United States Patent Application Publication US 2007/0042381 A1 - sequence listing, part 59

SEQ ID NO: 2675387 - RNA, 20 nt, Human
guacuuuucauucucuuuua

SEQ ID NO: 2675388 - RNA, 21 nt, Human
guacuuuucauucucuuuuaa

SEQ ID NO: 2675389 - RNA, 22 nt, Human
guacuuuucauucucuuuuaau

SEQ ID NO: 2675390 - RNA, 17 nt, Human
guacuuucuauuuuaau

SEQ ID NO: 2675391 - RNA, 21 nt, Human
guacuuucuguuaugggcuuu

SEQ ID NO: 2675392 - RNA, 15 nt, Human
guacuuggccuuugg

SEQ ID NO: 2675393 - RNA, 12 nt, Human
guaagucuuuuu

SEQ ID NO: 2675394 - RNA, 20 nt, Human
guaagcguauggcuuuauuu

SEQ ID NO: 2675395 - RNA, 14 nt, Human
guaagcguauggcu

SEQ ID NO: 2675396 - RNA, 22 nt, Human
guaagauaucucaaugaaccau

SEQ ID NO: 2675397 - RNA, 20 nt, Human
guaagaucacuguuuagauu

SEQ ID NO: 2675398 - RNA, 18 nt, Human
guaagaucacuguuuaga

SEQ ID NO: 2675399 - RNA, 13 nt, Human
guaagaucacugu

SEQ ID NO: 2675400 - RNA, 17 nt, Human
guaagauugauaucuau

SEQ ID NO: 2675401 - RNA, 11 nt, Human
guaagaaggca

SEQ ID NO: 2675402 - RNA, 13 nt, Human
guaagaaggcaau

SEQ ID NO: 2675403 - RNA, 16 nt, Human
guaagaagacaaacug

SEQ ID NO: 2675404 - RNA, 13 nt, Human
guaagaauucuga

SEQ ID NO: 2675405 - RNA, 21 nt, Human
guaacuguccuguccugcuca

SEQ ID NO: 2675406 - RNA, 19 nt, Human
guaacuuuuguaaauacac

SEQ ID NO: 2675407 - RNA, 18 nt, Human
guaacuuccaaauaaaua

SEQ ID NO: 2675408 - RNA, 19 nt, Human
guaacuuccaaauaaauaa

SEQ ID NO: 2675409 - RNA, 20 nt, Human
guaacuugcuuaaauuucuu

SEQ ID NO: 2675410 - RNA, 21 nt, Human
guaacuugcuuaaauuucuua

SEQ ID NO: 2675411 - RNA, 20 nt, Human
guaagaaagugaagcaaauc

SEQ ID NO: 2675412 - RNA, 11 nt, Human
guaaauguuuc

SEQ ID NO: 2675413 - RNA, 13 nt, Human
guaaauguuucuu

SEQ ID NO: 2675414 - RNA, 14 nt, Human
guaaauguuucuuu

SEQ ID NO: 2675415 - RNA, 15 nt, Human
guaaaguuaaaagaa

SEQ ID NO: 2675416 - RNA, 14 nt, Human
guaaagugucagaa

SEQ ID NO: 2675417 - RNA, 21 nt, Human
guaaaguuuccgugcguggca

SEQ ID NO: 2675418 - RNA, 23 nt, Human
guaaaguuuccgugcguggcacu

SEQ ID NO: 2675419 - RNA, 14 nt, Human
guaaauaaaccacu

SEQ ID NO: 2675420 - RNA, 15 nt, Human
guaaauaauucuuuu

SEQ ID NO: 2675421 - RNA, 14 nt, Human
guaaauaauucuuu

SEQ ID NO: 2675422 - RNA, 13 nt, Human
guaaauaauucuu

SEQ ID NO: 2675423 - RNA, 17 nt, Human
guaaauaggaaucauuc

SEQ ID NO: 2675424 - RNA, 21 nt, Human
guaaauaggaaucauucagaa

SEQ ID NO: 2675425 - RNA, 16 nt, Human
guaaauacaugcauau

SEQ ID NO: 2675426 - RNA, 17 nt, Human
guaaauacaugcauaua

SEQ ID NO: 2675427 - RNA, 15 nt, Human
guaaauaauuuauuu

SEQ ID NO: 2675428 - RNA, 20 nt, Human
guaaauaggauuuuuagaau

SEQ ID NO: 2675429 - RNA, 12 nt, Human
guaaauguguac

SEQ ID NO: 2675430 - RNA, 12 nt, Human
guaaauguaaac

SEQ ID NO: 2675431 - RNA, 13 nt, Human
guaaauguaaacu

SEQ ID NO: 2675432 - RNA, 21 nt, Human
gguggccgcugaguggcaggg

SEQ ID NO: 2675433 - RNA, 20 nt, Human
gguggccgcugaguggcagg

SEQ ID NO: 2675434 - RNA, 19 nt, Human
gguggcccacgccuguaau

SEQ ID NO: 2675435 - RNA, 19 nt, Human
gguuguaauuaaauucuga

SEQ ID NO: 2675436 - RNA, 13 nt, Human
gguuuaagcuguu

SEQ ID NO: 2675437 - RNA, 14 nt, Human
gguugugcacuguu

SEQ ID NO: 2675438 - RNA, 13 nt, Human
gguuggugggggc

SEQ ID NO: 2675439 - RNA, 17 nt, Human
gguugcgggacagagua

SEQ ID NO: 2675440 - RNA, 18 nt, Human
gguuggcaaaaaggcagg

SEQ ID NO: 2675441 - RNA, 20 nt, Human
gguuuuguaauuuguuugaa

SEQ ID NO: 2675442 - RNA, 21 nt, Human
gguuuuggcaaacgcuaaaga

SEQ ID NO: 2675443 - RNA, 13 nt, Human
gguuuugugccau

SEQ ID NO: 2675444 - RNA, 17 nt, Human
gguuuugugccaucugu

SEQ ID NO: 2675445 - RNA, 12 nt, Human
gguuuuucccug

SEQ ID NO: 2675446 - RNA, 21 nt, Human
guaaaagacaguguauguaga

SEQ ID NO: 2675447 - RNA, 14 nt, Human
guaaaagaaaucau

SEQ ID NO: 2675448 - RNA, 20 nt, Human
guaaaagaaaucauguccau

SEQ ID NO: 2675449 - RNA, 19 nt, Human
guaaaaaguauuuuuucaa

SEQ ID NO: 2675450 - RNA, 14 nt, Human
guaaaacaaaauuu

SEQ ID NO: 2675451 - RNA, 17 nt, Human
guaaaaauggaaacuau

SEQ ID NO: 2675452 - RNA, 13 nt, Human
guaaaaaaaccac

SEQ ID NO: 2675453 - RNA, 23 nt, Human
guaaaaaaaccaccaaaaacaaa

SEQ ID NO: 2675454 - RNA, 16 nt, Human
gggcugaggugggagg

SEQ ID NO: 2675455 - RNA, 14 nt, Human
gggcuuauaucugg

SEQ ID NO: 2675456 - RNA, 19 nt, Human
gggcuuauaucuggccucu

SEQ ID NO: 2675457 - RNA, 20 nt, Human
gggcuuaauggaguucuugu

SEQ ID NO: 2675458 - RNA, 16 nt, Human
gggcugucggcgcugc

SEQ ID NO: 2675459 - RNA, 16 nt, Human
gggcugagcugccugu

SEQ ID NO: 2675460 - RNA, 16 nt, Human
gggcucugugcaguca

SEQ ID NO: 2675461 - RNA, 11 nt, Human
gggcuccugca

SEQ ID NO: 2675462 - RNA, 18 nt, Human
gggcuccugcacuuacuu

SEQ ID NO: 2675463 - RNA, 22 nt, Human
gggcuccugcacuuacuugcuu

SEQ ID NO: 2675464 - RNA, 20 nt, Human
gggccuuuguucugggggga

SEQ ID NO: 2675465 - RNA, 18 nt, Human
gggccuuuucuggcaccg

SEQ ID NO: 2675466 - RNA, 21 nt, Human
gggccuuuucuggcaccgcag

SEQ ID NO: 2675467 - RNA, 16 nt, Human
gggcgcgguggcucac

SEQ ID NO: 2675468 - RNA, 18 nt, Human
gggccuggucguuuucaa

SEQ ID NO: 2675469 - RNA, 13 nt, Human
ggcucccagccuc

SEQ ID NO: 2675470 - RNA, 16 nt, Human
ggcucccagccucagc

SEQ ID NO: 2675471 - RNA, 15 nt, Human
ggcucccagccucag

SEQ ID NO: 2675472 - RNA, 17 nt, Human
ggcucccagccucagcg

SEQ ID NO: 2675473 - RNA, 17 nt, Human
ggcuauguauaaaauac

SEQ ID NO: 2675474 - RNA, 12 nt, Human
gggccuggagau

SEQ ID NO: 2675475 - RNA, 21 nt, Human
gggccuggagauccuccugca

SEQ ID NO: 2675476 - RNA, 23 nt, Human
gggcccggcccgcgccacaggac

SEQ ID NO: 2675477 - RNA, 18 nt, Human
ggggagccaaaaucucaa

SEQ ID NO: 2675478 - RNA, 18 nt, Human
ggggagacuuugauguca

SEQ ID NO: 2675479 - RNA, 14 nt, Human
ggggagagccugcu

SEQ ID NO: 2675480 - RNA, 16 nt, Human
ggggagagccugcugg

SEQ ID NO: 2675481 - RNA, 18 nt, Human
ggggagagccugcuggca

SEQ ID NO: 2675482 - RNA, 13 nt, Human
ggggauccccgcc

SEQ ID NO: 2675483 - RNA, 21 nt, Human
ggggauccccgccuggccagg

SEQ ID NO: 2675484 - RNA, 22 nt, Human
ggggauccccgccuggccagga

SEQ ID NO: 2675485 - RNA, 23 nt, Human
ggggauccccgccuggccaggag

SEQ ID NO: 2675486 - RNA, 17 nt, Human
ggggaucacagccucug

SEQ ID NO: 2675487 - RNA, 21 nt, Human
ggggcagacaauaaacccuca

SEQ ID NO: 2675488 - RNA, 13 nt, Human
gggcuugaagcca

SEQ ID NO: 2675489 - RNA, 16 nt, Human
gggcuucugugcccag

SEQ ID NO: 2675490 - RNA, 15 nt, Human
gggcuugaagccaaa

SEQ ID NO: 2675491 - RNA, 17 nt, Human
gggcuugaagccaaaga

SEQ ID NO: 2675492 - RNA, 13 nt, Human
gggcuuggccugc

SEQ ID NO: 2675493 - RNA, 16 nt, Human
gggcuuggccugcugu

SEQ ID NO: 2675494 - RNA, 17 nt, Human
gggcuuggccugcugug

SEQ ID NO: 2675495 - RNA, 19 nt, Human
gggcuuccucuagaagcca

SEQ ID NO: 2675496 - RNA, 18 nt, Human
ggggcugcccuugggcca

SEQ ID NO: 2675497 - RNA, 13 nt, Human
ggggcagggagcu

SEQ ID NO: 2675498 - RNA, 17 nt, Human
ggggcagggagcugggc

SEQ ID NO: 2675499 - RNA, 19 nt, Human
ggggcagggagcugggccc

SEQ ID NO: 2675500 - RNA, 16 nt, Human
ggggcugcuuccuccu

SEQ ID NO: 2675501 - RNA, 18 nt, Human
ggggcugcuuccuccugg

SEQ ID NO: 2675502 - RNA, 19 nt, Human
ggggcugcuuccuccugga

SEQ ID NO: 2675503 - RNA, 13 nt, Human
ggggcaggcuggg

SEQ ID NO: 2675504 - RNA, 14 nt, Human
ggggcaggcugggc

SEQ ID NO: 2675505 - RNA, 15 nt, Human
ggggcaggcugggcc

SEQ ID NO: 2675506 - RNA, 16 nt, Human
ggggcaggcugggcca

SEQ ID NO: 2675507 - RNA, 18 nt, Human
ggggcuggggaaggaagc

SEQ ID NO: 2675508 - RNA, 22 nt, Human
ggggcuuagggucggaacccaa

SEQ ID NO: 2675509 - RNA, 17 nt, Human
ggggcuugaagccaaag

SEQ ID NO: 2675510 - RNA, 17 nt, Human
ggggcuggcacugacug

SEQ ID NO: 2675511 - RNA, 22 nt, Human
gggguucccuugagggcugcag

SEQ ID NO: 2675512 - RNA, 18 nt, Human
gggguuccucaaauuuuu

SEQ ID NO: 2675513 - RNA, 12 nt, Human
ggggucuuugug

SEQ ID NO: 2675514 - RNA, 20 nt, Human
gguagagaggcgcggaguga

SEQ ID NO: 2675515 - RNA, 23 nt, Human
ggucaaggcaguagaacuccagg

SEQ ID NO: 2675516 - RNA, 22 nt, Human
ggucaaguugucagguuauuua

SEQ ID NO: 2675517 - RNA, 15 nt, Human
ggucacagcggaggu

SEQ ID NO: 2675518 - RNA, 13 nt, Human
ggucacaacuuga

SEQ ID NO: 2675519 - RNA, 19 nt, Human
gguacccggggcccagggc

SEQ ID NO: 2675520 - RNA, 17 nt, Human
gguacccggggcccagg

SEQ ID NO: 2675521 - RNA, 18 nt, Human
gguacuaauaaucuuguu

SEQ ID NO: 2675522 - RNA, 16 nt, Human
gguacuuuuaaaaaca

SEQ ID NO: 2675523 - RNA, 11 nt, Human
gguacccuggg

SEQ ID NO: 2675524 - RNA, 13 nt, Human
gguacccugggug

SEQ ID NO: 2675525 - RNA, 23 nt, Human
ggguucccuugagggcugcaguu

SEQ ID NO: 2675526 - RNA, 14 nt, Human
ggguucauuugugu

SEQ ID NO: 2675527 - RNA, 13 nt, Human
ggguucauuugug

SEQ ID NO: 2675528 - RNA, 17 nt, Human
ggguggaucacgagguc

SEQ ID NO: 2675529 - RNA, 16 nt, Human
ggguggaggcuuccug

SEQ ID NO: 2675530 - RNA, 14 nt, Human
ggguggaggggugu

SEQ ID NO: 2675531 - RNA, 20 nt, Human
gggugcuuuuauagaggcua

SEQ ID NO: 2675532 - RNA, 21 nt, Human
gggugcuuuuauagaggcuag

SEQ ID NO: 2675533 - RNA, 22 nt, Human
gggugcuuuuauagaggcuagc

SEQ ID NO: 2675534 - RNA, 17 nt, Human
ggguuccucaaauuuuu

SEQ ID NO: 2675535 - RNA, 15 nt, Human
ggugccugagaggca

SEQ ID NO: 2675536 - RNA, 17 nt, Human
ggugccugagaggcagg

SEQ ID NO: 2675537 - RNA, 18 nt, Human
ggugccugagaggcaggc

SEQ ID NO: 2675538 - RNA, 20 nt, Human
ggugcucggagaagagcgca

SEQ ID NO: 2675539 - RNA, 21 nt, Human
ggugcucggagaagagcgcag

SEQ ID NO: 2675540 - RNA, 21 nt, Human
ggugaguuugagcugccuucc

SEQ ID NO: 2675541 - RNA, 13 nt, Human
ggugaauauuuuc

SEQ ID NO: 2675542 - RNA, 15 nt, Human
ggugaggcaauaaaa

SEQ ID NO: 2675543 - RNA, 17 nt, Human
ggugaggggcuggcacu

SEQ ID NO: 2675544 - RNA, 16 nt, Human
ggugaggguuggcgcu

SEQ ID NO: 2675545 - RNA, 18 nt, Human
ggugaguccauucuccca

SEQ ID NO: 2675546 - RNA, 19 nt, Human
ggugaguuugagcugccuu

SEQ ID NO: 2675547 - RNA, 20 nt, Human
ggugaguuugagcugccuuc

SEQ ID NO: 2675548 - RNA, 11 nt, Human
ggucucccugg

SEQ ID NO: 2675549 - RNA, 12 nt, Human
ggucucccuggc

SEQ ID NO: 2675550 - RNA, 13 nt, Human
ggucucccuggcu

SEQ ID NO: 2675551 - RNA, 14 nt, Human
ggucucccuggcuc

SEQ ID NO: 2675552 - RNA, 15 nt, Human
ggucucccuggcucc

SEQ ID NO: 2675553 - RNA, 16 nt, Human
ggucucccuggcuccc

SEQ ID NO: 2675554 - RNA, 17 nt, Human
ggucucccuggcucccu

SEQ ID NO: 2675555 - RNA, 24 nt, Human
ggucucccuggcucccuccuccag

SEQ ID NO: 2675556 - RNA, 23 nt, Human
ggucuccugacuggugcugcagc

SEQ ID NO: 2675557 - RNA, 13 nt, Human
gguccgugggacg

SEQ ID NO: 2675558 - RNA, 22 nt, Human
gguccccguuccaccccaagag

SEQ ID NO: 2675559 - RNA, 21 nt, Human
gguccuaaggcaucuaucugu

SEQ ID NO: 2675560 - RNA, 23 nt, Human
gguccuagaaauuccccacccug

SEQ ID NO: 2675561 - RNA, 20 nt, Human
ggucccuccagaaccacccc

SEQ ID NO: 2675562 - RNA, 14 nt, Human
ggucccucugugua

SEQ ID NO: 2675563 - RNA, 12 nt, Human
guauuauuuaua

SEQ ID NO: 2675564 - RNA, 16 nt, Human
guauuauuuacauuua

SEQ ID NO: 2675565 - RNA, 20 nt, Human
guagaguguagacuguggcu

SEQ ID NO: 2675566 - RNA, 20 nt, Human
guauuauacaugugauacau

SEQ ID NO: 2675567 - RNA, 22 nt, Human
guauuauacaugugauacauuu

SEQ ID NO: 2675568 - RNA, 16 nt, Human
guauuaucaaagggau

SEQ ID NO: 2675569 - RNA, 22 nt, Human
guauuaucaaagggauaaagaa

SEQ ID NO: 2675570 - RNA, 13 nt, Human
guagagugggagc

SEQ ID NO: 2675571 - RNA, 14 nt, Human
guagaggcuuguuu

SEQ ID NO: 2675572 - RNA, 15 nt, Human
guagaggcuuguuua

SEQ ID NO: 2675573 - RNA, 12 nt, Human
guagagucugag

SEQ ID NO: 2675574 - RNA, 21 nt, Human
guagagucugagggcuuguag

SEQ ID NO: 2675575 - RNA, 14 nt, Human
guagagucugaggg

SEQ ID NO: 2675576 - RNA, 15 nt, Human
guagagugggagcug

SEQ ID NO: 2675577 - RNA, 16 nt, Human
guauuuauuuauguac

SEQ ID NO: 2675578 - RNA, 14 nt, Human
guauuuauuuaugu

SEQ ID NO: 2675579 - RNA, 17 nt, Human
guauuugaaagugccuu

SEQ ID NO: 2675580 - RNA, 12 nt, Human
guauuugcuuuu

SEQ ID NO: 2675581 - RNA, 22 nt, Human
guauuugcuuuuuuguuuuggc

SEQ ID NO: 2675582 - RNA, 15 nt, Human
gucaaggccugcucc

SEQ ID NO: 2675583 - RNA, 16 nt, Human
gucaaggccugcuccc

SEQ ID NO: 2675584 - RNA, 18 nt, Human
gucaagugaaaaaggagg

SEQ ID NO: 2675585 - RNA, 16 nt, Human
gucaagugaaaaagga

SEQ ID NO: 2675586 - RNA, 19 nt, Human
gucaagugaaaaaggagga

SEQ ID NO: 2675587 - RNA, 20 nt, Human
gucacccaggcuggacugca

SEQ ID NO: 2675588 - RNA, 15 nt, Human
gucaaguugucaggu

SEQ ID NO: 2675589 - RNA, 18 nt, Human
gucaaguugucagguuau

SEQ ID NO: 2675590 - RNA, 13 nt, Human
gucaauggcuugu

SEQ ID NO: 2675591 - RNA, 21 nt, Human
gucaauggcuuguucaucauc

SEQ ID NO: 2675592 - RNA, 17 nt, Human
gucaaugggaccugugg

SEQ ID NO: 2675593 - RNA, 19 nt, Human
gucaaugggaccuguggcu

SEQ ID NO: 2675594 - RNA, 14 nt, Human
gucccagcuacucg

SEQ ID NO: 2675595 - RNA, 17 nt, Human
gucccagauacuugggg

SEQ ID NO: 2675596 - RNA, 13 nt, Human
guccaggcugccg

SEQ ID NO: 2675597 - RNA, 14 nt, Human
guccaggcugccgu

SEQ ID NO: 2675598 - RNA, 16 nt, Human
guccaggcugccgugg

SEQ ID NO: 2675599 - RNA, 20 nt, Human
guccaggcugccguggggcc

SEQ ID NO: 2675600 - RNA, 19 nt, Human
guccagcuggccuggacag

SEQ ID NO: 2675601 - RNA, 19 nt, Human
guccagcugcccuuccgca

SEQ ID NO: 2675602 - RNA, 21 nt, Human
guccagcugcccuuccgcagu

SEQ ID NO: 2675603 - RNA, 22 nt, Human
guccagcugcccuuccgcagug

SEQ ID NO: 2675604 - RNA, 12 nt, Human
guccagcuggcc

SEQ ID NO: 2675605 - RNA, 13 nt, Human
guccagcuggccu

SEQ ID NO: 2675606 - RNA, 14 nt, Human
guccagcuggccug

SEQ ID NO: 2675607 - RNA, 17 nt, Human
guccagcuggccuggac

SEQ ID NO: 2675608 - RNA, 18 nt, Human
guccagcuggccuggaca

SEQ ID NO: 2675609 - RNA, 12 nt, Human
guccagcucugg

SEQ ID NO: 2675610 - RNA, 13 nt, Human
guccagcucugga

SEQ ID NO: 2675611 - RNA, 14 nt, Human
guccagcucuggag

SEQ ID NO: 2675612 - RNA, 16 nt, Human
guccagcucuggaggg

SEQ ID NO: 2675613 - RNA, 21 nt, Human
guccagcucuggaggggaggg

SEQ ID NO: 2675614 - RNA, 13 nt, Human
gucauguauguuu

SEQ ID NO: 2675615 - RNA, 14 nt, Human
gucauguauguuuc

SEQ ID NO: 2675616 - RNA, 14 nt, Human
gucauaucaaauaa

SEQ ID NO: 2675617 - RNA, 22 nt, Human
gucauaucaaauaaagagagaa

SEQ ID NO: 2675618 - RNA, 17 nt, Human
gucaucggcguggccca

SEQ ID NO: 2675619 - RNA, 18 nt, Human
gucauccagacucagagc

SEQ ID NO: 2675620 - RNA, 19 nt, Human
gucagccaggaccauaccg

SEQ ID NO: 2675621 - RNA, 23 nt, Human
gucagcaguugcugguaaaauga

SEQ ID NO: 2675622 - RNA, 14 nt, Human
gucagcaguugcug

SEQ ID NO: 2675623 - RNA, 21 nt, Human
gucacccaaaccggcaggugc

SEQ ID NO: 2675624 - RNA, 18 nt, Human
gucauacucgagucugag

SEQ ID NO: 2675625 - RNA, 20 nt, Human
gucauacucgagucugaggc

SEQ ID NO: 2675626 - RNA, 19 nt, Human
gucauacucgagucugagg

SEQ ID NO: 2675627 - RNA, 21 nt, Human
gucuaaucuagauaucgacuu

SEQ ID NO: 2675628 - RNA, 21 nt, Human
gucuaaacaaugcugauuugg

SEQ ID NO: 2675629 - RNA, 16 nt, Human
gucuaaacaaugcuga

SEQ ID NO: 2675630 - RNA, 19 nt, Human
gucguggggugugcuggga

SEQ ID NO: 2675631 - RNA, 21 nt, Human
gucguggggugugcugggagc

SEQ ID NO: 2675632 - RNA, 17 nt, Human
gucguggggugugcugg

SEQ ID NO: 2675633 - RNA, 21 nt, Human
gucugagggcuuguaguucuu

SEQ ID NO: 2675634 - RNA, 18 nt, Human
gucugaggccguugcuga

SEQ ID NO: 2675635 - RNA, 20 nt, Human
gucugagggcuuguaguucu

SEQ ID NO: 2675636 - RNA, 22 nt, Human
gucugaggccguugcugacuua

SEQ ID NO: 2675637 - RNA, 13 nt, Human
gucugauuucuua

SEQ ID NO: 2675638 - RNA, 13 nt, Human
guccucagccagu

SEQ ID NO: 2675639 - RNA, 20 nt, Human
gucucggaucaggcucccag

SEQ ID NO: 2675640 - RNA, 18 nt, Human
guccugugaaugccacug

SEQ ID NO: 2675641 - RNA, 14 nt, Human
guccuguccugcuc

SEQ ID NO: 2675642 - RNA, 19 nt, Human
guccugugaaugccacugc

SEQ ID NO: 2675643 - RNA, 22 nt, Human
guccuggcgccuggcaguccgu

SEQ ID NO: 2675644 - RNA, 22 nt, Human
guccuagaggcccuuugcuguc

SEQ ID NO: 2675645 - RNA, 23 nt, Human
guccuagcuugggaggcuucccc

SEQ ID NO: 2675646 - RNA, 14 nt, Human
guccuaguaagaag

SEQ ID NO: 2675647 - RNA, 17 nt, Human
guccuaguaagaagaca

SEQ ID NO: 2675648 - RNA, 22 nt, Human
guccuauuaguguuauaugaac

SEQ ID NO: 2675649 - RNA, 21 nt, Human
guccuauuaguguuauaugaa

SEQ ID NO: 2675650 - RNA, 20 nt, Human
guccuauuaguguuauauga

SEQ ID NO: 2675651 - RNA, 17 nt, Human
guccuauuaguguuaua

SEQ ID NO: 2675652 - RNA, 23 nt, Human
guccuagaaauuccccacccuga

SEQ ID NO: 2675653 - RNA, 20 nt, Human
guccuagaggcccuuugcug

SEQ ID NO: 2675654 - RNA, 19 nt, Human
guccuagaggcccuuugcu

SEQ ID NO: 2675655 - RNA, 17 nt, Human
gucccuggcgcaggugg

SEQ ID NO: 2675656 - RNA, 21 nt, Human
gucccugcgccuuuccuuuuc

SEQ ID NO: 2675657 - RNA, 16 nt, Human
gucccauagucccugc

SEQ ID NO: 2675658 - RNA, 12 nt, Human
gucccagugccg

SEQ ID NO: 2675659 - RNA, 18 nt, Human
gugaucccguuuucccca

SEQ ID NO: 2675660 - RNA, 22 nt, Human
gugauuccacuacaccuggcug

SEQ ID NO: 2675661 - RNA, 23 nt, Human
gugauuccacuacaccuggcuga

SEQ ID NO: 2675662 - RNA, 12 nt, Human
gugauuuucauu

SEQ ID NO: 2675663 - RNA, 14 nt, Human
gugcaacaggguau

SEQ ID NO: 2675664 - RNA, 14 nt, Human
gugcagucacugga

SEQ ID NO: 2675665 - RNA, 16 nt, Human
gugcccagaauaaguu

SEQ ID NO: 2675666 - RNA, 12 nt, Human
gugcccaagcca

SEQ ID NO: 2675667 - RNA, 19 nt, Human
gugcccaagccagaggcug

SEQ ID NO: 2675668 - RNA, 20 nt, Human
gugcccaagccagaggcugg

SEQ ID NO: 2675669 - RNA, 20 nt, Human
gugaaauugcauacuuugua

SEQ ID NO: 2675670 - RNA, 22 nt, Human
gugaaagugcauuuuuguaaau

SEQ ID NO: 2675671 - RNA, 13 nt, Human
gugaauauuuuca

SEQ ID NO: 2675672 - RNA, 22 nt, Human
gugaauacugcuugaauaaaca

SEQ ID NO: 2675673 - RNA, 17 nt, Human
gugaauuuuuaagcugc

SEQ ID NO: 2675674 - RNA, 15 nt, Human
gugaauuuuuauugu

SEQ ID NO: 2675675 - RNA, 16 nt, Human
gugaauuuuuauuguu

SEQ ID NO: 2675676 - RNA, 19 nt, Human
gugaauuuuuauuguugua

SEQ ID NO: 2675677 - RNA, 17 nt, Human
gugaaagcauauggguu

SEQ ID NO: 2675678 - RNA, 21 nt, Human
gugaaacuuuucuagaauuau

SEQ ID NO: 2675679 - RNA, 22 nt, Human
gugaaacuuuucuagaauuauu

SEQ ID NO: 2675680 - RNA, 15 nt, Human
gugaaaacggagcug

SEQ ID NO: 2675681 - RNA, 23 nt, Human
gugaaaagaaaaaugagccuggc

SEQ ID NO: 2675682 - RNA, 14 nt, Human
gugaaaagaaaaau

SEQ ID NO: 2675683 - RNA, 14 nt, Human
gugaaauuauuuug

SEQ ID NO: 2675684 - RNA, 23 nt, Human
gugagcucuuccuaucccucucc

SEQ ID NO: 2675685 - RNA, 14 nt, Human
gugaggaaaucaaa

SEQ ID NO: 2675686 - RNA, 22 nt, Human
gugaggaaaucaaagugcuauu

SEQ ID NO: 2675687 - RNA, 18 nt, Human
gugaggaaaucaaagugc

SEQ ID NO: 2675688 - RNA, 16 nt, Human
gugacccgaccuggcc

SEQ ID NO: 2675689 - RNA, 12 nt, Human
gugacccuccaa

SEQ ID NO: 2675690 - RNA, 20 nt, Human
gugacccuccaaauggagaa

SEQ ID NO: 2675691 - RNA, 13 nt, Human
gugaccucucucu

SEQ ID NO: 2675692 - RNA, 16 nt, Human
gugaccucucucucug

SEQ ID NO: 2675693 - RNA, 21 nt, Human
gugaccggacuuuucugcaaa

SEQ ID NO: 2675694 - RNA, 15 nt, Human
gugaccggacuuuuc

SEQ ID NO: 2675695 - RNA, 19 nt, Human
gugaccggacuuuucugca

SEQ ID NO: 2675696 - RNA, 22 nt, Human
guggacuguggcacuugccugg

SEQ ID NO: 2675697 - RNA, 14 nt, Human
guggacuguggcac

SEQ ID NO: 2675698 - RNA, 21 nt, Human
guggacuguggcacuugccug

SEQ ID NO: 2675699 - RNA, 20 nt, Human
guggagaagcggcuggcagc

SEQ ID NO: 2675700 - RNA, 21 nt, Human
guggaucagagaugcaccacc

SEQ ID NO: 2675701 - RNA, 22 nt, Human
guggaucacgaggucaggagau

SEQ ID NO: 2675702 - RNA, 15 nt, Human
guggagggguguggc

SEQ ID NO: 2675703 - RNA, 16 nt, Human
guggagggguguggca

SEQ ID NO: 2675704 - RNA, 23 nt, Human
guggagggguguggcagugguuu

SEQ ID NO: 2675705 - RNA, 12 nt, Human
guggagggaggc

SEQ ID NO: 2675706 - RNA, 15 nt, Human
guggagggaggcccc

SEQ ID NO: 2675707 - RNA, 12 nt, Human
guggagggaggg

SEQ ID NO: 2675708 - RNA, 13 nt, Human
guggaggcuuccu

SEQ ID NO: 2675709 - RNA, 14 nt, Human
guggaggcuuccug

SEQ ID NO: 2675710 - RNA, 15 nt, Human
guggaggcuuccugc

SEQ ID NO: 2675711 - RNA, 12 nt, Human
guggaggggugu

SEQ ID NO: 2675712 - RNA, 17 nt, Human
guggaggaggaaggcaa

SEQ ID NO: 2675713 - RNA, 19 nt, Human
guggaggaggaaggcaaga

SEQ ID NO: 2675714 - RNA, 16 nt, Human
guggaggcugcaguga

SEQ ID NO: 2675715 - RNA, 22 nt, Human
guggccacaauccacgcuucuc

SEQ ID NO: 2675716 - RNA, 23 nt, Human
guggccaagaagcaguggccuua

SEQ ID NO: 2675717 - RNA, 15 nt, Human
guggccaagaagcag

SEQ ID NO: 2675718 - RNA, 17 nt, Human
guggccaagaagcagug

SEQ ID NO: 2675719 - RNA, 22 nt, Human
guggccaagaagcaguggccuu

SEQ ID NO: 2675720 - RNA, 21 nt, Human
guggcagugguuuuggcaaac

SEQ ID NO: 2675721 - RNA, 16 nt, Human
guggccacagcgccag

SEQ ID NO: 2675722 - RNA, 17 nt, Human
guggccacagcgccagc

SEQ ID NO: 2675723 - RNA, 21 nt, Human
guggccacagcgccagccuca

SEQ ID NO: 2675724 - RNA, 21 nt, Human
guggccaggcugccuggccuu

SEQ ID NO: 2675725 - RNA, 13 nt, Human
guggccagaggug

SEQ ID NO: 2675726 - RNA, 19 nt, Human
guggccagaggugucaccc

SEQ ID NO: 2675727 - RNA, 15 nt, Human
guggccccacccugg

SEQ ID NO: 2675728 - RNA, 18 nt, Human
guggcccaaggcuggcag

SEQ ID NO: 2675729 - RNA, 19 nt, Human
guggcccaaggcuggcagg

SEQ ID NO: 2675730 - RNA, 18 nt, Human
guggccccacccugggcc

SEQ ID NO: 2675731 - RNA, 19 nt, Human
guggccccacccugggccc

SEQ ID NO: 2675732 - RNA, 20 nt, Human
guggccccacccugggcccu

SEQ ID NO: 2675733 - RNA, 20 nt, Human
guggcaggggacaggagucc

SEQ ID NO: 2675734 - RNA, 16 nt, Human
guggcaggggacagga

SEQ ID NO: 2675735 - RNA, 18 nt, Human
guggcaggggacaggagu

SEQ ID NO: 2675736 - RNA, 14 nt, Human
gugcugcagcaccg

SEQ ID NO: 2675737 - RNA, 22 nt, Human
gugcugcagcaccgaggggccu

SEQ ID NO: 2675738 - RNA, 20 nt, Human
gugcccuuccugcugcgcag

SEQ ID NO: 2675739 - RNA, 17 nt, Human
gugccuuugcagcucag

SEQ ID NO: 2675740 - RNA, 19 nt, Human
gugcugaauguugggacug

SEQ ID NO: 2675741 - RNA, 22 nt, Human
gugcuucacaguagagccagcu

SEQ ID NO: 2675742 - RNA, 13 nt, Human
gugcuuccuugua

SEQ ID NO: 2675743 - RNA, 22 nt, Human
gugcuucugccacccugcugag

SEQ ID NO: 2675744 - RNA, 21 nt, Human
gugcuucugccacccugcuga

SEQ ID NO: 2675745 - RNA, 16 nt, Human
gugcugcccugaagaa

SEQ ID NO: 2675746 - RNA, 11 nt, Human
gugcugcccug

SEQ ID NO: 2675747 - RNA, 11 nt, Human
gugcugugugu

SEQ ID NO: 2675748 - RNA, 18 nt, Human
gugcuuuuauagaggcua

SEQ ID NO: 2675749 - RNA, 19 nt, Human
gugcuuuuauagaggcuag

SEQ ID NO: 2675750 - RNA, 18 nt, Human
guggaaaaauagccugcc

SEQ ID NO: 2675751 - RNA, 18 nt, Human
uauuugaauuuuaaaucu

SEQ ID NO: 2675752 - RNA, 12 nt, Human
uauuugaauuuu

SEQ ID NO: 2675753 - RNA, 21 nt, Human
uauuugaauuuuaaaucuaaa

SEQ ID NO: 2675754 - RNA, 19 nt, Human
uauuugaauuuuaaaucua

SEQ ID NO: 2675755 - RNA, 21 nt, Human
uauuugacaacguuucagcga

SEQ ID NO: 2675756 - RNA, 23 nt, Human
uauuugauuuauuaacuuaauaa

SEQ ID NO: 2675757 - RNA, 19 nt, Human
uauuugauuuauuaacuua

SEQ ID NO: 2675758 - RNA, 16 nt, Human
uauuugauuuauuaac

SEQ ID NO: 2675759 - RNA, 15 nt, Human
uauuugauuuauuaa

SEQ ID NO: 2675760 - RNA, 13 nt, Human
uauuugauuuauu

SEQ ID NO: 2675761 - RNA, 15 nt, Human
uauuugcauguuaug

SEQ ID NO: 2675762 - RNA, 16 nt, Human
uauuugcauguuaugu

SEQ ID NO: 2675763 - RNA, 18 nt, Human
uauuugcauguuauguuu

SEQ ID NO: 2675764 - RNA, 19 nt, Human
uauuugcauguuauguuua

SEQ ID NO: 2675765 - RNA, 11 nt, Human
uauuugcaugu

SEQ ID NO: 2675766 - RNA, 12 nt, Human
uauuugcauguu

SEQ ID NO: 2675767 - RNA, 16 nt, Human
ucaaacuggggccucc

SEQ ID NO: 2675768 - RNA, 14 nt, Human
ucaaacuggggccu

SEQ ID NO: 2675769 - RNA, 23 nt, Human
ucaaacuggggccuccagaacuc

SEQ ID NO: 2675770 - RNA, 22 nt, Human
ucaaacuggggccuccagaacu

SEQ ID NO: 2675771 - RNA, 20 nt, Human
ucaaacuggggccuccagaa

SEQ ID NO: 2675772 - RNA, 19 nt, Human
ucaaacuggggccuccaga

SEQ ID NO: 2675773 - RNA, 17 nt, Human
ucaaacaugagaugugu

SEQ ID NO: 2675774 - RNA, 23 nt, Human
ucaaagagguuuuaaaaaaaucc

SEQ ID NO: 2675775 - RNA, 12 nt, Human
ucaaagagguuu

SEQ ID NO: 2675776 - RNA, 14 nt, Human
ucaaacuuccaguc

SEQ ID NO: 2675777 - RNA, 17 nt, Human
ucaaacuguagaaauga

SEQ ID NO: 2675778 - RNA, 20 nt, Human
ucaaacuguagaaaugauga

SEQ ID NO: 2675779 - RNA, 14 nt, Human
ucaaacuguagaaa

SEQ ID NO: 2675780 - RNA, 19 nt, Human
ucaaccucuucuggcucaa

SEQ ID NO: 2675781 - RNA, 18 nt, Human
ucaaccucgcgcuugcug

SEQ ID NO: 2675782 - RNA, 21 nt, Human
ucaaccucgcgcuugcuggcc

SEQ ID NO: 2675783 - RNA, 18 nt, Human
ucaaccucuucuggcuca

SEQ ID NO: 2675784 - RNA, 17 nt, Human
ucaaccucuucuggcuc

SEQ ID NO: 2675785 - RNA, 20 nt, Human
ucacauuggagucacugcca

SEQ ID NO: 2675786 - RNA, 10 nt, Human
ucaccaccac

SEQ ID NO: 2675787 - RNA, 12 nt, Human
ucaccaccaccc

SEQ ID NO: 2675788 - RNA, 13 nt, Human
ucaccaccacccc

SEQ ID NO: 2675789 - RNA, 18 nt, Human
ucaccaccaccccuacca

SEQ ID NO: 2675790 - RNA, 16 nt, Human
ucacauuguuaagaaa

SEQ ID NO: 2675791 - RNA, 18 nt, Human
ucacauuguuaagaaaaa

SEQ ID NO: 2675792 - RNA, 15 nt, Human
ucaccagagacuuua

SEQ ID NO: 2675793 - RNA, 14 nt, Human
ucaccagagacuuu

SEQ ID NO: 2675794 - RNA, 22 nt, Human
ucacccuuauagucuaagacua

SEQ ID NO: 2675795 - RNA, 13 nt, Human
ucacccuuguccu

SEQ ID NO: 2675796 - RNA, 18 nt, Human
ucacccucuuccugugau

SEQ ID NO: 2675797 - RNA, 22 nt, Human
ucaccgacugaaaauauuguuu

SEQ ID NO: 2675798 - RNA, 20 nt, Human
ucaauuaguaacauucaugu

SEQ ID NO: 2675799 - RNA, 12 nt, Human
ucacacaccugu

SEQ ID NO: 2675800 - RNA, 23 nt, Human
ucaauuaaaauagucucuuuaaa

SEQ ID NO: 2675801 - RNA, 14 nt, Human
ucacacagacacua

SEQ ID NO: 2675802 - RNA, 14 nt, Human
ucacauucuuggcu

SEQ ID NO: 2675803 - RNA, 21 nt, Human
ucacauucuuggcuuaaucau

SEQ ID NO: 2675804 - RNA, 14 nt, Human
ucacaguagagcca

SEQ ID NO: 2675805 - RNA, 21 nt, Human
ucacaguagagccagcuuggg

SEQ ID NO: 2675806 - RNA, 19 nt, Human
ucacaguagagccagcuug

SEQ ID NO: 2675807 - RNA, 20 nt, Human
ucacaguagagccagcuugg

SEQ ID NO: 2675808 - RNA, 15 nt, Human
ucacaguagagccag

SEQ ID NO: 2675809 - RNA, 16 nt, Human
ucacaguagagccagc

SEQ ID NO: 2675810 - RNA, 17 nt, Human
ucacaguagagccagcu

SEQ ID NO: 2675811 - RNA, 18 nt, Human
ucacaguagagccagcuu

SEQ ID NO: 2675812 - RNA, 12 nt, Human
ucacaggguggg

SEQ ID NO: 2675813 - RNA, 15 nt, Human
ucacagggugggccu

SEQ ID NO: 2675814 - RNA, 16 nt, Human
ucacagggugggccuc

SEQ ID NO: 2675815 - RNA, 17 nt, Human
ucacagggugggccucg

SEQ ID NO: 2675816 - RNA, 19 nt, Human
ucacagggugggccucggc

SEQ ID NO: 2675817 - RNA, 19 nt, Human
uauuguugacaacugugac

SEQ ID NO: 2675818 - RNA, 23 nt, Human
uauuguugacaacugugacugua

SEQ ID NO: 2675819 - RNA, 20 nt, Human
uauuguugacaacugugacu

SEQ ID NO: 2675820 - RNA, 20 nt, Human
uauuauuuuuauaauuguac

SEQ ID NO: 2675821 - RNA, 20 nt, Human
uauuauuuuuuuaaaauuuu

SEQ ID NO: 2675822 - RNA, 11 nt, Human
uauugcaguuu

SEQ ID NO: 2675823 - RNA, 13 nt, Human
uauugcaguuuau

SEQ ID NO: 2675824 - RNA, 15 nt, Human
uauugcaguuuauca

SEQ ID NO: 2675825 - RNA, 20 nt, Human
uauugcaguuuaucauucaa

SEQ ID NO: 2675826 - RNA, 19 nt, Human
uauugcaguuuaucauuca

SEQ ID NO: 2675827 - RNA, 13 nt, Human
uauuuauguuugc

SEQ ID NO: 2675828 - RNA, 22 nt, Human
uauuuaugggccccuggcacuc

SEQ ID NO: 2675829 - RNA, 15 nt, Human
uauuuauguacuuuu

SEQ ID NO: 2675830 - RNA, 14 nt, Human
uauuuauuauuuau

SEQ ID NO: 2675831 - RNA, 11 nt, Human
uauuuauuaaa

SEQ ID NO: 2675832 - RNA, 17 nt, Human
uauugugcucagagaca

SEQ ID NO: 2675833 - RNA, 14 nt, Human
uauuugaaagugcc

SEQ ID NO: 2675834 - RNA, 20 nt, Human
uauuugaaagugccuuugca

SEQ ID NO: 2675835 - RNA, 15 nt, Human
uauuugaaagugccu

SEQ ID NO: 2675836 - RNA, 15 nt, Human
uauuugaacaagugg

SEQ ID NO: 2675837 - RNA, 16 nt, Human
uauuugaacaaugaag

SEQ ID NO: 2675838 - RNA, 18 nt, Human
uauuugaacaaugaaguu

SEQ ID NO: 2675839 - RNA, 20 nt, Human
uauuugaacaaugaaguuga

SEQ ID NO: 2675840 - RNA, 16 nt, Human
uauuguuuaaaaugua

SEQ ID NO: 2675841 - RNA, 17 nt, Human
uauuguuuaaaauguaa

SEQ ID NO: 2675842 - RNA, 13 nt, Human
uauuuaacagaaa

SEQ ID NO: 2675843 - RNA, 14 nt, Human
uauuuaacagaaau

SEQ ID NO: 2675844 - RNA, 14 nt, Human
uauuuaaauuacaa

SEQ ID NO: 2675845 - RNA, 18 nt, Human
uauuuaaauuacaauuuu

SEQ ID NO: 2675846 - RNA, 12 nt, Human
uauuuaacagaa

SEQ ID NO: 2675847 - RNA, 21 nt, Human
uauuuaaauccugaagagcau

SEQ ID NO: 2675848 - RNA, 15 nt, Human
uauuuaucugauuaa

SEQ ID NO: 2675849 - RNA, 21 nt, Human
uauuuaucugauuaaguuguc

SEQ ID NO: 2675850 - RNA, 16 nt, Human
uauuuaucugauuaag

SEQ ID NO: 2675851 - RNA, 20 nt, Human
uauuuauccagaaaacugug

SEQ ID NO: 2675852 - RNA, 21 nt, Human
uauuuauccagaaaacuguga

SEQ ID NO: 2675853 - RNA, 23 nt, Human
uauuuauccagaaaacugugauu

SEQ ID NO: 2675854 - RNA, 18 nt, Human
uauuuauauuuauugacu

SEQ ID NO: 2675855 - RNA, 17 nt, Human
uauuuauauuuauugac

SEQ ID NO: 2675856 - RNA, 16 nt, Human
uauuuauauuuauuga

SEQ ID NO: 2675857 - RNA, 15 nt, Human
uauuuauauuuauug

SEQ ID NO: 2675858 - RNA, 22 nt, Human
uauuuauauguauguguuuaga

SEQ ID NO: 2675859 - RNA, 12 nt, Human
uauuuauaugua

SEQ ID NO: 2675860 - RNA, 15 nt, Human
uauuuauauguacug

SEQ ID NO: 2675861 - RNA, 16 nt, Human
uauuuauauguacugu

SEQ ID NO: 2675862 - RNA, 21 nt, Human
uauuuauauguauguguuuag

SEQ ID NO: 2675863 - RNA, 19 nt, Human
uauuuauauguauguguuu

SEQ ID NO: 2675864 - RNA, 18 nt, Human
uauuuauauguauguguu

SEQ ID NO: 2675865 - RNA, 17 nt, Human
uauuuauauguaugugu

SEQ ID NO: 2675866 - RNA, 16 nt, Human
uauuuauauguaugug

SEQ ID NO: 2675867 - RNA, 15 nt, Human
uauuuauauguaugu

SEQ ID NO: 2675868 - RNA, 14 nt, Human
uauuuauauguaug

SEQ ID NO: 2675869 - RNA, 17 nt, Human
uauuuauauguacuguu

SEQ ID NO: 2675870 - RNA, 15 nt, Human
uauuauuuauaauuc

SEQ ID NO: 2675871 - RNA, 22 nt, Human
uauuauuuauuuuuuuuaauug

SEQ ID NO: 2675872 - RNA, 18 nt, Human
uauuauguagguaagacu

SEQ ID NO: 2675873 - RNA, 15 nt, Human
uauuauguaguuguu

SEQ ID NO: 2675874 - RNA, 16 nt, Human
uauuauggaaaacugu

SEQ ID NO: 2675875 - RNA, 20 nt, Human
uauuauggaaaacuguguug

SEQ ID NO: 2675876 - RNA, 20 nt, Human
uauuaucaggggagaaaaau

SEQ ID NO: 2675877 - RNA, 14 nt, Human
uauuaucugggcuu

SEQ ID NO: 2675878 - RNA, 20 nt, Human
uauuaucaaagggauaaaga

SEQ ID NO: 2675879 - RNA, 22 nt, Human
uauuaucaaagggauaaagaaa

SEQ ID NO: 2675880 - RNA, 19 nt, Human
uauuauacaggaaagcaau

SEQ ID NO: 2675881 - RNA, 14 nt, Human
uauuauacauguga

SEQ ID NO: 2675882 - RNA, 19 nt, Human
uauuauacaugugauacau

SEQ ID NO: 2675883 - RNA, 21 nt, Human
uauuauacaugugauacauuu

SEQ ID NO: 2675884 - RNA, 14 nt, Human
uauuaaggaagaca

SEQ ID NO: 2675885 - RNA, 14 nt, Human
uauuauaaucuuau

SEQ ID NO: 2675886 - RNA, 19 nt, Human
uauuauaaucuuauaauug

SEQ ID NO: 2675887 - RNA, 16 nt, Human
uauguguuuagaauug

SEQ ID NO: 2675888 - RNA, 13 nt, Human
uauguguuuagaa

SEQ ID NO: 2675889 - RNA, 13 nt, Human
uauguuaaagaga

SEQ ID NO: 2675890 - RNA, 14 nt, Human
uauguuaaagagaa

SEQ ID NO: 2675891 - RNA, 13 nt, Human
uauggacuaucug

SEQ ID NO: 2675892 - RNA, 17 nt, Human
uauggacuaucugucug

SEQ ID NO: 2675893 - RNA, 18 nt, Human
uauggacuaucugucugg

SEQ ID NO: 2675894 - RNA, 21 nt, Human
uauggacuaucugucuggugg

SEQ ID NO: 2675895 - RNA, 16 nt, Human
uauguucagauuauug

SEQ ID NO: 2675896 - RNA, 18 nt, Human
uauguuguuuauaauaaa

SEQ ID NO: 2675897 - RNA, 18 nt, Human
uauuaacuuaauaaucaa

SEQ ID NO: 2675898 - RNA, 16 nt, Human
uauuaacuuaauaauc

SEQ ID NO: 2675899 - RNA, 20 nt, Human
uauuaacuuaauaaucaaga

SEQ ID NO: 2675900 - RNA, 15 nt, Human
uauuaacuuaauaau

SEQ ID NO: 2675901 - RNA, 20 nt, Human
uaucuaauauauaugaauaa

SEQ ID NO: 2675902 - RNA, 18 nt, Human
uaucuaauauauaugaau

SEQ ID NO: 2675903 - RNA, 17 nt, Human
uaucuaauauauaugaa

SEQ ID NO: 2675904 - RNA, 21 nt, Human
uaucuaauauauaugaauaaa

SEQ ID NO: 2675905 - RNA, 23 nt, Human
uaucugggauuaugguuuuguga

SEQ ID NO: 2675906 - RNA, 15 nt, Human
uaucuggccucugcu

SEQ ID NO: 2675907 - RNA, 22 nt, Human
uaucuggccccagguagaaacu

SEQ ID NO: 2675908 - RNA, 22 nt, Human
uauccugauuauaggauuuuaa

SEQ ID NO: 2675909 - RNA, 12 nt, Human
uauccucuguaa

SEQ ID NO: 2675910 - RNA, 13 nt, Human
uauauaaauguau

SEQ ID NO: 2675911 - RNA, 18 nt, Human
uauauuaaaaaagagaca

SEQ ID NO: 2675912 - RNA, 12 nt, Human
uaugaauaaagu

SEQ ID NO: 2675913 - RNA, 14 nt, Human
uaucuucugauuug

SEQ ID NO: 2675914 - RNA, 23 nt, Human
uaugaaugauuugcauaugaaag

SEQ ID NO: 2675915 - RNA, 16 nt, Human
uaugaaugauuugcau

SEQ ID NO: 2675916 - RNA, 14 nt, Human
uaugacaguaaaca

SEQ ID NO: 2675917 - RNA, 14 nt, Human
uaucuuacaauauu

SEQ ID NO: 2675918 - RNA, 22 nt, Human
uaucuuauaaaguggaaguaug

SEQ ID NO: 2675919 - RNA, 23 nt, Human
uaucuuauaaaguggaaguaugu

SEQ ID NO: 2675920 - RNA, 20 nt, Human
uaucuguuuccugacauugu

SEQ ID NO: 2675921 - RNA, 22 nt, Human
uaucuguuuccugacauugucu

SEQ ID NO: 2675922 - RNA, 11 nt, Human
uaugcaaaagg

SEQ ID NO: 2675923 - RNA, 14 nt, Human
uaugcacaguaaaa

SEQ ID NO: 2675924 - RNA, 15 nt, Human
uaugagacuuuaugu

SEQ ID NO: 2675925 - RNA, 15 nt, Human
uaugagaggcaauga

SEQ ID NO: 2675926 - RNA, 14 nt, Human
uaugagauugguuu

SEQ ID NO: 2675927 - RNA, 20 nt, Human
uaugagauugguuuuccugu

SEQ ID NO: 2675928 - RNA, 21 nt, Human
uaugagauugguuuuccugug

SEQ ID NO: 2675929 - RNA, 13 nt, Human
uaugacuuuuuau

SEQ ID NO: 2675930 - RNA, 19 nt, Human
uaugacuuuuuauaaaaug

SEQ ID NO: 2675931 - RNA, 22 nt, Human
uaugacuuuuuauaaaauggcu

SEQ ID NO: 2675932 - RNA, 17 nt, Human
uaugcaucauuucagga

SEQ ID NO: 2675933 - RNA, 18 nt, Human
uaugcaucauuucaggag

SEQ ID NO: 2675934 - RNA, 14 nt, Human
uaugcacuuggccu

SEQ ID NO: 2675935 - RNA, 13 nt, Human
uauggaaaacugu

SEQ ID NO: 2675936 - RNA, 15 nt, Human
uauggaaaacugugu

SEQ ID NO: 2675937 - RNA, 21 nt, Human
uaugcuuuccaaaccuuaucu

SEQ ID NO: 2675938 - RNA, 13 nt, Human
uaugcuuuauuaa

SEQ ID NO: 2675939 - RNA, 15 nt, Human
uauggaauuuugcaa

SEQ ID NO: 2675940 - RNA, 17 nt, Human
uauaauagcaacuuuug

SEQ ID NO: 2675941 - RNA, 12 nt, Human
uauaauaaauau

SEQ ID NO: 2675942 - RNA, 14 nt, Human
uauaauaaauauau

SEQ ID NO: 2675943 - RNA, 13 nt, Human
uauaauauaaaaa

SEQ ID NO: 2675944 - RNA, 22 nt, Human
uauaauauaaaaaauuuuaaaa

SEQ ID NO: 2675945 - RNA, 12 nt, Human
uauaaauguaua

SEQ ID NO: 2675946 - RNA, 14 nt, Human
uauaaauguauaaa

SEQ ID NO: 2675947 - RNA, 16 nt, Human
uauaaauguauaaaua

SEQ ID NO: 2675948 - RNA, 20 nt, Human
uauaaauguauaaauauaca

SEQ ID NO: 2675949 - RNA, 17 nt, Human
uaguugccuuaaaauaa

SEQ ID NO: 2675950 - RNA, 16 nt, Human
uaguugcaauugaauu

SEQ ID NO: 2675951 - RNA, 14 nt, Human
uaguugcaauugaa

SEQ ID NO: 2675952 - RNA, 12 nt, Human
uauaaagcagua

SEQ ID NO: 2675953 - RNA, 13 nt, Human
uauaauuguacaa

SEQ ID NO: 2675954 - RNA, 14 nt, Human
uauaauuguacaaa

SEQ ID NO: 2675955 - RNA, 16 nt, Human
uauaauuguacaaaau

SEQ ID NO: 2675956 - RNA, 23 nt, Human
uauaauuguacaaaauuaagcaa

SEQ ID NO: 2675957 - RNA, 17 nt, Human
uauaaucuuauaauugu

SEQ ID NO: 2675958 - RNA, 19 nt, Human
uauaauccuuaaaucuuaa

SEQ ID NO: 2675959 - RNA, 22 nt, Human
uauaauccuuaaaucuuaaugu

SEQ ID NO: 2675960 - RNA, 16 nt, Human
uauaaucuuauaauug

SEQ ID NO: 2675961 - RNA, 19 nt, Human
uauauguauuauuuauaau

SEQ ID NO: 2675962 - RNA, 22 nt, Human
uauauguauguguuuagaauug

SEQ ID NO: 2675963 - RNA, 19 nt, Human
uauauguauguguuuagaa

SEQ ID NO: 2675964 - RNA, 18 nt, Human
uauauguauguguuuaga

SEQ ID NO: 2675965 - RNA, 16 nt, Human
uauauguauguguuua

SEQ ID NO: 2675966 - RNA, 15 nt, Human
uauauguauguguuu

SEQ ID NO: 2675967 - RNA, 14 nt, Human
uauaucucuauuug

SEQ ID NO: 2675968 - RNA, 15 nt, Human
uauaucucuauuuga

SEQ ID NO: 2675969 - RNA, 16 nt, Human
uauauguauuauuuau

SEQ ID NO: 2675970 - RNA, 14 nt, Human
uauauguguaugca

SEQ ID NO: 2675971 - RNA, 14 nt, Human
uauauguauguguu

SEQ ID NO: 2675972 - RNA, 12 nt, Human
uauauaaaugua

SEQ ID NO: 2675973 - RNA, 14 nt, Human
uauaucuaucuauu

SEQ ID NO: 2675974 - RNA, 17 nt, Human
uauaucuaucuauuuga

SEQ ID NO: 2675975 - RNA, 19 nt, Human
uauaucuaucuauuugagg

SEQ ID NO: 2675976 - RNA, 17 nt, Human
uauaguguagaaaagaa

SEQ ID NO: 2675977 - RNA, 20 nt, Human
uauaguuauguaaauaauuc

SEQ ID NO: 2675978 - RNA, 16 nt, Human
uauaguuauguaaaua

SEQ ID NO: 2675979 - RNA, 22 nt, Human
uauaguuauguaaauaauucuu

SEQ ID NO: 2675980 - RNA, 22 nt, Human
uauacuggaacccuuuuaaagu

SEQ ID NO: 2675981 - RNA, 22 nt, Human
uauacugaaggaaaaacacaag

SEQ ID NO: 2675982 - RNA, 21 nt, Human
uauacuacuuuguuaggauuu

SEQ ID NO: 2675983 - RNA, 20 nt, Human
uauacugaaggaaaaacaca

SEQ ID NO: 2675984 - RNA, 12 nt, Human
uauacugaagga

SEQ ID NO: 2675985 - RNA, 23 nt, Human
uaggugaucccguuuuccccaug

SEQ ID NO: 2675986 - RNA, 15 nt, Human
uaguaucuauaugac

SEQ ID NO: 2675987 - RNA, 16 nt, Human
uaguaucuauaugacu

SEQ ID NO: 2675988 - RNA, 13 nt, Human
uaguaugaaaaug

SEQ ID NO: 2675989 - RNA, 22 nt, Human
uaguguuauaugaacauacaaa

SEQ ID NO: 2675990 - RNA, 18 nt, Human
uaguguuauaugaacaua

SEQ ID NO: 2675991 - RNA, 17 nt, Human
uaguguuauaugaacau

SEQ ID NO: 2675992 - RNA, 16 nt, Human
uaguguuauaugaaca

SEQ ID NO: 2675993 - RNA, 15 nt, Human
uaguguuauaugaac

SEQ ID NO: 2675994 - RNA, 13 nt, Human
uaguguuauauga

SEQ ID NO: 2675995 - RNA, 20 nt, Human
guggcucugggauccugggg

SEQ ID NO: 2675996 - RNA, 22 nt, Human
guggcugaugguguggccugug

SEQ ID NO: 2675997 - RNA, 17 nt, Human
uaggaaucauucagaaa

SEQ ID NO: 2675998 - RNA, 20 nt, Human
uaggaaucauucagaaaugu

SEQ ID NO: 2675999 - RNA, 22 nt, Human
uaggaaucauucagaaauguug

SEQ ID NO: 2676000 - RNA, 14 nt, Human
uaggaccaagaaag

SEQ ID NO: 2676001 - RNA, 17 nt, Human
uaggaccaagcaucuug

SEQ ID NO: 2676002 - RNA, 22 nt, Human
uaggaccaagcaucuugggggg

SEQ ID NO: 2676003 - RNA, 18 nt, Human
uaggaccaagcaucuugg

SEQ ID NO: 2676004 - RNA, 21 nt, Human
uaggcccccacuugccucuuc

SEQ ID NO: 2676005 - RNA, 14 nt, Human
uaggcccccacuug

SEQ ID NO: 2676006 - RNA, 19 nt, Human
uaggcccccacuugccucu

SEQ ID NO: 2676007 - RNA, 21 nt, Human
uaggccuuccucucuccagau

SEQ ID NO: 2676008 - RNA, 20 nt, Human
uagguagaagugagcaaaaa

SEQ ID NO: 2676009 - RNA, 15 nt, Human
uagguccucagaaag

SEQ ID NO: 2676010 - RNA, 15 nt, Human
uagguagagucugag

SEQ ID NO: 2676011 - RNA, 20 nt, Human
uaggcuauuuucuaaagacu

SEQ ID NO: 2676012 - RNA, 23 nt, Human
uaggccuuccucucuccagaugu

SEQ ID NO: 2676013 - RNA, 21 nt, Human
uagggaaaaaccagcguguga

SEQ ID NO: 2676014 - RNA, 20 nt, Human
uagggaaaaaccagcgugug

SEQ ID NO: 2676015 - RNA, 19 nt, Human
uagggaaaaaccagcgugu

SEQ ID NO: 2676016 - RNA, 17 nt, Human
uaggcucugccugacag

SEQ ID NO: 2676017 - RNA, 11 nt, Human
uagggaaaaac

SEQ ID NO: 2676018 - RNA, 19 nt, Human
uccaaaaagcuccuggggc

SEQ ID NO: 2676019 - RNA, 15 nt, Human
uccaaaccuuaucuc

SEQ ID NO: 2676020 - RNA, 19 nt, Human
uccaaagaggcugccccuc

SEQ ID NO: 2676021 - RNA, 13 nt, Human
uccaaagaggcug

SEQ ID NO: 2676022 - RNA, 14 nt, Human
uccaaagaggcugc

SEQ ID NO: 2676023 - RNA, 15 nt, Human
uccaaagaggcugcc

SEQ ID NO: 2676024 - RNA, 16 nt, Human
uccaaagaggcugccc

SEQ ID NO: 2676025 - RNA, 18 nt, Human
uccaaagaggcugccccu

SEQ ID NO: 2676026 - RNA, 14 nt, Human
ucauuuaagggaaa

SEQ ID NO: 2676027 - RNA, 15 nt, Human
ucauuuaagggaaaa

SEQ ID NO: 2676028 - RNA, 16 nt, Human
ucauuuaagggaaaaa

SEQ ID NO: 2676029 - RNA, 17 nt, Human
ucauuuaagggaaaaau

SEQ ID NO: 2676030 - RNA, 23 nt, Human
ucauuuaagggaaaaauauauau

SEQ ID NO: 2676031 - RNA, 19 nt, Human
ucauuuaagggaaagaaaa

SEQ ID NO: 2676032 - RNA, 23 nt, Human
ucaucaaucaaauaaguauuuau

SEQ ID NO: 2676033 - RNA, 21 nt, Human
ucaucaaucaaauaaguauuu

SEQ ID NO: 2676034 - RNA, 13 nt, Human
ucaucaaucaaau

SEQ ID NO: 2676035 - RNA, 15 nt, Human
ucaucacaagaacac

SEQ ID NO: 2676036 - RNA, 23 nt, Human
ucaucacaagaacacacacauau

SEQ ID NO: 2676037 - RNA, 14 nt, Human
ucaucucauuuaag

SEQ ID NO: 2676038 - RNA, 16 nt, Human
ucaucucauuuaaggg

SEQ ID NO: 2676039 - RNA, 20 nt, Human
ucaucucauuuaagggaaaa

SEQ ID NO: 2676040 - RNA, 21 nt, Human
ucaucucauuuaagggaaaaa

SEQ ID NO: 2676041 - RNA, 22 nt, Human
ucaucucauuuaagggaaaaau

SEQ ID NO: 2676042 - RNA, 23 nt, Human
ucaucucauuuaagggaaaaaua

SEQ ID NO: 2676043 - RNA, 23 nt, Human
ucagcucugcaagaauugaagca

SEQ ID NO: 2676044 - RNA, 13 nt, Human
ucaccgcccauca

SEQ ID NO: 2676045 - RNA, 15 nt, Human
ucaccgcccaucagg

SEQ ID NO: 2676046 - RNA, 20 nt, Human
ucaccgcccaucaggguucu

SEQ ID NO: 2676047 - RNA, 22 nt, Human
ucagcuccagggaauccaagcc

SEQ ID NO: 2676048 - RNA, 23 nt, Human
ucagcuccagggaauccaagccu

SEQ ID NO: 2676049 - RNA, 17 nt, Human
ucaggaauauuuuccaa

SEQ ID NO: 2676050 - RNA, 18 nt, Human
ucaggaauauuuuccaaa

SEQ ID NO: 2676051 - RNA, 23 nt, Human
ucaggccggcagccccagccugc

SEQ ID NO: 2676052 - RNA, 22 nt, Human
ucaggccggcagccccagccug

SEQ ID NO: 2676053 - RNA, 21 nt, Human
ucaggccggcagccccagccu

SEQ ID NO: 2676054 - RNA, 18 nt, Human
ucaggccggcagccccag

SEQ ID NO: 2676055 - RNA, 21 nt, Human
ucaggaguuacuggauuuguu

SEQ ID NO: 2676056 - RNA, 15 nt, Human
ucaggcugaaaacaa

SEQ ID NO: 2676057 - RNA, 16 nt, Human
ucaggcugaaaacaau

SEQ ID NO: 2676058 - RNA, 23 nt, Human
ucaggugagaagcagaggaagga

SEQ ID NO: 2676059 - RNA, 14 nt, Human
ucagugcauuugug

SEQ ID NO: 2676060 - RNA, 16 nt, Human
ucagugcauuugugcu

SEQ ID NO: 2676061 - RNA, 17 nt, Human
ucagucacauggcaugg

SEQ ID NO: 2676062 - RNA, 21 nt, Human
uccauuccacacagaaugcaa

SEQ ID NO: 2676063 - RNA, 22 nt, Human
uccauuccacacagaaugcaac

SEQ ID NO: 2676064 - RNA, 15 nt, Human
ucccaggaagcccag

SEQ ID NO: 2676065 - RNA, 16 nt, Human
ucccaggaagcccagg

SEQ ID NO: 2676066 - RNA, 20 nt, Human
uccccagcauuccagccccu

SEQ ID NO: 2676067 - RNA, 22 nt, Human
ucccauguagcccccuggccuc

SEQ ID NO: 2676068 - RNA, 15 nt, Human
uccagaucacugcca

SEQ ID NO: 2676069 - RNA, 22 nt, Human
uccacuuuguuucguggggagg

SEQ ID NO: 2676070 - RNA, 23 nt, Human
uccacuuuguuucguggggaggu

SEQ ID NO: 2676071 - RNA, 15 nt, Human
uccacuuuguuucgu

SEQ ID NO: 2676072 - RNA, 18 nt, Human
uccacuuuguuucguggg

SEQ ID NO: 2676073 - RNA, 19 nt, Human
uccacuuuguuucgugggg

SEQ ID NO: 2676074 - RNA, 14 nt, Human
uccagaaaacugug

SEQ ID NO: 2676075 - RNA, 15 nt, Human
uccagaaaacuguga

SEQ ID NO: 2676076 - RNA, 23 nt, Human
uccagaaaacugugauuucagga

SEQ ID NO: 2676077 - RNA, 17 nt, Human
uccaaagacucuuggga

SEQ ID NO: 2676078 - RNA, 16 nt, Human
uccagaucacugccac

SEQ ID NO: 2676079 - RNA, 17 nt, Human
uccagaucacugccaca

SEQ ID NO: 2676080 - RNA, 14 nt, Human
uccagcaccuugug

SEQ ID NO: 2676081 - RNA, 15 nt, Human
uccagcaccuugugc

SEQ ID NO: 2676082 - RNA, 18 nt, Human
uccagcaccuugugccug

SEQ ID NO: 2676083 - RNA, 19 nt, Human
uccagcaccuugugccugg

SEQ ID NO: 2676084 - RNA, 21 nt, Human
uccagcaccuugugccugggg

SEQ ID NO: 2676085 - RNA, 22 nt, Human
uccagcaccuugugccuggggu

SEQ ID NO: 2676086 - RNA, 12 nt, Human
uccagcucugga

SEQ ID NO: 2676087 - RNA, 13 nt, Human
uccagcucuggag

SEQ ID NO: 2676088 - RNA, 15 nt, Human
uccagcucuggaggg

SEQ ID NO: 2676089 - RNA, 20 nt, Human
uccagcucuggaggggaggg

SEQ ID NO: 2676090 - RNA, 23 nt, Human
uccaggggcugcuuccuccugga

SEQ ID NO: 2676091 - RNA, 21 nt, Human
uccaggggcugcuuccuccug

SEQ ID NO: 2676092 - RNA, 22 nt, Human
uccaggggcugcuuccuccugg

SEQ ID NO: 2676093 - RNA, 21 nt, Human
uccagcugcccuuccgcagug

SEQ ID NO: 2676094 - RNA, 17 nt, Human
uccagcugccuauugau

SEQ ID NO: 2676095 - RNA, 16 nt, Human
uccaucacuauaauaa

SEQ ID NO: 2676096 - RNA, 17 nt, Human
uccaucacccucuuccu

SEQ ID NO: 2676097 - RNA, 17 nt, Human
uccauauuuuauuacug

SEQ ID NO: 2676098 - RNA, 18 nt, Human
uccauauuuuauuacugu

SEQ ID NO: 2676099 - RNA, 19 nt, Human
uccauauuuuauuacuguu

SEQ ID NO: 2676100 - RNA, 20 nt, Human
uccauauuuuauuacuguuu

SEQ ID NO: 2676101 - RNA, 23 nt, Human
uccauauuuuauuacuguuuauu

SEQ ID NO: 2676102 - RNA, 23 nt, Human
uccaucacccucuuccugugauc

SEQ ID NO: 2676103 - RNA, 13 nt, Human
uccaguuauaaga

SEQ ID NO: 2676104 - RNA, 15 nt, Human
uccaguuauaagaag

SEQ ID NO: 2676105 - RNA, 16 nt, Human
uccaguuauaagaaga

SEQ ID NO: 2676106 - RNA, 20 nt, Human
uccaguucaucgauuuucua

SEQ ID NO: 2676107 - RNA, 21 nt, Human
uccaguucaucgauuuucuau

SEQ ID NO: 2676108 - RNA, 21 nt, Human
uccaguaagaucacuguuuag

SEQ ID NO: 2676109 - RNA, 17 nt, Human
uccaguuugucuuggau

SEQ ID NO: 2676110 - RNA, 13 nt, Human
uccauaaacauga

SEQ ID NO: 2676111 - RNA, 16 nt, Human
uccauaaacaugaaaa

SEQ ID NO: 2676112 - RNA, 20 nt, Human
uccagguuuaagcuguuacu

SEQ ID NO: 2676113 - RNA, 15 nt, Human
uccaguaagaucacu

SEQ ID NO: 2676114 - RNA, 20 nt, Human
uccaguaagaucacuguuua

SEQ ID NO: 2676115 - RNA, 19 nt, Human
uccaguaagaucacuguuu

SEQ ID NO: 2676116 - RNA, 18 nt, Human
uccaguaagaucacuguu

SEQ ID NO: 2676117 - RNA, 17 nt, Human
uccaguaagaucacugu

SEQ ID NO: 2676118 - RNA, 13 nt, Human
uccuccaggccug

SEQ ID NO: 2676119 - RNA, 17 nt, Human
uccuccaggccugccuc

SEQ ID NO: 2676120 - RNA, 19 nt, Human
uccuccaggccugccuccc

SEQ ID NO: 2676121 - RNA, 18 nt, Human
uccucauuagcauuuugc

SEQ ID NO: 2676122 - RNA, 13 nt, Human
uccuccaacagcu

SEQ ID NO: 2676123 - RNA, 13 nt, Human
uccuaguaagaag

SEQ ID NO: 2676124 - RNA, 14 nt, Human
uccuaguaagaaga

SEQ ID NO: 2676125 - RNA, 16 nt, Human
ucccuuccccaugcuu

SEQ ID NO: 2676126 - RNA, 19 nt, Human
uccuacacuugagagaaaa

SEQ ID NO: 2676127 - RNA, 18 nt, Human
uccuacauaucccuucca

SEQ ID NO: 2676128 - RNA, 19 nt, Human
uccuacauaucccuuccag

SEQ ID NO: 2676129 - RNA, 20 nt, Human
uccuacauaucccuuccaga

SEQ ID NO: 2676130 - RNA, 12 nt, Human
uccccccaucuu

SEQ ID NO: 2676131 - RNA, 15 nt, Human
uccccccaucuugcu

SEQ ID NO: 2676132 - RNA, 18 nt, Human
uccccccccaaccuuucc

SEQ ID NO: 2676133 - RNA, 19 nt, Human
uccccccccaaccuuuccc

SEQ ID NO: 2676134 - RNA, 22 nt, Human
uccccccaucuugcuucccuaa

SEQ ID NO: 2676135 - RNA, 15 nt, Human
ucccuugcuggcccc

SEQ ID NO: 2676136 - RNA, 16 nt, Human
ucccuugcuggcccca

SEQ ID NO: 2676137 - RNA, 17 nt, Human
ucccuugcuggccccag

SEQ ID NO: 2676138 - RNA, 19 nt, Human
ucccuugcuggccccagcc

SEQ ID NO: 2676139 - RNA, 21 nt, Human
ucccuugcuggccccagcccu

SEQ ID NO: 2676140 - RNA, 23 nt, Human
ucccuugcuggccccagcccugc

SEQ ID NO: 2676141 - RNA, 14 nt, Human
ucccuugcuugccu

SEQ ID NO: 2676142 - RNA, 20 nt, Human
ucccuugcuugccugcaggg

SEQ ID NO: 2676143 - RNA, 21 nt, Human
ucccuugcuugccugcagggc

SEQ ID NO: 2676144 - RNA, 23 nt, Human
ucccuugcuugccugcagggcca

SEQ ID NO: 2676145 - RNA, 17 nt, Human
uccgccagccuccucug

SEQ ID NO: 2676146 - RNA, 18 nt, Human
uccgccagccuccucugg

SEQ ID NO: 2676147 - RNA, 11 nt, Human
uccgccagccu

SEQ ID NO: 2676148 - RNA, 12 nt, Human
uccgccagccuc

SEQ ID NO: 2676149 - RNA, 13 nt, Human
uccgccagccucc

SEQ ID NO: 2676150 - RNA, 14 nt, Human
uccgccagccuccu

SEQ ID NO: 2676151 - RNA, 15 nt, Human
uccgccagccuccuc

SEQ ID NO: 2676152 - RNA, 16 nt, Human
uccgccagccuccucu

SEQ ID NO: 2676153 - RNA, 21 nt, Human
uccgcaucccuaccgacccag

SEQ ID NO: 2676154 - RNA, 14 nt, Human
uccgcaucccuacc

SEQ ID NO: 2676155 - RNA, 18 nt, Human
uccgcaguguggccaggc

SEQ ID NO: 2676156 - RNA, 19 nt, Human
uccgcaguguggccaggcu

SEQ ID NO: 2676157 - RNA, 12 nt, Human
uccgcaggacuu

SEQ ID NO: 2676158 - RNA, 14 nt, Human
uccgcgugugccug

SEQ ID NO: 2676159 - RNA, 18 nt, Human
uccgcgugugccugugug

SEQ ID NO: 2676160 - RNA, 19 nt, Human
uccgcgugugccugugugc

SEQ ID NO: 2676161 - RNA, 14 nt, Human
uccgcugccagccu

SEQ ID NO: 2676162 - RNA, 16 nt, Human
uccgcugccagccuug

SEQ ID NO: 2676163 - RNA, 19 nt, Human
uccgcugccagccuugagc

SEQ ID NO: 2676164 - RNA, 14 nt, Human
uccgcugccgugcc

SEQ ID NO: 2676165 - RNA, 14 nt, Human
uccuggccuauccg

SEQ ID NO: 2676166 - RNA, 18 nt, Human
uccuggccuauccgcugc

SEQ ID NO: 2676167 - RNA, 22 nt, Human
uccuggccuauccgcugccagc

SEQ ID NO: 2676168 - RNA, 23 nt, Human
uccuggccuauccgcugccagcc

SEQ ID NO: 2676169 - RNA, 12 nt, Human
uccuggcgccug

SEQ ID NO: 2676170 - RNA, 14 nt, Human
uccugccaggcaug

SEQ ID NO: 2676171 - RNA, 13 nt, Human
uccugccaggcau

SEQ ID NO: 2676172 - RNA, 13 nt, Human
uccugagcuagga

SEQ ID NO: 2676173 - RNA, 15 nt, Human
uccugacucucuccu

SEQ ID NO: 2676174 - RNA, 20 nt, Human
uccugacugaaaguaggggg

SEQ ID NO: 2676175 - RNA, 13 nt, Human
uccugacuggugc

SEQ ID NO: 2676176 - RNA, 14 nt, Human
uccugacuggugcu

SEQ ID NO: 2676177 - RNA, 15 nt, Human
uccugacuggugcug

SEQ ID NO: 2676178 - RNA, 20 nt, Human
uccucccacccggcugcaga

SEQ ID NO: 2676179 - RNA, 21 nt, Human
uccucccacccggcugcagag

SEQ ID NO: 2676180 - RNA, 14 nt, Human
uccuccucccaccc

SEQ ID NO: 2676181 - RNA, 20 nt, Human
uccuccucccacccggcugc

SEQ ID NO: 2676182 - RNA, 14 nt, Human
ucuacaaucucuuu

SEQ ID NO: 2676183 - RNA, 19 nt, Human
ucuacaaucucuuuuuguu

SEQ ID NO: 2676184 - RNA, 22 nt, Human
ucuacaaucucuuuuuguuugc

SEQ ID NO: 2676185 - RNA, 16 nt, Human
ucuacaaugacacaca

SEQ ID NO: 2676186 - RNA, 21 nt, Human
ucuacuuaauccaauggguuu

SEQ ID NO: 2676187 - RNA, 22 nt, Human
ucuacugucaaaugaugugcaa

SEQ ID NO: 2676188 - RNA, 23 nt, Human
ucuacugucaaaugaugugcaaa

SEQ ID NO: 2676189 - RNA, 12 nt, Human
ucuacguuucuu

SEQ ID NO: 2676190 - RNA, 13 nt, Human
ucuacguuucuuu

SEQ ID NO: 2676191 - RNA, 14 nt, Human
ucuacguuucuuua

SEQ ID NO: 2676192 - RNA, 20 nt, Human
uccuuagagguccucuggag

SEQ ID NO: 2676193 - RNA, 19 nt, Human
uccuuagaaaaaaaauuau

SEQ ID NO: 2676194 - RNA, 16 nt, Human
ucggagaagagcgcag

SEQ ID NO: 2676195 - RNA, 21 nt, Human
ucggagaagagcgcaguguuu

SEQ ID NO: 2676196 - RNA, 18 nt, Human
ucggauaguugcuauuuu

SEQ ID NO: 2676197 - RNA, 23 nt, Human
ucggauaguugcuauuuuuguaa

SEQ ID NO: 2676198 - RNA, 16 nt, Human
ucggaucaggcuccca

SEQ ID NO: 2676199 - RNA, 15 nt, Human
ucgugaagaagccug

SEQ ID NO: 2676200 - RNA, 21 nt, Human
ucgugaagaagccuguaacac

SEQ ID NO: 2676201 - RNA, 15 nt, Human
ucgucuuucccaugg

SEQ ID NO: 2676202 - RNA, 18 nt, Human
ucgucuuucccaugggga

SEQ ID NO: 2676203 - RNA, 20 nt, Human
ucgucuuucccauggggagg

SEQ ID NO: 2676204 - RNA, 22 nt, Human
ucgugaaagugcauuuuuguaa

SEQ ID NO: 2676205 - RNA, 22 nt, Human
ucguggacugagugggaagccc

SEQ ID NO: 2676206 - RNA, 22 nt, Human
ucguggacacacacagacuauu

SEQ ID NO: 2676207 - RNA, 20 nt, Human
ucguggacugagugggaagc

SEQ ID NO: 2676208 - RNA, 17 nt, Human
ucguggacacacacaga

SEQ ID NO: 2676209 - RNA, 18 nt, Human
ucguggacacacacagac

SEQ ID NO: 2676210 - RNA, 18 nt, Human
ucuaaagguggugaggca

SEQ ID NO: 2676211 - RNA, 14 nt, Human
ucuaaaguaaaaag

SEQ ID NO: 2676212 - RNA, 22 nt, Human
ucgugucauacucgagucugag

SEQ ID NO: 2676213 - RNA, 23 nt, Human
ucuaugcuuuccaaaccuuaucu

SEQ ID NO: 2676214 - RNA, 18 nt, Human
ucuaugcuuuccaaaccu

SEQ ID NO: 2676215 - RNA, 14 nt, Human
ucuccccucagcuc

SEQ ID NO: 2676216 - RNA, 18 nt, Human
ucuccacugugcuuucag

SEQ ID NO: 2676217 - RNA, 19 nt, Human
ucuccccagguccagcucu

SEQ ID NO: 2676218 - RNA, 20 nt, Human
ucuccccagguccagcucug

SEQ ID NO: 2676219 - RNA, 22 nt, Human
ucuccccagguccagcucugga

SEQ ID NO: 2676220 - RNA, 15 nt, Human
ucuccccagguccag

SEQ ID NO: 2676221 - RNA, 13 nt, Human
ucucccuggcucc

SEQ ID NO: 2676222 - RNA, 14 nt, Human
ucucccuggcuccc

SEQ ID NO: 2676223 - RNA, 15 nt, Human
ucucccuggcucccu

SEQ ID NO: 2676224 - RNA, 20 nt, Human
ucucccuggcucccuccucc

SEQ ID NO: 2676225 - RNA, 23 nt, Human
ucucccuggcucccuccuccagg

SEQ ID NO: 2676226 - RNA, 12 nt, Human
ucucccugccug

SEQ ID NO: 2676227 - RNA, 13 nt, Human
ucucccugccugg

SEQ ID NO: 2676228 - RNA, 14 nt, Human
ucucccugccuggc

SEQ ID NO: 2676229 - RNA, 15 nt, Human
ucucccugccuggcc

SEQ ID NO: 2676230 - RNA, 16 nt, Human
ucucccugccuggccc

SEQ ID NO: 2676231 - RNA, 17 nt, Human
ucucccugccuggcccc

SEQ ID NO: 2676232 - RNA, 13 nt, Human
ucuccccucagcu

SEQ ID NO: 2676233 - RNA, 14 nt, Human
ucuccagauguuuc

SEQ ID NO: 2676234 - RNA, 18 nt, Human
ucuccagauguuuccaga

SEQ ID NO: 2676235 - RNA, 15 nt, Human
ucuccagauguuucc

SEQ ID NO: 2676236 - RNA, 19 nt, Human
ucuccagauguuuccagac

SEQ ID NO: 2676237 - RNA, 10 nt, Human
ucuccacugu

SEQ ID NO: 2676238 - RNA, 19 nt, Human
ucuccacugugcacaccca

SEQ ID NO: 2676239 - RNA, 21 nt, Human
ucuccacugugcacacccacc

SEQ ID NO: 2676240 - RNA, 22 nt, Human
ucuccagccucagcccccugcu

SEQ ID NO: 2676241 - RNA, 23 nt, Human
ucuccagccucagcccccugcuu

SEQ ID NO: 2676242 - RNA, 21 nt, Human
ucuccagcgucagcugcuccc

SEQ ID NO: 2676243 - RNA, 14 nt, Human
ugacaauguuguag

SEQ ID NO: 2676244 - RNA, 13 nt, Human
ugacaauguugua

SEQ ID NO: 2676245 - RNA, 16 nt, Human
ugacaauuuuguacaa

SEQ ID NO: 2676246 - RNA, 16 nt, Human
ugacaauucuguuuuu

SEQ ID NO: 2676247 - RNA, 17 nt, Human
ugacaauucuguuuuua

SEQ ID NO: 2676248 - RNA, 22 nt, Human
ugacaauuuuguacaaauuugu

SEQ ID NO: 2676249 - RNA, 18 nt, Human
ugacaauuuuguacaaau

SEQ ID NO: 2676250 - RNA, 16 nt, Human
ugacaauauuccagau

SEQ ID NO: 2676251 - RNA, 24 nt, Human
ugacaauauuccagaucuuucaga

SEQ ID NO: 2676252 - RNA, 14 nt, Human
ugacaauaaagcuu

SEQ ID NO: 2676253 - RNA, 15 nt, Human
ugacaauaaagcuug

SEQ ID NO: 2676254 - RNA, 19 nt, Human
ugacaauaaagcuuguuga

SEQ ID NO: 2676255 - RNA, 15 nt, Human
ugacagaaggugcca

SEQ ID NO: 2676256 - RNA, 17 nt, Human
ugacagaaggugccacu

SEQ ID NO: 2676257 - RNA, 20 nt, Human
ugacagaaggugccacuuua

SEQ ID NO: 2676258 - RNA, 23 nt, Human
ugacaagcuggcuuacacuggca

SEQ ID NO: 2676259 - RNA, 21 nt, Human
ugacaagcuggcuuacacugg

SEQ ID NO: 2676260 - RNA, 14 nt, Human
ugacaagcuggcuu

SEQ ID NO: 2676261 - RNA, 22 nt, Human
ugacagagggauggaggaagaa

SEQ ID NO: 2676262 - RNA, 15 nt, Human
ugacauggugccuga

SEQ ID NO: 2676263 - RNA, 15 nt, Human
ugacauaucuacacu

SEQ ID NO: 2676264 - RNA, 16 nt, Human
ugacauggugccugag

SEQ ID NO: 2676265 - RNA, 17 nt, Human
ugacauggugccugaga

SEQ ID NO: 2676266 - RNA, 18 nt, Human
ugacauggugccugagag

SEQ ID NO: 2676267 - RNA, 21 nt, Human
ugacauggugccugagaggca

SEQ ID NO: 2676268 - RNA, 14 nt, Human
ugaccagaaauggu

SEQ ID NO: 2676269 - RNA, 16 nt, Human
ugaccacuugaggccu

SEQ ID NO: 2676270 - RNA, 17 nt, Human
ugaccacuugaggccug

SEQ ID NO: 2676271 - RNA, 18 nt, Human
ugaccacuugaggccuga

SEQ ID NO: 2676272 - RNA, 20 nt, Human
ugaccacuugaggccugauc

SEQ ID NO: 2676273 - RNA, 16 nt, Human
ugaccaggcugccucc

SEQ ID NO: 2676274 - RNA, 16 nt, Human
ugaccaggaucccaag

SEQ ID NO: 2676275 - RNA, 22 nt, Human
ugaccaggaucccaagccuccu

SEQ ID NO: 2676276 - RNA, 13 nt, Human
ugaagugcuugga

SEQ ID NO: 2676277 - RNA, 16 nt, Human
ugaaguugaaaaucau

SEQ ID NO: 2676278 - RNA, 18 nt, Human
ugaaguguauaauauaaa

SEQ ID NO: 2676279 - RNA, 20 nt, Human
ugaaguguauaauauaaaaa

SEQ ID NO: 2676280 - RNA, 18 nt, Human
ugaaggacuuuggcccua

SEQ ID NO: 2676281 - RNA, 17 nt, Human
ugaagauacuuuguauu

SEQ ID NO: 2676282 - RNA, 16 nt, Human
ugaagauacuuuguau

SEQ ID NO: 2676283 - RNA, 19 nt, Human
ugaagauacuuuguauugu

SEQ ID NO: 2676284 - RNA, 12 nt, Human
ugaagauacuuu

SEQ ID NO: 2676285 - RNA, 15 nt, Human
ugaagauacuuugua

SEQ ID NO: 2676286 - RNA, 14 nt, Human
ugaagauacuuugu

SEQ ID NO: 2676287 - RNA, 21 nt, Human
ugaauuauccacaugaaaaua

SEQ ID NO: 2676288 - RNA, 22 nt, Human
ugaauuauccacaugaaaauaa

SEQ ID NO: 2676289 - RNA, 15 nt, Human
ugaauuauauguuca

SEQ ID NO: 2676290 - RNA, 13 nt, Human
ugaauuauugaca

SEQ ID NO: 2676291 - RNA, 14 nt, Human
ugaauuauugacac

SEQ ID NO: 2676292 - RNA, 15 nt, Human
ugaauuauugacacu

SEQ ID NO: 2676293 - RNA, 16 nt, Human
ugaauuauugacacug

SEQ ID NO: 2676294 - RNA, 17 nt, Human
ugaauuauugacacuga

SEQ ID NO: 2676295 - RNA, 18 nt, Human
ugaauuauugacacugaa

SEQ ID NO: 2676296 - RNA, 21 nt, Human
ugaauuauugacacugaacuu

SEQ ID NO: 2676297 - RNA, 23 nt, Human
ugaaugagucuguugugugucau

SEQ ID NO: 2676298 - RNA, 18 nt, Human
ugaaugagucuguugugu

SEQ ID NO: 2676299 - RNA, 21 nt, Human
ugaaugagucuguuguguguc

SEQ ID NO: 2676300 - RNA, 21 nt, Human
ugaauguuaaagggauauuuu

SEQ ID NO: 2676301 - RNA, 12 nt, Human
ugaaugacaaag

SEQ ID NO: 2676302 - RNA, 16 nt, Human
ugaaugacaaaguaug

SEQ ID NO: 2676303 - RNA, 21 nt, Human
ugaaaggcuuuucaaccacaa

SEQ ID NO: 2676304 - RNA, 15 nt, Human
ugaaaggcuuuucaa

SEQ ID NO: 2676305 - RNA, 11 nt, Human
ugaaaggcuuu

SEQ ID NO: 2676306 - RNA, 16 nt, Human
ugaaagaugaucauuu

SEQ ID NO: 2676307 - RNA, 18 nt, Human
ugaaagcccugagcuuuc

SEQ ID NO: 2676308 - RNA, 17 nt, Human
ugaaaccccaaacagug

SEQ ID NO: 2676309 - RNA, 19 nt, Human
ugaaaccccaaacagugac

SEQ ID NO: 2676310 - RNA, 23 nt, Human
ugaaaccccaaacagugacugua

SEQ ID NO: 2676311 - RNA, 14 nt, Human
ugaaaagauucuuc

SEQ ID NO: 2676312 - RNA, 16 nt, Human
ugaaaagcagacauuu

SEQ ID NO: 2676313 - RNA, 12 nt, Human
ugaaaugugaau

SEQ ID NO: 2676314 - RNA, 20 nt, Human
ugaaaugugaauuuuuauug

SEQ ID NO: 2676315 - RNA, 21 nt, Human
ugaaaugugaauuuuuauugu

SEQ ID NO: 2676316 - RNA, 22 nt, Human
ugaaaugugaauuuuuauuguu

SEQ ID NO: 2676317 - RNA, 13 nt, Human
ugaaauguuacaa

SEQ ID NO: 2676318 - RNA, 20 nt, Human
ugaaauguuacaaaaauaaa

SEQ ID NO: 2676319 - RNA, 22 nt, Human
ugaaauguuacaaaaauaaacu

SEQ ID NO: 2676320 - RNA, 19 nt, Human
ugaaauuacggguaccuga

SEQ ID NO: 2676321 - RNA, 20 nt, Human
ugaaauuacggguaccugaa

SEQ ID NO: 2676322 - RNA, 22 nt, Human
ugaaauuacggguaccugaaga

SEQ ID NO: 2676323 - RNA, 14 nt, Human
ugaaauucuccugg

SEQ ID NO: 2676324 - RNA, 15 nt, Human
ugaaauucuccugga

SEQ ID NO: 2676325 - RNA, 16 nt, Human
ugaaauucuccuggag

SEQ ID NO: 2676326 - RNA, 23 nt, Human
ugaacaagugggccauuagccag

SEQ ID NO: 2676327 - RNA, 14 nt, Human
ugaacaaugaaguu

SEQ ID NO: 2676328 - RNA, 15 nt, Human
ugaacaaugaaguug

SEQ ID NO: 2676329 - RNA, 18 nt, Human
ugaacaaugaaguugaaa

SEQ ID NO: 2676330 - RNA, 23 nt, Human
ugaacaaugaaguugaaaaucau

SEQ ID NO: 2676331 - RNA, 17 nt, Human
ugaacaagcuucaguaa

SEQ ID NO: 2676332 - RNA, 22 nt, Human
ucuuguugcucaaaaaaugagc

SEQ ID NO: 2676333 - RNA, 18 nt, Human
ucuuguugcuguacaaaa

SEQ ID NO: 2676334 - RNA, 21 nt, Human
ucuuguugcucaaaaaaugag

SEQ ID NO: 2676335 - RNA, 11 nt, Human
ucuuguugguu

SEQ ID NO: 2676336 - RNA, 14 nt, Human
ucuuguuucugaaa

SEQ ID NO: 2676337 - RNA, 20 nt, Human
ucuuucaagcagucgugccu

SEQ ID NO: 2676338 - RNA, 21 nt, Human
ucuuucaagcagucgugccug

SEQ ID NO: 2676339 - RNA, 17 nt, Human
ucuuuauuuuguguaaa

SEQ ID NO: 2676340 - RNA, 18 nt, Human
ucuuuauuuuguguaaaa

SEQ ID NO: 2676341 - RNA, 18 nt, Human
ucuugcuucccuaaucua

SEQ ID NO: 2676342 - RNA, 22 nt, Human
ucuugcuucccuaaucuauggu

SEQ ID NO: 2676343 - RNA, 23 nt, Human
ucuugcuucccuaaucuaugguc

SEQ ID NO: 2676344 - RNA, 16 nt, Human
ucuugcaccaaauuau

SEQ ID NO: 2676345 - RNA, 21 nt, Human
ucuugcaccaaauuaucuuga

SEQ ID NO: 2676346 - RNA, 22 nt, Human
ucuugcaccaaauuaucuugau

SEQ ID NO: 2676347 - RNA, 10 nt, Human
ucuuucaugg

SEQ ID NO: 2676348 - RNA, 23 nt, Human
ucuuuccaggcuauguauaaaau

SEQ ID NO: 2676349 - RNA, 21 nt, Human
ucuuuccaguggaucauaaga

SEQ ID NO: 2676350 - RNA, 16 nt, Human
ucuuucaguacuuuuu

SEQ ID NO: 2676351 - RNA, 21 nt, Human
ucuuucaguacuuuuuuaaau

SEQ ID NO: 2676352 - RNA, 23 nt, Human
ucuuucaguacuuuuuuaaauau

SEQ ID NO: 2676353 - RNA, 14 nt, Human
ucuuucagaaagcu

SEQ ID NO: 2676354 - RNA, 18 nt, Human
ucuuucagaaauauaaca

SEQ ID NO: 2676355 - RNA, 23 nt, Human
ucuuucagaaauauaacacauuu

SEQ ID NO: 2676356 - RNA, 11 nt, Human
ucuuucagaaa

SEQ ID NO: 2676357 - RNA, 17 nt, Human
ucuuugauuauuugcau

SEQ ID NO: 2676358 - RNA, 18 nt, Human
ucuuugauuauuugcaug

SEQ ID NO: 2676359 - RNA, 19 nt, Human
ucuuugauuauuugcaugu

SEQ ID NO: 2676360 - RNA, 20 nt, Human
ucuuugauuauuugcauguu

SEQ ID NO: 2676361 - RNA, 16 nt, Human
ucuuugauguguuguu

SEQ ID NO: 2676362 - RNA, 14 nt, Human
ucuuugauguguug

SEQ ID NO: 2676363 - RNA, 13 nt, Human
ucuuugauguguu

SEQ ID NO: 2676364 - RNA, 23 nt, Human
ucuuucaaaggaacauugugucu

SEQ ID NO: 2676365 - RNA, 17 nt, Human
ucuuuggacacucacac

SEQ ID NO: 2676366 - RNA, 13 nt, Human
ugauuagcaaguu

SEQ ID NO: 2676367 - RNA, 18 nt, Human
ugauuagcaaguuacagu

SEQ ID NO: 2676368 - RNA, 22 nt, Human
ugauuauuuaagacuaaaaguu

SEQ ID NO: 2676369 - RNA, 16 nt, Human
ugauuauuuauuauuu

SEQ ID NO: 2676370 - RNA, 12 nt, Human
ugauuauuugca

SEQ ID NO: 2676371 - RNA, 13 nt, Human
ugauuauuugcau

SEQ ID NO: 2676372 - RNA, 14 nt, Human
ugauuauuugcaug

SEQ ID NO: 2676373 - RNA, 15 nt, Human
ugauuauuugcaugu

SEQ ID NO: 2676374 - RNA, 19 nt, Human
ugauuauuugcauguuaug

SEQ ID NO: 2676375 - RNA, 18 nt, Human
ugauuauuuuuuuuuucu

SEQ ID NO: 2676376 - RNA, 21 nt, Human
ugauuauuuuuuuuuucuucu

SEQ ID NO: 2676377 - RNA, 15 nt, Human
ugauugggaaaacau

SEQ ID NO: 2676378 - RNA, 16 nt, Human
ugauugggaaaacauu

SEQ ID NO: 2676379 - RNA, 17 nt, Human
ugauugggaaaacauuu

SEQ ID NO: 2676380 - RNA, 18 nt, Human
ugauugggaaaacauuug

SEQ ID NO: 2676381 - RNA, 20 nt, Human
ugauugggaaaacauuugcu

SEQ ID NO: 2676382 - RNA, 21 nt, Human
ugauugggaaaacauuugcug

SEQ ID NO: 2676383 - RNA, 16 nt, Human
ugauuggaccaggcca

SEQ ID NO: 2676384 - RNA, 17 nt, Human
ugauuggaccaggccau

SEQ ID NO: 2676385 - RNA, 19 nt, Human
ugauugaauaaugccacca

SEQ ID NO: 2676386 - RNA, 19 nt, Human
ugauuguuaauuuacagcu

SEQ ID NO: 2676387 - RNA, 14 nt, Human
ugauucuggcuuua

SEQ ID NO: 2676388 - RNA, 17 nt, Human
ugauucuggcuuuaagc

SEQ ID NO: 2676389 - RNA, 18 nt, Human
ugauucuggcuuuaagcc

SEQ ID NO: 2676390 - RNA, 21 nt, Human
ugauucuggcuuuaagccuuc

SEQ ID NO: 2676391 - RNA, 20 nt, Human
ugaugcugugcuaugaauuu

SEQ ID NO: 2676392 - RNA, 21 nt, Human
ugaugguguagcccucccacu

SEQ ID NO: 2676393 - RNA, 20 nt, Human
ugaugguguggccuguggcu

SEQ ID NO: 2676394 - RNA, 19 nt, Human
ugaugguucuucaccuccu

SEQ ID NO: 2676395 - RNA, 17 nt, Human
ugaugucaauuucugug

SEQ ID NO: 2676396 - RNA, 18 nt, Human
ugaugucagcaguugcug

SEQ ID NO: 2676397 - RNA, 23 nt, Human
ugaugucaauuucuguguugcca

SEQ ID NO: 2676398 - RNA, 18 nt, Human
ugaugucaauuucugugu

SEQ ID NO: 2676399 - RNA, 19 nt, Human
ugaugucaauuucuguguu

SEQ ID NO: 2676400 - RNA, 23 nt, Human
ugaugucagcaguugcugguaaa

SEQ ID NO: 2676401 - RNA, 22 nt, Human
ugaugucagcaguugcugguaa

SEQ ID NO: 2676402 - RNA, 19 nt, Human
ugauguggcccuggcugcc

SEQ ID NO: 2676403 - RNA, 23 nt, Human
ugauguggcccuggcugccggca

SEQ ID NO: 2676404 - RNA, 14 nt, Human
ugauguguuguucu

SEQ ID NO: 2676405 - RNA, 22 nt, Human
ugauguguuguucuuggcaaua

SEQ ID NO: 2676406 - RNA, 20 nt, Human
ugaugcugggaguucuaaca

SEQ ID NO: 2676407 - RNA, 13 nt, Human
ugaugcaugucuu

SEQ ID NO: 2676408 - RNA, 16 nt, Human
ugaugcaugucuuuua

SEQ ID NO: 2676409 - RNA, 14 nt, Human
ugaucauguacuuu

SEQ ID NO: 2676410 - RNA, 15 nt, Human
ugaucauguacuuuu

SEQ ID NO: 2676411 - RNA, 17 nt, Human
ugaucauguacuuuuua

SEQ ID NO: 2676412 - RNA, 19 nt, Human
ugaucauguacuuuuuagu

SEQ ID NO: 2676413 - RNA, 15 nt, Human
ugagaucagccuggg

SEQ ID NO: 2676414 - RNA, 14 nt, Human
ugagaucagccugg

SEQ ID NO: 2676415 - RNA, 15 nt, Human
ugagaucaaaacggu

SEQ ID NO: 2676416 - RNA, 19 nt, Human
ugaccggacuuuucugcaa

SEQ ID NO: 2676417 - RNA, 16 nt, Human
ugaccggacuuuucug

SEQ ID NO: 2676418 - RNA, 19 nt, Human
ugagacuacaagugugugc

SEQ ID NO: 2676419 - RNA, 15 nt, Human
ugagacucagugcag

SEQ ID NO: 2676420 - RNA, 16 nt, Human
ugagacucagugcaga

SEQ ID NO: 2676421 - RNA, 17 nt, Human
ugagacucagugcagau

SEQ ID NO: 2676422 - RNA, 18 nt, Human
ugagacucagugcagaug

SEQ ID NO: 2676423 - RNA, 18 nt, Human
ugagcuggccucucuagc

SEQ ID NO: 2676424 - RNA, 10 nt, Human
ugagcuggcc

SEQ ID NO: 2676425 - RNA, 12 nt, Human
ugagcugccuuc

SEQ ID NO: 2676426 - RNA, 15 nt, Human
ugagcugccuucccu

SEQ ID NO: 2676427 - RNA, 16 nt, Human
ugagcugccuucccua

SEQ ID NO: 2676428 - RNA, 17 nt, Human
ugagcugccuucccuag

SEQ ID NO: 2676429 - RNA, 19 nt, Human
ugagcugccuucccuagcu

SEQ ID NO: 2676430 - RNA, 14 nt, Human
ugagccugagcaga

SEQ ID NO: 2676431 - RNA, 13 nt, Human
ugagccugcaggg

SEQ ID NO: 2676432 - RNA, 15 nt, Human
ugagccugcagggaa

SEQ ID NO: 2676433 - RNA, 17 nt, Human
ugagccugcagggaagc

SEQ ID NO: 2676434 - RNA, 18 nt, Human
ugagccucugcuccccag

SEQ ID NO: 2676435 - RNA, 17 nt, Human
ugagccucugcucccca

SEQ ID NO: 2676436 - RNA, 16 nt, Human
ugagccucugcucccc

SEQ ID NO: 2676437 - RNA, 14 nt, Human
ugagccucugcucc

SEQ ID NO: 2676438 - RNA, 12 nt, Human
ugagccucugcu

SEQ ID NO: 2676439 - RNA, 12 nt, Human
ugagcccuggcu

SEQ ID NO: 2676440 - RNA, 13 nt, Human
ugagcccuggcug

SEQ ID NO: 2676441 - RNA, 13 nt, Human
ugauaaaaacuca

SEQ ID NO: 2676442 - RNA, 14 nt, Human
ugauaaaaacucag

SEQ ID NO: 2676443 - RNA, 19 nt, Human
ugaguuuuuacaagaugua

SEQ ID NO: 2676444 - RNA, 19 nt, Human
ugaguuugucgcucaugug

SEQ ID NO: 2676445 - RNA, 20 nt, Human
ugaguuugucgcucaugugu

SEQ ID NO: 2676446 - RNA, 16 nt, Human
ugaguuugagcugccu

SEQ ID NO: 2676447 - RNA, 17 nt, Human
ugaguuugagcugccuu

SEQ ID NO: 2676448 - RNA, 18 nt, Human
ugaguuugagcugccuuc

SEQ ID NO: 2676449 - RNA, 19 nt, Human
ugaguuugagcugccuucc

SEQ ID NO: 2676450 - RNA, 21 nt, Human
ugaguuugagcugccuucccu

SEQ ID NO: 2676451 - RNA, 14 nt, Human
ugagucugggcagc

SEQ ID NO: 2676452 - RNA, 21 nt, Human
ugagucugggcagcugucccu

SEQ ID NO: 2676453 - RNA, 21 nt, Human
ugagucuguacuaaacaguaa

SEQ ID NO: 2676454 - RNA, 16 nt, Human
ugagucuguucuggua

SEQ ID NO: 2676455 - RNA, 14 nt, Human
ugagucuguucugg

SEQ ID NO: 2676456 - RNA, 17 nt, Human
ugagucuguucugguaa

SEQ ID NO: 2676457 - RNA, 15 nt, Human
ugagucuguugugug

SEQ ID NO: 2676458 - RNA, 19 nt, Human
ugaguccagaaguuugaga

SEQ ID NO: 2676459 - RNA, 13 nt, Human
ugaguccagaagu

SEQ ID NO: 2676460 - RNA, 21 nt, Human
ugaggugggaggaucucuuga

SEQ ID NO: 2676461 - RNA, 17 nt, Human
ugaguccauucucccag

SEQ ID NO: 2676462 - RNA, 19 nt, Human
ugaguccauucucccaggu

SEQ ID NO: 2676463 - RNA, 20 nt, Human
ugaguccauucucccaggua

SEQ ID NO: 2676464 - RNA, 22 nt, Human
ugaguccauucucccagguacc

SEQ ID NO: 2676465 - RNA, 17 nt, Human
ugagggagaacaagacc

SEQ ID NO: 2676466 - RNA, 22 nt, Human
ugagggacgucagacuuggcuc

SEQ ID NO: 2676467 - RNA, 13 nt, Human
ugaggugggagga

SEQ ID NO: 2676468 - RNA, 12 nt, Human
ugaggugggagg

SEQ ID NO: 2676469 - RNA, 14 nt, Human
ugaggcaguuugag

SEQ ID NO: 2676470 - RNA, 21 nt, Human
ugagcuggccucucuagcaca

SEQ ID NO: 2676471 - RNA, 15 nt, Human
ugcgcaucuugccuc

SEQ ID NO: 2676472 - RNA, 20 nt, Human
ugcgcaucuugccuccaggu

SEQ ID NO: 2676473 - RNA, 22 nt, Human
ugcgcaucuugccuccaggugc

SEQ ID NO: 2676474 - RNA, 11 nt, Human
ugcgccugcug

SEQ ID NO: 2676475 - RNA, 12 nt, Human
ugcgccugcugc

SEQ ID NO: 2676476 - RNA, 17 nt, Human
ugcgcucucuuugcaac

SEQ ID NO: 2676477 - RNA, 23 nt, Human
ugcgcucagggccaugcugaggc

SEQ ID NO: 2676478 - RNA, 13 nt, Human
ugcgcucagggcc

SEQ ID NO: 2676479 - RNA, 14 nt, Human
ugcgcucagggcca

SEQ ID NO: 2676480 - RNA, 15 nt, Human
ugcgcucagggccau

SEQ ID NO: 2676481 - RNA, 19 nt, Human
ugcgcucagggccaugcug

SEQ ID NO: 2676482 - RNA, 21 nt, Human
ugcgcucagggccaugcugag

SEQ ID NO: 2676483 - RNA, 22 nt, Human
ugcgcucagggccaugcugagg

SEQ ID NO: 2676484 - RNA, 13 nt, Human
ugccuugcuguuu

SEQ ID NO: 2676485 - RNA, 20 nt, Human
ugccuugcuguuuguccuga

SEQ ID NO: 2676486 - RNA, 22 nt, Human
ugccuugcuguuuguccugaga

SEQ ID NO: 2676487 - RNA, 19 nt, Human
ugccuuggcucagacaugu

SEQ ID NO: 2676488 - RNA, 17 nt, Human
ugccuuggcucagacau

SEQ ID NO: 2676489 - RNA, 16 nt, Human
ugccuuggcucagaca

SEQ ID NO: 2676490 - RNA, 13 nt, Human
ugccuuggcucag

SEQ ID NO: 2676491 - RNA, 15 nt, Human
ugcuacugcacucca

SEQ ID NO: 2676492 - RNA, 18 nt, Human
ugcuacugcacuccagcc

SEQ ID NO: 2676493 - RNA, 20 nt, Human
ugcuacugcacuccagccug

SEQ ID NO: 2676494 - RNA, 21 nt, Human
ugcuacugcacuccagccugg

SEQ ID NO: 2676495 - RNA, 14 nt, Human
ugcuagaaauuuuc

SEQ ID NO: 2676496 - RNA, 15 nt, Human
ugcuagaaauuuuca

SEQ ID NO: 2676497 - RNA, 13 nt, Human
ugcuacuguugua

SEQ ID NO: 2676498 - RNA, 20 nt, Human
ugcuacuguuguaagaauuc

SEQ ID NO: 2676499 - RNA, 21 nt, Human
ugcuacuguuguaagaauucu

SEQ ID NO: 2676500 - RNA, 23 nt, Human
ugcuacuguuguaagaauucuga

SEQ ID NO: 2676501 - RNA, 12 nt, Human
ugcuaaaaaugu

SEQ ID NO: 2676502 - RNA, 14 nt, Human
ugcgcuugcuuuuc

SEQ ID NO: 2676503 - RNA, 19 nt, Human
ugcucuuguccuagcuugg

SEQ ID NO: 2676504 - RNA, 18 nt, Human
ugcucuuguccuagcuug

SEQ ID NO: 2676505 - RNA, 20 nt, Human
ugcucuacaaugacacacaa

SEQ ID NO: 2676506 - RNA, 19 nt, Human
ugcucggagaagagcgcag

SEQ ID NO: 2676507 - RNA, 20 nt, Human
ugcucggagaagagcgcagu

SEQ ID NO: 2676508 - RNA, 14 nt, Human
ugcucagaagggcu

SEQ ID NO: 2676509 - RNA, 19 nt, Human
ugcucaccgcccaucaggg

SEQ ID NO: 2676510 - RNA, 23 nt, Human
ugcucaccgcccaucaggguucu

SEQ ID NO: 2676511 - RNA, 15 nt, Human
ugcugggggcaacug

SEQ ID NO: 2676512 - RNA, 19 nt, Human
ugcugggggcaacuggcca

SEQ ID NO: 2676513 - RNA, 20 nt, Human
ugcugggggcaacuggccau

SEQ ID NO: 2676514 - RNA, 19 nt, Human
ugcugggcauuuucccaga

SEQ ID NO: 2676515 - RNA, 14 nt, Human
ugcugggcggcugu

SEQ ID NO: 2676516 - RNA, 16 nt, Human
ugcugggcggcugugc

SEQ ID NO: 2676517 - RNA, 18 nt, Human
ugcugggcggcugugcuu

SEQ ID NO: 2676518 - RNA, 17 nt, Human
ugcugggcuugucugua

SEQ ID NO: 2676519 - RNA, 13 nt, Human
ugcugguccgugg

SEQ ID NO: 2676520 - RNA, 16 nt, Human
ugcugguccgugggac

SEQ ID NO: 2676521 - RNA, 19 nt, Human
ugcugguaaaaugaagaau

SEQ ID NO: 2676522 - RNA, 18 nt, Human
ugcugguaaaaugaagaa

SEQ ID NO: 2676523 - RNA, 17 nt, Human
ugcugguaaaaugaaga

SEQ ID NO: 2676524 - RNA, 16 nt, Human
ugcugguaaaaugaag

SEQ ID NO: 2676525 - RNA, 14 nt, Human
ugcugguaaaauga

SEQ ID NO: 2676526 - RNA, 18 nt, Human
ugcugugugucccaggca

SEQ ID NO: 2676527 - RNA, 21 nt, Human
ugcugugugucccaggcaggg

SEQ ID NO: 2676528 - RNA, 23 nt, Human
ugcugugugucccaggcagggag

SEQ ID NO: 2676529 - RNA, 13 nt, Human
ugcuguguauaug

SEQ ID NO: 2676530 - RNA, 19 nt, Human
ugcuguguauaugguauau

SEQ ID NO: 2676531 - RNA, 23 nt, Human
ugcuguguauaugguauauauac

SEQ ID NO: 2676532 - RNA, 19 nt, Human
ugcuggggucaaggcagua

SEQ ID NO: 2676533 - RNA, 12 nt, Human
ugcugcucuuca

SEQ ID NO: 2676534 - RNA, 19 nt, Human
ugcugccucuuucccuagg

SEQ ID NO: 2676535 - RNA, 20 nt, Human
ugcucaguguuuuugugaau

SEQ ID NO: 2676536 - RNA, 19 nt, Human
ugcugcuugaggcaacuca

SEQ ID NO: 2676537 - RNA, 12 nt, Human
ugcugcugcugc

SEQ ID NO: 2676538 - RNA, 12 nt, Human
ugcugcuugagg

SEQ ID NO: 2676539 - RNA, 17 nt, Human
ugcugcugccucuuucc

SEQ ID NO: 2676540 - RNA, 17 nt, Human
ugcaggcuccccugagg

SEQ ID NO: 2676541 - RNA, 15 nt, Human
ugcaggcuccccuga

SEQ ID NO: 2676542 - RNA, 20 nt, Human
ugcaggcccuggccuccccu

SEQ ID NO: 2676543 - RNA, 20 nt, Human
ugauuuaagugucucacuaa

SEQ ID NO: 2676544 - RNA, 18 nt, Human
ugcaggcuccccugagga

SEQ ID NO: 2676545 - RNA, 19 nt, Human
ugcaggcuuugccauugug

SEQ ID NO: 2676546 - RNA, 15 nt, Human
ugcagggccauggcu

SEQ ID NO: 2676547 - RNA, 17 nt, Human
ugcaguucuacucaggc

SEQ ID NO: 2676548 - RNA, 10 nt, Human
ugcagggcca

SEQ ID NO: 2676549 - RNA, 13 nt, Human
ugcauauuauaaa

SEQ ID NO: 2676550 - RNA, 16 nt, Human
ugcauauuauaaagga

SEQ ID NO: 2676551 - RNA, 20 nt, Human
ugcauauuauaaaggauaaa

SEQ ID NO: 2676552 - RNA, 23 nt, Human
ugcauauuauaaaggauaaagaa

SEQ ID NO: 2676553 - RNA, 13 nt, Human
ugcauaguuucuu

SEQ ID NO: 2676554 - RNA, 14 nt, Human
ugcauaguuucuuu

SEQ ID NO: 2676555 - RNA, 15 nt, Human
ugcauaguuucuuua

SEQ ID NO: 2676556 - RNA, 18 nt, Human
ugcauaguuucuuuauuu

SEQ ID NO: 2676557 - RNA, 23 nt, Human
ugcauaguuucuuuauuuugugu

SEQ ID NO: 2676558 - RNA, 10 nt, Human
ugcaguuuau

SEQ ID NO: 2676559 - RNA, 12 nt, Human
ugcaguuuauca

SEQ ID NO: 2676560 - RNA, 16 nt, Human
ugcaguuuaucauuca

SEQ ID NO: 2676561 - RNA, 17 nt, Human
ugcaguuuaucauucaa

SEQ ID NO: 2676562 - RNA, 19 nt, Human
ugcaguuuaucauucaagu

SEQ ID NO: 2676563 - RNA, 13 nt, Human
ugcaugguggcca

SEQ ID NO: 2676564 - RNA, 14 nt, Human
ugcaugguggccag

SEQ ID NO: 2676565 - RNA, 15 nt, Human
ugcaugguggccaga

SEQ ID NO: 2676566 - RNA, 21 nt, Human
ugcaucacuguaucauuuucu

SEQ ID NO: 2676567 - RNA, 13 nt, Human
ugcaucagaaagc

SEQ ID NO: 2676568 - RNA, 19 nt, Human
ugcaucagaaagcuuuauu

SEQ ID NO: 2676569 - RNA, 17 nt, Human
ugccaaaauucauuucu

SEQ ID NO: 2676570 - RNA, 19 nt, Human
ugccaaaauucauuucuaa

SEQ ID NO: 2676571 - RNA, 15 nt, Human
ugccaaagaaagugg

SEQ ID NO: 2676572 - RNA, 23 nt, Human
ugccacgaauuucugugcccucc

SEQ ID NO: 2676573 - RNA, 16 nt, Human
ugccacgaauuucugu

SEQ ID NO: 2676574 - RNA, 15 nt, Human
ugccacgaauuucug

SEQ ID NO: 2676575 - RNA, 22 nt, Human
ugccacguuggagaagcccgug

SEQ ID NO: 2676576 - RNA, 19 nt, Human
ugccacuaaacuacauugu

SEQ ID NO: 2676577 - RNA, 20 nt, Human
ugccaggacaugcaauaaaa

SEQ ID NO: 2676578 - RNA, 23 nt, Human
ugccaggacaugcaauaaaauuu

SEQ ID NO: 2676579 - RNA, 14 nt, Human
ugccaggcauggug

SEQ ID NO: 2676580 - RNA, 10 nt, Human
ugccaggcau

SEQ ID NO: 2676581 - RNA, 14 nt, Human
ugccaggccagccu

SEQ ID NO: 2676582 - RNA, 15 nt, Human
ugccaggccagccuc

SEQ ID NO: 2676583 - RNA, 16 nt, Human
ugccaggccagccucc

SEQ ID NO: 2676584 - RNA, 17 nt, Human
ugccaggccagccuccg

SEQ ID NO: 2676585 - RNA, 18 nt, Human
ugccaggccagccuccga

SEQ ID NO: 2676586 - RNA, 15 nt, Human
ugccccucucaccaa

SEQ ID NO: 2676587 - RNA, 12 nt, Human
ugccccucucac

SEQ ID NO: 2676588 - RNA, 14 nt, Human
ugccccucucacca

SEQ ID NO: 2676589 - RNA, 18 nt, Human
ugcccuggcugcugcccc

SEQ ID NO: 2676590 - RNA, 20 nt, Human
ugcccuggcugcugccccca

SEQ ID NO: 2676591 - RNA, 14 nt, Human
ugcccuggcugcug

SEQ ID NO: 2676592 - RNA, 15 nt, Human
ugcccuggcugcugc

SEQ ID NO: 2676593 - RNA, 16 nt, Human
ugcccuggcugcugcc

SEQ ID NO: 2676594 - RNA, 17 nt, Human
ugcccuggcugcugccc

SEQ ID NO: 2676595 - RNA, 11 nt, Human
ugcccuggcug

SEQ ID NO: 2676596 - RNA, 12 nt, Human
ugcccuggcugc

SEQ ID NO: 2676597 - RNA, 15 nt, Human
ugccucaagaggaau

SEQ ID NO: 2676598 - RNA, 17 nt, Human
ugccucaagaggaauga

SEQ ID NO: 2676599 - RNA, 18 nt, Human
ugccucaagaggaaugaa

SEQ ID NO: 2676600 - RNA, 21 nt, Human
ugccuauaagccaaaauuaag

SEQ ID NO: 2676601 - RNA, 20 nt, Human
ugccuauaagccaaaauuaa

SEQ ID NO: 2676602 - RNA, 17 nt, Human
ugccuauaagccaaaau

SEQ ID NO: 2676603 - RNA, 16 nt, Human
ugccuauaagccaaaa

SEQ ID NO: 2676604 - RNA, 14 nt, Human
ugccccacagucuc

SEQ ID NO: 2676605 - RNA, 19 nt, Human
uggacugagugggaagccc

SEQ ID NO: 2676606 - RNA, 22 nt, Human
uggacugcuaccuuucaaagcu

SEQ ID NO: 2676607 - RNA, 23 nt, Human
uggacugcuaccuuucaaagcuu

SEQ ID NO: 2676608 - RNA, 17 nt, Human
uggacugagugggaagc

SEQ ID NO: 2676609 - RNA, 13 nt, Human
uggagaagcugca

SEQ ID NO: 2676610 - RNA, 14 nt, Human
uggagaagcugcag

SEQ ID NO: 2676611 - RNA, 15 nt, Human
uggagaagcugcagg

SEQ ID NO: 2676612 - RNA, 18 nt, Human
uggagaagcugcaggcuu

SEQ ID NO: 2676613 - RNA, 22 nt, Human
uggagacguuuauaaacagaaa

SEQ ID NO: 2676614 - RNA, 13 nt, Human
uggacacuccagg

SEQ ID NO: 2676615 - RNA, 14 nt, Human
uggacacuccaggg

SEQ ID NO: 2676616 - RNA, 16 nt, Human
uggacacuccagggac

SEQ ID NO: 2676617 - RNA, 18 nt, Human
uggacacuccagggacac

SEQ ID NO: 2676618 - RNA, 19 nt, Human
uggacacuccagggacaca

SEQ ID NO: 2676619 - RNA, 22 nt, Human
uggacacuccagggacacacag

SEQ ID NO: 2676620 - RNA, 23 nt, Human
uggacacuccagggacacacagc

SEQ ID NO: 2676621 - RNA, 24 nt, Human
uggacacuccagggacacacagcc

SEQ ID NO: 2676622 - RNA, 14 nt, Human
uggacauccuccuc

SEQ ID NO: 2676623 - RNA, 12 nt, Human
ugcuguugcuua

SEQ ID NO: 2676624 - RNA, 15 nt, Human
ugcuguuccuuacuu

SEQ ID NO: 2676625 - RNA, 23 nt, Human
ugcuguuguccaacuauuuauug

SEQ ID NO: 2676626 - RNA, 18 nt, Human
ugcuguuguccaacuauu

SEQ ID NO: 2676627 - RNA, 14 nt, Human
ugcuguuguucucg

SEQ ID NO: 2676628 - RNA, 20 nt, Human
uggcaaaacucuacuuaauc

SEQ ID NO: 2676629 - RNA, 16 nt, Human
uggcaaaaaggcagga

SEQ ID NO: 2676630 - RNA, 12 nt, Human
uggcaaaaaggc

SEQ ID NO: 2676631 - RNA, 17 nt, Human
uggcaaacgcuaaagag

SEQ ID NO: 2676632 - RNA, 24 nt, Human
uggcaaacgcuaaagagcccuugc

SEQ ID NO: 2676633 - RNA, 21 nt, Human
uggcaauaaauuuugaaaagu

SEQ ID NO: 2676634 - RNA, 20 nt, Human
uggcaauaaauuuugaaaag

SEQ ID NO: 2676635 - RNA, 18 nt, Human
uggcaauaaauuuugaaa

SEQ ID NO: 2676636 - RNA, 17 nt, Human
uggcaauaaauuuugaa

SEQ ID NO: 2676637 - RNA, 13 nt, Human
uggaggaggaagg

SEQ ID NO: 2676638 - RNA, 14 nt, Human
uggaggaggaaggc

SEQ ID NO: 2676639 - RNA, 15 nt, Human
uggaggaggaaggca

SEQ ID NO: 2676640 - RNA, 16 nt, Human
uggaggaggaaggcaa

SEQ ID NO: 2676641 - RNA, 17 nt, Human
uggaggaggaaggcaag

SEQ ID NO: 2676642 - RNA, 21 nt, Human
uggaggaggaaggcaagaggg

SEQ ID NO: 2676643 - RNA, 21 nt, Human
uggaggauccccuccaagccu

SEQ ID NO: 2676644 - RNA, 17 nt, Human
uggaguuuuaacuguaa

SEQ ID NO: 2676645 - RNA, 14 nt, Human
uggccuccccugcc

SEQ ID NO: 2676646 - RNA, 15 nt, Human
uggccuccccugcca

SEQ ID NO: 2676647 - RNA, 17 nt, Human
uggccuccccugccacc

SEQ ID NO: 2676648 - RNA, 18 nt, Human
uggccucauguggcugga

SEQ ID NO: 2676649 - RNA, 19 nt, Human
uggccucauguggcuggaa

SEQ ID NO: 2676650 - RNA, 20 nt, Human
uggccucauguggcuggaag

SEQ ID NO: 2676651 - RNA, 21 nt, Human
uggccucauguggcuggaaga

SEQ ID NO: 2676652 - RNA, 13 nt, Human
uggccucaugugg

SEQ ID NO: 2676653 - RNA, 15 nt, Human
uggccucauguggcu

SEQ ID NO: 2676654 - RNA, 17 nt, Human
uggccucauguggcugg

SEQ ID NO: 2676655 - RNA, 19 nt, Human
uggccuccccugccaccag

SEQ ID NO: 2676656 - RNA, 20 nt, Human
uggccuccccugccaccagg

SEQ ID NO: 2676657 - RNA, 21 nt, Human
uggccuccccugccaccaggc

SEQ ID NO: 2676658 - RNA, 23 nt, Human
uggccuccccugccaccaggcca

SEQ ID NO: 2676659 - RNA, 13 nt, Human
uggcgcuuagaga

SEQ ID NO: 2676660 - RNA, 20 nt, Human
uggcgcuuagagaggacaau

SEQ ID NO: 2676661 - RNA, 14 nt, Human
uggcggagaguuuu

SEQ ID NO: 2676662 - RNA, 14 nt, Human
uggcggccccagca

SEQ ID NO: 2676663 - RNA, 12 nt, Human
uggcugcugccc

SEQ ID NO: 2676664 - RNA, 15 nt, Human
uggccccguuucugg

SEQ ID NO: 2676665 - RNA, 16 nt, Human
uggccccguuucuggu

SEQ ID NO: 2676666 - RNA, 15 nt, Human
uggccccuacuuugu

SEQ ID NO: 2676667 - RNA, 23 nt, Human
uggccccuacuuuguggcaaucu

SEQ ID NO: 2676668 - RNA, 19 nt, Human
uggccaggcugccuggccu

SEQ ID NO: 2676669 - RNA, 15 nt, Human
uggccuauccgcugc

SEQ ID NO: 2676670 - RNA, 16 nt, Human
uggccuauccgcugcc

SEQ ID NO: 2676671 - RNA, 18 nt, Human
uggccuauccgcugccag

SEQ ID NO: 2676672 - RNA, 19 nt, Human
uggccuauccgcugccagc

SEQ ID NO: 2676673 - RNA, 21 nt, Human
uggccuauccgcugccagccu

SEQ ID NO: 2676674 - RNA, 11 nt, Human
uggccaggagc

SEQ ID NO: 2676675 - RNA, 18 nt, Human
ugguauuuuuuuaaauca

SEQ ID NO: 2676676 - RNA, 19 nt, Human
ugggucacacacggaggca

SEQ ID NO: 2676677 - RNA, 19 nt, Human
ugguccccaacaaugugag

SEQ ID NO: 2676678 - RNA, 17 nt, Human
ugguccccguuccaccc

SEQ ID NO: 2676679 - RNA, 17 nt, Human
ugguccuaguaagaaga

SEQ ID NO: 2676680 - RNA, 20 nt, Human
ugguccgugggacggugccc

SEQ ID NO: 2676681 - RNA, 22 nt, Human
ugguccuagaggcccuuugcug

SEQ ID NO: 2676682 - RNA, 21 nt, Human
ugguccuagaggcccuuugcu

SEQ ID NO: 2676683 - RNA, 17 nt, Human
ugguccuagaggcccuu

SEQ ID NO: 2676684 - RNA, 22 nt, Human
uggucccuccagaaccaccccg

SEQ ID NO: 2676685 - RNA, 14 nt, Human
uggugaugcagucu

SEQ ID NO: 2676686 - RNA, 13 nt, Human
uggucgcuccugc

SEQ ID NO: 2676687 - RNA, 15 nt, Human
uggucgcuccugccc

SEQ ID NO: 2676688 - RNA, 23 nt, Human
uggucgagaaagaggcaccagga

SEQ ID NO: 2676689 - RNA, 16 nt, Human
ugguccuguccccgca

SEQ ID NO: 2676690 - RNA, 14 nt, Human
ugggcagagcuggc

SEQ ID NO: 2676691 - RNA, 12 nt, Human
ugggcagagcug

SEQ ID NO: 2676692 - RNA, 21 nt, Human
ugggcccugagucugggcagc

SEQ ID NO: 2676693 - RNA, 22 nt, Human
ugggcccugagucugggcagcu

SEQ ID NO: 2676694 - RNA, 12 nt, Human
ugggccccuggc

SEQ ID NO: 2676695 - RNA, 15 nt, Human
ugggccccuggcacu

SEQ ID NO: 2676696 - RNA, 15 nt, Human
uggcugcugccccca

SEQ ID NO: 2676697 - RNA, 16 nt, Human
uggcugcugcccccac

SEQ ID NO: 2676698 - RNA, 20 nt, Human
uggcugcugcccccaccccg

SEQ ID NO: 2676699 - RNA, 14 nt, Human
uggcugcuguugcu

SEQ ID NO: 2676700 - RNA, 18 nt, Human
uggggauccccgccuggc

SEQ ID NO: 2676701 - RNA, 21 nt, Human
uggggauccccgccuggccag

SEQ ID NO: 2676702 - RNA, 22 nt, Human
uggggauccccgccuggccagg

SEQ ID NO: 2676703 - RNA, 23 nt, Human
uggggauccccgccuggccagga

SEQ ID NO: 2676704 - RNA, 12 nt, Human
ugggcuucugug

SEQ ID NO: 2676705 - RNA, 16 nt, Human
ugggcuucugugccca

SEQ ID NO: 2676706 - RNA, 14 nt, Human
ugggcuugaccagg

SEQ ID NO: 2676707 - RNA, 22 nt, Human
ugggcuugaccaggcuuggccu

SEQ ID NO: 2676708 - RNA, 13 nt, Human
uggggggguggcc

SEQ ID NO: 2676709 - RNA, 14 nt, Human
uggggggguggccg

SEQ ID NO: 2676710 - RNA, 23 nt, Human
uggggggguggccgcugaguggc

SEQ ID NO: 2676711 - RNA, 18 nt, Human
uggggguggaggcuuccu

SEQ ID NO: 2676712 - RNA, 20 nt, Human
ugggggacagaaagagacuc

SEQ ID NO: 2676713 - RNA, 20 nt, Human
ugggggaggggagacuuuga

SEQ ID NO: 2676714 - RNA, 19 nt, Human
uggggguggaggcuuccug

SEQ ID NO: 2676715 - RNA, 15 nt, Human
uuaauauauguauua

SEQ ID NO: 2676716 - RNA, 19 nt, Human
uuaauauauguauuauuua

SEQ ID NO: 2676717 - RNA, 23 nt, Human
uuaauauaaaguaguccugugaa

SEQ ID NO: 2676718 - RNA, 16 nt, Human
uuaagccuucaaaacu

SEQ ID NO: 2676719 - RNA, 21 nt, Human
uuaagcuguuccuguucagua

SEQ ID NO: 2676720 - RNA, 19 nt, Human
uuaagcugcagagauuucu

SEQ ID NO: 2676721 - RNA, 23 nt, Human
uuaagcugcagagauuucucauu

SEQ ID NO: 2676722 - RNA, 17 nt, Human
uuaagcuguggucaagg

SEQ ID NO: 2676723 - RNA, 19 nt, Human
uuaagcugcaaaucugaug

SEQ ID NO: 2676724 - RNA, 17 nt, Human
uuaagcuguuacugucu

SEQ ID NO: 2676725 - RNA, 14 nt, Human
uuaauguuuucaaa

SEQ ID NO: 2676726 - RNA, 15 nt, Human
uuaauguuuucaaaa

SEQ ID NO: 2676727 - RNA, 16 nt, Human
uuaauguuuucaaaag

SEQ ID NO: 2676728 - RNA, 16 nt, Human
uuacaagggaagauuu

SEQ ID NO: 2676729 - RNA, 18 nt, Human
uuacaagggaagauuuau

SEQ ID NO: 2676730 - RNA, 20 nt, Human
uuacaagggaagauuuaugu

SEQ ID NO: 2676731 - RNA, 20 nt, Human
uuacaagggcauaaaguaaa

SEQ ID NO: 2676732 - RNA, 15 nt, Human
uuaaugcacuuucua

SEQ ID NO: 2676733 - RNA, 11 nt, Human
uuaaugcacuu

SEQ ID NO: 2676734 - RNA, 12 nt, Human
uuaaugcacuuu

SEQ ID NO: 2676735 - RNA, 13 nt, Human
uuaaugcacuuuc

SEQ ID NO: 2676736 - RNA, 14 nt, Human
uuaaugcacuuucu

SEQ ID NO: 2676737 - RNA, 16 nt, Human
uuaacuuaauaaucaa

SEQ ID NO: 2676738 - RNA, 14 nt, Human
uuaacuuaauaauc

SEQ ID NO: 2676739 - RNA, 17 nt, Human
uuaacuuaauaaucaag

SEQ ID NO: 2676740 - RNA, 17 nt, Human
uuaaccacuucagcuga

SEQ ID NO: 2676741 - RNA, 21 nt, Human
uuaaccgguaagaguuucagu

SEQ ID NO: 2676742 - RNA, 14 nt, Human
uuaaccugcauaaa

SEQ ID NO: 2676743 - RNA, 21 nt, Human
uuaaccuuacuaauuauacua

SEQ ID NO: 2676744 - RNA, 15 nt, Human
uuaaccuuguauaaa

SEQ ID NO: 2676745 - RNA, 21 nt, Human
uuaaccuuguauaaauuauuc

SEQ ID NO: 2676746 - RNA, 12 nt, Human
uuaaagacagag

SEQ ID NO: 2676747 - RNA, 12 nt, Human
uuaaaauagaaa

SEQ ID NO: 2676748 - RNA, 20 nt, Human
uuaaagaauaugacuuuuua

SEQ ID NO: 2676749 - RNA, 18 nt, Human
uuaaagacaggagacaaa

SEQ ID NO: 2676750 - RNA, 20 nt, Human
uuaaagacccuccuauucua

SEQ ID NO: 2676751 - RNA, 13 nt, Human
uuaaauguuauua

SEQ ID NO: 2676752 - RNA, 12 nt, Human
uuaaauuacaau

SEQ ID NO: 2676753 - RNA, 15 nt, Human
uuaaauuacaauuuu

SEQ ID NO: 2676754 - RNA, 16 nt, Human
uuaaauuacaauuuua

SEQ ID NO: 2676755 - RNA, 17 nt, Human
uuaaauuacaauuuuau

SEQ ID NO: 2676756 - RNA, 18 nt, Human
uuaaauuacaauuuuauc

SEQ ID NO: 2676757 - RNA, 12 nt, Human
uuaaaagaauga

SEQ ID NO: 2676758 - RNA, 13 nt, Human
uuaaaagaaugac

SEQ ID NO: 2676759 - RNA, 14 nt, Human
uuaaaagaaugacu

SEQ ID NO: 2676760 - RNA, 15 nt, Human
uuaaaagaaugacua

SEQ ID NO: 2676761 - RNA, 14 nt, Human
uuaaagaaguauuu

SEQ ID NO: 2676762 - RNA, 19 nt, Human
uuaaagaaguauuuuuaga

SEQ ID NO: 2676763 - RNA, 20 nt, Human
uuaaacugucgugucauacu

SEQ ID NO: 2676764 - RNA, 17 nt, Human
uuaaaauagaaauuuug

SEQ ID NO: 2676765 - RNA, 20 nt, Human
uuaaaauagaaauuuuguaa

SEQ ID NO: 2676766 - RNA, 21 nt, Human
uuaaaauagaaauuuuguaag

SEQ ID NO: 2676767 - RNA, 15 nt, Human
uguuuuuuuguuugu

SEQ ID NO: 2676768 - RNA, 18 nt, Human
uguuuuuuuguuauuaaa

SEQ ID NO: 2676769 - RNA, 16 nt, Human
uguuuuuuuguuauua

SEQ ID NO: 2676770 - RNA, 18 nt, Human
uguuuuuuguuuuucugc

SEQ ID NO: 2676771 - RNA, 23 nt, Human
uguuuagaauugaagguuuuuga

SEQ ID NO: 2676772 - RNA, 17 nt, Human
uguuuagaauugaaggu

SEQ ID NO: 2676773 - RNA, 15 nt, Human
uguuuagaauugaag

SEQ ID NO: 2676774 - RNA, 14 nt, Human
uguuuagaauugaa

SEQ ID NO: 2676775 - RNA, 12 nt, Human
uguuuagaauug

SEQ ID NO: 2676776 - RNA, 14 nt, Human
uggugccaucccca

SEQ ID NO: 2676777 - RNA, 16 nt, Human
uggugccauccccagg

SEQ ID NO: 2676778 - RNA, 21 nt, Human
uggugccauccccagggggca

SEQ ID NO: 2676779 - RNA, 22 nt, Human
uguuucagguucaguauuaugu

SEQ ID NO: 2676780 - RNA, 15 nt, Human
uguuugucccuucua

SEQ ID NO: 2676781 - RNA, 20 nt, Human
uguuuccagacuuccuugag

SEQ ID NO: 2676782 - RNA, 23 nt, Human
uguuuccagacuuccuugagaca

SEQ ID NO: 2676783 - RNA, 15 nt, Human
uguuucguggggagg

SEQ ID NO: 2676784 - RNA, 23 nt, Human
uguuucgcggguaacugggguug

SEQ ID NO: 2676785 - RNA, 12 nt, Human
uguuugguaaau

SEQ ID NO: 2676786 - RNA, 14 nt, Human
uguuugguaaaugu

SEQ ID NO: 2676787 - RNA, 15 nt, Human
uguuugguaaauguu

SEQ ID NO: 2676788 - RNA, 20 nt, Human
uuaggcaaggcuaugugauu

SEQ ID NO: 2676789 - RNA, 16 nt, Human
uuaggauuuucacauu

SEQ ID NO: 2676790 - RNA, 18 nt, Human
uuagcuggccacauggcg

SEQ ID NO: 2676791 - RNA, 20 nt, Human
uuaggaaguguuuauguugu

SEQ ID NO: 2676792 - RNA, 16 nt, Human
uuaggccuuccucucu

SEQ ID NO: 2676793 - RNA, 15 nt, Human
uuaggcuuaaaaacu

SEQ ID NO: 2676794 - RNA, 15 nt, Human
uuaguguuauaugaa

SEQ ID NO: 2676795 - RNA, 14 nt, Human
uuaguguuauauga

SEQ ID NO: 2676796 - RNA, 16 nt, Human
uuaguguuuuuuuauu

SEQ ID NO: 2676797 - RNA, 20 nt, Human
uuaguauuuauuuauguacu

SEQ ID NO: 2676798 - RNA, 19 nt, Human
uuaguauuuauuuauguac

SEQ ID NO: 2676799 - RNA, 16 nt, Human
uuagaucauaguuuua

SEQ ID NO: 2676800 - RNA, 15 nt, Human
uuagaucauaguuuu

SEQ ID NO: 2676801 - RNA, 17 nt, Human
uuagaucauaguuuuau

SEQ ID NO: 2676802 - RNA, 16 nt, Human
uuagcugaagaauuga

SEQ ID NO: 2676803 - RNA, 14 nt, Human
uuagcuccuguggc

SEQ ID NO: 2676804 - RNA, 13 nt, Human
uuagcuccugugg

SEQ ID NO: 2676805 - RNA, 21 nt, Human
uuagacucaucaaucaaauaa

SEQ ID NO: 2676806 - RNA, 13 nt, Human
uuacuuugcugag

SEQ ID NO: 2676807 - RNA, 20 nt, Human
uuagacuugaaaagagacag

SEQ ID NO: 2676808 - RNA, 19 nt, Human
uuagacuugaaaagagaca

SEQ ID NO: 2676809 - RNA, 13 nt, Human
uuagacuugaaaa

SEQ ID NO: 2676810 - RNA, 12 nt, Human
uuagacuugaaa

SEQ ID NO: 2676811 - RNA, 17 nt, Human
uuagaccccauacaagu

SEQ ID NO: 2676812 - RNA, 13 nt, Human
uuagacccugggu

SEQ ID NO: 2676813 - RNA, 20 nt, Human
uuacuuuacugccugaauaa

SEQ ID NO: 2676814 - RNA, 15 nt, Human
uuacuuguuuuggau

SEQ ID NO: 2676815 - RNA, 23 nt, Human
uuacuuguugccuauaagccaaa

SEQ ID NO: 2676816 - RNA, 17 nt, Human
uuacuuguugccuauaa

SEQ ID NO: 2676817 - RNA, 13 nt, Human
uuacuuuguaaau

SEQ ID NO: 2676818 - RNA, 11 nt, Human
uuacuuuguaa

SEQ ID NO: 2676819 - RNA, 22 nt, Human
uuacuuuguaaauucugauuuc

SEQ ID NO: 2676820 - RNA, 20 nt, Human
uuacuuuguaaauucugauu

SEQ ID NO: 2676821 - RNA, 19 nt, Human
uuacuuuguaaauucugau

SEQ ID NO: 2676822 - RNA, 18 nt, Human
uuacuuuguaaauucuga

SEQ ID NO: 2676823 - RNA, 17 nt, Human
uuacuuuguaaauucug

SEQ ID NO: 2676824 - RNA, 14 nt, Human
uuacuuuguaaauu

SEQ ID NO: 2676825 - RNA, 18 nt, Human
uuacuugcuuuaccuuuu

SEQ ID NO: 2676826 - RNA, 13 nt, Human
uuacuucuucucu

SEQ ID NO: 2676827 - RNA, 23 nt, Human
uuacuuuguaaauucugauuucu

SEQ ID NO: 2676828 - RNA, 17 nt, Human
uuacuaauuauacuacu

SEQ ID NO: 2676829 - RNA, 13 nt, Human
uuacaauuuuauc

SEQ ID NO: 2676830 - RNA, 18 nt, Human
uuacaauuuuaucuguuu

SEQ ID NO: 2676831 - RNA, 14 nt, Human
uuacuguguuuuau

SEQ ID NO: 2676832 - RNA, 20 nt, Human
uuacuguguuuuauaaaaua

SEQ ID NO: 2676833 - RNA, 21 nt, Human
uuacuuaaaccgccaaggcug

SEQ ID NO: 2676834 - RNA, 17 nt, Human
uuacuguuuauuacuuc

SEQ ID NO: 2676835 - RNA, 23 nt, Human
uuacuguuuauuacuuccaugaa

SEQ ID NO: 2676836 - RNA, 14 nt, Human
uuacuguguaaacu

SEQ ID NO: 2676837 - RNA, 16 nt, Human
uuacuguguaaacuca

SEQ ID NO: 2676838 - RNA, 14 nt, Human
uuacuuccaugaau

SEQ ID NO: 2676839 - RNA, 15 nt, Human
uuacuuccaugaauu

SEQ ID NO: 2676840 - RNA, 18 nt, Human
uuacuuagguguggggga

SEQ ID NO: 2676841 - RNA, 14 nt, Human
uuccuauauccugu

SEQ ID NO: 2676842 - RNA, 13 nt, Human
uuccucauuagca

SEQ ID NO: 2676843 - RNA, 17 nt, Human
uuccuccauuugagaaa

SEQ ID NO: 2676844 - RNA, 14 nt, Human
uuccucaaauuuuu

SEQ ID NO: 2676845 - RNA, 20 nt, Human
uuccucaaauuuuuugacuu

SEQ ID NO: 2676846 - RNA, 22 nt, Human
uuccucaaauuuuuugacuuuu

SEQ ID NO: 2676847 - RNA, 19 nt, Human
uuccucaaaauaaagaagu

SEQ ID NO: 2676848 - RNA, 20 nt, Human
uuccucaaaauaaagaagua

SEQ ID NO: 2676849 - RNA, 21 nt, Human
uuccucaaaauaaagaaguau

SEQ ID NO: 2676850 - RNA, 18 nt, Human
uuccucaaagcuuggauu

SEQ ID NO: 2676851 - RNA, 14 nt, Human
uucccuugaaacuu

SEQ ID NO: 2676852 - RNA, 22 nt, Human
uucccuugaaacuuugggaaaa

SEQ ID NO: 2676853 - RNA, 16 nt, Human
uucccugcuuccagga

SEQ ID NO: 2676854 - RNA, 14 nt, Human
uucccugcuuccag

SEQ ID NO: 2676855 - RNA, 15 nt, Human
uucccugcuuccagg

SEQ ID NO: 2676856 - RNA, 13 nt, Human
uucccugcuucca

SEQ ID NO: 2676857 - RNA, 18 nt, Human
uucgggcgucugugugcg

SEQ ID NO: 2676858 - RNA, 20 nt, Human
uucgggaggucgaggcagga

SEQ ID NO: 2676859 - RNA, 24 nt, Human
uuccuugagacacggagcccagcc

SEQ ID NO: 2676860 - RNA, 23 nt, Human
uuccuugguccuaguaagaagac

SEQ ID NO: 2676861 - RNA, 17 nt, Human
uucguucuguacuguua

SEQ ID NO: 2676862 - RNA, 14 nt, Human
uucuaaaaacuucu

SEQ ID NO: 2676863 - RNA, 17 nt, Human
uuccugccaggcauggu

SEQ ID NO: 2676864 - RNA, 22 nt, Human
uuccuugagacacggagcccag

SEQ ID NO: 2676865 - RNA, 20 nt, Human
uuccuugaguugauucagcu

SEQ ID NO: 2676866 - RNA, 12 nt, Human
uuccccaugaca

SEQ ID NO: 2676867 - RNA, 21 nt, Human
uuccccaugcuuccuugccug

SEQ ID NO: 2676868 - RNA, 19 nt, Human
uuccccagcuuugcugccu

SEQ ID NO: 2676869 - RNA, 23 nt, Human
uucccccaccgguccagcuggcc

SEQ ID NO: 2676870 - RNA, 22 nt, Human
uucccccaccgguccagcuggc

SEQ ID NO: 2676871 - RNA, 18 nt, Human
uucccccaccgguccagc

SEQ ID NO: 2676872 - RNA, 14 nt, Human
uuccagauguggau

SEQ ID NO: 2676873 - RNA, 19 nt, Human
uuccagauggucauccaga

SEQ ID NO: 2676874 - RNA, 23 nt, Human
uuccagauggucauccagacuca

SEQ ID NO: 2676875 - RNA, 13 nt, Human
uuccauugcuuau

SEQ ID NO: 2676876 - RNA, 14 nt, Human
uuccauuccacaca

SEQ ID NO: 2676877 - RNA, 12 nt, Human
uucccaucugca

SEQ ID NO: 2676878 - RNA, 14 nt, Human
uucccaucugcacc

SEQ ID NO: 2676879 - RNA, 17 nt, Human
uucccauguagcccccu

SEQ ID NO: 2676880 - RNA, 23 nt, Human
uucccauggggagggauucuggu

SEQ ID NO: 2676881 - RNA, 14 nt, Human
uucccauggggagg

SEQ ID NO: 2676882 - RNA, 15 nt, Human
uucccauggggaggg

SEQ ID NO: 2676883 - RNA, 16 nt, Human
uuccagaucuuucaga

SEQ ID NO: 2676884 - RNA, 20 nt, Human
uuccagaucuuucagaaaua

SEQ ID NO: 2676885 - RNA, 17 nt, Human
uuccacuacaccuggcu

SEQ ID NO: 2676886 - RNA, 18 nt, Human
uuccacuacaccuggcug

SEQ ID NO: 2676887 - RNA, 19 nt, Human
uuccacuacaccuggcuga

SEQ ID NO: 2676888 - RNA, 22 nt, Human
uuccacuacaccuggcugaggu

SEQ ID NO: 2676889 - RNA, 16 nt, Human
uuccacuccauugucg

SEQ ID NO: 2676890 - RNA, 19 nt, Human
uuccacucguguguuucua

SEQ ID NO: 2676891 - RNA, 21 nt, Human
uuccaaauguaauaaacuuua

SEQ ID NO: 2676892 - RNA, 15 nt, Human
uuccacuacaccugg

SEQ ID NO: 2676893 - RNA, 16 nt, Human
uuccacuacaccuggc

SEQ ID NO: 2676894 - RNA, 20 nt, Human
uuccaaaccuuaucuccaca

SEQ ID NO: 2676895 - RNA, 15 nt, Human
uuccaaaccuuaucu

SEQ ID NO: 2676896 - RNA, 14 nt, Human
uuccaaauaaauaa

SEQ ID NO: 2676897 - RNA, 16 nt, Human
uuccaaauaaauaauu

SEQ ID NO: 2676898 - RNA, 15 nt, Human
uucaugaaaauacca

SEQ ID NO: 2676899 - RNA, 17 nt, Human
uucaugaaaauaccauu

SEQ ID NO: 2676900 - RNA, 15 nt, Human
uucaugcacuuaaag

SEQ ID NO: 2676901 - RNA, 17 nt, Human
uucaugcacuuaaagaa

SEQ ID NO: 2676902 - RNA, 19 nt, Human
uucaugcacuuaaagaagu

SEQ ID NO: 2676903 - RNA, 23 nt, Human
uucaugcacuuaaagaaguauuu

SEQ ID NO: 2676904 - RNA, 15 nt, Human
uucauuucuaauuaa

SEQ ID NO: 2676905 - RNA, 16 nt, Human
uucaaaguuuuguugu

SEQ ID NO: 2676906 - RNA, 20 nt, Human
uucaaaguuuuguuguacuu

SEQ ID NO: 2676907 - RNA, 21 nt, Human
uucaaaguuuuguuguacuua

SEQ ID NO: 2676908 - RNA, 16 nt, Human
uuauuuuacacagaaa

SEQ ID NO: 2676909 - RNA, 17 nt, Human
uuauuuuacacagaaac

SEQ ID NO: 2676910 - RNA, 20 nt, Human
uuauuuuacagcucauuaaa

SEQ ID NO: 2676911 - RNA, 12 nt, Human
uucaaagccuuc

SEQ ID NO: 2676912 - RNA, 17 nt, Human
uucaaagccuucucccu

SEQ ID NO: 2676913 - RNA, 19 nt, Human
uuauuuuacacagaaacac

SEQ ID NO: 2676914 - RNA, 14 nt, Human
uucaaaggaacauu

SEQ ID NO: 2676915 - RNA, 16 nt, Human
uucaaaggaacauugu

SEQ ID NO: 2676916 - RNA, 14 nt, Human
uuauuguauuuaug

SEQ ID NO: 2676917 - RNA, 18 nt, Human
uucacucuaagucaugua

SEQ ID NO: 2676918 - RNA, 19 nt, Human
uucacucuaagucauguau

SEQ ID NO: 2676919 - RNA, 20 nt, Human
uucagacaucugagguuuua

SEQ ID NO: 2676920 - RNA, 13 nt, Human
uucacuccagccu

SEQ ID NO: 2676921 - RNA, 16 nt, Human
uucacucacucuaaag

SEQ ID NO: 2676922 - RNA, 18 nt, Human
uucacggaagagccuugc

SEQ ID NO: 2676923 - RNA, 14 nt, Human
uucaccuugaagaa

SEQ ID NO: 2676924 - RNA, 14 nt, Human
uucaauugucacuu

SEQ ID NO: 2676925 - RNA, 13 nt, Human
uuauuacuguuua

SEQ ID NO: 2676926 - RNA, 18 nt, Human
uuauuaaugcacuuucua

SEQ ID NO: 2676927 - RNA, 13 nt, Human
uuauuaaugcacu

SEQ ID NO: 2676928 - RNA, 17 nt, Human
uuauuaaugcacuuucu

SEQ ID NO: 2676929 - RNA, 12 nt, Human
uuauuaauguuu

SEQ ID NO: 2676930 - RNA, 13 nt, Human
uuauuaauguuuu

SEQ ID NO: 2676931 - RNA, 16 nt, Human
uuauuaauguuuucaa

SEQ ID NO: 2676932 - RNA, 17 nt, Human
uuauuaauguuuucaaa

SEQ ID NO: 2676933 - RNA, 13 nt, Human
uuauggaaaacug

SEQ ID NO: 2676934 - RNA, 16 nt, Human
uuauuaaacaaauaau

SEQ ID NO: 2676935 - RNA, 11 nt, Human
uuauuaaugca

SEQ ID NO: 2676936 - RNA, 18 nt, Human
uuauuaaucacuguguau

SEQ ID NO: 2676937 - RNA, 16 nt, Human
uuauuaaucacugugu

SEQ ID NO: 2676938 - RNA, 14 nt, Human
uuauuaaucacugu

SEQ ID NO: 2676939 - RNA, 11 nt, Human
uuauugacacu

SEQ ID NO: 2676940 - RNA, 12 nt, Human
uuauugacacug

SEQ ID NO: 2676941 - RNA, 13 nt, Human
uuauugacacuga

SEQ ID NO: 2676942 - RNA, 14 nt, Human
uuauugacacugaa

SEQ ID NO: 2676943 - RNA, 15 nt, Human
uuauugacacugaac

SEQ ID NO: 2676944 - RNA, 17 nt, Human
uuauugacacugaacuu

SEQ ID NO: 2676945 - RNA, 14 nt, Human
uuauugacucuuga

SEQ ID NO: 2676946 - RNA, 22 nt, Human
uuauugacucuggguccuuccu

SEQ ID NO: 2676947 - RNA, 16 nt, Human
uuauugacucuggguc

SEQ ID NO: 2676948 - RNA, 13 nt, Human
uuauugaccauuu

SEQ ID NO: 2676949 - RNA, 22 nt, Human
uuauugaccauuuuuuaauuua

SEQ ID NO: 2676950 - RNA, 14 nt, Human
uuauugcaguuuau

SEQ ID NO: 2676951 - RNA, 16 nt, Human
uuauugcaguuuauca

SEQ ID NO: 2676952 - RNA, 22 nt, Human
uuauugcaguuuaucauucaag

SEQ ID NO: 2676953 - RNA, 18 nt, Human
uuauugcaguuuaucauu

SEQ ID NO: 2676954 - RNA, 21 nt, Human
uuauugcaguuuaucauucaa

SEQ ID NO: 2676955 - RNA, 16 nt, Human
uuauugaauauaugau

SEQ ID NO: 2676956 - RNA, 21 nt, Human
uuauugacucuugaguuguuu

SEQ ID NO: 2676957 - RNA, 20 nt, Human
uuauugacucuugaguuguu

SEQ ID NO: 2676958 - RNA, 17 nt, Human
uuauugacucuugaguu

SEQ ID NO: 2676959 - RNA, 16 nt, Human
uuauugacucuugagu

SEQ ID NO: 2676960 - RNA, 22 nt, Human
uuaugccacuuccuuuuaacug

SEQ ID NO: 2676961 - RNA, 17 nt, Human
uuaugcucucacuguuu

SEQ ID NO: 2676962 - RNA, 19 nt, Human
uuaugcucucacuguuugu

SEQ ID NO: 2676963 - RNA, 16 nt, Human
uuaugcaucauuucag

SEQ ID NO: 2676964 - RNA, 14 nt, Human
uuaucuugauacau

SEQ ID NO: 2676965 - RNA, 16 nt, Human
uuaucuugauacauuc

SEQ ID NO: 2676966 - RNA, 17 nt, Human
uuaucuugauacauuca

SEQ ID NO: 2676967 - RNA, 18 nt, Human
uuaucuugauacauucaa

SEQ ID NO: 2676968 - RNA, 14 nt, Human
uuaucuuugaauau

SEQ ID NO: 2676969 - RNA, 11 nt, Human
uuaguuuagaa

SEQ ID NO: 2676970 - RNA, 14 nt, Human
uuaguuccuugagu

SEQ ID NO: 2676971 - RNA, 16 nt, Human
uuaguuccucauuagc

SEQ ID NO: 2676972 - RNA, 23 nt, Human
uuaucugggauuaugguuuugug

SEQ ID NO: 2676973 - RNA, 12 nt, Human
uuaucugggcuu

SEQ ID NO: 2676974 - RNA, 22 nt, Human
uuuagacucaucaaucaaauaa

SEQ ID NO: 2676975 - RNA, 23 nt, Human
uuuaguucaauauuuguuacugu

SEQ ID NO: 2676976 - RNA, 22 nt, Human
uuuagacccuauugcugcuuga

SEQ ID NO: 2676977 - RNA, 15 nt, Human
uuuagaccauuuauc

SEQ ID NO: 2676978 - RNA, 19 nt, Human
uuuagacccuauugcugcu

SEQ ID NO: 2676979 - RNA, 16 nt, Human
uuuacccaccuagaac

SEQ ID NO: 2676980 - RNA, 12 nt, Human
uuuauaaagcau

SEQ ID NO: 2676981 - RNA, 14 nt, Human
uuuauaaauccagu

SEQ ID NO: 2676982 - RNA, 16 nt, Human
uuuauacugaaggaaa

SEQ ID NO: 2676983 - RNA, 16 nt, Human
uuuauacuguuuacug

SEQ ID NO: 2676984 - RNA, 18 nt, Human
uuuauccagaaaacugug

SEQ ID NO: 2676985 - RNA, 19 nt, Human
uuuauccagaaaacuguga

SEQ ID NO: 2676986 - RNA, 18 nt, Human
uuuauagcaacaacaauu

SEQ ID NO: 2676987 - RNA, 17 nt, Human
uuuaucugggauuaugg

SEQ ID NO: 2676988 - RNA, 17 nt, Human
uuuaucuggccccaggu

SEQ ID NO: 2676989 - RNA, 13 nt, Human
uuuaucugauuaa

SEQ ID NO: 2676990 - RNA, 14 nt, Human
uuuaugagaaacuu

SEQ ID NO: 2676991 - RNA, 23 nt, Human
uuuaaccgguaagaguuucaguu

SEQ ID NO: 2676992 - RNA, 22 nt, Human
uuuaaacacucuucagagaaau

SEQ ID NO: 2676993 - RNA, 23 nt, Human
uuuaauauaaaguaguccuguga

SEQ ID NO: 2676994 - RNA, 12 nt, Human
uuuaacagaaau

SEQ ID NO: 2676995 - RNA, 19 nt, Human
uuuaaucauaguuacugug

SEQ ID NO: 2676996 - RNA, 22 nt, Human
uuuaaucauaguuacuguguaa

SEQ ID NO: 2676997 - RNA, 23 nt, Human
uuuaaucauaguuacuguguaaa

SEQ ID NO: 2676998 - RNA, 22 nt, Human
uuuaauauugagaaagaaacua

SEQ ID NO: 2676999 - RNA, 15 nt, Human
uuuaauauugagaaa

SEQ ID NO: 2677000 - RNA, 19 nt, Human
uuuacauauaaaauguaau

SEQ ID NO: 2677001 - RNA, 21 nt, Human
uuuacagcucauuaaacuuuu

SEQ ID NO: 2677002 - RNA, 17 nt, Human
uuuacagaugaauguau

SEQ ID NO: 2677003 - RNA, 17 nt, Human
uuuaaaaggaaagaaaa

SEQ ID NO: 2677004 - RNA, 15 nt, Human
uuuaaaauaaaauga

SEQ ID NO: 2677005 - RNA, 16 nt, Human
uuuaaaauaaaaugaa

SEQ ID NO: 2677006 - RNA, 17 nt, Human
uuuaaaauaaaaugaaa

SEQ ID NO: 2677007 - RNA, 18 nt, Human
uuuaaaauaaaaugaaaa

SEQ ID NO: 2677008 - RNA, 19 nt, Human
uuuaaaauaaaaugaaaau

SEQ ID NO: 2677009 - RNA, 22 nt, Human
uuuaaaauaaaaugaaaauugu

SEQ ID NO: 2677010 - RNA, 16 nt, Human
uuuaaaauauuuaucu

SEQ ID NO: 2677011 - RNA, 13 nt, Human
uuuaaaauagaaa

SEQ ID NO: 2677012 - RNA, 21 nt, Human
uuuaaaauagaaauuuuguaa

SEQ ID NO: 2677013 - RNA, 22 nt, Human
uuuaaaauagaaauuuuguaag

SEQ ID NO: 2677014 - RNA, 23 nt, Human
uuuaaaauagaaauuuuguaaga

SEQ ID NO: 2677015 - RNA, 16 nt, Human
uuuaaaacuggaccug

SEQ ID NO: 2677016 - RNA, 13 nt, Human
uuuaaaagaauga

SEQ ID NO: 2677017 - RNA, 12 nt, Human
uuuaaaauguaa

SEQ ID NO: 2677018 - RNA, 18 nt, Human
uuuaaaauguaauuuaaa

SEQ ID NO: 2677019 - RNA, 21 nt, Human
uuuaaaauguaauuuaaauga

SEQ ID NO: 2677020 - RNA, 22 nt, Human
uuuaaaauguaauuuaaaugaa

SEQ ID NO: 2677021 - RNA, 23 nt, Human
uuuaaaauguaauuuaaaugaaa

SEQ ID NO: 2677022 - RNA, 21 nt, Human
uuuaaaaucugagggaaaugu

SEQ ID NO: 2677023 - RNA, 10 nt, Human
uuuaaaauuu

SEQ ID NO: 2677024 - RNA, 17 nt, Human
uuuaaaauuuuguaugu

SEQ ID NO: 2677025 - RNA, 21 nt, Human
uuuaaaauuuuguauguuaaa

SEQ ID NO: 2677026 - RNA, 15 nt, Human
uuuaaacugucgugu

SEQ ID NO: 2677027 - RNA, 15 nt, Human
uuguuuaaaauguaa

SEQ ID NO: 2677028 - RNA, 21 nt, Human
uuguuuaaaauguaauuuaaa

SEQ ID NO: 2677029 - RNA, 15 nt, Human
uuguuauuaaacaaa

SEQ ID NO: 2677030 - RNA, 13 nt, Human
uuguuuuaaaacu

SEQ ID NO: 2677031 - RNA, 14 nt, Human
uuguuuuaaaacug

SEQ ID NO: 2677032 - RNA, 18 nt, Human
uuuaaaacaccuucuaua

SEQ ID NO: 2677033 - RNA, 16 nt, Human
uuuaaaacacauguuu

SEQ ID NO: 2677034 - RNA, 23 nt, Human
uuuaaaacacauguuuuuauaca

SEQ ID NO: 2677035 - RNA, 13 nt, Human
uuuaaaacacaug

SEQ ID NO: 2677036 - RNA, 13 nt, Human
uuguuuuacaaua

SEQ ID NO: 2677037 - RNA, 12 nt, Human
uuguuuuacaau

SEQ ID NO: 2677038 - RNA, 17 nt, Human
uuguuugguaaauguuu

SEQ ID NO: 2677039 - RNA, 19 nt, Human
uuguuugguaaauguuucu

SEQ ID NO: 2677040 - RNA, 15 nt, Human
uuguuuauaauaaaa

SEQ ID NO: 2677041 - RNA, 16 nt, Human
uuguuuauaauaaaaa

SEQ ID NO: 2677042 - RNA, 18 nt, Human
uuguuuauaauaaaaaua

SEQ ID NO: 2677043 - RNA, 12 nt, Human
uuguuucugaaa

SEQ ID NO: 2677044 - RNA, 21 nt, Human
uuugaacaaugaaguugaaaa

SEQ ID NO: 2677045 - RNA, 13 nt, Human
uuucugaaaagau

SEQ ID NO: 2677046 - RNA, 15 nt, Human
uuugaauaaaugugu

SEQ ID NO: 2677047 - RNA, 17 nt, Human
uuugagaucagccuggg

SEQ ID NO: 2677048 - RNA, 16 nt, Human
uuugagaucagccugg

SEQ ID NO: 2677049 - RNA, 22 nt, Human
uuugaaauuguuccuuggagaa

SEQ ID NO: 2677050 - RNA, 13 nt, Human
uuugaauaaaugu

SEQ ID NO: 2677051 - RNA, 20 nt, Human
uuugauaaaaauuuagaaca

SEQ ID NO: 2677052 - RNA, 22 nt, Human
uuugaggauuaguuuagaacag

SEQ ID NO: 2677053 - RNA, 19 nt, Human
uuugaggauuaguuuagaa

SEQ ID NO: 2677054 - RNA, 18 nt, Human
uuugaggauuaguuuaga

SEQ ID NO: 2677055 - RNA, 17 nt, Human
uuugaggauuaguuuag

SEQ ID NO: 2677056 - RNA, 23 nt, Human
uuugaggauuaguuuagaacagg

SEQ ID NO: 2677057 - RNA, 16 nt, Human
uuugaggauuaguuua

SEQ ID NO: 2677058 - RNA, 15 nt, Human
uuugagauguaaaaa

SEQ ID NO: 2677059 - RNA, 13 nt, Human
uuugguaaauguu

SEQ ID NO: 2677060 - RNA, 16 nt, Human
uuugguaaauguuucu

SEQ ID NO: 2677061 - RNA, 14 nt, Human
uuugguacuaauaa

SEQ ID NO: 2677062 - RNA, 16 nt, Human
uuuguauguuaaagag

SEQ ID NO: 2677063 - RNA, 22 nt, Human
uuuguaugccaagugagaagau

SEQ ID NO: 2677064 - RNA, 12 nt, Human
uuuguaugugug

SEQ ID NO: 2677065 - RNA, 14 nt, Human
uuuguaaagcuauu

SEQ ID NO: 2677066 - RNA, 14 nt, Human
uuuguaaauaggau

SEQ ID NO: 2677067 - RNA, 20 nt, Human
uuuguaaauaggauuuuuag

SEQ ID NO: 2677068 - RNA, 15 nt, Human
uuuguaaaguuuccg

SEQ ID NO: 2677069 - RNA, 13 nt, Human
uuuguaaacauuu

SEQ ID NO: 2677070 - RNA, 14 nt, Human
uuuguaaacauuua

SEQ ID NO: 2677071 - RNA, 19 nt, Human
uuuggaccuaaauggccuc

SEQ ID NO: 2677072 - RNA, 23 nt, Human
uuugccaaaauucauuucuaauu

SEQ ID NO: 2677073 - RNA, 21 nt, Human
uuugauauuauacaggaaagc

SEQ ID NO: 2677074 - RNA, 15 nt, Human
uuucuaauuaaccuu

SEQ ID NO: 2677075 - RNA, 16 nt, Human
uuucucuauuaaaaug

SEQ ID NO: 2677076 - RNA, 19 nt, Human
uuucuacagugguuuuaua

SEQ ID NO: 2677077 - RNA, 12 nt, Human
uuucucucucua

SEQ ID NO: 2677078 - RNA, 15 nt, Human
uuucucugaaagugu

SEQ ID NO: 2677079 - RNA, 15 nt, Human
uuucucuuugauuau

SEQ ID NO: 2677080 - RNA, 21 nt, Human
uuucucuuugauuauuugcau

SEQ ID NO: 2677081 - RNA, 22 nt, Human
uuucucuuugauuauuugcaug

SEQ ID NO: 2677082 - RNA, 17 nt, Human
uuuccucucuauauuuc

SEQ ID NO: 2677083 - RNA, 23 nt, Human
uuuccuggcacuggaccccagca

SEQ ID NO: 2677084 - RNA, 21 nt, Human
uuuccuggcacuggaccccag

SEQ ID NO: 2677085 - RNA, 22 nt, Human
uuuccucgcagccucucagugc

SEQ ID NO: 2677086 - RNA, 18 nt, Human
uuucagcgacuccguugg

SEQ ID NO: 2677087 - RNA, 23 nt, Human
uuucagcgacuccguuggccacu

SEQ ID NO: 2677088 - RNA, 14 nt, Human
uuuaucuguuuccu

SEQ ID NO: 2677089 - RNA, 16 nt, Human
uuucaguacuuuuuua

SEQ ID NO: 2677090 - RNA, 19 nt, Human
uuucaguacuuuuuuaaau

SEQ ID NO: 2677091 - RNA, 18 nt, Human
uuucagguuauauccaau

SEQ ID NO: 2677092 - RNA, 21 nt, Human
uuucagguucaguauuaugua

SEQ ID NO: 2677093 - RNA, 19 nt, Human
uuuccaccacagccagcac

SEQ ID NO: 2677094 - RNA, 23 nt, Human
uuuccaccacagccagcaccugg

SEQ ID NO: 2677095 - RNA, 16 nt, Human
uuuccacuaaaaauau

SEQ ID NO: 2677096 - RNA, 16 nt, Human
uuuccacuccauuguc

SEQ ID NO: 2677097 - RNA, 13 nt, Human
uugaaugugucag

SEQ ID NO: 2677098 - RNA, 14 nt, Human
uugaauguuaaagg

SEQ ID NO: 2677099 - RNA, 22 nt, Human
uugaauguuaaagggauauuuu

SEQ ID NO: 2677100 - RNA, 11 nt, Human
uugaagcauag

SEQ ID NO: 2677101 - RNA, 19 nt, Human
uugaagcauagauaauauu

SEQ ID NO: 2677102 - RNA, 23 nt, Human
uugaagcauagauaauauuguuu

SEQ ID NO: 2677103 - RNA, 14 nt, Human
uugaaaauaguuua

SEQ ID NO: 2677104 - RNA, 16 nt, Human
uugaaaauguccagga

SEQ ID NO: 2677105 - RNA, 23 nt, Human
uugaaaauaguuuauuuuaaaac

SEQ ID NO: 2677106 - RNA, 16 nt, Human
uucuuuaaccuuguau

SEQ ID NO: 2677107 - RNA, 19 nt, Human
uucuuuaaccuuguauaaa

SEQ ID NO: 2677108 - RNA, 18 nt, Human
uucuucagauauacugga

SEQ ID NO: 2677109 - RNA, 18 nt, Human
uucuuaggggaaggagaa

SEQ ID NO: 2677110 - RNA, 14 nt, Human
uucuuaugaggagg

SEQ ID NO: 2677111 - RNA, 18 nt, Human
uucuuaugaggaggggag

SEQ ID NO: 2677112 - RNA, 13 nt, Human
uucuuaugugaca

SEQ ID NO: 2677113 - RNA, 16 nt, Human
uucuuaugugacauua

SEQ ID NO: 2677114 - RNA, 19 nt, Human
uucuuaugugacauuaaca

SEQ ID NO: 2677115 - RNA, 20 nt, Human
uucuuaugugacauuaacaa

SEQ ID NO: 2677116 - RNA, 21 nt, Human
uucuuaugugacauuaacaaa

SEQ ID NO: 2677117 - RNA, 13 nt, Human
uucuguauuugaa

SEQ ID NO: 2677118 - RNA, 11 nt, Human
uucuguauuug

SEQ ID NO: 2677119 - RNA, 20 nt, Human
uucguuguguuuuuuaagau

SEQ ID NO: 2677120 - RNA, 17 nt, Human
uucugugaugagcugau

SEQ ID NO: 2677121 - RNA, 24 nt, Human
uucugugcccagaauacugaugga

SEQ ID NO: 2677122 - RNA, 23 nt, Human
uucugugcccagaauacugaugg

SEQ ID NO: 2677123 - RNA, 20 nt, Human
uucugugcccagaauacuga

SEQ ID NO: 2677124 - RNA, 19 nt, Human
uucugugcccagaauacug

SEQ ID NO: 2677125 - RNA, 18 nt, Human
uucugugaugagcugauc

SEQ ID NO: 2677126 - RNA, 13 nt, Human
uucugugcccucc

SEQ ID NO: 2677127 - RNA, 13 nt, Human
uugcaguuuauca

SEQ ID NO: 2677128 - RNA, 18 nt, Human
uugcaguuuaucauucaa

SEQ ID NO: 2677129 - RNA, 18 nt, Human
uugcagcucagaaccaca

SEQ ID NO: 2677130 - RNA, 16 nt, Human
uugcacuguuuaauca

SEQ ID NO: 2677131 - RNA, 21 nt, Human
uugcagcccuugugaugugau

SEQ ID NO: 2677132 - RNA, 15 nt, Human
uugcagcccuuguga

SEQ ID NO: 2677133 - RNA, 17 nt, Human
uugcacuugugauuauu

SEQ ID NO: 2677134 - RNA, 20 nt, Human
uugcacuugugauuauuuau

SEQ ID NO: 2677135 - RNA, 23 nt, Human
uugauucgguauccccccaucuu

SEQ ID NO: 2677136 - RNA, 18 nt, Human
uugccagcugacaucuug

SEQ ID NO: 2677137 - RNA, 15 nt, Human
uugccaggacaugca

SEQ ID NO: 2677138 - RNA, 16 nt, Human
uugccaggacaugcaa

SEQ ID NO: 2677139 - RNA, 17 nt, Human
uugccaggacaugcaau

SEQ ID NO: 2677140 - RNA, 23 nt, Human
uugcaguuuaucauucaagugua

SEQ ID NO: 2677141 - RNA, 19 nt, Human
uugcaguuuaucauucaag

SEQ ID NO: 2677142 - RNA, 20 nt, Human
uugcaguuuaucauucaagu

SEQ ID NO: 2677143 - RNA, 16 nt, Human
uugauaucuauaaaau

SEQ ID NO: 2677144 - RNA, 17 nt, Human
uugauaucuauaaaaua

SEQ ID NO: 2677145 - RNA, 16 nt, Human
uugauucagcucugca

SEQ ID NO: 2677146 - RNA, 15 nt, Human
uugaucauguacuuu

SEQ ID NO: 2677147 - RNA, 16 nt, Human
uugaucauguacuuuu

SEQ ID NO: 2677148 - RNA, 17 nt, Human
uugaucauguacuuuuu

SEQ ID NO: 2677149 - RNA, 23 nt, Human
uugaauuaaauuaggaauaaaua

SEQ ID NO: 2677150 - RNA, 22 nt, Human
uugaauuaaauuaggaauaaau

SEQ ID NO: 2677151 - RNA, 17 nt, Human
uugaauuaaauuaggaa

SEQ ID NO: 2677152 - RNA, 23 nt, Human
uugaauuauccacaugaaaauaa

SEQ ID NO: 2677153 - RNA, 14 nt, Human
uugagccugggagg

SEQ ID NO: 2677154 - RNA, 12 nt, Human
uugagcucccac

SEQ ID NO: 2677155 - RNA, 22 nt, Human
uugagcucccacuucugccaga

SEQ ID NO: 2677156 - RNA, 16 nt, Human
uugagcuaugacuuaa

SEQ ID NO: 2677157 - RNA, 15 nt, Human
uugagcuaugacuua

SEQ ID NO: 2677158 - RNA, 14 nt, Human
uugagcuaugacuu

SEQ ID NO: 2677159 - RNA, 11 nt, Human
uugagcuauga

SEQ ID NO: 2677160 - RNA, 20 nt, Human
uugaggccaagaauauugca

SEQ ID NO: 2677161 - RNA, 21 nt, Human
uugaggccaagaauauugcaa

SEQ ID NO: 2677162 - RNA, 19 nt, Human
uugaggauuaguuuagaac

SEQ ID NO: 2677163 - RNA, 18 nt, Human
uugaggauuaguuuagaa

SEQ ID NO: 2677164 - RNA, 17 nt, Human
uugaggauuaguuuaga

SEQ ID NO: 2677165 - RNA, 14 nt, Human
uugaggauuaguuu

SEQ ID NO: 2677166 - RNA, 23 nt, Human
uugggaaugaggaaaauucuuaa

SEQ ID NO: 2677167 - RNA, 21 nt, Human
uugggagagccauacauaaaa

SEQ ID NO: 2677168 - RNA, 22 nt, Human
uugggacugcuaaauaaaauuu

SEQ ID NO: 2677169 - RNA, 23 nt, Human
uuggcuucacggaagagccuugc

SEQ ID NO: 2677170 - RNA, 22 nt, Human
uuggcuucugugaugagcugau

SEQ ID NO: 2677171 - RNA, 11 nt, Human
uuggcuucugu

SEQ ID NO: 2677172 - RNA, 13 nt, Human
uuggcaggcuggc

SEQ ID NO: 2677173 - RNA, 14 nt, Human
uuggcaggcuggcc

SEQ ID NO: 2677174 - RNA, 20 nt, Human
uugguaauccccuaaaauaa

SEQ ID NO: 2677175 - RNA, 17 nt, Human
uugguccuguccccgca

SEQ ID NO: 2677176 - RNA, 14 nt, Human
uugguccugucccc

SEQ ID NO: 2677177 - RNA, 13 nt, Human
uugggaguuuuua

SEQ ID NO: 2677178 - RNA, 15 nt, Human
uuguacuuaaauggu

SEQ ID NO: 2677179 - RNA, 23 nt, Human
uuguacuuaaaugguaauaagca

SEQ ID NO: 2677180 - RNA, 15 nt, Human
uuguagauuugauuu

SEQ ID NO: 2677181 - RNA, 12 nt, Human
uuguaaacauuu

SEQ ID NO: 2677182 - RNA, 13 nt, Human
uuguaaacauuua

SEQ ID NO: 2677183 - RNA, 14 nt, Human
uuguaaacauuuau

SEQ ID NO: 2677184 - RNA, 20 nt, Human
uuguacauuugggaguuuuu

SEQ ID NO: 2677185 - RNA, 22 nt, Human
uugucuuaaaaaguggaaaaau

SEQ ID NO: 2677186 - RNA, 22 nt, Human
uugucaaacuguagaaaugaug

SEQ ID NO: 2677187 - RNA, 19 nt, Human
uuguauuuuuguuguuggg

SEQ ID NO: 2677188 - RNA, 16 nt, Human
uuguauuuuuguuguu

SEQ ID NO: 2677189 - RNA, 18 nt, Human
uuguauuuugauuauuuu

SEQ ID NO: 2677190 - RNA, 12 nt, Human
uuguaugaaaac

SEQ ID NO: 2677191 - RNA, 16 nt, Human
uuguauuuucaugaaa

SEQ ID NO: 2677192 - RNA, 17 nt, Human
uuguauuuucaugaaaa

SEQ ID NO: 2677193 - RNA, 18 nt, Human
uuguauuuucaugaaaau

SEQ ID NO: 2677194 - RNA, 21 nt, Human
uuggcaaugacucaaagucug

SEQ ID NO: 2677195 - RNA, 12 nt, Human
uuggcaggcugg

SEQ ID NO: 2677196 - RNA, 18 nt, Human
uuggcacuuauugaauau

SEQ ID NO: 2677197 - RNA, 22 nt, Human
uuggcaauaaauuuugaaaagu

SEQ ID NO: 2677198 - RNA, 20 nt, Human
uuggcaauaaauuuugaaaa

SEQ ID NO: 2677199 - RNA, 18 nt, Human
uuggcaauaaauuuugaa

SEQ ID NO: 2677200 - RNA, 22 nt, Human
uuggaagcacaccaaucuuacu

SEQ ID NO: 2677201 - RNA, 19 nt, Human
uugcuguuguccaacuauu

SEQ ID NO: 2677202 - RNA, 14 nt, Human
uugcuguuguccaa

SEQ ID NO: 2677203 - RNA, 20 nt, Human
uugcugugcuucaaacuacu

SEQ ID NO: 2677204 - RNA, 19 nt, Human
uugcugugugucccaggca

SEQ ID NO: 2677205 - RNA, 20 nt, Human
uugcugugugucccaggcag

SEQ ID NO: 2677206 - RNA, 14 nt, Human
uuggacauccuccu

SEQ ID NO: 2677207 - RNA, 12 nt, Human
uugcugcucuuc

SEQ ID NO: 2677208 - RNA, 15 nt, Human
uugcugcugccucuu

SEQ ID NO: 2677209 - RNA, 16 nt, Human
uugcugcuugaggcaa

SEQ ID NO: 2677210 - RNA, 14 nt, Human
uugcugcuugaggc

SEQ ID NO: 2677211 - RNA, 22 nt, Human
uugcuggccaguccacccugcc

SEQ ID NO: 2677212 - RNA, 13 nt, Human
uugcuggccccag

SEQ ID NO: 2677213 - RNA, 14 nt, Human
uugcuggccccagc

SEQ ID NO: 2677214 - RNA, 17 nt, Human
uugcuggccccagcccu

SEQ ID NO: 2677215 - RNA, 23 nt, Human
uugcuggccccagcccugcuggg

SEQ ID NO: 2677216 - RNA, 14 nt, Human
uugccauguguuuu

SEQ ID NO: 2677217 - RNA, 20 nt, Human
uugccaugugcuucugccac

SEQ ID NO: 2677218 - RNA, 13 nt, Human
uugccaugugcuu

SEQ ID NO: 2677219 - RNA, 21 nt, Human
uugccuguuucugauuugcug

SEQ ID NO: 2677220 - RNA, 13 nt, Human
uugccuuaaaaua

SEQ ID NO: 2677221 - RNA, 16 nt, Human
uugccuugcuguuugu

SEQ ID NO: 2677222 - RNA, 20 nt, Human
uugccuuccauuuccccucu

SEQ ID NO: 2677223 - RNA, 15 nt, Human
uugccuuuuaauuuu

SEQ ID NO: 2677224 - RNA, 19 nt, Human
uugccuuuuaauuuuuaau

SEQ ID NO: 2677225 - RNA, 19 nt, Human
uugccuuuugcaaccagga

SEQ ID NO: 2677226 - RNA, 21 nt, Human
caacuuuuguguaaugaaaau

SEQ ID NO: 2677227 - RNA, 20 nt, Human
caacuuuuguguaaugaaaa

SEQ ID NO: 2677228 - RNA, 19 nt, Human
caacuuuuucccucacuaa

SEQ ID NO: 2677229 - RNA, 14 nt, Human
caacuuuuguguaa

SEQ ID NO: 2677230 - RNA, 17 nt, Human
caagaacacacacauau

SEQ ID NO: 2677231 - RNA, 22 nt, Human
caagaagaaaugcuuuccaaaa

SEQ ID NO: 2677232 - RNA, 18 nt, Human
caagacucuuuggacacu

SEQ ID NO: 2677233 - RNA, 20 nt, Human
caacggaggccugcgacccu

SEQ ID NO: 2677234 - RNA, 16 nt, Human
caaccucgcugagggc

SEQ ID NO: 2677235 - RNA, 23 nt, Human
caacggucuccugacuggugcug

SEQ ID NO: 2677236 - RNA, 17 nt, Human
caaauuucaugaccagu

SEQ ID NO: 2677237 - RNA, 14 nt, Human
caaccgagaagguu

SEQ ID NO: 2677238 - RNA, 15 nt, Human
caacccugccgucac

SEQ ID NO: 2677239 - RNA, 20 nt, Human
caacccugccgucaccacca

SEQ ID NO: 2677240 - RNA, 20 nt, Human
caacccuaucuccugacaga

SEQ ID NO: 2677241 - RNA, 22 nt, Human
caacccuaucuccugacagaag

SEQ ID NO: 2677242 - RNA, 16 nt, Human
caacccuaucuccuga

SEQ ID NO: 2677243 - RNA, 19 nt, Human
caacccuaucuccugacag

SEQ ID NO: 2677244 - RNA, 15 nt, Human
caaggacuuuguaca

SEQ ID NO: 2677245 - RNA, 13 nt, Human
caagccagaggcu

SEQ ID NO: 2677246 - RNA, 15 nt, Human
caagccagaggcugg

SEQ ID NO: 2677247 - RNA, 16 nt, Human
caagccagaggcuggg

SEQ ID NO: 2677248 - RNA, 15 nt, Human
caagccuccacagcg

SEQ ID NO: 2677249 - RNA, 16 nt, Human
caagccuccacagcga

SEQ ID NO: 2677250 - RNA, 17 nt, Human
caagccuccacagcgag

SEQ ID NO: 2677251 - RNA, 14 nt, Human
caagccuccacagc

SEQ ID NO: 2677252 - RNA, 13 nt, Human
caagccuccacag

SEQ ID NO: 2677253 - RNA, 17 nt, Human
caagcuggcuuacacug

SEQ ID NO: 2677254 - RNA, 15 nt, Human
caaggcugcagugag

SEQ ID NO: 2677255 - RNA, 12 nt, Human
caaggcugcagu

SEQ ID NO: 2677256 - RNA, 21 nt, Human
caaguguaaaauauuuugaau

SEQ ID NO: 2677257 - RNA, 23 nt, Human
caaguguaaaauauuuugaauca

SEQ ID NO: 2677258 - RNA, 16 nt, Human
caagugugaauacugc

SEQ ID NO: 2677259 - RNA, 15 nt, Human
caagugugaauacug

SEQ ID NO: 2677260 - RNA, 14 nt, Human
caagugugaauacu

SEQ ID NO: 2677261 - RNA, 23 nt, Human
caaguggaccuuaggccuuccuc

SEQ ID NO: 2677262 - RNA, 22 nt, Human
caaguggaccuuaggccuuccu

SEQ ID NO: 2677263 - RNA, 21 nt, Human
caaguggaccuuaggccuucc

SEQ ID NO: 2677264 - RNA, 12 nt, Human
caaguggaccuu

SEQ ID NO: 2677265 - RNA, 21 nt, Human
caauuugcacuaaaucagaga

SEQ ID NO: 2677266 - RNA, 20 nt, Human
caauuugcacuaaaucagag

SEQ ID NO: 2677267 - RNA, 22 nt, Human
caauuucuguguugccaagcuc

SEQ ID NO: 2677268 - RNA, 16 nt, Human
caauucuagucauaua

SEQ ID NO: 2677269 - RNA, 18 nt, Human
caaugugaggggucccua

SEQ ID NO: 2677270 - RNA, 20 nt, Human
caaugugaggggucccuagc

SEQ ID NO: 2677271 - RNA, 17 nt, Human
caaugugauaaaacccc

SEQ ID NO: 2677272 - RNA, 15 nt, Human
caaugugauaaaacc

SEQ ID NO: 2677273 - RNA, 15 nt, Human
caaugacucaaaguc

SEQ ID NO: 2677274 - RNA, 20 nt, Human
caaugguaguuucugugguu

SEQ ID NO: 2677275 - RNA, 17 nt, Human
caaugguaguuucugug

SEQ ID NO: 2677276 - RNA, 16 nt, Human
caaugguaguuucugu

SEQ ID NO: 2677277 - RNA, 14 nt, Human
caaugguaguuucu

SEQ ID NO: 2677278 - RNA, 23 nt, Human
caauggguuuuucccuguacagu

SEQ ID NO: 2677279 - RNA, 13 nt, Human
caaugagagcaua

SEQ ID NO: 2677280 - RNA, 19 nt, Human
caaugagagcauaauuuaa

SEQ ID NO: 2677281 - RNA, 17 nt, Human
caauacacuaguuguuu

SEQ ID NO: 2677282 - RNA, 19 nt, Human
caauacacuaguuguuucu

SEQ ID NO: 2677283 - RNA, 18 nt, Human
caauaauauauuuucugu

SEQ ID NO: 2677284 - RNA, 20 nt, Human
caauaauauauuuucuguuu

SEQ ID NO: 2677285 - RNA, 13 nt, Human
caauaauauauuu

SEQ ID NO: 2677286 - RNA, 14 nt, Human
caauaauauauuuu

SEQ ID NO: 2677287 - RNA, 16 nt, Human
caauaauauauuuucu

SEQ ID NO: 2677288 - RNA, 17 nt, Human
caauaauauauuuucug

SEQ ID NO: 2677289 - RNA, 14 nt, Human
caaucuuacuuugu

SEQ ID NO: 2677290 - RNA, 15 nt, Human
caaucuuacuuugua

SEQ ID NO: 2677291 - RNA, 12 nt, Human
caaucugugggc

SEQ ID NO: 2677292 - RNA, 20 nt, Human
caauauagaaaaauaaaaau

SEQ ID NO: 2677293 - RNA, 22 nt, Human
caauauagaaaaauaaaaaucu

SEQ ID NO: 2677294 - RNA, 17 nt, Human
caauauucgcuguguca

SEQ ID NO: 2677295 - RNA, 14 nt, Human
caauauauugaacu

SEQ ID NO: 2677296 - RNA, 15 nt, Human
caauauauugaacuu

SEQ ID NO: 2677297 - RNA, 20 nt, Human
caauauauugaacuuuugua

SEQ ID NO: 2677298 - RNA, 15 nt, Human
caaucucuucauuau

SEQ ID NO: 2677299 - RNA, 22 nt, Human
caaucucuucauuauucucugc

SEQ ID NO: 2677300 - RNA, 14 nt, Human
caaucucuuuuugu

SEQ ID NO: 2677301 - RNA, 17 nt, Human
caaucucuuuuuguuug

SEQ ID NO: 2677302 - RNA, 16 nt, Human
caauauugauugggaa

SEQ ID NO: 2677303 - RNA, 17 nt, Human
caauauugauugggaaa

SEQ ID NO: 2677304 - RNA, 20 nt, Human
caauauugauugggaaaaca

SEQ ID NO: 2677305 - RNA, 21 nt, Human
caauauugauugggaaaacau

SEQ ID NO: 2677306 - RNA, 23 nt, Human
caauauugauugggaaaacauuu

SEQ ID NO: 2677307 - RNA, 14 nt, Human
caauguucucucuu

SEQ ID NO: 2677308 - RNA, 20 nt, Human
caaaaauuagccgggcgugg

SEQ ID NO: 2677309 - RNA, 17 nt, Human
caaaaauuagccgggcg

SEQ ID NO: 2677310 - RNA, 15 nt, Human
caaaaauuagccggg

SEQ ID NO: 2677311 - RNA, 23 nt, Human
caaaaauaaacuauaaaacaaaa

SEQ ID NO: 2677312 - RNA, 14 nt, Human
caaaaagcuucccc

SEQ ID NO: 2677313 - RNA, 13 nt, Human
caaaaagcuuccc

SEQ ID NO: 2677314 - RNA, 13 nt, Human
caaaaaggcuuau

SEQ ID NO: 2677315 - RNA, 14 nt, Human
auuuucuaaagacu

SEQ ID NO: 2677316 - RNA, 15 nt, Human
auuuucuaaagacuu

SEQ ID NO: 2677317 - RNA, 14 nt, Human
auuuucuacagugg

SEQ ID NO: 2677318 - RNA, 16 nt, Human
auuuucuacguuucuu

SEQ ID NO: 2677319 - RNA, 17 nt, Human
auuuucuacguuucuuu

SEQ ID NO: 2677320 - RNA, 18 nt, Human
auuuuggagauuauaaua

SEQ ID NO: 2677321 - RNA, 19 nt, Human
auuuuggagauuauaauaa

SEQ ID NO: 2677322 - RNA, 20 nt, Human
auuuuggagauuauaauaaa

SEQ ID NO: 2677323 - RNA, 21 nt, Human
auuuuggagauuauaauaaau

SEQ ID NO: 2677324 - RNA, 10 nt, Human
caaaaacaaa

SEQ ID NO: 2677325 - RNA, 16 nt, Human
caaaaaauuagccggg

SEQ ID NO: 2677326 - RNA, 18 nt, Human
caaaaaauuagccgggcg

SEQ ID NO: 2677327 - RNA, 15 nt, Human
caaaaaauguuuuaa

SEQ ID NO: 2677328 - RNA, 16 nt, Human
caaaaaauguuuuaaa

SEQ ID NO: 2677329 - RNA, 12 nt, Human
caaaaaccaaau

SEQ ID NO: 2677330 - RNA, 15 nt, Human
caaaaaccaaauguu

SEQ ID NO: 2677331 - RNA, 13 nt, Human
caaaaaggcagga

SEQ ID NO: 2677332 - RNA, 15 nt, Human
caaaaagaaaugaug

SEQ ID NO: 2677333 - RNA, 13 nt, Human
caaaaagaaauga

SEQ ID NO: 2677334 - RNA, 18 nt, Human
caaauauucacuggcccc

SEQ ID NO: 2677335 - RNA, 13 nt, Human
caaauuaucuuga

SEQ ID NO: 2677336 - RNA, 19 nt, Human
caaauuaucuugauacauu

SEQ ID NO: 2677337 - RNA, 22 nt, Human
caaauuaucuugauacauucaa

SEQ ID NO: 2677338 - RNA, 13 nt, Human
caaaccggcaggu

SEQ ID NO: 2677339 - RNA, 15 nt, Human
caaaccuaccaaaau

SEQ ID NO: 2677340 - RNA, 17 nt, Human
caaaccuaccaaaaugg

SEQ ID NO: 2677341 - RNA, 17 nt, Human
caaacgccuccccugcc

SEQ ID NO: 2677342 - RNA, 14 nt, Human
caaacgccuccccu

SEQ ID NO: 2677343 - RNA, 13 nt, Human
caaacgcuaaaga

SEQ ID NO: 2677344 - RNA, 21 nt, Human
caaacgcuaaagagcccuugc

SEQ ID NO: 2677345 - RNA, 22 nt, Human
caaacgcuaaagagcccuugcc

SEQ ID NO: 2677346 - RNA, 23 nt, Human
caaacgcuaaagagcccuugccu

SEQ ID NO: 2677347 - RNA, 21 nt, Human
caaaaugugagugguugaaua

SEQ ID NO: 2677348 - RNA, 19 nt, Human
caaaaugugagugguugaa

SEQ ID NO: 2677349 - RNA, 12 nt, Human
caaaaugugagu

SEQ ID NO: 2677350 - RNA, 23 nt, Human
caaaauguaggcuuaguuugugu

SEQ ID NO: 2677351 - RNA, 16 nt, Human
caaaauggaauaaaag

SEQ ID NO: 2677352 - RNA, 17 nt, Human
caaaauggaauaaaagg

SEQ ID NO: 2677353 - RNA, 13 nt, Human
caaaauaaaacau

SEQ ID NO: 2677354 - RNA, 14 nt, Human
caaaauaaaacaua

SEQ ID NO: 2677355 - RNA, 15 nt, Human
caaaauaaaacauag

SEQ ID NO: 2677356 - RNA, 17 nt, Human
caaaauaaaacauagca

SEQ ID NO: 2677357 - RNA, 18 nt, Human
caaaauaaaacauagcaa

SEQ ID NO: 2677358 - RNA, 19 nt, Human
caaaauaaaacauagcaaa

SEQ ID NO: 2677359 - RNA, 12 nt, Human
caaaauaaaaca

SEQ ID NO: 2677360 - RNA, 15 nt, Human
caaaauucauuucua

SEQ ID NO: 2677361 - RNA, 18 nt, Human
caaaauucauuucuaauu

SEQ ID NO: 2677362 - RNA, 19 nt, Human
caaaauucauuucuaauua

SEQ ID NO: 2677363 - RNA, 20 nt, Human
caaaauuaagguguuugaaa

SEQ ID NO: 2677364 - RNA, 19 nt, Human
caaaauuaagguguuugaa

SEQ ID NO: 2677365 - RNA, 16 nt, Human
caaaauuaagguguuu

SEQ ID NO: 2677366 - RNA, 16 nt, Human
caaaauuaagcaaaug

SEQ ID NO: 2677367 - RNA, 22 nt, Human
caaaauuaagcaaauguuaaaa

SEQ ID NO: 2677368 - RNA, 21 nt, Human
caaaggcauuauaaaaagaau

SEQ ID NO: 2677369 - RNA, 17 nt, Human
caaaggaagguggaugg

SEQ ID NO: 2677370 - RNA, 20 nt, Human
caaagcugcccacuguuucu

SEQ ID NO: 2677371 - RNA, 14 nt, Human
caaagcugcccacu

SEQ ID NO: 2677372 - RNA, 15 nt, Human
caaagcugcccacug

SEQ ID NO: 2677373 - RNA, 12 nt, Human
caaagcugagcc

SEQ ID NO: 2677374 - RNA, 13 nt, Human
caaagcugagccu

SEQ ID NO: 2677375 - RNA, 14 nt, Human
caaagcugagccug

SEQ ID NO: 2677376 - RNA, 17 nt, Human
caaagcugagccugcag

SEQ ID NO: 2677377 - RNA, 22 nt, Human
caaagcugagccugcagggaag

SEQ ID NO: 2677378 - RNA, 23 nt, Human
caaagcugagccugcagggaagc

SEQ ID NO: 2677379 - RNA, 24 nt, Human
caaagcugagccugcagggaagcc

SEQ ID NO: 2677380 - RNA, 21 nt, Human
caaacucaaugcuuuauuugu

SEQ ID NO: 2677381 - RNA, 23 nt, Human
caaacucaaugcuuuauuuguaa

SEQ ID NO: 2677382 - RNA, 13 nt, Human
caaacuguugauu

SEQ ID NO: 2677383 - RNA, 21 nt, Human
caaacuggggccuccagaacu

SEQ ID NO: 2677384 - RNA, 19 nt, Human
caaacuggggccuccagaa

SEQ ID NO: 2677385 - RNA, 16 nt, Human
caaacuggggccucca

SEQ ID NO: 2677386 - RNA, 15 nt, Human
caaacuggggccucc

SEQ ID NO: 2677387 - RNA, 18 nt, Human
caaagccuccuccagccg

SEQ ID NO: 2677388 - RNA, 17 nt, Human
caaagccuccuccagcc

SEQ ID NO: 2677389 - RNA, 16 nt, Human
caaagccuucucccua

SEQ ID NO: 2677390 - RNA, 18 nt, Human
cacauagcauguaauggu

SEQ ID NO: 2677391 - RNA, 14 nt, Human
cacaggaggcaggc

SEQ ID NO: 2677392 - RNA, 15 nt, Human
cacaggaggcaggca

SEQ ID NO: 2677393 - RNA, 19 nt, Human
cacaggaggcaggcauggc

SEQ ID NO: 2677394 - RNA, 21 nt, Human
cacaggaggcaggcauggccc

SEQ ID NO: 2677395 - RNA, 22 nt, Human
cacaggaggcaggcauggcccu

SEQ ID NO: 2677396 - RNA, 15 nt, Human
aagcugcagagauuu

SEQ ID NO: 2677397 - RNA, 17 nt, Human
aagcugcagagauuucu

SEQ ID NO: 2677398 - RNA, 23 nt, Human
aagcugcagagauuucucauuga

SEQ ID NO: 2677399 - RNA, 22 nt, Human
aagcugcacccucaggcaggug

SEQ ID NO: 2677400 - RNA, 20 nt, Human
aagcugcacccucaggcagg

SEQ ID NO: 2677401 - RNA, 21 nt, Human
aagcugcacccucaggcaggu

SEQ ID NO: 2677402 - RNA, 13 nt, Human
aagcugggcaggu

SEQ ID NO: 2677403 - RNA, 18 nt, Human
aagcuggcuuacacuggc

SEQ ID NO: 2677404 - RNA, 11 nt, Human
aagcugggcag

SEQ ID NO: 2677405 - RNA, 19 nt, Human
aaggacugacugaggcagu

SEQ ID NO: 2677406 - RNA, 12 nt, Human
aaggacugacug

SEQ ID NO: 2677407 - RNA, 12 nt, Human
aaggauuuuucu

SEQ ID NO: 2677408 - RNA, 17 nt, Human
aaggcaauauuaaccua

SEQ ID NO: 2677409 - RNA, 14 nt, Human
aagaaauguauaaa

SEQ ID NO: 2677410 - RNA, 15 nt, Human
aagaaaugauguugg

SEQ ID NO: 2677411 - RNA, 23 nt, Human
aagaaaugauguuggagaaggga

SEQ ID NO: 2677412 - RNA, 15 nt, Human
aagaacacacacaua

SEQ ID NO: 2677413 - RNA, 19 nt, Human
aagaacacacacauauaca

SEQ ID NO: 2677414 - RNA, 12 nt, Human
aagaacaggccu

SEQ ID NO: 2677415 - RNA, 13 nt, Human
aagaacaggccuc

SEQ ID NO: 2677416 - RNA, 19 nt, Human
aagauugcuuaauaaauug

SEQ ID NO: 2677417 - RNA, 15 nt, Human
aagaaauuuuuuaaa

SEQ ID NO: 2677418 - RNA, 12 nt, Human
aagauuuauguu

SEQ ID NO: 2677419 - RNA, 15 nt, Human
aagccagaggcuggg

SEQ ID NO: 2677420 - RNA, 16 nt, Human
aagccagaggcugggu

SEQ ID NO: 2677421 - RNA, 14 nt, Human
aagccagaggcugg

SEQ ID NO: 2677422 - RNA, 14 nt, Human
aagcagaggaagga

SEQ ID NO: 2677423 - RNA, 16 nt, Human
aagcagacauuuuaaa

SEQ ID NO: 2677424 - RNA, 16 nt, Human
aagcagcuuauuguuu

SEQ ID NO: 2677425 - RNA, 14 nt, Human
aauaaucuuguuuc

SEQ ID NO: 2677426 - RNA, 15 nt, Human
aauaaucuuguuucu

SEQ ID NO: 2677427 - RNA, 11 nt, Human
aauaaucaaga

SEQ ID NO: 2677428 - RNA, 15 nt, Human
aauaaucaagagccu

SEQ ID NO: 2677429 - RNA, 13 nt, Human
aauaaucaagagc

SEQ ID NO: 2677430 - RNA, 21 nt, Human
aauaagugugugguagaaaca

SEQ ID NO: 2677431 - RNA, 22 nt, Human
aauaagugugugguagaaacaa

SEQ ID NO: 2677432 - RNA, 23 nt, Human
aauaagugugugguagaaacaaa

SEQ ID NO: 2677433 - RNA, 18 nt, Human
aauaaguuauugcaguuu

SEQ ID NO: 2677434 - RNA, 13 nt, Human
aauaaguuauugc

SEQ ID NO: 2677435 - RNA, 14 nt, Human
aauaaguuauugca

SEQ ID NO: 2677436 - RNA, 19 nt, Human
aauaaugcuacaauuuuaa

SEQ ID NO: 2677437 - RNA, 21 nt, Human
aauaaugcuacaauuuuaaga

SEQ ID NO: 2677438 - RNA, 22 nt, Human
aagugguccuagaggcccuuug

SEQ ID NO: 2677439 - RNA, 19 nt, Human
aaguggucuuaagaaaugu

SEQ ID NO: 2677440 - RNA, 22 nt, Human
aaguguaaaauauuuugaauca

SEQ ID NO: 2677441 - RNA, 11 nt, Human
aauaaguuauu

SEQ ID NO: 2677442 - RNA, 17 nt, Human
aagucucuagguucuga

SEQ ID NO: 2677443 - RNA, 19 nt, Human
aagucuuaaggacaaagug

SEQ ID NO: 2677444 - RNA, 22 nt, Human
aagucuuaaggacaaagugcca

SEQ ID NO: 2677445 - RNA, 16 nt, Human
aagucuuacuacagaa

SEQ ID NO: 2677446 - RNA, 18 nt, Human
aaguaugugguuuuguaa

SEQ ID NO: 2677447 - RNA, 20 nt, Human
aaguccaguguuucuuuuuu

SEQ ID NO: 2677448 - RNA, 21 nt, Human
aaguauguauuauuuacauuu

SEQ ID NO: 2677449 - RNA, 14 nt, Human
aaguauguauuauu

SEQ ID NO: 2677450 - RNA, 19 nt, Human
aaguauguauauuaaaaaa

SEQ ID NO: 2677451 - RNA, 20 nt, Human
aaguauguauauuaaaaaag

SEQ ID NO: 2677452 - RNA, 21 nt, Human
aaguauguauauuaaaaaaga

SEQ ID NO: 2677453 - RNA, 22 nt, Human
aaguauguauauuaaaaaagag

SEQ ID NO: 2677454 - RNA, 16 nt, Human
aaguagaacuuuguau

SEQ ID NO: 2677455 - RNA, 22 nt, Human
aaguauagccuauggcagaaaa

SEQ ID NO: 2677456 - RNA, 15 nt, Human
aaguagaacuuugua

SEQ ID NO: 2677457 - RNA, 19 nt, Human
aagguggauggccccagca

SEQ ID NO: 2677458 - RNA, 14 nt, Human
aagguggauuuugu

SEQ ID NO: 2677459 - RNA, 22 nt, Human
aagguggauuuuguuuaaaaaa

SEQ ID NO: 2677460 - RNA, 15 nt, Human
aagguguuugaaaau

SEQ ID NO: 2677461 - RNA, 21 nt, Human
aagguguuugaaaauaguuua

SEQ ID NO: 2677462 - RNA, 20 nt, Human
aagguguuugaaaauaguuu

SEQ ID NO: 2677463 - RNA, 11 nt, Human
aaggugggagg

SEQ ID NO: 2677464 - RNA, 21 nt, Human
aaugaugauccuaggcauuug

SEQ ID NO: 2677465 - RNA, 18 nt, Human
aaugaagaauuuaaagaa

SEQ ID NO: 2677466 - RNA, 17 nt, Human
aaugaagaauuuaaaga

SEQ ID NO: 2677467 - RNA, 17 nt, Human
aaugaaccauaaauuca

SEQ ID NO: 2677468 - RNA, 18 nt, Human
aaugaaccauaaauucaa

SEQ ID NO: 2677469 - RNA, 16 nt, Human
aaugaagaauuuaaag

SEQ ID NO: 2677470 - RNA, 15 nt, Human
aaugaagaauuuaaa

SEQ ID NO: 2677471 - RNA, 14 nt, Human
aaugaagaauuuaa

SEQ ID NO: 2677472 - RNA, 13 nt, Human
aaugaagaauuua

SEQ ID NO: 2677473 - RNA, 17 nt, Human
aauccagugaccucucu

SEQ ID NO: 2677474 - RNA, 13 nt, Human
aauccaguuauaa

SEQ ID NO: 2677475 - RNA, 16 nt, Human
aauccaguuauaagaa

SEQ ID NO: 2677476 - RNA, 19 nt, Human
aauccaguuauaagaagaa

SEQ ID NO: 2677477 - RNA, 19 nt, Human
aaugaugacaaaaaauguu

SEQ ID NO: 2677478 - RNA, 21 nt, Human
aaugaugauguggaagaacuu

SEQ ID NO: 2677479 - RNA, 15 nt, Human
aaucaauucuaguca

SEQ ID NO: 2677480 - RNA, 16 nt, Human
aauauguaguaucuau

SEQ ID NO: 2677481 - RNA, 23 nt, Human
aauauaaggaaagcaauaaauga

SEQ ID NO: 2677482 - RNA, 21 nt, Human
aauauaaggaaagcaauaaau

SEQ ID NO: 2677483 - RNA, 19 nt, Human
aauauaaggaaagcaauaa

SEQ ID NO: 2677484 - RNA, 18 nt, Human
aauauaaggaaagcaaua

SEQ ID NO: 2677485 - RNA, 17 nt, Human
aauguuuuauacuguuu

SEQ ID NO: 2677486 - RNA, 16 nt, Human
aauguuuucaaaaggu

SEQ ID NO: 2677487 - RNA, 20 nt, Human
aauguuuggcauguaaaugu

SEQ ID NO: 2677488 - RNA, 21 nt, Human
aauguuuggcauguaaaugua

SEQ ID NO: 2677489 - RNA, 12 nt, Human
aauguuuuguaa

SEQ ID NO: 2677490 - RNA, 13 nt, Human
aauguuuuguaaa

SEQ ID NO: 2677491 - RNA, 16 nt, Human
aauguuuuguaaacau

SEQ ID NO: 2677492 - RNA, 18 nt, Human
aauguuuuguaaacauuu

SEQ ID NO: 2677493 - RNA, 19 nt, Human
aauguuuuguaaacauuua

SEQ ID NO: 2677494 - RNA, 20 nt, Human
aauguuuuguaaacauuuau

SEQ ID NO: 2677495 - RNA, 14 nt, Human
aauuaaauuaggaa

SEQ ID NO: 2677496 - RNA, 16 nt, Human
aauuaaaagucuuuuu

SEQ ID NO: 2677497 - RNA, 14 nt, Human
aauggcuuguucau

SEQ ID NO: 2677498 - RNA, 17 nt, Human
aauggcuguaaucauuu

SEQ ID NO: 2677499 - RNA, 13 nt, Human
aaugguaguuucu

SEQ ID NO: 2677500 - RNA, 12 nt, Human
aaugguaguuuc

SEQ ID NO: 2677501 - RNA, 20 nt, Human
aaugguaguuucugugguug

SEQ ID NO: 2677502 - RNA, 18 nt, Human
aaugguaguuucuguggu

SEQ ID NO: 2677503 - RNA, 17 nt, Human
aaugguaguuucugugg

SEQ ID NO: 2677504 - RNA, 14 nt, Human
aaugguaguuucug

SEQ ID NO: 2677505 - RNA, 16 nt, Human
aauggguuuuucccug

SEQ ID NO: 2677506 - RNA, 14 nt, Human
aaugguaauaagca

SEQ ID NO: 2677507 - RNA, 15 nt, Human
aaugggcucuccggg

SEQ ID NO: 2677508 - RNA, 19 nt, Human
aaugggcucuccggggcca

SEQ ID NO: 2677509 - RNA, 22 nt, Human
aaugucuaguuguaacaccaug

SEQ ID NO: 2677510 - RNA, 14 nt, Human
aaugucuguaaaua

SEQ ID NO: 2677511 - RNA, 16 nt, Human
aaugucuguaauaaua

SEQ ID NO: 2677512 - RNA, 17 nt, Human
aaugucuguaauaauag

SEQ ID NO: 2677513 - RNA, 18 nt, Human
aaugucuguaauaauaga

SEQ ID NO: 2677514 - RNA, 19 nt, Human
aaugucuguaauaauagac

SEQ ID NO: 2677515 - RNA, 23 nt, Human
aaugucuguaauaauagacugua

SEQ ID NO: 2677516 - RNA, 20 nt, Human
aaugucucaaggcaguuaau

SEQ ID NO: 2677517 - RNA, 13 nt, Human
aaugucuccuccc

SEQ ID NO: 2677518 - RNA, 20 nt, Human
aaauggaaaguaacucauuu

SEQ ID NO: 2677519 - RNA, 12 nt, Human
aaauggaaauuu

SEQ ID NO: 2677520 - RNA, 14 nt, Human
aaauggaaauuuug

SEQ ID NO: 2677521 - RNA, 13 nt, Human
aaauggaaacuau

SEQ ID NO: 2677522 - RNA, 21 nt, Human
aaauggaaagcagaguuuuca

SEQ ID NO: 2677523 - RNA, 15 nt, Human
aaauauuuugaauca

SEQ ID NO: 2677524 - RNA, 21 nt, Human
aaauauuuugaaucaauaaua

SEQ ID NO: 2677525 - RNA, 11 nt, Human
aaauauuuucu

SEQ ID NO: 2677526 - RNA, 12 nt, Human
aaauauuuucua

SEQ ID NO: 2677527 - RNA, 13 nt, Human
aaauauuuucuau

SEQ ID NO: 2677528 - RNA, 14 nt, Human
aaauauuuucuauu

SEQ ID NO: 2677529 - RNA, 15 nt, Human
aaauauuuucuauuu

SEQ ID NO: 2677530 - RNA, 17 nt, Human
aaauauuuucuauuuua

SEQ ID NO: 2677531 - RNA, 19 nt, Human
aaauauuuucuauuuuaag

SEQ ID NO: 2677532 - RNA, 12 nt, Human
aaauauuuucuc

SEQ ID NO: 2677533 - RNA, 15 nt, Human
aaauauuuucucugu

SEQ ID NO: 2677534 - RNA, 21 nt, Human
aaauauuuucucuguacuuuu

SEQ ID NO: 2677535 - RNA, 13 nt, Human
aaaucuucccaug

SEQ ID NO: 2677536 - RNA, 21 nt, Human
aaauggccucauguggcugga

SEQ ID NO: 2677537 - RNA, 22 nt, Human
aaauggccucauguggcuggaa

SEQ ID NO: 2677538 - RNA, 23 nt, Human
aaauggacuggagcucaucugca

SEQ ID NO: 2677539 - RNA, 11 nt, Human
aaauggccuca

SEQ ID NO: 2677540 - RNA, 15 nt, Human
aaauggccucaugug

SEQ ID NO: 2677541 - RNA, 19 nt, Human
aaauggcuguaaucauuug

SEQ ID NO: 2677542 - RNA, 21 nt, Human
aaauggcuguaaucauuuguu

SEQ ID NO: 2677543 - RNA, 14 nt, Human
aaauauaacacauu

SEQ ID NO: 2677544 - RNA, 16 nt, Human
aaauauaacacauuuu

SEQ ID NO: 2677545 - RNA, 17 nt, Human
aaauauaacacauuuuu

SEQ ID NO: 2677546 - RNA, 22 nt, Human
aaauauaaacaaagauucauga

SEQ ID NO: 2677547 - RNA, 23 nt, Human
aaauauaaacaaagauucaugau

SEQ ID NO: 2677548 - RNA, 13 nt, Human
aaauauaaaauua

SEQ ID NO: 2677549 - RNA, 18 nt, Human
aaauauaaaauuaugaga

SEQ ID NO: 2677550 - RNA, 13 nt, Human
aaauauaaacaaa

SEQ ID NO: 2677551 - RNA, 16 nt, Human
aaauaguaugaaaaug

SEQ ID NO: 2677552 - RNA, 19 nt, Human
aaauaguaugaaaauggaa

SEQ ID NO: 2677553 - RNA, 23 nt, Human
aaauagucucuuuaaaaggaaag

SEQ ID NO: 2677554 - RNA, 16 nt, Human
aaauagaagagagagg

SEQ ID NO: 2677555 - RNA, 12 nt, Human
aaauagaaauuu

SEQ ID NO: 2677556 - RNA, 14 nt, Human
aaauagaaauuuug

SEQ ID NO: 2677557 - RNA, 19 nt, Human
aaauagaaauuuuguaaga

SEQ ID NO: 2677558 - RNA, 16 nt, Human
aaauagaaccacuaug

SEQ ID NO: 2677559 - RNA, 12 nt, Human
aaauagaaacau

SEQ ID NO: 2677560 - RNA, 22 nt, Human
aaauaaagagagaacaggacua

SEQ ID NO: 2677561 - RNA, 15 nt, Human
aaauaaagagccaua

SEQ ID NO: 2677562 - RNA, 14 nt, Human
aaauaaagagagaa

SEQ ID NO: 2677563 - RNA, 15 nt, Human
aaauaaaauuuguug

SEQ ID NO: 2677564 - RNA, 16 nt, Human
aaauaaaauuuguugc

SEQ ID NO: 2677565 - RNA, 17 nt, Human
aaauaaaauuuguugca

SEQ ID NO: 2677566 - RNA, 11 nt, Human
aaauaaagaag

SEQ ID NO: 2677567 - RNA, 13 nt, Human
aaauaaagaagua

SEQ ID NO: 2677568 - RNA, 14 nt, Human
aaauaaagaaguau

SEQ ID NO: 2677569 - RNA, 14 nt, Human
aaauaaaauauauc

SEQ ID NO: 2677570 - RNA, 14 nt, Human
aaauaaaaugaaaa

SEQ ID NO: 2677571 - RNA, 15 nt, Human
aaauaaaaugaaaau

SEQ ID NO: 2677572 - RNA, 19 nt, Human
aaauaaaaugaaaauugua

SEQ ID NO: 2677573 - RNA, 21 nt, Human
aaauaaaaugaaaauuguauu

SEQ ID NO: 2677574 - RNA, 23 nt, Human
aaauaaaaugaaaauuguauuau

SEQ ID NO: 2677575 - RNA, 18 nt, Human
aaagucuuuuuuuuccug

SEQ ID NO: 2677576 - RNA, 13 nt, Human
aaagugaagcaaa

SEQ ID NO: 2677577 - RNA, 23 nt, Human
aaagugaagcaaaucagaaacuu

SEQ ID NO: 2677578 - RNA, 23 nt, Human
aaagucugcucucauauaagaca

SEQ ID NO: 2677579 - RNA, 16 nt, Human
aaagucugucuuuccu

SEQ ID NO: 2677580 - RNA, 18 nt, Human
aaagucugucuuuccuga

SEQ ID NO: 2677581 - RNA, 14 nt, Human
aaagggaauuauga

SEQ ID NO: 2677582 - RNA, 14 nt, Human
aaagggaagaaacu

SEQ ID NO: 2677583 - RNA, 17 nt, Human
aaaggcuugaagcugug

SEQ ID NO: 2677584 - RNA, 16 nt, Human
aaaggcuugaagcugu

SEQ ID NO: 2677585 - RNA, 17 nt, Human
aaaggcuuauaaaacag

SEQ ID NO: 2677586 - RNA, 14 nt, Human
aaaggcuuauaaaa

SEQ ID NO: 2677587 - RNA, 16 nt, Human
aaaacacauguuuuua

SEQ ID NO: 2677588 - RNA, 18 nt, Human
aaaauucauaguaagauu

SEQ ID NO: 2677589 - RNA, 19 nt, Human
aaaauucauaguaagauug

SEQ ID NO: 2677590 - RNA, 20 nt, Human
aaaauucauaguaagauuga

SEQ ID NO: 2677591 - RNA, 13 nt, Human
aaaauucauuucu

SEQ ID NO: 2677592 - RNA, 14 nt, Human
aaaauucauuucua

SEQ ID NO: 2677593 - RNA, 15 nt, Human
aaaauucauuucuaa

SEQ ID NO: 2677594 - RNA, 16 nt, Human
aaaauuggcaaaacua

SEQ ID NO: 2677595 - RNA, 13 nt, Human
aaacacugccuuu

SEQ ID NO: 2677596 - RNA, 17 nt, Human
aaacacugccuuuuuau

SEQ ID NO: 2677597 - RNA, 18 nt, Human
aaacacugccuuuuuauu

SEQ ID NO: 2677598 - RNA, 18 nt, Human
aaacagaguaaucuuguu

SEQ ID NO: 2677599 - RNA, 17 nt, Human
aaacagaguaaucuugu

SEQ ID NO: 2677600 - RNA, 15 nt, Human
aaagaugaaaggcag

SEQ ID NO: 2677601 - RNA, 22 nt, Human
aaacugaagcagccucucccca

SEQ ID NO: 2677602 - RNA, 17 nt, Human
aaagauagacagguccu

SEQ ID NO: 2677603 - RNA, 12 nt, Human
aaagaaaguggu

SEQ ID NO: 2677604 - RNA, 23 nt, Human
aaagaaaguggucuuaagaaaug

SEQ ID NO: 2677605 - RNA, 13 nt, Human
aaagaaauaaacc

SEQ ID NO: 2677606 - RNA, 12 nt, Human
aaagaaauacag

SEQ ID NO: 2677607 - RNA, 11 nt, Human
aaagagguuuu

SEQ ID NO: 2677608 - RNA, 20 nt, Human
aacuuuuguguaaugaaaau

SEQ ID NO: 2677609 - RNA, 11 nt, Human
aacuuuuguac

SEQ ID NO: 2677610 - RNA, 14 nt, Human
aacuuuuguacuga

SEQ ID NO: 2677611 - RNA, 17 nt, Human
aacuuuuguacugaauu

SEQ ID NO: 2677612 - RNA, 18 nt, Human
aacuuuuguacugaauuu

SEQ ID NO: 2677613 - RNA, 19 nt, Human
aacuuuuguacugaauuuu

SEQ ID NO: 2677614 - RNA, 20 nt, Human
aacuuuuguacugaauuuuu

SEQ ID NO: 2677615 - RNA, 14 nt, Human
aacuuuuguaaaua

SEQ ID NO: 2677616 - RNA, 14 nt, Human
aacuuuuaucuauu

SEQ ID NO: 2677617 - RNA, 12 nt, Human
aacuuuucuaga

SEQ ID NO: 2677618 - RNA, 19 nt, Human
aagaaauccggagaagcug

SEQ ID NO: 2677619 - RNA, 12 nt, Human
aagaaaugaugu

SEQ ID NO: 2677620 - RNA, 13 nt, Human
aagaaaugauguu

SEQ ID NO: 2677621 - RNA, 22 nt, Human
aacuuuguauaguuauguaaau

SEQ ID NO: 2677622 - RNA, 21 nt, Human
aacuuuguauaguuauguaaa

SEQ ID NO: 2677623 - RNA, 20 nt, Human
aacuuuguauaguuauguaa

SEQ ID NO: 2677624 - RNA, 12 nt, Human
aacuuugggaaa

SEQ ID NO: 2677625 - RNA, 16 nt, Human
aacuuugggaaaacau

SEQ ID NO: 2677626 - RNA, 22 nt, Human
aacuuugggaaaacauguuaau

SEQ ID NO: 2677627 - RNA, 14 nt, Human
aacuuuguaaaaau

SEQ ID NO: 2677628 - RNA, 18 nt, Human
aacuuuguaaaaaucuuu

SEQ ID NO: 2677629 - RNA, 21 nt, Human
aacuuuguaaaaaucuuuuga

SEQ ID NO: 2677630 - RNA, 15 nt, Human
aacuuuguauaguua

SEQ ID NO: 2677631 - RNA, 14 nt, Human
aacuuuguauaguu

SEQ ID NO: 2677632 - RNA, 13 nt, Human
aacuuuguauagu

SEQ ID NO: 2677633 - RNA, 22 nt, Human
aacuguuugaaaacuucagaag

SEQ ID NO: 2677634 - RNA, 14 nt, Human
aacuuaaauaauaa

SEQ ID NO: 2677635 - RNA, 13 nt, Human
aacuuaaauaaua

SEQ ID NO: 2677636 - RNA, 13 nt, Human
aacucaaugcuuu

SEQ ID NO: 2677637 - RNA, 16 nt, Human
aacucaaugcuuuauu

SEQ ID NO: 2677638 - RNA, 19 nt, Human
aacucaaugcuuuauuugu

SEQ ID NO: 2677639 - RNA, 20 nt, Human
aacucaaugcuuuauuugua

SEQ ID NO: 2677640 - RNA, 21 nt, Human
aacucaaugcuuuauuuguaa

SEQ ID NO: 2677641 - RNA, 20 nt, Human
aacucaccagccccacugcc

SEQ ID NO: 2677642 - RNA, 18 nt, Human
aacugaagcagccucucc

SEQ ID NO: 2677643 - RNA, 14 nt, Human
aacucaggcaaaga

SEQ ID NO: 2677644 - RNA, 15 nt, Human
aacucaggcaaagaa

SEQ ID NO: 2677645 - RNA, 17 nt, Human
aacucaggcaaagaaaa

SEQ ID NO: 2677646 - RNA, 18 nt, Human
aacucaggcaaagaaaau

SEQ ID NO: 2677647 - RNA, 19 nt, Human
aacuuauuuuaaauaugcc

SEQ ID NO: 2677648 - RNA, 20 nt, Human
aacacauuuuuuugcaugca

SEQ ID NO: 2677649 - RNA, 22 nt, Human
aacaagaaauaauagaaauguc

SEQ ID NO: 2677650 - RNA, 16 nt, Human
aacaaaaagcuucccc

SEQ ID NO: 2677651 - RNA, 14 nt, Human
aacaaaaagcuucc

SEQ ID NO: 2677652 - RNA, 19 nt, Human
aaauuggggaggagggggc

SEQ ID NO: 2677653 - RNA, 14 nt, Human
aacaaaaugaagcu

SEQ ID NO: 2677654 - RNA, 12 nt, Human
aaauugcauacu

SEQ ID NO: 2677655 - RNA, 14 nt, Human
aaauugcauacuuu

SEQ ID NO: 2677656 - RNA, 15 nt, Human
aaauugcauacuuug

SEQ ID NO: 2677657 - RNA, 17 nt, Human
aaauugcauacuuugua

SEQ ID NO: 2677658 - RNA, 23 nt, Human
aaauugcauacuuuguauuuuga

SEQ ID NO: 2677659 - RNA, 18 nt, Human
aaauugcuuuguauugua

SEQ ID NO: 2677660 - RNA, 19 nt, Human
aacaccuucuauagcauca

SEQ ID NO: 2677661 - RNA, 15 nt, Human
aacccugccgucacc

SEQ ID NO: 2677662 - RNA, 18 nt, Human
aacccugccgucaccacc

SEQ ID NO: 2677663 - RNA, 19 nt, Human
aacccugccgucaccacca

SEQ ID NO: 2677664 - RNA, 20 nt, Human
aacccugccgucaccaccac

SEQ ID NO: 2677665 - RNA, 21 nt, Human
aacccugccgucaccaccacc

SEQ ID NO: 2677666 - RNA, 22 nt, Human
aacccugccgucaccaccaccc

SEQ ID NO: 2677667 - RNA, 23 nt, Human
aacaugguuugacucaucuuaua

SEQ ID NO: 2677668 - RNA, 12 nt, Human
aaccacuagaaa

SEQ ID NO: 2677669 - RNA, 13 nt, Human
aacaugcccccug

SEQ ID NO: 2677670 - RNA, 14 nt, Human
aacaugcccccugc

SEQ ID NO: 2677671 - RNA, 22 nt, Human
aacaugcccccugcagacacgu

SEQ ID NO: 2677672 - RNA, 23 nt, Human
aacaugaguagauaauuucaggg

SEQ ID NO: 2677673 - RNA, 13 nt, Human
aacaucauuccuu

SEQ ID NO: 2677674 - RNA, 11 nt, Human
aacagcugcaa

SEQ ID NO: 2677675 - RNA, 19 nt, Human
aacagcugcaauucccugg

SEQ ID NO: 2677676 - RNA, 21 nt, Human
aacagcugcaauucccuggau

SEQ ID NO: 2677677 - RNA, 22 nt, Human
acaauguuguagugucccccac

SEQ ID NO: 2677678 - RNA, 20 nt, Human
acaauuugcacuaaaucaga

SEQ ID NO: 2677679 - RNA, 12 nt, Human
acaauuuuaaga

SEQ ID NO: 2677680 - RNA, 12 nt, Human
acacagaaacac

SEQ ID NO: 2677681 - RNA, 13 nt, Human
acacagaaacacu

SEQ ID NO: 2677682 - RNA, 14 nt, Human
acacagaaacacug

SEQ ID NO: 2677683 - RNA, 16 nt, Human
acacagaaacacugcc

SEQ ID NO: 2677684 - RNA, 17 nt, Human
acacagaaacacugccu

SEQ ID NO: 2677685 - RNA, 21 nt, Human
acacagaaacacugccuuuuu

SEQ ID NO: 2677686 - RNA, 18 nt, Human
acacaaacgggcucagca

SEQ ID NO: 2677687 - RNA, 15 nt, Human
acaauuuuguacaaa

SEQ ID NO: 2677688 - RNA, 12 nt, Human
acaauuuuguac

SEQ ID NO: 2677689 - RNA, 19 nt, Human
acacagccugggccccagc

SEQ ID NO: 2677690 - RNA, 18 nt, Human
acacagccugggccccag

SEQ ID NO: 2677691 - RNA, 20 nt, Human
acacagccugggccccagcu

SEQ ID NO: 2677692 - RNA, 14 nt, Human
acacagacuauuuu

SEQ ID NO: 2677693 - RNA, 16 nt, Human
acacagaaugcaacca

SEQ ID NO: 2677694 - RNA, 21 nt, Human
acacagacacuaacgaaauau

SEQ ID NO: 2677695 - RNA, 23 nt, Human
acaccaaucuuacuuuguaaauu

SEQ ID NO: 2677696 - RNA, 22 nt, Human
acaccaaucuuacuuuguaaau

SEQ ID NO: 2677697 - RNA, 20 nt, Human
acaccaaucuuacuuuguaa

SEQ ID NO: 2677698 - RNA, 15 nt, Human
acacggacacucaaa

SEQ ID NO: 2677699 - RNA, 22 nt, Human
acacggagcccagcccucccca

SEQ ID NO: 2677700 - RNA, 18 nt, Human
acacggagcccagcccuc

SEQ ID NO: 2677701 - RNA, 19 nt, Human
aauuuuaucuguuuccuga

SEQ ID NO: 2677702 - RNA, 17 nt, Human
acaaagacaaaagucug

SEQ ID NO: 2677703 - RNA, 18 nt, Human
acaaagacaaaagucugu

SEQ ID NO: 2677704 - RNA, 21 nt, Human
acaaaccuaccaaaauggaau

SEQ ID NO: 2677705 - RNA, 15 nt, Human
acaaacgggcucagc

SEQ ID NO: 2677706 - RNA, 22 nt, Human
aauuuugaaaaguaauauuuau

SEQ ID NO: 2677707 - RNA, 13 nt, Human
aauuuugaaaagu

SEQ ID NO: 2677708 - RNA, 21 nt, Human
aauuuugaaaaguaauauuua

SEQ ID NO: 2677709 - RNA, 20 nt, Human
aauuuugaaaaguaauauuu

SEQ ID NO: 2677710 - RNA, 23 nt, Human
aauuuugauaaaaauuuagaaca

SEQ ID NO: 2677711 - RNA, 18 nt, Human
acaaaccuaccaaaaugg

SEQ ID NO: 2677712 - RNA, 16 nt, Human
acaaguaguucuguau

SEQ ID NO: 2677713 - RNA, 23 nt, Human
acaaguaguucuguauuugaaag

SEQ ID NO: 2677714 - RNA, 22 nt, Human
acaaguaguucuguauuugaaa

SEQ ID NO: 2677715 - RNA, 21 nt, Human
acaaguaguucuguauuugaa

SEQ ID NO: 2677716 - RNA, 20 nt, Human
acaaguaguucuguauuuga

SEQ ID NO: 2677717 - RNA, 19 nt, Human
acaaguaguucuguauuug

SEQ ID NO: 2677718 - RNA, 18 nt, Human
acaaguaguucuguauuu

SEQ ID NO: 2677719 - RNA, 17 nt, Human
acaaguaguucuguauu

SEQ ID NO: 2677720 - RNA, 22 nt, Human
acaagucagcuccagcuuucug

SEQ ID NO: 2677721 - RNA, 13 nt, Human
acagccagcaccu

SEQ ID NO: 2677722 - RNA, 16 nt, Human
acagccagcaccuggc

SEQ ID NO: 2677723 - RNA, 16 nt, Human
acagccacuccccggc

SEQ ID NO: 2677724 - RNA, 16 nt, Human
acagccaaaggcuggc

SEQ ID NO: 2677725 - RNA, 13 nt, Human
acagcaucagggu

SEQ ID NO: 2677726 - RNA, 15 nt, Human
acagagucaaggccu

SEQ ID NO: 2677727 - RNA, 18 nt, Human
acagagucaaggccugcu

SEQ ID NO: 2677728 - RNA, 19 nt, Human
acagaguagccagguucug

SEQ ID NO: 2677729 - RNA, 15 nt, Human
acagaguaaucuugu

SEQ ID NO: 2677730 - RNA, 19 nt, Human
acagagguauuaaaacuaa

SEQ ID NO: 2677731 - RNA, 22 nt, Human
acagagguauuaaaacuaaauu

SEQ ID NO: 2677732 - RNA, 15 nt, Human
acagaauauuuuuau

SEQ ID NO: 2677733 - RNA, 16 nt, Human
acagaauauuuuuaua

SEQ ID NO: 2677734 - RNA, 22 nt, Human
acagaauauuuuuauauuuccu

SEQ ID NO: 2677735 - RNA, 23 nt, Human
acagaauauuuuuauauuuccuu

SEQ ID NO: 2677736 - RNA, 22 nt, Human
acacugccuuuuuauuuauaug

SEQ ID NO: 2677737 - RNA, 21 nt, Human
acacugcugcuccagugcagg

SEQ ID NO: 2677738 - RNA, 15 nt, Human
acacugccugccuua

SEQ ID NO: 2677739 - RNA, 20 nt, Human
acacugccugccuuaaguga

SEQ ID NO: 2677740 - RNA, 16 nt, Human
acacugccugccuuaa

SEQ ID NO: 2677741 - RNA, 12 nt, Human
acacugccuggg

SEQ ID NO: 2677742 - RNA, 13 nt, Human
acacugccugggc

SEQ ID NO: 2677743 - RNA, 14 nt, Human
acacugccugggcu

SEQ ID NO: 2677744 - RNA, 15 nt, Human
acacugccugggcug

SEQ ID NO: 2677745 - RNA, 16 nt, Human
acacugccugggcuga

SEQ ID NO: 2677746 - RNA, 19 nt, Human
acacugccuuuuuauuuau

SEQ ID NO: 2677747 - RNA, 20 nt, Human
acacugccuuuuuauuuaua

SEQ ID NO: 2677748 - RNA, 23 nt, Human
acacugccuuuuuauuuauaugu

SEQ ID NO: 2677749 - RNA, 23 nt, Human
acagaaauuguauauuguaauuu

SEQ ID NO: 2677750 - RNA, 14 nt, Human
acagaaauuguaua

SEQ ID NO: 2677751 - RNA, 15 nt, Human
acagaaauuguauau

SEQ ID NO: 2677752 - RNA, 16 nt, Human
acagaaauuguauauu

SEQ ID NO: 2677753 - RNA, 19 nt, Human
acagaaauuguauauugua

SEQ ID NO: 2677754 - RNA, 13 nt, Human
acagguccugauu

SEQ ID NO: 2677755 - RNA, 14 nt, Human
acauaaaagaaaua

SEQ ID NO: 2677756 - RNA, 15 nt, Human
acauaaaagaaauaa

SEQ ID NO: 2677757 - RNA, 17 nt, Human
acauaaaagaaauaaac

SEQ ID NO: 2677758 - RNA, 16 nt, Human
acauguuaaugacaau

SEQ ID NO: 2677759 - RNA, 20 nt, Human
acauguuaaugacaauauuc

SEQ ID NO: 2677760 - RNA, 21 nt, Human
acauccagagcuuugucguau

SEQ ID NO: 2677761 - RNA, 21 nt, Human
acauguuuaauaaauaaaaau

SEQ ID NO: 2677762 - RNA, 20 nt, Human
acauguugggaaacuuggcu

SEQ ID NO: 2677763 - RNA, 13 nt, Human
acaugcaauaaaa

SEQ ID NO: 2677764 - RNA, 14 nt, Human
acaugcaauaaaau

SEQ ID NO: 2677765 - RNA, 15 nt, Human
acaugcaauaaaauu

SEQ ID NO: 2677766 - RNA, 16 nt, Human
acaugcaauaaaauuu

SEQ ID NO: 2677767 - RNA, 18 nt, Human
acaugcaauaaaauuuaa

SEQ ID NO: 2677768 - RNA, 19 nt, Human
acaugcaauaaaauuuaaa

SEQ ID NO: 2677769 - RNA, 13 nt, Human
acauguuuauaaa

SEQ ID NO: 2677770 - RNA, 21 nt, Human
acauuaaaggcauaaaugacu

SEQ ID NO: 2677771 - RNA, 15 nt, Human
acauuugcugccauu

SEQ ID NO: 2677772 - RNA, 23 nt, Human
accaacugucacucauugcugag

SEQ ID NO: 2677773 - RNA, 20 nt, Human
acauuugggaguuuuuauga

SEQ ID NO: 2677774 - RNA, 21 nt, Human
acauuugggaguuuuuaugag

SEQ ID NO: 2677775 - RNA, 16 nt, Human
accagcaucaccugcc

SEQ ID NO: 2677776 - RNA, 17 nt, Human
accagcaucaccugccu

SEQ ID NO: 2677777 - RNA, 17 nt, Human
accagcagccuggaccc

SEQ ID NO: 2677778 - RNA, 14 nt, Human
accagcagccugga

SEQ ID NO: 2677779 - RNA, 13 nt, Human
accagcagccugg

SEQ ID NO: 2677780 - RNA, 22 nt, Human
accacgccucuugaccaggcug

SEQ ID NO: 2677781 - RNA, 18 nt, Human
accacgccucuugaccag

SEQ ID NO: 2677782 - RNA, 23 nt, Human
accacgcccguccugccuguggc

SEQ ID NO: 2677783 - RNA, 20 nt, Human
accacgcccguccugccugu

SEQ ID NO: 2677784 - RNA, 21 nt, Human
accacgcccguccugccugug

SEQ ID NO: 2677785 - RNA, 18 nt, Human
accacgcccguccugccu

SEQ ID NO: 2677786 - RNA, 19 nt, Human
accacgcccguccugccug

SEQ ID NO: 2677787 - RNA, 18 nt, Human
accagcaucaccugccug

SEQ ID NO: 2677788 - RNA, 19 nt, Human
accagcaucaccugccugu

SEQ ID NO: 2677789 - RNA, 19 nt, Human
accccgguggcggccccag

SEQ ID NO: 2677790 - RNA, 21 nt, Human
accccgguggcggccccagca

SEQ ID NO: 2677791 - RNA, 15 nt, Human
accccggggacccug

SEQ ID NO: 2677792 - RNA, 16 nt, Human
accccggggacccugu

SEQ ID NO: 2677793 - RNA, 17 nt, Human
accccggggacccugug

SEQ ID NO: 2677794 - RNA, 18 nt, Human
accccggggacccuguga

SEQ ID NO: 2677795 - RNA, 19 nt, Human
accccaaacagugacugua

SEQ ID NO: 2677796 - RNA, 22 nt, Human
accccggccggccacccaggag

SEQ ID NO: 2677797 - RNA, 15 nt, Human
accccgcagacaccu

SEQ ID NO: 2677798 - RNA, 17 nt, Human
accccgcagacaccuug

SEQ ID NO: 2677799 - RNA, 18 nt, Human
accccgcagacaccuugg

SEQ ID NO: 2677800 - RNA, 20 nt, Human
accccgcagacaccuuggac

SEQ ID NO: 2677801 - RNA, 15 nt, Human
acccaagcuuagaac

SEQ ID NO: 2677802 - RNA, 20 nt, Human
accccucaacaccucugcac

SEQ ID NO: 2677803 - RNA, 16 nt, Human
accccgucucuacuaa

SEQ ID NO: 2677804 - RNA, 13 nt, Human
agaaauaaaccaa

SEQ ID NO: 2677805 - RNA, 14 nt, Human
agaaauaaaccaaa

SEQ ID NO: 2677806 - RNA, 23 nt, Human
agaaauaaaccaaaggaaaaugu

SEQ ID NO: 2677807 - RNA, 18 nt, Human
agaaauaaaguuugcuua

SEQ ID NO: 2677808 - RNA, 13 nt, Human
agaaacaaacauc

SEQ ID NO: 2677809 - RNA, 13 nt, Human
agaaaauugaguu

SEQ ID NO: 2677810 - RNA, 22 nt, Human
agaaaauugaguugcacuuauu

SEQ ID NO: 2677811 - RNA, 11 nt, Human
agaaaauguga

SEQ ID NO: 2677812 - RNA, 19 nt, Human
agaaaaugugacccuccaa

SEQ ID NO: 2677813 - RNA, 18 nt, Human
agaaaauauauucuuuca

SEQ ID NO: 2677814 - RNA, 19 nt, Human
agaaaauauauucuuucaa

SEQ ID NO: 2677815 - RNA, 21 nt, Human
acuuuuaucuauucugagaaa

SEQ ID NO: 2677816 - RNA, 18 nt, Human
acuuuucuagaauuauuu

SEQ ID NO: 2677817 - RNA, 23 nt, Human
acuuuucuagaauuauuuuucac

SEQ ID NO: 2677818 - RNA, 14 nt, Human
acuuuuauaaagca

SEQ ID NO: 2677819 - RNA, 16 nt, Human
acuuuuauaaagcaug

SEQ ID NO: 2677820 - RNA, 17 nt, Human
acuuuuauaaagcaugu

SEQ ID NO: 2677821 - RNA, 13 nt, Human
acuuuauaaaucc

SEQ ID NO: 2677822 - RNA, 19 nt, Human
acuuuagggggugggauuc

SEQ ID NO: 2677823 - RNA, 20 nt, Human
acuuuguuucguggggaggu

SEQ ID NO: 2677824 - RNA, 15 nt, Human
acuuuguugcaagau

SEQ ID NO: 2677825 - RNA, 17 nt, Human
acuuuguugcaagaugu

SEQ ID NO: 2677826 - RNA, 20 nt, Human
acuuuguugcaagaugugaa

SEQ ID NO: 2677827 - RNA, 21 nt, Human
acuuuguugcaagaugugaau

SEQ ID NO: 2677828 - RNA, 22 nt, Human
acuuuguugcaagaugugaauu

SEQ ID NO: 2677829 - RNA, 19 nt, Human
acuucugccagauguccua

SEQ ID NO: 2677830 - RNA, 12 nt, Human
acuucugccaga

SEQ ID NO: 2677831 - RNA, 16 nt, Human
acuucugcaacaagca

SEQ ID NO: 2677832 - RNA, 18 nt, Human
acuucugcaacaagcaug

SEQ ID NO: 2677833 - RNA, 19 nt, Human
acuucugcaacaagcaugc

SEQ ID NO: 2677834 - RNA, 24 nt, Human
acuucugcaacaagcaugcagcuu

SEQ ID NO: 2677835 - RNA, 14 nt, Human
acuguuuuaucugg

SEQ ID NO: 2677836 - RNA, 21 nt, Human
acuguuuguuuuuauuuaaau

SEQ ID NO: 2677837 - RNA, 22 nt, Human
acuguuuguuuuuauuuaaauu

SEQ ID NO: 2677838 - RNA, 17 nt, Human
acuguuuuccaguucau

SEQ ID NO: 2677839 - RNA, 20 nt, Human
acuguuuagauuugccauag

SEQ ID NO: 2677840 - RNA, 19 nt, Human
acuguuuagauuugccaua

SEQ ID NO: 2677841 - RNA, 14 nt, Human
acuguuuauuacuu

SEQ ID NO: 2677842 - RNA, 20 nt, Human
acuguuuauuacuuccauga

SEQ ID NO: 2677843 - RNA, 24 nt, Human
acuguuuauuacuuccaugaauuu

SEQ ID NO: 2677844 - RNA, 13 nt, Human
acuguuuagauuu

SEQ ID NO: 2677845 - RNA, 14 nt, Human
acuguuuaaucaua

SEQ ID NO: 2677846 - RNA, 20 nt, Human
acuguuuaaucauaguuacu

SEQ ID NO: 2677847 - RNA, 22 nt, Human
acuguuuaaucauaguuacugu

SEQ ID NO: 2677848 - RNA, 13 nt, Human
acugucuuccuca

SEQ ID NO: 2677849 - RNA, 14 nt, Human
acugucuuccucaa

SEQ ID NO: 2677850 - RNA, 18 nt, Human
acugucuuccucaaaaua

SEQ ID NO: 2677851 - RNA, 20 nt, Human
acugucuuccucaaaauaaa

SEQ ID NO: 2677852 - RNA, 12 nt, Human
acugucuucagu

SEQ ID NO: 2677853 - RNA, 15 nt, Human
acugucugugaacag

SEQ ID NO: 2677854 - RNA, 13 nt, Human
acugugcacaccc

SEQ ID NO: 2677855 - RNA, 20 nt, Human
acugucucucuucucagagu

SEQ ID NO: 2677856 - RNA, 15 nt, Human
acuggguugcgggac

SEQ ID NO: 2677857 - RNA, 17 nt, Human
acugucuauuaauauuc

SEQ ID NO: 2677858 - RNA, 12 nt, Human
acuguccugucc

SEQ ID NO: 2677859 - RNA, 13 nt, Human
acuguccuguccu

SEQ ID NO: 2677860 - RNA, 15 nt, Human
acuguccuguccugc

SEQ ID NO: 2677861 - RNA, 17 nt, Human
acuguccuguccugcuc

SEQ ID NO: 2677862 - RNA, 15 nt, Human
acuggguaggaaaga

SEQ ID NO: 2677863 - RNA, 21 nt, Human
acugccacacucuccaucacc

SEQ ID NO: 2677864 - RNA, 16 nt, Human
acugcauuuagggagu

SEQ ID NO: 2677865 - RNA, 19 nt, Human
acugcauuuagggaguauu

SEQ ID NO: 2677866 - RNA, 14 nt, Human
acugcauuuaggga

SEQ ID NO: 2677867 - RNA, 18 nt, Human
acugccacacucuccauc

SEQ ID NO: 2677868 - RNA, 23 nt, Human
acugccaauauagaaaaauaaaa

SEQ ID NO: 2677869 - RNA, 21 nt, Human
acugaagucuuacuacagaaa

SEQ ID NO: 2677870 - RNA, 23 nt, Human
acugaagucuuacuacagaaaug

SEQ ID NO: 2677871 - RNA, 23 nt, Human
acugaaggaaaaacacaagcaaa

SEQ ID NO: 2677872 - RNA, 20 nt, Human
acugaaggaaaaacacaagc

SEQ ID NO: 2677873 - RNA, 22 nt, Human
acugaaggaaaaacacaagcaa

SEQ ID NO: 2677874 - RNA, 18 nt, Human
acugaaggaaaaacacaa

SEQ ID NO: 2677875 - RNA, 11 nt, Human
acucagccuuc

SEQ ID NO: 2677876 - RNA, 23 nt, Human
acucagccuucagacagagagga

SEQ ID NO: 2677877 - RNA, 11 nt, Human
acucagugcag

SEQ ID NO: 2677878 - RNA, 12 nt, Human
acucagugcaga

SEQ ID NO: 2677879 - RNA, 20 nt, Human
acucaguggguuaacaucag

SEQ ID NO: 2677880 - RNA, 14 nt, Human
acucccccaggugg

SEQ ID NO: 2677881 - RNA, 15 nt, Human
acucaaauacacauu

SEQ ID NO: 2677882 - RNA, 16 nt, Human
acucaaauacacauuu

SEQ ID NO: 2677883 - RNA, 19 nt, Human
acucaaauacacauuugcu

SEQ ID NO: 2677884 - RNA, 16 nt, Human
acucaaacucuuaaaa

SEQ ID NO: 2677885 - RNA, 17 nt, Human
acucaaacucuuaaaac

SEQ ID NO: 2677886 - RNA, 18 nt, Human
acucaaaagcugggcagg

SEQ ID NO: 2677887 - RNA, 14 nt, Human
acuauaaaacaaaa

SEQ ID NO: 2677888 - RNA, 15 nt, Human
acuauaaaacaaaaa

SEQ ID NO: 2677889 - RNA, 18 nt, Human
acuaggcccccacuugcc

SEQ ID NO: 2677890 - RNA, 20 nt, Human
acuaggcccccacuugccuc

SEQ ID NO: 2677891 - RNA, 18 nt, Human
acuaggagaaccaaaucu

SEQ ID NO: 2677892 - RNA, 15 nt, Human
acucuggguccuucc

SEQ ID NO: 2677893 - RNA, 18 nt, Human
acucuggguccuuccuga

SEQ ID NO: 2677894 - RNA, 16 nt, Human
acucuggguccuuccu

SEQ ID NO: 2677895 - RNA, 17 nt, Human
acucuggcuuuuggaag

SEQ ID NO: 2677896 - RNA, 19 nt, Human
acucuggguccuuccugaa

SEQ ID NO: 2677897 - RNA, 18 nt, Human
acucuuaaaacccaagug

SEQ ID NO: 2677898 - RNA, 11 nt, Human
acucuuaaaac

SEQ ID NO: 2677899 - RNA, 18 nt, Human
acucuacccucuuagaaa

SEQ ID NO: 2677900 - RNA, 13 nt, Human
acucuacccucuu

SEQ ID NO: 2677901 - RNA, 21 nt, Human
acucuacccucuuagaaaaac

SEQ ID NO: 2677902 - RNA, 16 nt, Human
acucccuugcuggccc

SEQ ID NO: 2677903 - RNA, 17 nt, Human
acucccuugcuggcccc

SEQ ID NO: 2677904 - RNA, 18 nt, Human
acucccuugcuggcccca

SEQ ID NO: 2677905 - RNA, 19 nt, Human
acucccuugcuggccccag

SEQ ID NO: 2677906 - RNA, 21 nt, Human
acucccuugcuggccccagcc

SEQ ID NO: 2677907 - RNA, 22 nt, Human
acucccuugcuggccccagccc

SEQ ID NO: 2677908 - RNA, 23 nt, Human
acucccuugcuggccccagcccu

SEQ ID NO: 2677909 - RNA, 14 nt, Human
accuguagucccag

SEQ ID NO: 2677910 - RNA, 16 nt, Human
accuguagucccagcu

SEQ ID NO: 2677911 - RNA, 16 nt, Human
accuguauacagugca

SEQ ID NO: 2677912 - RNA, 20 nt, Human
accuguauauuuguaaagcu

SEQ ID NO: 2677913 - RNA, 21 nt, Human
accuguauauuuguaaagcua

SEQ ID NO: 2677914 - RNA, 17 nt, Human
accuguauuuaaaaaua

SEQ ID NO: 2677915 - RNA, 18 nt, Human
accuguauuuaaaaauag

SEQ ID NO: 2677916 - RNA, 20 nt, Human
accuguauuuaaaaauagaa

SEQ ID NO: 2677917 - RNA, 21 nt, Human
accuguauuuaaaaauagaaa

SEQ ID NO: 2677918 - RNA, 23 nt, Human
accuguauuuaaaaauagaaaca

SEQ ID NO: 2677919 - RNA, 17 nt, Human
accuuguuacuucugag

SEQ ID NO: 2677920 - RNA, 14 nt, Human
accuugugccuggg

SEQ ID NO: 2677921 - RNA, 16 nt, Human
accuugugccuggggu

SEQ ID NO: 2677922 - RNA, 12 nt, Human
accuugugccug

SEQ ID NO: 2677923 - RNA, 12 nt, Human
accuuguauaaa

SEQ ID NO: 2677924 - RNA, 19 nt, Human
accuuguauaaauuauuca

SEQ ID NO: 2677925 - RNA, 15 nt, Human
accuuguuacuucug

SEQ ID NO: 2677926 - RNA, 16 nt, Human
accuuguuacuucuga

SEQ ID NO: 2677927 - RNA, 17 nt, Human
accuuuauuuuagaauu

SEQ ID NO: 2677928 - RNA, 14 nt, Human
accuuucaaagcuu

SEQ ID NO: 2677929 - RNA, 21 nt, Human
accucugcacaagcugcaccc

SEQ ID NO: 2677930 - RNA, 18 nt, Human
accucugcacaagcugca

SEQ ID NO: 2677931 - RNA, 16 nt, Human
accucugcacaagcug

SEQ ID NO: 2677932 - RNA, 16 nt, Human
accucuucuggcucaa

SEQ ID NO: 2677933 - RNA, 14 nt, Human
accucuucuggcuc

SEQ ID NO: 2677934 - RNA, 15 nt, Human
acgaugauguacaga

SEQ ID NO: 2677935 - RNA, 19 nt, Human
acgaucacaaaugacuuua

SEQ ID NO: 2677936 - RNA, 12 nt, Human
acgauuuaaggu

SEQ ID NO: 2677937 - RNA, 12 nt, Human
acgccacucauu

SEQ ID NO: 2677938 - RNA, 15 nt, Human
acgccacucauuuca

SEQ ID NO: 2677939 - RNA, 16 nt, Human
acgccacucauuucau

SEQ ID NO: 2677940 - RNA, 17 nt, Human
acgccacucauuucauc

SEQ ID NO: 2677941 - RNA, 20 nt, Human
acgccacucauuucaucuca

SEQ ID NO: 2677942 - RNA, 21 nt, Human
acgccacucauuucaucucau

SEQ ID NO: 2677943 - RNA, 23 nt, Human
acuaauaaucuuguuucugaaaa

SEQ ID NO: 2677944 - RNA, 15 nt, Human
auaaguauuuauaau

SEQ ID NO: 2677945 - RNA, 19 nt, Human
auaaguauuuauaauagca

SEQ ID NO: 2677946 - RNA, 20 nt, Human
auaagugugugguagaaaca

SEQ ID NO: 2677947 - RNA, 13 nt, Human
auaacagcugcaa

SEQ ID NO: 2677948 - RNA, 19 nt, Human
auaacagcugcaauucccu

SEQ ID NO: 2677949 - RNA, 21 nt, Human
auaacagcugcaauucccugg

SEQ ID NO: 2677950 - RNA, 22 nt, Human
auaacagcugcaauucccugga

SEQ ID NO: 2677951 - RNA, 12 nt, Human
auaacacauuuu

SEQ ID NO: 2677952 - RNA, 13 nt, Human
auaacacauuuuu

SEQ ID NO: 2677953 - RNA, 23 nt, Human
auaacacauuuuuuugcaugcau

SEQ ID NO: 2677954 - RNA, 19 nt, Human
auacuuaccuagugaaacu

SEQ ID NO: 2677955 - RNA, 20 nt, Human
auacuuaccuagugaaacuu

SEQ ID NO: 2677956 - RNA, 21 nt, Human
auacuuaccuagugaaacuuu

SEQ ID NO: 2677957 - RNA, 13 nt, Human
auauccugugacu

SEQ ID NO: 2677958 - RNA, 14 nt, Human
auauccugugacug

SEQ ID NO: 2677959 - RNA, 13 nt, Human
auaucccuuccag

SEQ ID NO: 2677960 - RNA, 16 nt, Human
auaucccuuaaugaaa

SEQ ID NO: 2677961 - RNA, 20 nt, Human
auauccugugacugucucac

SEQ ID NO: 2677962 - RNA, 19 nt, Human
auauggaauuuugcaaaga

SEQ ID NO: 2677963 - RNA, 19 nt, Human
auauggacauaucaucugu

SEQ ID NO: 2677964 - RNA, 15 nt, Human
auauggaauuuugca

SEQ ID NO: 2677965 - RNA, 14 nt, Human
auaugcuuuauuaa

SEQ ID NO: 2677966 - RNA, 19 nt, Human
auaugcuuuauuaauguuu

SEQ ID NO: 2677967 - RNA, 20 nt, Human
auaugcuuuauuaauguuuu

SEQ ID NO: 2677968 - RNA, 15 nt, Human
auauuuauuaaauuu

SEQ ID NO: 2677969 - RNA, 16 nt, Human
auauucagauguaugu

SEQ ID NO: 2677970 - RNA, 15 nt, Human
auauuaguauguaug

SEQ ID NO: 2677971 - RNA, 13 nt, Human
auauuauaaagga

SEQ ID NO: 2677972 - RNA, 19 nt, Human
auauuauaaaggauaaaga

SEQ ID NO: 2677973 - RNA, 20 nt, Human
auauuauaaaggauaaagaa

SEQ ID NO: 2677974 - RNA, 23 nt, Human
auauuauaaaggauaaagaagga

SEQ ID NO: 2677975 - RNA, 20 nt, Human
auauuauacaggaaagcaau

SEQ ID NO: 2677976 - RNA, 23 nt, Human
auaguauccauauuuuauuacug

SEQ ID NO: 2677977 - RNA, 16 nt, Human
auauacaugaagaaua

SEQ ID NO: 2677978 - RNA, 19 nt, Human
auauacaugaagaauagaa

SEQ ID NO: 2677979 - RNA, 22 nt, Human
auauaauuuauuuccacuaaaa

SEQ ID NO: 2677980 - RNA, 18 nt, Human
auauacauucaaacuuaa

SEQ ID NO: 2677981 - RNA, 14 nt, Human
auauacauauauau

SEQ ID NO: 2677982 - RNA, 19 nt, Human
aguuguauuuaacagaaau

SEQ ID NO: 2677983 - RNA, 20 nt, Human
aguuguauuuaacagaaauu

SEQ ID NO: 2677984 - RNA, 22 nt, Human
aguuguauuuaacagaaauugu

SEQ ID NO: 2677985 - RNA, 23 nt, Human
aguuguauuuaacagaaauugua

SEQ ID NO: 2677986 - RNA, 13 nt, Human
agugugaauacug

SEQ ID NO: 2677987 - RNA, 16 nt, Human
agugugaauacugcuu

SEQ ID NO: 2677988 - RNA, 14 nt, Human
agugugaauacugc

SEQ ID NO: 2677989 - RNA, 15 nt, Human
agugauauuacauuu

SEQ ID NO: 2677990 - RNA, 13 nt, Human
agucaaggccugc

SEQ ID NO: 2677991 - RNA, 14 nt, Human
agucaaggccugcu

SEQ ID NO: 2677992 - RNA, 15 nt, Human
agucaaggccugcuc

SEQ ID NO: 2677993 - RNA, 19 nt, Human
agucaaggccugcucccug

SEQ ID NO: 2677994 - RNA, 16 nt, Human
agucaagugaaaaagg

SEQ ID NO: 2677995 - RNA, 20 nt, Human
agucaagugaaaaaggagga

SEQ ID NO: 2677996 - RNA, 16 nt, Human
agucaauauguggaag

SEQ ID NO: 2677997 - RNA, 14 nt, Human
agucaauaagaaaa

SEQ ID NO: 2677998 - RNA, 22 nt, Human
agucauuaugagaggcaaugau

SEQ ID NO: 2677999 - RNA, 13 nt, Human
agucauucagcag

SEQ ID NO: 2678000 - RNA, 22 nt, Human
agucauucagcagcaaauuuuc

SEQ ID NO: 2678001 - RNA, 23 nt, Human
agucauucagcagcaaauuuuca

SEQ ID NO: 2678002 - RNA, 14 nt, Human
agucauuaaacugg

SEQ ID NO: 2678003 - RNA, 14 nt, Human
agucauuaaagaca

SEQ ID NO: 2678004 - RNA, 23 nt, Human
agucauuaaagacaggagacaaa

SEQ ID NO: 2678005 - RNA, 14 nt, Human
aguccacccugccu

SEQ ID NO: 2678006 - RNA, 16 nt, Human
aguccacccugccugc

SEQ ID NO: 2678007 - RNA, 17 nt, Human
aguccacccugccugcc

SEQ ID NO: 2678008 - RNA, 19 nt, Human
aguccacccugccugccgu

SEQ ID NO: 2678009 - RNA, 14 nt, Human
aguccacuuuguuu

SEQ ID NO: 2678010 - RNA, 24 nt, Human
agugacaaauaaauuaggaccaag

SEQ ID NO: 2678011 - RNA, 14 nt, Human
agugaucaaacuac

SEQ ID NO: 2678012 - RNA, 16 nt, Human
agugaucaagaagacu

SEQ ID NO: 2678013 - RNA, 23 nt, Human
auccuuuguuuucugacuaauua

SEQ ID NO: 2678014 - RNA, 21 nt, Human
auccuuuguuuucugacuaau

SEQ ID NO: 2678015 - RNA, 19 nt, Human
auccuuuguuuucugacua

SEQ ID NO: 2678016 - RNA, 21 nt, Human
aucgacuuguuuuugcacaug

SEQ ID NO: 2678017 - RNA, 15 nt, Human
aucgagaccauccug

SEQ ID NO: 2678018 - RNA, 16 nt, Human
aucgagaccauccugg

SEQ ID NO: 2678019 - RNA, 17 nt, Human
aucgagaccauccuggc

SEQ ID NO: 2678020 - RNA, 19 nt, Human
aucgagaccauccuggcua

SEQ ID NO: 2678021 - RNA, 22 nt, Human
aucgagugccgcaucucacagc

SEQ ID NO: 2678022 - RNA, 21 nt, Human
aucgagugccgcaucucacag

SEQ ID NO: 2678023 - RNA, 17 nt, Human
aucgcaccauucugacu

SEQ ID NO: 2678024 - RNA, 18 nt, Human
aucgcaccauucugacuc

SEQ ID NO: 2678025 - RNA, 15 nt, Human
aucaucuauagaaag

SEQ ID NO: 2678026 - RNA, 20 nt, Human
aucagccugcuccagcuguu

SEQ ID NO: 2678027 - RNA, 19 nt, Human
aucaucuauagaaagcuau

SEQ ID NO: 2678028 - RNA, 21 nt, Human
aucagccugggcaaugugaua

SEQ ID NO: 2678029 - RNA, 20 nt, Human
aucagccugggcaaugugau

SEQ ID NO: 2678030 - RNA, 11 nt, Human
aucagccuggg

SEQ ID NO: 2678031 - RNA, 12 nt, Human
aucaccugccug

SEQ ID NO: 2678032 - RNA, 14 nt, Human
aucaccugccuguu

SEQ ID NO: 2678033 - RNA, 15 nt, Human
aucaccugccuguua

SEQ ID NO: 2678034 - RNA, 17 nt, Human
augaaaauacaacuuaa

SEQ ID NO: 2678035 - RNA, 13 nt, Human
augaaaauacaac

SEQ ID NO: 2678036 - RNA, 22 nt, Human
augaaaauacaacuuaaauaau

SEQ ID NO: 2678037 - RNA, 14 nt, Human
augaaaauaccauu

SEQ ID NO: 2678038 - RNA, 24 nt, Human
augaaaauaccauuuaguaagaau

SEQ ID NO: 2678039 - RNA, 11 nt, Human
augaaaauugu

SEQ ID NO: 2678040 - RNA, 19 nt, Human
augaaaagauucuucugug

SEQ ID NO: 2678041 - RNA, 17 nt, Human
augaaaagauucuucug

SEQ ID NO: 2678042 - RNA, 14 nt, Human
augaaaauuguauu

SEQ ID NO: 2678043 - RNA, 15 nt, Human
augaaaauuguauua

SEQ ID NO: 2678044 - RNA, 21 nt, Human
aucuuuuuuguuaacugauuu

SEQ ID NO: 2678045 - RNA, 14 nt, Human
augacucaaagucu

SEQ ID NO: 2678046 - RNA, 17 nt, Human
augacuauauaauuuau

SEQ ID NO: 2678047 - RNA, 22 nt, Human
augacuauauaauuuauuucca

SEQ ID NO: 2678048 - RNA, 22 nt, Human
augacuaugcguggcuggaacc

SEQ ID NO: 2678049 - RNA, 16 nt, Human
augacucggggguggg

SEQ ID NO: 2678050 - RNA, 14 nt, Human
augagccuggcaag

SEQ ID NO: 2678051 - RNA, 13 nt, Human
augagccuggcaa

SEQ ID NO: 2678052 - RNA, 21 nt, Human
aucuggaagccaaaauguagg

SEQ ID NO: 2678053 - RNA, 21 nt, Human
aucuggaaucuggagaccagg

SEQ ID NO: 2678054 - RNA, 15 nt, Human
aucuuauaugggaaa

SEQ ID NO: 2678055 - RNA, 22 nt, Human
aucuuauaugggaaaccaugua

SEQ ID NO: 2678056 - RNA, 19 nt, Human
aucuuccaacucaaacucu

SEQ ID NO: 2678057 - RNA, 13 nt, Human
aucuucuaaaugg

SEQ ID NO: 2678058 - RNA, 15 nt, Human
aucugcuguauaugg

SEQ ID NO: 2678059 - RNA, 15 nt, Human
aucucuaaagagcau

SEQ ID NO: 2678060 - RNA, 17 nt, Human
aucugcugcagagcagu

SEQ ID NO: 2678061 - RNA, 16 nt, Human
aucugcugcagagcag

SEQ ID NO: 2678062 - RNA, 14 nt, Human
aucucuaggaaguc

SEQ ID NO: 2678063 - RNA, 19 nt, Human
augucagacagaacuugaa

SEQ ID NO: 2678064 - RNA, 16 nt, Human
augucagcaguugcug

SEQ ID NO: 2678065 - RNA, 13 nt, Human
augucagcaguug

SEQ ID NO: 2678066 - RNA, 16 nt, Human
augucacgaauaugga

SEQ ID NO: 2678067 - RNA, 16 nt, Human
augucaaguaccaaaa

SEQ ID NO: 2678068 - RNA, 21 nt, Human
augucaaacaugagaugugug

SEQ ID NO: 2678069 - RNA, 16 nt, Human
auguacaguugaaaua

SEQ ID NO: 2678070 - RNA, 14 nt, Human
auguacagauucuu

SEQ ID NO: 2678071 - RNA, 15 nt, Human
auguacagauucuuu

SEQ ID NO: 2678072 - RNA, 16 nt, Human
auguacagauucuuuc

SEQ ID NO: 2678073 - RNA, 18 nt, Human
auguacagauucuuucag

SEQ ID NO: 2678074 - RNA, 14 nt, Human
auguaauaaacuuu

SEQ ID NO: 2678075 - RNA, 15 nt, Human
auguaauaaacuuua

SEQ ID NO: 2678076 - RNA, 16 nt, Human
auguaauaaacuuuaa

SEQ ID NO: 2678077 - RNA, 14 nt, Human
auguaagugggccc

SEQ ID NO: 2678078 - RNA, 15 nt, Human
auguaagugggccca

SEQ ID NO: 2678079 - RNA, 18 nt, Human
auguaagugggcccaccc

SEQ ID NO: 2678080 - RNA, 15 nt, Human
auguaagcauacuuu

SEQ ID NO: 2678081 - RNA, 16 nt, Human
auguaagcauacuuug

SEQ ID NO: 2678082 - RNA, 19 nt, Human
auguaagcauacuuuguaa

SEQ ID NO: 2678083 - RNA, 22 nt, Human
auguaagcauacuuuguaaaua

SEQ ID NO: 2678084 - RNA, 19 nt, Human
auggugaaaccccgucucu

SEQ ID NO: 2678085 - RNA, 20 nt, Human
augucagcaguugcugguaa

SEQ ID NO: 2678086 - RNA, 16 nt, Human
auguuucuuuuaaaga

SEQ ID NO: 2678087 - RNA, 16 nt, Human
auguuugcacuuguga

SEQ ID NO: 2678088 - RNA, 12 nt, Human
auguuuuaaaga

SEQ ID NO: 2678089 - RNA, 13 nt, Human
auguuuuaaagaa

SEQ ID NO: 2678090 - RNA, 22 nt, Human
auguuuuaaagaauaugacuuu

SEQ ID NO: 2678091 - RNA, 16 nt, Human
auguuucuuuuguuug

SEQ ID NO: 2678092 - RNA, 21 nt, Human
auguuucuuuuguuugguaaa

SEQ ID NO: 2678093 - RNA, 18 nt, Human
auguuugaauuuuucucu

SEQ ID NO: 2678094 - RNA, 20 nt, Human
auguuugaauuuuucucuuc

SEQ ID NO: 2678095 - RNA, 20 nt, Human
auguguaugcacaguaaaaa

SEQ ID NO: 2678096 - RNA, 15 nt, Human
auggaugauuuaagu

SEQ ID NO: 2678097 - RNA, 12 nt, Human
auggauguuacu

SEQ ID NO: 2678098 - RNA, 23 nt, Human
auggagccagcucccucuauuua

SEQ ID NO: 2678099 - RNA, 15 nt, Human
auggcugcuguugcu

SEQ ID NO: 2678100 - RNA, 19 nt, Human
auggaaaacuguguugcca

SEQ ID NO: 2678101 - RNA, 19 nt, Human
auggaaaucagccaaguuu

SEQ ID NO: 2678102 - RNA, 16 nt, Human
auggaaauuuugcuau

SEQ ID NO: 2678103 - RNA, 14 nt, Human
augcuucuucucaa

SEQ ID NO: 2678104 - RNA, 15 nt, Human
augcuucuucucaaa

SEQ ID NO: 2678105 - RNA, 14 nt, Human
augcaauaaaauuu

SEQ ID NO: 2678106 - RNA, 18 nt, Human
augcaauaaaauuuaaaa

SEQ ID NO: 2678107 - RNA, 23 nt, Human
augcaauaaaauuuaaaaaauaa

SEQ ID NO: 2678108 - RNA, 19 nt, Human
augaugucuuuuuauuaaa

SEQ ID NO: 2678109 - RNA, 22 nt, Human
augaugugcaaaaccuuuuacu

SEQ ID NO: 2678110 - RNA, 24 nt, Human
augcaauguaagcauacuuuguaa

SEQ ID NO: 2678111 - RNA, 17 nt, Human
augcacaguaaaaaugg

SEQ ID NO: 2678112 - RNA, 17 nt, Human
augcaugcuucuucuca

SEQ ID NO: 2678113 - RNA, 13 nt, Human
augcaugcaaaug

SEQ ID NO: 2678114 - RNA, 16 nt, Human
augcaugcaaaugagc

SEQ ID NO: 2678115 - RNA, 17 nt, Human
agcugcucccuggcauu

SEQ ID NO: 2678116 - RNA, 18 nt, Human
agcugcuccgaggaccca

SEQ ID NO: 2678117 - RNA, 19 nt, Human
agcugcuccgaggacccag

SEQ ID NO: 2678118 - RNA, 20 nt, Human
agcugcuccgaggacccagg

SEQ ID NO: 2678119 - RNA, 22 nt, Human
agcugcuccgaggacccaggaa

SEQ ID NO: 2678120 - RNA, 13 nt, Human
agcuccuccccuu

SEQ ID NO: 2678121 - RNA, 19 nt, Human
agcuccuccccuuccucuu

SEQ ID NO: 2678122 - RNA, 22 nt, Human
agcuccuggggcguccaggccg

SEQ ID NO: 2678123 - RNA, 13 nt, Human
agcuccuggggcg

SEQ ID NO: 2678124 - RNA, 15 nt, Human
agcugacaucuugaa

SEQ ID NO: 2678125 - RNA, 16 nt, Human
agcugacaucuugaau

SEQ ID NO: 2678126 - RNA, 15 nt, Human
agcuucaguugcuug

SEQ ID NO: 2678127 - RNA, 16 nt, Human
agcuucaguugcuugu

SEQ ID NO: 2678128 - RNA, 19 nt, Human
agcuucaguugcuugucuu

SEQ ID NO: 2678129 - RNA, 23 nt, Human
agcuucaguugcuugucuucugg

SEQ ID NO: 2678130 - RNA, 21 nt, Human
agcuucaguaaguuaucuuug

SEQ ID NO: 2678131 - RNA, 22 nt, Human
agcuucaguaaguuaucuuuga

SEQ ID NO: 2678132 - RNA, 17 nt, Human
agcuucauauaccagca

SEQ ID NO: 2678133 - RNA, 17 nt, Human
aggagggggccgggcgc

SEQ ID NO: 2678134 - RNA, 19 nt, Human
aggagggggccgggcgcgg

SEQ ID NO: 2678135 - RNA, 14 nt, Human
aggaggggagggua

SEQ ID NO: 2678136 - RNA, 20 nt, Human
aggaccucaggugagaagca

SEQ ID NO: 2678137 - RNA, 14 nt, Human
aggaccucagguga

SEQ ID NO: 2678138 - RNA, 19 nt, Human
aggagaaccaaaucuggaa

SEQ ID NO: 2678139 - RNA, 22 nt, Human
aggagaaccaaaucuggaagcc

SEQ ID NO: 2678140 - RNA, 16 nt, Human
aggagaaccaaaucug

SEQ ID NO: 2678141 - RNA, 18 nt, Human
aggagaggggcacagggu

SEQ ID NO: 2678142 - RNA, 16 nt, Human
aggagaggggcacagg

SEQ ID NO: 2678143 - RNA, 14 nt, Human
aggagaggggcaca

SEQ ID NO: 2678144 - RNA, 13 nt, Human
aggagaagcugca

SEQ ID NO: 2678145 - RNA, 15 nt, Human
aggagagcuagcagc

SEQ ID NO: 2678146 - RNA, 17 nt, Human
aggaccaagcaucuugg

SEQ ID NO: 2678147 - RNA, 19 nt, Human
aggaccaagcaucuugggg

SEQ ID NO: 2678148 - RNA, 16 nt, Human
agggcaagggguuccc

SEQ ID NO: 2678149 - RNA, 15 nt, Human
aggggcacagggucu

SEQ ID NO: 2678150 - RNA, 13 nt, Human
aggggccggcccu

SEQ ID NO: 2678151 - RNA, 14 nt, Human
aggggccggcccug

SEQ ID NO: 2678152 - RNA, 15 nt, Human
aggggccggcccugu

SEQ ID NO: 2678153 - RNA, 17 nt, Human
aggggccggcccugugu

SEQ ID NO: 2678154 - RNA, 21 nt, Human
aggggccggcccugugugcag

SEQ ID NO: 2678155 - RNA, 19 nt, Human
agggcggcaggggccugga

SEQ ID NO: 2678156 - RNA, 23 nt, Human
agggcggcaggggccuggagauc

SEQ ID NO: 2678157 - RNA, 13 nt, Human
agggcggcagggg

SEQ ID NO: 2678158 - RNA, 15 nt, Human
agggcggcaggggcc

SEQ ID NO: 2678159 - RNA, 16 nt, Human
agggcggcaggggccu

SEQ ID NO: 2678160 - RNA, 18 nt, Human
agggcggcaggggccugg

SEQ ID NO: 2678161 - RNA, 19 nt, Human
agggacggccaagaaugua

SEQ ID NO: 2678162 - RNA, 20 nt, Human
agggacggccaagaauguac

SEQ ID NO: 2678163 - RNA, 19 nt, Human
agggacuacccauagacau

SEQ ID NO: 2678164 - RNA, 22 nt, Human
agggacuacccauagacaugaa

SEQ ID NO: 2678165 - RNA, 12 nt, Human
aggcugccccuc

SEQ ID NO: 2678166 - RNA, 15 nt, Human
aggcugccccucuca

SEQ ID NO: 2678167 - RNA, 17 nt, Human
aggcugccccucucacc

SEQ ID NO: 2678168 - RNA, 16 nt, Human
aggcuguggucacagc

SEQ ID NO: 2678169 - RNA, 21 nt, Human
aggcugugcugcccugaagaa

SEQ ID NO: 2678170 - RNA, 22 nt, Human
aggcugugcugcccugaagaau

SEQ ID NO: 2678171 - RNA, 15 nt, Human
aggcugugcugcccu

SEQ ID NO: 2678172 - RNA, 16 nt, Human
aggcugugcugcccug

SEQ ID NO: 2678173 - RNA, 17 nt, Human
aggcugugcugcccuga

SEQ ID NO: 2678174 - RNA, 20 nt, Human
aggcugugcugcccugaaga

SEQ ID NO: 2678175 - RNA, 21 nt, Human
aggcugaugucaauuucugug

SEQ ID NO: 2678176 - RNA, 14 nt, Human
aggcugaaaacaau

SEQ ID NO: 2678177 - RNA, 16 nt, Human
aggcuauguauaaaau

SEQ ID NO: 2678178 - RNA, 17 nt, Human
aggcuauguauaaaaua

SEQ ID NO: 2678179 - RNA, 18 nt, Human
aggcuauguauaaaauac

SEQ ID NO: 2678180 - RNA, 22 nt, Human
agguggaagaagggagaagaaa

SEQ ID NO: 2678181 - RNA, 16 nt, Human
agguggauggccccag

SEQ ID NO: 2678182 - RNA, 23 nt, Human
agguggauggccccagcacagcu

SEQ ID NO: 2678183 - RNA, 19 nt, Human
agguggauuuuguuuaaaa

SEQ ID NO: 2678184 - RNA, 15 nt, Human
agguggauggcccca

SEQ ID NO: 2678185 - RNA, 23 nt, Human
agguggauuuuguuuaaaaaauc

SEQ ID NO: 2678186 - RNA, 15 nt, Human
agguggaagaaggga

SEQ ID NO: 2678187 - RNA, 16 nt, Human
agguggaagaagggag

SEQ ID NO: 2678188 - RNA, 17 nt, Human
agguggaagaagggaga

SEQ ID NO: 2678189 - RNA, 18 nt, Human
agguggaagaagggagaa

SEQ ID NO: 2678190 - RNA, 19 nt, Human
agguggaagaagggagaag

SEQ ID NO: 2678191 - RNA, 22 nt, Human
aggugcuggagcacugggcucc

SEQ ID NO: 2678192 - RNA, 21 nt, Human
aggugcuggagcacugggcuc

SEQ ID NO: 2678193 - RNA, 14 nt, Human
aggucgaggcagga

SEQ ID NO: 2678194 - RNA, 19 nt, Human
agguccugauuucuagaac

SEQ ID NO: 2678195 - RNA, 13 nt, Human
aggugcugcuuaa

SEQ ID NO: 2678196 - RNA, 20 nt, Human
aggugcuggagcacugggcu

SEQ ID NO: 2678197 - RNA, 16 nt, Human
aggugcuggagcacug

SEQ ID NO: 2678198 - RNA, 20 nt, Human
agguucaguauuauguaguu

SEQ ID NO: 2678199 - RNA, 15 nt, Human
agguucagccaaggu

SEQ ID NO: 2678200 - RNA, 19 nt, Human
agguucagccaagguuuua

SEQ ID NO: 2678201 - RNA, 13 nt, Human
agguucagccaag

SEQ ID NO: 2678202 - RNA, 17 nt, Human
agguuccucugccugcc

SEQ ID NO: 2678203 - RNA, 18 nt, Human
agguuccucugccugccc

SEQ ID NO: 2678204 - RNA, 19 nt, Human
agguuccucugccugcccc

SEQ ID NO: 2678205 - RNA, 20 nt, Human
agguuccucugccugccccg

SEQ ID NO: 2678206 - RNA, 13 nt, Human
agguuccucugcc

SEQ ID NO: 2678207 - RNA, 14 nt, Human
agguuccucugccu

SEQ ID NO: 2678208 - RNA, 15 nt, Human
agguuccucugccug

SEQ ID NO: 2678209 - RNA, 16 nt, Human
agguuccucugccugc

SEQ ID NO: 2678210 - RNA, 13 nt, Human
agguaccagcugc

SEQ ID NO: 2678211 - RNA, 16 nt, Human
agguaccagcugcgcu

SEQ ID NO: 2678212 - RNA, 23 nt, Human
agguaccagcugcgcuugcuuuu

SEQ ID NO: 2678213 - RNA, 12 nt, Human
agguacccuggg

SEQ ID NO: 2678214 - RNA, 13 nt, Human
agguacccugggu

SEQ ID NO: 2678215 - RNA, 14 nt, Human
agguacccugggug

SEQ ID NO: 2678216 - RNA, 20 nt, Human
agguacccuggguguccccg

SEQ ID NO: 2678217 - RNA, 16 nt, Human
agagccuggugcugcu

SEQ ID NO: 2678218 - RNA, 18 nt, Human
agagccuggugcugcugc

SEQ ID NO: 2678219 - RNA, 13 nt, Human
agagccuuaaaac

SEQ ID NO: 2678220 - RNA, 13 nt, Human
agagccugcuggc

SEQ ID NO: 2678221 - RNA, 19 nt, Human
agagccugcuggcacccac

SEQ ID NO: 2678222 - RNA, 24 nt, Human
agagccugcuggcacccaccgugg

SEQ ID NO: 2678223 - RNA, 12 nt, Human
agagccugcugg

SEQ ID NO: 2678224 - RNA, 14 nt, Human
agagccuuaaaaca

SEQ ID NO: 2678225 - RNA, 16 nt, Human
agagccuuaaaacauc

SEQ ID NO: 2678226 - RNA, 15 nt, Human
agagccuuaaaacau

SEQ ID NO: 2678227 - RNA, 21 nt, Human
agagaagagauugugguuuca

SEQ ID NO: 2678228 - RNA, 10 nt, Human
agagaagaga

SEQ ID NO: 2678229 - RNA, 13 nt, Human
agagaggacagcu

SEQ ID NO: 2678230 - RNA, 20 nt, Human
agagaggaaauucuccacug

SEQ ID NO: 2678231 - RNA, 15 nt, Human
agagaagcaaguaaa

SEQ ID NO: 2678232 - RNA, 13 nt, Human
agacguuuauaaa

SEQ ID NO: 2678233 - RNA, 16 nt, Human
agacguuuauaaacag

SEQ ID NO: 2678234 - RNA, 21 nt, Human
agacguuuauaaacagaaaug

SEQ ID NO: 2678235 - RNA, 16 nt, Human
agacuaaaaguugcau

SEQ ID NO: 2678236 - RNA, 16 nt, Human
agaccaccacuucgaa

SEQ ID NO: 2678237 - RNA, 15 nt, Human
agaccagggagccuu

SEQ ID NO: 2678238 - RNA, 12 nt, Human
agacaauaaacc

SEQ ID NO: 2678239 - RNA, 17 nt, Human
agacaauaaacccucag

SEQ ID NO: 2678240 - RNA, 22 nt, Human
agacaauaaacccucagagccu

SEQ ID NO: 2678241 - RNA, 19 nt, Human
agauaguguaacuugcuua

SEQ ID NO: 2678242 - RNA, 13 nt, Human
agaugggaaugag

SEQ ID NO: 2678243 - RNA, 18 nt, Human
agaugggaaugagguggg

SEQ ID NO: 2678244 - RNA, 22 nt, Human
agauacuuuguauuguccuauu

SEQ ID NO: 2678245 - RNA, 20 nt, Human
agauacuuuguauuguccua

SEQ ID NO: 2678246 - RNA, 11 nt, Human
agauacuuugu

SEQ ID NO: 2678247 - RNA, 16 nt, Human
agauacuuuguauugu

SEQ ID NO: 2678248 - RNA, 15 nt, Human
agauacuuuguauug

SEQ ID NO: 2678249 - RNA, 13 nt, Human
agauacuuuguau

SEQ ID NO: 2678250 - RNA, 12 nt, Human
agauacuuugua

SEQ ID NO: 2678251 - RNA, 22 nt, Human
agauacuuggggggcugaggug

SEQ ID NO: 2678252 - RNA, 12 nt, Human
agagggcuuccu

SEQ ID NO: 2678253 - RNA, 22 nt, Human
agagggcuuccucuagaagcca

SEQ ID NO: 2678254 - RNA, 13 nt, Human
agagggcuuccuc

SEQ ID NO: 2678255 - RNA, 13 nt, Human
agaggagaggggc

SEQ ID NO: 2678256 - RNA, 14 nt, Human
agaggagccuuuuu

SEQ ID NO: 2678257 - RNA, 11 nt, Human
agaggagccuu

SEQ ID NO: 2678258 - RNA, 23 nt, Human
agccggggaagagauccaaagac

SEQ ID NO: 2678259 - RNA, 21 nt, Human
agccgguuccugucccugcgc

SEQ ID NO: 2678260 - RNA, 14 nt, Human
agccgguuccuguc

SEQ ID NO: 2678261 - RNA, 13 nt, Human
agccgguuccugu

SEQ ID NO: 2678262 - RNA, 16 nt, Human
agccgguaacuguccu

SEQ ID NO: 2678263 - RNA, 17 nt, Human
agccgguaacuguccug

SEQ ID NO: 2678264 - RNA, 18 nt, Human
agccgguaacuguccugu

SEQ ID NO: 2678265 - RNA, 20 nt, Human
agccgguaacuguccugucc

SEQ ID NO: 2678266 - RNA, 21 nt, Human
agccgguaacuguccuguccu

SEQ ID NO: 2678267 - RNA, 20 nt, Human
agccgagauugcaccacugc

SEQ ID NO: 2678268 - RNA, 19 nt, Human
agccgagauugcaccacug

SEQ ID NO: 2678269 - RNA, 19 nt, Human
agccuccucuggacggcag

SEQ ID NO: 2678270 - RNA, 12 nt, Human
agccuccucugg

SEQ ID NO: 2678271 - RNA, 13 nt, Human
agccuccucugga

SEQ ID NO: 2678272 - RNA, 14 nt, Human
agccuccucuggac

SEQ ID NO: 2678273 - RNA, 18 nt, Human
agccuccucuggacggca

SEQ ID NO: 2678274 - RNA, 12 nt, Human
agccccagccug

SEQ ID NO: 2678275 - RNA, 17 nt, Human
agccccagccugcuagc

SEQ ID NO: 2678276 - RNA, 15 nt, Human
agccccagccugcua

SEQ ID NO: 2678277 - RNA, 14 nt, Human
agccccagccugcu

SEQ ID NO: 2678278 - RNA, 13 nt, Human
agccccagccugc

SEQ ID NO: 2678279 - RNA, 19 nt, Human
agccccacugccagcagca

SEQ ID NO: 2678280 - RNA, 20 nt, Human
agccccacugccagcagcag

SEQ ID NO: 2678281 - RNA, 12 nt, Human
agccccacugcc

SEQ ID NO: 2678282 - RNA, 14 nt, Human
agccccacugccag

SEQ ID NO: 2678283 - RNA, 15 nt, Human
agccccacugccagc

SEQ ID NO: 2678284 - RNA, 16 nt, Human
agccccacugccagca

SEQ ID NO: 2678285 - RNA, 17 nt, Human
agccccacugccagcag

SEQ ID NO: 2678286 - RNA, 18 nt, Human
agccccacugccagcagc

SEQ ID NO: 2678287 - RNA, 24 nt, Human
agcccuacucccugcagaugccac

SEQ ID NO: 2678288 - RNA, 15 nt, Human
agcccugagcuuucu

SEQ ID NO: 2678289 - RNA, 17 nt, Human
agcccuaagguccuaag

SEQ ID NO: 2678290 - RNA, 19 nt, Human
agcccuaagguccuaaggc

SEQ ID NO: 2678291 - RNA, 13 nt, Human
agcccuacucccu

SEQ ID NO: 2678292 - RNA, 17 nt, Human
agcccuaaccccuucca

SEQ ID NO: 2678293 - RNA, 18 nt, Human
agcccuaaccccuuccag

SEQ ID NO: 2678294 - RNA, 21 nt, Human
agcccuaaccccuuccagauc

SEQ ID NO: 2678295 - RNA, 20 nt, Human
agcccuacucccugcagaug

SEQ ID NO: 2678296 - RNA, 21 nt, Human
agcccuacucccugcagaugc

SEQ ID NO: 2678297 - RNA, 15 nt, Human
agcccuacucccugc

SEQ ID NO: 2678298 - RNA, 16 nt, Human
agcccuacucccugca

SEQ ID NO: 2678299 - RNA, 17 nt, Human
agcccuacucccugcag

SEQ ID NO: 2678300 - RNA, 18 nt, Human
agcccuacucccugcaga

SEQ ID NO: 2678301 - RNA, 10 nt, Human
agccccaggg

SEQ ID NO: 2678302 - RNA, 16 nt, Human
agccccaggggacaag

SEQ ID NO: 2678303 - RNA, 18 nt, Human
agccagauuugucuuuuu

SEQ ID NO: 2678304 - RNA, 19 nt, Human
agcagucgugccugugucc

SEQ ID NO: 2678305 - RNA, 21 nt, Human
agcagucgugccuguguccau

SEQ ID NO: 2678306 - RNA, 12 nt, Human
agcagcccaccc

SEQ ID NO: 2678307 - RNA, 13 nt, Human
agcagcccacccu

SEQ ID NO: 2678308 - RNA, 14 nt, Human
agcagcccacccug

SEQ ID NO: 2678309 - RNA, 16 nt, Human
agcagcccacccugcu

SEQ ID NO: 2678310 - RNA, 20 nt, Human
agcagcccacccugcugcug

SEQ ID NO: 2678311 - RNA, 15 nt, Human
agcacugggcucccg

SEQ ID NO: 2678312 - RNA, 12 nt, Human
agcacugggcuc

SEQ ID NO: 2678313 - RNA, 16 nt, Human
agcacugggcucccgg

SEQ ID NO: 2678314 - RNA, 16 nt, Human
agcaguugcugguaaa

SEQ ID NO: 2678315 - RNA, 22 nt, Human
agcaguugcugguaaaaugaag

SEQ ID NO: 2678316 - RNA, 21 nt, Human
agcaguugcugguaaaaugaa

SEQ ID NO: 2678317 - RNA, 20 nt, Human
agcaguugcugguaaaauga

SEQ ID NO: 2678318 - RNA, 17 nt, Human
agcaguugcugguaaaa

SEQ ID NO: 2678319 - RNA, 23 nt, Human
agcaguugcugguaaaaugaaga

SEQ ID NO: 2678320 - RNA, 14 nt, Human
agccaagggaaagg

SEQ ID NO: 2678321 - RNA, 23 nt, Human
agccaaggcccugaguuggcagu

SEQ ID NO: 2678322 - RNA, 17 nt, Human
agcaugcagcuuugcaa

SEQ ID NO: 2678323 - RNA, 16 nt, Human
agccaagggaaagggg

SEQ ID NO: 2678324 - RNA, 11 nt, Human
agccagaggcu

SEQ ID NO: 2678325 - RNA, 14 nt, Human
agccagaggcuggg

SEQ ID NO: 2678326 - RNA, 15 nt, Human
agccagaggcugggu

SEQ ID NO: 2678327 - RNA, 18 nt, Human
agccagaggcuggguuca

SEQ ID NO: 2678328 - RNA, 20 nt, Human
agccaagggaaaggggugcu

SEQ ID NO: 2678329 - RNA, 17 nt, Human
agcaugaaauaaaauau

SEQ ID NO: 2678330 - RNA, 19 nt, Human
agcaugaaauaaaauauau

SEQ ID NO: 2678331 - RNA, 14 nt, Human
agcaugaaauguga

SEQ ID NO: 2678332 - RNA, 15 nt, Human
agcaugaaaugugaa

SEQ ID NO: 2678333 - RNA, 16 nt, Human
agcaugaaaugugaau

SEQ ID NO: 2678334 - RNA, 17 nt, Human
agcaugaaaugugaauu

SEQ ID NO: 2678335 - RNA, 22 nt, Human
agcaugaaaugugaauuuuuau

SEQ ID NO: 2678336 - RNA, 19 nt, Human
agcaucuuggggggguggc

SEQ ID NO: 2678337 - RNA, 21 nt, Human
agcaucuuggggggguggccg

SEQ ID NO: 2678338 - RNA, 23 nt, Human
agcaucuuggggggguggccgcu

SEQ ID NO: 2678339 - RNA, 12 nt, Human
aaaacaaaauuu

SEQ ID NO: 2678340 - RNA, 22 nt, Human
aaaacaaaauuugacuaauuuu

SEQ ID NO: 2678341 - RNA, 18 nt, Human
aaaacaauggaguauucu

SEQ ID NO: 2678342 - RNA, 15 nt, Human
aaaacacaagcaaaa

SEQ ID NO: 2678343 - RNA, 18 nt, Human
aaaacaauaggaugggcu

SEQ ID NO: 2678344 - RNA, 17 nt, Human
aaaacaauaggaugggc

SEQ ID NO: 2678345 - RNA, 11 nt, Human
aaaaauuguua

SEQ ID NO: 2678346 - RNA, 19 nt, Human
aaaaagacuuuaaaaguga

SEQ ID NO: 2678347 - RNA, 12 nt, Human
aaaaagagacau

SEQ ID NO: 2678348 - RNA, 15 nt, Human
aaaaagagacaucca

SEQ ID NO: 2678349 - RNA, 14 nt, Human
aaaaagauguacag

SEQ ID NO: 2678350 - RNA, 17 nt, Human
aaaaagaaugaagccuc

SEQ ID NO: 2678351 - RNA, 19 nt, Human
aaaaaccaccaaaaacaaa

SEQ ID NO: 2678352 - RNA, 13 nt, Human
aaaaacauaacau

SEQ ID NO: 2678353 - RNA, 18 nt, Human
aaaaacauaacauaaauu

SEQ ID NO: 2678354 - RNA, 16 nt, Human
aaguaacucauuuguu

SEQ ID NO: 2678355 - RNA, 12 nt, Human
aaguaacucauu

SEQ ID NO: 2678356 - RNA, 14 nt, Human
aaguaacucauuug

SEQ ID NO: 2678357 - RNA, 21 nt, Human
aaguaacucauuuguuaaaau

SEQ ID NO: 2678358 - RNA, 23 nt, Human
aaguaacugggauuacaggcaug

SEQ ID NO: 2678359 - RNA, 16 nt, Human
aagguauuauacaugu

SEQ ID NO: 2678360 - RNA, 14 nt, Human
aaguaacugugaga

SEQ ID NO: 2678361 - RNA, 20 nt, Human
aagguuuuauaaggcugaug

SEQ ID NO: 2678362 - RNA, 13 nt, Human
aagguuuauuguu

SEQ ID NO: 2678363 - RNA, 14 nt, Human
aagguuuauuguua

SEQ ID NO: 2678364 - RNA, 17 nt, Human
aagguuuauuguuaaua

SEQ ID NO: 2678365 - RNA, 20 nt, Human
aagguuuauuguuaauacaa

SEQ ID NO: 2678366 - RNA, 21 nt, Human
aagguuuauuguuaauacaag

SEQ ID NO: 2678367 - RNA, 13 nt, Human
aagggguaaaagg

SEQ ID NO: 2678368 - RNA, 15 nt, Human
aagguauaauaaaau

SEQ ID NO: 2678369 - RNA, 16 nt, Human
aagguauaauaaaauu

SEQ ID NO: 2678370 - RNA, 18 nt, Human
aagguauaauaaaauuau

SEQ ID NO: 2678371 - RNA, 19 nt, Human
aaggggagagccugcuggc

SEQ ID NO: 2678372 - RNA, 12 nt, Human
aaggggagagcc

SEQ ID NO: 2678373 - RNA, 14 nt, Human
aaggggagagccug

SEQ ID NO: 2678374 - RNA, 15 nt, Human
aaggggagagccugc

SEQ ID NO: 2678375 - RNA, 18 nt, Human
aaggggagagccugcugg

SEQ ID NO: 2678376 - RNA, 22 nt, Human
aaggcugguacaacggaggccu

SEQ ID NO: 2678377 - RNA, 15 nt, Human
aaggcuuauaaaaca

SEQ ID NO: 2678378 - RNA, 14 nt, Human
aaggcuuauaaaac

SEQ ID NO: 2678379 - RNA, 17 nt, Human
aaggcugugcugcccug

SEQ ID NO: 2678380 - RNA, 21 nt, Human
aaggcugugcugcccugaaga

SEQ ID NO: 2678381 - RNA, 22 nt, Human
aaggcugggggaagaagcucuc

SEQ ID NO: 2678382 - RNA, 19 nt, Human
aaggcugggggaagaagcu

SEQ ID NO: 2678383 - RNA, 14 nt, Human
aaggcugggggaag

SEQ ID NO: 2678384 - RNA, 16 nt, Human
aaggcugggggaagaa

SEQ ID NO: 2678385 - RNA, 17 nt, Human
guuuauuacuuccauga

SEQ ID NO: 2678386 - RNA, 19 nt, Human
guuuauuacuuccaugaau

SEQ ID NO: 2678387 - RNA, 20 nt, Human
guuuauuacuuccaugaauu

SEQ ID NO: 2678388 - RNA, 21 nt, Human
guuuauuacuuccaugaauuu

SEQ ID NO: 2678389 - RNA, 17 nt, Human
aaggaaaauaguaaugu

SEQ ID NO: 2678390 - RNA, 16 nt, Human
aaggaaaacuaccugu

SEQ ID NO: 2678391 - RNA, 23 nt, Human
aaggaaaacuaccuguauuuaaa

SEQ ID NO: 2678392 - RNA, 19 nt, Human
guuuaaaaaccgaauaaau

SEQ ID NO: 2678393 - RNA, 20 nt, Human
guuuaaaaaccgaauaaaug

SEQ ID NO: 2678394 - RNA, 21 nt, Human
guuguuuuuguauauugguuu

SEQ ID NO: 2678395 - RNA, 14 nt, Human
guuguuuuuguaua

SEQ ID NO: 2678396 - RNA, 20 nt, Human
guuuuaugguuacuucuucu

SEQ ID NO: 2678397 - RNA, 12 nt, Human
guuuuauuuaua

SEQ ID NO: 2678398 - RNA, 17 nt, Human
guuuuauuuauauuuau

SEQ ID NO: 2678399 - RNA, 14 nt, Human
guuuuauuuauauu

SEQ ID NO: 2678400 - RNA, 22 nt, Human
guuuuauuuauauuuauugacu

SEQ ID NO: 2678401 - RNA, 18 nt, Human
guuuuauuuauauuuauu

SEQ ID NO: 2678402 - RNA, 12 nt, Human
guuuuauuucau

SEQ ID NO: 2678403 - RNA, 18 nt, Human
aaguaagaaagugaagca

SEQ ID NO: 2678404 - RNA, 17 nt, Human
guuuggaaaaguggcgu

SEQ ID NO: 2678405 - RNA, 16 nt, Human
guuuuaaacuuucaau

SEQ ID NO: 2678406 - RNA, 16 nt, Human
aaguaauugugaaaaa

SEQ ID NO: 2678407 - RNA, 11 nt, Human
aaguauuuucu

SEQ ID NO: 2678408 - RNA, 17 nt, Human
aaguauuuuuagaauaa

SEQ ID NO: 2678409 - RNA, 12 nt, Human
aagucagagaca

SEQ ID NO: 2678410 - RNA, 14 nt, Human
aagucagagacaga

SEQ ID NO: 2678411 - RNA, 15 nt, Human
aagucagagacagau

SEQ ID NO: 2678412 - RNA, 14 nt, Human
aaguauuuuuucaa

SEQ ID NO: 2678413 - RNA, 12 nt, Human
uaaaauuguuau

SEQ ID NO: 2678414 - RNA, 15 nt, Human
uaaaauuguuaucaa

SEQ ID NO: 2678415 - RNA, 16 nt, Human
uaaaauuguuaucaaa

SEQ ID NO: 2678416 - RNA, 10 nt, Human
uaaaauguaa

SEQ ID NO: 2678417 - RNA, 20 nt, Human
aaguuugagaucagccuggg

SEQ ID NO: 2678418 - RNA, 20 nt, Human
uaaaauguccaguaagauca

SEQ ID NO: 2678419 - RNA, 19 nt, Human
uaaaauguccaguaagauc

SEQ ID NO: 2678420 - RNA, 22 nt, Human
uaaaauguccaguaagaucacu

SEQ ID NO: 2678421 - RNA, 21 nt, Human
uaaaauguccaguaagaucac

SEQ ID NO: 2678422 - RNA, 15 nt, Human
uaaaauguaauuuaa

SEQ ID NO: 2678423 - RNA, 16 nt, Human
uaaaauguaauuuaaa

SEQ ID NO: 2678424 - RNA, 17 nt, Human
uaaaauguaauuuaaau

SEQ ID NO: 2678425 - RNA, 19 nt, Human
uaaaauguaauuuaaauga

SEQ ID NO: 2678426 - RNA, 20 nt, Human
uaaaauguaauuuaaaugaa

SEQ ID NO: 2678427 - RNA, 21 nt, Human
uaaaauguaauuuaaaugaaa

SEQ ID NO: 2678428 - RNA, 18 nt, Human
aaguuauuuucuacagug

SEQ ID NO: 2678429 - RNA, 21 nt, Human
aaguuauuuucuacagugguu

SEQ ID NO: 2678430 - RNA, 14 nt, Human
aaguuauuuucuac

SEQ ID NO: 2678431 - RNA, 19 nt, Human
aaguucaaucuguuuuuca

SEQ ID NO: 2678432 - RNA, 16 nt, Human
aaguuuccaucaucua

SEQ ID NO: 2678433 - RNA, 14 nt, Human
aagugcauuuuugu

SEQ ID NO: 2678434 - RNA, 16 nt, Human
aagugcauuuuuguaa

SEQ ID NO: 2678435 - RNA, 13 nt, Human
aagugccaaagaa

SEQ ID NO: 2678436 - RNA, 14 nt, Human
aagugccaaagaaa

SEQ ID NO: 2678437 - RNA, 15 nt, Human
aagugccaaagaaag

SEQ ID NO: 2678438 - RNA, 16 nt, Human
aagugccaaagaaagu

SEQ ID NO: 2678439 - RNA, 19 nt, Human
aagugccaaagaaaguggu

SEQ ID NO: 2678440 - RNA, 14 nt, Human
aaguguccuucuug

SEQ ID NO: 2678441 - RNA, 19 nt, Human
aagugucucacuaaagcau

SEQ ID NO: 2678442 - RNA, 21 nt, Human
aagugucucacuaaagcauga

SEQ ID NO: 2678443 - RNA, 18 nt, Human
aagugugaauacugcuug

SEQ ID NO: 2678444 - RNA, 16 nt, Human
aagugugaauacugcu

SEQ ID NO: 2678445 - RNA, 15 nt, Human
aagugugaauacugc

SEQ ID NO: 2678446 - RNA, 14 nt, Human
aagugugaauacug

SEQ ID NO: 2678447 - RNA, 13 nt, Human
aagugugagcaaa

SEQ ID NO: 2678448 - RNA, 20 nt, Human
aagugugaauacugcuugaa

SEQ ID NO: 2678449 - RNA, 13 nt, Human
aagugugguagag

SEQ ID NO: 2678450 - RNA, 15 nt, Human
aaguguguauauauu

SEQ ID NO: 2678451 - RNA, 16 nt, Human
aaguguguauauauuu

SEQ ID NO: 2678452 - RNA, 17 nt, Human
aaguguguauauauuuu

SEQ ID NO: 2678453 - RNA, 19 nt, Human
aaguguguauauauuuugu

SEQ ID NO: 2678454 - RNA, 21 nt, Human
aaguguguauauauuuugugu

SEQ ID NO: 2678455 - RNA, 16 nt, Human
uaaaauaguaugaaaa

SEQ ID NO: 2678456 - RNA, 18 nt, Human
aagugugugguagaaaca

SEQ ID NO: 2678457 - RNA, 13 nt, Human
aaguuaucuuuga

SEQ ID NO: 2678458 - RNA, 14 nt, Human
aaguuaucuuugaa

SEQ ID NO: 2678459 - RNA, 15 nt, Human
aaguuaucuuugaau

SEQ ID NO: 2678460 - RNA, 22 nt, Human
aaguuaucuuugaauauguagu

SEQ ID NO: 2678461 - RNA, 23 nt, Human
aaguuauugcaguuuaucauuca

SEQ ID NO: 2678462 - RNA, 23 nt, Human
aaguuaguuuguauauauuauua

SEQ ID NO: 2678463 - RNA, 17 nt, Human
aaguuaguuuguauaua

SEQ ID NO: 2678464 - RNA, 22 nt, Human
aaguuaguuuguauauauuauu

SEQ ID NO: 2678465 - RNA, 15 nt, Human
aaguuaguuuguaua

SEQ ID NO: 2678466 - RNA, 16 nt, Human
aaguguguguaguuuu

SEQ ID NO: 2678467 - RNA, 17 nt, Human
uaaaauaaggauuuuuc

SEQ ID NO: 2678468 - RNA, 22 nt, Human
uaaaauaaggauuuuucucuua

SEQ ID NO: 2678469 - RNA, 15 nt, Human
uaaaagugaucuaca

SEQ ID NO: 2678470 - RNA, 18 nt, Human
uaaaacuggaccuguaua

SEQ ID NO: 2678471 - RNA, 14 nt, Human
uaaaagaaauaaac

SEQ ID NO: 2678472 - RNA, 16 nt, Human
uaaaagaaauaaacca

SEQ ID NO: 2678473 - RNA, 13 nt, Human
uaaaagaaacacu

SEQ ID NO: 2678474 - RNA, 17 nt, Human
aagugauuuuuuugucc

SEQ ID NO: 2678475 - RNA, 22 nt, Human
aagugaucuacaugaggaacug

SEQ ID NO: 2678476 - RNA, 18 nt, Human
uaaaauagucucuuuaaa

SEQ ID NO: 2678477 - RNA, 15 nt, Human
uaaaauagauauaaa

SEQ ID NO: 2678478 - RNA, 16 nt, Human
uaaaauagauauaaau

SEQ ID NO: 2678479 - RNA, 18 nt, Human
uaaaauagauauaaauuu

SEQ ID NO: 2678480 - RNA, 19 nt, Human
uaaaauacauagugaaaau

SEQ ID NO: 2678481 - RNA, 14 nt, Human
uaaaauauaaacaa

SEQ ID NO: 2678482 - RNA, 15 nt, Human
aagucagcuccagcu

SEQ ID NO: 2678483 - RNA, 20 nt, Human
aagucagcuccagcuuucug

SEQ ID NO: 2678484 - RNA, 22 nt, Human
aagucagcuccagcuuucugcc

SEQ ID NO: 2678485 - RNA, 17 nt, Human
aagucaguacccaccac

SEQ ID NO: 2678486 - RNA, 14 nt, Human
uaaaaaguauuuuu

SEQ ID NO: 2678487 - RNA, 18 nt, Human
uaaaaaguauuuuuucaa

SEQ ID NO: 2678488 - RNA, 12 nt, Human
uaaaaauagaaa

SEQ ID NO: 2678489 - RNA, 13 nt, Human
uaaaaauagaaac

SEQ ID NO: 2678490 - RNA, 14 nt, Human
uaaaaauagaaaca

SEQ ID NO: 2678491 - RNA, 15 nt, Human
uaaaaauagaaacau

SEQ ID NO: 2678492 - RNA, 17 nt, Human
uaaaaaggaguauacaa

SEQ ID NO: 2678493 - RNA, 18 nt, Human
uaaaaaggaguauacaaa

SEQ ID NO: 2678494 - RNA, 20 nt, Human
uaaaaaggaguauacaaaca

SEQ ID NO: 2678495 - RNA, 17 nt, Human
uaaaaaggcuaaaugga

SEQ ID NO: 2678496 - RNA, 13 nt, Human
uaaaaaguauaaa

SEQ ID NO: 2678497 - RNA, 19 nt, Human
uaaaaaguauaaaauagua

SEQ ID NO: 2678498 - RNA, 23 nt, Human
uaaaaauaucaaauuaauugugu

SEQ ID NO: 2678499 - RNA, 15 nt, Human
uaaaaaucucuuuuc

SEQ ID NO: 2678500 - RNA, 11 nt, Human
uaaaaaucuuu

SEQ ID NO: 2678501 - RNA, 18 nt, Human
uaaaaaucuuuugaagca

SEQ ID NO: 2678502 - RNA, 13 nt, Human
uaaaacccaagug

SEQ ID NO: 2678503 - RNA, 16 nt, Human
uaaaacucacugugau

SEQ ID NO: 2678504 - RNA, 17 nt, Human
uaaaacucacugugauc

SEQ ID NO: 2678505 - RNA, 15 nt, Human
aagcacagaauauuu

SEQ ID NO: 2678506 - RNA, 16 nt, Human
aagcacagaauauuuu

SEQ ID NO: 2678507 - RNA, 18 nt, Human
aagcacaccaaucuuacu

SEQ ID NO: 2678508 - RNA, 22 nt, Human
aagcacaccaaucuuacuuugu

SEQ ID NO: 2678509 - RNA, 19 nt, Human
aagcacaccaaucuuacuu

SEQ ID NO: 2678510 - RNA, 20 nt, Human
aagcacagucugaugacaca

SEQ ID NO: 2678511 - RNA, 23 nt, Human
aagcacaccaaucuuacuuugua

SEQ ID NO: 2678512 - RNA, 23 nt, Human
aagcacuccugcuuaaucuucaa

SEQ ID NO: 2678513 - RNA, 19 nt, Human
aagcacuacaccuugccuu

SEQ ID NO: 2678514 - RNA, 23 nt, Human
aagcacuacaccuugccuugcug

SEQ ID NO: 2678515 - RNA, 13 nt, Human
aagccaagugggg

SEQ ID NO: 2678516 - RNA, 19 nt, Human
aagccaaguggggugcugg

SEQ ID NO: 2678517 - RNA, 23 nt, Human
aagccaagggaaaggggugcuuu

SEQ ID NO: 2678518 - RNA, 20 nt, Human
aagccaagggaaccuguguc

SEQ ID NO: 2678519 - RNA, 18 nt, Human
aagccaagggaaccugug

SEQ ID NO: 2678520 - RNA, 19 nt, Human
aagccaagggaaccugugu

SEQ ID NO: 2678521 - RNA, 13 nt, Human
aagccaagggaaa

SEQ ID NO: 2678522 - RNA, 14 nt, Human
aagccaagggaaag

SEQ ID NO: 2678523 - RNA, 16 nt, Human
aagccaagggaaaggg

SEQ ID NO: 2678524 - RNA, 19 nt, Human
aagcacucuggaugaugga

SEQ ID NO: 2678525 - RNA, 13 nt, Human
aagcaugaaaugu

SEQ ID NO: 2678526 - RNA, 14 nt, Human
aagcaugaaaugug

SEQ ID NO: 2678527 - RNA, 16 nt, Human
aagcaugaaaugugaa

SEQ ID NO: 2678528 - RNA, 17 nt, Human
aagcaugaaaugugaau

SEQ ID NO: 2678529 - RNA, 18 nt, Human
aagcaugaaaugugaauu

SEQ ID NO: 2678530 - RNA, 19 nt, Human
aagcauauggguuagaugu

SEQ ID NO: 2678531 - RNA, 21 nt, Human
aagcauauggguuagauguug

SEQ ID NO: 2678532 - RNA, 20 nt, Human
aagcaucuuggggggguggc

SEQ ID NO: 2678533 - RNA, 21 nt, Human
aagcaugcuugugaaaaugug

SEQ ID NO: 2678534 - RNA, 22 nt, Human
aagcaugcuugugaaaaugugu

SEQ ID NO: 2678535 - RNA, 17 nt, Human
aagcaaauguuaaaagu

SEQ ID NO: 2678536 - RNA, 19 nt, Human
aagcaaauguuaaaaguuu

SEQ ID NO: 2678537 - RNA, 18 nt, Human
aagauuuuuuaauuguuu

SEQ ID NO: 2678538 - RNA, 19 nt, Human
aagauuuuuuaauuguuua

SEQ ID NO: 2678539 - RNA, 20 nt, Human
aagauuuuuuaauuguuuaa

SEQ ID NO: 2678540 - RNA, 23 nt, Human
aagaucaaaaaggcuuauaaaac

SEQ ID NO: 2678541 - RNA, 21 nt, Human
aagaucaaaaaggcuuauaaa

SEQ ID NO: 2678542 - RNA, 15 nt, Human
gugugaacuuggaag

SEQ ID NO: 2678543 - RNA, 17 nt, Human
gugugaacuuggaagca

SEQ ID NO: 2678544 - RNA, 19 nt, Human
guguauucuaguuuuguca

SEQ ID NO: 2678545 - RNA, 19 nt, Human
gugucacccaaaccggcag

SEQ ID NO: 2678546 - RNA, 14 nt, Human
aagauaguguaacu

SEQ ID NO: 2678547 - RNA, 15 nt, Human
aagauaguguaacuu

SEQ ID NO: 2678548 - RNA, 21 nt, Human
aagauaguguaacuugcuuaa

SEQ ID NO: 2678549 - RNA, 15 nt, Human
aagaggcaccaggaa

SEQ ID NO: 2678550 - RNA, 18 nt, Human
aagaggcaccaggaagcc

SEQ ID NO: 2678551 - RNA, 13 nt, Human
gugguuccucugc

SEQ ID NO: 2678552 - RNA, 16 nt, Human
gugguuccucugcuca

SEQ ID NO: 2678553 - RNA, 18 nt, Human
gugguugaauaugauuaa

SEQ ID NO: 2678554 - RNA, 16 nt, Human
gugguugaauaugauu

SEQ ID NO: 2678555 - RNA, 14 nt, Human
gugcugcugcugcu

SEQ ID NO: 2678556 - RNA, 17 nt, Human
guguaaaauauuuugaa

SEQ ID NO: 2678557 - RNA, 18 nt, Human
guguaaaauauuuugaau

SEQ ID NO: 2678558 - RNA, 19 nt, Human
guguaaaauauuuugaauc

SEQ ID NO: 2678559 - RNA, 15 nt, Human
guguaaaaaaaccac

SEQ ID NO: 2678560 - RNA, 16 nt, Human
guguaacucccaguga

SEQ ID NO: 2678561 - RNA, 15 nt, Human
guguaacuugcuuaa

SEQ ID NO: 2678562 - RNA, 20 nt, Human
guguaacuugcuuaaauuuc

SEQ ID NO: 2678563 - RNA, 21 nt, Human
guguaacuugcuuaaauuucu

SEQ ID NO: 2678564 - RNA, 15 nt, Human
guuacuguguaaacu

SEQ ID NO: 2678565 - RNA, 17 nt, Human
guuacuguguaaacuca

SEQ ID NO: 2678566 - RNA, 18 nt, Human
guuacuguguaaacucau

SEQ ID NO: 2678567 - RNA, 13 nt, Human
guuagacagccaa

SEQ ID NO: 2678568 - RNA, 13 nt, Human
guuauugcaguuu

SEQ ID NO: 2678569 - RNA, 14 nt, Human
guuauugcaguuua

SEQ ID NO: 2678570 - RNA, 16 nt, Human
guuauugcaguuuauc

SEQ ID NO: 2678571 - RNA, 23 nt, Human
guuauugcaguuuaucauucaag

SEQ ID NO: 2678572 - RNA, 14 nt, Human
guuaauacaaggua

SEQ ID NO: 2678573 - RNA, 15 nt, Human
guuaauacaagguau

SEQ ID NO: 2678574 - RNA, 16 nt, Human
guuaauacaagguaua

SEQ ID NO: 2678575 - RNA, 19 nt, Human
aagccaaucuacaaucucu

SEQ ID NO: 2678576 - RNA, 22 nt, Human
aagccauucuccugccucagcc

SEQ ID NO: 2678577 - RNA, 12 nt, Human
guuaauuuaagu

SEQ ID NO: 2678578 - RNA, 19 nt, Human
guuaauuuaaguuuugaca

SEQ ID NO: 2678579 - RNA, 13 nt, Human
guuaauuuaaguu

SEQ ID NO: 2678580 - RNA, 23 nt, Human
guuaauuuaaguuuugacaagcu

SEQ ID NO: 2678581 - RNA, 22 nt, Human
guuacuggauuuguuguucuuu

SEQ ID NO: 2678582 - RNA, 14 nt, Human
guuacugggcccug

SEQ ID NO: 2678583 - RNA, 17 nt, Human
guuacugggcccugagu

SEQ ID NO: 2678584 - RNA, 19 nt, Human
aagccuucagcuccaggga

SEQ ID NO: 2678585 - RNA, 11 nt, Human
aagccuuccua

SEQ ID NO: 2678586 - RNA, 22 nt, Human
aagccuucgggcgucugugugc

SEQ ID NO: 2678587 - RNA, 16 nt, Human
aagccuucagcuccag

SEQ ID NO: 2678588 - RNA, 17 nt, Human
aagccuucagcuccagg

SEQ ID NO: 2678589 - RNA, 15 nt, Human
aagccuucagcucca

SEQ ID NO: 2678590 - RNA, 13 nt, Human
aagccuucaaaac

SEQ ID NO: 2678591 - RNA, 22 nt, Human
aagccuucaaaacuauagcuug

SEQ ID NO: 2678592 - RNA, 17 nt, Human
aagcuagucaacaguac

SEQ ID NO: 2678593 - RNA, 15 nt, Human
aagcuagucaacagu

SEQ ID NO: 2678594 - RNA, 15 nt, Human
aagcuaguugaauac

SEQ ID NO: 2678595 - RNA, 13 nt, Human
aagcuaguugaau

SEQ ID NO: 2678596 - RNA, 21 nt, Human
aagcuaguugaauacuugaac

SEQ ID NO: 2678597 - RNA, 20 nt, Human
aagcuaguugaauacuugaa

SEQ ID NO: 2678598 - RNA, 19 nt, Human
aagcuaguugaauacuuga

SEQ ID NO: 2678599 - RNA, 17 nt, Human
aagcuaguugaauacuu

SEQ ID NO: 2678600 - RNA, 17 nt, Human
aagccuguaacacuccu

SEQ ID NO: 2678601 - RNA, 21 nt, Human
aagccuguaacacuccucugc

SEQ ID NO: 2678602 - RNA, 15 nt, Human
aagccuccuccagcc

SEQ ID NO: 2678603 - RNA, 23 nt, Human
aagccuccacagcgagggcagcu

SEQ ID NO: 2678604 - RNA, 13 nt, Human
aagccuccacagc

SEQ ID NO: 2678605 - RNA, 15 nt, Human
aagccuccacagcga

SEQ ID NO: 2678606 - RNA, 12 nt, Human
aagccuccacag

SEQ ID NO: 2678607 - RNA, 16 nt, Human
aagccucccacgacug

SEQ ID NO: 2678608 - RNA, 18 nt, Human
guucaguauuauguaguu

SEQ ID NO: 2678609 - RNA, 21 nt, Human
aagccgugauuuucauugcug

SEQ ID NO: 2678610 - RNA, 13 nt, Human
aagccguccuggc

SEQ ID NO: 2678611 - RNA, 20 nt, Human
guuauuuucuacagugguuu

SEQ ID NO: 2678612 - RNA, 15 nt, Human
guuauuuucuacagu

SEQ ID NO: 2678613 - RNA, 17 nt, Human
guuauuuucuacagugg

SEQ ID NO: 2678614 - RNA, 12 nt, Human
guuauuuucuac

SEQ ID NO: 2678615 - RNA, 14 nt, Human
guuauuuucuacag

SEQ ID NO: 2678616 - RNA, 21 nt, Human
guucccuugaaacuuugggaa

SEQ ID NO: 2678617 - RNA, 22 nt, Human
guucccuugaaacuuugggaaa

SEQ ID NO: 2678618 - RNA, 20 nt, Human
guucccuugagggcugcagu

SEQ ID NO: 2678619 - RNA, 16 nt, Human
aagcuugguucuguga

SEQ ID NO: 2678620 - RNA, 17 nt, Human
aagcuugguucugugaa

SEQ ID NO: 2678621 - RNA, 21 nt, Human
aagcuugguucugugaacaag

SEQ ID NO: 2678622 - RNA, 11 nt, Human
aagcuuagaac

SEQ ID NO: 2678623 - RNA, 10 nt, Human
aagcuuagaa

SEQ ID NO: 2678624 - RNA, 18 nt, Human
aagcuuggauuaaauaca

SEQ ID NO: 2678625 - RNA, 20 nt, Human
aagcuauaaagcaguauuuu

SEQ ID NO: 2678626 - RNA, 13 nt, Human
aagcuauaaagca

SEQ ID NO: 2678627 - RNA, 15 nt, Human
aagcuauaaagcagu

SEQ ID NO: 2678628 - RNA, 20 nt, Human
guucuuggcaauaaauuuug

SEQ ID NO: 2678629 - RNA, 23 nt, Human
guucuuggcaauaaauuuugaaa

SEQ ID NO: 2678630 - RNA, 22 nt, Human
guucuuggcaauaaauuuugaa

SEQ ID NO: 2678631 - RNA, 21 nt, Human
guucuuggcaauaaauuuuga

SEQ ID NO: 2678632 - RNA, 16 nt, Human
aaggaaaaacacaagc

SEQ ID NO: 2678633 - RNA, 19 nt, Human
aaggaaaaacacaagcaaa

SEQ ID NO: 2678634 - RNA, 20 nt, Human
aaggaaaaacacaagcaaaa

SEQ ID NO: 2678635 - RNA, 15 nt, Human
guucucucuucucca

SEQ ID NO: 2678636 - RNA, 12 nt, Human
guauuuauaaua

SEQ ID NO: 2678637 - RNA, 17 nt, Human
aaauguagguccucaga

SEQ ID NO: 2678638 - RNA, 18 nt, Human
guauuguuuaaaauguaa

SEQ ID NO: 2678639 - RNA, 17 nt, Human
guauuuaacagaaauug

SEQ ID NO: 2678640 - RNA, 16 nt, Human
guauuuaaaaauagaa

SEQ ID NO: 2678641 - RNA, 17 nt, Human
guauuuaaaaauagaaa

SEQ ID NO: 2678642 - RNA, 19 nt, Human
guauuuaaaaauagaaaca

SEQ ID NO: 2678643 - RNA, 20 nt, Human
guauuuaaaaauagaaacau

SEQ ID NO: 2678644 - RNA, 14 nt, Human
aaauguauaaacuu

SEQ ID NO: 2678645 - RNA, 13 nt, Human
aaauguauaaaua

SEQ ID NO: 2678646 - RNA, 15 nt, Human
aaauguauaaauaua

SEQ ID NO: 2678647 - RNA, 16 nt, Human
aaauguauaaauauac

SEQ ID NO: 2678648 - RNA, 17 nt, Human
aaauguauaaauauaca

SEQ ID NO: 2678649 - RNA, 19 nt, Human
aaauguauaaauauacagu

SEQ ID NO: 2678650 - RNA, 21 nt, Human
aaauguauaaauauacaguau

SEQ ID NO: 2678651 - RNA, 18 nt, Human
aaaugucuguaauaauag

SEQ ID NO: 2678652 - RNA, 20 nt, Human
aaaugucuguaaauauguuu

SEQ ID NO: 2678653 - RNA, 14 nt, Human
aaaugucuguaaau

SEQ ID NO: 2678654 - RNA, 19 nt, Human
aaaucauucuuacuaaaaa

SEQ ID NO: 2678655 - RNA, 21 nt, Human
aaaucauucuuacuaaaaagu

SEQ ID NO: 2678656 - RNA, 23 nt, Human
aaaucauguugaucauguacuuu

SEQ ID NO: 2678657 - RNA, 18 nt, Human
guauucuaguuuugucaa

SEQ ID NO: 2678658 - RNA, 19 nt, Human
guauucuaauaagcuaguu

SEQ ID NO: 2678659 - RNA, 22 nt, Human
guauucuaauaagcuaguugaa

SEQ ID NO: 2678660 - RNA, 21 nt, Human
guauuguccuauuaguguuau

SEQ ID NO: 2678661 - RNA, 13 nt, Human
guauuguccuauu

SEQ ID NO: 2678662 - RNA, 13 nt, Human
aaauuaauugugu

SEQ ID NO: 2678663 - RNA, 15 nt, Human
aaauuagccgggcgu

SEQ ID NO: 2678664 - RNA, 13 nt, Human
aaauuacaauuuu

SEQ ID NO: 2678665 - RNA, 14 nt, Human
aaauuacaauuuua

SEQ ID NO: 2678666 - RNA, 15 nt, Human
aaauuacaauuuuau

SEQ ID NO: 2678667 - RNA, 16 nt, Human
aaauuacaauuuuauc

SEQ ID NO: 2678668 - RNA, 18 nt, Human
aaauuaauugugugaacu

SEQ ID NO: 2678669 - RNA, 16 nt, Human
aaauuaaucauaguca

SEQ ID NO: 2678670 - RNA, 16 nt, Human
aaauuaauugugugaa

SEQ ID NO: 2678671 - RNA, 15 nt, Human
aaauuaauuguguga

SEQ ID NO: 2678672 - RNA, 18 nt, Human
aaauuaggaauaaauaaa

SEQ ID NO: 2678673 - RNA, 16 nt, Human
aaauuaggaauaaaua

SEQ ID NO: 2678674 - RNA, 15 nt, Human
aaauuaggaauaaau

SEQ ID NO: 2678675 - RNA, 14 nt, Human
aaauuaggaauaaa

SEQ ID NO: 2678676 - RNA, 17 nt, Human
aaauuaucuugauacau

SEQ ID NO: 2678677 - RNA, 20 nt, Human
aaauuaucuugauacauuca

SEQ ID NO: 2678678 - RNA, 21 nt, Human
aaauuaucuugauacauucaa

SEQ ID NO: 2678679 - RNA, 22 nt, Human
aaauuaucuugauacauucaaa

SEQ ID NO: 2678680 - RNA, 15 nt, Human
aaauucaacuuugua

SEQ ID NO: 2678681 - RNA, 16 nt, Human
aaauucaacuuuguaa

SEQ ID NO: 2678682 - RNA, 20 nt, Human
aaauucaacuuuguaaaaau

SEQ ID NO: 2678683 - RNA, 12 nt, Human
aaauucuccacu

SEQ ID NO: 2678684 - RNA, 13 nt, Human
aaauucuccugga

SEQ ID NO: 2678685 - RNA, 23 nt, Human
aaauucuauaggaacauaugaaa

SEQ ID NO: 2678686 - RNA, 22 nt, Human
aaauucuauaggaacauaugaa

SEQ ID NO: 2678687 - RNA, 19 nt, Human
aaauucuauaggaacauau

SEQ ID NO: 2678688 - RNA, 19 nt, Human
aaauuguauauuguaauuu

SEQ ID NO: 2678689 - RNA, 13 nt, Human
aaauuguauauug

SEQ ID NO: 2678690 - RNA, 15 nt, Human
aaauuguauauugua

SEQ ID NO: 2678691 - RNA, 14 nt, Human
aaauucuccuggag

SEQ ID NO: 2678692 - RNA, 13 nt, Human
aaauuuaaaaaau

SEQ ID NO: 2678693 - RNA, 16 nt, Human
aaauuuaaaaaauaaa

SEQ ID NO: 2678694 - RNA, 19 nt, Human
aaauuuaaaaaauaaauaa

SEQ ID NO: 2678695 - RNA, 11 nt, Human
aaauuccugua

SEQ ID NO: 2678696 - RNA, 14 nt, Human
gucaggugacccug

SEQ ID NO: 2678697 - RNA, 14 nt, Human
gucacuuuuuaugc

SEQ ID NO: 2678698 - RNA, 21 nt, Human
gucaggagaucgagaccaucc

SEQ ID NO: 2678699 - RNA, 12 nt, Human
gucacuggaaag

SEQ ID NO: 2678700 - RNA, 18 nt, Human
gucacuggagguugaagc

SEQ ID NO: 2678701 - RNA, 20 nt, Human
gucacuggagguugaagcca

SEQ ID NO: 2678702 - RNA, 15 nt, Human
gucacuggaaagggg

SEQ ID NO: 2678703 - RNA, 18 nt, Human
gucacuggaaaggggaga

SEQ ID NO: 2678704 - RNA, 20 nt, Human
gucacuggaaaggggagagc

SEQ ID NO: 2678705 - RNA, 23 nt, Human
gucacuggaaaggggagagccug

SEQ ID NO: 2678706 - RNA, 19 nt, Human
gucacuguuuauuuuuuua

SEQ ID NO: 2678707 - RNA, 14 nt, Human
gucacuguuuccug

SEQ ID NO: 2678708 - RNA, 17 nt, Human
gucacuguuuccugggc

SEQ ID NO: 2678709 - RNA, 23 nt, Human
gucacuggagguugaagccaagu

SEQ ID NO: 2678710 - RNA, 21 nt, Human
aaauuuaauaccagauaccuu

SEQ ID NO: 2678711 - RNA, 17 nt, Human
gucaauuucuguguugc

SEQ ID NO: 2678712 - RNA, 22 nt, Human
gucaauuucuguguugccaagc

SEQ ID NO: 2678713 - RNA, 13 nt, Human
gucaccaccaccc

SEQ ID NO: 2678714 - RNA, 14 nt, Human
gucaccaccacccc

SEQ ID NO: 2678715 - RNA, 12 nt, Human
aacauuauuuau

SEQ ID NO: 2678716 - RNA, 13 nt, Human
guccuccucaccu

SEQ ID NO: 2678717 - RNA, 21 nt, Human
guccuccucaccucaugccca

SEQ ID NO: 2678718 - RNA, 15 nt, Human
guccuccucaccuca

SEQ ID NO: 2678719 - RNA, 17 nt, Human
guccuccucaccucaug

SEQ ID NO: 2678720 - RNA, 19 nt, Human
guccgugggacggugccca

SEQ ID NO: 2678721 - RNA, 17 nt, Human
gucccuuccccaugcuu

SEQ ID NO: 2678722 - RNA, 20 nt, Human
gucccuuccccaugcuuccu

SEQ ID NO: 2678723 - RNA, 12 nt, Human
aacaguuuugug

SEQ ID NO: 2678724 - RNA, 17 nt, Human
aacaguuuuguguaacu

SEQ ID NO: 2678725 - RNA, 17 nt, Human
aacauagccaaaaugug

SEQ ID NO: 2678726 - RNA, 17 nt, Human
guccucuuuaguuuuug

SEQ ID NO: 2678727 - RNA, 12 nt, Human
gucgaggcagga

SEQ ID NO: 2678728 - RNA, 16 nt, Human
gucgcucaugugugca

SEQ ID NO: 2678729 - RNA, 21 nt, Human
gucgcucaugugugcaacagg

SEQ ID NO: 2678730 - RNA, 11 nt, Human
gucgcuccugc

SEQ ID NO: 2678731 - RNA, 15 nt, Human
gucgcuccugcccac

SEQ ID NO: 2678732 - RNA, 17 nt, Human
gucuauaaaagaaacac

SEQ ID NO: 2678733 - RNA, 23 nt, Human
gucuauuuaaaaaaaaagucaga

SEQ ID NO: 2678734 - RNA, 11 nt, Human
aaauuucuuau

SEQ ID NO: 2678735 - RNA, 14 nt, Human
aaauuucuuaugug

SEQ ID NO: 2678736 - RNA, 15 nt, Human
aaauuucuuauguga

SEQ ID NO: 2678737 - RNA, 17 nt, Human
aaauuucuuaugugaca

SEQ ID NO: 2678738 - RNA, 20 nt, Human
aaauuucuuaugugacauua

SEQ ID NO: 2678739 - RNA, 16 nt, Human
aaauuugacuaauuuu

SEQ ID NO: 2678740 - RNA, 17 nt, Human
aaauuugacuaauuuua

SEQ ID NO: 2678741 - RNA, 18 nt, Human
aaauuugacuaauuuuac

SEQ ID NO: 2678742 - RNA, 20 nt, Human
aaauuugacuaauuuuacau

SEQ ID NO: 2678743 - RNA, 19 nt, Human
aacacaaacgggcucagca

SEQ ID NO: 2678744 - RNA, 13 nt, Human
aacacagccuggg

SEQ ID NO: 2678745 - RNA, 14 nt, Human
aacacagccugggc

SEQ ID NO: 2678746 - RNA, 15 nt, Human
aacacacacauauac

SEQ ID NO: 2678747 - RNA, 17 nt, Human
aacacacacauauacac

SEQ ID NO: 2678748 - RNA, 12 nt, Human
aacacaagcaaa

SEQ ID NO: 2678749 - RNA, 13 nt, Human
aacacaagcaaaa

SEQ ID NO: 2678750 - RNA, 16 nt, Human
aacacaagcaaaaaaa

SEQ ID NO: 2678751 - RNA, 16 nt, Human
aacacagccugggccc

SEQ ID NO: 2678752 - RNA, 16 nt, Human
guccaaccagaccugg

SEQ ID NO: 2678753 - RNA, 16 nt, Human
guccaaagaggcugcc

SEQ ID NO: 2678754 - RNA, 19 nt, Human
guccaaagaggcugccccu

SEQ ID NO: 2678755 - RNA, 17 nt, Human
guccaaacguccucuuu

SEQ ID NO: 2678756 - RNA, 16 nt, Human
aacuugaaugugucag

SEQ ID NO: 2678757 - RNA, 21 nt, Human
aacugucaggcugaaaacaau

SEQ ID NO: 2678758 - RNA, 13 nt, Human
aacuguauuugaa

SEQ ID NO: 2678759 - RNA, 20 nt, Human
aacuguauuugaaauaagaa

SEQ ID NO: 2678760 - RNA, 15 nt, Human
aacugucgugucaua

SEQ ID NO: 2678761 - RNA, 11 nt, Human
aacuguccugu

SEQ ID NO: 2678762 - RNA, 13 nt, Human
aacuguccugucc

SEQ ID NO: 2678763 - RNA, 14 nt, Human
aacuguccuguccu

SEQ ID NO: 2678764 - RNA, 16 nt, Human
aacuguccuguccugc

SEQ ID NO: 2678765 - RNA, 17 nt, Human
aacuguccuguccugcu

SEQ ID NO: 2678766 - RNA, 18 nt, Human
aacuguccuguccugcuc

SEQ ID NO: 2678767 - RNA, 20 nt, Human
aacugucgugucauacucga

SEQ ID NO: 2678768 - RNA, 14 nt, Human
aacuguguacuguu

SEQ ID NO: 2678769 - RNA, 16 nt, Human
aacugugauuucagga

SEQ ID NO: 2678770 - RNA, 22 nt, Human
aacugucucucuucucagagug

SEQ ID NO: 2678771 - RNA, 14 nt, Human
aacugucuuccuca

SEQ ID NO: 2678772 - RNA, 15 nt, Human
aacugucuuccucaa

SEQ ID NO: 2678773 - RNA, 16 nt, Human
aacugucuuccucaaa

SEQ ID NO: 2678774 - RNA, 17 nt, Human
gugauuaaagcuaagga

SEQ ID NO: 2678775 - RNA, 19 nt, Human
gugauuaaagcuaaggacc

SEQ ID NO: 2678776 - RNA, 21 nt, Human
gugauccucucaccucagccu

SEQ ID NO: 2678777 - RNA, 20 nt, Human
gugaucugcugcagagcagu

SEQ ID NO: 2678778 - RNA, 19 nt, Human
gugaucugcugcagagcag

SEQ ID NO: 2678779 - RNA, 14 nt, Human
gugauguuuguccu

SEQ ID NO: 2678780 - RNA, 23 nt, Human
gugcauuugugcuagaaauuuuc

SEQ ID NO: 2678781 - RNA, 13 nt, Human
gugcauuuuugua

SEQ ID NO: 2678782 - RNA, 15 nt, Human
gugcauuuuuguaaa

SEQ ID NO: 2678783 - RNA, 11 nt, Human
gugccaaagaa

SEQ ID NO: 2678784 - RNA, 14 nt, Human
gugccaaagaaagu

SEQ ID NO: 2678785 - RNA, 21 nt, Human
gugccaaagaaaguggucuua

SEQ ID NO: 2678786 - RNA, 15 nt, Human
aagaagagcuaucag

SEQ ID NO: 2678787 - RNA, 20 nt, Human
aagaagagcuaucaggagaa

SEQ ID NO: 2678788 - RNA, 13 nt, Human
aagaagacuuuuu

SEQ ID NO: 2678789 - RNA, 17 nt, Human
aagaaguucauguccaa

SEQ ID NO: 2678790 - RNA, 12 nt, Human
aagaagaugcuc

SEQ ID NO: 2678791 - RNA, 22 nt, Human
aagaagaugcuccagcaacaca

SEQ ID NO: 2678792 - RNA, 21 nt, Human
gugcucggagaagagcgcagu

SEQ ID NO: 2678793 - RNA, 20 nt, Human
gugccagaggaauccuggca

SEQ ID NO: 2678794 - RNA, 21 nt, Human
gugccagaggaauccuggcag

SEQ ID NO: 2678795 - RNA, 22 nt, Human
gugccagaggaauccuggcagc

SEQ ID NO: 2678796 - RNA, 18 nt, Human
aagaaaaagaaaaagaaa

SEQ ID NO: 2678797 - RNA, 13 nt, Human
aagaaaaagaaaa

SEQ ID NO: 2678798 - RNA, 19 nt, Human
aagaaaaaauauuuucccu

SEQ ID NO: 2678799 - RNA, 18 nt, Human
aagaaaaaugagccuggc

SEQ ID NO: 2678800 - RNA, 17 nt, Human
aagaaaaaugagccugg

SEQ ID NO: 2678801 - RNA, 15 nt, Human
aacuuuauaaaucca

SEQ ID NO: 2678802 - RNA, 19 nt, Human
aacuuuauaaauccaguga

SEQ ID NO: 2678803 - RNA, 22 nt, Human
gugagacccugucucaaaaaaa

SEQ ID NO: 2678804 - RNA, 22 nt, Human
gugacaguugcagcccuuguga

SEQ ID NO: 2678805 - RNA, 18 nt, Human
gugaaguuuuacugucua

SEQ ID NO: 2678806 - RNA, 23 nt, Human
gugaauaauacaguaucucaggg

SEQ ID NO: 2678807 - RNA, 17 nt, Human
aacuccacaucugccuu

SEQ ID NO: 2678808 - RNA, 18 nt, Human
aacuccacaucugccuua

SEQ ID NO: 2678809 - RNA, 14 nt, Human
aacuccacaucugc

SEQ ID NO: 2678810 - RNA, 15 nt, Human
aacuccacaucugcc

SEQ ID NO: 2678811 - RNA, 16 nt, Human
aacuccacaucugccu

SEQ ID NO: 2678812 - RNA, 15 nt, Human
aacugccaagaaauu

SEQ ID NO: 2678813 - RNA, 16 nt, Human
aacugcauuggcuuug

SEQ ID NO: 2678814 - RNA, 17 nt, Human
aacucuucucauuacuu

SEQ ID NO: 2678815 - RNA, 16 nt, Human
aacucuucucauuacu

SEQ ID NO: 2678816 - RNA, 13 nt, Human
aacucuucucauu

SEQ ID NO: 2678817 - RNA, 17 nt, Human
gucuuaagaaauguaua

SEQ ID NO: 2678818 - RNA, 21 nt, Human
gucuuaagaaauguauaaacu

SEQ ID NO: 2678819 - RNA, 13 nt, Human
gucuuaaggacaa

SEQ ID NO: 2678820 - RNA, 19 nt, Human
gucuuaaggacaaagugcc

SEQ ID NO: 2678821 - RNA, 11 nt, Human
gucuuucagua

SEQ ID NO: 2678822 - RNA, 15 nt, Human
gucuuucaguacuuu

SEQ ID NO: 2678823 - RNA, 16 nt, Human
gucuuucaguacuuuu

SEQ ID NO: 2678824 - RNA, 22 nt, Human
gucuuucaguacuuuuuuaaau

SEQ ID NO: 2678825 - RNA, 13 nt, Human
gucuuucauggcu

SEQ ID NO: 2678826 - RNA, 16 nt, Human
gucuuucauggcugcu

SEQ ID NO: 2678827 - RNA, 19 nt, Human
gucuuucauggcugcuguu

SEQ ID NO: 2678828 - RNA, 23 nt, Human
gucuuucauggcugcuguugcuu

SEQ ID NO: 2678829 - RNA, 17 nt, Human
gucucaaaaaaagaaaa

SEQ ID NO: 2678830 - RNA, 23 nt, Human
aacuauagcuugcagaacuguag

SEQ ID NO: 2678831 - RNA, 14 nt, Human
aacuaguguacauu

SEQ ID NO: 2678832 - RNA, 23 nt, Human
aacuagugggguuuccuggcacu

SEQ ID NO: 2678833 - RNA, 15 nt, Human
aacuaaaauuugaag

SEQ ID NO: 2678834 - RNA, 17 nt, Human
aacuagggaagauaaua

SEQ ID NO: 2678835 - RNA, 22 nt, Human
aaccuuaucuccacaaccucuu

SEQ ID NO: 2678836 - RNA, 15 nt, Human
aaccuucguccuuuu

SEQ ID NO: 2678837 - RNA, 16 nt, Human
gucuuucucaaagaaa

SEQ ID NO: 2678838 - RNA, 23 nt, Human
gucuuucucaaagaaauauuaag

SEQ ID NO: 2678839 - RNA, 20 nt, Human
gucuuucccauggggaggga

SEQ ID NO: 2678840 - RNA, 19 nt, Human
gucuuucccauggggaggg

SEQ ID NO: 2678841 - RNA, 21 nt, Human
aaccugggauucaggaaugug

SEQ ID NO: 2678842 - RNA, 20 nt, Human
aaccugggauucaggaaugu

SEQ ID NO: 2678843 - RNA, 17 nt, Human
aaccugggauucaggaa

SEQ ID NO: 2678844 - RNA, 14 nt, Human
aaccugggauucag

SEQ ID NO: 2678845 - RNA, 19 nt, Human
uaggcaaggcuaugugauu

SEQ ID NO: 2678846 - RNA, 17 nt, Human
uaggcaccuuuuacugu

SEQ ID NO: 2678847 - RNA, 18 nt, Human
uaggcaccuuuuacugug

SEQ ID NO: 2678848 - RNA, 20 nt, Human
uaggcauuugcugaauacag

SEQ ID NO: 2678849 - RNA, 16 nt, Human
uaggcauuugcugaau

SEQ ID NO: 2678850 - RNA, 19 nt, Human
uagggacuacccauagaca

SEQ ID NO: 2678851 - RNA, 20 nt, Human
uagggacuacccauagacau

SEQ ID NO: 2678852 - RNA, 19 nt, Human
uaggaccuuuccaccacag

SEQ ID NO: 2678853 - RNA, 21 nt, Human
uaggaccuuuccaccacagcc

SEQ ID NO: 2678854 - RNA, 22 nt, Human
uaggaccuuuccaccacagcca

SEQ ID NO: 2678855 - RNA, 13 nt, Human
uagcuaauuauuu

SEQ ID NO: 2678856 - RNA, 23 nt, Human
uaggagacuugccagagccgggc

SEQ ID NO: 2678857 - RNA, 23 nt, Human
uaggagcugccuuggcucagaca

SEQ ID NO: 2678858 - RNA, 18 nt, Human
uaggagcugccuuggcuc

SEQ ID NO: 2678859 - RNA, 17 nt, Human
uaggagaaccaaaucug

SEQ ID NO: 2678860 - RNA, 20 nt, Human
uaggagaaccaaaucuggaa

SEQ ID NO: 2678861 - RNA, 17 nt, Human
uaggagacuugccagag

SEQ ID NO: 2678862 - RNA, 20 nt, Human
uaggagacuugccagagccg

SEQ ID NO: 2678863 - RNA, 15 nt, Human
acaauaaacccucag

SEQ ID NO: 2678864 - RNA, 20 nt, Human
acaauaaacccucagagccu

SEQ ID NO: 2678865 - RNA, 19 nt, Human
acaauccacgcuucuccgg

SEQ ID NO: 2678866 - RNA, 22 nt, Human
acaauccacgcuucuccggauc

SEQ ID NO: 2678867 - RNA, 18 nt, Human
uacuggauuuguuguucu

SEQ ID NO: 2678868 - RNA, 23 nt, Human
aauuguuccuuggagaaaugaaa

SEQ ID NO: 2678869 - RNA, 13 nt, Human
aauuguucucaga

SEQ ID NO: 2678870 - RNA, 11 nt, Human
acaaaagcaau

SEQ ID NO: 2678871 - RNA, 22 nt, Human
uagauauguauucuuuucucag

SEQ ID NO: 2678872 - RNA, 22 nt, Human
uagauauugaggccaagaauau

SEQ ID NO: 2678873 - RNA, 14 nt, Human
uagaugauguauuu

SEQ ID NO: 2678874 - RNA, 23 nt, Human
uagauaucgacuuguuuuugcac

SEQ ID NO: 2678875 - RNA, 20 nt, Human
uagauaucaugcaaauuuca

SEQ ID NO: 2678876 - RNA, 18 nt, Human
uagaggcccuuugcuguc

SEQ ID NO: 2678877 - RNA, 12 nt, Human
uagcauguaaug

SEQ ID NO: 2678878 - RNA, 16 nt, Human
uagcauuuugcuaaau

SEQ ID NO: 2678879 - RNA, 22 nt, Human
uagcauuuugcuaaaugugaau

SEQ ID NO: 2678880 - RNA, 17 nt, Human
acaacaaaaagcuuccc

SEQ ID NO: 2678881 - RNA, 15 nt, Human
uagccagauuugucu

SEQ ID NO: 2678882 - RNA, 18 nt, Human
uagccagauuugucuuuu

SEQ ID NO: 2678883 - RNA, 13 nt, Human
uagccaaaaugug

SEQ ID NO: 2678884 - RNA, 21 nt, Human
uagccaaugucuccuccccuu

SEQ ID NO: 2678885 - RNA, 13 nt, Human
uagugaaacuuuu

SEQ ID NO: 2678886 - RNA, 14 nt, Human
uagugaaacuuuuc

SEQ ID NO: 2678887 - RNA, 19 nt, Human
uagugaaacuuuucuagaa

SEQ ID NO: 2678888 - RNA, 20 nt, Human
uagugaaaauuguuuaguga

SEQ ID NO: 2678889 - RNA, 23 nt, Human
uagucccagcuacuugggaggcu

SEQ ID NO: 2678890 - RNA, 16 nt, Human
uagucccugccacgaa

SEQ ID NO: 2678891 - RNA, 16 nt, Human
acacauacaugucaca

SEQ ID NO: 2678892 - RNA, 23 nt, Human
uaguguuuuuuuauuucuacugu

SEQ ID NO: 2678893 - RNA, 23 nt, Human
acacaguuuugaccuaacauacc

SEQ ID NO: 2678894 - RNA, 14 nt, Human
acacacacauauac

SEQ ID NO: 2678895 - RNA, 22 nt, Human
acaauguccuaacugaaagaug

SEQ ID NO: 2678896 - RNA, 19 nt, Human
acaaugugaaaagaaaaau

SEQ ID NO: 2678897 - RNA, 17 nt, Human
acaaugugaaaagaaaa

SEQ ID NO: 2678898 - RNA, 18 nt, Human
acaauggacccuuuuugu

SEQ ID NO: 2678899 - RNA, 15 nt, Human
acaauggaguauucu

SEQ ID NO: 2678900 - RNA, 15 nt, Human
acacucaaaagcugg

SEQ ID NO: 2678901 - RNA, 18 nt, Human
acacgaauagacaucaaa

SEQ ID NO: 2678902 - RNA, 16 nt, Human
acacuaacgaaauauc

SEQ ID NO: 2678903 - RNA, 17 nt, Human
acacuaacgaaauauca

SEQ ID NO: 2678904 - RNA, 21 nt, Human
acacuaacgaaauaucaaagu

SEQ ID NO: 2678905 - RNA, 17 nt, Human
acacuaacucaccagcc

SEQ ID NO: 2678906 - RNA, 19 nt, Human
acacuaacucaccagcccc

SEQ ID NO: 2678907 - RNA, 20 nt, Human
acacuaacucaccagcccca

SEQ ID NO: 2678908 - RNA, 22 nt, Human
acaccuuggacauccuccuccc

SEQ ID NO: 2678909 - RNA, 20 nt, Human
acaccuuggacauccuccuc

SEQ ID NO: 2678910 - RNA, 12 nt, Human
acaccuucuaua

SEQ ID NO: 2678911 - RNA, 23 nt, Human
acaccuuggacauccuccuccca

SEQ ID NO: 2678912 - RNA, 19 nt, Human
acaccuggcugagguuccu

SEQ ID NO: 2678913 - RNA, 20 nt, Human
acaccuguagcacuuacugg

SEQ ID NO: 2678914 - RNA, 23 nt, Human
acaccuggcugagguuccucugc

SEQ ID NO: 2678915 - RNA, 21 nt, Human
acaccucugcacaagcugcac

SEQ ID NO: 2678916 - RNA, 19 nt, Human
acaccucugcacaagcugc

SEQ ID NO: 2678917 - RNA, 18 nt, Human
acacccucaaccucuucu

SEQ ID NO: 2678918 - RNA, 17 nt, Human
acacccucaaccucuuc

SEQ ID NO: 2678919 - RNA, 13 nt, Human
acacccaaagcug

SEQ ID NO: 2678920 - RNA, 20 nt, Human
uauaaaaaccccaaacuguu

SEQ ID NO: 2678921 - RNA, 17 nt, Human
acacauagcauguaaug

SEQ ID NO: 2678922 - RNA, 15 nt, Human
acacauauacacgaa

SEQ ID NO: 2678923 - RNA, 16 nt, Human
acacauauauauuaca

SEQ ID NO: 2678924 - RNA, 20 nt, Human
uaguuaaauguuaccucuga

SEQ ID NO: 2678925 - RNA, 14 nt, Human
uauccaguuacugc

SEQ ID NO: 2678926 - RNA, 14 nt, Human
uauccagaaaacug

SEQ ID NO: 2678927 - RNA, 17 nt, Human
uauccagaaaacuguga

SEQ ID NO: 2678928 - RNA, 14 nt, Human
uauccgcugccagc

SEQ ID NO: 2678929 - RNA, 16 nt, Human
uaucccuuccagaugg

SEQ ID NO: 2678930 - RNA, 19 nt, Human
uaucaaauuaauuguguga

SEQ ID NO: 2678931 - RNA, 21 nt, Human
uaucaaauuaauugugugaac

SEQ ID NO: 2678932 - RNA, 20 nt, Human
uaucaaauuaauugugugaa

SEQ ID NO: 2678933 - RNA, 19 nt, Human
uaucaacuuagucaauaag

SEQ ID NO: 2678934 - RNA, 20 nt, Human
uaucauuuucuuuuuuaacc

SEQ ID NO: 2678935 - RNA, 19 nt, Human
uaucuauuaauauauguau

SEQ ID NO: 2678936 - RNA, 16 nt, Human
uaucuauucugagaaa

SEQ ID NO: 2678937 - RNA, 18 nt, Human
uaucuauuaauauaugua

SEQ ID NO: 2678938 - RNA, 17 nt, Human
uaucuauuaauauaugu

SEQ ID NO: 2678939 - RNA, 15 nt, Human
uaucuauuaauauau

SEQ ID NO: 2678940 - RNA, 13 nt, Human
uaucuauuaauau

SEQ ID NO: 2678941 - RNA, 12 nt, Human
uaucuauuaaua

SEQ ID NO: 2678942 - RNA, 16 nt, Human
uaucuaucuauuugag

SEQ ID NO: 2678943 - RNA, 17 nt, Human
uaucuaucuauuugagg

SEQ ID NO: 2678944 - RNA, 23 nt, Human
uaucuauucugagaaaacaagca

SEQ ID NO: 2678945 - RNA, 12 nt, Human
uaucuauuugag

SEQ ID NO: 2678946 - RNA, 18 nt, Human
uaucuauucugagaaaac

SEQ ID NO: 2678947 - RNA, 19 nt, Human
uaucuauucugagaaaaca

SEQ ID NO: 2678948 - RNA, 23 nt, Human
uauauugguuuuaugaugacgua

SEQ ID NO: 2678949 - RNA, 12 nt, Human
uauauuguaauu

SEQ ID NO: 2678950 - RNA, 14 nt, Human
uauauuguaauuua

SEQ ID NO: 2678951 - RNA, 18 nt, Human
acagaccccucgcaacug

SEQ ID NO: 2678952 - RNA, 16 nt, Human
uauauuaguauguaug

SEQ ID NO: 2678953 - RNA, 16 nt, Human
uauauuacugacauuu

SEQ ID NO: 2678954 - RNA, 23 nt, Human
uauauuacugacauuucuucuag

SEQ ID NO: 2678955 - RNA, 13 nt, Human
uauauuacaauga

SEQ ID NO: 2678956 - RNA, 12 nt, Human
uauauuacaaug

SEQ ID NO: 2678957 - RNA, 17 nt, Human
uauauuacaaugaucac

SEQ ID NO: 2678958 - RNA, 11 nt, Human
uauauuacaag

SEQ ID NO: 2678959 - RNA, 14 nt, Human
uauacaaaauaaga

SEQ ID NO: 2678960 - RNA, 22 nt, Human
uauacaaaccuaccaaaaugga

SEQ ID NO: 2678961 - RNA, 21 nt, Human
uauacaaaauaagaacgagga

SEQ ID NO: 2678962 - RNA, 12 nt, Human
uauaauaaaaau

SEQ ID NO: 2678963 - RNA, 13 nt, Human
uauaauaaaaaua

SEQ ID NO: 2678964 - RNA, 14 nt, Human
uauaauaaaaauau

SEQ ID NO: 2678965 - RNA, 18 nt, Human
uauaauaaaaauauauuu

SEQ ID NO: 2678966 - RNA, 13 nt, Human
acagccucuuuuu

SEQ ID NO: 2678967 - RNA, 22 nt, Human
uauggguuagauguugccaugu

SEQ ID NO: 2678968 - RNA, 17 nt, Human
uaugaacauacaaaugc

SEQ ID NO: 2678969 - RNA, 17 nt, Human
acagaugaauguauuua

SEQ ID NO: 2678970 - RNA, 14 nt, Human
acagaugaauguau

SEQ ID NO: 2678971 - RNA, 19 nt, Human
acagauugccuguuucuga

SEQ ID NO: 2678972 - RNA, 19 nt, Human
acaguacccugguugugug

SEQ ID NO: 2678973 - RNA, 14 nt, Human
acaguagagccagc

SEQ ID NO: 2678974 - RNA, 15 nt, Human
acaguagagccagcu

SEQ ID NO: 2678975 - RNA, 20 nt, Human
acaguacccugguugugugu

SEQ ID NO: 2678976 - RNA, 13 nt, Human
acaguagaacugu

SEQ ID NO: 2678977 - RNA, 18 nt, Human
acaguagaacugucugug

SEQ ID NO: 2678978 - RNA, 19 nt, Human
acaguagaacugucuguga

SEQ ID NO: 2678979 - RNA, 13 nt, Human
acaguagagccag

SEQ ID NO: 2678980 - RNA, 15 nt, Human
acaguaagauaucuc

SEQ ID NO: 2678981 - RNA, 18 nt, Human
acagggauaaggccugug

SEQ ID NO: 2678982 - RNA, 22 nt, Human
acagggauaaggccuguggggg

SEQ ID NO: 2678983 - RNA, 23 nt, Human
acaguaguuagaauuauaucacu

SEQ ID NO: 2678984 - RNA, 16 nt, Human
acaguagagccagcuu

SEQ ID NO: 2678985 - RNA, 16 nt, Human
uauuaaaauauuucag

SEQ ID NO: 2678986 - RNA, 17 nt, Human
uauuaaaauauuucagg

SEQ ID NO: 2678987 - RNA, 15 nt, Human
uauuacuguuuauua

SEQ ID NO: 2678988 - RNA, 13 nt, Human
uauuacuuccaug

SEQ ID NO: 2678989 - RNA, 14 nt, Human
uauuacuuccauga

SEQ ID NO: 2678990 - RNA, 15 nt, Human
uauuacuuccaugaa

SEQ ID NO: 2678991 - RNA, 18 nt, Human
uauuacuuccaugaauuu

SEQ ID NO: 2678992 - RNA, 19 nt, Human
uauuacuuccaugaauuuu

SEQ ID NO: 2678993 - RNA, 16 nt, Human
uauuacugacauuucu

SEQ ID NO: 2678994 - RNA, 17 nt, Human
uauuacugacauuucuu

SEQ ID NO: 2678995 - RNA, 18 nt, Human
uauuacugacauuucuuc

SEQ ID NO: 2678996 - RNA, 19 nt, Human
uauuaggaaguguuuaugu

SEQ ID NO: 2678997 - RNA, 15 nt, Human
uauuagguugucacg

SEQ ID NO: 2678998 - RNA, 15 nt, Human
uauuagaaaggcucu

SEQ ID NO: 2678999 - RNA, 16 nt, Human
uauucaauucuuuuaa

SEQ ID NO: 2679000 - RNA, 20 nt, Human
acagcuuucaugauuagcaa

SEQ ID NO: 2679001 - RNA, 14 nt, Human
acagcgucccuggc

SEQ ID NO: 2679002 - RNA, 15 nt, Human
acagcgucccuggcg

SEQ ID NO: 2679003 - RNA, 17 nt, Human
acagcgucccuggcgca

SEQ ID NO: 2679004 - RNA, 13 nt, Human
acaggaggcaggc

SEQ ID NO: 2679005 - RNA, 21 nt, Human
acaggaggcaggcauggcccu

SEQ ID NO: 2679006 - RNA, 14 nt, Human
acaggaaccuuaag

SEQ ID NO: 2679007 - RNA, 19 nt, Human
acaggcaugugucaccaug

SEQ ID NO: 2679008 - RNA, 16 nt, Human
acaggcaugugucacc

SEQ ID NO: 2679009 - RNA, 18 nt, Human
uaugugggauauugaaug

SEQ ID NO: 2679010 - RNA, 19 nt, Human
uaugugggauauugaaugu

SEQ ID NO: 2679011 - RNA, 21 nt, Human
uaugugggauauugaauguua

SEQ ID NO: 2679012 - RNA, 20 nt, Human
uauguguaugcacaguaaaa

SEQ ID NO: 2679013 - RNA, 17 nt, Human
uauuaaaaaagagacau

SEQ ID NO: 2679014 - RNA, 23 nt, Human
uauuaaaaaagagacauccaaau

SEQ ID NO: 2679015 - RNA, 13 nt, Human
uauguuuuucugu

SEQ ID NO: 2679016 - RNA, 15 nt, Human
uauguuuuucugugu

SEQ ID NO: 2679017 - RNA, 22 nt, Human
uauguuuuucugugugucaguu

SEQ ID NO: 2679018 - RNA, 17 nt, Human
uauguuuuuuaaaauau

SEQ ID NO: 2679019 - RNA, 19 nt, Human
uaugugacaauuuuguaca

SEQ ID NO: 2679020 - RNA, 12 nt, Human
uaugugaauuuu

SEQ ID NO: 2679021 - RNA, 18 nt, Human
uaugugaauuuuuaagcu

SEQ ID NO: 2679022 - RNA, 14 nt, Human
uaugugacauuaac

SEQ ID NO: 2679023 - RNA, 22 nt, Human
acaggcaugaggaaucugggag

SEQ ID NO: 2679024 - RNA, 21 nt, Human
aauuccuauauccugugacug

SEQ ID NO: 2679025 - RNA, 22 nt, Human
uacgccaggggaaaaucagccu

SEQ ID NO: 2679026 - RNA, 20 nt, Human
uacgauuuaagguauuuaaa

SEQ ID NO: 2679027 - RNA, 17 nt, Human
uacuauccaguuacugc

SEQ ID NO: 2679028 - RNA, 15 nt, Human
uacuaaaaaguauaa

SEQ ID NO: 2679029 - RNA, 16 nt, Human
uacuaaaaaguauaaa

SEQ ID NO: 2679030 - RNA, 18 nt, Human
uacuaaaaaguauaaaau

SEQ ID NO: 2679031 - RNA, 11 nt, Human
uacguuucuuu

SEQ ID NO: 2679032 - RNA, 13 nt, Human
uacguuucuuuaa

SEQ ID NO: 2679033 - RNA, 23 nt, Human
uacguuucuuuaaccuuguauaa

SEQ ID NO: 2679034 - RNA, 12 nt, Human
uacuacuuuguu

SEQ ID NO: 2679035 - RNA, 19 nt, Human
uacuacuuuguuaggauuu

SEQ ID NO: 2679036 - RNA, 22 nt, Human
uacuacuuuguuaggauuuuca

SEQ ID NO: 2679037 - RNA, 23 nt, Human
uacuacuuuguuaggauuuucac

SEQ ID NO: 2679038 - RNA, 20 nt, Human
uacuacuuuugcaugaaaau

SEQ ID NO: 2679039 - RNA, 18 nt, Human
uacuggcuuaccuccuca

SEQ ID NO: 2679040 - RNA, 18 nt, Human
aauugaguugcacuuauu

SEQ ID NO: 2679041 - RNA, 12 nt, Human
aauugccagcug

SEQ ID NO: 2679042 - RNA, 21 nt, Human
uacucuccuugaguguaugag

SEQ ID NO: 2679043 - RNA, 23 nt, Human
aauuaggcaaggcuaugugauua

SEQ ID NO: 2679044 - RNA, 20 nt, Human
aauuaggcaaggcuauguga

SEQ ID NO: 2679045 - RNA, 20 nt, Human
aauuaggaauaaauaaaaau

SEQ ID NO: 2679046 - RNA, 15 nt, Human
aauuacugccuugaa

SEQ ID NO: 2679047 - RNA, 16 nt, Human
aauuacugccuugaaa

SEQ ID NO: 2679048 - RNA, 15 nt, Human
aauuagccaagugug

SEQ ID NO: 2679049 - RNA, 14 nt, Human
aauuagccgggcgu

SEQ ID NO: 2679050 - RNA, 14 nt, Human
aauuacgugcucug

SEQ ID NO: 2679051 - RNA, 22 nt, Human
aauuaauugugugaacuuggaa

SEQ ID NO: 2679052 - RNA, 14 nt, Human
aauuacaauuuuau

SEQ ID NO: 2679053 - RNA, 15 nt, Human
aauuacaauuuuauc

SEQ ID NO: 2679054 - RNA, 19 nt, Human
aauuacaauuuuaucuguu

SEQ ID NO: 2679055 - RNA, 12 nt, Human
uaccuguauaca

SEQ ID NO: 2679056 - RNA, 20 nt, Human
uaccuguauacagugcagag

SEQ ID NO: 2679057 - RNA, 18 nt, Human
uaccuguauuuaaaaaua

SEQ ID NO: 2679058 - RNA, 21 nt, Human
uaccuguauuuaaaaauagaa

SEQ ID NO: 2679059 - RNA, 22 nt, Human
uaccuguauuuaaaaauagaaa

SEQ ID NO: 2679060 - RNA, 20 nt, Human
uaccacucgugcaucccuga

SEQ ID NO: 2679061 - RNA, 14 nt, Human
aauuccccacccug

SEQ ID NO: 2679062 - RNA, 23 nt, Human
aauucacucccacacccaagaag

SEQ ID NO: 2679063 - RNA, 12 nt, Human
aauucauuucua

SEQ ID NO: 2679064 - RNA, 13 nt, Human
aauucauuucuaa

SEQ ID NO: 2679065 - RNA, 13 nt, Human
aauucacucccac

SEQ ID NO: 2679066 - RNA, 13 nt, Human
aauuaguaacauu

SEQ ID NO: 2679067 - RNA, 20 nt, Human
aauucaaacuggggccucca

SEQ ID NO: 2679068 - RNA, 13 nt, Human
aauuauugacacu

SEQ ID NO: 2679069 - RNA, 14 nt, Human
aauuauugacacug

SEQ ID NO: 2679070 - RNA, 15 nt, Human
aauuauugacacuga

SEQ ID NO: 2679071 - RNA, 16 nt, Human
aauuauugacacugaa

SEQ ID NO: 2679072 - RNA, 17 nt, Human
aauuauugacacugaac

SEQ ID NO: 2679073 - RNA, 19 nt, Human
aauuauugacacugaacuu

SEQ ID NO: 2679074 - RNA, 19 nt, Human
aauggaaaguaacucauuu

SEQ ID NO: 2679075 - RNA, 20 nt, Human
aaugccauuuauuuauugau

SEQ ID NO: 2679076 - RNA, 18 nt, Human
aaugccauuuuaaggaaa

SEQ ID NO: 2679077 - RNA, 20 nt, Human
aaugccauuuuaaggaaaac

SEQ ID NO: 2679078 - RNA, 22 nt, Human
aaugccauuuuaaggaaaacua

SEQ ID NO: 2679079 - RNA, 19 nt, Human
aaugccauuuauuuauuga

SEQ ID NO: 2679080 - RNA, 17 nt, Human
aaugccaucuaucuagu

SEQ ID NO: 2679081 - RNA, 22 nt, Human
aaugccacugccuucgcuucuu

SEQ ID NO: 2679082 - RNA, 12 nt, Human
aaugacaauauu

SEQ ID NO: 2679083 - RNA, 15 nt, Human
aauggaaauuuugcu

SEQ ID NO: 2679084 - RNA, 16 nt, Human
aauggaaauuuugcua

SEQ ID NO: 2679085 - RNA, 17 nt, Human
aauggaaauuuugcuau

SEQ ID NO: 2679086 - RNA, 15 nt, Human
aauggauuucagaag

SEQ ID NO: 2679087 - RNA, 19 nt, Human
aauggcgugaacccgggag

SEQ ID NO: 2679088 - RNA, 20 nt, Human
aauggccucauguggcugga

SEQ ID NO: 2679089 - RNA, 22 nt, Human
aauggccucauguggcuggaag

SEQ ID NO: 2679090 - RNA, 15 nt, Human
aauggccucaugugg

SEQ ID NO: 2679091 - RNA, 19 nt, Human
uacacguuagauuugccgu

SEQ ID NO: 2679092 - RNA, 16 nt, Human
uacagagguauuaaaa

SEQ ID NO: 2679093 - RNA, 19 nt, Human
aaugugaaaagaaaaauga

SEQ ID NO: 2679094 - RNA, 21 nt, Human
aauguauaaacuuuagaguag

SEQ ID NO: 2679095 - RNA, 13 nt, Human
aauguauaaauau

SEQ ID NO: 2679096 - RNA, 14 nt, Human
aauguauaaauaua

SEQ ID NO: 2679097 - RNA, 15 nt, Human
aauguauaaauauac

SEQ ID NO: 2679098 - RNA, 16 nt, Human
aauguauaaauauaca

SEQ ID NO: 2679099 - RNA, 11 nt, Human
uacauauauau

SEQ ID NO: 2679100 - RNA, 18 nt, Human
uacauauauauauauaac

SEQ ID NO: 2679101 - RNA, 16 nt, Human
uacauaucccuuccag

SEQ ID NO: 2679102 - RNA, 19 nt, Human
uacauaucccuuccagaug

SEQ ID NO: 2679103 - RNA, 16 nt, Human
uacauauggauguuac

SEQ ID NO: 2679104 - RNA, 17 nt, Human
uacauauggauguuacu

SEQ ID NO: 2679105 - RNA, 18 nt, Human
uacauauggauguuacuc

SEQ ID NO: 2679106 - RNA, 19 nt, Human
uacauauggauguuacucu

SEQ ID NO: 2679107 - RNA, 20 nt, Human
uacauauggauguuacucuc

SEQ ID NO: 2679108 - RNA, 22 nt, Human
uacagaugaauguauuuauuug

SEQ ID NO: 2679109 - RNA, 18 nt, Human
uacagaugaauguauuua

SEQ ID NO: 2679110 - RNA, 13 nt, Human
uacauguuuauaa

SEQ ID NO: 2679111 - RNA, 15 nt, Human
aauuaauugugugaa

SEQ ID NO: 2679112 - RNA, 15 nt, Human
uacaugugauacauu

SEQ ID NO: 2679113 - RNA, 16 nt, Human
uacaugugauacauuu

SEQ ID NO: 2679114 - RNA, 17 nt, Human
uacaugugauacauuuu

SEQ ID NO: 2679115 - RNA, 18 nt, Human
uacaugugauacauuuuu

SEQ ID NO: 2679116 - RNA, 19 nt, Human
uacaugugauacauuuuuu

SEQ ID NO: 2679117 - RNA, 13 nt, Human
aauuaauugugug

SEQ ID NO: 2679118 - RNA, 13 nt, Human
aauguuaaaggga

SEQ ID NO: 2679119 - RNA, 18 nt, Human
aauguuaaagggauauuu

SEQ ID NO: 2679120 - RNA, 12 nt, Human
aauguguucucg

SEQ ID NO: 2679121 - RNA, 19 nt, Human
aauguguucucggagugug

SEQ ID NO: 2679122 - RNA, 22 nt, Human
aauguguucucggaguguguau

SEQ ID NO: 2679123 - RNA, 14 nt, Human
aauuaacugaaaca

SEQ ID NO: 2679124 - RNA, 21 nt, Human
aauguuaauggauuucagaag

SEQ ID NO: 2679125 - RNA, 21 nt, Human
aauguucucucuucuccaccu

SEQ ID NO: 2679126 - RNA, 22 nt, Human
aauccuuuguuuucugacuaau

SEQ ID NO: 2679127 - RNA, 23 nt, Human
aauccuuuguuuucugacuaauu

SEQ ID NO: 2679128 - RNA, 14 nt, Human
aauccuuuggaaaa

SEQ ID NO: 2679129 - RNA, 21 nt, Human
aaucgagugccgcaucucaca

SEQ ID NO: 2679130 - RNA, 20 nt, Human
aaucuaagcagcuuauuguu

SEQ ID NO: 2679131 - RNA, 21 nt, Human
aaucuaagcagcuuauuguuu

SEQ ID NO: 2679132 - RNA, 16 nt, Human
aauccuggcagcccag

SEQ ID NO: 2679133 - RNA, 15 nt, Human
uaaguaaucaucuaa

SEQ ID NO: 2679134 - RNA, 18 nt, Human
aaucccuuaacaguugua

SEQ ID NO: 2679135 - RNA, 22 nt, Human
aaucccuuaacaguuguauuua

SEQ ID NO: 2679136 - RNA, 13 nt, Human
aaucauucagaaa

SEQ ID NO: 2679137 - RNA, 14 nt, Human
aaucauucagaaau

SEQ ID NO: 2679138 - RNA, 15 nt, Human
aaucauucagaaaug

SEQ ID NO: 2679139 - RNA, 16 nt, Human
aaucauucagaaaugu

SEQ ID NO: 2679140 - RNA, 19 nt, Human
aaucccuuuauuacccccu

SEQ ID NO: 2679141 - RNA, 23 nt, Human
aaucccuuuauuacccccuccuu

SEQ ID NO: 2679142 - RNA, 20 nt, Human
aaucuuacuuuguaaauucu

SEQ ID NO: 2679143 - RNA, 19 nt, Human
aaucuuacuuuguaaauuc

SEQ ID NO: 2679144 - RNA, 18 nt, Human
aaucuuacuuuguaaauu

SEQ ID NO: 2679145 - RNA, 17 nt, Human
aaucuuacuuuguaaau

SEQ ID NO: 2679146 - RNA, 16 nt, Human
aaucuuacuuuguaaa

SEQ ID NO: 2679147 - RNA, 15 nt, Human
aaucuuacuuuguaa

SEQ ID NO: 2679148 - RNA, 14 nt, Human
aaucuuacuuugua

SEQ ID NO: 2679149 - RNA, 13 nt, Human
aaucuuacuuugu

SEQ ID NO: 2679150 - RNA, 13 nt, Human
aaucuuaauguuc

SEQ ID NO: 2679151 - RNA, 14 nt, Human
aaucuuaauguucc

SEQ ID NO: 2679152 - RNA, 15 nt, Human
aaucuuaauguuccu

SEQ ID NO: 2679153 - RNA, 19 nt, Human
aaucuguugauaaauccau

SEQ ID NO: 2679154 - RNA, 21 nt, Human
aaucuguugauaaauccauca

SEQ ID NO: 2679155 - RNA, 20 nt, Human
aaucuacaaucucuuuuugu

SEQ ID NO: 2679156 - RNA, 15 nt, Human
aaucuggagaccagg

SEQ ID NO: 2679157 - RNA, 22 nt, Human
uaagcuguuccuguucaguaau

SEQ ID NO: 2679158 - RNA, 18 nt, Human
uaaggaaaacuaccugua

SEQ ID NO: 2679159 - RNA, 22 nt, Human
uaaggaaaacuaccuguauuua

SEQ ID NO: 2679160 - RNA, 17 nt, Human
uaagcuucaguugcuug

SEQ ID NO: 2679161 - RNA, 16 nt, Human
uaagcuuccauuuuaa

SEQ ID NO: 2679162 - RNA, 23 nt, Human
uaagcuuccauuuuaauuuuaaa

SEQ ID NO: 2679163 - RNA, 12 nt, Human
uaaguucuuaug

SEQ ID NO: 2679164 - RNA, 21 nt, Human
uaaguucuuaugaggagggga

SEQ ID NO: 2679165 - RNA, 19 nt, Human
aaucaugaaucuuuguuuc

SEQ ID NO: 2679166 - RNA, 22 nt, Human
aaucauaguacucuuuguagca

SEQ ID NO: 2679167 - RNA, 15 nt, Human
aaucauaguuacugu

SEQ ID NO: 2679168 - RNA, 16 nt, Human
aaucauaguuacugug

SEQ ID NO: 2679169 - RNA, 17 nt, Human
aaucauaguuacugugu

SEQ ID NO: 2679170 - RNA, 19 nt, Human
aaucauaguuacuguguaa

SEQ ID NO: 2679171 - RNA, 22 nt, Human
aaucauaguuacuguguaaacu

SEQ ID NO: 2679172 - RNA, 19 nt, Human
aaucauaguacucuuugua

SEQ ID NO: 2679173 - RNA, 22 nt, Human
aaucauaggcaccuuuuacugu

SEQ ID NO: 2679174 - RNA, 23 nt, Human
aaucauaggcaccuuuuacugug

SEQ ID NO: 2679175 - RNA, 21 nt, Human
uaauagcaacuuuuguguaau

SEQ ID NO: 2679176 - RNA, 20 nt, Human
uaauagcaacuuuuguguaa

SEQ ID NO: 2679177 - RNA, 21 nt, Human
uaauauuuaacauuauuuaua

SEQ ID NO: 2679178 - RNA, 13 nt, Human
uaauauuuaacau

SEQ ID NO: 2679179 - RNA, 13 nt, Human
uaauauuuauuaa

SEQ ID NO: 2679180 - RNA, 17 nt, Human
uaauauuuauuaaauuu

SEQ ID NO: 2679181 - RNA, 16 nt, Human
uaauauuuauuaaauu

SEQ ID NO: 2679182 - RNA, 14 nt, Human
uaauauuuaaugga

SEQ ID NO: 2679183 - RNA, 22 nt, Human
uaauagacuguaacuuccaaau

SEQ ID NO: 2679184 - RNA, 18 nt, Human
uaaugaaaaugaauaucu

SEQ ID NO: 2679185 - RNA, 21 nt, Human
uaaucacuguguauauuugau

SEQ ID NO: 2679186 - RNA, 20 nt, Human
uaaucacuguguauauuuga

SEQ ID NO: 2679187 - RNA, 22 nt, Human
uaaucacuguguauauuugauu

SEQ ID NO: 2679188 - RNA, 16 nt, Human
uaaucacuguguauau

SEQ ID NO: 2679189 - RNA, 15 nt, Human
uaaucacuguguaua

SEQ ID NO: 2679190 - RNA, 14 nt, Human
uaaucacuguguau

SEQ ID NO: 2679191 - RNA, 13 nt, Human
uaaucacugugua

SEQ ID NO: 2679192 - RNA, 12 nt, Human
uaaucacugugu

SEQ ID NO: 2679193 - RNA, 10 nt, Human
uaaucacugu

SEQ ID NO: 2679194 - RNA, 19 nt, Human
uaauccaguuauaagaaga

SEQ ID NO: 2679195 - RNA, 23 nt, Human
uaauccaguuauaagaagaaguu

SEQ ID NO: 2679196 - RNA, 21 nt, Human
uaaucccagcacuuugggagg

SEQ ID NO: 2679197 - RNA, 23 nt, Human
uaaucccagcacuuugggaggcc

SEQ ID NO: 2679198 - RNA, 15 nt, Human
aaucuuuaccuguau

SEQ ID NO: 2679199 - RNA, 18 nt, Human
aaucuuuaccuguauaca

SEQ ID NO: 2679200 - RNA, 20 nt, Human
aaucuuuaccuguauacagu

SEQ ID NO: 2679201 - RNA, 22 nt, Human
aaucuuuaccuguauacagugc

SEQ ID NO: 2679202 - RNA, 23 nt, Human
aaucuuuaccuguauacagugca

SEQ ID NO: 2679203 - RNA, 15 nt, Human
uaauguguggauugc

SEQ ID NO: 2679204 - RNA, 23 nt, Human
uaauguguggauugccucugaaa

SEQ ID NO: 2679205 - RNA, 13 nt, Human
aaugaaagaaaau

SEQ ID NO: 2679206 - RNA, 16 nt, Human
aaugaaagaaaauuga

SEQ ID NO: 2679207 - RNA, 19 nt, Human
aaugaaagaaaauugaguu

SEQ ID NO: 2679208 - RNA, 17 nt, Human
aaugaauuuuuaugaua

SEQ ID NO: 2679209 - RNA, 17 nt, Human
aaugaaaauuguauuau

SEQ ID NO: 2679210 - RNA, 13 nt, Human
aaugaaaauugua

SEQ ID NO: 2679211 - RNA, 14 nt, Human
aaugaaaauuguau

SEQ ID NO: 2679212 - RNA, 21 nt, Human
aauauuuaacauuauuuauau

SEQ ID NO: 2679213 - RNA, 19 nt, Human
aauauugagaaagaaacua

SEQ ID NO: 2679214 - RNA, 16 nt, Human
aauauugagaaagaaa

SEQ ID NO: 2679215 - RNA, 20 nt, Human
aauauugagaaagaaacuaa

SEQ ID NO: 2679216 - RNA, 23 nt, Human
aauaugccugcaaucugagccag

SEQ ID NO: 2679217 - RNA, 20 nt, Human
aauauucaggguaaauagga

SEQ ID NO: 2679218 - RNA, 20 nt, Human
aauaugccuaguaacacaua

SEQ ID NO: 2679219 - RNA, 20 nt, Human
aauauuccuuugcauauuau

SEQ ID NO: 2679220 - RNA, 21 nt, Human
aauauuccuuugcauauuaua

SEQ ID NO: 2679221 - RNA, 16 nt, Human
aauauuccagaucuuu

SEQ ID NO: 2679222 - RNA, 18 nt, Human
aauauuccagaucuuuca

SEQ ID NO: 2679223 - RNA, 22 nt, Human
aauauuccagaucuuucagaaa

SEQ ID NO: 2679224 - RNA, 23 nt, Human
aauauuccagaucuuucagaaau

SEQ ID NO: 2679225 - RNA, 15 nt, Human
uaagagaaguuguaa

SEQ ID NO: 2679226 - RNA, 12 nt, Human
uaagaugugaaa

SEQ ID NO: 2679227 - RNA, 13 nt, Human
uaagaugugaaaa

SEQ ID NO: 2679228 - RNA, 14 nt, Human
uaagaugugaaaau

SEQ ID NO: 2679229 - RNA, 16 nt, Human
uaagaugugaaaauua

SEQ ID NO: 2679230 - RNA, 15 nt, Human
aauauuuuuauauca

SEQ ID NO: 2679231 - RNA, 23 nt, Human
aauauuuuuauaucaugcaaaau

SEQ ID NO: 2679232 - RNA, 18 nt, Human
aauauuuuuauauuuccu

SEQ ID NO: 2679233 - RNA, 19 nt, Human
aauauuuuuauauuuccuu

SEQ ID NO: 2679234 - RNA, 20 nt, Human
aauauuuuuauauuuccuuu

SEQ ID NO: 2679235 - RNA, 21 nt, Human
aauauuuuuauauuuccuuua

SEQ ID NO: 2679236 - RNA, 22 nt, Human
aauauuuuuauauuuccuuuau

SEQ ID NO: 2679237 - RNA, 12 nt, Human
aauauuuggaau

SEQ ID NO: 2679238 - RNA, 21 nt, Human
uaagauugauaucuauaaaau

SEQ ID NO: 2679239 - RNA, 22 nt, Human
uaagauugauaucuauaaaaua

SEQ ID NO: 2679240 - RNA, 23 nt, Human
uaagauugauaucuauaaaauag

SEQ ID NO: 2679241 - RNA, 14 nt, Human
uaagcaaauguuaa

SEQ ID NO: 2679242 - RNA, 18 nt, Human
uaagcaaauguuaaaagu

SEQ ID NO: 2679243 - RNA, 19 nt, Human
uaagcaaauguuaaaaguu

SEQ ID NO: 2679244 - RNA, 10 nt, Human
uaagcugcaa

SEQ ID NO: 2679245 - RNA, 23 nt, Human
uaagcugcaaaucugauggccuu

SEQ ID NO: 2679246 - RNA, 22 nt, Human
uaagcuguuacugucuucagua

SEQ ID NO: 2679247 - RNA, 18 nt, Human
uaacaguuguauuuaaca

SEQ ID NO: 2679248 - RNA, 19 nt, Human
uaacaguuguauuuaacag

SEQ ID NO: 2679249 - RNA, 23 nt, Human
uaacaguuguauuuaacagaaau

SEQ ID NO: 2679250 - RNA, 19 nt, Human
uaacaguuuuguguaacuc

SEQ ID NO: 2679251 - RNA, 19 nt, Human
aauaguuuauuuuaaaaca

SEQ ID NO: 2679252 - RNA, 19 nt, Human
uaacauagccaaaauguga

SEQ ID NO: 2679253 - RNA, 17 nt, Human
aauaguuuauuuuaaaa

SEQ ID NO: 2679254 - RNA, 17 nt, Human
aauauauuucuaaaugu

SEQ ID NO: 2679255 - RNA, 19 nt, Human
aauauauuucuaaauguuu

SEQ ID NO: 2679256 - RNA, 21 nt, Human
aauauauuucuaaauguuugg

SEQ ID NO: 2679257 - RNA, 18 nt, Human
uaagaauaccacaucaaa

SEQ ID NO: 2679258 - RNA, 22 nt, Human
uaagaauaccacaucaaauaag

SEQ ID NO: 2679259 - RNA, 23 nt, Human
uaagaauaccacaucaaauaaga

SEQ ID NO: 2679260 - RNA, 18 nt, Human
uaagaauaguagaugugg

SEQ ID NO: 2679261 - RNA, 20 nt, Human
uaagacauacuccuuccauc

SEQ ID NO: 2679262 - RNA, 17 nt, Human
uaagacagaguauccug

SEQ ID NO: 2679263 - RNA, 19 nt, Human
uaagacaaauauuccuuug

SEQ ID NO: 2679264 - RNA, 22 nt, Human
uaagacaauggacccuuuuugu

SEQ ID NO: 2679265 - RNA, 22 nt, Human
uaacuugagaguagaugguuug

SEQ ID NO: 2679266 - RNA, 15 nt, Human
uaacuuccaaauaaa

SEQ ID NO: 2679267 - RNA, 19 nt, Human
uaacuuccaaauaaauaau

SEQ ID NO: 2679268 - RNA, 14 nt, Human
uaacuuuacagaaa

SEQ ID NO: 2679269 - RNA, 16 nt, Human
uaacuuuauaaaucca

SEQ ID NO: 2679270 - RNA, 17 nt, Human
uaacuuuauaaauccag

SEQ ID NO: 2679271 - RNA, 19 nt, Human
uaacuugcuuaaauuucuu

SEQ ID NO: 2679272 - RNA, 20 nt, Human
uaacuugcuuaaauuucuua

SEQ ID NO: 2679273 - RNA, 19 nt, Human
uaaccuuacuaauuauacu

SEQ ID NO: 2679274 - RNA, 13 nt, Human
uaaccuuguauaa

SEQ ID NO: 2679275 - RNA, 17 nt, Human
uaacuuaauaaucaaga

SEQ ID NO: 2679276 - RNA, 16 nt, Human
uaacuuaauaaucaag

SEQ ID NO: 2679277 - RNA, 14 nt, Human
uaacuuaauaauca

SEQ ID NO: 2679278 - RNA, 13 nt, Human
uaacuuaauaauc

SEQ ID NO: 2679279 - RNA, 14 nt, Human
uaacuuaacugaaa

SEQ ID NO: 2679280 - RNA, 16 nt, Human
uaacuuaacugaaaug

SEQ ID NO: 2679281 - RNA, 21 nt, Human
uaacuuaauaaucaagagccu

SEQ ID NO: 2679282 - RNA, 20 nt, Human
ucacuugaugauacaaugaa

SEQ ID NO: 2679283 - RNA, 14 nt, Human
ucacuugaugauac

SEQ ID NO: 2679284 - RNA, 10 nt, Human
ucacuugagu

SEQ ID NO: 2679285 - RNA, 14 nt, Human
ucacuguuuccugg

SEQ ID NO: 2679286 - RNA, 21 nt, Human
ucacuguuuagauuugccaua

SEQ ID NO: 2679287 - RNA, 12 nt, Human
ucacuguuuaga

SEQ ID NO: 2679288 - RNA, 13 nt, Human
ucacuguuuagau

SEQ ID NO: 2679289 - RNA, 17 nt, Human
ucacuguuuagauuugc

SEQ ID NO: 2679290 - RNA, 16 nt, Human
ucacuguuuagauuug

SEQ ID NO: 2679291 - RNA, 15 nt, Human
ucacuguuuagauuu

SEQ ID NO: 2679292 - RNA, 12 nt, Human
ucacugugauca

SEQ ID NO: 2679293 - RNA, 21 nt, Human
ucacugugaucaauauuuuua

SEQ ID NO: 2679294 - RNA, 21 nt, Human
ucacuguguauauuugauuua

SEQ ID NO: 2679295 - RNA, 19 nt, Human
ucacuguguauauuugauu

SEQ ID NO: 2679296 - RNA, 18 nt, Human
ucacuguguauauuugau

SEQ ID NO: 2679297 - RNA, 17 nt, Human
ucacuguguauauuuga

SEQ ID NO: 2679298 - RNA, 15 nt, Human
ucacuguguauauuu

SEQ ID NO: 2679299 - RNA, 14 nt, Human
ucacuguguauauu

SEQ ID NO: 2679300 - RNA, 12 nt, Human
ucacuguguaua

SEQ ID NO: 2679301 - RNA, 23 nt, Human
ucaccucaugcccacccccugcc

SEQ ID NO: 2679302 - RNA, 20 nt, Human
ucaccucaugcccacccccu

SEQ ID NO: 2679303 - RNA, 23 nt, Human
ucacuaggcccccacuugccucu

SEQ ID NO: 2679304 - RNA, 14 nt, Human
ucacuacaguauua

SEQ ID NO: 2679305 - RNA, 18 nt, Human
ucacuacaagucagcucc

SEQ ID NO: 2679306 - RNA, 19 nt, Human
ucacuacaagucagcucca

SEQ ID NO: 2679307 - RNA, 23 nt, Human
ucacuaauugguacuuuuaaaaa

SEQ ID NO: 2679308 - RNA, 15 nt, Human
ucacuaauuuuugua

SEQ ID NO: 2679309 - RNA, 16 nt, Human
ucacuaauuuuuguau

SEQ ID NO: 2679310 - RNA, 15 nt, Human
ucacuaaagcaugaa

SEQ ID NO: 2679311 - RNA, 16 nt, Human
ucacuaaagcaugaaa

SEQ ID NO: 2679312 - RNA, 18 nt, Human
ucacuaaagcaugaaaug

SEQ ID NO: 2679313 - RNA, 21 nt, Human
ucacuaaagcaugaaauguga

SEQ ID NO: 2679314 - RNA, 22 nt, Human
ucacuaaagcaugaaaugugaa

SEQ ID NO: 2679315 - RNA, 23 nt, Human
ucacuaaagcaugaaaugugaau

SEQ ID NO: 2679316 - RNA, 21 nt, Human
ucacguuuggugcuucucaga

SEQ ID NO: 2679317 - RNA, 15 nt, Human
ucacuaauacacagu

SEQ ID NO: 2679318 - RNA, 20 nt, Human
ucacguuggggugauuuaau

SEQ ID NO: 2679319 - RNA, 17 nt, Human
ucacguuuggugcuucu

SEQ ID NO: 2679320 - RNA, 21 nt, Human
ucacguggcucgacuauagaa

SEQ ID NO: 2679321 - RNA, 23 nt, Human
accagcugaaguugcagauguua

SEQ ID NO: 2679322 - RNA, 16 nt, Human
accagcugcgcuugcu

SEQ ID NO: 2679323 - RNA, 22 nt, Human
accagcucugccgucucuggag

SEQ ID NO: 2679324 - RNA, 18 nt, Human
accagcugcgcuugcuuu

SEQ ID NO: 2679325 - RNA, 19 nt, Human
accagcugcgcuugcuuuu

SEQ ID NO: 2679326 - RNA, 22 nt, Human
accagcugcuccgaggacccag

SEQ ID NO: 2679327 - RNA, 20 nt, Human
accagcugcgcuugcuuuuc

SEQ ID NO: 2679328 - RNA, 12 nt, Human
accaggaagccg

SEQ ID NO: 2679329 - RNA, 20 nt, Human
accaggaacucuggaguuca

SEQ ID NO: 2679330 - RNA, 13 nt, Human
accaggaacagca

SEQ ID NO: 2679331 - RNA, 15 nt, Human
accacuaugaagcua

SEQ ID NO: 2679332 - RNA, 22 nt, Human
accagcgugugacuacuccccc

SEQ ID NO: 2679333 - RNA, 23 nt, Human
ucaauuucuguguugccaagcuc

SEQ ID NO: 2679334 - RNA, 15 nt, Human
ucaauuucuguguug

SEQ ID NO: 2679335 - RNA, 14 nt, Human
ucaauugucacuuu

SEQ ID NO: 2679336 - RNA, 17 nt, Human
ucaauugucacuuuuua

SEQ ID NO: 2679337 - RNA, 12 nt, Human
accaaagcugcc

SEQ ID NO: 2679338 - RNA, 13 nt, Human
accaaagcugccc

SEQ ID NO: 2679339 - RNA, 14 nt, Human
accaaagcugccca

SEQ ID NO: 2679340 - RNA, 18 nt, Human
accaaagcugcccacugu

SEQ ID NO: 2679341 - RNA, 19 nt, Human
accaaaggaaaaugucugu

SEQ ID NO: 2679342 - RNA, 19 nt, Human
accaaagcugcccacuguu

SEQ ID NO: 2679343 - RNA, 19 nt, Human
ucacaacuugauggcugcg

SEQ ID NO: 2679344 - RNA, 12 nt, Human
ucacaagaacac

SEQ ID NO: 2679345 - RNA, 20 nt, Human
ucacaagaacacacacauau

SEQ ID NO: 2679346 - RNA, 15 nt, Human
ucacacugguucuca

SEQ ID NO: 2679347 - RNA, 16 nt, Human
ucacacugguucucaa

SEQ ID NO: 2679348 - RNA, 17 nt, Human
ucacacugguucucaau

SEQ ID NO: 2679349 - RNA, 21 nt, Human
ucacacugguucucaaugaaa

SEQ ID NO: 2679350 - RNA, 19 nt, Human
ucacacugguucucaauga

SEQ ID NO: 2679351 - RNA, 20 nt, Human
ucacacugguucucaaugaa

SEQ ID NO: 2679352 - RNA, 13 nt, Human
ucacagccucuga

SEQ ID NO: 2679353 - RNA, 21 nt, Human
ucaccauucguacauaauacu

SEQ ID NO: 2679354 - RNA, 15 nt, Human
ucacccccucccacc

SEQ ID NO: 2679355 - RNA, 17 nt, Human
ucacccccucccacccc

SEQ ID NO: 2679356 - RNA, 19 nt, Human
ucacccccucccaccccca

SEQ ID NO: 2679357 - RNA, 20 nt, Human
ucacccccucccacccccag

SEQ ID NO: 2679358 - RNA, 22 nt, Human
ucacccccucccacccccagcc

SEQ ID NO: 2679359 - RNA, 23 nt, Human
ucacccccucccacccccagccc

SEQ ID NO: 2679360 - RNA, 15 nt, Human
ucaccauguaagcac

SEQ ID NO: 2679361 - RNA, 16 nt, Human
ucaccauguaagcacu

SEQ ID NO: 2679362 - RNA, 17 nt, Human
ucaccauguaagcacuc

SEQ ID NO: 2679363 - RNA, 21 nt, Human
ucaccauguaagcacucugga

SEQ ID NO: 2679364 - RNA, 15 nt, Human
ucacaguuuuuccug

SEQ ID NO: 2679365 - RNA, 17 nt, Human
ucacaguuuuuccugga

SEQ ID NO: 2679366 - RNA, 19 nt, Human
ucacaguuuuuccuggaau

SEQ ID NO: 2679367 - RNA, 13 nt, Human
ucacagcggaggu

SEQ ID NO: 2679368 - RNA, 12 nt, Human
accaccaccccu

SEQ ID NO: 2679369 - RNA, 16 nt, Human
accaccaccccuacca

SEQ ID NO: 2679370 - RNA, 16 nt, Human
accaccaagccaaggg

SEQ ID NO: 2679371 - RNA, 15 nt, Human
accacauugaagaau

SEQ ID NO: 2679372 - RNA, 14 nt, Human
accaccaaaaacaa

SEQ ID NO: 2679373 - RNA, 15 nt, Human
accaccaaaaacaaa

SEQ ID NO: 2679374 - RNA, 18 nt, Human
ucaccaugugagcucuuc

SEQ ID NO: 2679375 - RNA, 17 nt, Human
accacagccagcaccug

SEQ ID NO: 2679376 - RNA, 20 nt, Human
accacagccagcaccuggca

SEQ ID NO: 2679377 - RNA, 19 nt, Human
accacagccagcaccuggc

SEQ ID NO: 2679378 - RNA, 21 nt, Human
ucaauaucuaauauauaugaa

SEQ ID NO: 2679379 - RNA, 19 nt, Human
ucaauaucuaauauauaug

SEQ ID NO: 2679380 - RNA, 15 nt, Human
ucaauaucuaauaua

SEQ ID NO: 2679381 - RNA, 13 nt, Human
ucaauaucuaaua

SEQ ID NO: 2679382 - RNA, 16 nt, Human
ucaauauauugaacuu

SEQ ID NO: 2679383 - RNA, 17 nt, Human
ucaauauauugaacuuu

SEQ ID NO: 2679384 - RNA, 20 nt, Human
ucaauauauugaacuuuugu

SEQ ID NO: 2679385 - RNA, 22 nt, Human
ucaauauauugaacuuuuguac

SEQ ID NO: 2679386 - RNA, 13 nt, Human
ucaacuuuguaaa

SEQ ID NO: 2679387 - RNA, 14 nt, Human
ucaacuuuguaaaa

SEQ ID NO: 2679388 - RNA, 16 nt, Human
ucaacuuuguaaaaau

SEQ ID NO: 2679389 - RNA, 19 nt, Human
ucaacuuuguaaaaaucuu

SEQ ID NO: 2679390 - RNA, 16 nt, Human
ucaacugucuuccuca

SEQ ID NO: 2679391 - RNA, 23 nt, Human
ucaacugucuuccucaaaauaaa

SEQ ID NO: 2679392 - RNA, 20 nt, Human
ucaacuuagucaauaagaaa

SEQ ID NO: 2679393 - RNA, 16 nt, Human
ucaaugaaccauaaau

SEQ ID NO: 2679394 - RNA, 17 nt, Human
ucaaugaaccauaaauu

SEQ ID NO: 2679395 - RNA, 22 nt, Human
ucaaugaaaaauagugucuuug

SEQ ID NO: 2679396 - RNA, 13 nt, Human
ucaaugagagcau

SEQ ID NO: 2679397 - RNA, 14 nt, Human
ucaaugagagcaua

SEQ ID NO: 2679398 - RNA, 19 nt, Human
ucaaugagagcauaauuua

SEQ ID NO: 2679399 - RNA, 20 nt, Human
acauugaaguaaugaauuuu

SEQ ID NO: 2679400 - RNA, 19 nt, Human
acauugaaguaaugaauuu

SEQ ID NO: 2679401 - RNA, 18 nt, Human
acauugaaguaaugaauu

SEQ ID NO: 2679402 - RNA, 15 nt, Human
acauugaaguaauga

SEQ ID NO: 2679403 - RNA, 20 nt, Human
acauucuuggcuuaaucauu

SEQ ID NO: 2679404 - RNA, 22 nt, Human
acauucuuggcuuaaucauuuu

SEQ ID NO: 2679405 - RNA, 23 nt, Human
acauucuuggcuuaaucauuuuc

SEQ ID NO: 2679406 - RNA, 20 nt, Human
ucaauccugauuccucucua

SEQ ID NO: 2679407 - RNA, 21 nt, Human
ucaauccugauuccucucuaa

SEQ ID NO: 2679408 - RNA, 16 nt, Human
ucaaucuguuuuucau

SEQ ID NO: 2679409 - RNA, 13 nt, Human
accaaaauucauc

SEQ ID NO: 2679410 - RNA, 15 nt, Human
accaaagagggcuuc

SEQ ID NO: 2679411 - RNA, 18 nt, Human
accaaagagggcuuccuc

SEQ ID NO: 2679412 - RNA, 17 nt, Human
acauuguucuuauucug

SEQ ID NO: 2679413 - RNA, 17 nt, Human
acauuguuaagaaaaau

SEQ ID NO: 2679414 - RNA, 12 nt, Human
acauugugucua

SEQ ID NO: 2679415 - RNA, 15 nt, Human
acauugugucuagga

SEQ ID NO: 2679416 - RNA, 19 nt, Human
acauugucuccuauauauu

SEQ ID NO: 2679417 - RNA, 22 nt, Human
acauugucuccuauauauuucu

SEQ ID NO: 2679418 - RNA, 12 nt, Human
acauugaagaau

SEQ ID NO: 2679419 - RNA, 14 nt, Human
ucaaauuuuuugac

SEQ ID NO: 2679420 - RNA, 16 nt, Human
ucaaauuuuuugacuu

SEQ ID NO: 2679421 - RNA, 22 nt, Human
ucaaauuugucugguuaaaaaa

SEQ ID NO: 2679422 - RNA, 18 nt, Human
ucaacaaauauucacugg

SEQ ID NO: 2679423 - RNA, 22 nt, Human
ucaacaaauauucacuggcccc

SEQ ID NO: 2679424 - RNA, 15 nt, Human
ucaacaagaaauaau

SEQ ID NO: 2679425 - RNA, 18 nt, Human
ucaacaagaaauaauaga

SEQ ID NO: 2679426 - RNA, 14 nt, Human
ucaaccacaaaacu

SEQ ID NO: 2679427 - RNA, 12 nt, Human
ucaaccacaaaa

SEQ ID NO: 2679428 - RNA, 16 nt, Human
ucaacuggguccagaa

SEQ ID NO: 2679429 - RNA, 17 nt, Human
ucaacuggguccagaag

SEQ ID NO: 2679430 - RNA, 18 nt, Human
ucaacuggguccagaaga

SEQ ID NO: 2679431 - RNA, 13 nt, Human
acauguaauuuga

SEQ ID NO: 2679432 - RNA, 13 nt, Human
acauggugccuga

SEQ ID NO: 2679433 - RNA, 16 nt, Human
acauggugccugagag

SEQ ID NO: 2679434 - RNA, 18 nt, Human
acauggugccugagaggc

SEQ ID NO: 2679435 - RNA, 18 nt, Human
acaugaaucaaaagugcc

SEQ ID NO: 2679436 - RNA, 21 nt, Human
acaugaaucaaaagugccuca

SEQ ID NO: 2679437 - RNA, 22 nt, Human
acaugaguagauaauuucaggg

SEQ ID NO: 2679438 - RNA, 12 nt, Human
acauggaacagu

SEQ ID NO: 2679439 - RNA, 17 nt, Human
acauggucugucaauga

SEQ ID NO: 2679440 - RNA, 21 nt, Human
ucauaguucugagcugccagu

SEQ ID NO: 2679441 - RNA, 16 nt, Human
ucauaguuuuauuuau

SEQ ID NO: 2679442 - RNA, 15 nt, Human
ucauaguuuuauuua

SEQ ID NO: 2679443 - RNA, 17 nt, Human
ucauaguuuuauuuaua

SEQ ID NO: 2679444 - RNA, 17 nt, Human
ucauaguauccauauuu

SEQ ID NO: 2679445 - RNA, 20 nt, Human
ucauaguauccauauuuuau

SEQ ID NO: 2679446 - RNA, 24 nt, Human
ucauaguauccauauuuuauuacu

SEQ ID NO: 2679447 - RNA, 15 nt, Human
ucauaguuaaauguu

SEQ ID NO: 2679448 - RNA, 14 nt, Human
ucauaguuacugug

SEQ ID NO: 2679449 - RNA, 15 nt, Human
ucauaguuacugugu

SEQ ID NO: 2679450 - RNA, 20 nt, Human
ucauaguuacuguguaaacu

SEQ ID NO: 2679451 - RNA, 21 nt, Human
ucauaguuacuguguaaacuc

SEQ ID NO: 2679452 - RNA, 22 nt, Human
ucauaguuacuguguaaacuca

SEQ ID NO: 2679453 - RNA, 15 nt, Human
ucauauauuaaacau

SEQ ID NO: 2679454 - RNA, 17 nt, Human
ucauauauuaaacaucc

SEQ ID NO: 2679455 - RNA, 20 nt, Human
ucauauauuaaacauccaca

SEQ ID NO: 2679456 - RNA, 21 nt, Human
ucauauauuaaacauccacaa

SEQ ID NO: 2679457 - RNA, 17 nt, Human
ucauauaccagcaauau

SEQ ID NO: 2679458 - RNA, 16 nt, Human
ucauauaccagcaaua

SEQ ID NO: 2679459 - RNA, 12 nt, Human
ucauauaagaca

SEQ ID NO: 2679460 - RNA, 19 nt, Human
ucauaacauccagagcuuu

SEQ ID NO: 2679461 - RNA, 11 nt, Human
ucauaaauuau

SEQ ID NO: 2679462 - RNA, 13 nt, Human
ucauaaauuauuu

SEQ ID NO: 2679463 - RNA, 22 nt, Human
ucauaaauuauuugauuauuua

SEQ ID NO: 2679464 - RNA, 13 nt, Human
ucauaaaagagac

SEQ ID NO: 2679465 - RNA, 22 nt, Human
ucauaguacucuuuguagcaaa

SEQ ID NO: 2679466 - RNA, 16 nt, Human
ucauauguaaucucua

SEQ ID NO: 2679467 - RNA, 22 nt, Human
ucauauguaaucucuaggaagu

SEQ ID NO: 2679468 - RNA, 11 nt, Human
ucauaugaaaa

SEQ ID NO: 2679469 - RNA, 12 nt, Human
ucauaugaaaaa

SEQ ID NO: 2679470 - RNA, 21 nt, Human
ucauaugaaaaaaaugcauuu

SEQ ID NO: 2679471 - RNA, 21 nt, Human
ucauaucaacuuagucaauaa

SEQ ID NO: 2679472 - RNA, 14 nt, Human
ucauauuguuuccu

SEQ ID NO: 2679473 - RNA, 19 nt, Human
ucauaucuuaauauauuuc

SEQ ID NO: 2679474 - RNA, 14 nt, Human
accgaggggccuuu

SEQ ID NO: 2679475 - RNA, 15 nt, Human
accgaggggccuuug

SEQ ID NO: 2679476 - RNA, 21 nt, Human
accgaggggccuuuguucugg

SEQ ID NO: 2679477 - RNA, 18 nt, Human
accgaguagaaaauguga

SEQ ID NO: 2679478 - RNA, 20 nt, Human
accgaguagaaaaugugacc

SEQ ID NO: 2679479 - RNA, 18 nt, Human
accgcacagcucaggagg

SEQ ID NO: 2679480 - RNA, 17 nt, Human
ucaguggcgagaaauaa

SEQ ID NO: 2679481 - RNA, 14 nt, Human
ucagugcccuccag

SEQ ID NO: 2679482 - RNA, 15 nt, Human
ucagugcccuccagc

SEQ ID NO: 2679483 - RNA, 14 nt, Human
accuccaggcuuuc

SEQ ID NO: 2679484 - RNA, 20 nt, Human
accucccacaaaggagagcu

SEQ ID NO: 2679485 - RNA, 15 nt, Human
accuccccagcauuc

SEQ ID NO: 2679486 - RNA, 21 nt, Human
accuccccagcauuccagccc

SEQ ID NO: 2679487 - RNA, 23 nt, Human
accuccccagcauuccagccccu

SEQ ID NO: 2679488 - RNA, 17 nt, Human
accuauuuccagaaaua

SEQ ID NO: 2679489 - RNA, 16 nt, Human
accuauuuccagaaau

SEQ ID NO: 2679490 - RNA, 19 nt, Human
accuauuuccagaaauaca

SEQ ID NO: 2679491 - RNA, 15 nt, Human
accucaccuagaaau

SEQ ID NO: 2679492 - RNA, 14 nt, Human
accucaccuagaaa

SEQ ID NO: 2679493 - RNA, 22 nt, Human
accuagaaauugacacaagugg

SEQ ID NO: 2679494 - RNA, 16 nt, Human
ucaugauuagcaaguu

SEQ ID NO: 2679495 - RNA, 13 nt, Human
ucaugauuuauaa

SEQ ID NO: 2679496 - RNA, 16 nt, Human
ucaugauuuauaaaug

SEQ ID NO: 2679497 - RNA, 11 nt, Human
ucaugcaaaau

SEQ ID NO: 2679498 - RNA, 13 nt, Human
ucaugcaaaauau

SEQ ID NO: 2679499 - RNA, 19 nt, Human
ucaucuaagucaguaccca

SEQ ID NO: 2679500 - RNA, 19 nt, Human
ucauccagacucagagcuc

SEQ ID NO: 2679501 - RNA, 20 nt, Human
ucauccagacucagagcucu

SEQ ID NO: 2679502 - RNA, 20 nt, Human
ucauccagauguggcuacug

SEQ ID NO: 2679503 - RNA, 13 nt, Human
ucauguggcugga

SEQ ID NO: 2679504 - RNA, 19 nt, Human
ucaugugguuucuaugcaa

SEQ ID NO: 2679505 - RNA, 16 nt, Human
ucauguggcuggaaga

SEQ ID NO: 2679506 - RNA, 21 nt, Human
ucauguggcuggaagauccug

SEQ ID NO: 2679507 - RNA, 16 nt, Human
ucaugcacuuaaagaa

SEQ ID NO: 2679508 - RNA, 17 nt, Human
ucaugcacuuaaagaag

SEQ ID NO: 2679509 - RNA, 21 nt, Human
ucaugcacuuaaagaaguauu

SEQ ID NO: 2679510 - RNA, 22 nt, Human
ucaugcacuuaaagaaguauuu

SEQ ID NO: 2679511 - RNA, 14 nt, Human
acccggcugcagag

SEQ ID NO: 2679512 - RNA, 23 nt, Human
acccgggaaccuccccagccugc

SEQ ID NO: 2679513 - RNA, 22 nt, Human
acccgggaaccuccccagccug

SEQ ID NO: 2679514 - RNA, 22 nt, Human
ucagggugcagcccaaucugcc

SEQ ID NO: 2679515 - RNA, 23 nt, Human
ucaggguggucucuucuuggggc

SEQ ID NO: 2679516 - RNA, 14 nt, Human
ucaggggagaaaaa

SEQ ID NO: 2679517 - RNA, 18 nt, Human
ucagggcuggcuccugau

SEQ ID NO: 2679518 - RNA, 19 nt, Human
ucagggcuggcuccugauc

SEQ ID NO: 2679519 - RNA, 22 nt, Human
ucagcuuugagaagccuucagc

SEQ ID NO: 2679520 - RNA, 15 nt, Human
ucagcuuugagaagc

SEQ ID NO: 2679521 - RNA, 20 nt, Human
acccuuucccccuucucuua

SEQ ID NO: 2679522 - RNA, 14 nt, Human
acccuuuauuugaa

SEQ ID NO: 2679523 - RNA, 17 nt, Human
acccugccgucaccacc

SEQ ID NO: 2679524 - RNA, 18 nt, Human
acccugccgucaccacca

SEQ ID NO: 2679525 - RNA, 19 nt, Human
acccugccgucaccaccac

SEQ ID NO: 2679526 - RNA, 22 nt, Human
acccugccgucaccaccacccc

SEQ ID NO: 2679527 - RNA, 18 nt, Human
acccugaaagcccugagc

SEQ ID NO: 2679528 - RNA, 16 nt, Human
acccugaaagcccuga

SEQ ID NO: 2679529 - RNA, 22 nt, Human
acccucuaaccucgcccucucc

SEQ ID NO: 2679530 - RNA, 15 nt, Human
acccucuaaccucgc

SEQ ID NO: 2679531 - RNA, 23 nt, Human
acccucuaaccucgcccucuccu

SEQ ID NO: 2679532 - RNA, 18 nt, Human
acccucgccggacccucu

SEQ ID NO: 2679533 - RNA, 13 nt, Human
acccucgccggac

SEQ ID NO: 2679534 - RNA, 21 nt, Human
acccgggaggcggagcuugca

SEQ ID NO: 2679535 - RNA, 15 nt, Human
acccggggcccaggg

SEQ ID NO: 2679536 - RNA, 14 nt, Human
acccggggcccagg

SEQ ID NO: 2679537 - RNA, 22 nt, Human
acccggggcccagggcaagcuc

SEQ ID NO: 2679538 - RNA, 13 nt, Human
ucagccaggacca

SEQ ID NO: 2679539 - RNA, 23 nt, Human
ucagccaggaccauaccgggucu

SEQ ID NO: 2679540 - RNA, 13 nt, Human
acccaggaggcag

SEQ ID NO: 2679541 - RNA, 14 nt, Human
acccaggaggcagg

SEQ ID NO: 2679542 - RNA, 22 nt, Human
acccaggaggcagggaggcagc

SEQ ID NO: 2679543 - RNA, 23 nt, Human
acccaggaggcagggaggcagcc

SEQ ID NO: 2679544 - RNA, 15 nt, Human
ucagcaaaagaugcu

SEQ ID NO: 2679545 - RNA, 23 nt, Human
ucagccaagguuuuauaaggcug

SEQ ID NO: 2679546 - RNA, 14 nt, Human
ucagccaaguuuua

SEQ ID NO: 2679547 - RNA, 15 nt, Human
ucagccaaguuuuau

SEQ ID NO: 2679548 - RNA, 16 nt, Human
ucagccaaguuuuaua

SEQ ID NO: 2679549 - RNA, 14 nt, Human
accauaaauucaac

SEQ ID NO: 2679550 - RNA, 22 nt, Human
accauaaauucaacuuuguaaa

SEQ ID NO: 2679551 - RNA, 24 nt, Human
accaguuuuuggauaaagaauacu

SEQ ID NO: 2679552 - RNA, 16 nt, Human
ucagauuucugaggaa

SEQ ID NO: 2679553 - RNA, 18 nt, Human
accccaucucuacaaaaa

SEQ ID NO: 2679554 - RNA, 19 nt, Human
acccccuccuucagacacc

SEQ ID NO: 2679555 - RNA, 17 nt, Human
acccccuccuucagaca

SEQ ID NO: 2679556 - RNA, 16 nt, Human
acccccuccuucagac

SEQ ID NO: 2679557 - RNA, 15 nt, Human
acccccuccuucaga

SEQ ID NO: 2679558 - RNA, 12 nt, Human
acccccuccuuc

SEQ ID NO: 2679559 - RNA, 11 nt, Human
acccccuccuu

SEQ ID NO: 2679560 - RNA, 10 nt, Human
accccugccc

SEQ ID NO: 2679561 - RNA, 20 nt, Human
accccugcccccagccccgg

SEQ ID NO: 2679562 - RNA, 12 nt, Human
accccugccccc

SEQ ID NO: 2679563 - RNA, 13 nt, Human
accccugccccca

SEQ ID NO: 2679564 - RNA, 17 nt, Human
accccugcccccagccc

SEQ ID NO: 2679565 - RNA, 12 nt, Human
ucagcuccagcu

SEQ ID NO: 2679566 - RNA, 22 nt, Human
uccuagcuugggaggcuucccc

SEQ ID NO: 2679567 - RNA, 21 nt, Human
uccuagcuugggaggcuuccc

SEQ ID NO: 2679568 - RNA, 13 nt, Human
uccuaggcauuug

SEQ ID NO: 2679569 - RNA, 13 nt, Human
acuccugcuuaau

SEQ ID NO: 2679570 - RNA, 20 nt, Human
acuccagcaacuucuucucc

SEQ ID NO: 2679571 - RNA, 15 nt, Human
acuccagcaacuucu

SEQ ID NO: 2679572 - RNA, 11 nt, Human
acuccagccag

SEQ ID NO: 2679573 - RNA, 12 nt, Human
acuccagccagc

SEQ ID NO: 2679574 - RNA, 13 nt, Human
acuccagccagcg

SEQ ID NO: 2679575 - RNA, 14 nt, Human
acuccagccagcgc

SEQ ID NO: 2679576 - RNA, 15 nt, Human
acuccagccagcgcc

SEQ ID NO: 2679577 - RNA, 16 nt, Human
acuccagccagcgccu

SEQ ID NO: 2679578 - RNA, 17 nt, Human
acuccagccagcgccuc

SEQ ID NO: 2679579 - RNA, 18 nt, Human
acuccagccagcgccucc

SEQ ID NO: 2679580 - RNA, 19 nt, Human
acuccagccagcgccuccc

SEQ ID NO: 2679581 - RNA, 16 nt, Human
acucacagugcuuuua

SEQ ID NO: 2679582 - RNA, 17 nt, Human
acucacagagucaaggc

SEQ ID NO: 2679583 - RNA, 18 nt, Human
acucacagagucaaggcc

SEQ ID NO: 2679584 - RNA, 19 nt, Human
acucacagagucaaggccu

SEQ ID NO: 2679585 - RNA, 21 nt, Human
acucacagagucaaggccugc

SEQ ID NO: 2679586 - RNA, 22 nt, Human
acucacagagucaaggccugcu

SEQ ID NO: 2679587 - RNA, 18 nt, Human
acuccucagggcagccuc

SEQ ID NO: 2679588 - RNA, 15 nt, Human
uccucaccucaugcc

SEQ ID NO: 2679589 - RNA, 16 nt, Human
uccucaccucaugccc

SEQ ID NO: 2679590 - RNA, 21 nt, Human
uccucaccucaugcccacccc

SEQ ID NO: 2679591 - RNA, 22 nt, Human
acucuugaguuguuuuuguaua

SEQ ID NO: 2679592 - RNA, 21 nt, Human
acucuugaguuguuuuuguau

SEQ ID NO: 2679593 - RNA, 20 nt, Human
acucuugaguuguuuuugua

SEQ ID NO: 2679594 - RNA, 16 nt, Human
acucuugaguuguuuu

SEQ ID NO: 2679595 - RNA, 15 nt, Human
acucuugaguuguuu

SEQ ID NO: 2679596 - RNA, 19 nt, Human
uccucccaggaagcccagg

SEQ ID NO: 2679597 - RNA, 23 nt, Human
uccucccaggaagcccaggagcc

SEQ ID NO: 2679598 - RNA, 12 nt, Human
uccucagggcag

SEQ ID NO: 2679599 - RNA, 17 nt, Human
uccucagggcagccucc

SEQ ID NO: 2679600 - RNA, 23 nt, Human
acucugaugguucuucaccuccu

SEQ ID NO: 2679601 - RNA, 22 nt, Human
uccuggaaauugacgaggggug

SEQ ID NO: 2679602 - RNA, 14 nt, Human
uccuggaacaauau

SEQ ID NO: 2679603 - RNA, 16 nt, Human
uccuggaacaauauuu

SEQ ID NO: 2679604 - RNA, 19 nt, Human
uccuggaacaauauuuuau

SEQ ID NO: 2679605 - RNA, 20 nt, Human
uccuggaacaauauuuuaug

SEQ ID NO: 2679606 - RNA, 21 nt, Human
uccuggaacaauauuuuaugg

SEQ ID NO: 2679607 - RNA, 17 nt, Human
uccuggaauugccagcu

SEQ ID NO: 2679608 - RNA, 20 nt, Human
uccuggaauugccagcugac

SEQ ID NO: 2679609 - RNA, 20 nt, Human
uccuggcgccuggcaguccg

SEQ ID NO: 2679610 - RNA, 14 nt, Human
uccugccuguggcg

SEQ ID NO: 2679611 - RNA, 13 nt, Human
acugcacuccagc

SEQ ID NO: 2679612 - RNA, 12 nt, Human
uccugccugugg

SEQ ID NO: 2679613 - RNA, 13 nt, Human
uccugccuguggc

SEQ ID NO: 2679614 - RNA, 20 nt, Human
acugcacuccagccugggug

SEQ ID NO: 2679615 - RNA, 19 nt, Human
acugcacuccagccugggu

SEQ ID NO: 2679616 - RNA, 21 nt, Human
acugcacuccagccugggcga

SEQ ID NO: 2679617 - RNA, 18 nt, Human
acugcacuccagccuggg

SEQ ID NO: 2679618 - RNA, 17 nt, Human
acugcacuccagccugg

SEQ ID NO: 2679619 - RNA, 14 nt, Human
acugcacuccagcc

SEQ ID NO: 2679620 - RNA, 20 nt, Human
uccugauccacuuuggggga

SEQ ID NO: 2679621 - RNA, 21 nt, Human
uccugauccacuuugggggag

SEQ ID NO: 2679622 - RNA, 16 nt, Human
acugcacuccagccug

SEQ ID NO: 2679623 - RNA, 19 nt, Human
acugcacuccagccugggg

SEQ ID NO: 2679624 - RNA, 20 nt, Human
acugcacuccagccuggggg

SEQ ID NO: 2679625 - RNA, 22 nt, Human
acugacugucgggcuuuaaaaa

SEQ ID NO: 2679626 - RNA, 21 nt, Human
acugacugaggcaguuugagg

SEQ ID NO: 2679627 - RNA, 15 nt, Human
acugacugaggcagu

SEQ ID NO: 2679628 - RNA, 12 nt, Human
acugacugaggc

SEQ ID NO: 2679629 - RNA, 15 nt, Human
acugaccuuguaaaa

SEQ ID NO: 2679630 - RNA, 20 nt, Human
acugaccuuguaaaagacag

SEQ ID NO: 2679631 - RNA, 21 nt, Human
acugaaccacuuguagauuug

SEQ ID NO: 2679632 - RNA, 20 nt, Human
acugaaccacuuguagauuu

SEQ ID NO: 2679633 - RNA, 19 nt, Human
acugaaccacuuguagauu

SEQ ID NO: 2679634 - RNA, 18 nt, Human
acugaaccacuuguagau

SEQ ID NO: 2679635 - RNA, 16 nt, Human
acugaaccacuuguag

SEQ ID NO: 2679636 - RNA, 14 nt, Human
uccugacagaaggu

SEQ ID NO: 2679637 - RNA, 15 nt, Human
uccugacagaaggug

SEQ ID NO: 2679638 - RNA, 16 nt, Human
uccugacagaaggugc

SEQ ID NO: 2679639 - RNA, 14 nt, Human
uccugacauugucu

SEQ ID NO: 2679640 - RNA, 15 nt, Human
uccugacauugucuc

SEQ ID NO: 2679641 - RNA, 17 nt, Human
uccugacagaaggugcc

SEQ ID NO: 2679642 - RNA, 23 nt, Human
uccugaaacuauauuuugucaua

SEQ ID NO: 2679643 - RNA, 21 nt, Human
uccugaaacuauauuuuguca

SEQ ID NO: 2679644 - RNA, 16 nt, Human
uccugaaacuauauuu

SEQ ID NO: 2679645 - RNA, 14 nt, Human
uccugaaacuauau

SEQ ID NO: 2679646 - RNA, 23 nt, Human
uccugaaccgcacagcucaggag

SEQ ID NO: 2679647 - RNA, 21 nt, Human
uccugaaccgcacagcucagg

SEQ ID NO: 2679648 - RNA, 22 nt, Human
uccugaaccgcacagcucagga

SEQ ID NO: 2679649 - RNA, 17 nt, Human
uccugaaccgcacagcu

SEQ ID NO: 2679650 - RNA, 18 nt, Human
uccugaaccgcacagcuc

SEQ ID NO: 2679651 - RNA, 19 nt, Human
uccugaaccgcacagcuca

SEQ ID NO: 2679652 - RNA, 20 nt, Human
uccugaaccgcacagcucag

SEQ ID NO: 2679653 - RNA, 14 nt, Human
uccugaaccaugug

SEQ ID NO: 2679654 - RNA, 22 nt, Human
uccugaaccauguggauaacuu

SEQ ID NO: 2679655 - RNA, 16 nt, Human
uccugaaccgcacagc

SEQ ID NO: 2679656 - RNA, 13 nt, Human
accuuucucucuc

SEQ ID NO: 2679657 - RNA, 20 nt, Human
accuuugaguagauccauuu

SEQ ID NO: 2679658 - RNA, 17 nt, Human
accuuuggaaagcucug

SEQ ID NO: 2679659 - RNA, 18 nt, Human
uccacucguguguuucua

SEQ ID NO: 2679660 - RNA, 16 nt, Human
uccacucguguguuuc

SEQ ID NO: 2679661 - RNA, 11 nt, Human
accuuuuacug

SEQ ID NO: 2679662 - RNA, 20 nt, Human
accuuuuacugguugcaugg

SEQ ID NO: 2679663 - RNA, 21 nt, Human
accuuuuacugguugcaugga

SEQ ID NO: 2679664 - RNA, 24 nt, Human
accuuuuacugguugcauggaaau

SEQ ID NO: 2679665 - RNA, 13 nt, Human
accuuuuacugug

SEQ ID NO: 2679666 - RNA, 14 nt, Human
accuuuuacuguga

SEQ ID NO: 2679667 - RNA, 16 nt, Human
accuuuuacugugaug

SEQ ID NO: 2679668 - RNA, 15 nt, Human
uccacucguguguuu

SEQ ID NO: 2679669 - RNA, 14 nt, Human
uccacucguguguu

SEQ ID NO: 2679670 - RNA, 15 nt, Human
accuuuucagggcug

SEQ ID NO: 2679671 - RNA, 14 nt, Human
accuuuuguuuucu

SEQ ID NO: 2679672 - RNA, 14 nt, Human
uccaggccugccuc

SEQ ID NO: 2679673 - RNA, 15 nt, Human
uccaggccugccucc

SEQ ID NO: 2679674 - RNA, 16 nt, Human
uccaggccugccuccc

SEQ ID NO: 2679675 - RNA, 17 nt, Human
uccaggccugccuccca

SEQ ID NO: 2679676 - RNA, 18 nt, Human
uccaggccugccucccac

SEQ ID NO: 2679677 - RNA, 19 nt, Human
uccaggccugccucccacu

SEQ ID NO: 2679678 - RNA, 19 nt, Human
uccaggcuauguauaaaau

SEQ ID NO: 2679679 - RNA, 20 nt, Human
uccaggcuauguauaaaaua

SEQ ID NO: 2679680 - RNA, 16 nt, Human
uccagccugccccgga

SEQ ID NO: 2679681 - RNA, 17 nt, Human
acgaaauaucaaaguca

SEQ ID NO: 2679682 - RNA, 14 nt, Human
uccacugugcacac

SEQ ID NO: 2679683 - RNA, 13 nt, Human
uccagccucagcc

SEQ ID NO: 2679684 - RNA, 15 nt, Human
uccagccucagcccc

SEQ ID NO: 2679685 - RNA, 15 nt, Human
acgccucuugaccag

SEQ ID NO: 2679686 - RNA, 22 nt, Human
acgaauuucugugcccuccuga

SEQ ID NO: 2679687 - RNA, 21 nt, Human
acgaauuucugugcccuccug

SEQ ID NO: 2679688 - RNA, 19 nt, Human
acgaauuucugugcccucc

SEQ ID NO: 2679689 - RNA, 16 nt, Human
acgccucuugaccagg

SEQ ID NO: 2679690 - RNA, 24 nt, Human
acgccucuugaccaggcugccucc

SEQ ID NO: 2679691 - RNA, 21 nt, Human
acgccuguaaucccagcacuu

SEQ ID NO: 2679692 - RNA, 20 nt, Human
acgcguaucuaggcuuuggu

SEQ ID NO: 2679693 - RNA, 24 nt, Human
accuuuuuuuaucguuuuuguauu

SEQ ID NO: 2679694 - RNA, 16 nt, Human
acgcgcgucgccgcca

SEQ ID NO: 2679695 - RNA, 23 nt, Human
acgcgccucgccggaucugaggg

SEQ ID NO: 2679696 - RNA, 20 nt, Human
acgcuccgcugccgugccgc

SEQ ID NO: 2679697 - RNA, 13 nt, Human
acgcuccgcugcc

SEQ ID NO: 2679698 - RNA, 21 nt, Human
acggagucucacucugucacc

SEQ ID NO: 2679699 - RNA, 14 nt, Human
uccaguauaaccag

SEQ ID NO: 2679700 - RNA, 22 nt, Human
uccaguaagaucacuguuuaga

SEQ ID NO: 2679701 - RNA, 18 nt, Human
acggcuuuuacuuaaacc

SEQ ID NO: 2679702 - RNA, 23 nt, Human
uccaguaagaucacuguuuagau

SEQ ID NO: 2679703 - RNA, 19 nt, Human
acgggacaucacagggugg

SEQ ID NO: 2679704 - RNA, 23 nt, Human
acgggacaucacagggugggccu

SEQ ID NO: 2679705 - RNA, 18 nt, Human
acgggaacaugcccccug

SEQ ID NO: 2679706 - RNA, 22 nt, Human
acggcaggcucacugccaggcc

SEQ ID NO: 2679707 - RNA, 15 nt, Human
acggccaagaaugua

SEQ ID NO: 2679708 - RNA, 16 nt, Human
acggccaagaauguac

SEQ ID NO: 2679709 - RNA, 23 nt, Human
acggccaagaauguacguccagc

SEQ ID NO: 2679710 - RNA, 15 nt, Human
acggcaggcucacug

SEQ ID NO: 2679711 - RNA, 17 nt, Human
acggcaggcucacugcc

SEQ ID NO: 2679712 - RNA, 18 nt, Human
acggcaggcucacugcca

SEQ ID NO: 2679713 - RNA, 20 nt, Human
acggcaggcucacugccagg

SEQ ID NO: 2679714 - RNA, 12 nt, Human
acgucauguauu

SEQ ID NO: 2679715 - RNA, 18 nt, Human
acgucauguauuugagca

SEQ ID NO: 2679716 - RNA, 20 nt, Human
acgucagauguuuaaaacac

SEQ ID NO: 2679717 - RNA, 17 nt, Human
acgucagacuuggcuca

SEQ ID NO: 2679718 - RNA, 18 nt, Human
acgucagauguuuaaaac

SEQ ID NO: 2679719 - RNA, 17 nt, Human
acgucagauguuuaaaa

SEQ ID NO: 2679720 - RNA, 15 nt, Human
acgucagauguuuaa

SEQ ID NO: 2679721 - RNA, 18 nt, Human
acgucagacuuggcucag

SEQ ID NO: 2679722 - RNA, 19 nt, Human
acguuggagaagcccgugu

SEQ ID NO: 2679723 - RNA, 18 nt, Human
uccagugugggcuugacc

SEQ ID NO: 2679724 - RNA, 19 nt, Human
uccagugugggcuugacca

SEQ ID NO: 2679725 - RNA, 23 nt, Human
uccagugucuauaaaagaaacac

SEQ ID NO: 2679726 - RNA, 17 nt, Human
uccaguggaucauaaga

SEQ ID NO: 2679727 - RNA, 18 nt, Human
acggugcugugagggagg

SEQ ID NO: 2679728 - RNA, 19 nt, Human
acggugcugugagggaggg

SEQ ID NO: 2679729 - RNA, 20 nt, Human
acggugcugugagggagggg

SEQ ID NO: 2679730 - RNA, 14 nt, Human
acggugcccaagcc

SEQ ID NO: 2679731 - RNA, 15 nt, Human
acggugcccaagcca

SEQ ID NO: 2679732 - RNA, 17 nt, Human
acguacaaguaguucug

SEQ ID NO: 2679733 - RNA, 16 nt, Human
acguacaaguaguucu

SEQ ID NO: 2679734 - RNA, 15 nt, Human
acguacaaguaguuc

SEQ ID NO: 2679735 - RNA, 21 nt, Human
acguacaaguaguucuguauu

SEQ ID NO: 2679736 - RNA, 20 nt, Human
acguacaaguaguucuguau

SEQ ID NO: 2679737 - RNA, 19 nt, Human
acguacaaguaguucugua

SEQ ID NO: 2679738 - RNA, 18 nt, Human
acguacaaguaguucugu

SEQ ID NO: 2679739 - RNA, 24 nt, Human
acguacaaguaguucuguauuuga

SEQ ID NO: 2679740 - RNA, 22 nt, Human
acguacaaguaguucuguauuu

SEQ ID NO: 2679741 - RNA, 15 nt, Human
acuaauuuuacaugu

SEQ ID NO: 2679742 - RNA, 21 nt, Human
acuaauuuuacauguuuauaa

SEQ ID NO: 2679743 - RNA, 18 nt, Human
acuaauuuuuguauuauu

SEQ ID NO: 2679744 - RNA, 19 nt, Human
acuaauuuuuguauuauuu

SEQ ID NO: 2679745 - RNA, 18 nt, Human
acguuuuaaggacugacu

SEQ ID NO: 2679746 - RNA, 14 nt, Human
acguuuuaaggacu

SEQ ID NO: 2679747 - RNA, 12 nt, Human
acguuuuaagga

SEQ ID NO: 2679748 - RNA, 18 nt, Human
acguuggagaagcccgug

SEQ ID NO: 2679749 - RNA, 10 nt, Human
acguuucuuu

SEQ ID NO: 2679750 - RNA, 12 nt, Human
acguuucuuuaa

SEQ ID NO: 2679751 - RNA, 20 nt, Human
acguuucuuuaaccuuguau

SEQ ID NO: 2679752 - RNA, 21 nt, Human
acguuucuuuaaccuuguaua

SEQ ID NO: 2679753 - RNA, 11 nt, Human
acuaaagcaau

SEQ ID NO: 2679754 - RNA, 13 nt, Human
acuaaagcaauag

SEQ ID NO: 2679755 - RNA, 14 nt, Human
acuaaagcaauaga

SEQ ID NO: 2679756 - RNA, 15 nt, Human
acuaaagcaauagaa

SEQ ID NO: 2679757 - RNA, 16 nt, Human
acuaaagcaauagaaa

SEQ ID NO: 2679758 - RNA, 19 nt, Human
acuaaagcaauagaaacaa

SEQ ID NO: 2679759 - RNA, 14 nt, Human
acuacaccuggcug

SEQ ID NO: 2679760 - RNA, 21 nt, Human
acuacaccuugccuugcuguu

SEQ ID NO: 2679761 - RNA, 13 nt, Human
acuacaccuggcu

SEQ ID NO: 2679762 - RNA, 23 nt, Human
ucccacuuugcuguuccuuacuu

SEQ ID NO: 2679763 - RNA, 16 nt, Human
ucccagauacuugggg

SEQ ID NO: 2679764 - RNA, 18 nt, Human
ucccagauacuugggggg

SEQ ID NO: 2679765 - RNA, 15 nt, Human
uccccagguccagcu

SEQ ID NO: 2679766 - RNA, 16 nt, Human
uccccagguccagcuc

SEQ ID NO: 2679767 - RNA, 15 nt, Human
uccccaggggaguug

SEQ ID NO: 2679768 - RNA, 17 nt, Human
uccccagguccagcucu

SEQ ID NO: 2679769 - RNA, 23 nt, Human
uccccagguccagcucuggaggg

SEQ ID NO: 2679770 - RNA, 15 nt, Human
ucccagccucagcgc

SEQ ID NO: 2679771 - RNA, 19 nt, Human
ucccagcuacuugggaggc

SEQ ID NO: 2679772 - RNA, 18 nt, Human
ucccagcuacuugggagg

SEQ ID NO: 2679773 - RNA, 16 nt, Human
ucccagcuacucggga

SEQ ID NO: 2679774 - RNA, 16 nt, Human
ucccagcuacuuggga

SEQ ID NO: 2679775 - RNA, 16 nt, Human
ucccauuugugccaga

SEQ ID NO: 2679776 - RNA, 17 nt, Human
ucccauuugugccagag

SEQ ID NO: 2679777 - RNA, 19 nt, Human
ucccauuugugccagagga

SEQ ID NO: 2679778 - RNA, 12 nt, Human
uccccacccuga

SEQ ID NO: 2679779 - RNA, 23 nt, Human
ucccauuucuaccuaagucagcu

SEQ ID NO: 2679780 - RNA, 23 nt, Human
uccccacccugaaagcccugagc

SEQ ID NO: 2679781 - RNA, 14 nt, Human
acuaucugucuggu

SEQ ID NO: 2679782 - RNA, 17 nt, Human
acuaucugucugguggc

SEQ ID NO: 2679783 - RNA, 16 nt, Human
acuauauuuugucaua

SEQ ID NO: 2679784 - RNA, 15 nt, Human
acuauauuuugucau

SEQ ID NO: 2679785 - RNA, 20 nt, Human
acuauagcuugcagaacugu

SEQ ID NO: 2679786 - RNA, 21 nt, Human
acuagaggaaaccaguuuggu

SEQ ID NO: 2679787 - RNA, 12 nt, Human
acucaaugcuuu

SEQ ID NO: 2679788 - RNA, 15 nt, Human
acucaaugcuuuauu

SEQ ID NO: 2679789 - RNA, 17 nt, Human
acucaaugcuuuauuug

SEQ ID NO: 2679790 - RNA, 18 nt, Human
acucaaugcuuuauuugu

SEQ ID NO: 2679791 - RNA, 19 nt, Human
acucaaugcuuuauuugua

SEQ ID NO: 2679792 - RNA, 20 nt, Human
acucaaugcuuuauuuguaa

SEQ ID NO: 2679793 - RNA, 21 nt, Human
acucaaugcuuuauuuguaaa

SEQ ID NO: 2679794 - RNA, 22 nt, Human
acucaaugcuuuauuuguaaau

SEQ ID NO: 2679795 - RNA, 23 nt, Human
acucaaugcuuuauuuguaaauu

SEQ ID NO: 2679796 - RNA, 17 nt, Human
acucaagcggguggcuc

SEQ ID NO: 2679797 - RNA, 18 nt, Human
acucaagcggguggcucu

SEQ ID NO: 2679798 - RNA, 21 nt, Human
acucaagcggguggcucuggg

SEQ ID NO: 2679799 - RNA, 15 nt, Human
acuaugggaugagaa

SEQ ID NO: 2679800 - RNA, 16 nt, Human
acuaugggaugagaaa

SEQ ID NO: 2679801 - RNA, 22 nt, Human
acuaugguagccagaugauaaa

SEQ ID NO: 2679802 - RNA, 19 nt, Human
acuaugcguggcuggaacc

SEQ ID NO: 2679803 - RNA, 23 nt, Human
acuaugcguggcuggaaccacau

SEQ ID NO: 2679804 - RNA, 16 nt, Human
ucucaggagauuucau

SEQ ID NO: 2679805 - RNA, 20 nt, Human
ucucaggccggcagccccag

SEQ ID NO: 2679806 - RNA, 23 nt, Human
ucucaggccggcagccccagccu

SEQ ID NO: 2679807 - RNA, 15 nt, Human
ucucauuuaagggaa

SEQ ID NO: 2679808 - RNA, 16 nt, Human
ucucauuuaagggaaa

SEQ ID NO: 2679809 - RNA, 17 nt, Human
ucucauuuaagggaaaa

SEQ ID NO: 2679810 - RNA, 18 nt, Human
ucucauuuaagggaaaaa

SEQ ID NO: 2679811 - RNA, 19 nt, Human
ucucauuuaagggaaaaau

SEQ ID NO: 2679812 - RNA, 23 nt, Human
ucucauuuaagggaaaaauauau

SEQ ID NO: 2679813 - RNA, 21 nt, Human
acuugcuuuaccuuuucaggg

SEQ ID NO: 2679814 - RNA, 22 nt, Human
acuugcuuuaccuuuucagggc

SEQ ID NO: 2679815 - RNA, 16 nt, Human
acuugcuuauuugaca

SEQ ID NO: 2679816 - RNA, 16 nt, Human
acuugcuuaaauuucu

SEQ ID NO: 2679817 - RNA, 18 nt, Human
acuugcuuaaauuucuua

SEQ ID NO: 2679818 - RNA, 19 nt, Human
acuugcuuaaauuucuuau

SEQ ID NO: 2679819 - RNA, 23 nt, Human
acuugcuuaaauuucuuauguga

SEQ ID NO: 2679820 - RNA, 16 nt, Human
acuugauggcugcgaa

SEQ ID NO: 2679821 - RNA, 12 nt, Human
ucucaccucagc

SEQ ID NO: 2679822 - RNA, 17 nt, Human
acuuuguacauuuggga

SEQ ID NO: 2679823 - RNA, 23 nt, Human
acuuuguaaauucugauuucuuu

SEQ ID NO: 2679824 - RNA, 21 nt, Human
acuuuguaaauucugauuucu

SEQ ID NO: 2679825 - RNA, 19 nt, Human
acuuuguaaauucugauuu

SEQ ID NO: 2679826 - RNA, 18 nt, Human
acuuuguaaauucugauu

SEQ ID NO: 2679827 - RNA, 17 nt, Human
acuuuguaaauucugau

SEQ ID NO: 2679828 - RNA, 16 nt, Human
acuuuguaaauucuga

SEQ ID NO: 2679829 - RNA, 14 nt, Human
acuuuguaaauucu

SEQ ID NO: 2679830 - RNA, 17 nt, Human
acuuuguaaaaaucuuu

SEQ ID NO: 2679831 - RNA, 21 nt, Human
acuuuguaaaaaucuuuugaa

SEQ ID NO: 2679832 - RNA, 12 nt, Human
acuuuguaaaua

SEQ ID NO: 2679833 - RNA, 13 nt, Human
acuuuguaaauag

SEQ ID NO: 2679834 - RNA, 23 nt, Human
acuuuguaaauaggauuuuuaga

SEQ ID NO: 2679835 - RNA, 20 nt, Human
acuuuguuaggauuuucaca

SEQ ID NO: 2679836 - RNA, 15 nt, Human
acuuuuuaguaauuu

SEQ ID NO: 2679837 - RNA, 17 nt, Human
acuuuuuaguaauuucu

SEQ ID NO: 2679838 - RNA, 12 nt, Human
acuuuuuauaaa

SEQ ID NO: 2679839 - RNA, 17 nt, Human
agaaaaaauauuuuccc

SEQ ID NO: 2679840 - RNA, 14 nt, Human
acuuucuguuaugg

SEQ ID NO: 2679841 - RNA, 18 nt, Human
acuuucuguuaugggcuu

SEQ ID NO: 2679842 - RNA, 13 nt, Human
acuuucugccugg

SEQ ID NO: 2679843 - RNA, 18 nt, Human
acuuuacccaccuagaac

SEQ ID NO: 2679844 - RNA, 14 nt, Human
acuuucugccugga

SEQ ID NO: 2679845 - RNA, 13 nt, Human
acuuuacccaccu

SEQ ID NO: 2679846 - RNA, 17 nt, Human
acuuuacccaccuagaa

SEQ ID NO: 2679847 - RNA, 14 nt, Human
acuuuacagaaaug

SEQ ID NO: 2679848 - RNA, 15 nt, Human
acuuuacagaaaugg

SEQ ID NO: 2679849 - RNA, 18 nt, Human
acuuuacagaaauggacu

SEQ ID NO: 2679850 - RNA, 19 nt, Human
acuuuacagaaauggacug

SEQ ID NO: 2679851 - RNA, 16 nt, Human
ucuauuuauuaauauu

SEQ ID NO: 2679852 - RNA, 12 nt, Human
ucuauuuuaaga

SEQ ID NO: 2679853 - RNA, 12 nt, Human
ucuauuuuaauc

SEQ ID NO: 2679854 - RNA, 15 nt, Human
ucuauuuauguuugc

SEQ ID NO: 2679855 - RNA, 13 nt, Human
ucuauuuauguuu

SEQ ID NO: 2679856 - RNA, 16 nt, Human
ucuauugcuucaccau

SEQ ID NO: 2679857 - RNA, 22 nt, Human
ucucacccaugcaagcagagga

SEQ ID NO: 2679858 - RNA, 23 nt, Human
ucucacccaugcaagcagaggac

SEQ ID NO: 2679859 - RNA, 21 nt, Human
ucuauuaauauauguauuauu

SEQ ID NO: 2679860 - RNA, 16 nt, Human
ucuauuaauauaugua

SEQ ID NO: 2679861 - RNA, 13 nt, Human
ucuauuaauauau

SEQ ID NO: 2679862 - RNA, 12 nt, Human
ucuauuaauaua

SEQ ID NO: 2679863 - RNA, 10 nt, Human
ucuauuaaua

SEQ ID NO: 2679864 - RNA, 22 nt, Human
ucuauuaauauauguauuauuu

SEQ ID NO: 2679865 - RNA, 16 nt, Human
ucuauuaauauucagg

SEQ ID NO: 2679866 - RNA, 18 nt, Human
ucuauucugagaaaacaa

SEQ ID NO: 2679867 - RNA, 19 nt, Human
ucuauucugagaaaacaag

SEQ ID NO: 2679868 - RNA, 14 nt, Human
ucuauuccaauaaa

SEQ ID NO: 2679869 - RNA, 15 nt, Human
ucuauuccaauaaac

SEQ ID NO: 2679870 - RNA, 15 nt, Human
ucuauuauggaaaac

SEQ ID NO: 2679871 - RNA, 17 nt, Human
ucuauuauggaaaacug

SEQ ID NO: 2679872 - RNA, 20 nt, Human
ucuauuauggaaaacugugu

SEQ ID NO: 2679873 - RNA, 16 nt, Human
ucuauuauuuuuauaa

SEQ ID NO: 2679874 - RNA, 17 nt, Human
ucuauagcaucacuuaa

SEQ ID NO: 2679875 - RNA, 15 nt, Human
ucuauagcaucacuu

SEQ ID NO: 2679876 - RNA, 13 nt, Human
ucuaguucuuugu

SEQ ID NO: 2679877 - RNA, 21 nt, Human
ucuagagcuuaaugcuacaug

SEQ ID NO: 2679878 - RNA, 13 nt, Human
acuuacuugcuua

SEQ ID NO: 2679879 - RNA, 23 nt, Human
acuuagggcaccagggguuucuc

SEQ ID NO: 2679880 - RNA, 17 nt, Human
acuuaugaaugauuugc

SEQ ID NO: 2679881 - RNA, 20 nt, Human
acuuaugaaugauuugcaua

SEQ ID NO: 2679882 - RNA, 16 nt, Human
acuuagggcaccaggg

SEQ ID NO: 2679883 - RNA, 15 nt, Human
acuuagguguggggg

SEQ ID NO: 2679884 - RNA, 13 nt, Human
acuuauugaauau

SEQ ID NO: 2679885 - RNA, 15 nt, Human
acuuauugaauauau

SEQ ID NO: 2679886 - RNA, 17 nt, Human
acuuauugaauauauga

SEQ ID NO: 2679887 - RNA, 18 nt, Human
acuuauugaauauaugau

SEQ ID NO: 2679888 - RNA, 15 nt, Human
acuuauugaccauuu

SEQ ID NO: 2679889 - RNA, 19 nt, Human
acuuaaaugguaauaagca

SEQ ID NO: 2679890 - RNA, 15 nt, Human
acuguugauaaaaac

SEQ ID NO: 2679891 - RNA, 13 nt, Human
acuuaacugaaau

SEQ ID NO: 2679892 - RNA, 22 nt, Human
acuuaacugaaaugccugcuuu

SEQ ID NO: 2679893 - RNA, 18 nt, Human
acuuaaauguuauuaucu

SEQ ID NO: 2679894 - RNA, 15 nt, Human
acuuaaauguuauua

SEQ ID NO: 2679895 - RNA, 20 nt, Human
acuuaacauagccaaaaugu

SEQ ID NO: 2679896 - RNA, 18 nt, Human
ucuaauaagcuaguugaa

SEQ ID NO: 2679897 - RNA, 16 nt, Human
acuguucacucacucu

SEQ ID NO: 2679898 - RNA, 15 nt, Human
acuguucuuuccagg

SEQ ID NO: 2679899 - RNA, 12 nt, Human
agaauagaaaca

SEQ ID NO: 2679900 - RNA, 13 nt, Human
agaauagaaacaa

SEQ ID NO: 2679901 - RNA, 21 nt, Human
agaauauccuuuaaaauuuaa

SEQ ID NO: 2679902 - RNA, 22 nt, Human
agaauauccuuuaaaauuuaaa

SEQ ID NO: 2679903 - RNA, 16 nt, Human
agaauaugacuuuuua

SEQ ID NO: 2679904 - RNA, 21 nt, Human
agaauaaguuauugcaguuua

SEQ ID NO: 2679905 - RNA, 19 nt, Human
agaauaaguuauugcaguu

SEQ ID NO: 2679906 - RNA, 20 nt, Human
agaauaaguuauugcaguuu

SEQ ID NO: 2679907 - RNA, 15 nt, Human
agaauacugauggaa

SEQ ID NO: 2679908 - RNA, 17 nt, Human
agaauacugauggaauu

SEQ ID NO: 2679909 - RNA, 21 nt, Human
agaauacugauggaauuuuuu

SEQ ID NO: 2679910 - RNA, 12 nt, Human
agaauaaguuau

SEQ ID NO: 2679911 - RNA, 13 nt, Human
agaauaaguuauu

SEQ ID NO: 2679912 - RNA, 14 nt, Human
agaauaaguuauug

SEQ ID NO: 2679913 - RNA, 16 nt, Human
agaauaaguuauugca

SEQ ID NO: 2679914 - RNA, 17 nt, Human
agaauaaguuauugcag

SEQ ID NO: 2679915 - RNA, 13 nt, Human
agaauaagaauuu

SEQ ID NO: 2679916 - RNA, 16 nt, Human
agaauaagaauuugca

SEQ ID NO: 2679917 - RNA, 17 nt, Human
agaauaagaauuugcau

SEQ ID NO: 2679918 - RNA, 18 nt, Human
agaauaagaauuugcaua

SEQ ID NO: 2679919 - RNA, 15 nt, Human
agaaguuaguuugua

SEQ ID NO: 2679920 - RNA, 16 nt, Human
agaaguuaguuuguau

SEQ ID NO: 2679921 - RNA, 18 nt, Human
agaaguuaguuuguauau

SEQ ID NO: 2679922 - RNA, 19 nt, Human
agaaguuaguuuguauaua

SEQ ID NO: 2679923 - RNA, 23 nt, Human
agaaguuauuuucuacagugguu

SEQ ID NO: 2679924 - RNA, 13 nt, Human
agaaggcaauauu

SEQ ID NO: 2679925 - RNA, 14 nt, Human
agaaggcaauauua

SEQ ID NO: 2679926 - RNA, 17 nt, Human
ucugcuuucuccuuuaa

SEQ ID NO: 2679927 - RNA, 19 nt, Human
ucugcuuuagacuugaaaa

SEQ ID NO: 2679928 - RNA, 18 nt, Human
ucugcuuuagacuugaaa

SEQ ID NO: 2679929 - RNA, 16 nt, Human
ucugcuugcuuggccc

SEQ ID NO: 2679930 - RNA, 12 nt, Human
ucugcuuuagac

SEQ ID NO: 2679931 - RNA, 17 nt, Human
ucugcuuuagacuugaa

SEQ ID NO: 2679932 - RNA, 16 nt, Human
ucugcuuuagacuuga

SEQ ID NO: 2679933 - RNA, 20 nt, Human
agaauucaaacuggggccuc

SEQ ID NO: 2679934 - RNA, 21 nt, Human
agaauguacguccagccugcc

SEQ ID NO: 2679935 - RNA, 14 nt, Human
agaauuauuuuuca

SEQ ID NO: 2679936 - RNA, 13 nt, Human
agaauucagacau

SEQ ID NO: 2679937 - RNA, 13 nt, Human
agaauauugcaaa

SEQ ID NO: 2679938 - RNA, 15 nt, Human
agaauauugcaaaau

SEQ ID NO: 2679939 - RNA, 16 nt, Human
agaauauugcaaaaua

SEQ ID NO: 2679940 - RNA, 18 nt, Human
agaauauugcaaaauaca

SEQ ID NO: 2679941 - RNA, 19 nt, Human
agaauauugcaaaauacau

SEQ ID NO: 2679942 - RNA, 21 nt, Human
agaauauugcaaaauacauga

SEQ ID NO: 2679943 - RNA, 22 nt, Human
agaauauugcaaaauacaugaa

SEQ ID NO: 2679944 - RNA, 15 nt, Human
agaaucccuguguua

SEQ ID NO: 2679945 - RNA, 21 nt, Human
agaaucccuguguuaauuuaa

SEQ ID NO: 2679946 - RNA, 19 nt, Human
agaaucccuguguuaauuu

SEQ ID NO: 2679947 - RNA, 18 nt, Human
agaaucccuguguuaauu

SEQ ID NO: 2679948 - RNA, 17 nt, Human
agaaucccuguguuaau

SEQ ID NO: 2679949 - RNA, 19 nt, Human
agaauggugugaacccggg

SEQ ID NO: 2679950 - RNA, 20 nt, Human
agaauggugugaacccggga

SEQ ID NO: 2679951 - RNA, 19 nt, Human
ucugugaacaagcuucagu

SEQ ID NO: 2679952 - RNA, 17 nt, Human
ucugugaacagagagac

SEQ ID NO: 2679953 - RNA, 19 nt, Human
ucugugagaagguuuauug

SEQ ID NO: 2679954 - RNA, 20 nt, Human
ucugugagaagguuuauugu

SEQ ID NO: 2679955 - RNA, 23 nt, Human
ucugugagaagguuuauuguuaa

SEQ ID NO: 2679956 - RNA, 23 nt, Human
ucuguauuuuauuuagacaagag

SEQ ID NO: 2679957 - RNA, 22 nt, Human
ucuguauuugaaagugccuuug

SEQ ID NO: 2679958 - RNA, 18 nt, Human
ucuguauuugaaagugcc

SEQ ID NO: 2679959 - RNA, 15 nt, Human
ucuguauuugaaagu

SEQ ID NO: 2679960 - RNA, 14 nt, Human
ucuguauuugaaag

SEQ ID NO: 2679961 - RNA, 13 nt, Human
ucuguauuugaaa

SEQ ID NO: 2679962 - RNA, 18 nt, Human
ucuguuggcaggcuggcc

SEQ ID NO: 2679963 - RNA, 20 nt, Human
ucuguuggcaggcuggccag

SEQ ID NO: 2679964 - RNA, 18 nt, Human
ucuguugugugucaugcc

SEQ ID NO: 2679965 - RNA, 14 nt, Human
ucuguuguguguca

SEQ ID NO: 2679966 - RNA, 16 nt, Human
agaauugaaaaguuuu

SEQ ID NO: 2679967 - RNA, 17 nt, Human
agaauugaaaaguuuuu

SEQ ID NO: 2679968 - RNA, 19 nt, Human
agaauugaaaaguuuuugu

SEQ ID NO: 2679969 - RNA, 18 nt, Human
ucuguuuaauuuucacuu

SEQ ID NO: 2679970 - RNA, 15 nt, Human
ucuguuggcaggcug

SEQ ID NO: 2679971 - RNA, 12 nt, Human
ucuguugaaguu

SEQ ID NO: 2679972 - RNA, 17 nt, Human
ucuguugauaaauccau

SEQ ID NO: 2679973 - RNA, 15 nt, Human
agacagagaggacug

SEQ ID NO: 2679974 - RNA, 20 nt, Human
agacagagaggacuguaggg

SEQ ID NO: 2679975 - RNA, 14 nt, Human
agacacuguugaua

SEQ ID NO: 2679976 - RNA, 17 nt, Human
agacacuguugauaaaa

SEQ ID NO: 2679977 - RNA, 18 nt, Human
agacacuguugauaaaaa

SEQ ID NO: 2679978 - RNA, 19 nt, Human
agacacuguugauaaaaac

SEQ ID NO: 2679979 - RNA, 11 nt, Human
agacacugccu

SEQ ID NO: 2679980 - RNA, 12 nt, Human
agacacugccug

SEQ ID NO: 2679981 - RNA, 13 nt, Human
agacacugccugg

SEQ ID NO: 2679982 - RNA, 14 nt, Human
agacacugccuggg

SEQ ID NO: 2679983 - RNA, 15 nt, Human
agacacugccugggc

SEQ ID NO: 2679984 - RNA, 16 nt, Human
agacacugccugggcu

SEQ ID NO: 2679985 - RNA, 21 nt, Human
agacacauacaugucacauuu

SEQ ID NO: 2679986 - RNA, 14 nt, Human
agacaccugguugc

SEQ ID NO: 2679987 - RNA, 12 nt, Human
agaauuugcaua

SEQ ID NO: 2679988 - RNA, 13 nt, Human
agaauuugcauac

SEQ ID NO: 2679989 - RNA, 17 nt, Human
agaauuugcauacuuac

SEQ ID NO: 2679990 - RNA, 20 nt, Human
agaauugauauacacggaug

SEQ ID NO: 2679991 - RNA, 12 nt, Human
agaauugaaggu

SEQ ID NO: 2679992 - RNA, 16 nt, Human
agaauugaagguuuuu

SEQ ID NO: 2679993 - RNA, 15 nt, Human
agaauugaagguuuu

SEQ ID NO: 2679994 - RNA, 14 nt, Human
agaauugaagguuu

SEQ ID NO: 2679995 - RNA, 13 nt, Human
agaauugaagguu

SEQ ID NO: 2679996 - RNA, 21 nt, Human
agaauugaagguuuuugauag

SEQ ID NO: 2679997 - RNA, 20 nt, Human
agaauugaagguuuuugaua

SEQ ID NO: 2679998 - RNA, 18 nt, Human
agaauugaagguuuuuga

SEQ ID NO: 2679999 - RNA, 15 nt, Human
ucugagguuuuauuu

SEQ ID NO: 2680000 - RNA, 16 nt, Human
ucugacucgguuucuc

SEQ ID NO: 2680001 - RNA, 18 nt, Human
ucugacucgguuucucca

SEQ ID NO: 2680002 - RNA, 19 nt, Human
ucugacucgguuucuccaa

SEQ ID NO: 2680003 - RNA, 20 nt, Human
ucugacucgguuucuccaaa

SEQ ID NO: 2680004 - RNA, 15 nt, Human
ucuccuuuaauugua

SEQ ID NO: 2680005 - RNA, 17 nt, Human
ucuccuuuaauuguaaa

SEQ ID NO: 2680006 - RNA, 22 nt, Human
ucuccuuuaauuguaaaguaaa

SEQ ID NO: 2680007 - RNA, 22 nt, Human
agaaaugaggaggaugcuaaaa

SEQ ID NO: 2680008 - RNA, 18 nt, Human
agaaaugauguuggagaa

SEQ ID NO: 2680009 - RNA, 17 nt, Human
agaaauauuaagcaugu

SEQ ID NO: 2680010 - RNA, 15 nt, Human
agaagacaaacugcu

SEQ ID NO: 2680011 - RNA, 12 nt, Human
agaagacaaaau

SEQ ID NO: 2680012 - RNA, 14 nt, Human
agaacugucuguga

SEQ ID NO: 2680013 - RNA, 16 nt, Human
agaagaaguucauguc

SEQ ID NO: 2680014 - RNA, 22 nt, Human
agaagccaagggaaaggggugc

SEQ ID NO: 2680015 - RNA, 22 nt, Human
agaagccaaucuacaaucucuu

SEQ ID NO: 2680016 - RNA, 15 nt, Human
agaagccaagggaaa

SEQ ID NO: 2680017 - RNA, 16 nt, Human
agaagccaagggaaag

SEQ ID NO: 2680018 - RNA, 18 nt, Human
agaagccaagggaaaggg

SEQ ID NO: 2680019 - RNA, 19 nt, Human
agaagccaagggaaagggg

SEQ ID NO: 2680020 - RNA, 18 nt, Human
ucugcuugcucuuguccu

SEQ ID NO: 2680021 - RNA, 15 nt, Human
ucugcucaccgccca

SEQ ID NO: 2680022 - RNA, 20 nt, Human
ucugcucaccgcccaucagg

SEQ ID NO: 2680023 - RNA, 21 nt, Human
ucugcucaccgcccaucaggg

SEQ ID NO: 2680024 - RNA, 19 nt, Human
ucugcgucuauccugugua

SEQ ID NO: 2680025 - RNA, 19 nt, Human
ucugcggaucucagcuuug

SEQ ID NO: 2680026 - RNA, 21 nt, Human
ucugccuggaguguaugacug

SEQ ID NO: 2680027 - RNA, 17 nt, Human
ucugcggaucucagcuu

SEQ ID NO: 2680028 - RNA, 23 nt, Human
ucugccuggagacuuagggcacc

SEQ ID NO: 2680029 - RNA, 12 nt, Human
ucugccugcccc

SEQ ID NO: 2680030 - RNA, 14 nt, Human
ucugccugccccgc

SEQ ID NO: 2680031 - RNA, 12 nt, Human
ucugccuggagu

SEQ ID NO: 2680032 - RNA, 13 nt, Human
ucugccuggagug

SEQ ID NO: 2680033 - RNA, 21 nt, Human
agaagccaagggaaaggggug

SEQ ID NO: 2680034 - RNA, 23 nt, Human
agaucccauggguuguguguuua

SEQ ID NO: 2680035 - RNA, 17 nt, Human
agauccugcgggugggg

SEQ ID NO: 2680036 - RNA, 12 nt, Human
agauccuccugc

SEQ ID NO: 2680037 - RNA, 18 nt, Human
agauccugcggguggggc

SEQ ID NO: 2680038 - RNA, 19 nt, Human
agaucgugcuacugcacuc

SEQ ID NO: 2680039 - RNA, 16 nt, Human
agaucucgguuugcca

SEQ ID NO: 2680040 - RNA, 22 nt, Human
agaucucgguuugccaaaauuc

SEQ ID NO: 2680041 - RNA, 12 nt, Human
agaucuccagcg

SEQ ID NO: 2680042 - RNA, 17 nt, Human
agaugccacuucuaaga

SEQ ID NO: 2680043 - RNA, 20 nt, Human
agaugccacuucuaagaaaa

SEQ ID NO: 2680044 - RNA, 20 nt, Human
agaugcaccaccaagccaag

SEQ ID NO: 2680045 - RNA, 17 nt, Human
agaugccacccuagcca

SEQ ID NO: 2680046 - RNA, 15 nt, Human
agaugccacccuagc

SEQ ID NO: 2680047 - RNA, 18 nt, Human
agaugcaccaccaagcca

SEQ ID NO: 2680048 - RNA, 19 nt, Human
ugaaugcugggacucagcc

SEQ ID NO: 2680049 - RNA, 14 nt, Human
ugaaugcugggacu

SEQ ID NO: 2680050 - RNA, 15 nt, Human
ugaaugcugggacuc

SEQ ID NO: 2680051 - RNA, 11 nt, Human
ugaaugcuggg

SEQ ID NO: 2680052 - RNA, 12 nt, Human
ugaaugcuggga

SEQ ID NO: 2680053 - RNA, 13 nt, Human
ugaaugcugggac

SEQ ID NO: 2680054 - RNA, 13 nt, Human
ugaaucaauaaua

SEQ ID NO: 2680055 - RNA, 15 nt, Human
ugaaucaauaauaua

SEQ ID NO: 2680056 - RNA, 16 nt, Human
ugaaucaauaauauau

SEQ ID NO: 2680057 - RNA, 17 nt, Human
ugaaucaauaauauauu

SEQ ID NO: 2680058 - RNA, 19 nt, Human
ugaaucaauaauauauuuu

SEQ ID NO: 2680059 - RNA, 20 nt, Human
ugaaucaauaauauauuuuc

SEQ ID NO: 2680060 - RNA, 22 nt, Human
ugacacugaacuuaauaacugu

SEQ ID NO: 2680061 - RNA, 14 nt, Human
ugacauuaacaaau

SEQ ID NO: 2680062 - RNA, 19 nt, Human
ugacauuaacaaauaaaaa

SEQ ID NO: 2680063 - RNA, 13 nt, Human
ugacauuucuucu

SEQ ID NO: 2680064 - RNA, 22 nt, Human
ugacauuucuucuagugaugau

SEQ ID NO: 2680065 - RNA, 13 nt, Human
ugacaggaaccuu

SEQ ID NO: 2680066 - RNA, 13 nt, Human
agaugugaaaauu

SEQ ID NO: 2680067 - RNA, 15 nt, Human
agaugugaaaauuac

SEQ ID NO: 2680068 - RNA, 11 nt, Human
agaugugaauu

SEQ ID NO: 2680069 - RNA, 14 nt, Human
agaugugaauuauu

SEQ ID NO: 2680070 - RNA, 16 nt, Human
agaugugaauuauuga

SEQ ID NO: 2680071 - RNA, 18 nt, Human
agaugugaauuauugaca

SEQ ID NO: 2680072 - RNA, 20 nt, Human
agaugugaauuauugacacu

SEQ ID NO: 2680073 - RNA, 21 nt, Human
agaugugaauuauugacacug

SEQ ID NO: 2680074 - RNA, 22 nt, Human
agaugugaauuauugacacuga

SEQ ID NO: 2680075 - RNA, 23 nt, Human
agaugugaauuauugacacugaa

SEQ ID NO: 2680076 - RNA, 22 nt, Human
ugaccuggcaucuaauucugau

SEQ ID NO: 2680077 - RNA, 20 nt, Human
ugacuaugcguggcuggaac

SEQ ID NO: 2680078 - RNA, 18 nt, Human
ugacuauauaauuuauuu

SEQ ID NO: 2680079 - RNA, 23 nt, Human
ugacuauauaauuuauuuccacu

SEQ ID NO: 2680080 - RNA, 14 nt, Human
ugacucgguuucuc

SEQ ID NO: 2680081 - RNA, 15 nt, Human
ugacucgguuucucc

SEQ ID NO: 2680082 - RNA, 16 nt, Human
ugacucgguuucucca

SEQ ID NO: 2680083 - RNA, 18 nt, Human
ugacucgguuucuccaaa

SEQ ID NO: 2680084 - RNA, 18 nt, Human
ugacucggggguggggaa

SEQ ID NO: 2680085 - RNA, 21 nt, Human
ugacuguuuucucuugagagg

SEQ ID NO: 2680086 - RNA, 19 nt, Human
ugacuuaacauagccaaaa

SEQ ID NO: 2680087 - RNA, 16 nt, Human
ugacuuaacugcauuu

SEQ ID NO: 2680088 - RNA, 22 nt, Human
ugacuuaacauagccaaaaugu

SEQ ID NO: 2680089 - RNA, 20 nt, Human
ugacuuaacauagccaaaau

SEQ ID NO: 2680090 - RNA, 15 nt, Human
agauuaagagcaaau

SEQ ID NO: 2680091 - RNA, 23 nt, Human
ugacuuagaaucccuguguuaau

SEQ ID NO: 2680092 - RNA, 22 nt, Human
ugacuuagaaucccuguguuaa

SEQ ID NO: 2680093 - RNA, 21 nt, Human
ugacuuagaaucccuguguua

SEQ ID NO: 2680094 - RNA, 20 nt, Human
ugacuuagaaucccuguguu

SEQ ID NO: 2680095 - RNA, 19 nt, Human
ugacuuagaaucccugugu

SEQ ID NO: 2680096 - RNA, 13 nt, Human
ugacuuagaaucc

SEQ ID NO: 2680097 - RNA, 13 nt, Human
agauuauaauaaa

SEQ ID NO: 2680098 - RNA, 18 nt, Human
agauuauaauaaauauau

SEQ ID NO: 2680099 - RNA, 14 nt, Human
agcaccucagccug

SEQ ID NO: 2680100 - RNA, 16 nt, Human
agcaccucagccugca

SEQ ID NO: 2680101 - RNA, 14 nt, Human
agcaccgaggggcc

SEQ ID NO: 2680102 - RNA, 17 nt, Human
agcaccgaggggccuuu

SEQ ID NO: 2680103 - RNA, 18 nt, Human
agcaccgaggggccuuug

SEQ ID NO: 2680104 - RNA, 14 nt, Human
agcacagcuugacc

SEQ ID NO: 2680105 - RNA, 22 nt, Human
agcaaucaagguuauaauuuuu

SEQ ID NO: 2680106 - RNA, 15 nt, Human
agcaauaaaugaaug

SEQ ID NO: 2680107 - RNA, 14 nt, Human
agcaauaaaugaau

SEQ ID NO: 2680108 - RNA, 13 nt, Human
agcaauaaaugaa

SEQ ID NO: 2680109 - RNA, 12 nt, Human
agcaauagaaac

SEQ ID NO: 2680110 - RNA, 14 nt, Human
agcaauagaaacaa

SEQ ID NO: 2680111 - RNA, 18 nt, Human
agcacagcuugaccugag

SEQ ID NO: 2680112 - RNA, 20 nt, Human
agcacagcuugaccugaggc

SEQ ID NO: 2680113 - RNA, 13 nt, Human
agcaaguaaaaag

SEQ ID NO: 2680114 - RNA, 18 nt, Human
agcaaguaaaaaggcuaa

SEQ ID NO: 2680115 - RNA, 16 nt, Human
agcaagugagacccug

SEQ ID NO: 2680116 - RNA, 18 nt, Human
agcaagcaguagcauuug

SEQ ID NO: 2680117 - RNA, 21 nt, Human
ugagauggaaaaguguccuuc

SEQ ID NO: 2680118 - RNA, 22 nt, Human
ugagauuuuuaaaaaauauuuu

SEQ ID NO: 2680119 - RNA, 18 nt, Human
ugagcaaacuaacuugac

SEQ ID NO: 2680120 - RNA, 18 nt, Human
ugagcauguuugccuaga

SEQ ID NO: 2680121 - RNA, 13 nt, Human
ugagaagccuuca

SEQ ID NO: 2680122 - RNA, 14 nt, Human
ugagaagccuucag

SEQ ID NO: 2680123 - RNA, 15 nt, Human
ugagaagccuucagc

SEQ ID NO: 2680124 - RNA, 19 nt, Human
ugagaagccuucagcucca

SEQ ID NO: 2680125 - RNA, 20 nt, Human
ugagaagccuucagcuccag

SEQ ID NO: 2680126 - RNA, 22 nt, Human
ugagacacggagcccagcccuc

SEQ ID NO: 2680127 - RNA, 17 nt, Human
ugagacacggagcccag

SEQ ID NO: 2680128 - RNA, 21 nt, Human
ugagacacggagcccagcccu

SEQ ID NO: 2680129 - RNA, 13 nt, Human
ugagacugugcug

SEQ ID NO: 2680130 - RNA, 21 nt, Human
ugagacugugcuguuguucuc

SEQ ID NO: 2680131 - RNA, 13 nt, Human
ugagagcauaauu

SEQ ID NO: 2680132 - RNA, 15 nt, Human
ugagagcauaauuua

SEQ ID NO: 2680133 - RNA, 13 nt, Human
ugagauguaaaaa

SEQ ID NO: 2680134 - RNA, 20 nt, Human
ugagauguguggacuguggc

SEQ ID NO: 2680135 - RNA, 13 nt, Human
ugagauugguuuu

SEQ ID NO: 2680136 - RNA, 15 nt, Human
ugagauugguuuucc

SEQ ID NO: 2680137 - RNA, 19 nt, Human
ugagauugguuuuccugug

SEQ ID NO: 2680138 - RNA, 22 nt, Human
ugagauugguuuuccuguggca

SEQ ID NO: 2680139 - RNA, 15 nt, Human
ugagauucucaaagg

SEQ ID NO: 2680140 - RNA, 22 nt, Human
ugagauucucaaaggagcgagc

SEQ ID NO: 2680141 - RNA, 19 nt, Human
ugaaaaugaauaucuauua

SEQ ID NO: 2680142 - RNA, 13 nt, Human
ugaaaauaccauu

SEQ ID NO: 2680143 - RNA, 23 nt, Human
ugaaaaugaauaucuauuaauau

SEQ ID NO: 2680144 - RNA, 21 nt, Human
ugaaaaugaauaucuauuaau

SEQ ID NO: 2680145 - RNA, 11 nt, Human
ugaaaauggaa

SEQ ID NO: 2680146 - RNA, 23 nt, Human
ugaaaauacaacuuaaauaauaa

SEQ ID NO: 2680147 - RNA, 18 nt, Human
ugaaaauaguuuauuuua

SEQ ID NO: 2680148 - RNA, 19 nt, Human
ugaaaauacaacuuaaaua

SEQ ID NO: 2680149 - RNA, 12 nt, Human
ugaaaauacaac

SEQ ID NO: 2680150 - RNA, 15 nt, Human
ugaaaaguuuuuguu

SEQ ID NO: 2680151 - RNA, 15 nt, Human
ucuuuuuuuuuaagu

SEQ ID NO: 2680152 - RNA, 16 nt, Human
ucuuuuuuuuuaaguu

SEQ ID NO: 2680153 - RNA, 18 nt, Human
ucuuuuuuuuuaaguucu

SEQ ID NO: 2680154 - RNA, 20 nt, Human
ucuuuuuuuuuaaguucuua

SEQ ID NO: 2680155 - RNA, 14 nt, Human
agagacugaaauua

SEQ ID NO: 2680156 - RNA, 13 nt, Human
agagauccaaaga

SEQ ID NO: 2680157 - RNA, 14 nt, Human
agagauccaaagac

SEQ ID NO: 2680158 - RNA, 15 nt, Human
agagauccaaagacu

SEQ ID NO: 2680159 - RNA, 16 nt, Human
agagauccaaagacuc

SEQ ID NO: 2680160 - RNA, 13 nt, Human
ugaaagaaaauug

SEQ ID NO: 2680161 - RNA, 14 nt, Human
ugaaagaaaauuga

SEQ ID NO: 2680162 - RNA, 15 nt, Human
ugaaagaaaauugag

SEQ ID NO: 2680163 - RNA, 17 nt, Human
ugaaagaaaauugaguu

SEQ ID NO: 2680164 - RNA, 22 nt, Human
ugaaagaaaauugaguugcacu

SEQ ID NO: 2680165 - RNA, 20 nt, Human
agagacacuguugauaaaaa

SEQ ID NO: 2680166 - RNA, 22 nt, Human
agagacacuguugauaaaaacu

SEQ ID NO: 2680167 - RNA, 16 nt, Human
ucuuuuuucaaaagaa

SEQ ID NO: 2680168 - RNA, 17 nt, Human
ucuuuuuucaaaagaaa

SEQ ID NO: 2680169 - RNA, 22 nt, Human
agacugguuuauccacccacaa

SEQ ID NO: 2680170 - RNA, 14 nt, Human
agacugguuuucug

SEQ ID NO: 2680171 - RNA, 15 nt, Human
agacugguuuucugc

SEQ ID NO: 2680172 - RNA, 16 nt, Human
agacugguuuucugcc

SEQ ID NO: 2680173 - RNA, 18 nt, Human
agacugguuuucugccaa

SEQ ID NO: 2680174 - RNA, 21 nt, Human
agacuguaacuuccaaauaaa

SEQ ID NO: 2680175 - RNA, 22 nt, Human
agacuguaacuuccaaauaaau

SEQ ID NO: 2680176 - RNA, 15 nt, Human
ucuuucucaaagaaa

SEQ ID NO: 2680177 - RNA, 16 nt, Human
ucuuuccugaaccaug

SEQ ID NO: 2680178 - RNA, 15 nt, Human
agacaggagacaaaa

SEQ ID NO: 2680179 - RNA, 22 nt, Human
agacuggcuuuuauuaaugcac

SEQ ID NO: 2680180 - RNA, 23 nt, Human
agacuggcuuuuauuaaugcacu

SEQ ID NO: 2680181 - RNA, 11 nt, Human
agacuggcuuu

SEQ ID NO: 2680182 - RNA, 18 nt, Human
agacuggcuuuuauuaau

SEQ ID NO: 2680183 - RNA, 13 nt, Human
agaggccagaggc

SEQ ID NO: 2680184 - RNA, 17 nt, Human
agaggcccuuugcuguc

SEQ ID NO: 2680185 - RNA, 14 nt, Human
agaggcugccccuc

SEQ ID NO: 2680186 - RNA, 16 nt, Human
agaggcugccccucuc

SEQ ID NO: 2680187 - RNA, 18 nt, Human
agaggcugccccucucac

SEQ ID NO: 2680188 - RNA, 19 nt, Human
agaggcugccccucucacc

SEQ ID NO: 2680189 - RNA, 12 nt, Human
agaggcugcccc

SEQ ID NO: 2680190 - RNA, 20 nt, Human
agaggcugccccucucacca

SEQ ID NO: 2680191 - RNA, 20 nt, Human
agagggaggucacuggaaag

SEQ ID NO: 2680192 - RNA, 22 nt, Human
agagggaggucacuggaaaggg

SEQ ID NO: 2680193 - RNA, 17 nt, Human
ugaagggacccuuuggg

SEQ ID NO: 2680194 - RNA, 13 nt, Human
ugaagguuuuuga

SEQ ID NO: 2680195 - RNA, 18 nt, Human
ugaagguuuuugauagca

SEQ ID NO: 2680196 - RNA, 14 nt, Human
ugaagguuuuugau

SEQ ID NO: 2680197 - RNA, 19 nt, Human
ugaagguuuuugauagcau

SEQ ID NO: 2680198 - RNA, 15 nt, Human
ugaaguaaaagcaag

SEQ ID NO: 2680199 - RNA, 20 nt, Human
ugaaguaaugaauuuuuaug

SEQ ID NO: 2680200 - RNA, 14 nt, Human
ugaaguaaugaauu

SEQ ID NO: 2680201 - RNA, 12 nt, Human
ugaauaauacag

SEQ ID NO: 2680202 - RNA, 21 nt, Human
ugaauaaauucuauaggaaca

SEQ ID NO: 2680203 - RNA, 19 nt, Human
ugaauaaauucuauaggaa

SEQ ID NO: 2680204 - RNA, 12 nt, Human
ugaauaaaugug

SEQ ID NO: 2680205 - RNA, 13 nt, Human
ugaauaaaugugu

SEQ ID NO: 2680206 - RNA, 15 nt, Human
ugaaucaaaagugcc

SEQ ID NO: 2680207 - RNA, 16 nt, Human
ugaaucaaaagugccu

SEQ ID NO: 2680208 - RNA, 12 nt, Human
ugaauauuuuca

SEQ ID NO: 2680209 - RNA, 13 nt, Human
ugaauauuuucaa

SEQ ID NO: 2680210 - RNA, 15 nt, Human
ugaauacauuuccaa

SEQ ID NO: 2680211 - RNA, 13 nt, Human
ugaauaauacagu

SEQ ID NO: 2680212 - RNA, 14 nt, Human
ugaagaacugcagg

SEQ ID NO: 2680213 - RNA, 15 nt, Human
ugaagaacugcaggc

SEQ ID NO: 2680214 - RNA, 16 nt, Human
ugaagaacugcaggcc

SEQ ID NO: 2680215 - RNA, 17 nt, Human
ugaagaacugcaggccc

SEQ ID NO: 2680216 - RNA, 11 nt, Human
ugaagaauuua

SEQ ID NO: 2680217 - RNA, 15 nt, Human
ugaagaauuuaaaga

SEQ ID NO: 2680218 - RNA, 13 nt, Human
ugaagaauuuaaa

SEQ ID NO: 2680219 - RNA, 15 nt, Human
ugaagaauggcgcca

SEQ ID NO: 2680220 - RNA, 13 nt, Human
ugaagaauugaaa

SEQ ID NO: 2680221 - RNA, 23 nt, Human
ugaagaauguuagaguaaugaaa

SEQ ID NO: 2680222 - RNA, 16 nt, Human
ugaagaauagaaacaa

SEQ ID NO: 2680223 - RNA, 18 nt, Human
ugaagaauagaaacaagc

SEQ ID NO: 2680224 - RNA, 18 nt, Human
ugaagaacugcaggcccu

SEQ ID NO: 2680225 - RNA, 12 nt, Human
ugaagaagccug

SEQ ID NO: 2680226 - RNA, 14 nt, Human
ugaagaagccugua

SEQ ID NO: 2680227 - RNA, 16 nt, Human
ugaagaauuuaaagaa

SEQ ID NO: 2680228 - RNA, 20 nt, Human
ugaaccauggugaagugcuu

SEQ ID NO: 2680229 - RNA, 22 nt, Human
ugaaccauggugaagugcuugg

SEQ ID NO: 2680230 - RNA, 23 nt, Human
ugaaccauggugaagugcuugga

SEQ ID NO: 2680231 - RNA, 18 nt, Human
ugaaccauaaaaugucca

SEQ ID NO: 2680232 - RNA, 16 nt, Human
ugaaccauaaauucaa

SEQ ID NO: 2680233 - RNA, 21 nt, Human
ugaaccauaaauucaacuuug

SEQ ID NO: 2680234 - RNA, 22 nt, Human
ugaaccauaaauucaacuuugu

SEQ ID NO: 2680235 - RNA, 13 nt, Human
ugaaccacuugua

SEQ ID NO: 2680236 - RNA, 15 nt, Human
ugaaccacuuguaga

SEQ ID NO: 2680237 - RNA, 14 nt, Human
ugaaccacuuguag

SEQ ID NO: 2680238 - RNA, 16 nt, Human
ugaaccauaaaauguc

SEQ ID NO: 2680239 - RNA, 15 nt, Human
ugaaccauaaaaugu

SEQ ID NO: 2680240 - RNA, 13 nt, Human
ugaaccauaaaau

SEQ ID NO: 2680241 - RNA, 23 nt, Human
ugaaccacuuguagauuugauuu

SEQ ID NO: 2680242 - RNA, 21 nt, Human
ugaaccacuuguagauuugau

SEQ ID NO: 2680243 - RNA, 20 nt, Human
ugaaccacuuguagauuuga

SEQ ID NO: 2680244 - RNA, 16 nt, Human
ugaaccacuuguagau

SEQ ID NO: 2680245 - RNA, 17 nt, Human
ugaaaguuuuguaaaag

SEQ ID NO: 2680246 - RNA, 20 nt, Human
ugaaaguuuuguaaaagaaa

SEQ ID NO: 2680247 - RNA, 22 nt, Human
ugaaaguuuuguaaaagaaauc

SEQ ID NO: 2680248 - RNA, 16 nt, Human
agagauugugguuuca

SEQ ID NO: 2680249 - RNA, 14 nt, Human
ugaaauaacuggaa

SEQ ID NO: 2680250 - RNA, 20 nt, Human
ugaaauaacuggaacaaauu

SEQ ID NO: 2680251 - RNA, 12 nt, Human
ugaaauaaaaua

SEQ ID NO: 2680252 - RNA, 14 nt, Human
ugaaauaaaauaua

SEQ ID NO: 2680253 - RNA, 20 nt, Human
ugaaauaagaauucagacau

SEQ ID NO: 2680254 - RNA, 15 nt, Human
ugaaauaagaauuca

SEQ ID NO: 2680255 - RNA, 15 nt, Human
ugaaauaggaaacaa

SEQ ID NO: 2680256 - RNA, 17 nt, Human
ugaaauaggaaacaagu

SEQ ID NO: 2680257 - RNA, 18 nt, Human
ugaaauaggaaacaagug

SEQ ID NO: 2680258 - RNA, 16 nt, Human
ugaaauugcauacuuu

SEQ ID NO: 2680259 - RNA, 17 nt, Human
ugaaauugcauacuuug

SEQ ID NO: 2680260 - RNA, 23 nt, Human
aggugaucccguuuuccccauga

SEQ ID NO: 2680261 - RNA, 22 nt, Human
aggugaucugcugcagagcagu

SEQ ID NO: 2680262 - RNA, 21 nt, Human
uguaaaucauguugaucaugu

SEQ ID NO: 2680263 - RNA, 17 nt, Human
aggugauuccagugaag

SEQ ID NO: 2680264 - RNA, 15 nt, Human
aggugaucccguuuu

SEQ ID NO: 2680265 - RNA, 17 nt, Human
aggugguagauauugag

SEQ ID NO: 2680266 - RNA, 14 nt, Human
uguaauuuguuuga

SEQ ID NO: 2680267 - RNA, 13 nt, Human
uguacaaaauuaa

SEQ ID NO: 2680268 - RNA, 16 nt, Human
uguacaaaauuaagca

SEQ ID NO: 2680269 - RNA, 19 nt, Human
uguacaaaauuaagcaaau

SEQ ID NO: 2680270 - RNA, 24 nt, Human
uguacaaaauuaagcaaauguuaa

SEQ ID NO: 2680271 - RNA, 16 nt, Human
uguacauuugggaguu

SEQ ID NO: 2680272 - RNA, 16 nt, Human
uguacauuucuauaaa

SEQ ID NO: 2680273 - RNA, 17 nt, Human
uguacauuucuauaaau

SEQ ID NO: 2680274 - RNA, 18 nt, Human
uguacauuucuauaaaua

SEQ ID NO: 2680275 - RNA, 21 nt, Human
uguacauuucuauaaauagau

SEQ ID NO: 2680276 - RNA, 12 nt, Human
uguaaagacugg

SEQ ID NO: 2680277 - RNA, 21 nt, Human
uguaaauacacauagcaugua

SEQ ID NO: 2680278 - RNA, 18 nt, Human
uguaaauauuuauuuaug

SEQ ID NO: 2680279 - RNA, 13 nt, Human
ugguuuuccugug

SEQ ID NO: 2680280 - RNA, 13 nt, Human
ugguuuucugcca

SEQ ID NO: 2680281 - RNA, 18 nt, Human
ugguuuucugccaaugac

SEQ ID NO: 2680282 - RNA, 21 nt, Human
ugguuuucugccaaugaccaa

SEQ ID NO: 2680283 - RNA, 16 nt, Human
ugguuuuauacugaag

SEQ ID NO: 2680284 - RNA, 23 nt, Human
ugguuuuauacugaaggaaaaac

SEQ ID NO: 2680285 - RNA, 15 nt, Human
ugguuuuaugaugac

SEQ ID NO: 2680286 - RNA, 12 nt, Human
ugguuuuaugau

SEQ ID NO: 2680287 - RNA, 12 nt, Human
ugguuuuaagaa

SEQ ID NO: 2680288 - RNA, 13 nt, Human
ugguuauguuuuu

SEQ ID NO: 2680289 - RNA, 19 nt, Human
ugguuauguuuuucugugu

SEQ ID NO: 2680290 - RNA, 14 nt, Human
ugguguggccugug

SEQ ID NO: 2680291 - RNA, 15 nt, Human
ugguguggccugugg

SEQ ID NO: 2680292 - RNA, 14 nt, Human
agggugcagcccaa

SEQ ID NO: 2680293 - RNA, 21 nt, Human
agggucuuucucaaagaaaua

SEQ ID NO: 2680294 - RNA, 15 nt, Human
ugguaaaacucacug

SEQ ID NO: 2680295 - RNA, 20 nt, Human
ugguaaaacucacugugauc

SEQ ID NO: 2680296 - RNA, 18 nt, Human
ugguaaaaugaagaauuu

SEQ ID NO: 2680297 - RNA, 15 nt, Human
ugguaaaaugaagaa

SEQ ID NO: 2680298 - RNA, 14 nt, Human
uggguuuuucccug

SEQ ID NO: 2680299 - RNA, 19 nt, Human
uggucacguuuggugcuuc

SEQ ID NO: 2680300 - RNA, 19 nt, Human
ugguaaaaugaagaauuua

SEQ ID NO: 2680301 - RNA, 16 nt, Human
ugguaaagacuggcuu

SEQ ID NO: 2680302 - RNA, 15 nt, Human
ugguacaacggaggc

SEQ ID NO: 2680303 - RNA, 16 nt, Human
ugguacaacggaggcc

SEQ ID NO: 2680304 - RNA, 20 nt, Human
ugguacaacggaggccugcg

SEQ ID NO: 2680305 - RNA, 14 nt, Human
uggucaccaugaaa

SEQ ID NO: 2680306 - RNA, 16 nt, Human
uggucaccaugaaacu

SEQ ID NO: 2680307 - RNA, 18 nt, Human
aggggagggggauccgac

SEQ ID NO: 2680308 - RNA, 16 nt, Human
aggggaguugugucug

SEQ ID NO: 2680309 - RNA, 15 nt, Human
aggggucggcugacc

SEQ ID NO: 2680310 - RNA, 21 nt, Human
aggggucggcugaccaugcuc

SEQ ID NO: 2680311 - RNA, 14 nt, Human
aggggucccuagca

SEQ ID NO: 2680312 - RNA, 23 nt, Human
aggggucccuagcagcccacccu

SEQ ID NO: 2680313 - RNA, 14 nt, Human
aggggucucccugg

SEQ ID NO: 2680314 - RNA, 15 nt, Human
aggggucucccuggc

SEQ ID NO: 2680315 - RNA, 16 nt, Human
aggggucucccuggcu

SEQ ID NO: 2680316 - RNA, 17 nt, Human
aggggucucccuggcuc

SEQ ID NO: 2680317 - RNA, 18 nt, Human
aggggucucccuggcucc

SEQ ID NO: 2680318 - RNA, 19 nt, Human
aggggucucccuggcuccc

SEQ ID NO: 2680319 - RNA, 22 nt, Human
aggggacaagggauuugaggug

SEQ ID NO: 2680320 - RNA, 16 nt, Human
agggggcuugaagcca

SEQ ID NO: 2680321 - RNA, 18 nt, Human
agggggcuugaagccaaa

SEQ ID NO: 2680322 - RNA, 19 nt, Human
agggggcuugaagccaaag

SEQ ID NO: 2680323 - RNA, 18 nt, Human
agggggcuuucuggggcc

SEQ ID NO: 2680324 - RNA, 20 nt, Human
aggguaggagggugggaagg

SEQ ID NO: 2680325 - RNA, 14 nt, Human
uggucuguuggcag

SEQ ID NO: 2680326 - RNA, 18 nt, Human
uggucuguuggcaggcug

SEQ ID NO: 2680327 - RNA, 16 nt, Human
uggucuuaagaaaugu

SEQ ID NO: 2680328 - RNA, 19 nt, Human
uggucucuucuuggggccc

SEQ ID NO: 2680329 - RNA, 17 nt, Human
aggguucccgcggggcu

SEQ ID NO: 2680330 - RNA, 19 nt, Human
aggguucccgcggggcugu

SEQ ID NO: 2680331 - RNA, 14 nt, Human
uggugaacuauauu

SEQ ID NO: 2680332 - RNA, 23 nt, Human
uggucugugugugugugugugcg

SEQ ID NO: 2680333 - RNA, 15 nt, Human
agguagagucugagg

SEQ ID NO: 2680334 - RNA, 15 nt, Human
uggugaagugcuugg

SEQ ID NO: 2680335 - RNA, 14 nt, Human
aggguuucucuauu

SEQ ID NO: 2680336 - RNA, 15 nt, Human
agguaucuagagcuu

SEQ ID NO: 2680337 - RNA, 21 nt, Human
aggucaaggcugcagugagcc

SEQ ID NO: 2680338 - RNA, 14 nt, Human
ugugaagagaacca

SEQ ID NO: 2680339 - RNA, 16 nt, Human
agucuuacuacagaaa

SEQ ID NO: 2680340 - RNA, 18 nt, Human
agucuuacuacagaaaug

SEQ ID NO: 2680341 - RNA, 19 nt, Human
agucuuacuacagaaauga

SEQ ID NO: 2680342 - RNA, 18 nt, Human
agucuuagaucauaguuu

SEQ ID NO: 2680343 - RNA, 13 nt, Human
agucuuagaucau

SEQ ID NO: 2680344 - RNA, 20 nt, Human
agucuuagaucauaguuuua

SEQ ID NO: 2680345 - RNA, 19 nt, Human
agucuuagaucauaguuuu

SEQ ID NO: 2680346 - RNA, 21 nt, Human
agucuuaaggacaaagugcca

SEQ ID NO: 2680347 - RNA, 14 nt, Human
agucuuuugcuuuu

SEQ ID NO: 2680348 - RNA, 18 nt, Human
agucuuuugcuuuuggca

SEQ ID NO: 2680349 - RNA, 19 nt, Human
agucuuuugcuuuuggcaa

SEQ ID NO: 2680350 - RNA, 20 nt, Human
agucuuuugcuuuuggcaaa

SEQ ID NO: 2680351 - RNA, 23 nt, Human
agugaaaaaggaggaagagaaaa

SEQ ID NO: 2680352 - RNA, 20 nt, Human
agugaaaaaggaggaagaga

SEQ ID NO: 2680353 - RNA, 17 nt, Human
agugaaaaaggaggaag

SEQ ID NO: 2680354 - RNA, 11 nt, Human
agugaaaaagg

SEQ ID NO: 2680355 - RNA, 16 nt, Human
agucuuuuuuuuccug

SEQ ID NO: 2680356 - RNA, 14 nt, Human
agugaaaaagaugu

SEQ ID NO: 2680357 - RNA, 17 nt, Human
agugagacccugucuca

SEQ ID NO: 2680358 - RNA, 21 nt, Human
agugagacccugucucaaaaa

SEQ ID NO: 2680359 - RNA, 18 nt, Human
ugugauggacacuccagg

SEQ ID NO: 2680360 - RNA, 11 nt, Human
ugucuuccuca

SEQ ID NO: 2680361 - RNA, 16 nt, Human
ugucuuccucaaaaua

SEQ ID NO: 2680362 - RNA, 22 nt, Human
ugucuuccucaaaauaaagaag

SEQ ID NO: 2680363 - RNA, 18 nt, Human
ugucucucuucucagagu

SEQ ID NO: 2680364 - RNA, 20 nt, Human
ugucucucuucucagagugg

SEQ ID NO: 2680365 - RNA, 22 nt, Human
agucccugccacgaauuucugu

SEQ ID NO: 2680366 - RNA, 21 nt, Human
agucccugccacgaauuucug

SEQ ID NO: 2680367 - RNA, 18 nt, Human
ugucuccuauauauuucu

SEQ ID NO: 2680368 - RNA, 22 nt, Human
ugucuccuauauauuucuauua

SEQ ID NO: 2680369 - RNA, 17 nt, Human
ugucuccuuaagcugca

SEQ ID NO: 2680370 - RNA, 21 nt, Human
ugucuccuuaagcugcagaga

SEQ ID NO: 2680371 - RNA, 14 nt, Human
ugucucuugaguuu

SEQ ID NO: 2680372 - RNA, 17 nt, Human
ugucucuugaguuuguc

SEQ ID NO: 2680373 - RNA, 21 nt, Human
agucacuaugggaugagaaaa

SEQ ID NO: 2680374 - RNA, 22 nt, Human
agucacuaugggaugagaaaau

SEQ ID NO: 2680375 - RNA, 15 nt, Human
ugucagcauagaagu

SEQ ID NO: 2680376 - RNA, 12 nt, Human
aguauuguuuaa

SEQ ID NO: 2680377 - RNA, 13 nt, Human
aguauuguuuaaa

SEQ ID NO: 2680378 - RNA, 14 nt, Human
aguauuguuuaaaa

SEQ ID NO: 2680379 - RNA, 16 nt, Human
aguauuguuuaaaaug

SEQ ID NO: 2680380 - RNA, 19 nt, Human
aguauuguuuaaaauguaa

SEQ ID NO: 2680381 - RNA, 22 nt, Human
aguauuguuuaaaauguaauuu

SEQ ID NO: 2680382 - RNA, 14 nt, Human
uguagacuguggcu

SEQ ID NO: 2680383 - RNA, 17 nt, Human
ugucaaaugaugugcaa

SEQ ID NO: 2680384 - RNA, 18 nt, Human
ugucaaaugaugugcaaa

SEQ ID NO: 2680385 - RNA, 19 nt, Human
ugucaaaugaugugcaaaa

SEQ ID NO: 2680386 - RNA, 18 nt, Human
ugucaaacuguagaaaug

SEQ ID NO: 2680387 - RNA, 16 nt, Human
ugucaaacuguagaaa

SEQ ID NO: 2680388 - RNA, 23 nt, Human
uguccacgcgugccguggcacca

SEQ ID NO: 2680389 - RNA, 17 nt, Human
ugucccuaugcauauca

SEQ ID NO: 2680390 - RNA, 11 nt, Human
uguccuguccu

SEQ ID NO: 2680391 - RNA, 13 nt, Human
uguccuguccugc

SEQ ID NO: 2680392 - RNA, 14 nt, Human
uguccuguccugcu

SEQ ID NO: 2680393 - RNA, 15 nt, Human
uguccuguccugcuc

SEQ ID NO: 2680394 - RNA, 18 nt, Human
aguccccaccccugcccc

SEQ ID NO: 2680395 - RNA, 20 nt, Human
aguccccaccccugccccca

SEQ ID NO: 2680396 - RNA, 13 nt, Human
aguccccaccccu

SEQ ID NO: 2680397 - RNA, 15 nt, Human
aguccccaccccugc

SEQ ID NO: 2680398 - RNA, 16 nt, Human
aguccccaccccugcc

SEQ ID NO: 2680399 - RNA, 17 nt, Human
aguccccaccccugccc

SEQ ID NO: 2680400 - RNA, 11 nt, Human
aguccccaccc

SEQ ID NO: 2680401 - RNA, 12 nt, Human
aguccccacccc

SEQ ID NO: 2680402 - RNA, 18 nt, Human
agucaguacccaccaccu

SEQ ID NO: 2680403 - RNA, 19 nt, Human
agucaguaggacuccuuau

SEQ ID NO: 2680404 - RNA, 22 nt, Human
ugucuaaacaaugcugauuugg

SEQ ID NO: 2680405 - RNA, 12 nt, Human
ugucuaaagugu

SEQ ID NO: 2680406 - RNA, 19 nt, Human
ugucuaaaguguauuuuca

SEQ ID NO: 2680407 - RNA, 23 nt, Human
ugucuaaaguguauuuucagagc

SEQ ID NO: 2680408 - RNA, 23 nt, Human
ugucccuugcuugccugcagggc

SEQ ID NO: 2680409 - RNA, 22 nt, Human
auaauuccuauauccugugacu

SEQ ID NO: 2680410 - RNA, 13 nt, Human
auaauuguacaaa

SEQ ID NO: 2680411 - RNA, 15 nt, Human
auaauuguacaaaau

SEQ ID NO: 2680412 - RNA, 19 nt, Human
auaauuguacaaaauuaag

SEQ ID NO: 2680413 - RNA, 21 nt, Human
auaauuguacaaaauuaagca

SEQ ID NO: 2680414 - RNA, 24 nt, Human
auaauuguacaaaauuaagcaaau

SEQ ID NO: 2680415 - RNA, 23 nt, Human
uuagauuugccauagaguacacu

SEQ ID NO: 2680416 - RNA, 21 nt, Human
uuagauuugccauagaguaca

SEQ ID NO: 2680417 - RNA, 16 nt, Human
uuagauuugccauaga

SEQ ID NO: 2680418 - RNA, 20 nt, Human
uuagauucuuaauucaugag

SEQ ID NO: 2680419 - RNA, 13 nt, Human
auaaugaauaaau

SEQ ID NO: 2680420 - RNA, 14 nt, Human
auaaugaauaaauc

SEQ ID NO: 2680421 - RNA, 15 nt, Human
auaauuauauaacug

SEQ ID NO: 2680422 - RNA, 17 nt, Human
auaauuauauaacugua

SEQ ID NO: 2680423 - RNA, 19 nt, Human
auaauuauauaacuguauu

SEQ ID NO: 2680424 - RNA, 19 nt, Human
auaauacaguaucucaggg

SEQ ID NO: 2680425 - RNA, 11 nt, Human
auaauaaaaau

SEQ ID NO: 2680426 - RNA, 13 nt, Human
auaagcacuguaa

SEQ ID NO: 2680427 - RNA, 17 nt, Human
auaagcacuguaaacuu

SEQ ID NO: 2680428 - RNA, 17 nt, Human
auaagcaaucaagguua

SEQ ID NO: 2680429 - RNA, 23 nt, Human
auaagaagaaguucauguccaaa

SEQ ID NO: 2680430 - RNA, 21 nt, Human
auaagaaauaaugcuacaauu

SEQ ID NO: 2680431 - RNA, 22 nt, Human
auaagaaauaaugcuacaauuu

SEQ ID NO: 2680432 - RNA, 13 nt, Human
auaaguuauugca

SEQ ID NO: 2680433 - RNA, 14 nt, Human
auaaguuauugcag

SEQ ID NO: 2680434 - RNA, 16 nt, Human
auaaguuauugcaguu

SEQ ID NO: 2680435 - RNA, 20 nt, Human
auaaguuauugcaguuuauc

SEQ ID NO: 2680436 - RNA, 21 nt, Human
auaaguuauugcaguuuauca

SEQ ID NO: 2680437 - RNA, 24 nt, Human
auaaguuauugcaguuuaucauuc

SEQ ID NO: 2680438 - RNA, 17 nt, Human
auaauaaaaaaagaaag

SEQ ID NO: 2680439 - RNA, 14 nt, Human
auaaauguguuggg

SEQ ID NO: 2680440 - RNA, 14 nt, Human
auaaauuaggacca

SEQ ID NO: 2680441 - RNA, 20 nt, Human
auaaauaacccauaauugaa

SEQ ID NO: 2680442 - RNA, 19 nt, Human
auaaauaacucaauggaaa

SEQ ID NO: 2680443 - RNA, 15 nt, Human
uuacccaccuagaac

SEQ ID NO: 2680444 - RNA, 16 nt, Human
uuacccaccuagaaca

SEQ ID NO: 2680445 - RNA, 22 nt, Human
uuacccaccuagaacacuaacu

SEQ ID NO: 2680446 - RNA, 15 nt, Human
auaacuguauuugaa

SEQ ID NO: 2680447 - RNA, 18 nt, Human
auaacuguauuugaaaua

SEQ ID NO: 2680448 - RNA, 10 nt, Human
aguuuuccua

SEQ ID NO: 2680449 - RNA, 15 nt, Human
auaaaccacugugcg

SEQ ID NO: 2680450 - RNA, 12 nt, Human
auaaacaugaaa

SEQ ID NO: 2680451 - RNA, 22 nt, Human
auaaacaguggaauauaaggaa

SEQ ID NO: 2680452 - RNA, 13 nt, Human
auaaacagaaaug

SEQ ID NO: 2680453 - RNA, 16 nt, Human
auaaacuuuaauauaa

SEQ ID NO: 2680454 - RNA, 20 nt, Human
auaaacuuuaauauaaagua

SEQ ID NO: 2680455 - RNA, 22 nt, Human
auaaacuuuaauauaaaguagu

SEQ ID NO: 2680456 - RNA, 16 nt, Human
auaaacuauaaaacaa

SEQ ID NO: 2680457 - RNA, 17 nt, Human
auaaauaaaaauggaua

SEQ ID NO: 2680458 - RNA, 15 nt, Human
auaaauaaaaaugga

SEQ ID NO: 2680459 - RNA, 16 nt, Human
auaaaguaguccugug

SEQ ID NO: 2680460 - RNA, 17 nt, Human
auaaaguaguccuguga

SEQ ID NO: 2680461 - RNA, 20 nt, Human
uuauacaugugauacauuuu

SEQ ID NO: 2680462 - RNA, 18 nt, Human
uuauaaaucuuaugcucu

SEQ ID NO: 2680463 - RNA, 13 nt, Human
uuagccgggcgug

SEQ ID NO: 2680464 - RNA, 17 nt, Human
uuagccgcccaugcacu

SEQ ID NO: 2680465 - RNA, 21 nt, Human
uuauagaggcuagcuucugcu

SEQ ID NO: 2680466 - RNA, 23 nt, Human
uuauacuacuuuguuaggauuuu

SEQ ID NO: 2680467 - RNA, 18 nt, Human
uuauagcaacaacaauug

SEQ ID NO: 2680468 - RNA, 20 nt, Human
uuauagcaacaacaauuggu

SEQ ID NO: 2680469 - RNA, 20 nt, Human
uuauagccuggacugcuacc

SEQ ID NO: 2680470 - RNA, 20 nt, Human
uuauagucuaagacuauaua

SEQ ID NO: 2680471 - RNA, 16 nt, Human
uuauagucaauggcuu

SEQ ID NO: 2680472 - RNA, 16 nt, Human
uuauauaacuguauuu

SEQ ID NO: 2680473 - RNA, 18 nt, Human
uuauauaacuguauuuga

SEQ ID NO: 2680474 - RNA, 22 nt, Human
uuauauaacuguauuugaaaua

SEQ ID NO: 2680475 - RNA, 12 nt, Human
uuauauaacugu

SEQ ID NO: 2680476 - RNA, 17 nt, Human
uuauauagcaucuggaa

SEQ ID NO: 2680477 - RNA, 18 nt, Human
auaauuuuuuuuaaaaua

SEQ ID NO: 2680478 - RNA, 22 nt, Human
auaauuuuuuuuaaaauagaaa

SEQ ID NO: 2680479 - RNA, 13 nt, Human
auacuauuuaaga

SEQ ID NO: 2680480 - RNA, 16 nt, Human
auacuauuuaagaugu

SEQ ID NO: 2680481 - RNA, 18 nt, Human
auacuauuuaagauguga

SEQ ID NO: 2680482 - RNA, 19 nt, Human
auacuauuuaagaugugaa

SEQ ID NO: 2680483 - RNA, 20 nt, Human
auacuauuuaagaugugaaa

SEQ ID NO: 2680484 - RNA, 21 nt, Human
auacuauuuaagaugugaaaa

SEQ ID NO: 2680485 - RNA, 22 nt, Human
auacuauuuaagaugugaaaau

SEQ ID NO: 2680486 - RNA, 20 nt, Human
uuaucaaaauagucuaaggc

SEQ ID NO: 2680487 - RNA, 23 nt, Human
uuaucaaaauagucuaaggccau

SEQ ID NO: 2680488 - RNA, 16 nt, Human
auacaguuuucagaaa

SEQ ID NO: 2680489 - RNA, 17 nt, Human
auacaguuuucagaaaa

SEQ ID NO: 2680490 - RNA, 22 nt, Human
auacaguuuucagaaaaagaaa

SEQ ID NO: 2680491 - RNA, 22 nt, Human
auacaugaagaauagaaacaag

SEQ ID NO: 2680492 - RNA, 13 nt, Human
auacaugaagcuu

SEQ ID NO: 2680493 - RNA, 18 nt, Human
auacaugaagcuucaugc

SEQ ID NO: 2680494 - RNA, 16 nt, Human
auacauucaaauuugu

SEQ ID NO: 2680495 - RNA, 20 nt, Human
auacauucaaauuugucugg

SEQ ID NO: 2680496 - RNA, 21 nt, Human
auacauucaaauuugucuggu

SEQ ID NO: 2680497 - RNA, 14 nt, Human
auacauaaaagaaa

SEQ ID NO: 2680498 - RNA, 16 nt, Human
auacauaaaagaaaua

SEQ ID NO: 2680499 - RNA, 18 nt, Human
auacauaaaagaaauaaa

SEQ ID NO: 2680500 - RNA, 20 nt, Human
auacauaaaagaaauaaacc

SEQ ID NO: 2680501 - RNA, 14 nt, Human
auacauauggaugu

SEQ ID NO: 2680502 - RNA, 15 nt, Human
auacauauggauguu

SEQ ID NO: 2680503 - RNA, 18 nt, Human
auacauauggauguuacu

SEQ ID NO: 2680504 - RNA, 13 nt, Human
auaccaaacaugc

SEQ ID NO: 2680505 - RNA, 16 nt, Human
auacauuuuuuaagcu

SEQ ID NO: 2680506 - RNA, 20 nt, Human
auacauuuuuuaagcuucag

SEQ ID NO: 2680507 - RNA, 20 nt, Human
auacauuguauauaugugua

SEQ ID NO: 2680508 - RNA, 13 nt, Human
auacagcaaagga

SEQ ID NO: 2680509 - RNA, 15 nt, Human
auacagcaaaggaaa

SEQ ID NO: 2680510 - RNA, 18 nt, Human
auacaaaccuaccaaaau

SEQ ID NO: 2680511 - RNA, 15 nt, Human
auacaaaugcaucuu

SEQ ID NO: 2680512 - RNA, 13 nt, Human
auacaaaaagaaa

SEQ ID NO: 2680513 - RNA, 14 nt, Human
auacaaaaagaaaa

SEQ ID NO: 2680514 - RNA, 20 nt, Human
auacaaaugcaucuuugaug

SEQ ID NO: 2680515 - RNA, 19 nt, Human
auacaaaugcaucuuugau

SEQ ID NO: 2680516 - RNA, 18 nt, Human
auacaaaugcaucuuuga

SEQ ID NO: 2680517 - RNA, 17 nt, Human
auacaaaugcaucuuug

SEQ ID NO: 2680518 - RNA, 22 nt, Human
auacaaaugcaucuuugaugug

SEQ ID NO: 2680519 - RNA, 21 nt, Human
auacaaaugcaucuuugaugu

SEQ ID NO: 2680520 - RNA, 11 nt, Human
uguuguagugu

SEQ ID NO: 2680521 - RNA, 13 nt, Human
uguugucagcuga

SEQ ID NO: 2680522 - RNA, 15 nt, Human
uguuguaagaauucu

SEQ ID NO: 2680523 - RNA, 16 nt, Human
uguuguaagaauucug

SEQ ID NO: 2680524 - RNA, 18 nt, Human
uguuguaagaauucugau

SEQ ID NO: 2680525 - RNA, 21 nt, Human
uguuguacauacgauuuaagg

SEQ ID NO: 2680526 - RNA, 15 nt, Human
uguuguacuuaaaug

SEQ ID NO: 2680527 - RNA, 16 nt, Human
uguuguacuuaaaugg

SEQ ID NO: 2680528 - RNA, 13 nt, Human
uguuguaaaacaa

SEQ ID NO: 2680529 - RNA, 17 nt, Human
uguuguaaaacaaaauu

SEQ ID NO: 2680530 - RNA, 22 nt, Human
uguuguaaaacaaaauuugacu

SEQ ID NO: 2680531 - RNA, 23 nt, Human
uguuguaaaacaaaauuugacua

SEQ ID NO: 2680532 - RNA, 19 nt, Human
aguucuaacagugaaguuu

SEQ ID NO: 2680533 - RNA, 23 nt, Human
aguucuaacagugaaguuuuacu

SEQ ID NO: 2680534 - RNA, 17 nt, Human
aguucccuugaaacuuu

SEQ ID NO: 2680535 - RNA, 22 nt, Human
aguucccuugaaacuuugggaa

SEQ ID NO: 2680536 - RNA, 12 nt, Human
aguucaaaaaca

SEQ ID NO: 2680537 - RNA, 14 nt, Human
aguuauuuucuaca

SEQ ID NO: 2680538 - RNA, 23 nt, Human
aguuauuuucuacagugguuuua

SEQ ID NO: 2680539 - RNA, 14 nt, Human
aguuaguuuguaua

SEQ ID NO: 2680540 - RNA, 22 nt, Human
aguuaguuuguauauauuauua

SEQ ID NO: 2680541 - RNA, 21 nt, Human
aguguuucgcggguaacuggg

SEQ ID NO: 2680542 - RNA, 18 nt, Human
aguguuuauguuguuuau

SEQ ID NO: 2680543 - RNA, 15 nt, Human
aguuaguuuguauau

SEQ ID NO: 2680544 - RNA, 12 nt, Human
aguuauaagaag

SEQ ID NO: 2680545 - RNA, 14 nt, Human
aguuauaagaagaa

SEQ ID NO: 2680546 - RNA, 17 nt, Human
aguuauguaaauaauuc

SEQ ID NO: 2680547 - RNA, 14 nt, Human
aguuauguaaauaa

SEQ ID NO: 2680548 - RNA, 13 nt, Human
aguuauguaaaua

SEQ ID NO: 2680549 - RNA, 15 nt, Human
aguuauggugccgaa

SEQ ID NO: 2680550 - RNA, 23 nt, Human
aguuauggugccgaauugucuuu

SEQ ID NO: 2680551 - RNA, 20 nt, Human
aguuauguaaauaauucuuu

SEQ ID NO: 2680552 - RNA, 18 nt, Human
aguuauguaaauaauucu

SEQ ID NO: 2680553 - RNA, 20 nt, Human
aguuauuacauguaauuuga

SEQ ID NO: 2680554 - RNA, 18 nt, Human
aguuaucuuugaauaugu

SEQ ID NO: 2680555 - RNA, 13 nt, Human
aguuauugcaguu

SEQ ID NO: 2680556 - RNA, 16 nt, Human
aguuauugcaguuuau

SEQ ID NO: 2680557 - RNA, 18 nt, Human
aguuauugcaguuuauca

SEQ ID NO: 2680558 - RNA, 19 nt, Human
aguuauugcaguuuaucau

SEQ ID NO: 2680559 - RNA, 22 nt, Human
aguuauugcaguuuaucauuca

SEQ ID NO: 2680560 - RNA, 19 nt, Human
ugugcaaaaccuuuuacug

SEQ ID NO: 2680561 - RNA, 20 nt, Human
ugugcaaaaccuuuuacugg

SEQ ID NO: 2680562 - RNA, 18 nt, Human
ugugcaacaggguaugga

SEQ ID NO: 2680563 - RNA, 20 nt, Human
ugugcaacaggguauggacu

SEQ ID NO: 2680564 - RNA, 19 nt, Human
ugugcaacgccgugggcug

SEQ ID NO: 2680565 - RNA, 21 nt, Human
ugugcaacggucuccugacug

SEQ ID NO: 2680566 - RNA, 11 nt, Human
aguggcagggg

SEQ ID NO: 2680567 - RNA, 18 nt, Human
aguggcaggggacaggag

SEQ ID NO: 2680568 - RNA, 18 nt, Human
agugggugaauaauacag

SEQ ID NO: 2680569 - RNA, 13 nt, Human
agugggugaauaa

SEQ ID NO: 2680570 - RNA, 18 nt, Human
agugggggaucacagccu

SEQ ID NO: 2680571 - RNA, 15 nt, Human
agugggguuuccugg

SEQ ID NO: 2680572 - RNA, 16 nt, Human
aguguacagccagacc

SEQ ID NO: 2680573 - RNA, 18 nt, Human
aguguacagccagaccag

SEQ ID NO: 2680574 - RNA, 20 nt, Human
agugguuuuauacugaagga

SEQ ID NO: 2680575 - RNA, 21 nt, Human
agugguuuuauacugaaggaa

SEQ ID NO: 2680576 - RNA, 23 nt, Human
agugguuuuauacugaaggaaaa

SEQ ID NO: 2680577 - RNA, 16 nt, Human
aguguaacuugcuuaa

SEQ ID NO: 2680578 - RNA, 18 nt, Human
aguguaacuugcuuaaau

SEQ ID NO: 2680579 - RNA, 20 nt, Human
aguguaacuugcuuaaauuu

SEQ ID NO: 2680580 - RNA, 17 nt, Human
agugguuuuauacugaa

SEQ ID NO: 2680581 - RNA, 18 nt, Human
agugguuuuauacugaag

SEQ ID NO: 2680582 - RNA, 15 nt, Human
aguggugauuugaaa

SEQ ID NO: 2680583 - RNA, 22 nt, Human
aguggugauuugaaaaauauaa

SEQ ID NO: 2680584 - RNA, 18 nt, Human
agugguugaauaugauua

SEQ ID NO: 2680585 - RNA, 15 nt, Human
agugguugaauauga

SEQ ID NO: 2680586 - RNA, 14 nt, Human
agugguugaauaug

SEQ ID NO: 2680587 - RNA, 13 nt, Human
agugguugaauau

SEQ ID NO: 2680588 - RNA, 19 nt, Human
agugggugaauaauacagu

SEQ ID NO: 2680589 - RNA, 23 nt, Human
aguggucuuaagaaauguauaaa

SEQ ID NO: 2680590 - RNA, 18 nt, Human
uguuauuuucuguugaag

SEQ ID NO: 2680591 - RNA, 20 nt, Human
uguucccauguagcccccug

SEQ ID NO: 2680592 - RNA, 14 nt, Human
uguuauuaaacaaa

SEQ ID NO: 2680593 - RNA, 20 nt, Human
aguguacauuucuauaaaua

SEQ ID NO: 2680594 - RNA, 16 nt, Human
aguguaguuuacagaa

SEQ ID NO: 2680595 - RNA, 17 nt, Human
aguguaguuuacagaaa

SEQ ID NO: 2680596 - RNA, 19 nt, Human
aguguaguuuacagaaaaa

SEQ ID NO: 2680597 - RNA, 15 nt, Human
aguguauaauaagaa

SEQ ID NO: 2680598 - RNA, 15 nt, Human
aguguauaauauaaa

SEQ ID NO: 2680599 - RNA, 16 nt, Human
aguguauaauauaaaa

SEQ ID NO: 2680600 - RNA, 17 nt, Human
aguguauaauauaaaaa

SEQ ID NO: 2680601 - RNA, 17 nt, Human
uguuauguuuaauaagc

SEQ ID NO: 2680602 - RNA, 23 nt, Human
uguucuuggcaauaaauuuugaa

SEQ ID NO: 2680603 - RNA, 14 nt, Human
uguucuuucagaaa

SEQ ID NO: 2680604 - RNA, 15 nt, Human
uguucuuucagaaag

SEQ ID NO: 2680605 - RNA, 22 nt, Human
uguucuuggcaauaaauuuuga

SEQ ID NO: 2680606 - RNA, 20 nt, Human
uguucuuggcaauaaauuuu

SEQ ID NO: 2680607 - RNA, 17 nt, Human
uguucuuggcaauaaau

SEQ ID NO: 2680608 - RNA, 16 nt, Human
uguucuuggcaauaaa

SEQ ID NO: 2680609 - RNA, 19 nt, Human
uuaaacgaagaguucccuu

SEQ ID NO: 2680610 - RNA, 17 nt, Human
uuaaaccgccaaggcug

SEQ ID NO: 2680611 - RNA, 15 nt, Human
uuaaaaauagaaaca

SEQ ID NO: 2680612 - RNA, 14 nt, Human
uuaaaaauuguuau

SEQ ID NO: 2680613 - RNA, 20 nt, Human
uuaaauaaaauugaaaguaa

SEQ ID NO: 2680614 - RNA, 14 nt, Human
aguugcaucagaaa

SEQ ID NO: 2680615 - RNA, 14 nt, Human
aguugcauuuuaac

SEQ ID NO: 2680616 - RNA, 23 nt, Human
aguugcauuuuaacccuauuuua

SEQ ID NO: 2680617 - RNA, 19 nt, Human
aguugcaauugaauuaaau

SEQ ID NO: 2680618 - RNA, 18 nt, Human
aguugcaauugaauuaaa

SEQ ID NO: 2680619 - RNA, 20 nt, Human
aguugcaauugaauuaaauu

SEQ ID NO: 2680620 - RNA, 19 nt, Human
uuaaaaauaucaaauuaau

SEQ ID NO: 2680621 - RNA, 18 nt, Human
uuaaaaauaucaaauuaa

SEQ ID NO: 2680622 - RNA, 13 nt, Human
uuaaaaauaucaa

SEQ ID NO: 2680623 - RNA, 18 nt, Human
uuaaaaaguggaaaaaua

SEQ ID NO: 2680624 - RNA, 23 nt, Human
aguuuggcugcugucauaacauc

SEQ ID NO: 2680625 - RNA, 22 nt, Human
aguuuguaugccaagugagaag

SEQ ID NO: 2680626 - RNA, 17 nt, Human
aguuugucgcucaugug

SEQ ID NO: 2680627 - RNA, 19 nt, Human
aguuugucgcucaugugug

SEQ ID NO: 2680628 - RNA, 21 nt, Human
aguuugucgcucaugugugca

SEQ ID NO: 2680629 - RNA, 13 nt, Human
aguuugugagaaa

SEQ ID NO: 2680630 - RNA, 14 nt, Human
aguuugugagaaac

SEQ ID NO: 2680631 - RNA, 14 nt, Human
aguuuuauuuauau

SEQ ID NO: 2680632 - RNA, 23 nt, Human
aguuuuauuuauauuuauugacu

SEQ ID NO: 2680633 - RNA, 22 nt, Human
aguuuuauuuauauuuauugac

SEQ ID NO: 2680634 - RNA, 20 nt, Human
aguuuuauuuauauuuauug

SEQ ID NO: 2680635 - RNA, 19 nt, Human
aguuuuauuuauauuuauu

SEQ ID NO: 2680636 - RNA, 18 nt, Human
aguuuuauuuauauuuau

SEQ ID NO: 2680637 - RNA, 17 nt, Human
aguuuuauuuauauuua

SEQ ID NO: 2680638 - RNA, 15 nt, Human
aguuuuauuuauauu

SEQ ID NO: 2680639 - RNA, 15 nt, Human
aguuuucauuaaauc

SEQ ID NO: 2680640 - RNA, 12 nt, Human
aguuuucagaaa

SEQ ID NO: 2680641 - RNA, 18 nt, Human
aguuuucagaaaaagaaa

SEQ ID NO: 2680642 - RNA, 19 nt, Human
aguuuucagaaaaagaaau

SEQ ID NO: 2680643 - RNA, 18 nt, Human
aguuuucauaguauccau

SEQ ID NO: 2680644 - RNA, 16 nt, Human
aguuuauuuuaaaaca

SEQ ID NO: 2680645 - RNA, 23 nt, Human
aguuuauuuuaaaacaauaggau

SEQ ID NO: 2680646 - RNA, 14 nt, Human
aguucuguauuuga

SEQ ID NO: 2680647 - RNA, 13 nt, Human
aguucuguauuug

SEQ ID NO: 2680648 - RNA, 23 nt, Human
aguucuguauuugaaagugccuu

SEQ ID NO: 2680649 - RNA, 22 nt, Human
aguucuguauuugaaagugccu

SEQ ID NO: 2680650 - RNA, 21 nt, Human
aguucuguauuugaaagugcc

SEQ ID NO: 2680651 - RNA, 20 nt, Human
aguucuguauuugaaagugc

SEQ ID NO: 2680652 - RNA, 18 nt, Human
aguucuguauuugaaagu

SEQ ID NO: 2680653 - RNA, 17 nt, Human
aguucuguauuugaaag

SEQ ID NO: 2680654 - RNA, 16 nt, Human
aguucuguauuugaaa

SEQ ID NO: 2680655 - RNA, 15 nt, Human
aguucuguauuugaa

SEQ ID NO: 2680656 - RNA, 15 nt, Human
aguucuuuggauucu

SEQ ID NO: 2680657 - RNA, 22 nt, Human
aguucuuuggauucuaaauaca

SEQ ID NO: 2680658 - RNA, 15 nt, Human
aguucuuuaaacugu

SEQ ID NO: 2680659 - RNA, 23 nt, Human
aguucuuggucccuccagaacca

SEQ ID NO: 2680660 - RNA, 13 nt, Human
aguugauucagcu

SEQ ID NO: 2680661 - RNA, 18 nt, Human
aguugauucagcucugca

SEQ ID NO: 2680662 - RNA, 17 nt, Human
aguugauucagcucugc

SEQ ID NO: 2680663 - RNA, 15 nt, Human
aguugauucagcucu

SEQ ID NO: 2680664 - RNA, 14 nt, Human
aguugauucagcuc

SEQ ID NO: 2680665 - RNA, 23 nt, Human
aguugauucagcucugcaagaau

SEQ ID NO: 2680666 - RNA, 13 nt, Human
uguuuuauaaaau

SEQ ID NO: 2680667 - RNA, 15 nt, Human
uguuuucucuugaga

SEQ ID NO: 2680668 - RNA, 19 nt, Human
uguuuuccgugaaaacgga

SEQ ID NO: 2680669 - RNA, 16 nt, Human
uguuuuccgugaaaac

SEQ ID NO: 2680670 - RNA, 14 nt, Human
uguugucagcugaa

SEQ ID NO: 2680671 - RNA, 17 nt, Human
uguuguccaacuauuua

SEQ ID NO: 2680672 - RNA, 13 nt, Human
uguuugccaggac

SEQ ID NO: 2680673 - RNA, 16 nt, Human
uguuugccaggacaug

SEQ ID NO: 2680674 - RNA, 18 nt, Human
uguuugccaggacaugca

SEQ ID NO: 2680675 - RNA, 19 nt, Human
uguuugccaggacaugcaa

SEQ ID NO: 2680676 - RNA, 19 nt, Human
uguuuggagacguuuauaa

SEQ ID NO: 2680677 - RNA, 15 nt, Human
uguuuggcauguaaa

SEQ ID NO: 2680678 - RNA, 16 nt, Human
uguuuggcauguaaau

SEQ ID NO: 2680679 - RNA, 17 nt, Human
uguuugggaugaccagg

SEQ ID NO: 2680680 - RNA, 17 nt, Human
uguuuuacaauaguucu

SEQ ID NO: 2680681 - RNA, 13 nt, Human
uguuuuacaauag

SEQ ID NO: 2680682 - RNA, 21 nt, Human
uguuuuacaauaguucugugg

SEQ ID NO: 2680683 - RNA, 22 nt, Human
uguuuuacaauaguucuguggg

SEQ ID NO: 2680684 - RNA, 15 nt, Human
ugccucacuaauuuu

SEQ ID NO: 2680685 - RNA, 18 nt, Human
ugccucacuaauuuuugu

SEQ ID NO: 2680686 - RNA, 22 nt, Human
ugccucacuaauuuuuguauua

SEQ ID NO: 2680687 - RNA, 22 nt, Human
ugccuccccauuucccaucugc

SEQ ID NO: 2680688 - RNA, 23 nt, Human
ugccuccccauuucccaucugca

SEQ ID NO: 2680689 - RNA, 17 nt, Human
ugccuccccauuuccca

SEQ ID NO: 2680690 - RNA, 20 nt, Human
ugccuccccauuucccaucu

SEQ ID NO: 2680691 - RNA, 21 nt, Human
ugccuccccauuucccaucug

SEQ ID NO: 2680692 - RNA, 22 nt, Human
ugccgccgcuagguagagucug

SEQ ID NO: 2680693 - RNA, 18 nt, Human
ugccgccgcuagguagag

SEQ ID NO: 2680694 - RNA, 16 nt, Human
ugccgcaucucacagc

SEQ ID NO: 2680695 - RNA, 17 nt, Human
ugccgcccccuccugaa

SEQ ID NO: 2680696 - RNA, 18 nt, Human
ugccgcccccuccugaac

SEQ ID NO: 2680697 - RNA, 19 nt, Human
ugccgcccccuccugaacc

SEQ ID NO: 2680698 - RNA, 19 nt, Human
agcucuuccuaucccucuc

SEQ ID NO: 2680699 - RNA, 22 nt, Human
agcucuuccuaucccucuccua

SEQ ID NO: 2680700 - RNA, 13 nt, Human
ugccugcuuugaa

SEQ ID NO: 2680701 - RNA, 14 nt, Human
ugccugcuuugaau

SEQ ID NO: 2680702 - RNA, 19 nt, Human
ugccugccuuaagugagga

SEQ ID NO: 2680703 - RNA, 11 nt, Human
ugccugccuua

SEQ ID NO: 2680704 - RNA, 12 nt, Human
agcucuggaggg

SEQ ID NO: 2680705 - RNA, 16 nt, Human
agcucuggaggggagg

SEQ ID NO: 2680706 - RNA, 17 nt, Human
agcucuggaggggaggg

SEQ ID NO: 2680707 - RNA, 18 nt, Human
agcucuggaggggagggg

SEQ ID NO: 2680708 - RNA, 19 nt, Human
agcucuggaggggaggggg

SEQ ID NO: 2680709 - RNA, 20 nt, Human
agcucuggaggggaggggga

SEQ ID NO: 2680710 - RNA, 14 nt, Human
agcuccagcuuucu

SEQ ID NO: 2680711 - RNA, 21 nt, Human
agcuccagggaauccaagccu

SEQ ID NO: 2680712 - RNA, 19 nt, Human
agcucccacuucugccaga

SEQ ID NO: 2680713 - RNA, 18 nt, Human
agcucccacuucugccag

SEQ ID NO: 2680714 - RNA, 17 nt, Human
agcucccacuucugcca

SEQ ID NO: 2680715 - RNA, 20 nt, Human
agcuccccgcuucugccugc

SEQ ID NO: 2680716 - RNA, 14 nt, Human
ugcccucucaggcc

SEQ ID NO: 2680717 - RNA, 13 nt, Human
ugcccuaauaaaa

SEQ ID NO: 2680718 - RNA, 15 nt, Human
ugcccuaauaaaaag

SEQ ID NO: 2680719 - RNA, 23 nt, Human
ugcccuccugacccauugcuguu

SEQ ID NO: 2680720 - RNA, 20 nt, Human
ugcccucuucucgugccucc

SEQ ID NO: 2680721 - RNA, 22 nt, Human
ugcccugcacgucaugggaggg

SEQ ID NO: 2680722 - RNA, 11 nt, Human
agcuccacucu

SEQ ID NO: 2680723 - RNA, 12 nt, Human
agcuccacucug

SEQ ID NO: 2680724 - RNA, 13 nt, Human
agcuccacucugc

SEQ ID NO: 2680725 - RNA, 14 nt, Human
agcuccacucugcu

SEQ ID NO: 2680726 - RNA, 16 nt, Human
agcuccacucugcuuc

SEQ ID NO: 2680727 - RNA, 17 nt, Human
agcuccacucugcuucu

SEQ ID NO: 2680728 - RNA, 18 nt, Human
agcuccacucugcuucuc

SEQ ID NO: 2680729 - RNA, 19 nt, Human
agcuccacucugcuucucu

SEQ ID NO: 2680730 - RNA, 22 nt, Human
agcuccacucugcuucucugac

SEQ ID NO: 2680731 - RNA, 23 nt, Human
agcuccacucugcuucucugacu

SEQ ID NO: 2680732 - RNA, 24 nt, Human
agcuccacucugcuucucugacuu

SEQ ID NO: 2680733 - RNA, 12 nt, Human
ugccauuuauuu

SEQ ID NO: 2680734 - RNA, 14 nt, Human
ugccauuuauuuau

SEQ ID NO: 2680735 - RNA, 15 nt, Human
agcuccaagccccau

SEQ ID NO: 2680736 - RNA, 15 nt, Human
agcucaggaggcgcc

SEQ ID NO: 2680737 - RNA, 17 nt, Human
agcucaggaggcgcccu

SEQ ID NO: 2680738 - RNA, 14 nt, Human
agcuagucaacagu

SEQ ID NO: 2680739 - RNA, 13 nt, Human
agcgucccuggcg

SEQ ID NO: 2680740 - RNA, 14 nt, Human
agcgucccuggcgc

SEQ ID NO: 2680741 - RNA, 15 nt, Human
agcgucccuggcgca

SEQ ID NO: 2680742 - RNA, 18 nt, Human
agcuaguugaauacuuga

SEQ ID NO: 2680743 - RNA, 17 nt, Human
agcuaguugaauacuug

SEQ ID NO: 2680744 - RNA, 16 nt, Human
agcuaguugaauacuu

SEQ ID NO: 2680745 - RNA, 15 nt, Human
agcuaguugaauacu

SEQ ID NO: 2680746 - RNA, 19 nt, Human
ugccccaucuccccucagc

SEQ ID NO: 2680747 - RNA, 16 nt, Human
ugccccaucuccccuc

SEQ ID NO: 2680748 - RNA, 21 nt, Human
ugccccaucuccccucagcuc

SEQ ID NO: 2680749 - RNA, 13 nt, Human
ugccccggagcug

SEQ ID NO: 2680750 - RNA, 22 nt, Human
ugccccgcccccaguccccacc

SEQ ID NO: 2680751 - RNA, 14 nt, Human
ugcccccugcagac

SEQ ID NO: 2680752 - RNA, 16 nt, Human
ugccauuuuaaggaaa

SEQ ID NO: 2680753 - RNA, 20 nt, Human
ugccauuuuaaggaaaacua

SEQ ID NO: 2680754 - RNA, 20 nt, Human
ugcagcucagaaccacagca

SEQ ID NO: 2680755 - RNA, 19 nt, Human
ugcagcucagaaccacagc

SEQ ID NO: 2680756 - RNA, 18 nt, Human
ugcagcucagaaccacag

SEQ ID NO: 2680757 - RNA, 18 nt, Human
agccuucucagaagcaca

SEQ ID NO: 2680758 - RNA, 12 nt, Human
agccuucucccu

SEQ ID NO: 2680759 - RNA, 16 nt, Human
agccuucucccuagcu

SEQ ID NO: 2680760 - RNA, 20 nt, Human
agccuucucccuagcuccuc

SEQ ID NO: 2680761 - RNA, 21 nt, Human
agccuugauucccuuguuauu

SEQ ID NO: 2680762 - RNA, 16 nt, Human
agccuugagcccuggc

SEQ ID NO: 2680763 - RNA, 17 nt, Human
agccuugagcccuggcu

SEQ ID NO: 2680764 - RNA, 19 nt, Human
agccuugagcccuggcugu

SEQ ID NO: 2680765 - RNA, 18 nt, Human
ugcauucguuguguuuuu

SEQ ID NO: 2680766 - RNA, 21 nt, Human
ugcauucguuguguuuuuuaa

SEQ ID NO: 2680767 - RNA, 11 nt, Human
ugcauucauuu

SEQ ID NO: 2680768 - RNA, 14 nt, Human
ugcauucauuuuua

SEQ ID NO: 2680769 - RNA, 15 nt, Human
ugcauucauuuuuau

SEQ ID NO: 2680770 - RNA, 18 nt, Human
ugcauucauuuuuauagc

SEQ ID NO: 2680771 - RNA, 20 nt, Human
ugcauucauuuuuauagcaa

SEQ ID NO: 2680772 - RNA, 19 nt, Human
ugcauuuagggaguauucu

SEQ ID NO: 2680773 - RNA, 16 nt, Human
agcgcuuuuccuuggc

SEQ ID NO: 2680774 - RNA, 23 nt, Human
agcggcuggcagcccaccccuca

SEQ ID NO: 2680775 - RNA, 16 nt, Human
agcguauggcuuuauu

SEQ ID NO: 2680776 - RNA, 15 nt, Human
agcgucagcugcucc

SEQ ID NO: 2680777 - RNA, 19 nt, Human
agcgucagcugcucccugg

SEQ ID NO: 2680778 - RNA, 21 nt, Human
agcgucagcugcucccuggca

SEQ ID NO: 2680779 - RNA, 18 nt, Human
ugccagcuuaucucaggg

SEQ ID NO: 2680780 - RNA, 12 nt, Human
ugccagcuggcc

SEQ ID NO: 2680781 - RNA, 15 nt, Human
ugccagcuggccuuu

SEQ ID NO: 2680782 - RNA, 16 nt, Human
ugccagcuggccuuug

SEQ ID NO: 2680783 - RNA, 18 nt, Human
ugccagcuggccuuugua

SEQ ID NO: 2680784 - RNA, 19 nt, Human
ugccagcuggccuuuguaa

SEQ ID NO: 2680785 - RNA, 13 nt, Human
agcggcuggcagc

SEQ ID NO: 2680786 - RNA, 15 nt, Human
ugccagcugacaucu

SEQ ID NO: 2680787 - RNA, 18 nt, Human
ugccagcugacaucuuga

SEQ ID NO: 2680788 - RNA, 23 nt, Human
ugccagcugacaucuugaauccu

SEQ ID NO: 2680789 - RNA, 14 nt, Human
ugccagcagcagca

SEQ ID NO: 2680790 - RNA, 10 nt, Human
ugccagcagc

SEQ ID NO: 2680791 - RNA, 15 nt, Human
ugccagcagcagcag

SEQ ID NO: 2680792 - RNA, 16 nt, Human
ugccagcagcagcagg

SEQ ID NO: 2680793 - RNA, 17 nt, Human
ugccagcagcagcaggu

SEQ ID NO: 2680794 - RNA, 18 nt, Human
ugccagcagcagcaggug

SEQ ID NO: 2680795 - RNA, 23 nt, Human
ugccagaggaauccuggcagccc

SEQ ID NO: 2680796 - RNA, 21 nt, Human
ugccagauguccuaaugguga

SEQ ID NO: 2680797 - RNA, 20 nt, Human
ugcauuuccucgcagccucu

SEQ ID NO: 2680798 - RNA, 21 nt, Human
ugcauuuagggaguauucuaa

SEQ ID NO: 2680799 - RNA, 12 nt, Human
ugccagagccgg

SEQ ID NO: 2680800 - RNA, 20 nt, Human
ugccagaggaauccuggcag

SEQ ID NO: 2680801 - RNA, 21 nt, Human
ugccagaggaauccuggcagc

SEQ ID NO: 2680802 - RNA, 22 nt, Human
ugccagaggaauccuggcagcc

SEQ ID NO: 2680803 - RNA, 12 nt, Human
agcccaggagcc

SEQ ID NO: 2680804 - RNA, 15 nt, Human
agcccaggagccuca

SEQ ID NO: 2680805 - RNA, 16 nt, Human
agcccaggagccucac

SEQ ID NO: 2680806 - RNA, 17 nt, Human
agcccaggagccucacu

SEQ ID NO: 2680807 - RNA, 12 nt, Human
ugcaagugcugg

SEQ ID NO: 2680808 - RNA, 13 nt, Human
ugcaagugcugga

SEQ ID NO: 2680809 - RNA, 15 nt, Human
ugcaagugcuggagu

SEQ ID NO: 2680810 - RNA, 23 nt, Human
ugcaagugcuggagucuccugag

SEQ ID NO: 2680811 - RNA, 12 nt, Human
ugcaauaacagc

SEQ ID NO: 2680812 - RNA, 14 nt, Human
ugcaauaacagcug

SEQ ID NO: 2680813 - RNA, 15 nt, Human
ugcaauaacagcugc

SEQ ID NO: 2680814 - RNA, 16 nt, Human
ugcaauaacagcugca

SEQ ID NO: 2680815 - RNA, 17 nt, Human
ugcaauaacagcugcaa

SEQ ID NO: 2680816 - RNA, 18 nt, Human
ugcaauaacagcugcaau

SEQ ID NO: 2680817 - RNA, 17 nt, Human
agcccagggcuccugca

SEQ ID NO: 2680818 - RNA, 23 nt, Human
agcccagggcuccugcacuuacu

SEQ ID NO: 2680819 - RNA, 14 nt, Human
agcccagggcuccu

SEQ ID NO: 2680820 - RNA, 15 nt, Human
agcccagggcuccug

SEQ ID NO: 2680821 - RNA, 16 nt, Human
agcccagggcuccugc

SEQ ID NO: 2680822 - RNA, 14 nt, Human
agcccccugcuuca

SEQ ID NO: 2680823 - RNA, 12 nt, Human
agccccucuucc

SEQ ID NO: 2680824 - RNA, 13 nt, Human
agccccucuuccc

SEQ ID NO: 2680825 - RNA, 17 nt, Human
agccccucuuccccaau

SEQ ID NO: 2680826 - RNA, 22 nt, Human
agccccucuggucgcuccugcc

SEQ ID NO: 2680827 - RNA, 20 nt, Human
agccccucuggucgcuccug

SEQ ID NO: 2680828 - RNA, 21 nt, Human
agccccucuggucgcuccugc

SEQ ID NO: 2680829 - RNA, 14 nt, Human
agcccccuggccuc

SEQ ID NO: 2680830 - RNA, 14 nt, Human
agcccggccgcucc

SEQ ID NO: 2680831 - RNA, 12 nt, Human
agcccuggcugu

SEQ ID NO: 2680832 - RNA, 19 nt, Human
agcccugcuggggaucccc

SEQ ID NO: 2680833 - RNA, 22 nt, Human
agccuccacagcgagggcagcu

SEQ ID NO: 2680834 - RNA, 23 nt, Human
agccuccacagcgagggcagcug

SEQ ID NO: 2680835 - RNA, 12 nt, Human
agccuccacagc

SEQ ID NO: 2680836 - RNA, 13 nt, Human
agccuccacagcg

SEQ ID NO: 2680837 - RNA, 14 nt, Human
agccuccacagcga

SEQ ID NO: 2680838 - RNA, 15 nt, Human
agccuccacagcgag

SEQ ID NO: 2680839 - RNA, 21 nt, Human
agccuccacagcgagggcagc

SEQ ID NO: 2680840 - RNA, 13 nt, Human
agccucugcuccc

SEQ ID NO: 2680841 - RNA, 23 nt, Human
agccucugaaaaccaauguucuc

SEQ ID NO: 2680842 - RNA, 16 nt, Human
agccucugcuccccag

SEQ ID NO: 2680843 - RNA, 15 nt, Human
agccucugcucccca

SEQ ID NO: 2680844 - RNA, 15 nt, Human
ugcagcucagaacca

SEQ ID NO: 2680845 - RNA, 23 nt, Human
agccucacuggggcagacaauaa

SEQ ID NO: 2680846 - RNA, 13 nt, Human
agccucagacugg

SEQ ID NO: 2680847 - RNA, 14 nt, Human
agccucagacugga

SEQ ID NO: 2680848 - RNA, 17 nt, Human
agccucagcccccugcu

SEQ ID NO: 2680849 - RNA, 19 nt, Human
agccucagcccccugcuuc

SEQ ID NO: 2680850 - RNA, 22 nt, Human
agccucagcccccugcuucagu

SEQ ID NO: 2680851 - RNA, 19 nt, Human
agccucagcgcggcccucc

SEQ ID NO: 2680852 - RNA, 22 nt, Human
agccucagcgcggcccucccga

SEQ ID NO: 2680853 - RNA, 12 nt, Human
agcccuugccuc

SEQ ID NO: 2680854 - RNA, 13 nt, Human
agcccuugccucc

SEQ ID NO: 2680855 - RNA, 14 nt, Human
agcccuugccuccc

SEQ ID NO: 2680856 - RNA, 16 nt, Human
agcccuugccucccca

SEQ ID NO: 2680857 - RNA, 23 nt, Human
agcccuugccuccccauuuccca

SEQ ID NO: 2680858 - RNA, 23 nt, Human
ugcagaccacgcccguccugccu

SEQ ID NO: 2680859 - RNA, 15 nt, Human
ugcagaacuguagcu

SEQ ID NO: 2680860 - RNA, 12 nt, Human
ugcacuccucag

SEQ ID NO: 2680861 - RNA, 16 nt, Human
ugcacuccucagggca

SEQ ID NO: 2680862 - RNA, 15 nt, Human
ugauuuccucccucu

SEQ ID NO: 2680863 - RNA, 22 nt, Human
ugauuucuuaggggaaggagaa

SEQ ID NO: 2680864 - RNA, 18 nt, Human
ugauuucuuuaaaagaau

SEQ ID NO: 2680865 - RNA, 20 nt, Human
ugauuucuuuaaaagaauga

SEQ ID NO: 2680866 - RNA, 21 nt, Human
ugauuucuuuaaaagaaugac

SEQ ID NO: 2680867 - RNA, 23 nt, Human
ugauuucuuuucaccauucguac

SEQ ID NO: 2680868 - RNA, 16 nt, Human
ugauuugaaaaauaua

SEQ ID NO: 2680869 - RNA, 20 nt, Human
ugauuuggugaccaacuguc

SEQ ID NO: 2680870 - RNA, 19 nt, Human
ugauuuggugaccaacugu

SEQ ID NO: 2680871 - RNA, 13 nt, Human
ugauuuggugacc

SEQ ID NO: 2680872 - RNA, 13 nt, Human
ugauuucuagaac

SEQ ID NO: 2680873 - RNA, 18 nt, Human
ugauucccuuguuauuca

SEQ ID NO: 2680874 - RNA, 20 nt, Human
ugauucccuuguuauucaac

SEQ ID NO: 2680875 - RNA, 19 nt, Human
ugauucccuuguuauucaa

SEQ ID NO: 2680876 - RNA, 12 nt, Human
agccagcgccuc

SEQ ID NO: 2680877 - RNA, 14 nt, Human
agccagcgccuccc

SEQ ID NO: 2680878 - RNA, 15 nt, Human
agccagcgccucccu

SEQ ID NO: 2680879 - RNA, 16 nt, Human
agccagcgccucccuc

SEQ ID NO: 2680880 - RNA, 17 nt, Human
agccagcgccucccucc

SEQ ID NO: 2680881 - RNA, 18 nt, Human
agccagcgccucccucca

SEQ ID NO: 2680882 - RNA, 19 nt, Human
agccagcgccucccuccac

SEQ ID NO: 2680883 - RNA, 21 nt, Human
agccagcgccucccuccaccc

SEQ ID NO: 2680884 - RNA, 22 nt, Human
agccagcgccucccuccacccc

SEQ ID NO: 2680885 - RNA, 23 nt, Human
agccagcgccucccuccacccca

SEQ ID NO: 2680886 - RNA, 19 nt, Human
agccagcucccucuauuua

SEQ ID NO: 2680887 - RNA, 17 nt, Human
agccagcucccucuauu

SEQ ID NO: 2680888 - RNA, 15 nt, Human
agccagcucccucua

SEQ ID NO: 2680889 - RNA, 14 nt, Human
agccagcucccucu

SEQ ID NO: 2680890 - RNA, 22 nt, Human
agccagcucccucuauuuaugu

SEQ ID NO: 2680891 - RNA, 23 nt, Human
agccaucuaaaguaaaaagggaa

SEQ ID NO: 2680892 - RNA, 14 nt, Human
agccaugccagcug

SEQ ID NO: 2680893 - RNA, 16 nt, Human
agccaugccagcuggc

SEQ ID NO: 2680894 - RNA, 17 nt, Human
agccaugccagcuggcc

SEQ ID NO: 2680895 - RNA, 21 nt, Human
agccaugccagcuggccuuug

SEQ ID NO: 2680896 - RNA, 16 nt, Human
agccaugcgcccccuc

SEQ ID NO: 2680897 - RNA, 23 nt, Human
agccaugcgcccccuccgcccug

SEQ ID NO: 2680898 - RNA, 17 nt, Human
agccacuccccggcaug

SEQ ID NO: 2680899 - RNA, 21 nt, Human
agccaugccgucugccggacc

SEQ ID NO: 2680900 - RNA, 16 nt, Human
ugauggacacuccagg

SEQ ID NO: 2680901 - RNA, 19 nt, Human
ugauggacacuccagggac

SEQ ID NO: 2680902 - RNA, 15 nt, Human
ugauggagugugagc

SEQ ID NO: 2680903 - RNA, 14 nt, Human
ugaugagauuuuua

SEQ ID NO: 2680904 - RNA, 20 nt, Human
ugauggaauuuuuuuguacg

SEQ ID NO: 2680905 - RNA, 14 nt, Human
ugauggaaccuuaa

SEQ ID NO: 2680906 - RNA, 18 nt, Human
ugaugacaauaaagcuug

SEQ ID NO: 2680907 - RNA, 22 nt, Human
ugaugacguacaaguaguucug

SEQ ID NO: 2680908 - RNA, 21 nt, Human
ugaugacguacaaguaguucu

SEQ ID NO: 2680909 - RNA, 19 nt, Human
ugaugacguacaaguaguu

SEQ ID NO: 2680910 - RNA, 13 nt, Human
ugauccuccaaca

SEQ ID NO: 2680911 - RNA, 14 nt, Human
ugauccucucaccu

SEQ ID NO: 2680912 - RNA, 19 nt, Human
ugauuaaccacuucagcug

SEQ ID NO: 2680913 - RNA, 16 nt, Human
agccagccccucuucc

SEQ ID NO: 2680914 - RNA, 17 nt, Human
agccagccccucuuccc

SEQ ID NO: 2680915 - RNA, 19 nt, Human
uggaccgcccuuuuccccu

SEQ ID NO: 2680916 - RNA, 17 nt, Human
uggaccuaaauggccuc

SEQ ID NO: 2680917 - RNA, 18 nt, Human
uggaccuaaauggccuca

SEQ ID NO: 2680918 - RNA, 21 nt, Human
uggaccuaaauggccucaugu

SEQ ID NO: 2680919 - RNA, 16 nt, Human
uggacccuuauaaaau

SEQ ID NO: 2680920 - RNA, 15 nt, Human
uggaauugccagcug

SEQ ID NO: 2680921 - RNA, 13 nt, Human
uggaauuguggcu

SEQ ID NO: 2680922 - RNA, 14 nt, Human
uggaauuguggcua

SEQ ID NO: 2680923 - RNA, 20 nt, Human
uggaauuguggcuauccuga

SEQ ID NO: 2680924 - RNA, 22 nt, Human
uggaauuguggcuauccugauu

SEQ ID NO: 2680925 - RNA, 17 nt, Human
aggcaacucaucuuagg

SEQ ID NO: 2680926 - RNA, 21 nt, Human
aggauuuuggauguugagagg

SEQ ID NO: 2680927 - RNA, 12 nt, Human
aggauuuuuaga

SEQ ID NO: 2680928 - RNA, 20 nt, Human
aggaggcaggcauggcccug

SEQ ID NO: 2680929 - RNA, 22 nt, Human
aggaggcaggcauggcccuggg

SEQ ID NO: 2680930 - RNA, 12 nt, Human
aggagggagagg

SEQ ID NO: 2680931 - RNA, 13 nt, Human
aggagggagaggg

SEQ ID NO: 2680932 - RNA, 16 nt, Human
uggaaauugacgaggg

SEQ ID NO: 2680933 - RNA, 13 nt, Human
uggaaauuccugu

SEQ ID NO: 2680934 - RNA, 14 nt, Human
uggaaauuccugua

SEQ ID NO: 2680935 - RNA, 19 nt, Human
uggaaauuccuguacugug

SEQ ID NO: 2680936 - RNA, 22 nt, Human
uggaaauuccuguacugugucu

SEQ ID NO: 2680937 - RNA, 22 nt, Human
aggagcugccuuggcucagaca

SEQ ID NO: 2680938 - RNA, 21 nt, Human
aggagcugccuuggcucagac

SEQ ID NO: 2680939 - RNA, 23 nt, Human
aggagcugccuuggcucagacau

SEQ ID NO: 2680940 - RNA, 19 nt, Human
aggagcugccuuggcucag

SEQ ID NO: 2680941 - RNA, 18 nt, Human
aggagcugccuuggcuca

SEQ ID NO: 2680942 - RNA, 14 nt, Human
aggagggagaggga

SEQ ID NO: 2680943 - RNA, 15 nt, Human
aggagggagagggag

SEQ ID NO: 2680944 - RNA, 22 nt, Human
aggaucucuugagccugggagg

SEQ ID NO: 2680945 - RNA, 21 nt, Human
aggaucucuugagccugggag

SEQ ID NO: 2680946 - RNA, 16 nt, Human
aggagccuuuuuaaaa

SEQ ID NO: 2680947 - RNA, 14 nt, Human
aggagcgagcaugu

SEQ ID NO: 2680948 - RNA, 19 nt, Human
aggagccuuuuuaaaacac

SEQ ID NO: 2680949 - RNA, 15 nt, Human
aggagcgagcauguc

SEQ ID NO: 2680950 - RNA, 14 nt, Human
aggagccugcccag

SEQ ID NO: 2680951 - RNA, 15 nt, Human
ugcuugccugcaggg

SEQ ID NO: 2680952 - RNA, 18 nt, Human
ugcuugccugcagggcca

SEQ ID NO: 2680953 - RNA, 20 nt, Human
ugcuugccugcagggccaug

SEQ ID NO: 2680954 - RNA, 16 nt, Human
ugcuuuguagaguuuu

SEQ ID NO: 2680955 - RNA, 22 nt, Human
ugcuuuguagaguuuugucauu

SEQ ID NO: 2680956 - RNA, 12 nt, Human
ugcuuuguauug

SEQ ID NO: 2680957 - RNA, 13 nt, Human
aggacuuuguaca

SEQ ID NO: 2680958 - RNA, 16 nt, Human
aggagcaggcacgggu

SEQ ID NO: 2680959 - RNA, 21 nt, Human
ugcuucaccauggccuuauga

SEQ ID NO: 2680960 - RNA, 15 nt, Human
aggacugacugaggc

SEQ ID NO: 2680961 - RNA, 17 nt, Human
aggacugacugaggcag

SEQ ID NO: 2680962 - RNA, 16 nt, Human
aggacugacugaggca

SEQ ID NO: 2680963 - RNA, 22 nt, Human
aggacugacugaggcaguuuga

SEQ ID NO: 2680964 - RNA, 18 nt, Human
aggacugacugaggcagu

SEQ ID NO: 2680965 - RNA, 20 nt, Human
aggacuuccccggagggcug

SEQ ID NO: 2680966 - RNA, 21 nt, Human
aggacuuccccggagggcugc

SEQ ID NO: 2680967 - RNA, 13 nt, Human
ugcuucacaguag

SEQ ID NO: 2680968 - RNA, 16 nt, Human
ugcuucacaguagagc

SEQ ID NO: 2680969 - RNA, 20 nt, Human
ugcuucacaguagagccagc

SEQ ID NO: 2680970 - RNA, 21 nt, Human
ugcuucacaguagagccagcu

SEQ ID NO: 2680971 - RNA, 17 nt, Human
ugcuuauuauguaggua

SEQ ID NO: 2680972 - RNA, 17 nt, Human
ugcugugaagcuggaac

SEQ ID NO: 2680973 - RNA, 18 nt, Human
ugcugugaagcuggaacu

SEQ ID NO: 2680974 - RNA, 17 nt, Human
ugcugugagggagggga

SEQ ID NO: 2680975 - RNA, 18 nt, Human
ugcugugagggaggggaa

SEQ ID NO: 2680976 - RNA, 23 nt, Human
ugcugugagggaggggaaaagca

SEQ ID NO: 2680977 - RNA, 22 nt, Human
ugcuucacaguagagccagcuu

SEQ ID NO: 2680978 - RNA, 13 nt, Human
aggacaugcaaua

SEQ ID NO: 2680979 - RNA, 16 nt, Human
aggacaugcaauaaaa

SEQ ID NO: 2680980 - RNA, 20 nt, Human
aggacaugcaauaaaauuua

SEQ ID NO: 2680981 - RNA, 21 nt, Human
aggacaugcaauaaaauuuaa

SEQ ID NO: 2680982 - RNA, 22 nt, Human
aggacaugcaauaaaauuuaaa

SEQ ID NO: 2680983 - RNA, 13 nt, Human
ugcuggccccagc

SEQ ID NO: 2680984 - RNA, 14 nt, Human
ugcuggccccagcc

SEQ ID NO: 2680985 - RNA, 16 nt, Human
ugcuggccccagcccu

SEQ ID NO: 2680986 - RNA, 18 nt, Human
ugcuggccccagcccugc

SEQ ID NO: 2680987 - RNA, 19 nt, Human
ugcuggccccagcccugcu

SEQ ID NO: 2680988 - RNA, 20 nt, Human
ugcuggccccagcccugcug

SEQ ID NO: 2680989 - RNA, 21 nt, Human
ugcuggccccagcccugcugg

SEQ ID NO: 2680990 - RNA, 22 nt, Human
ugcuggccccagcccugcuggg

SEQ ID NO: 2680991 - RNA, 21 nt, Human
ugcugucccauagucccugcc

SEQ ID NO: 2680992 - RNA, 15 nt, Human
ugcugggagcuccac

SEQ ID NO: 2680993 - RNA, 16 nt, Human
ugcugggagcuccacu

SEQ ID NO: 2680994 - RNA, 17 nt, Human
ugcugggagcuccacuc

SEQ ID NO: 2680995 - RNA, 18 nt, Human
ugcugggagcuccacucu

SEQ ID NO: 2680996 - RNA, 20 nt, Human
ugcugggagcuccacucugc

SEQ ID NO: 2680997 - RNA, 21 nt, Human
ugcugggagcuccacucugcu

SEQ ID NO: 2680998 - RNA, 22 nt, Human
ugcugggagcuccacucugcuu

SEQ ID NO: 2680999 - RNA, 23 nt, Human
ugcugggagcuccacucugcuuc

SEQ ID NO: 2681000 - RNA, 17 nt, Human
ugcugggaggagggaga

SEQ ID NO: 2681001 - RNA, 18 nt, Human
ugcugggaggagggagag

SEQ ID NO: 2681002 - RNA, 14 nt, Human
ugcuguacaaaagc

SEQ ID NO: 2681003 - RNA, 20 nt, Human
ugcuguacacauauuugaag

SEQ ID NO: 2681004 - RNA, 23 nt, Human
ugcuguacacauauuugaagggu

SEQ ID NO: 2681005 - RNA, 20 nt, Human
ugcugggaggagggagaggg

SEQ ID NO: 2681006 - RNA, 15 nt, Human
aggaaggagaggaga

SEQ ID NO: 2681007 - RNA, 20 nt, Human
ugcuccgaggacccaggaaa

SEQ ID NO: 2681008 - RNA, 18 nt, Human
ugcuccgaggacccagga

SEQ ID NO: 2681009 - RNA, 22 nt, Human
ugcucccuguaggguccaacca

SEQ ID NO: 2681010 - RNA, 11 nt, Human
ugcuccccaca

SEQ ID NO: 2681011 - RNA, 13 nt, Human
ugcuccccacagc

SEQ ID NO: 2681012 - RNA, 14 nt, Human
ugcuccccacagcg

SEQ ID NO: 2681013 - RNA, 19 nt, Human
ugcuccccacagcgucccu

SEQ ID NO: 2681014 - RNA, 20 nt, Human
ugcuccccacagcgucccug

SEQ ID NO: 2681015 - RNA, 21 nt, Human
ugcuccccacagcgucccugg

SEQ ID NO: 2681016 - RNA, 22 nt, Human
ugcuccccacagcgucccuggc

SEQ ID NO: 2681017 - RNA, 23 nt, Human
ugcuccccacagcgucccuggcg

SEQ ID NO: 2681018 - RNA, 15 nt, Human
ugcuccagcaacaca

SEQ ID NO: 2681019 - RNA, 19 nt, Human
ugcuccagcaacacagccu

SEQ ID NO: 2681020 - RNA, 23 nt, Human
ugcuccagcaacacagccugggc

SEQ ID NO: 2681021 - RNA, 19 nt, Human
ugcuccagcuguucagcug

SEQ ID NO: 2681022 - RNA, 16 nt, Human
ugcuccagcuguucag

SEQ ID NO: 2681023 - RNA, 18 nt, Human
ugcuauuuauuuuccuaa

SEQ ID NO: 2681024 - RNA, 19 nt, Human
ugcuauuuauuuuccuaaa

SEQ ID NO: 2681025 - RNA, 16 nt, Human
ugcuauuuauuuuccu

SEQ ID NO: 2681026 - RNA, 20 nt, Human
uggccaggcuggucuugaac

SEQ ID NO: 2681027 - RNA, 17 nt, Human
aggccugguguuucuug

SEQ ID NO: 2681028 - RNA, 18 nt, Human
aggcucguggacugagug

SEQ ID NO: 2681029 - RNA, 23 nt, Human
aggcucuauuccaauaaacuaug

SEQ ID NO: 2681030 - RNA, 12 nt, Human
aggcuggcaggu

SEQ ID NO: 2681031 - RNA, 15 nt, Human
aggcuggccagucca

SEQ ID NO: 2681032 - RNA, 23 nt, Human
aggcuggaucuuggagaauguga

SEQ ID NO: 2681033 - RNA, 18 nt, Human
aggcuggcgagagucugg

SEQ ID NO: 2681034 - RNA, 17 nt, Human
aggcuggcgagagucug

SEQ ID NO: 2681035 - RNA, 22 nt, Human
aggcuggcgagagucuggcccu

SEQ ID NO: 2681036 - RNA, 20 nt, Human
aggcuggcgagagucuggcc

SEQ ID NO: 2681037 - RNA, 19 nt, Human
aggcuggcgagagucuggc

SEQ ID NO: 2681038 - RNA, 17 nt, Human
aggcuggccaguccagg

SEQ ID NO: 2681039 - RNA, 18 nt, Human
aggcuggccaguccaggc

SEQ ID NO: 2681040 - RNA, 19 nt, Human
aggcuggccaguccaggcu

SEQ ID NO: 2681041 - RNA, 21 nt, Human
aggcuggccaguccaggcugc

SEQ ID NO: 2681042 - RNA, 23 nt, Human
uggcugagguuccucugccugcc

SEQ ID NO: 2681043 - RNA, 24 nt, Human
uggcugagguuccucugccugccc

SEQ ID NO: 2681044 - RNA, 17 nt, Human
uggcugagguuccucug

SEQ ID NO: 2681045 - RNA, 18 nt, Human
uggcugagguuccucugc

SEQ ID NO: 2681046 - RNA, 20 nt, Human
uggcugagguuccucugccu

SEQ ID NO: 2681047 - RNA, 21 nt, Human
uggcugagguuccucugccug

SEQ ID NO: 2681048 - RNA, 22 nt, Human
uggcugagguuccucugccugc

SEQ ID NO: 2681049 - RNA, 20 nt, Human
uggcuguugacgcaccugug

SEQ ID NO: 2681050 - RNA, 13 nt, Human
uggcuuacacugg

SEQ ID NO: 2681051 - RNA, 22 nt, Human
uggcuucacggaagagccuugc

SEQ ID NO: 2681052 - RNA, 23 nt, Human
uggcuucacggaagagccuugcg

SEQ ID NO: 2681053 - RNA, 23 nt, Human
ugggaaagcgcggacgugcuggg

SEQ ID NO: 2681054 - RNA, 15 nt, Human
uggcuuaaucauuuu

SEQ ID NO: 2681055 - RNA, 22 nt, Human
ugggaagcccauccugaccagc

SEQ ID NO: 2681056 - RNA, 19 nt, Human
ugggaagcccauccugacc

SEQ ID NO: 2681057 - RNA, 19 nt, Human
aggccucuccauuugcucu

SEQ ID NO: 2681058 - RNA, 21 nt, Human
aggccucuccauuugcucuuc

SEQ ID NO: 2681059 - RNA, 13 nt, Human
aggccuauuucau

SEQ ID NO: 2681060 - RNA, 14 nt, Human
aggccuauuucauc

SEQ ID NO: 2681061 - RNA, 21 nt, Human
aggccuauuucaucacaagaa

SEQ ID NO: 2681062 - RNA, 12 nt, Human
aggccugcuccc

SEQ ID NO: 2681063 - RNA, 14 nt, Human
aggccugcucccug

SEQ ID NO: 2681064 - RNA, 23 nt, Human
aggccugcucccuguagggucca

SEQ ID NO: 2681065 - RNA, 18 nt, Human
aggccugccucccacuuc

SEQ ID NO: 2681066 - RNA, 22 nt, Human
aggccugccucccacuucacug

SEQ ID NO: 2681067 - RNA, 17 nt, Human
aggccugcgacccuggg

SEQ ID NO: 2681068 - RNA, 18 nt, Human
aggccugcgacccugggg

SEQ ID NO: 2681069 - RNA, 19 nt, Human
aggccugcgacccuggggg

SEQ ID NO: 2681070 - RNA, 20 nt, Human
aggccugcgacccugggggc

SEQ ID NO: 2681071 - RNA, 21 nt, Human
aggccugcgacccugggggca

SEQ ID NO: 2681072 - RNA, 16 nt, Human
aggccugaucugccca

SEQ ID NO: 2681073 - RNA, 13 nt, Human
uggccaagaagca

SEQ ID NO: 2681074 - RNA, 16 nt, Human
uggccaagaagcagug

SEQ ID NO: 2681075 - RNA, 21 nt, Human
uggccaagaagcaguggccuu

SEQ ID NO: 2681076 - RNA, 23 nt, Human
uggccaguccaggcugccguggg

SEQ ID NO: 2681077 - RNA, 20 nt, Human
uggccagucuggucucgaac

SEQ ID NO: 2681078 - RNA, 17 nt, Human
uggccaguccaggcugc

SEQ ID NO: 2681079 - RNA, 21 nt, Human
uggccaguccaggcugccgug

SEQ ID NO: 2681080 - RNA, 16 nt, Human
uggccaguccaggcug

SEQ ID NO: 2681081 - RNA, 22 nt, Human
uggccaagaagcaguggccuua

SEQ ID NO: 2681082 - RNA, 13 nt, Human
uggcccuagacuc

SEQ ID NO: 2681083 - RNA, 17 nt, Human
uggccgcugaguggcag

SEQ ID NO: 2681084 - RNA, 19 nt, Human
uggccgcugaguggcaggg

SEQ ID NO: 2681085 - RNA, 16 nt, Human
uggccgcgcuccgggc

SEQ ID NO: 2681086 - RNA, 18 nt, Human
uggccgcgcuccgggcuu

SEQ ID NO: 2681087 - RNA, 17 nt, Human
uggccgcggagccugca

SEQ ID NO: 2681088 - RNA, 18 nt, Human
aggccaaggugggaggau

SEQ ID NO: 2681089 - RNA, 13 nt, Human
uggacggcaggcu

SEQ ID NO: 2681090 - RNA, 15 nt, Human
uggacggcaggcuca

SEQ ID NO: 2681091 - RNA, 18 nt, Human
uggacggcaggcucacug

SEQ ID NO: 2681092 - RNA, 20 nt, Human
uggacggcaggcucacugcc

SEQ ID NO: 2681093 - RNA, 13 nt, Human
uggagucuccuga

SEQ ID NO: 2681094 - RNA, 14 nt, Human
uggagucuccugag

SEQ ID NO: 2681095 - RNA, 16 nt, Human
aggccaagaauauugc

SEQ ID NO: 2681096 - RNA, 18 nt, Human
aggccaagaauauugcaa

SEQ ID NO: 2681097 - RNA, 19 nt, Human
aggccaagaauauugcaaa

SEQ ID NO: 2681098 - RNA, 20 nt, Human
aggccaagaauauugcaaaa

SEQ ID NO: 2681099 - RNA, 15 nt, Human
uggauguuacucucu

SEQ ID NO: 2681100 - RNA, 18 nt, Human
uggcaccagcagccugga

SEQ ID NO: 2681101 - RNA, 20 nt, Human
uggcacccaccguggaggag

SEQ ID NO: 2681102 - RNA, 21 nt, Human
uggcacccaccguggaggagg

SEQ ID NO: 2681103 - RNA, 22 nt, Human
uggcacccaccguggaggagga

SEQ ID NO: 2681104 - RNA, 11 nt, Human
uggcagcccag

SEQ ID NO: 2681105 - RNA, 12 nt, Human
uggcagcccaga

SEQ ID NO: 2681106 - RNA, 21 nt, Human
auccugugacugucucacuua

SEQ ID NO: 2681107 - RNA, 11 nt, Human
auccugugacu

SEQ ID NO: 2681108 - RNA, 15 nt, Human
auccugugcaauaga

SEQ ID NO: 2681109 - RNA, 14 nt, Human
auccuguguagcau

SEQ ID NO: 2681110 - RNA, 15 nt, Human
auccuuaaaucuuaa

SEQ ID NO: 2681111 - RNA, 20 nt, Human
auccuuaaaucuuaauguuc

SEQ ID NO: 2681112 - RNA, 22 nt, Human
auccuuaaaucuuaauguuccu

SEQ ID NO: 2681113 - RNA, 16 nt, Human
auccuguauucuucaa

SEQ ID NO: 2681114 - RNA, 21 nt, Human
auccuguauucuucaaccagu

SEQ ID NO: 2681115 - RNA, 22 nt, Human
aucggccuagggcccccacagu

SEQ ID NO: 2681116 - RNA, 20 nt, Human
auccuggaacaauauuuuau

SEQ ID NO: 2681117 - RNA, 21 nt, Human
auccuggaacaauauuuuaug

SEQ ID NO: 2681118 - RNA, 11 nt, Human
auccuggcagc

SEQ ID NO: 2681119 - RNA, 12 nt, Human
auccuggcagcc

SEQ ID NO: 2681120 - RNA, 13 nt, Human
auccuggcagccc

SEQ ID NO: 2681121 - RNA, 20 nt, Human
auccuggcagcccagagacu

SEQ ID NO: 2681122 - RNA, 24 nt, Human
auccuggcagcccagagacuuugu

SEQ ID NO: 2681123 - RNA, 15 nt, Human
auccuggcagcccag

SEQ ID NO: 2681124 - RNA, 16 nt, Human
auccuggcagcccaga

SEQ ID NO: 2681125 - RNA, 18 nt, Human
auccuggcagcccagaga

SEQ ID NO: 2681126 - RNA, 19 nt, Human
auccuggcagcccagagac

SEQ ID NO: 2681127 - RNA, 18 nt, Human
auccuggcuaacauggug

SEQ ID NO: 2681128 - RNA, 18 nt, Human
auccugggggccuggguu

SEQ ID NO: 2681129 - RNA, 21 nt, Human
auccugggggccuggguuggg

SEQ ID NO: 2681130 - RNA, 21 nt, Human
auccugggggacccaauguag

SEQ ID NO: 2681131 - RNA, 16 nt, Human
auccugcggguggggc

SEQ ID NO: 2681132 - RNA, 15 nt, Human
auccugauuccucuc

SEQ ID NO: 2681133 - RNA, 17 nt, Human
auccugauuccucucua

SEQ ID NO: 2681134 - RNA, 18 nt, Human
auccugauuccucucuaa

SEQ ID NO: 2681135 - RNA, 20 nt, Human
auccugauuccucucuaagu

SEQ ID NO: 2681136 - RNA, 23 nt, Human
uucuuuugguaaagacuggcuuu

SEQ ID NO: 2681137 - RNA, 13 nt, Human
uucuuuugguaaa

SEQ ID NO: 2681138 - RNA, 22 nt, Human
uucuuuugguaaagacuggcuu

SEQ ID NO: 2681139 - RNA, 14 nt, Human
uucuuuucucagug

SEQ ID NO: 2681140 - RNA, 13 nt, Human
auccugaagagca

SEQ ID NO: 2681141 - RNA, 24 nt, Human
auccugaccagcugcuccgaggac

SEQ ID NO: 2681142 - RNA, 18 nt, Human
aucuaaaucuauuuauua

SEQ ID NO: 2681143 - RNA, 16 nt, Human
aucuaaaucuauuuau

SEQ ID NO: 2681144 - RNA, 15 nt, Human
aucuaaaucuauuua

SEQ ID NO: 2681145 - RNA, 13 nt, Human
aucuaaaucuauu

SEQ ID NO: 2681146 - RNA, 19 nt, Human
aucggcugcauugaagauc

SEQ ID NO: 2681147 - RNA, 15 nt, Human
aucgugaagaagccu

SEQ ID NO: 2681148 - RNA, 23 nt, Human
aucgugaagaagccuguaacacu

SEQ ID NO: 2681149 - RNA, 14 nt, Human
uugaagguuuuuga

SEQ ID NO: 2681150 - RNA, 16 nt, Human
uugaagguuuuugaua

SEQ ID NO: 2681151 - RNA, 19 nt, Human
uugaagggucuuucucaaa

SEQ ID NO: 2681152 - RNA, 17 nt, Human
uugaaguaaugaauuuu

SEQ ID NO: 2681153 - RNA, 16 nt, Human
uugaaguaaugaauuu

SEQ ID NO: 2681154 - RNA, 12 nt, Human
uugaaguaauga

SEQ ID NO: 2681155 - RNA, 19 nt, Human
uugaagucuauaaaaaaua

SEQ ID NO: 2681156 - RNA, 13 nt, Human
uugaauauaugau

SEQ ID NO: 2681157 - RNA, 23 nt, Human
uugaauaugauuaaaaauaucaa

SEQ ID NO: 2681158 - RNA, 15 nt, Human
uugaauaugauuaaa

SEQ ID NO: 2681159 - RNA, 14 nt, Human
uugaauaugauuaa

SEQ ID NO: 2681160 - RNA, 18 nt, Human
uugaaguggccagaugag

SEQ ID NO: 2681161 - RNA, 18 nt, Human
uugaagucuuuaauaaau

SEQ ID NO: 2681162 - RNA, 20 nt, Human
uugaagucuuuaauaaauaa

SEQ ID NO: 2681163 - RNA, 16 nt, Human
uugaaguguauaauau

SEQ ID NO: 2681164 - RNA, 21 nt, Human
uugaaguguauaauauaaaaa

SEQ ID NO: 2681165 - RNA, 15 nt, Human
uugauaaauccauca

SEQ ID NO: 2681166 - RNA, 22 nt, Human
uugagaagaccucaccuagaaa

SEQ ID NO: 2681167 - RNA, 19 nt, Human
uugagaagccuucagcucc

SEQ ID NO: 2681168 - RNA, 21 nt, Human
uugagaagccuucagcuccag

SEQ ID NO: 2681169 - RNA, 22 nt, Human
uugacacugaacuuaauaacug

SEQ ID NO: 2681170 - RNA, 23 nt, Human
uugagaagccuucagcuccaggg

SEQ ID NO: 2681171 - RNA, 17 nt, Human
auccacaauaaccaaga

SEQ ID NO: 2681172 - RNA, 15 nt, Human
auccacaugaaaaua

SEQ ID NO: 2681173 - RNA, 16 nt, Human
auccacaugaaaauaa

SEQ ID NO: 2681174 - RNA, 14 nt, Human
auccaacuccagca

SEQ ID NO: 2681175 - RNA, 22 nt, Human
auccaaauuuuuuuuuaaagca

SEQ ID NO: 2681176 - RNA, 15 nt, Human
auccaacuccagcaa

SEQ ID NO: 2681177 - RNA, 16 nt, Human
auccaacuccagcaac

SEQ ID NO: 2681178 - RNA, 20 nt, Human
auccaauggguuuuucccug

SEQ ID NO: 2681179 - RNA, 19 nt, Human
aucccacuaaugcaaacug

SEQ ID NO: 2681180 - RNA, 20 nt, Human
aucccacuaaugcaaacugg

SEQ ID NO: 2681181 - RNA, 14 nt, Human
uucuguuuaauuuu

SEQ ID NO: 2681182 - RNA, 19 nt, Human
uucuguuuaauuuucacuu

SEQ ID NO: 2681183 - RNA, 20 nt, Human
aucccugaucccauuuuccu

SEQ ID NO: 2681184 - RNA, 16 nt, Human
uucuuacgcaaugcuu

SEQ ID NO: 2681185 - RNA, 15 nt, Human
uucuuacuaaaaagu

SEQ ID NO: 2681186 - RNA, 18 nt, Human
uucuuacuaaaaaguaua

SEQ ID NO: 2681187 - RNA, 20 nt, Human
uucuuacuaaaaaguauaaa

SEQ ID NO: 2681188 - RNA, 15 nt, Human
uucuugcaagcaugc

SEQ ID NO: 2681189 - RNA, 15 nt, Human
uucuugccucugugc

SEQ ID NO: 2681190 - RNA, 16 nt, Human
uucuugccucugugcu

SEQ ID NO: 2681191 - RNA, 17 nt, Human
uucuugccucugugcug

SEQ ID NO: 2681192 - RNA, 22 nt, Human
uucuugccucugugcugugugu

SEQ ID NO: 2681193 - RNA, 18 nt, Human
aucacuguuuagauuugc

SEQ ID NO: 2681194 - RNA, 17 nt, Human
aucacuguuuagauuug

SEQ ID NO: 2681195 - RNA, 19 nt, Human
aucacuuagcgaacccuuu

SEQ ID NO: 2681196 - RNA, 13 nt, Human
aucacuuaaaaca

SEQ ID NO: 2681197 - RNA, 12 nt, Human
aucacuuaaaac

SEQ ID NO: 2681198 - RNA, 22 nt, Human
aucacuguuuagauuugccaua

SEQ ID NO: 2681199 - RNA, 15 nt, Human
aucacuuaaaacacg

SEQ ID NO: 2681200 - RNA, 14 nt, Human
aucacuuaaaacac

SEQ ID NO: 2681201 - RNA, 18 nt, Human
aucacuuaaaacacguuu

SEQ ID NO: 2681202 - RNA, 17 nt, Human
aucauaguuuuauuuau

SEQ ID NO: 2681203 - RNA, 16 nt, Human
aucauaguuuuauuua

SEQ ID NO: 2681204 - RNA, 14 nt, Human
aucauaguuuuauu

SEQ ID NO: 2681205 - RNA, 15 nt, Human
aucauaguuacugug

SEQ ID NO: 2681206 - RNA, 16 nt, Human
aucauaguuacugugu

SEQ ID NO: 2681207 - RNA, 19 nt, Human
aucauaguuacuguguaaa

SEQ ID NO: 2681208 - RNA, 23 nt, Human
aucauaguuuuauuuauauuuau

SEQ ID NO: 2681209 - RNA, 19 nt, Human
aucauaguuuuauuuauau

SEQ ID NO: 2681210 - RNA, 18 nt, Human
uucuccguuagcuccugu

SEQ ID NO: 2681211 - RNA, 19 nt, Human
uucuccguuagcuccugug

SEQ ID NO: 2681212 - RNA, 20 nt, Human
uucuccguuagcuccugugg

SEQ ID NO: 2681213 - RNA, 22 nt, Human
uucuccguuagcuccuguggcc

SEQ ID NO: 2681214 - RNA, 13 nt, Human
uucuccgccagcc

SEQ ID NO: 2681215 - RNA, 14 nt, Human
uucuccgccagccu

SEQ ID NO: 2681216 - RNA, 15 nt, Human
uucuccgccagccuc

SEQ ID NO: 2681217 - RNA, 16 nt, Human
uucuccgccagccucc

SEQ ID NO: 2681218 - RNA, 17 nt, Human
uucuccgccagccuccu

SEQ ID NO: 2681219 - RNA, 18 nt, Human
uucuccgccagccuccuc

SEQ ID NO: 2681220 - RNA, 16 nt, Human
uucuccguuagcuccu

SEQ ID NO: 2681221 - RNA, 17 nt, Human
uucuccguuagcuccug

SEQ ID NO: 2681222 - RNA, 19 nt, Human
uucuccgccagccuccucu

SEQ ID NO: 2681223 - RNA, 20 nt, Human
uucuccgccagccuccucug

SEQ ID NO: 2681224 - RNA, 21 nt, Human
uucuccgccagccuccucugg

SEQ ID NO: 2681225 - RNA, 14 nt, Human
aucauucuuacuaa

SEQ ID NO: 2681226 - RNA, 18 nt, Human
aucauucuuacuaaaaag

SEQ ID NO: 2681227 - RNA, 23 nt, Human
aucauucuuacuaaaaaguauaa

SEQ ID NO: 2681228 - RNA, 22 nt, Human
aucauuguacauagcauguuua

SEQ ID NO: 2681229 - RNA, 17 nt, Human
uucucgugccuccccac

SEQ ID NO: 2681230 - RNA, 23 nt, Human
uucucguuuuuauagucaauggc

SEQ ID NO: 2681231 - RNA, 15 nt, Human
uucucuauuaaaaug

SEQ ID NO: 2681232 - RNA, 20 nt, Human
auauuugaauuuuaaaucua

SEQ ID NO: 2681233 - RNA, 13 nt, Human
auauuugaauuuu

SEQ ID NO: 2681234 - RNA, 12 nt, Human
auauuugauuua

SEQ ID NO: 2681235 - RNA, 18 nt, Human
auauuugauuuauuaacu

SEQ ID NO: 2681236 - RNA, 16 nt, Human
auauuugauuuauuaa

SEQ ID NO: 2681237 - RNA, 15 nt, Human
auauuugauuuauua

SEQ ID NO: 2681238 - RNA, 14 nt, Human
auauuugauuuauu

SEQ ID NO: 2681239 - RNA, 17 nt, Human
auauuaaaaaagagaca

SEQ ID NO: 2681240 - RNA, 23 nt, Human
auauuugauuuauuaacuuaaua

SEQ ID NO: 2681241 - RNA, 17 nt, Human
auauuugcaaaguguau

SEQ ID NO: 2681242 - RNA, 20 nt, Human
auauuugcaaaguguauuag

SEQ ID NO: 2681243 - RNA, 16 nt, Human
uucccuaaucuauggu

SEQ ID NO: 2681244 - RNA, 22 nt, Human
uuccgaagaagaugcuccagca

SEQ ID NO: 2681245 - RNA, 20 nt, Human
uuccugaaacuauauuuugu

SEQ ID NO: 2681246 - RNA, 17 nt, Human
uuccugaaacuauauuu

SEQ ID NO: 2681247 - RNA, 22 nt, Human
uuccucuuuuuauuuaguuccu

SEQ ID NO: 2681248 - RNA, 21 nt, Human
uuccuggcacuggaccccagc

SEQ ID NO: 2681249 - RNA, 14 nt, Human
uuccucucuccaga

SEQ ID NO: 2681250 - RNA, 15 nt, Human
uuccucucuauauuu

SEQ ID NO: 2681251 - RNA, 14 nt, Human
uuccucucuaagug

SEQ ID NO: 2681252 - RNA, 15 nt, Human
uuccucucuccagau

SEQ ID NO: 2681253 - RNA, 16 nt, Human
uuccucucuauauuuc

SEQ ID NO: 2681254 - RNA, 19 nt, Human
aucaagguuauaauuuuuu

SEQ ID NO: 2681255 - RNA, 23 nt, Human
aucaagguuauaauuuuuuuuaa

SEQ ID NO: 2681256 - RNA, 22 nt, Human
aucaacuuagucaauaagaaaa

SEQ ID NO: 2681257 - RNA, 17 nt, Human
auauuuuucauaaacaa

SEQ ID NO: 2681258 - RNA, 18 nt, Human
auauuuuucauaaacaag

SEQ ID NO: 2681259 - RNA, 18 nt, Human
uuccuuacagaacuacuu

SEQ ID NO: 2681260 - RNA, 19 nt, Human
auauuuaacauuauuuaua

SEQ ID NO: 2681261 - RNA, 14 nt, Human
auauuguuucugca

SEQ ID NO: 2681262 - RNA, 19 nt, Human
auauuguuucugcauucau

SEQ ID NO: 2681263 - RNA, 19 nt, Human
auauuguuuuacaauaguu

SEQ ID NO: 2681264 - RNA, 9 nt, Human
auauuuaau

SEQ ID NO: 2681265 - RNA, 22 nt, Human
auauuuaacauuauuuauaugg

SEQ ID NO: 2681266 - RNA, 14 nt, Human
auauuguuugguaa

SEQ ID NO: 2681267 - RNA, 16 nt, Human
auauuguuugguaaau

SEQ ID NO: 2681268 - RNA, 18 nt, Human
auauuguuugguaaaugu

SEQ ID NO: 2681269 - RNA, 19 nt, Human
auauuguuugguaaauguu

SEQ ID NO: 2681270 - RNA, 21 nt, Human
auauuguuugguaaauguuuc

SEQ ID NO: 2681271 - RNA, 18 nt, Human
auauugguuuuaugauga

SEQ ID NO: 2681272 - RNA, 17 nt, Human
auauugguuuuaugaug

SEQ ID NO: 2681273 - RNA, 12 nt, Human
auauugguuuua

SEQ ID NO: 2681274 - RNA, 15 nt, Human
auauugguuuuauga

SEQ ID NO: 2681275 - RNA, 13 nt, Human
auauugguuuuau

SEQ ID NO: 2681276 - RNA, 19 nt, Human
auauugguuuuaugaugac

SEQ ID NO: 2681277 - RNA, 12 nt, Human
auauuacauuua

SEQ ID NO: 2681278 - RNA, 22 nt, Human
auauuacauuuauuuauccaga

SEQ ID NO: 2681279 - RNA, 12 nt, Human
auauuccuuugc

SEQ ID NO: 2681280 - RNA, 23 nt, Human
auauuccuuugcauauuauaaag

SEQ ID NO: 2681281 - RNA, 18 nt, Human
auauugaggccaagaaua

SEQ ID NO: 2681282 - RNA, 19 nt, Human
auauugaggccaagaauau

SEQ ID NO: 2681283 - RNA, 22 nt, Human
auauugaggccaagaauauugc

SEQ ID NO: 2681284 - RNA, 12 nt, Human
auauugaauguu

SEQ ID NO: 2681285 - RNA, 13 nt, Human
auauugaauguua

SEQ ID NO: 2681286 - RNA, 14 nt, Human
auauuacaaaaaca

SEQ ID NO: 2681287 - RNA, 16 nt, Human
auauuacaaaaacaaa

SEQ ID NO: 2681288 - RNA, 22 nt, Human
auauuacaaaaacaaaauaaaa

SEQ ID NO: 2681289 - RNA, 12 nt, Human
auauuacaauga

SEQ ID NO: 2681290 - RNA, 16 nt, Human
auauuacaaugaucac

SEQ ID NO: 2681291 - RNA, 15 nt, Human
auauuacaaugauca

SEQ ID NO: 2681292 - RNA, 13 nt, Human
auauuacaaugau

SEQ ID NO: 2681293 - RNA, 23 nt, Human
uuccaauuauuuauaauaaauca

SEQ ID NO: 2681294 - RNA, 21 nt, Human
auauguuuaaaauaaaaugaa

SEQ ID NO: 2681295 - RNA, 17 nt, Human
auauuaaacauccacaa

SEQ ID NO: 2681296 - RNA, 21 nt, Human
uucacuugaugauacaaugaa

SEQ ID NO: 2681297 - RNA, 19 nt, Human
uucacuuguguuuuaaaau

SEQ ID NO: 2681298 - RNA, 18 nt, Human
uuaucauucaaguguaaa

SEQ ID NO: 2681299 - RNA, 14 nt, Human
uucagaaaaagaaa

SEQ ID NO: 2681300 - RNA, 15 nt, Human
uucagaaaaagaaau

SEQ ID NO: 2681301 - RNA, 16 nt, Human
uucagaaaaagaaaug

SEQ ID NO: 2681302 - RNA, 10 nt, Human
uucagccaag

SEQ ID NO: 2681303 - RNA, 17 nt, Human
uucagcauuaagcuguu

SEQ ID NO: 2681304 - RNA, 22 nt, Human
uucagcauuaagcuguuccugu

SEQ ID NO: 2681305 - RNA, 17 nt, Human
uucagcagcaaauuuuc

SEQ ID NO: 2681306 - RNA, 19 nt, Human
uucagcagcaaauuuucag

SEQ ID NO: 2681307 - RNA, 20 nt, Human
uucagcagcaaauuuucagc

SEQ ID NO: 2681308 - RNA, 15 nt, Human
auauauggaagagga

SEQ ID NO: 2681309 - RNA, 19 nt, Human
auauauuucuaaauguuug

SEQ ID NO: 2681310 - RNA, 12 nt, Human
auauauuucuau

SEQ ID NO: 2681311 - RNA, 13 nt, Human
auauauuucuauu

SEQ ID NO: 2681312 - RNA, 17 nt, Human
auauauuucuauuauua

SEQ ID NO: 2681313 - RNA, 23 nt, Human
auauauuucuauuauuaauugca

SEQ ID NO: 2681314 - RNA, 15 nt, Human
uucaucauccagaug

SEQ ID NO: 2681315 - RNA, 15 nt, Human
uucaguaacugucag

SEQ ID NO: 2681316 - RNA, 20 nt, Human
uucaguaaguuaucuuugaa

SEQ ID NO: 2681317 - RNA, 17 nt, Human
uucagucacauggcaug

SEQ ID NO: 2681318 - RNA, 17 nt, Human
uucagucccuuccccau

SEQ ID NO: 2681319 - RNA, 14 nt, Human
uucaguaagccgug

SEQ ID NO: 2681320 - RNA, 12 nt, Human
uucagaaauguu

SEQ ID NO: 2681321 - RNA, 23 nt, Human
uucagggugcagcccaaucugcc

SEQ ID NO: 2681322 - RNA, 17 nt, Human
uucauaguaagauugau

SEQ ID NO: 2681323 - RNA, 19 nt, Human
uucauaguauccauauuuu

SEQ ID NO: 2681324 - RNA, 23 nt, Human
uucauaguauccauauuuuauua

SEQ ID NO: 2681325 - RNA, 16 nt, Human
auauggggaauauauu

SEQ ID NO: 2681326 - RNA, 23 nt, Human
auauggguuagauguugccaugu

SEQ ID NO: 2681327 - RNA, 13 nt, Human
auauguacuguuu

SEQ ID NO: 2681328 - RNA, 15 nt, Human
auauguaguaucuau

SEQ ID NO: 2681329 - RNA, 22 nt, Human
auauguguaugcacaguaaaaa

SEQ ID NO: 2681330 - RNA, 16 nt, Human
auauauuuugugugaa

SEQ ID NO: 2681331 - RNA, 19 nt, Human
auauauuuugugugaaauu

SEQ ID NO: 2681332 - RNA, 20 nt, Human
auauauuuugugugaaauug

SEQ ID NO: 2681333 - RNA, 22 nt, Human
auauauuuugugugaaauugca

SEQ ID NO: 2681334 - RNA, 16 nt, Human
auaugaacauacaaau

SEQ ID NO: 2681335 - RNA, 15 nt, Human
auauauuuucuguuu

SEQ ID NO: 2681336 - RNA, 19 nt, Human
auaugaacauacaaaugca

SEQ ID NO: 2681337 - RNA, 18 nt, Human
auaugaacauacaaaugc

SEQ ID NO: 2681338 - RNA, 17 nt, Human
auaugaacauacaaaug

SEQ ID NO: 2681339 - RNA, 15 nt, Human
auaugacuuuuuaua

SEQ ID NO: 2681340 - RNA, 13 nt, Human
uucauuauucucu

SEQ ID NO: 2681341 - RNA, 15 nt, Human
uucauuauucucugc

SEQ ID NO: 2681342 - RNA, 16 nt, Human
uucauucuucagauau

SEQ ID NO: 2681343 - RNA, 18 nt, Human
uucauuauuuuaaaaaua

SEQ ID NO: 2681344 - RNA, 17 nt, Human
uuccaguauaaccagcu

SEQ ID NO: 2681345 - RNA, 15 nt, Human
uuccagggaggggcc

SEQ ID NO: 2681346 - RNA, 17 nt, Human
uuccagguuuaagcugu

SEQ ID NO: 2681347 - RNA, 18 nt, Human
uuccagguuuaagcuguu

SEQ ID NO: 2681348 - RNA, 14 nt, Human
uuccacuaaaaaua

SEQ ID NO: 2681349 - RNA, 18 nt, Human
uuccacuaaaaauauugu

SEQ ID NO: 2681350 - RNA, 22 nt, Human
uuccaccacagccagcaccugg

SEQ ID NO: 2681351 - RNA, 15 nt, Human
uuccaccacagccag

SEQ ID NO: 2681352 - RNA, 16 nt, Human
uuccaccacagccagc

SEQ ID NO: 2681353 - RNA, 21 nt, Human
uuccaccacagccagcaccug

SEQ ID NO: 2681354 - RNA, 16 nt, Human
uuucgaagucauuaaa

SEQ ID NO: 2681355 - RNA, 20 nt, Human
uuucgaagucauuaaacugg

SEQ ID NO: 2681356 - RNA, 16 nt, Human
uuuccuuuuugacacu

SEQ ID NO: 2681357 - RNA, 17 nt, Human
uuuccuuuuugacacug

SEQ ID NO: 2681358 - RNA, 18 nt, Human
uuuccuuuuugacacuga

SEQ ID NO: 2681359 - RNA, 19 nt, Human
uuuccuuuuugacacugaa

SEQ ID NO: 2681360 - RNA, 14 nt, Human
uuuccuuuguccuu

SEQ ID NO: 2681361 - RNA, 21 nt, Human
uuuccuuuuuaaggucuuuca

SEQ ID NO: 2681362 - RNA, 13 nt, Human
uuuccuuuaugug

SEQ ID NO: 2681363 - RNA, 14 nt, Human
uuuccuuuauguga

SEQ ID NO: 2681364 - RNA, 15 nt, Human
uuuccuuuaugugaa

SEQ ID NO: 2681365 - RNA, 17 nt, Human
uuuccuuuaugugaauu

SEQ ID NO: 2681366 - RNA, 19 nt, Human
uuuccuuuaugugaauuuu

SEQ ID NO: 2681367 - RNA, 21 nt, Human
uuuccuuuaugugaauuuuua

SEQ ID NO: 2681368 - RNA, 23 nt, Human
uuuccuuuaugugaauuuuuaag

SEQ ID NO: 2681369 - RNA, 13 nt, Human
uuucguggggagg

SEQ ID NO: 2681370 - RNA, 16 nt, Human
uuucgccuuuccucuc

SEQ ID NO: 2681371 - RNA, 13 nt, Human
uuucgccuuuccu

SEQ ID NO: 2681372 - RNA, 12 nt, Human
uuuccuguugaa

SEQ ID NO: 2681373 - RNA, 22 nt, Human
uuuccuguggcauaaauugcau

SEQ ID NO: 2681374 - RNA, 17 nt, Human
auggccucauguggcug

SEQ ID NO: 2681375 - RNA, 18 nt, Human
auggccucauguggcugg

SEQ ID NO: 2681376 - RNA, 19 nt, Human
auggccucauguggcugga

SEQ ID NO: 2681377 - RNA, 20 nt, Human
auggccucauguggcuggaa

SEQ ID NO: 2681378 - RNA, 22 nt, Human
uuucccaucugcaccccuucuc

SEQ ID NO: 2681379 - RNA, 13 nt, Human
auggccucaugug

SEQ ID NO: 2681380 - RNA, 21 nt, Human
auggacccaauauuuaccaga

SEQ ID NO: 2681381 - RNA, 12 nt, Human
augggccccugg

SEQ ID NO: 2681382 - RNA, 14 nt, Human
augggccccuggca

SEQ ID NO: 2681383 - RNA, 16 nt, Human
augggccccuggcacu

SEQ ID NO: 2681384 - RNA, 19 nt, Human
augggaccuguggcugucg

SEQ ID NO: 2681385 - RNA, 18 nt, Human
uuucuuuaggagauuuau

SEQ ID NO: 2681386 - RNA, 23 nt, Human
uuucuuuugguaaagacuggcuu

SEQ ID NO: 2681387 - RNA, 13 nt, Human
uuugaaaacuuca

SEQ ID NO: 2681388 - RNA, 19 nt, Human
uuugaaaacuucagaagca

SEQ ID NO: 2681389 - RNA, 13 nt, Human
uuugaaaagcaga

SEQ ID NO: 2681390 - RNA, 18 nt, Human
uuugaaaagcagacauuu

SEQ ID NO: 2681391 - RNA, 16 nt, Human
uuugaaaagcagacau

SEQ ID NO: 2681392 - RNA, 12 nt, Human
uuucuggcaccg

SEQ ID NO: 2681393 - RNA, 23 nt, Human
uuucuuuaaccuuguauaaauua

SEQ ID NO: 2681394 - RNA, 20 nt, Human
uuucugcuuuagacuugaaa

SEQ ID NO: 2681395 - RNA, 19 nt, Human
uuucugcuuuagacuugaa

SEQ ID NO: 2681396 - RNA, 17 nt, Human
uuucugcuuuagacuug

SEQ ID NO: 2681397 - RNA, 12 nt, Human
uuucugcccugg

SEQ ID NO: 2681398 - RNA, 13 nt, Human
uuucugcccuggc

SEQ ID NO: 2681399 - RNA, 14 nt, Human
uuucugcccuggcu

SEQ ID NO: 2681400 - RNA, 15 nt, Human
uuucugcccuggcug

SEQ ID NO: 2681401 - RNA, 20 nt, Human
uuucugcccuggcugcugcc

SEQ ID NO: 2681402 - RNA, 14 nt, Human
uuucugccuggagu

SEQ ID NO: 2681403 - RNA, 22 nt, Human
uuucugccuggaguguaugacu

SEQ ID NO: 2681404 - RNA, 23 nt, Human
uuugaaagugccuuugcagcuca

SEQ ID NO: 2681405 - RNA, 21 nt, Human
uuugaaagugccuuugcagcu

SEQ ID NO: 2681406 - RNA, 18 nt, Human
uuugaaagugccuuugca

SEQ ID NO: 2681407 - RNA, 14 nt, Human
uuugaaagugccuu

SEQ ID NO: 2681408 - RNA, 18 nt, Human
uuugaaaauaguuuauuu

SEQ ID NO: 2681409 - RNA, 15 nt, Human
uuugaaaauaguuua

SEQ ID NO: 2681410 - RNA, 14 nt, Human
uuugaaaauaguuu

SEQ ID NO: 2681411 - RNA, 11 nt, Human
uuugaaaauag

SEQ ID NO: 2681412 - RNA, 22 nt, Human
uuugaaaaguaauauuuauuaa

SEQ ID NO: 2681413 - RNA, 17 nt, Human
uuugaaaaguaauauuu

SEQ ID NO: 2681414 - RNA, 14 nt, Human
uuugaaaaguaaua

SEQ ID NO: 2681415 - RNA, 12 nt, Human
uuugaaaaguaa

SEQ ID NO: 2681416 - RNA, 11 nt, Human
uuugaaaagua

SEQ ID NO: 2681417 - RNA, 22 nt, Human
auggggaaucuaagagagcugc

SEQ ID NO: 2681418 - RNA, 22 nt, Human
augggcuuuuggggagccagaa

SEQ ID NO: 2681419 - RNA, 15 nt, Human
uuucuauuuuaagac

SEQ ID NO: 2681420 - RNA, 17 nt, Human
uuucucaguguugguau

SEQ ID NO: 2681421 - RNA, 20 nt, Human
uuucucaguguugguauauu

SEQ ID NO: 2681422 - RNA, 21 nt, Human
uuucucaacuggguccagaag

SEQ ID NO: 2681423 - RNA, 15 nt, Human
uuucuauccucugua

SEQ ID NO: 2681424 - RNA, 20 nt, Human
uuucuauuauggaaaacugu

SEQ ID NO: 2681425 - RNA, 12 nt, Human
uuucuaaagacu

SEQ ID NO: 2681426 - RNA, 15 nt, Human
augccucacuaauuu

SEQ ID NO: 2681427 - RNA, 16 nt, Human
augccucacuaauuuu

SEQ ID NO: 2681428 - RNA, 20 nt, Human
augccucacuaauuuuugua

SEQ ID NO: 2681429 - RNA, 21 nt, Human
augccucacuaauuuuuguau

SEQ ID NO: 2681430 - RNA, 23 nt, Human
augccucacuaauuuuuguauua

SEQ ID NO: 2681431 - RNA, 15 nt, Human
augcgcucagggcca

SEQ ID NO: 2681432 - RNA, 23 nt, Human
augcgcucagggccaugcugagg

SEQ ID NO: 2681433 - RNA, 13 nt, Human
augcgcccccucc

SEQ ID NO: 2681434 - RNA, 18 nt, Human
augcgcccccuccgcccu

SEQ ID NO: 2681435 - RNA, 22 nt, Human
augcgcccccuccgcccugcca

SEQ ID NO: 2681436 - RNA, 20 nt, Human
uuuaaagaaaaaaaugucaa

SEQ ID NO: 2681437 - RNA, 17 nt, Human
uuuaaagaaaagaugaa

SEQ ID NO: 2681438 - RNA, 18 nt, Human
uuuaaagaaaagaugaaa

SEQ ID NO: 2681439 - RNA, 21 nt, Human
uuuaaagaaaagaugaaaggc

SEQ ID NO: 2681440 - RNA, 18 nt, Human
uuuaccuuuuaugcaaaa

SEQ ID NO: 2681441 - RNA, 22 nt, Human
augcuaauagugaucaagaaga

SEQ ID NO: 2681442 - RNA, 17 nt, Human
augcuacaauuuuaaga

SEQ ID NO: 2681443 - RNA, 23 nt, Human
uuuauuaaauuuuuuuguaugaa

SEQ ID NO: 2681444 - RNA, 17 nt, Human
uuuauuaacuuaauaau

SEQ ID NO: 2681445 - RNA, 13 nt, Human
uuuauuaaauuuu

SEQ ID NO: 2681446 - RNA, 12 nt, Human
uuuauuaaauuu

SEQ ID NO: 2681447 - RNA, 15 nt, Human
uuuauaucaugcaaa

SEQ ID NO: 2681448 - RNA, 16 nt, Human
uuuauaucaugcaaaa

SEQ ID NO: 2681449 - RNA, 17 nt, Human
uuuauaucaugcaaaau

SEQ ID NO: 2681450 - RNA, 19 nt, Human
uuuacucauccuccaggaa

SEQ ID NO: 2681451 - RNA, 21 nt, Human
uuuacucauccuccaggaacu

SEQ ID NO: 2681452 - RNA, 13 nt, Human
uuuaguaauuucu

SEQ ID NO: 2681453 - RNA, 15 nt, Human
uuuaguaauuucuuu

SEQ ID NO: 2681454 - RNA, 12 nt, Human
uuucccaucugc

SEQ ID NO: 2681455 - RNA, 13 nt, Human
uuucccaucugca

SEQ ID NO: 2681456 - RNA, 19 nt, Human
uuucccacuucccacccug

SEQ ID NO: 2681457 - RNA, 23 nt, Human
uuucccacuucccacccugcccc

SEQ ID NO: 2681458 - RNA, 14 nt, Human
uuucaguuuguugg

SEQ ID NO: 2681459 - RNA, 11 nt, Human
uuuccagggag

SEQ ID NO: 2681460 - RNA, 13 nt, Human
uuuccagggaggg

SEQ ID NO: 2681461 - RNA, 19 nt, Human
uuuccagguuuaagcuguu

SEQ ID NO: 2681462 - RNA, 18 nt, Human
uuucauaaauuauuugau

SEQ ID NO: 2681463 - RNA, 19 nt, Human
uuucauaaauuauuugauu

SEQ ID NO: 2681464 - RNA, 14 nt, Human
uuucauaaacaagu

SEQ ID NO: 2681465 - RNA, 17 nt, Human
uuucauaaacaaguucg

SEQ ID NO: 2681466 - RNA, 16 nt, Human
uuucagaaaaugaaaa

SEQ ID NO: 2681467 - RNA, 22 nt, Human
uuucaguucuuuggauucuaaa

SEQ ID NO: 2681468 - RNA, 18 nt, Human
uuucacuuguguuuuaaa

SEQ ID NO: 2681469 - RNA, 16 nt, Human
uuucagaaaaagaaau

SEQ ID NO: 2681470 - RNA, 14 nt, Human
uuucacucuaaguc

SEQ ID NO: 2681471 - RNA, 15 nt, Human
uuucacucuaaguca

SEQ ID NO: 2681472 - RNA, 18 nt, Human
uuucacucuaagucaugu

SEQ ID NO: 2681473 - RNA, 19 nt, Human
uuucacucuaagucaugua

SEQ ID NO: 2681474 - RNA, 20 nt, Human
uuucacucuaagucauguau

SEQ ID NO: 2681475 - RNA, 22 nt, Human
uuucacucuaagucauguaugu

SEQ ID NO: 2681476 - RNA, 23 nt, Human
uuucacucuaagucauguauguu

SEQ ID NO: 2681477 - RNA, 17 nt, Human
uuuauuuuuuggacuuc

SEQ ID NO: 2681478 - RNA, 13 nt, Human
uuuauuuugugua

SEQ ID NO: 2681479 - RNA, 15 nt, Human
uuuauuuuguguaaa

SEQ ID NO: 2681480 - RNA, 21 nt, Human
uuuauuuuuuuuaauuguauu

SEQ ID NO: 2681481 - RNA, 18 nt, Human
uuuauuuuuuuuaaagaa

SEQ ID NO: 2681482 - RNA, 20 nt, Human
uuuauuaacuuaauaaucaa

SEQ ID NO: 2681483 - RNA, 16 nt, Human
uuuauuacuuccauga

SEQ ID NO: 2681484 - RNA, 20 nt, Human
uuuauuacuuccaugaauuu

SEQ ID NO: 2681485 - RNA, 16 nt, Human
augcugggacucagcc

SEQ ID NO: 2681486 - RNA, 9 nt, Human
augcuggga

SEQ ID NO: 2681487 - RNA, 15 nt, Human
uuuauuacuguuuau

SEQ ID NO: 2681488 - RNA, 21 nt, Human
uuuauuacuguuuauuacuuc

SEQ ID NO: 2681489 - RNA, 10 nt, Human
augcugggac

SEQ ID NO: 2681490 - RNA, 15 nt, Human
augcugggacucagc

SEQ ID NO: 2681491 - RNA, 15 nt, Human
auggaaguuuuccua

SEQ ID NO: 2681492 - RNA, 13 nt, Human
auggaauaaaagg

SEQ ID NO: 2681493 - RNA, 13 nt, Human
uuuauuuuacaca

SEQ ID NO: 2681494 - RNA, 18 nt, Human
uuuauuuuacacagaaac

SEQ ID NO: 2681495 - RNA, 18 nt, Human
uuuauuuugagauguaaa

SEQ ID NO: 2681496 - RNA, 21 nt, Human
uuuauuuuacacagaaacacu

SEQ ID NO: 2681497 - RNA, 19 nt, Human
uuuauuuuacagcucauua

SEQ ID NO: 2681498 - RNA, 12 nt, Human
uuuauuuuccua

SEQ ID NO: 2681499 - RNA, 15 nt, Human
uuuauuuuccuaaag

SEQ ID NO: 2681500 - RNA, 23 nt, Human
augcuuacgugauccucucaccu

SEQ ID NO: 2681501 - RNA, 20 nt, Human
uuguccugccugcaauauuu

SEQ ID NO: 2681502 - RNA, 18 nt, Human
uuguccuuuuucaggaga

SEQ ID NO: 2681503 - RNA, 14 nt, Human
uugucgcucaugug

SEQ ID NO: 2681504 - RNA, 20 nt, Human
uuguccuauuaguguuauau

SEQ ID NO: 2681505 - RNA, 19 nt, Human
uuguccuauuaguguuaua

SEQ ID NO: 2681506 - RNA, 17 nt, Human
uuguccuauuaguguua

SEQ ID NO: 2681507 - RNA, 16 nt, Human
uuguccuauuaguguu

SEQ ID NO: 2681508 - RNA, 14 nt, Human
uugucacuuuuuau

SEQ ID NO: 2681509 - RNA, 21 nt, Human
uugucacuuuuuaugcuauuu

SEQ ID NO: 2681510 - RNA, 15 nt, Human
augauaaaacacaaa

SEQ ID NO: 2681511 - RNA, 19 nt, Human
augagucuguuguguguca

SEQ ID NO: 2681512 - RNA, 18 nt, Human
augagucuguuguguguc

SEQ ID NO: 2681513 - RNA, 13 nt, Human
augaggugggagg

SEQ ID NO: 2681514 - RNA, 14 nt, Human
augaggugggaggu

SEQ ID NO: 2681515 - RNA, 19 nt, Human
augaguccuugauuucaaa

SEQ ID NO: 2681516 - RNA, 21 nt, Human
augaguccuugauuucaaagu

SEQ ID NO: 2681517 - RNA, 22 nt, Human
augaggugggagguggaagaag

SEQ ID NO: 2681518 - RNA, 13 nt, Human
augagagcauaau

SEQ ID NO: 2681519 - RNA, 16 nt, Human
augagagcauaauuua

SEQ ID NO: 2681520 - RNA, 20 nt, Human
augagagcauaauuuaaaaa

SEQ ID NO: 2681521 - RNA, 12 nt, Human
augagaugugug

SEQ ID NO: 2681522 - RNA, 20 nt, Human
augagauugguuuuccugug

SEQ ID NO: 2681523 - RNA, 16 nt, Human
augagauuuuuaaaaa

SEQ ID NO: 2681524 - RNA, 20 nt, Human
augagauuuuuaaaaaauau

SEQ ID NO: 2681525 - RNA, 22 nt, Human
augagauguguggacuguggca

SEQ ID NO: 2681526 - RNA, 14 nt, Human
augagaugugugga

SEQ ID NO: 2681527 - RNA, 23 nt, Human
uugugaaccauggugaagugcuu

SEQ ID NO: 2681528 - RNA, 16 nt, Human
uuguguguccccuugc

SEQ ID NO: 2681529 - RNA, 15 nt, Human
uugugugucaugcca

SEQ ID NO: 2681530 - RNA, 16 nt, Human
uuguucucagaauccc

SEQ ID NO: 2681531 - RNA, 23 nt, Human
uuguucucagaaucccuuaacag

SEQ ID NO: 2681532 - RNA, 23 nt, Human
uuguuccuuggagaaaugaaaac

SEQ ID NO: 2681533 - RNA, 16 nt, Human
augauccuaggcauuu

SEQ ID NO: 2681534 - RNA, 18 nt, Human
augaucaccgacugaaaa

SEQ ID NO: 2681535 - RNA, 16 nt, Human
uuguugcaagauguga

SEQ ID NO: 2681536 - RNA, 17 nt, Human
uuguugcaagaugugaa

SEQ ID NO: 2681537 - RNA, 18 nt, Human
uuguugcaagaugugaau

SEQ ID NO: 2681538 - RNA, 19 nt, Human
uuguugcaagaugugaauu

SEQ ID NO: 2681539 - RNA, 20 nt, Human
uuguugcaagaugugaauua

SEQ ID NO: 2681540 - RNA, 20 nt, Human
uuguugccaugugcaccuug

SEQ ID NO: 2681541 - RNA, 14 nt, Human
uuuaaaaaaaaagu

SEQ ID NO: 2681542 - RNA, 18 nt, Human
uuuaaaaaaaaagucaga

SEQ ID NO: 2681543 - RNA, 16 nt, Human
uuuaaaaaauauuuuc

SEQ ID NO: 2681544 - RNA, 17 nt, Human
uuuaaaaaauauuuucu

SEQ ID NO: 2681545 - RNA, 12 nt, Human
uuuaaaaaauaa

SEQ ID NO: 2681546 - RNA, 22 nt, Human
uuuaaaaaauaaauaaaaacua

SEQ ID NO: 2681547 - RNA, 18 nt, Human
uuuaaagaaaaaaauguc

SEQ ID NO: 2681548 - RNA, 17 nt, Human
uuuaaagaaaaaaaugu

SEQ ID NO: 2681549 - RNA, 11 nt, Human
uuuaaacuuuc

SEQ ID NO: 2681550 - RNA, 16 nt, Human
uuuaaaaaauggucac

SEQ ID NO: 2681551 - RNA, 22 nt, Human
uuguuuuggcugaaauucuccu

SEQ ID NO: 2681552 - RNA, 15 nt, Human
uuguuuuuguauauu

SEQ ID NO: 2681553 - RNA, 13 nt, Human
uuguuuuuguaua

SEQ ID NO: 2681554 - RNA, 18 nt, Human
uuguuuuucugcuuuaga

SEQ ID NO: 2681555 - RNA, 12 nt, Human
uuguuuuucugc

SEQ ID NO: 2681556 - RNA, 16 nt, Human
augaacauacaaaugc

SEQ ID NO: 2681557 - RNA, 12 nt, Human
uugggcagagcu

SEQ ID NO: 2681558 - RNA, 22 nt, Human
uugggcagagcuggcucugagc

SEQ ID NO: 2681559 - RNA, 17 nt, Human
uugggcagagcuggcuc

SEQ ID NO: 2681560 - RNA, 21 nt, Human
uugggcagagcuggcucugag

SEQ ID NO: 2681561 - RNA, 17 nt, Human
uuguaguucuuuaaacu

SEQ ID NO: 2681562 - RNA, 22 nt, Human
uuguauaguuauguaaauaauu

SEQ ID NO: 2681563 - RNA, 15 nt, Human
uuguaguucuuuaaa

SEQ ID NO: 2681564 - RNA, 22 nt, Human
uuguaagcguauggcuuuauuu

SEQ ID NO: 2681565 - RNA, 18 nt, Human
uuguaagcguauggcuuu

SEQ ID NO: 2681566 - RNA, 17 nt, Human
uuguaagcguauggcuu

SEQ ID NO: 2681567 - RNA, 16 nt, Human
uuguaagcguauggcu

SEQ ID NO: 2681568 - RNA, 22 nt, Human
uuguaaaaaucuuuugaagcau

SEQ ID NO: 2681569 - RNA, 16 nt, Human
uuguauauuacaauga

SEQ ID NO: 2681570 - RNA, 15 nt, Human
uuguauauuacaaug

SEQ ID NO: 2681571 - RNA, 14 nt, Human
uuguauauuacaau

SEQ ID NO: 2681572 - RNA, 13 nt, Human
uuguauauuacaa

SEQ ID NO: 2681573 - RNA, 19 nt, Human
uuguauauauuauuauaau

SEQ ID NO: 2681574 - RNA, 21 nt, Human
uuguauauauuauuauaaucu

SEQ ID NO: 2681575 - RNA, 14 nt, Human
augacaaaaaaugu

SEQ ID NO: 2681576 - RNA, 17 nt, Human
augacaaaaaauguuuu

SEQ ID NO: 2681577 - RNA, 15 nt, Human
augacaauaaagcuu

SEQ ID NO: 2681578 - RNA, 19 nt, Human
uugcugaauacagaggcaa

SEQ ID NO: 2681579 - RNA, 20 nt, Human
uugcuaauuaacugaaacau

SEQ ID NO: 2681580 - RNA, 19 nt, Human
uugcuacuguuguaagaau

SEQ ID NO: 2681581 - RNA, 18 nt, Human
uugcuaucaacaauaaaa

SEQ ID NO: 2681582 - RNA, 22 nt, Human
uugcuaucaacaauaaaauuuu

SEQ ID NO: 2681583 - RNA, 14 nt, Human
uugcuugucuucug

SEQ ID NO: 2681584 - RNA, 15 nt, Human
uugcugagccucugc

SEQ ID NO: 2681585 - RNA, 14 nt, Human
uugcugagccucug

SEQ ID NO: 2681586 - RNA, 22 nt, Human
uugcugagccucugcuccccag

SEQ ID NO: 2681587 - RNA, 16 nt, Human
uugcuugccugcaggg

SEQ ID NO: 2681588 - RNA, 19 nt, Human
uugcuugccugcagggcca

SEQ ID NO: 2681589 - RNA, 15 nt, Human
uugcugacuuagaau

SEQ ID NO: 2681590 - RNA, 14 nt, Human
uugcugacuuagaa

SEQ ID NO: 2681591 - RNA, 12 nt, Human
uugcugacuuag

SEQ ID NO: 2681592 - RNA, 20 nt, Human
uugcuuuuggcaaaacucua

SEQ ID NO: 2681593 - RNA, 16 nt, Human
uugcuuuaccuuuuca

SEQ ID NO: 2681594 - RNA, 12 nt, Human
aucuuucagaaa

SEQ ID NO: 2681595 - RNA, 14 nt, Human
aucuuucagaaaua

SEQ ID NO: 2681596 - RNA, 16 nt, Human
aucuuucagaaauaua

SEQ ID NO: 2681597 - RNA, 17 nt, Human
aucuuucagaaauauaa

SEQ ID NO: 2681598 - RNA, 22 nt, Human
aucuuucagaaauauaacacau

SEQ ID NO: 2681599 - RNA, 12 nt, Human
uuggccugggcc

SEQ ID NO: 2681600 - RNA, 12 nt, Human
uuggccugcugu

SEQ ID NO: 2681601 - RNA, 13 nt, Human
uuggccugcugug

SEQ ID NO: 2681602 - RNA, 14 nt, Human
uuggccugcuguga

SEQ ID NO: 2681603 - RNA, 21 nt, Human
uuggaccuaaauggccucaug

SEQ ID NO: 2681604 - RNA, 23 nt, Human
uuggaccuaaauggccucaugug

SEQ ID NO: 2681605 - RNA, 19 nt, Human
uuggaccuaaauggccuca

SEQ ID NO: 2681606 - RNA, 23 nt, Human
auuuauuaauauuuaacauuauu

SEQ ID NO: 2681607 - RNA, 15 nt, Human
auuuauuaauauuua

SEQ ID NO: 2681608 - RNA, 14 nt, Human
auuuauuaauauuu

SEQ ID NO: 2681609 - RNA, 12 nt, Human
auuuauuaauau

SEQ ID NO: 2681610 - RNA, 23 nt, Human
auuuauuaacuuaauaaucaaga

SEQ ID NO: 2681611 - RNA, 21 nt, Human
auuuauuaacuuaauaaucaa

SEQ ID NO: 2681612 - RNA, 20 nt, Human
auuuauuaacuuaauaauca

SEQ ID NO: 2681613 - RNA, 17 nt, Human
auuuauuaacuuaauaa

SEQ ID NO: 2681614 - RNA, 14 nt, Human
auuuauuaaauuuu

SEQ ID NO: 2681615 - RNA, 24 nt, Human
auuuauuaaauuuuuuuguaugaa

SEQ ID NO: 2681616 - RNA, 21 nt, Human
auuuauuaaauuuuuuuguau

SEQ ID NO: 2681617 - RNA, 16 nt, Human
auuuauuaacuuaaua

SEQ ID NO: 2681618 - RNA, 14 nt, Human
auuuauuaacuuaa

SEQ ID NO: 2681619 - RNA, 13 nt, Human
auuuauuaacuua

SEQ ID NO: 2681620 - RNA, 16 nt, Human
auuuagacaagagaug

SEQ ID NO: 2681621 - RNA, 16 nt, Human
auuuaguauuaucaaa

SEQ ID NO: 2681622 - RNA, 17 nt, Human
auuuaaaaaauaaauaa

SEQ ID NO: 2681623 - RNA, 22 nt, Human
auuuaaaaaauaaauaaaaacu

SEQ ID NO: 2681624 - RNA, 14 nt, Human
auuuaaaaauagaa

SEQ ID NO: 2681625 - RNA, 15 nt, Human
auuuaaaaauagaaa

SEQ ID NO: 2681626 - RNA, 16 nt, Human
auuuaaaaauagaaac

SEQ ID NO: 2681627 - RNA, 17 nt, Human
auuuaaaaauagaaaca

SEQ ID NO: 2681628 - RNA, 15 nt, Human
auuuaaaaauauauu

SEQ ID NO: 2681629 - RNA, 13 nt, Human
auuuaacagaaau

SEQ ID NO: 2681630 - RNA, 21 nt, Human
auuuaaauuacaauuuuaucu

SEQ ID NO: 2681631 - RNA, 14 nt, Human
auuuagacaagaga

SEQ ID NO: 2681632 - RNA, 20 nt, Human
auuuagacaagagaugggaa

SEQ ID NO: 2681633 - RNA, 19 nt, Human
auuuagaccccauacaagu

SEQ ID NO: 2681634 - RNA, 14 nt, Human
auuuauuuauuauu

SEQ ID NO: 2681635 - RNA, 13 nt, Human
auuuauuuauuau

SEQ ID NO: 2681636 - RNA, 15 nt, Human
auuuauuuauccaga

SEQ ID NO: 2681637 - RNA, 15 nt, Human
auuuauuuauguacu

SEQ ID NO: 2681638 - RNA, 16 nt, Human
auuuauuuauguacuu

SEQ ID NO: 2681639 - RNA, 18 nt, Human
auuuauuuauguacuuuu

SEQ ID NO: 2681640 - RNA, 23 nt, Human
auuuauuuacagaugaauguauu

SEQ ID NO: 2681641 - RNA, 13 nt, Human
auuuauuuacaga

SEQ ID NO: 2681642 - RNA, 15 nt, Human
auuuauuuaauauuu

SEQ ID NO: 2681643 - RNA, 18 nt, Human
auuuauuuaauauuuaau

SEQ ID NO: 2681644 - RNA, 19 nt, Human
auuuauuauuuauuuauua

SEQ ID NO: 2681645 - RNA, 13 nt, Human
auuuauuauuuau

SEQ ID NO: 2681646 - RNA, 11 nt, Human
auuuauuauuu

SEQ ID NO: 2681647 - RNA, 18 nt, Human
auuucaaaguuuuguugu

SEQ ID NO: 2681648 - RNA, 19 nt, Human
auuucaaaguuuuguugua

SEQ ID NO: 2681649 - RNA, 13 nt, Human
auuucaaaauaua

SEQ ID NO: 2681650 - RNA, 13 nt, Human
auuucccaucugc

SEQ ID NO: 2681651 - RNA, 14 nt, Human
auuucccaucugca

SEQ ID NO: 2681652 - RNA, 15 nt, Human
auuucccaucugcac

SEQ ID NO: 2681653 - RNA, 22 nt, Human
auuucccauuugugccagagga

SEQ ID NO: 2681654 - RNA, 21 nt, Human
auuucccauuugugccagagg

SEQ ID NO: 2681655 - RNA, 17 nt, Human
auuuccagccaaagccu

SEQ ID NO: 2681656 - RNA, 22 nt, Human
auuuccagaaccacacuugaaa

SEQ ID NO: 2681657 - RNA, 17 nt, Human
auuugaaagugccuuug

SEQ ID NO: 2681658 - RNA, 16 nt, Human
auuugaaagugccuuu

SEQ ID NO: 2681659 - RNA, 17 nt, Human
auuugaacaaugaaguu

SEQ ID NO: 2681660 - RNA, 18 nt, Human
auuugaacaaugaaguug

SEQ ID NO: 2681661 - RNA, 19 nt, Human
auuugaacaaugaaguuga

SEQ ID NO: 2681662 - RNA, 20 nt, Human
auuugaacaaugaaguugaa

SEQ ID NO: 2681663 - RNA, 22 nt, Human
auuugaaagugccuuugcagcu

SEQ ID NO: 2681664 - RNA, 20 nt, Human
auuugaaagugccuuugcag

SEQ ID NO: 2681665 - RNA, 15 nt, Human
auuugaaauaagaau

SEQ ID NO: 2681666 - RNA, 16 nt, Human
auuugaaauaagaauu

SEQ ID NO: 2681667 - RNA, 14 nt, Human
auuugaaaaauaua

SEQ ID NO: 2681668 - RNA, 15 nt, Human
auuugaaaaauauaa

SEQ ID NO: 2681669 - RNA, 20 nt, Human
auuugaaaaauauaaaauua

SEQ ID NO: 2681670 - RNA, 16 nt, Human
auuucuuuuuuuccuu

SEQ ID NO: 2681671 - RNA, 22 nt, Human
auuuccccucugcacccagaac

SEQ ID NO: 2681672 - RNA, 23 nt, Human
auuuccccucugcacccagaaca

SEQ ID NO: 2681673 - RNA, 14 nt, Human
auuucuagaaacaa

SEQ ID NO: 2681674 - RNA, 15 nt, Human
auuucuacugucaaa

SEQ ID NO: 2681675 - RNA, 16 nt, Human
auuucuacugucaaau

SEQ ID NO: 2681676 - RNA, 21 nt, Human
auuucuacugucaaaugaugu

SEQ ID NO: 2681677 - RNA, 13 nt, Human
auugaccauuuuu

SEQ ID NO: 2681678 - RNA, 22 nt, Human
auugaccauuuuuuaauuuacu

SEQ ID NO: 2681679 - RNA, 22 nt, Human
auucuuuuaauuguuucagaau

SEQ ID NO: 2681680 - RNA, 22 nt, Human
auugaaaauguccaggaaagug

SEQ ID NO: 2681681 - RNA, 16 nt, Human
auugaaaaguuuuugu

SEQ ID NO: 2681682 - RNA, 19 nt, Human
auugaaaaguuuuuguuug

SEQ ID NO: 2681683 - RNA, 20 nt, Human
auugaaaaguuuuuguuugg

SEQ ID NO: 2681684 - RNA, 23 nt, Human
auugaaaaguuuuuguuuggaga

SEQ ID NO: 2681685 - RNA, 14 nt, Human
auucuggcuuuaag

SEQ ID NO: 2681686 - RNA, 16 nt, Human
auucuggcuuuaagcc

SEQ ID NO: 2681687 - RNA, 19 nt, Human
auucuggcuuuaagccuuc

SEQ ID NO: 2681688 - RNA, 16 nt, Human
auucugguuccagggu

SEQ ID NO: 2681689 - RNA, 20 nt, Human
auucugauuucuuuucacca

SEQ ID NO: 2681690 - RNA, 14 nt, Human
auucugauuucuuu

SEQ ID NO: 2681691 - RNA, 22 nt, Human
auucugauucuggcuuuaagcc

SEQ ID NO: 2681692 - RNA, 19 nt, Human
auucugguuccaggguccc

SEQ ID NO: 2681693 - RNA, 23 nt, Human
auucuuaaaaggcccauagcagc

SEQ ID NO: 2681694 - RNA, 19 nt, Human
auucuguuuuuaaugcuau

SEQ ID NO: 2681695 - RNA, 13 nt, Human
auucuuuucucag

SEQ ID NO: 2681696 - RNA, 19 nt, Human
auucuuuucucaguguugg

SEQ ID NO: 2681697 - RNA, 15 nt, Human
auucuucucuuccuu

SEQ ID NO: 2681698 - RNA, 13 nt, Human
auucuuacuaaaa

SEQ ID NO: 2681699 - RNA, 17 nt, Human
auucuuacuaaaaagua

SEQ ID NO: 2681700 - RNA, 22 nt, Human
auucuuacuaaaaaguauaaaa

SEQ ID NO: 2681701 - RNA, 17 nt, Human
auucuucagauauacug

SEQ ID NO: 2681702 - RNA, 14 nt, Human
auucuucaaccagu

SEQ ID NO: 2681703 - RNA, 15 nt, Human
auuguauuuaugugu

SEQ ID NO: 2681704 - RNA, 14 nt, Human
auuguccaguuugu

SEQ ID NO: 2681705 - RNA, 23 nt, Human
auuguccaguuugucuuggauau

SEQ ID NO: 2681706 - RNA, 20 nt, Human
auuguggucacaacuugaug

SEQ ID NO: 2681707 - RNA, 14 nt, Human
auuuauuuaugugu

SEQ ID NO: 2681708 - RNA, 14 nt, Human
auuugaagggucuu

SEQ ID NO: 2681709 - RNA, 18 nt, Human
auuuuaaaaaagccuucc

SEQ ID NO: 2681710 - RNA, 17 nt, Human
auuuuaaaaaaugguca

SEQ ID NO: 2681711 - RNA, 16 nt, Human
auuuuaaaaaaugguc

SEQ ID NO: 2681712 - RNA, 17 nt, Human
auuuuaccuagcuaauu

SEQ ID NO: 2681713 - RNA, 19 nt, Human
auuuuaccuagcuaauuau

SEQ ID NO: 2681714 - RNA, 22 nt, Human
auuuuaccuagcuaauuauuua

SEQ ID NO: 2681715 - RNA, 20 nt, Human
auuuucaacugucuuccuca

SEQ ID NO: 2681716 - RNA, 13 nt, Human
auuuucagagccg

SEQ ID NO: 2681717 - RNA, 23 nt, Human
auuuucagagccggcccgccucu

SEQ ID NO: 2681718 - RNA, 12 nt, Human
auuuucagcauu

SEQ ID NO: 2681719 - RNA, 19 nt, Human
auuuucagcauuaagcugu

SEQ ID NO: 2681720 - RNA, 20 nt, Human
auuuucagcauuaagcuguu

SEQ ID NO: 2681721 - RNA, 14 nt, Human
auuuuccaaagagu

SEQ ID NO: 2681722 - RNA, 14 nt, Human
auuuuccaaaugua

SEQ ID NO: 2681723 - RNA, 14 nt, Human
auuuucaugaaaau

SEQ ID NO: 2681724 - RNA, 17 nt, Human
auuuucaugaaaauacc

SEQ ID NO: 2681725 - RNA, 20 nt, Human
auuuucaugaaaauaccauu

SEQ ID NO: 2681726 - RNA, 21 nt, Human
auuuucaugaaaauaccauuu

SEQ ID NO: 2681727 - RNA, 14 nt, Human
auuuuccucuugug

SEQ ID NO: 2681728 - RNA, 15 nt, Human
auuuuccucuuguga

SEQ ID NO: 2681729 - RNA, 12 nt, Human
auuuuccucuga

SEQ ID NO: 2681730 - RNA, 17 nt, Human
auuuuccaaauguaaua

SEQ ID NO: 2681731 - RNA, 16 nt, Human
auuuucaaguaauugu

SEQ ID NO: 2681732 - RNA, 12 nt, Human
auuuucaaguaa

SEQ ID NO: 2681733 - RNA, 19 nt, Human
auuuucaaguaauugugaa

SEQ ID NO: 2681734 - RNA, 15 nt, Human
auuuucacauucuug

SEQ ID NO: 2681735 - RNA, 19 nt, Human
auuuucacauucuuggcuu

SEQ ID NO: 2681736 - RNA, 20 nt, Human
auuuucacauucuuggcuua

SEQ ID NO: 2681737 - RNA, 22 nt, Human
auuuucacuuuuggcaaugacu

SEQ ID NO: 2681738 - RNA, 13 nt, Human
uuuucugacuaau

SEQ ID NO: 2681739 - RNA, 11 nt, Human
uuuucuggcac

SEQ ID NO: 2681740 - RNA, 23 nt, Human
uuuucuggggaaagacacugccu

SEQ ID NO: 2681741 - RNA, 13 nt, Human
uuuucaugaaaau

SEQ ID NO: 2681742 - RNA, 14 nt, Human
uuuuauuaaugcac

SEQ ID NO: 2681743 - RNA, 13 nt, Human
uuuuauuaaugca

SEQ ID NO: 2681744 - RNA, 19 nt, Human
uuuuauuaaugcacuuucu

SEQ ID NO: 2681745 - RNA, 16 nt, Human
uuuuauuuauauguau

SEQ ID NO: 2681746 - RNA, 14 nt, Human
uuuuauuuauaugu

SEQ ID NO: 2681747 - RNA, 17 nt, Human
uuuuauuuagggaacau

SEQ ID NO: 2681748 - RNA, 14 nt, Human
uuuucauaaacaag

SEQ ID NO: 2681749 - RNA, 23 nt, Human
uuuucauaaauuauuugauuauu

SEQ ID NO: 2681750 - RNA, 19 nt, Human
uuuucauaguauccauauu

SEQ ID NO: 2681751 - RNA, 20 nt, Human
uuuucauaguauccauauuu

SEQ ID NO: 2681752 - RNA, 21 nt, Human
uuuuauuucuacugucaaaug

SEQ ID NO: 2681753 - RNA, 22 nt, Human
auguuuaaaacaccuucuauag

SEQ ID NO: 2681754 - RNA, 20 nt, Human
auguuuauaaaucuuaugcu

SEQ ID NO: 2681755 - RNA, 20 nt, Human
auguuuauaucugcaaaaaa

SEQ ID NO: 2681756 - RNA, 23 nt, Human
auguuuauaucugcaaaaaaccu

SEQ ID NO: 2681757 - RNA, 12 nt, Human
uuuucuguauuu

SEQ ID NO: 2681758 - RNA, 23 nt, Human
uuuucugugugucaguuuucaua

SEQ ID NO: 2681759 - RNA, 21 nt, Human
auguuuaaaacaccuucuaua

SEQ ID NO: 2681760 - RNA, 16 nt, Human
auguuuaaaacaccuu

SEQ ID NO: 2681761 - RNA, 14 nt, Human
auguuuaaaacacc

SEQ ID NO: 2681762 - RNA, 12 nt, Human
auguuuaaaaca

SEQ ID NO: 2681763 - RNA, 16 nt, Human
auguuguuuauaauaa

SEQ ID NO: 2681764 - RNA, 17 nt, Human
auguuguuuauaauaaa

SEQ ID NO: 2681765 - RNA, 18 nt, Human
auguuguuuauaauaaaa

SEQ ID NO: 2681766 - RNA, 20 nt, Human
auguuguuuauaauaaaaau

SEQ ID NO: 2681767 - RNA, 22 nt, Human
auguuguuuauaauaaaaauau

SEQ ID NO: 2681768 - RNA, 16 nt, Human
auuaaaacuaaauuuc

SEQ ID NO: 2681769 - RNA, 17 nt, Human
auuaaaacuaaauuuca

SEQ ID NO: 2681770 - RNA, 12 nt, Human
auuaaacuuuuu

SEQ ID NO: 2681771 - RNA, 13 nt, Human
auuaaacuucaua

SEQ ID NO: 2681772 - RNA, 18 nt, Human
auuaaacuucauauguaa

SEQ ID NO: 2681773 - RNA, 15 nt, Human
auguuuuguaaacau

SEQ ID NO: 2681774 - RNA, 16 nt, Human
auguuuuguaaacauu

SEQ ID NO: 2681775 - RNA, 17 nt, Human
auguuuuguaaacauuu

SEQ ID NO: 2681776 - RNA, 19 nt, Human
auguuuuguaaacauuuau

SEQ ID NO: 2681777 - RNA, 20 nt, Human
auguguucucggagugugua

SEQ ID NO: 2681778 - RNA, 14 nt, Human
auguguguuuuuuc

SEQ ID NO: 2681779 - RNA, 11 nt, Human
auguguuuaga

SEQ ID NO: 2681780 - RNA, 12 nt, Human
auguguuuagaa

SEQ ID NO: 2681781 - RNA, 20 nt, Human
auguuaauggauuucagaag

SEQ ID NO: 2681782 - RNA, 14 nt, Human
auguuaccucugaa

SEQ ID NO: 2681783 - RNA, 15 nt, Human
auguuaccucugaau

SEQ ID NO: 2681784 - RNA, 17 nt, Human
auguuacucucuugcac

SEQ ID NO: 2681785 - RNA, 16 nt, Human
auguucagauuauugg

SEQ ID NO: 2681786 - RNA, 14 nt, Human
auguuagaguaaug

SEQ ID NO: 2681787 - RNA, 16 nt, Human
auguugccauguguuu

SEQ ID NO: 2681788 - RNA, 18 nt, Human
auguugccauguguuuua

SEQ ID NO: 2681789 - RNA, 13 nt, Human
uuuuagaauaaga

SEQ ID NO: 2681790 - RNA, 16 nt, Human
uuuuagaauaagaauu

SEQ ID NO: 2681791 - RNA, 17 nt, Human
uuuuagaauaagaauuu

SEQ ID NO: 2681792 - RNA, 20 nt, Human
uuuuagaauaagaauuugca

SEQ ID NO: 2681793 - RNA, 21 nt, Human
uuuuagaauaagaauuugcau

SEQ ID NO: 2681794 - RNA, 22 nt, Human
uuuuagaauaagaauuugcaua

SEQ ID NO: 2681795 - RNA, 18 nt, Human
auguggaccuuagaauac

SEQ ID NO: 2681796 - RNA, 16 nt, Human
auguggccuuugaauu

SEQ ID NO: 2681797 - RNA, 20 nt, Human
auguggccuuugaauucugu

SEQ ID NO: 2681798 - RNA, 22 nt, Human
auguggcccuggcugccggcac

SEQ ID NO: 2681799 - RNA, 13 nt, Human
auguggcuggaag

SEQ ID NO: 2681800 - RNA, 14 nt, Human
auguggcuggaaga

SEQ ID NO: 2681801 - RNA, 20 nt, Human
auguggcuggaagauccugc

SEQ ID NO: 2681802 - RNA, 20 nt, Human
uuuugcacauguuuccucua

SEQ ID NO: 2681803 - RNA, 19 nt, Human
uuuugcaaagauuuaaucu

SEQ ID NO: 2681804 - RNA, 17 nt, Human
uuuugcaaagauuuaau

SEQ ID NO: 2681805 - RNA, 21 nt, Human
uuuugcaaccaggaacagcaa

SEQ ID NO: 2681806 - RNA, 12 nt, Human
uuuugauuaugu

SEQ ID NO: 2681807 - RNA, 15 nt, Human
uuuugagacagucuu

SEQ ID NO: 2681808 - RNA, 22 nt, Human
uuuugauuauuuuuuuuuucuu

SEQ ID NO: 2681809 - RNA, 12 nt, Human
uuuugcaugaaa

SEQ ID NO: 2681810 - RNA, 19 nt, Human
uuuugcaugcaugcaaaug

SEQ ID NO: 2681811 - RNA, 21 nt, Human
uuuugcaugcaugcaaaugag

SEQ ID NO: 2681812 - RNA, 21 nt, Human
uuuugcacugaggauauucag

SEQ ID NO: 2681813 - RNA, 13 nt, Human
uuuugagcacuuu

SEQ ID NO: 2681814 - RNA, 14 nt, Human
uuuugagauguaaa

SEQ ID NO: 2681815 - RNA, 19 nt, Human
uuuugauagcauuguaagc

SEQ ID NO: 2681816 - RNA, 13 nt, Human
auuaaagacagag

SEQ ID NO: 2681817 - RNA, 22 nt, Human
auuaaagacaggagacaaaaga

SEQ ID NO: 2681818 - RNA, 14 nt, Human
auuaagcaaauguu

SEQ ID NO: 2681819 - RNA, 17 nt, Human
auuaagcaaauguuaaa

SEQ ID NO: 2681820 - RNA, 15 nt, Human
auuaaacuuccuucu

SEQ ID NO: 2681821 - RNA, 23 nt, Human
uuuuuaguauuuauuuauguacu

SEQ ID NO: 2681822 - RNA, 18 nt, Human
uuuuuauaaaauggcugu

SEQ ID NO: 2681823 - RNA, 13 nt, Human
uuuuuauaauugu

SEQ ID NO: 2681824 - RNA, 18 nt, Human
uuuuuauaauuguacaaa

SEQ ID NO: 2681825 - RNA, 23 nt, Human
uuuuuauaauuguacaaaauuaa

SEQ ID NO: 2681826 - RNA, 13 nt, Human
uuuuuauacaaaa

SEQ ID NO: 2681827 - RNA, 20 nt, Human
uuuuuauacaaaccuaccaa

SEQ ID NO: 2681828 - RNA, 13 nt, Human
uuuuuacuguguu

SEQ ID NO: 2681829 - RNA, 11 nt, Human
uuuuuacugug

SEQ ID NO: 2681830 - RNA, 18 nt, Human
uuuuuagaauaagaauuu

SEQ ID NO: 2681831 - RNA, 22 nt, Human
uuuuuagaauaagaauuugcau

SEQ ID NO: 2681832 - RNA, 23 nt, Human
uuuuuagaauaagaauuugcaua

SEQ ID NO: 2681833 - RNA, 18 nt, Human
uuuuuacuguguuuuaua

SEQ ID NO: 2681834 - RNA, 15 nt, Human
uuuuguuugguaaau

SEQ ID NO: 2681835 - RNA, 16 nt, Human
uuuuguuugguaaaug

SEQ ID NO: 2681836 - RNA, 15 nt, Human
uuuuguuugccagga

SEQ ID NO: 2681837 - RNA, 16 nt, Human
uuuuguuuuaaaacug

SEQ ID NO: 2681838 - RNA, 18 nt, Human
uuuuguuuggagacguuu

SEQ ID NO: 2681839 - RNA, 15 nt, Human
uuuugccuuuugcaa

SEQ ID NO: 2681840 - RNA, 15 nt, Human
uuuuguuauuaaaca

SEQ ID NO: 2681841 - RNA, 13 nt, Human
auuacccccuccu

SEQ ID NO: 2681842 - RNA, 19 nt, Human
auuacccccuccuucagac

SEQ ID NO: 2681843 - RNA, 18 nt, Human
auuacccccuccuucaga

SEQ ID NO: 2681844 - RNA, 16 nt, Human
auuacauguaauuuga

SEQ ID NO: 2681845 - RNA, 19 nt, Human
auuacauugcuuuuucuug

SEQ ID NO: 2681846 - RNA, 18 nt, Human
auuacauuuauuuaucca

SEQ ID NO: 2681847 - RNA, 16 nt, Human
uuuuuguuauuaaaca

SEQ ID NO: 2681848 - RNA, 21 nt, Human
uuuuuauuaaucacuguguau

SEQ ID NO: 2681849 - RNA, 19 nt, Human
uuuuuauuaaucacugugu

SEQ ID NO: 2681850 - RNA, 15 nt, Human
uuuuuauuaaucacu

SEQ ID NO: 2681851 - RNA, 14 nt, Human
uuuuuauuaaaaua

SEQ ID NO: 2681852 - RNA, 23 nt, Human
uuuuuauuaaaauauuucagguu

SEQ ID NO: 2681853 - RNA, 16 nt, Human
uuuuuguaaaugugua

SEQ ID NO: 2681854 - RNA, 20 nt, Human
uuuuuguaaauguguacaua

SEQ ID NO: 2681855 - RNA, 12 nt, Human
uuuuuguaauaa

SEQ ID NO: 2681856 - RNA, 22 nt, Human
uuuuuguaauaagcaaucaagg

SEQ ID NO: 2681857 - RNA, 12 nt, Human
uuuuuauuguug

SEQ ID NO: 2681858 - RNA, 16 nt, Human
uuuuuaugcuauuucu

SEQ ID NO: 2681859 - RNA, 21 nt, Human
auuacccccuccuucagacac

SEQ ID NO: 2681860 - RNA, 20 nt, Human
auuacccccuccuucagaca

SEQ ID NO: 2681861 - RNA, 17 nt, Human
auuacgaaguucaagau

SEQ ID NO: 2681862 - RNA, 22 nt, Human
auuacgaaguucaagaucaaaa

SEQ ID NO: 2681863 - RNA, 13 nt, Human
auuacgugcucug

SEQ ID NO: 2681864 - RNA, 21 nt, Human
auuaguauguauguguaccua

SEQ ID NO: 2681865 - RNA, 15 nt, Human
auuacuuccaugaau

SEQ ID NO: 2681866 - RNA, 16 nt, Human
auuacuuccaugaauu

SEQ ID NO: 2681867 - RNA, 17 nt, Human
auuacuuccaugaauuu

SEQ ID NO: 2681868 - RNA, 14 nt, Human
auuauaguguagaa

SEQ ID NO: 2681869 - RNA, 15 nt, Human
auuauaguguagaaa

SEQ ID NO: 2681870 - RNA, 16 nt, Human
auuauaguguagaaaa

SEQ ID NO: 2681871 - RNA, 19 nt, Human
auuauauaacuguauuuga

SEQ ID NO: 2681872 - RNA, 15 nt, Human
auuauauaacuguau

SEQ ID NO: 2681873 - RNA, 17 nt, Human
auuauauaacuguauuu

SEQ ID NO: 2681874 - RNA, 17 nt, Human
auuccagccccucuggu

SEQ ID NO: 2681875 - RNA, 12 nt, Human
auucagucacau

SEQ ID NO: 2681876 - RNA, 18 nt, Human
auucaguaacugucaggc

SEQ ID NO: 2681877 - RNA, 11 nt, Human
auucagacauc

SEQ ID NO: 2681878 - RNA, 15 nt, Human
auucagacaucugag

SEQ ID NO: 2681879 - RNA, 20 nt, Human
auucucccagguaccagcug

SEQ ID NO: 2681880 - RNA, 21 nt, Human
auucucccagguaccagcugc

SEQ ID NO: 2681881 - RNA, 22 nt, Human
auucucccagguaccagcugcg

SEQ ID NO: 2681882 - RNA, 13 nt, Human
auucuccacugug

SEQ ID NO: 2681883 - RNA, 24 nt, Human
auucucccagguaccagcugcgcu

SEQ ID NO: 2681884 - RNA, 11 nt, Human
auucuccugga

SEQ ID NO: 2681885 - RNA, 17 nt, Human
auucucaaaggagcgag

SEQ ID NO: 2681886 - RNA, 14 nt, Human
auucuaaauacaug

SEQ ID NO: 2681887 - RNA, 17 nt, Human
auucuaguuuugucaaa

SEQ ID NO: 2681888 - RNA, 13 nt, Human
auucuauaaaacu

SEQ ID NO: 2681889 - RNA, 14 nt, Human
auucuauaaaacuc

SEQ ID NO: 2681890 - RNA, 15 nt, Human
auucuauaaaacucu

SEQ ID NO: 2681891 - RNA, 24 nt, Human
auucuauaaaacucugcauguaga

SEQ ID NO: 2681892 - RNA, 18 nt, Human
cgguuucgaagucauuaa

SEQ ID NO: 2681893 - RNA, 13 nt, Human
cgguuuccaggga

SEQ ID NO: 2681894 - RNA, 16 nt, Human
cgguuuccagggaggg

SEQ ID NO: 2681895 - RNA, 20 nt, Human
cgguuuccagggaggggccg

SEQ ID NO: 2681896 - RNA, 22 nt, Human
cgguuucgaagucauuaaacug

SEQ ID NO: 2681897 - RNA, 16 nt, Human
cgguuuuacugcagcu

SEQ ID NO: 2681898 - RNA, 11 nt, Human
cgguuucucca

SEQ ID NO: 2681899 - RNA, 20 nt, Human
cguguaaccauggacccaau

SEQ ID NO: 2681900 - RNA, 11 nt, Human
cgggcucagca

SEQ ID NO: 2681901 - RNA, 14 nt, Human
cgggcgcgguggcu

SEQ ID NO: 2681902 - RNA, 16 nt, Human
cgggcgcgguggcuca

SEQ ID NO: 2681903 - RNA, 15 nt, Human
cgggcucagcaaaag

SEQ ID NO: 2681904 - RNA, 12 nt, Human
cggggaagagau

SEQ ID NO: 2681905 - RNA, 19 nt, Human
cggggaagagauccaaaga

SEQ ID NO: 2681906 - RNA, 20 nt, Human
cggggaagagauccaaagac

SEQ ID NO: 2681907 - RNA, 18 nt, Human
cgguguggagaagcggcu

SEQ ID NO: 2681908 - RNA, 13 nt, Human
cgguguggagaag

SEQ ID NO: 2681909 - RNA, 13 nt, Human
cggcucccagccu

SEQ ID NO: 2681910 - RNA, 19 nt, Human
cggcucccagccucagcgc

SEQ ID NO: 2681911 - RNA, 17 nt, Human
cggcucccagccucagc

SEQ ID NO: 2681912 - RNA, 15 nt, Human
cggcucccagccuca

SEQ ID NO: 2681913 - RNA, 14 nt, Human
cggcucccagccuc

SEQ ID NO: 2681914 - RNA, 16 nt, Human
cggaggcaaagcuggc

SEQ ID NO: 2681915 - RNA, 19 nt, Human
cggaggcaaagcuggcuca

SEQ ID NO: 2681916 - RNA, 22 nt, Human
cggaggcauccuacccuuuucu

SEQ ID NO: 2681917 - RNA, 20 nt, Human
cgccuguaaucccagcacuu

SEQ ID NO: 2681918 - RNA, 20 nt, Human
cgccuguaaucccagcuacu

SEQ ID NO: 2681919 - RNA, 14 nt, Human
cgcugccccaucuc

SEQ ID NO: 2681920 - RNA, 23 nt, Human
cgcugccccaucuccccucagcu

SEQ ID NO: 2681921 - RNA, 21 nt, Human
cgcugccccaucuccccucag

SEQ ID NO: 2681922 - RNA, 24 nt, Human
cgcugccccaucuccccucagcuc

SEQ ID NO: 2681923 - RNA, 14 nt, Human
cgcugccagccuug

SEQ ID NO: 2681924 - RNA, 21 nt, Human
cgcugccagccuugagcccug

SEQ ID NO: 2681925 - RNA, 23 nt, Human
cgcugccagccuugagcccuggc

SEQ ID NO: 2681926 - RNA, 18 nt, Human
cgcugcccaccugccggc

SEQ ID NO: 2681927 - RNA, 19 nt, Human
cgcugcccaccugccggcc

SEQ ID NO: 2681928 - RNA, 15 nt, Human
cgccugcugcaugcc

SEQ ID NO: 2681929 - RNA, 21 nt, Human
cgccuggcaguccgugggacg

SEQ ID NO: 2681930 - RNA, 13 nt, Human
cgccuggccagga

SEQ ID NO: 2681931 - RNA, 14 nt, Human
cgccuggccaggag

SEQ ID NO: 2681932 - RNA, 15 nt, Human
cgccuggccaggagc

SEQ ID NO: 2681933 - RNA, 16 nt, Human
cgccuggccaggagca

SEQ ID NO: 2681934 - RNA, 18 nt, Human
cgccuggccaggagcagg

SEQ ID NO: 2681935 - RNA, 16 nt, Human
cgccuccauccaaggc

SEQ ID NO: 2681936 - RNA, 18 nt, Human
cgccuccauccaaggcca

SEQ ID NO: 2681937 - RNA, 15 nt, Human
cgccucuuucaagca

SEQ ID NO: 2681938 - RNA, 15 nt, Human
cgccucuugaccagg

SEQ ID NO: 2681939 - RNA, 17 nt, Human
cgccucuugaccaggcu

SEQ ID NO: 2681940 - RNA, 12 nt, Human
cgccacucauuu

SEQ ID NO: 2681941 - RNA, 14 nt, Human
cgccacucauuuca

SEQ ID NO: 2681942 - RNA, 16 nt, Human
cgccacucauuucauc

SEQ ID NO: 2681943 - RNA, 17 nt, Human
cgccacucauuucaucu

SEQ ID NO: 2681944 - RNA, 19 nt, Human
cgccacucauuucaucuca

SEQ ID NO: 2681945 - RNA, 21 nt, Human
cgccacucauuucaucucauu

SEQ ID NO: 2681946 - RNA, 14 nt, Human
cgagucaaaguuga

SEQ ID NO: 2681947 - RNA, 21 nt, Human
cgaucacaaaugacuuuauua

SEQ ID NO: 2681948 - RNA, 19 nt, Human
cgaucacaaaugacuuuau

SEQ ID NO: 2681949 - RNA, 18 nt, Human
cgaucacaaaugacuuua

SEQ ID NO: 2681950 - RNA, 17 nt, Human
cgaucacaaaugacuuu

SEQ ID NO: 2681951 - RNA, 15 nt, Human
cgaucacaaaugacu

SEQ ID NO: 2681952 - RNA, 14 nt, Human
cgaucacaaaugac

SEQ ID NO: 2681953 - RNA, 23 nt, Human
cgacucugugccucccuccccag

SEQ ID NO: 2681954 - RNA, 17 nt, Human
cgacugaaaauauuguu

SEQ ID NO: 2681955 - RNA, 16 nt, Human
cgacuccguuggccac

SEQ ID NO: 2681956 - RNA, 19 nt, Human
cgacuccguuggccacucc

SEQ ID NO: 2681957 - RNA, 12 nt, Human
cgacuauagaaa

SEQ ID NO: 2681958 - RNA, 10 nt, Human
cgacuccagc

SEQ ID NO: 2681959 - RNA, 11 nt, Human
cgacuccagcc

SEQ ID NO: 2681960 - RNA, 12 nt, Human
cgacuccagcca

SEQ ID NO: 2681961 - RNA, 13 nt, Human
cgacuccagccag

SEQ ID NO: 2681962 - RNA, 14 nt, Human
cgacuccagccagc

SEQ ID NO: 2681963 - RNA, 15 nt, Human
cgacuccagccagcg

SEQ ID NO: 2681964 - RNA, 16 nt, Human
cgacuccagccagcgc

SEQ ID NO: 2681965 - RNA, 17 nt, Human
cgacuccagccagcgcc

SEQ ID NO: 2681966 - RNA, 18 nt, Human
cgacuccagccagcgccu

SEQ ID NO: 2681967 - RNA, 20 nt, Human
cgacuccagccagcgccucc

SEQ ID NO: 2681968 - RNA, 21 nt, Human
cgacuccagccagcgccuccc

SEQ ID NO: 2681969 - RNA, 15 nt, Human
cgacuaaacuagauu

SEQ ID NO: 2681970 - RNA, 14 nt, Human
cgacgcccacccaa

SEQ ID NO: 2681971 - RNA, 21 nt, Human
cgacuaaacuagauuuucacu

SEQ ID NO: 2681972 - RNA, 19 nt, Human
cgaccccccgugggcuccc

SEQ ID NO: 2681973 - RNA, 12 nt, Human
cgacccuggggg

SEQ ID NO: 2681974 - RNA, 17 nt, Human
cgacccugggggcacag

SEQ ID NO: 2681975 - RNA, 19 nt, Human
cgacccugggggcacagga

SEQ ID NO: 2681976 - RNA, 23 nt, Human
cgacccugggggcacaggaggca

SEQ ID NO: 2681977 - RNA, 12 nt, Human
cgacgcccaccc

SEQ ID NO: 2681978 - RNA, 18 nt, Human
cgacugaaaauauuguuu

SEQ ID NO: 2681979 - RNA, 17 nt, Human
cgacugcccggcagggu

SEQ ID NO: 2681980 - RNA, 16 nt, Human
cgaccccccgugggcu

SEQ ID NO: 2681981 - RNA, 18 nt, Human
cgaccccccgugggcucc

SEQ ID NO: 2681982 - RNA, 17 nt, Human
cgaauuuuucagaugau

SEQ ID NO: 2681983 - RNA, 18 nt, Human
cgacacggucucggauca

SEQ ID NO: 2681984 - RNA, 20 nt, Human
cgaauuucugugcccuccug

SEQ ID NO: 2681985 - RNA, 16 nt, Human
cgaauuucugugcccu

SEQ ID NO: 2681986 - RNA, 12 nt, Human
ccuuuuuauuua

SEQ ID NO: 2681987 - RNA, 13 nt, Human
ccuuuuuauuuau

SEQ ID NO: 2681988 - RNA, 22 nt, Human
ccuuuuuauuuauauguaugug

SEQ ID NO: 2681989 - RNA, 20 nt, Human
ccuuuuuauuuauauguaug

SEQ ID NO: 2681990 - RNA, 18 nt, Human
ccuuuuuauuuauaugua

SEQ ID NO: 2681991 - RNA, 16 nt, Human
ccuuuuuauuuauaug

SEQ ID NO: 2681992 - RNA, 13 nt, Human
ccuuuuugacacu

SEQ ID NO: 2681993 - RNA, 14 nt, Human
ccuuuuugacacug

SEQ ID NO: 2681994 - RNA, 15 nt, Human
ccuuuuugacacuga

SEQ ID NO: 2681995 - RNA, 16 nt, Human
ccuuuuugacacugaa

SEQ ID NO: 2681996 - RNA, 19 nt, Human
ccuuuuucauaaauuauuu

SEQ ID NO: 2681997 - RNA, 18 nt, Human
ccuuuaauuguaaaguaa

SEQ ID NO: 2681998 - RNA, 20 nt, Human
ccuuuagaaacucaaaaacu

SEQ ID NO: 2681999 - RNA, 11 nt, Human
ccuuuuuaagg

SEQ ID NO: 2682000 - RNA, 12 nt, Human
ccuugcuggccc

SEQ ID NO: 2682001 - RNA, 13 nt, Human
ccuugcuggcccc

SEQ ID NO: 2682002 - RNA, 14 nt, Human
ccuugcuggcccca

SEQ ID NO: 2682003 - RNA, 15 nt, Human
ccuugcuggccccag

SEQ ID NO: 2682004 - RNA, 16 nt, Human
ccuugcuggccccagc

SEQ ID NO: 2682005 - RNA, 17 nt, Human
ccuugcuggccccagcc

SEQ ID NO: 2682006 - RNA, 19 nt, Human
ccuugcuggccccagcccu

SEQ ID NO: 2682007 - RNA, 20 nt, Human
ccuugcuggccccagcccug

SEQ ID NO: 2682008 - RNA, 21 nt, Human
ccuugcuggccccagcccugc

SEQ ID NO: 2682009 - RNA, 22 nt, Human
ccuugcuggccccagcccugcu

SEQ ID NO: 2682010 - RNA, 16 nt, Human
ccuugcuugccugcag

SEQ ID NO: 2682011 - RNA, 18 nt, Human
ccuugcuugccugcaggg

SEQ ID NO: 2682012 - RNA, 21 nt, Human
ccuugcuugccugcagggcca

SEQ ID NO: 2682013 - RNA, 19 nt, Human
ccuugcuguuuguccugag

SEQ ID NO: 2682014 - RNA, 21 nt, Human
ccuugcuguuuguccugagau

SEQ ID NO: 2682015 - RNA, 11 nt, Human
cuauuaauaua

SEQ ID NO: 2682016 - RNA, 15 nt, Human
cuauuaauauaugua

SEQ ID NO: 2682017 - RNA, 14 nt, Human
cuauuaauauaugu

SEQ ID NO: 2682018 - RNA, 12 nt, Human
cuauuaauauau

SEQ ID NO: 2682019 - RNA, 17 nt, Human
cuauuaauauauguauu

SEQ ID NO: 2682020 - RNA, 14 nt, Human
cuauuuuuguaaag

SEQ ID NO: 2682021 - RNA, 19 nt, Human
cuauuuuuguaaaguuucc

SEQ ID NO: 2682022 - RNA, 21 nt, Human
cuauuaauauauguauuauuu

SEQ ID NO: 2682023 - RNA, 18 nt, Human
cucaaaagcugggcaggu

SEQ ID NO: 2682024 - RNA, 18 nt, Human
cucaaaauaaagaaguau

SEQ ID NO: 2682025 - RNA, 16 nt, Human
cucaauagaucuccag

SEQ ID NO: 2682026 - RNA, 20 nt, Human
cucaauaaagugcuuuaaaa

SEQ ID NO: 2682027 - RNA, 22 nt, Human
cucaaugcaguuagcugaagaa

SEQ ID NO: 2682028 - RNA, 15 nt, Human
cucaaugcuuuauuu

SEQ ID NO: 2682029 - RNA, 17 nt, Human
cucaaugcuuuauuugu

SEQ ID NO: 2682030 - RNA, 19 nt, Human
cucaaugcuuuauuuguaa

SEQ ID NO: 2682031 - RNA, 20 nt, Human
cucaaugcuuuauuuguaaa

SEQ ID NO: 2682032 - RNA, 18 nt, Human
cuaguuugggaggagcag

SEQ ID NO: 2682033 - RNA, 18 nt, Human
cuaguuugugagaaacau

SEQ ID NO: 2682034 - RNA, 20 nt, Human
cuaguuugugagaaacaucu

SEQ ID NO: 2682035 - RNA, 18 nt, Human
cuaucuaguucuaacagu

SEQ ID NO: 2682036 - RNA, 13 nt, Human
cuaucuauuugag

SEQ ID NO: 2682037 - RNA, 14 nt, Human
cuaucuauuugagg

SEQ ID NO: 2682038 - RNA, 21 nt, Human
cuacagugguuuuauacugaa

SEQ ID NO: 2682039 - RNA, 22 nt, Human
cuacaguugaaaaacagcugag

SEQ ID NO: 2682040 - RNA, 21 nt, Human
cuacaguugaaaaacagcuga

SEQ ID NO: 2682041 - RNA, 19 nt, Human
cuacaguugaaaaacagcu

SEQ ID NO: 2682042 - RNA, 14 nt, Human
cuaauuucuccucc

SEQ ID NO: 2682043 - RNA, 15 nt, Human
cuaauuucuccuccc

SEQ ID NO: 2682044 - RNA, 14 nt, Human
cuacagugguuuua

SEQ ID NO: 2682045 - RNA, 16 nt, Human
cuacagugguuuuaua

SEQ ID NO: 2682046 - RNA, 16 nt, Human
cuacauaucccuucca

SEQ ID NO: 2682047 - RNA, 17 nt, Human
cuacauaucccuuccag

SEQ ID NO: 2682048 - RNA, 18 nt, Human
cuacauaucccuuccaga

SEQ ID NO: 2682049 - RNA, 19 nt, Human
cuacauaucccuuccagau

SEQ ID NO: 2682050 - RNA, 21 nt, Human
cuacauaucccuuccagaugg

SEQ ID NO: 2682051 - RNA, 14 nt, Human
cuacaugcuggggu

SEQ ID NO: 2682052 - RNA, 15 nt, Human
cuacaugcugggguc

SEQ ID NO: 2682053 - RNA, 12 nt, Human
cuaccugcccuc

SEQ ID NO: 2682054 - RNA, 14 nt, Human
cuaccugcccucaa

SEQ ID NO: 2682055 - RNA, 16 nt, Human
cuaccugcccucaagg

SEQ ID NO: 2682056 - RNA, 20 nt, Human
cuaccuguauuuaaaaauag

SEQ ID NO: 2682057 - RNA, 21 nt, Human
cuaccuguauuuaaaaauaga

SEQ ID NO: 2682058 - RNA, 23 nt, Human
cuaccuguauuuaaaaauagaaa

SEQ ID NO: 2682059 - RNA, 22 nt, Human
cgugugugugugugugugugca

SEQ ID NO: 2682060 - RNA, 20 nt, Human
cuaagugggcauugccaugu

SEQ ID NO: 2682061 - RNA, 23 nt, Human
cuaagugggcauugccaugugga

SEQ ID NO: 2682062 - RNA, 22 nt, Human
cuaauugcugugugucccaggc

SEQ ID NO: 2682063 - RNA, 14 nt, Human
cuaauucuaaugug

SEQ ID NO: 2682064 - RNA, 22 nt, Human
cuagaacacuaacucaccagcc

SEQ ID NO: 2682065 - RNA, 19 nt, Human
cuagaacacuaacucacca

SEQ ID NO: 2682066 - RNA, 20 nt, Human
cuagaacacuaacucaccag

SEQ ID NO: 2682067 - RNA, 12 nt, Human
cuagaagccaag

SEQ ID NO: 2682068 - RNA, 13 nt, Human
cuagaagccaagg

SEQ ID NO: 2682069 - RNA, 16 nt, Human
cuagaagccaagggaa

SEQ ID NO: 2682070 - RNA, 20 nt, Human
cuagaagccaagggaaaggg

SEQ ID NO: 2682071 - RNA, 21 nt, Human
cuagaagccaagggaaagggg

SEQ ID NO: 2682072 - RNA, 22 nt, Human
cucuaaaagguaauguguggau

SEQ ID NO: 2682073 - RNA, 14 nt, Human
cucuaaagagcauc

SEQ ID NO: 2682074 - RNA, 13 nt, Human
cucucaccucagc

SEQ ID NO: 2682075 - RNA, 19 nt, Human
cucucacacugguucucaa

SEQ ID NO: 2682076 - RNA, 20 nt, Human
cucucacacugguucucaau

SEQ ID NO: 2682077 - RNA, 22 nt, Human
cucucacacugguucucaauga

SEQ ID NO: 2682078 - RNA, 14 nt, Human
cucguguguuucua

SEQ ID NO: 2682079 - RNA, 18 nt, Human
cuccuggcccacugcauc

SEQ ID NO: 2682080 - RNA, 16 nt, Human
cuccuggcccacugca

SEQ ID NO: 2682081 - RNA, 20 nt, Human
cuccuaacugccagcccccu

SEQ ID NO: 2682082 - RNA, 21 nt, Human
cuccucuccuacucggcucug

SEQ ID NO: 2682083 - RNA, 19 nt, Human
cuccuacauaucccuucca

SEQ ID NO: 2682084 - RNA, 20 nt, Human
cuccuacauaucccuuccag

SEQ ID NO: 2682085 - RNA, 21 nt, Human
cuccuacauaucccuuccaga

SEQ ID NO: 2682086 - RNA, 22 nt, Human
cuccguuagcuccuguggcccc

SEQ ID NO: 2682087 - RNA, 12 nt, Human
cuccguuggcca

SEQ ID NO: 2682088 - RNA, 20 nt, Human
cuccguuggccacuccgaga

SEQ ID NO: 2682089 - RNA, 17 nt, Human
cuccguuagcuccugug

SEQ ID NO: 2682090 - RNA, 18 nt, Human
cuccguuagcuccugugg

SEQ ID NO: 2682091 - RNA, 21 nt, Human
cuccguuagcuccuguggccc

SEQ ID NO: 2682092 - RNA, 22 nt, Human
cucccccaguuccucccaggaa

SEQ ID NO: 2682093 - RNA, 22 nt, Human
cucccccagccaugccagcugg

SEQ ID NO: 2682094 - RNA, 13 nt, Human
cuccacugugcac

SEQ ID NO: 2682095 - RNA, 16 nt, Human
cuccacugugcacacc

SEQ ID NO: 2682096 - RNA, 17 nt, Human
cuccccauggagccagc

SEQ ID NO: 2682097 - RNA, 12 nt, Human
cuccccauggag

SEQ ID NO: 2682098 - RNA, 17 nt, Human
cuccccauuucccaucu

SEQ ID NO: 2682099 - RNA, 18 nt, Human
cuccccauuucccaucug

SEQ ID NO: 2682100 - RNA, 19 nt, Human
cuccccauuucccaucugc

SEQ ID NO: 2682101 - RNA, 22 nt, Human
cuccccauuucccaucugcacc

SEQ ID NO: 2682102 - RNA, 20 nt, Human
cuccccauuucccaucugca

SEQ ID NO: 2682103 - RNA, 21 nt, Human
cuccccauuucccaucugcac

SEQ ID NO: 2682104 - RNA, 11 nt, Human
cucccaccccc

SEQ ID NO: 2682105 - RNA, 13 nt, Human
cucccacccccag

SEQ ID NO: 2682106 - RNA, 14 nt, Human
cucccacccccagc

SEQ ID NO: 2682107 - RNA, 15 nt, Human
cucccacccccagcc

SEQ ID NO: 2682108 - RNA, 16 nt, Human
cucccacccccagccc

SEQ ID NO: 2682109 - RNA, 21 nt, Human
cuccaggggcugcuuccuccu

SEQ ID NO: 2682110 - RNA, 14 nt, Human
cuccaggggcugcu

SEQ ID NO: 2682111 - RNA, 15 nt, Human
cuccaggggcugcuu

SEQ ID NO: 2682112 - RNA, 18 nt, Human
cuccaggggcugcuuccu

SEQ ID NO: 2682113 - RNA, 12 nt, Human
cucaguaaacgg

SEQ ID NO: 2682114 - RNA, 20 nt, Human
cucaguaaacgggaacaugc

SEQ ID NO: 2682115 - RNA, 21 nt, Human
cucaguaaacgggaacaugcc

SEQ ID NO: 2682116 - RNA, 13 nt, Human
cucaugcccaccc

SEQ ID NO: 2682117 - RNA, 16 nt, Human
cucaugcccacccccu

SEQ ID NO: 2682118 - RNA, 17 nt, Human
cucaugcccacccccug

SEQ ID NO: 2682119 - RNA, 19 nt, Human
cucaugcccacccccugcc

SEQ ID NO: 2682120 - RNA, 20 nt, Human
cucaugcccacccccugccc

SEQ ID NO: 2682121 - RNA, 21 nt, Human
cucaugcccacccccugcccu

SEQ ID NO: 2682122 - RNA, 22 nt, Human
cucaugcccacccccugcccug

SEQ ID NO: 2682123 - RNA, 23 nt, Human
cucaugcccacccccugcccugc

SEQ ID NO: 2682124 - RNA, 13 nt, Human
cucaucugcuggu

SEQ ID NO: 2682125 - RNA, 17 nt, Human
cucaucuggaguucuca

SEQ ID NO: 2682126 - RNA, 21 nt, Human
cucaucuggaguucucaaaga

SEQ ID NO: 2682127 - RNA, 14 nt, Human
cucaucugcugguc

SEQ ID NO: 2682128 - RNA, 15 nt, Human
cucaucugcuggucc

SEQ ID NO: 2682129 - RNA, 16 nt, Human
cucaucugcugguccg

SEQ ID NO: 2682130 - RNA, 20 nt, Human
cucaucugcugguccguggg

SEQ ID NO: 2682131 - RNA, 15 nt, Human
cuccaagccccaucu

SEQ ID NO: 2682132 - RNA, 17 nt, Human
cuccaagccccaucuuc

SEQ ID NO: 2682133 - RNA, 18 nt, Human
cuccaagccccaucuucu

SEQ ID NO: 2682134 - RNA, 16 nt, Human
cucaugugugcaacag

SEQ ID NO: 2682135 - RNA, 12 nt, Human
cucauguggcug

SEQ ID NO: 2682136 - RNA, 13 nt, Human
cucauguggcugg

SEQ ID NO: 2682137 - RNA, 14 nt, Human
cucauguggcugga

SEQ ID NO: 2682138 - RNA, 15 nt, Human
cucauguggcuggaa

SEQ ID NO: 2682139 - RNA, 12 nt, Human
cugaggugggag

SEQ ID NO: 2682140 - RNA, 15 nt, Human
cugagcuuucugcua

SEQ ID NO: 2682141 - RNA, 14 nt, Human
cugagcuuucugcu

SEQ ID NO: 2682142 - RNA, 19 nt, Human
cugagaucgugcuacugca

SEQ ID NO: 2682143 - RNA, 21 nt, Human
cugagaucaaaacgguuuuac

SEQ ID NO: 2682144 - RNA, 21 nt, Human
cugaguauuaauaucugagga

SEQ ID NO: 2682145 - RNA, 15 nt, Human
cugagauggaaaagu

SEQ ID NO: 2682146 - RNA, 23 nt, Human
cugaccuggcaucuaauucugau

SEQ ID NO: 2682147 - RNA, 16 nt, Human
cugacccauugcuguu

SEQ ID NO: 2682148 - RNA, 14 nt, Human
cugacccauugcug

SEQ ID NO: 2682149 - RNA, 12 nt, Human
cugagacugugc

SEQ ID NO: 2682150 - RNA, 15 nt, Human
cugagacugugcugu

SEQ ID NO: 2682151 - RNA, 21 nt, Human
cugagacuuucagugcacugu

SEQ ID NO: 2682152 - RNA, 12 nt, Human
cugagagccagg

SEQ ID NO: 2682153 - RNA, 17 nt, Human
cugagaggcaggcauag

SEQ ID NO: 2682154 - RNA, 14 nt, Human
cugagaggcaggca

SEQ ID NO: 2682155 - RNA, 15 nt, Human
cugagaggcaggcau

SEQ ID NO: 2682156 - RNA, 12 nt, Human
cugagaggcagg

SEQ ID NO: 2682157 - RNA, 13 nt, Human
cugagaggcaggc

SEQ ID NO: 2682158 - RNA, 22 nt, Human
cugacaaggcacuucauguaaa

SEQ ID NO: 2682159 - RNA, 23 nt, Human
cugacaaggcacuucauguaaag

SEQ ID NO: 2682160 - RNA, 18 nt, Human
cucuuagauucuuaauuc

SEQ ID NO: 2682161 - RNA, 14 nt, Human
cucuucagaugcca

SEQ ID NO: 2682162 - RNA, 20 nt, Human
cucuucagaugccacuucua

SEQ ID NO: 2682163 - RNA, 21 nt, Human
cucuucagaugccacuucuaa

SEQ ID NO: 2682164 - RNA, 21 nt, Human
cucuggguccuuccugaaacu

SEQ ID NO: 2682165 - RNA, 18 nt, Human
cucuggguccuuccugaa

SEQ ID NO: 2682166 - RNA, 17 nt, Human
cucuggguccuuccuga

SEQ ID NO: 2682167 - RNA, 16 nt, Human
cucuggguccuuccug

SEQ ID NO: 2682168 - RNA, 15 nt, Human
cucuggguccuuccu

SEQ ID NO: 2682169 - RNA, 13 nt, Human
cucugcuccccag

SEQ ID NO: 2682170 - RNA, 13 nt, Human
cucugucaggccu

SEQ ID NO: 2682171 - RNA, 14 nt, Human
cucugucaggccuu

SEQ ID NO: 2682172 - RNA, 20 nt, Human
cucuggucgcuccugcccac

SEQ ID NO: 2682173 - RNA, 17 nt, Human
cucuggucgcuccugcc

SEQ ID NO: 2682174 - RNA, 18 nt, Human
cucuggucgcuccugccc

SEQ ID NO: 2682175 - RNA, 16 nt, Human
cucuggucgcuccugc

SEQ ID NO: 2682176 - RNA, 21 nt, Human
cugaaaauuggacagauugcc

SEQ ID NO: 2682177 - RNA, 23 nt, Human
cugaaaauuggacagauugccug

SEQ ID NO: 2682178 - RNA, 20 nt, Human
cugaaacuauauuuugucau

SEQ ID NO: 2682179 - RNA, 12 nt, Human
cugaaacuauau

SEQ ID NO: 2682180 - RNA, 14 nt, Human
cugaauuuuuuugu

SEQ ID NO: 2682181 - RNA, 15 nt, Human
cugaauuuuuuugua

SEQ ID NO: 2682182 - RNA, 16 nt, Human
cugaauuuuuuuguaa

SEQ ID NO: 2682183 - RNA, 17 nt, Human
cugaauuuuuuuguaau

SEQ ID NO: 2682184 - RNA, 18 nt, Human
cugaauuuuuuuguaaua

SEQ ID NO: 2682185 - RNA, 19 nt, Human
cugaauuuuuuuguaauaa

SEQ ID NO: 2682186 - RNA, 20 nt, Human
cugaauuuuuuuguaauaag

SEQ ID NO: 2682187 - RNA, 23 nt, Human
cugaauuuuuuuguaauaagcaa

SEQ ID NO: 2682188 - RNA, 16 nt, Human
ccugugacugucucac

SEQ ID NO: 2682189 - RNA, 22 nt, Human
ccugugacauggugccugagag

SEQ ID NO: 2682190 - RNA, 23 nt, Human
ccugugacauggugccugagagg

SEQ ID NO: 2682191 - RNA, 16 nt, Human
ccugugaaugccacug

SEQ ID NO: 2682192 - RNA, 17 nt, Human
ccugugaaugccacugc

SEQ ID NO: 2682193 - RNA, 19 nt, Human
ccugugaaugccacugccu

SEQ ID NO: 2682194 - RNA, 21 nt, Human
ccugugaaugccacugccuuc

SEQ ID NO: 2682195 - RNA, 22 nt, Human
ccugugaaugccacugccuucg

SEQ ID NO: 2682196 - RNA, 17 nt, Human
ccugugacauggugccu

SEQ ID NO: 2682197 - RNA, 18 nt, Human
ccugugacauggugccug

SEQ ID NO: 2682198 - RNA, 19 nt, Human
ccugugacauggugccuga

SEQ ID NO: 2682199 - RNA, 21 nt, Human
ccugugacauggugccugaga

SEQ ID NO: 2682200 - RNA, 15 nt, Human
ccuguaaucccagca

SEQ ID NO: 2682201 - RNA, 16 nt, Human
ccuguaaucccagcac

SEQ ID NO: 2682202 - RNA, 18 nt, Human
ccuguaacuugagaguag

SEQ ID NO: 2682203 - RNA, 16 nt, Human
ccugguuguguguccc

SEQ ID NO: 2682204 - RNA, 16 nt, Human
ccugggccgcugccac

SEQ ID NO: 2682205 - RNA, 17 nt, Human
ccugggccgcugccacg

SEQ ID NO: 2682206 - RNA, 22 nt, Human
ccugggccguaucuccggcucc

SEQ ID NO: 2682207 - RNA, 20 nt, Human
ccugggccguaucuccggcu

SEQ ID NO: 2682208 - RNA, 13 nt, Human
ccugggccgcugc

SEQ ID NO: 2682209 - RNA, 14 nt, Human
ccugggcccugggc

SEQ ID NO: 2682210 - RNA, 15 nt, Human
ccugggcccugggcu

SEQ ID NO: 2682211 - RNA, 16 nt, Human
ccugggcccugggcug

SEQ ID NO: 2682212 - RNA, 18 nt, Human
ccugggcccugggcugga

SEQ ID NO: 2682213 - RNA, 19 nt, Human
ccugggcccugggcuggaa

SEQ ID NO: 2682214 - RNA, 15 nt, Human
ccugggggcacagga

SEQ ID NO: 2682215 - RNA, 18 nt, Human
ccugggggcacaggaggc

SEQ ID NO: 2682216 - RNA, 23 nt, Human
ccugggggcacaggaggcaggca

SEQ ID NO: 2682217 - RNA, 17 nt, Human
ccugggggccuggguug

SEQ ID NO: 2682218 - RNA, 14 nt, Human
ccugggccccagcu

SEQ ID NO: 2682219 - RNA, 21 nt, Human
ccuggccuauccgcugccagc

SEQ ID NO: 2682220 - RNA, 23 nt, Human
ccuggccuauccgcugccagccu

SEQ ID NO: 2682221 - RNA, 13 nt, Human
ccuggccucugug

SEQ ID NO: 2682222 - RNA, 17 nt, Human
ccuggccgcgcuccggg

SEQ ID NO: 2682223 - RNA, 19 nt, Human
ccuggccgcggagccugca

SEQ ID NO: 2682224 - RNA, 21 nt, Human
ccugcagaugccacccuagcc

SEQ ID NO: 2682225 - RNA, 15 nt, Human
ccucuuucccuagga

SEQ ID NO: 2682226 - RNA, 20 nt, Human
ccugaccagcugcuccgagg

SEQ ID NO: 2682227 - RNA, 21 nt, Human
ccugaccagcugcuccgagga

SEQ ID NO: 2682228 - RNA, 22 nt, Human
ccugaccagcugcuccgaggac

SEQ ID NO: 2682229 - RNA, 14 nt, Human
ccugaccagcugcu

SEQ ID NO: 2682230 - RNA, 15 nt, Human
ccugaccagcugcuc

SEQ ID NO: 2682231 - RNA, 13 nt, Human
ccugcagaugcca

SEQ ID NO: 2682232 - RNA, 14 nt, Human
ccugcagaugccac

SEQ ID NO: 2682233 - RNA, 15 nt, Human
ccugcagaugccacc

SEQ ID NO: 2682234 - RNA, 20 nt, Human
ccugcagaugccacccuagc

SEQ ID NO: 2682235 - RNA, 20 nt, Human
ccugccucccacuucacugc

SEQ ID NO: 2682236 - RNA, 14 nt, Human
ccugcugcgcaguu

SEQ ID NO: 2682237 - RNA, 20 nt, Human
ccugccccaaucccuuuauu

SEQ ID NO: 2682238 - RNA, 13 nt, Human
ccugcccagacaa

SEQ ID NO: 2682239 - RNA, 15 nt, Human
ccugcccagacaaga

SEQ ID NO: 2682240 - RNA, 18 nt, Human
ccugcccagcccccuggu

SEQ ID NO: 2682241 - RNA, 23 nt, Human
ccucuuuaguuuuugguugggaa

SEQ ID NO: 2682242 - RNA, 23 nt, Human
ccucuuucaagcagucgugccug

SEQ ID NO: 2682243 - RNA, 22 nt, Human
ccucauggcagccuacucuccu

SEQ ID NO: 2682244 - RNA, 20 nt, Human
ccucaaagcuuggauuaaau

SEQ ID NO: 2682245 - RNA, 24 nt, Human
ccucaaagcuuggauuaaauacau

SEQ ID NO: 2682246 - RNA, 20 nt, Human
ccuccccaaaucaauacacu

SEQ ID NO: 2682247 - RNA, 19 nt, Human
ccuccaaauggagaagcug

SEQ ID NO: 2682248 - RNA, 20 nt, Human
ccuccaaauggagaagcugc

SEQ ID NO: 2682249 - RNA, 21 nt, Human
ccuccaaauggagaagcugca

SEQ ID NO: 2682250 - RNA, 22 nt, Human
ccuccaaauggagaagcugcag

SEQ ID NO: 2682251 - RNA, 23 nt, Human
ccuccaaauggagaagcugcagg

SEQ ID NO: 2682252 - RNA, 13 nt, Human
ccucccaccccca

SEQ ID NO: 2682253 - RNA, 14 nt, Human
ccucccacccccag

SEQ ID NO: 2682254 - RNA, 15 nt, Human
ccucccacccccagc

SEQ ID NO: 2682255 - RNA, 16 nt, Human
ccucccacccccagcc

SEQ ID NO: 2682256 - RNA, 12 nt, Human
ccuccaacccug

SEQ ID NO: 2682257 - RNA, 13 nt, Human
ccuccaacccugc

SEQ ID NO: 2682258 - RNA, 14 nt, Human
ccuccaacccugcc

SEQ ID NO: 2682259 - RNA, 15 nt, Human
ccuccaacccugccg

SEQ ID NO: 2682260 - RNA, 18 nt, Human
ccuccaacccugccguca

SEQ ID NO: 2682261 - RNA, 17 nt, Human
cccugugacauggugcc

SEQ ID NO: 2682262 - RNA, 18 nt, Human
cccugugacauggugccu

SEQ ID NO: 2682263 - RNA, 23 nt, Human
cccugucucaaaaaaagaaaaag

SEQ ID NO: 2682264 - RNA, 20 nt, Human
cccugucucaaaaaaagaaa

SEQ ID NO: 2682265 - RNA, 18 nt, Human
ccgcaguguggccaggcu

SEQ ID NO: 2682266 - RNA, 14 nt, Human
ccgcaucucacagc

SEQ ID NO: 2682267 - RNA, 14 nt, Human
ccgcagcccuggca

SEQ ID NO: 2682268 - RNA, 21 nt, Human
cccuuccuuuucccugcuucc

SEQ ID NO: 2682269 - RNA, 22 nt, Human
cccuuccuuuucccugcuucca

SEQ ID NO: 2682270 - RNA, 19 nt, Human
cccugugacauggugccug

SEQ ID NO: 2682271 - RNA, 20 nt, Human
cccugugacauggugccuga

SEQ ID NO: 2682272 - RNA, 19 nt, Human
cccuuccuuuucccugcuu

SEQ ID NO: 2682273 - RNA, 14 nt, Human
ccggcccccugccc

SEQ ID NO: 2682274 - RNA, 14 nt, Human
ccagcagccuggac

SEQ ID NO: 2682275 - RNA, 15 nt, Human
ccagcagccuggacc

SEQ ID NO: 2682276 - RNA, 20 nt, Human
ccagcagccuggacccugug

SEQ ID NO: 2682277 - RNA, 19 nt, Human
ccagcagccuggacccugu

SEQ ID NO: 2682278 - RNA, 16 nt, Human
ccagcuuaucucaggg

SEQ ID NO: 2682279 - RNA, 13 nt, Human
ccacucugcuucu

SEQ ID NO: 2682280 - RNA, 14 nt, Human
ccacucugcuucuc

SEQ ID NO: 2682281 - RNA, 17 nt, Human
ccacucugcuucucuga

SEQ ID NO: 2682282 - RNA, 19 nt, Human
ccacucugcuucucugacu

SEQ ID NO: 2682283 - RNA, 20 nt, Human
ccacucugcuucucugacuu

SEQ ID NO: 2682284 - RNA, 21 nt, Human
ccaggaguguggccacguggg

SEQ ID NO: 2682285 - RNA, 20 nt, Human
ccaggggcugcuuccuccug

SEQ ID NO: 2682286 - RNA, 21 nt, Human
ccaggggcugcuuccuccugg

SEQ ID NO: 2682287 - RNA, 22 nt, Human
ccaggggcugcuuccuccugga

SEQ ID NO: 2682288 - RNA, 23 nt, Human
ccaggggcugcuuccuccuggaa

SEQ ID NO: 2682289 - RNA, 15 nt, Human
ccaguccccaccccu

SEQ ID NO: 2682290 - RNA, 16 nt, Human
ccaguccccaccccug

SEQ ID NO: 2682291 - RNA, 17 nt, Human
ccaguccccaccccugc

SEQ ID NO: 2682292 - RNA, 18 nt, Human
ccaguccccaccccugcc

SEQ ID NO: 2682293 - RNA, 19 nt, Human
ccaguccccaccccugccc

SEQ ID NO: 2682294 - RNA, 21 nt, Human
ccaguccccaccccugccccc

SEQ ID NO: 2682295 - RNA, 22 nt, Human
ccaguccccaccccugccccca

SEQ ID NO: 2682296 - RNA, 15 nt, Human
ccagggggcaagagg

SEQ ID NO: 2682297 - RNA, 22 nt, Human
ccauugagaccgugaagauacu

SEQ ID NO: 2682298 - RNA, 18 nt, Human
ccauuucccaucugcacc

SEQ ID NO: 2682299 - RNA, 19 nt, Human
ccauacauaaaagaaauaa

SEQ ID NO: 2682300 - RNA, 17 nt, Human
ccauacacuuuguugca

SEQ ID NO: 2682301 - RNA, 20 nt, Human
ccauacacuuuguugcaaga

SEQ ID NO: 2682302 - RNA, 16 nt, Human
ccauccccuguagagu

SEQ ID NO: 2682303 - RNA, 20 nt, Human
cccuaucuccugacagaagg

SEQ ID NO: 2682304 - RNA, 22 nt, Human
cccuaucuccugacagaaggug

SEQ ID NO: 2682305 - RNA, 13 nt, Human
cccuaucuccuga

SEQ ID NO: 2682306 - RNA, 14 nt, Human
cccuaucuccugac

SEQ ID NO: 2682307 - RNA, 15 nt, Human
cccuaucuccugaca

SEQ ID NO: 2682308 - RNA, 16 nt, Human
cccuaucuccugacag

SEQ ID NO: 2682309 - RNA, 17 nt, Human
cccuaucuccugacaga

SEQ ID NO: 2682310 - RNA, 20 nt, Human
cccggcuuccuuucccaagc

SEQ ID NO: 2682311 - RNA, 21 nt, Human
cccggcugcagaggccagagg

SEQ ID NO: 2682312 - RNA, 20 nt, Human
cccgggaaccuccccagccu

SEQ ID NO: 2682313 - RNA, 23 nt, Human
cccgggaaccuccccagccugcg

SEQ ID NO: 2682314 - RNA, 22 nt, Human
cccgggaaccuccccagccugc

SEQ ID NO: 2682315 - RNA, 14 nt, Human
ccccuucucuccuc

SEQ ID NO: 2682316 - RNA, 12 nt, Human
ccccaucuugcu

SEQ ID NO: 2682317 - RNA, 14 nt, Human
ccccaucuugcuuc

SEQ ID NO: 2682318 - RNA, 16 nt, Human
cccaggggacaaggga

SEQ ID NO: 2682319 - RNA, 14 nt, Human
cccagggcuccugc

SEQ ID NO: 2682320 - RNA, 15 nt, Human
cccagggcuccugca

SEQ ID NO: 2682321 - RNA, 19 nt, Human
cccauuucccaucugcacc

SEQ ID NO: 2682322 - RNA, 14 nt, Human
cccauuucccaucu

SEQ ID NO: 2682323 - RNA, 15 nt, Human
cccauuucccaucug

SEQ ID NO: 2682324 - RNA, 16 nt, Human
cccauuucccaucugc

SEQ ID NO: 2682325 - RNA, 17 nt, Human
cccauuucccaucugca

SEQ ID NO: 2682326 - RNA, 14 nt, Human
cccaggaagcccag

SEQ ID NO: 2682327 - RNA, 15 nt, Human
cccaggaagcccagg

SEQ ID NO: 2682328 - RNA, 15 nt, Human
cccagcacuuuggga

SEQ ID NO: 2682329 - RNA, 17 nt, Human
cccagcacuuugggagg

SEQ ID NO: 2682330 - RNA, 18 nt, Human
cccagcacuuugggaggc

SEQ ID NO: 2682331 - RNA, 23 nt, Human
cccagcacuuugggaggccgagg

SEQ ID NO: 2682332 - RNA, 17 nt, Human
ccaauauuuaccagacc

SEQ ID NO: 2682333 - RNA, 18 nt, Human
ccaaauggagaagcugca

SEQ ID NO: 2682334 - RNA, 19 nt, Human
ccaaauggagaagcugcag

SEQ ID NO: 2682335 - RNA, 20 nt, Human
ccaaauggagaagcugcagg

SEQ ID NO: 2682336 - RNA, 21 nt, Human
ccaaauggagaagcugcaggc

SEQ ID NO: 2682337 - RNA, 15 nt, Human
ccaauguaggagcug

SEQ ID NO: 2682338 - RNA, 20 nt, Human
ccaauggguuuuucccugua

SEQ ID NO: 2682339 - RNA, 20 nt, Human
ccaauguaggagcugccuug

SEQ ID NO: 2682340 - RNA, 17 nt, Human
ccaauguaggagcugcc

SEQ ID NO: 2682341 - RNA, 15 nt, Human
cauuugugccagagg

SEQ ID NO: 2682342 - RNA, 16 nt, Human
cauuugugccagagga

SEQ ID NO: 2682343 - RNA, 16 nt, Human
cauuugugcuagaaau

SEQ ID NO: 2682344 - RNA, 20 nt, Human
cauuugugcuagaaauuuuc

SEQ ID NO: 2682345 - RNA, 21 nt, Human
cauuugugcuagaaauuuuca

SEQ ID NO: 2682346 - RNA, 16 nt, Human
cauuuuuuaauuuacu

SEQ ID NO: 2682347 - RNA, 21 nt, Human
cauuuuuuaauuuacuuguuu

SEQ ID NO: 2682348 - RNA, 23 nt, Human
cauuuuuuaauuuacuuguuuug

SEQ ID NO: 2682349 - RNA, 14 nt, Human
cauuuuuuugcaug

SEQ ID NO: 2682350 - RNA, 17 nt, Human
ccaccgccccuggccgc

SEQ ID NO: 2682351 - RNA, 22 nt, Human
ccaccuuuggaaagcucugacc

SEQ ID NO: 2682352 - RNA, 24 nt, Human
ccaccuuuggaaagcucugaccac

SEQ ID NO: 2682353 - RNA, 20 nt, Human
ccacccuuucccccuucucu

SEQ ID NO: 2682354 - RNA, 23 nt, Human
ccacgaauuucugugcccuccug

SEQ ID NO: 2682355 - RNA, 21 nt, Human
ccacgaauuucugugcccucc

SEQ ID NO: 2682356 - RNA, 18 nt, Human
ccacgaauuucugugccc

SEQ ID NO: 2682357 - RNA, 15 nt, Human
ccacgcccguccugc

SEQ ID NO: 2682358 - RNA, 17 nt, Human
ccacgcccguccugccu

SEQ ID NO: 2682359 - RNA, 18 nt, Human
ccacgcccguccugccug

SEQ ID NO: 2682360 - RNA, 23 nt, Human
ccacgcccguccugccuguggcg

SEQ ID NO: 2682361 - RNA, 19 nt, Human
ccacgcccguccugccugu

SEQ ID NO: 2682362 - RNA, 20 nt, Human
ccacgcccguccugccugug

SEQ ID NO: 2682363 - RNA, 21 nt, Human
ccacgcccguccugccugugg

SEQ ID NO: 2682364 - RNA, 22 nt, Human
ccacgcccguccugccuguggc

SEQ ID NO: 2682365 - RNA, 22 nt, Human
ccacagcaacgaucacaaauga

SEQ ID NO: 2682366 - RNA, 15 nt, Human
ccacagccagcaccu

SEQ ID NO: 2682367 - RNA, 15 nt, Human
ccacagcgagggcag

SEQ ID NO: 2682368 - RNA, 17 nt, Human
ccacagcgagggcagcu

SEQ ID NO: 2682369 - RNA, 17 nt, Human
ccacagccagcaccugg

SEQ ID NO: 2682370 - RNA, 18 nt, Human
ccacagccagcaccuggc

SEQ ID NO: 2682371 - RNA, 19 nt, Human
ccacagccagcaccuggca

SEQ ID NO: 2682372 - RNA, 22 nt, Human
ccacagccagcaccuggcaucg

SEQ ID NO: 2682373 - RNA, 13 nt, Human
ccacagcgccagc

SEQ ID NO: 2682374 - RNA, 18 nt, Human
ccacagcgccagccucag

SEQ ID NO: 2682375 - RNA, 23 nt, Human
ccacagcgccagccucagacugg

SEQ ID NO: 2682376 - RNA, 24 nt, Human
ccacagcgccagccucagacugga

SEQ ID NO: 2682377 - RNA, 12 nt, Human
ccacagcguccc

SEQ ID NO: 2682378 - RNA, 15 nt, Human
ccacagcgucccugg

SEQ ID NO: 2682379 - RNA, 16 nt, Human
ccacagcgucccuggc

SEQ ID NO: 2682380 - RNA, 17 nt, Human
ccacagcgucccuggcg

SEQ ID NO: 2682381 - RNA, 21 nt, Human
ccacagcgucccuggcgcagg

SEQ ID NO: 2682382 - RNA, 18 nt, Human
ccacagcgagggcagcug

SEQ ID NO: 2682383 - RNA, 19 nt, Human
ccacagcgagggcagcugc

SEQ ID NO: 2682384 - RNA, 20 nt, Human
ccacagcgagggcagcugcu

SEQ ID NO: 2682385 - RNA, 21 nt, Human
ccacagcgagggcagcugcua

SEQ ID NO: 2682386 - RNA, 21 nt, Human
ccaccacagccagcaccuggc

SEQ ID NO: 2682387 - RNA, 14 nt, Human
ccaccacagccagc

SEQ ID NO: 2682388 - RNA, 15 nt, Human
ccaccacagccagca

SEQ ID NO: 2682389 - RNA, 18 nt, Human
ccaccacagccagcaccu

SEQ ID NO: 2682390 - RNA, 20 nt, Human
ccaccacagccagcaccugg

SEQ ID NO: 2682391 - RNA, 15 nt, Human
ccacccugggcccug

SEQ ID NO: 2682392 - RNA, 16 nt, Human
ccacccugggcccugg

SEQ ID NO: 2682393 - RNA, 17 nt, Human
ccacccugggcccuggg

SEQ ID NO: 2682394 - RNA, 20 nt, Human
ccacccugggcccugggcug

SEQ ID NO: 2682395 - RNA, 22 nt, Human
ccacccugggcccugggcugga

SEQ ID NO: 2682396 - RNA, 20 nt, Human
ccacuccgagaggugggcca

SEQ ID NO: 2682397 - RNA, 18 nt, Human
ccacucccuugcuggccc

SEQ ID NO: 2682398 - RNA, 20 nt, Human
ccacucccuugcuggcccca

SEQ ID NO: 2682399 - RNA, 16 nt, Human
ccacuccgagaggugg

SEQ ID NO: 2682400 - RNA, 17 nt, Human
ccacuccgagagguggg

SEQ ID NO: 2682401 - RNA, 19 nt, Human
ccacuccgagaggugggcc

SEQ ID NO: 2682402 - RNA, 23 nt, Human
ccacuccgagaggugggccaguc

SEQ ID NO: 2682403 - RNA, 20 nt, Human
caugcuccuggcccacugca

SEQ ID NO: 2682404 - RNA, 16 nt, Human
caugcaaaauauguuu

SEQ ID NO: 2682405 - RNA, 17 nt, Human
caugcaaaauauguuua

SEQ ID NO: 2682406 - RNA, 16 nt, Human
cauggcuccggccucu

SEQ ID NO: 2682407 - RNA, 17 nt, Human
cauggcuccggccucug

SEQ ID NO: 2682408 - RNA, 16 nt, Human
cauggcucaggguggu

SEQ ID NO: 2682409 - RNA, 17 nt, Human
cauucuaggcucacugc

SEQ ID NO: 2682410 - RNA, 21 nt, Human
cauucguuguguuuuuuaaga

SEQ ID NO: 2682411 - RNA, 23 nt, Human
cauucguuguguuuuuuaagaua

SEQ ID NO: 2682412 - RNA, 19 nt, Human
cauucguacauaauacuga

SEQ ID NO: 2682413 - RNA, 17 nt, Human
cauucguacauaauacu

SEQ ID NO: 2682414 - RNA, 13 nt, Human
cauuauaaaaaga

SEQ ID NO: 2682415 - RNA, 15 nt, Human
cauguagcagugagu

SEQ ID NO: 2682416 - RNA, 19 nt, Human
cauguagcagugagucaua

SEQ ID NO: 2682417 - RNA, 17 nt, Human
cauguagcccccuggcc

SEQ ID NO: 2682418 - RNA, 13 nt, Human
cauguagcccccu

SEQ ID NO: 2682419 - RNA, 22 nt, Human
cauguagcccccuggccucugu

SEQ ID NO: 2682420 - RNA, 21 nt, Human
cauguagcccccuggccucug

SEQ ID NO: 2682421 - RNA, 20 nt, Human
cauguagcccccuggccucu

SEQ ID NO: 2682422 - RNA, 18 nt, Human
cauguagcccccuggccu

SEQ ID NO: 2682423 - RNA, 14 nt, Human
cauguauuugagca

SEQ ID NO: 2682424 - RNA, 15 nt, Human
cauguauuugagcau

SEQ ID NO: 2682425 - RNA, 22 nt, Human
cauguacuuuuuaguaauuucu

SEQ ID NO: 2682426 - RNA, 21 nt, Human
cauguuggccaggcuggucuu

SEQ ID NO: 2682427 - RNA, 15 nt, Human
cauguugggaaacuu

SEQ ID NO: 2682428 - RNA, 19 nt, Human
cauguugggaaacuuggcu

SEQ ID NO: 2682429 - RNA, 20 nt, Human
cauguugggaaacuuggcuc

SEQ ID NO: 2682430 - RNA, 21 nt, Human
cauguugggaaacuuggcucg

SEQ ID NO: 2682431 - RNA, 12 nt, Human
cauguuauguuu

SEQ ID NO: 2682432 - RNA, 13 nt, Human
cauguuauguuua

SEQ ID NO: 2682433 - RNA, 20 nt, Human
caugucaaacaugagaugug

SEQ ID NO: 2682434 - RNA, 21 nt, Human
caugucaaacaugagaugugu

SEQ ID NO: 2682435 - RNA, 13 nt, Human
caugucaaacaug

SEQ ID NO: 2682436 - RNA, 18 nt, Human
cauauggguuagauguug

SEQ ID NO: 2682437 - RNA, 17 nt, Human
cauauggguuagauguu

SEQ ID NO: 2682438 - RNA, 22 nt, Human
cagugguggcaacauucauugc

SEQ ID NO: 2682439 - RNA, 11 nt, Human
cauauggaugu

SEQ ID NO: 2682440 - RNA, 12 nt, Human
cauauggauguu

SEQ ID NO: 2682441 - RNA, 15 nt, Human
cauauggauguuacu

SEQ ID NO: 2682442 - RNA, 16 nt, Human
cauauggauguuacuc

SEQ ID NO: 2682443 - RNA, 14 nt, Human
caucacuuaaaaca

SEQ ID NO: 2682444 - RNA, 13 nt, Human
caucacuuaaaac

SEQ ID NO: 2682445 - RNA, 12 nt, Human
caucacuguauc

SEQ ID NO: 2682446 - RNA, 21 nt, Human
cauccccuguagagugggagc

SEQ ID NO: 2682447 - RNA, 15 nt, Human
caucacuuaaaacac

SEQ ID NO: 2682448 - RNA, 16 nt, Human
caucgcaccauucuga

SEQ ID NO: 2682449 - RNA, 18 nt, Human
caucgcaccauucugacu

SEQ ID NO: 2682450 - RNA, 19 nt, Human
caucgcaccauucugacuc

SEQ ID NO: 2682451 - RNA, 17 nt, Human
caucggccuagggcccc

SEQ ID NO: 2682452 - RNA, 15 nt, Human
caucggcguggccca

SEQ ID NO: 2682453 - RNA, 16 nt, Human
caucggccuagggccc

SEQ ID NO: 2682454 - RNA, 14 nt, Human
caucggccuagggc

SEQ ID NO: 2682455 - RNA, 14 nt, Human
caucugcugguccg

SEQ ID NO: 2682456 - RNA, 19 nt, Human
caucugcugguccguggga

SEQ ID NO: 2682457 - RNA, 16 nt, Human
caucgugaagaagccu

SEQ ID NO: 2682458 - RNA, 17 nt, Human
caucgugaagaagccug

SEQ ID NO: 2682459 - RNA, 18 nt, Human
caucgugaagaagccugu

SEQ ID NO: 2682460 - RNA, 17 nt, Human
caucuguggacugaccu

SEQ ID NO: 2682461 - RNA, 15 nt, Human
caucgccacaaacuc

SEQ ID NO: 2682462 - RNA, 14 nt, Human
caucuggaagauca

SEQ ID NO: 2682463 - RNA, 21 nt, Human
caucuggaagaucauuuugaa

SEQ ID NO: 2682464 - RNA, 21 nt, Human
caucuggaaucuggagaccag

SEQ ID NO: 2682465 - RNA, 16 nt, Human
caucuggaaucuggag

SEQ ID NO: 2682466 - RNA, 19 nt, Human
cagcugagggugagugggu

SEQ ID NO: 2682467 - RNA, 19 nt, Human
cagcuguucagcugguuga

SEQ ID NO: 2682468 - RNA, 17 nt, Human
cagccucugaaaaccaa

SEQ ID NO: 2682469 - RNA, 18 nt, Human
cagccugcgccugcugca

SEQ ID NO: 2682470 - RNA, 12 nt, Human
cagccugcucca

SEQ ID NO: 2682471 - RNA, 23 nt, Human
cagccugcuagcuagcucaacua

SEQ ID NO: 2682472 - RNA, 22 nt, Human
cagccugcuagcuagcucaacu

SEQ ID NO: 2682473 - RNA, 18 nt, Human
cagccugcuagcuagcuc

SEQ ID NO: 2682474 - RNA, 16 nt, Human
cagccugcuagcuagc

SEQ ID NO: 2682475 - RNA, 13 nt, Human
cagccugcuagcu

SEQ ID NO: 2682476 - RNA, 23 nt, Human
cagccugcgccugcugcaugccc

SEQ ID NO: 2682477 - RNA, 22 nt, Human
cagccugcgccugcugcaugcc

SEQ ID NO: 2682478 - RNA, 21 nt, Human
cagccugcgccugcugcaugc

SEQ ID NO: 2682479 - RNA, 12 nt, Human
cagcgccucccu

SEQ ID NO: 2682480 - RNA, 14 nt, Human
cagcgccucccucc

SEQ ID NO: 2682481 - RNA, 15 nt, Human
cagcgccucccucca

SEQ ID NO: 2682482 - RNA, 16 nt, Human
cagcgccucccuccac

SEQ ID NO: 2682483 - RNA, 18 nt, Human
cagcgccucccuccaccc

SEQ ID NO: 2682484 - RNA, 20 nt, Human
cagcgccucccuccacccca

SEQ ID NO: 2682485 - RNA, 21 nt, Human
cagcgccucccuccaccccag

SEQ ID NO: 2682486 - RNA, 22 nt, Human
cagcgccucccuccaccccagg

SEQ ID NO: 2682487 - RNA, 23 nt, Human
cagcgccucccuccaccccagga

SEQ ID NO: 2682488 - RNA, 15 nt, Human
cagaucacugccaca

SEQ ID NO: 2682489 - RNA, 16 nt, Human
cagaucacugccacac

SEQ ID NO: 2682490 - RNA, 22 nt, Human
cagagguauuaaaacuaaauuu

SEQ ID NO: 2682491 - RNA, 23 nt, Human
cagagguauuaaaacuaaauuuc

SEQ ID NO: 2682492 - RNA, 13 nt, Human
cagagguacccug

SEQ ID NO: 2682493 - RNA, 14 nt, Human
cagagguacccugg

SEQ ID NO: 2682494 - RNA, 15 nt, Human
cagagguacccuggg

SEQ ID NO: 2682495 - RNA, 16 nt, Human
cagagguacccugggu

SEQ ID NO: 2682496 - RNA, 17 nt, Human
cagagguacccugggug

SEQ ID NO: 2682497 - RNA, 18 nt, Human
cagagguacccugggugu

SEQ ID NO: 2682498 - RNA, 18 nt, Human
cagagguugugcacuguu

SEQ ID NO: 2682499 - RNA, 13 nt, Human
cagaucacugcca

SEQ ID NO: 2682500 - RNA, 14 nt, Human
cagaucacugccac

SEQ ID NO: 2682501 - RNA, 13 nt, Human
cagaaucccuuaa

SEQ ID NO: 2682502 - RNA, 18 nt, Human
cagaaucccuuaacaguu

SEQ ID NO: 2682503 - RNA, 13 nt, Human
cagaauauuuuua

SEQ ID NO: 2682504 - RNA, 21 nt, Human
cagaauauuuuuauauuuccu

SEQ ID NO: 2682505 - RNA, 22 nt, Human
cagaauauuuuuauauuuccuu

SEQ ID NO: 2682506 - RNA, 23 nt, Human
cagaauauuuuuauauuuccuuu

SEQ ID NO: 2682507 - RNA, 17 nt, Human
cagcaguugcugguaaa

SEQ ID NO: 2682508 - RNA, 19 nt, Human
cagcaucaccugccuguua

SEQ ID NO: 2682509 - RNA, 23 nt, Human
cagcaguugcugguaaaaugaag

SEQ ID NO: 2682510 - RNA, 22 nt, Human
cagcaguugcugguaaaaugaa

SEQ ID NO: 2682511 - RNA, 21 nt, Human
cagcaguugcugguaaaauga

SEQ ID NO: 2682512 - RNA, 20 nt, Human
cagcaguugcugguaaaaug

SEQ ID NO: 2682513 - RNA, 13 nt, Human
cagcaucaggguu

SEQ ID NO: 2682514 - RNA, 16 nt, Human
cagcaucaccugccug

SEQ ID NO: 2682515 - RNA, 17 nt, Human
cagcaucaccugccugu

SEQ ID NO: 2682516 - RNA, 23 nt, Human
cagcaucaggguuaagaagacuu

SEQ ID NO: 2682517 - RNA, 22 nt, Human
cagccaggaccauaccgggucu

SEQ ID NO: 2682518 - RNA, 16 nt, Human
cagccagcgccucccu

SEQ ID NO: 2682519 - RNA, 17 nt, Human
cagccagcgccucccuc

SEQ ID NO: 2682520 - RNA, 18 nt, Human
cagccagcgccucccucc

SEQ ID NO: 2682521 - RNA, 19 nt, Human
cagccagcgccucccucca

SEQ ID NO: 2682522 - RNA, 20 nt, Human
cagccagcgccucccuccac

SEQ ID NO: 2682523 - RNA, 21 nt, Human
cagccagcgccucccuccacc

SEQ ID NO: 2682524 - RNA, 22 nt, Human
cagccagcgccucccuccaccc

SEQ ID NO: 2682525 - RNA, 23 nt, Human
cagccagcgccucccuccacccc

SEQ ID NO: 2682526 - RNA, 21 nt, Human
caguaaacgggaacaugcccc

SEQ ID NO: 2682527 - RNA, 23 nt, Human
caguaaacgggaacaugcccccu

SEQ ID NO: 2682528 - RNA, 21 nt, Human
cagguuggugggggccucggu

SEQ ID NO: 2682529 - RNA, 14 nt, Human
cagguuuaagcugu

SEQ ID NO: 2682530 - RNA, 21 nt, Human
caggugauuggaccaggccau

SEQ ID NO: 2682531 - RNA, 23 nt, Human
caggugaucugcugcagagcagu

SEQ ID NO: 2682532 - RNA, 20 nt, Human
caggugauuggaccaggcca

SEQ ID NO: 2682533 - RNA, 19 nt, Human
cagggauaaggccuguggg

SEQ ID NO: 2682534 - RNA, 19 nt, Human
caggggaaaaucagccugc

SEQ ID NO: 2682535 - RNA, 20 nt, Human
caggggaaaaucagccugcu

SEQ ID NO: 2682536 - RNA, 23 nt, Human
cagggcugcugggggcaacuggc

SEQ ID NO: 2682537 - RNA, 21 nt, Human
cagggcugcugggggcaacug

SEQ ID NO: 2682538 - RNA, 12 nt, Human
cagggcucccag

SEQ ID NO: 2682539 - RNA, 14 nt, Human
cagggcucccaggg

SEQ ID NO: 2682540 - RNA, 21 nt, Human
cagggcucccaggggucuccc

SEQ ID NO: 2682541 - RNA, 22 nt, Human
cagggagccuuugguucuggcc

SEQ ID NO: 2682542 - RNA, 14 nt, Human
auuuauaauuccua

SEQ ID NO: 2682543 - RNA, 22 nt, Human
auuuaauggaaguguauuuauu

SEQ ID NO: 2682544 - RNA, 23 nt, Human
auuuaauggaaguguauuuauuu

SEQ ID NO: 2682545 - RNA, 20 nt, Human
auuuaauccaguuauaagaa

SEQ ID NO: 2682546 - RNA, 23 nt, Human
auuuaauccaguuauaagaagaa

SEQ ID NO: 2682547 - RNA, 15 nt, Human
auuucaucacaagaa

SEQ ID NO: 2682548 - RNA, 19 nt, Human
auuucaucacaagaacaca

SEQ ID NO: 2682549 - RNA, 15 nt, Human
auuuauauuuauuga

SEQ ID NO: 2682550 - RNA, 22 nt, Human
auuuauauuuauugacucuuga

SEQ ID NO: 2682551 - RNA, 20 nt, Human
auuuauauuuauugacucuu

SEQ ID NO: 2682552 - RNA, 16 nt, Human
auuuauauuuauugac

SEQ ID NO: 2682553 - RNA, 15 nt, Human
auuucuccauacgca

SEQ ID NO: 2682554 - RNA, 15 nt, Human
auuucucauugacuu

SEQ ID NO: 2682555 - RNA, 17 nt, Human
auuucucauugacuuuu

SEQ ID NO: 2682556 - RNA, 22 nt, Human
auuucucauugacuuuuauaaa

SEQ ID NO: 2682557 - RNA, 14 nt, Human
auuucaucucauuu

SEQ ID NO: 2682558 - RNA, 15 nt, Human
auuucaucucauuua

SEQ ID NO: 2682559 - RNA, 21 nt, Human
auuucaucucauuuaagggaa

SEQ ID NO: 2682560 - RNA, 22 nt, Human
auuucaucucauuuaagggaaa

SEQ ID NO: 2682561 - RNA, 23 nt, Human
auuucaucucauuuaagggaaaa

SEQ ID NO: 2682562 - RNA, 23 nt, Human
auuucuguguugccaagcuccaa

SEQ ID NO: 2682563 - RNA, 15 nt, Human
auuucuguguugcca

SEQ ID NO: 2682564 - RNA, 11 nt, Human
auuucuguguu

SEQ ID NO: 2682565 - RNA, 19 nt, Human
auuucuccucccuuccuuu

SEQ ID NO: 2682566 - RNA, 12 nt, Human
auuucuccuccc

SEQ ID NO: 2682567 - RNA, 14 nt, Human
auuucuccucccuu

SEQ ID NO: 2682568 - RNA, 17 nt, Human
auuucuccucccuuccu

SEQ ID NO: 2682569 - RNA, 20 nt, Human
auuguugacaacugugacug

SEQ ID NO: 2682570 - RNA, 18 nt, Human
auuguugacaacugugac

SEQ ID NO: 2682571 - RNA, 20 nt, Human
auuguuccuuggagaaauga

SEQ ID NO: 2682572 - RNA, 21 nt, Human
auuguuccuuggagaaaugaa

SEQ ID NO: 2682573 - RNA, 14 nt, Human
auuguucucagaau

SEQ ID NO: 2682574 - RNA, 17 nt, Human
auuguucucagaauccc

SEQ ID NO: 2682575 - RNA, 19 nt, Human
auuguaagcguauggcuuu

SEQ ID NO: 2682576 - RNA, 18 nt, Human
auuguaagcguauggcuu

SEQ ID NO: 2682577 - RNA, 19 nt, Human
auuguugacaacugugacu

SEQ ID NO: 2682578 - RNA, 14 nt, Human
auuguuuaaaaugu

SEQ ID NO: 2682579 - RNA, 15 nt, Human
auuguuuaaaaugua

SEQ ID NO: 2682580 - RNA, 16 nt, Human
auuguuuaaaauguaa

SEQ ID NO: 2682581 - RNA, 17 nt, Human
auuguuuaaaauguaau

SEQ ID NO: 2682582 - RNA, 18 nt, Human
auuguucuuauucuggca

SEQ ID NO: 2682583 - RNA, 14 nt, Human
auugaugcaaauaa

SEQ ID NO: 2682584 - RNA, 17 nt, Human
auuguaagcguauggcu

SEQ ID NO: 2682585 - RNA, 14 nt, Human
auuaaauucugagc

SEQ ID NO: 2682586 - RNA, 13 nt, Human
auucaacuuugua

SEQ ID NO: 2682587 - RNA, 14 nt, Human
auucaacuuuguaa

SEQ ID NO: 2682588 - RNA, 15 nt, Human
auucaacuuuguaaa

SEQ ID NO: 2682589 - RNA, 18 nt, Human
auucaacuuuguaaaaau

SEQ ID NO: 2682590 - RNA, 13 nt, Human
auucaucugucua

SEQ ID NO: 2682591 - RNA, 17 nt, Human
auucaucugucuauauu

SEQ ID NO: 2682592 - RNA, 18 nt, Human
auucaucugucuauauuu

SEQ ID NO: 2682593 - RNA, 16 nt, Human
auucaugaggagggug

SEQ ID NO: 2682594 - RNA, 11 nt, Human
auucauuucua

SEQ ID NO: 2682595 - RNA, 12 nt, Human
auucauuucuaa

SEQ ID NO: 2682596 - RNA, 16 nt, Human
auugagaaagaaacua

SEQ ID NO: 2682597 - RNA, 23 nt, Human
auugagaccgugaagauacuuug

SEQ ID NO: 2682598 - RNA, 22 nt, Human
auugagaccgugaagauacuuu

SEQ ID NO: 2682599 - RNA, 21 nt, Human
auugagaccgugaagauacuu

SEQ ID NO: 2682600 - RNA, 20 nt, Human
auugagaccgugaagauacu

SEQ ID NO: 2682601 - RNA, 17 nt, Human
auugagaccgugaagau

SEQ ID NO: 2682602 - RNA, 17 nt, Human
auucugagccugauauu

SEQ ID NO: 2682603 - RNA, 18 nt, Human
auucugacucgguuucuc

SEQ ID NO: 2682604 - RNA, 20 nt, Human
auucugacucgguuucucca

SEQ ID NO: 2682605 - RNA, 14 nt, Human
auucugagaaaaca

SEQ ID NO: 2682606 - RNA, 15 nt, Human
auucugagaaaacaa

SEQ ID NO: 2682607 - RNA, 19 nt, Human
auucuuguugcuguacaaa

SEQ ID NO: 2682608 - RNA, 20 nt, Human
auucuuguugcuguacaaaa

SEQ ID NO: 2682609 - RNA, 21 nt, Human
auucuuguugcuguacaaaag

SEQ ID NO: 2682610 - RNA, 22 nt, Human
auucuuguugcuguacaaaagc

SEQ ID NO: 2682611 - RNA, 18 nt, Human
auucuuggcuuaaucauu

SEQ ID NO: 2682612 - RNA, 21 nt, Human
auucugauucuggcuuuaagc

SEQ ID NO: 2682613 - RNA, 16 nt, Human
caacaaaaagcuuccc

SEQ ID NO: 2682614 - RNA, 17 nt, Human
caacaaaaagcuucccc

SEQ ID NO: 2682615 - RNA, 15 nt, Human
caaauuuuuugacuu

SEQ ID NO: 2682616 - RNA, 23 nt, Human
caaauuuuuugacuuuuuuugua

SEQ ID NO: 2682617 - RNA, 14 nt, Human
caacaauugguaaa

SEQ ID NO: 2682618 - RNA, 15 nt, Human
caacaauugguaaaa

SEQ ID NO: 2682619 - RNA, 18 nt, Human
caacaauugguaaaacuc

SEQ ID NO: 2682620 - RNA, 19 nt, Human
caacaauugguaaaacuca

SEQ ID NO: 2682621 - RNA, 18 nt, Human
caaaucguagcguuuguu

SEQ ID NO: 2682622 - RNA, 16 nt, Human
caaaugagcucugaaa

SEQ ID NO: 2682623 - RNA, 20 nt, Human
caaaugagcucugaaaucuu

SEQ ID NO: 2682624 - RNA, 21 nt, Human
caaaugagcucugaaaucuuc

SEQ ID NO: 2682625 - RNA, 21 nt, Human
caaaugcaaaaacucuuugag

SEQ ID NO: 2682626 - RNA, 19 nt, Human
caaaugcaaaaacucuuug

SEQ ID NO: 2682627 - RNA, 16 nt, Human
caaaucugauggccuu

SEQ ID NO: 2682628 - RNA, 21 nt, Human
caaaugaugugcaaaaccuuu

SEQ ID NO: 2682629 - RNA, 22 nt, Human
caacaccucugcacaagcugca

SEQ ID NO: 2682630 - RNA, 18 nt, Human
caaccccaaacccaagug

SEQ ID NO: 2682631 - RNA, 17 nt, Human
caaccccaagccagccc

SEQ ID NO: 2682632 - RNA, 14 nt, Human
caaccaugucauuu

SEQ ID NO: 2682633 - RNA, 16 nt, Human
caaccaugucauuuca

SEQ ID NO: 2682634 - RNA, 22 nt, Human
caaccaugucauuucagaaguu

SEQ ID NO: 2682635 - RNA, 21 nt, Human
caaccacuaagaauucaaacu

SEQ ID NO: 2682636 - RNA, 19 nt, Human
caagaugugaauuauugac

SEQ ID NO: 2682637 - RNA, 22 nt, Human
caagaugugaauuauugacacu

SEQ ID NO: 2682638 - RNA, 23 nt, Human
caagaugugaauuauugacacug

SEQ ID NO: 2682639 - RNA, 19 nt, Human
caagauguugauuuuuacu

SEQ ID NO: 2682640 - RNA, 22 nt, Human
caaaaaaaaaaaaaagcaucua

SEQ ID NO: 2682641 - RNA, 19 nt, Human
caaaaaaaauuuagccggg

SEQ ID NO: 2682642 - RNA, 21 nt, Human
caaaaaaaauuuagccgggcg

SEQ ID NO: 2682643 - RNA, 22 nt, Human
caaaagcgcuuuuccuuggcau

SEQ ID NO: 2682644 - RNA, 17 nt, Human
caaaagcgcuuuuccuu

SEQ ID NO: 2682645 - RNA, 12 nt, Human
auuuuuaagcug

SEQ ID NO: 2682646 - RNA, 17 nt, Human
caaaccacgccucuuga

SEQ ID NO: 2682647 - RNA, 19 nt, Human
caaaccacgccucuugacc

SEQ ID NO: 2682648 - RNA, 22 nt, Human
caaaccacgccucuugaccagg

SEQ ID NO: 2682649 - RNA, 15 nt, Human
caaaagcugggcagg

SEQ ID NO: 2682650 - RNA, 22 nt, Human
caaaaguagaacuuuguauagu

SEQ ID NO: 2682651 - RNA, 21 nt, Human
caaaaguagaacuuuguauag

SEQ ID NO: 2682652 - RNA, 20 nt, Human
caaaaguagaacuuuguaua

SEQ ID NO: 2682653 - RNA, 19 nt, Human
caaaaguagaacuuuguau

SEQ ID NO: 2682654 - RNA, 18 nt, Human
caaaaguagaacuuugua

SEQ ID NO: 2682655 - RNA, 14 nt, Human
caaaaguagaacuu

SEQ ID NO: 2682656 - RNA, 11 nt, Human
caaaagguuua

SEQ ID NO: 2682657 - RNA, 15 nt, Human
caaaagguuuauucc

SEQ ID NO: 2682658 - RNA, 16 nt, Human
caaaagucugucuuuc

SEQ ID NO: 2682659 - RNA, 19 nt, Human
caaaagucugucuuuccug

SEQ ID NO: 2682660 - RNA, 21 nt, Human
caaaagugccucaagaggaau

SEQ ID NO: 2682661 - RNA, 22 nt, Human
auuuuauauuacugacauuucu

SEQ ID NO: 2682662 - RNA, 22 nt, Human
auuuuaucuguuuccugacauu

SEQ ID NO: 2682663 - RNA, 18 nt, Human
auuuucuucucugugaga

SEQ ID NO: 2682664 - RNA, 18 nt, Human
auuuugaaucaauaauau

SEQ ID NO: 2682665 - RNA, 18 nt, Human
auuuugaccuacucucau

SEQ ID NO: 2682666 - RNA, 17 nt, Human
auuuugaccuacucuca

SEQ ID NO: 2682667 - RNA, 22 nt, Human
auuuugagaaugcugacacuuu

SEQ ID NO: 2682668 - RNA, 13 nt, Human
auuuugagaugua

SEQ ID NO: 2682669 - RNA, 19 nt, Human
auuuugagauguaaaaaga

SEQ ID NO: 2682670 - RNA, 18 nt, Human
auuuugaguaaagcuccu

SEQ ID NO: 2682671 - RNA, 12 nt, Human
cagaaauuguau

SEQ ID NO: 2682672 - RNA, 13 nt, Human
cagaaauuguaua

SEQ ID NO: 2682673 - RNA, 14 nt, Human
cagaaauuguauau

SEQ ID NO: 2682674 - RNA, 15 nt, Human
cagaaauuguauauu

SEQ ID NO: 2682675 - RNA, 16 nt, Human
cagaaauuguauauug

SEQ ID NO: 2682676 - RNA, 18 nt, Human
cagaaauuguauauugua

SEQ ID NO: 2682677 - RNA, 19 nt, Human
cagaaauuguauauuguaa

SEQ ID NO: 2682678 - RNA, 22 nt, Human
cagaaauguugagucuguacua

SEQ ID NO: 2682679 - RNA, 21 nt, Human
cagaaauuguauauuguaauu

SEQ ID NO: 2682680 - RNA, 22 nt, Human
cagaaauuguauauuguaauuu

SEQ ID NO: 2682681 - RNA, 18 nt, Human
cagaagugcccuuccugc

SEQ ID NO: 2682682 - RNA, 20 nt, Human
cagaagugcccuuccugcug

SEQ ID NO: 2682683 - RNA, 21 nt, Human
cagaagugcccuuccugcugc

SEQ ID NO: 2682684 - RNA, 16 nt, Human
cagaaguuaguuugua

SEQ ID NO: 2682685 - RNA, 18 nt, Human
cagaaguuaguuuguaua

SEQ ID NO: 2682686 - RNA, 19 nt, Human
cagaaguuaguuuguauau

SEQ ID NO: 2682687 - RNA, 15 nt, Human
cagaauacugaugga

SEQ ID NO: 2682688 - RNA, 21 nt, Human
cagaauaaguuauugcaguuu

SEQ ID NO: 2682689 - RNA, 23 nt, Human
cagaauaaguuauugcaguuuau

SEQ ID NO: 2682690 - RNA, 15 nt, Human
cagaauaaguuauug

SEQ ID NO: 2682691 - RNA, 17 nt, Human
cagaauaaguuauugca

SEQ ID NO: 2682692 - RNA, 18 nt, Human
cagaauaaguuauugcag

SEQ ID NO: 2682693 - RNA, 19 nt, Human
cagaauaaguuauugcagu

SEQ ID NO: 2682694 - RNA, 20 nt, Human
cagaauaaguuauugcaguu

SEQ ID NO: 2682695 - RNA, 21 nt, Human
cacuggggcagacaauaaacc

SEQ ID NO: 2682696 - RNA, 22 nt, Human
cacugguccccaacaaugugag

SEQ ID NO: 2682697 - RNA, 17 nt, Human
cacuugugauuauuuau

SEQ ID NO: 2682698 - RNA, 16 nt, Human
cacuguuuaaucauag

SEQ ID NO: 2682699 - RNA, 12 nt, Human
cacuguuuagau

SEQ ID NO: 2682700 - RNA, 20 nt, Human
cacuguuuagauuugccaua

SEQ ID NO: 2682701 - RNA, 15 nt, Human
cacuguuuagauuug

SEQ ID NO: 2682702 - RNA, 23 nt, Human
cacuguuuagauuugccauagag

SEQ ID NO: 2682703 - RNA, 13 nt, Human
cacuguuuccugg

SEQ ID NO: 2682704 - RNA, 14 nt, Human
cacuguuuccuggg

SEQ ID NO: 2682705 - RNA, 15 nt, Human
cacuguuuccugggc

SEQ ID NO: 2682706 - RNA, 17 nt, Human
cacuguuucucuugagc

SEQ ID NO: 2682707 - RNA, 18 nt, Human
cacuguuucucuugagcu

SEQ ID NO: 2682708 - RNA, 21 nt, Human
cacuuacugguaggaccaagc

SEQ ID NO: 2682709 - RNA, 15 nt, Human
cacuuacugguagga

SEQ ID NO: 2682710 - RNA, 19 nt, Human
cacuguuucucuugagcug

SEQ ID NO: 2682711 - RNA, 20 nt, Human
cacuguuucucuugagcugg

SEQ ID NO: 2682712 - RNA, 16 nt, Human
cacuuacuugcuuauu

SEQ ID NO: 2682713 - RNA, 23 nt, Human
cacuuuauugccuuuuaauuuuu

SEQ ID NO: 2682714 - RNA, 17 nt, Human
cacuaggcccccacuug

SEQ ID NO: 2682715 - RNA, 20 nt, Human
cacuaggcccccacuugccu

SEQ ID NO: 2682716 - RNA, 21 nt, Human
cacuaggcccccacuugccuc

SEQ ID NO: 2682717 - RNA, 22 nt, Human
cacuaggcccccacuugccucu

SEQ ID NO: 2682718 - RNA, 14 nt, Human
cacuccccuagggg

SEQ ID NO: 2682719 - RNA, 15 nt, Human
cacuaauuuuuguau

SEQ ID NO: 2682720 - RNA, 18 nt, Human
cacuaauuuuuguauuau

SEQ ID NO: 2682721 - RNA, 19 nt, Human
cacuaauuuuuguauuauu

SEQ ID NO: 2682722 - RNA, 20 nt, Human
cacuaauuuuuguauuauuu

SEQ ID NO: 2682723 - RNA, 23 nt, Human
cacuaauuuuuguauuauuuuug

SEQ ID NO: 2682724 - RNA, 17 nt, Human
cacuaauugguacuuuu

SEQ ID NO: 2682725 - RNA, 23 nt, Human
cacuaauugguacuuuuaaaaac

SEQ ID NO: 2682726 - RNA, 21 nt, Human
cacuacaagucagcuccagcu

SEQ ID NO: 2682727 - RNA, 23 nt, Human
cacggagucguggggugugcugg

SEQ ID NO: 2682728 - RNA, 19 nt, Human
cacggagcccagcccuccc

SEQ ID NO: 2682729 - RNA, 19 nt, Human
cacggaggaugaugccagu

SEQ ID NO: 2682730 - RNA, 23 nt, Human
cacggaggcauccuacccuuuuc

SEQ ID NO: 2682731 - RNA, 22 nt, Human
cacugaaaauuggacagauugc

SEQ ID NO: 2682732 - RNA, 13 nt, Human
cacugaaaguuuu

SEQ ID NO: 2682733 - RNA, 16 nt, Human
cacugaaaguuuugua

SEQ ID NO: 2682734 - RNA, 17 nt, Human
cacugaaaguuuuguaa

SEQ ID NO: 2682735 - RNA, 18 nt, Human
cacugaaaguuuuguaaa

SEQ ID NO: 2682736 - RNA, 19 nt, Human
cacugaaaguuuuguaaaa

SEQ ID NO: 2682737 - RNA, 20 nt, Human
cacugaaaguuuuguaaaag

SEQ ID NO: 2682738 - RNA, 21 nt, Human
cacugaaaguuuuguaaaaga

SEQ ID NO: 2682739 - RNA, 23 nt, Human
cacugaaaguuuuguaaaagaaa

SEQ ID NO: 2682740 - RNA, 13 nt, Human
caccuugccuugc

SEQ ID NO: 2682741 - RNA, 16 nt, Human
caccuuggacauccuc

SEQ ID NO: 2682742 - RNA, 17 nt, Human
caccuuggacauccucc

SEQ ID NO: 2682743 - RNA, 18 nt, Human
caccuuggacauccuccu

SEQ ID NO: 2682744 - RNA, 21 nt, Human
caccuuggacauccuccuccc

SEQ ID NO: 2682745 - RNA, 22 nt, Human
caccuuggacauccuccuccca

SEQ ID NO: 2682746 - RNA, 19 nt, Human
caccuuuggaaagcucuga

SEQ ID NO: 2682747 - RNA, 13 nt, Human
caccuugugccug

SEQ ID NO: 2682748 - RNA, 15 nt, Human
caccuugugccuggg

SEQ ID NO: 2682749 - RNA, 16 nt, Human
caccuugugccugggg

SEQ ID NO: 2682750 - RNA, 17 nt, Human
caccuugugccuggggu

SEQ ID NO: 2682751 - RNA, 18 nt, Human
caccuugugccuggggug

SEQ ID NO: 2682752 - RNA, 11 nt, Human
caauaaaauuu

SEQ ID NO: 2682753 - RNA, 13 nt, Human
caauaaaauuuaa

SEQ ID NO: 2682754 - RNA, 14 nt, Human
caauaaaauuuaaa

SEQ ID NO: 2682755 - RNA, 20 nt, Human
caauaaaauuuaaaaaauaa

SEQ ID NO: 2682756 - RNA, 14 nt, Human
caauaaaaaucaua

SEQ ID NO: 2682757 - RNA, 15 nt, Human
caauaaacccucaga

SEQ ID NO: 2682758 - RNA, 19 nt, Human
caauaaacccucagagccu

SEQ ID NO: 2682759 - RNA, 20 nt, Human
caauaaacccucagagccuc

SEQ ID NO: 2682760 - RNA, 18 nt, Human
caauaaaauuuuuuuaaa

SEQ ID NO: 2682761 - RNA, 20 nt, Human
caauaaaauuuuuuuaaagu

SEQ ID NO: 2682762 - RNA, 20 nt, Human
caaguacauggcuagcuuuu

SEQ ID NO: 2682763 - RNA, 23 nt, Human
caaguaauugugaaaaaguuaaa

SEQ ID NO: 2682764 - RNA, 11 nt, Human
caaguaauugu

SEQ ID NO: 2682765 - RNA, 13 nt, Human
caaguaguucugu

SEQ ID NO: 2682766 - RNA, 19 nt, Human
caaguugagcuaugacuua

SEQ ID NO: 2682767 - RNA, 18 nt, Human
caaguuggaugcggccau

SEQ ID NO: 2682768 - RNA, 12 nt, Human
caaguuguaaau

SEQ ID NO: 2682769 - RNA, 15 nt, Human
caaguuguaaauaau

SEQ ID NO: 2682770 - RNA, 16 nt, Human
caaguugucagguuau

SEQ ID NO: 2682771 - RNA, 14 nt, Human
caauucuguuuuua

SEQ ID NO: 2682772 - RNA, 23 nt, Human
caauucuguuuuuaaugcuauuu

SEQ ID NO: 2682773 - RNA, 18 nt, Human
caaugcuucuagaguuuu

SEQ ID NO: 2682774 - RNA, 17 nt, Human
caaugcuuuauuuguaa

SEQ ID NO: 2682775 - RNA, 18 nt, Human
caaugcuuuauuuguaaa

SEQ ID NO: 2682776 - RNA, 20 nt, Human
caaugcuuuauuuguaaauu

SEQ ID NO: 2682777 - RNA, 23 nt, Human
caaugcuuuauuuguaaauuuag

SEQ ID NO: 2682778 - RNA, 22 nt, Human
cacaagcaaaaaaaaaaaaaag

SEQ ID NO: 2682779 - RNA, 22 nt, Human
cacagacacuaacgaaauauca

SEQ ID NO: 2682780 - RNA, 14 nt, Human
cacagggugggccu

SEQ ID NO: 2682781 - RNA, 16 nt, Human
cacagggugggccucg

SEQ ID NO: 2682782 - RNA, 13 nt, Human
cacagcucaggag

SEQ ID NO: 2682783 - RNA, 15 nt, Human
cacagcucaggaggc

SEQ ID NO: 2682784 - RNA, 14 nt, Human
cacagcgucccugg

SEQ ID NO: 2682785 - RNA, 15 nt, Human
cacagcgucccuggc

SEQ ID NO: 2682786 - RNA, 16 nt, Human
cacagcgucccuggcg

SEQ ID NO: 2682787 - RNA, 18 nt, Human
cacagcgucccuggcgca

SEQ ID NO: 2682788 - RNA, 19 nt, Human
cacagcgucccuggcgcag

SEQ ID NO: 2682789 - RNA, 22 nt, Human
cacagcgucccuggcgcaggug

SEQ ID NO: 2682790 - RNA, 21 nt, Human
cacagcggagguguggagccg

SEQ ID NO: 2682791 - RNA, 12 nt, Human
cacagaaugcaa

SEQ ID NO: 2682792 - RNA, 19 nt, Human
cacagaaugcaaccaaguc

SEQ ID NO: 2682793 - RNA, 16 nt, Human
cacagaauauuuuuau

SEQ ID NO: 2682794 - RNA, 18 nt, Human
cacagaauauuuuuauau

SEQ ID NO: 2682795 - RNA, 18 nt, Human
cacauccgcgugugccug

SEQ ID NO: 2682796 - RNA, 19 nt, Human
cacauccgcgugugccugu

SEQ ID NO: 2682797 - RNA, 22 nt, Human
cacauccgcgugugccugugug

SEQ ID NO: 2682798 - RNA, 23 nt, Human
cacauccgcgugugccugugugc

SEQ ID NO: 2682799 - RNA, 21 nt, Human
cacauuugcuacuguuguaag

SEQ ID NO: 2682800 - RNA, 15 nt, Human
caccaggcgcugccc

SEQ ID NO: 2682801 - RNA, 22 nt, Human
caccagcucugccgucucugga

SEQ ID NO: 2682802 - RNA, 22 nt, Human
caccaggccaccuccccagcau

SEQ ID NO: 2682803 - RNA, 15 nt, Human
caccaggccaccucc

SEQ ID NO: 2682804 - RNA, 19 nt, Human
caccaggccaccuccccag

SEQ ID NO: 2682805 - RNA, 13 nt, Human
caccaggccaccu

SEQ ID NO: 2682806 - RNA, 14 nt, Human
caccaggccaccuc

SEQ ID NO: 2682807 - RNA, 12 nt, Human
caccagcagccu

SEQ ID NO: 2682808 - RNA, 14 nt, Human
caccagcagccugg

SEQ ID NO: 2682809 - RNA, 12 nt, Human
caccaaaaacaa

SEQ ID NO: 2682810 - RNA, 13 nt, Human
caccaaaaacaaa

SEQ ID NO: 2682811 - RNA, 15 nt, Human
caccagcaucaccug

SEQ ID NO: 2682812 - RNA, 18 nt, Human
caccagcaucaccugccu

SEQ ID NO: 2682813 - RNA, 19 nt, Human
caccagcaucaccugccug

SEQ ID NO: 2682814 - RNA, 20 nt, Human
caccagcaucaccugccugu

SEQ ID NO: 2682815 - RNA, 15 nt, Human
caccagcagccugga

SEQ ID NO: 2682816 - RNA, 16 nt, Human
cuuuuguguaaugaaa

SEQ ID NO: 2682817 - RNA, 17 nt, Human
cuuuuguguaaugaaaa

SEQ ID NO: 2682818 - RNA, 12 nt, Human
cuuuuuuuguau

SEQ ID NO: 2682819 - RNA, 16 nt, Human
cuuuuuuuguaugugu

SEQ ID NO: 2682820 - RNA, 17 nt, Human
cuuuuuuuguaugugug

SEQ ID NO: 2682821 - RNA, 13 nt, Human
cuuuuuuuuuaag

SEQ ID NO: 2682822 - RNA, 14 nt, Human
cuuuuuuuuuaagu

SEQ ID NO: 2682823 - RNA, 18 nt, Human
cuuuuuuuuuaaguucuu

SEQ ID NO: 2682824 - RNA, 21 nt, Human
cuuuuuuuuuaaguucuuaug

SEQ ID NO: 2682825 - RNA, 22 nt, Human
cuuuuuuuuuuuuuuuuugguc

SEQ ID NO: 2682826 - RNA, 19 nt, Human
gaaaaaauauuuuccugcc

SEQ ID NO: 2682827 - RNA, 11 nt, Human
cuuuugcuuuu

SEQ ID NO: 2682828 - RNA, 20 nt, Human
cuuuugccuuuugcaaccag

SEQ ID NO: 2682829 - RNA, 20 nt, Human
cuuuugguaaagacuggcuu

SEQ ID NO: 2682830 - RNA, 21 nt, Human
cuuuugguaaagacuggcuuu

SEQ ID NO: 2682831 - RNA, 17 nt, Human
cuuuugcuuuuggcaaa

SEQ ID NO: 2682832 - RNA, 15 nt, Human
cuuuugcuuuuggca

SEQ ID NO: 2682833 - RNA, 16 nt, Human
gaaaacuucagaagca

SEQ ID NO: 2682834 - RNA, 17 nt, Human
gaaaagagacaggcagg

SEQ ID NO: 2682835 - RNA, 13 nt, Human
gaaaagagacagg

SEQ ID NO: 2682836 - RNA, 15 nt, Human
gaaaacugugauuuc

SEQ ID NO: 2682837 - RNA, 12 nt, Human
gaaaacuguguu

SEQ ID NO: 2682838 - RNA, 13 nt, Human
gaaaacuguguug

SEQ ID NO: 2682839 - RNA, 19 nt, Human
gaaaacuguguugccacag

SEQ ID NO: 2682840 - RNA, 22 nt, Human
gaaaauuacaguccaaaauacu

SEQ ID NO: 2682841 - RNA, 16 nt, Human
gaaaagcauuuuucaa

SEQ ID NO: 2682842 - RNA, 21 nt, Human
gaaaagccuaaucacaguuuu

SEQ ID NO: 2682843 - RNA, 16 nt, Human
gaaaagcagacauuuu

SEQ ID NO: 2682844 - RNA, 15 nt, Human
gaaaagcagacauuu

SEQ ID NO: 2682845 - RNA, 18 nt, Human
gaaaagagacaggcaggu

SEQ ID NO: 2682846 - RNA, 19 nt, Human
cuuuuauuaaugcacuuuc

SEQ ID NO: 2682847 - RNA, 14 nt, Human
cuuuuauuaaugca

SEQ ID NO: 2682848 - RNA, 16 nt, Human
cuuuuauuaaugcacu

SEQ ID NO: 2682849 - RNA, 13 nt, Human
gaaagacacugcc

SEQ ID NO: 2682850 - RNA, 14 nt, Human
gaaagacacugccu

SEQ ID NO: 2682851 - RNA, 15 nt, Human
gaaagacacugccug

SEQ ID NO: 2682852 - RNA, 18 nt, Human
gaaagacacugccugggc

SEQ ID NO: 2682853 - RNA, 19 nt, Human
gaaagacacugccugggcu

SEQ ID NO: 2682854 - RNA, 12 nt, Human
gaaacuuggcuc

SEQ ID NO: 2682855 - RNA, 17 nt, Human
gaaacuuguuucacuga

SEQ ID NO: 2682856 - RNA, 18 nt, Human
gaaacuuguuucacugaa

SEQ ID NO: 2682857 - RNA, 19 nt, Human
gaaacuuaaauguuauuau

SEQ ID NO: 2682858 - RNA, 21 nt, Human
gaaacuuaaauguuauuaucu

SEQ ID NO: 2682859 - RNA, 16 nt, Human
gaaaucaaagugcuau

SEQ ID NO: 2682860 - RNA, 14 nt, Human
gaaaucaaagugcu

SEQ ID NO: 2682861 - RNA, 12 nt, Human
gaaaucaaagug

SEQ ID NO: 2682862 - RNA, 20 nt, Human
gaaagacacugccugggcug

SEQ ID NO: 2682863 - RNA, 17 nt, Human
gaaaucaaagugcuauu

SEQ ID NO: 2682864 - RNA, 21 nt, Human
gaaaugaaauauuguuuccaa

SEQ ID NO: 2682865 - RNA, 13 nt, Human
gaaauuuugcuau

SEQ ID NO: 2682866 - RNA, 12 nt, Human
gaaauuuuguaa

SEQ ID NO: 2682867 - RNA, 13 nt, Human
gaaauuuuguaag

SEQ ID NO: 2682868 - RNA, 14 nt, Human
gaaauuuuguaaga

SEQ ID NO: 2682869 - RNA, 15 nt, Human
gaaauuuuguaagaa

SEQ ID NO: 2682870 - RNA, 17 nt, Human
gaaauuuuguaagaagg

SEQ ID NO: 2682871 - RNA, 19 nt, Human
gaaauuuuguaagaaggca

SEQ ID NO: 2682872 - RNA, 20 nt, Human
gaaauuuuguaagaaggcaa

SEQ ID NO: 2682873 - RNA, 13 nt, Human
gaacaagcuucag

SEQ ID NO: 2682874 - RNA, 18 nt, Human
gaacaagcuucaguaagu

SEQ ID NO: 2682875 - RNA, 15 nt, Human
cuucuucucaaagca

SEQ ID NO: 2682876 - RNA, 12 nt, Human
cuucuucuccau

SEQ ID NO: 2682877 - RNA, 16 nt, Human
cuucuuacgcaaugcu

SEQ ID NO: 2682878 - RNA, 15 nt, Human
cuucuaauugcugug

SEQ ID NO: 2682879 - RNA, 14 nt, Human
cuuccucuugucug

SEQ ID NO: 2682880 - RNA, 16 nt, Human
cuuccucuugucugau

SEQ ID NO: 2682881 - RNA, 18 nt, Human
cuuccucuugucugauuu

SEQ ID NO: 2682882 - RNA, 18 nt, Human
cuucuauagcaucacuua

SEQ ID NO: 2682883 - RNA, 22 nt, Human
cuucucugacuucugccuggag

SEQ ID NO: 2682884 - RNA, 16 nt, Human
cuucuauagcaucacu

SEQ ID NO: 2682885 - RNA, 12 nt, Human
cuucuaccugcc

SEQ ID NO: 2682886 - RNA, 13 nt, Human
cuucuaccugccc

SEQ ID NO: 2682887 - RNA, 14 nt, Human
cuucuaccugcccu

SEQ ID NO: 2682888 - RNA, 15 nt, Human
cuucuaccugcccuc

SEQ ID NO: 2682889 - RNA, 16 nt, Human
cuucuaccugcccuca

SEQ ID NO: 2682890 - RNA, 18 nt, Human
cuucuaccugcccucaag

SEQ ID NO: 2682891 - RNA, 19 nt, Human
cuucuaccugcccucaagg

SEQ ID NO: 2682892 - RNA, 16 nt, Human
cuuccauuuuaauuuu

SEQ ID NO: 2682893 - RNA, 12 nt, Human
cuuccauuccac

SEQ ID NO: 2682894 - RNA, 15 nt, Human
cuuccauuccacaca

SEQ ID NO: 2682895 - RNA, 17 nt, Human
cuuccauuccacacaga

SEQ ID NO: 2682896 - RNA, 22 nt, Human
cuuccauuccacacagaaugca

SEQ ID NO: 2682897 - RNA, 13 nt, Human
cuuccaugaauuu

SEQ ID NO: 2682898 - RNA, 18 nt, Human
cuuccaugaauuuuaaaa

SEQ ID NO: 2682899 - RNA, 19 nt, Human
cuuccaugaauuuuaaaau

SEQ ID NO: 2682900 - RNA, 20 nt, Human
cuuccaugaauuuuaaaauc

SEQ ID NO: 2682901 - RNA, 20 nt, Human
cuuaaagaaguauuuuuaga

SEQ ID NO: 2682902 - RNA, 18 nt, Human
cuugucuucugguacuuu

SEQ ID NO: 2682903 - RNA, 21 nt, Human
cuugucuucugguacuuucug

SEQ ID NO: 2682904 - RNA, 23 nt, Human
cuugucuucugguacuuucuguu

SEQ ID NO: 2682905 - RNA, 14 nt, Human
cuuuaagacauacu

SEQ ID NO: 2682906 - RNA, 17 nt, Human
cuuuaagccuucaaaac

SEQ ID NO: 2682907 - RNA, 18 nt, Human
cuuuaagccuucaaaacu

SEQ ID NO: 2682908 - RNA, 20 nt, Human
cuuuaagccuucaaaacuau

SEQ ID NO: 2682909 - RNA, 23 nt, Human
cuuuaagacauacuccuuccauc

SEQ ID NO: 2682910 - RNA, 16 nt, Human
cuugguucugugaaca

SEQ ID NO: 2682911 - RNA, 14 nt, Human
cuugucugauuucu

SEQ ID NO: 2682912 - RNA, 13 nt, Human
cuugucuguagau

SEQ ID NO: 2682913 - RNA, 13 nt, Human
cuugccuccaggu

SEQ ID NO: 2682914 - RNA, 14 nt, Human
cuugccuccaggug

SEQ ID NO: 2682915 - RNA, 15 nt, Human
cuugccuccaggugc

SEQ ID NO: 2682916 - RNA, 16 nt, Human
cuugccuccaggugca

SEQ ID NO: 2682917 - RNA, 18 nt, Human
cuugccuccaggugcaga

SEQ ID NO: 2682918 - RNA, 19 nt, Human
cuugccuccaggugcagag

SEQ ID NO: 2682919 - RNA, 21 nt, Human
cuugccuccaggugcagaggu

SEQ ID NO: 2682920 - RNA, 23 nt, Human
cuugccuccaggugcagagguac

SEQ ID NO: 2682921 - RNA, 19 nt, Human
cuugauuucaaaguuuugu

SEQ ID NO: 2682922 - RNA, 23 nt, Human
cuugauuucaaaguuuuguugua

SEQ ID NO: 2682923 - RNA, 17 nt, Human
cuugauucccuuguuau

SEQ ID NO: 2682924 - RNA, 20 nt, Human
cuugccuccccauuucccau

SEQ ID NO: 2682925 - RNA, 12 nt, Human
cuugccucccca

SEQ ID NO: 2682926 - RNA, 14 nt, Human
cuugccuccccauu

SEQ ID NO: 2682927 - RNA, 19 nt, Human
cuuggccuaaaccucaguu

SEQ ID NO: 2682928 - RNA, 18 nt, Human
cugcuaccuuucaaagcu

SEQ ID NO: 2682929 - RNA, 19 nt, Human
cugcuaccuuucaaagcuu

SEQ ID NO: 2682930 - RNA, 20 nt, Human
cugcuaccuuucaaagcuug

SEQ ID NO: 2682931 - RNA, 16 nt, Human
cugcuauccccaucuc

SEQ ID NO: 2682932 - RNA, 20 nt, Human
cugcuauccccaucucccug

SEQ ID NO: 2682933 - RNA, 21 nt, Human
cugcuauccccaucucccugc

SEQ ID NO: 2682934 - RNA, 23 nt, Human
cugcuauccccaucucccugccu

SEQ ID NO: 2682935 - RNA, 17 nt, Human
cugcuauuuauuuuccu

SEQ ID NO: 2682936 - RNA, 17 nt, Human
cugcuaucaaagagguu

SEQ ID NO: 2682937 - RNA, 19 nt, Human
cugcuauuuauuuuccuaa

SEQ ID NO: 2682938 - RNA, 20 nt, Human
cugcuauuuauuuuccuaaa

SEQ ID NO: 2682939 - RNA, 21 nt, Human
cugcuauuuauuuuccuaaag

SEQ ID NO: 2682940 - RNA, 17 nt, Human
cuggcucccuccuccag

SEQ ID NO: 2682941 - RNA, 18 nt, Human
cuggcucccuccuccagg

SEQ ID NO: 2682942 - RNA, 21 nt, Human
cuggcucccuccuccaggccu

SEQ ID NO: 2682943 - RNA, 22 nt, Human
cuggcucccuccuccaggccug

SEQ ID NO: 2682944 - RNA, 23 nt, Human
cuggcucccuccuccaggccugc

SEQ ID NO: 2682945 - RNA, 19 nt, Human
cuggcccuagacucggggu

SEQ ID NO: 2682946 - RNA, 13 nt, Human
cuggcccuagacu

SEQ ID NO: 2682947 - RNA, 20 nt, Human
cuggccgcgcuccgggcuuu

SEQ ID NO: 2682948 - RNA, 18 nt, Human
cuggccgcggagccugca

SEQ ID NO: 2682949 - RNA, 21 nt, Human
cugcuucagucccuuccccau

SEQ ID NO: 2682950 - RNA, 13 nt, Human
cuggaaaggggag

SEQ ID NO: 2682951 - RNA, 15 nt, Human
cuggaaaggggagag

SEQ ID NO: 2682952 - RNA, 16 nt, Human
cuggaaaggggagagc

SEQ ID NO: 2682953 - RNA, 17 nt, Human
cuggaaaggggagagcc

SEQ ID NO: 2682954 - RNA, 18 nt, Human
cuggaaaggggagagccu

SEQ ID NO: 2682955 - RNA, 19 nt, Human
cuggaaaggggagagccug

SEQ ID NO: 2682956 - RNA, 20 nt, Human
cuggaaaggggagagccugc

SEQ ID NO: 2682957 - RNA, 21 nt, Human
cuggaaaggggagagccugcu

SEQ ID NO: 2682958 - RNA, 22 nt, Human
cuggaaaggggagagccugcug

SEQ ID NO: 2682959 - RNA, 23 nt, Human
cuggaaaggggagagccugcugg

SEQ ID NO: 2682960 - RNA, 15 nt, Human
cugugaaugccacug

SEQ ID NO: 2682961 - RNA, 16 nt, Human
cugugaaugccacugc

SEQ ID NO: 2682962 - RNA, 20 nt, Human
cugugaaugccacugccuuc

SEQ ID NO: 2682963 - RNA, 21 nt, Human
cugugaaugccacugccuucg

SEQ ID NO: 2682964 - RNA, 15 nt, Human
cuguucacucacucu

SEQ ID NO: 2682965 - RNA, 12 nt, Human
cuguucagcugg

SEQ ID NO: 2682966 - RNA, 13 nt, Human
cuguuacugucuu

SEQ ID NO: 2682967 - RNA, 17 nt, Human
cuguuacugucuucagu

SEQ ID NO: 2682968 - RNA, 22 nt, Human
cuguguccaugcgcucagggcc

SEQ ID NO: 2682969 - RNA, 23 nt, Human
cuguguccaugcgcucagggcca

SEQ ID NO: 2682970 - RNA, 13 nt, Human
cuguguccaugcg

SEQ ID NO: 2682971 - RNA, 18 nt, Human
cuguguccaugcgcucag

SEQ ID NO: 2682972 - RNA, 19 nt, Human
cuguguccaugcgcucagg

SEQ ID NO: 2682973 - RNA, 21 nt, Human
cuguguccaugcgcucagggc

SEQ ID NO: 2682974 - RNA, 16 nt, Human
cuguguauuugcuuuu

SEQ ID NO: 2682975 - RNA, 14 nt, Human
cuguguauuugcuu

SEQ ID NO: 2682976 - RNA, 15 nt, Human
cuguguauuugcuuu

SEQ ID NO: 2682977 - RNA, 22 nt, Human
cuguguauauuugauuuauuaa

SEQ ID NO: 2682978 - RNA, 20 nt, Human
cuguguauauuugauuuauu

SEQ ID NO: 2682979 - RNA, 18 nt, Human
cuguguauauuugauuua

SEQ ID NO: 2682980 - RNA, 16 nt, Human
cuguguauauuugauu

SEQ ID NO: 2682981 - RNA, 15 nt, Human
cuguguauauuugau

SEQ ID NO: 2682982 - RNA, 12 nt, Human
cuguguauauuu

SEQ ID NO: 2682983 - RNA, 21 nt, Human
cuguguauaugguauauauac

SEQ ID NO: 2682984 - RNA, 15 nt, Human
cuguuggcaggcugg

SEQ ID NO: 2682985 - RNA, 16 nt, Human
cuguuggcaggcuggc

SEQ ID NO: 2682986 - RNA, 18 nt, Human
cuguuggcaggcuggcca

SEQ ID NO: 2682987 - RNA, 19 nt, Human
cuguuggcaggcuggccag

SEQ ID NO: 2682988 - RNA, 19 nt, Human
cuuaaacgaagaguucccu

SEQ ID NO: 2682989 - RNA, 19 nt, Human
cuuaaacacucaccuucua

SEQ ID NO: 2682990 - RNA, 15 nt, Human
cuuaaaaccaaagag

SEQ ID NO: 2682991 - RNA, 21 nt, Human
cuuaaaaccaaagagggcuuc

SEQ ID NO: 2682992 - RNA, 14 nt, Human
cuuaaaaccaaaga

SEQ ID NO: 2682993 - RNA, 13 nt, Human
cuuaaaaccaaag

SEQ ID NO: 2682994 - RNA, 22 nt, Human
cuuaaaauaaugaauacauuuc

SEQ ID NO: 2682995 - RNA, 14 nt, Human
cuguaaauauguuu

SEQ ID NO: 2682996 - RNA, 11 nt, Human
cuguaaaucau

SEQ ID NO: 2682997 - RNA, 15 nt, Human
cuguagagugggagc

SEQ ID NO: 2682998 - RNA, 16 nt, Human
cuguaacacuccucug

SEQ ID NO: 2682999 - RNA, 16 nt, Human
cuguagcacuuacugg

SEQ ID NO: 2683000 - RNA, 16 nt, Human
cuguagaugauguauu

SEQ ID NO: 2683001 - RNA, 14 nt, Human
cuguagauauguau

SEQ ID NO: 2683002 - RNA, 18 nt, Human
cuguagauauguauucuu

SEQ ID NO: 2683003 - RNA, 20 nt, Human
cuguagauauguauucuuuu

SEQ ID NO: 2683004 - RNA, 13 nt, Human
cuguagaugaugu

SEQ ID NO: 2683005 - RNA, 22 nt, Human
cugucggcgcugccccaucucc

SEQ ID NO: 2683006 - RNA, 15 nt, Human
cugucggugggaccu

SEQ ID NO: 2683007 - RNA, 23 nt, Human
cugucggcgcugccccaucuccc

SEQ ID NO: 2683008 - RNA, 20 nt, Human
cugucggcgcugccccaucu

SEQ ID NO: 2683009 - RNA, 15 nt, Human
cugucuaaaguguau

SEQ ID NO: 2683010 - RNA, 12 nt, Human
cuguccuguccu

SEQ ID NO: 2683011 - RNA, 14 nt, Human
cuguccuguccugc

SEQ ID NO: 2683012 - RNA, 16 nt, Human
cuguccuguccugcuc

SEQ ID NO: 2683013 - RNA, 15 nt, Human
cugucauugcacaua

SEQ ID NO: 2683014 - RNA, 21 nt, Human
cuguagcuauaaugagcaugu

SEQ ID NO: 2683015 - RNA, 14 nt, Human
cuguagcugccaug

SEQ ID NO: 2683016 - RNA, 16 nt, Human
cuguagcuuuuaggaa

SEQ ID NO: 2683017 - RNA, 16 nt, Human
cugucaguaugacauu

SEQ ID NO: 2683018 - RNA, 16 nt, Human
cugucaggccuucagg

SEQ ID NO: 2683019 - RNA, 16 nt, Human
cugucaggcugaaaac

SEQ ID NO: 2683020 - RNA, 18 nt, Human
cugucaggcugaaaacaa

SEQ ID NO: 2683021 - RNA, 19 nt, Human
cugucaggcugaaaacaau

SEQ ID NO: 2683022 - RNA, 17 nt, Human
gaauaucuauuaauaua

SEQ ID NO: 2683023 - RNA, 19 nt, Human
gaauauccuuuaaaauuua

SEQ ID NO: 2683024 - RNA, 16 nt, Human
gaauaugcaacauugu

SEQ ID NO: 2683025 - RNA, 13 nt, Human
gaauauggacaua

SEQ ID NO: 2683026 - RNA, 21 nt, Human
gaauaugauuaaaaauaucaa

SEQ ID NO: 2683027 - RNA, 19 nt, Human
gaauaugauuaaaaauauc

SEQ ID NO: 2683028 - RNA, 13 nt, Human
gaauauugcaaaa

SEQ ID NO: 2683029 - RNA, 14 nt, Human
gaauauugcaaaau

SEQ ID NO: 2683030 - RNA, 18 nt, Human
gaauauugcaaaauacau

SEQ ID NO: 2683031 - RNA, 20 nt, Human
gaauauugcaaaauacauga

SEQ ID NO: 2683032 - RNA, 21 nt, Human
gaauauugcaaaauacaugaa

SEQ ID NO: 2683033 - RNA, 22 nt, Human
gaauauacaugaagaauagaaa

SEQ ID NO: 2683034 - RNA, 20 nt, Human
gaauauaucucuauuugaga

SEQ ID NO: 2683035 - RNA, 15 nt, Human
gaaugaggugggagg

SEQ ID NO: 2683036 - RNA, 22 nt, Human
gaaugaggugggagguggaaga

SEQ ID NO: 2683037 - RNA, 21 nt, Human
gaaugagucuguuguguguca

SEQ ID NO: 2683038 - RNA, 20 nt, Human
gaaugaugauccuaggcauu

SEQ ID NO: 2683039 - RNA, 14 nt, Human
gaaugauuugcaua

SEQ ID NO: 2683040 - RNA, 21 nt, Human
gaauuaaauuaggaauaaaua

SEQ ID NO: 2683041 - RNA, 20 nt, Human
gaauuaaauuaggaauaaau

SEQ ID NO: 2683042 - RNA, 14 nt, Human
gaauuaaaaaagca

SEQ ID NO: 2683043 - RNA, 19 nt, Human
gaaugcaaccaagucacac

SEQ ID NO: 2683044 - RNA, 19 nt, Human
gaauuaccaagaauauccu

SEQ ID NO: 2683045 - RNA, 19 nt, Human
gaauuacgugcucuguggg

SEQ ID NO: 2683046 - RNA, 15 nt, Human
gaauuacgugcucug

SEQ ID NO: 2683047 - RNA, 12 nt, Human
gacaaagugcca

SEQ ID NO: 2683048 - RNA, 16 nt, Human
gacaaagugccaaaga

SEQ ID NO: 2683049 - RNA, 17 nt, Human
gacaaagugccaaagaa

SEQ ID NO: 2683050 - RNA, 18 nt, Human
gacaaagugccaaagaaa

SEQ ID NO: 2683051 - RNA, 19 nt, Human
gacaaagugccaaagaaag

SEQ ID NO: 2683052 - RNA, 11 nt, Human
gacaaauauuc

SEQ ID NO: 2683053 - RNA, 22 nt, Human
gacaaauauuccuuugcauauu

SEQ ID NO: 2683054 - RNA, 18 nt, Human
gacaaaaaauguuuuaaa

SEQ ID NO: 2683055 - RNA, 13 nt, Human
gaauuuuuuugua

SEQ ID NO: 2683056 - RNA, 14 nt, Human
gaauuuuuuuguaa

SEQ ID NO: 2683057 - RNA, 21 nt, Human
gaauuaugcuuuguagaguuu

SEQ ID NO: 2683058 - RNA, 17 nt, Human
gaauuagauuucuauag

SEQ ID NO: 2683059 - RNA, 12 nt, Human
gaauuauugaca

SEQ ID NO: 2683060 - RNA, 14 nt, Human
gaauuauugacacu

SEQ ID NO: 2683061 - RNA, 15 nt, Human
gaauuauugacacug

SEQ ID NO: 2683062 - RNA, 16 nt, Human
gaauuauugacacuga

SEQ ID NO: 2683063 - RNA, 17 nt, Human
gaauuauugacacugaa

SEQ ID NO: 2683064 - RNA, 22 nt, Human
gaauucaaacuggggccuccag

SEQ ID NO: 2683065 - RNA, 21 nt, Human
gaauucaaacuggggccucca

SEQ ID NO: 2683066 - RNA, 18 nt, Human
gaauucaaacuggggccu

SEQ ID NO: 2683067 - RNA, 16 nt, Human
gaauucaaacuggggc

SEQ ID NO: 2683068 - RNA, 15 nt, Human
gaauuauuuuucacu

SEQ ID NO: 2683069 - RNA, 20 nt, Human
gacauuuuaaaaaaugguca

SEQ ID NO: 2683070 - RNA, 17 nt, Human
gacauguuuuccgugaa

SEQ ID NO: 2683071 - RNA, 18 nt, Human
gacccggaggccgaggcc

SEQ ID NO: 2683072 - RNA, 19 nt, Human
gaccucaggugagaagcag

SEQ ID NO: 2683073 - RNA, 18 nt, Human
gaccucaggugagaagca

SEQ ID NO: 2683074 - RNA, 21 nt, Human
gaccucaggugagaagcagag

SEQ ID NO: 2683075 - RNA, 11 nt, Human
gacccuccaaa

SEQ ID NO: 2683076 - RNA, 13 nt, Human
gacccucuugccc

SEQ ID NO: 2683077 - RNA, 14 nt, Human
gacccucuugccca

SEQ ID NO: 2683078 - RNA, 17 nt, Human
gacccucuugcccaucc

SEQ ID NO: 2683079 - RNA, 19 nt, Human
gacccucuugcccauccug

SEQ ID NO: 2683080 - RNA, 20 nt, Human
gacccucuugcccauccuga

SEQ ID NO: 2683081 - RNA, 22 nt, Human
gacccucuugcccauccugacu

SEQ ID NO: 2683082 - RNA, 20 nt, Human
gaccuccacacccgugagaa

SEQ ID NO: 2683083 - RNA, 16 nt, Human
gacgccaugugaugga

SEQ ID NO: 2683084 - RNA, 22 nt, Human
gacgccaugugauggacacucc

SEQ ID NO: 2683085 - RNA, 11 nt, Human
gacgcccaccc

SEQ ID NO: 2683086 - RNA, 14 nt, Human
gacgccacucauuu

SEQ ID NO: 2683087 - RNA, 16 nt, Human
gacgccacucauuuca

SEQ ID NO: 2683088 - RNA, 17 nt, Human
gacgccacucauuucau

SEQ ID NO: 2683089 - RNA, 18 nt, Human
gacgccacucauuucauc

SEQ ID NO: 2683090 - RNA, 19 nt, Human
gacgccacucauuucaucu

SEQ ID NO: 2683091 - RNA, 21 nt, Human
gacgccacucauuucaucuca

SEQ ID NO: 2683092 - RNA, 23 nt, Human
gacgccacucauuucaucucauu

SEQ ID NO: 2683093 - RNA, 17 nt, Human
gagauugguuuuccugu

SEQ ID NO: 2683094 - RNA, 21 nt, Human
gagauugugccacuucacucc

SEQ ID NO: 2683095 - RNA, 14 nt, Human
gagagggagagaga

SEQ ID NO: 2683096 - RNA, 13 nt, Human
gagauuauaauaa

SEQ ID NO: 2683097 - RNA, 16 nt, Human
gagauguguggacugu

SEQ ID NO: 2683098 - RNA, 20 nt, Human
gagauguguggacuguggca

SEQ ID NO: 2683099 - RNA, 21 nt, Human
gagagcuagcagcagggaggg

SEQ ID NO: 2683100 - RNA, 15 nt, Human
gagagcuagcagcag

SEQ ID NO: 2683101 - RNA, 13 nt, Human
gagacucagugca

SEQ ID NO: 2683102 - RNA, 15 nt, Human
gagacucagugcaga

SEQ ID NO: 2683103 - RNA, 16 nt, Human
gagacucagugcagau

SEQ ID NO: 2683104 - RNA, 23 nt, Human
gagacucagugcagauggagaga

SEQ ID NO: 2683105 - RNA, 20 nt, Human
gagacguuuauaaacagaaa

SEQ ID NO: 2683106 - RNA, 23 nt, Human
gagacguuuauaaacagaaaugg

SEQ ID NO: 2683107 - RNA, 18 nt, Human
gagacgguguuuugccau

SEQ ID NO: 2683108 - RNA, 17 nt, Human
gagacgguuuccaggga

SEQ ID NO: 2683109 - RNA, 19 nt, Human
gagacgguuuccagggagg

SEQ ID NO: 2683110 - RNA, 23 nt, Human
gagacgguuuccagggaggggcc

SEQ ID NO: 2683111 - RNA, 10 nt, Human
gagagggaga

SEQ ID NO: 2683112 - RNA, 14 nt, Human
gagaggcaaugauu

SEQ ID NO: 2683113 - RNA, 10 nt, Human
gagaggacag

SEQ ID NO: 2683114 - RNA, 19 nt, Human
gagaggacaauacuggggu

SEQ ID NO: 2683115 - RNA, 15 nt, Human
gagaggacagcuuga

SEQ ID NO: 2683116 - RNA, 18 nt, Human
gagaggacagcuugagcc

SEQ ID NO: 2683117 - RNA, 20 nt, Human
gagaggacuguagggagggc

SEQ ID NO: 2683118 - RNA, 18 nt, Human
gagaggaaauucuccacu

SEQ ID NO: 2683119 - RNA, 18 nt, Human
gagaaaaaugcuccccac

SEQ ID NO: 2683120 - RNA, 16 nt, Human
gacuuuuuauaaaaug

SEQ ID NO: 2683121 - RNA, 13 nt, Human
gacuuuuuuugua

SEQ ID NO: 2683122 - RNA, 17 nt, Human
gacuuuuuuuguaugug

SEQ ID NO: 2683123 - RNA, 13 nt, Human
gagaagguuuauu

SEQ ID NO: 2683124 - RNA, 15 nt, Human
gagaagguuuauugu

SEQ ID NO: 2683125 - RNA, 16 nt, Human
gagaagguuuauuguu

SEQ ID NO: 2683126 - RNA, 17 nt, Human
gagaagguuuauuguua

SEQ ID NO: 2683127 - RNA, 22 nt, Human
gagaccgugaagauacuuugua

SEQ ID NO: 2683128 - RNA, 20 nt, Human
gagaccgugaagauacuuug

SEQ ID NO: 2683129 - RNA, 20 nt, Human
gagaccgggguauccugggg

SEQ ID NO: 2683130 - RNA, 18 nt, Human
gagaccgggcccuggguu

SEQ ID NO: 2683131 - RNA, 20 nt, Human
gagaccgggcccuggguucc

SEQ ID NO: 2683132 - RNA, 19 nt, Human
gagaccuggcacuggaugc

SEQ ID NO: 2683133 - RNA, 16 nt, Human
gagaaguuguaaagua

SEQ ID NO: 2683134 - RNA, 21 nt, Human
gagacccugucucaaaaaaag

SEQ ID NO: 2683135 - RNA, 12 nt, Human
gagcuggcucug

SEQ ID NO: 2683136 - RNA, 11 nt, Human
gagcuggccuc

SEQ ID NO: 2683137 - RNA, 16 nt, Human
gagcuggccucucuag

SEQ ID NO: 2683138 - RNA, 20 nt, Human
gagcaucggccuagggcccc

SEQ ID NO: 2683139 - RNA, 13 nt, Human
gaggaccagggcc

SEQ ID NO: 2683140 - RNA, 14 nt, Human
gaggaccagggccu

SEQ ID NO: 2683141 - RNA, 11 nt, Human
gaggacccagg

SEQ ID NO: 2683142 - RNA, 12 nt, Human
gaggacccagga

SEQ ID NO: 2683143 - RNA, 20 nt, Human
gaggacuguagggagggcgg

SEQ ID NO: 2683144 - RNA, 21 nt, Human
gaggacuguagggagggcggc

SEQ ID NO: 2683145 - RNA, 20 nt, Human
gaggacccaggaaaggcagg

SEQ ID NO: 2683146 - RNA, 20 nt, Human
gaggggagacuuugauguca

SEQ ID NO: 2683147 - RNA, 11 nt, Human
gaggggagggg

SEQ ID NO: 2683148 - RNA, 12 nt, Human
gaggggagggua

SEQ ID NO: 2683149 - RNA, 18 nt, Human
gaggccaagaauauugca

SEQ ID NO: 2683150 - RNA, 22 nt, Human
gaggccaagaauauugcaaaau

SEQ ID NO: 2683151 - RNA, 14 nt, Human
gcagccaaccuaag

SEQ ID NO: 2683152 - RNA, 15 nt, Human
gcagaggccagaggc

SEQ ID NO: 2683153 - RNA, 21 nt, Human
gcagaacgaaccuuggccugg

SEQ ID NO: 2683154 - RNA, 22 nt, Human
gcagaacgaaccuuggccuggg

SEQ ID NO: 2683155 - RNA, 12 nt, Human
gcagagcuggcu

SEQ ID NO: 2683156 - RNA, 13 nt, Human
gcagagcuggcuc

SEQ ID NO: 2683157 - RNA, 14 nt, Human
gcagagcuggcucu

SEQ ID NO: 2683158 - RNA, 15 nt, Human
gcagagcuggcucug

SEQ ID NO: 2683159 - RNA, 17 nt, Human
gcagagcuggcucugag

SEQ ID NO: 2683160 - RNA, 23 nt, Human
gcagagcuggcucugagcgccuc

SEQ ID NO: 2683161 - RNA, 12 nt, Human
gcagaggccaga

SEQ ID NO: 2683162 - RNA, 14 nt, Human
gcagaggaccaggg

SEQ ID NO: 2683163 - RNA, 16 nt, Human
gcagaggaccagggcc

SEQ ID NO: 2683164 - RNA, 17 nt, Human
gcagaggaccagggccu

SEQ ID NO: 2683165 - RNA, 22 nt, Human
gcagaaaaucuuuuacuagugu

SEQ ID NO: 2683166 - RNA, 19 nt, Human
gcagaaaaaggcugugcug

SEQ ID NO: 2683167 - RNA, 17 nt, Human
gcagaaaaaggcugugc

SEQ ID NO: 2683168 - RNA, 14 nt, Human
gcacuccagccugg

SEQ ID NO: 2683169 - RNA, 18 nt, Human
gcagcccaccccucaaca

SEQ ID NO: 2683170 - RNA, 13 nt, Human
gcagccaguucaa

SEQ ID NO: 2683171 - RNA, 14 nt, Human
gcaguuuaucauuc

SEQ ID NO: 2683172 - RNA, 22 nt, Human
gcaguuggccagagagccuggu

SEQ ID NO: 2683173 - RNA, 14 nt, Human
gcaguuggccagag

SEQ ID NO: 2683174 - RNA, 19 nt, Human
gcaguugcugguaaaauga

SEQ ID NO: 2683175 - RNA, 18 nt, Human
gcaguugcugguaaaaug

SEQ ID NO: 2683176 - RNA, 23 nt, Human
gcaguugcugguaaaaugaagaa

SEQ ID NO: 2683177 - RNA, 16 nt, Human
gcagucgugccugugu

SEQ ID NO: 2683178 - RNA, 17 nt, Human
gcagucgugccuguguc

SEQ ID NO: 2683179 - RNA, 18 nt, Human
gcagucgugccugugucc

SEQ ID NO: 2683180 - RNA, 19 nt, Human
gcagucgugccugugucca

SEQ ID NO: 2683181 - RNA, 11 nt, Human
gcauccagccu

SEQ ID NO: 2683182 - RNA, 21 nt, Human
gcaucccuaccgacccagggu

SEQ ID NO: 2683183 - RNA, 18 nt, Human
gcaucccuaccgacccag

SEQ ID NO: 2683184 - RNA, 12 nt, Human
gcaucccugaga

SEQ ID NO: 2683185 - RNA, 13 nt, Human
gcaucccugagac

SEQ ID NO: 2683186 - RNA, 22 nt, Human
gcaucccuuuuucauaaauuau

SEQ ID NO: 2683187 - RNA, 13 nt, Human
gcauggcccuggg

SEQ ID NO: 2683188 - RNA, 20 nt, Human
gcaucggccuagggccccca

SEQ ID NO: 2683189 - RNA, 16 nt, Human
gcaucggccuagggcc

SEQ ID NO: 2683190 - RNA, 14 nt, Human
gcauggcccugggc

SEQ ID NO: 2683191 - RNA, 13 nt, Human
gcaugguggccag

SEQ ID NO: 2683192 - RNA, 14 nt, Human
gcaugguggccaga

SEQ ID NO: 2683193 - RNA, 15 nt, Human
gcaugguggccagag

SEQ ID NO: 2683194 - RNA, 16 nt, Human
gcaugguggccagagg

SEQ ID NO: 2683195 - RNA, 19 nt, Human
gcaugguuuugugccaucu

SEQ ID NO: 2683196 - RNA, 21 nt, Human
gcaugguuuugugccaucugu

SEQ ID NO: 2683197 - RNA, 15 nt, Human
gcauguaaauguaaa

SEQ ID NO: 2683198 - RNA, 17 nt, Human
gcauguaaauguaaacu

SEQ ID NO: 2683199 - RNA, 19 nt, Human
gcauguaaauguaaacuca

SEQ ID NO: 2683200 - RNA, 20 nt, Human
gcaaccaggaacagcaaaug

SEQ ID NO: 2683201 - RNA, 15 nt, Human
gcaaccaggaacagc

SEQ ID NO: 2683202 - RNA, 17 nt, Human
gcaaccaggaacagcaa

SEQ ID NO: 2683203 - RNA, 11 nt, Human
gcaaccaggaa

SEQ ID NO: 2683204 - RNA, 14 nt, Human
gcaaccacuaagaa

SEQ ID NO: 2683205 - RNA, 15 nt, Human
gcaaccaagucacac

SEQ ID NO: 2683206 - RNA, 14 nt, Human
gcaacauucauugc

SEQ ID NO: 2683207 - RNA, 22 nt, Human
gcaacaggguauggacuaucug

SEQ ID NO: 2683208 - RNA, 13 nt, Human
gcaaaaggccucu

SEQ ID NO: 2683209 - RNA, 16 nt, Human
gcaaaaggccucuugu

SEQ ID NO: 2683210 - RNA, 17 nt, Human
gcaaaaggccucuugua

SEQ ID NO: 2683211 - RNA, 23 nt, Human
gcaaaaggccucuuguaaagacu

SEQ ID NO: 2683212 - RNA, 10 nt, Human
gcaaaauaug

SEQ ID NO: 2683213 - RNA, 13 nt, Human
gcaaaauauguuu

SEQ ID NO: 2683214 - RNA, 13 nt, Human
gcaaaauaaaaca

SEQ ID NO: 2683215 - RNA, 15 nt, Human
gcaaaauaaaacaua

SEQ ID NO: 2683216 - RNA, 21 nt, Human
gcaaaauaaaacauagcaaau

SEQ ID NO: 2683217 - RNA, 13 nt, Human
gcaaaauacauga

SEQ ID NO: 2683218 - RNA, 14 nt, Human
gcaaaauacaugaa

SEQ ID NO: 2683219 - RNA, 17 nt, Human
gcaaaauacaugaagcu

SEQ ID NO: 2683220 - RNA, 13 nt, Human
gauggaauuuuuu

SEQ ID NO: 2683221 - RNA, 19 nt, Human
gauuuaaucugccaagggc

SEQ ID NO: 2683222 - RNA, 14 nt, Human
gcaaaaaggcagga

SEQ ID NO: 2683223 - RNA, 22 nt, Human
gcaaaagaugcuucucacugcc

SEQ ID NO: 2683224 - RNA, 17 nt, Human
gcaaaagaugcuucuca

SEQ ID NO: 2683225 - RNA, 20 nt, Human
gauuuauuaacuuaauaauc

SEQ ID NO: 2683226 - RNA, 18 nt, Human
gaucugcugcagagcagu

SEQ ID NO: 2683227 - RNA, 17 nt, Human
gaucugcugcagagcag

SEQ ID NO: 2683228 - RNA, 16 nt, Human
gaucugcugcagagca

SEQ ID NO: 2683229 - RNA, 11 nt, Human
gaucugcccau

SEQ ID NO: 2683230 - RNA, 13 nt, Human
gaucugcccaucg

SEQ ID NO: 2683231 - RNA, 18 nt, Human
gaucugcccaucgugaag

SEQ ID NO: 2683232 - RNA, 19 nt, Human
gaucugcccaucgugaaga

SEQ ID NO: 2683233 - RNA, 21 nt, Human
gaucugcccaucgugaagaag

SEQ ID NO: 2683234 - RNA, 23 nt, Human
gaucugcccaucgugaagaagcc

SEQ ID NO: 2683235 - RNA, 19 nt, Human
gaucucuugagccugggag

SEQ ID NO: 2683236 - RNA, 13 nt, Human
gaucugagggaga

SEQ ID NO: 2683237 - RNA, 18 nt, Human
gaucucuugagccuggga

SEQ ID NO: 2683238 - RNA, 14 nt, Human
gaucucuccuggcc

SEQ ID NO: 2683239 - RNA, 16 nt, Human
gaucucuccuggccua

SEQ ID NO: 2683240 - RNA, 14 nt, Human
gauccacuuugggg

SEQ ID NO: 2683241 - RNA, 18 nt, Human
gauccacucgccucagcc

SEQ ID NO: 2683242 - RNA, 18 nt, Human
gauggaaaaacugaggcu

SEQ ID NO: 2683243 - RNA, 18 nt, Human
gauggaaaaguguccuuc

SEQ ID NO: 2683244 - RNA, 14 nt, Human
gaugauccuaggca

SEQ ID NO: 2683245 - RNA, 13 nt, Human
gaugauccuaggc

SEQ ID NO: 2683246 - RNA, 14 nt, Human
gaugauuuaagugu

SEQ ID NO: 2683247 - RNA, 21 nt, Human
gauacugcgacuuucugccug

SEQ ID NO: 2683248 - RNA, 23 nt, Human
gauacugcgacuuucugccugga

SEQ ID NO: 2683249 - RNA, 17 nt, Human
gauacugcgacuuucug

SEQ ID NO: 2683250 - RNA, 18 nt, Human
gauacugcgacuuucugc

SEQ ID NO: 2683251 - RNA, 19 nt, Human
gauacugcgacuuucugcc

SEQ ID NO: 2683252 - RNA, 20 nt, Human
gauacugcgacuuucugccu

SEQ ID NO: 2683253 - RNA, 13 nt, Human
gauaccagcugga

SEQ ID NO: 2683254 - RNA, 19 nt, Human
gauacaguuuucagaaaaa

SEQ ID NO: 2683255 - RNA, 14 nt, Human
gaucaaaaaggcuu

SEQ ID NO: 2683256 - RNA, 23 nt, Human
gaucaaaaaggcuuauaaaacag

SEQ ID NO: 2683257 - RNA, 20 nt, Human
gaucaaaaaggcuuauaaaa

SEQ ID NO: 2683258 - RNA, 23 nt, Human
gauacuuuguauuguccuauuag

SEQ ID NO: 2683259 - RNA, 19 nt, Human
gauacuuuguauuguccua

SEQ ID NO: 2683260 - RNA, 16 nt, Human
gauacuuuguauuguc

SEQ ID NO: 2683261 - RNA, 16 nt, Human
gauccacccaacccua

SEQ ID NO: 2683262 - RNA, 17 nt, Human
gauccacccaacccuau

SEQ ID NO: 2683263 - RNA, 11 nt, Human
gauccaaagac

SEQ ID NO: 2683264 - RNA, 12 nt, Human
gauccaaagacu

SEQ ID NO: 2683265 - RNA, 21 nt, Human
gcugccucccuuguggcagca

SEQ ID NO: 2683266 - RNA, 13 nt, Human
gcugccucuuucc

SEQ ID NO: 2683267 - RNA, 18 nt, Human
gcugccuauugauuuaag

SEQ ID NO: 2683268 - RNA, 20 nt, Human
gcugcccccaccccggggac

SEQ ID NO: 2683269 - RNA, 13 nt, Human
gcugccccucuca

SEQ ID NO: 2683270 - RNA, 14 nt, Human
gcugccccucucac

SEQ ID NO: 2683271 - RNA, 15 nt, Human
gcugccccucucacc

SEQ ID NO: 2683272 - RNA, 16 nt, Human
gcugccccucucacca

SEQ ID NO: 2683273 - RNA, 18 nt, Human
gcugccccucucaccaaa

SEQ ID NO: 2683274 - RNA, 15 nt, Human
gcugcccccaccccg

SEQ ID NO: 2683275 - RNA, 16 nt, Human
gcugcagcaccgaggg

SEQ ID NO: 2683276 - RNA, 20 nt, Human
gcugcagcaccgaggggccu

SEQ ID NO: 2683277 - RNA, 23 nt, Human
gcugcagcaccgaggggccuuug

SEQ ID NO: 2683278 - RNA, 15 nt, Human
gcugcaauucccugg

SEQ ID NO: 2683279 - RNA, 16 nt, Human
gcugcaauucccugga

SEQ ID NO: 2683280 - RNA, 19 nt, Human
gcugcacccucaggcaggu

SEQ ID NO: 2683281 - RNA, 18 nt, Human
gcugcacccucaggcagg

SEQ ID NO: 2683282 - RNA, 14 nt, Human
gcugaggugggagg

SEQ ID NO: 2683283 - RNA, 23 nt, Human
gcugagggugagugggugaauaa

SEQ ID NO: 2683284 - RNA, 18 nt, Human
gcugagggugagugggug

SEQ ID NO: 2683285 - RNA, 14 nt, Human
gcugaggguuugaa

SEQ ID NO: 2683286 - RNA, 10 nt, Human
gcugcucuuc

SEQ ID NO: 2683287 - RNA, 22 nt, Human
gcugcucuucaucccauuccag

SEQ ID NO: 2683288 - RNA, 23 nt, Human
gcuggacuucuaccugcccucaa

SEQ ID NO: 2683289 - RNA, 16 nt, Human
gcuggcucugagcgcc

SEQ ID NO: 2683290 - RNA, 13 nt, Human
gcuggcucugagc

SEQ ID NO: 2683291 - RNA, 17 nt, Human
gcugguacaacggaggc

SEQ ID NO: 2683292 - RNA, 23 nt, Human
gcugguaaaaugaagaauuuaaa

SEQ ID NO: 2683293 - RNA, 14 nt, Human
gcugguaaaaugaa

SEQ ID NO: 2683294 - RNA, 18 nt, Human
gcugguaaaaugaagaau

SEQ ID NO: 2683295 - RNA, 16 nt, Human
gcugguaaaaugaaga

SEQ ID NO: 2683296 - RNA, 17 nt, Human
gcugggccauguccaaa

SEQ ID NO: 2683297 - RNA, 19 nt, Human
gcugggccauguccaaaga

SEQ ID NO: 2683298 - RNA, 20 nt, Human
gcugggccauguccaaagag

SEQ ID NO: 2683299 - RNA, 14 nt, Human
gcugggcagguugg

SEQ ID NO: 2683300 - RNA, 19 nt, Human
gcugugcugcccugaagaa

SEQ ID NO: 2683301 - RNA, 16 nt, Human
gcugugcugcccugaa

SEQ ID NO: 2683302 - RNA, 17 nt, Human
gcugugcugcccugaag

SEQ ID NO: 2683303 - RNA, 16 nt, Human
gcugugcuaugaauuu

SEQ ID NO: 2683304 - RNA, 15 nt, Human
gcugugcuaugaauu

SEQ ID NO: 2683305 - RNA, 14 nt, Human
gcugugcuaugaau

SEQ ID NO: 2683306 - RNA, 13 nt, Human
gcugugagggagg

SEQ ID NO: 2683307 - RNA, 14 nt, Human
gcugugagggaggg

SEQ ID NO: 2683308 - RNA, 15 nt, Human
gcugugagggagggg

SEQ ID NO: 2683309 - RNA, 23 nt, Human
gcugugagggaggggaaaagcau

SEQ ID NO: 2683310 - RNA, 13 nt, Human
gcugugcaacgcc

SEQ ID NO: 2683311 - RNA, 19 nt, Human
gcugugcaacgccgugggc

SEQ ID NO: 2683312 - RNA, 20 nt, Human
gcugugcaacgccgugggcu

SEQ ID NO: 2683313 - RNA, 23 nt, Human
gcugugcaacgccgugggcugcg

SEQ ID NO: 2683314 - RNA, 19 nt, Human
gcugugcaacggucuccug

SEQ ID NO: 2683315 - RNA, 18 nt, Human
gcuuuucuguauuuuauu

SEQ ID NO: 2683316 - RNA, 17 nt, Human
gcuuuucugcccuggcu

SEQ ID NO: 2683317 - RNA, 16 nt, Human
gcuuuucugcccuggc

SEQ ID NO: 2683318 - RNA, 15 nt, Human
gcuuuuccuuggcau

SEQ ID NO: 2683319 - RNA, 18 nt, Human
gcuuuucugcccuggcug

SEQ ID NO: 2683320 - RNA, 19 nt, Human
gcuuuucugcccuggcugc

SEQ ID NO: 2683321 - RNA, 22 nt, Human
gcuuuucugcccuggcugcugc

SEQ ID NO: 2683322 - RNA, 14 nt, Human
gcuuuucuguauuu

SEQ ID NO: 2683323 - RNA, 18 nt, Human
ggaaacucacacuccccu

SEQ ID NO: 2683324 - RNA, 18 nt, Human
ggaaacuccacaucugcc

SEQ ID NO: 2683325 - RNA, 20 nt, Human
ggaaacuccacaucugccuu

SEQ ID NO: 2683326 - RNA, 21 nt, Human
ggaaacuccacaucugccuua

SEQ ID NO: 2683327 - RNA, 14 nt, Human
ggaaagacacugcc

SEQ ID NO: 2683328 - RNA, 20 nt, Human
ggaaagacacugccugggcu

SEQ ID NO: 2683329 - RNA, 15 nt, Human
ggaaagacacugccu

SEQ ID NO: 2683330 - RNA, 16 nt, Human
ggaaagacacugccug

SEQ ID NO: 2683331 - RNA, 15 nt, Human
ggaaagcaauaaaug

SEQ ID NO: 2683332 - RNA, 16 nt, Human
gcuuugccauugugaa

SEQ ID NO: 2683333 - RNA, 16 nt, Human
gcuuugccaugugcuu

SEQ ID NO: 2683334 - RNA, 12 nt, Human
gcuuaauaccaa

SEQ ID NO: 2683335 - RNA, 15 nt, Human
gcuuaaucauuuuca

SEQ ID NO: 2683336 - RNA, 16 nt, Human
gcuuaaucauuuucau

SEQ ID NO: 2683337 - RNA, 21 nt, Human
gcuuaaucauuuucauuccua

SEQ ID NO: 2683338 - RNA, 22 nt, Human
gcuuaaucuucaaagccuucuc

SEQ ID NO: 2683339 - RNA, 19 nt, Human
gcuguuugagauucucaaa

SEQ ID NO: 2683340 - RNA, 18 nt, Human
ggaaaucagccaaguuuu

SEQ ID NO: 2683341 - RNA, 23 nt, Human
ggaaaucagccaaguuuuauaau

SEQ ID NO: 2683342 - RNA, 14 nt, Human
ggaagcccaggagc

SEQ ID NO: 2683343 - RNA, 19 nt, Human
ggaagcccaggagccucac

SEQ ID NO: 2683344 - RNA, 14 nt, Human
ggaagcccauccug

SEQ ID NO: 2683345 - RNA, 18 nt, Human
ggacaguaucccacaucc

SEQ ID NO: 2683346 - RNA, 13 nt, Human
ggacauccuccuc

SEQ ID NO: 2683347 - RNA, 21 nt, Human
ggacaucacagggugggccuc

SEQ ID NO: 2683348 - RNA, 16 nt, Human
ggacauccuccuccca

SEQ ID NO: 2683349 - RNA, 16 nt, Human
ggacaugcaauaaaau

SEQ ID NO: 2683350 - RNA, 18 nt, Human
ggacaugcaauaaaauuu

SEQ ID NO: 2683351 - RNA, 19 nt, Human
ggacaugcaauaaaauuua

SEQ ID NO: 2683352 - RNA, 22 nt, Human
ggacaugcaauaaaauuuaaaa

SEQ ID NO: 2683353 - RNA, 16 nt, Human
ggaaugaggaaaauuc

SEQ ID NO: 2683354 - RNA, 17 nt, Human
ggaaugaggaaaauucu

SEQ ID NO: 2683355 - RNA, 21 nt, Human
ggaaugaggugggagguggaa

SEQ ID NO: 2683356 - RNA, 13 nt, Human
ggacacacagccu

SEQ ID NO: 2683357 - RNA, 14 nt, Human
ggacacacagccua

SEQ ID NO: 2683358 - RNA, 15 nt, Human
ggaagccguccuggc

SEQ ID NO: 2683359 - RNA, 23 nt, Human
ggaauauaaggaaagcaauaaau

SEQ ID NO: 2683360 - RNA, 17 nt, Human
gcccccacuugccucuu

SEQ ID NO: 2683361 - RNA, 21 nt, Human
gcccccacuugccucuuccuu

SEQ ID NO: 2683362 - RNA, 14 nt, Human
gcccccacuugccu

SEQ ID NO: 2683363 - RNA, 16 nt, Human
gcccccacuugccucu

SEQ ID NO: 2683364 - RNA, 23 nt, Human
gccccacagucuccggccucucc

SEQ ID NO: 2683365 - RNA, 15 nt, Human
gccccacauguccag

SEQ ID NO: 2683366 - RNA, 23 nt, Human
gccccacauguccagcaccuugu

SEQ ID NO: 2683367 - RNA, 20 nt, Human
gcccccagccccggggugag

SEQ ID NO: 2683368 - RNA, 21 nt, Human
gcccccagccccggggugagu

SEQ ID NO: 2683369 - RNA, 17 nt, Human
gcccccagcccagggcu

SEQ ID NO: 2683370 - RNA, 18 nt, Human
gcccccagcccagggcuc

SEQ ID NO: 2683371 - RNA, 21 nt, Human
gcccccagcccagggcuccug

SEQ ID NO: 2683372 - RNA, 22 nt, Human
gcccccagcccagggcuccugc

SEQ ID NO: 2683373 - RNA, 16 nt, Human
gcauuuagcuggccac

SEQ ID NO: 2683374 - RNA, 19 nt, Human
gcauuuagggaguauucua

SEQ ID NO: 2683375 - RNA, 18 nt, Human
gcauuuagggaguauucu

SEQ ID NO: 2683376 - RNA, 20 nt, Human
gccauuagccagauuugucu

SEQ ID NO: 2683377 - RNA, 12 nt, Human
gccuagcacagc

SEQ ID NO: 2683378 - RNA, 14 nt, Human
gccuagcacagcag

SEQ ID NO: 2683379 - RNA, 15 nt, Human
gccuagcacagcagc

SEQ ID NO: 2683380 - RNA, 16 nt, Human
gccuagcacagcagcu

SEQ ID NO: 2683381 - RNA, 22 nt, Human
gccuacagcuuugaucccugac

SEQ ID NO: 2683382 - RNA, 23 nt, Human
gccuacagcuuugaucccugaca

SEQ ID NO: 2683383 - RNA, 13 nt, Human
gccucauguggcu

SEQ ID NO: 2683384 - RNA, 14 nt, Human
gccucauguggcug

SEQ ID NO: 2683385 - RNA, 12 nt, Human
gccuccagaacu

SEQ ID NO: 2683386 - RNA, 15 nt, Human
gccuccacagcgagg

SEQ ID NO: 2683387 - RNA, 17 nt, Human
gccucauguggcuggaa

SEQ ID NO: 2683388 - RNA, 15 nt, Human
gccucauguggcugg

SEQ ID NO: 2683389 - RNA, 16 nt, Human
gccucauguggcugga

SEQ ID NO: 2683390 - RNA, 20 nt, Human
gccuccacagcgagggcagc

SEQ ID NO: 2683391 - RNA, 21 nt, Human
gccuccacagcgagggcagcu

SEQ ID NO: 2683392 - RNA, 22 nt, Human
gccuccacagcgagggcagcug

SEQ ID NO: 2683393 - RNA, 23 nt, Human
gccuccacagcgagggcagcugc

SEQ ID NO: 2683394 - RNA, 17 nt, Human
gccuccucuggacggca

SEQ ID NO: 2683395 - RNA, 21 nt, Human
gccuccucucauaaaagagac

SEQ ID NO: 2683396 - RNA, 20 nt, Human
gccuccucuggacggcaggc

SEQ ID NO: 2683397 - RNA, 11 nt, Human
gcccugccacu

SEQ ID NO: 2683398 - RNA, 12 nt, Human
gcccugccacuc

SEQ ID NO: 2683399 - RNA, 13 nt, Human
gcccugccacuca

SEQ ID NO: 2683400 - RNA, 19 nt, Human
gcccugccacucacuaggc

SEQ ID NO: 2683401 - RNA, 20 nt, Human
gcccugccacucacuaggcc

SEQ ID NO: 2683402 - RNA, 21 nt, Human
gcccugccacucacuaggccc

SEQ ID NO: 2683403 - RNA, 14 nt, Human
gcccguccugccug

SEQ ID NO: 2683404 - RNA, 15 nt, Human
gcccguccugccugu

SEQ ID NO: 2683405 - RNA, 16 nt, Human
gcccguccugccugug

SEQ ID NO: 2683406 - RNA, 17 nt, Human
gcccguccugccugugg

SEQ ID NO: 2683407 - RNA, 18 nt, Human
gcccguccugccuguggc

SEQ ID NO: 2683408 - RNA, 16 nt, Human
gccgcguggugccauc

SEQ ID NO: 2683409 - RNA, 20 nt, Human
gccgcguggugccaucccca

SEQ ID NO: 2683410 - RNA, 15 nt, Human
gccgcuccaccagca

SEQ ID NO: 2683411 - RNA, 23 nt, Human
gccgcuagguagagucugagggc

SEQ ID NO: 2683412 - RNA, 13 nt, Human
gccgcuagguaga

SEQ ID NO: 2683413 - RNA, 21 nt, Human
gccgcguggugccauccccag

SEQ ID NO: 2683414 - RNA, 23 nt, Human
gcccuuccgcaguguggccaggc

SEQ ID NO: 2683415 - RNA, 17 nt, Human
gccggcagccccagccu

SEQ ID NO: 2683416 - RNA, 16 nt, Human
gccggcagccccagcc

SEQ ID NO: 2683417 - RNA, 15 nt, Human
gccggcagccccagc

SEQ ID NO: 2683418 - RNA, 14 nt, Human
gccggcagccccag

SEQ ID NO: 2683419 - RNA, 16 nt, Human
gccggcacggcccgug

SEQ ID NO: 2683420 - RNA, 17 nt, Human
gccggaucugagggaga

SEQ ID NO: 2683421 - RNA, 15 nt, Human
gccggaucugaggga

SEQ ID NO: 2683422 - RNA, 22 nt, Human
gccggacccggaggccgaggcc

SEQ ID NO: 2683423 - RNA, 13 nt, Human
gcucaggaguuug

SEQ ID NO: 2683424 - RNA, 15 nt, Human
gcucaggaggcgccc

SEQ ID NO: 2683425 - RNA, 22 nt, Human
gcucacugccaggccagccucc

SEQ ID NO: 2683426 - RNA, 21 nt, Human
gcucacugccaggccagccuc

SEQ ID NO: 2683427 - RNA, 23 nt, Human
gcucacugccaggccagccuccg

SEQ ID NO: 2683428 - RNA, 15 nt, Human
gcucagaaccacagc

SEQ ID NO: 2683429 - RNA, 17 nt, Human
gcucagaaccacagcaa

SEQ ID NO: 2683430 - RNA, 18 nt, Human
gcuaguugaauacuugaa

SEQ ID NO: 2683431 - RNA, 16 nt, Human
gcuaguugaauacuug

SEQ ID NO: 2683432 - RNA, 15 nt, Human
gcuaguugaauacuu

SEQ ID NO: 2683433 - RNA, 13 nt, Human
gcuaguugaauac

SEQ ID NO: 2683434 - RNA, 18 nt, Human
gcuagguuaaaugguugg

SEQ ID NO: 2683435 - RNA, 22 nt, Human
gcuaguugaauacuugaaccau

SEQ ID NO: 2683436 - RNA, 19 nt, Human
gcuaguugaauacuugaac

SEQ ID NO: 2683437 - RNA, 23 nt, Human
gcuauuacgaaguucaagaucaa

SEQ ID NO: 2683438 - RNA, 14 nt, Human
gcucaaagaaaucu

SEQ ID NO: 2683439 - RNA, 20 nt, Human
gccuugauucccuuguuauu

SEQ ID NO: 2683440 - RNA, 15 nt, Human
gccuugagcccuggc

SEQ ID NO: 2683441 - RNA, 16 nt, Human
gccuugagcccuggcu

SEQ ID NO: 2683442 - RNA, 15 nt, Human
gccuugaguuccagu

SEQ ID NO: 2683443 - RNA, 15 nt, Human
gccuucuuuugauua

SEQ ID NO: 2683444 - RNA, 22 nt, Human
gccuucuuuugauuauguuuuu

SEQ ID NO: 2683445 - RNA, 19 nt, Human
gccuucgucuuucccaugg

SEQ ID NO: 2683446 - RNA, 15 nt, Human
gccuucucagaagca

SEQ ID NO: 2683447 - RNA, 16 nt, Human
gccuucucagaagcac

SEQ ID NO: 2683448 - RNA, 16 nt, Human
gccucugucaggccuu

SEQ ID NO: 2683449 - RNA, 18 nt, Human
gccucugucaggccuuca

SEQ ID NO: 2683450 - RNA, 20 nt, Human
gcggauuaauuugcaucuga

SEQ ID NO: 2683451 - RNA, 18 nt, Human
gcggauuaauuugcaucu

SEQ ID NO: 2683452 - RNA, 19 nt, Human
gcggauuaauuugcaucug

SEQ ID NO: 2683453 - RNA, 16 nt, Human
gcggccuuuggcuuca

SEQ ID NO: 2683454 - RNA, 19 nt, Human
gcggcaggggccuggagau

SEQ ID NO: 2683455 - RNA, 15 nt, Human
gcggcaggggccugg

SEQ ID NO: 2683456 - RNA, 16 nt, Human
gcggcaggggccugga

SEQ ID NO: 2683457 - RNA, 17 nt, Human
gcggcguacaggcuggc

SEQ ID NO: 2683458 - RNA, 16 nt, Human
gcggcguacaggcugg

SEQ ID NO: 2683459 - RNA, 21 nt, Human
gcgugcgcaucuugccuccag

SEQ ID NO: 2683460 - RNA, 22 nt, Human
gcgugcgcaucuugccuccagg

SEQ ID NO: 2683461 - RNA, 23 nt, Human
gcgugcgcaucuugccuccaggu

SEQ ID NO: 2683462 - RNA, 16 nt, Human
gcgggacagaguagcc

SEQ ID NO: 2683463 - RNA, 21 nt, Human
gcgggagccaugcgcccccuc

SEQ ID NO: 2683464 - RNA, 15 nt, Human
gcgugccguggcacc

SEQ ID NO: 2683465 - RNA, 17 nt, Human
gcgugccguggcaccag

SEQ ID NO: 2683466 - RNA, 12 nt, Human
gcggcugugcuu

SEQ ID NO: 2683467 - RNA, 15 nt, Human
gcggcuggcagccca

SEQ ID NO: 2683468 - RNA, 14 nt, Human
gcguggagggaggc

SEQ ID NO: 2683469 - RNA, 16 nt, Human
gcguggagggaggccc

SEQ ID NO: 2683470 - RNA, 17 nt, Human
gcguggagggaggcccc

SEQ ID NO: 2683471 - RNA, 20 nt, Human
gcguggagggaggccccagg

SEQ ID NO: 2683472 - RNA, 21 nt, Human
gcguggagggaggccccaggg

SEQ ID NO: 2683473 - RNA, 22 nt, Human
gcguggagggaggccccagggg

SEQ ID NO: 2683474 - RNA, 17 nt, Human
gguuucgaagucauuaa

SEQ ID NO: 2683475 - RNA, 20 nt, Human
gguuuccuggcacuggaccc

SEQ ID NO: 2683476 - RNA, 12 nt, Human
gguuuccaggga

SEQ ID NO: 2683477 - RNA, 13 nt, Human
gguucucaaugaa

SEQ ID NO: 2683478 - RNA, 14 nt, Human
gguucucaaugaaa

SEQ ID NO: 2683479 - RNA, 22 nt, Human
aaaguaacucauuuguuaaaau

SEQ ID NO: 2683480 - RNA, 23 nt, Human
gguuuuaugguuacuucuucucu

SEQ ID NO: 2683481 - RNA, 16 nt, Human
aaaguaacugugagaa

SEQ ID NO: 2683482 - RNA, 16 nt, Human
gguuuuauacugaagg

SEQ ID NO: 2683483 - RNA, 11 nt, Human
gguuuuaugau

SEQ ID NO: 2683484 - RNA, 17 nt, Human
gguuuuauaaggcugau

SEQ ID NO: 2683485 - RNA, 13 nt, Human
gguuuuaaacuuu

SEQ ID NO: 2683486 - RNA, 14 nt, Human
gguuuuaaacuuuc

SEQ ID NO: 2683487 - RNA, 21 nt, Human
aaaguggcgugggagccagcc

SEQ ID NO: 2683488 - RNA, 22 nt, Human
aaaguggcgugggagccagccu

SEQ ID NO: 2683489 - RNA, 16 nt, Human
aaaguauguauuauuu

SEQ ID NO: 2683490 - RNA, 17 nt, Human
aaaguauguauuauuua

SEQ ID NO: 2683491 - RNA, 19 nt, Human
aaaguauguauuauuuaca

SEQ ID NO: 2683492 - RNA, 15 nt, Human
aaaguaauauuuauu

SEQ ID NO: 2683493 - RNA, 18 nt, Human
aaaguaauauuuauuaaa

SEQ ID NO: 2683494 - RNA, 15 nt, Human
aaaguagaacuuugu

SEQ ID NO: 2683495 - RNA, 23 nt, Human
aaaguagaacuuuguauaguuau

SEQ ID NO: 2683496 - RNA, 21 nt, Human
aaaguagaacuuuguauaguu

SEQ ID NO: 2683497 - RNA, 18 nt, Human
aaaguagaacuuuguaua

SEQ ID NO: 2683498 - RNA, 17 nt, Human
aaaguagaacuuuguau

SEQ ID NO: 2683499 - RNA, 16 nt, Human
aaaguagaacuuugua

SEQ ID NO: 2683500 - RNA, 13 nt, Human
ggugugggggaag

SEQ ID NO: 2683501 - RNA, 11 nt, Human
gguguggggga

SEQ ID NO: 2683502 - RNA, 16 nt, Human
gguguggagccgaggc

SEQ ID NO: 2683503 - RNA, 18 nt, Human
gguguggcccauggcugu

SEQ ID NO: 2683504 - RNA, 12 nt, Human
gguguggagaag

SEQ ID NO: 2683505 - RNA, 14 nt, Human
ggugggggagggag

SEQ ID NO: 2683506 - RNA, 23 nt, Human
gguguggagaagcggcuggcagc

SEQ ID NO: 2683507 - RNA, 14 nt, Human
gguguggagaagcg

SEQ ID NO: 2683508 - RNA, 13 nt, Human
ggugggggccucg

SEQ ID NO: 2683509 - RNA, 12 nt, Human
gguggggaaagg

SEQ ID NO: 2683510 - RNA, 14 nt, Human
ggugggcuggacuu

SEQ ID NO: 2683511 - RNA, 19 nt, Human
gguucguucuguacuguua

SEQ ID NO: 2683512 - RNA, 12 nt, Human
gguucucaauga

SEQ ID NO: 2683513 - RNA, 20 nt, Human
gguguuugaaaauaguuuau

SEQ ID NO: 2683514 - RNA, 14 nt, Human
gguguuugaaaaua

SEQ ID NO: 2683515 - RNA, 13 nt, Human
gguguuugaaaau

SEQ ID NO: 2683516 - RNA, 15 nt, Human
aaaguaacucauuug

SEQ ID NO: 2683517 - RNA, 14 nt, Human
aaaguaacucauuu

SEQ ID NO: 2683518 - RNA, 18 nt, Human
aaaguaaauacaugcaua

SEQ ID NO: 2683519 - RNA, 20 nt, Human
aaaguaacucauuuguuaaa

SEQ ID NO: 2683520 - RNA, 18 nt, Human
aaaguaacucauuuguua

SEQ ID NO: 2683521 - RNA, 15 nt, Human
ggugggaaggggagc

SEQ ID NO: 2683522 - RNA, 23 nt, Human
ggugggaaggggagcacaauuuc

SEQ ID NO: 2683523 - RNA, 20 nt, Human
aaaguaaaaagggaauuaug

SEQ ID NO: 2683524 - RNA, 20 nt, Human
ggugggaggaucucuugagc

SEQ ID NO: 2683525 - RNA, 13 nt, Human
ggugggcucugug

SEQ ID NO: 2683526 - RNA, 16 nt, Human
ggugggcucugugcag

SEQ ID NO: 2683527 - RNA, 11 nt, Human
ggugggacccc

SEQ ID NO: 2683528 - RNA, 20 nt, Human
ggugggacccccguggggca

SEQ ID NO: 2683529 - RNA, 23 nt, Human
aaagggcccacagugacuuuugc

SEQ ID NO: 2683530 - RNA, 16 nt, Human
aaaggggagagccugc

SEQ ID NO: 2683531 - RNA, 19 nt, Human
aaaggggagagccugcugg

SEQ ID NO: 2683532 - RNA, 14 nt, Human
aaaggggagagccu

SEQ ID NO: 2683533 - RNA, 19 nt, Human
aaagguggauuuuguuuaa

SEQ ID NO: 2683534 - RNA, 18 nt, Human
aaagguggugaggcaaua

SEQ ID NO: 2683535 - RNA, 23 nt, Human
aaaggggucggcugaccaugcuc

SEQ ID NO: 2683536 - RNA, 24 nt, Human
aaaggggucggcugaccaugcuca

SEQ ID NO: 2683537 - RNA, 23 nt, Human
aaaggugaguuugagcugccuuc

SEQ ID NO: 2683538 - RNA, 21 nt, Human
aaaggugaguuugagcugccu

SEQ ID NO: 2683539 - RNA, 22 nt, Human
aaaggugaguuugagcugccuu

SEQ ID NO: 2683540 - RNA, 20 nt, Human
aaaggugaguuugagcugcc

SEQ ID NO: 2683541 - RNA, 13 nt, Human
aaagcugagccug

SEQ ID NO: 2683542 - RNA, 15 nt, Human
aaagcugagccugca

SEQ ID NO: 2683543 - RNA, 14 nt, Human
aaagcuguuccuug

SEQ ID NO: 2683544 - RNA, 15 nt, Human
aaagcaguauuuuuc

SEQ ID NO: 2683545 - RNA, 16 nt, Human
aaagcaguauuuuucu

SEQ ID NO: 2683546 - RNA, 12 nt, Human
gguaucauauau

SEQ ID NO: 2683547 - RNA, 20 nt, Human
gguggcaccagcagccugga

SEQ ID NO: 2683548 - RNA, 14 nt, Human
gguggcaccagcag

SEQ ID NO: 2683549 - RNA, 18 nt, Human
ggugcuggagcacugggc

SEQ ID NO: 2683550 - RNA, 22 nt, Human
ggugcuggagcacugggcuccc

SEQ ID NO: 2683551 - RNA, 20 nt, Human
ggugcuggagcacugggcuc

SEQ ID NO: 2683552 - RNA, 13 nt, Human
guaauaagcacug

SEQ ID NO: 2683553 - RNA, 20 nt, Human
guaauaagcacuguaaacuu

SEQ ID NO: 2683554 - RNA, 21 nt, Human
guaauaagcacuguaaacuuc

SEQ ID NO: 2683555 - RNA, 17 nt, Human
guaauacuuccagaagu

SEQ ID NO: 2683556 - RNA, 13 nt, Human
guaauaauagacu

SEQ ID NO: 2683557 - RNA, 16 nt, Human
guaauaauagacugua

SEQ ID NO: 2683558 - RNA, 13 nt, Human
guaauauuuauua

SEQ ID NO: 2683559 - RNA, 15 nt, Human
guaauauuuauuaaa

SEQ ID NO: 2683560 - RNA, 14 nt, Human
guaauauuuauuaa

SEQ ID NO: 2683561 - RNA, 21 nt, Human
guaauauuuauuaaauuuuuu

SEQ ID NO: 2683562 - RNA, 18 nt, Human
guaauauuuauuaaauuu

SEQ ID NO: 2683563 - RNA, 17 nt, Human
guaauauuuauuaaauu

SEQ ID NO: 2683564 - RNA, 16 nt, Human
guaauauuuauuaaau

SEQ ID NO: 2683565 - RNA, 16 nt, Human
guaaguuaucuuugaa

SEQ ID NO: 2683566 - RNA, 12 nt, Human
guacaaaauuaa

SEQ ID NO: 2683567 - RNA, 14 nt, Human
guacaaaauuaagc

SEQ ID NO: 2683568 - RNA, 14 nt, Human
guacaacggaggcc

SEQ ID NO: 2683569 - RNA, 15 nt, Human
guacaacggaggccu

SEQ ID NO: 2683570 - RNA, 23 nt, Human
guacaacggaggccugcgacccu

SEQ ID NO: 2683571 - RNA, 22 nt, Human
guacaaguaguucuguauuuga

SEQ ID NO: 2683572 - RNA, 21 nt, Human
guacaaguaguucuguauuug

SEQ ID NO: 2683573 - RNA, 17 nt, Human
guacaaguaguucugua

SEQ ID NO: 2683574 - RNA, 16 nt, Human
guacaaguaguucugu

SEQ ID NO: 2683575 - RNA, 15 nt, Human
guacaaguaguucug

SEQ ID NO: 2683576 - RNA, 14 nt, Human
guacaaguaguucu

SEQ ID NO: 2683577 - RNA, 13 nt, Human
guacaaguaguuc

SEQ ID NO: 2683578 - RNA, 23 nt, Human
guaauccuagcacuuugggaggc

SEQ ID NO: 2683579 - RNA, 18 nt, Human
guaaucccugcuuuuugu

SEQ ID NO: 2683580 - RNA, 17 nt, Human
guaauccccuaaaauaa

SEQ ID NO: 2683581 - RNA, 20 nt, Human
guaauccccuaaaauaacag

SEQ ID NO: 2683582 - RNA, 13 nt, Human
guaaucccugcuu

SEQ ID NO: 2683583 - RNA, 15 nt, Human
guaaucaucuaaguc

SEQ ID NO: 2683584 - RNA, 16 nt, Human
guaaucaucuaaguca

SEQ ID NO: 2683585 - RNA, 13 nt, Human
aaauaauucuuuu

SEQ ID NO: 2683586 - RNA, 21 nt, Human
aaauaauucuuuuuuauuaau

SEQ ID NO: 2683587 - RNA, 19 nt, Human
aaauaauucuuuuuuauua

SEQ ID NO: 2683588 - RNA, 18 nt, Human
aaauaauucuuuuuuauu

SEQ ID NO: 2683589 - RNA, 14 nt, Human
aaauaauucuuuuu

SEQ ID NO: 2683590 - RNA, 21 nt, Human
aaauaauuauauaacuguauu

SEQ ID NO: 2683591 - RNA, 22 nt, Human
aaauaauuauauaacuguauuu

SEQ ID NO: 2683592 - RNA, 23 nt, Human
aaauaauuauauaacuguauuug

SEQ ID NO: 2683593 - RNA, 17 nt, Human
aaagugggcuuaaugga

SEQ ID NO: 2683594 - RNA, 23 nt, Human
aaagugucagaaggagcuacaaa

SEQ ID NO: 2683595 - RNA, 17 nt, Human
aaaguuaaaauuguuau

SEQ ID NO: 2683596 - RNA, 16 nt, Human
aaaguuaaacauugaa

SEQ ID NO: 2683597 - RNA, 22 nt, Human
aaaguuaaacauugaaguaaug

SEQ ID NO: 2683598 - RNA, 22 nt, Human
guaaaguauguauuauuuacau

SEQ ID NO: 2683599 - RNA, 23 nt, Human
guaaaguauguauuauuuacauu

SEQ ID NO: 2683600 - RNA, 15 nt, Human
guaaaguauguauua

SEQ ID NO: 2683601 - RNA, 17 nt, Human
guaaaguauguauuauu

SEQ ID NO: 2683602 - RNA, 18 nt, Human
guaaauuuuguaugaaaa

SEQ ID NO: 2683603 - RNA, 20 nt, Human
guaaagcuauuuaugggccc

SEQ ID NO: 2683604 - RNA, 23 nt, Human
guaaagcuauuuaugggccccug

SEQ ID NO: 2683605 - RNA, 12 nt, Human
guaaagcuccua

SEQ ID NO: 2683606 - RNA, 21 nt, Human
guaaagcccauuuuuaaaaua

SEQ ID NO: 2683607 - RNA, 15 nt, Human
guaaacaaaaugaag

SEQ ID NO: 2683608 - RNA, 22 nt, Human
guaaacgggaacaugcccccug

SEQ ID NO: 2683609 - RNA, 19 nt, Human
guaaacucaucugaaaugu

SEQ ID NO: 2683610 - RNA, 13 nt, Human
guaacauucaugu

SEQ ID NO: 2683611 - RNA, 17 nt, Human
guaacauucauguucua

SEQ ID NO: 2683612 - RNA, 23 nt, Human
aaauaucaaauuaauugugugaa

SEQ ID NO: 2683613 - RNA, 13 nt, Human
aaauaucauugua

SEQ ID NO: 2683614 - RNA, 20 nt, Human
aaauaucaaauuaauugugu

SEQ ID NO: 2683615 - RNA, 16 nt, Human
aaauaucaaauuaauu

SEQ ID NO: 2683616 - RNA, 13 nt, Human
aaauaucaaauua

SEQ ID NO: 2683617 - RNA, 12 nt, Human
aaauaucaaauu

SEQ ID NO: 2683618 - RNA, 12 nt, Human
aaauaucaaagu

SEQ ID NO: 2683619 - RNA, 14 nt, Human
aaauaucaaaguca

SEQ ID NO: 2683620 - RNA, 21 nt, Human
aaauaucaaagucauuaaaga

SEQ ID NO: 2683621 - RNA, 22 nt, Human
aaauaucaaagucauuaaagac

SEQ ID NO: 2683622 - RNA, 22 nt, Human
aaauauauaucuaucuauuuga

SEQ ID NO: 2683623 - RNA, 20 nt, Human
aaauauauucuuucaaagga

SEQ ID NO: 2683624 - RNA, 17 nt, Human
aaauauaucuuauaaag

SEQ ID NO: 2683625 - RNA, 12 nt, Human
aaauaccauuua

SEQ ID NO: 2683626 - RNA, 22 nt, Human
aaauaccauuuaguaagaauac

SEQ ID NO: 2683627 - RNA, 13 nt, Human
aaauauauacauu

SEQ ID NO: 2683628 - RNA, 14 nt, Human
aaauaucuuggccu

SEQ ID NO: 2683629 - RNA, 16 nt, Human
aaauauuccuuugcau

SEQ ID NO: 2683630 - RNA, 19 nt, Human
aaauauuccuuugcauauu

SEQ ID NO: 2683631 - RNA, 23 nt, Human
aaaucagccugcuccagcuguuc

SEQ ID NO: 2683632 - RNA, 19 nt, Human
aaaucauaguuaaauguua

SEQ ID NO: 2683633 - RNA, 21 nt, Human
aaaucagccugcuccagcugu

SEQ ID NO: 2683634 - RNA, 19 nt, Human
aaaucagccugcuccagcu

SEQ ID NO: 2683635 - RNA, 13 nt, Human
aaauauguuuuua

SEQ ID NO: 2683636 - RNA, 16 nt, Human
ggggucccuagcagcc

SEQ ID NO: 2683637 - RNA, 22 nt, Human
ggggucccuagcagcccacccu

SEQ ID NO: 2683638 - RNA, 21 nt, Human
ggguccugaggccugcagcac

SEQ ID NO: 2683639 - RNA, 22 nt, Human
aaaccuuaucuccacaaccucu

SEQ ID NO: 2683640 - RNA, 18 nt, Human
aaaccugggauucaggaa

SEQ ID NO: 2683641 - RNA, 21 nt, Human
aaaccugggauucaggaaugu

SEQ ID NO: 2683642 - RNA, 22 nt, Human
aaaccacuuaaacgaagaguuc

SEQ ID NO: 2683643 - RNA, 12 nt, Human
aaacauuugcug

SEQ ID NO: 2683644 - RNA, 15 nt, Human
aaaccacuagaaagu

SEQ ID NO: 2683645 - RNA, 12 nt, Human
ggggcccagugc

SEQ ID NO: 2683646 - RNA, 14 nt, Human
ggggcccagugcau

SEQ ID NO: 2683647 - RNA, 19 nt, Human
ggggcccagggcaagcucc

SEQ ID NO: 2683648 - RNA, 21 nt, Human
ggggccauuugcaauaacagc

SEQ ID NO: 2683649 - RNA, 17 nt, Human
aaaaugucuguaauaau

SEQ ID NO: 2683650 - RNA, 18 nt, Human
aaaaugucuguaauaaua

SEQ ID NO: 2683651 - RNA, 12 nt, Human
aaaaugucugua

SEQ ID NO: 2683652 - RNA, 23 nt, Human
aaaauguccaguaagaucacugu

SEQ ID NO: 2683653 - RNA, 11 nt, Human
aaaaugucugu

SEQ ID NO: 2683654 - RNA, 23 nt, Human
aaaaugucaaaaguagaacuuug

SEQ ID NO: 2683655 - RNA, 22 nt, Human
aaaaugucaaaaguagaacuuu

SEQ ID NO: 2683656 - RNA, 21 nt, Human
aaaaugucaaaaguagaacuu

SEQ ID NO: 2683657 - RNA, 15 nt, Human
aaaaugucaaaagua

SEQ ID NO: 2683658 - RNA, 14 nt, Human
aaaaugucaaaagu

SEQ ID NO: 2683659 - RNA, 23 nt, Human
ggggguggccgcugaguggcagg

SEQ ID NO: 2683660 - RNA, 13 nt, Human
ggggguggccgcu

SEQ ID NO: 2683661 - RNA, 14 nt, Human
gggggcaggugcug

SEQ ID NO: 2683662 - RNA, 15 nt, Human
gggggcacaggaggc

SEQ ID NO: 2683663 - RNA, 17 nt, Human
gggggaucacagccucu

SEQ ID NO: 2683664 - RNA, 14 nt, Human
aaacuguuugaaaa

SEQ ID NO: 2683665 - RNA, 23 nt, Human
aaacuguuugaaaacuucagaag

SEQ ID NO: 2683666 - RNA, 21 nt, Human
aaacuuaaauguuauuaucug

SEQ ID NO: 2683667 - RNA, 16 nt, Human
aaacuuaaauguuauu

SEQ ID NO: 2683668 - RNA, 17 nt, Human
aaacuuaaauguuauua

SEQ ID NO: 2683669 - RNA, 16 nt, Human
aaacuaaagcaauaga

SEQ ID NO: 2683670 - RNA, 17 nt, Human
aaacuaaagcaauagaa

SEQ ID NO: 2683671 - RNA, 20 nt, Human
aaacuaaagcaauagaaaca

SEQ ID NO: 2683672 - RNA, 22 nt, Human
aaacgcuaaagagcccuugccu

SEQ ID NO: 2683673 - RNA, 16 nt, Human
aaacgugguuacauua

SEQ ID NO: 2683674 - RNA, 12 nt, Human
aaacuucagaag

SEQ ID NO: 2683675 - RNA, 20 nt, Human
aaacuucagaagcaaacaau

SEQ ID NO: 2683676 - RNA, 13 nt, Human
ggguuuuguaaug

SEQ ID NO: 2683677 - RNA, 19 nt, Human
ggguguccccgcugcugug

SEQ ID NO: 2683678 - RNA, 12 nt, Human
gguaaauguuuc

SEQ ID NO: 2683679 - RNA, 13 nt, Human
gguaaauguuucu

SEQ ID NO: 2683680 - RNA, 16 nt, Human
gguaaauguuucuuuu

SEQ ID NO: 2683681 - RNA, 21 nt, Human
gguaaauguuucuuuuaaaga

SEQ ID NO: 2683682 - RNA, 13 nt, Human
gguaaaaugaaga

SEQ ID NO: 2683683 - RNA, 20 nt, Human
gguaaaaugaagaauuuaaa

SEQ ID NO: 2683684 - RNA, 14 nt, Human
gguaaaaugaagaa

SEQ ID NO: 2683685 - RNA, 12 nt, Human
gguaaaaugaag

SEQ ID NO: 2683686 - RNA, 19 nt, Human
gguaaaacucacugugauc

SEQ ID NO: 2683687 - RNA, 18 nt, Human
gguaaaaaguauuuuuuc

SEQ ID NO: 2683688 - RNA, 15 nt, Human
gguaaagacuggcuu

SEQ ID NO: 2683689 - RNA, 16 nt, Human
gguaaagacuggcuuu

SEQ ID NO: 2683690 - RNA, 15 nt, Human
gguaaauaaaccacu

SEQ ID NO: 2683691 - RNA, 20 nt, Human
gguaaauaaaccacugugcg

SEQ ID NO: 2683692 - RNA, 18 nt, Human
gguagguucagccaaggu

SEQ ID NO: 2683693 - RNA, 19 nt, Human
gguagguucagccaagguu

SEQ ID NO: 2683694 - RNA, 13 nt, Human
gguauauauacau

SEQ ID NO: 2683695 - RNA, 15 nt, Human
gguagguucagccaa

SEQ ID NO: 2683696 - RNA, 16 nt, Human
gguagguucagccaag

SEQ ID NO: 2683697 - RNA, 17 nt, Human
gguagguucagccaagg

SEQ ID NO: 2683698 - RNA, 17 nt, Human
gguaggagggugggaag

SEQ ID NO: 2683699 - RNA, 19 nt, Human
gguaagaauaguagaugug

SEQ ID NO: 2683700 - RNA, 12 nt, Human
gguaacuguccu

SEQ ID NO: 2683701 - RNA, 13 nt, Human
gguaacuguccug

SEQ ID NO: 2683702 - RNA, 14 nt, Human
gguaacuguccugu

SEQ ID NO: 2683703 - RNA, 16 nt, Human
gguaacuguccugucc

SEQ ID NO: 2683704 - RNA, 17 nt, Human
gguaacuguccuguccu

SEQ ID NO: 2683705 - RNA, 21 nt, Human
ggucaguaguuuaaaaguucu

SEQ ID NO: 2683706 - RNA, 18 nt, Human
gguauccccccaucuugc

SEQ ID NO: 2683707 - RNA, 18 nt, Human
gguccagcuggccuggac

SEQ ID NO: 2683708 - RNA, 20 nt, Human
gguccagcuggccuggacag

SEQ ID NO: 2683709 - RNA, 22 nt, Human
gguccagcucuggaggggaggg

SEQ ID NO: 2683710 - RNA, 13 nt, Human
gguccagcuggcc

SEQ ID NO: 2683711 - RNA, 15 nt, Human
gguccagcuggccug

SEQ ID NO: 2683712 - RNA, 11 nt, Human
gguccagcucu

SEQ ID NO: 2683713 - RNA, 12 nt, Human
gguccagcucug

SEQ ID NO: 2683714 - RNA, 13 nt, Human
gguccagcucugg

SEQ ID NO: 2683715 - RNA, 14 nt, Human
gguccagcucugga

SEQ ID NO: 2683716 - RNA, 15 nt, Human
gguccagcucuggag

SEQ ID NO: 2683717 - RNA, 16 nt, Human
gguccagcucuggagg

SEQ ID NO: 2683718 - RNA, 12 nt, Human
aaaauacaugaa

SEQ ID NO: 2683719 - RNA, 13 nt, Human
aaaauacaugaag

SEQ ID NO: 2683720 - RNA, 15 nt, Human
aaaauacaugaagcu

SEQ ID NO: 2683721 - RNA, 13 nt, Human
aaaauaacaguau

SEQ ID NO: 2683722 - RNA, 16 nt, Human
aaaauacauagugaaa

SEQ ID NO: 2683723 - RNA, 12 nt, Human
aaaauacauugu

SEQ ID NO: 2683724 - RNA, 20 nt, Human
aaaauaauuauauaacugua

SEQ ID NO: 2683725 - RNA, 16 nt, Human
aaaauaauaaaaaaag

SEQ ID NO: 2683726 - RNA, 13 nt, Human
aaaauaauaauaa

SEQ ID NO: 2683727 - RNA, 14 nt, Human
aaaagguauuauac

SEQ ID NO: 2683728 - RNA, 20 nt, Human
aaaauaacccuuugguuuuu

SEQ ID NO: 2683729 - RNA, 15 nt, Human
aaaaggucuuuaaaa

SEQ ID NO: 2683730 - RNA, 14 nt, Human
aaaaggaguauaca

SEQ ID NO: 2683731 - RNA, 15 nt, Human
aaaaggaguauacaa

SEQ ID NO: 2683732 - RNA, 11 nt, Human
aaaaggcagga

SEQ ID NO: 2683733 - RNA, 15 nt, Human
aaaaggccucuugua

SEQ ID NO: 2683734 - RNA, 21 nt, Human
aaaaggccucuuguaaagacu

SEQ ID NO: 2683735 - RNA, 22 nt, Human
aaaaggccucuuguaaagacug

SEQ ID NO: 2683736 - RNA, 23 nt, Human
aaaaggccucuuguaaagacugg

SEQ ID NO: 2683737 - RNA, 12 nt, Human
aaaauauuuuga

SEQ ID NO: 2683738 - RNA, 13 nt, Human
aaaauauuuucuc

SEQ ID NO: 2683739 - RNA, 23 nt, Human
aaaauauuuucucuguacuuuuc

SEQ ID NO: 2683740 - RNA, 16 nt, Human
aaaauauuuuccugcc

SEQ ID NO: 2683741 - RNA, 19 nt, Human
aaaauauuguuuuacaaua

SEQ ID NO: 2683742 - RNA, 11 nt, Human
aaaauauuguu

SEQ ID NO: 2683743 - RNA, 14 nt, Human
aaaauauuguuucu

SEQ ID NO: 2683744 - RNA, 15 nt, Human
aaaauauuguuucug

SEQ ID NO: 2683745 - RNA, 16 nt, Human
aaaauauuguuucugc

SEQ ID NO: 2683746 - RNA, 22 nt, Human
aaaauauuguuucugcauucau

SEQ ID NO: 2683747 - RNA, 23 nt, Human
aaaauauuguuucugcauucauu

SEQ ID NO: 2683748 - RNA, 20 nt, Human
aaaauauuguuuuacaauag

SEQ ID NO: 2683749 - RNA, 17 nt, Human
aaaauagaaauuuugua

SEQ ID NO: 2683750 - RNA, 20 nt, Human
aaaauagaaauuuuguaaga

SEQ ID NO: 2683751 - RNA, 21 nt, Human
aaaauagaaauuuuguaagaa

SEQ ID NO: 2683752 - RNA, 11 nt, Human
aaaauagaaac

SEQ ID NO: 2683753 - RNA, 12 nt, Human
aaaauagaaaca

SEQ ID NO: 2683754 - RNA, 13 nt, Human
aaaauagaaacau

SEQ ID NO: 2683755 - RNA, 15 nt, Human
aaaauagaaacauau

SEQ ID NO: 2683756 - RNA, 13 nt, Human
aaaauaucaaauu

SEQ ID NO: 2683757 - RNA, 20 nt, Human
aaaauagaguguaguuuaca

SEQ ID NO: 2683758 - RNA, 18 nt, Human
aaaauauauuuauaagga

SEQ ID NO: 2683759 - RNA, 12 nt, Human
aaaauaucuugg

SEQ ID NO: 2683760 - RNA, 13 nt, Human
aaaauauuuugaa

SEQ ID NO: 2683761 - RNA, 14 nt, Human
aaaauauuuggaau

SEQ ID NO: 2683762 - RNA, 16 nt, Human
aaaaucugagggaaau

SEQ ID NO: 2683763 - RNA, 21 nt, Human
aaaaucugagggaaauguuuu

SEQ ID NO: 2683764 - RNA, 11 nt, Human
gggcucccagg

SEQ ID NO: 2683765 - RNA, 15 nt, Human
aaaauggucucuaac

SEQ ID NO: 2683766 - RNA, 12 nt, Human
gggcugcuuccu

SEQ ID NO: 2683767 - RNA, 22 nt, Human
gggcugcggcguacaggcuggc

SEQ ID NO: 2683768 - RNA, 20 nt, Human
gggcugcggcguacaggcug

SEQ ID NO: 2683769 - RNA, 13 nt, Human
gggcucccagggg

SEQ ID NO: 2683770 - RNA, 14 nt, Human
gggcucccaggggu

SEQ ID NO: 2683771 - RNA, 22 nt, Human
gggcucccaggggucucccugg

SEQ ID NO: 2683772 - RNA, 23 nt, Human
gggcucccaggggucucccuggc

SEQ ID NO: 2683773 - RNA, 15 nt, Human
gggcucccgggcccc

SEQ ID NO: 2683774 - RNA, 22 nt, Human
gggcucagcaaaagaugcuucu

SEQ ID NO: 2683775 - RNA, 14 nt, Human
gggcuagggagacg

SEQ ID NO: 2683776 - RNA, 20 nt, Human
gggccgggcgcgguggcuca

SEQ ID NO: 2683777 - RNA, 12 nt, Human
gggccggcccug

SEQ ID NO: 2683778 - RNA, 19 nt, Human
gggccggcccugugugcag

SEQ ID NO: 2683779 - RNA, 17 nt, Human
gggccgccgccucuuuc

SEQ ID NO: 2683780 - RNA, 20 nt, Human
gggccgcguggugccauccc

SEQ ID NO: 2683781 - RNA, 23 nt, Human
gggccgcguggugccauccccag

SEQ ID NO: 2683782 - RNA, 12 nt, Human
gggccgcugcca

SEQ ID NO: 2683783 - RNA, 22 nt, Human
gggccauguccaaagaggcugc

SEQ ID NO: 2683784 - RNA, 23 nt, Human
gggccauguccaaagaggcugcc

SEQ ID NO: 2683785 - RNA, 23 nt, Human
gggccaugcugaggccugggccg

SEQ ID NO: 2683786 - RNA, 13 nt, Human
gggccauggcuca

SEQ ID NO: 2683787 - RNA, 15 nt, Human
gggccauggcucagg

SEQ ID NO: 2683788 - RNA, 19 nt, Human
gggccauggcucagggugg

SEQ ID NO: 2683789 - RNA, 21 nt, Human
gggccaugcugaggccugggc

SEQ ID NO: 2683790 - RNA, 14 nt, Human
gggccauguccaaa

SEQ ID NO: 2683791 - RNA, 15 nt, Human
gggccauguccaaag

SEQ ID NO: 2683792 - RNA, 16 nt, Human
gggccauguccaaaga

SEQ ID NO: 2683793 - RNA, 17 nt, Human
gggccauguccaaagag

SEQ ID NO: 2683794 - RNA, 21 nt, Human
gggccauguccaaagaggcug

SEQ ID NO: 2683795 - RNA, 13 nt, Human
aaaauggaaauuu

SEQ ID NO: 2683796 - RNA, 22 nt, Human
gggccacugguccccaacaaug

SEQ ID NO: 2683797 - RNA, 19 nt, Human
gggccaugcugaggccugg

SEQ ID NO: 2683798 - RNA, 20 nt, Human
gggccaugcugaggccuggg

SEQ ID NO: 2683799 - RNA, 14 nt, Human
gggccauuugcaau

SEQ ID NO: 2683800 - RNA, 16 nt, Human
gggccugcccagacaa

SEQ ID NO: 2683801 - RNA, 13 nt, Human
gggcguggaggga

SEQ ID NO: 2683802 - RNA, 15 nt, Human
gggcguggagggagg

SEQ ID NO: 2683803 - RNA, 21 nt, Human
gggcguggagggaggccccag

SEQ ID NO: 2683804 - RNA, 22 nt, Human
gggccucgguguggagaagcgg

SEQ ID NO: 2683805 - RNA, 15 nt, Human
ggcaucuaucugugc

SEQ ID NO: 2683806 - RNA, 16 nt, Human
ggcaucuaucugugcu

SEQ ID NO: 2683807 - RNA, 18 nt, Human
ggcaucuaucugugcuag

SEQ ID NO: 2683808 - RNA, 14 nt, Human
ggcauuugcugaau

SEQ ID NO: 2683809 - RNA, 13 nt, Human
ggcaucaugcaug

SEQ ID NO: 2683810 - RNA, 18 nt, Human
ggcaucgcaccauucuga

SEQ ID NO: 2683811 - RNA, 21 nt, Human
ggcaucgcaccauucugacuc

SEQ ID NO: 2683812 - RNA, 21 nt, Human
ggccagagagccuggugcugc

SEQ ID NO: 2683813 - RNA, 18 nt, Human
ggccagagagccuggugc

SEQ ID NO: 2683814 - RNA, 19 nt, Human
ggccagaggcccccagccc

SEQ ID NO: 2683815 - RNA, 21 nt, Human
ggccagaggcccccagcccag

SEQ ID NO: 2683816 - RNA, 15 nt, Human
ggccaagaagcagug

SEQ ID NO: 2683817 - RNA, 17 nt, Human
ggccaagaauauugcaa

SEQ ID NO: 2683818 - RNA, 22 nt, Human
ggccaagaauauugcaaaauac

SEQ ID NO: 2683819 - RNA, 21 nt, Human
ggccaagaauguacguccagc

SEQ ID NO: 2683820 - RNA, 13 nt, Human
ggcaggggugggg

SEQ ID NO: 2683821 - RNA, 14 nt, Human
ggcagggguggggg

SEQ ID NO: 2683822 - RNA, 16 nt, Human
ggcaggggcuggaggg

SEQ ID NO: 2683823 - RNA, 16 nt, Human
ggauuuuuagaauuaa

SEQ ID NO: 2683824 - RNA, 12 nt, Human
ggcaaaacucua

SEQ ID NO: 2683825 - RNA, 15 nt, Human
ggcaaaaaggcagga

SEQ ID NO: 2683826 - RNA, 18 nt, Human
ggcacauugagcugugca

SEQ ID NO: 2683827 - RNA, 14 nt, Human
ggcaggggccugga

SEQ ID NO: 2683828 - RNA, 16 nt, Human
ggcaggggccuggaga

SEQ ID NO: 2683829 - RNA, 17 nt, Human
ggcaggggccuggagau

SEQ ID NO: 2683830 - RNA, 17 nt, Human
ggcagggagcugggccc

SEQ ID NO: 2683831 - RNA, 14 nt, Human
ggcagggaggcagc

SEQ ID NO: 2683832 - RNA, 15 nt, Human
ggcagggaggcagcc

SEQ ID NO: 2683833 - RNA, 16 nt, Human
ggcagggaggcagccg

SEQ ID NO: 2683834 - RNA, 14 nt, Human
ggcaggcugggcca

SEQ ID NO: 2683835 - RNA, 15 nt, Human
ggcaggcugggccau

SEQ ID NO: 2683836 - RNA, 16 nt, Human
ggcaggcugggccaug

SEQ ID NO: 2683837 - RNA, 22 nt, Human
ggcaggcugggccauguccaaa

SEQ ID NO: 2683838 - RNA, 18 nt, Human
ggcaggaggaucacuuga

SEQ ID NO: 2683839 - RNA, 15 nt, Human
ggcagcccagagacu

SEQ ID NO: 2683840 - RNA, 21 nt, Human
ggcagcccagagacuuuguag

SEQ ID NO: 2683841 - RNA, 22 nt, Human
ggcagcccagagacuuuguaga

SEQ ID NO: 2683842 - RNA, 18 nt, Human
ggcagccccagccugcua

SEQ ID NO: 2683843 - RNA, 17 nt, Human
ggcagccccagccugcu

SEQ ID NO: 2683844 - RNA, 19 nt, Human
ggcagccccagccugcuag

SEQ ID NO: 2683845 - RNA, 12 nt, Human
ggcagccucugu

SEQ ID NO: 2683846 - RNA, 20 nt, Human
ggcagccucugucaggccuu

SEQ ID NO: 2683847 - RNA, 16 nt, Human
ggcagccccagccugc

SEQ ID NO: 2683848 - RNA, 15 nt, Human
ggcagccccagccug

SEQ ID NO: 2683849 - RNA, 14 nt, Human
ggcagccccagccu

SEQ ID NO: 2683850 - RNA, 13 nt, Human
ggcagccccagcc

SEQ ID NO: 2683851 - RNA, 22 nt, Human
ggaucucagcuuugagaagccu

SEQ ID NO: 2683852 - RNA, 16 nt, Human
ggaucucagcuuugag

SEQ ID NO: 2683853 - RNA, 17 nt, Human
ggaucucagcuuugaga

SEQ ID NO: 2683854 - RNA, 15 nt, Human
ggaucucagcuuuga

SEQ ID NO: 2683855 - RNA, 18 nt, Human
ggaucuaccagcauaaau

SEQ ID NO: 2683856 - RNA, 13 nt, Human
ggaucuaccagca

SEQ ID NO: 2683857 - RNA, 12 nt, Human
ggaucuaccagc

SEQ ID NO: 2683858 - RNA, 18 nt, Human
ggaucucuugagccuggg

SEQ ID NO: 2683859 - RNA, 20 nt, Human
ggaguguaugacugcacaug

SEQ ID NO: 2683860 - RNA, 18 nt, Human
ggaguggugauuugaaaa

SEQ ID NO: 2683861 - RNA, 18 nt, Human
ggagugucuggaauugug

SEQ ID NO: 2683862 - RNA, 19 nt, Human
ggagugugagccaccuaag

SEQ ID NO: 2683863 - RNA, 13 nt, Human
ggagggugggaag

SEQ ID NO: 2683864 - RNA, 14 nt, Human
ggagggugggaagg

SEQ ID NO: 2683865 - RNA, 15 nt, Human
ggaggcuuccugcgu

SEQ ID NO: 2683866 - RNA, 18 nt, Human
ggagggggcuugaagcca

SEQ ID NO: 2683867 - RNA, 21 nt, Human
ggagggggcuugaagccaaag

SEQ ID NO: 2683868 - RNA, 16 nt, Human
ggagggggcuugaagc

SEQ ID NO: 2683869 - RNA, 14 nt, Human
ggagggggauccga

SEQ ID NO: 2683870 - RNA, 20 nt, Human
ggaggcgggggcugcccuug

SEQ ID NO: 2683871 - RNA, 20 nt, Human
ggaggcggagcuugcaguga

SEQ ID NO: 2683872 - RNA, 22 nt, Human
ggaggcuccugccugagcuucc

SEQ ID NO: 2683873 - RNA, 16 nt, Human
ggcuggccaguccagg

SEQ ID NO: 2683874 - RNA, 20 nt, Human
ggcuggccaguccaggcugc

SEQ ID NO: 2683875 - RNA, 21 nt, Human
ggcuggccaguccaggcugcc

SEQ ID NO: 2683876 - RNA, 16 nt, Human
ggcugcccuugggcca

SEQ ID NO: 2683877 - RNA, 18 nt, Human
ggcugcccuugggccacc

SEQ ID NO: 2683878 - RNA, 16 nt, Human
ggcugccguggggccg

SEQ ID NO: 2683879 - RNA, 23 nt, Human
ggcugccguggggccgccgccuc

SEQ ID NO: 2683880 - RNA, 15 nt, Human
ggcugccccucucac

SEQ ID NO: 2683881 - RNA, 15 nt, Human
ggcugaccaugcuca

SEQ ID NO: 2683882 - RNA, 13 nt, Human
ggcugaaaacaau

SEQ ID NO: 2683883 - RNA, 13 nt, Human
ggcucguggacug

SEQ ID NO: 2683884 - RNA, 19 nt, Human
ggcucguggacugaguggg

SEQ ID NO: 2683885 - RNA, 23 nt, Human
ggcucguggacugagugggaagc

SEQ ID NO: 2683886 - RNA, 15 nt, Human
ggcucccuccuccag

SEQ ID NO: 2683887 - RNA, 16 nt, Human
ggcucccuccuccagg

SEQ ID NO: 2683888 - RNA, 20 nt, Human
ggcucccuccuccaggccug

SEQ ID NO: 2683889 - RNA, 11 nt, Human
aaaaaaaccac

SEQ ID NO: 2683890 - RNA, 12 nt, Human
aaaaaaauaaua

SEQ ID NO: 2683891 - RNA, 22 nt, Human
aaaaaacugcugacuguuuucu

SEQ ID NO: 2683892 - RNA, 10 nt, Human
aaaaaacuac

SEQ ID NO: 2683893 - RNA, 20 nt, Human
aaaaauaaaauaauuauaaa

SEQ ID NO: 2683894 - RNA, 16 nt, Human
aaaaauaauaauaaug

SEQ ID NO: 2683895 - RNA, 18 nt, Human
aaaaauacuauuuaagau

SEQ ID NO: 2683896 - RNA, 20 nt, Human
ggcugguacaacggaggccu

SEQ ID NO: 2683897 - RNA, 11 nt, Human
aaaaauagaaa

SEQ ID NO: 2683898 - RNA, 12 nt, Human
aaaaauagaaac

SEQ ID NO: 2683899 - RNA, 13 nt, Human
aaaaauagaaaca

SEQ ID NO: 2683900 - RNA, 15 nt, Human
aaaaauagaaacaua

SEQ ID NO: 2683901 - RNA, 16 nt, Human
aaaaauagaaacauau

SEQ ID NO: 2683902 - RNA, 14 nt, Human
aaaaaggaggaaga

SEQ ID NO: 2683903 - RNA, 12 nt, Human
aaaaaggcagga

SEQ ID NO: 2683904 - RNA, 22 nt, Human
ggcuggccaguccaggcugccg

SEQ ID NO: 2683905 - RNA, 14 nt, Human
ggccgcuccaccag

SEQ ID NO: 2683906 - RNA, 14 nt, Human
ggccgccgccucuu

SEQ ID NO: 2683907 - RNA, 18 nt, Human
ggccgcgcguccagcugc

SEQ ID NO: 2683908 - RNA, 19 nt, Human
ggccgcgcguccagcugcc

SEQ ID NO: 2683909 - RNA, 16 nt, Human
ggccgcggagccugca

SEQ ID NO: 2683910 - RNA, 16 nt, Human
ggccgcgcccuuuccc

SEQ ID NO: 2683911 - RNA, 22 nt, Human
ggcccuagacucggggugcuuc

SEQ ID NO: 2683912 - RNA, 20 nt, Human
ggccccagcaccucagccug

SEQ ID NO: 2683913 - RNA, 15 nt, Human
ggccccagcacagcu

SEQ ID NO: 2683914 - RNA, 18 nt, Human
ggccccagcacagcuuga

SEQ ID NO: 2683915 - RNA, 17 nt, Human
ggccccagcaccucagc

SEQ ID NO: 2683916 - RNA, 13 nt, Human
ggccccagcccug

SEQ ID NO: 2683917 - RNA, 14 nt, Human
ggccccagcccugc

SEQ ID NO: 2683918 - RNA, 15 nt, Human
ggccccagcccugcu

SEQ ID NO: 2683919 - RNA, 16 nt, Human
ggccccagcccugcug

SEQ ID NO: 2683920 - RNA, 18 nt, Human
ggccccagcccugcuggg

SEQ ID NO: 2683921 - RNA, 21 nt, Human
ggccccagcccugcuggggau

SEQ ID NO: 2683922 - RNA, 22 nt, Human
ggccccagcccugcuggggauc

SEQ ID NO: 2683923 - RNA, 22 nt, Human
ggccagaggcccccagcccagg

SEQ ID NO: 2683924 - RNA, 22 nt, Human
ggcgagagucuggcccuagacu

SEQ ID NO: 2683925 - RNA, 17 nt, Human
ggccuuauugcauccca

SEQ ID NO: 2683926 - RNA, 13 nt, Human
ggccuuaauuucc

SEQ ID NO: 2683927 - RNA, 15 nt, Human
ggccuuaauuuccuu

SEQ ID NO: 2683928 - RNA, 16 nt, Human
ggccuuaauuuccuuu

SEQ ID NO: 2683929 - RNA, 17 nt, Human
ggccuuaauuuccuuuu

SEQ ID NO: 2683930 - RNA, 20 nt, Human
ggccuuaauuuccuuuuuga

SEQ ID NO: 2683931 - RNA, 19 nt, Human
ggccuggagauccuccugc

SEQ ID NO: 2683932 - RNA, 20 nt, Human
ggccuggagauccuccugca

SEQ ID NO: 2683933 - RNA, 16 nt, Human
ggccugcgacccuggg

SEQ ID NO: 2683934 - RNA, 18 nt, Human
ggccugcgacccuggggg

SEQ ID NO: 2683935 - RNA, 23 nt, Human
ggccugcgacccugggggcacag

SEQ ID NO: 2683936 - RNA, 15 nt, Human
ggccugccucccacu

SEQ ID NO: 2683937 - RNA, 14 nt, Human
ggccugcacaguga

SEQ ID NO: 2683938 - RNA, 23 nt, Human
cacuugaugauacaaugaacacu

SEQ ID NO: 2683939 - RNA, 13 nt, Human
cacuugaguccag

SEQ ID NO: 2683940 - RNA, 18 nt, Human
cacuugaggucaggaguu

SEQ ID NO: 2683941 - RNA, 14 nt, Human
cacuugaggccuga

SEQ ID NO: 2683942 - RNA, 15 nt, Human
cacuugaggccugau

SEQ ID NO: 2683943 - RNA, 16 nt, Human
cacuugaggccugauc

SEQ ID NO: 2683944 - RNA, 17 nt, Human
cacuugaggccugaucu

SEQ ID NO: 2683945 - RNA, 20 nt, Human
cacuugaggccugaucugcc

SEQ ID NO: 2683946 - RNA, 14 nt, Human
cacuugaaaccuuu

SEQ ID NO: 2683947 - RNA, 21 nt, Human
cacuugaaaccuuuuuuuauc

SEQ ID NO: 2683948 - RNA, 19 nt, Human
cacuucuaagaaaagccua

SEQ ID NO: 2683949 - RNA, 19 nt, Human
cacuugaagccaucuaaag

SEQ ID NO: 2683950 - RNA, 13 nt, Human
cacuugagagaaa

SEQ ID NO: 2683951 - RNA, 13 nt, Human
cacuugccugggu

SEQ ID NO: 2683952 - RNA, 12 nt, Human
cacuugccucuu

SEQ ID NO: 2683953 - RNA, 13 nt, Human
cacuugccucuuc

SEQ ID NO: 2683954 - RNA, 21 nt, Human
cacuugccucuuccuugaaga

SEQ ID NO: 2683955 - RNA, 12 nt, Human
cacuugccuggg

SEQ ID NO: 2683956 - RNA, 14 nt, Human
cacuugccucuucc

SEQ ID NO: 2683957 - RNA, 17 nt, Human
cacuugccucuuccuug

SEQ ID NO: 2683958 - RNA, 18 nt, Human
cacuucacuccagccugg

SEQ ID NO: 2683959 - RNA, 14 nt, Human
cacuucacccugga

SEQ ID NO: 2683960 - RNA, 13 nt, Human
cacuguugauaaa

SEQ ID NO: 2683961 - RNA, 14 nt, Human
cacuguugauaaaa

SEQ ID NO: 2683962 - RNA, 16 nt, Human
cacuguugauaaaaac

SEQ ID NO: 2683963 - RNA, 17 nt, Human
cacuguugauaaaaacu

SEQ ID NO: 2683964 - RNA, 15 nt, Human
cacuucauguaaagu

SEQ ID NO: 2683965 - RNA, 19 nt, Human
cacuucauguaaaguguca

SEQ ID NO: 2683966 - RNA, 21 nt, Human
cacuucagcugacuuuucugu

SEQ ID NO: 2683967 - RNA, 12 nt, Human
cacuucagcuga

SEQ ID NO: 2683968 - RNA, 17 nt, Human
cacuucugccagauguc

SEQ ID NO: 2683969 - RNA, 13 nt, Human
cacuucugccaga

SEQ ID NO: 2683970 - RNA, 23 nt, Human
cacuucgggaggucgaggcagga

SEQ ID NO: 2683971 - RNA, 21 nt, Human
cacuucgggaggucgaggcag

SEQ ID NO: 2683972 - RNA, 21 nt, Human
cacuucacugcgaagacccuc

SEQ ID NO: 2683973 - RNA, 15 nt, Human
cacuuccuuuuaacu

SEQ ID NO: 2683974 - RNA, 23 nt, Human
cacuucgcaccggagugucugga

SEQ ID NO: 2683975 - RNA, 14 nt, Human
cacuucccacccug

SEQ ID NO: 2683976 - RNA, 16 nt, Human
cacuucccacccugcc

SEQ ID NO: 2683977 - RNA, 14 nt, Human
cacugugcuuucag

SEQ ID NO: 2683978 - RNA, 19 nt, Human
cacugugaucaauauuuuu

SEQ ID NO: 2683979 - RNA, 21 nt, Human
cacugugaucaauauuuuuau

SEQ ID NO: 2683980 - RNA, 15 nt, Human
cacugugcacaccca

SEQ ID NO: 2683981 - RNA, 19 nt, Human
cacugugcgucuuggugua

SEQ ID NO: 2683982 - RNA, 22 nt, Human
cacugugcgucuugguguaauu

SEQ ID NO: 2683983 - RNA, 13 nt, Human
cacuguguauauu

SEQ ID NO: 2683984 - RNA, 17 nt, Human
cacuguguauauuugau

SEQ ID NO: 2683985 - RNA, 16 nt, Human
cacuguguauauuuga

SEQ ID NO: 2683986 - RNA, 15 nt, Human
cacuguguauauuug

SEQ ID NO: 2683987 - RNA, 14 nt, Human
cacuguguauauuu

SEQ ID NO: 2683988 - RNA, 21 nt, Human
cacuguguauauuugauuuau

SEQ ID NO: 2683989 - RNA, 20 nt, Human
cacuguguauauuugauuua

SEQ ID NO: 2683990 - RNA, 18 nt, Human
cacuguguauauuugauu

SEQ ID NO: 2683991 - RNA, 21 nt, Human
cacuguuccagugucuauaaa

SEQ ID NO: 2683992 - RNA, 13 nt, Human
cacugugaagaga

SEQ ID NO: 2683993 - RNA, 13 nt, Human
cacuggcgaggag

SEQ ID NO: 2683994 - RNA, 23 nt, Human
cacuggcgcaucauaugcaguga

SEQ ID NO: 2683995 - RNA, 13 nt, Human
cacugcaaccucc

SEQ ID NO: 2683996 - RNA, 14 nt, Human
cacugcaaccuccg

SEQ ID NO: 2683997 - RNA, 18 nt, Human
cacugccuucgcuucuug

SEQ ID NO: 2683998 - RNA, 19 nt, Human
cacugccuucgcuucuugc

SEQ ID NO: 2683999 - RNA, 21 nt, Human
cacugccuucgcuucuugccu

SEQ ID NO: 2684000 - RNA, 23 nt, Human
cacugccuucgcuucuugccucu

SEQ ID NO: 2684001 - RNA, 12 nt, Human
cacugccuuuuu

SEQ ID NO: 2684002 - RNA, 15 nt, Human
cacugccugggcuga

SEQ ID NO: 2684003 - RNA, 19 nt, Human
cacugccuuuuuauuuaua

SEQ ID NO: 2684004 - RNA, 20 nt, Human
cacugcgaagacccucuugc

SEQ ID NO: 2684005 - RNA, 21 nt, Human
cacugcgaagacccucuugcc

SEQ ID NO: 2684006 - RNA, 22 nt, Human
cacugcgaagacccucuugccc

SEQ ID NO: 2684007 - RNA, 11 nt, Human
cacugccuggg

SEQ ID NO: 2684008 - RNA, 12 nt, Human
cacugccugggc

SEQ ID NO: 2684009 - RNA, 13 nt, Human
cacugccugggcu

SEQ ID NO: 2684010 - RNA, 19 nt, Human
cacugccugggcugacccc

SEQ ID NO: 2684011 - RNA, 15 nt, Human
cacugccugccuuaa

SEQ ID NO: 2684012 - RNA, 14 nt, Human
cacugccugccuua

SEQ ID NO: 2684013 - RNA, 20 nt, Human
cacugccugccuuaagugag

SEQ ID NO: 2684014 - RNA, 16 nt, Human
cacugccugccuuaag

SEQ ID NO: 2684015 - RNA, 17 nt, Human
cacuggaccccagcaag

SEQ ID NO: 2684016 - RNA, 15 nt, Human
cacuggaccccagca

SEQ ID NO: 2684017 - RNA, 12 nt, Human
cacuggaaaggg

SEQ ID NO: 2684018 - RNA, 15 nt, Human
cacuggaaaggggag

SEQ ID NO: 2684019 - RNA, 16 nt, Human
cacuggaaaggggaga

SEQ ID NO: 2684020 - RNA, 18 nt, Human
cacuggaaaggggagagc

SEQ ID NO: 2684021 - RNA, 19 nt, Human
cacuggaaaggggagagcc

SEQ ID NO: 2684022 - RNA, 22 nt, Human
cacuggaaaggggagagccugc

SEQ ID NO: 2684023 - RNA, 23 nt, Human
cacuggaaaggggagagccugcu

SEQ ID NO: 2684024 - RNA, 24 nt, Human
cacuggaaaggggagagccugcug

SEQ ID NO: 2684025 - RNA, 18 nt, Human
cacuggagguugaagcca

SEQ ID NO: 2684026 - RNA, 20 nt, Human
cacuggagguugaagccaag

SEQ ID NO: 2684027 - RNA, 21 nt, Human
cacuggagguugaagccaagu

SEQ ID NO: 2684028 - RNA, 15 nt, Human
cacuggaugcagaaa

SEQ ID NO: 2684029 - RNA, 18 nt, Human
cacuggcaaugguaguuu

SEQ ID NO: 2684030 - RNA, 23 nt, Human
cacgguuucgaagucauuaaacu

SEQ ID NO: 2684031 - RNA, 21 nt, Human
cacgguuucgaagucauuaaa

SEQ ID NO: 2684032 - RNA, 22 nt, Human
cacggguggggaaaggaggugg

SEQ ID NO: 2684033 - RNA, 13 nt, Human
cacgggugguccc

SEQ ID NO: 2684034 - RNA, 14 nt, Human
cacggguggucccc

SEQ ID NO: 2684035 - RNA, 15 nt, Human
cacgggugguccccg

SEQ ID NO: 2684036 - RNA, 15 nt, Human
cacgggagauuucuu

SEQ ID NO: 2684037 - RNA, 18 nt, Human
cacgggacaucacagggu

SEQ ID NO: 2684038 - RNA, 20 nt, Human
cacgccuguaauccuagcac

SEQ ID NO: 2684039 - RNA, 19 nt, Human
cacgccuguaauccuagca

SEQ ID NO: 2684040 - RNA, 16 nt, Human
cacgccuguaauccca

SEQ ID NO: 2684041 - RNA, 17 nt, Human
cacgcgugccguggcac

SEQ ID NO: 2684042 - RNA, 14 nt, Human
cacgucaugggagg

SEQ ID NO: 2684043 - RNA, 22 nt, Human
cacuaaaaauauuguuucugca

SEQ ID NO: 2684044 - RNA, 22 nt, Human
cacguuuuaaggacugacugag

SEQ ID NO: 2684045 - RNA, 17 nt, Human
cacguuggggugauuua

SEQ ID NO: 2684046 - RNA, 20 nt, Human
cacguuggggugauuuaauc

SEQ ID NO: 2684047 - RNA, 21 nt, Human
cacguuggggugauuuaaucc

SEQ ID NO: 2684048 - RNA, 16 nt, Human
cacguuuuaaggacug

SEQ ID NO: 2684049 - RNA, 15 nt, Human
cacguuuuaaggacu

SEQ ID NO: 2684050 - RNA, 14 nt, Human
cacguuuuaaggac

SEQ ID NO: 2684051 - RNA, 13 nt, Human
cacguuuuaagga

SEQ ID NO: 2684052 - RNA, 21 nt, Human
caccuucuagucuuggccagc

SEQ ID NO: 2684053 - RNA, 21 nt, Human
cacgaagguaaaaaguauuuu

SEQ ID NO: 2684054 - RNA, 16 nt, Human
cacgacugcccggcag

SEQ ID NO: 2684055 - RNA, 23 nt, Human
cacgaauuucugugcccuccuga

SEQ ID NO: 2684056 - RNA, 16 nt, Human
cacgaauagacaucaa

SEQ ID NO: 2684057 - RNA, 17 nt, Human
cacgaauuucugugccc

SEQ ID NO: 2684058 - RNA, 17 nt, Human
cacgacugcccggcagg

SEQ ID NO: 2684059 - RNA, 22 nt, Human
caccuugaagaaccucucacuu

SEQ ID NO: 2684060 - RNA, 21 nt, Human
caccuucuauagcaucacuua

SEQ ID NO: 2684061 - RNA, 16 nt, Human
cacgagaccccggcuu

SEQ ID NO: 2684062 - RNA, 12 nt, Human
cacgagccaccu

SEQ ID NO: 2684063 - RNA, 15 nt, Human
cacgaggucaggaga

SEQ ID NO: 2684064 - RNA, 17 nt, Human
cacgaguaagauuaaga

SEQ ID NO: 2684065 - RNA, 17 nt, Human
cacgcacuucgggaggu

SEQ ID NO: 2684066 - RNA, 23 nt, Human
cacgcacuggguugcgggacaga

SEQ ID NO: 2684067 - RNA, 21 nt, Human
cacgcccgggguggccacagc

SEQ ID NO: 2684068 - RNA, 20 nt, Human
cacgcccguccugccugugg

SEQ ID NO: 2684069 - RNA, 21 nt, Human
cacgcccguccugccuguggc

SEQ ID NO: 2684070 - RNA, 14 nt, Human
cacgcccguccugc

SEQ ID NO: 2684071 - RNA, 15 nt, Human
cacgcccguccugcc

SEQ ID NO: 2684072 - RNA, 16 nt, Human
cacgcccguccugccu

SEQ ID NO: 2684073 - RNA, 19 nt, Human
cacgcccguccugccugug

SEQ ID NO: 2684074 - RNA, 19 nt, Human
cacuccugcuuaaucuuca

SEQ ID NO: 2684075 - RNA, 21 nt, Human
cacuccugcuuaaucuucaaa

SEQ ID NO: 2684076 - RNA, 13 nt, Human
cacuccucagggc

SEQ ID NO: 2684077 - RNA, 16 nt, Human
cacuccucagggcagc

SEQ ID NO: 2684078 - RNA, 14 nt, Human
cacucccuugcugg

SEQ ID NO: 2684079 - RNA, 17 nt, Human
cacucccuugcuggccc

SEQ ID NO: 2684080 - RNA, 18 nt, Human
cacucccuugcuggcccc

SEQ ID NO: 2684081 - RNA, 19 nt, Human
cacucccuugcuggcccca

SEQ ID NO: 2684082 - RNA, 20 nt, Human
cacucccuugcuggccccag

SEQ ID NO: 2684083 - RNA, 22 nt, Human
cacucccuugcuggccccagcc

SEQ ID NO: 2684084 - RNA, 19 nt, Human
cacuccgagaggugggcca

SEQ ID NO: 2684085 - RNA, 14 nt, Human
cacucggguuucuc

SEQ ID NO: 2684086 - RNA, 20 nt, Human
cacucggguuucucuguggc

SEQ ID NO: 2684087 - RNA, 21 nt, Human
cacucggguuucucuguggcu

SEQ ID NO: 2684088 - RNA, 17 nt, Human
cacucgugcaucccuga

SEQ ID NO: 2684089 - RNA, 15 nt, Human
cacucuaagucaugu

SEQ ID NO: 2684090 - RNA, 16 nt, Human
cacucuaagucaugua

SEQ ID NO: 2684091 - RNA, 17 nt, Human
cacucuaagucauguau

SEQ ID NO: 2684092 - RNA, 18 nt, Human
cacucuaagucauguaug

SEQ ID NO: 2684093 - RNA, 22 nt, Human
cacucuaagucauguauguuuc

SEQ ID NO: 2684094 - RNA, 21 nt, Human
cacucuaaaggcgcugagacu

SEQ ID NO: 2684095 - RNA, 16 nt, Human
cacucguguguuucua

SEQ ID NO: 2684096 - RNA, 15 nt, Human
cacucguguguuucu

SEQ ID NO: 2684097 - RNA, 13 nt, Human
cacucuccaucac

SEQ ID NO: 2684098 - RNA, 18 nt, Human
cacucuggaugauggauu

SEQ ID NO: 2684099 - RNA, 21 nt, Human
cacucugcuucucugacuucu

SEQ ID NO: 2684100 - RNA, 16 nt, Human
cacucugcuucucuga

SEQ ID NO: 2684101 - RNA, 17 nt, Human
cacucugcuucucugac

SEQ ID NO: 2684102 - RNA, 18 nt, Human
cacucugcuucucugacu

SEQ ID NO: 2684103 - RNA, 19 nt, Human
cacucugcuucucugacuu

SEQ ID NO: 2684104 - RNA, 12 nt, Human
cacucugcuucu

SEQ ID NO: 2684105 - RNA, 13 nt, Human
cacucugcuucuc

SEQ ID NO: 2684106 - RNA, 14 nt, Human
cacucugcuucucu

SEQ ID NO: 2684107 - RNA, 15 nt, Human
cacucugcuucucug

SEQ ID NO: 2684108 - RNA, 15 nt, Human
cacucacagagucaa

SEQ ID NO: 2684109 - RNA, 18 nt, Human
cacucacagagucaaggc

SEQ ID NO: 2684110 - RNA, 20 nt, Human
cacucacagagucaaggccu

SEQ ID NO: 2684111 - RNA, 22 nt, Human
cacucacagagucaaggccugc

SEQ ID NO: 2684112 - RNA, 23 nt, Human
cacucacagagucaaggccugcu

SEQ ID NO: 2684113 - RNA, 16 nt, Human
cacucacuaggccccc

SEQ ID NO: 2684114 - RNA, 17 nt, Human
cacucacuaggccccca

SEQ ID NO: 2684115 - RNA, 22 nt, Human
cacucacuaggcccccacuugc

SEQ ID NO: 2684116 - RNA, 20 nt, Human
cacucaaaagcugggcaggu

SEQ ID NO: 2684117 - RNA, 19 nt, Human
cacucaaaagcugggcagg

SEQ ID NO: 2684118 - RNA, 18 nt, Human
cacucaaaagcugggcag

SEQ ID NO: 2684119 - RNA, 17 nt, Human
cacucaaaagcugggca

SEQ ID NO: 2684120 - RNA, 15 nt, Human
cacucaaaagcuggg

SEQ ID NO: 2684121 - RNA, 16 nt, Human
cacuaaagcaugaaau

SEQ ID NO: 2684122 - RNA, 21 nt, Human
cacuaaagcaugaaaugugaa

SEQ ID NO: 2684123 - RNA, 22 nt, Human
cacuaaagcaugaaaugugaau

SEQ ID NO: 2684124 - RNA, 13 nt, Human
cacuaaaucagag

SEQ ID NO: 2684125 - RNA, 15 nt, Human
cacuaaaucagagac

SEQ ID NO: 2684126 - RNA, 16 nt, Human
cacuaaaucagagaca

SEQ ID NO: 2684127 - RNA, 14 nt, Human
cacuaacucaccag

SEQ ID NO: 2684128 - RNA, 15 nt, Human
cacuaacucaccagc

SEQ ID NO: 2684129 - RNA, 18 nt, Human
cacuaacucaccagcccc

SEQ ID NO: 2684130 - RNA, 19 nt, Human
cacuaacucaccagcccca

SEQ ID NO: 2684131 - RNA, 16 nt, Human
cacuaacgaaauauca

SEQ ID NO: 2684132 - RNA, 17 nt, Human
cacuaugaagcuaccuc

SEQ ID NO: 2684133 - RNA, 22 nt, Human
caccuguagucccagcuacuug

SEQ ID NO: 2684134 - RNA, 16 nt, Human
caccuguagucccagc

SEQ ID NO: 2684135 - RNA, 17 nt, Human
caccuguagucccagcu

SEQ ID NO: 2684136 - RNA, 22 nt, Human
caccuguagcacuuacugguag

SEQ ID NO: 2684137 - RNA, 11 nt, Human
caccugguugc

SEQ ID NO: 2684138 - RNA, 18 nt, Human
caccuguagcacuuacug

SEQ ID NO: 2684139 - RNA, 23 nt, Human
caccuggcaucgcaccauucuga

SEQ ID NO: 2684140 - RNA, 22 nt, Human
caccuggcugagguuccucugc

SEQ ID NO: 2684141 - RNA, 23 nt, Human
caccuggcugagguuccucugcc

SEQ ID NO: 2684142 - RNA, 19 nt, Human
caccuggcugagguuccuc

SEQ ID NO: 2684143 - RNA, 20 nt, Human
caccuggcugagguuccucu

SEQ ID NO: 2684144 - RNA, 21 nt, Human
caccuggcugagguuccucug

SEQ ID NO: 2684145 - RNA, 19 nt, Human
caccucugcacaagcugca

SEQ ID NO: 2684146 - RNA, 18 nt, Human
caccucugcacaagcugc

SEQ ID NO: 2684147 - RNA, 12 nt, Human
caccuccaggcu

SEQ ID NO: 2684148 - RNA, 14 nt, Human
caccuccccagcau

SEQ ID NO: 2684149 - RNA, 16 nt, Human
caccuccccagcauuc

SEQ ID NO: 2684150 - RNA, 19 nt, Human
caccucaugcccacccccu

SEQ ID NO: 2684151 - RNA, 20 nt, Human
caccucaugcccacccccug

SEQ ID NO: 2684152 - RNA, 21 nt, Human
caccucaugcccacccccugc

SEQ ID NO: 2684153 - RNA, 22 nt, Human
caccucaugcccacccccugcc

SEQ ID NO: 2684154 - RNA, 17 nt, Human
caccguggaggaggaag

SEQ ID NO: 2684155 - RNA, 12 nt, Human
caccucaugccc

SEQ ID NO: 2684156 - RNA, 14 nt, Human
caccucaugcccac

SEQ ID NO: 2684157 - RNA, 15 nt, Human
caccucaugcccacc

SEQ ID NO: 2684158 - RNA, 16 nt, Human
caccucaugcccaccc

SEQ ID NO: 2684159 - RNA, 17 nt, Human
caccucaugcccacccc

SEQ ID NO: 2684160 - RNA, 18 nt, Human
caccucaugcccaccccc

SEQ ID NO: 2684161 - RNA, 19 nt, Human
caccgcgggugugggaaag

SEQ ID NO: 2684162 - RNA, 15 nt, Human
caccgguccagcugg

SEQ ID NO: 2684163 - RNA, 16 nt, Human
caccgguccagcuggc

SEQ ID NO: 2684164 - RNA, 17 nt, Human
caccgguccagcuggcc

SEQ ID NO: 2684165 - RNA, 18 nt, Human
caccgguccagcuggccu

SEQ ID NO: 2684166 - RNA, 19 nt, Human
caccgccuccccaccucca

SEQ ID NO: 2684167 - RNA, 22 nt, Human
caccgccuccccaccuccaggc

SEQ ID NO: 2684168 - RNA, 14 nt, Human
caccgcccaucagg

SEQ ID NO: 2684169 - RNA, 14 nt, Human
caccgccccuggcc

SEQ ID NO: 2684170 - RNA, 15 nt, Human
caccgccccuggccg

SEQ ID NO: 2684171 - RNA, 18 nt, Human
cacccucaaccucuucug

SEQ ID NO: 2684172 - RNA, 21 nt, Human
cacccggugggacccccgugg

SEQ ID NO: 2684173 - RNA, 15 nt, Human
cacccggcugcagag

SEQ ID NO: 2684174 - RNA, 21 nt, Human
cacccggcugcagaggccaga

SEQ ID NO: 2684175 - RNA, 12 nt, Human
caccccuucucu

SEQ ID NO: 2684176 - RNA, 18 nt, Human
caccccuucucuccuccc

SEQ ID NO: 2684177 - RNA, 21 nt, Human
caccccuucucuccuccccaa

SEQ ID NO: 2684178 - RNA, 21 nt, Human
cacccgacgucauguauuuga

SEQ ID NO: 2684179 - RNA, 19 nt, Human
caccccugcccccagcccc

SEQ ID NO: 2684180 - RNA, 18 nt, Human
caccccugcccccagccc

SEQ ID NO: 2684181 - RNA, 11 nt, Human
caccccugccc

SEQ ID NO: 2684182 - RNA, 13 nt, Human
caccccugccccc

SEQ ID NO: 2684183 - RNA, 14 nt, Human
caccccugccccca

SEQ ID NO: 2684184 - RNA, 12 nt, Human
caccccuaccac

SEQ ID NO: 2684185 - RNA, 20 nt, Human
caccccucaacaccucugca

SEQ ID NO: 2684186 - RNA, 13 nt, Human
caccgaggggccu

SEQ ID NO: 2684187 - RNA, 14 nt, Human
caccgaggggccuu

SEQ ID NO: 2684188 - RNA, 16 nt, Human
caccgaggggccuuug

SEQ ID NO: 2684189 - RNA, 15 nt, Human
caccgacugaaaaua

SEQ ID NO: 2684190 - RNA, 15 nt, Human
cagaccagauuaaac

SEQ ID NO: 2684191 - RNA, 23 nt, Human
cagaccacgcccguccugccugu

SEQ ID NO: 2684192 - RNA, 24 nt, Human
cagaccacgcccguccugccugug

SEQ ID NO: 2684193 - RNA, 22 nt, Human
cagaccacgcccguccugccug

SEQ ID NO: 2684194 - RNA, 20 nt, Human
cagaccacaaaacuuuucua

SEQ ID NO: 2684195 - RNA, 14 nt, Human
cagaccacaaaacu

SEQ ID NO: 2684196 - RNA, 13 nt, Human
cagacauuuuaaa

SEQ ID NO: 2684197 - RNA, 20 nt, Human
cagaccgcgggcacugccgc

SEQ ID NO: 2684198 - RNA, 18 nt, Human
cagagaaaaaugcucccc

SEQ ID NO: 2684199 - RNA, 20 nt, Human
cagagaaaaaugcuccccac

SEQ ID NO: 2684200 - RNA, 23 nt, Human
cagagaaaaaugcuccccacagc

SEQ ID NO: 2684201 - RNA, 13 nt, Human
cagacucagagcu

SEQ ID NO: 2684202 - RNA, 15 nt, Human
cagacucagagcucu

SEQ ID NO: 2684203 - RNA, 16 nt, Human
cagacucagagcucuc

SEQ ID NO: 2684204 - RNA, 17 nt, Human
cagacucagagcucucu

SEQ ID NO: 2684205 - RNA, 18 nt, Human
cagacucagagcucucuc

SEQ ID NO: 2684206 - RNA, 20 nt, Human
cagacucagagcucucucua

SEQ ID NO: 2684207 - RNA, 23 nt, Human
cagacucagagcucucucuacag

SEQ ID NO: 2684208 - RNA, 15 nt, Human
cagacuuccuugaga

SEQ ID NO: 2684209 - RNA, 24 nt, Human
cagacuuccuugagacacggagcc

SEQ ID NO: 2684210 - RNA, 14 nt, Human
cagacuuggcucag

SEQ ID NO: 2684211 - RNA, 16 nt, Human
cagaccuggaagaaca

SEQ ID NO: 2684212 - RNA, 21 nt, Human
cagaccuggaagaacaggccu

SEQ ID NO: 2684213 - RNA, 20 nt, Human
cagacuauuuuuagauuuuc

SEQ ID NO: 2684214 - RNA, 22 nt, Human
cagacuauuuuuagauuuucuu

SEQ ID NO: 2684215 - RNA, 15 nt, Human
cagacuauuuuuaga

SEQ ID NO: 2684216 - RNA, 22 nt, Human
cagacauguuuuccgugaaaac

SEQ ID NO: 2684217 - RNA, 18 nt, Human
cagacauguuuuccguga

SEQ ID NO: 2684218 - RNA, 12 nt, Human
cagacauguuuu

SEQ ID NO: 2684219 - RNA, 20 nt, Human
cagacaucugagguuuuauu

SEQ ID NO: 2684220 - RNA, 18 nt, Human
cagacaccuuggacaucc

SEQ ID NO: 2684221 - RNA, 19 nt, Human
cagacacgagccaccucac

SEQ ID NO: 2684222 - RNA, 14 nt, Human
cagacaccuuggac

SEQ ID NO: 2684223 - RNA, 19 nt, Human
cagacacuaacgaaauauc

SEQ ID NO: 2684224 - RNA, 21 nt, Human
cagacacccucaaccucuucu

SEQ ID NO: 2684225 - RNA, 15 nt, Human
cagacacccucaacc

SEQ ID NO: 2684226 - RNA, 14 nt, Human
cagacacccucaac

SEQ ID NO: 2684227 - RNA, 13 nt, Human
cagaauguaagug

SEQ ID NO: 2684228 - RNA, 18 nt, Human
cagaauguaagugggccc

SEQ ID NO: 2684229 - RNA, 19 nt, Human
cagaauguaagugggccca

SEQ ID NO: 2684230 - RNA, 20 nt, Human
cagaauguaagugggcccac

SEQ ID NO: 2684231 - RNA, 21 nt, Human
cagaauguaagugggcccacc

SEQ ID NO: 2684232 - RNA, 22 nt, Human
cagaauguaagugggcccaccc

SEQ ID NO: 2684233 - RNA, 23 nt, Human
cagaauguaagugggcccacccg

SEQ ID NO: 2684234 - RNA, 18 nt, Human
cagaaugcugcaggacuu

SEQ ID NO: 2684235 - RNA, 20 nt, Human
cagaaugcaaccaagucaca

SEQ ID NO: 2684236 - RNA, 21 nt, Human
cagaaugcaaccaagucacac

SEQ ID NO: 2684237 - RNA, 20 nt, Human
cagacaaaagcgcuuuuccu

SEQ ID NO: 2684238 - RNA, 22 nt, Human
cagacaagauuuuuuaauuguu

SEQ ID NO: 2684239 - RNA, 18 nt, Human
cagacaauaaacccucag

SEQ ID NO: 2684240 - RNA, 20 nt, Human
cagacaauaaacccucagag

SEQ ID NO: 2684241 - RNA, 22 nt, Human
cagacaauaaacccucagagcc

SEQ ID NO: 2684242 - RNA, 23 nt, Human
cagacaauaaacccucagagccu

SEQ ID NO: 2684243 - RNA, 15 nt, Human
cagaacuugaaugug

SEQ ID NO: 2684244 - RNA, 18 nt, Human
cagaacucacuggggccu

SEQ ID NO: 2684245 - RNA, 15 nt, Human
cagaacucacugggg

SEQ ID NO: 2684246 - RNA, 21 nt, Human
cagaacgaaccuuggccuggg

SEQ ID NO: 2684247 - RNA, 13 nt, Human
cagaacuacuucu

SEQ ID NO: 2684248 - RNA, 16 nt, Human
cagaacuugaaugugu

SEQ ID NO: 2684249 - RNA, 20 nt, Human
cagaagcacagaauauuuuu

SEQ ID NO: 2684250 - RNA, 20 nt, Human
cagaagucacacauuacaaa

SEQ ID NO: 2684251 - RNA, 22 nt, Human
cagaagucacacauuacaaagu

SEQ ID NO: 2684252 - RNA, 23 nt, Human
cagaagccaaucuacaaucucuu

SEQ ID NO: 2684253 - RNA, 22 nt, Human
cagaaggugccacuuuacccac

SEQ ID NO: 2684254 - RNA, 17 nt, Human
cagaacagugguggcaa

SEQ ID NO: 2684255 - RNA, 20 nt, Human
cagaaccaccccggcccccu

SEQ ID NO: 2684256 - RNA, 16 nt, Human
cagaaccacacuugaa

SEQ ID NO: 2684257 - RNA, 21 nt, Human
cagaaccacacuugaaaccuu

SEQ ID NO: 2684258 - RNA, 22 nt, Human
cagaaccacacuugaaaccuuu

SEQ ID NO: 2684259 - RNA, 20 nt, Human
cagaaacuugugaaguggaa

SEQ ID NO: 2684260 - RNA, 21 nt, Human
cagaaacacugccuuuuuauu

SEQ ID NO: 2684261 - RNA, 15 nt, Human
cagaaacacugccuu

SEQ ID NO: 2684262 - RNA, 17 nt, Human
cagaaacacugccuuuu

SEQ ID NO: 2684263 - RNA, 18 nt, Human
cagaaacacugccuuuuu

SEQ ID NO: 2684264 - RNA, 19 nt, Human
cagaaacacugccuuuuua

SEQ ID NO: 2684265 - RNA, 12 nt, Human
cagaaacacugc

SEQ ID NO: 2684266 - RNA, 13 nt, Human
cagaaacacugcc

SEQ ID NO: 2684267 - RNA, 14 nt, Human
cagaaacacugccu

SEQ ID NO: 2684268 - RNA, 12 nt, Human
cacuuuggggga

SEQ ID NO: 2684269 - RNA, 14 nt, Human
cagaaaaugaaaaa

SEQ ID NO: 2684270 - RNA, 18 nt, Human
cacuuugaagucuauaaa

SEQ ID NO: 2684271 - RNA, 17 nt, Human
cacuuugagccugggaa

SEQ ID NO: 2684272 - RNA, 18 nt, Human
cacuuugagccugggaaa

SEQ ID NO: 2684273 - RNA, 19 nt, Human
cacuuugagccugggaaau

SEQ ID NO: 2684274 - RNA, 20 nt, Human
cacuuucuauccucuguaaa

SEQ ID NO: 2684275 - RNA, 16 nt, Human
cacuuugggaggccaa

SEQ ID NO: 2684276 - RNA, 13 nt, Human
cacuuugggaggc

SEQ ID NO: 2684277 - RNA, 12 nt, Human
cacuuugggagg

SEQ ID NO: 2684278 - RNA, 19 nt, Human
cagaaaaaaugucuguaaa

SEQ ID NO: 2684279 - RNA, 20 nt, Human
cagaaaaaaugucuguaaau

SEQ ID NO: 2684280 - RNA, 20 nt, Human
cagaaaaaaagagugaaaaa

SEQ ID NO: 2684281 - RNA, 21 nt, Human
cagaaaaaaagagugaaaaag

SEQ ID NO: 2684282 - RNA, 21 nt, Human
cagaaaaagaaaugaacauaa

SEQ ID NO: 2684283 - RNA, 17 nt, Human
cagaaaaaggcugugcu

SEQ ID NO: 2684284 - RNA, 14 nt, Human
cacuuuguugcaag

SEQ ID NO: 2684285 - RNA, 15 nt, Human
cacuuuguugcaaga

SEQ ID NO: 2684286 - RNA, 21 nt, Human
cacuuuguugcaagaugugaa

SEQ ID NO: 2684287 - RNA, 22 nt, Human
cacuuuguugcaagaugugaau

SEQ ID NO: 2684288 - RNA, 23 nt, Human
cacuuuguugcaagaugugaauu

SEQ ID NO: 2684289 - RNA, 20 nt, Human
cacuuuguuucguggggagg

SEQ ID NO: 2684290 - RNA, 21 nt, Human
cacuuuguuucguggggaggu

SEQ ID NO: 2684291 - RNA, 14 nt, Human
cacuuuuuaugcua

SEQ ID NO: 2684292 - RNA, 15 nt, Human
cagaggaccagggcc

SEQ ID NO: 2684293 - RNA, 16 nt, Human
cagaggaccagggccu

SEQ ID NO: 2684294 - RNA, 16 nt, Human
cagaggaauccuggca

SEQ ID NO: 2684295 - RNA, 17 nt, Human
cagaggaauccuggcag

SEQ ID NO: 2684296 - RNA, 18 nt, Human
cagaggaauccuggcagc

SEQ ID NO: 2684297 - RNA, 19 nt, Human
cagaggaauccuggcagcc

SEQ ID NO: 2684298 - RNA, 20 nt, Human
cagaggaauccuggcagccc

SEQ ID NO: 2684299 - RNA, 21 nt, Human
cagaggaauccuggcagccca

SEQ ID NO: 2684300 - RNA, 22 nt, Human
cagaggaauccuggcagcccag

SEQ ID NO: 2684301 - RNA, 23 nt, Human
cagaggaauccuggcagcccaga

SEQ ID NO: 2684302 - RNA, 15 nt, Human
cagaggagccuuuuu

SEQ ID NO: 2684303 - RNA, 22 nt, Human
cagaggagccuuuuuaaaacac

SEQ ID NO: 2684304 - RNA, 14 nt, Human
cagaggagccuuuu

SEQ ID NO: 2684305 - RNA, 18 nt, Human
cagagccggcccgccucu

SEQ ID NO: 2684306 - RNA, 20 nt, Human
cagagccggcccgccucucc

SEQ ID NO: 2684307 - RNA, 13 nt, Human
cagaggaaggaga

SEQ ID NO: 2684308 - RNA, 20 nt, Human
cagagaugcaccaccaagcc

SEQ ID NO: 2684309 - RNA, 21 nt, Human
cagagaugcaccaccaagcca

SEQ ID NO: 2684310 - RNA, 16 nt, Human
cagagauuucucauug

SEQ ID NO: 2684311 - RNA, 19 nt, Human
cagagauuucucauugacu

SEQ ID NO: 2684312 - RNA, 20 nt, Human
cagagauuucucauugacuu

SEQ ID NO: 2684313 - RNA, 21 nt, Human
cagagauuucucauugacuuu

SEQ ID NO: 2684314 - RNA, 20 nt, Human
cagagcaagugagacccugu

SEQ ID NO: 2684315 - RNA, 14 nt, Human
cagagcaagugaga

SEQ ID NO: 2684316 - RNA, 21 nt, Human
cagagacacuguugauaaaaa

SEQ ID NO: 2684317 - RNA, 22 nt, Human
cagagacacuguugauaaaaac

SEQ ID NO: 2684318 - RNA, 23 nt, Human
cagagacacuguugauaaaaacu

SEQ ID NO: 2684319 - RNA, 12 nt, Human
cagagacaaaau

SEQ ID NO: 2684320 - RNA, 20 nt, Human
cagagacaaaauauuuccca

SEQ ID NO: 2684321 - RNA, 12 nt, Human
cagagacagaua

SEQ ID NO: 2684322 - RNA, 16 nt, Human
cagagacagauaccuc

SEQ ID NO: 2684323 - RNA, 19 nt, Human
cagagacagauaccuccaa

SEQ ID NO: 2684324 - RNA, 20 nt, Human
cagagacagauaccuccaac

SEQ ID NO: 2684325 - RNA, 14 nt, Human
cagaguuuucauua

SEQ ID NO: 2684326 - RNA, 17 nt, Human
cagaguuuucauuaaau

SEQ ID NO: 2684327 - RNA, 22 nt, Human
cagaguuuucauuaaauccuuu

SEQ ID NO: 2684328 - RNA, 23 nt, Human
cagaguuuucauuaaauccuuuu

SEQ ID NO: 2684329 - RNA, 12 nt, Human
cagagugguggg

SEQ ID NO: 2684330 - RNA, 15 nt, Human
cagagugguggggga

SEQ ID NO: 2684331 - RNA, 12 nt, Human
cagaugagcugu

SEQ ID NO: 2684332 - RNA, 15 nt, Human
cagaucuuucagaaa

SEQ ID NO: 2684333 - RNA, 17 nt, Human
cagaucuuucagaaaua

SEQ ID NO: 2684334 - RNA, 20 nt, Human
cagaucuuucagaaauauaa

SEQ ID NO: 2684335 - RNA, 23 nt, Human
cagaugaauguauuuauuuggga

SEQ ID NO: 2684336 - RNA, 19 nt, Human
cagaugaauguauuuauuu

SEQ ID NO: 2684337 - RNA, 15 nt, Human
cagaugaauguauuu

SEQ ID NO: 2684338 - RNA, 15 nt, Human
cagagucagccagga

SEQ ID NO: 2684339 - RNA, 16 nt, Human
cagagucagccaggac

SEQ ID NO: 2684340 - RNA, 17 nt, Human
cagagucagccaggacc

SEQ ID NO: 2684341 - RNA, 18 nt, Human
cagagucagccaggacca

SEQ ID NO: 2684342 - RNA, 21 nt, Human
cagaggccgcgcguccagcug

SEQ ID NO: 2684343 - RNA, 23 nt, Human
cagaggcccccagcccagggcuc

SEQ ID NO: 2684344 - RNA, 24 nt, Human
cagaggcccccagcccagggcucc

SEQ ID NO: 2684345 - RNA, 16 nt, Human
cagaggcccccagccc

SEQ ID NO: 2684346 - RNA, 17 nt, Human
cagaggcccccagccca

SEQ ID NO: 2684347 - RNA, 19 nt, Human
cagaggcccccagcccagg

SEQ ID NO: 2684348 - RNA, 22 nt, Human
cagaggcccccagcccagggcu

SEQ ID NO: 2684349 - RNA, 14 nt, Human
cagaggcuggguuc

SEQ ID NO: 2684350 - RNA, 12 nt, Human
cagaggcugggu

SEQ ID NO: 2684351 - RNA, 13 nt, Human
cagaggcuggguu

SEQ ID NO: 2684352 - RNA, 20 nt, Human
cagaggccagaggcccccag

SEQ ID NO: 2684353 - RNA, 20 nt, Human
caggaagggaugcaggcucc

SEQ ID NO: 2684354 - RNA, 22 nt, Human
caggaagggccuacagcccauu

SEQ ID NO: 2684355 - RNA, 17 nt, Human
caggaauauuuuccaaa

SEQ ID NO: 2684356 - RNA, 12 nt, Human
caggacgccacu

SEQ ID NO: 2684357 - RNA, 14 nt, Human
caggacgccacuca

SEQ ID NO: 2684358 - RNA, 16 nt, Human
caggacgccacucauu

SEQ ID NO: 2684359 - RNA, 17 nt, Human
caggacgccacucauuu

SEQ ID NO: 2684360 - RNA, 18 nt, Human
caggacgccacucauuuc

SEQ ID NO: 2684361 - RNA, 19 nt, Human
caggacgccacucauuuca

SEQ ID NO: 2684362 - RNA, 20 nt, Human
caggacgccacucauuucau

SEQ ID NO: 2684363 - RNA, 21 nt, Human
caggacgccacucauuucauc

SEQ ID NO: 2684364 - RNA, 17 nt, Human
caggaauguguggccug

SEQ ID NO: 2684365 - RNA, 16 nt, Human
caggaauguguggccu

SEQ ID NO: 2684366 - RNA, 23 nt, Human
caggaauguguggccugcacagu

SEQ ID NO: 2684367 - RNA, 21 nt, Human
caggaauguguggccugcaca

SEQ ID NO: 2684368 - RNA, 19 nt, Human
caggaauguguggccugca

SEQ ID NO: 2684369 - RNA, 14 nt, Human
caggaaggaaguca

SEQ ID NO: 2684370 - RNA, 15 nt, Human
caggaagccguccug

SEQ ID NO: 2684371 - RNA, 18 nt, Human
caggaagccguccuggcg

SEQ ID NO: 2684372 - RNA, 16 nt, Human
caggaagcccaggagc

SEQ ID NO: 2684373 - RNA, 18 nt, Human
caggaagcccaggagccu

SEQ ID NO: 2684374 - RNA, 19 nt, Human
caggaagcccaggagccuc

SEQ ID NO: 2684375 - RNA, 20 nt, Human
caggaagcccaggagccuca

SEQ ID NO: 2684376 - RNA, 14 nt, Human
cagcuugagccggg

SEQ ID NO: 2684377 - RNA, 21 nt, Human
cagcuugagccgggccccugg

SEQ ID NO: 2684378 - RNA, 22 nt, Human
cagcuugagccgggccccuggg

SEQ ID NO: 2684379 - RNA, 15 nt, Human
cagcuugaccugagg

SEQ ID NO: 2684380 - RNA, 16 nt, Human
cagcuugaccugaggc

SEQ ID NO: 2684381 - RNA, 17 nt, Human
cagcuugaccugaggcu

SEQ ID NO: 2684382 - RNA, 19 nt, Human
cagcuugaccugaggcugu

SEQ ID NO: 2684383 - RNA, 20 nt, Human
cagcuugaccugaggcugug

SEQ ID NO: 2684384 - RNA, 21 nt, Human
cagcuugaccugaggcugugg

SEQ ID NO: 2684385 - RNA, 22 nt, Human
cagcuugaccugaggcuguggu

SEQ ID NO: 2684386 - RNA, 23 nt, Human
cagcuugaccugaggcugugguc

SEQ ID NO: 2684387 - RNA, 16 nt, Human
cagcuuucaugauuag

SEQ ID NO: 2684388 - RNA, 21 nt, Human
cagcuuucaucuuuguggaug

SEQ ID NO: 2684389 - RNA, 20 nt, Human
cagcuuucaugauuagcaag

SEQ ID NO: 2684390 - RNA, 17 nt, Human
cagcuuucaugauuagc

SEQ ID NO: 2684391 - RNA, 22 nt, Human
cagcuuggggccaccaaagcug

SEQ ID NO: 2684392 - RNA, 20 nt, Human
cagcuuggggccaccaaagc

SEQ ID NO: 2684393 - RNA, 21 nt, Human
cagcuuggggccaccaaagcu

SEQ ID NO: 2684394 - RNA, 16 nt, Human
cagcuuuucucaacug

SEQ ID NO: 2684395 - RNA, 21 nt, Human
cagcuuuucucaacugggucc

SEQ ID NO: 2684396 - RNA, 12 nt, Human
cagcuuugcaaa

SEQ ID NO: 2684397 - RNA, 16 nt, Human
cagcuuugagaagccu

SEQ ID NO: 2684398 - RNA, 18 nt, Human
cagcuuugagaagccuuc

SEQ ID NO: 2684399 - RNA, 20 nt, Human
cagcuuugaucccugacauc

SEQ ID NO: 2684400 - RNA, 17 nt, Human
cagcuuugaucccugac

SEQ ID NO: 2684401 - RNA, 16 nt, Human
cagcuuugaucccuga

SEQ ID NO: 2684402 - RNA, 19 nt, Human
cagcuuugagaagccuuca

SEQ ID NO: 2684403 - RNA, 20 nt, Human
cagcuuugagaagccuucag

SEQ ID NO: 2684404 - RNA, 23 nt, Human
cagcuuuguuuguugucagcuga

SEQ ID NO: 2684405 - RNA, 22 nt, Human
cagcuuuguuuguugucagcug

SEQ ID NO: 2684406 - RNA, 21 nt, Human
cagcuuuguuuguugucagcu

SEQ ID NO: 2684407 - RNA, 12 nt, Human
cagcuuuguuug

SEQ ID NO: 2684408 - RNA, 18 nt, Human
cagcugguugagguuuca

SEQ ID NO: 2684409 - RNA, 13 nt, Human
cagcuggccugga

SEQ ID NO: 2684410 - RNA, 14 nt, Human
cagcuggccuggac

SEQ ID NO: 2684411 - RNA, 15 nt, Human
cagcuggccuggaca

SEQ ID NO: 2684412 - RNA, 16 nt, Human
cagcuggccuggacag

SEQ ID NO: 2684413 - RNA, 17 nt, Human
cagcuggccuggacagu

SEQ ID NO: 2684414 - RNA, 16 nt, Human
cagcuggccuuuguaa

SEQ ID NO: 2684415 - RNA, 20 nt, Human
cagcugggccgggacccagg

SEQ ID NO: 2684416 - RNA, 23 nt, Human
cagcugggccgggacccagggcc

SEQ ID NO: 2684417 - RNA, 18 nt, Human
cagcugcucccuggcauu

SEQ ID NO: 2684418 - RNA, 23 nt, Human
cagcugcuccgaggacccaggaa

SEQ ID NO: 2684419 - RNA, 19 nt, Human
cagcugcgcuugcuuuucu

SEQ ID NO: 2684420 - RNA, 22 nt, Human
cagcugcuauuuauuuuccuaa

SEQ ID NO: 2684421 - RNA, 17 nt, Human
cagcugcgcuugcuuuu

SEQ ID NO: 2684422 - RNA, 16 nt, Human
cagcugcuauccccau

SEQ ID NO: 2684423 - RNA, 18 nt, Human
cagcugcuauccccaucu

SEQ ID NO: 2684424 - RNA, 23 nt, Human
cagcugcuauccccaucucccug

SEQ ID NO: 2684425 - RNA, 20 nt, Human
cagcugcuauuuauuuuccu

SEQ ID NO: 2684426 - RNA, 23 nt, Human
cagcugaaguugcagauguuaga

SEQ ID NO: 2684427 - RNA, 14 nt, Human
cagcugacaucuug

SEQ ID NO: 2684428 - RNA, 21 nt, Human
cagcugacaucuugaauccuu

SEQ ID NO: 2684429 - RNA, 21 nt, Human
cagcucugcaagaauugaagc

SEQ ID NO: 2684430 - RNA, 19 nt, Human
cagcucugccgucucugga

SEQ ID NO: 2684431 - RNA, 20 nt, Human
cagcucugccgucucuggag

SEQ ID NO: 2684432 - RNA, 11 nt, Human
cagcucuggag

SEQ ID NO: 2684433 - RNA, 16 nt, Human
cagcucugcaagaauu

SEQ ID NO: 2684434 - RNA, 15 nt, Human
cagcucugcaagaau

SEQ ID NO: 2684435 - RNA, 15 nt, Human
cagcucggcucagcu

SEQ ID NO: 2684436 - RNA, 13 nt, Human
cagcucggggagc

SEQ ID NO: 2684437 - RNA, 14 nt, Human
cagcucggcucagc

SEQ ID NO: 2684438 - RNA, 13 nt, Human
cagcucggcucag

SEQ ID NO: 2684439 - RNA, 16 nt, Human
cagcucgguacccggg

SEQ ID NO: 2684440 - RNA, 16 nt, Human
cagcucggggagccuu

SEQ ID NO: 2684441 - RNA, 14 nt, Human
cagcucauuaaacu

SEQ ID NO: 2684442 - RNA, 16 nt, Human
cagcucauuaaacuuu

SEQ ID NO: 2684443 - RNA, 18 nt, Human
cagcucuggaggggaggg

SEQ ID NO: 2684444 - RNA, 22 nt, Human
cagcucugccgucucuggagcg

SEQ ID NO: 2684445 - RNA, 21 nt, Human
cagccccacugccagcagcag

SEQ ID NO: 2684446 - RNA, 22 nt, Human
cagccccacugccagcagcagc

SEQ ID NO: 2684447 - RNA, 19 nt, Human
cagccccagccugcuagcu

SEQ ID NO: 2684448 - RNA, 18 nt, Human
cagccccagccugcuagc

SEQ ID NO: 2684449 - RNA, 17 nt, Human
cagccccagccugcuag

SEQ ID NO: 2684450 - RNA, 16 nt, Human
cagccccagccugcua

SEQ ID NO: 2684451 - RNA, 15 nt, Human
cagccccagccugcu

SEQ ID NO: 2684452 - RNA, 14 nt, Human
cagccccagccugc

SEQ ID NO: 2684453 - RNA, 13 nt, Human
cagccccagccug

SEQ ID NO: 2684454 - RNA, 12 nt, Human
cagccccagccu

SEQ ID NO: 2684455 - RNA, 12 nt, Human
cagccccacugc

SEQ ID NO: 2684456 - RNA, 13 nt, Human
cagccccacugcc

SEQ ID NO: 2684457 - RNA, 14 nt, Human
cagccccacugcca

SEQ ID NO: 2684458 - RNA, 15 nt, Human
cagccccacugccag

SEQ ID NO: 2684459 - RNA, 16 nt, Human
cagccccacugccagc

SEQ ID NO: 2684460 - RNA, 18 nt, Human
cagccccacugccagcag

SEQ ID NO: 2684461 - RNA, 19 nt, Human
cagccccacugccagcagc

SEQ ID NO: 2684462 - RNA, 20 nt, Human
cagccccacugccagcagca

SEQ ID NO: 2684463 - RNA, 20 nt, Human
cagcccuccccauggagcca

SEQ ID NO: 2684464 - RNA, 17 nt, Human
cagcccggccgcuccac

SEQ ID NO: 2684465 - RNA, 13 nt, Human
cagccucagacug

SEQ ID NO: 2684466 - RNA, 14 nt, Human
cagccucagacugg

SEQ ID NO: 2684467 - RNA, 20 nt, Human
cagccucagcgcggcccucc

SEQ ID NO: 2684468 - RNA, 18 nt, Human
cagccucagcgcggcccu

SEQ ID NO: 2684469 - RNA, 17 nt, Human
cagccucagcgcggccc

SEQ ID NO: 2684470 - RNA, 21 nt, Human
cagcccuccccauggagccag

SEQ ID NO: 2684471 - RNA, 11 nt, Human
cagcccugcug

SEQ ID NO: 2684472 - RNA, 12 nt, Human
cagcccugcugg

SEQ ID NO: 2684473 - RNA, 15 nt, Human
cagccuacucuccuu

SEQ ID NO: 2684474 - RNA, 16 nt, Human
cagccuacucuccuug

SEQ ID NO: 2684475 - RNA, 17 nt, Human
cagccuagcacagcagc

SEQ ID NO: 2684476 - RNA, 19 nt, Human
cagccuagcacagcagcuu

SEQ ID NO: 2684477 - RNA, 21 nt, Human
cagccguguaaccauggaccc

SEQ ID NO: 2684478 - RNA, 21 nt, Human
cagcccuggcagggggcaugc

SEQ ID NO: 2684479 - RNA, 13 nt, Human
cagcccugcuggg

SEQ ID NO: 2684480 - RNA, 15 nt, Human
cagcccugcugggga

SEQ ID NO: 2684481 - RNA, 20 nt, Human
cagcccugcuggggaucccc

SEQ ID NO: 2684482 - RNA, 15 nt, Human
cagccucucagugcc

SEQ ID NO: 2684483 - RNA, 19 nt, Human
cagccucucagugcccucc

SEQ ID NO: 2684484 - RNA, 21 nt, Human
cagccucucagugcccuccag

SEQ ID NO: 2684485 - RNA, 22 nt, Human
cagccucucagugcccuccagc

SEQ ID NO: 2684486 - RNA, 19 nt, Human
cagccuggacccuguggau

SEQ ID NO: 2684487 - RNA, 15 nt, Human
cagccuggacccugu

SEQ ID NO: 2684488 - RNA, 20 nt, Human
cagccugcuccagcuguuca

SEQ ID NO: 2684489 - RNA, 14 nt, Human
cagccuccucugga

SEQ ID NO: 2684490 - RNA, 17 nt, Human
cagccuccucuggacgg

SEQ ID NO: 2684491 - RNA, 21 nt, Human
cagccuccucuggacggcagg

SEQ ID NO: 2684492 - RNA, 22 nt, Human
cagccuccucuggacggcaggc

SEQ ID NO: 2684493 - RNA, 23 nt, Human
cagccuccucuggacggcaggcu

SEQ ID NO: 2684494 - RNA, 19 nt, Human
cagccuccgagagggagag

SEQ ID NO: 2684495 - RNA, 20 nt, Human
cagccuccgagagggagaga

SEQ ID NO: 2684496 - RNA, 17 nt, Human
cagccuccgagagggag

SEQ ID NO: 2684497 - RNA, 12 nt, Human
cagccugggccc

SEQ ID NO: 2684498 - RNA, 15 nt, Human
cagccugggccccag

SEQ ID NO: 2684499 - RNA, 16 nt, Human
cagccugggccccagc

SEQ ID NO: 2684500 - RNA, 19 nt, Human
cagccugggcaaugugaua

SEQ ID NO: 2684501 - RNA, 16 nt, Human
cagccugggcaaugug

SEQ ID NO: 2684502 - RNA, 23 nt, Human
cagccuucagacagagaggacug

SEQ ID NO: 2684503 - RNA, 15 nt, Human
cagccuugagcccug

SEQ ID NO: 2684504 - RNA, 16 nt, Human
cagccuugagcccugg

SEQ ID NO: 2684505 - RNA, 18 nt, Human
cagccuugagcccuggcu

SEQ ID NO: 2684506 - RNA, 19 nt, Human
cagccuugagcccuggcug

SEQ ID NO: 2684507 - RNA, 19 nt, Human
cagcuacuugggaggcuga

SEQ ID NO: 2684508 - RNA, 14 nt, Human
cagcuaauucuacu

SEQ ID NO: 2684509 - RNA, 22 nt, Human
cagcuaauucuacucacagugc

SEQ ID NO: 2684510 - RNA, 20 nt, Human
cagcgaucucuccacugugc

SEQ ID NO: 2684511 - RNA, 14 nt, Human
cagcgccagccuca

SEQ ID NO: 2684512 - RNA, 17 nt, Human
cagcgacuccguuggcc

SEQ ID NO: 2684513 - RNA, 21 nt, Human
cagcgacuccguuggccacuc

SEQ ID NO: 2684514 - RNA, 22 nt, Human
cagcgacuccguuggccacucc

SEQ ID NO: 2684515 - RNA, 18 nt, Human
cagcgagggcagcugcua

SEQ ID NO: 2684516 - RNA, 15 nt, Human
cagcgagggcagcug

SEQ ID NO: 2684517 - RNA, 16 nt, Human
cagcgagggcagcugc

SEQ ID NO: 2684518 - RNA, 17 nt, Human
cagcgagggcagcugcu

SEQ ID NO: 2684519 - RNA, 14 nt, Human
cagcgagggcagcu

SEQ ID NO: 2684520 - RNA, 15 nt, Human
cagcuacuugggagg

SEQ ID NO: 2684521 - RNA, 16 nt, Human
cagcuacuugggaggc

SEQ ID NO: 2684522 - RNA, 18 nt, Human
cagcuacuugggaggcug

SEQ ID NO: 2684523 - RNA, 13 nt, Human
cagcuaugcaaaa

SEQ ID NO: 2684524 - RNA, 17 nt, Human
cagcucagaaccacagc

SEQ ID NO: 2684525 - RNA, 15 nt, Human
cagcucagaaccaca

SEQ ID NO: 2684526 - RNA, 13 nt, Human
cagcucagaacca

SEQ ID NO: 2684527 - RNA, 16 nt, Human
cagcuacacagagcuu

SEQ ID NO: 2684528 - RNA, 23 nt, Human
cagccaagguuuuauaaggcuga

SEQ ID NO: 2684529 - RNA, 14 nt, Human
cagccaaguuuuau

SEQ ID NO: 2684530 - RNA, 15 nt, Human
cagccaguucaaaaa

SEQ ID NO: 2684531 - RNA, 16 nt, Human
cagccacuccccggca

SEQ ID NO: 2684532 - RNA, 17 nt, Human
cagcccagagacuuugu

SEQ ID NO: 2684533 - RNA, 21 nt, Human
cagcccagagacuuuguagau

SEQ ID NO: 2684534 - RNA, 13 nt, Human
cagcccagagacu

SEQ ID NO: 2684535 - RNA, 14 nt, Human
cagcccagagacuu

SEQ ID NO: 2684536 - RNA, 12 nt, Human
cagcccagagac

SEQ ID NO: 2684537 - RNA, 16 nt, Human
cagcccagggcuccug

SEQ ID NO: 2684538 - RNA, 17 nt, Human
cagcccagggcuccugc

SEQ ID NO: 2684539 - RNA, 18 nt, Human
cagcccagggcuccugca

SEQ ID NO: 2684540 - RNA, 19 nt, Human
cagcccagggcuccugcac

SEQ ID NO: 2684541 - RNA, 21 nt, Human
cagcccagggcuccugcacuu

SEQ ID NO: 2684542 - RNA, 16 nt, Human
cagccaugccagcugg

SEQ ID NO: 2684543 - RNA, 17 nt, Human
cagccaugccagcuggc

SEQ ID NO: 2684544 - RNA, 18 nt, Human
cagccaugccagcuggcc

SEQ ID NO: 2684545 - RNA, 20 nt, Human
cagccaugccagcuggccuu

SEQ ID NO: 2684546 - RNA, 21 nt, Human
cagccaugccagcuggccuuu

SEQ ID NO: 2684547 - RNA, 23 nt, Human
cagccauccagggggcaagagga

SEQ ID NO: 2684548 - RNA, 15 nt, Human
cagcccaccccucaa

SEQ ID NO: 2684549 - RNA, 17 nt, Human
cagcccaaucugccaga

SEQ ID NO: 2684550 - RNA, 12 nt, Human
cagcccacccug

SEQ ID NO: 2684551 - RNA, 13 nt, Human
cagcccacccugc

SEQ ID NO: 2684552 - RNA, 14 nt, Human
cagcccacccugcu

SEQ ID NO: 2684553 - RNA, 16 nt, Human
cagcccacccugcugc

SEQ ID NO: 2684554 - RNA, 18 nt, Human
cagcccacccugcugcug

SEQ ID NO: 2684555 - RNA, 15 nt, Human
cagccaaaggcuggc

SEQ ID NO: 2684556 - RNA, 21 nt, Human
cagccaaagccuccuccagcc

SEQ ID NO: 2684557 - RNA, 18 nt, Human
cagccaaagccuccucca

SEQ ID NO: 2684558 - RNA, 16 nt, Human
cagccaagauuuuccu

SEQ ID NO: 2684559 - RNA, 20 nt, Human
cagccaagauuuuccucuug

SEQ ID NO: 2684560 - RNA, 22 nt, Human
cagccaagauuuuccucuugug

SEQ ID NO: 2684561 - RNA, 23 nt, Human
cagccaagauuuuccucuuguga

SEQ ID NO: 2684562 - RNA, 18 nt, Human
cagcauuuagcuggccac

SEQ ID NO: 2684563 - RNA, 21 nt, Human
cagcauuuagcuggccacaug

SEQ ID NO: 2684564 - RNA, 22 nt, Human
cagcauuuagcuggccacaugg

SEQ ID NO: 2684565 - RNA, 16 nt, Human
cagccaaagccuccuc

SEQ ID NO: 2684566 - RNA, 15 nt, Human
cagccaaagccuccu

SEQ ID NO: 2684567 - RNA, 14 nt, Human
cagcauuccagccc

SEQ ID NO: 2684568 - RNA, 16 nt, Human
cagcauuccagccccu

SEQ ID NO: 2684569 - RNA, 20 nt, Human
cagcauuccagccccucugg

SEQ ID NO: 2684570 - RNA, 21 nt, Human
cagcauuccagccccucuggu

SEQ ID NO: 2684571 - RNA, 18 nt, Human
cagcagggagggcuucug

SEQ ID NO: 2684572 - RNA, 20 nt, Human
cagcagggagggcuucugcc

SEQ ID NO: 2684573 - RNA, 18 nt, Human
cagcagccuggacccugu

SEQ ID NO: 2684574 - RNA, 15 nt, Human
cagcagccuggaccc

SEQ ID NO: 2684575 - RNA, 14 nt, Human
cagcagccuggacc

SEQ ID NO: 2684576 - RNA, 12 nt, Human
cagcagccugga

SEQ ID NO: 2684577 - RNA, 22 nt, Human
cagcagccuggacccuguggau

SEQ ID NO: 2684578 - RNA, 19 nt, Human
cagcagccuggacccugug

SEQ ID NO: 2684579 - RNA, 15 nt, Human
cagcagcuuauaaug

SEQ ID NO: 2684580 - RNA, 21 nt, Human
cagcagcuuauaaugggcucu

SEQ ID NO: 2684581 - RNA, 23 nt, Human
cagcagcuuauaaugggcucucc

SEQ ID NO: 2684582 - RNA, 18 nt, Human
cagcaaaagaugcuucuc

SEQ ID NO: 2684583 - RNA, 13 nt, Human
cagcaaauuuuca

SEQ ID NO: 2684584 - RNA, 14 nt, Human
cagcaaauuuucag

SEQ ID NO: 2684585 - RNA, 22 nt, Human
cagcaaaugcaaaaacucuuug

SEQ ID NO: 2684586 - RNA, 13 nt, Human
cagcaaaugcaaa

SEQ ID NO: 2684587 - RNA, 14 nt, Human
cagcaaaggaaacu

SEQ ID NO: 2684588 - RNA, 23 nt, Human
cagcaaaggaaacuuugcagaug

SEQ ID NO: 2684589 - RNA, 23 nt, Human
cagcaacgaucacaaaugacuuu

SEQ ID NO: 2684590 - RNA, 22 nt, Human
cagcaacgaucacaaaugacuu

SEQ ID NO: 2684591 - RNA, 21 nt, Human
cagcaacgaucacaaaugacu

SEQ ID NO: 2684592 - RNA, 20 nt, Human
cagcaacgaucacaaaugac

SEQ ID NO: 2684593 - RNA, 19 nt, Human
cagcaacgaucacaaauga

SEQ ID NO: 2684594 - RNA, 18 nt, Human
cagcaacgaucacaaaug

SEQ ID NO: 2684595 - RNA, 16 nt, Human
cagcaacgaucacaaa

SEQ ID NO: 2684596 - RNA, 20 nt, Human
cagcaacggcacagcuaauu

SEQ ID NO: 2684597 - RNA, 22 nt, Human
cagcaacuucuucuccaucccu

SEQ ID NO: 2684598 - RNA, 20 nt, Human
cagcaacuucuucuccaucc

SEQ ID NO: 2684599 - RNA, 14 nt, Human
cagcaacacagccu

SEQ ID NO: 2684600 - RNA, 19 nt, Human
cagcaacacagccugggcc

SEQ ID NO: 2684601 - RNA, 16 nt, Human
cagcaacacagccugg

SEQ ID NO: 2684602 - RNA, 18 nt, Human
cagcaacacagccugggc

SEQ ID NO: 2684603 - RNA, 15 nt, Human
cagauuuuacagagc

SEQ ID NO: 2684604 - RNA, 19 nt, Human
cagauuuuacagagcgcac

SEQ ID NO: 2684605 - RNA, 24 nt, Human
cagauuugucuuuuuguuguaaaa

SEQ ID NO: 2684606 - RNA, 17 nt, Human
cagauguuagauauuuu

SEQ ID NO: 2684607 - RNA, 14 nt, Human
cagauuaaacuuca

SEQ ID NO: 2684608 - RNA, 17 nt, Human
cagauguuuaaaacacc

SEQ ID NO: 2684609 - RNA, 23 nt, Human
cagauguuuccagacuuccuuga

SEQ ID NO: 2684610 - RNA, 18 nt, Human
cagauguuuccagacuuc

SEQ ID NO: 2684611 - RNA, 14 nt, Human
cagauguuuaaaac

SEQ ID NO: 2684612 - RNA, 18 nt, Human
cagaugccacuucuaaga

SEQ ID NO: 2684613 - RNA, 14 nt, Human
cagauguuuccaga

SEQ ID NO: 2684614 - RNA, 16 nt, Human
cagauguuuaaaacac

SEQ ID NO: 2684615 - RNA, 15 nt, Human
cagauguuuaaaaca

SEQ ID NO: 2684616 - RNA, 16 nt, Human
cagauguuuccagacu

SEQ ID NO: 2684617 - RNA, 15 nt, Human
cagauguuuccagac

SEQ ID NO: 2684618 - RNA, 12 nt, Human
cagauguggcua

SEQ ID NO: 2684619 - RNA, 19 nt, Human
cagauguggcuacugacau

SEQ ID NO: 2684620 - RNA, 20 nt, Human
cagauguggcuacugacaua

SEQ ID NO: 2684621 - RNA, 23 nt, Human
cagauguggcuacugacauaucu

SEQ ID NO: 2684622 - RNA, 22 nt, Human
cagauguccuaauggugaugca

SEQ ID NO: 2684623 - RNA, 19 nt, Human
cagauguccuaauggugau

SEQ ID NO: 2684624 - RNA, 15 nt, Human
cagauggucauccag

SEQ ID NO: 2684625 - RNA, 16 nt, Human
cagauggucauccaga

SEQ ID NO: 2684626 - RNA, 18 nt, Human
cagauggaaaaacugagg

SEQ ID NO: 2684627 - RNA, 16 nt, Human
cagaugccacccuagc

SEQ ID NO: 2684628 - RNA, 18 nt, Human
cagaugccacccuagcca

SEQ ID NO: 2684629 - RNA, 20 nt, Human
cagaugccacccuagccaau

SEQ ID NO: 2684630 - RNA, 13 nt, Human
cagaugcguccca

SEQ ID NO: 2684631 - RNA, 20 nt, Human
cagaugcgucccaagauguu

SEQ ID NO: 2684632 - RNA, 21 nt, Human
cagaugcgucccaagauguug

SEQ ID NO: 2684633 - RNA, 22 nt, Human
cagaugcgucccaagauguuga

SEQ ID NO: 2684634 - RNA, 15 nt, Human
cagcaagugugaaua

SEQ ID NO: 2684635 - RNA, 22 nt, Human
cagcaagugguccuagaggccc

SEQ ID NO: 2684636 - RNA, 14 nt, Human
cagcaagugguccu

SEQ ID NO: 2684637 - RNA, 16 nt, Human
cagcacuuugggaggc

SEQ ID NO: 2684638 - RNA, 15 nt, Human
cagcacuuugggagg

SEQ ID NO: 2684639 - RNA, 18 nt, Human
cagcacuuugggaggccg

SEQ ID NO: 2684640 - RNA, 22 nt, Human
cagcagaggcccagauauuaga

SEQ ID NO: 2684641 - RNA, 15 nt, Human
cagcagcaaauuuuc

SEQ ID NO: 2684642 - RNA, 13 nt, Human
cagcagcagcagg

SEQ ID NO: 2684643 - RNA, 14 nt, Human
cagcagcagcaggu

SEQ ID NO: 2684644 - RNA, 15 nt, Human
cagcagcagcaggug

SEQ ID NO: 2684645 - RNA, 13 nt, Human
cagcagcagguga

SEQ ID NO: 2684646 - RNA, 16 nt, Human
cagcagcagcagguga

SEQ ID NO: 2684647 - RNA, 12 nt, Human
cagcagcaggug

SEQ ID NO: 2684648 - RNA, 14 nt, Human
caggcuccccugag

SEQ ID NO: 2684649 - RNA, 16 nt, Human
caggcuccccugagga

SEQ ID NO: 2684650 - RNA, 15 nt, Human
caggcuccccugagg

SEQ ID NO: 2684651 - RNA, 22 nt, Human
caggcucccaggagccugccca

SEQ ID NO: 2684652 - RNA, 15 nt, Human
caggcucccaggagc

SEQ ID NO: 2684653 - RNA, 24 nt, Human
caggcucccaggagccugcccagc

SEQ ID NO: 2684654 - RNA, 23 nt, Human
caggcucccaggagccugcccag

SEQ ID NO: 2684655 - RNA, 13 nt, Human
caggccggcagcc

SEQ ID NO: 2684656 - RNA, 18 nt, Human
caggccgcgcccuuuccc

SEQ ID NO: 2684657 - RNA, 22 nt, Human
caggccggcagccccagccugc

SEQ ID NO: 2684658 - RNA, 21 nt, Human
caggccggcagccccagccug

SEQ ID NO: 2684659 - RNA, 20 nt, Human
caggccggcagccccagccu

SEQ ID NO: 2684660 - RNA, 17 nt, Human
caggccggcagccccag

SEQ ID NO: 2684661 - RNA, 23 nt, Human
caggccggcagccccagccugcu

SEQ ID NO: 2684662 - RNA, 17 nt, Human
caggcuauguauaaaau

SEQ ID NO: 2684663 - RNA, 21 nt, Human
caggcuauguauaaaauacau

SEQ ID NO: 2684664 - RNA, 15 nt, Human
caggcucacucacag

SEQ ID NO: 2684665 - RNA, 16 nt, Human
caggcucacucacaga

SEQ ID NO: 2684666 - RNA, 20 nt, Human
caggcucacucacagaguca

SEQ ID NO: 2684667 - RNA, 13 nt, Human
caggcucacugcc

SEQ ID NO: 2684668 - RNA, 14 nt, Human
caggcucacugcca

SEQ ID NO: 2684669 - RNA, 15 nt, Human
caggcucacugccag

SEQ ID NO: 2684670 - RNA, 16 nt, Human
caggcucacugccagg

SEQ ID NO: 2684671 - RNA, 23 nt, Human
caggcucacugccaggccagccu

SEQ ID NO: 2684672 - RNA, 18 nt, Human
caggcucacugccaggcc

SEQ ID NO: 2684673 - RNA, 20 nt, Human
caggcucacugccaggccag

SEQ ID NO: 2684674 - RNA, 21 nt, Human
caggcucacugccaggccagc

SEQ ID NO: 2684675 - RNA, 22 nt, Human
caggcucacugccaggccagcc

SEQ ID NO: 2684676 - RNA, 15 nt, Human
caggcuccugugaua

SEQ ID NO: 2684677 - RNA, 21 nt, Human
caggcucguggacugaguggg

SEQ ID NO: 2684678 - RNA, 22 nt, Human
caggcccuggccuccccugcca

SEQ ID NO: 2684679 - RNA, 14 nt, Human
caggcccuggccuc

SEQ ID NO: 2684680 - RNA, 15 nt, Human
caggcccuggccucc

SEQ ID NO: 2684681 - RNA, 17 nt, Human
caggcccuggccucccc

SEQ ID NO: 2684682 - RNA, 18 nt, Human
caggcccuggccuccccu

SEQ ID NO: 2684683 - RNA, 20 nt, Human
caggcccuggccuccccugc

SEQ ID NO: 2684684 - RNA, 14 nt, Human
caggcccuccucuc

SEQ ID NO: 2684685 - RNA, 16 nt, Human
caggcccuccucuccc

SEQ ID NO: 2684686 - RNA, 14 nt, Human
caggcugaaaacaa

SEQ ID NO: 2684687 - RNA, 15 nt, Human
caggcugaaaacaau

SEQ ID NO: 2684688 - RNA, 16 nt, Human
caggcugccguggggc

SEQ ID NO: 2684689 - RNA, 16 nt, Human
caggcugccucccuug

SEQ ID NO: 2684690 - RNA, 21 nt, Human
caggcuggccaguccaggcug

SEQ ID NO: 2684691 - RNA, 14 nt, Human
caggcuggccaguc

SEQ ID NO: 2684692 - RNA, 16 nt, Human
caggcuggccagucca

SEQ ID NO: 2684693 - RNA, 18 nt, Human
caggcuggccaguccagg

SEQ ID NO: 2684694 - RNA, 19 nt, Human
caggcuggccaguccaggc

SEQ ID NO: 2684695 - RNA, 12 nt, Human
caggcuggccag

SEQ ID NO: 2684696 - RNA, 14 nt, Human
caggcuggacgugg

SEQ ID NO: 2684697 - RNA, 11 nt, Human
cagggccuuuu

SEQ ID NO: 2684698 - RNA, 20 nt, Human
cagggccuuuucuggcaccg

SEQ ID NO: 2684699 - RNA, 16 nt, Human
caggggacaggagucc

SEQ ID NO: 2684700 - RNA, 22 nt, Human
caggggacaggaguccacuuug

SEQ ID NO: 2684701 - RNA, 22 nt, Human
caggggcugcuuccuccuggaa

SEQ ID NO: 2684702 - RNA, 16 nt, Human
caggggcugcuuccuc

SEQ ID NO: 2684703 - RNA, 18 nt, Human
caggggcugcuuccuccu

SEQ ID NO: 2684704 - RNA, 19 nt, Human
caggggcugcuuccuccug

SEQ ID NO: 2684705 - RNA, 20 nt, Human
caggggcugcuuccuccugg

SEQ ID NO: 2684706 - RNA, 13 nt, Human
caggggcugcuuc

SEQ ID NO: 2684707 - RNA, 23 nt, Human
caggggccuggagauccuccugc

SEQ ID NO: 2684708 - RNA, 12 nt, Human
caggggccugga

SEQ ID NO: 2684709 - RNA, 13 nt, Human
caggggccuggag

SEQ ID NO: 2684710 - RNA, 14 nt, Human
caggggccuggaga

SEQ ID NO: 2684711 - RNA, 15 nt, Human
caggggccuggagau

SEQ ID NO: 2684712 - RNA, 22 nt, Human
caggggccuggagauccuccug

SEQ ID NO: 2684713 - RNA, 15 nt, Human
cagggggcaagagga

SEQ ID NO: 2684714 - RNA, 17 nt, Human
cagggggcaugaccaga

SEQ ID NO: 2684715 - RNA, 14 nt, Human
cagggccaugcuga

SEQ ID NO: 2684716 - RNA, 16 nt, Human
cagggccaugcugagg

SEQ ID NO: 2684717 - RNA, 17 nt, Human
cagggccaugcugaggc

SEQ ID NO: 2684718 - RNA, 18 nt, Human
cagggccaugcugaggcc

SEQ ID NO: 2684719 - RNA, 21 nt, Human
cagggccaugcugaggccugg

SEQ ID NO: 2684720 - RNA, 14 nt, Human
cagggccgaccaga

SEQ ID NO: 2684721 - RNA, 23 nt, Human
cagggccgaccagaggagccuuu

SEQ ID NO: 2684722 - RNA, 23 nt, Human
cagggccaugcugaggccugggc

SEQ ID NO: 2684723 - RNA, 16 nt, Human
cagggccauggcucag

SEQ ID NO: 2684724 - RNA, 17 nt, Human
cagggccauggcucagg

SEQ ID NO: 2684725 - RNA, 18 nt, Human
cagggccauggcucaggg

SEQ ID NO: 2684726 - RNA, 22 nt, Human
cagggccauggcucaggguggu

SEQ ID NO: 2684727 - RNA, 22 nt, Human
cagggccaugcugaggccuggg

SEQ ID NO: 2684728 - RNA, 23 nt, Human
cagggaccggcggaccccagcca

SEQ ID NO: 2684729 - RNA, 22 nt, Human
cagggcaagcuccgcaggacuu

SEQ ID NO: 2684730 - RNA, 13 nt, Human
caggcuuucccac

SEQ ID NO: 2684731 - RNA, 21 nt, Human
cagggcaagcuccgcaggacu

SEQ ID NO: 2684732 - RNA, 18 nt, Human
cagggcaagcuccgcagg

SEQ ID NO: 2684733 - RNA, 15 nt, Human
cagggcaagcuccgc

SEQ ID NO: 2684734 - RNA, 13 nt, Human
cagggcaagcucc

SEQ ID NO: 2684735 - RNA, 21 nt, Human
cagggcagccucccccggcuc

SEQ ID NO: 2684736 - RNA, 15 nt, Human
cagggacacacagcc

SEQ ID NO: 2684737 - RNA, 18 nt, Human
cagggaauccaagccucc

SEQ ID NO: 2684738 - RNA, 23 nt, Human
cagggaauccaagccuccacagc

SEQ ID NO: 2684739 - RNA, 14 nt, Human
cagggaauccaagc

SEQ ID NO: 2684740 - RNA, 15 nt, Human
cagggaagccccaca

SEQ ID NO: 2684741 - RNA, 17 nt, Human
cagggaagccccacaug

SEQ ID NO: 2684742 - RNA, 22 nt, Human
cagggaagccccacauguccag

SEQ ID NO: 2684743 - RNA, 23 nt, Human
cagggaagccccacauguccagc

SEQ ID NO: 2684744 - RNA, 16 nt, Human
caggccauucugccgc

SEQ ID NO: 2684745 - RNA, 19 nt, Human
caggccaaagugccgguga

SEQ ID NO: 2684746 - RNA, 15 nt, Human
caggcaggugggaug

SEQ ID NO: 2684747 - RNA, 17 nt, Human
caggcaguuggccagag

SEQ ID NO: 2684748 - RNA, 14 nt, Human
caggcauagaggcu

SEQ ID NO: 2684749 - RNA, 17 nt, Human
caggcauagaggcuucu

SEQ ID NO: 2684750 - RNA, 18 nt, Human
caggcauagaggcuucuc

SEQ ID NO: 2684751 - RNA, 19 nt, Human
caggcauagaggcuucucc

SEQ ID NO: 2684752 - RNA, 21 nt, Human
caggcauagaggcuucuccgc

SEQ ID NO: 2684753 - RNA, 23 nt, Human
caggcauagaggcuucuccgcca

SEQ ID NO: 2684754 - RNA, 22 nt, Human
caggcaugaggaaucugggagg

SEQ ID NO: 2684755 - RNA, 17 nt, Human
caggcaugguggcccac

SEQ ID NO: 2684756 - RNA, 14 nt, Human
caggcauggcccug

SEQ ID NO: 2684757 - RNA, 15 nt, Human
caggcauggcccugg

SEQ ID NO: 2684758 - RNA, 16 nt, Human
caggcauggcccuggg

SEQ ID NO: 2684759 - RNA, 17 nt, Human
caggcauggcccugggc

SEQ ID NO: 2684760 - RNA, 18 nt, Human
caggcauggcccugggcg

SEQ ID NO: 2684761 - RNA, 17 nt, Human
caggcaaagaaaaugaa

SEQ ID NO: 2684762 - RNA, 12 nt, Human
caggcagggaga

SEQ ID NO: 2684763 - RNA, 12 nt, Human
caggcaggggug

SEQ ID NO: 2684764 - RNA, 13 nt, Human
caggcaggggugg

SEQ ID NO: 2684765 - RNA, 17 nt, Human
caggcaggggugggggu

SEQ ID NO: 2684766 - RNA, 21 nt, Human
caggcagggguggggguggag

SEQ ID NO: 2684767 - RNA, 22 nt, Human
caggcagggguggggguggagg

SEQ ID NO: 2684768 - RNA, 23 nt, Human
caggcagggguggggguggaggc

SEQ ID NO: 2684769 - RNA, 13 nt, Human
caggcagccucug

SEQ ID NO: 2684770 - RNA, 16 nt, Human
caggcagccucuguca

SEQ ID NO: 2684771 - RNA, 17 nt, Human
caggcagccucugucag

SEQ ID NO: 2684772 - RNA, 18 nt, Human
caggcagccucugucagg

SEQ ID NO: 2684773 - RNA, 21 nt, Human
caggcagccucugucaggccu

SEQ ID NO: 2684774 - RNA, 22 nt, Human
caggcagccucugucaggccuu

SEQ ID NO: 2684775 - RNA, 23 nt, Human
caggauggccgggcgcgguggcu

SEQ ID NO: 2684776 - RNA, 23 nt, Human
caggauaucacauuggagucacu

SEQ ID NO: 2684777 - RNA, 22 nt, Human
caggacuuccccggagggcugc

SEQ ID NO: 2684778 - RNA, 21 nt, Human
caggacuuccccggagggcug

SEQ ID NO: 2684779 - RNA, 15 nt, Human
caggacuuccccgga

SEQ ID NO: 2684780 - RNA, 13 nt, Human
caggagacaaaag

SEQ ID NO: 2684781 - RNA, 22 nt, Human
caggagaucgagaccauccugg

SEQ ID NO: 2684782 - RNA, 16 nt, Human
caggagccugcccagc

SEQ ID NO: 2684783 - RNA, 16 nt, Human
caggagccucacuggg

SEQ ID NO: 2684784 - RNA, 15 nt, Human
caggagcaggcacgg

SEQ ID NO: 2684785 - RNA, 17 nt, Human
caggagcaggcacgggu

SEQ ID NO: 2684786 - RNA, 18 nt, Human
caggagcaggcacgggug

SEQ ID NO: 2684787 - RNA, 14 nt, Human
caggaguccacuuu

SEQ ID NO: 2684788 - RNA, 18 nt, Human
caggaguccacuuuguuu

SEQ ID NO: 2684789 - RNA, 21 nt, Human
caggaguuugagaccaaccug

SEQ ID NO: 2684790 - RNA, 16 nt, Human
caggagaaccuaacau

SEQ ID NO: 2684791 - RNA, 23 nt, Human
caggaguuugagaccaaccuggg

SEQ ID NO: 2684792 - RNA, 22 nt, Human
caggaguuugagaccaaccugg

SEQ ID NO: 2684793 - RNA, 16 nt, Human
cagguucaguauuaug

SEQ ID NO: 2684794 - RNA, 14 nt, Human
caguaacugucagg

SEQ ID NO: 2684795 - RNA, 20 nt, Human
caguaagauaucucaaugaa

SEQ ID NO: 2684796 - RNA, 15 nt, Human
caguaagaucacugu

SEQ ID NO: 2684797 - RNA, 17 nt, Human
caguaagaucacuguuu

SEQ ID NO: 2684798 - RNA, 16 nt, Human
caguaagaucacuguu

SEQ ID NO: 2684799 - RNA, 18 nt, Human
caguaacccccuuaaauu

SEQ ID NO: 2684800 - RNA, 20 nt, Human
caguaacccccuuaaauuua

SEQ ID NO: 2684801 - RNA, 21 nt, Human
caguaacccccuuaaauuuaa

SEQ ID NO: 2684802 - RNA, 14 nt, Human
caguaagucuuuuu

SEQ ID NO: 2684803 - RNA, 15 nt, Human
caguaaguuaucuuu

SEQ ID NO: 2684804 - RNA, 20 nt, Human
caguaaguuaucuuugaaua

SEQ ID NO: 2684805 - RNA, 21 nt, Human
caguaagaucacuguuuagau

SEQ ID NO: 2684806 - RNA, 20 nt, Human
caguaagaucacuguuuaga

SEQ ID NO: 2684807 - RNA, 19 nt, Human
caguaagaucacuguuuag

SEQ ID NO: 2684808 - RNA, 14 nt, Human
caguacccaccacc

SEQ ID NO: 2684809 - RNA, 16 nt, Human
caguacccaccaccuu

SEQ ID NO: 2684810 - RNA, 22 nt, Human
caguacuauucagguaacacua

SEQ ID NO: 2684811 - RNA, 17 nt, Human
caguacccugguugugu

SEQ ID NO: 2684812 - RNA, 16 nt, Human
caguacccugguugug

SEQ ID NO: 2684813 - RNA, 12 nt, Human
caggugggcugg

SEQ ID NO: 2684814 - RNA, 22 nt, Human
caggugggcuggacuucuaccu

SEQ ID NO: 2684815 - RNA, 23 nt, Human
caggugggcuggacuucuaccug

SEQ ID NO: 2684816 - RNA, 18 nt, Human
caggugguuauggagagg

SEQ ID NO: 2684817 - RNA, 20 nt, Human
caggugguuauggagagggu

SEQ ID NO: 2684818 - RNA, 20 nt, Human
caggugagaagcagaggaag

SEQ ID NO: 2684819 - RNA, 13 nt, Human
caggugagaagca

SEQ ID NO: 2684820 - RNA, 13 nt, Human
caggugagaaacu

SEQ ID NO: 2684821 - RNA, 22 nt, Human
caggugagaaacuguuugaaaa

SEQ ID NO: 2684822 - RNA, 21 nt, Human
caggugagaagcagaggaagg

SEQ ID NO: 2684823 - RNA, 16 nt, Human
caggugggcccucuga

SEQ ID NO: 2684824 - RNA, 21 nt, Human
caggugcuggagcacugggcu

SEQ ID NO: 2684825 - RNA, 19 nt, Human
caggugcuggagcacuggg

SEQ ID NO: 2684826 - RNA, 18 nt, Human
caggugcuggagcacugg

SEQ ID NO: 2684827 - RNA, 15 nt, Human
caggugcuggagcac

SEQ ID NO: 2684828 - RNA, 23 nt, Human
caggugcuggagcacugggcucc

SEQ ID NO: 2684829 - RNA, 22 nt, Human
caggugcuggagcacugggcuc

SEQ ID NO: 2684830 - RNA, 23 nt, Human
cagguccagcucuggaggggagg

SEQ ID NO: 2684831 - RNA, 13 nt, Human
cagguccagcucu

SEQ ID NO: 2684832 - RNA, 14 nt, Human
cagguccagcucug

SEQ ID NO: 2684833 - RNA, 16 nt, Human
cagguccagcucugga

SEQ ID NO: 2684834 - RNA, 17 nt, Human
cagguccagcucuggag

SEQ ID NO: 2684835 - RNA, 19 nt, Human
cagguccagcucuggaggg

SEQ ID NO: 2684836 - RNA, 23 nt, Human
cagguaguugcaauugaauuaaa

SEQ ID NO: 2684837 - RNA, 18 nt, Human
cagguaguugcaauugaa

SEQ ID NO: 2684838 - RNA, 13 nt, Human
cagguaccagcug

SEQ ID NO: 2684839 - RNA, 14 nt, Human
cagguaccagcugc

SEQ ID NO: 2684840 - RNA, 15 nt, Human
cagguaccagcugcg

SEQ ID NO: 2684841 - RNA, 19 nt, Human
cagguaaugugaauaaauu

SEQ ID NO: 2684842 - RNA, 13 nt, Human
cagguaaugugaa

SEQ ID NO: 2684843 - RNA, 21 nt, Human
cagguaccagcugcgcuugcu

SEQ ID NO: 2684844 - RNA, 16 nt, Human
cagguaccagcugcgc

SEQ ID NO: 2684845 - RNA, 17 nt, Human
cagguaccagcugcgcu

SEQ ID NO: 2684846 - RNA, 18 nt, Human
cagguaccagcugcgcuu

SEQ ID NO: 2684847 - RNA, 19 nt, Human
cagguaccagcugcgcuug

SEQ ID NO: 2684848 - RNA, 13 nt, Human
cagggucccucug

SEQ ID NO: 2684849 - RNA, 21 nt, Human
caggguauuccagagugggga

SEQ ID NO: 2684850 - RNA, 20 nt, Human
caggguauuccagagugggg

SEQ ID NO: 2684851 - RNA, 18 nt, Human
caggguauggacuaucug

SEQ ID NO: 2684852 - RNA, 23 nt, Human
caggguauggacuaucugucugg

SEQ ID NO: 2684853 - RNA, 13 nt, Human
cagggguuucucg

SEQ ID NO: 2684854 - RNA, 12 nt, Human
cagggguggggg

SEQ ID NO: 2684855 - RNA, 20 nt, Human
cagggguggggguggaggcu

SEQ ID NO: 2684856 - RNA, 22 nt, Human
cagggguggggguggaggcuuc

SEQ ID NO: 2684857 - RNA, 15 nt, Human
cagggucccucugug

SEQ ID NO: 2684858 - RNA, 16 nt, Human
cagggucccucugugu

SEQ ID NO: 2684859 - RNA, 13 nt, Human
caggggucucccu

SEQ ID NO: 2684860 - RNA, 14 nt, Human
caggggucucccug

SEQ ID NO: 2684861 - RNA, 15 nt, Human
caggggucucccugg

SEQ ID NO: 2684862 - RNA, 16 nt, Human
caggggucucccuggc

SEQ ID NO: 2684863 - RNA, 17 nt, Human
caggggucucccuggcu

SEQ ID NO: 2684864 - RNA, 18 nt, Human
caggggucucccuggcuc

SEQ ID NO: 2684865 - RNA, 19 nt, Human
caggggucucccuggcucc

SEQ ID NO: 2684866 - RNA, 20 nt, Human
caggggucucccuggcuccc

SEQ ID NO: 2684867 - RNA, 21 nt, Human
caggggucucccuggcucccu

SEQ ID NO: 2684868 - RNA, 22 nt, Human
caggggucucccuggcucccuc

SEQ ID NO: 2684869 - RNA, 13 nt, Human
cagugcccuccag

SEQ ID NO: 2684870 - RNA, 14 nt, Human
cagugcccuccagc

SEQ ID NO: 2684871 - RNA, 16 nt, Human
cagugcccuccagccc

SEQ ID NO: 2684872 - RNA, 18 nt, Human
cagugcccuccagccccg

SEQ ID NO: 2684873 - RNA, 18 nt, Human
cagugccgagaaggaagc

SEQ ID NO: 2684874 - RNA, 15 nt, Human
cagugccgagaagga

SEQ ID NO: 2684875 - RNA, 15 nt, Human
cagugccuauugaua

SEQ ID NO: 2684876 - RNA, 15 nt, Human
cagucuguggaucag

SEQ ID NO: 2684877 - RNA, 22 nt, Human
cagucuuagaucauaguuuuau

SEQ ID NO: 2684878 - RNA, 18 nt, Human
cagugaccucucucucug

SEQ ID NO: 2684879 - RNA, 20 nt, Human
cagugaagauauuuuauuuc

SEQ ID NO: 2684880 - RNA, 21 nt, Human
cagugaauuugcacuguuuaa

SEQ ID NO: 2684881 - RNA, 24 nt, Human
cagugagccgagauugcaccacug

SEQ ID NO: 2684882 - RNA, 15 nt, Human
caguaucucagggcc

SEQ ID NO: 2684883 - RNA, 13 nt, Human
caguaucucaggg

SEQ ID NO: 2684884 - RNA, 16 nt, Human
caguaucccacaucca

SEQ ID NO: 2684885 - RNA, 12 nt, Human
caguaucccaca

SEQ ID NO: 2684886 - RNA, 13 nt, Human
caguaucccacau

SEQ ID NO: 2684887 - RNA, 14 nt, Human
caguaucccacauc

SEQ ID NO: 2684888 - RNA, 15 nt, Human
caguaucccacaucc

SEQ ID NO: 2684889 - RNA, 18 nt, Human
caguaguuuaaaaguucu

SEQ ID NO: 2684890 - RNA, 22 nt, Human
caguaggugcccagaauaaguu

SEQ ID NO: 2684891 - RNA, 17 nt, Human
caguaggacuccuuauu

SEQ ID NO: 2684892 - RNA, 20 nt, Human
caguauaaccagcugaaguu

SEQ ID NO: 2684893 - RNA, 16 nt, Human
caguagauuuuccaaa

SEQ ID NO: 2684894 - RNA, 18 nt, Human
caguagauuuuccaaaug

SEQ ID NO: 2684895 - RNA, 14 nt, Human
caguagaacuccag

SEQ ID NO: 2684896 - RNA, 22 nt, Human
caguagaacuccaggcccuccu

SEQ ID NO: 2684897 - RNA, 12 nt, Human
caguagaacugu

SEQ ID NO: 2684898 - RNA, 14 nt, Human
caguagaacugucu

SEQ ID NO: 2684899 - RNA, 15 nt, Human
caguagaacugucug

SEQ ID NO: 2684900 - RNA, 15 nt, Human
caguacuuuuuuaaa

SEQ ID NO: 2684901 - RNA, 21 nt, Human
caguacuuuuuuaaauauuuu

SEQ ID NO: 2684902 - RNA, 23 nt, Human
caguacuuuuuuaaauauuuucu

SEQ ID NO: 2684903 - RNA, 16 nt, Human
caguagagccagcuug

SEQ ID NO: 2684904 - RNA, 17 nt, Human
caguagagccagcuugg

SEQ ID NO: 2684905 - RNA, 20 nt, Human
caguagaccuuguuacuucu

SEQ ID NO: 2684906 - RNA, 12 nt, Human
caguagagccag

SEQ ID NO: 2684907 - RNA, 13 nt, Human
caguagagccagc

SEQ ID NO: 2684908 - RNA, 14 nt, Human
caguagagccagcu

SEQ ID NO: 2684909 - RNA, 15 nt, Human
caguagagccagcuu

SEQ ID NO: 2684910 - RNA, 21 nt, Human
cagucagguaguugcaauuga

SEQ ID NO: 2684911 - RNA, 15 nt, Human
caguaugugggauau

SEQ ID NO: 2684912 - RNA, 19 nt, Human
caguaugugggauauugaa

SEQ ID NO: 2684913 - RNA, 14 nt, Human
cagucacuggaggu

SEQ ID NO: 2684914 - RNA, 23 nt, Human
cagucacuggagguugaagccaa

SEQ ID NO: 2684915 - RNA, 15 nt, Human
caguccaggcugccg

SEQ ID NO: 2684916 - RNA, 18 nt, Human
caguccaggcugccgugg

SEQ ID NO: 2684917 - RNA, 12 nt, Human
caguccccaccc

SEQ ID NO: 2684918 - RNA, 13 nt, Human
caguccccacccc

SEQ ID NO: 2684919 - RNA, 14 nt, Human
caguccccaccccu

SEQ ID NO: 2684920 - RNA, 15 nt, Human
caguccccaccccug

SEQ ID NO: 2684921 - RNA, 16 nt, Human
caguccccaccccugc

SEQ ID NO: 2684922 - RNA, 17 nt, Human
caguccccaccccugcc

SEQ ID NO: 2684923 - RNA, 18 nt, Human
caguccccaccccugccc

SEQ ID NO: 2684924 - RNA, 14 nt, Human
caguccaaaauacu

SEQ ID NO: 2684925 - RNA, 17 nt, Human
caguccacccugccugc

SEQ ID NO: 2684926 - RNA, 18 nt, Human
caguccacccugccugcc

SEQ ID NO: 2684927 - RNA, 23 nt, Human
cagucauuaugagaggcaaugau

SEQ ID NO: 2684928 - RNA, 13 nt, Human
cagucauuaugag

SEQ ID NO: 2684929 - RNA, 22 nt, Human
cagucccuuccccaugcuuccu

SEQ ID NO: 2684930 - RNA, 15 nt, Human
caguccuacucaagc

SEQ ID NO: 2684931 - RNA, 20 nt, Human
caguccuacucaagcgggug

SEQ ID NO: 2684932 - RNA, 21 nt, Human
caguccuacucaagcgggugg

SEQ ID NO: 2684933 - RNA, 21 nt, Human
caguccccaccccugccccca

SEQ ID NO: 2684934 - RNA, 19 nt, Human
caguccccaccccugcccc

SEQ ID NO: 2684935 - RNA, 20 nt, Human
caguccccaccccugccccc

SEQ ID NO: 2684936 - RNA, 22 nt, Human
cagucauucagcagcaaauuuu

SEQ ID NO: 2684937 - RNA, 14 nt, Human
cauuauuuauaugg

SEQ ID NO: 2684938 - RNA, 17 nt, Human
cauucaaguguaaaaua

SEQ ID NO: 2684939 - RNA, 13 nt, Human
cauucaaauuugu

SEQ ID NO: 2684940 - RNA, 14 nt, Human
cauucaaauuuguc

SEQ ID NO: 2684941 - RNA, 15 nt, Human
cauucaaauuugucu

SEQ ID NO: 2684942 - RNA, 22 nt, Human
cauucaaguguaaaauauuuug

SEQ ID NO: 2684943 - RNA, 23 nt, Human
cauucaaguguaaaauauuuuga

SEQ ID NO: 2684944 - RNA, 18 nt, Human
cauucaaguguaaaauau

SEQ ID NO: 2684945 - RNA, 19 nt, Human
cauucaaguguaaaauauu

SEQ ID NO: 2684946 - RNA, 20 nt, Human
cauucaaguguaaaauauuu

SEQ ID NO: 2684947 - RNA, 21 nt, Human
cauucaaguguaaaauauuuu

SEQ ID NO: 2684948 - RNA, 22 nt, Human
cauuauucucugcuauauauaa

SEQ ID NO: 2684949 - RNA, 24 nt, Human
cauuauucucugcuauauauaaaa

SEQ ID NO: 2684950 - RNA, 18 nt, Human
cauuacuuguugccuaua

SEQ ID NO: 2684951 - RNA, 17 nt, Human
cauuacuuguugccuau

SEQ ID NO: 2684952 - RNA, 21 nt, Human
cauuacagagguauuaaaacu

SEQ ID NO: 2684953 - RNA, 18 nt, Human
cauuaaggggaagaauga

SEQ ID NO: 2684954 - RNA, 19 nt, Human
cauuaaggggaagaaugaa

SEQ ID NO: 2684955 - RNA, 21 nt, Human
cauuaaggggaagaaugaaag

SEQ ID NO: 2684956 - RNA, 23 nt, Human
cauuaaggggaagaaugaaagcu

SEQ ID NO: 2684957 - RNA, 13 nt, Human
cauucagagucag

SEQ ID NO: 2684958 - RNA, 22 nt, Human
cauucagagucagccaggacca

SEQ ID NO: 2684959 - RNA, 19 nt, Human
cauucagcagcaaauuuuc

SEQ ID NO: 2684960 - RNA, 20 nt, Human
cauucagcagcaaauuuuca

SEQ ID NO: 2684961 - RNA, 12 nt, Human
cauucagaaaug

SEQ ID NO: 2684962 - RNA, 14 nt, Human
cauucagaaauguu

SEQ ID NO: 2684963 - RNA, 15 nt, Human
cauucagaaauguug

SEQ ID NO: 2684964 - RNA, 20 nt, Human
cauucagaaauguugagucu

SEQ ID NO: 2684965 - RNA, 23 nt, Human
cauucagaaauguugagucugua

SEQ ID NO: 2684966 - RNA, 11 nt, Human
cauucauuuuu

SEQ ID NO: 2684967 - RNA, 13 nt, Human
cauucauuuuuau

SEQ ID NO: 2684968 - RNA, 16 nt, Human
cauucauuuuuauagc

SEQ ID NO: 2684969 - RNA, 22 nt, Human
cauuccuaaagaaaaauaucuu

SEQ ID NO: 2684970 - RNA, 13 nt, Human
cauuccacacaga

SEQ ID NO: 2684971 - RNA, 13 nt, Human
cauuccagccccu

SEQ ID NO: 2684972 - RNA, 15 nt, Human
cauuccagccccucu

SEQ ID NO: 2684973 - RNA, 18 nt, Human
cauuccagccccucuggu

SEQ ID NO: 2684974 - RNA, 19 nt, Human
cauuccagccccucugguc

SEQ ID NO: 2684975 - RNA, 22 nt, Human
cauuccagccccucuggucgcu

SEQ ID NO: 2684976 - RNA, 12 nt, Human
cauuccaggcag

SEQ ID NO: 2684977 - RNA, 17 nt, Human
cauuccaggcagccucu

SEQ ID NO: 2684978 - RNA, 18 nt, Human
cauuccaggcagccucug

SEQ ID NO: 2684979 - RNA, 19 nt, Human
cauuccaggcagccucugu

SEQ ID NO: 2684980 - RNA, 21 nt, Human
cauuccaggcagccucuguca

SEQ ID NO: 2684981 - RNA, 21 nt, Human
cauucuggucaagggcuguca

SEQ ID NO: 2684982 - RNA, 23 nt, Human
cauucuggucaagggcugucauu

SEQ ID NO: 2684983 - RNA, 12 nt, Human
cauucuuacuaa

SEQ ID NO: 2684984 - RNA, 18 nt, Human
cauucuuacuaaaaagua

SEQ ID NO: 2684985 - RNA, 19 nt, Human
cauucuuacuaaaaaguau

SEQ ID NO: 2684986 - RNA, 22 nt, Human
cauucuuacuaaaaaguauaaa

SEQ ID NO: 2684987 - RNA, 18 nt, Human
cauucugccgcccccucc

SEQ ID NO: 2684988 - RNA, 21 nt, Human
cauucugccgcccccuccuga

SEQ ID NO: 2684989 - RNA, 22 nt, Human
cauucugccgcccccuccugaa

SEQ ID NO: 2684990 - RNA, 23 nt, Human
cauucugccgcccccuccugaac

SEQ ID NO: 2684991 - RNA, 23 nt, Human
cauucugacucgguuucuccaaa

SEQ ID NO: 2684992 - RNA, 12 nt, Human
cauucugacucg

SEQ ID NO: 2684993 - RNA, 16 nt, Human
cauucugacucgguuu

SEQ ID NO: 2684994 - RNA, 19 nt, Human
cauucugacucgguuucuc

SEQ ID NO: 2684995 - RNA, 21 nt, Human
cauucugacucgguuucucca

SEQ ID NO: 2684996 - RNA, 12 nt, Human
cauucuuggcuu

SEQ ID NO: 2684997 - RNA, 19 nt, Human
cauucuuggcuuaaucauu

SEQ ID NO: 2684998 - RNA, 20 nt, Human
cauucuuggcuuaaucauuu

SEQ ID NO: 2684999 - RNA, 14 nt, Human
cauuuucauuccua

SEQ ID NO: 2685000 - RNA, 23 nt, Human
ccaaaauguaggcuuaguuugug

SEQ ID NO: 2685001 - RNA, 20 nt, Human
ccaaaaugugagugguugaa

SEQ ID NO: 2685002 - RNA, 16 nt, Human
ccaaaaucucaagaaa

SEQ ID NO: 2685003 - RNA, 15 nt, Human
ccaaaauuaaggugu

SEQ ID NO: 2685004 - RNA, 14 nt, Human
ccaaaauuaaggug

SEQ ID NO: 2685005 - RNA, 16 nt, Human
cauuugcaauaacagc

SEQ ID NO: 2685006 - RNA, 18 nt, Human
cauuugcaauaacagcug

SEQ ID NO: 2685007 - RNA, 19 nt, Human
cauuugcaauaacagcugc

SEQ ID NO: 2685008 - RNA, 20 nt, Human
cauuugcaauaacagcugca

SEQ ID NO: 2685009 - RNA, 21 nt, Human
cauuugcaauaacagcugcaa

SEQ ID NO: 2685010 - RNA, 13 nt, Human
cauuugcugaaua

SEQ ID NO: 2685011 - RNA, 16 nt, Human
cauuugaugcaugucu

SEQ ID NO: 2685012 - RNA, 17 nt, Human
cauuugaugcaugucuu

SEQ ID NO: 2685013 - RNA, 19 nt, Human
cauuugaugcaugucuuuu

SEQ ID NO: 2685014 - RNA, 20 nt, Human
cauuugaugcaugucuuuua

SEQ ID NO: 2685015 - RNA, 22 nt, Human
cauuugaugcaugucuuuuaaa

SEQ ID NO: 2685016 - RNA, 18 nt, Human
cauugaaguaaugaauuu

SEQ ID NO: 2685017 - RNA, 21 nt, Human
cauugaagaauguuagaguaa

SEQ ID NO: 2685018 - RNA, 22 nt, Human
cauugaagaauguuagaguaau

SEQ ID NO: 2685019 - RNA, 19 nt, Human
cauugaaguaaugaauuuu

SEQ ID NO: 2685020 - RNA, 10 nt, Human
cauugaguau

SEQ ID NO: 2685021 - RNA, 14 nt, Human
cauugaguauuguu

SEQ ID NO: 2685022 - RNA, 15 nt, Human
cauugaguauuguuu

SEQ ID NO: 2685023 - RNA, 16 nt, Human
cauugaguauuguuua

SEQ ID NO: 2685024 - RNA, 18 nt, Human
cauugaguauuguuuaaa

SEQ ID NO: 2685025 - RNA, 22 nt, Human
cauugaguauuguuuaaaaugu

SEQ ID NO: 2685026 - RNA, 14 nt, Human
cauugagcugugca

SEQ ID NO: 2685027 - RNA, 15 nt, Human
cauugagcugugcaa

SEQ ID NO: 2685028 - RNA, 21 nt, Human
cauuguaagcguauggcuuua

SEQ ID NO: 2685029 - RNA, 15 nt, Human
cauuuaaaaaaaauc

SEQ ID NO: 2685030 - RNA, 12 nt, Human
cauuuaaaaaaa

SEQ ID NO: 2685031 - RNA, 14 nt, Human
cauuuaagggaaaa

SEQ ID NO: 2685032 - RNA, 15 nt, Human
cauuuaagggaaaaa

SEQ ID NO: 2685033 - RNA, 16 nt, Human
cauuuaagggaaaaau

SEQ ID NO: 2685034 - RNA, 17 nt, Human
cauuuaagggaaaaaua

SEQ ID NO: 2685035 - RNA, 18 nt, Human
cauuuaagggaaaaauau

SEQ ID NO: 2685036 - RNA, 19 nt, Human
cauuuaagggaaaaauaua

SEQ ID NO: 2685037 - RNA, 22 nt, Human
cauuuaagggaaaaauauauau

SEQ ID NO: 2685038 - RNA, 20 nt, Human
cauuuaagggaaagaaaaug

SEQ ID NO: 2685039 - RNA, 20 nt, Human
cauuuaagcuguggucaagg

SEQ ID NO: 2685040 - RNA, 9 nt, Human
cauugagua

SEQ ID NO: 2685041 - RNA, 18 nt, Human
cauuuacucuaaaaacug

SEQ ID NO: 2685042 - RNA, 21 nt, Human
cauguuuccucuaguucuuug

SEQ ID NO: 2685043 - RNA, 13 nt, Human
cauguuuccucua

SEQ ID NO: 2685044 - RNA, 14 nt, Human
caugugagcucuuc

SEQ ID NO: 2685045 - RNA, 16 nt, Human
caugugagcucuuccu

SEQ ID NO: 2685046 - RNA, 18 nt, Human
caugugagcucuuccuau

SEQ ID NO: 2685047 - RNA, 21 nt, Human
caugugagugacgaugaugua

SEQ ID NO: 2685048 - RNA, 15 nt, Human
caugugauacauuuu

SEQ ID NO: 2685049 - RNA, 16 nt, Human
caugugauacauuuuu

SEQ ID NO: 2685050 - RNA, 22 nt, Human
caugugauacauuuuuuaagcu

SEQ ID NO: 2685051 - RNA, 17 nt, Human
caugugauggacacucc

SEQ ID NO: 2685052 - RNA, 18 nt, Human
caugugauggacacucca

SEQ ID NO: 2685053 - RNA, 19 nt, Human
caugugauggacacuccag

SEQ ID NO: 2685054 - RNA, 20 nt, Human
caugugauggacacuccagg

SEQ ID NO: 2685055 - RNA, 21 nt, Human
caugugauggacacuccaggg

SEQ ID NO: 2685056 - RNA, 22 nt, Human
caugugauggacacuccaggga

SEQ ID NO: 2685057 - RNA, 17 nt, Human
cauguaaagugucagaa

SEQ ID NO: 2685058 - RNA, 18 nt, Human
cauguaaagugucagaag

SEQ ID NO: 2685059 - RNA, 15 nt, Human
cauguaaauguaaac

SEQ ID NO: 2685060 - RNA, 16 nt, Human
cauguaaauguaaacu

SEQ ID NO: 2685061 - RNA, 19 nt, Human
caugguuuugugccaucug

SEQ ID NO: 2685062 - RNA, 20 nt, Human
caugguuuugugccaucugu

SEQ ID NO: 2685063 - RNA, 24 nt, Human
caugguuuugugccaucuguagcu

SEQ ID NO: 2685064 - RNA, 13 nt, Human
caugguggccaga

SEQ ID NO: 2685065 - RNA, 21 nt, Human
caugucguggacacacacaga

SEQ ID NO: 2685066 - RNA, 22 nt, Human
cauggugccugagaggcaggca

SEQ ID NO: 2685067 - RNA, 18 nt, Human
cauggugccugagaggca

SEQ ID NO: 2685068 - RNA, 17 nt, Human
cauggugccugagaggc

SEQ ID NO: 2685069 - RNA, 19 nt, Human
cauggugccugagaggcag

SEQ ID NO: 2685070 - RNA, 21 nt, Human
cauggugccugagaggcaggc

SEQ ID NO: 2685071 - RNA, 14 nt, Human
caugguuugacuca

SEQ ID NO: 2685072 - RNA, 15 nt, Human
cauguaaaacagaaa

SEQ ID NO: 2685073 - RNA, 17 nt, Human
cauguaaaacagaaaaa

SEQ ID NO: 2685074 - RNA, 14 nt, Human
cauguuugccuaga

SEQ ID NO: 2685075 - RNA, 18 nt, Human
cauguuugccuagacagc

SEQ ID NO: 2685076 - RNA, 23 nt, Human
cauuaaaaaaaugugccuaguuu

SEQ ID NO: 2685077 - RNA, 14 nt, Human
caugcuucuucuca

SEQ ID NO: 2685078 - RNA, 15 nt, Human
cauggaaaucagcca

SEQ ID NO: 2685079 - RNA, 21 nt, Human
cauggaaaucagccaaguuuu

SEQ ID NO: 2685080 - RNA, 19 nt, Human
caugcuugugaaaaugugu

SEQ ID NO: 2685081 - RNA, 17 nt, Human
cauggagccagcucccu

SEQ ID NO: 2685082 - RNA, 14 nt, Human
cauggagccagcuc

SEQ ID NO: 2685083 - RNA, 14 nt, Human
caugcacuuaaaga

SEQ ID NO: 2685084 - RNA, 16 nt, Human
caugcacuuaaagaag

SEQ ID NO: 2685085 - RNA, 17 nt, Human
caugcacuuaaagaagu

SEQ ID NO: 2685086 - RNA, 22 nt, Human
caugcgcucagggccaugcuga

SEQ ID NO: 2685087 - RNA, 23 nt, Human
caugcgcucagggccaugcugag

SEQ ID NO: 2685088 - RNA, 14 nt, Human
caugggagggggcu

SEQ ID NO: 2685089 - RNA, 22 nt, Human
caugggagggggcuugaagcca

SEQ ID NO: 2685090 - RNA, 20 nt, Human
cauggcagccuacucuccuu

SEQ ID NO: 2685091 - RNA, 14 nt, Human
caucaccugccugu

SEQ ID NO: 2685092 - RNA, 14 nt, Human
caucacccucuucc

SEQ ID NO: 2685093 - RNA, 21 nt, Human
caucacccucuuccugugauc

SEQ ID NO: 2685094 - RNA, 19 nt, Human
caucaguuuuguuuacuca

SEQ ID NO: 2685095 - RNA, 16 nt, Human
caucauccagaugugg

SEQ ID NO: 2685096 - RNA, 17 nt, Human
caucauccagauguggc

SEQ ID NO: 2685097 - RNA, 12 nt, Human
caucaugcaugu

SEQ ID NO: 2685098 - RNA, 17 nt, Human
cauccagacucagagcu

SEQ ID NO: 2685099 - RNA, 21 nt, Human
cauccagacucagagcucucu

SEQ ID NO: 2685100 - RNA, 23 nt, Human
cauccagucucccaacuuguauu

SEQ ID NO: 2685101 - RNA, 22 nt, Human
caucauuccuuuuuauuuauau

SEQ ID NO: 2685102 - RNA, 15 nt, Human
caucauuccuuuuua

SEQ ID NO: 2685103 - RNA, 20 nt, Human
caucauuccuuuuuauuuau

SEQ ID NO: 2685104 - RNA, 19 nt, Human
caucauuccuuuuuauuua

SEQ ID NO: 2685105 - RNA, 23 nt, Human
caucccugagacagggagggaag

SEQ ID NO: 2685106 - RNA, 13 nt, Human
cauagucccugcc

SEQ ID NO: 2685107 - RNA, 11 nt, Human
cauauaagaca

SEQ ID NO: 2685108 - RNA, 18 nt, Human
cauauaagacaaauauuc

SEQ ID NO: 2685109 - RNA, 20 nt, Human
cauauaagacaaauauuccu

SEQ ID NO: 2685110 - RNA, 13 nt, Human
cauauauauuaca

SEQ ID NO: 2685111 - RNA, 16 nt, Human
cauauauauuacaagg

SEQ ID NO: 2685112 - RNA, 19 nt, Human
cauagugaaaauuguuuag

SEQ ID NO: 2685113 - RNA, 14 nt, Human
cauauaguguacag

SEQ ID NO: 2685114 - RNA, 12 nt, Human
cauauauauuac

SEQ ID NO: 2685115 - RNA, 21 nt, Human
cauaguacucuuuguagcaaa

SEQ ID NO: 2685116 - RNA, 14 nt, Human
cauaguaagauuga

SEQ ID NO: 2685117 - RNA, 22 nt, Human
cauagucaccugacuaagaaau

SEQ ID NO: 2685118 - RNA, 12 nt, Human
cauagucccugc

SEQ ID NO: 2685119 - RNA, 19 nt, Human
cauaguauccauauuuuau

SEQ ID NO: 2685120 - RNA, 20 nt, Human
cauaguauccauauuuuauu

SEQ ID NO: 2685121 - RNA, 18 nt, Human
cauaugaaaauacaacuu

SEQ ID NO: 2685122 - RNA, 11 nt, Human
cauaugaaaaa

SEQ ID NO: 2685123 - RNA, 22 nt, Human
cauaugaaaaaaaugcauuuua

SEQ ID NO: 2685124 - RNA, 15 nt, Human
cauaugaaaggagag

SEQ ID NO: 2685125 - RNA, 20 nt, Human
cauaucuuaauauauuucua

SEQ ID NO: 2685126 - RNA, 21 nt, Human
cauauugugcuucacaguaga

SEQ ID NO: 2685127 - RNA, 23 nt, Human
cauauugugcuucacaguagagc

SEQ ID NO: 2685128 - RNA, 17 nt, Human
caugacucggggguggg

SEQ ID NO: 2685129 - RNA, 14 nt, Human
caugagaugugugg

SEQ ID NO: 2685130 - RNA, 12 nt, Human
caugagaugugu

SEQ ID NO: 2685131 - RNA, 23 nt, Human
caugagauguguggacuguggca

SEQ ID NO: 2685132 - RNA, 15 nt, Human
caugagaugugugga

SEQ ID NO: 2685133 - RNA, 17 nt, Human
caugagauguguggacu

SEQ ID NO: 2685134 - RNA, 15 nt, Human
caugagacucagugc

SEQ ID NO: 2685135 - RNA, 17 nt, Human
caugagacucagugcag

SEQ ID NO: 2685136 - RNA, 18 nt, Human
caugagacucagugcaga

SEQ ID NO: 2685137 - RNA, 19 nt, Human
caugagacucagugcagau

SEQ ID NO: 2685138 - RNA, 12 nt, Human
caugaggagggu

SEQ ID NO: 2685139 - RNA, 13 nt, Human
caugaggagggug

SEQ ID NO: 2685140 - RNA, 20 nt, Human
caugaggagggugggggagg

SEQ ID NO: 2685141 - RNA, 22 nt, Human
caugaggaacuguagaugaugu

SEQ ID NO: 2685142 - RNA, 18 nt, Human
caugaggaacuguagaug

SEQ ID NO: 2685143 - RNA, 21 nt, Human
caugaguaaaauagauuuuau

SEQ ID NO: 2685144 - RNA, 21 nt, Human
caugaguagauaauuucaggg

SEQ ID NO: 2685145 - RNA, 22 nt, Human
caugaguagauaauuucagggu

SEQ ID NO: 2685146 - RNA, 13 nt, Human
caugaaauaaaau

SEQ ID NO: 2685147 - RNA, 14 nt, Human
caugaaauaaaaua

SEQ ID NO: 2685148 - RNA, 18 nt, Human
caugaaauaaaauauauc

SEQ ID NO: 2685149 - RNA, 21 nt, Human
caugaaauaaaauauaucuua

SEQ ID NO: 2685150 - RNA, 24 nt, Human
caugaaaauaccauuuaguaagaa

SEQ ID NO: 2685151 - RNA, 15 nt, Human
caugaagaauagaaa

SEQ ID NO: 2685152 - RNA, 18 nt, Human
caugaagaauagaaacaa

SEQ ID NO: 2685153 - RNA, 13 nt, Human
caugaaaugugaa

SEQ ID NO: 2685154 - RNA, 14 nt, Human
caugaaaugugaau

SEQ ID NO: 2685155 - RNA, 16 nt, Human
caugaaaugugaauuu

SEQ ID NO: 2685156 - RNA, 19 nt, Human
caugaaaugugaauuuuua

SEQ ID NO: 2685157 - RNA, 20 nt, Human
caugaaaugugaauuuuuau

SEQ ID NO: 2685158 - RNA, 23 nt, Human
caugaaaugugaauuuuuauugu

SEQ ID NO: 2685159 - RNA, 22 nt, Human
caugaaacuuguuucacugaaa

SEQ ID NO: 2685160 - RNA, 18 nt, Human
caucuuuuuuguuaacug

SEQ ID NO: 2685161 - RNA, 14 nt, Human
caucuuugaugugu

SEQ ID NO: 2685162 - RNA, 13 nt, Human
caucuuugaugug

SEQ ID NO: 2685163 - RNA, 12 nt, Human
caucuuugaugu

SEQ ID NO: 2685164 - RNA, 18 nt, Human
caucuuugauguguuguu

SEQ ID NO: 2685165 - RNA, 16 nt, Human
caucuuugauguguug

SEQ ID NO: 2685166 - RNA, 15 nt, Human
caucuuugauguguu

SEQ ID NO: 2685167 - RNA, 14 nt, Human
caucugaaauguua

SEQ ID NO: 2685168 - RNA, 16 nt, Human
caucucuacaaaaagc

SEQ ID NO: 2685169 - RNA, 15 nt, Human
caucucccucccaca

SEQ ID NO: 2685170 - RNA, 21 nt, Human
caucuccccucagcucggcuc

SEQ ID NO: 2685171 - RNA, 17 nt, Human
caucuccccucagcucg

SEQ ID NO: 2685172 - RNA, 16 nt, Human
caucuccccucagcuc

SEQ ID NO: 2685173 - RNA, 13 nt, Human
caucucccugccu

SEQ ID NO: 2685174 - RNA, 14 nt, Human
caucucccugccug

SEQ ID NO: 2685175 - RNA, 15 nt, Human
caucucccugccugg

SEQ ID NO: 2685176 - RNA, 16 nt, Human
caucucccugccuggc

SEQ ID NO: 2685177 - RNA, 17 nt, Human
caucucccugccuggcc

SEQ ID NO: 2685178 - RNA, 18 nt, Human
caucucccugccuggccc

SEQ ID NO: 2685179 - RNA, 19 nt, Human
caucucccugccuggcccc

SEQ ID NO: 2685180 - RNA, 21 nt, Human
caucucccugccuggccccca

SEQ ID NO: 2685181 - RNA, 15 nt, Human
caucuccccucagcu

SEQ ID NO: 2685182 - RNA, 16 nt, Human
cauccgcgugugccug

SEQ ID NO: 2685183 - RNA, 17 nt, Human
cauccgcgugugccugu

SEQ ID NO: 2685184 - RNA, 20 nt, Human
cauccgcgugugccugugug

SEQ ID NO: 2685185 - RNA, 10 nt, Human
caucuuuaag

SEQ ID NO: 2685186 - RNA, 16 nt, Human
caucugccccacaguc

SEQ ID NO: 2685187 - RNA, 13 nt, Human
caucuugaauccu

SEQ ID NO: 2685188 - RNA, 17 nt, Human
caucuugaauccuucca

SEQ ID NO: 2685189 - RNA, 18 nt, Human
caucuugaauccuuccau

SEQ ID NO: 2685190 - RNA, 23 nt, Human
caucuugaauccuuccauuccac

SEQ ID NO: 2685191 - RNA, 21 nt, Human
ccacuaagaauucaaacuggg

SEQ ID NO: 2685192 - RNA, 15 nt, Human
ccacuccccggcaug

SEQ ID NO: 2685193 - RNA, 18 nt, Human
ccacucacuaggccccca

SEQ ID NO: 2685194 - RNA, 13 nt, Human
ccacucauuucau

SEQ ID NO: 2685195 - RNA, 14 nt, Human
ccacucauuucauc

SEQ ID NO: 2685196 - RNA, 15 nt, Human
ccacucauuucaucu

SEQ ID NO: 2685197 - RNA, 14 nt, Human
ccacugccuucgcu

SEQ ID NO: 2685198 - RNA, 15 nt, Human
ccacugccuucgcuu

SEQ ID NO: 2685199 - RNA, 16 nt, Human
ccacugccuucgcuuc

SEQ ID NO: 2685200 - RNA, 18 nt, Human
ccacugccuucgcuucuu

SEQ ID NO: 2685201 - RNA, 22 nt, Human
ccacugccuucgcuucuugccu

SEQ ID NO: 2685202 - RNA, 23 nt, Human
ccacugccuucgcuucuugccuc

SEQ ID NO: 2685203 - RNA, 20 nt, Human
ccacugcacuccagccuggg

SEQ ID NO: 2685204 - RNA, 19 nt, Human
ccacugcacuccagccugg

SEQ ID NO: 2685205 - RNA, 18 nt, Human
ccacugcacuccagccug

SEQ ID NO: 2685206 - RNA, 12 nt, Human
ccacuaaaaaua

SEQ ID NO: 2685207 - RNA, 13 nt, Human
ccacuaaaaauau

SEQ ID NO: 2685208 - RNA, 14 nt, Human
ccacuaaaaauauu

SEQ ID NO: 2685209 - RNA, 16 nt, Human
ccacuaaaaauauugu

SEQ ID NO: 2685210 - RNA, 23 nt, Human
ccacuaaaaauauuguuucugca

SEQ ID NO: 2685211 - RNA, 21 nt, Human
ccacguuggagaagcccgugu

SEQ ID NO: 2685212 - RNA, 20 nt, Human
ccacguuggagaagcccgug

SEQ ID NO: 2685213 - RNA, 18 nt, Human
ccacccuagccaaugucu

SEQ ID NO: 2685214 - RNA, 21 nt, Human
ccacccuagccaaugucuccu

SEQ ID NO: 2685215 - RNA, 18 nt, Human
ccaccccggggacccugu

SEQ ID NO: 2685216 - RNA, 19 nt, Human
ccaccccggggacccugug

SEQ ID NO: 2685217 - RNA, 20 nt, Human
ccaccccggggacccuguga

SEQ ID NO: 2685218 - RNA, 21 nt, Human
ccaccccggggacccugugac

SEQ ID NO: 2685219 - RNA, 15 nt, Human
ccaccccggcccccu

SEQ ID NO: 2685220 - RNA, 19 nt, Human
ccaccccggcccccugccc

SEQ ID NO: 2685221 - RNA, 19 nt, Human
ccaccccucaacaccucug

SEQ ID NO: 2685222 - RNA, 17 nt, Human
ccacccugaaagcccug

SEQ ID NO: 2685223 - RNA, 16 nt, Human
ccacccugaaagcccu

SEQ ID NO: 2685224 - RNA, 18 nt, Human
ccacccugaaagcccuga

SEQ ID NO: 2685225 - RNA, 21 nt, Human
ccaccuccaggcuuucccacu

SEQ ID NO: 2685226 - RNA, 17 nt, Human
ccaccucccacaaagga

SEQ ID NO: 2685227 - RNA, 14 nt, Human
ccacgcuucuccgg

SEQ ID NO: 2685228 - RNA, 17 nt, Human
ccacgcuucuccggauc

SEQ ID NO: 2685229 - RNA, 16 nt, Human
ccacaucaaauaagaa

SEQ ID NO: 2685230 - RNA, 18 nt, Human
ccacauccaacuccagca

SEQ ID NO: 2685231 - RNA, 19 nt, Human
ccacauccaacuccagcaa

SEQ ID NO: 2685232 - RNA, 12 nt, Human
ccacaucugccu

SEQ ID NO: 2685233 - RNA, 13 nt, Human
ccacaucugccuu

SEQ ID NO: 2685234 - RNA, 14 nt, Human
ccacaucugccuua

SEQ ID NO: 2685235 - RNA, 22 nt, Human
ccacaucugccuuaaaaccaaa

SEQ ID NO: 2685236 - RNA, 23 nt, Human
ccacaucugccuuaaaaccaaag

SEQ ID NO: 2685237 - RNA, 16 nt, Human
ccacacucuccaucac

SEQ ID NO: 2685238 - RNA, 13 nt, Human
ccacacucuccau

SEQ ID NO: 2685239 - RNA, 21 nt, Human
ccaccaaagcugcccacuguu

SEQ ID NO: 2685240 - RNA, 18 nt, Human
ccaccaaagcugcccacu

SEQ ID NO: 2685241 - RNA, 19 nt, Human
ccaccaaagcugcccacug

SEQ ID NO: 2685242 - RNA, 12 nt, Human
ccaccaaagcug

SEQ ID NO: 2685243 - RNA, 13 nt, Human
ccaccaaagcugc

SEQ ID NO: 2685244 - RNA, 14 nt, Human
ccaccaaagcugcc

SEQ ID NO: 2685245 - RNA, 16 nt, Human
ccaccaaagcugccca

SEQ ID NO: 2685246 - RNA, 14 nt, Human
ccacaucaaaccuu

SEQ ID NO: 2685247 - RNA, 15 nt, Human
ccacacagaaugcaa

SEQ ID NO: 2685248 - RNA, 15 nt, Human
ccacacccaaagcug

SEQ ID NO: 2685249 - RNA, 13 nt, Human
ccagaggagccuu

SEQ ID NO: 2685250 - RNA, 15 nt, Human
ccagaggagccuuuu

SEQ ID NO: 2685251 - RNA, 16 nt, Human
ccagaggagccuuuuu

SEQ ID NO: 2685252 - RNA, 17 nt, Human
ccagaggagccuuuuua

SEQ ID NO: 2685253 - RNA, 14 nt, Human
ccagaggcccccag

SEQ ID NO: 2685254 - RNA, 15 nt, Human
ccagaggcccccagc

SEQ ID NO: 2685255 - RNA, 18 nt, Human
ccagaggcccccagccca

SEQ ID NO: 2685256 - RNA, 17 nt, Human
ccagaggaauccuggca

SEQ ID NO: 2685257 - RNA, 18 nt, Human
ccagaggaauccuggcag

SEQ ID NO: 2685258 - RNA, 19 nt, Human
ccagaggaauccuggcagc

SEQ ID NO: 2685259 - RNA, 20 nt, Human
ccagaggaauccuggcagcc

SEQ ID NO: 2685260 - RNA, 21 nt, Human
ccagaggaauccuggcagccc

SEQ ID NO: 2685261 - RNA, 22 nt, Human
ccagaggaauccuggcagccca

SEQ ID NO: 2685262 - RNA, 23 nt, Human
ccagaggaauccuggcagcccag

SEQ ID NO: 2685263 - RNA, 12 nt, Human
ccagaggcuggg

SEQ ID NO: 2685264 - RNA, 15 nt, Human
ccagaggcuggguuc

SEQ ID NO: 2685265 - RNA, 22 nt, Human
ccagaggcccccagcccagggc

SEQ ID NO: 2685266 - RNA, 19 nt, Human
ccagaggcccccagcccag

SEQ ID NO: 2685267 - RNA, 21 nt, Human
ccagaggcccccagcccaggg

SEQ ID NO: 2685268 - RNA, 11 nt, Human
ccacugggagg

SEQ ID NO: 2685269 - RNA, 15 nt, Human
ccagauuaaacuuca

SEQ ID NO: 2685270 - RNA, 17 nt, Human
ccagaugcgucccaaga

SEQ ID NO: 2685271 - RNA, 16 nt, Human
ccagaggcuggguuca

SEQ ID NO: 2685272 - RNA, 21 nt, Human
ccagaugcgucccaagauguu

SEQ ID NO: 2685273 - RNA, 23 nt, Human
ccagauguuuccagacuuccuug

SEQ ID NO: 2685274 - RNA, 17 nt, Human
ccagauguuuccagacu

SEQ ID NO: 2685275 - RNA, 13 nt, Human
ccagauguggcua

SEQ ID NO: 2685276 - RNA, 13 nt, Human
ccagauggucauc

SEQ ID NO: 2685277 - RNA, 16 nt, Human
ccagauggucauccag

SEQ ID NO: 2685278 - RNA, 17 nt, Human
ccagauggucauccaga

SEQ ID NO: 2685279 - RNA, 18 nt, Human
ccagauggucauccagac

SEQ ID NO: 2685280 - RNA, 14 nt, Human
ccagcaucaccugc

SEQ ID NO: 2685281 - RNA, 15 nt, Human
ccagcaucaccugcc

SEQ ID NO: 2685282 - RNA, 16 nt, Human
ccagcaucaccugccu

SEQ ID NO: 2685283 - RNA, 17 nt, Human
ccagcaucaccugccug

SEQ ID NO: 2685284 - RNA, 18 nt, Human
ccagcaucaccugccugu

SEQ ID NO: 2685285 - RNA, 14 nt, Human
ccagcauuccagcc

SEQ ID NO: 2685286 - RNA, 15 nt, Human
ccagcauuccagccc

SEQ ID NO: 2685287 - RNA, 16 nt, Human
ccagcauuccagcccc

SEQ ID NO: 2685288 - RNA, 17 nt, Human
ccagcauuccagccccu

SEQ ID NO: 2685289 - RNA, 18 nt, Human
ccagcauuccagccccuc

SEQ ID NO: 2685290 - RNA, 19 nt, Human
ccagcauuccagccccucu

SEQ ID NO: 2685291 - RNA, 20 nt, Human
ccagcauuccagccccucug

SEQ ID NO: 2685292 - RNA, 21 nt, Human
ccagcauuccagccccucugg

SEQ ID NO: 2685293 - RNA, 22 nt, Human
ccagcauuccagccccucuggu

SEQ ID NO: 2685294 - RNA, 12 nt, Human
ccagccagcgcc

SEQ ID NO: 2685295 - RNA, 13 nt, Human
ccagccagcgccu

SEQ ID NO: 2685296 - RNA, 14 nt, Human
ccagccagcgccuc

SEQ ID NO: 2685297 - RNA, 15 nt, Human
ccagccagcgccucc

SEQ ID NO: 2685298 - RNA, 16 nt, Human
ccagccagcgccuccc

SEQ ID NO: 2685299 - RNA, 17 nt, Human
ccagccagcgccucccu

SEQ ID NO: 2685300 - RNA, 20 nt, Human
ccagccagcgccucccucca

SEQ ID NO: 2685301 - RNA, 22 nt, Human
ccagccagcgccucccuccacc

SEQ ID NO: 2685302 - RNA, 20 nt, Human
ccagccagaggcaucugagg

SEQ ID NO: 2685303 - RNA, 17 nt, Human
ccagccaacucugggaa

SEQ ID NO: 2685304 - RNA, 19 nt, Human
ccagccaaagccuccucca

SEQ ID NO: 2685305 - RNA, 18 nt, Human
ccagccaaagccuccucc

SEQ ID NO: 2685306 - RNA, 15 nt, Human
ccagccaaagccucc

SEQ ID NO: 2685307 - RNA, 16 nt, Human
ccagcauuuagcuggc

SEQ ID NO: 2685308 - RNA, 17 nt, Human
ccagcauuuagcuggcc

SEQ ID NO: 2685309 - RNA, 18 nt, Human
ccagcauuuagcuggcca

SEQ ID NO: 2685310 - RNA, 19 nt, Human
ccagcauuuagcuggccac

SEQ ID NO: 2685311 - RNA, 20 nt, Human
ccagcauuuagcuggccaca

SEQ ID NO: 2685312 - RNA, 21 nt, Human
ccagccucagcgcggcccucc

SEQ ID NO: 2685313 - RNA, 13 nt, Human
ccagccucagcgc

SEQ ID NO: 2685314 - RNA, 12 nt, Human
ccagccucagcg

SEQ ID NO: 2685315 - RNA, 16 nt, Human
ccagccucagacugga

SEQ ID NO: 2685316 - RNA, 19 nt, Human
ccagccgccaugcuccugg

SEQ ID NO: 2685317 - RNA, 18 nt, Human
ccagccgccaugcuccug

SEQ ID NO: 2685318 - RNA, 14 nt, Human
ccagccgccaugcu

SEQ ID NO: 2685319 - RNA, 21 nt, Human
ccagcccuccccauggagcca

SEQ ID NO: 2685320 - RNA, 20 nt, Human
ccagcccuccccauggagcc

SEQ ID NO: 2685321 - RNA, 14 nt, Human
ccagcccuccccau

SEQ ID NO: 2685322 - RNA, 13 nt, Human
ccagccccacugc

SEQ ID NO: 2685323 - RNA, 16 nt, Human
ccagccccacugccag

SEQ ID NO: 2685324 - RNA, 17 nt, Human
ccagccccacugccagc

SEQ ID NO: 2685325 - RNA, 18 nt, Human
ccagccccacugccagca

SEQ ID NO: 2685326 - RNA, 19 nt, Human
ccagccccacugccagcag

SEQ ID NO: 2685327 - RNA, 20 nt, Human
ccagccccacugccagcagc

SEQ ID NO: 2685328 - RNA, 21 nt, Human
ccagccccacugccagcagca

SEQ ID NO: 2685329 - RNA, 23 nt, Human
ccagccccacugccagcagcagc

SEQ ID NO: 2685330 - RNA, 14 nt, Human
ccagcaacuucuuc

SEQ ID NO: 2685331 - RNA, 23 nt, Human
ccagcaacuucuucuccaucccu

SEQ ID NO: 2685332 - RNA, 13 nt, Human
cccaaccucaggg

SEQ ID NO: 2685333 - RNA, 15 nt, Human
cccaaccucagggcu

SEQ ID NO: 2685334 - RNA, 19 nt, Human
cccaaccucagggcuccca

SEQ ID NO: 2685335 - RNA, 20 nt, Human
cccaaccucagggcucccag

SEQ ID NO: 2685336 - RNA, 22 nt, Human
cccaaccucagggcucccaggg

SEQ ID NO: 2685337 - RNA, 16 nt, Human
cccaaggcuggcaggu

SEQ ID NO: 2685338 - RNA, 21 nt, Human
cccaaucccuuuauuaccccc

SEQ ID NO: 2685339 - RNA, 17 nt, Human
cccaaucccuuuauuac

SEQ ID NO: 2685340 - RNA, 14 nt, Human
cccaaaucaauaca

SEQ ID NO: 2685341 - RNA, 16 nt, Human
cccaaaucaauacacu

SEQ ID NO: 2685342 - RNA, 20 nt, Human
cccaacccuaucuccugaca

SEQ ID NO: 2685343 - RNA, 11 nt, Human
ccauucuccca

SEQ ID NO: 2685344 - RNA, 12 nt, Human
ccauucucccag

SEQ ID NO: 2685345 - RNA, 13 nt, Human
ccauucucccagg

SEQ ID NO: 2685346 - RNA, 14 nt, Human
ccauucucccaggu

SEQ ID NO: 2685347 - RNA, 15 nt, Human
ccauucucccaggua

SEQ ID NO: 2685348 - RNA, 14 nt, Human
ccauuugugccaga

SEQ ID NO: 2685349 - RNA, 15 nt, Human
ccauuugugccagag

SEQ ID NO: 2685350 - RNA, 16 nt, Human
ccauuugugccagagg

SEQ ID NO: 2685351 - RNA, 18 nt, Human
ccauuugugccagaggaa

SEQ ID NO: 2685352 - RNA, 13 nt, Human
cccaaagcugagc

SEQ ID NO: 2685353 - RNA, 14 nt, Human
cccaaagcugagcc

SEQ ID NO: 2685354 - RNA, 16 nt, Human
cccaaagcugagccug

SEQ ID NO: 2685355 - RNA, 18 nt, Human
cccaaagcugagccugca

SEQ ID NO: 2685356 - RNA, 14 nt, Human
ccauagucccugcc

SEQ ID NO: 2685357 - RNA, 21 nt, Human
ccauauugugcuucacaguag

SEQ ID NO: 2685358 - RNA, 13 nt, Human
ccauagucccugc

SEQ ID NO: 2685359 - RNA, 14 nt, Human
ccauauuggccagu

SEQ ID NO: 2685360 - RNA, 17 nt, Human
ccaucgugaagaagccu

SEQ ID NO: 2685361 - RNA, 18 nt, Human
ccaucgugaagaagccug

SEQ ID NO: 2685362 - RNA, 20 nt, Human
ccaucgugaagaagccugua

SEQ ID NO: 2685363 - RNA, 14 nt, Human
ccauggccuuauga

SEQ ID NO: 2685364 - RNA, 16 nt, Human
ccauggcucagggugg

SEQ ID NO: 2685365 - RNA, 17 nt, Human
ccauggcucaggguggu

SEQ ID NO: 2685366 - RNA, 16 nt, Human
ccaucugccccacagu

SEQ ID NO: 2685367 - RNA, 17 nt, Human
ccaucugccccacaguc

SEQ ID NO: 2685368 - RNA, 19 nt, Human
ccaucugccccacagucuc

SEQ ID NO: 2685369 - RNA, 20 nt, Human
ccaucugccccacagucucc

SEQ ID NO: 2685370 - RNA, 14 nt, Human
ccaucugcaccccu

SEQ ID NO: 2685371 - RNA, 12 nt, Human
ccaucugcaccc

SEQ ID NO: 2685372 - RNA, 17 nt, Human
ccaucugcaccccuucu

SEQ ID NO: 2685373 - RNA, 20 nt, Human
ccaucugcaccccuucucuc

SEQ ID NO: 2685374 - RNA, 22 nt, Human
ccaucugcaccccuucucuccu

SEQ ID NO: 2685375 - RNA, 23 nt, Human
ccaucugcaccccuucucuccuc

SEQ ID NO: 2685376 - RNA, 21 nt, Human
ccaguguuugggaugaccagg

SEQ ID NO: 2685377 - RNA, 19 nt, Human
ccaguuaaaauguguuucu

SEQ ID NO: 2685378 - RNA, 13 nt, Human
ccagugugggcuu

SEQ ID NO: 2685379 - RNA, 18 nt, Human
ccagugugggcuugacca

SEQ ID NO: 2685380 - RNA, 20 nt, Human
ccagugugggcuugaccagg

SEQ ID NO: 2685381 - RNA, 21 nt, Human
ccagugucuauaaaagaaaca

SEQ ID NO: 2685382 - RNA, 20 nt, Human
ccagugccgagaaggaagcc

SEQ ID NO: 2685383 - RNA, 16 nt, Human
ccagucuguggaucag

SEQ ID NO: 2685384 - RNA, 24 nt, Human
ccagguucuccguuagcuccugug

SEQ ID NO: 2685385 - RNA, 22 nt, Human
ccagguucuccguuagcuccug

SEQ ID NO: 2685386 - RNA, 23 nt, Human
ccagguucuccguuagcuccugu

SEQ ID NO: 2685387 - RNA, 19 nt, Human
ccagguaccagcugcgcuu

SEQ ID NO: 2685388 - RNA, 14 nt, Human
ccagguuccgaaga

SEQ ID NO: 2685389 - RNA, 21 nt, Human
ccagguucuccguuagcuccu

SEQ ID NO: 2685390 - RNA, 12 nt, Human
ccagucugugga

SEQ ID NO: 2685391 - RNA, 13 nt, Human
ccagucuguggau

SEQ ID NO: 2685392 - RNA, 13 nt, Human
ccagggagccuuu

SEQ ID NO: 2685393 - RNA, 12 nt, Human
ccagggagccuu

SEQ ID NO: 2685394 - RNA, 14 nt, Human
ccagggagccuuug

SEQ ID NO: 2685395 - RNA, 12 nt, Human
ccagggcuccug

SEQ ID NO: 2685396 - RNA, 13 nt, Human
ccagggcuccugc

SEQ ID NO: 2685397 - RNA, 14 nt, Human
ccagggcuccugca

SEQ ID NO: 2685398 - RNA, 20 nt, Human
ccagggcuccugcacuuacu

SEQ ID NO: 2685399 - RNA, 15 nt, Human
ccagguaccagcugc

SEQ ID NO: 2685400 - RNA, 17 nt, Human
ccagguaccagcugcgc

SEQ ID NO: 2685401 - RNA, 18 nt, Human
ccagguaccagcugcgcu

SEQ ID NO: 2685402 - RNA, 23 nt, Human
ccagguaccagcugcgcuugcuu

SEQ ID NO: 2685403 - RNA, 23 nt, Human
ccaggccagccuccgagagggag

SEQ ID NO: 2685404 - RNA, 11 nt, Human
ccagccucccu

SEQ ID NO: 2685405 - RNA, 13 nt, Human
ccaggagccucac

SEQ ID NO: 2685406 - RNA, 17 nt, Human
ccaggagccugcccagc

SEQ ID NO: 2685407 - RNA, 16 nt, Human
ccaggagccugcccag

SEQ ID NO: 2685408 - RNA, 19 nt, Human
ccaggcuauguauaaaaua

SEQ ID NO: 2685409 - RNA, 20 nt, Human
ccaggcuauguauaaaauac

SEQ ID NO: 2685410 - RNA, 22 nt, Human
ccaggcuauguauaaaauacau

SEQ ID NO: 2685411 - RNA, 13 nt, Human
ccaggcucacuca

SEQ ID NO: 2685412 - RNA, 17 nt, Human
ccaggcucacucacaga

SEQ ID NO: 2685413 - RNA, 18 nt, Human
ccaggcucacucacagag

SEQ ID NO: 2685414 - RNA, 20 nt, Human
ccaggcucacucacagaguc

SEQ ID NO: 2685415 - RNA, 15 nt, Human
ccaggccauucugcc

SEQ ID NO: 2685416 - RNA, 17 nt, Human
ccaggccauucugccgc

SEQ ID NO: 2685417 - RNA, 19 nt, Human
ccaggccgcgcccuuuccc

SEQ ID NO: 2685418 - RNA, 11 nt, Human
ccagccuccuc

SEQ ID NO: 2685419 - RNA, 12 nt, Human
ccagccuccucu

SEQ ID NO: 2685420 - RNA, 13 nt, Human
ccagccuccucug

SEQ ID NO: 2685421 - RNA, 18 nt, Human
ccagccuccgagagggag

SEQ ID NO: 2685422 - RNA, 19 nt, Human
ccagccuccgagagggaga

SEQ ID NO: 2685423 - RNA, 21 nt, Human
ccagccuccgagagggagaga

SEQ ID NO: 2685424 - RNA, 14 nt, Human
ccagccuccucugg

SEQ ID NO: 2685425 - RNA, 15 nt, Human
ccagccuccucugga

SEQ ID NO: 2685426 - RNA, 17 nt, Human
ccuuggugccucuugua

SEQ ID NO: 2685427 - RNA, 13 nt, Human
ccuugauuucaaa

SEQ ID NO: 2685428 - RNA, 19 nt, Human
ccuugauucccuuguuauu

SEQ ID NO: 2685429 - RNA, 19 nt, Human
ccuuguuacuucugaggua

SEQ ID NO: 2685430 - RNA, 16 nt, Human
ccuuguuacuucugag

SEQ ID NO: 2685431 - RNA, 18 nt, Human
ccuuguuacuucugaggu

SEQ ID NO: 2685432 - RNA, 17 nt, Human
ccuuguccucagccagu

SEQ ID NO: 2685433 - RNA, 18 nt, Human
ccuugaaacuuugggaaa

SEQ ID NO: 2685434 - RNA, 19 nt, Human
ccuugaaacuuugggaaaa

SEQ ID NO: 2685435 - RNA, 18 nt, Human
ccuugaagaacugcaggc

SEQ ID NO: 2685436 - RNA, 21 nt, Human
ccuugaagaacugcaggcccu

SEQ ID NO: 2685437 - RNA, 22 nt, Human
ccuugaagaacugcaggcccug

SEQ ID NO: 2685438 - RNA, 23 nt, Human
ccuugaagaacugcaggcccugg

SEQ ID NO: 2685439 - RNA, 18 nt, Human
ccuugaagaaccucucac

SEQ ID NO: 2685440 - RNA, 17 nt, Human
ccuugaagaaccucuca

SEQ ID NO: 2685441 - RNA, 20 nt, Human
ccuugaguugauucagcucu

SEQ ID NO: 2685442 - RNA, 13 nt, Human
ccuugagggcugc

SEQ ID NO: 2685443 - RNA, 15 nt, Human
ccuugagggcugcag

SEQ ID NO: 2685444 - RNA, 16 nt, Human
ccuugagggcugcagu

SEQ ID NO: 2685445 - RNA, 18 nt, Human
ccuucgggcgucugugug

SEQ ID NO: 2685446 - RNA, 22 nt, Human
ccuucuagucuuggccagccaa

SEQ ID NO: 2685447 - RNA, 21 nt, Human
ccuucuauagcaucacuuaaa

SEQ ID NO: 2685448 - RNA, 19 nt, Human
ccuucuauagcaucacuua

SEQ ID NO: 2685449 - RNA, 20 nt, Human
ccuucagacacccucaaccu

SEQ ID NO: 2685450 - RNA, 17 nt, Human
ccuucagacacccucaa

SEQ ID NO: 2685451 - RNA, 11 nt, Human
ccuucagacac

SEQ ID NO: 2685452 - RNA, 10 nt, Human
ccuucagaca

SEQ ID NO: 2685453 - RNA, 19 nt, Human
ccuucgcuucuugccucug

SEQ ID NO: 2685454 - RNA, 20 nt, Human
ccuucgcuucuugccucugu

SEQ ID NO: 2685455 - RNA, 21 nt, Human
ccuucgcuucuugccucugug

SEQ ID NO: 2685456 - RNA, 23 nt, Human
ccuucgcuucuugccucugugcu

SEQ ID NO: 2685457 - RNA, 23 nt, Human
ccuuccuuuucccugcuuccagg

SEQ ID NO: 2685458 - RNA, 20 nt, Human
ccuuccuuuucccugcuucc

SEQ ID NO: 2685459 - RNA, 21 nt, Human
ccuuccuuuucccugcuucca

SEQ ID NO: 2685460 - RNA, 16 nt, Human
ccuuccuuuucccugc

SEQ ID NO: 2685461 - RNA, 17 nt, Human
ccuuccuuuucccugcu

SEQ ID NO: 2685462 - RNA, 18 nt, Human
ccuuccuuuucccugcuu

SEQ ID NO: 2685463 - RNA, 19 nt, Human
ccuuccuuuucccugcuuc

SEQ ID NO: 2685464 - RNA, 16 nt, Human
ccuucgcuucuugccu

SEQ ID NO: 2685465 - RNA, 17 nt, Human
ccuucgcuucuugccuc

SEQ ID NO: 2685466 - RNA, 18 nt, Human
ccuucgcuucuugccucu

SEQ ID NO: 2685467 - RNA, 15 nt, Human
ccuuccuuuucccug

SEQ ID NO: 2685468 - RNA, 13 nt, Human
ccuuccuuuuccc

SEQ ID NO: 2685469 - RNA, 17 nt, Human
ccuuccucucuccagau

SEQ ID NO: 2685470 - RNA, 15 nt, Human
ccuuccucucuccag

SEQ ID NO: 2685471 - RNA, 14 nt, Human
ccuuacuaauuaua

SEQ ID NO: 2685472 - RNA, 10 nt, Human
ccugugugca

SEQ ID NO: 2685473 - RNA, 12 nt, Human
ccugugugcagg

SEQ ID NO: 2685474 - RNA, 13 nt, Human
ccugugugcaggu

SEQ ID NO: 2685475 - RNA, 16 nt, Human
ccugugugcagguucc

SEQ ID NO: 2685476 - RNA, 19 nt, Human
ccuguguccaugcgcucag

SEQ ID NO: 2685477 - RNA, 13 nt, Human
ccuguguccaugc

SEQ ID NO: 2685478 - RNA, 13 nt, Human
ccuguguuaauuu

SEQ ID NO: 2685479 - RNA, 23 nt, Human
ccuguguuaauuuaaguuuugac

SEQ ID NO: 2685480 - RNA, 17 nt, Human
ccuguguuaauuuaagu

SEQ ID NO: 2685481 - RNA, 14 nt, Human
ccuguguuaauuua

SEQ ID NO: 2685482 - RNA, 15 nt, Human
ccuuaaaaccaaaga

SEQ ID NO: 2685483 - RNA, 16 nt, Human
ccuuaaaaccaaagag

SEQ ID NO: 2685484 - RNA, 20 nt, Human
ccuuaaaacaucauuccuuu

SEQ ID NO: 2685485 - RNA, 17 nt, Human
ccuuaaaaccaaagagg

SEQ ID NO: 2685486 - RNA, 16 nt, Human
ccuuaacaguuguauu

SEQ ID NO: 2685487 - RNA, 13 nt, Human
ccuuaaauuuaau

SEQ ID NO: 2685488 - RNA, 17 nt, Human
ccuuaacaguuguauuu

SEQ ID NO: 2685489 - RNA, 19 nt, Human
ccuuaagugaggaaaucaa

SEQ ID NO: 2685490 - RNA, 17 nt, Human
ccuuaauucacucccac

SEQ ID NO: 2685491 - RNA, 20 nt, Human
ccuuaagugaggaaaucaaa

SEQ ID NO: 2685492 - RNA, 22 nt, Human
ccuuaagugaggaaaucaaagu

SEQ ID NO: 2685493 - RNA, 13 nt, Human
ccuuaauuuccuu

SEQ ID NO: 2685494 - RNA, 15 nt, Human
ccuuaauuuccuuuu

SEQ ID NO: 2685495 - RNA, 18 nt, Human
ccuuaauuuccuuuuuga

SEQ ID NO: 2685496 - RNA, 19 nt, Human
ccuuaauuuccuuuuugac

SEQ ID NO: 2685497 - RNA, 20 nt, Human
ccuuaauuuccuuuuugaca

SEQ ID NO: 2685498 - RNA, 22 nt, Human
ccuuaauuuccuuuuugacacu

SEQ ID NO: 2685499 - RNA, 23 nt, Human
ccuuaauuuccuuuuugacacug

SEQ ID NO: 2685500 - RNA, 24 nt, Human
ccuuaauuuccuuuuugacacuga

SEQ ID NO: 2685501 - RNA, 16 nt, Human
ccuuaacugcauccag

SEQ ID NO: 2685502 - RNA, 13 nt, Human
ccuuacuggcuua

SEQ ID NO: 2685503 - RNA, 18 nt, Human
ccuuacuggcuuaccucc

SEQ ID NO: 2685504 - RNA, 20 nt, Human
cgagauugcaccacugcacu

SEQ ID NO: 2685505 - RNA, 20 nt, Human
cgagagucuggcccuagacu

SEQ ID NO: 2685506 - RNA, 14 nt, Human
cgagaccagccugg

SEQ ID NO: 2685507 - RNA, 13 nt, Human
cgagaccauccug

SEQ ID NO: 2685508 - RNA, 15 nt, Human
cgagaccauccuggc

SEQ ID NO: 2685509 - RNA, 16 nt, Human
cgagaccauccuggcu

SEQ ID NO: 2685510 - RNA, 14 nt, Human
cgagaggugggcca

SEQ ID NO: 2685511 - RNA, 15 nt, Human
cgagaggugggccag

SEQ ID NO: 2685512 - RNA, 19 nt, Human
cgagaggugggccagucug

SEQ ID NO: 2685513 - RNA, 20 nt, Human
cgagaggugggccagucugu

SEQ ID NO: 2685514 - RNA, 19 nt, Human
cgagagucuggcccuagac

SEQ ID NO: 2685515 - RNA, 17 nt, Human
cgagagucuggcccuag

SEQ ID NO: 2685516 - RNA, 15 nt, Human
cgagagucuggcccu

SEQ ID NO: 2685517 - RNA, 14 nt, Human
cgagagucuggccc

SEQ ID NO: 2685518 - RNA, 22 nt, Human
cgagaggugggccagucugugg

SEQ ID NO: 2685519 - RNA, 23 nt, Human
cgagaggugggccagucugugga

SEQ ID NO: 2685520 - RNA, 14 nt, Human
cgaauagacaucaa

SEQ ID NO: 2685521 - RNA, 15 nt, Human
cgaauagacaucaaa

SEQ ID NO: 2685522 - RNA, 17 nt, Human
cgaauagacaucaaacu

SEQ ID NO: 2685523 - RNA, 16 nt, Human
cgacuuucugccugga

SEQ ID NO: 2685524 - RNA, 17 nt, Human
cgagaaagaggcaccag

SEQ ID NO: 2685525 - RNA, 20 nt, Human
cgagaaauaaaguuugcuua

SEQ ID NO: 2685526 - RNA, 19 nt, Human
cgagaaagaggcaccagga

SEQ ID NO: 2685527 - RNA, 21 nt, Human
cgagaaagaggcaccaggaag

SEQ ID NO: 2685528 - RNA, 19 nt, Human
cgacuuguuuuugcacaug

SEQ ID NO: 2685529 - RNA, 13 nt, Human
cgacuuucugccu

SEQ ID NO: 2685530 - RNA, 14 nt, Human
cgacuuucugccug

SEQ ID NO: 2685531 - RNA, 15 nt, Human
cgacuuucugccugg

SEQ ID NO: 2685532 - RNA, 10 nt, Human
cgaauaaaug

SEQ ID NO: 2685533 - RNA, 18 nt, Human
cgaaguucaagaucaaaa

SEQ ID NO: 2685534 - RNA, 18 nt, Human
cgaagacccucuugccca

SEQ ID NO: 2685535 - RNA, 20 nt, Human
cgaagacccucuugcccauc

SEQ ID NO: 2685536 - RNA, 23 nt, Human
cgaagacccucuugcccauccug

SEQ ID NO: 2685537 - RNA, 17 nt, Human
cgaaguucaagaucaaa

SEQ ID NO: 2685538 - RNA, 16 nt, Human
cgaaguucaagaucaa

SEQ ID NO: 2685539 - RNA, 14 nt, Human
cgaagaagaugcuc

SEQ ID NO: 2685540 - RNA, 17 nt, Human
cgaaccuuggccugggc

SEQ ID NO: 2685541 - RNA, 19 nt, Human
cgaaccuuggccugggccg

SEQ ID NO: 2685542 - RNA, 18 nt, Human
cgaaccuuggccugggcc

SEQ ID NO: 2685543 - RNA, 20 nt, Human
cgaaaggaugaaagugacca

SEQ ID NO: 2685544 - RNA, 11 nt, Human
ccuuuuacugg

SEQ ID NO: 2685545 - RNA, 12 nt, Human
ccuuuuacuggu

SEQ ID NO: 2685546 - RNA, 18 nt, Human
ccuuuuacugguugcaug

SEQ ID NO: 2685547 - RNA, 19 nt, Human
ccuuuuacugguugcaugg

SEQ ID NO: 2685548 - RNA, 20 nt, Human
ccuuuuacugguugcaugga

SEQ ID NO: 2685549 - RNA, 12 nt, Human
ccuuuuacugug

SEQ ID NO: 2685550 - RNA, 12 nt, Human
ccuuuucagggc

SEQ ID NO: 2685551 - RNA, 13 nt, Human
ccuuuucagggcu

SEQ ID NO: 2685552 - RNA, 18 nt, Human
ccuuuucagggcuggcuc

SEQ ID NO: 2685553 - RNA, 18 nt, Human
cgaaaccugggauucagg

SEQ ID NO: 2685554 - RNA, 16 nt, Human
ccuuuuuuuuuucuug

SEQ ID NO: 2685555 - RNA, 22 nt, Human
cgccaggggaaaaucagccugc

SEQ ID NO: 2685556 - RNA, 19 nt, Human
cgcagagcgcgccccuagc

SEQ ID NO: 2685557 - RNA, 13 nt, Human
cgcagagcgcgcc

SEQ ID NO: 2685558 - RNA, 14 nt, Human
cgcaccauucugac

SEQ ID NO: 2685559 - RNA, 15 nt, Human
cgcaccauucugacu

SEQ ID NO: 2685560 - RNA, 17 nt, Human
cgauguuauuagauguu

SEQ ID NO: 2685561 - RNA, 15 nt, Human
cgagcaugucgugga

SEQ ID NO: 2685562 - RNA, 17 nt, Human
cgccaugcuccuggccc

SEQ ID NO: 2685563 - RNA, 13 nt, Human
ccugcaauauuug

SEQ ID NO: 2685564 - RNA, 16 nt, Human
ccugcaauauuugaau

SEQ ID NO: 2685565 - RNA, 19 nt, Human
ccugcacgucaugggaggg

SEQ ID NO: 2685566 - RNA, 23 nt, Human
ccugcacgucaugggagggggcu

SEQ ID NO: 2685567 - RNA, 12 nt, Human
ccugcacuccuc

SEQ ID NO: 2685568 - RNA, 23 nt, Human
ccugcacuccucagggcagccuc

SEQ ID NO: 2685569 - RNA, 18 nt, Human
ccugcacgucaugggagg

SEQ ID NO: 2685570 - RNA, 17 nt, Human
ccugcagggccauggcu

SEQ ID NO: 2685571 - RNA, 19 nt, Human
ccugcagggccauggcuca

SEQ ID NO: 2685572 - RNA, 20 nt, Human
ccugcagggccauggcucag

SEQ ID NO: 2685573 - RNA, 13 nt, Human
ccugauuccucuc

SEQ ID NO: 2685574 - RNA, 12 nt, Human
ccugcagggcca

SEQ ID NO: 2685575 - RNA, 16 nt, Human
ccugccaggcauggug

SEQ ID NO: 2685576 - RNA, 15 nt, Human
ccugccaggcauggu

SEQ ID NO: 2685577 - RNA, 13 nt, Human
ccugcccccagcc

SEQ ID NO: 2685578 - RNA, 14 nt, Human
ccugcccccagccc

SEQ ID NO: 2685579 - RNA, 15 nt, Human
ccugcccccagcccc

SEQ ID NO: 2685580 - RNA, 17 nt, Human
ccugcccccagccccgg

SEQ ID NO: 2685581 - RNA, 16 nt, Human
ccugagcuuucugcua

SEQ ID NO: 2685582 - RNA, 14 nt, Human
ccugagcuuucugc

SEQ ID NO: 2685583 - RNA, 13 nt, Human
ccugacauugucu

SEQ ID NO: 2685584 - RNA, 23 nt, Human
ccugacagagggauggaggaaga

SEQ ID NO: 2685585 - RNA, 14 nt, Human
ccugacagaaggug

SEQ ID NO: 2685586 - RNA, 15 nt, Human
ccugacagaaggugc

SEQ ID NO: 2685587 - RNA, 16 nt, Human
ccugacagaaggugcc

SEQ ID NO: 2685588 - RNA, 17 nt, Human
ccugacagaaggugcca

SEQ ID NO: 2685589 - RNA, 14 nt, Human
ccugcgacccuggg

SEQ ID NO: 2685590 - RNA, 15 nt, Human
ccugcgacccugggg

SEQ ID NO: 2685591 - RNA, 16 nt, Human
ccugcgacccuggggg

SEQ ID NO: 2685592 - RNA, 17 nt, Human
ccugcgacccugggggc

SEQ ID NO: 2685593 - RNA, 21 nt, Human
ccugcgacccugggggcacag

SEQ ID NO: 2685594 - RNA, 14 nt, Human
ccugcgccugcugc

SEQ ID NO: 2685595 - RNA, 13 nt, Human
ccugcgccugcug

SEQ ID NO: 2685596 - RNA, 15 nt, Human
ccugcgccugcugca

SEQ ID NO: 2685597 - RNA, 18 nt, Human
ccugcgccugcugcaugc

SEQ ID NO: 2685598 - RNA, 20 nt, Human
ccugcggguggggcuugggg

SEQ ID NO: 2685599 - RNA, 21 nt, Human
ccugcggguggggcuuggggc

SEQ ID NO: 2685600 - RNA, 24 nt, Human
ccugcggguggggcuuggggcuca

SEQ ID NO: 2685601 - RNA, 12 nt, Human
ccugccuggccc

SEQ ID NO: 2685602 - RNA, 13 nt, Human
ccugccuggcccc

SEQ ID NO: 2685603 - RNA, 15 nt, Human
ccugccuggccccca

SEQ ID NO: 2685604 - RNA, 14 nt, Human
ccugccuuaaguga

SEQ ID NO: 2685605 - RNA, 20 nt, Human
ccugccccgcccccaguccc

SEQ ID NO: 2685606 - RNA, 18 nt, Human
ccugccccggagcuggag

SEQ ID NO: 2685607 - RNA, 13 nt, Human
ccugccccgcccc

SEQ ID NO: 2685608 - RNA, 18 nt, Human
ccugccccgcccccaguc

SEQ ID NO: 2685609 - RNA, 18 nt, Human
ccugcccccagccccggg

SEQ ID NO: 2685610 - RNA, 16 nt, Human
ccugccgucaccacca

SEQ ID NO: 2685611 - RNA, 17 nt, Human
ccugccgucaccaccac

SEQ ID NO: 2685612 - RNA, 18 nt, Human
ccugccgucaccaccacc

SEQ ID NO: 2685613 - RNA, 22 nt, Human
ccugccgucaccaccaccccua

SEQ ID NO: 2685614 - RNA, 23 nt, Human
ccugccgucaccaccaccccuac

SEQ ID NO: 2685615 - RNA, 16 nt, Human
ccugccccucagagac

SEQ ID NO: 2685616 - RNA, 19 nt, Human
ccugccggccccggccgcc

SEQ ID NO: 2685617 - RNA, 17 nt, Human
ccugcucauuaugccac

SEQ ID NO: 2685618 - RNA, 23 nt, Human
ccugcucauuaugccacuuccuu

SEQ ID NO: 2685619 - RNA, 18 nt, Human
ccugcguccuccucaccu

SEQ ID NO: 2685620 - RNA, 19 nt, Human
ccugcguccuccucaccuc

SEQ ID NO: 2685621 - RNA, 13 nt, Human
ccugcguccuccu

SEQ ID NO: 2685622 - RNA, 15 nt, Human
ccugcguccuccuca

SEQ ID NO: 2685623 - RNA, 16 nt, Human
ccugcguccuccucac

SEQ ID NO: 2685624 - RNA, 17 nt, Human
ccugcguccuccucacc

SEQ ID NO: 2685625 - RNA, 21 nt, Human
ccugcuuccaggaaacuccac

SEQ ID NO: 2685626 - RNA, 16 nt, Human
ccuggaagaacaggcc

SEQ ID NO: 2685627 - RNA, 17 nt, Human
ccuggaagaacaggccu

SEQ ID NO: 2685628 - RNA, 18 nt, Human
ccuggaagaacaggccuc

SEQ ID NO: 2685629 - RNA, 20 nt, Human
ccuggaagaacaggccucuc

SEQ ID NO: 2685630 - RNA, 23 nt, Human
ccuggaagaacaggccucuccau

SEQ ID NO: 2685631 - RNA, 19 nt, Human
ccuggaacaauauuuuaug

SEQ ID NO: 2685632 - RNA, 20 nt, Human
ccuggaacaauauuuuaugg

SEQ ID NO: 2685633 - RNA, 23 nt, Human
ccugcugugauuccacuacaccu

SEQ ID NO: 2685634 - RNA, 22 nt, Human
ccugcuuaaucuucaaagccuu

SEQ ID NO: 2685635 - RNA, 23 nt, Human
ccugcuuaaucuucaaagccuuc

SEQ ID NO: 2685636 - RNA, 20 nt, Human
ccugcugugauuccacuaca

SEQ ID NO: 2685637 - RNA, 17 nt, Human
ccugcgcucucuuugca

SEQ ID NO: 2685638 - RNA, 24 nt, Human
ccugcuucagucccuuccccaugc

SEQ ID NO: 2685639 - RNA, 14 nt, Human
ccugcuuccaggaa

SEQ ID NO: 2685640 - RNA, 24 nt, Human
ccuggcugagguuccucugccugc

SEQ ID NO: 2685641 - RNA, 13 nt, Human
ccuggcugccggc

SEQ ID NO: 2685642 - RNA, 15 nt, Human
ccuggcugccggcac

SEQ ID NO: 2685643 - RNA, 13 nt, Human
ccuggcugcugcc

SEQ ID NO: 2685644 - RNA, 14 nt, Human
ccuggcugcugccc

SEQ ID NO: 2685645 - RNA, 15 nt, Human
ccuggcugcugcccc

SEQ ID NO: 2685646 - RNA, 16 nt, Human
ccuggcugcugccccc

SEQ ID NO: 2685647 - RNA, 17 nt, Human
ccuggcugcugccccca

SEQ ID NO: 2685648 - RNA, 18 nt, Human
ccuggcugcugcccccac

SEQ ID NO: 2685649 - RNA, 20 nt, Human
ccuggcugcugcccccaccc

SEQ ID NO: 2685650 - RNA, 21 nt, Human
ccuggcugcugcccccacccc

SEQ ID NO: 2685651 - RNA, 22 nt, Human
ccuggcugcugcccccaccccg

SEQ ID NO: 2685652 - RNA, 15 nt, Human
ccuggcagcccagag

SEQ ID NO: 2685653 - RNA, 17 nt, Human
ccuggcagcccagagac

SEQ ID NO: 2685654 - RNA, 18 nt, Human
ccuggcagcccagagacu

SEQ ID NO: 2685655 - RNA, 15 nt, Human
ccuggaauugccagc

SEQ ID NO: 2685656 - RNA, 17 nt, Human
ccuggaauugccagcug

SEQ ID NO: 2685657 - RNA, 13 nt, Human
ccuggagauccuc

SEQ ID NO: 2685658 - RNA, 15 nt, Human
ccuggagauccuccu

SEQ ID NO: 2685659 - RNA, 19 nt, Human
ccuggagacuuagggcacc

SEQ ID NO: 2685660 - RNA, 23 nt, Human
ccuggagacuuagggcaccaggg

SEQ ID NO: 2685661 - RNA, 11 nt, Human
ccuggcagccc

SEQ ID NO: 2685662 - RNA, 13 nt, Human
ccuggcagcccag

SEQ ID NO: 2685663 - RNA, 14 nt, Human
ccuggcagcccaga

SEQ ID NO: 2685664 - RNA, 16 nt, Human
ccuggagauccuccug

SEQ ID NO: 2685665 - RNA, 17 nt, Human
ccuggagauccuccugc

SEQ ID NO: 2685666 - RNA, 18 nt, Human
ccuggagauccuccugca

SEQ ID NO: 2685667 - RNA, 21 nt, Human
ccuggcuguucugugguuccu

SEQ ID NO: 2685668 - RNA, 15 nt, Human
ccugggugggcucug

SEQ ID NO: 2685669 - RNA, 16 nt, Human
ccugggugggcucugu

SEQ ID NO: 2685670 - RNA, 17 nt, Human
ccugggugggcucugug

SEQ ID NO: 2685671 - RNA, 15 nt, Human
cccggggacccugug

SEQ ID NO: 2685672 - RNA, 16 nt, Human
cccggggacccuguga

SEQ ID NO: 2685673 - RNA, 17 nt, Human
cccggggacccugugac

SEQ ID NO: 2685674 - RNA, 18 nt, Human
cccggggacccugugaca

SEQ ID NO: 2685675 - RNA, 21 nt, Human
cccggggacccugugacaugg

SEQ ID NO: 2685676 - RNA, 16 nt, Human
cccggggcccagggca

SEQ ID NO: 2685677 - RNA, 15 nt, Human
cccggggcccagggc

SEQ ID NO: 2685678 - RNA, 18 nt, Human
cccgguggcggccccagc

SEQ ID NO: 2685679 - RNA, 19 nt, Human
cccgguggcggccccagca

SEQ ID NO: 2685680 - RNA, 16 nt, Human
cccgggguggccacag

SEQ ID NO: 2685681 - RNA, 14 nt, Human
cccgugggcucccg

SEQ ID NO: 2685682 - RNA, 14 nt, Human
cccguggggcaggg

SEQ ID NO: 2685683 - RNA, 22 nt, Human
cccguggggcagggagcugggc

SEQ ID NO: 2685684 - RNA, 13 nt, Human
cccguccugccug

SEQ ID NO: 2685685 - RNA, 14 nt, Human
cccguccugccugu

SEQ ID NO: 2685686 - RNA, 15 nt, Human
cccguccugccugug

SEQ ID NO: 2685687 - RNA, 16 nt, Human
cccguccugccugugg

SEQ ID NO: 2685688 - RNA, 17 nt, Human
cccguccugccuguggc

SEQ ID NO: 2685689 - RNA, 15 nt, Human
cccuaaucuaugguc

SEQ ID NO: 2685690 - RNA, 20 nt, Human
cccggugggacccccguggg

SEQ ID NO: 2685691 - RNA, 22 nt, Human
cccuaaucuauggucgggagac

SEQ ID NO: 2685692 - RNA, 20 nt, Human
cccuacaguugaaaaacagc

SEQ ID NO: 2685693 - RNA, 18 nt, Human
cccguuccaccccaagag

SEQ ID NO: 2685694 - RNA, 21 nt, Human
cccuagcuuuagacccugggu

SEQ ID NO: 2685695 - RNA, 17 nt, Human
cccuagcuuuagacccu

SEQ ID NO: 2685696 - RNA, 18 nt, Human
cccuagcuuuagacccug

SEQ ID NO: 2685697 - RNA, 19 nt, Human
cccuagcuuuagacccugg

SEQ ID NO: 2685698 - RNA, 20 nt, Human
cccuagcuccuccccuuccu

SEQ ID NO: 2685699 - RNA, 23 nt, Human
cccuagccgguuccugucccugc

SEQ ID NO: 2685700 - RNA, 18 nt, Human
cccuagccgguuccuguc

SEQ ID NO: 2685701 - RNA, 17 nt, Human
cccuagccgguuccugu

SEQ ID NO: 2685702 - RNA, 19 nt, Human
cccuacucccugcagaugc

SEQ ID NO: 2685703 - RNA, 21 nt, Human
cccuacucccugcagaugcca

SEQ ID NO: 2685704 - RNA, 15 nt, Human
cccuacucccugcag

SEQ ID NO: 2685705 - RNA, 16 nt, Human
cccuacucccugcaga

SEQ ID NO: 2685706 - RNA, 18 nt, Human
cccuacucccugcagaug

SEQ ID NO: 2685707 - RNA, 23 nt, Human
cccuacuauucaguggcgagaaa

SEQ ID NO: 2685708 - RNA, 12 nt, Human
cccgcugcugug

SEQ ID NO: 2685709 - RNA, 16 nt, Human
cccgcugcugugcaac

SEQ ID NO: 2685710 - RNA, 16 nt, Human
cccgccgauagaggga

SEQ ID NO: 2685711 - RNA, 11 nt, Human
cccgggcccca

SEQ ID NO: 2685712 - RNA, 21 nt, Human
cccucuccuuuguucccggcu

SEQ ID NO: 2685713 - RNA, 16 nt, Human
cccucugcacccagaa

SEQ ID NO: 2685714 - RNA, 16 nt, Human
cccucugaacuugccu

SEQ ID NO: 2685715 - RNA, 18 nt, Human
cccuccagaaccaccccg

SEQ ID NO: 2685716 - RNA, 14 nt, Human
cccuccccauggag

SEQ ID NO: 2685717 - RNA, 23 nt, Human
cccucccccagccaugccagcug

SEQ ID NO: 2685718 - RNA, 13 nt, Human
cccuccaccccag

SEQ ID NO: 2685719 - RNA, 14 nt, Human
cccuccaccccagg

SEQ ID NO: 2685720 - RNA, 15 nt, Human
cccuccaccccagga

SEQ ID NO: 2685721 - RNA, 18 nt, Human
cccucuggucgcuccugc

SEQ ID NO: 2685722 - RNA, 19 nt, Human
cccucuggucgcuccugcc

SEQ ID NO: 2685723 - RNA, 20 nt, Human
cccucuggucgcuccugccc

SEQ ID NO: 2685724 - RNA, 22 nt, Human
cccucuggucgcuccugcccac

SEQ ID NO: 2685725 - RNA, 16 nt, Human
cccugaaagcccugag

SEQ ID NO: 2685726 - RNA, 15 nt, Human
cccugaaagcccuga

SEQ ID NO: 2685727 - RNA, 13 nt, Human
cccugccacucac

SEQ ID NO: 2685728 - RNA, 18 nt, Human
cccugccacucacuaggc

SEQ ID NO: 2685729 - RNA, 19 nt, Human
cccugccacucacuaggcc

SEQ ID NO: 2685730 - RNA, 13 nt, Human
cccugcacgucau

SEQ ID NO: 2685731 - RNA, 15 nt, Human
cccugcacgucaugg

SEQ ID NO: 2685732 - RNA, 14 nt, Human
cccugcacgucaug

SEQ ID NO: 2685733 - RNA, 15 nt, Human
cccugagucugggca

SEQ ID NO: 2685734 - RNA, 16 nt, Human
cccugagucugggcag

SEQ ID NO: 2685735 - RNA, 13 nt, Human
cccugggcccugg

SEQ ID NO: 2685736 - RNA, 16 nt, Human
cccugggcccugggcu

SEQ ID NO: 2685737 - RNA, 18 nt, Human
cccugggcccugggcugg

SEQ ID NO: 2685738 - RNA, 19 nt, Human
cccugggcccugggcugga

SEQ ID NO: 2685739 - RNA, 20 nt, Human
cccugccacucacuaggccc

SEQ ID NO: 2685740 - RNA, 21 nt, Human
cccacaaaggagagcuagcag

SEQ ID NO: 2685741 - RNA, 17 nt, Human
cccacagcgucccuggc

SEQ ID NO: 2685742 - RNA, 18 nt, Human
cccacagcgucccuggcg

SEQ ID NO: 2685743 - RNA, 18 nt, Human
cccaccgguccagcuggc

SEQ ID NO: 2685744 - RNA, 16 nt, Human
cccaccgguccagcug

SEQ ID NO: 2685745 - RNA, 17 nt, Human
cccaccgguccagcugg

SEQ ID NO: 2685746 - RNA, 17 nt, Human
cccacgagaccccggcu

SEQ ID NO: 2685747 - RNA, 21 nt, Human
cccacuuugcuguuccuuacu

SEQ ID NO: 2685748 - RNA, 22 nt, Human
cccacuuugcuguuccuuacuu

SEQ ID NO: 2685749 - RNA, 14 nt, Human
cccacuucugccag

SEQ ID NO: 2685750 - RNA, 13 nt, Human
cccacuugccucu

SEQ ID NO: 2685751 - RNA, 14 nt, Human
cccacuugccucuu

SEQ ID NO: 2685752 - RNA, 15 nt, Human
cccacuugccucuuc

SEQ ID NO: 2685753 - RNA, 21 nt, Human
cccacuugccucuuccuugaa

SEQ ID NO: 2685754 - RNA, 14 nt, Human
cccaccuccaggcu

SEQ ID NO: 2685755 - RNA, 21 nt, Human
cccacgacugcccggcagggu

SEQ ID NO: 2685756 - RNA, 20 nt, Human
cccacgacugcccggcaggg

SEQ ID NO: 2685757 - RNA, 13 nt, Human
cccaccugccggc

SEQ ID NO: 2685758 - RNA, 14 nt, Human
cccaccugccggcc

SEQ ID NO: 2685759 - RNA, 16 nt, Human
ccuauauccugugacu

SEQ ID NO: 2685760 - RNA, 13 nt, Human
ccuauauauuucu

SEQ ID NO: 2685761 - RNA, 15 nt, Human
ccuauauauuucuau

SEQ ID NO: 2685762 - RNA, 20 nt, Human
ccuaguuugggaggagcaga

SEQ ID NO: 2685763 - RNA, 16 nt, Human
ccuaguuugugagaaa

SEQ ID NO: 2685764 - RNA, 17 nt, Human
ccuaguuugugagaaac

SEQ ID NO: 2685765 - RNA, 16 nt, Human
ccuaccaauauuaggu

SEQ ID NO: 2685766 - RNA, 20 nt, Human
ccuagggcccccacaguugc

SEQ ID NO: 2685767 - RNA, 12 nt, Human
ccuagggccccc

SEQ ID NO: 2685768 - RNA, 19 nt, Human
ccuaaaauaacaguaugug

SEQ ID NO: 2685769 - RNA, 23 nt, Human
ccuaaaauaacaguaugugggau

SEQ ID NO: 2685770 - RNA, 16 nt, Human
ccgggucuugauucag

SEQ ID NO: 2685771 - RNA, 13 nt, Human
ccuaaaagcacuc

SEQ ID NO: 2685772 - RNA, 22 nt, Human
ccgugugagaagugaaugcugg

SEQ ID NO: 2685773 - RNA, 23 nt, Human
ccgugugagaagugaaugcuggg

SEQ ID NO: 2685774 - RNA, 16 nt, Human
ccgugucugucuggca

SEQ ID NO: 2685775 - RNA, 17 nt, Human
ccgugucugucuggcac

SEQ ID NO: 2685776 - RNA, 23 nt, Human
ccuaauuucuccucccuuccuuu

SEQ ID NO: 2685777 - RNA, 20 nt, Human
ccuaauuucuccucccuucc

SEQ ID NO: 2685778 - RNA, 21 nt, Human
ccgggaccacccugagccggc

SEQ ID NO: 2685779 - RNA, 20 nt, Human
ccgggcgcgguggcucacgc

SEQ ID NO: 2685780 - RNA, 20 nt, Human
ccgggaccacccugagccgg

SEQ ID NO: 2685781 - RNA, 14 nt, Human
ccgguccagcuggc

SEQ ID NO: 2685782 - RNA, 15 nt, Human
ccgguaacuguccug

SEQ ID NO: 2685783 - RNA, 16 nt, Human
ccgguaacuguccugu

SEQ ID NO: 2685784 - RNA, 18 nt, Human
ccgguaacuguccugucc

SEQ ID NO: 2685785 - RNA, 19 nt, Human
ccgguaacuguccuguccu

SEQ ID NO: 2685786 - RNA, 21 nt, Human
ccgguaacuguccuguccugc

SEQ ID NO: 2685787 - RNA, 15 nt, Human
ccggcuuccuuuccc

SEQ ID NO: 2685788 - RNA, 19 nt, Human
ccggcuuccuuucccaagc

SEQ ID NO: 2685789 - RNA, 23 nt, Human
ccggcuuccuuucccaagccuuc

SEQ ID NO: 2685790 - RNA, 20 nt, Human
ccgcugccacguuggagaag

SEQ ID NO: 2685791 - RNA, 13 nt, Human
ccgcugccagccu

SEQ ID NO: 2685792 - RNA, 15 nt, Human
ccgcugccagccuug

SEQ ID NO: 2685793 - RNA, 19 nt, Human
ccgauguuauuagauguua

SEQ ID NO: 2685794 - RNA, 22 nt, Human
ccgaggccuaccccgcagacac

SEQ ID NO: 2685795 - RNA, 16 nt, Human
ccgcgggcacugccgc

SEQ ID NO: 2685796 - RNA, 15 nt, Human
ccgcggagccugcau

SEQ ID NO: 2685797 - RNA, 21 nt, Human
ccgcggggcugucggcgcugc

SEQ ID NO: 2685798 - RNA, 14 nt, Human
ccgcgugugccugu

SEQ ID NO: 2685799 - RNA, 17 nt, Human
ccgcgugugccugugug

SEQ ID NO: 2685800 - RNA, 15 nt, Human
ccgcgaccauguggc

SEQ ID NO: 2685801 - RNA, 18 nt, Human
ccgcgaccauguggccac

SEQ ID NO: 2685802 - RNA, 16 nt, Human
ccgcgccacaggaccc

SEQ ID NO: 2685803 - RNA, 15 nt, Human
ccgcgccacaggacc

SEQ ID NO: 2685804 - RNA, 14 nt, Human
ccgcgcguccagcu

SEQ ID NO: 2685805 - RNA, 17 nt, Human
ccgcgcguccagcugcc

SEQ ID NO: 2685806 - RNA, 23 nt, Human
ccgcgcguccagcugcccuuccg

SEQ ID NO: 2685807 - RNA, 21 nt, Human
ccgcgcuccgggcuuucacgg

SEQ ID NO: 2685808 - RNA, 12 nt, Human
ccgcacagcuca

SEQ ID NO: 2685809 - RNA, 13 nt, Human
ccgcacagcucag

SEQ ID NO: 2685810 - RNA, 14 nt, Human
ccgcacagcucagg

SEQ ID NO: 2685811 - RNA, 16 nt, Human
ccgcacagcucaggag

SEQ ID NO: 2685812 - RNA, 18 nt, Human
ccgcacagcucaggaggc

SEQ ID NO: 2685813 - RNA, 20 nt, Human
ccuccagccccgcgaccaug

SEQ ID NO: 2685814 - RNA, 13 nt, Human
ccuccaggccugc

SEQ ID NO: 2685815 - RNA, 15 nt, Human
ccuccaggccugccu

SEQ ID NO: 2685816 - RNA, 16 nt, Human
ccuccaggccugccuc

SEQ ID NO: 2685817 - RNA, 18 nt, Human
ccuccaggccugccuccc

SEQ ID NO: 2685818 - RNA, 19 nt, Human
ccuccaggccugccuccca

SEQ ID NO: 2685819 - RNA, 20 nt, Human
ccuccaggccugccucccac

SEQ ID NO: 2685820 - RNA, 21 nt, Human
ccuccaggccugccucccacu

SEQ ID NO: 2685821 - RNA, 13 nt, Human
ccuccaccccagg

SEQ ID NO: 2685822 - RNA, 14 nt, Human
ccuccaccccagga

SEQ ID NO: 2685823 - RNA, 15 nt, Human
ccuccaccccaggac

SEQ ID NO: 2685824 - RNA, 16 nt, Human
ccuccaccacccuuuc

SEQ ID NO: 2685825 - RNA, 14 nt, Human
ccuccaggugcaga

SEQ ID NO: 2685826 - RNA, 15 nt, Human
ccuccaggugcagag

SEQ ID NO: 2685827 - RNA, 17 nt, Human
ccuccaggugcagaggu

SEQ ID NO: 2685828 - RNA, 18 nt, Human
ccuccaggugcagaggua

SEQ ID NO: 2685829 - RNA, 14 nt, Human
ccuccccauuuccc

SEQ ID NO: 2685830 - RNA, 15 nt, Human
ccuccccauuuccca

SEQ ID NO: 2685831 - RNA, 20 nt, Human
ccuccccauuucccaucugc

SEQ ID NO: 2685832 - RNA, 21 nt, Human
ccuccccauuucccaucugca

SEQ ID NO: 2685833 - RNA, 22 nt, Human
ccuccccauuucccaucugcac

SEQ ID NO: 2685834 - RNA, 16 nt, Human
ccuccauuugagaaaa

SEQ ID NO: 2685835 - RNA, 17 nt, Human
ccuccauuugagaaaau

SEQ ID NO: 2685836 - RNA, 19 nt, Human
ccuccccagugcaaaugca

SEQ ID NO: 2685837 - RNA, 16 nt, Human
ccuccccauggagcca

SEQ ID NO: 2685838 - RNA, 22 nt, Human
ccuccacagcgagggcagcugc

SEQ ID NO: 2685839 - RNA, 23 nt, Human
ccuccacagcgagggcagcugcu

SEQ ID NO: 2685840 - RNA, 14 nt, Human
ccuccacagcgagg

SEQ ID NO: 2685841 - RNA, 15 nt, Human
ccuccacagcgaggg

SEQ ID NO: 2685842 - RNA, 20 nt, Human
ccuccacagcgagggcagcu

SEQ ID NO: 2685843 - RNA, 21 nt, Human
ccuccacagcgagggcagcug

SEQ ID NO: 2685844 - RNA, 13 nt, Human
ccuccacagcgag

SEQ ID NO: 2685845 - RNA, 20 nt, Human
ccuccucuggacggcaggcu

SEQ ID NO: 2685846 - RNA, 21 nt, Human
ccuccucuggacggcaggcuc

SEQ ID NO: 2685847 - RNA, 22 nt, Human
ccuccucuggacggcaggcuca

SEQ ID NO: 2685848 - RNA, 20 nt, Human
ccuccugaaccgcacagcuc

SEQ ID NO: 2685849 - RNA, 22 nt, Human
ccuccugaaccgcacagcucag

SEQ ID NO: 2685850 - RNA, 21 nt, Human
ccuccugacccauugcuguug

SEQ ID NO: 2685851 - RNA, 20 nt, Human
ccuccugacccauugcuguu

SEQ ID NO: 2685852 - RNA, 12 nt, Human
ccucccuccacc

SEQ ID NO: 2685853 - RNA, 13 nt, Human
ccucccuccaccc

SEQ ID NO: 2685854 - RNA, 15 nt, Human
ccucccuccacccca

SEQ ID NO: 2685855 - RNA, 16 nt, Human
ccucccuccaccccag

SEQ ID NO: 2685856 - RNA, 17 nt, Human
ccucccuccaccccagg

SEQ ID NO: 2685857 - RNA, 19 nt, Human
ccucccuccaccccaggac

SEQ ID NO: 2685858 - RNA, 20 nt, Human
ccucccuccaccccaggacg

SEQ ID NO: 2685859 - RNA, 23 nt, Human
ccuccccauuucccaucugcacc

SEQ ID NO: 2685860 - RNA, 21 nt, Human
ccucccccagccaugccagcu

SEQ ID NO: 2685861 - RNA, 23 nt, Human
ccucccccagccaugccagcugg

SEQ ID NO: 2685862 - RNA, 18 nt, Human
ccucgguguggagaagcg

SEQ ID NO: 2685863 - RNA, 15 nt, Human
ccucgguacucccau

SEQ ID NO: 2685864 - RNA, 14 nt, Human
ccucuagaggcaag

SEQ ID NO: 2685865 - RNA, 15 nt, Human
ccucuagaagccaag

SEQ ID NO: 2685866 - RNA, 16 nt, Human
ccucuagaagccaagg

SEQ ID NO: 2685867 - RNA, 18 nt, Human
ccucuagaagccaaggga

SEQ ID NO: 2685868 - RNA, 22 nt, Human
ccuccuucagacacccucaacc

SEQ ID NO: 2685869 - RNA, 15 nt, Human
ccuccuucagacacc

SEQ ID NO: 2685870 - RNA, 14 nt, Human
ccuccuucagacac

SEQ ID NO: 2685871 - RNA, 13 nt, Human
ccuccuucagaca

SEQ ID NO: 2685872 - RNA, 14 nt, Human
ccucgguguggaga

SEQ ID NO: 2685873 - RNA, 16 nt, Human
ccucggugccuuccuc

SEQ ID NO: 2685874 - RNA, 21 nt, Human
ccucuauuuauguuugcacuu

SEQ ID NO: 2685875 - RNA, 17 nt, Human
ccucuauuuauguuugc

SEQ ID NO: 2685876 - RNA, 14 nt, Human
ccucucagugcccu

SEQ ID NO: 2685877 - RNA, 16 nt, Human
ccucucagugcccucc

SEQ ID NO: 2685878 - RNA, 18 nt, Human
ccucucagugcccuccag

SEQ ID NO: 2685879 - RNA, 14 nt, Human
ccucucaccucagc

SEQ ID NO: 2685880 - RNA, 22 nt, Human
cuucucauuacuuguugccuau

SEQ ID NO: 2685881 - RNA, 14 nt, Human
cuucucauuacuug

SEQ ID NO: 2685882 - RNA, 21 nt, Human
cuucucacugccaugccagcu

SEQ ID NO: 2685883 - RNA, 13 nt, Human
cuucucagaagca

SEQ ID NO: 2685884 - RNA, 14 nt, Human
cuucucagaagcac

SEQ ID NO: 2685885 - RNA, 16 nt, Human
cuucucagaagcacag

SEQ ID NO: 2685886 - RNA, 17 nt, Human
cuucucagaagcacaga

SEQ ID NO: 2685887 - RNA, 22 nt, Human
cuucucagaagcacagaauauu

SEQ ID NO: 2685888 - RNA, 16 nt, Human
cuucucacugccaugc

SEQ ID NO: 2685889 - RNA, 22 nt, Human
cuucgucuuucccauggggagg

SEQ ID NO: 2685890 - RNA, 14 nt, Human
cuucgucuuuccca

SEQ ID NO: 2685891 - RNA, 21 nt, Human
cuucgucuuucccauggggag

SEQ ID NO: 2685892 - RNA, 19 nt, Human
cuucgggaggucgaggcag

SEQ ID NO: 2685893 - RNA, 21 nt, Human
cuuccuuaauucacucccaca

SEQ ID NO: 2685894 - RNA, 19 nt, Human
cuuccuuaauucacuccca

SEQ ID NO: 2685895 - RNA, 19 nt, Human
cuuccuuucccaagccuuc

SEQ ID NO: 2685896 - RNA, 17 nt, Human
cuuccuuuuaucaguag

SEQ ID NO: 2685897 - RNA, 14 nt, Human
cuuccuuuucccug

SEQ ID NO: 2685898 - RNA, 13 nt, Human
cuuccuuuuaacu

SEQ ID NO: 2685899 - RNA, 14 nt, Human
cuuccuuuuaacug

SEQ ID NO: 2685900 - RNA, 15 nt, Human
cuucgcuucuugccu

SEQ ID NO: 2685901 - RNA, 16 nt, Human
cuucgcuucuugccuc

SEQ ID NO: 2685902 - RNA, 17 nt, Human
cuucgcuucuugccucu

SEQ ID NO: 2685903 - RNA, 18 nt, Human
cuucgcuucuugccucug

SEQ ID NO: 2685904 - RNA, 20 nt, Human
cuucgcuucuugccucugug

SEQ ID NO: 2685905 - RNA, 21 nt, Human
cuucgcuucuugccucugugc

SEQ ID NO: 2685906 - RNA, 20 nt, Human
cuuccccccaaaacccggga

SEQ ID NO: 2685907 - RNA, 23 nt, Human
cuucccccaccgguccagcuggc

SEQ ID NO: 2685908 - RNA, 19 nt, Human
cuuccccaugcuuccuugc

SEQ ID NO: 2685909 - RNA, 21 nt, Human
cuucccuagcuuuagacccug

SEQ ID NO: 2685910 - RNA, 22 nt, Human
cuucccuagcuuuagacccugg

SEQ ID NO: 2685911 - RNA, 13 nt, Human
cuucccaugcauu

SEQ ID NO: 2685912 - RNA, 18 nt, Human
cuucccaugcauucuggu

SEQ ID NO: 2685913 - RNA, 20 nt, Human
cuuccagaucacugccacac

SEQ ID NO: 2685914 - RNA, 13 nt, Human
cuuccagaucacu

SEQ ID NO: 2685915 - RNA, 15 nt, Human
cuuccagaucacugc

SEQ ID NO: 2685916 - RNA, 17 nt, Human
cuuccagaucacugcca

SEQ ID NO: 2685917 - RNA, 18 nt, Human
cuuccagaucacugccac

SEQ ID NO: 2685918 - RNA, 16 nt, Human
cuuccugugauccacc

SEQ ID NO: 2685919 - RNA, 18 nt, Human
cuuccugugauccaccca

SEQ ID NO: 2685920 - RNA, 15 nt, Human
cuuccugcguccucc

SEQ ID NO: 2685921 - RNA, 16 nt, Human
cuuccugcguccuccu

SEQ ID NO: 2685922 - RNA, 21 nt, Human
cuuccugcguccuccucaccu

SEQ ID NO: 2685923 - RNA, 18 nt, Human
cuuccugcguccuccuca

SEQ ID NO: 2685924 - RNA, 20 nt, Human
cuuccugcguccuccucacc

SEQ ID NO: 2685925 - RNA, 22 nt, Human
cuuccucaaaauaaagaaguau

SEQ ID NO: 2685926 - RNA, 23 nt, Human
cuucccuagcuuuagacccuggg

SEQ ID NO: 2685927 - RNA, 17 nt, Human
cuucagucccuucccca

SEQ ID NO: 2685928 - RNA, 22 nt, Human
cuucagucccuuccccaugcuu

SEQ ID NO: 2685929 - RNA, 17 nt, Human
cuucauguaaaguguca

SEQ ID NO: 2685930 - RNA, 14 nt, Human
cuucauuauucucu

SEQ ID NO: 2685931 - RNA, 15 nt, Human
cuucauuauucucug

SEQ ID NO: 2685932 - RNA, 14 nt, Human
cuucauuauuuuaa

SEQ ID NO: 2685933 - RNA, 18 nt, Human
cuucauuauuuuaaaaau

SEQ ID NO: 2685934 - RNA, 19 nt, Human
cuucagcugacuuuucugu

SEQ ID NO: 2685935 - RNA, 15 nt, Human
cuucagcugacuuuu

SEQ ID NO: 2685936 - RNA, 14 nt, Human
cuucaguaagccgu

SEQ ID NO: 2685937 - RNA, 14 nt, Human
cuucaaaugaaaau

SEQ ID NO: 2685938 - RNA, 21 nt, Human
cuucacaguagagccagcuug

SEQ ID NO: 2685939 - RNA, 22 nt, Human
cuucacaguagagccagcuugg

SEQ ID NO: 2685940 - RNA, 19 nt, Human
cuucacaguagagccagcu

SEQ ID NO: 2685941 - RNA, 20 nt, Human
cuucacaguagagccagcuu

SEQ ID NO: 2685942 - RNA, 17 nt, Human
cuucagaugccacuucu

SEQ ID NO: 2685943 - RNA, 23 nt, Human
cuguuucuggacccuuauaaaau

SEQ ID NO: 2685944 - RNA, 18 nt, Human
cuguugccauggugaugg

SEQ ID NO: 2685945 - RNA, 19 nt, Human
cuguuuagauuugccauag

SEQ ID NO: 2685946 - RNA, 22 nt, Human
cuguuuagauuugccauagagu

SEQ ID NO: 2685947 - RNA, 21 nt, Human
cuguuuagauuugccauagag

SEQ ID NO: 2685948 - RNA, 16 nt, Human
cuguuuguccugagau

SEQ ID NO: 2685949 - RNA, 22 nt, Human
cuguuuguccugagauggaaaa

SEQ ID NO: 2685950 - RNA, 19 nt, Human
cuguuugaaaacuucagaa

SEQ ID NO: 2685951 - RNA, 17 nt, Human
cuuaaaaaguggaaaaa

SEQ ID NO: 2685952 - RNA, 16 nt, Human
cuuaaaaaguggaaaa

SEQ ID NO: 2685953 - RNA, 15 nt, Human
cuuaaaaacugaaaa

SEQ ID NO: 2685954 - RNA, 19 nt, Human
cuguucugugguuccucug

SEQ ID NO: 2685955 - RNA, 20 nt, Human
cuguucugugguuccucugc

SEQ ID NO: 2685956 - RNA, 21 nt, Human
cuguucugugguuccucugcu

SEQ ID NO: 2685957 - RNA, 18 nt, Human
cuguugacgcaccugugg

SEQ ID NO: 2685958 - RNA, 14 nt, Human
cuguugauaaaaac

SEQ ID NO: 2685959 - RNA, 15 nt, Human
cuguugauaaaaacu

SEQ ID NO: 2685960 - RNA, 18 nt, Human
cuguugauaaaaacucag

SEQ ID NO: 2685961 - RNA, 15 nt, Human
cuguugauaaaucca

SEQ ID NO: 2685962 - RNA, 18 nt, Human
cuguugauaaauccauca

SEQ ID NO: 2685963 - RNA, 21 nt, Human
cuuaaugaaugagucuguugu

SEQ ID NO: 2685964 - RNA, 23 nt, Human
cuuaauauauuucuaaauguuug

SEQ ID NO: 2685965 - RNA, 21 nt, Human
cuuaaucuguuuauuuacaag

SEQ ID NO: 2685966 - RNA, 12 nt, Human
cuuaaugaaaua

SEQ ID NO: 2685967 - RNA, 12 nt, Human
cuuaauuuccuu

SEQ ID NO: 2685968 - RNA, 13 nt, Human
cuuaauuuccuuu

SEQ ID NO: 2685969 - RNA, 14 nt, Human
cuuaauuuccuuuu

SEQ ID NO: 2685970 - RNA, 17 nt, Human
cuuaauuuccuuuuuga

SEQ ID NO: 2685971 - RNA, 20 nt, Human
cuuaauuuccuuuuugacac

SEQ ID NO: 2685972 - RNA, 21 nt, Human
cuuaauuuccuuuuugacacu

SEQ ID NO: 2685973 - RNA, 22 nt, Human
cuuaauuuccuuuuugacacug

SEQ ID NO: 2685974 - RNA, 23 nt, Human
cuuaauuuccuuuuugacacuga

SEQ ID NO: 2685975 - RNA, 19 nt, Human
cuuaagacagaguauccug

SEQ ID NO: 2685976 - RNA, 19 nt, Human
cuuaacauagccaaaaugu

SEQ ID NO: 2685977 - RNA, 15 nt, Human
cuuaacauagccaaa

SEQ ID NO: 2685978 - RNA, 16 nt, Human
cuuaacaguuguauuu

SEQ ID NO: 2685979 - RNA, 17 nt, Human
cuuaacaguuguauuua

SEQ ID NO: 2685980 - RNA, 20 nt, Human
cuuaacauagccaaaaugug

SEQ ID NO: 2685981 - RNA, 21 nt, Human
cuuaauaaucaagagccuuaa

SEQ ID NO: 2685982 - RNA, 19 nt, Human
cuuaaguaaucaucuaagu

SEQ ID NO: 2685983 - RNA, 20 nt, Human
cuuaauaaucaagagccuua

SEQ ID NO: 2685984 - RNA, 15 nt, Human
cuuaauaaucaagag

SEQ ID NO: 2685985 - RNA, 14 nt, Human
cuuaauaaucaaga

SEQ ID NO: 2685986 - RNA, 13 nt, Human
cuuaauaaucaag

SEQ ID NO: 2685987 - RNA, 20 nt, Human
cuuaauaaauuguguuuccu

SEQ ID NO: 2685988 - RNA, 15 nt, Human
cuuaauaacugugua

SEQ ID NO: 2685989 - RNA, 19 nt, Human
cuuaauaacuguguacugu

SEQ ID NO: 2685990 - RNA, 20 nt, Human
cuuaauaacuguguacuguu

SEQ ID NO: 2685991 - RNA, 20 nt, Human
cuuaagggguaucauguaug

SEQ ID NO: 2685992 - RNA, 18 nt, Human
cuuaaggacaaagugcca

SEQ ID NO: 2685993 - RNA, 23 nt, Human
cuuaaggacaaagugccaaagaa

SEQ ID NO: 2685994 - RNA, 12 nt, Human
cuuaagcuuccg

SEQ ID NO: 2685995 - RNA, 20 nt, Human
cuuagaaaaaccaccaccau

SEQ ID NO: 2685996 - RNA, 18 nt, Human
cuuaauugaugcaaauaa

SEQ ID NO: 2685997 - RNA, 18 nt, Human
cuuagaaucccuguguua

SEQ ID NO: 2685998 - RNA, 15 nt, Human
cuuagaaucccugug

SEQ ID NO: 2685999 - RNA, 16 nt, Human
cuuagaauacaguuuu

SEQ ID NO: 2686000 - RNA, 20 nt, Human
cuuagaaucccuguguuaau

SEQ ID NO: 2686001 - RNA, 19 nt, Human
cuuagaaucccuguguuaa

SEQ ID NO: 2686002 - RNA, 21 nt, Human
cuuagguuggcaaaaaggcag

SEQ ID NO: 2686003 - RNA, 23 nt, Human
cuuagguuggcaaaaaggcagga

SEQ ID NO: 2686004 - RNA, 15 nt, Human
cugugugcgcucugu

SEQ ID NO: 2686005 - RNA, 14 nt, Human
cugugugucaguuu

SEQ ID NO: 2686006 - RNA, 16 nt, Human
cugugugucaguuuuc

SEQ ID NO: 2686007 - RNA, 17 nt, Human
cugugugucaguuuuca

SEQ ID NO: 2686008 - RNA, 18 nt, Human
cugugugucaguuuucau

SEQ ID NO: 2686009 - RNA, 16 nt, Human
cugugugucccaggca

SEQ ID NO: 2686010 - RNA, 18 nt, Human
cugugugucccaggcagg

SEQ ID NO: 2686011 - RNA, 19 nt, Human
cugugugucccaggcaggg

SEQ ID NO: 2686012 - RNA, 20 nt, Human
cugugugucccaggcaggga

SEQ ID NO: 2686013 - RNA, 22 nt, Human
cugugugucccaggcagggaga

SEQ ID NO: 2686014 - RNA, 23 nt, Human
cugugugucccaggcagggagac

SEQ ID NO: 2686015 - RNA, 9 nt, Human
cugugugca

SEQ ID NO: 2686016 - RNA, 13 nt, Human
cugugugcagguu

SEQ ID NO: 2686017 - RNA, 11 nt, Human
cuguguaaacu

SEQ ID NO: 2686018 - RNA, 14 nt, Human
cuguguaaacucau

SEQ ID NO: 2686019 - RNA, 21 nt, Human
cuguguaaacucaucugaaau

SEQ ID NO: 2686020 - RNA, 19 nt, Human
cugugguuggcugggaaau

SEQ ID NO: 2686021 - RNA, 18 nt, Human
cugugguuggcugggaaa

SEQ ID NO: 2686022 - RNA, 17 nt, Human
cugugguuggcugggaa

SEQ ID NO: 2686023 - RNA, 21 nt, Human
cuguguuaauuuaaguuuuga

SEQ ID NO: 2686024 - RNA, 16 nt, Human
cuguguuaauuuaagu

SEQ ID NO: 2686025 - RNA, 15 nt, Human
cuguguuaauuuaag

SEQ ID NO: 2686026 - RNA, 13 nt, Human
cuguguugccaag

SEQ ID NO: 2686027 - RNA, 18 nt, Human
cuguguugguguggccca

SEQ ID NO: 2686028 - RNA, 21 nt, Human
cuguguuguaccaaaauucau

SEQ ID NO: 2686029 - RNA, 21 nt, Human
cuguguugccaagcuccaagc

SEQ ID NO: 2686030 - RNA, 13 nt, Human
cuguguugccaca

SEQ ID NO: 2686031 - RNA, 22 nt, Human
cuguguugccacaguagaacug

SEQ ID NO: 2686032 - RNA, 23 nt, Human
cuguguugccacaguagaacugu

SEQ ID NO: 2686033 - RNA, 14 nt, Human
cuguguugccaagc

SEQ ID NO: 2686034 - RNA, 16 nt, Human
cuguguugccaagcuc

SEQ ID NO: 2686035 - RNA, 17 nt, Human
cuguguugccaagcucc

SEQ ID NO: 2686036 - RNA, 19 nt, Human
cuguguugccaagcuccaa

SEQ ID NO: 2686037 - RNA, 21 nt, Human
cugugggggguaaucccugcu

SEQ ID NO: 2686038 - RNA, 15 nt, Human
cugugguuccucugc

SEQ ID NO: 2686039 - RNA, 16 nt, Human
cugugguuccucugcu

SEQ ID NO: 2686040 - RNA, 20 nt, Human
cuguggucaaggcuacagau

SEQ ID NO: 2686041 - RNA, 16 nt, Human
cuguggucacagcgga

SEQ ID NO: 2686042 - RNA, 15 nt, Human
cuguggaucagagau

SEQ ID NO: 2686043 - RNA, 21 nt, Human
cuguggccccacccugggccc

SEQ ID NO: 2686044 - RNA, 16 nt, Human
cuguggccccacccug

SEQ ID NO: 2686045 - RNA, 17 nt, Human
cuguggccccacccugg

SEQ ID NO: 2686046 - RNA, 18 nt, Human
cuguggccccacccuggg

SEQ ID NO: 2686047 - RNA, 20 nt, Human
cuguggccccacccugggcc

SEQ ID NO: 2686048 - RNA, 17 nt, Human
cugugcccuccugaccc

SEQ ID NO: 2686049 - RNA, 16 nt, Human
cugugcccuccugacc

SEQ ID NO: 2686050 - RNA, 14 nt, Human
cugugcccuccuga

SEQ ID NO: 2686051 - RNA, 21 nt, Human
cuguggacugaccuuguaaaa

SEQ ID NO: 2686052 - RNA, 22 nt, Human
cuguggacugaccuuguaaaag

SEQ ID NO: 2686053 - RNA, 18 nt, Human
cugucuucaguaagccgu

SEQ ID NO: 2686054 - RNA, 13 nt, Human
cugucuuccucaa

SEQ ID NO: 2686055 - RNA, 14 nt, Human
cugucuuccucaaa

SEQ ID NO: 2686056 - RNA, 20 nt, Human
cugucuuccucaaaauaaag

SEQ ID NO: 2686057 - RNA, 18 nt, Human
cugucuuuccugaaccau

SEQ ID NO: 2686058 - RNA, 14 nt, Human
cugucugugaacag

SEQ ID NO: 2686059 - RNA, 23 nt, Human
cugucugguggccccguuucugg

SEQ ID NO: 2686060 - RNA, 13 nt, Human
cugucugguggcc

SEQ ID NO: 2686061 - RNA, 15 nt, Human
cugucugguggcccc

SEQ ID NO: 2686062 - RNA, 13 nt, Human
cugugaugagcug

SEQ ID NO: 2686063 - RNA, 14 nt, Human
cugugaugagcuga

SEQ ID NO: 2686064 - RNA, 15 nt, Human
cugugaugagcugau

SEQ ID NO: 2686065 - RNA, 16 nt, Human
cugugaugagcugauc

SEQ ID NO: 2686066 - RNA, 18 nt, Human
cugugaugagcugaucug

SEQ ID NO: 2686067 - RNA, 22 nt, Human
cugugaugagcugaucugcgga

SEQ ID NO: 2686068 - RNA, 13 nt, Human
cugugauguuugu

SEQ ID NO: 2686069 - RNA, 23 nt, Human
cugugauguuuguguauguggga

SEQ ID NO: 2686070 - RNA, 20 nt, Human
cugugaacaagcuucaguaa

SEQ ID NO: 2686071 - RNA, 21 nt, Human
cugugaacaagcuucaguaag

SEQ ID NO: 2686072 - RNA, 19 nt, Human
cugugaacagagagacccu

SEQ ID NO: 2686073 - RNA, 22 nt, Human
cugugauuccacuacaccuggc

SEQ ID NO: 2686074 - RNA, 16 nt, Human
cugugcagucacugga

SEQ ID NO: 2686075 - RNA, 19 nt, Human
cugugcccagaauacugau

SEQ ID NO: 2686076 - RNA, 20 nt, Human
cugggcuuauaucuggccuc

SEQ ID NO: 2686077 - RNA, 18 nt, Human
cugggcuugucuguagau

SEQ ID NO: 2686078 - RNA, 22 nt, Human
cugggcuuauaucuggccucug

SEQ ID NO: 2686079 - RNA, 16 nt, Human
cuggggaaagacacug

SEQ ID NO: 2686080 - RNA, 18 nt, Human
cuggggaaagacacugcc

SEQ ID NO: 2686081 - RNA, 19 nt, Human
cuggggaaagacacugccu

SEQ ID NO: 2686082 - RNA, 20 nt, Human
cugggguguuaguggcaccg

SEQ ID NO: 2686083 - RNA, 14 nt, Human
cugggguugagggc

SEQ ID NO: 2686084 - RNA, 13 nt, Human
cuggguccagaag

SEQ ID NO: 2686085 - RNA, 19 nt, Human
cuggguccuuccugaaacu

SEQ ID NO: 2686086 - RNA, 15 nt, Human
cuggguccuuccuga

SEQ ID NO: 2686087 - RNA, 14 nt, Human
cuggguccuuccug

SEQ ID NO: 2686088 - RNA, 22 nt, Human
cugguaaaaugaagaauuuaaa

SEQ ID NO: 2686089 - RNA, 19 nt, Human
cugguaaaaugaagaauuu

SEQ ID NO: 2686090 - RNA, 17 nt, Human
cugguaaaaugaagaau

SEQ ID NO: 2686091 - RNA, 16 nt, Human
cugguaaaaugaagaa

SEQ ID NO: 2686092 - RNA, 15 nt, Human
cugguaaaaugaaga

SEQ ID NO: 2686093 - RNA, 13 nt, Human
cugguaaaaugaa

SEQ ID NO: 2686094 - RNA, 13 nt, Human
cugggcccugagu

SEQ ID NO: 2686095 - RNA, 22 nt, Human
cugggcccugagucugggcagc

SEQ ID NO: 2686096 - RNA, 11 nt, Human
cugggcccuga

SEQ ID NO: 2686097 - RNA, 20 nt, Human
cugggcccgacauggcuccg

SEQ ID NO: 2686098 - RNA, 21 nt, Human
cugggcccgacauggcuccgg

SEQ ID NO: 2686099 - RNA, 17 nt, Human
cuguacgacacgggugg

SEQ ID NO: 2686100 - RNA, 20 nt, Human
cuguauuuuguuuuugucuu

SEQ ID NO: 2686101 - RNA, 23 nt, Human
cuguauuuuauuuagacaagaga

SEQ ID NO: 2686102 - RNA, 17 nt, Human
cuguauuuaaaaauaga

SEQ ID NO: 2686103 - RNA, 18 nt, Human
cuguauuuaaaaauagaa

SEQ ID NO: 2686104 - RNA, 19 nt, Human
cuguauuuaaaaauagaaa

SEQ ID NO: 2686105 - RNA, 18 nt, Human
cuguauuuuuuuuucuaa

SEQ ID NO: 2686106 - RNA, 21 nt, Human
cuguauuuuuuuuucuaagag

SEQ ID NO: 2686107 - RNA, 22 nt, Human
cuguauuuuuuuuucuaagaga

SEQ ID NO: 2686108 - RNA, 17 nt, Human
cuguaaucccagcacuu

SEQ ID NO: 2686109 - RNA, 14 nt, Human
cuguaaucccagca

SEQ ID NO: 2686110 - RNA, 13 nt, Human
cuguaaucccagc

SEQ ID NO: 2686111 - RNA, 14 nt, Human
cuguaaucccagcu

SEQ ID NO: 2686112 - RNA, 19 nt, Human
cuguaauccuagcacuuug

SEQ ID NO: 2686113 - RNA, 19 nt, Human
cuguaaucccagcuacucg

SEQ ID NO: 2686114 - RNA, 22 nt, Human
cuguaaucccagcuacucggga

SEQ ID NO: 2686115 - RNA, 22 nt, Human
gaacacuuauaagugaagugau

SEQ ID NO: 2686116 - RNA, 23 nt, Human
gaaauuugggagagccauacaua

SEQ ID NO: 2686117 - RNA, 20 nt, Human
gaaccuaacuccccacccca

SEQ ID NO: 2686118 - RNA, 19 nt, Human
gaaccacauugaagaaugu

SEQ ID NO: 2686119 - RNA, 19 nt, Human
gaacuauauuaguauguau

SEQ ID NO: 2686120 - RNA, 20 nt, Human
gaacuauugugcucagagac

SEQ ID NO: 2686121 - RNA, 17 nt, Human
gaaccuuggccugggcc

SEQ ID NO: 2686122 - RNA, 16 nt, Human
gaaccuuggccugggc

SEQ ID NO: 2686123 - RNA, 13 nt, Human
gaaccuuggccug

SEQ ID NO: 2686124 - RNA, 12 nt, Human
gaaccugugucc

SEQ ID NO: 2686125 - RNA, 14 nt, Human
gaacuccaggcccu

SEQ ID NO: 2686126 - RNA, 17 nt, Human
gaacuccaggcccuccu

SEQ ID NO: 2686127 - RNA, 23 nt, Human
gaacuccaggcccuccucuccca

SEQ ID NO: 2686128 - RNA, 18 nt, Human
gaacuguagaugauguau

SEQ ID NO: 2686129 - RNA, 20 nt, Human
gaacuggucaccaugaaacu

SEQ ID NO: 2686130 - RNA, 20 nt, Human
gaacuguagcugccauggcu

SEQ ID NO: 2686131 - RNA, 17 nt, Human
gaacugucugugaacag

SEQ ID NO: 2686132 - RNA, 17 nt, Human
gaacuugaaugugucag

SEQ ID NO: 2686133 - RNA, 13 nt, Human
gaagaagaugcuc

SEQ ID NO: 2686134 - RNA, 19 nt, Human
gaagaacugcaggcccugg

SEQ ID NO: 2686135 - RNA, 15 nt, Human
gaacuuggaagcaca

SEQ ID NO: 2686136 - RNA, 13 nt, Human
gaacuuggaagca

SEQ ID NO: 2686137 - RNA, 18 nt, Human
gaaauaggaaacaaguga

SEQ ID NO: 2686138 - RNA, 15 nt, Human
gaaauaggaaacaag

SEQ ID NO: 2686139 - RNA, 14 nt, Human
gaaauaggaaacaa

SEQ ID NO: 2686140 - RNA, 17 nt, Human
gaaauauaacacauuuu

SEQ ID NO: 2686141 - RNA, 18 nt, Human
gaaauauaacacauuuuu

SEQ ID NO: 2686142 - RNA, 17 nt, Human
gaaauaaaguuugcuua

SEQ ID NO: 2686143 - RNA, 16 nt, Human
gaaacaucucaauaaa

SEQ ID NO: 2686144 - RNA, 17 nt, Human
gaaacaucucaauaaag

SEQ ID NO: 2686145 - RNA, 16 nt, Human
gaaauaauagaaaugu

SEQ ID NO: 2686146 - RNA, 14 nt, Human
gaaauaaugcuaca

SEQ ID NO: 2686147 - RNA, 19 nt, Human
gaaauaaugcuacaauuuu

SEQ ID NO: 2686148 - RNA, 21 nt, Human
gaaauaaugcuacaauuuuaa

SEQ ID NO: 2686149 - RNA, 23 nt, Human
gaaauaaugcuacaauuuuaaga

SEQ ID NO: 2686150 - RNA, 14 nt, Human
gaaauucuccugga

SEQ ID NO: 2686151 - RNA, 15 nt, Human
gaaauucuccuggag

SEQ ID NO: 2686152 - RNA, 16 nt, Human
gaaauucuccuggagg

SEQ ID NO: 2686153 - RNA, 14 nt, Human
gaaauguuuuguaa

SEQ ID NO: 2686154 - RNA, 18 nt, Human
gaaauguuuuguaaacau

SEQ ID NO: 2686155 - RNA, 19 nt, Human
gaaauguuuuguaaacauu

SEQ ID NO: 2686156 - RNA, 20 nt, Human
gaaauguuuuguaaacauuu

SEQ ID NO: 2686157 - RNA, 22 nt, Human
gaaauguuuuguaaacauuuau

SEQ ID NO: 2686158 - RNA, 22 nt, Human
gaaauauuaagcauguuuuguu

SEQ ID NO: 2686159 - RNA, 15 nt, Human
gaaauggaaagcaga

SEQ ID NO: 2686160 - RNA, 16 nt, Human
gaaauggaaagcagag

SEQ ID NO: 2686161 - RNA, 14 nt, Human
gaaauggaaauuuu

SEQ ID NO: 2686162 - RNA, 21 nt, Human
gaaauggaggaucucuaaaga

SEQ ID NO: 2686163 - RNA, 24 nt, Human
gaaauggaggaucucuaaagagca

SEQ ID NO: 2686164 - RNA, 21 nt, Human
gaaauuuucaagagucuaaua

SEQ ID NO: 2686165 - RNA, 23 nt, Human
gaaauguuacaaaaauaaacuau

SEQ ID NO: 2686166 - RNA, 13 nt, Human
gaaauugcauacu

SEQ ID NO: 2686167 - RNA, 16 nt, Human
gaaauugcauacuuug

SEQ ID NO: 2686168 - RNA, 18 nt, Human
gaaauugcuuuguauugu

SEQ ID NO: 2686169 - RNA, 17 nt, Human
gaaauucuccuggaggu

SEQ ID NO: 2686170 - RNA, 21 nt, Human
gaaauugacacaaguggaccu

SEQ ID NO: 2686171 - RNA, 23 nt, Human
gaaggagauaauuacugccuuga

SEQ ID NO: 2686172 - RNA, 17 nt, Human
gaaggagaaguaagagg

SEQ ID NO: 2686173 - RNA, 22 nt, Human
gaaggcaagaggggguggaggg

SEQ ID NO: 2686174 - RNA, 23 nt, Human
gaaggcaagaggggguggagggg

SEQ ID NO: 2686175 - RNA, 14 nt, Human
gaaggcaagccagg

SEQ ID NO: 2686176 - RNA, 16 nt, Human
gaaggcaagccaggcu

SEQ ID NO: 2686177 - RNA, 14 nt, Human
gaaggcaagagggg

SEQ ID NO: 2686178 - RNA, 16 nt, Human
gaaggcaagagggggu

SEQ ID NO: 2686179 - RNA, 17 nt, Human
gaaggcaagagggggug

SEQ ID NO: 2686180 - RNA, 13 nt, Human
gaaggguuucucu

SEQ ID NO: 2686181 - RNA, 14 nt, Human
gaaggguuucucua

SEQ ID NO: 2686182 - RNA, 16 nt, Human
gaaggguuucucuauu

SEQ ID NO: 2686183 - RNA, 14 nt, Human
gaagggguuccuca

SEQ ID NO: 2686184 - RNA, 19 nt, Human
gaagccuccuuagaaaaaa

SEQ ID NO: 2686185 - RNA, 22 nt, Human
gaagccguccuggcgccuggca

SEQ ID NO: 2686186 - RNA, 12 nt, Human
gaagaagccugu

SEQ ID NO: 2686187 - RNA, 21 nt, Human
gaagccggggaagagauccaa

SEQ ID NO: 2686188 - RNA, 19 nt, Human
gaagccaucuaaaguaaaa

SEQ ID NO: 2686189 - RNA, 14 nt, Human
gaauagacaucaaa

SEQ ID NO: 2686190 - RNA, 16 nt, Human
gaauagacaucaaacu

SEQ ID NO: 2686191 - RNA, 19 nt, Human
gaauagacaucaaacucaa

SEQ ID NO: 2686192 - RNA, 11 nt, Human
gaaucaauaau

SEQ ID NO: 2686193 - RNA, 21 nt, Human
gaaucaauaauauauuuucug

SEQ ID NO: 2686194 - RNA, 14 nt, Human
gaauccaagccucc

SEQ ID NO: 2686195 - RNA, 15 nt, Human
gaauccaagccucca

SEQ ID NO: 2686196 - RNA, 17 nt, Human
gaauccaagccuccaca

SEQ ID NO: 2686197 - RNA, 20 nt, Human
gaauccaagccuccacagcg

SEQ ID NO: 2686198 - RNA, 17 nt, Human
gaaucccuguguuaauu

SEQ ID NO: 2686199 - RNA, 16 nt, Human
gaaucccuuaacaguu

SEQ ID NO: 2686200 - RNA, 18 nt, Human
gaaucuggagaccaggga

SEQ ID NO: 2686201 - RNA, 16 nt, Human
gaaucuggagaccagg

SEQ ID NO: 2686202 - RNA, 22 nt, Human
gaaucuggagaccagggagccu

SEQ ID NO: 2686203 - RNA, 13 nt, Human
gaauccuggcagc

SEQ ID NO: 2686204 - RNA, 14 nt, Human
gaauccuggcagcc

SEQ ID NO: 2686205 - RNA, 16 nt, Human
gaauccuggcagccca

SEQ ID NO: 2686206 - RNA, 17 nt, Human
gaauccuggcagcccag

SEQ ID NO: 2686207 - RNA, 12 nt, Human
gaauccuggcag

SEQ ID NO: 2686208 - RNA, 19 nt, Human
gaaucccuuaacaguugua

SEQ ID NO: 2686209 - RNA, 21 nt, Human
gaaucccuuaacaguuguauu

SEQ ID NO: 2686210 - RNA, 15 nt, Human
gaaugaaagcuguuc

SEQ ID NO: 2686211 - RNA, 14 nt, Human
gaauacuugaacca

SEQ ID NO: 2686212 - RNA, 12 nt, Human
gaauacuugaac

SEQ ID NO: 2686213 - RNA, 22 nt, Human
gaauacuugaaccauaaaaugu

SEQ ID NO: 2686214 - RNA, 15 nt, Human
gaauacuugaaccau

SEQ ID NO: 2686215 - RNA, 17 nt, Human
gaauacugcuugaauaa

SEQ ID NO: 2686216 - RNA, 14 nt, Human
gaauacugcuugaa

SEQ ID NO: 2686217 - RNA, 13 nt, Human
gaauacugcuuga

SEQ ID NO: 2686218 - RNA, 15 nt, Human
gaauacugauggaau

SEQ ID NO: 2686219 - RNA, 16 nt, Human
gaauacugauggaauu

SEQ ID NO: 2686220 - RNA, 18 nt, Human
gaauaaguuauugcaguu

SEQ ID NO: 2686221 - RNA, 19 nt, Human
gaauaaguuauugcaguuu

SEQ ID NO: 2686222 - RNA, 12 nt, Human
gaauaaguuauu

SEQ ID NO: 2686223 - RNA, 13 nt, Human
gaauaaguuauug

SEQ ID NO: 2686224 - RNA, 14 nt, Human
gaauaaguuauugc

SEQ ID NO: 2686225 - RNA, 16 nt, Human
gaauaaguuauugcag

SEQ ID NO: 2686226 - RNA, 12 nt, Human
gaauaaaugugu

SEQ ID NO: 2686227 - RNA, 16 nt, Human
gaauaaauguguuggg

SEQ ID NO: 2686228 - RNA, 13 nt, Human
gaagguuuauugu

SEQ ID NO: 2686229 - RNA, 14 nt, Human
gaagguuuauuguu

SEQ ID NO: 2686230 - RNA, 22 nt, Human
gaagguuuauuguuaauacaag

SEQ ID NO: 2686231 - RNA, 14 nt, Human
gaagguuuuugaua

SEQ ID NO: 2686232 - RNA, 14 nt, Human
gaauaaacaccacu

SEQ ID NO: 2686233 - RNA, 11 nt, Human
gaaacacugcc

SEQ ID NO: 2686234 - RNA, 12 nt, Human
gaaacacugccu

SEQ ID NO: 2686235 - RNA, 13 nt, Human
gaaacacugccuu

SEQ ID NO: 2686236 - RNA, 14 nt, Human
gaaacacugccuuu

SEQ ID NO: 2686237 - RNA, 16 nt, Human
gaaacacugccuuuuu

SEQ ID NO: 2686238 - RNA, 17 nt, Human
gaaacacugccuuuuua

SEQ ID NO: 2686239 - RNA, 18 nt, Human
gaaaaucagccugcucca

SEQ ID NO: 2686240 - RNA, 16 nt, Human
gaaaaucagccugcuc

SEQ ID NO: 2686241 - RNA, 14 nt, Human
gaaaaucagccugc

SEQ ID NO: 2686242 - RNA, 22 nt, Human
gaaaaauaaagacaccugguug

SEQ ID NO: 2686243 - RNA, 20 nt, Human
gaaaacaauggaguauucuc

SEQ ID NO: 2686244 - RNA, 17 nt, Human
cuuuucugcccuggcug

SEQ ID NO: 2686245 - RNA, 15 nt, Human
gaaaaaggcugugcu

SEQ ID NO: 2686246 - RNA, 16 nt, Human
gaaaaaggcugugcug

SEQ ID NO: 2686247 - RNA, 19 nt, Human
gaaaaaguuaaacauugaa

SEQ ID NO: 2686248 - RNA, 17 nt, Human
cuuuucucaguguuggu

SEQ ID NO: 2686249 - RNA, 20 nt, Human
cuuuucucaacuggguccag

SEQ ID NO: 2686250 - RNA, 20 nt, Human
cuuuucccugcuuccaggaa

SEQ ID NO: 2686251 - RNA, 18 nt, Human
cuuuucccugcuuccagg

SEQ ID NO: 2686252 - RNA, 13 nt, Human
cuuuucccugcuu

SEQ ID NO: 2686253 - RNA, 14 nt, Human
cuuuucccugcuuc

SEQ ID NO: 2686254 - RNA, 15 nt, Human
cuuuucccugcuucc

SEQ ID NO: 2686255 - RNA, 23 nt, Human
cuuuucuguccgagcuuugaaaa

SEQ ID NO: 2686256 - RNA, 18 nt, Human
cuuuucuguccgagcuuu

SEQ ID NO: 2686257 - RNA, 19 nt, Human
cuuuucugcccuggcugcu

SEQ ID NO: 2686258 - RNA, 12 nt, Human
cuuuucuggcac

SEQ ID NO: 2686259 - RNA, 14 nt, Human
cuuuucuggcaccg

SEQ ID NO: 2686260 - RNA, 15 nt, Human
cuuuucuggcaccgc

SEQ ID NO: 2686261 - RNA, 21 nt, Human
cuuuucuggggaaagacacug

SEQ ID NO: 2686262 - RNA, 23 nt, Human
cuuuucuggggaaagacacugcc

SEQ ID NO: 2686263 - RNA, 13 nt, Human
cuuuucuguauuu

SEQ ID NO: 2686264 - RNA, 17 nt, Human
cuuuucauucucuuuua

SEQ ID NO: 2686265 - RNA, 13 nt, Human
cuuuucagggcug

SEQ ID NO: 2686266 - RNA, 16 nt, Human
cuuuucagggcuggcu

SEQ ID NO: 2686267 - RNA, 17 nt, Human
cuuuucagggcuggcuc

SEQ ID NO: 2686268 - RNA, 20 nt, Human
cuuuucagggcuggcuccug

SEQ ID NO: 2686269 - RNA, 23 nt, Human
cuuuucagggcuggcuccugauc

SEQ ID NO: 2686270 - RNA, 17 nt, Human
cuuuguuucguggggag

SEQ ID NO: 2686271 - RNA, 18 nt, Human
cuuuguuucguggggagg

SEQ ID NO: 2686272 - RNA, 20 nt, Human
cuuuguuuguugucagcuga

SEQ ID NO: 2686273 - RNA, 18 nt, Human
cuuuguuuguugucagcu

SEQ ID NO: 2686274 - RNA, 19 nt, Human
cuuuuaauuguuucagaau

SEQ ID NO: 2686275 - RNA, 20 nt, Human
cuuuuaccuuuuuuuuuucu

SEQ ID NO: 2686276 - RNA, 21 nt, Human
cuuuuaccuuuuuuuuuucuu

SEQ ID NO: 2686277 - RNA, 14 nt, Human
cuuugggaaaacau

SEQ ID NO: 2686278 - RNA, 21 nt, Human
cuuugggaaaacauguuaaug

SEQ ID NO: 2686279 - RNA, 13 nt, Human
cuuugggaggcca

SEQ ID NO: 2686280 - RNA, 18 nt, Human
cuuuguucauagcccagu

SEQ ID NO: 2686281 - RNA, 14 nt, Human
cuuuguucccggcu

SEQ ID NO: 2686282 - RNA, 14 nt, Human
cuuugcugucccau

SEQ ID NO: 2686283 - RNA, 23 nt, Human
cuuugcugucccauagucccugc

SEQ ID NO: 2686284 - RNA, 22 nt, Human
cuuugcugucccauagucccug

SEQ ID NO: 2686285 - RNA, 15 nt, Human
cuuucccaagccuuc

SEQ ID NO: 2686286 - RNA, 16 nt, Human
cuuucccauggggagg

SEQ ID NO: 2686287 - RNA, 20 nt, Human
cuuuggaccuaaauggccuc

SEQ ID NO: 2686288 - RNA, 20 nt, Human
cuuuaaacugucgugucaua

SEQ ID NO: 2686289 - RNA, 14 nt, Human
cuuuaaacugucgu

SEQ ID NO: 2686290 - RNA, 12 nt, Human
cuuguuuuugca

SEQ ID NO: 2686291 - RNA, 16 nt, Human
cuuguuuuugcacaug

SEQ ID NO: 2686292 - RNA, 17 nt, Human
cuuguuuuggauggcuu

SEQ ID NO: 2686293 - RNA, 21 nt, Human
cuuguuuuggauggcuugucu

SEQ ID NO: 2686294 - RNA, 16 nt, Human
cuuguggcagcaacgg

SEQ ID NO: 2686295 - RNA, 22 nt, Human
cuuguugguucaccauugagac

SEQ ID NO: 2686296 - RNA, 13 nt, Human
cuuuauaaaucca

SEQ ID NO: 2686297 - RNA, 17 nt, Human
cuuuauaaauccaguga

SEQ ID NO: 2686298 - RNA, 18 nt, Human
cuuuauaaauccagugac

SEQ ID NO: 2686299 - RNA, 13 nt, Human
cuuuaguuuuugg

SEQ ID NO: 2686300 - RNA, 14 nt, Human
cuuuaguuuuuggu

SEQ ID NO: 2686301 - RNA, 21 nt, Human
cuuuaguuuuugguugggaau

SEQ ID NO: 2686302 - RNA, 23 nt, Human
cuuuaguuuuugguugggaauga

SEQ ID NO: 2686303 - RNA, 12 nt, Human
cuuuauuauuua

SEQ ID NO: 2686304 - RNA, 14 nt, Human
cuuuauuauuuauu

SEQ ID NO: 2686305 - RNA, 13 nt, Human
cuuuauuauuuau

SEQ ID NO: 2686306 - RNA, 22 nt, Human
cuuuauuacccccuccuucaga

SEQ ID NO: 2686307 - RNA, 20 nt, Human
cuuuauuacccccuccuuca

SEQ ID NO: 2686308 - RNA, 14 nt, Human
cuuuauuacccccu

SEQ ID NO: 2686309 - RNA, 14 nt, Human
cuuuauuaauguuu

SEQ ID NO: 2686310 - RNA, 15 nt, Human
cuuuauuaauguuuu

SEQ ID NO: 2686311 - RNA, 19 nt, Human
cuuuauuaauguuuucaaa

SEQ ID NO: 2686312 - RNA, 20 nt, Human
cuuuauguuuuugaggcuuu

SEQ ID NO: 2686313 - RNA, 14 nt, Human
cuuucaguacuuuu

SEQ ID NO: 2686314 - RNA, 15 nt, Human
cuuucaguacuuuuu

SEQ ID NO: 2686315 - RNA, 21 nt, Human
cuuucaguacuuuuuuaaaua

SEQ ID NO: 2686316 - RNA, 20 nt, Human
cuuuauuugaacaaugaagu

SEQ ID NO: 2686317 - RNA, 14 nt, Human
cuuuauuuguaaau

SEQ ID NO: 2686318 - RNA, 15 nt, Human
cuuuauuuguaaauu

SEQ ID NO: 2686319 - RNA, 16 nt, Human
cuuuauuuguaaauuu

SEQ ID NO: 2686320 - RNA, 17 nt, Human
cuuuauuuguaaauuua

SEQ ID NO: 2686321 - RNA, 22 nt, Human
cuuuccaaaugcccagcuuaaa

SEQ ID NO: 2686322 - RNA, 19 nt, Human
cuuuccaaaugcccagcuu

SEQ ID NO: 2686323 - RNA, 18 nt, Human
cuuuccaaaugcccagcu

SEQ ID NO: 2686324 - RNA, 11 nt, Human
cuuucccaagc

SEQ ID NO: 2686325 - RNA, 15 nt, Human
cuuuccaccacagcc

SEQ ID NO: 2686326 - RNA, 17 nt, Human
cuuuccaccacagccag

SEQ ID NO: 2686327 - RNA, 21 nt, Human
cuuuccaccacagccagcacc

SEQ ID NO: 2686328 - RNA, 22 nt, Human
cuuuccaccacagccagcaccu

SEQ ID NO: 2686329 - RNA, 23 nt, Human
cuuuccaccacagccagcaccug

SEQ ID NO: 2686330 - RNA, 22 nt, Human
cuuuccaaaccuuaucuccaca

SEQ ID NO: 2686331 - RNA, 18 nt, Human
cuuuccaaaccuuaucuc

SEQ ID NO: 2686332 - RNA, 16 nt, Human
cuuggggggcugaggu

SEQ ID NO: 2686333 - RNA, 15 nt, Human
cuuggggggcugagg

SEQ ID NO: 2686334 - RNA, 14 nt, Human
cuugggccacugug

SEQ ID NO: 2686335 - RNA, 22 nt, Human
cuugggcagagcuggcucugag

SEQ ID NO: 2686336 - RNA, 23 nt, Human
cuugggcagagcuggcucugagc

SEQ ID NO: 2686337 - RNA, 13 nt, Human
cuugggccacccc

SEQ ID NO: 2686338 - RNA, 17 nt, Human
cuugggccaccccuccu

SEQ ID NO: 2686339 - RNA, 14 nt, Human
cuugggcagagcug

SEQ ID NO: 2686340 - RNA, 15 nt, Human
cuugggcagagcugg

SEQ ID NO: 2686341 - RNA, 18 nt, Human
cuugggcagagcuggcuc

SEQ ID NO: 2686342 - RNA, 19 nt, Human
cuugggcagagcuggcucu

SEQ ID NO: 2686343 - RNA, 20 nt, Human
cuugggcagagcuggcucug

SEQ ID NO: 2686344 - RNA, 14 nt, Human
cuuggagggaagcc

SEQ ID NO: 2686345 - RNA, 13 nt, Human
cuugccagagccg

SEQ ID NO: 2686346 - RNA, 20 nt, Human
cuugccagagccgggcacau

SEQ ID NO: 2686347 - RNA, 16 nt, Human
cuuggaaauuccugua

SEQ ID NO: 2686348 - RNA, 19 nt, Human
cuuggaaauuccuguacug

SEQ ID NO: 2686349 - RNA, 20 nt, Human
cuuggaaauuccuguacugu

SEQ ID NO: 2686350 - RNA, 15 nt, Human
cuugcuuauuugaca

SEQ ID NO: 2686351 - RNA, 17 nt, Human
cuugcuuuucuguauuu

SEQ ID NO: 2686352 - RNA, 19 nt, Human
cuugcuguuuguccugaga

SEQ ID NO: 2686353 - RNA, 13 nt, Human
cuugcuuaaauuu

SEQ ID NO: 2686354 - RNA, 16 nt, Human
cuugcuuaaauuucuu

SEQ ID NO: 2686355 - RNA, 17 nt, Human
cuugcuuaaauuucuua

SEQ ID NO: 2686356 - RNA, 22 nt, Human
cuugcuuaaauuucuuauguga

SEQ ID NO: 2686357 - RNA, 23 nt, Human
cuugcuuaaauuucuuaugugac

SEQ ID NO: 2686358 - RNA, 13 nt, Human
cucgacucugugc

SEQ ID NO: 2686359 - RNA, 14 nt, Human
cucgacucugugcc

SEQ ID NO: 2686360 - RNA, 19 nt, Human
cuccuuauuuggcgugacc

SEQ ID NO: 2686361 - RNA, 18 nt, Human
cucgcauaggaccuuucc

SEQ ID NO: 2686362 - RNA, 20 nt, Human
cucgccggacccucuaaccu

SEQ ID NO: 2686363 - RNA, 17 nt, Human
cucgccggaucugaggg

SEQ ID NO: 2686364 - RNA, 18 nt, Human
cucgccggaucugaggga

SEQ ID NO: 2686365 - RNA, 12 nt, Human
cucgcugagggc

SEQ ID NO: 2686366 - RNA, 22 nt, Human
cucgcugagggcagacuggggc

SEQ ID NO: 2686367 - RNA, 18 nt, Human
cucgcagccucucagugc

SEQ ID NO: 2686368 - RNA, 19 nt, Human
cucgcagccucucagugcc

SEQ ID NO: 2686369 - RNA, 19 nt, Human
cuccugcuuaaucuucaaa

SEQ ID NO: 2686370 - RNA, 14 nt, Human
cuccuuagaaaaaa

SEQ ID NO: 2686371 - RNA, 14 nt, Human
cuccugcugccaca

SEQ ID NO: 2686372 - RNA, 15 nt, Human
cuccucccacccggc

SEQ ID NO: 2686373 - RNA, 15 nt, Human
cuccuccagccgcca

SEQ ID NO: 2686374 - RNA, 18 nt, Human
cuccucagggcagccucc

SEQ ID NO: 2686375 - RNA, 18 nt, Human
cuccucucccauccuuga

SEQ ID NO: 2686376 - RNA, 20 nt, Human
cuccucccacccggcugcag

SEQ ID NO: 2686377 - RNA, 22 nt, Human
cuccucccacccggcugcagag

SEQ ID NO: 2686378 - RNA, 22 nt, Human
cuccuauucucuuaauuuuucu

SEQ ID NO: 2686379 - RNA, 15 nt, Human
cuccuauucuauaaa

SEQ ID NO: 2686380 - RNA, 16 nt, Human
cuccuauucuauaaaa

SEQ ID NO: 2686381 - RNA, 20 nt, Human
cuccuauucuauaaaacucu

SEQ ID NO: 2686382 - RNA, 12 nt, Human
cuccgccagccu

SEQ ID NO: 2686383 - RNA, 13 nt, Human
cuccgccagccuc

SEQ ID NO: 2686384 - RNA, 12 nt, Human
cuccgcaggacu

SEQ ID NO: 2686385 - RNA, 22 nt, Human
cuccgcaggacuuccccggagg

SEQ ID NO: 2686386 - RNA, 13 nt, Human
cuccgcaggacuu

SEQ ID NO: 2686387 - RNA, 17 nt, Human
cuccgaggacccaggaa

SEQ ID NO: 2686388 - RNA, 14 nt, Human
cuccgagagggaga

SEQ ID NO: 2686389 - RNA, 13 nt, Human
cuccgagaggugg

SEQ ID NO: 2686390 - RNA, 14 nt, Human
cuccgagagguggg

SEQ ID NO: 2686391 - RNA, 15 nt, Human
cuccgagaggugggc

SEQ ID NO: 2686392 - RNA, 17 nt, Human
cuccgagaggugggcca

SEQ ID NO: 2686393 - RNA, 18 nt, Human
cuccgagaggugggccag

SEQ ID NO: 2686394 - RNA, 22 nt, Human
cuccgagaggugggccagucug

SEQ ID NO: 2686395 - RNA, 16 nt, Human
cuccgagagggagaga

SEQ ID NO: 2686396 - RNA, 15 nt, Human
cuccgaggacccagg

SEQ ID NO: 2686397 - RNA, 22 nt, Human
cucccuguaggguccaaccaga

SEQ ID NO: 2686398 - RNA, 19 nt, Human
cuccccagcauuccagccc

SEQ ID NO: 2686399 - RNA, 12 nt, Human
cucccugccugg

SEQ ID NO: 2686400 - RNA, 16 nt, Human
cuccccuuuuuuuccc

SEQ ID NO: 2686401 - RNA, 17 nt, Human
cucaucaaucaaauaag

SEQ ID NO: 2686402 - RNA, 21 nt, Human
cucauaucaacuuagucaaua

SEQ ID NO: 2686403 - RNA, 21 nt, Human
cucaucaaucaaauaaguauu

SEQ ID NO: 2686404 - RNA, 23 nt, Human
cucaggaguuugagaccaaccug

SEQ ID NO: 2686405 - RNA, 18 nt, Human
cucaggaguuugagacca

SEQ ID NO: 2686406 - RNA, 15 nt, Human
cucagggccuggucg

SEQ ID NO: 2686407 - RNA, 13 nt, Human
cucagggcuccca

SEQ ID NO: 2686408 - RNA, 15 nt, Human
cucagggcucccagg

SEQ ID NO: 2686409 - RNA, 16 nt, Human
cucagggcucccaggg

SEQ ID NO: 2686410 - RNA, 14 nt, Human
cucagggcagccuc

SEQ ID NO: 2686411 - RNA, 21 nt, Human
cucagggcagccucccccggc

SEQ ID NO: 2686412 - RNA, 20 nt, Human
cucaggugagaagcagagga

SEQ ID NO: 2686413 - RNA, 19 nt, Human
cucaggugagaagcagagg

SEQ ID NO: 2686414 - RNA, 16 nt, Human
cucaggugagaagcag

SEQ ID NO: 2686415 - RNA, 21 nt, Human
cuccauaguuuggcauuugca

SEQ ID NO: 2686416 - RNA, 15 nt, Human
cuccaucacccucuu

SEQ ID NO: 2686417 - RNA, 20 nt, Human
cuccauaguuuggcauuugc

SEQ ID NO: 2686418 - RNA, 22 nt, Human
cuccaucacccucuuccuguga

SEQ ID NO: 2686419 - RNA, 12 nt, Human
cuccaucccucu

SEQ ID NO: 2686420 - RNA, 13 nt, Human
cuccaucccucua

SEQ ID NO: 2686421 - RNA, 15 nt, Human
cuccaucccucuaau

SEQ ID NO: 2686422 - RNA, 22 nt, Human
cuccaucccucuaaugagacug

SEQ ID NO: 2686423 - RNA, 12 nt, Human
cuccauccaagg

SEQ ID NO: 2686424 - RNA, 13 nt, Human
cuccauccaaggc

SEQ ID NO: 2686425 - RNA, 14 nt, Human
cuccauccaaggcc

SEQ ID NO: 2686426 - RNA, 18 nt, Human
cuccauccaaggccaggu

SEQ ID NO: 2686427 - RNA, 22 nt, Human
cuccagcgaucucuccacugug

SEQ ID NO: 2686428 - RNA, 13 nt, Human
cuccagccugggg

SEQ ID NO: 2686429 - RNA, 16 nt, Human
cuccagccugggggac

SEQ ID NO: 2686430 - RNA, 12 nt, Human
cuccagccuggg

SEQ ID NO: 2686431 - RNA, 18 nt, Human
cuccagcgucagcugcuc

SEQ ID NO: 2686432 - RNA, 19 nt, Human
cuccagcgucagcugcucc

SEQ ID NO: 2686433 - RNA, 23 nt, Human
cuccagcgucagcugcucccugg

SEQ ID NO: 2686434 - RNA, 23 nt, Human
cuccaaacugaagcagccucucc

SEQ ID NO: 2686435 - RNA, 13 nt, Human
cucauauaagaca

SEQ ID NO: 2686436 - RNA, 19 nt, Human
cucauuacuuguugccuau

SEQ ID NO: 2686437 - RNA, 15 nt, Human
cucauuaaacuuuuu

SEQ ID NO: 2686438 - RNA, 19 nt, Human
cucaucugaaauguuacaa

SEQ ID NO: 2686439 - RNA, 21 nt, Human
cucaucugaaauguuacaaaa

SEQ ID NO: 2686440 - RNA, 13 nt, Human
cucaucugcaaaa

SEQ ID NO: 2686441 - RNA, 12 nt, Human
cucaucugcugg

SEQ ID NO: 2686442 - RNA, 17 nt, Human
cuccacaaccucuuccc

SEQ ID NO: 2686443 - RNA, 22 nt, Human
cuccacaaccucuuccccccaa

SEQ ID NO: 2686444 - RNA, 13 nt, Human
cuccacaucugcc

SEQ ID NO: 2686445 - RNA, 14 nt, Human
cuccacaucugccu

SEQ ID NO: 2686446 - RNA, 15 nt, Human
cuccacaucugccuu

SEQ ID NO: 2686447 - RNA, 17 nt, Human
cuccacaucugccuuaa

SEQ ID NO: 2686448 - RNA, 16 nt, Human
cuccacaucugccuua

SEQ ID NO: 2686449 - RNA, 13 nt, Human
cucacugccaggc

SEQ ID NO: 2686450 - RNA, 12 nt, Human
cucacugccagg

SEQ ID NO: 2686451 - RNA, 22 nt, Human
cucacucggguuucucuguggc

SEQ ID NO: 2686452 - RNA, 16 nt, Human
cucacucacagaguca

SEQ ID NO: 2686453 - RNA, 16 nt, Human
cucagagugguggggg

SEQ ID NO: 2686454 - RNA, 21 nt, Human
cucagaguggugggggaaggc

SEQ ID NO: 2686455 - RNA, 22 nt, Human
cucagagacacuguugauaaaa

SEQ ID NO: 2686456 - RNA, 22 nt, Human
cucacugccaggccagccuccg

SEQ ID NO: 2686457 - RNA, 19 nt, Human
cucacuguuuguuuuuauu

SEQ ID NO: 2686458 - RNA, 21 nt, Human
cucacuguuuguuuuuauuua

SEQ ID NO: 2686459 - RNA, 19 nt, Human
cucagagaaaaaugcuccc

SEQ ID NO: 2686460 - RNA, 20 nt, Human
cucagagaaaaaugcucccc

SEQ ID NO: 2686461 - RNA, 21 nt, Human
cucagagaaaaaugcucccca

SEQ ID NO: 2686462 - RNA, 23 nt, Human
cucagagaaaaaugcuccccaca

SEQ ID NO: 2686463 - RNA, 22 nt, Human
cucacugccaugccagcuuauc

SEQ ID NO: 2686464 - RNA, 19 nt, Human
cucacugccaugccagcuu

SEQ ID NO: 2686465 - RNA, 14 nt, Human
cucacugccaggcc

SEQ ID NO: 2686466 - RNA, 15 nt, Human
cucacugccaggcca

SEQ ID NO: 2686467 - RNA, 18 nt, Human
cucacugccaggccagcc

SEQ ID NO: 2686468 - RNA, 19 nt, Human
cucacugccaggccagccu

SEQ ID NO: 2686469 - RNA, 20 nt, Human
cucacugccaggccagccuc

SEQ ID NO: 2686470 - RNA, 21 nt, Human
cucacugccaggccagccucc

SEQ ID NO: 2686471 - RNA, 17 nt, Human
cucagauuucugaggaa

SEQ ID NO: 2686472 - RNA, 16 nt, Human
cucagauuucugagga

SEQ ID NO: 2686473 - RNA, 13 nt, Human
cucaaauuuuuug

SEQ ID NO: 2686474 - RNA, 21 nt, Human
cucaaauuuuuugacuuuuuu

SEQ ID NO: 2686475 - RNA, 21 nt, Human
cucaacaccucugcacaagcu

SEQ ID NO: 2686476 - RNA, 14 nt, Human
cuauuucaucacaa

SEQ ID NO: 2686477 - RNA, 22 nt, Human
cuauucuauaaaacucugcaug

SEQ ID NO: 2686478 - RNA, 12 nt, Human
cuauuccaauaa

SEQ ID NO: 2686479 - RNA, 15 nt, Human
cuauuccaauaaacu

SEQ ID NO: 2686480 - RNA, 12 nt, Human
cucaacaagaaa

SEQ ID NO: 2686481 - RNA, 22 nt, Human
cucacagcuaugcaaaaagcua

SEQ ID NO: 2686482 - RNA, 16 nt, Human
cucacagcuaugcaaa

SEQ ID NO: 2686483 - RNA, 15 nt, Human
cucacagcuaugcaa

SEQ ID NO: 2686484 - RNA, 15 nt, Human
cucaagaaauuccca

SEQ ID NO: 2686485 - RNA, 23 nt, Human
cucaccagccccacugccagcag

SEQ ID NO: 2686486 - RNA, 21 nt, Human
cucaccagccccacugccagc

SEQ ID NO: 2686487 - RNA, 22 nt, Human
cucaccagccccacugccagca

SEQ ID NO: 2686488 - RNA, 13 nt, Human
cucaccagcccca

SEQ ID NO: 2686489 - RNA, 16 nt, Human
cucaccagccccacug

SEQ ID NO: 2686490 - RNA, 17 nt, Human
cucaccagccccacugc

SEQ ID NO: 2686491 - RNA, 18 nt, Human
cucaccagccccacugcc

SEQ ID NO: 2686492 - RNA, 19 nt, Human
cucaccagccccacugcca

SEQ ID NO: 2686493 - RNA, 20 nt, Human
cucaccagccccacugccag

SEQ ID NO: 2686494 - RNA, 17 nt, Human
cuauaagccaaaauuaa

SEQ ID NO: 2686495 - RNA, 17 nt, Human
cuauagcaucacuuaaa

SEQ ID NO: 2686496 - RNA, 15 nt, Human
cuauagcaucacuua

SEQ ID NO: 2686497 - RNA, 20 nt, Human
cuauagcaucacuuaaaaca

SEQ ID NO: 2686498 - RNA, 21 nt, Human
cuaucugucugguggccccgu

SEQ ID NO: 2686499 - RNA, 12 nt, Human
cuaucugugcua

SEQ ID NO: 2686500 - RNA, 17 nt, Human
cuaucugucugguggcc

SEQ ID NO: 2686501 - RNA, 18 nt, Human
cuaucugucugguggccc

SEQ ID NO: 2686502 - RNA, 11 nt, Human
cuaucugucug

SEQ ID NO: 2686503 - RNA, 14 nt, Human
cuaucugucuggug

SEQ ID NO: 2686504 - RNA, 16 nt, Human
cuaucugucugguggc

SEQ ID NO: 2686505 - RNA, 18 nt, Human
cuauauuuuaaccugcau

SEQ ID NO: 2686506 - RNA, 19 nt, Human
cuauucaguggcgagaaau

SEQ ID NO: 2686507 - RNA, 15 nt, Human
cuauuagagaagaga

SEQ ID NO: 2686508 - RNA, 18 nt, Human
cuauuacgaaguucaaga

SEQ ID NO: 2686509 - RNA, 23 nt, Human
cuauuacgaaguucaagaucaaa

SEQ ID NO: 2686510 - RNA, 22 nt, Human
cuauuacgaaguucaagaucaa

SEQ ID NO: 2686511 - RNA, 16 nt, Human
cuauuaguguuauaug

SEQ ID NO: 2686512 - RNA, 15 nt, Human
cuauuaguguuauau

SEQ ID NO: 2686513 - RNA, 14 nt, Human
cuauuaguguuaua

SEQ ID NO: 2686514 - RNA, 17 nt, Human
cuauggucgggagacag

SEQ ID NO: 2686515 - RNA, 21 nt, Human
cuauggucgggagacagcauc

SEQ ID NO: 2686516 - RNA, 20 nt, Human
cuaugcauaucaguugagcu

SEQ ID NO: 2686517 - RNA, 14 nt, Human
cuauggcagaaaaa

SEQ ID NO: 2686518 - RNA, 23 nt, Human
cuauggcagaaaaaaugucugua

SEQ ID NO: 2686519 - RNA, 16 nt, Human
cuauggcagaaaaaau

SEQ ID NO: 2686520 - RNA, 22 nt, Human
cuauggcagaaaaaaugucugu

SEQ ID NO: 2686521 - RNA, 17 nt, Human
cuaugcuuuccaaaccu

SEQ ID NO: 2686522 - RNA, 16 nt, Human
cuagguagagucugag

SEQ ID NO: 2686523 - RNA, 17 nt, Human
cuagguagagucugagg

SEQ ID NO: 2686524 - RNA, 12 nt, Human
cuaggucuccag

SEQ ID NO: 2686525 - RNA, 13 nt, Human
cuaggucuccagu

SEQ ID NO: 2686526 - RNA, 15 nt, Human
cgccaugcuccuggc

SEQ ID NO: 2686527 - RNA, 18 nt, Human
cgcccaugcacuggggac

SEQ ID NO: 2686528 - RNA, 12 nt, Human
cuagugaaacuu

SEQ ID NO: 2686529 - RNA, 16 nt, Human
cuagugaaacuuuucu

SEQ ID NO: 2686530 - RNA, 14 nt, Human
cuagucauauauua

SEQ ID NO: 2686531 - RNA, 21 nt, Human
cuagucaacaguacccugguu

SEQ ID NO: 2686532 - RNA, 14 nt, Human
cuagucaccagaga

SEQ ID NO: 2686533 - RNA, 13 nt, Human
cuaguaagaagac

SEQ ID NO: 2686534 - RNA, 22 nt, Human
cuaguaagaagacaaacugcuu

SEQ ID NO: 2686535 - RNA, 21 nt, Human
cugauuucuagaacccgugac

SEQ ID NO: 2686536 - RNA, 13 nt, Human
cugauuucuucag

SEQ ID NO: 2686537 - RNA, 22 nt, Human
cugauuugcaauaaaaaugaua

SEQ ID NO: 2686538 - RNA, 13 nt, Human
cugauuucuuuuc

SEQ ID NO: 2686539 - RNA, 21 nt, Human
cugaugguguggccuguggcu

SEQ ID NO: 2686540 - RNA, 23 nt, Human
cugauuugaugauacauuucauu

SEQ ID NO: 2686541 - RNA, 16 nt, Human
cugauuugcugcucuu

SEQ ID NO: 2686542 - RNA, 17 nt, Human
cugauuugcugcucuuc

SEQ ID NO: 2686543 - RNA, 22 nt, Human
cugcacaagcugcacccucagg

SEQ ID NO: 2686544 - RNA, 22 nt, Human
cugcacaugacucggggguggg

SEQ ID NO: 2686545 - RNA, 23 nt, Human
cugcacaugacucgggggugggg

SEQ ID NO: 2686546 - RNA, 22 nt, Human
cugcacuccucagggcagccuc

SEQ ID NO: 2686547 - RNA, 19 nt, Human
cugcaccccuucucuccuc

SEQ ID NO: 2686548 - RNA, 20 nt, Human
cugcaccccuucucuccucc

SEQ ID NO: 2686549 - RNA, 21 nt, Human
cugcaccccuucucuccuccc

SEQ ID NO: 2686550 - RNA, 15 nt, Human
cugcacuccucaggg

SEQ ID NO: 2686551 - RNA, 19 nt, Human
cugcacucuuaagcuuccg

SEQ ID NO: 2686552 - RNA, 14 nt, Human
cugcacccucaggc

SEQ ID NO: 2686553 - RNA, 13 nt, Human
cugcacccucagg

SEQ ID NO: 2686554 - RNA, 16 nt, Human
cugaggccugcagcac

SEQ ID NO: 2686555 - RNA, 14 nt, Human
cugaggccugggcc

SEQ ID NO: 2686556 - RNA, 15 nt, Human
cugaggccugggccg

SEQ ID NO: 2686557 - RNA, 19 nt, Human
cugaggccugggccgcugc

SEQ ID NO: 2686558 - RNA, 22 nt, Human
cugaggccugggccgcugccac

SEQ ID NO: 2686559 - RNA, 23 nt, Human
cugaggccugggccgcugccacg

SEQ ID NO: 2686560 - RNA, 20 nt, Human
cugaggccguugcugacuua

SEQ ID NO: 2686561 - RNA, 13 nt, Human
cugaggcuguggu

SEQ ID NO: 2686562 - RNA, 14 nt, Human
cugaggcugugguc

SEQ ID NO: 2686563 - RNA, 17 nt, Human
cugaggcuguggucaca

SEQ ID NO: 2686564 - RNA, 19 nt, Human
cugaggcuguggucacagc

SEQ ID NO: 2686565 - RNA, 20 nt, Human
cugaggcuguggucacagcg

SEQ ID NO: 2686566 - RNA, 12 nt, Human
cugaggcugagg

SEQ ID NO: 2686567 - RNA, 14 nt, Human
cugaggcugaggca

SEQ ID NO: 2686568 - RNA, 20 nt, Human
cugagucuguucugguaauc

SEQ ID NO: 2686569 - RNA, 14 nt, Human
cugagucugggcag

SEQ ID NO: 2686570 - RNA, 22 nt, Human
cugagucugggcagcugucccu

SEQ ID NO: 2686571 - RNA, 18 nt, Human
cugcccaucgugaagaag

SEQ ID NO: 2686572 - RNA, 21 nt, Human
cugcccaucgugaagaagccu

SEQ ID NO: 2686573 - RNA, 22 nt, Human
cugcccaucgugaagaagccug

SEQ ID NO: 2686574 - RNA, 17 nt, Human
cugcccagcccccuggu

SEQ ID NO: 2686575 - RNA, 13 nt, Human
cugcccacuguuu

SEQ ID NO: 2686576 - RNA, 22 nt, Human
cugcccacuguuucucuugagc

SEQ ID NO: 2686577 - RNA, 23 nt, Human
cugcccacuguuucucuugagcu

SEQ ID NO: 2686578 - RNA, 17 nt, Human
cugcccagacaagauuu

SEQ ID NO: 2686579 - RNA, 17 nt, Human
cugccaggcaggggugg

SEQ ID NO: 2686580 - RNA, 20 nt, Human
cugccaggcagggguggggg

SEQ ID NO: 2686581 - RNA, 13 nt, Human
cugccaggccagc

SEQ ID NO: 2686582 - RNA, 15 nt, Human
cugccaggccagccu

SEQ ID NO: 2686583 - RNA, 16 nt, Human
cugccaggccagccuc

SEQ ID NO: 2686584 - RNA, 17 nt, Human
cugccaggccagccucc

SEQ ID NO: 2686585 - RNA, 18 nt, Human
cugccaggccagccuccg

SEQ ID NO: 2686586 - RNA, 19 nt, Human
cugccaggccagccuccga

SEQ ID NO: 2686587 - RNA, 20 nt, Human
cugccaggccagccuccgag

SEQ ID NO: 2686588 - RNA, 22 nt, Human
cugccaggccagccuccgagag

SEQ ID NO: 2686589 - RNA, 23 nt, Human
cugccaggccagccuccgagagg

SEQ ID NO: 2686590 - RNA, 14 nt, Human
cugccaugccagcu

SEQ ID NO: 2686591 - RNA, 16 nt, Human
cugccacucacuaggc

SEQ ID NO: 2686592 - RNA, 19 nt, Human
cugccacucacuaggcccc

SEQ ID NO: 2686593 - RNA, 13 nt, Human
cugccaggcaugg

SEQ ID NO: 2686594 - RNA, 11 nt, Human
cugccaggcau

SEQ ID NO: 2686595 - RNA, 16 nt, Human
cugcaucguuucaucu

SEQ ID NO: 2686596 - RNA, 13 nt, Human
cugcauccagccu

SEQ ID NO: 2686597 - RNA, 22 nt, Human
cugcaucguuucaucuuccaac

SEQ ID NO: 2686598 - RNA, 20 nt, Human
cugcauguagaggcuuguuu

SEQ ID NO: 2686599 - RNA, 16 nt, Human
cugcaugcccucucag

SEQ ID NO: 2686600 - RNA, 15 nt, Human
cugcaugcccucuca

SEQ ID NO: 2686601 - RNA, 21 nt, Human
cugcaugcccucucaggccgg

SEQ ID NO: 2686602 - RNA, 20 nt, Human
cugcaugcccucucaggccg

SEQ ID NO: 2686603 - RNA, 19 nt, Human
cugcaugcccucucaggcc

SEQ ID NO: 2686604 - RNA, 18 nt, Human
cugcaugcccucucaggc

SEQ ID NO: 2686605 - RNA, 17 nt, Human
cugcaugcccucucagg

SEQ ID NO: 2686606 - RNA, 22 nt, Human
cugccuggagacuuagggcacc

SEQ ID NO: 2686607 - RNA, 20 nt, Human
cugccuucgcuucuugccuc

SEQ ID NO: 2686608 - RNA, 21 nt, Human
cugccuucgcuucuugccucu

SEQ ID NO: 2686609 - RNA, 23 nt, Human
cugccuucgcuucuugccucugu

SEQ ID NO: 2686610 - RNA, 19 nt, Human
cugccugccccgcccccag

SEQ ID NO: 2686611 - RNA, 21 nt, Human
cugccugccccgcccccaguc

SEQ ID NO: 2686612 - RNA, 14 nt, Human
cugccugccccgcc

SEQ ID NO: 2686613 - RNA, 15 nt, Human
cugccugccccgccc

SEQ ID NO: 2686614 - RNA, 18 nt, Human
cugccugccccgccccca

SEQ ID NO: 2686615 - RNA, 22 nt, Human
cugccugccccgcccccagucc

SEQ ID NO: 2686616 - RNA, 24 nt, Human
cugcguccuccucaccucaugccc

SEQ ID NO: 2686617 - RNA, 13 nt, Human
cugcgucuauccu

SEQ ID NO: 2686618 - RNA, 16 nt, Human
cugcgucuauccugug

SEQ ID NO: 2686619 - RNA, 18 nt, Human
cugcgucuauccugugua

SEQ ID NO: 2686620 - RNA, 13 nt, Human
cugcguccuccuc

SEQ ID NO: 2686621 - RNA, 14 nt, Human
cugcguccuccuca

SEQ ID NO: 2686622 - RNA, 15 nt, Human
cugcguccuccucac

SEQ ID NO: 2686623 - RNA, 17 nt, Human
cugcguccuccucaccu

SEQ ID NO: 2686624 - RNA, 18 nt, Human
cugcguccuccucaccuc

SEQ ID NO: 2686625 - RNA, 19 nt, Human
cugcguccuccucaccuca

SEQ ID NO: 2686626 - RNA, 20 nt, Human
cugcgaagacccucuugccc

SEQ ID NO: 2686627 - RNA, 21 nt, Human
cugcgaagacccucuugccca

SEQ ID NO: 2686628 - RNA, 22 nt, Human
cugcgaagacccucuugcccau

SEQ ID NO: 2686629 - RNA, 14 nt, Human
cugccuuugcacca

SEQ ID NO: 2686630 - RNA, 20 nt, Human
cugccuuugcaccacgggac

SEQ ID NO: 2686631 - RNA, 15 nt, Human
cugcggaucucagcu

SEQ ID NO: 2686632 - RNA, 17 nt, Human
cugcggcguacaggcug

SEQ ID NO: 2686633 - RNA, 15 nt, Human
cugccuauugauuua

SEQ ID NO: 2686634 - RNA, 21 nt, Human
cugccggacccggaggccgag

SEQ ID NO: 2686635 - RNA, 20 nt, Human
cugccgccgcuagguagagu

SEQ ID NO: 2686636 - RNA, 19 nt, Human
cugccgcccccuccugaac

SEQ ID NO: 2686637 - RNA, 18 nt, Human
cugccgcccccuccugaa

SEQ ID NO: 2686638 - RNA, 13 nt, Human
cugccccucucac

SEQ ID NO: 2686639 - RNA, 17 nt, Human
cugccccucucaccaaa

SEQ ID NO: 2686640 - RNA, 15 nt, Human
cugaauguugggacu

SEQ ID NO: 2686641 - RNA, 16 nt, Human
cugaauguugggacug

SEQ ID NO: 2686642 - RNA, 19 nt, Human
cugaauguugggacugcua

SEQ ID NO: 2686643 - RNA, 17 nt, Human
cugaaguuuuuuugcug

SEQ ID NO: 2686644 - RNA, 23 nt, Human
cugaaguuuuuuugcugcugccu

SEQ ID NO: 2686645 - RNA, 17 nt, Human
cugaaguugcagauguu

SEQ ID NO: 2686646 - RNA, 18 nt, Human
cugaaguugcagauguua

SEQ ID NO: 2686647 - RNA, 22 nt, Human
cugaagucccagauacuugggg

SEQ ID NO: 2686648 - RNA, 20 nt, Human
cugaagucuuacuacagaaa

SEQ ID NO: 2686649 - RNA, 12 nt, Human
cugaaccaugug

SEQ ID NO: 2686650 - RNA, 22 nt, Human
cugaaccacuuguagauuugau

SEQ ID NO: 2686651 - RNA, 18 nt, Human
cugaaccacuuguagauu

SEQ ID NO: 2686652 - RNA, 17 nt, Human
cugaaccacuuguagau

SEQ ID NO: 2686653 - RNA, 15 nt, Human
cugaaccacuuguag

SEQ ID NO: 2686654 - RNA, 14 nt, Human
cugaaccacuugua

SEQ ID NO: 2686655 - RNA, 21 nt, Human
cugaacaauaggcuguuccca

SEQ ID NO: 2686656 - RNA, 19 nt, Human
cugaacaauaggcuguucc

SEQ ID NO: 2686657 - RNA, 18 nt, Human
cugaaauucuccuggagg

SEQ ID NO: 2686658 - RNA, 14 nt, Human
cugaaauucuccug

SEQ ID NO: 2686659 - RNA, 15 nt, Human
cugaaauucuccugg

SEQ ID NO: 2686660 - RNA, 16 nt, Human
cugaaauucuccugga

SEQ ID NO: 2686661 - RNA, 17 nt, Human
cugaaauucuccuggag

SEQ ID NO: 2686662 - RNA, 13 nt, Human
cugaaaguuuugu

SEQ ID NO: 2686663 - RNA, 15 nt, Human
cugaaaguuuuguaa

SEQ ID NO: 2686664 - RNA, 16 nt, Human
cugaaaguuuuguaaa

SEQ ID NO: 2686665 - RNA, 17 nt, Human
cugaaaguuuuguaaaa

SEQ ID NO: 2686666 - RNA, 18 nt, Human
cugaaaguuuuguaaaag

SEQ ID NO: 2686667 - RNA, 20 nt, Human
cugaaaguuuuguaaaagaa

SEQ ID NO: 2686668 - RNA, 22 nt, Human
cugaaaguuuuguaaaagaaau

SEQ ID NO: 2686669 - RNA, 23 nt, Human
cugaaaguuuuguaaaagaaauc

SEQ ID NO: 2686670 - RNA, 16 nt, Human
cugaaaguagggggcu

SEQ ID NO: 2686671 - RNA, 23 nt, Human
cucuuuuccacuccauugucgua

SEQ ID NO: 2686672 - RNA, 12 nt, Human
cugaaagugugu

SEQ ID NO: 2686673 - RNA, 21 nt, Human
cugaaaguguguguaguuuua

SEQ ID NO: 2686674 - RNA, 18 nt, Human
cucuucucauuacuuguu

SEQ ID NO: 2686675 - RNA, 16 nt, Human
cugaccagcugcuccg

SEQ ID NO: 2686676 - RNA, 19 nt, Human
cugaccagcugcuccgagg

SEQ ID NO: 2686677 - RNA, 13 nt, Human
cugaccagcugcu

SEQ ID NO: 2686678 - RNA, 13 nt, Human
cugacguccaccu

SEQ ID NO: 2686679 - RNA, 14 nt, Human
cugagaaaacaagc

SEQ ID NO: 2686680 - RNA, 12 nt, Human
cugagaaaacaa

SEQ ID NO: 2686681 - RNA, 16 nt, Human
cugacuggugcugcag

SEQ ID NO: 2686682 - RNA, 14 nt, Human
cugacuaagaaauu

SEQ ID NO: 2686683 - RNA, 17 nt, Human
cugacugaggcaguuug

SEQ ID NO: 2686684 - RNA, 14 nt, Human
cugacugaggcagu

SEQ ID NO: 2686685 - RNA, 11 nt, Human
cugacugaggc

SEQ ID NO: 2686686 - RNA, 15 nt, Human
cugacucgguuucuc

SEQ ID NO: 2686687 - RNA, 16 nt, Human
cugacucgguuucucc

SEQ ID NO: 2686688 - RNA, 17 nt, Human
cugacucgguuucucca

SEQ ID NO: 2686689 - RNA, 18 nt, Human
cugacucgguuucuccaa

SEQ ID NO: 2686690 - RNA, 21 nt, Human
cugacugaaaguagggggcuu

SEQ ID NO: 2686691 - RNA, 21 nt, Human
cugacugucgggcuuuaaaaa

SEQ ID NO: 2686692 - RNA, 16 nt, Human
cucugggauccugggg

SEQ ID NO: 2686693 - RNA, 16 nt, Human
cucugccgucucugga

SEQ ID NO: 2686694 - RNA, 17 nt, Human
cucugccgucucuggag

SEQ ID NO: 2686695 - RNA, 18 nt, Human
cucugccgucucuggagc

SEQ ID NO: 2686696 - RNA, 13 nt, Human
cucuuccugugau

SEQ ID NO: 2686697 - RNA, 17 nt, Human
cucuuccugugauccac

SEQ ID NO: 2686698 - RNA, 23 nt, Human
cucuuccuugaagaacugcaggc

SEQ ID NO: 2686699 - RNA, 16 nt, Human
cucuuccuuuuaucag

SEQ ID NO: 2686700 - RNA, 22 nt, Human
cucuuaagcuuccgccgucuca

SEQ ID NO: 2686701 - RNA, 14 nt, Human
cucuuccccccaaa

SEQ ID NO: 2686702 - RNA, 13 nt, Human
cucuuccccccaa

SEQ ID NO: 2686703 - RNA, 20 nt, Human
cucugaauuuacuuccuugc

SEQ ID NO: 2686704 - RNA, 21 nt, Human
cucugaauuuacuuccuugca

SEQ ID NO: 2686705 - RNA, 17 nt, Human
cucugaaugccccauaa

SEQ ID NO: 2686706 - RNA, 13 nt, Human
cucugaccacuug

SEQ ID NO: 2686707 - RNA, 20 nt, Human
cucugaccacuugaggccug

SEQ ID NO: 2686708 - RNA, 15 nt, Human
cucugccgucucugg

SEQ ID NO: 2686709 - RNA, 19 nt, Human
cucugccccucccccagcc

SEQ ID NO: 2686710 - RNA, 23 nt, Human
cucugccccucccccagccaugc

SEQ ID NO: 2686711 - RNA, 15 nt, Human
cucugcacaagcugc

SEQ ID NO: 2686712 - RNA, 14 nt, Human
cucugcacaagcug

SEQ ID NO: 2686713 - RNA, 13 nt, Human
cucugcacaagcu

SEQ ID NO: 2686714 - RNA, 10 nt, Human
cucugcacaa

SEQ ID NO: 2686715 - RNA, 17 nt, Human
cucugcauuuaaaaaaa

SEQ ID NO: 2686716 - RNA, 11 nt, Human
gagcugccagu

SEQ ID NO: 2686717 - RNA, 13 nt, Human
gagcugccagugg

SEQ ID NO: 2686718 - RNA, 21 nt, Human
gagcuuaaugcuacaugugag

SEQ ID NO: 2686719 - RNA, 22 nt, Human
gagcuuaaugcuacaugugagu

SEQ ID NO: 2686720 - RNA, 21 nt, Human
gagcuccacucugcuucucug

SEQ ID NO: 2686721 - RNA, 12 nt, Human
gagcuccacucu

SEQ ID NO: 2686722 - RNA, 13 nt, Human
gagcuccacucug

SEQ ID NO: 2686723 - RNA, 16 nt, Human
gagcuccacucugcuu

SEQ ID NO: 2686724 - RNA, 18 nt, Human
gagcuccacucugcuucu

SEQ ID NO: 2686725 - RNA, 14 nt, Human
gagcucucucuaca

SEQ ID NO: 2686726 - RNA, 15 nt, Human
gagcucugaaaucuu

SEQ ID NO: 2686727 - RNA, 16 nt, Human
gagcucugaaaucuuc

SEQ ID NO: 2686728 - RNA, 19 nt, Human
gagcucugaaaucuuccca

SEQ ID NO: 2686729 - RNA, 17 nt, Human
gagccuggugcugcugc

SEQ ID NO: 2686730 - RNA, 16 nt, Human
gagccuggugcugcug

SEQ ID NO: 2686731 - RNA, 21 nt, Human
gagccugggaggucaaggcug

SEQ ID NO: 2686732 - RNA, 13 nt, Human
gagccugggaggu

SEQ ID NO: 2686733 - RNA, 10 nt, Human
gagccuggca

SEQ ID NO: 2686734 - RNA, 15 nt, Human
gagccugcuggcacc

SEQ ID NO: 2686735 - RNA, 15 nt, Human
gagccuggcaagaau

SEQ ID NO: 2686736 - RNA, 10 nt, Human
gagccugcug

SEQ ID NO: 2686737 - RNA, 12 nt, Human
gagccugcuggc

SEQ ID NO: 2686738 - RNA, 11 nt, Human
gagccugcugg

SEQ ID NO: 2686739 - RNA, 13 nt, Human
gagccugcuggca

SEQ ID NO: 2686740 - RNA, 13 nt, Human
gagccugcaggga

SEQ ID NO: 2686741 - RNA, 16 nt, Human
gagccugcagggaagc

SEQ ID NO: 2686742 - RNA, 21 nt, Human
gaaugcugcaggacuugagaa

SEQ ID NO: 2686743 - RNA, 18 nt, Human
gaaugcugggacucagcc

SEQ ID NO: 2686744 - RNA, 19 nt, Human
gaaugcugggacucagccu

SEQ ID NO: 2686745 - RNA, 13 nt, Human
gaaugcugggacu

SEQ ID NO: 2686746 - RNA, 14 nt, Human
gaaugcugggacuc

SEQ ID NO: 2686747 - RNA, 16 nt, Human
gaaugcugggacucag

SEQ ID NO: 2686748 - RNA, 17 nt, Human
gaaugcugggacucagc

SEQ ID NO: 2686749 - RNA, 13 nt, Human
gagaucagccugg

SEQ ID NO: 2686750 - RNA, 16 nt, Human
gagaucagccugggca

SEQ ID NO: 2686751 - RNA, 14 nt, Human
gagaucagccuggg

SEQ ID NO: 2686752 - RNA, 17 nt, Human
gagauccuccugcagac

SEQ ID NO: 2686753 - RNA, 23 nt, Human
gagauccuccugcagaccacgcc

SEQ ID NO: 2686754 - RNA, 13 nt, Human
gagauccuccugc

SEQ ID NO: 2686755 - RNA, 14 nt, Human
gagauccuccugca

SEQ ID NO: 2686756 - RNA, 20 nt, Human
gagaucgcgccacugcacuc

SEQ ID NO: 2686757 - RNA, 17 nt, Human
gagaucgagaccauccu

SEQ ID NO: 2686758 - RNA, 18 nt, Human
gagaucgagaccauccug

SEQ ID NO: 2686759 - RNA, 19 nt, Human
gagaucgagaccauccugg

SEQ ID NO: 2686760 - RNA, 21 nt, Human
gagaucgagaccauccuggcu

SEQ ID NO: 2686761 - RNA, 22 nt, Human
gagaucgagaccauccuggcua

SEQ ID NO: 2686762 - RNA, 21 nt, Human
gagaucgugcuacugcacucc

SEQ ID NO: 2686763 - RNA, 21 nt, Human
gagcaggcacggguggucccc

SEQ ID NO: 2686764 - RNA, 22 nt, Human
gagcaggcacgggugguccccg

SEQ ID NO: 2686765 - RNA, 14 nt, Human
gagcacugggcucc

SEQ ID NO: 2686766 - RNA, 22 nt, Human
gagccauggaccacgcaggaag

SEQ ID NO: 2686767 - RNA, 17 nt, Human
gagccaugcgcccccuc

SEQ ID NO: 2686768 - RNA, 12 nt, Human
gagccaccucac

SEQ ID NO: 2686769 - RNA, 21 nt, Human
gaggcccccagcccagggcuc

SEQ ID NO: 2686770 - RNA, 15 nt, Human
gaggcccccagccca

SEQ ID NO: 2686771 - RNA, 14 nt, Human
gaggcccccagccc

SEQ ID NO: 2686772 - RNA, 16 nt, Human
gaggcccccagcccag

SEQ ID NO: 2686773 - RNA, 17 nt, Human
gaggcccccagcccagg

SEQ ID NO: 2686774 - RNA, 19 nt, Human
gaggcccccagcccagggc

SEQ ID NO: 2686775 - RNA, 20 nt, Human
gaggcccccagcccagggcu

SEQ ID NO: 2686776 - RNA, 14 nt, Human
gaggccgaggccau

SEQ ID NO: 2686777 - RNA, 14 nt, Human
gaggccgaggcggg

SEQ ID NO: 2686778 - RNA, 22 nt, Human
gaggccugaucugcccaucgug

SEQ ID NO: 2686779 - RNA, 16 nt, Human
gaggccugcgacccug

SEQ ID NO: 2686780 - RNA, 19 nt, Human
gaggccugcgacccugggg

SEQ ID NO: 2686781 - RNA, 20 nt, Human
gaggccugcgacccuggggg

SEQ ID NO: 2686782 - RNA, 17 nt, Human
gaggcccuuugcugucc

SEQ ID NO: 2686783 - RNA, 16 nt, Human
gaggcccuuugcuguc

SEQ ID NO: 2686784 - RNA, 21 nt, Human
gaggccugggccgcugccacg

SEQ ID NO: 2686785 - RNA, 22 nt, Human
gaggccugggccgcugccacgu

SEQ ID NO: 2686786 - RNA, 14 nt, Human
gaggccugggccgc

SEQ ID NO: 2686787 - RNA, 16 nt, Human
gaggccugggccgcug

SEQ ID NO: 2686788 - RNA, 20 nt, Human
gaggccugggccgcugccac

SEQ ID NO: 2686789 - RNA, 20 nt, Human
gaggcggagcuugcagugag

SEQ ID NO: 2686790 - RNA, 15 nt, Human
gaggcuucuccgcca

SEQ ID NO: 2686791 - RNA, 18 nt, Human
gaggcuucuccgccagcc

SEQ ID NO: 2686792 - RNA, 13 nt, Human
gaggcuuccugcg

SEQ ID NO: 2686793 - RNA, 15 nt, Human
gaggcuuccugcguc

SEQ ID NO: 2686794 - RNA, 21 nt, Human
gaggcuuccugcguccuccuc

SEQ ID NO: 2686795 - RNA, 15 nt, Human
gagggacggccaaga

SEQ ID NO: 2686796 - RNA, 20 nt, Human
gagggacggccaagaaugua

SEQ ID NO: 2686797 - RNA, 22 nt, Human
gagggacgucagacuuggcuca

SEQ ID NO: 2686798 - RNA, 11 nt, Human
gagggaggccc

SEQ ID NO: 2686799 - RNA, 12 nt, Human
gagggaggcccc

SEQ ID NO: 2686800 - RNA, 16 nt, Human
gagggaggccccaggg

SEQ ID NO: 2686801 - RNA, 17 nt, Human
gagggaggccccagggg

SEQ ID NO: 2686802 - RNA, 16 nt, Human
gagggagaacaagacc

SEQ ID NO: 2686803 - RNA, 19 nt, Human
gagggaaggguuucucuau

SEQ ID NO: 2686804 - RNA, 20 nt, Human
gagggaaggguuucucuauu

SEQ ID NO: 2686805 - RNA, 23 nt, Human
gaggcuucuccgccagccuccuc

SEQ ID NO: 2686806 - RNA, 19 nt, Human
gaggcuucuccgccagccu

SEQ ID NO: 2686807 - RNA, 20 nt, Human
gaggcuucuccgccagccuc

SEQ ID NO: 2686808 - RNA, 21 nt, Human
gaggcuucuccgccagccucc

SEQ ID NO: 2686809 - RNA, 22 nt, Human
gaggcuucuccgccagccuccu

SEQ ID NO: 2686810 - RNA, 19 nt, Human
gaggcuuguuuaccuuucu

SEQ ID NO: 2686811 - RNA, 23 nt, Human
gaggcuuguuuaccuuucucucu

SEQ ID NO: 2686812 - RNA, 17 nt, Human
gagggcagacuggggca

SEQ ID NO: 2686813 - RNA, 18 nt, Human
gagggcagacuggggcau

SEQ ID NO: 2686814 - RNA, 21 nt, Human
gagggcagacuggggcauccu

SEQ ID NO: 2686815 - RNA, 23 nt, Human
gagggcagacuggggcauccugu

SEQ ID NO: 2686816 - RNA, 15 nt, Human
gaggaaugaaaaaag

SEQ ID NO: 2686817 - RNA, 20 nt, Human
gaggaauccuggcagcccag

SEQ ID NO: 2686818 - RNA, 15 nt, Human
gaggaauccuggcag

SEQ ID NO: 2686819 - RNA, 16 nt, Human
gaggaauccuggcagc

SEQ ID NO: 2686820 - RNA, 17 nt, Human
gaggaauccuggcagcc

SEQ ID NO: 2686821 - RNA, 19 nt, Human
gaggaauccuggcagccca

SEQ ID NO: 2686822 - RNA, 21 nt, Human
gaggaaggcaagagggggugg

SEQ ID NO: 2686823 - RNA, 13 nt, Human
gaggaaggcaaga

SEQ ID NO: 2686824 - RNA, 13 nt, Human
gaggagccuuuuu

SEQ ID NO: 2686825 - RNA, 11 nt, Human
gaggagccuuu

SEQ ID NO: 2686826 - RNA, 16 nt, Human
gaggaggaaggcaaga

SEQ ID NO: 2686827 - RNA, 13 nt, Human
gaggaggaaggca

SEQ ID NO: 2686828 - RNA, 11 nt, Human
gaggaggggag

SEQ ID NO: 2686829 - RNA, 12 nt, Human
gaggaggggagg

SEQ ID NO: 2686830 - RNA, 13 nt, Human
gaggaggggaggg

SEQ ID NO: 2686831 - RNA, 11 nt, Human
gaggagggaga

SEQ ID NO: 2686832 - RNA, 17 nt, Human
gaggagggagagggagg

SEQ ID NO: 2686833 - RNA, 15 nt, Human
gaggacagcuugagc

SEQ ID NO: 2686834 - RNA, 18 nt, Human
gaggacagcuugagccgg

SEQ ID NO: 2686835 - RNA, 13 nt, Human
gaggcaccaggaa

SEQ ID NO: 2686836 - RNA, 17 nt, Human
gaggcaccaggaagccg

SEQ ID NO: 2686837 - RNA, 21 nt, Human
gaggcagcgugaaagcagaug

SEQ ID NO: 2686838 - RNA, 23 nt, Human
gaggcagcgugaaagcagaugag

SEQ ID NO: 2686839 - RNA, 16 nt, Human
gaggcaggcauggccc

SEQ ID NO: 2686840 - RNA, 18 nt, Human
gaggcaggcauggcccug

SEQ ID NO: 2686841 - RNA, 19 nt, Human
gaggcaggcauggcccugg

SEQ ID NO: 2686842 - RNA, 20 nt, Human
gaggcaggcauggcccuggg

SEQ ID NO: 2686843 - RNA, 12 nt, Human
gaggaggguggg

SEQ ID NO: 2686844 - RNA, 15 nt, Human
gaggaggguggggga

SEQ ID NO: 2686845 - RNA, 17 nt, Human
gaggagggugggggagg

SEQ ID NO: 2686846 - RNA, 16 nt, Human
gaggauugcuugagcu

SEQ ID NO: 2686847 - RNA, 14 nt, Human
gaggauuaguuuag

SEQ ID NO: 2686848 - RNA, 22 nt, Human
gaggaugguagaaguuuggcug

SEQ ID NO: 2686849 - RNA, 14 nt, Human
gaugaaaacauagc

SEQ ID NO: 2686850 - RNA, 12 nt, Human
gaucuuucagaa

SEQ ID NO: 2686851 - RNA, 15 nt, Human
gaucuuucagaaaua

SEQ ID NO: 2686852 - RNA, 16 nt, Human
gaucuuucagaaauau

SEQ ID NO: 2686853 - RNA, 18 nt, Human
gaucuuucagaaauauaa

SEQ ID NO: 2686854 - RNA, 16 nt, Human
gaucgagaccauccug

SEQ ID NO: 2686855 - RNA, 17 nt, Human
gaucgagaccauccugg

SEQ ID NO: 2686856 - RNA, 18 nt, Human
gaucgagaccauccuggc

SEQ ID NO: 2686857 - RNA, 19 nt, Human
gaucgagaccauccuggcu

SEQ ID NO: 2686858 - RNA, 21 nt, Human
gauccuuagagguccucugga

SEQ ID NO: 2686859 - RNA, 22 nt, Human
gauccuuagagguccucuggag

SEQ ID NO: 2686860 - RNA, 23 nt, Human
gaugggaaugaggugggaggugg

SEQ ID NO: 2686861 - RNA, 14 nt, Human
gaugcaugucuuuu

SEQ ID NO: 2686862 - RNA, 16 nt, Human
gaugcaugucuuuuaa

SEQ ID NO: 2686863 - RNA, 17 nt, Human
gaugcaugucuuuuaaa

SEQ ID NO: 2686864 - RNA, 22 nt, Human
gaugcaugucuuuuaaaaugca

SEQ ID NO: 2686865 - RNA, 21 nt, Human
gaugacguacaaguaguucug

SEQ ID NO: 2686866 - RNA, 15 nt, Human
gaugacuguguugua

SEQ ID NO: 2686867 - RNA, 21 nt, Human
gauuaaccacuucagcugacu

SEQ ID NO: 2686868 - RNA, 19 nt, Human
gauuaaccacuucagcuga

SEQ ID NO: 2686869 - RNA, 18 nt, Human
gauuaaccacuucagcug

SEQ ID NO: 2686870 - RNA, 20 nt, Human
gauuaaauacauauggaugu

SEQ ID NO: 2686871 - RNA, 17 nt, Human
gauuauuuuuuuuuucu

SEQ ID NO: 2686872 - RNA, 18 nt, Human
gauguguggacuguggca

SEQ ID NO: 2686873 - RNA, 20 nt, Human
gaugguguagcccucccacu

SEQ ID NO: 2686874 - RNA, 15 nt, Human
gauuggaccaggcca

SEQ ID NO: 2686875 - RNA, 18 nt, Human
gauugcuugagcucagga

SEQ ID NO: 2686876 - RNA, 23 nt, Human
gauugacuaacucaaauacacau

SEQ ID NO: 2686877 - RNA, 14 nt, Human
gauuggaccaggcc

SEQ ID NO: 2686878 - RNA, 18 nt, Human
gauugaaaauguccagga

SEQ ID NO: 2686879 - RNA, 19 nt, Human
gauugaaaauguccaggaa

SEQ ID NO: 2686880 - RNA, 20 nt, Human
gauugaaaauguccaggaaa

SEQ ID NO: 2686881 - RNA, 13 nt, Human
gauucccuuguua

SEQ ID NO: 2686882 - RNA, 23 nt, Human
gauucuaccacacagcagcaguu

SEQ ID NO: 2686883 - RNA, 13 nt, Human
gauucuaaauaca

SEQ ID NO: 2686884 - RNA, 14 nt, Human
gauucuaaauacau

SEQ ID NO: 2686885 - RNA, 17 nt, Human
gauuccucucuaagugg

SEQ ID NO: 2686886 - RNA, 19 nt, Human
gauucccuuguuauucaac

SEQ ID NO: 2686887 - RNA, 16 nt, Human
gauucccuuguuauuc

SEQ ID NO: 2686888 - RNA, 18 nt, Human
gagugugagccaccuaag

SEQ ID NO: 2686889 - RNA, 23 nt, Human
gagugugagccaccuaagaucuc

SEQ ID NO: 2686890 - RNA, 17 nt, Human
gagugugccugaagucc

SEQ ID NO: 2686891 - RNA, 19 nt, Human
gaguuccaguuccucuuug

SEQ ID NO: 2686892 - RNA, 22 nt, Human
gaguucccuugaaacuuuggga

SEQ ID NO: 2686893 - RNA, 23 nt, Human
gaguggcaggggacaggagucca

SEQ ID NO: 2686894 - RNA, 17 nt, Human
gagucuggcccuagacu

SEQ ID NO: 2686895 - RNA, 19 nt, Human
gagucugaggccguugcug

SEQ ID NO: 2686896 - RNA, 12 nt, Human
gagucugaggcc

SEQ ID NO: 2686897 - RNA, 20 nt, Human
gagucugagggcuuguaguu

SEQ ID NO: 2686898 - RNA, 23 nt, Human
gagucugaggccguugcugacuu

SEQ ID NO: 2686899 - RNA, 12 nt, Human
gagugggaagcc

SEQ ID NO: 2686900 - RNA, 13 nt, Human
gagugggaagccc

SEQ ID NO: 2686901 - RNA, 11 nt, Human
gagugggaagc

SEQ ID NO: 2686902 - RNA, 23 nt, Human
gagugggggaucacagccucuga

SEQ ID NO: 2686903 - RNA, 16 nt, Human
gaguuuucauuaaauc

SEQ ID NO: 2686904 - RNA, 16 nt, Human
gaguuuugucauucag

SEQ ID NO: 2686905 - RNA, 15 nt, Human
gauaauguauuuuaa

SEQ ID NO: 2686906 - RNA, 21 nt, Human
gauagacgaguugauuuccuc

SEQ ID NO: 2686907 - RNA, 15 nt, Human
gauagcauuguaagc

SEQ ID NO: 2686908 - RNA, 18 nt, Human
gauauacacggaugacuu

SEQ ID NO: 2686909 - RNA, 10 nt, Human
gaguaaagcu

SEQ ID NO: 2686910 - RNA, 19 nt, Human
gagguuuuaaaaaaauccc

SEQ ID NO: 2686911 - RNA, 16 nt, Human
gagguuuuauuucauu

SEQ ID NO: 2686912 - RNA, 21 nt, Human
gagguuuuauuucauuuuuca

SEQ ID NO: 2686913 - RNA, 17 nt, Human
gaguaaagcuccuaucu

SEQ ID NO: 2686914 - RNA, 14 nt, Human
gagguccucuggag

SEQ ID NO: 2686915 - RNA, 16 nt, Human
gagguccucuggagcc

SEQ ID NO: 2686916 - RNA, 13 nt, Human
gaggggguggagg

SEQ ID NO: 2686917 - RNA, 14 nt, Human
gaggggguggaggg

SEQ ID NO: 2686918 - RNA, 20 nt, Human
gagguccucuggagcccuaa

SEQ ID NO: 2686919 - RNA, 17 nt, Human
gaggugggccagucugu

SEQ ID NO: 2686920 - RNA, 21 nt, Human
gagggggcuugaagccaaaga

SEQ ID NO: 2686921 - RNA, 18 nt, Human
gagucguggggugugcug

SEQ ID NO: 2686922 - RNA, 19 nt, Human
gagucguggggugugcugg

SEQ ID NO: 2686923 - RNA, 20 nt, Human
gagucguggggugugcuggg

SEQ ID NO: 2686924 - RNA, 17 nt, Human
gagucguggggugugcu

SEQ ID NO: 2686925 - RNA, 14 nt, Human
gagucaaggccugc

SEQ ID NO: 2686926 - RNA, 15 nt, Human
gagucaaggccugcu

SEQ ID NO: 2686927 - RNA, 21 nt, Human
gaguauuguuuaaaauguaau

SEQ ID NO: 2686928 - RNA, 12 nt, Human
gcccagagacuu

SEQ ID NO: 2686929 - RNA, 16 nt, Human
gcccagcccuccccau

SEQ ID NO: 2686930 - RNA, 12 nt, Human
gcccagcccucc

SEQ ID NO: 2686931 - RNA, 13 nt, Human
gccaugcugaggc

SEQ ID NO: 2686932 - RNA, 14 nt, Human
gccaugcugaggcc

SEQ ID NO: 2686933 - RNA, 17 nt, Human
gccaugcugaggccugg

SEQ ID NO: 2686934 - RNA, 18 nt, Human
gccaugcugaggccuggg

SEQ ID NO: 2686935 - RNA, 19 nt, Human
gccaugcugaggccugggc

SEQ ID NO: 2686936 - RNA, 20 nt, Human
gccaugcugaggccugggcc

SEQ ID NO: 2686937 - RNA, 21 nt, Human
gccaugcugaggccugggccg

SEQ ID NO: 2686938 - RNA, 22 nt, Human
gccauuuuaaggaaaacuaccu

SEQ ID NO: 2686939 - RNA, 14 nt, Human
gccaucuaaaguaa

SEQ ID NO: 2686940 - RNA, 15 nt, Human
gccaucuagccagcc

SEQ ID NO: 2686941 - RNA, 16 nt, Human
gccaucuagccagccc

SEQ ID NO: 2686942 - RNA, 23 nt, Human
gccaucuagccagccccucuucc

SEQ ID NO: 2686943 - RNA, 18 nt, Human
gccaugccagcuuaucuc

SEQ ID NO: 2686944 - RNA, 13 nt, Human
gccaugccagcuu

SEQ ID NO: 2686945 - RNA, 19 nt, Human
gccaugccagcuuaucuca

SEQ ID NO: 2686946 - RNA, 13 nt, Human
gccaugccagcug

SEQ ID NO: 2686947 - RNA, 14 nt, Human
gccaugccagcugg

SEQ ID NO: 2686948 - RNA, 15 nt, Human
gccaugccagcuggc

SEQ ID NO: 2686949 - RNA, 16 nt, Human
gccaugccagcuggcc

SEQ ID NO: 2686950 - RNA, 14 nt, Human
gccaguauuuuuua

SEQ ID NO: 2686951 - RNA, 23 nt, Human
gccagguucuccguuagcuccug

SEQ ID NO: 2686952 - RNA, 14 nt, Human
gccaggcugccugg

SEQ ID NO: 2686953 - RNA, 18 nt, Human
gccaggcugccuggccuu

SEQ ID NO: 2686954 - RNA, 14 nt, Human
gccagauuugucuu

SEQ ID NO: 2686955 - RNA, 15 nt, Human
gccagauuugucuuu

SEQ ID NO: 2686956 - RNA, 16 nt, Human
gccagauuugucuuuu

SEQ ID NO: 2686957 - RNA, 20 nt, Human
gccagauuugucuuuuuguu

SEQ ID NO: 2686958 - RNA, 17 nt, Human
gccagaggaauccuggc

SEQ ID NO: 2686959 - RNA, 18 nt, Human
gccagaggaauccuggca

SEQ ID NO: 2686960 - RNA, 19 nt, Human
gccagaggaauccuggcag

SEQ ID NO: 2686961 - RNA, 20 nt, Human
gccagaggaauccuggcagc

SEQ ID NO: 2686962 - RNA, 21 nt, Human
gccagaggaauccuggcagcc

SEQ ID NO: 2686963 - RNA, 22 nt, Human
gccagaggaauccuggcagccc

SEQ ID NO: 2686964 - RNA, 23 nt, Human
gccagaggaauccuggcagccca

SEQ ID NO: 2686965 - RNA, 24 nt, Human
gccagaggaauccuggcagcccag

SEQ ID NO: 2686966 - RNA, 15 nt, Human
gccacaguagaacug

SEQ ID NO: 2686967 - RNA, 15 nt, Human
gccacaucaaaccuu

SEQ ID NO: 2686968 - RNA, 16 nt, Human
gccacaucaaaccuuu

SEQ ID NO: 2686969 - RNA, 22 nt, Human
gccaccgcgggugugggaaagc

SEQ ID NO: 2686970 - RNA, 17 nt, Human
gccacacucuccaucac

SEQ ID NO: 2686971 - RNA, 18 nt, Human
gccacacucuccaucacc

SEQ ID NO: 2686972 - RNA, 12 nt, Human
gccacaggaccc

SEQ ID NO: 2686973 - RNA, 11 nt, Human
gccacaggacc

SEQ ID NO: 2686974 - RNA, 15 nt, Human
gccacagcgccagcc

SEQ ID NO: 2686975 - RNA, 16 nt, Human
gccacagcgccagccu

SEQ ID NO: 2686976 - RNA, 18 nt, Human
gccacagcgccagccuca

SEQ ID NO: 2686977 - RNA, 16 nt, Human
gccaaugucuccuccc

SEQ ID NO: 2686978 - RNA, 13 nt, Human
gccaaguggggug

SEQ ID NO: 2686979 - RNA, 18 nt, Human
gccaaguggggugcuggg

SEQ ID NO: 2686980 - RNA, 23 nt, Human
gccaaguggggugcugggaggag

SEQ ID NO: 2686981 - RNA, 19 nt, Human
gccaaguggggugcuggga

SEQ ID NO: 2686982 - RNA, 20 nt, Human
gccaaguggggugcugggag

SEQ ID NO: 2686983 - RNA, 18 nt, Human
gcauuugucaaugacagu

SEQ ID NO: 2686984 - RNA, 13 nt, Human
gcauuugucaaug

SEQ ID NO: 2686985 - RNA, 21 nt, Human
gccaaggcugggggaagaagc

SEQ ID NO: 2686986 - RNA, 12 nt, Human
gccaagggaaag

SEQ ID NO: 2686987 - RNA, 18 nt, Human
gccaagggaaaggggugc

SEQ ID NO: 2686988 - RNA, 16 nt, Human
gccaaguaagaaagug

SEQ ID NO: 2686989 - RNA, 20 nt, Human
gccaagguuuuauaaggcug

SEQ ID NO: 2686990 - RNA, 21 nt, Human
gccaagggccgacuaagagaa

SEQ ID NO: 2686991 - RNA, 23 nt, Human
gccaaggugggaggauugcuuga

SEQ ID NO: 2686992 - RNA, 15 nt, Human
gccaaggugggagga

SEQ ID NO: 2686993 - RNA, 14 nt, Human
gccaaggugggagg

SEQ ID NO: 2686994 - RNA, 20 nt, Human
gccaagggcccaaagaaaga

SEQ ID NO: 2686995 - RNA, 18 nt, Human
gccaagggaaccuguguc

SEQ ID NO: 2686996 - RNA, 19 nt, Human
gccaagggaaccugugucc

SEQ ID NO: 2686997 - RNA, 22 nt, Human
gccaagggaaaggggugcuuuu

SEQ ID NO: 2686998 - RNA, 20 nt, Human
gcagcucagaaccacagcaa

SEQ ID NO: 2686999 - RNA, 20 nt, Human
gcagccucuccccaggucca

SEQ ID NO: 2687000 - RNA, 12 nt, Human
gcagccucuccc

SEQ ID NO: 2687001 - RNA, 16 nt, Human
gcagccucuccccagg

SEQ ID NO: 2687002 - RNA, 20 nt, Human
gcagccucucagugcccucc

SEQ ID NO: 2687003 - RNA, 22 nt, Human
gcagccucucagugcccuccag

SEQ ID NO: 2687004 - RNA, 15 nt, Human
gcagcagcaggugau

SEQ ID NO: 2687005 - RNA, 19 nt, Human
gcagcagggagggcuucug

SEQ ID NO: 2687006 - RNA, 18 nt, Human
gcagcagggagggcuucu

SEQ ID NO: 2687007 - RNA, 20 nt, Human
gcagccgccccaucugcccc

SEQ ID NO: 2687008 - RNA, 19 nt, Human
gcagcccuggcagggggca

SEQ ID NO: 2687009 - RNA, 14 nt, Human
gcagagguacccug

SEQ ID NO: 2687010 - RNA, 15 nt, Human
gcagagguacccugg

SEQ ID NO: 2687011 - RNA, 16 nt, Human
gcagagguacccuggg

SEQ ID NO: 2687012 - RNA, 17 nt, Human
gcagagguacccugggu

SEQ ID NO: 2687013 - RNA, 18 nt, Human
gcagagguacccugggug

SEQ ID NO: 2687014 - RNA, 19 nt, Human
gcagagguacccugggugu

SEQ ID NO: 2687015 - RNA, 18 nt, Human
gcagauguuagauauuuu

SEQ ID NO: 2687016 - RNA, 20 nt, Human
gcagauguuagauauuuuuc

SEQ ID NO: 2687017 - RNA, 20 nt, Human
gcagacuggggcauccugug

SEQ ID NO: 2687018 - RNA, 22 nt, Human
gcacuucgggaggucgaggcag

SEQ ID NO: 2687019 - RNA, 13 nt, Human
gcacuuaaagaag

SEQ ID NO: 2687020 - RNA, 14 nt, Human
gcacagcuugaccu

SEQ ID NO: 2687021 - RNA, 22 nt, Human
gcacagcuugaccugaggcugu

SEQ ID NO: 2687022 - RNA, 18 nt, Human
gcacagcuugaccugagg

SEQ ID NO: 2687023 - RNA, 19 nt, Human
gcacagcuugaccugaggc

SEQ ID NO: 2687024 - RNA, 20 nt, Human
gcacagcuugaccugaggcu

SEQ ID NO: 2687025 - RNA, 21 nt, Human
gcacagcuugaccugaggcug

SEQ ID NO: 2687026 - RNA, 13 nt, Human
gcaccaccaagcc

SEQ ID NO: 2687027 - RNA, 14 nt, Human
gcaccaccaagcca

SEQ ID NO: 2687028 - RNA, 13 nt, Human
gcaccagcagccu

SEQ ID NO: 2687029 - RNA, 14 nt, Human
gcaccagcagccug

SEQ ID NO: 2687030 - RNA, 18 nt, Human
gcacugggcucccgggcc

SEQ ID NO: 2687031 - RNA, 14 nt, Human
gcacugggcucccg

SEQ ID NO: 2687032 - RNA, 16 nt, Human
gcacuggcgaggagag

SEQ ID NO: 2687033 - RNA, 15 nt, Human
gcacuggcgaggaga

SEQ ID NO: 2687034 - RNA, 14 nt, Human
gcacuguugagaag

SEQ ID NO: 2687035 - RNA, 18 nt, Human
gcacuguugagaaggaga

SEQ ID NO: 2687036 - RNA, 23 nt, Human
gcacgcggauuaauuugcaucug

SEQ ID NO: 2687037 - RNA, 19 nt, Human
gcacccucaggcagguggg

SEQ ID NO: 2687038 - RNA, 16 nt, Human
gcacccucaggcaggu

SEQ ID NO: 2687039 - RNA, 12 nt, Human
gcaccccuucuc

SEQ ID NO: 2687040 - RNA, 13 nt, Human
gcaccccuucucu

SEQ ID NO: 2687041 - RNA, 17 nt, Human
gcaccccuucucuccuc

SEQ ID NO: 2687042 - RNA, 18 nt, Human
gcaccccuucucuccucc

SEQ ID NO: 2687043 - RNA, 19 nt, Human
gcaccccuucucuccuccc

SEQ ID NO: 2687044 - RNA, 20 nt, Human
gcaccccuucucuccucccc

SEQ ID NO: 2687045 - RNA, 21 nt, Human
gcaccccuucucuccucccca

SEQ ID NO: 2687046 - RNA, 22 nt, Human
gcaccccuucucuccuccccaa

SEQ ID NO: 2687047 - RNA, 17 nt, Human
gcacuaaaucagagaca

SEQ ID NO: 2687048 - RNA, 17 nt, Human
gcacuacaccuugccuu

SEQ ID NO: 2687049 - RNA, 19 nt, Human
gcauacuuaccuagugaaa

SEQ ID NO: 2687050 - RNA, 21 nt, Human
gcauacuuaccuagugaaacu

SEQ ID NO: 2687051 - RNA, 12 nt, Human
gcaucaggguua

SEQ ID NO: 2687052 - RNA, 14 nt, Human
gcaucuaucucauc

SEQ ID NO: 2687053 - RNA, 15 nt, Human
gcaucuaucugugcu

SEQ ID NO: 2687054 - RNA, 16 nt, Human
gcaucuaucugugcua

SEQ ID NO: 2687055 - RNA, 13 nt, Human
gcaucaugcaugu

SEQ ID NO: 2687056 - RNA, 21 nt, Human
gcaucucacagcuaugcaaaa

SEQ ID NO: 2687057 - RNA, 10 nt, Human
gcauugagua

SEQ ID NO: 2687058 - RNA, 15 nt, Human
gcauugaguauuguu

SEQ ID NO: 2687059 - RNA, 17 nt, Human
gcauugaguauuguuua

SEQ ID NO: 2687060 - RNA, 15 nt, Human
gcaugcccucucagg

SEQ ID NO: 2687061 - RNA, 13 nt, Human
gcauguuauguuu

SEQ ID NO: 2687062 - RNA, 14 nt, Human
gcauguuauguuua

SEQ ID NO: 2687063 - RNA, 16 nt, Human
gcauguuauguuuaau

SEQ ID NO: 2687064 - RNA, 18 nt, Human
gcauguuauguuuaauaa

SEQ ID NO: 2687065 - RNA, 19 nt, Human
gcauguuauguuuaauaag

SEQ ID NO: 2687066 - RNA, 20 nt, Human
gcauguucacccuuauaguc

SEQ ID NO: 2687067 - RNA, 21 nt, Human
gcauguucacccuuauagucu

SEQ ID NO: 2687068 - RNA, 15 nt, Human
gcaugaccagaugcg

SEQ ID NO: 2687069 - RNA, 16 nt, Human
gcaugcccucucaggc

SEQ ID NO: 2687070 - RNA, 12 nt, Human
gcaggcccuggc

SEQ ID NO: 2687071 - RNA, 14 nt, Human
gcaggcccuggccu

SEQ ID NO: 2687072 - RNA, 15 nt, Human
gcaggcccuggccuc

SEQ ID NO: 2687073 - RNA, 16 nt, Human
gcaggcccuggccucc

SEQ ID NO: 2687074 - RNA, 17 nt, Human
gcaggcauagaggcuuc

SEQ ID NO: 2687075 - RNA, 13 nt, Human
gcaggcauggccc

SEQ ID NO: 2687076 - RNA, 15 nt, Human
gcaggcauggcccug

SEQ ID NO: 2687077 - RNA, 16 nt, Human
gcaggcauggcccugg

SEQ ID NO: 2687078 - RNA, 19 nt, Human
gcaggcauggcccugggcg

SEQ ID NO: 2687079 - RNA, 22 nt, Human
gcaggacuuccccggagggcug

SEQ ID NO: 2687080 - RNA, 15 nt, Human
gcaggccuauuucau

SEQ ID NO: 2687081 - RNA, 19 nt, Human
gcaggguccuagaaauucc

SEQ ID NO: 2687082 - RNA, 15 nt, Human
gcuuccaaauauugu

SEQ ID NO: 2687083 - RNA, 22 nt, Human
gcuucucagauuucugaggaaa

SEQ ID NO: 2687084 - RNA, 21 nt, Human
gcuucucagauuucugaggaa

SEQ ID NO: 2687085 - RNA, 17 nt, Human
gcuucucacugccaugc

SEQ ID NO: 2687086 - RNA, 22 nt, Human
gcuucucacugccaugccagcu

SEQ ID NO: 2687087 - RNA, 13 nt, Human
gcuucugccugca

SEQ ID NO: 2687088 - RNA, 23 nt, Human
gcuucugcuuuucugcccuggcu

SEQ ID NO: 2687089 - RNA, 16 nt, Human
gcuucugcuuuucugc

SEQ ID NO: 2687090 - RNA, 19 nt, Human
gcuucugcuuuucugcccu

SEQ ID NO: 2687091 - RNA, 20 nt, Human
gcuucugcuuuucugcccug

SEQ ID NO: 2687092 - RNA, 21 nt, Human
gcuucugcuuuucugcccugg

SEQ ID NO: 2687093 - RNA, 13 nt, Human
gcuucugcuuuuc

SEQ ID NO: 2687094 - RNA, 14 nt, Human
gcuucugcuuuucu

SEQ ID NO: 2687095 - RNA, 15 nt, Human
gcuucugcuuuucug

SEQ ID NO: 2687096 - RNA, 22 nt, Human
gcuuacguaguucuaccggcuu

SEQ ID NO: 2687097 - RNA, 15 nt, Human
gcuuacguaguucua

SEQ ID NO: 2687098 - RNA, 14 nt, Human
gcuuacguaguucu

SEQ ID NO: 2687099 - RNA, 11 nt, Human
gcuuauaucug

SEQ ID NO: 2687100 - RNA, 15 nt, Human
gcuuauaucuggccu

SEQ ID NO: 2687101 - RNA, 17 nt, Human
gcuuauaucuggccucu

SEQ ID NO: 2687102 - RNA, 20 nt, Human
gcuuauaucuggccucugcu

SEQ ID NO: 2687103 - RNA, 19 nt, Human
gcuucaugcacuuaaagaa

SEQ ID NO: 2687104 - RNA, 20 nt, Human
gcuucaugcacuuaaagaag

SEQ ID NO: 2687105 - RNA, 15 nt, Human
gcuucaguugcuugu

SEQ ID NO: 2687106 - RNA, 15 nt, Human
gcuuucccacuuccc

SEQ ID NO: 2687107 - RNA, 16 nt, Human
gcuuuuauagaggcua

SEQ ID NO: 2687108 - RNA, 12 nt, Human
gcuuucaugauu

SEQ ID NO: 2687109 - RNA, 18 nt, Human
gcuuucaugauuagcaag

SEQ ID NO: 2687110 - RNA, 22 nt, Human
gcuuuccaaaccuuaucuccac

SEQ ID NO: 2687111 - RNA, 19 nt, Human
gcuuuccaaaccuuaucuc

SEQ ID NO: 2687112 - RNA, 16 nt, Human
gcuuguuuaccuuucu

SEQ ID NO: 2687113 - RNA, 18 nt, Human
gcuuguuuaccuuucucu

SEQ ID NO: 2687114 - RNA, 20 nt, Human
gcuuuaaaaagggaagaaac

SEQ ID NO: 2687115 - RNA, 21 nt, Human
gcuuuaaaaagggaagaaacu

SEQ ID NO: 2687116 - RNA, 22 nt, Human
gcuuuaaaaagggaagaaacug

SEQ ID NO: 2687117 - RNA, 12 nt, Human
gcuugcuuuucu

SEQ ID NO: 2687118 - RNA, 11 nt, Human
gcuugcuggcc

SEQ ID NO: 2687119 - RNA, 14 nt, Human
gcuugccugcaggg

SEQ ID NO: 2687120 - RNA, 15 nt, Human
gcuugccugcagggc

SEQ ID NO: 2687121 - RNA, 16 nt, Human
gcuugccugcagggcc

SEQ ID NO: 2687122 - RNA, 17 nt, Human
gcuugccugcagggcca

SEQ ID NO: 2687123 - RNA, 22 nt, Human
gcuugccugcagggccauggcu

SEQ ID NO: 2687124 - RNA, 18 nt, Human
gcuuguucaucauccaga

SEQ ID NO: 2687125 - RNA, 21 nt, Human
gcuuguucaucauccagaugu

SEQ ID NO: 2687126 - RNA, 19 nt, Human
gcuguguugguguggccca

SEQ ID NO: 2687127 - RNA, 14 nt, Human
gcugugugucccag

SEQ ID NO: 2687128 - RNA, 15 nt, Human
gcugugugucccagg

SEQ ID NO: 2687129 - RNA, 16 nt, Human
gcugugugucccaggc

SEQ ID NO: 2687130 - RNA, 18 nt, Human
gcugugugucccaggcag

SEQ ID NO: 2687131 - RNA, 20 nt, Human
gcugugugucccaggcaggg

SEQ ID NO: 2687132 - RNA, 23 nt, Human
gcugugugucccaggcagggaga

SEQ ID NO: 2687133 - RNA, 13 nt, Human
gcuuaccuccuca

SEQ ID NO: 2687134 - RNA, 22 nt, Human
gcugucccuugcuugccugcag

SEQ ID NO: 2687135 - RNA, 21 nt, Human
gcugucauugcacauaagcuu

SEQ ID NO: 2687136 - RNA, 20 nt, Human
gcugucccauagucccugcc

SEQ ID NO: 2687137 - RNA, 18 nt, Human
gcugucccauagucccug

SEQ ID NO: 2687138 - RNA, 23 nt, Human
gcugucccauagucccugccacg

SEQ ID NO: 2687139 - RNA, 21 nt, Human
gcugucccauagucccugcca

SEQ ID NO: 2687140 - RNA, 15 nt, Human
gcugguccgugggac

SEQ ID NO: 2687141 - RNA, 16 nt, Human
gcugguccgugggacg

SEQ ID NO: 2687142 - RNA, 12 nt, Human
gcuggugcacag

SEQ ID NO: 2687143 - RNA, 20 nt, Human
gcuggugcacagccacuccc

SEQ ID NO: 2687144 - RNA, 21 nt, Human
gcuggggauccccgccuggcc

SEQ ID NO: 2687145 - RNA, 22 nt, Human
gcuggggauccccgccuggcca

SEQ ID NO: 2687146 - RNA, 23 nt, Human
gcuggggauccccgccuggccag

SEQ ID NO: 2687147 - RNA, 12 nt, Human
gcuggggaagga

SEQ ID NO: 2687148 - RNA, 13 nt, Human
gcuggggaaggaa

SEQ ID NO: 2687149 - RNA, 15 nt, Human
gcuggggaaggaagc

SEQ ID NO: 2687150 - RNA, 21 nt, Human
gcugcaguucuacucaggcug

SEQ ID NO: 2687151 - RNA, 22 nt, Human
gcugcaguucuacucaggcugg

SEQ ID NO: 2687152 - RNA, 22 nt, Human
gcugaucugcggaucucagcuu

SEQ ID NO: 2687153 - RNA, 17 nt, Human
gcugauuuggugaccaa

SEQ ID NO: 2687154 - RNA, 15 nt, Human
gcugagacugugcug

SEQ ID NO: 2687155 - RNA, 12 nt, Human
gcucuucuuaaa

SEQ ID NO: 2687156 - RNA, 22 nt, Human
gcugacuguuuucucuugagag

SEQ ID NO: 2687157 - RNA, 13 nt, Human
gcugacuuagaau

SEQ ID NO: 2687158 - RNA, 16 nt, Human
gcugacaucuugaauc

SEQ ID NO: 2687159 - RNA, 22 nt, Human
gcugacaucuugaauccuucca

SEQ ID NO: 2687160 - RNA, 23 nt, Human
gcugacaucuugaauccuuccau

SEQ ID NO: 2687161 - RNA, 14 nt, Human
gcugcccugaagaa

SEQ ID NO: 2687162 - RNA, 17 nt, Human
gcugcgcuugcuuuucu

SEQ ID NO: 2687163 - RNA, 16 nt, Human
gcugcgcuugcuuuuc

SEQ ID NO: 2687164 - RNA, 16 nt, Human
gcugccuucccuagcu

SEQ ID NO: 2687165 - RNA, 12 nt, Human
gcugccuucccu

SEQ ID NO: 2687166 - RNA, 13 nt, Human
gcugccuucccua

SEQ ID NO: 2687167 - RNA, 15 nt, Human
gcugccuucccuagc

SEQ ID NO: 2687168 - RNA, 18 nt, Human
gcugcggcguacaggcug

SEQ ID NO: 2687169 - RNA, 17 nt, Human
gcugcggcguacaggcu

SEQ ID NO: 2687170 - RNA, 14 nt, Human
gcuggaagauccug

SEQ ID NO: 2687171 - RNA, 15 nt, Human
gcuggaagauccugc

SEQ ID NO: 2687172 - RNA, 17 nt, Human
gcuggaagauccugcgg

SEQ ID NO: 2687173 - RNA, 18 nt, Human
gcuggaagauccugcggg

SEQ ID NO: 2687174 - RNA, 16 nt, Human
gcuggccaguccaggc

SEQ ID NO: 2687175 - RNA, 17 nt, Human
gcuggccaguccaggcu

SEQ ID NO: 2687176 - RNA, 22 nt, Human
gcuggccaguccacccugccug

SEQ ID NO: 2687177 - RNA, 14 nt, Human
gcuggccaguccag

SEQ ID NO: 2687178 - RNA, 15 nt, Human
gcuggccaguccagg

SEQ ID NO: 2687179 - RNA, 21 nt, Human
gcuggcacccaccguggagga

SEQ ID NO: 2687180 - RNA, 23 nt, Human
gcuggcacccaccguggaggagg

SEQ ID NO: 2687181 - RNA, 16 nt, Human
gcuggcacccaccgug

SEQ ID NO: 2687182 - RNA, 20 nt, Human
gcuggcacccaccguggagg

SEQ ID NO: 2687183 - RNA, 13 nt, Human
gcuccuguggccc

SEQ ID NO: 2687184 - RNA, 15 nt, Human
gcuccuguggcccca

SEQ ID NO: 2687185 - RNA, 20 nt, Human
gcuccuguggccccacccug

SEQ ID NO: 2687186 - RNA, 21 nt, Human
gcuccuguggccccacccugg

SEQ ID NO: 2687187 - RNA, 15 nt, Human
gcuccuccccuuccu

SEQ ID NO: 2687188 - RNA, 23 nt, Human
gcuccuccccuuccucuugucug

SEQ ID NO: 2687189 - RNA, 21 nt, Human
gcuccggccucugccuuugca

SEQ ID NO: 2687190 - RNA, 15 nt, Human
gcuccgcugccgugc

SEQ ID NO: 2687191 - RNA, 17 nt, Human
gcuccagcuuucugcca

SEQ ID NO: 2687192 - RNA, 21 nt, Human
gcuccagcuuucugccaucua

SEQ ID NO: 2687193 - RNA, 17 nt, Human
gcucaugugugcaacag

SEQ ID NO: 2687194 - RNA, 22 nt, Human
gcucaugugugcaacaggguau

SEQ ID NO: 2687195 - RNA, 14 nt, Human
gcucauuaaacuuu

SEQ ID NO: 2687196 - RNA, 17 nt, Human
gcucauuaaacuuuuuu

SEQ ID NO: 2687197 - RNA, 16 nt, Human
gcucauuaugccacuu

SEQ ID NO: 2687198 - RNA, 21 nt, Human
gcuccagcuguucagcugguu

SEQ ID NO: 2687199 - RNA, 16 nt, Human
gcuccgcaggacuucc

SEQ ID NO: 2687200 - RNA, 17 nt, Human
gcuccgcaggacuuccc

SEQ ID NO: 2687201 - RNA, 14 nt, Human
gcuccgcaggacuu

SEQ ID NO: 2687202 - RNA, 13 nt, Human
gcuccgcaggacu

SEQ ID NO: 2687203 - RNA, 15 nt, Human
gcuccgaggacccag

SEQ ID NO: 2687204 - RNA, 16 nt, Human
gcuccgaggacccagg

SEQ ID NO: 2687205 - RNA, 20 nt, Human
gcuccagggaauccaagccu

SEQ ID NO: 2687206 - RNA, 21 nt, Human
gcuccagggaauccaagccuc

SEQ ID NO: 2687207 - RNA, 22 nt, Human
gcuccagggaauccaagccucc

SEQ ID NO: 2687208 - RNA, 23 nt, Human
gcuccagggaauccaagccucca

SEQ ID NO: 2687209 - RNA, 13 nt, Human
gcucacacaccug

SEQ ID NO: 2687210 - RNA, 16 nt, Human
gcuaucaggagaaagc

SEQ ID NO: 2687211 - RNA, 18 nt, Human
gcuauaaugagcauguuu

SEQ ID NO: 2687212 - RNA, 18 nt, Human
gcuauccccaucucccug

SEQ ID NO: 2687213 - RNA, 19 nt, Human
gcuauccccaucucccugc

SEQ ID NO: 2687214 - RNA, 21 nt, Human
gcuauccccaucucccugccu

SEQ ID NO: 2687215 - RNA, 22 nt, Human
gcuauccccaucucccugccug

SEQ ID NO: 2687216 - RNA, 23 nt, Human
gcuauccccaucucccugccugg

SEQ ID NO: 2687217 - RNA, 12 nt, Human
gcuauccugauu

SEQ ID NO: 2687218 - RNA, 17 nt, Human
gcuauauaagacaagaa

SEQ ID NO: 2687219 - RNA, 14 nt, Human
gcuauauauaaaac

SEQ ID NO: 2687220 - RNA, 19 nt, Human
gcuauaaagcaguauuuuu

SEQ ID NO: 2687221 - RNA, 21 nt, Human
gcuauaaagcaguauuuuucu

SEQ ID NO: 2687222 - RNA, 19 nt, Human
gcucagcucggggagccuu

SEQ ID NO: 2687223 - RNA, 23 nt, Human
gcucaucugcugguccgugggac

SEQ ID NO: 2687224 - RNA, 16 nt, Human
gcucaucugcuggucc

SEQ ID NO: 2687225 - RNA, 21 nt, Human
gcucaucugcugguccguggg

SEQ ID NO: 2687226 - RNA, 13 nt, Human
gcucaucugcugg

SEQ ID NO: 2687227 - RNA, 14 nt, Human
gcucaucugcuggu

SEQ ID NO: 2687228 - RNA, 15 nt, Human
gcucaucugcugguc

SEQ ID NO: 2687229 - RNA, 13 nt, Human
gccugcucccugu

SEQ ID NO: 2687230 - RNA, 14 nt, Human
gccugcauuuccuc

SEQ ID NO: 2687231 - RNA, 19 nt, Human
gccugcauuuccucgcagc

SEQ ID NO: 2687232 - RNA, 21 nt, Human
gccugcauuuccucgcagccu

SEQ ID NO: 2687233 - RNA, 22 nt, Human
gccugcugcaugcccucucagg

SEQ ID NO: 2687234 - RNA, 21 nt, Human
gccugcugcaugcccucucag

SEQ ID NO: 2687235 - RNA, 18 nt, Human
gccugcugcaugcccucu

SEQ ID NO: 2687236 - RNA, 14 nt, Human
gccugcugcaugcc

SEQ ID NO: 2687237 - RNA, 22 nt, Human
gccuggacaguaucccacaucc

SEQ ID NO: 2687238 - RNA, 21 nt, Human
gccuggacaguaucccacauc

SEQ ID NO: 2687239 - RNA, 12 nt, Human
gccugcagggaa

SEQ ID NO: 2687240 - RNA, 15 nt, Human
gccugcagggaagcc

SEQ ID NO: 2687241 - RNA, 20 nt, Human
gccugcagggaagccccaca

SEQ ID NO: 2687242 - RNA, 22 nt, Human
gccugcagggaagccccacaug

SEQ ID NO: 2687243 - RNA, 13 nt, Human
gccugcagggcca

SEQ ID NO: 2687244 - RNA, 14 nt, Human
gccugcagggccau

SEQ ID NO: 2687245 - RNA, 16 nt, Human
gccugcagggccaugg

SEQ ID NO: 2687246 - RNA, 18 nt, Human
gccugcagggccauggcu

SEQ ID NO: 2687247 - RNA, 21 nt, Human
gccugcagggccauggcucag

SEQ ID NO: 2687248 - RNA, 15 nt, Human
gccuggguugggggc

SEQ ID NO: 2687249 - RNA, 21 nt, Human
gccugggcugaccccgguggc

SEQ ID NO: 2687250 - RNA, 20 nt, Human
gccugggcgacagagcgaga

SEQ ID NO: 2687251 - RNA, 17 nt, Human
gccugggccgcugccac

SEQ ID NO: 2687252 - RNA, 18 nt, Human
gccugggccgcugccacg

SEQ ID NO: 2687253 - RNA, 22 nt, Human
gccugggccguaucuccggcuc

SEQ ID NO: 2687254 - RNA, 15 nt, Human
gccuguaauccuagc

SEQ ID NO: 2687255 - RNA, 10 nt, Human
gccuggcccc

SEQ ID NO: 2687256 - RNA, 20 nt, Human
gccuguaauccuagcacuuu

SEQ ID NO: 2687257 - RNA, 16 nt, Human
gccugggccgcugcca

SEQ ID NO: 2687258 - RNA, 15 nt, Human
gccugggccccagcu

SEQ ID NO: 2687259 - RNA, 20 nt, Human
gccugggccccagcucgcgg

SEQ ID NO: 2687260 - RNA, 13 nt, Human
gccuggcccccaa

SEQ ID NO: 2687261 - RNA, 20 nt, Human
gccuggcccccaaccucagg

SEQ ID NO: 2687262 - RNA, 22 nt, Human
gccuggcccccaaccucagggc

SEQ ID NO: 2687263 - RNA, 22 nt, Human
gcgccccuagccgguuccuguc

SEQ ID NO: 2687264 - RNA, 13 nt, Human
gcgccccuagccg

SEQ ID NO: 2687265 - RNA, 22 nt, Human
gcgcccccuccgcccugccacu

SEQ ID NO: 2687266 - RNA, 12 nt, Human
gcgccccuagcc

SEQ ID NO: 2687267 - RNA, 21 nt, Human
gcgcccccuccgcccugccac

SEQ ID NO: 2687268 - RNA, 13 nt, Human
gcgccacaggacc

SEQ ID NO: 2687269 - RNA, 14 nt, Human
gcgccacaggaccc

SEQ ID NO: 2687270 - RNA, 15 nt, Human
gcgccaccagcucug

SEQ ID NO: 2687271 - RNA, 17 nt, Human
gcgcaguguuuugcaag

SEQ ID NO: 2687272 - RNA, 11 nt, Human
gcgcaucuaac

SEQ ID NO: 2687273 - RNA, 18 nt, Human
gcgcaucuugccuccagg

SEQ ID NO: 2687274 - RNA, 22 nt, Human
gcgcaucuugccuccaggugca

SEQ ID NO: 2687275 - RNA, 19 nt, Human
gcgccuccauccaaggcca

SEQ ID NO: 2687276 - RNA, 12 nt, Human
gcgccucccucc

SEQ ID NO: 2687277 - RNA, 14 nt, Human
gcgccucccuccac

SEQ ID NO: 2687278 - RNA, 16 nt, Human
gcgccucccuccaccc

SEQ ID NO: 2687279 - RNA, 17 nt, Human
gcgccucccuccacccc

SEQ ID NO: 2687280 - RNA, 18 nt, Human
gcgccucccuccacccca

SEQ ID NO: 2687281 - RNA, 19 nt, Human
gcgccucccuccaccccag

SEQ ID NO: 2687282 - RNA, 21 nt, Human
gcgccucccuccaccccagga

SEQ ID NO: 2687283 - RNA, 22 nt, Human
gcgccucccuccaccccaggac

SEQ ID NO: 2687284 - RNA, 23 nt, Human
gcgccucccuccaccccaggacg

SEQ ID NO: 2687285 - RNA, 21 nt, Human
gcgccucgccggaucugaggg

SEQ ID NO: 2687286 - RNA, 16 nt, Human
gcgccugcugcaugcc

SEQ ID NO: 2687287 - RNA, 22 nt, Human
gcgcccuuaacugcauccagcc

SEQ ID NO: 2687288 - RNA, 16 nt, Human
gcgcccuuggcuucug

SEQ ID NO: 2687289 - RNA, 20 nt, Human
gcgcccuuggcuucugugau

SEQ ID NO: 2687290 - RNA, 23 nt, Human
gcgcccuuuccccgacgcccacc

SEQ ID NO: 2687291 - RNA, 12 nt, Human
gcgcccuuuccc

SEQ ID NO: 2687292 - RNA, 18 nt, Human
gcgcccuuuccccgacgc

SEQ ID NO: 2687293 - RNA, 19 nt, Human
gcggguggaucacgagguc

SEQ ID NO: 2687294 - RNA, 18 nt, Human
gccuuguccucagccagu

SEQ ID NO: 2687295 - RNA, 18 nt, Human
gccuuccucucuccagau

SEQ ID NO: 2687296 - RNA, 17 nt, Human
gccuuccucucuccaga

SEQ ID NO: 2687297 - RNA, 16 nt, Human
gccuuccucucuccag

SEQ ID NO: 2687298 - RNA, 13 nt, Human
gccuuccucucuc

SEQ ID NO: 2687299 - RNA, 24 nt, Human
gccuucccuagcuuuagacccugg

SEQ ID NO: 2687300 - RNA, 23 nt, Human
gccuucccuagcuuuagacccug

SEQ ID NO: 2687301 - RNA, 20 nt, Human
gccuuaaacacucaccuucu

SEQ ID NO: 2687302 - RNA, 22 nt, Human
gccuuaagugaggaaaucaaag

SEQ ID NO: 2687303 - RNA, 14 nt, Human
gccuuaauuuccuu

SEQ ID NO: 2687304 - RNA, 17 nt, Human
gccuuaauuuccuuuuu

SEQ ID NO: 2687305 - RNA, 19 nt, Human
gccuuaauuuccuuuuuga

SEQ ID NO: 2687306 - RNA, 21 nt, Human
gccuuaauuuccuuuuugaca

SEQ ID NO: 2687307 - RNA, 23 nt, Human
gccuuaauuuccuuuuugacacu

SEQ ID NO: 2687308 - RNA, 21 nt, Human
gccuuaagugaggaaaucaaa

SEQ ID NO: 2687309 - RNA, 20 nt, Human
gccuuaagugaggaaaucaa

SEQ ID NO: 2687310 - RNA, 23 nt, Human
gccuuuccuuuucgccuuuccuc

SEQ ID NO: 2687311 - RNA, 14 nt, Human
gccuuuccucucua

SEQ ID NO: 2687312 - RNA, 13 nt, Human
gccuuuccucucu

SEQ ID NO: 2687313 - RNA, 19 nt, Human
gcgaagacccucuugccca

SEQ ID NO: 2687314 - RNA, 22 nt, Human
gcgaagacccucuugcccaucc

SEQ ID NO: 2687315 - RNA, 18 nt, Human
gcgcaggugggcuggacu

SEQ ID NO: 2687316 - RNA, 19 nt, Human
gcgcaggugggcuggacuu

SEQ ID NO: 2687317 - RNA, 13 nt, Human
ggcuccccugagg

SEQ ID NO: 2687318 - RNA, 12 nt, Human
ggcuccccugag

SEQ ID NO: 2687319 - RNA, 20 nt, Human
ggcucccaggagccugccca

SEQ ID NO: 2687320 - RNA, 21 nt, Human
ggcucccaggagccugcccag

SEQ ID NO: 2687321 - RNA, 12 nt, Human
ggcucccagggg

SEQ ID NO: 2687322 - RNA, 22 nt, Human
ggcucccaggagccugcccagc

SEQ ID NO: 2687323 - RNA, 20 nt, Human
ggcucccaggggucucccug

SEQ ID NO: 2687324 - RNA, 21 nt, Human
ggcucccaggggucucccugg

SEQ ID NO: 2687325 - RNA, 22 nt, Human
ggcucccaggggucucccuggc

SEQ ID NO: 2687326 - RNA, 23 nt, Human
ggcucccaggggucucccuggcu

SEQ ID NO: 2687327 - RNA, 23 nt, Human
ggcucuccggggccauuugcaau

SEQ ID NO: 2687328 - RNA, 12 nt, Human
ggcucugcaguc

SEQ ID NO: 2687329 - RNA, 14 nt, Human
ggcucugcaguccu

SEQ ID NO: 2687330 - RNA, 22 nt, Human
ggcucugcaguccuacucaagc

SEQ ID NO: 2687331 - RNA, 14 nt, Human
ggcucugagcgccu

SEQ ID NO: 2687332 - RNA, 15 nt, Human
ggcucugagcgccuc

SEQ ID NO: 2687333 - RNA, 13 nt, Human
ggcuauccugauu

SEQ ID NO: 2687334 - RNA, 13 nt, Human
ggcucacgccugu

SEQ ID NO: 2687335 - RNA, 21 nt, Human
ggcgcugcccaccugccggcc

SEQ ID NO: 2687336 - RNA, 23 nt, Human
ggcucacgccuguaaucccagca

SEQ ID NO: 2687337 - RNA, 20 nt, Human
ggcggguggaucacgagguc

SEQ ID NO: 2687338 - RNA, 23 nt, Human
ggcgcugccccaucuccccucag

SEQ ID NO: 2687339 - RNA, 18 nt, Human
ggcgcccuuggcuucugu

SEQ ID NO: 2687340 - RNA, 15 nt, Human
ggcgcgguggcucac

SEQ ID NO: 2687341 - RNA, 15 nt, Human
ggccucuccauuugc

SEQ ID NO: 2687342 - RNA, 20 nt, Human
ggccucuccauuugcucuuc

SEQ ID NO: 2687343 - RNA, 15 nt, Human
ggccucuccagccuc

SEQ ID NO: 2687344 - RNA, 19 nt, Human
ggccucuccagccucagcc

SEQ ID NO: 2687345 - RNA, 13 nt, Human
ggccucucuagca

SEQ ID NO: 2687346 - RNA, 20 nt, Human
ggccucgguguggagaagcg

SEQ ID NO: 2687347 - RNA, 16 nt, Human
ggccguugcugacuua

SEQ ID NO: 2687348 - RNA, 14 nt, Human
ggccggcccugugu

SEQ ID NO: 2687349 - RNA, 15 nt, Human
ggccggcccugugug

SEQ ID NO: 2687350 - RNA, 14 nt, Human
ggcgcaggugggcu

SEQ ID NO: 2687351 - RNA, 15 nt, Human
ggcgcaggugggcug

SEQ ID NO: 2687352 - RNA, 16 nt, Human
ggcgcaggugggcugg

SEQ ID NO: 2687353 - RNA, 20 nt, Human
ggcgcaggugggcuggacuu

SEQ ID NO: 2687354 - RNA, 16 nt, Human
ggcgccaccagcucug

SEQ ID NO: 2687355 - RNA, 17 nt, Human
ggcgccaccagcucugc

SEQ ID NO: 2687356 - RNA, 18 nt, Human
ggcgccaccagcucugcc

SEQ ID NO: 2687357 - RNA, 21 nt, Human
ggccugggccguaucuccggc

SEQ ID NO: 2687358 - RNA, 23 nt, Human
ggccugggccguaucuccggcuc

SEQ ID NO: 2687359 - RNA, 15 nt, Human
ggccugggccgcugc

SEQ ID NO: 2687360 - RNA, 18 nt, Human
ggcuguucugugguuccu

SEQ ID NO: 2687361 - RNA, 21 nt, Human
ggcuguucugugguuccucug

SEQ ID NO: 2687362 - RNA, 14 nt, Human
ggcuguguuggugu

SEQ ID NO: 2687363 - RNA, 15 nt, Human
ggcugucggcgcugc

SEQ ID NO: 2687364 - RNA, 16 nt, Human
ggcugucggugggacc

SEQ ID NO: 2687365 - RNA, 13 nt, Human
ggcugucggcgcu

SEQ ID NO: 2687366 - RNA, 14 nt, Human
ggcugugcugcccu

SEQ ID NO: 2687367 - RNA, 15 nt, Human
ggcugugcugcccug

SEQ ID NO: 2687368 - RNA, 16 nt, Human
ggcugugcugcccuga

SEQ ID NO: 2687369 - RNA, 15 nt, Human
ggcuguggucacagc

SEQ ID NO: 2687370 - RNA, 12 nt, Human
ggcuuggccugc

SEQ ID NO: 2687371 - RNA, 13 nt, Human
ggcuuggccugcu

SEQ ID NO: 2687372 - RNA, 14 nt, Human
ggcuuggccugcug

SEQ ID NO: 2687373 - RNA, 16 nt, Human
ggcuuggccugcugug

SEQ ID NO: 2687374 - RNA, 15 nt, Human
ggcuuggccugcugu

SEQ ID NO: 2687375 - RNA, 21 nt, Human
ggcuucacggaagagccuugc

SEQ ID NO: 2687376 - RNA, 20 nt, Human
ggcuucacggaagagccuug

SEQ ID NO: 2687377 - RNA, 20 nt, Human
ggcuggagugcaguggcgca

SEQ ID NO: 2687378 - RNA, 20 nt, Human
ggcuggacuucuaccugccc

SEQ ID NO: 2687379 - RNA, 21 nt, Human
ggcuggacuucuaccugcccu

SEQ ID NO: 2687380 - RNA, 15 nt, Human
ggcuggacguggugg

SEQ ID NO: 2687381 - RNA, 15 nt, Human
ggcugaggcaggaga

SEQ ID NO: 2687382 - RNA, 16 nt, Human
ggcugaggcaggagaa

SEQ ID NO: 2687383 - RNA, 23 nt, Human
ggcugaggcaggagaauggugug

SEQ ID NO: 2687384 - RNA, 16 nt, Human
ggcugggggaagaagc

SEQ ID NO: 2687385 - RNA, 21 nt, Human
gggacccaauguaggagcugc

SEQ ID NO: 2687386 - RNA, 22 nt, Human
gggaaucuaagagagcugccau

SEQ ID NO: 2687387 - RNA, 19 nt, Human
ggcuuuuauuaaugcacuu

SEQ ID NO: 2687388 - RNA, 20 nt, Human
ggcuuuuauuaaugcacuuu

SEQ ID NO: 2687389 - RNA, 14 nt, Human
ggcuuucuggggcc

SEQ ID NO: 2687390 - RNA, 15 nt, Human
ggcuuucuguugcca

SEQ ID NO: 2687391 - RNA, 17 nt, Human
ggcuuugccauugugaa

SEQ ID NO: 2687392 - RNA, 18 nt, Human
gggaauccaagccuccac

SEQ ID NO: 2687393 - RNA, 21 nt, Human
gggaauccaagccuccacagc

SEQ ID NO: 2687394 - RNA, 22 nt, Human
gggaauccaagccuccacagcg

SEQ ID NO: 2687395 - RNA, 15 nt, Human
gggaauccaagccuc

SEQ ID NO: 2687396 - RNA, 17 nt, Human
gggaccugccaggcagg

SEQ ID NO: 2687397 - RNA, 13 nt, Human
gggacacacagcc

SEQ ID NO: 2687398 - RNA, 23 nt, Human
gggacccccguggggcagggagc

SEQ ID NO: 2687399 - RNA, 18 nt, Human
gggaccugccaggcaggg

SEQ ID NO: 2687400 - RNA, 19 nt, Human
gggaccugccaggcagggg

SEQ ID NO: 2687401 - RNA, 12 nt, Human
gggacccagugc

SEQ ID NO: 2687402 - RNA, 15 nt, Human
gggacccagugcaga

SEQ ID NO: 2687403 - RNA, 16 nt, Human
gggacccagugcagaa

SEQ ID NO: 2687404 - RNA, 20 nt, Human
gggacgcuccgcugccgugc

SEQ ID NO: 2687405 - RNA, 17 nt, Human
gggacggugcccaagcc

SEQ ID NO: 2687406 - RNA, 13 nt, Human
gggaggagggaga

SEQ ID NO: 2687407 - RNA, 14 nt, Human
gggaggagggagag

SEQ ID NO: 2687408 - RNA, 17 nt, Human
gggaggagggagaggga

SEQ ID NO: 2687409 - RNA, 23 nt, Human
gggaggaucucuugagccuggga

SEQ ID NO: 2687410 - RNA, 21 nt, Human
gggaggauugcuugagcucag

SEQ ID NO: 2687411 - RNA, 18 nt, Human
gggaggagggagagggag

SEQ ID NO: 2687412 - RNA, 23 nt, Human
gggaggauugcuugagcucagga

SEQ ID NO: 2687413 - RNA, 13 nt, Human
gggagcggagguu

SEQ ID NO: 2687414 - RNA, 21 nt, Human
gggagccuuugguucuggcca

SEQ ID NO: 2687415 - RNA, 20 nt, Human
gggagccgguaacuguccug

SEQ ID NO: 2687416 - RNA, 19 nt, Human
gggagcuccacucugcuuc

SEQ ID NO: 2687417 - RNA, 23 nt, Human
gggagcuccacucugcuucucug

SEQ ID NO: 2687418 - RNA, 18 nt, Human
gggagccuuagccgccca

SEQ ID NO: 2687419 - RNA, 22 nt, Human
gggagccuuugguucuggccag

SEQ ID NO: 2687420 - RNA, 13 nt, Human
gggagcugggccc

SEQ ID NO: 2687421 - RNA, 19 nt, Human
gggagcugggcccgacaug

SEQ ID NO: 2687422 - RNA, 16 nt, Human
ggcaagagggggugga

SEQ ID NO: 2687423 - RNA, 19 nt, Human
ggauugaaaauguccagga

SEQ ID NO: 2687424 - RNA, 14 nt, Human
ggauucugguucca

SEQ ID NO: 2687425 - RNA, 18 nt, Human
ggauucugguuccagggu

SEQ ID NO: 2687426 - RNA, 19 nt, Human
ggauucugguuccaggguc

SEQ ID NO: 2687427 - RNA, 17 nt, Human
ggcaccagggguuucuc

SEQ ID NO: 2687428 - RNA, 14 nt, Human
ggcaccaggaagcc

SEQ ID NO: 2687429 - RNA, 15 nt, Human
ggcaccaggaagccg

SEQ ID NO: 2687430 - RNA, 17 nt, Human
ggcaccagcagccugga

SEQ ID NO: 2687431 - RNA, 18 nt, Human
ggcaaggacuuuguacau

SEQ ID NO: 2687432 - RNA, 18 nt, Human
ggcaagcuccgcaggacu

SEQ ID NO: 2687433 - RNA, 14 nt, Human
ggcaagcuccgcag

SEQ ID NO: 2687434 - RNA, 13 nt, Human
ggcaagccaggcu

SEQ ID NO: 2687435 - RNA, 16 nt, Human
ggcagagcuggcucug

SEQ ID NO: 2687436 - RNA, 17 nt, Human
ggcagagcuggcucuga

SEQ ID NO: 2687437 - RNA, 22 nt, Human
ggauuccacucguguguuucua

SEQ ID NO: 2687438 - RNA, 14 nt, Human
ggauucuaaauaca

SEQ ID NO: 2687439 - RNA, 15 nt, Human
ggauucuaaauacau

SEQ ID NO: 2687440 - RNA, 19 nt, Human
ggauucuaaauacaugcca

SEQ ID NO: 2687441 - RNA, 21 nt, Human
ggauucaggaauguguggccu

SEQ ID NO: 2687442 - RNA, 18 nt, Human
ggauuaguuuagaacagg

SEQ ID NO: 2687443 - RNA, 17 nt, Human
ggauuaguuuagaacag

SEQ ID NO: 2687444 - RNA, 14 nt, Human
ggauuaguuuagaa

SEQ ID NO: 2687445 - RNA, 23 nt, Human
ggaugaugucuuuuuauuaaaau

SEQ ID NO: 2687446 - RNA, 17 nt, Human
ggaugccagggccgacc

SEQ ID NO: 2687447 - RNA, 16 nt, Human
ggcaggggugggggug

SEQ ID NO: 2687448 - RNA, 11 nt, Human
ggcagcugcua

SEQ ID NO: 2687449 - RNA, 22 nt, Human
ggcagcugcuauuuauuuuccu

SEQ ID NO: 2687450 - RNA, 12 nt, Human
ggcaggguccua

SEQ ID NO: 2687451 - RNA, 17 nt, Human
ggcagguuggugggggc

SEQ ID NO: 2687452 - RNA, 21 nt, Human
ggcaugagacucagugcagau

SEQ ID NO: 2687453 - RNA, 18 nt, Human
ggcaugguuuugugccau

SEQ ID NO: 2687454 - RNA, 22 nt, Human
ggcaugguuuugugccaucugu

SEQ ID NO: 2687455 - RNA, 11 nt, Human
ggcauguaaau

SEQ ID NO: 2687456 - RNA, 18 nt, Human
ggcauguaaauguaaacu

SEQ ID NO: 2687457 - RNA, 21 nt, Human
ggcauguaaauguaaacucag

SEQ ID NO: 2687458 - RNA, 21 nt, Human
ggcaguagaacuccaggcccu

SEQ ID NO: 2687459 - RNA, 15 nt, Human
ggcaguccgugggac

SEQ ID NO: 2687460 - RNA, 16 nt, Human
ggcaguccgugggacg

SEQ ID NO: 2687461 - RNA, 13 nt, Human
ggcaugaccagau

SEQ ID NO: 2687462 - RNA, 20 nt, Human
ggccacugugaagagaacca

SEQ ID NO: 2687463 - RNA, 17 nt, Human
ggccacagcgccagccu

SEQ ID NO: 2687464 - RNA, 17 nt, Human
ggccaccuccccagcau

SEQ ID NO: 2687465 - RNA, 13 nt, Human
ggccaccucccca

SEQ ID NO: 2687466 - RNA, 16 nt, Human
ggccaccuccccagca

SEQ ID NO: 2687467 - RNA, 13 nt, Human
ggccaugcugagg

SEQ ID NO: 2687468 - RNA, 14 nt, Human
ggccaugcugaggc

SEQ ID NO: 2687469 - RNA, 15 nt, Human
ggccaugcugaggcc

SEQ ID NO: 2687470 - RNA, 18 nt, Human
ggccaugcugaggccugg

SEQ ID NO: 2687471 - RNA, 19 nt, Human
ggccaugcugaggccuggg

SEQ ID NO: 2687472 - RNA, 22 nt, Human
ggccaugcugaggccugggccg

SEQ ID NO: 2687473 - RNA, 18 nt, Human
ggcccacccggugggacc

SEQ ID NO: 2687474 - RNA, 20 nt, Human
ggcccacccggugggacccc

SEQ ID NO: 2687475 - RNA, 13 nt, Human
ggccaggagcagg

SEQ ID NO: 2687476 - RNA, 21 nt, Human
ggccaggagcaggcacgggug

SEQ ID NO: 2687477 - RNA, 20 nt, Human
gcuuuguagaguuuugucau

SEQ ID NO: 2687478 - RNA, 14 nt, Human
ggacagaaagagac

SEQ ID NO: 2687479 - RNA, 14 nt, Human
ggacacuccaggga

SEQ ID NO: 2687480 - RNA, 18 nt, Human
ggacacuccagggacaca

SEQ ID NO: 2687481 - RNA, 22 nt, Human
ggacacuccagggacacacagc

SEQ ID NO: 2687482 - RNA, 23 nt, Human
ggacacuccagggacacacagcc

SEQ ID NO: 2687483 - RNA, 19 nt, Human
gcuuuuauuaaugcacuuu

SEQ ID NO: 2687484 - RNA, 22 nt, Human
gcuuuuauuaaugcacuuucua

SEQ ID NO: 2687485 - RNA, 15 nt, Human
gcuuuuauuaaugca

SEQ ID NO: 2687486 - RNA, 18 nt, Human
gcuuuuauuaaugcacuu

SEQ ID NO: 2687487 - RNA, 22 nt, Human
gcuuuuauagaggcuagcuucu

SEQ ID NO: 2687488 - RNA, 19 nt, Human
gcuuuuauagaggcuagcu

SEQ ID NO: 2687489 - RNA, 17 nt, Human
ggacugacugaggcagu

SEQ ID NO: 2687490 - RNA, 16 nt, Human
ggacugacugaggcag

SEQ ID NO: 2687491 - RNA, 15 nt, Human
ggacugacugaggca

SEQ ID NO: 2687492 - RNA, 11 nt, Human
ggacugacuga

SEQ ID NO: 2687493 - RNA, 14 nt, Human
ggagaagagcgcag

SEQ ID NO: 2687494 - RNA, 12 nt, Human
ggagaagcugca

SEQ ID NO: 2687495 - RNA, 13 nt, Human
ggagaagcugcag

SEQ ID NO: 2687496 - RNA, 14 nt, Human
ggagaagcugcagg

SEQ ID NO: 2687497 - RNA, 17 nt, Human
ggagaagggaaguugaa

SEQ ID NO: 2687498 - RNA, 21 nt, Human
ggacugaccuuguaaaagaca

SEQ ID NO: 2687499 - RNA, 12 nt, Human
ggaccagggccu

SEQ ID NO: 2687500 - RNA, 20 nt, Human
ggaccuuuccaccacagcca

SEQ ID NO: 2687501 - RNA, 16 nt, Human
ggaccuuuuguuuucu

SEQ ID NO: 2687502 - RNA, 18 nt, Human
ggaccuuuccaccacagc

SEQ ID NO: 2687503 - RNA, 19 nt, Human
ggaccuuuccaccacagcc

SEQ ID NO: 2687504 - RNA, 22 nt, Human
ggaccuuuccaccacagccagc

SEQ ID NO: 2687505 - RNA, 19 nt, Human
ggacccaauguaggagcug

SEQ ID NO: 2687506 - RNA, 20 nt, Human
ggagggcggcaggggccugg

SEQ ID NO: 2687507 - RNA, 21 nt, Human
ggagggcggcaggggccugga

SEQ ID NO: 2687508 - RNA, 13 nt, Human
ggaggggaggggg

SEQ ID NO: 2687509 - RNA, 14 nt, Human
ggaggggaggguaa

SEQ ID NO: 2687510 - RNA, 13 nt, Human
ggaguauugaaug

SEQ ID NO: 2687511 - RNA, 16 nt, Human
ggaguauugaauggug

SEQ ID NO: 2687512 - RNA, 21 nt, Human
ggaguauugaaugguggugga

SEQ ID NO: 2687513 - RNA, 17 nt, Human
ggagcucaucugcaaaa

SEQ ID NO: 2687514 - RNA, 21 nt, Human
ggaggcaaagcuggcucaccu

SEQ ID NO: 2687515 - RNA, 17 nt, Human
ggaggcaaagcuggcuc

SEQ ID NO: 2687516 - RNA, 20 nt, Human
ggaggcaaagcuggcucacc

SEQ ID NO: 2687517 - RNA, 13 nt, Human
ggaggcagccgcc

SEQ ID NO: 2687518 - RNA, 14 nt, Human
ggaggcaggcaugg

SEQ ID NO: 2687519 - RNA, 17 nt, Human
ggaggcagggaggcagc

SEQ ID NO: 2687520 - RNA, 18 nt, Human
ggaggcagggaggcagcc

SEQ ID NO: 2687521 - RNA, 17 nt, Human
ggagggauucugguucc

SEQ ID NO: 2687522 - RNA, 13 nt, Human
ggagcacugggcu

SEQ ID NO: 2687523 - RNA, 15 nt, Human
ggagcacugggcucc

SEQ ID NO: 2687524 - RNA, 18 nt, Human
ggagccgguaacuguccu

SEQ ID NO: 2687525 - RNA, 19 nt, Human
ggagccgguaacuguccug

SEQ ID NO: 2687526 - RNA, 20 nt, Human
ggagccgguaacuguccugu

SEQ ID NO: 2687527 - RNA, 23 nt, Human
ggagccgguaacuguccuguccu

SEQ ID NO: 2687528 - RNA, 19 nt, Human
ggagcggagguugcaguga

SEQ ID NO: 2687529 - RNA, 22 nt, Human
ggagcgagcaugucguggacac

SEQ ID NO: 2687530 - RNA, 19 nt, Human
ggagccuuuuuaaaacaca

SEQ ID NO: 2687531 - RNA, 20 nt, Human
ggagccuuugguucuggcca

SEQ ID NO: 2687532 - RNA, 23 nt, Human
ggagccugcauuuccucgcagcc

SEQ ID NO: 2687533 - RNA, 23 nt, Human
ucagacagaacuugaauguguca

SEQ ID NO: 2687534 - RNA, 16 nt, Human
ucagacagaacuugaa

SEQ ID NO: 2687535 - RNA, 15 nt, Human
ucagacagaacuuga

SEQ ID NO: 2687536 - RNA, 17 nt, Human
ucagacagagaggacug

SEQ ID NO: 2687537 - RNA, 22 nt, Human
ucagacagagaggacuguaggg

SEQ ID NO: 2687538 - RNA, 18 nt, Human
ucagaaacuugugaagug

SEQ ID NO: 2687539 - RNA, 17 nt, Human
ucagaaacuugugaagu

SEQ ID NO: 2687540 - RNA, 16 nt, Human
ucagaaacuugugaag

SEQ ID NO: 2687541 - RNA, 15 nt, Human
ucagaaacuugugaa

SEQ ID NO: 2687542 - RNA, 15 nt, Human
ucagacacccucaac

SEQ ID NO: 2687543 - RNA, 22 nt, Human
ucagacacccucaaccucuucu

SEQ ID NO: 2687544 - RNA, 17 nt, Human
ucagacacccucaaccu

SEQ ID NO: 2687545 - RNA, 23 nt, Human
ucagacacccucaaccucuucug

SEQ ID NO: 2687546 - RNA, 11 nt, Human
ucacugccagg

SEQ ID NO: 2687547 - RNA, 14 nt, Human
ucacugccaggcca

SEQ ID NO: 2687548 - RNA, 15 nt, Human
ucacugccacacucu

SEQ ID NO: 2687549 - RNA, 19 nt, Human
ucacugccacacucuccau

SEQ ID NO: 2687550 - RNA, 20 nt, Human
ucacugccacacucuccauc

SEQ ID NO: 2687551 - RNA, 18 nt, Human
ucacugcgaagacccucu

SEQ ID NO: 2687552 - RNA, 18 nt, Human
ucacugccaugccagcuu

SEQ ID NO: 2687553 - RNA, 20 nt, Human
ucacugccaggccagccucc

SEQ ID NO: 2687554 - RNA, 23 nt, Human
ucacugccaggccagccuccgag

SEQ ID NO: 2687555 - RNA, 15 nt, Human
ucacugccaggccag

SEQ ID NO: 2687556 - RNA, 16 nt, Human
ucacugccaggccagc

SEQ ID NO: 2687557 - RNA, 18 nt, Human
ucacugccaggccagccu

SEQ ID NO: 2687558 - RNA, 19 nt, Human
ucacugccaggccagccuc

SEQ ID NO: 2687559 - RNA, 23 nt, Human
ucaccagccccacugccagcagc

SEQ ID NO: 2687560 - RNA, 24 nt, Human
ucaccagccccacugccagcagca

SEQ ID NO: 2687561 - RNA, 21 nt, Human
ucaccagcccaucgccacaaa

SEQ ID NO: 2687562 - RNA, 15 nt, Human
ucaccagccccacug

SEQ ID NO: 2687563 - RNA, 19 nt, Human
ucaccagccccacugccag

SEQ ID NO: 2687564 - RNA, 21 nt, Human
ucaccagccccacugccagca

SEQ ID NO: 2687565 - RNA, 22 nt, Human
ucaccagccccacugccagcag

SEQ ID NO: 2687566 - RNA, 13 nt, Human
ucacuggggcaga

SEQ ID NO: 2687567 - RNA, 14 nt, Human
ucacuggggcagac

SEQ ID NO: 2687568 - RNA, 13 nt, Human
ucacuuguguuuu

SEQ ID NO: 2687569 - RNA, 17 nt, Human
ucacuggggccuacagc

SEQ ID NO: 2687570 - RNA, 15 nt, Human
ucacuggaaagggga

SEQ ID NO: 2687571 - RNA, 17 nt, Human
ucacuggaaaggggaga

SEQ ID NO: 2687572 - RNA, 18 nt, Human
ucacuggaaaggggagag

SEQ ID NO: 2687573 - RNA, 21 nt, Human
ucacuggaaaggggagagccu

SEQ ID NO: 2687574 - RNA, 23 nt, Human
ucacuggaaaggggagagccugc

SEQ ID NO: 2687575 - RNA, 16 nt, Human
ucagcugaaccugggu

SEQ ID NO: 2687576 - RNA, 15 nt, Human
ucagcugaaccuggg

SEQ ID NO: 2687577 - RNA, 19 nt, Human
ucagccugcuccagcuguu

SEQ ID NO: 2687578 - RNA, 18 nt, Human
ucagccugcuccagcugu

SEQ ID NO: 2687579 - RNA, 16 nt, Human
ucagagucagccagga

SEQ ID NO: 2687580 - RNA, 16 nt, Human
ucaggcaaagaaaaug

SEQ ID NO: 2687581 - RNA, 13 nt, Human
ucaggcucccagg

SEQ ID NO: 2687582 - RNA, 12 nt, Human
ucaggcucccag

SEQ ID NO: 2687583 - RNA, 13 nt, Human
ucagggccaugcu

SEQ ID NO: 2687584 - RNA, 14 nt, Human
ucagggccaugcug

SEQ ID NO: 2687585 - RNA, 17 nt, Human
ucagggccaugcugagg

SEQ ID NO: 2687586 - RNA, 14 nt, Human
ucagggcucccagg

SEQ ID NO: 2687587 - RNA, 16 nt, Human
ucagggcucccagggg

SEQ ID NO: 2687588 - RNA, 16 nt, Human
ucaggugagaagcaga

SEQ ID NO: 2687589 - RNA, 15 nt, Human
ucaggugagaagcag

SEQ ID NO: 2687590 - RNA, 18 nt, Human
ucagggccaugcugaggc

SEQ ID NO: 2687591 - RNA, 19 nt, Human
ucagggccaugcugaggcc

SEQ ID NO: 2687592 - RNA, 21 nt, Human
ucagggccaugcugaggccug

SEQ ID NO: 2687593 - RNA, 23 nt, Human
ucagggccaugcugaggccuggg

SEQ ID NO: 2687594 - RNA, 14 nt, Human
uccacccugccugc

SEQ ID NO: 2687595 - RNA, 11 nt, Human
ucauuucaucu

SEQ ID NO: 2687596 - RNA, 23 nt, Human
uccagccaaagccuccuccagcc

SEQ ID NO: 2687597 - RNA, 10 nt, Human
uccagccagc

SEQ ID NO: 2687598 - RNA, 11 nt, Human
uccagccagcg

SEQ ID NO: 2687599 - RNA, 12 nt, Human
uccagccagcgc

SEQ ID NO: 2687600 - RNA, 13 nt, Human
uccagccagcgcc

SEQ ID NO: 2687601 - RNA, 14 nt, Human
uccagccagcgccu

SEQ ID NO: 2687602 - RNA, 18 nt, Human
uccagccagcgccucccu

SEQ ID NO: 2687603 - RNA, 19 nt, Human
uccagccagcgccucccuc

SEQ ID NO: 2687604 - RNA, 20 nt, Human
uccagccagcgccucccucc

SEQ ID NO: 2687605 - RNA, 21 nt, Human
uccagccagcgccucccucca

SEQ ID NO: 2687606 - RNA, 22 nt, Human
uccagccagcgccucccuccac

SEQ ID NO: 2687607 - RNA, 23 nt, Human
uccagccagcgccucccuccacc

SEQ ID NO: 2687608 - RNA, 23 nt, Human
uccagccccgcgaccauguggcc

SEQ ID NO: 2687609 - RNA, 17 nt, Human
uccagcuguucagcugg

SEQ ID NO: 2687610 - RNA, 16 nt, Human
uccagcuuucugccau

SEQ ID NO: 2687611 - RNA, 14 nt, Human
uccaggugcagagg

SEQ ID NO: 2687612 - RNA, 15 nt, Human
uccaggugcagaggu

SEQ ID NO: 2687613 - RNA, 16 nt, Human
uccagggucccucugu

SEQ ID NO: 2687614 - RNA, 17 nt, Human
uccagggucccucugug

SEQ ID NO: 2687615 - RNA, 18 nt, Human
uccagggucccucugugu

SEQ ID NO: 2687616 - RNA, 17 nt, Human
ucauagccauaaaugau

SEQ ID NO: 2687617 - RNA, 23 nt, Human
ucaucacauuucuaugccaaaca

SEQ ID NO: 2687618 - RNA, 21 nt, Human
ucauaggcaccuuuuacugug

SEQ ID NO: 2687619 - RNA, 22 nt, Human
ucauaggcaccuuuuacuguga

SEQ ID NO: 2687620 - RNA, 12 nt, Human
ucaucugcaaaa

SEQ ID NO: 2687621 - RNA, 13 nt, Human
ucaucugcaaaag

SEQ ID NO: 2687622 - RNA, 18 nt, Human
ucaucacuacaguauuac

SEQ ID NO: 2687623 - RNA, 23 nt, Human
ucaucuuagguuggcaaaaaggc

SEQ ID NO: 2687624 - RNA, 21 nt, Human
ucaggugagaagcagaggaag

SEQ ID NO: 2687625 - RNA, 14 nt, Human
ucauagcccaguag

SEQ ID NO: 2687626 - RNA, 22 nt, Human
ucauagcccaguagaccuuguu

SEQ ID NO: 2687627 - RNA, 14 nt, Human
ucauuauucucugc

SEQ ID NO: 2687628 - RNA, 17 nt, Human
ucauuauucucugcuau

SEQ ID NO: 2687629 - RNA, 22 nt, Human
ucauucaaguguaaaauauuuu

SEQ ID NO: 2687630 - RNA, 14 nt, Human
ucauuucaucucau

SEQ ID NO: 2687631 - RNA, 15 nt, Human
ucauuucaucucauu

SEQ ID NO: 2687632 - RNA, 16 nt, Human
ucauuucaucucauuu

SEQ ID NO: 2687633 - RNA, 17 nt, Human
ucauuucaucucauuua

SEQ ID NO: 2687634 - RNA, 18 nt, Human
ucauuucaucucauuuaa

SEQ ID NO: 2687635 - RNA, 20 nt, Human
ucauuucaucucauuuaagg

SEQ ID NO: 2687636 - RNA, 21 nt, Human
ucauuucagaaguuaguuugu

SEQ ID NO: 2687637 - RNA, 13 nt, Human
ucauuucagaagu

SEQ ID NO: 2687638 - RNA, 13 nt, Human
uauuaauauuuaa

SEQ ID NO: 2687639 - RNA, 12 nt, Human
uauuaaucacug

SEQ ID NO: 2687640 - RNA, 14 nt, Human
uauuaaucacugug

SEQ ID NO: 2687641 - RNA, 13 nt, Human
uauuaaucacugu

SEQ ID NO: 2687642 - RNA, 19 nt, Human
uauuaaucacuguguauau

SEQ ID NO: 2687643 - RNA, 17 nt, Human
uauuaaucacuguguau

SEQ ID NO: 2687644 - RNA, 16 nt, Human
uauuaaucacugugua

SEQ ID NO: 2687645 - RNA, 15 nt, Human
uauuaaucacugugu

SEQ ID NO: 2687646 - RNA, 14 nt, Human
uauuaauauaugua

SEQ ID NO: 2687647 - RNA, 13 nt, Human
uauuaaugcacuu

SEQ ID NO: 2687648 - RNA, 14 nt, Human
uauuaaugcacuuu

SEQ ID NO: 2687649 - RNA, 17 nt, Human
uauuaaugcacuuucua

SEQ ID NO: 2687650 - RNA, 20 nt, Human
uauuaaugcacuuucuaucc

SEQ ID NO: 2687651 - RNA, 12 nt, Human
uauuaaugcacu

SEQ ID NO: 2687652 - RNA, 23 nt, Human
uauuaaucacuguguauauuuga

SEQ ID NO: 2687653 - RNA, 22 nt, Human
uauuaaucacuguguauauuug

SEQ ID NO: 2687654 - RNA, 20 nt, Human
uauuaaucacuguguauauu

SEQ ID NO: 2687655 - RNA, 22 nt, Human
uauguuucucuuugauuauuug

SEQ ID NO: 2687656 - RNA, 23 nt, Human
uauguuucucuuugauuauuugc

SEQ ID NO: 2687657 - RNA, 23 nt, Human
uauuaaauuuuuuuguaugaaaa

SEQ ID NO: 2687658 - RNA, 22 nt, Human
uauuaaauuuuuuuguaugaaa

SEQ ID NO: 2687659 - RNA, 21 nt, Human
uauuaaauuuuuuuguaugaa

SEQ ID NO: 2687660 - RNA, 20 nt, Human
uauuaaauuuuuuuguauga

SEQ ID NO: 2687661 - RNA, 18 nt, Human
uauuaaauuuuuuuguau

SEQ ID NO: 2687662 - RNA, 17 nt, Human
uauuaaauuuuuuugua

SEQ ID NO: 2687663 - RNA, 13 nt, Human
uauguauuauuua

SEQ ID NO: 2687664 - RNA, 19 nt, Human
uauguauuauuuacauuua

SEQ ID NO: 2687665 - RNA, 21 nt, Human
uauguauuauuuauaauuccu

SEQ ID NO: 2687666 - RNA, 21 nt, Human
uauguauuauuuacauuuaau

SEQ ID NO: 2687667 - RNA, 14 nt, Human
uauguauucuuuuc

SEQ ID NO: 2687668 - RNA, 15 nt, Human
uaugucaguacuauu

SEQ ID NO: 2687669 - RNA, 20 nt, Human
uauguuguuuauaauaaaaa

SEQ ID NO: 2687670 - RNA, 13 nt, Human
uauguuuaaaaua

SEQ ID NO: 2687671 - RNA, 13 nt, Human
uaugguuauguuu

SEQ ID NO: 2687672 - RNA, 14 nt, Human
uaugguuauguuuu

SEQ ID NO: 2687673 - RNA, 19 nt, Human
uaugguuacuucuucucuu

SEQ ID NO: 2687674 - RNA, 20 nt, Human
uaugguuacuucuucucuua

SEQ ID NO: 2687675 - RNA, 22 nt, Human
uaugguuacuucuucucuuaga

SEQ ID NO: 2687676 - RNA, 22 nt, Human
uauggcagaaaaaaugucugua

SEQ ID NO: 2687677 - RNA, 15 nt, Human
uauggauguuacucu

SEQ ID NO: 2687678 - RNA, 16 nt, Human
uauggaugauuuaagu

SEQ ID NO: 2687679 - RNA, 18 nt, Human
uauggaugauuuaagugu

SEQ ID NO: 2687680 - RNA, 15 nt, Human
uauguaaauaauucu

SEQ ID NO: 2687681 - RNA, 17 nt, Human
uauguaaauaauucuuu

SEQ ID NO: 2687682 - RNA, 14 nt, Human
uauguaaauaauuc

SEQ ID NO: 2687683 - RNA, 13 nt, Human
uauguaaauaauu

SEQ ID NO: 2687684 - RNA, 17 nt, Human
uauguaaucucuaggaa

SEQ ID NO: 2687685 - RNA, 18 nt, Human
uauguauauuaaaaaaga

SEQ ID NO: 2687686 - RNA, 12 nt, Human
uauguauaaaau

SEQ ID NO: 2687687 - RNA, 18 nt, Human
uauguaguaucuauauga

SEQ ID NO: 2687688 - RNA, 19 nt, Human
uauguaguaucuauaugac

SEQ ID NO: 2687689 - RNA, 22 nt, Human
uauguauguguuuagaauugaa

SEQ ID NO: 2687690 - RNA, 21 nt, Human
uauguauguguuuagaauuga

SEQ ID NO: 2687691 - RNA, 20 nt, Human
uauguauguguuuagaauug

SEQ ID NO: 2687692 - RNA, 17 nt, Human
uauguauguguuuagaa

SEQ ID NO: 2687693 - RNA, 16 nt, Human
uauguauguguuuaga

SEQ ID NO: 2687694 - RNA, 15 nt, Human
uauguauguguuuag

SEQ ID NO: 2687695 - RNA, 13 nt, Human
uauguauguguuu

SEQ ID NO: 2687696 - RNA, 17 nt, Human
uauguagguaagacugu

SEQ ID NO: 2687697 - RNA, 21 nt, Human
uauguagguaagacuguagau

SEQ ID NO: 2687698 - RNA, 13 nt, Human
uauguagaagcau

SEQ ID NO: 2687699 - RNA, 21 nt, Human
uauguacuuuuauuuuacaca

SEQ ID NO: 2687700 - RNA, 16 nt, Human
uauuguuucucugaaa

SEQ ID NO: 2687701 - RNA, 12 nt, Human
uauuguuucugc

SEQ ID NO: 2687702 - RNA, 13 nt, Human
uauuguuucugca

SEQ ID NO: 2687703 - RNA, 15 nt, Human
uauuguuucugcauu

SEQ ID NO: 2687704 - RNA, 15 nt, Human
uauuguuugguaaau

SEQ ID NO: 2687705 - RNA, 16 nt, Human
uauuguuugguaaaug

SEQ ID NO: 2687706 - RNA, 17 nt, Human
uauuguuugguaaaugu

SEQ ID NO: 2687707 - RNA, 15 nt, Human
uauuguuuuacaaua

SEQ ID NO: 2687708 - RNA, 14 nt, Human
uauuguuuuacaau

SEQ ID NO: 2687709 - RNA, 22 nt, Human
uauuguuuuacaauaguucugu

SEQ ID NO: 2687710 - RNA, 20 nt, Human
uauuguuuuacaauaguucu

SEQ ID NO: 2687711 - RNA, 17 nt, Human
uauuguuuuacaauagu

SEQ ID NO: 2687712 - RNA, 16 nt, Human
uauuguuaauacaagg

SEQ ID NO: 2687713 - RNA, 16 nt, Human
uauuuaaaaaaaaagu

SEQ ID NO: 2687714 - RNA, 15 nt, Human
uauuuaaaaauagaa

SEQ ID NO: 2687715 - RNA, 16 nt, Human
uauuuaaaaauagaaa

SEQ ID NO: 2687716 - RNA, 18 nt, Human
uauuuaaaaauagaaaca

SEQ ID NO: 2687717 - RNA, 22 nt, Human
uauuuaguuguaaaccaaguga

SEQ ID NO: 2687718 - RNA, 17 nt, Human
uauugccuuuuaauuuu

SEQ ID NO: 2687719 - RNA, 21 nt, Human
uauugccuuuuaauuuuuaau

SEQ ID NO: 2687720 - RNA, 22 nt, Human
uauuaauauucaggguaaauag

SEQ ID NO: 2687721 - RNA, 14 nt, Human
uauugauugggaaa

SEQ ID NO: 2687722 - RNA, 15 nt, Human
uauugauugggaaaa

SEQ ID NO: 2687723 - RNA, 18 nt, Human
uauugauugggaaaacau

SEQ ID NO: 2687724 - RNA, 19 nt, Human
uauugauugggaaaacauu

SEQ ID NO: 2687725 - RNA, 20 nt, Human
uauugauugggaaaacauuu

SEQ ID NO: 2687726 - RNA, 22 nt, Human
uauugauugggaaaacauuugc

SEQ ID NO: 2687727 - RNA, 14 nt, Human
uauugauuuaagcu

SEQ ID NO: 2687728 - RNA, 12 nt, Human
uauugcaaaaua

SEQ ID NO: 2687729 - RNA, 15 nt, Human
uauugcaaaauacau

SEQ ID NO: 2687730 - RNA, 16 nt, Human
uauugcaaaauacaug

SEQ ID NO: 2687731 - RNA, 17 nt, Human
uauugcaaaauacauga

SEQ ID NO: 2687732 - RNA, 18 nt, Human
uauugcaaaauacaugaa

SEQ ID NO: 2687733 - RNA, 19 nt, Human
uauugcaaaauacaugaag

SEQ ID NO: 2687734 - RNA, 15 nt, Human
uauuauuauaaucuu

SEQ ID NO: 2687735 - RNA, 22 nt, Human
uauuauuauaaucuuauaauug

SEQ ID NO: 2687736 - RNA, 15 nt, Human
uauuacaaugaucac

SEQ ID NO: 2687737 - RNA, 17 nt, Human
uauuaauguuuucaaaa

SEQ ID NO: 2687738 - RNA, 18 nt, Human
uauuaauguuuucaaaag

SEQ ID NO: 2687739 - RNA, 14 nt, Human
uauuacaaaaacaa

SEQ ID NO: 2687740 - RNA, 16 nt, Human
uauuacaaaaacaaaa

SEQ ID NO: 2687741 - RNA, 14 nt, Human
uauuacaaugauca

SEQ ID NO: 2687742 - RNA, 22 nt, Human
uauuccagaucuuucagaaaua

SEQ ID NO: 2687743 - RNA, 22 nt, Human
uauucgauacugcgacuuucug

SEQ ID NO: 2687744 - RNA, 19 nt, Human
uauucuauaaaacucugca

SEQ ID NO: 2687745 - RNA, 20 nt, Human
uauucuaauaagcuaguuga

SEQ ID NO: 2687746 - RNA, 17 nt, Human
uauucuaauaagcuagu

SEQ ID NO: 2687747 - RNA, 15 nt, Human
uauucuaauaagcua

SEQ ID NO: 2687748 - RNA, 13 nt, Human
uauucuaauaagc

SEQ ID NO: 2687749 - RNA, 15 nt, Human
uauuuauaauuccua

SEQ ID NO: 2687750 - RNA, 22 nt, Human
uauuuauaauagcaacuuuugu

SEQ ID NO: 2687751 - RNA, 13 nt, Human
uauuuuauuacug

SEQ ID NO: 2687752 - RNA, 14 nt, Human
uauuuuauuacugu

SEQ ID NO: 2687753 - RNA, 15 nt, Human
uauuuuauuacuguu

SEQ ID NO: 2687754 - RNA, 20 nt, Human
uauuuuauuuagacaagaga

SEQ ID NO: 2687755 - RNA, 17 nt, Human
uauuuuauuuagacaag

SEQ ID NO: 2687756 - RNA, 11 nt, Human
uauuuuuuccu

SEQ ID NO: 2687757 - RNA, 14 nt, Human
uauuuuuuccuuuu

SEQ ID NO: 2687758 - RNA, 20 nt, Human
uauuuucucuguacuuuuca

SEQ ID NO: 2687759 - RNA, 15 nt, Human
uauuuuuuuaaaauu

SEQ ID NO: 2687760 - RNA, 16 nt, Human
uauuuuuuuaaaauuu

SEQ ID NO: 2687761 - RNA, 15 nt, Human
uauuuuuuggacuuc

SEQ ID NO: 2687762 - RNA, 21 nt, Human
uauuuuuuggacuucaaagca

SEQ ID NO: 2687763 - RNA, 13 nt, Human
uauuuuuugaaaa

SEQ ID NO: 2687764 - RNA, 22 nt, Human
uauuuucccuauuagagaagag

SEQ ID NO: 2687765 - RNA, 12 nt, Human
uauuuuccuaaa

SEQ ID NO: 2687766 - RNA, 16 nt, Human
uauuuuccuaaagaga

SEQ ID NO: 2687767 - RNA, 14 nt, Human
uauuuucuacagug

SEQ ID NO: 2687768 - RNA, 14 nt, Human
uauuuucuauuuua

SEQ ID NO: 2687769 - RNA, 19 nt, Human
uauuuucuauuuuaagacu

SEQ ID NO: 2687770 - RNA, 15 nt, Human
uauuuucuaaagacu

SEQ ID NO: 2687771 - RNA, 15 nt, Human
uauuuucuacagugg

SEQ ID NO: 2687772 - RNA, 14 nt, Human
uauuuucuacguuu

SEQ ID NO: 2687773 - RNA, 20 nt, Human
uauuuucuacguuucuuuaa

SEQ ID NO: 2687774 - RNA, 15 nt, Human
ucaaaaaaagaaaaa

SEQ ID NO: 2687775 - RNA, 14 nt, Human
ucaaaaaaagaaaa

SEQ ID NO: 2687776 - RNA, 16 nt, Human
uauuuuuuuuaauugu

SEQ ID NO: 2687777 - RNA, 15 nt, Human
uauuuuuuuuaaaga

SEQ ID NO: 2687778 - RNA, 17 nt, Human
uauuuuuuuuaaagaaa

SEQ ID NO: 2687779 - RNA, 19 nt, Human
uauuuuuuuuaauuguauu

SEQ ID NO: 2687780 - RNA, 18 nt, Human
uauuuuuuuuaauuguau

SEQ ID NO: 2687781 - RNA, 16 nt, Human
uauuuuuuuuucuaag

SEQ ID NO: 2687782 - RNA, 19 nt, Human
uauuuuuuuuucuaagaga

SEQ ID NO: 2687783 - RNA, 16 nt, Human
uauuuuuuuuuucuuc

SEQ ID NO: 2687784 - RNA, 17 nt, Human
uauuuuuuuuuucuucu

SEQ ID NO: 2687785 - RNA, 19 nt, Human
uauuuuuuuuuucuucuug

SEQ ID NO: 2687786 - RNA, 21 nt, Human
uauuuuuuuuuucuucuuggg

SEQ ID NO: 2687787 - RNA, 13 nt, Human
uauuuuuuugaac

SEQ ID NO: 2687788 - RNA, 10 nt, Human
ucaaauuaau

SEQ ID NO: 2687789 - RNA, 18 nt, Human
ucaaauuaauugugugaa

SEQ ID NO: 2687790 - RNA, 17 nt, Human
ucaaauuaauuguguga

SEQ ID NO: 2687791 - RNA, 13 nt, Human
ucaaauuaauugu

SEQ ID NO: 2687792 - RNA, 16 nt, Human
ucaaauuaauugugug

SEQ ID NO: 2687793 - RNA, 15 nt, Human
ucaaauuaauugugu

SEQ ID NO: 2687794 - RNA, 15 nt, Human
ucaaaugaugugcaa

SEQ ID NO: 2687795 - RNA, 17 nt, Human
ucaaaugaugugcaaaa

SEQ ID NO: 2687796 - RNA, 21 nt, Human
ucaaaugaugugcaaaaccuu

SEQ ID NO: 2687797 - RNA, 21 nt, Human
ucaaagaccuggggcugcugu

SEQ ID NO: 2687798 - RNA, 23 nt, Human
ucaaagaccuggggcugcuguga

SEQ ID NO: 2687799 - RNA, 15 nt, Human
ucaaagaacaaacau

SEQ ID NO: 2687800 - RNA, 16 nt, Human
ucaaguuguaaauaau

SEQ ID NO: 2687801 - RNA, 14 nt, Human
ucaauacacuaguu

SEQ ID NO: 2687802 - RNA, 19 nt, Human
ucaauaauauauuuucugu

SEQ ID NO: 2687803 - RNA, 20 nt, Human
ucaauaauauauuuucuguu

SEQ ID NO: 2687804 - RNA, 15 nt, Human
ucaauaauauauuuu

SEQ ID NO: 2687805 - RNA, 18 nt, Human
ucaauaauauauuuucug

SEQ ID NO: 2687806 - RNA, 21 nt, Human
ucaauaaagugcuuuaaaaag

SEQ ID NO: 2687807 - RNA, 17 nt, Human
ucaaguugucagguuau

SEQ ID NO: 2687808 - RNA, 15 nt, Human
ucaaugucaaguacc

SEQ ID NO: 2687809 - RNA, 18 nt, Human
ucaauguggugaugaaau

SEQ ID NO: 2687810 - RNA, 19 nt, Human
ucaccagagacuuuagggg

SEQ ID NO: 2687811 - RNA, 16 nt, Human
ucacagugcuuuuaag

SEQ ID NO: 2687812 - RNA, 18 nt, Human
ucacagugcuuuuaagug

SEQ ID NO: 2687813 - RNA, 20 nt, Human
uccuuuguuuucugacuaau

SEQ ID NO: 2687814 - RNA, 18 nt, Human
uccuuuguuuucugacua

SEQ ID NO: 2687815 - RNA, 22 nt, Human
uccuuuguuuucugacuaauua

SEQ ID NO: 2687816 - RNA, 12 nt, Human
uccuuuuaacug

SEQ ID NO: 2687817 - RNA, 18 nt, Human
uccuuggagaaaugaaaa

SEQ ID NO: 2687818 - RNA, 19 nt, Human
uccuuggagaaaugaaaac

SEQ ID NO: 2687819 - RNA, 21 nt, Human
uccuuggagaaaugaaaacag

SEQ ID NO: 2687820 - RNA, 15 nt, Human
uccuuuguucccggc

SEQ ID NO: 2687821 - RNA, 13 nt, Human
uccuuuucccugc

SEQ ID NO: 2687822 - RNA, 14 nt, Human
uccuuuucccugcu

SEQ ID NO: 2687823 - RNA, 15 nt, Human
uccuuuucccugcuu

SEQ ID NO: 2687824 - RNA, 19 nt, Human
ucgaaaccugggauucagg

SEQ ID NO: 2687825 - RNA, 23 nt, Human
uccuugagacacggagcccagcc

SEQ ID NO: 2687826 - RNA, 21 nt, Human
uccuugagacacggagcccag

SEQ ID NO: 2687827 - RNA, 17 nt, Human
uccuugagacacggagc

SEQ ID NO: 2687828 - RNA, 16 nt, Human
uccuugagugcucuug

SEQ ID NO: 2687829 - RNA, 16 nt, Human
uccuugaguguaugag

SEQ ID NO: 2687830 - RNA, 17 nt, Human
uccugucccuugaccuu

SEQ ID NO: 2687831 - RNA, 13 nt, Human
uccuucagacacc

SEQ ID NO: 2687832 - RNA, 20 nt, Human
uccuugaagaacugcaggcc

SEQ ID NO: 2687833 - RNA, 21 nt, Human
uccuugaagaacugcaggccc

SEQ ID NO: 2687834 - RNA, 23 nt, Human
uccuugaagaacugcaggcccug

SEQ ID NO: 2687835 - RNA, 12 nt, Human
uccuucagacac

SEQ ID NO: 2687836 - RNA, 13 nt, Human
uccuguccugcuc

SEQ ID NO: 2687837 - RNA, 24 nt, Human
uccuguccugcucauuaugccacu

SEQ ID NO: 2687838 - RNA, 16 nt, Human
uccuggcagcccagag

SEQ ID NO: 2687839 - RNA, 13 nt, Human
uccuggcacugga

SEQ ID NO: 2687840 - RNA, 11 nt, Human
uccuggcagcc

SEQ ID NO: 2687841 - RNA, 19 nt, Human
uccuggcacuggaccccag

SEQ ID NO: 2687842 - RNA, 18 nt, Human
uccuggcacuggacccca

SEQ ID NO: 2687843 - RNA, 21 nt, Human
uccuggcacuggaccccagca

SEQ ID NO: 2687844 - RNA, 13 nt, Human
uccuggcagccca

SEQ ID NO: 2687845 - RNA, 14 nt, Human
uccuggcagcccag

SEQ ID NO: 2687846 - RNA, 15 nt, Human
uccuggcagcccaga

SEQ ID NO: 2687847 - RNA, 14 nt, Human
uccugccucagccu

SEQ ID NO: 2687848 - RNA, 19 nt, Human
ucuaauauauaugaauaaa

SEQ ID NO: 2687849 - RNA, 15 nt, Human
ucuaauauauaugaa

SEQ ID NO: 2687850 - RNA, 12 nt, Human
ucuaauagucuu

SEQ ID NO: 2687851 - RNA, 22 nt, Human
ucuaacagugaaguuuuacugu

SEQ ID NO: 2687852 - RNA, 21 nt, Human
ucuaaaucuauuuauuaauau

SEQ ID NO: 2687853 - RNA, 20 nt, Human
ucuaaaucuauuuauuaaua

SEQ ID NO: 2687854 - RNA, 19 nt, Human
ucuaaaucuauuuauuaau

SEQ ID NO: 2687855 - RNA, 17 nt, Human
ucuaaaucuauuuauua

SEQ ID NO: 2687856 - RNA, 16 nt, Human
ucuaaaucuauuuauu

SEQ ID NO: 2687857 - RNA, 14 nt, Human
ucuaaaucuauuua

SEQ ID NO: 2687858 - RNA, 21 nt, Human
ucguguguuucuauuuuuuga

SEQ ID NO: 2687859 - RNA, 12 nt, Human
ucguggggaggu

SEQ ID NO: 2687860 - RNA, 15 nt, Human
ucguggggugugcug

SEQ ID NO: 2687861 - RNA, 18 nt, Human
ucguggggugugcuggga

SEQ ID NO: 2687862 - RNA, 12 nt, Human
ucguggcuguca

SEQ ID NO: 2687863 - RNA, 13 nt, Human
ucguggcugucaa

SEQ ID NO: 2687864 - RNA, 12 nt, Human
ucgugccugugu

SEQ ID NO: 2687865 - RNA, 13 nt, Human
ucgugccuguguc

SEQ ID NO: 2687866 - RNA, 14 nt, Human
ucgugccugugucc

SEQ ID NO: 2687867 - RNA, 16 nt, Human
ucgugcuacugcacuc

SEQ ID NO: 2687868 - RNA, 22 nt, Human
ucgugcuacugcacuccagccu

SEQ ID NO: 2687869 - RNA, 15 nt, Human
ucgugccugugucca

SEQ ID NO: 2687870 - RNA, 21 nt, Human
ucgugccuguguccaugcgcu

SEQ ID NO: 2687871 - RNA, 16 nt, Human
ucucaaaggagcgagc

SEQ ID NO: 2687872 - RNA, 17 nt, Human
ucucaaagaccuggggc

SEQ ID NO: 2687873 - RNA, 12 nt, Human
ucuagugaugau

SEQ ID NO: 2687874 - RNA, 17 nt, Human
ucuaugcuuuccaaacc

SEQ ID NO: 2687875 - RNA, 13 nt, Human
ucuaugcuuucca

SEQ ID NO: 2687876 - RNA, 14 nt, Human
ucuagucuuggcca

SEQ ID NO: 2687877 - RNA, 14 nt, Human
ucuagaaacaaaca

SEQ ID NO: 2687878 - RNA, 18 nt, Human
ucuaauuaaccuuacuaa

SEQ ID NO: 2687879 - RNA, 23 nt, Human
ucuaauuaaccuuacuaauuaua

SEQ ID NO: 2687880 - RNA, 18 nt, Human
uccuauauccugugacug

SEQ ID NO: 2687881 - RNA, 14 nt, Human
uccuauauauuucu

SEQ ID NO: 2687882 - RNA, 15 nt, Human
uccuauauauuucua

SEQ ID NO: 2687883 - RNA, 16 nt, Human
uccuauauauuucuau

SEQ ID NO: 2687884 - RNA, 17 nt, Human
uccuauauauuucuauu

SEQ ID NO: 2687885 - RNA, 20 nt, Human
uccuauauauuucuauuauu

SEQ ID NO: 2687886 - RNA, 12 nt, Human
uccuauuagugu

SEQ ID NO: 2687887 - RNA, 19 nt, Human
uccuauuaguguuauauga

SEQ ID NO: 2687888 - RNA, 17 nt, Human
uccuauuaguguuauau

SEQ ID NO: 2687889 - RNA, 14 nt, Human
uccuauuaguguua

SEQ ID NO: 2687890 - RNA, 13 nt, Human
uccuauuaguguu

SEQ ID NO: 2687891 - RNA, 15 nt, Human
uccuauucuauaaaa

SEQ ID NO: 2687892 - RNA, 18 nt, Human
uccuauucuauaaaacuc

SEQ ID NO: 2687893 - RNA, 17 nt, Human
uccucauuagcauuuug

SEQ ID NO: 2687894 - RNA, 19 nt, Human
uccuaauuucuccucccuu

SEQ ID NO: 2687895 - RNA, 15 nt, Human
uccuaauuucuccuc

SEQ ID NO: 2687896 - RNA, 16 nt, Human
uccuaauuucuccucc

SEQ ID NO: 2687897 - RNA, 17 nt, Human
uccuaauggugaugcag

SEQ ID NO: 2687898 - RNA, 14 nt, Human
uccuaauggugaug

SEQ ID NO: 2687899 - RNA, 24 nt, Human
uccuaauggugaugcagucuuaga

SEQ ID NO: 2687900 - RNA, 20 nt, Human
uccuaauggugaugcagucu

SEQ ID NO: 2687901 - RNA, 18 nt, Human
uccucuagaagccaaggg

SEQ ID NO: 2687902 - RNA, 19 nt, Human
uccucuagaagccaaggga

SEQ ID NO: 2687903 - RNA, 15 nt, Human
uccucuggacggcag

SEQ ID NO: 2687904 - RNA, 17 nt, Human
uccucuggacggcaggc

SEQ ID NO: 2687905 - RNA, 22 nt, Human
uccucuagaagccaagggaaag

SEQ ID NO: 2687906 - RNA, 22 nt, Human
uccucuggacggcaggcucacu

SEQ ID NO: 2687907 - RNA, 18 nt, Human
uccucuggacggcaggcu

SEQ ID NO: 2687908 - RNA, 20 nt, Human
uccucuggacggcaggcuca

SEQ ID NO: 2687909 - RNA, 19 nt, Human
uccucauggcagccuacuc

SEQ ID NO: 2687910 - RNA, 22 nt, Human
uccucauggcagccuacucucc

SEQ ID NO: 2687911 - RNA, 16 nt, Human
uccucgguacucccau

SEQ ID NO: 2687912 - RNA, 14 nt, Human
uccucuagaagcca

SEQ ID NO: 2687913 - RNA, 16 nt, Human
uccucuagaagccaag

SEQ ID NO: 2687914 - RNA, 17 nt, Human
uccucuagaagccaagg

SEQ ID NO: 2687915 - RNA, 14 nt, Human
uccucgcagccucu

SEQ ID NO: 2687916 - RNA, 19 nt, Human
uccucgcagccucucagug

SEQ ID NO: 2687917 - RNA, 21 nt, Human
uccucgcagccucucagugcc

SEQ ID NO: 2687918 - RNA, 15 nt, Human
uccucgguacuccca

SEQ ID NO: 2687919 - RNA, 17 nt, Human
uccucgguacucccaua

SEQ ID NO: 2687920 - RNA, 19 nt, Human
ucccguuuuccccaugaca

SEQ ID NO: 2687921 - RNA, 17 nt, Human
ucccguuuuccccauga

SEQ ID NO: 2687922 - RNA, 16 nt, Human
ucccguuuuccccaug

SEQ ID NO: 2687923 - RNA, 18 nt, Human
uccagguuuaagcuguua

SEQ ID NO: 2687924 - RNA, 17 nt, Human
uccagguuuaagcuguu

SEQ ID NO: 2687925 - RNA, 17 nt, Human
ucccgggccccacagac

SEQ ID NO: 2687926 - RNA, 16 nt, Human
ucccuaaucuaugguc

SEQ ID NO: 2687927 - RNA, 23 nt, Human
ucccuaaucuauggucgggagac

SEQ ID NO: 2687928 - RNA, 16 nt, Human
ucccuauuagagaaga

SEQ ID NO: 2687929 - RNA, 16 nt, Human
ucccucuaaugagacu

SEQ ID NO: 2687930 - RNA, 17 nt, Human
ucccucuaaugagacug

SEQ ID NO: 2687931 - RNA, 19 nt, Human
ucccucuaaugagacugac

SEQ ID NO: 2687932 - RNA, 14 nt, Human
ucccuccuccaggc

SEQ ID NO: 2687933 - RNA, 16 nt, Human
ucccuccuccaggccu

SEQ ID NO: 2687934 - RNA, 17 nt, Human
ucccuccuccaggccug

SEQ ID NO: 2687935 - RNA, 21 nt, Human
ucccuccuccaggccugccuc

SEQ ID NO: 2687936 - RNA, 17 nt, Human
ucccuuccuuuucccug

SEQ ID NO: 2687937 - RNA, 18 nt, Human
ucccuuccuuuucccugc

SEQ ID NO: 2687938 - RNA, 19 nt, Human
ucccuuccuuuucccugcu

SEQ ID NO: 2687939 - RNA, 20 nt, Human
ucccuuccuuuucccugcuu

SEQ ID NO: 2687940 - RNA, 15 nt, Human
ucccuugagggcugc

SEQ ID NO: 2687941 - RNA, 17 nt, Human
ucccuugagggcugcag

SEQ ID NO: 2687942 - RNA, 18 nt, Human
ucccuugagggcugcagu

SEQ ID NO: 2687943 - RNA, 19 nt, Human
ucccuugagggcugcaguu

SEQ ID NO: 2687944 - RNA, 19 nt, Human
ucccugcuuuuuguguuuu

SEQ ID NO: 2687945 - RNA, 17 nt, Human
ucccuuccagaugguca

SEQ ID NO: 2687946 - RNA, 21 nt, Human
ucccuuccagauggucaucca

SEQ ID NO: 2687947 - RNA, 22 nt, Human
ucccuuccagauggucauccag

SEQ ID NO: 2687948 - RNA, 14 nt, Human
ucccucuccuaacu

SEQ ID NO: 2687949 - RNA, 12 nt, Human
ucccugccuggc

SEQ ID NO: 2687950 - RNA, 15 nt, Human
ucccugccuggcccc

SEQ ID NO: 2687951 - RNA, 12 nt, Human
ucccugcuucca

SEQ ID NO: 2687952 - RNA, 14 nt, Human
ucccugcuuccagg

SEQ ID NO: 2687953 - RNA, 18 nt, Human
ucccugcuuccaggaaac

SEQ ID NO: 2687954 - RNA, 16 nt, Human
ucccugcgccuuuccu

SEQ ID NO: 2687955 - RNA, 15 nt, Human
ucccugcgccuuucc

SEQ ID NO: 2687956 - RNA, 13 nt, Human
ucucuaggaaguc

SEQ ID NO: 2687957 - RNA, 17 nt, Human
ucucuaagguuuacaau

SEQ ID NO: 2687958 - RNA, 15 nt, Human
ucucuaagugggcau

SEQ ID NO: 2687959 - RNA, 20 nt, Human
ucucuaagugggcauugcca

SEQ ID NO: 2687960 - RNA, 23 nt, Human
ucucuaagugggcauugccaugu

SEQ ID NO: 2687961 - RNA, 11 nt, Human
ucuccuggagg

SEQ ID NO: 2687962 - RNA, 19 nt, Human
ucuccuggccuauccgcug

SEQ ID NO: 2687963 - RNA, 21 nt, Human
ucuccuggccuauccgcugcc

SEQ ID NO: 2687964 - RNA, 23 nt, Human
ucuccuggccuauccgcugccag

SEQ ID NO: 2687965 - RNA, 13 nt, Human
ucucaaugaaaaa

SEQ ID NO: 2687966 - RNA, 14 nt, Human
ucucaaguaauaua

SEQ ID NO: 2687967 - RNA, 22 nt, Human
ucucaauccuaauuucuccucc

SEQ ID NO: 2687968 - RNA, 19 nt, Human
ucucaaugaaccauaaauu

SEQ ID NO: 2687969 - RNA, 21 nt, Human
ucucaaugaaccauaaauuca

SEQ ID NO: 2687970 - RNA, 23 nt, Human
ucucaauccuaauuucuccuccc

SEQ ID NO: 2687971 - RNA, 12 nt, Human
ucucaaugaaaa

SEQ ID NO: 2687972 - RNA, 14 nt, Human
ucucaaugaaaaau

SEQ ID NO: 2687973 - RNA, 16 nt, Human
ucucuguacuuuucau

SEQ ID NO: 2687974 - RNA, 21 nt, Human
ucucuguacuuuucauucucu

SEQ ID NO: 2687975 - RNA, 19 nt, Human
ucucugucacccuuguccu

SEQ ID NO: 2687976 - RNA, 12 nt, Human
ucucugugccuu

SEQ ID NO: 2687977 - RNA, 17 nt, Human
ucucugugccuucgucu

SEQ ID NO: 2687978 - RNA, 13 nt, Human
ucucugugagaag

SEQ ID NO: 2687979 - RNA, 15 nt, Human
ucucugugagaaggu

SEQ ID NO: 2687980 - RNA, 19 nt, Human
ucucugugagaagguuuau

SEQ ID NO: 2687981 - RNA, 18 nt, Human
ucucuguggcuccaggcc

SEQ ID NO: 2687982 - RNA, 14 nt, Human
ucucucucuaaggu

SEQ ID NO: 2687983 - RNA, 15 nt, Human
ucucugaaugcccca

SEQ ID NO: 2687984 - RNA, 15 nt, Human
ucugcauuuaaaaaa

SEQ ID NO: 2687985 - RNA, 16 nt, Human
ucugcauucauuuuua

SEQ ID NO: 2687986 - RNA, 21 nt, Human
ucugcauucauuuuuauagca

SEQ ID NO: 2687987 - RNA, 17 nt, Human
ucugccacccugcugag

SEQ ID NO: 2687988 - RNA, 14 nt, Human
ucugcaacaagcau

SEQ ID NO: 2687989 - RNA, 16 nt, Human
ucugcaacaagcaugc

SEQ ID NO: 2687990 - RNA, 17 nt, Human
ucugcaacaagcaugca

SEQ ID NO: 2687991 - RNA, 22 nt, Human
ucugaggccguugcugacuuag

SEQ ID NO: 2687992 - RNA, 21 nt, Human
ucugaggccguugcugacuua

SEQ ID NO: 2687993 - RNA, 17 nt, Human
ucugaggccguugcuga

SEQ ID NO: 2687994 - RNA, 21 nt, Human
ucugcaagaauugaagcagga

SEQ ID NO: 2687995 - RNA, 20 nt, Human
ucugcaagaauugaagcagg

SEQ ID NO: 2687996 - RNA, 12 nt, Human
ucucuuuuuguu

SEQ ID NO: 2687997 - RNA, 14 nt, Human
ucucuuuuuguuug

SEQ ID NO: 2687998 - RNA, 15 nt, Human
ucugaaaagugugua

SEQ ID NO: 2687999 - RNA, 23 nt, Human
ucugaaaaguguguauauauuuu

SEQ ID NO: 2688000 - RNA, 19 nt, Human
ucuguuuuuaaugcuauuu

SEQ ID NO: 2688001 - RNA, 18 nt, Human
ucuuaaaguauucuucuc

SEQ ID NO: 2688002 - RNA, 22 nt, Human
ucuuaaaguauucuucucuucc

SEQ ID NO: 2688003 - RNA, 16 nt, Human
ucugucugguggcccc

SEQ ID NO: 2688004 - RNA, 17 nt, Human
ucugucugguggccccg

SEQ ID NO: 2688005 - RNA, 13 nt, Human
ucugucugguggc

SEQ ID NO: 2688006 - RNA, 12 nt, Human
ucugucuggcac

SEQ ID NO: 2688007 - RNA, 14 nt, Human
ucuuaagaaaugua

SEQ ID NO: 2688008 - RNA, 17 nt, Human
ucuucucauuacuuguu

SEQ ID NO: 2688009 - RNA, 15 nt, Human
ucuucucauuacuug

SEQ ID NO: 2688010 - RNA, 21 nt, Human
ucuuccuugaagaacugcagg

SEQ ID NO: 2688011 - RNA, 13 nt, Human
ucuucagaugcca

SEQ ID NO: 2688012 - RNA, 14 nt, Human
ucuucagaugccac

SEQ ID NO: 2688013 - RNA, 16 nt, Human
ucuucaucccauucca

SEQ ID NO: 2688014 - RNA, 17 nt, Human
ucuucaucccauuccag

SEQ ID NO: 2688015 - RNA, 23 nt, Human
ucuucauaucaucacaacauuau

SEQ ID NO: 2688016 - RNA, 13 nt, Human
ucuuccugugauc

SEQ ID NO: 2688017 - RNA, 20 nt, Human
ucugggaccugccaggcagg

SEQ ID NO: 2688018 - RNA, 21 nt, Human
ucugggaccugccaggcaggg

SEQ ID NO: 2688019 - RNA, 22 nt, Human
ucugggaccugccaggcagggg

SEQ ID NO: 2688020 - RNA, 12 nt, Human
ucugguuccagg

SEQ ID NO: 2688021 - RNA, 13 nt, Human
ucugguuccaggg

SEQ ID NO: 2688022 - RNA, 14 nt, Human
ucugguuccagggu

SEQ ID NO: 2688023 - RNA, 21 nt, Human
ucugguuccagggucccucug

SEQ ID NO: 2688024 - RNA, 23 nt, Human
ucugguuccagggucccucugug

SEQ ID NO: 2688025 - RNA, 13 nt, Human
ucugguuaaaaaa

SEQ ID NO: 2688026 - RNA, 16 nt, Human
ucugguggucuguugg

SEQ ID NO: 2688027 - RNA, 12 nt, Human
ucugguggcccc

SEQ ID NO: 2688028 - RNA, 14 nt, Human
ucugguggccccgu

SEQ ID NO: 2688029 - RNA, 21 nt, Human
ucugggacuugguuuccccaa

SEQ ID NO: 2688030 - RNA, 19 nt, Human
ucuggaaucuggagaccag

SEQ ID NO: 2688031 - RNA, 20 nt, Human
ucuggaauaugcaacauugu

SEQ ID NO: 2688032 - RNA, 23 nt, Human
ucugccagauguccuaaugguga

SEQ ID NO: 2688033 - RNA, 22 nt, Human
ucugccagauguccuaauggug

SEQ ID NO: 2688034 - RNA, 16 nt, Human
ucugcuccccagggga

SEQ ID NO: 2688035 - RNA, 21 nt, Human
uguaaugaaaaugaauaucua

SEQ ID NO: 2688036 - RNA, 17 nt, Human
uguacacauauuugaag

SEQ ID NO: 2688037 - RNA, 14 nt, Human
uguaauaauagacu

SEQ ID NO: 2688038 - RNA, 22 nt, Human
uguacagaacacauuucucuga

SEQ ID NO: 2688039 - RNA, 18 nt, Human
uguaaugaaaaugaauau

SEQ ID NO: 2688040 - RNA, 15 nt, Human
uguaaugaaaaugaa

SEQ ID NO: 2688041 - RNA, 13 nt, Human
uguaauaagcaau

SEQ ID NO: 2688042 - RNA, 22 nt, Human
uguaaacucaucugaaauguua

SEQ ID NO: 2688043 - RNA, 16 nt, Human
uguaacacuccucugc

SEQ ID NO: 2688044 - RNA, 20 nt, Human
uguaaauuuuguaugaaaaa

SEQ ID NO: 2688045 - RNA, 21 nt, Human
uguaaaauauuuugaaucaau

SEQ ID NO: 2688046 - RNA, 14 nt, Human
uguaaaacaaaauu

SEQ ID NO: 2688047 - RNA, 12 nt, Human
uguaaaaaucuu

SEQ ID NO: 2688048 - RNA, 16 nt, Human
uguaaaaaucuuuuga

SEQ ID NO: 2688049 - RNA, 23 nt, Human
uguaaaaaucuuuugaagcauag

SEQ ID NO: 2688050 - RNA, 12 nt, Human
uguaaaagaaau

SEQ ID NO: 2688051 - RNA, 13 nt, Human
uguaaaagaaauc

SEQ ID NO: 2688052 - RNA, 19 nt, Human
uguaaaauauuuugaauca

SEQ ID NO: 2688053 - RNA, 20 nt, Human
uguaaaauauuuugaaucaa

SEQ ID NO: 2688054 - RNA, 14 nt, Human
uguaaaaaaaccac

SEQ ID NO: 2688055 - RNA, 23 nt, Human
uguaaaaaaaccaccaaaaacaa

SEQ ID NO: 2688056 - RNA, 23 nt, Human
ugguuuuuaaaaaacugcugacu

SEQ ID NO: 2688057 - RNA, 16 nt, Human
ugguuuugugccaucu

SEQ ID NO: 2688058 - RNA, 18 nt, Human
ugguuuugugccaucugu

SEQ ID NO: 2688059 - RNA, 22 nt, Human
ugguuuugugccaucuguagcu

SEQ ID NO: 2688060 - RNA, 21 nt, Human
ugguuuuuaaaaaacugcuga

SEQ ID NO: 2688061 - RNA, 20 nt, Human
ugguuguguguccccuugca

SEQ ID NO: 2688062 - RNA, 11 nt, Human
ugguugcaugg

SEQ ID NO: 2688063 - RNA, 18 nt, Human
ugguuggcugggaaaucg

SEQ ID NO: 2688064 - RNA, 16 nt, Human
ugguugggaaugagga

SEQ ID NO: 2688065 - RNA, 23 nt, Human
ugguugggaaugaggaaaauucu

SEQ ID NO: 2688066 - RNA, 12 nt, Human
ugguucucaaug

SEQ ID NO: 2688067 - RNA, 11 nt, Human
ugguucucaau

SEQ ID NO: 2688068 - RNA, 12 nt, Human
ugguuccucugc

SEQ ID NO: 2688069 - RNA, 13 nt, Human
ugguuccucugcu

SEQ ID NO: 2688070 - RNA, 13 nt, Human
ugguucugugaac

SEQ ID NO: 2688071 - RNA, 17 nt, Human
ugguucuggcuguuuga

SEQ ID NO: 2688072 - RNA, 12 nt, Human
ugguucuggcca

SEQ ID NO: 2688073 - RNA, 16 nt, Human
ugguucucaaugaaaa

SEQ ID NO: 2688074 - RNA, 14 nt, Human
ugguucucaaugaa

SEQ ID NO: 2688075 - RNA, 15 nt, Human
ugguucucaaugaaa

SEQ ID NO: 2688076 - RNA, 12 nt, Human
ugguugaauaug

SEQ ID NO: 2688077 - RNA, 12 nt, Human
ugguuccagggu

SEQ ID NO: 2688078 - RNA, 21 nt, Human
ugguuccagggucccucugug

SEQ ID NO: 2688079 - RNA, 22 nt, Human
ugguuccagggucccucugugu

SEQ ID NO: 2688080 - RNA, 15 nt, Human
ugguguaauuugaag

SEQ ID NO: 2688081 - RNA, 17 nt, Human
ugguguaauuugaagau

SEQ ID NO: 2688082 - RNA, 18 nt, Human
ugguguagcccucccacu

SEQ ID NO: 2688083 - RNA, 21 nt, Human
ugguguagcccucccacuuug

SEQ ID NO: 2688084 - RNA, 14 nt, Human
uggugauuugaaaa

SEQ ID NO: 2688085 - RNA, 19 nt, Human
uggugauuugaaaaauaua

SEQ ID NO: 2688086 - RNA, 20 nt, Human
uggugauuugaaaaauauaa

SEQ ID NO: 2688087 - RNA, 21 nt, Human
uggugauuugaaaaauauaaa

SEQ ID NO: 2688088 - RNA, 22 nt, Human
uggugauuugaaaaauauaaaa

SEQ ID NO: 2688089 - RNA, 18 nt, Human
uggugggggccucggugu

SEQ ID NO: 2688090 - RNA, 16 nt, Human
uggugggggccucggu

SEQ ID NO: 2688091 - RNA, 15 nt, Human
ugguggucuguuggc

SEQ ID NO: 2688092 - RNA, 14 nt, Human
uggugguagagaag

SEQ ID NO: 2688093 - RNA, 22 nt, Human
uguccugccugcaauauuugaa

SEQ ID NO: 2688094 - RNA, 14 nt, Human
uguccucagccagu

SEQ ID NO: 2688095 - RNA, 16 nt, Human
uguccccgcagcccug

SEQ ID NO: 2688096 - RNA, 18 nt, Human
uguccccgcugcugugca

SEQ ID NO: 2688097 - RNA, 17 nt, Human
uguccuauuaguguuau

SEQ ID NO: 2688098 - RNA, 16 nt, Human
uguccuauuaguguua

SEQ ID NO: 2688099 - RNA, 13 nt, Human
ugucugauuucuu

SEQ ID NO: 2688100 - RNA, 14 nt, Human
ugucugucuggcac

SEQ ID NO: 2688101 - RNA, 14 nt, Human
ugucugugaacaga

SEQ ID NO: 2688102 - RNA, 19 nt, Human
ugucugugaacagagagac

SEQ ID NO: 2688103 - RNA, 15 nt, Human
ugucuuuuaaaaugc

SEQ ID NO: 2688104 - RNA, 16 nt, Human
ugucuuuuaaaaugca

SEQ ID NO: 2688105 - RNA, 20 nt, Human
ugucuuuuaaaaugcaaugu

SEQ ID NO: 2688106 - RNA, 15 nt, Human
ugucuauaaaagaaa

SEQ ID NO: 2688107 - RNA, 16 nt, Human
ugucuauaaaagaaac

SEQ ID NO: 2688108 - RNA, 19 nt, Human
ugucuaggauuuuggaugu

SEQ ID NO: 2688109 - RNA, 17 nt, Human
ugucucacuaaagcaug

SEQ ID NO: 2688110 - RNA, 20 nt, Human
ugucucacuaaagcaugaaa

SEQ ID NO: 2688111 - RNA, 23 nt, Human
ugucucacuaaagcaugaaaugu

SEQ ID NO: 2688112 - RNA, 21 nt, Human
ugucucaaaaaaagaaaaaga

SEQ ID NO: 2688113 - RNA, 13 nt, Human
uguauaaaauaca

SEQ ID NO: 2688114 - RNA, 14 nt, Human
uguauaaaauacau

SEQ ID NO: 2688115 - RNA, 16 nt, Human
uguauaaaauacauag

SEQ ID NO: 2688116 - RNA, 19 nt, Human
uguauaaaauacauaguga

SEQ ID NO: 2688117 - RNA, 22 nt, Human
uguauaaaauacauagugaaaa

SEQ ID NO: 2688118 - RNA, 14 nt, Human
uguacagauucuuu

SEQ ID NO: 2688119 - RNA, 18 nt, Human
uguacagauucuuucagu

SEQ ID NO: 2688120 - RNA, 19 nt, Human
uguacagauucuuucaguu

SEQ ID NO: 2688121 - RNA, 17 nt, Human
uguaugacugcacauga

SEQ ID NO: 2688122 - RNA, 16 nt, Human
uguaugaguagccagg

SEQ ID NO: 2688123 - RNA, 17 nt, Human
uguaugaguagccaggg

SEQ ID NO: 2688124 - RNA, 16 nt, Human
uguaugacugcacaug

SEQ ID NO: 2688125 - RNA, 19 nt, Human
uguaugaaaacauggaaca

SEQ ID NO: 2688126 - RNA, 13 nt, Human
uguaugaaaacau

SEQ ID NO: 2688127 - RNA, 18 nt, Human
uguaugaaaaauugggga

SEQ ID NO: 2688128 - RNA, 20 nt, Human
uguaugaaaaauuggggagg

SEQ ID NO: 2688129 - RNA, 21 nt, Human
uguaugaaaaauuggggagga

SEQ ID NO: 2688130 - RNA, 13 nt, Human
uguauagcaugaa

SEQ ID NO: 2688131 - RNA, 19 nt, Human
uguauagcaugaaauaaaa

SEQ ID NO: 2688132 - RNA, 12 nt, Human
uguauaaauaua

SEQ ID NO: 2688133 - RNA, 13 nt, Human
uguauaaauauac

SEQ ID NO: 2688134 - RNA, 14 nt, Human
uguauaaauauaca

SEQ ID NO: 2688135 - RNA, 19 nt, Human
uguauaaauauacaguaua

SEQ ID NO: 2688136 - RNA, 14 nt, Human
uguauguagaagca

SEQ ID NO: 2688137 - RNA, 15 nt, Human
uguauguagaagcau

SEQ ID NO: 2688138 - RNA, 15 nt, Human
ugucaauuucugugu

SEQ ID NO: 2688139 - RNA, 16 nt, Human
ugucaauuucuguguu

SEQ ID NO: 2688140 - RNA, 17 nt, Human
uguauggggaaucuaag

SEQ ID NO: 2688141 - RNA, 20 nt, Human
uguaugccaagugagaagau

SEQ ID NO: 2688142 - RNA, 18 nt, Human
uguaugccaagugagaag

SEQ ID NO: 2688143 - RNA, 16 nt, Human
uguaugccaagugaga

SEQ ID NO: 2688144 - RNA, 19 nt, Human
uggauauauaggcuauuuu

SEQ ID NO: 2688145 - RNA, 14 nt, Human
uggagauccuccug

SEQ ID NO: 2688146 - RNA, 16 nt, Human
uggagauccuccugca

SEQ ID NO: 2688147 - RNA, 18 nt, Human
uggagauccuccugcaga

SEQ ID NO: 2688148 - RNA, 20 nt, Human
uggagauccuccugcagacc

SEQ ID NO: 2688149 - RNA, 21 nt, Human
uggagauccuccugcagacca

SEQ ID NO: 2688150 - RNA, 13 nt, Human
uggcaaggacuuu

SEQ ID NO: 2688151 - RNA, 19 nt, Human
uggcaaggacuuuguacau

SEQ ID NO: 2688152 - RNA, 20 nt, Human
uggcaaggacuuuguacauu

SEQ ID NO: 2688153 - RNA, 21 nt, Human
uggcaaggacuuuguacauuu

SEQ ID NO: 2688154 - RNA, 16 nt, Human
uggcaacauucauugc

SEQ ID NO: 2688155 - RNA, 18 nt, Human
uggcacuggaugcagaaa

SEQ ID NO: 2688156 - RNA, 15 nt, Human
uggcacuggaugcag

SEQ ID NO: 2688157 - RNA, 13 nt, Human
uggcacuggaugc

SEQ ID NO: 2688158 - RNA, 18 nt, Human
uggcacuggaccccagca

SEQ ID NO: 2688159 - RNA, 16 nt, Human
uggcacuggaccccag

SEQ ID NO: 2688160 - RNA, 19 nt, Human
uggcacugacugggcauag

SEQ ID NO: 2688161 - RNA, 14 nt, Human
uggcacucgcugua

SEQ ID NO: 2688162 - RNA, 16 nt, Human
uggaagaacaggccuc

SEQ ID NO: 2688163 - RNA, 18 nt, Human
uggaagaacaggccucuc

SEQ ID NO: 2688164 - RNA, 12 nt, Human
uggaagaaggga

SEQ ID NO: 2688165 - RNA, 21 nt, Human
uggaagaagggagaagaaagg

SEQ ID NO: 2688166 - RNA, 13 nt, Human
uggaagaagggag

SEQ ID NO: 2688167 - RNA, 15 nt, Human
uggaagaagggagaa

SEQ ID NO: 2688168 - RNA, 17 nt, Human
uggaagaagggagaaga

SEQ ID NO: 2688169 - RNA, 19 nt, Human
uggaagaagggagaagaaa

SEQ ID NO: 2688170 - RNA, 22 nt, Human
uggacggcaggcucacugccag

SEQ ID NO: 2688171 - RNA, 23 nt, Human
uggacggcaggcucacugccagg

SEQ ID NO: 2688172 - RNA, 21 nt, Human
uggacggcaggcucacugcca

SEQ ID NO: 2688173 - RNA, 13 nt, Human
uggacuguggcac

SEQ ID NO: 2688174 - RNA, 12 nt, Human
uggacuguggca

SEQ ID NO: 2688175 - RNA, 18 nt, Human
uggacuguggcacuugcc

SEQ ID NO: 2688176 - RNA, 20 nt, Human
uggacuguggcacuugccug

SEQ ID NO: 2688177 - RNA, 22 nt, Human
uggacuguggcacuugccuggg

SEQ ID NO: 2688178 - RNA, 19 nt, Human
uggagaccagggagccuuu

SEQ ID NO: 2688179 - RNA, 18 nt, Human
uggagaccagggagccuu

SEQ ID NO: 2688180 - RNA, 21 nt, Human
uggacuguggcacuugccugg

SEQ ID NO: 2688181 - RNA, 12 nt, Human
ugcuucucugac

SEQ ID NO: 2688182 - RNA, 13 nt, Human
ugcuucucugacu

SEQ ID NO: 2688183 - RNA, 23 nt, Human
ugcuuccucccaacaagcagcug

SEQ ID NO: 2688184 - RNA, 15 nt, Human
ugcuucccuuacuuu

SEQ ID NO: 2688185 - RNA, 15 nt, Human
ugcuuccucccaaca

SEQ ID NO: 2688186 - RNA, 12 nt, Human
ugcuuccuccug

SEQ ID NO: 2688187 - RNA, 13 nt, Human
ugcuuccuccugg

SEQ ID NO: 2688188 - RNA, 12 nt, Human
ugcuucucacug

SEQ ID NO: 2688189 - RNA, 22 nt, Human
ugcuucucagauuucugaggaa

SEQ ID NO: 2688190 - RNA, 21 nt, Human
ugcuucucagauuucugagga

SEQ ID NO: 2688191 - RNA, 14 nt, Human
ugcuuccuccugga

SEQ ID NO: 2688192 - RNA, 15 nt, Human
ugcuuccuccuggaa

SEQ ID NO: 2688193 - RNA, 15 nt, Human
ugcuucccuaaucua

SEQ ID NO: 2688194 - RNA, 15 nt, Human
ugcuuaauaaauugu

SEQ ID NO: 2688195 - RNA, 14 nt, Human
ugcuuaaucuucaa

SEQ ID NO: 2688196 - RNA, 15 nt, Human
ugcuuaaucuucaaa

SEQ ID NO: 2688197 - RNA, 16 nt, Human
ugcuuaaucuucaaag

SEQ ID NO: 2688198 - RNA, 20 nt, Human
ugcuuaaucuucaaagccuu

SEQ ID NO: 2688199 - RNA, 21 nt, Human
ugcuuaaucuucaaagccuuc

SEQ ID NO: 2688200 - RNA, 13 nt, Human
ugcuuaaauuucu

SEQ ID NO: 2688201 - RNA, 15 nt, Human
ugcuuaaauuucuua

SEQ ID NO: 2688202 - RNA, 16 nt, Human
ugcuuaaauuucuuau

SEQ ID NO: 2688203 - RNA, 22 nt, Human
ugcuuaaauuucuuaugugaca

SEQ ID NO: 2688204 - RNA, 14 nt, Human
ugcuuaaaccacuu

SEQ ID NO: 2688205 - RNA, 21 nt, Human
ugcuuaaaccacuuaaacgaa

SEQ ID NO: 2688206 - RNA, 22 nt, Human
ugcuugucuucugguacuuucu

SEQ ID NO: 2688207 - RNA, 16 nt, Human
ugcuugugaaaaugug

SEQ ID NO: 2688208 - RNA, 20 nt, Human
ugcuugugaaaauguguucu

SEQ ID NO: 2688209 - RNA, 22 nt, Human
ugcuuucuccuuuaauuguaaa

SEQ ID NO: 2688210 - RNA, 15 nt, Human
ugcuuucuccuuuaa

SEQ ID NO: 2688211 - RNA, 20 nt, Human
ugcuuucuccuuuaauugua

SEQ ID NO: 2688212 - RNA, 12 nt, Human
uggcuuguucau

SEQ ID NO: 2688213 - RNA, 21 nt, Human
uggcuuguucaucauccagau

SEQ ID NO: 2688214 - RNA, 22 nt, Human
uggcuuguucaucauccagaug

SEQ ID NO: 2688215 - RNA, 15 nt, Human
uggcuuuaagccuuc

SEQ ID NO: 2688216 - RNA, 23 nt, Human
uggcuuuaagccuucaaaacuau

SEQ ID NO: 2688217 - RNA, 14 nt, Human
uggcuccaggccaa

SEQ ID NO: 2688218 - RNA, 15 nt, Human
uggcuccaggccaaa

SEQ ID NO: 2688219 - RNA, 14 nt, Human
uggcuccggccucu

SEQ ID NO: 2688220 - RNA, 15 nt, Human
uggcuccggccucug

SEQ ID NO: 2688221 - RNA, 18 nt, Human
uggcuccggccucugccu

SEQ ID NO: 2688222 - RNA, 19 nt, Human
uggcuccggccucugccuu

SEQ ID NO: 2688223 - RNA, 15 nt, Human
uggcucccuccucca

SEQ ID NO: 2688224 - RNA, 17 nt, Human
uggcucccuccuccagg

SEQ ID NO: 2688225 - RNA, 19 nt, Human
uggcucccuccuccaggcc

SEQ ID NO: 2688226 - RNA, 20 nt, Human
uggcucccuccuccaggccu

SEQ ID NO: 2688227 - RNA, 21 nt, Human
uggcucccuccuccaggccug

SEQ ID NO: 2688228 - RNA, 13 nt, Human
uggccccagcaca

SEQ ID NO: 2688229 - RNA, 14 nt, Human
uggccccagcacag

SEQ ID NO: 2688230 - RNA, 17 nt, Human
uggccccagcacagcuu

SEQ ID NO: 2688231 - RNA, 18 nt, Human
uggccccagcacagcuug

SEQ ID NO: 2688232 - RNA, 19 nt, Human
uggccccagcacagcuuga

SEQ ID NO: 2688233 - RNA, 13 nt, Human
uggccccagcccu

SEQ ID NO: 2688234 - RNA, 16 nt, Human
uggccccagcccugcu

SEQ ID NO: 2688235 - RNA, 18 nt, Human
uggccccagcccugcugg

SEQ ID NO: 2688236 - RNA, 19 nt, Human
uggccccagcccugcuggg

SEQ ID NO: 2688237 - RNA, 20 nt, Human
uggccccagcccugcugggg

SEQ ID NO: 2688238 - RNA, 21 nt, Human
uggccccagcccugcugggga

SEQ ID NO: 2688239 - RNA, 13 nt, Human
uggccucucuagc

SEQ ID NO: 2688240 - RNA, 16 nt, Human
ugggaggaucucuuga

SEQ ID NO: 2688241 - RNA, 15 nt, Human
ugggaggagggagag

SEQ ID NO: 2688242 - RNA, 18 nt, Human
ugggaggagggagaggga

SEQ ID NO: 2688243 - RNA, 19 nt, Human
ugggaggagggagagggag

SEQ ID NO: 2688244 - RNA, 13 nt, Human
uggcuugucuaua

SEQ ID NO: 2688245 - RNA, 20 nt, Human
ugggaguuuuuaugagaaac

SEQ ID NO: 2688246 - RNA, 16 nt, Human
ugggaugaaacuaaag

SEQ ID NO: 2688247 - RNA, 14 nt, Human
ugggaugaaugcca

SEQ ID NO: 2688248 - RNA, 13 nt, Human
ugggaugaccagg

SEQ ID NO: 2688249 - RNA, 20 nt, Human
ugggauauaagaggcagcgu

SEQ ID NO: 2688250 - RNA, 18 nt, Human
ugggauauugaauguuaa

SEQ ID NO: 2688251 - RNA, 19 nt, Human
ugggcagcugucccuugcu

SEQ ID NO: 2688252 - RNA, 14 nt, Human
ugggccgcugccac

SEQ ID NO: 2688253 - RNA, 20 nt, Human
ugggccguaucuccggcucc

SEQ ID NO: 2688254 - RNA, 21 nt, Human
ugggccguaucuccggcuccc

SEQ ID NO: 2688255 - RNA, 13 nt, Human
ugggccgcugcca

SEQ ID NO: 2688256 - RNA, 14 nt, Human
ugggcccugggcug

SEQ ID NO: 2688257 - RNA, 16 nt, Human
ugggcccugggcugga

SEQ ID NO: 2688258 - RNA, 17 nt, Human
ugggcccugggcuggaa

SEQ ID NO: 2688259 - RNA, 21 nt, Human
ugggcuugucuguagauuuua

SEQ ID NO: 2688260 - RNA, 17 nt, Human
ugggcuugucuguagau

SEQ ID NO: 2688261 - RNA, 15 nt, Human
ugggccucggccccu

SEQ ID NO: 2688262 - RNA, 19 nt, Human
ugggccucggccccuccca

SEQ ID NO: 2688263 - RNA, 20 nt, Human
uggggccaccaaagcugccc

SEQ ID NO: 2688264 - RNA, 21 nt, Human
uggggccaccaaagcugccca

SEQ ID NO: 2688265 - RNA, 19 nt, Human
ugggccgggacccagggcc

SEQ ID NO: 2688266 - RNA, 15 nt, Human
uggggggcauugagu

SEQ ID NO: 2688267 - RNA, 19 nt, Human
uggggggcugaggugggag

SEQ ID NO: 2688268 - RNA, 17 nt, Human
uggggggacccagugca

SEQ ID NO: 2688269 - RNA, 19 nt, Human
uggggggacccagugcaga

SEQ ID NO: 2688270 - RNA, 13 nt, Human
uggggugugcugg

SEQ ID NO: 2688271 - RNA, 15 nt, Human
uggggugugcuggga

SEQ ID NO: 2688272 - RNA, 15 nt, Human
ugacccugaugaaaa

SEQ ID NO: 2688273 - RNA, 11 nt, Human
ugacccuccaa

SEQ ID NO: 2688274 - RNA, 13 nt, Human
ugacccuccaaau

SEQ ID NO: 2688275 - RNA, 14 nt, Human
ugacccuccaaaug

SEQ ID NO: 2688276 - RNA, 13 nt, Human
ugaccuacucuca

SEQ ID NO: 2688277 - RNA, 16 nt, Human
ucuugaauccuuccau

SEQ ID NO: 2688278 - RNA, 11 nt, Human
ugacucugggu

SEQ ID NO: 2688279 - RNA, 15 nt, Human
ugacucuggguccuu

SEQ ID NO: 2688280 - RNA, 13 nt, Human
ugacucugggucc

SEQ ID NO: 2688281 - RNA, 20 nt, Human
ugacucuggguccuuccuga

SEQ ID NO: 2688282 - RNA, 19 nt, Human
ugacucuggguccuuccug

SEQ ID NO: 2688283 - RNA, 18 nt, Human
ugacucuggguccuuccu

SEQ ID NO: 2688284 - RNA, 17 nt, Human
ugacucuggguccuucc

SEQ ID NO: 2688285 - RNA, 22 nt, Human
ugacgugaccggacuuuucugc

SEQ ID NO: 2688286 - RNA, 24 nt, Human
ugacgugaccggacuuuucugcaa

SEQ ID NO: 2688287 - RNA, 23 nt, Human
ugacguacaaguaguucuguauu

SEQ ID NO: 2688288 - RNA, 22 nt, Human
ugacguacaaguaguucuguau

SEQ ID NO: 2688289 - RNA, 17 nt, Human
ugacgugaccggacuuu

SEQ ID NO: 2688290 - RNA, 21 nt, Human
ugacguacaaguaguucugua

SEQ ID NO: 2688291 - RNA, 19 nt, Human
ugacguacaaguaguucug

SEQ ID NO: 2688292 - RNA, 18 nt, Human
ugacguacaaguaguucu

SEQ ID NO: 2688293 - RNA, 21 nt, Human
ugacucuggguccuuccugaa

SEQ ID NO: 2688294 - RNA, 19 nt, Human
ugacugaggcaguuugagg

SEQ ID NO: 2688295 - RNA, 18 nt, Human
ugacugaggcaguuugag

SEQ ID NO: 2688296 - RNA, 13 nt, Human
ugacugaggcagu

SEQ ID NO: 2688297 - RNA, 16 nt, Human
ugaccucucucucugg

SEQ ID NO: 2688298 - RNA, 20 nt, Human
ugaccucucucucugggacu

SEQ ID NO: 2688299 - RNA, 14 nt, Human
ugacgaugauguac

SEQ ID NO: 2688300 - RNA, 21 nt, Human
ugacgaugauguacagauucu

SEQ ID NO: 2688301 - RNA, 14 nt, Human
ugagaaaugaaaua

SEQ ID NO: 2688302 - RNA, 18 nt, Human
ugagaaaugaaauauugu

SEQ ID NO: 2688303 - RNA, 15 nt, Human
ugacuggugcugcag

SEQ ID NO: 2688304 - RNA, 15 nt, Human
ugagacagucuugcu

SEQ ID NO: 2688305 - RNA, 12 nt, Human
ugagacccuguc

SEQ ID NO: 2688306 - RNA, 20 nt, Human
ugagaucgugcuacugcacu

SEQ ID NO: 2688307 - RNA, 21 nt, Human
ugagaucgugcuacugcacuc

SEQ ID NO: 2688308 - RNA, 23 nt, Human
ugagaucgugcuacugcacucca

SEQ ID NO: 2688309 - RNA, 16 nt, Human
ugagaggcaggcauag

SEQ ID NO: 2688310 - RNA, 12 nt, Human
ugagaggcaggc

SEQ ID NO: 2688311 - RNA, 20 nt, Human
ugagaggcaaugauuguuaa

SEQ ID NO: 2688312 - RNA, 13 nt, Human
ugagaggcaggca

SEQ ID NO: 2688313 - RNA, 14 nt, Human
ugagaggcaggcau

SEQ ID NO: 2688314 - RNA, 23 nt, Human
ugagaccgugaagauacuuugua

SEQ ID NO: 2688315 - RNA, 20 nt, Human
ugagaccgugaagauacuuu

SEQ ID NO: 2688316 - RNA, 21 nt, Human
ugagcucccacuucugccaga

SEQ ID NO: 2688317 - RNA, 20 nt, Human
ugagcucccacuucugccag

SEQ ID NO: 2688318 - RNA, 19 nt, Human
ugagcucccacuucugcca

SEQ ID NO: 2688319 - RNA, 21 nt, Human
ugagcucuuccuaucccucuc

SEQ ID NO: 2688320 - RNA, 12 nt, Human
ugagcucugaaa

SEQ ID NO: 2688321 - RNA, 15 nt, Human
ugagcucugaaaucu

SEQ ID NO: 2688322 - RNA, 16 nt, Human
ugagcucugaaaucuu

SEQ ID NO: 2688323 - RNA, 17 nt, Human
ugagcucugaaaucuuc

SEQ ID NO: 2688324 - RNA, 23 nt, Human
ugagcccuacucccugcagaugc

SEQ ID NO: 2688325 - RNA, 19 nt, Human
ugagcccuacucccugcag

SEQ ID NO: 2688326 - RNA, 20 nt, Human
ugagcccuacucccugcaga

SEQ ID NO: 2688327 - RNA, 15 nt, Human
ugagccgggccccug

SEQ ID NO: 2688328 - RNA, 16 nt, Human
ugagccgggccccugg

SEQ ID NO: 2688329 - RNA, 17 nt, Human
ugagccgggccccuggg

SEQ ID NO: 2688330 - RNA, 20 nt, Human
ugagccgggccccugggcuu

SEQ ID NO: 2688331 - RNA, 19 nt, Human
ugagccgggccccugggcu

SEQ ID NO: 2688332 - RNA, 21 nt, Human
ugaggcuguggucacagcgga

SEQ ID NO: 2688333 - RNA, 13 nt, Human
ugaggcuuagaga

SEQ ID NO: 2688334 - RNA, 11 nt, Human
ugaggcugugg

SEQ ID NO: 2688335 - RNA, 13 nt, Human
ugagggaaauguu

SEQ ID NO: 2688336 - RNA, 16 nt, Human
ugagggaaauguuuug

SEQ ID NO: 2688337 - RNA, 14 nt, Human
ugagguuccucugc

SEQ ID NO: 2688338 - RNA, 15 nt, Human
ugagguuccucugcc

SEQ ID NO: 2688339 - RNA, 16 nt, Human
ugagguuccucugccu

SEQ ID NO: 2688340 - RNA, 17 nt, Human
ugagguuccucugccug

SEQ ID NO: 2688341 - RNA, 18 nt, Human
ugagguuccucugccugc

SEQ ID NO: 2688342 - RNA, 19 nt, Human
ugagguuccucugccugcc

SEQ ID NO: 2688343 - RNA, 20 nt, Human
ugagguuccucugccugccc

SEQ ID NO: 2688344 - RNA, 21 nt, Human
ugagguuccucugccugcccc

SEQ ID NO: 2688345 - RNA, 19 nt, Human
ugagguuucaaaccucccu

SEQ ID NO: 2688346 - RNA, 18 nt, Human
ugaguccuugauuucaaa

SEQ ID NO: 2688347 - RNA, 14 nt, Human
ugaguuguuuuugu

SEQ ID NO: 2688348 - RNA, 16 nt, Human
ugaguuguuuuuguau

SEQ ID NO: 2688349 - RNA, 15 nt, Human
ugaguuguuuuugua

SEQ ID NO: 2688350 - RNA, 18 nt, Human
ugaguuguuuuuguauau

SEQ ID NO: 2688351 - RNA, 17 nt, Human
ugaguuguuuuuguaua

SEQ ID NO: 2688352 - RNA, 20 nt, Human
ugaguuguuuuuguauauug

SEQ ID NO: 2688353 - RNA, 19 nt, Human
ugaguugauucagcucugc

SEQ ID NO: 2688354 - RNA, 16 nt, Human
ugaguugauucagcuc

SEQ ID NO: 2688355 - RNA, 16 nt, Human
ugauagucuuuugcuu

SEQ ID NO: 2688356 - RNA, 17 nt, Human
ugauagucuuuugcuuu

SEQ ID NO: 2688357 - RNA, 15 nt, Human
ugauagggaacuggg

SEQ ID NO: 2688358 - RNA, 16 nt, Human
ugauagcauuguaagc

SEQ ID NO: 2688359 - RNA, 14 nt, Human
ugauagcauuguaa

SEQ ID NO: 2688360 - RNA, 13 nt, Human
ugauaaauccauc

SEQ ID NO: 2688361 - RNA, 15 nt, Human
ugauaucuauaaaau

SEQ ID NO: 2688362 - RNA, 16 nt, Human
ugauaucuauaaaaua

SEQ ID NO: 2688363 - RNA, 17 nt, Human
ugauaucuauaaaauag

SEQ ID NO: 2688364 - RNA, 18 nt, Human
ugauaucuauaaaauaga

SEQ ID NO: 2688365 - RNA, 23 nt, Human
ugauaucuauaaaauagauauaa

SEQ ID NO: 2688366 - RNA, 21 nt, Human
ugauccacccaacccuaucuc

SEQ ID NO: 2688367 - RNA, 15 nt, Human
ugauccacccaaccc

SEQ ID NO: 2688368 - RNA, 16 nt, Human
ugauccacccaacccu

SEQ ID NO: 2688369 - RNA, 17 nt, Human
ugauguacagauucuuu

SEQ ID NO: 2688370 - RNA, 20 nt, Human
ugauauaugagacuuuaugu

SEQ ID NO: 2688371 - RNA, 19 nt, Human
ugccucccuuguggcagca

SEQ ID NO: 2688372 - RNA, 18 nt, Human
ugccucccuccccagugc

SEQ ID NO: 2688373 - RNA, 21 nt, Human
ugccucugugcugugugugac

SEQ ID NO: 2688374 - RNA, 17 nt, Human
ugccucugugcugugug

SEQ ID NO: 2688375 - RNA, 17 nt, Human
ugccucuuccuugaaga

SEQ ID NO: 2688376 - RNA, 21 nt, Human
ugccucuucucuacucuaggg

SEQ ID NO: 2688377 - RNA, 12 nt, Human
ugccugcagggc

SEQ ID NO: 2688378 - RNA, 13 nt, Human
ugccugcagggcc

SEQ ID NO: 2688379 - RNA, 14 nt, Human
ugccugcagggcca

SEQ ID NO: 2688380 - RNA, 16 nt, Human
ugccugcagggccaug

SEQ ID NO: 2688381 - RNA, 17 nt, Human
ugccugcagggccaugg

SEQ ID NO: 2688382 - RNA, 22 nt, Human
ugccugcagggccauggcucag

SEQ ID NO: 2688383 - RNA, 23 nt, Human
ugccugcagggccauggcucagg

SEQ ID NO: 2688384 - RNA, 19 nt, Human
ugccugggguguuaguggc

SEQ ID NO: 2688385 - RNA, 23 nt, Human
ugccugggguguuaguggcaccg

SEQ ID NO: 2688386 - RNA, 18 nt, Human
ugcccagaauacugaugg

SEQ ID NO: 2688387 - RNA, 16 nt, Human
ugcccagaauacugau

SEQ ID NO: 2688388 - RNA, 19 nt, Human
ugcccagaauacugaugga

SEQ ID NO: 2688389 - RNA, 21 nt, Human
ugcccagaauaaguuauugca

SEQ ID NO: 2688390 - RNA, 14 nt, Human
ugcccagaauacug

SEQ ID NO: 2688391 - RNA, 21 nt, Human
ugcccacuguuucucuugagc

SEQ ID NO: 2688392 - RNA, 17 nt, Human
ugcccagaauaaguuau

SEQ ID NO: 2688393 - RNA, 19 nt, Human
ugcccagaauaaguuauug

SEQ ID NO: 2688394 - RNA, 19 nt, Human
ugcccguguaguccccaac

SEQ ID NO: 2688395 - RNA, 14 nt, Human
ugcccguucuugaa

SEQ ID NO: 2688396 - RNA, 17 nt, Human
ugcccguucuugaaaug

SEQ ID NO: 2688397 - RNA, 13 nt, Human
ugccgucaccacc

SEQ ID NO: 2688398 - RNA, 14 nt, Human
ugccgucaccacca

SEQ ID NO: 2688399 - RNA, 15 nt, Human
ugccgucaccaccac

SEQ ID NO: 2688400 - RNA, 16 nt, Human
ugccgucaccaccacc

SEQ ID NO: 2688401 - RNA, 17 nt, Human
ugccgucaccaccaccc

SEQ ID NO: 2688402 - RNA, 18 nt, Human
ugccgucaccaccacccc

SEQ ID NO: 2688403 - RNA, 15 nt, Human
ugccggugagaccca

SEQ ID NO: 2688404 - RNA, 12 nt, Human
ugccgucucugg

SEQ ID NO: 2688405 - RNA, 13 nt, Human
ugccgucucugga

SEQ ID NO: 2688406 - RNA, 14 nt, Human
ugccgucucuggag

SEQ ID NO: 2688407 - RNA, 13 nt, Human
ugccguggcacca

SEQ ID NO: 2688408 - RNA, 22 nt, Human
ugccguggcaccaggcgcugcc

SEQ ID NO: 2688409 - RNA, 23 nt, Human
ugccguggggccgccgccucuuu

SEQ ID NO: 2688410 - RNA, 22 nt, Human
ugccacaucaaaccuuugagua

SEQ ID NO: 2688411 - RNA, 17 nt, Human
ugccacaguagaacugu

SEQ ID NO: 2688412 - RNA, 22 nt, Human
ugccacaguagaacugucugug

SEQ ID NO: 2688413 - RNA, 19 nt, Human
ugcauuuuaacccuauuuu

SEQ ID NO: 2688414 - RNA, 18 nt, Human
ugcauuugugcuagaaau

SEQ ID NO: 2688415 - RNA, 17 nt, Human
ugcagaugccacccuag

SEQ ID NO: 2688416 - RNA, 20 nt, Human
ugcagaugccacccuagcca

SEQ ID NO: 2688417 - RNA, 13 nt, Human
ugcaucccugaga

SEQ ID NO: 2688418 - RNA, 14 nt, Human
ugcaucccugagac

SEQ ID NO: 2688419 - RNA, 17 nt, Human
ugcagauguuagauauu

SEQ ID NO: 2688420 - RNA, 22 nt, Human
ugcaucccaaaccacgccucuu

SEQ ID NO: 2688421 - RNA, 23 nt, Human
ugcaucccaaaccacgccucuug

SEQ ID NO: 2688422 - RNA, 18 nt, Human
ugcauguagaggcuuguu

SEQ ID NO: 2688423 - RNA, 21 nt, Human
ugcauguagaggcuuguuuac

SEQ ID NO: 2688424 - RNA, 13 nt, Human
ugcauguuauguu

SEQ ID NO: 2688425 - RNA, 14 nt, Human
ugcauguuauguuu

SEQ ID NO: 2688426 - RNA, 15 nt, Human
ugcauguuauguuua

SEQ ID NO: 2688427 - RNA, 16 nt, Human
ugcauguuauguuuaa

SEQ ID NO: 2688428 - RNA, 22 nt, Human
ugcauguuauguuuaauaagcu

SEQ ID NO: 2688429 - RNA, 20 nt, Human
ugccaugaagggacccuuug

SEQ ID NO: 2688430 - RNA, 20 nt, Human
ugccaugugcuucugccacc

SEQ ID NO: 2688431 - RNA, 15 nt, Human
ugccaugugcaccuu

SEQ ID NO: 2688432 - RNA, 22 nt, Human
ugccauguggaaggcaagccag

SEQ ID NO: 2688433 - RNA, 12 nt, Human
ugcccacuguuu

SEQ ID NO: 2688434 - RNA, 19 nt, Human
ugcccacggagucgugggg

SEQ ID NO: 2688435 - RNA, 15 nt, Human
ugccauguuggccag

SEQ ID NO: 2688436 - RNA, 16 nt, Human
ugccagggccgaccag

SEQ ID NO: 2688437 - RNA, 14 nt, Human
ugccaggugagaaa

SEQ ID NO: 2688438 - RNA, 17 nt, Human
ugccaggugagaaacug

SEQ ID NO: 2688439 - RNA, 19 nt, Human
ugccacucacuaggccccc

SEQ ID NO: 2688440 - RNA, 20 nt, Human
ugccacucacuaggccccca

SEQ ID NO: 2688441 - RNA, 21 nt, Human
ugccacucacuaggcccccac

SEQ ID NO: 2688442 - RNA, 22 nt, Human
ugccacucacuaggcccccacu

SEQ ID NO: 2688443 - RNA, 13 nt, Human
ugccacucacuag

SEQ ID NO: 2688444 - RNA, 14 nt, Human
ugccacucacuagg

SEQ ID NO: 2688445 - RNA, 15 nt, Human
ugccacucacuaggc

SEQ ID NO: 2688446 - RNA, 17 nt, Human
ugccacucacuaggccc

SEQ ID NO: 2688447 - RNA, 18 nt, Human
ugccacucacuaggcccc

SEQ ID NO: 2688448 - RNA, 13 nt, Human
ugauuuuuuucca

SEQ ID NO: 2688449 - RNA, 16 nt, Human
ugcaaaaccuuuuacu

SEQ ID NO: 2688450 - RNA, 17 nt, Human
ugcaaaaccuuuuacug

SEQ ID NO: 2688451 - RNA, 18 nt, Human
ugcaaaaccuuuuacugg

SEQ ID NO: 2688452 - RNA, 19 nt, Human
ugcaaaaccuuuuacuggu

SEQ ID NO: 2688453 - RNA, 21 nt, Human
ugcaaaaacucuuugagaggg

SEQ ID NO: 2688454 - RNA, 21 nt, Human
ugcaaaaagcuagucaacagu

SEQ ID NO: 2688455 - RNA, 20 nt, Human
ugauuuuuuuuuuuaaucua

SEQ ID NO: 2688456 - RNA, 13 nt, Human
ugauuuuuacugu

SEQ ID NO: 2688457 - RNA, 13 nt, Human
ugauuuucauugc

SEQ ID NO: 2688458 - RNA, 15 nt, Human
ugauuuucauugcug

SEQ ID NO: 2688459 - RNA, 17 nt, Human
ugaugucuuuuuauuaa

SEQ ID NO: 2688460 - RNA, 22 nt, Human
ugaugugcaaaaccuuuuacug

SEQ ID NO: 2688461 - RNA, 23 nt, Human
ugaugugcaaaaccuuuuacugg

SEQ ID NO: 2688462 - RNA, 20 nt, Human
ugcaaccaggaacagcaaau

SEQ ID NO: 2688463 - RNA, 24 nt, Human
ugcaacaggguauggacuaucugu

SEQ ID NO: 2688464 - RNA, 16 nt, Human
ugcaaccaagucacac

SEQ ID NO: 2688465 - RNA, 17 nt, Human
ugcaaccaagucacacg

SEQ ID NO: 2688466 - RNA, 12 nt, Human
ugcaaccaggaa

SEQ ID NO: 2688467 - RNA, 17 nt, Human
ugcaaccaggaacagca

SEQ ID NO: 2688468 - RNA, 12 nt, Human
ugcaaaauacau

SEQ ID NO: 2688469 - RNA, 13 nt, Human
ugcaaaauacaug

SEQ ID NO: 2688470 - RNA, 14 nt, Human
ugcaaaauacauga

SEQ ID NO: 2688471 - RNA, 15 nt, Human
ugcaaaauacaugaa

SEQ ID NO: 2688472 - RNA, 20 nt, Human
ugcaacggucuccugacugg

SEQ ID NO: 2688473 - RNA, 21 nt, Human
ugcaacggucuccugacuggu

SEQ ID NO: 2688474 - RNA, 22 nt, Human
ugcaacggucuccugacuggug

SEQ ID NO: 2688475 - RNA, 14 nt, Human
ugcaaccucgcuga

SEQ ID NO: 2688476 - RNA, 14 nt, Human
ugcacaguaaaaau

SEQ ID NO: 2688477 - RNA, 15 nt, Human
ugcacuuacuugcuu

SEQ ID NO: 2688478 - RNA, 20 nt, Human
ugcacuuaaguuagccucca

SEQ ID NO: 2688479 - RNA, 19 nt, Human
ugcacuuauugaccauuuu

SEQ ID NO: 2688480 - RNA, 23 nt, Human
ugcacuuauugaccauuuuuuaa

SEQ ID NO: 2688481 - RNA, 16 nt, Human
ugcacuuacuugcuua

SEQ ID NO: 2688482 - RNA, 18 nt, Human
ugcacuuacuugcuuauu

SEQ ID NO: 2688483 - RNA, 12 nt, Human
ugcacuguuuaa

SEQ ID NO: 2688484 - RNA, 13 nt, Human
ugcacuuaaagaa

SEQ ID NO: 2688485 - RNA, 14 nt, Human
ugcacuuaaagaag

SEQ ID NO: 2688486 - RNA, 19 nt, Human
ugcagaggguacuuuaaga

SEQ ID NO: 2688487 - RNA, 15 nt, Human
ugcagagguacccug

SEQ ID NO: 2688488 - RNA, 17 nt, Human
ugcagagguacccuggg

SEQ ID NO: 2688489 - RNA, 18 nt, Human
ugcagagguacccugggu

SEQ ID NO: 2688490 - RNA, 19 nt, Human
ugcagagguacccugggug

SEQ ID NO: 2688491 - RNA, 20 nt, Human
uuuuccccuaccaauauuag

SEQ ID NO: 2688492 - RNA, 22 nt, Human
uuuucccuauuagagaagagau

SEQ ID NO: 2688493 - RNA, 18 nt, Human
uuuucccuauuagagaag

SEQ ID NO: 2688494 - RNA, 17 nt, Human
uuuucacauucuuggcu

SEQ ID NO: 2688495 - RNA, 23 nt, Human
uuuucaccauucguacauaauac

SEQ ID NO: 2688496 - RNA, 20 nt, Human
uuuucaaaauccaaaaagaa

SEQ ID NO: 2688497 - RNA, 17 nt, Human
uuuucaaaagguauuau

SEQ ID NO: 2688498 - RNA, 16 nt, Human
uuuucuacguuucuuu

SEQ ID NO: 2688499 - RNA, 15 nt, Human
uuuucccuguacagu

SEQ ID NO: 2688500 - RNA, 17 nt, Human
uuuuccuaaagagagua

SEQ ID NO: 2688501 - RNA, 15 nt, Human
uuuuccccuuucugu

SEQ ID NO: 2688502 - RNA, 14 nt, Human
uuuuauauuuccuu

SEQ ID NO: 2688503 - RNA, 20 nt, Human
uuuuauauuuccuuuaugug

SEQ ID NO: 2688504 - RNA, 21 nt, Human
uuuuauauuuccuuuauguga

SEQ ID NO: 2688505 - RNA, 22 nt, Human
uuuuauauuuccuuuaugugaa

SEQ ID NO: 2688506 - RNA, 23 nt, Human
uuuuauauuuccuuuaugugaau

SEQ ID NO: 2688507 - RNA, 17 nt, Human
uuuuauagccuggacug

SEQ ID NO: 2688508 - RNA, 20 nt, Human
uuuuauagccuggacugcua

SEQ ID NO: 2688509 - RNA, 14 nt, Human
uuuucaaaagaaag

SEQ ID NO: 2688510 - RNA, 23 nt, Human
uuuuaucguuuuuguauuuucau

SEQ ID NO: 2688511 - RNA, 22 nt, Human
uuuuaucuauucugagaaaaca

SEQ ID NO: 2688512 - RNA, 15 nt, Human
uuuuaucuguuuccu

SEQ ID NO: 2688513 - RNA, 18 nt, Human
uuuuaaagguggauuuug

SEQ ID NO: 2688514 - RNA, 18 nt, Human
uuuuaaagaaaagaugaa

SEQ ID NO: 2688515 - RNA, 15 nt, Human
uuuguuguaaaacaa

SEQ ID NO: 2688516 - RNA, 16 nt, Human
uuuuaaagguggauuu

SEQ ID NO: 2688517 - RNA, 11 nt, Human
uuuuaaagaaa

SEQ ID NO: 2688518 - RNA, 14 nt, Human
uuuuaaaguugaua

SEQ ID NO: 2688519 - RNA, 13 nt, Human
uuuuaaagugcaa

SEQ ID NO: 2688520 - RNA, 14 nt, Human
uuuuaaagugcaaa

SEQ ID NO: 2688521 - RNA, 15 nt, Human
uuuuacaagauguau

SEQ ID NO: 2688522 - RNA, 14 nt, Human
uuuuauacaaaaua

SEQ ID NO: 2688523 - RNA, 14 nt, Human
uuuuauacaaaccu

SEQ ID NO: 2688524 - RNA, 19 nt, Human
uuuuaccuagcuaauuauu

SEQ ID NO: 2688525 - RNA, 15 nt, Human
uuuuacacagaaaca

SEQ ID NO: 2688526 - RNA, 17 nt, Human
uuuuacacagaaacacu

SEQ ID NO: 2688527 - RNA, 18 nt, Human
uuuuacacagaaacacug

SEQ ID NO: 2688528 - RNA, 21 nt, Human
uuuuacacagaaacacugccu

SEQ ID NO: 2688529 - RNA, 22 nt, Human
uuuuacacagaaacacugccuu

SEQ ID NO: 2688530 - RNA, 18 nt, Human
uuugcacugaggauauuc

SEQ ID NO: 2688531 - RNA, 14 nt, Human
uuugcacuaaauca

SEQ ID NO: 2688532 - RNA, 19 nt, Human
uuugcacuaaaucagagac

SEQ ID NO: 2688533 - RNA, 20 nt, Human
uuugcacuaaaucagagaca

SEQ ID NO: 2688534 - RNA, 21 nt, Human
uuugcacuaaaucagagacaa

SEQ ID NO: 2688535 - RNA, 13 nt, Human
uuuguauuuucau

SEQ ID NO: 2688536 - RNA, 14 nt, Human
uuuguauuuucaug

SEQ ID NO: 2688537 - RNA, 15 nt, Human
uuuguauuuucauga

SEQ ID NO: 2688538 - RNA, 21 nt, Human
uuuguauuuucaugaaaauac

SEQ ID NO: 2688539 - RNA, 22 nt, Human
uuuguauuguccuauuaguguu

SEQ ID NO: 2688540 - RNA, 15 nt, Human
uuuguauuguccuau

SEQ ID NO: 2688541 - RNA, 13 nt, Human
uuuguauuguccu

SEQ ID NO: 2688542 - RNA, 14 nt, Human
uuuguauuguauau

SEQ ID NO: 2688543 - RNA, 14 nt, Human
uuuuaaaauagaaa

SEQ ID NO: 2688544 - RNA, 16 nt, Human
uuuuaaaauagaaauu

SEQ ID NO: 2688545 - RNA, 18 nt, Human
uuuuaaaauagaaauuuu

SEQ ID NO: 2688546 - RNA, 21 nt, Human
uuuuaaaauagaaauuuugua

SEQ ID NO: 2688547 - RNA, 23 nt, Human
uuuuaaaauagaaauuuuguaag

SEQ ID NO: 2688548 - RNA, 12 nt, Human
uuuguuguaaaa

SEQ ID NO: 2688549 - RNA, 18 nt, Human
uuuguuguacuuaaaugg

SEQ ID NO: 2688550 - RNA, 17 nt, Human
uuuuaaaauaaggauuu

SEQ ID NO: 2688551 - RNA, 20 nt, Human
uuuuaaaaucugagggaaau

SEQ ID NO: 2688552 - RNA, 21 nt, Human
uuuuaaaaucugagggaaaug

SEQ ID NO: 2688553 - RNA, 23 nt, Human
uuuuaaaaucugagggaaauguu

SEQ ID NO: 2688554 - RNA, 17 nt, Human
uuuguuaggauuuucac

SEQ ID NO: 2688555 - RNA, 22 nt, Human
uuuguuaggauuuucacauucu

SEQ ID NO: 2688556 - RNA, 17 nt, Human
uuuguguguugucucuu

SEQ ID NO: 2688557 - RNA, 15 nt, Human
uuuguugucagcuga

SEQ ID NO: 2688558 - RNA, 16 nt, Human
uuuguugcaagaugug

SEQ ID NO: 2688559 - RNA, 18 nt, Human
uuuguugcaagaugugaa

SEQ ID NO: 2688560 - RNA, 19 nt, Human
uuuguugcaagaugugaau

SEQ ID NO: 2688561 - RNA, 12 nt, Human
uuuuuuaaagaa

SEQ ID NO: 2688562 - RNA, 13 nt, Human
uuuuuuaaagaaa

SEQ ID NO: 2688563 - RNA, 14 nt, Human
uuuuuuaaaauaga

SEQ ID NO: 2688564 - RNA, 12 nt, Human
uuuuuuaagcuu

SEQ ID NO: 2688565 - RNA, 15 nt, Human
uuuuuuaagcuucag

SEQ ID NO: 2688566 - RNA, 23 nt, Human
uuuuuuaagcuucaguugcuugu

SEQ ID NO: 2688567 - RNA, 12 nt, Human
uuuuuuauuucu

SEQ ID NO: 2688568 - RNA, 17 nt, Human
uuuuuuauuucuacugu

SEQ ID NO: 2688569 - RNA, 18 nt, Human
uuuuuuaaucuacugcau

SEQ ID NO: 2688570 - RNA, 18 nt, Human
uuuuuuaaguucuuauga

SEQ ID NO: 2688571 - RNA, 12 nt, Human
uuuuuuaaucua

SEQ ID NO: 2688572 - RNA, 13 nt, Human
uuuuuuguuuguu

SEQ ID NO: 2688573 - RNA, 14 nt, Human
uuuuuuuguacgac

SEQ ID NO: 2688574 - RNA, 14 nt, Human
uuuuuuuguuauua

SEQ ID NO: 2688575 - RNA, 12 nt, Human
uuuuuuucuauu

SEQ ID NO: 2688576 - RNA, 13 nt, Human
uuuuuuuguaaua

SEQ ID NO: 2688577 - RNA, 14 nt, Human
uuuuuuucuaagag

SEQ ID NO: 2688578 - RNA, 13 nt, Human
uuuuuuuccuuuu

SEQ ID NO: 2688579 - RNA, 13 nt, Human
uuuuuuuuuuggu

SEQ ID NO: 2688580 - RNA, 17 nt, Human
uuuugaacucuucucau

SEQ ID NO: 2688581 - RNA, 22 nt, Human
uuuuuaaucuacugcauuuagg

SEQ ID NO: 2688582 - RNA, 13 nt, Human
uuuuuaaugcuau

SEQ ID NO: 2688583 - RNA, 19 nt, Human
uuuuucacucuaagucaug

SEQ ID NO: 2688584 - RNA, 13 nt, Human
uuuugaagcauag

SEQ ID NO: 2688585 - RNA, 13 nt, Human
uuuuucauaaaca

SEQ ID NO: 2688586 - RNA, 18 nt, Human
uuuuucauaaacaaguuc

SEQ ID NO: 2688587 - RNA, 14 nt, Human
uuuuuuuuaaacua

SEQ ID NO: 2688588 - RNA, 12 nt, Human
uuuaacauuauu

SEQ ID NO: 2688589 - RNA, 16 nt, Human
uuuaaccuuguauaaa

SEQ ID NO: 2688590 - RNA, 12 nt, Human
uuguuuggagac

SEQ ID NO: 2688591 - RNA, 21 nt, Human
uuguuuggagacguuuauaaa

SEQ ID NO: 2688592 - RNA, 21 nt, Human
uuuaacagaaauuguauauug

SEQ ID NO: 2688593 - RNA, 13 nt, Human
uuuaacagaaauu

SEQ ID NO: 2688594 - RNA, 14 nt, Human
uuuaacagaaauug

SEQ ID NO: 2688595 - RNA, 16 nt, Human
uuuaacagaaauugua

SEQ ID NO: 2688596 - RNA, 19 nt, Human
uuuaacagaaauuguauau

SEQ ID NO: 2688597 - RNA, 16 nt, Human
uuuaacuuaacugaaa

SEQ ID NO: 2688598 - RNA, 20 nt, Human
uuuaauaagcuacuagcaaa

SEQ ID NO: 2688599 - RNA, 19 nt, Human
uuuaaguucuuaugaggag

SEQ ID NO: 2688600 - RNA, 18 nt, Human
uuuaaguuuugacaagcu

SEQ ID NO: 2688601 - RNA, 13 nt, Human
uuuaaguuuugac

SEQ ID NO: 2688602 - RNA, 17 nt, Human
uuuaagugucucacuaa

SEQ ID NO: 2688603 - RNA, 23 nt, Human
uuuacagcuuucaugauuagcaa

SEQ ID NO: 2688604 - RNA, 20 nt, Human
uuuacagcuuucaugauuag

SEQ ID NO: 2688605 - RNA, 22 nt, Human
uuuacaguaucuacuugcaugu

SEQ ID NO: 2688606 - RNA, 13 nt, Human
uuuacagaaaaag

SEQ ID NO: 2688607 - RNA, 13 nt, Human
uuuacagaaaugg

SEQ ID NO: 2688608 - RNA, 12 nt, Human
uuuacagaaaaa

SEQ ID NO: 2688609 - RNA, 11 nt, Human
uuuacagaaaa

SEQ ID NO: 2688610 - RNA, 12 nt, Human
uuuacacagaaa

SEQ ID NO: 2688611 - RNA, 14 nt, Human
uuuacacagaaaca

SEQ ID NO: 2688612 - RNA, 15 nt, Human
uuuacacagaaacac

SEQ ID NO: 2688613 - RNA, 19 nt, Human
uuuacacagaaacacugcc

SEQ ID NO: 2688614 - RNA, 20 nt, Human
uuuacacagaaacacugccu

SEQ ID NO: 2688615 - RNA, 22 nt, Human
uuuagacaagagaugggaauga

SEQ ID NO: 2688616 - RNA, 21 nt, Human
uuuagaauugaagguuuuuga

SEQ ID NO: 2688617 - RNA, 18 nt, Human
uuuagaauugaagguuuu

SEQ ID NO: 2688618 - RNA, 17 nt, Human
uuuagaauugaagguuu

SEQ ID NO: 2688619 - RNA, 15 nt, Human
uuuagaauugaaggu

SEQ ID NO: 2688620 - RNA, 13 nt, Human
uuuagaauugaag

SEQ ID NO: 2688621 - RNA, 11 nt, Human
uuuagaauuga

SEQ ID NO: 2688622 - RNA, 15 nt, Human
uuuacuuguuuugga

SEQ ID NO: 2688623 - RNA, 18 nt, Human
uuuauaauagcaacuuuu

SEQ ID NO: 2688624 - RNA, 15 nt, Human
uuuauaauuguacaa

SEQ ID NO: 2688625 - RNA, 17 nt, Human
uuuauaauuguacaaaa

SEQ ID NO: 2688626 - RNA, 20 nt, Human
uuuauaauuguacaaaauua

SEQ ID NO: 2688627 - RNA, 14 nt, Human
uuuauaauaaaaau

SEQ ID NO: 2688628 - RNA, 16 nt, Human
uuuauaauaaaaauau

SEQ ID NO: 2688629 - RNA, 19 nt, Human
uuuauaauaaaaauauauu

SEQ ID NO: 2688630 - RNA, 13 nt, Human
uuuauacaaaaua

SEQ ID NO: 2688631 - RNA, 12 nt, Human
uuuauacaaaau

SEQ ID NO: 2688632 - RNA, 15 nt, Human
uuuauuuagggaaca

SEQ ID NO: 2688633 - RNA, 22 nt, Human
uuucaagcagucgugccugugu

SEQ ID NO: 2688634 - RNA, 23 nt, Human
uuucaagcagucgugccuguguc

SEQ ID NO: 2688635 - RNA, 13 nt, Human
uuuagaauuaaaa

SEQ ID NO: 2688636 - RNA, 21 nt, Human
uuucaagagucuaauagucuu

SEQ ID NO: 2688637 - RNA, 22 nt, Human
uuucaagagucuaauagucuuu

SEQ ID NO: 2688638 - RNA, 19 nt, Human
uuuauuuaaauuacaauuu

SEQ ID NO: 2688639 - RNA, 20 nt, Human
uuuauuuacagaugaaugua

SEQ ID NO: 2688640 - RNA, 16 nt, Human
uuuauugacucuugag

SEQ ID NO: 2688641 - RNA, 19 nt, Human
uuucauuuaagggaaagaa

SEQ ID NO: 2688642 - RNA, 23 nt, Human
uuucauuuaagggaaagaaaaug

SEQ ID NO: 2688643 - RNA, 21 nt, Human
uuucauuuacucuaaaaacug

SEQ ID NO: 2688644 - RNA, 16 nt, Human
uuucaaguuguaaaua

SEQ ID NO: 2688645 - RNA, 15 nt, Human
uuucaauagcacaua

SEQ ID NO: 2688646 - RNA, 21 nt, Human
uuguuuaaaaaccgaauaaau

SEQ ID NO: 2688647 - RNA, 16 nt, Human
uuguuucguggggagg

SEQ ID NO: 2688648 - RNA, 13 nt, Human
uuguuugccagga

SEQ ID NO: 2688649 - RNA, 12 nt, Human
uuguuaucaaaa

SEQ ID NO: 2688650 - RNA, 14 nt, Human
uuguuaucaaaaua

SEQ ID NO: 2688651 - RNA, 16 nt, Human
uuguuaucaaaauagu

SEQ ID NO: 2688652 - RNA, 16 nt, Human
uugugcucagagacac

SEQ ID NO: 2688653 - RNA, 14 nt, Human
uuguuacuucugag

SEQ ID NO: 2688654 - RNA, 14 nt, Human
uuguuaagaaaaau

SEQ ID NO: 2688655 - RNA, 13 nt, Human
uuguuaauacaag

SEQ ID NO: 2688656 - RNA, 15 nt, Human
uuguuaauacaaggu

SEQ ID NO: 2688657 - RNA, 18 nt, Human
uuguuaauacaagguaua

SEQ ID NO: 2688658 - RNA, 15 nt, Human
uuguguuuuuuaaga

SEQ ID NO: 2688659 - RNA, 16 nt, Human
uuguguuuuuuaagau

SEQ ID NO: 2688660 - RNA, 17 nt, Human
uuguguuuuuuaagaua

SEQ ID NO: 2688661 - RNA, 21 nt, Human
uuguguuuuuuaagauagugu

SEQ ID NO: 2688662 - RNA, 13 nt, Human
uugugccuggggu

SEQ ID NO: 2688663 - RNA, 21 nt, Human
uugugccagaggaauccuggc

SEQ ID NO: 2688664 - RNA, 12 nt, Human
uugugccaucug

SEQ ID NO: 2688665 - RNA, 13 nt, Human
uugugccaucugu

SEQ ID NO: 2688666 - RNA, 13 nt, Human
uugugccagagga

SEQ ID NO: 2688667 - RNA, 16 nt, Human
uugugcuucacaguag

SEQ ID NO: 2688668 - RNA, 21 nt, Human
uugugcuucacaguagagcca

SEQ ID NO: 2688669 - RNA, 16 nt, Human
uugugcuagaaauuuu

SEQ ID NO: 2688670 - RNA, 18 nt, Human
uugugcuagaaauuuuca

SEQ ID NO: 2688671 - RNA, 12 nt, Human
uugugcacuguu

SEQ ID NO: 2688672 - RNA, 20 nt, Human
uuguguuccuacagacacuu

SEQ ID NO: 2688673 - RNA, 15 nt, Human
uugucuuaaaaagug

SEQ ID NO: 2688674 - RNA, 16 nt, Human
uugucugauuucuuag

SEQ ID NO: 2688675 - RNA, 21 nt, Human
uugucuggcaaggacuuugua

SEQ ID NO: 2688676 - RNA, 17 nt, Human
uugucugguuaaaaaau

SEQ ID NO: 2688677 - RNA, 18 nt, Human
uugucugguuaaaaaaua

SEQ ID NO: 2688678 - RNA, 20 nt, Human
uugucuggcaaggacuuugu

SEQ ID NO: 2688679 - RNA, 14 nt, Human
uugugauuucuuua

SEQ ID NO: 2688680 - RNA, 23 nt, Human
uugugauuucuuuaaaagaauga

SEQ ID NO: 2688681 - RNA, 16 nt, Human
uuguauuaaagacaga

SEQ ID NO: 2688682 - RNA, 14 nt, Human
uuguauuaaagaca

SEQ ID NO: 2688683 - RNA, 14 nt, Human
uuguacugaauuuu

SEQ ID NO: 2688684 - RNA, 21 nt, Human
uuguacugaauuuuuuuguaa

SEQ ID NO: 2688685 - RNA, 22 nt, Human
uuguacugaauuuuuuuguaau

SEQ ID NO: 2688686 - RNA, 19 nt, Human
uuguacauacgauuuaagg

SEQ ID NO: 2688687 - RNA, 22 nt, Human
uuguacauacgauuuaagguau

SEQ ID NO: 2688688 - RNA, 23 nt, Human
uuguacauacgauuuaagguauu

SEQ ID NO: 2688689 - RNA, 20 nt, Human
uuguacauguaacauuaaag

SEQ ID NO: 2688690 - RNA, 21 nt, Human
uuguacgacgucagauguuua

SEQ ID NO: 2688691 - RNA, 18 nt, Human
uuguacgacgucagaugu

SEQ ID NO: 2688692 - RNA, 12 nt, Human
uugguauauuuu

SEQ ID NO: 2688693 - RNA, 20 nt, Human
uugggugucuccuuaagcug

SEQ ID NO: 2688694 - RNA, 13 nt, Human
uuguaaaagaaau

SEQ ID NO: 2688695 - RNA, 15 nt, Human
uuguaaaagaaauca

SEQ ID NO: 2688696 - RNA, 18 nt, Human
uuguaaaagaaaucaugu

SEQ ID NO: 2688697 - RNA, 22 nt, Human
uuguaaaagaaaucauguccau

SEQ ID NO: 2688698 - RNA, 14 nt, Human
uuguaaauacacau

SEQ ID NO: 2688699 - RNA, 18 nt, Human
uuguaaaacaaaauuuga

SEQ ID NO: 2688700 - RNA, 18 nt, Human
uuguaaauaggauuuuua

SEQ ID NO: 2688701 - RNA, 14 nt, Human
uuguaaauucugau

SEQ ID NO: 2688702 - RNA, 13 nt, Human
uuguaaauucuga

SEQ ID NO: 2688703 - RNA, 12 nt, Human
uuguaaauucug

SEQ ID NO: 2688704 - RNA, 15 nt, Human
uuguaaauucugauu

SEQ ID NO: 2688705 - RNA, 11 nt, Human
uuauuaauauu

SEQ ID NO: 2688706 - RNA, 18 nt, Human
uuauuaauauuuaacauu

SEQ ID NO: 2688707 - RNA, 12 nt, Human
uuauuaaucacu

SEQ ID NO: 2688708 - RNA, 13 nt, Human
uuauuaaucacug

SEQ ID NO: 2688709 - RNA, 14 nt, Human
uuauuacuuccaug

SEQ ID NO: 2688710 - RNA, 15 nt, Human
uuauuacuuccauga

SEQ ID NO: 2688711 - RNA, 16 nt, Human
uuauuacuuccaugaa

SEQ ID NO: 2688712 - RNA, 17 nt, Human
uuauuacuuccaugaau

SEQ ID NO: 2688713 - RNA, 18 nt, Human
uuauuacuuccaugaauu

SEQ ID NO: 2688714 - RNA, 22 nt, Human
uuauuacccccuccuucagaca

SEQ ID NO: 2688715 - RNA, 20 nt, Human
uuauuacccccuccuucaga

SEQ ID NO: 2688716 - RNA, 19 nt, Human
uuauuacccccuccuucag

SEQ ID NO: 2688717 - RNA, 13 nt, Human
uuauuacauguaa

SEQ ID NO: 2688718 - RNA, 15 nt, Human
uuauuacauguaauu

SEQ ID NO: 2688719 - RNA, 18 nt, Human
uuauuacauguaauuuga

SEQ ID NO: 2688720 - RNA, 22 nt, Human
uuauguuuuuuaaaauauuuau

SEQ ID NO: 2688721 - RNA, 21 nt, Human
uuauuaaauuuuuuuguauga

SEQ ID NO: 2688722 - RNA, 20 nt, Human
uuauuaaauuuuuuuguaug

SEQ ID NO: 2688723 - RNA, 22 nt, Human
uuauuaaauuuuuuuguaugaa

SEQ ID NO: 2688724 - RNA, 17 nt, Human
uuauuaacuuaauaauc

SEQ ID NO: 2688725 - RNA, 14 nt, Human
uuauuaacuuaaua

SEQ ID NO: 2688726 - RNA, 19 nt, Human
uuauuaacuuaauaaucaa

SEQ ID NO: 2688727 - RNA, 14 nt, Human
uuauguuuaauaag

SEQ ID NO: 2688728 - RNA, 19 nt, Human
uuauguuguuuauaauaaa

SEQ ID NO: 2688729 - RNA, 16 nt, Human
uuauggaugauuuaag

SEQ ID NO: 2688730 - RNA, 17 nt, Human
uuauggaugauuuaagu

SEQ ID NO: 2688731 - RNA, 18 nt, Human
uuauauuuaugugucugu

SEQ ID NO: 2688732 - RNA, 15 nt, Human
uuaugauuguuaugu

SEQ ID NO: 2688733 - RNA, 20 nt, Human
uuaucuauucugagaaaaca

SEQ ID NO: 2688734 - RNA, 21 nt, Human
uuaucuccacaaccucuuccc

SEQ ID NO: 2688735 - RNA, 12 nt, Human
uuaucuguuucc

SEQ ID NO: 2688736 - RNA, 22 nt, Human
uuaucuguuuccugacauuguc

SEQ ID NO: 2688737 - RNA, 15 nt, Human
uuaucuuacaauauu

SEQ ID NO: 2688738 - RNA, 20 nt, Human
uuaucuuacaauauugauug

SEQ ID NO: 2688739 - RNA, 15 nt, Human
uuaucguuuuuguau

SEQ ID NO: 2688740 - RNA, 22 nt, Human
uuaucguuuuuguauuuucaug

SEQ ID NO: 2688741 - RNA, 15 nt, Human
uuauauuuauugacu

SEQ ID NO: 2688742 - RNA, 19 nt, Human
uuauauuuauauuucaggu

SEQ ID NO: 2688743 - RNA, 20 nt, Human
uuauauuuauugacucuuga

SEQ ID NO: 2688744 - RNA, 12 nt, Human
uuauauuuccuu

SEQ ID NO: 2688745 - RNA, 13 nt, Human
uuauauuuccuuu

SEQ ID NO: 2688746 - RNA, 14 nt, Human
uuauauuuccuuua

SEQ ID NO: 2688747 - RNA, 16 nt, Human
uuauauuuccuuuaug

SEQ ID NO: 2688748 - RNA, 20 nt, Human
uuauauuuccuuuaugugaa

SEQ ID NO: 2688749 - RNA, 21 nt, Human
uuauauuuccuuuaugugaau

SEQ ID NO: 2688750 - RNA, 22 nt, Human
uuauauuuccuuuaugugaauu

SEQ ID NO: 2688751 - RNA, 17 nt, Human
uuauaagugaagugaua

SEQ ID NO: 2688752 - RNA, 17 nt, Human
uuauaaggaaauuuuac

SEQ ID NO: 2688753 - RNA, 18 nt, Human
uuauaagaagaaguucau

SEQ ID NO: 2688754 - RNA, 21 nt, Human
uuauaagaagaaguucauguc

SEQ ID NO: 2688755 - RNA, 12 nt, Human
uuaguggcaccg

SEQ ID NO: 2688756 - RNA, 13 nt, Human
uuaguggcaccgc

SEQ ID NO: 2688757 - RNA, 15 nt, Human
ugugaaaagaaaaau

SEQ ID NO: 2688758 - RNA, 13 nt, Human
ugugaaaagaaaa

SEQ ID NO: 2688759 - RNA, 17 nt, Human
ugugaaaagaaaaauga

SEQ ID NO: 2688760 - RNA, 16 nt, Human
ugucuuuggaggugcu

SEQ ID NO: 2688761 - RNA, 11 nt, Human
uuauaauagca

SEQ ID NO: 2688762 - RNA, 15 nt, Human
uuauaauaaauauau

SEQ ID NO: 2688763 - RNA, 20 nt, Human
uuauaauaaauauauacauu

SEQ ID NO: 2688764 - RNA, 18 nt, Human
uuauaaucuuauaauugu

SEQ ID NO: 2688765 - RNA, 16 nt, Human
uuauaauccuuaaauc

SEQ ID NO: 2688766 - RNA, 24 nt, Human
uuauaauccuuaaaucuuaauguu

SEQ ID NO: 2688767 - RNA, 20 nt, Human
uuauaauuguacaaaauuaa

SEQ ID NO: 2688768 - RNA, 20 nt, Human
uuauaauuuuuuuuaaaaua

SEQ ID NO: 2688769 - RNA, 19 nt, Human
uuauacaaaauaagaacga

SEQ ID NO: 2688770 - RNA, 20 nt, Human
uuauacaaaccuaccaaaau

SEQ ID NO: 2688771 - RNA, 21 nt, Human
uuauacaaaccuaccaaaaug

SEQ ID NO: 2688772 - RNA, 14 nt, Human
uuauaucaugcaaa

SEQ ID NO: 2688773 - RNA, 16 nt, Human
uuauaucaugcaaaau

SEQ ID NO: 2688774 - RNA, 20 nt, Human
uuauaucaugcaaaauaugu

SEQ ID NO: 2688775 - RNA, 16 nt, Human
uuauaucuggccucug

SEQ ID NO: 2688776 - RNA, 13 nt, Human
uuauaugaacaua

SEQ ID NO: 2688777 - RNA, 17 nt, Human
uuauaugaacauacaaa

SEQ ID NO: 2688778 - RNA, 15 nt, Human
uuauaugaacauaca

SEQ ID NO: 2688779 - RNA, 21 nt, Human
uuauaugaacauacaaaugca

SEQ ID NO: 2688780 - RNA, 20 nt, Human
uuauaugcuuuauuaauguu

SEQ ID NO: 2688781 - RNA, 20 nt, Human
uuauauguauguguuuagaa

SEQ ID NO: 2688782 - RNA, 19 nt, Human
uuauauguauguguuuaga

SEQ ID NO: 2688783 - RNA, 21 nt, Human
uuauauguauguguuuagaau

SEQ ID NO: 2688784 - RNA, 12 nt, Human
uuauauguaugu

SEQ ID NO: 2688785 - RNA, 14 nt, Human
uuauauguacuguu

SEQ ID NO: 2688786 - RNA, 17 nt, Human
uuauauguauguguuua

SEQ ID NO: 2688787 - RNA, 16 nt, Human
uuauauguauguguuu

SEQ ID NO: 2688788 - RNA, 15 nt, Human
uuauauguauguguu

SEQ ID NO: 2688789 - RNA, 14 nt, Human
uuauauguaugugu

SEQ ID NO: 2688790 - RNA, 19 nt, Human
uuauauuacugacauuucu

SEQ ID NO: 2688791 - RNA, 17 nt, Human
uucacggaagagccuug

SEQ ID NO: 2688792 - RNA, 13 nt, Human
uucacggaagagc

SEQ ID NO: 2688793 - RNA, 15 nt, Human
uucaauauauugaac

SEQ ID NO: 2688794 - RNA, 17 nt, Human
uucaauauauugaacuu

SEQ ID NO: 2688795 - RNA, 18 nt, Human
uucaauauauugaacuuu

SEQ ID NO: 2688796 - RNA, 17 nt, Human
uucaauagcacauaugg

SEQ ID NO: 2688797 - RNA, 20 nt, Human
uuauuugaacaaugaaguug

SEQ ID NO: 2688798 - RNA, 22 nt, Human
uuauuagccagguaaugugaau

SEQ ID NO: 2688799 - RNA, 12 nt, Human
uuauuagauguu

SEQ ID NO: 2688800 - RNA, 13 nt, Human
uuauuugcauguu

SEQ ID NO: 2688801 - RNA, 14 nt, Human
uuauuugcauguua

SEQ ID NO: 2688802 - RNA, 15 nt, Human
uuauuugcauguuau

SEQ ID NO: 2688803 - RNA, 16 nt, Human
uuauuugcauguuaug

SEQ ID NO: 2688804 - RNA, 19 nt, Human
uuauuugcauguuauguuu

SEQ ID NO: 2688805 - RNA, 21 nt, Human
uuauuugcauguuauguuuaa

SEQ ID NO: 2688806 - RNA, 13 nt, Human
uuauuuguaaauu

SEQ ID NO: 2688807 - RNA, 15 nt, Human
uuauuuguaaauuua

SEQ ID NO: 2688808 - RNA, 19 nt, Human
uuauuuguaaauuuagugu

SEQ ID NO: 2688809 - RNA, 19 nt, Human
uuauuugauuauuuaagac

SEQ ID NO: 2688810 - RNA, 20 nt, Human
uuauuugauuauuuaagacu

SEQ ID NO: 2688811 - RNA, 14 nt, Human
uuauuuuguguaaa

SEQ ID NO: 2688812 - RNA, 21 nt, Human
uuauuuuggagauuauaauaa

SEQ ID NO: 2688813 - RNA, 20 nt, Human
uuccagacuuccuugagaca

SEQ ID NO: 2688814 - RNA, 18 nt, Human
uuccagaucacugccaca

SEQ ID NO: 2688815 - RNA, 16 nt, Human
uucaucugucuauauu

SEQ ID NO: 2688816 - RNA, 14 nt, Human
uucaguucuuugga

SEQ ID NO: 2688817 - RNA, 20 nt, Human
uucaguucuuuggauucuaa

SEQ ID NO: 2688818 - RNA, 15 nt, Human
uucauaaacaaguuc

SEQ ID NO: 2688819 - RNA, 22 nt, Human
uucacccuuauagucuaagacu

SEQ ID NO: 2688820 - RNA, 11 nt, Human
uucauaaacaa

SEQ ID NO: 2688821 - RNA, 14 nt, Human
uucauaaauuauuu

SEQ ID NO: 2688822 - RNA, 20 nt, Human
uucauaaauuauuugauuau

SEQ ID NO: 2688823 - RNA, 21 nt, Human
uucagcugguugagguuucaa

SEQ ID NO: 2688824 - RNA, 14 nt, Human
uuccuuuaugugaa

SEQ ID NO: 2688825 - RNA, 15 nt, Human
uuccuuuaugugaau

SEQ ID NO: 2688826 - RNA, 19 nt, Human
uuccuuuaugugaauuuuu

SEQ ID NO: 2688827 - RNA, 20 nt, Human
uuccuuguagcgacuaaacu

SEQ ID NO: 2688828 - RNA, 21 nt, Human
uuccuugaguugauucagcuc

SEQ ID NO: 2688829 - RNA, 17 nt, Human
uuccuggaauugccagc

SEQ ID NO: 2688830 - RNA, 18 nt, Human
uuccuggaauugccagcu

SEQ ID NO: 2688831 - RNA, 22 nt, Human
uuccuggaauugccagcugaca

SEQ ID NO: 2688832 - RNA, 15 nt, Human
uuccugcguccuccu

SEQ ID NO: 2688833 - RNA, 19 nt, Human
uuccugcguccuccucacc

SEQ ID NO: 2688834 - RNA, 16 nt, Human
uuccugcguccuccuc

SEQ ID NO: 2688835 - RNA, 17 nt, Human
uuccugcguccuccuca

SEQ ID NO: 2688836 - RNA, 15 nt, Human
uuccugacauugucu

SEQ ID NO: 2688837 - RNA, 18 nt, Human
uucguacauaauacugaa

SEQ ID NO: 2688838 - RNA, 13 nt, Human
uucguggggaggu

SEQ ID NO: 2688839 - RNA, 22 nt, Human
uucuaauuaaccuuacuaauua

SEQ ID NO: 2688840 - RNA, 15 nt, Human
uucuacagugguuuu

SEQ ID NO: 2688841 - RNA, 21 nt, Human
uucuacagugguuuuauacug

SEQ ID NO: 2688842 - RNA, 21 nt, Human
uucuaccacacagcagcaguu

SEQ ID NO: 2688843 - RNA, 19 nt, Human
uucuaccaaggucuucuua

SEQ ID NO: 2688844 - RNA, 17 nt, Human
uucuacugucaaaugau

SEQ ID NO: 2688845 - RNA, 19 nt, Human
uucuacugucaaaugaugu

SEQ ID NO: 2688846 - RNA, 23 nt, Human
uucuacugucaaaugaugugcaa

SEQ ID NO: 2688847 - RNA, 20 nt, Human
uucuauaggaacauaugaaa

SEQ ID NO: 2688848 - RNA, 19 nt, Human
uucuauagcaucacuuaaa

SEQ ID NO: 2688849 - RNA, 22 nt, Human
uucuauagcaucacuuaaaaca

SEQ ID NO: 2688850 - RNA, 20 nt, Human
uucuauagcaucacuuaaaa

SEQ ID NO: 2688851 - RNA, 13 nt, Human
uucuacgccaggg

SEQ ID NO: 2688852 - RNA, 20 nt, Human
uucuaccggcuuugccaugu

SEQ ID NO: 2688853 - RNA, 13 nt, Human
uucuacguuucuu

SEQ ID NO: 2688854 - RNA, 14 nt, Human
uucuacguuucuuu

SEQ ID NO: 2688855 - RNA, 13 nt, Human
uucuaccugcccu

SEQ ID NO: 2688856 - RNA, 23 nt, Human
uucugauucuggcuuuaagccuu

SEQ ID NO: 2688857 - RNA, 17 nt, Human
uucugcaacaagcaugc

SEQ ID NO: 2688858 - RNA, 13 nt, Human
uucugauuucuuu

SEQ ID NO: 2688859 - RNA, 20 nt, Human
uucugauuucuuuucaccau

SEQ ID NO: 2688860 - RNA, 14 nt, Human
uucuauccucugua

SEQ ID NO: 2688861 - RNA, 15 nt, Human
uucuauccucuguaa

SEQ ID NO: 2688862 - RNA, 20 nt, Human
uucucauugacuuuuauaaa

SEQ ID NO: 2688863 - RNA, 21 nt, Human
uucucauuacuuguugccuau

SEQ ID NO: 2688864 - RNA, 15 nt, Human
uucucauuacuuguu

SEQ ID NO: 2688865 - RNA, 21 nt, Human
uucuccaccucccacaaagga

SEQ ID NO: 2688866 - RNA, 14 nt, Human
uucuccacugugca

SEQ ID NO: 2688867 - RNA, 18 nt, Human
uucuccacugugcacacc

SEQ ID NO: 2688868 - RNA, 17 nt, Human
uucucugacuucugccu

SEQ ID NO: 2688869 - RNA, 14 nt, Human
uugacaacugugac

SEQ ID NO: 2688870 - RNA, 14 nt, Human
uugaauuuuucucu

SEQ ID NO: 2688871 - RNA, 15 nt, Human
uugaauuuuaaaucu

SEQ ID NO: 2688872 - RNA, 16 nt, Human
uugaauuuuaaaucua

SEQ ID NO: 2688873 - RNA, 16 nt, Human
uugacaacugugacug

SEQ ID NO: 2688874 - RNA, 14 nt, Human
uugacaagcuggcu

SEQ ID NO: 2688875 - RNA, 15 nt, Human
uugacaagcuggcuu

SEQ ID NO: 2688876 - RNA, 13 nt, Human
uugacucaucuua

SEQ ID NO: 2688877 - RNA, 15 nt, Human
uugacucaucuuaua

SEQ ID NO: 2688878 - RNA, 13 nt, Human
uugacucuggguc

SEQ ID NO: 2688879 - RNA, 12 nt, Human
uugacucugggu

SEQ ID NO: 2688880 - RNA, 19 nt, Human
uugacucuggguccuuccu

SEQ ID NO: 2688881 - RNA, 18 nt, Human
uugacucuggguccuucc

SEQ ID NO: 2688882 - RNA, 21 nt, Human
uugaugauacaaugaacacuu

SEQ ID NO: 2688883 - RNA, 17 nt, Human
uugauugggaaaacauu

SEQ ID NO: 2688884 - RNA, 19 nt, Human
uugauugggaaaacauuug

SEQ ID NO: 2688885 - RNA, 22 nt, Human
uugauugggaaaacauuugcug

SEQ ID NO: 2688886 - RNA, 13 nt, Human
uugcaaaguguau

SEQ ID NO: 2688887 - RNA, 18 nt, Human
uugauuugauugggauga

SEQ ID NO: 2688888 - RNA, 16 nt, Human
uugauagggaacuggg

SEQ ID NO: 2688889 - RNA, 19 nt, Human
uugauagggaacuggggaa

SEQ ID NO: 2688890 - RNA, 20 nt, Human
uugagccgggccccugggcu

SEQ ID NO: 2688891 - RNA, 11 nt, Human
uugagccuggg

SEQ ID NO: 2688892 - RNA, 19 nt, Human
uugagccgggccccugggc

SEQ ID NO: 2688893 - RNA, 13 nt, Human
uugagcccuggcu

SEQ ID NO: 2688894 - RNA, 14 nt, Human
uugagcccuggcug

SEQ ID NO: 2688895 - RNA, 15 nt, Human
uugagcccuggcugu

SEQ ID NO: 2688896 - RNA, 21 nt, Human
uugacucuggguccuuccuga

SEQ ID NO: 2688897 - RNA, 16 nt, Human
uucugugugucaguuu

SEQ ID NO: 2688898 - RNA, 17 nt, Human
uucugugugucaguuuu

SEQ ID NO: 2688899 - RNA, 18 nt, Human
uucugugugucaguuuuc

SEQ ID NO: 2688900 - RNA, 21 nt, Human
uucugugugucaguuuucaua

SEQ ID NO: 2688901 - RNA, 12 nt, Human
uucuguguuuau

SEQ ID NO: 2688902 - RNA, 18 nt, Human
uucuguguuuauaaaaua

SEQ ID NO: 2688903 - RNA, 18 nt, Human
uucuguauuuuguuuuug

SEQ ID NO: 2688904 - RNA, 20 nt, Human
uucuguauuuuuuuuucuaa

SEQ ID NO: 2688905 - RNA, 22 nt, Human
uucuguauuuuuuuuucuaaga

SEQ ID NO: 2688906 - RNA, 19 nt, Human
uucuguauuugaaagugcc

SEQ ID NO: 2688907 - RNA, 17 nt, Human
uucuguauuugaaagug

SEQ ID NO: 2688908 - RNA, 16 nt, Human
uucuguauuugaaagu

SEQ ID NO: 2688909 - RNA, 15 nt, Human
uucuguauuugaaag

SEQ ID NO: 2688910 - RNA, 14 nt, Human
uucuguauuugaaa

SEQ ID NO: 2688911 - RNA, 11 nt, Human
uucuggcaccg

SEQ ID NO: 2688912 - RNA, 19 nt, Human
uucuggacccuuauaaaau

SEQ ID NO: 2688913 - RNA, 17 nt, Human
uucugcuuuagacuuga

SEQ ID NO: 2688914 - RNA, 13 nt, Human
uucugcuuuagac

SEQ ID NO: 2688915 - RNA, 19 nt, Human
uucugcuuuagacuugaaa

SEQ ID NO: 2688916 - RNA, 13 nt, Human
uucugcuuuucug

SEQ ID NO: 2688917 - RNA, 17 nt, Human
uucugcuuuucugcccu

SEQ ID NO: 2688918 - RNA, 18 nt, Human
uucugcuuuucugcccug

SEQ ID NO: 2688919 - RNA, 19 nt, Human
uucugcuuuucugcccugg

SEQ ID NO: 2688920 - RNA, 12 nt, Human
uucuuucagaaa

SEQ ID NO: 2688921 - RNA, 19 nt, Human
uucuuucaguucuuuggau

SEQ ID NO: 2688922 - RNA, 13 nt, Human
uucuuuaaacugu

SEQ ID NO: 2688923 - RNA, 14 nt, Human
uucuuuaaacacuc

SEQ ID NO: 2688924 - RNA, 13 nt, Human
uucuuuaaaagaa

SEQ ID NO: 2688925 - RNA, 16 nt, Human
uucuuuaaaagaauga

SEQ ID NO: 2688926 - RNA, 17 nt, Human
uucuuuaaaagaaugac

SEQ ID NO: 2688927 - RNA, 18 nt, Human
uucuuuaaaagaaugacu

SEQ ID NO: 2688928 - RNA, 19 nt, Human
uucuuuaaaagaaugacua

SEQ ID NO: 2688929 - RNA, 13 nt, Human
uugaaaaauauaa

SEQ ID NO: 2688930 - RNA, 17 nt, Human
uugaaaaauauaaaauu

SEQ ID NO: 2688931 - RNA, 19 nt, Human
uugaaaaauauaaaauuau

SEQ ID NO: 2688932 - RNA, 20 nt, Human
uugaaaaauauaaaauuaug

SEQ ID NO: 2688933 - RNA, 17 nt, Human
uucuuuuuuuuuaaguu

SEQ ID NO: 2688934 - RNA, 20 nt, Human
uucuuuuuuuuuaaguucuu

SEQ ID NO: 2688935 - RNA, 21 nt, Human
uucuuuuuuuuuaaguucuua

SEQ ID NO: 2688936 - RNA, 21 nt, Human
uucuuuuuuuuuuuuuugaga

SEQ ID NO: 2688937 - RNA, 22 nt, Human
uucuuuuuuuuuuuuuugagac

SEQ ID NO: 2688938 - RNA, 13 nt, Human
uugaaaagagaca

SEQ ID NO: 2688939 - RNA, 15 nt, Human
uugaaaagcagacau

SEQ ID NO: 2688940 - RNA, 16 nt, Human
uugaaaacuucagaag

SEQ ID NO: 2688941 - RNA, 18 nt, Human
uugaaaacuucagaagca

SEQ ID NO: 2688942 - RNA, 22 nt, Human
uugaaaaguaauauuuauuaaa

SEQ ID NO: 2688943 - RNA, 17 nt, Human
uugaaaaguaauauuua

SEQ ID NO: 2688944 - RNA, 17 nt, Human
uugaaaagcagacauuu

SEQ ID NO: 2688945 - RNA, 18 nt, Human papillomavirus type 31
auaacaguaaaacagcaa

SEQ ID NO: 2688946 - RNA, 22 nt, Human papillomavirus type 31
aaccuuaacauauauaaguaca

SEQ ID NO: 2688947 - RNA, 23 nt, Human papillomavirus type 31
ggccaaagccuuacaagcuauug

SEQ ID NO: 2688948 - RNA, 15 nt, Human papillomavirus type 31
acauaaaaaugcuau

SEQ ID NO: 2688949 - RNA, 14 nt, Human papillomavirus type 31
uauuguaaccuuaa

SEQ ID NO: 2688950 - RNA, 18 nt, Human papillomavirus type 31
cacaguauuaaccaccag

SEQ ID NO: 2688951 - RNA, 23 nt, Human papillomavirus type 31
ugugcuguauuguauaugugugu

SEQ ID NO: 2688952 - RNA, 21 nt, Human papillomavirus type 31
caugcauuauacuaacuggaa

SEQ ID NO: 2688953 - RNA, 13 nt, Human papillomavirus type 31
auccaaacaaauu

SEQ ID NO: 2688954 - RNA, 18 nt, Human papillomavirus type 31
uguaugaacaagugucau

SEQ ID NO: 2688955 - RNA, 19 nt, Human papillomavirus type 31
auaaaaaugcuauuguaac

SEQ ID NO: 2688956 - RNA, 17 nt, Human papillomavirus type 31
cauguacuuauuucugc

SEQ ID NO: 2688957 - RNA, 14 nt, Human papillomavirus type 31
gguauauguauguu

SEQ ID NO: 2688958 - RNA, 17 nt, Human papillomavirus type 31
guauaccuauuagacca

SEQ ID NO: 2688959 - RNA, 14 nt, Human papillomavirus type 31
ucaggcagaagcag

SEQ ID NO: 2688960 - RNA, 20 nt, Human papillomavirus type 31
auagauggccaauguacugu

SEQ ID NO: 2688961 - RNA, 15 nt, Human papillomavirus type 31
uauaaagcaagagaa

SEQ ID NO: 2688962 - RNA, 21 nt, Human papillomavirus type 31
auacuguuguuuguauuggua

SEQ ID NO: 2688963 - RNA, 16 nt, Human papillomavirus type 31
gucuguauguguaugu

SEQ ID NO: 2688964 - RNA, 14 nt, Human papillomavirus type 31
auguauacaacaau

SEQ ID NO: 2688965 - RNA, 14 nt, Human papillomavirus type 31
uauuaaauaaauuu

SEQ ID NO: 2688966 - RNA, 16 nt, Human papillomavirus type 31
ugaacuuccagacagc

SEQ ID NO: 2688967 - RNA, 19 nt, Human papillomavirus type 31
uguaauucauacacaugca

SEQ ID NO: 2688968 - RNA, 12 nt, Human papillomavirus type 31
gauacuggggag

SEQ ID NO: 2688969 - RNA, 17 nt, Human papillomavirus type 31
caccuacguugcaagac

SEQ ID NO: 2688970 - RNA, 23 nt, Human papillomavirus type 31
acuuuuuuuuuauuauuaccaug

SEQ ID NO: 2688971 - RNA, 17 nt, Human papillomavirus type 31
cugaccuccacuguuau

SEQ ID NO: 2688972 - RNA, 19 nt, Human papillomavirus type 31
cauugugcuaugcuuuuug

SEQ ID NO: 2688973 - RNA, 17 nt, Human papillomavirus type 31
cguguguacuuguauau

SEQ ID NO: 2688974 - RNA, 19 nt, Human papillomavirus type 31
aguagugauacuggggagg

SEQ ID NO: 2688975 - RNA, 14 nt, Human papillomavirus type 31
agugucaacaggau

SEQ ID NO: 2688976 - RNA, 17 nt, Human papillomavirus type 31
caguaauugacagacag

SEQ ID NO: 2688977 - RNA, 16 nt, Human papillomavirus type 31
cuaugcuuuuugcuuu

SEQ ID NO: 2688978 - RNA, 21 nt, Human papillomavirus type 31
uugaugacacugaaaacucua

SEQ ID NO: 2688979 - RNA, 14 nt, Human papillomavirus type 31
uuguaaccuuaaca

SEQ ID NO: 2688980 - RNA, 22 nt, Human papillomavirus type 31
auguaauacaugugucuguaug

SEQ ID NO: 2688981 - RNA, 14 nt, Human papillomavirus type 31
ucacgccauaguaa

SEQ ID NO: 2688982 - RNA, 19 nt, Human papillomavirus type 31
uacuguuguggaagggcaa

SEQ ID NO: 2688983 - RNA, 18 nt, Human papillomavirus type 31
aacacgaaccaacauaua

SEQ ID NO: 2688984 - RNA, 17 nt, Human papillomavirus type 31
auguacuguuguggaag

SEQ ID NO: 2688985 - RNA, 14 nt, Human papillomavirus type 31
ggaggaacaugcag

SEQ ID NO: 2688986 - RNA, 23 nt, Human papillomavirus type 31
aagagaaaugggaauacacagua

SEQ ID NO: 2688987 - RNA, 17 nt, Human papillomavirus type 31
uuuuuuacuuguguaua

SEQ ID NO: 2688988 - RNA, 21 nt, Human papillomavirus type 31
auagaacauacuaccauugca

SEQ ID NO: 2688989 - RNA, 15 nt, Human papillomavirus type 31
uauuccauaccuaaa

SEQ ID NO: 2688990 - RNA, 17 nt, Human papillomavirus type 31
uauagacuauuggaaac

SEQ ID NO: 2688991 - RNA, 16 nt, Human papillomavirus type 31
gaaaauaacaguaaaa

SEQ ID NO: 2688992 - RNA, 21 nt, Human papillomavirus type 31
acacugaauacaaaaaugagg

SEQ ID NO: 2688993 - RNA, 20 nt, Human papillomavirus type 31
cuguguguguuguguauguu

SEQ ID NO: 2688994 - RNA, 23 nt, Human papillomavirus type 31
uaaauaaauuugaugacacugaa

SEQ ID NO: 2688995 - RNA, 15 nt, Human papillomavirus type 31
cuauuagaccaccag

SEQ ID NO: 2688996 - RNA, 15 nt, Human papillomavirus type 31
auuuuuuaaauacug

SEQ ID NO: 2688997 - RNA, 20 nt, Human papillomavirus type 31
aaacauuaaauaacacugaa

SEQ ID NO: 2688998 - RNA, 14 nt, Human papillomavirus type 31
guauguuuauguau

SEQ ID NO: 2688999 - RNA, 13 nt, Human papillomavirus type 31
gacagacagacag

SEQ ID NO: 2689000 - RNA, 15 nt, Human papillomavirus type 31
auacacaguauuaac

SEQ ID NO: 2689001 - RNA, 15 nt, Human papillomavirus type 31
ugauguuggaaacau

SEQ ID NO: 2689002 - RNA, 21 nt, Human papillomavirus type 31
uauucgacuugaauguguauu

SEQ ID NO: 2689003 - RNA, 17 nt, Human papillomavirus type 31
uauguuguccuuauaua

SEQ ID NO: 2689004 - RNA, 17 nt, Human papillomavirus type 31
uucgcauauugcaagag

SEQ ID NO: 2689005 - RNA, 23 nt, Human papillomavirus type 31
uauauauguauaguauguuaugu

SEQ ID NO: 2689006 - RNA, 13 nt, Human papillomavirus type 31
auauacuguagag

SEQ ID NO: 2689007 - RNA, 16 nt, Human papillomavirus type 31
caaaugauguuggaaa

SEQ ID NO: 2689008 - RNA, 15 nt, Human papillomavirus type 31
cagacagacagggga

SEQ ID NO: 2689009 - RNA, 13 nt, Human papillomavirus type 31
caaguauaccuau

SEQ ID NO: 2689010 - RNA, 18 nt, Human papillomavirus type 31
aaacauggauauacugua

SEQ ID NO: 2689011 - RNA, 14 nt, Human papillomavirus type 31
cacaggaagcggag

SEQ ID NO: 2689012 - RNA, 22 nt, Human papillomavirus type 31
aguauguuauguguguauguau

SEQ ID NO: 2689013 - RNA, 21 nt, Human papillomavirus type 31
guguguacuuguauauaugua

SEQ ID NO: 2689014 - RNA, 18 nt, Human papillomavirus type 31
cacgaaccaacauauauu

SEQ ID NO: 2689015 - RNA, 13 nt, Human papillomavirus type 31
gaggauaugguug

SEQ ID NO: 2689016 - RNA, 20 nt, Human papillomavirus type 31
auaguauguuauguguguau

SEQ ID NO: 2689017 - RNA, 22 nt, Human papillomavirus type 31
auaccuguguguguuguguaug

SEQ ID NO: 2689018 - RNA, 22 nt, Human papillomavirus type 31
agaagcaguaauugacagacag

SEQ ID NO: 2689019 - RNA, 13 nt, Human papillomavirus type 31
ucuacauggcauu

SEQ ID NO: 2689020 - RNA, 19 nt, Human papillomavirus type 31
uguauuaauguauaaagca

SEQ ID NO: 2689021 - RNA, 19 nt, Human papillomavirus type 31
gcaguaauugacagacaga

SEQ ID NO: 2689022 - RNA, 23 nt, Human papillomavirus type 31
uauguaugcguguguacuuguau

SEQ ID NO: 2689023 - RNA, 12 nt, Human papillomavirus type 31
cacaggaagcgg

SEQ ID NO: 2689024 - RNA, 13 nt, Human papillomavirus type 31
uuaaaaaaacaug

SEQ ID NO: 2689025 - RNA, 15 nt, Human papillomavirus type 31
uaacacugaauacaa

SEQ ID NO: 2689026 - RNA, 22 nt, Human papillomavirus type 31
gcaacacuacuauuauuaauug

SEQ ID NO: 2689027 - RNA, 19 nt, Human papillomavirus type 31
ugucaguaucaaaggccaa

SEQ ID NO: 2689028 - RNA, 21 nt, Human papillomavirus type 31
cuagacuguaacuacaauggc

SEQ ID NO: 2689029 - RNA, 18 nt, Human papillomavirus type 31
auaaacaauuguaugaac

SEQ ID NO: 2689030 - RNA, 14 nt, Human papillomavirus type 31
gucauguacuuauu

SEQ ID NO: 2689031 - RNA, 21 nt, Human papillomavirus type 31
cuugaacuguauuuaacugca

SEQ ID NO: 2689032 - RNA, 15 nt, Human papillomavirus type 31
aggcauuguuucaug

SEQ ID NO: 2689033 - RNA, 23 nt, Human papillomavirus type 31
caaauuuggauuuccugauacau

SEQ ID NO: 2689034 - RNA, 23 nt, Human papillomavirus type 31
acucuuugaacuuccagacagcg

SEQ ID NO: 2689035 - RNA, 18 nt, Human papillomavirus type 31
gaauguguauuaauguau

SEQ ID NO: 2689036 - RNA, 16 nt, Human papillomavirus type 31
ugcaaccucuccauua

SEQ ID NO: 2689037 - RNA, 12 nt, Human papillomavirus type 31
auguuguccuua

SEQ ID NO: 2689038 - RNA, 16 nt, Human papillomavirus type 31
uacuuguauauaugua

SEQ ID NO: 2689039 - RNA, 19 nt, Human papillomavirus type 31
caagagcuguuaaugggcu

SEQ ID NO: 2689040 - RNA, 18 nt, Human papillomavirus type 31
uauaaacaauuguaugaa

SEQ ID NO: 2689041 - RNA, 16 nt, Human papillomavirus type 31
aaugauugaacuaaau

SEQ ID NO: 2689042 - RNA, 19 nt, Human papillomavirus type 31
gacacauccaauuacaaua

SEQ ID NO: 2689043 - RNA, 17 nt, Human papillomavirus type 31
cggaggaacaugcagag

SEQ ID NO: 2689044 - RNA, 15 nt, Human papillomavirus type 31
caacaaucaggcaga

SEQ ID NO: 2689045 - RNA, 16 nt, Human papillomavirus type 31
gguacagauggggagg

SEQ ID NO: 2689046 - RNA, 14 nt, Human papillomavirus type 31
caaaaaugaggacu

SEQ ID NO: 2689047 - RNA, 13 nt, Human papillomavirus type 31
acuaacuggaaau

SEQ ID NO: 2689048 - RNA, 18 nt, Human papillomavirus type 31
guccacuugugcugucug

SEQ ID NO: 2689049 - RNA, 23 nt, Human papillomavirus type 31
ugucauacguccacuugugcugu

SEQ ID NO: 2689050 - RNA, 13 nt, Human papillomavirus type 31
auugacagacaga

SEQ ID NO: 2689051 - RNA, 23 nt, Human papillomavirus type 31
acaauuauaucaaacauguaaag

SEQ ID NO: 2689052 - RNA, 21 nt, Human papillomavirus type 31
caaucaggcagaagcagagac

SEQ ID NO: 2689053 - RNA, 17 nt, Human papillomavirus type 31
aucuuuuuauaauccug

SEQ ID NO: 2689054 - RNA, 19 nt, Human papillomavirus type 31
cggaggaacaugcagaggc

SEQ ID NO: 2689055 - RNA, 16 nt, Human papillomavirus type 31
auauaccuauguauag

SEQ ID NO: 2689056 - RNA, 13 nt, Human papillomavirus type 31
gcaaauauauuaa

SEQ ID NO: 2689057 - RNA, 19 nt, Human papillomavirus type 31
gacuggacaaugcagcaaa

SEQ ID NO: 2689058 - RNA, 16 nt, Human papillomavirus type 31
auacaugugucuguau

SEQ ID NO: 2689059 - RNA, 15 nt, Human papillomavirus type 31
uauaucaaacaugua

SEQ ID NO: 2689060 - RNA, 20 nt, Human papillomavirus type 31
uauuuaggguucguuuacca

SEQ ID NO: 2689061 - RNA, 18 nt, Human papillomavirus type 31
gucaguguaagucuacac

SEQ ID NO: 2689062 - RNA, 23 nt, Human papillomavirus type 31
agagacgauuuuuuaaauacugu

SEQ ID NO: 2689063 - RNA, 20 nt, Human papillomavirus type 31
ucgugugccccaacuguucu

SEQ ID NO: 2689064 - RNA, 21 nt, Human papillomavirus type 31
auucauacacaugcaucuuuu

SEQ ID NO: 2689065 - RNA, 17 nt, Human papillomavirus type 31
ugugccccaacuguucu

SEQ ID NO: 2689066 - RNA, 19 nt, Human papillomavirus type 31
agugucaucuacauggcau

SEQ ID NO: 2689067 - RNA, 19 nt, Human papillomavirus type 31
gugucaacaggauauauga

SEQ ID NO: 2689068 - RNA, 14 nt, Human papillomavirus type 31
uaugcguguguacu

SEQ ID NO: 2689069 - RNA, 16 nt, Human papillomavirus type 31
cgugugccccaacugu

SEQ ID NO: 2689070 - RNA, 14 nt, Human papillomavirus type 31
ugguauauguaugu

SEQ ID NO: 2689071 - RNA, 17 nt, Human papillomavirus type 31
aauaaauuugaugacac

SEQ ID NO: 2689072 - RNA, 15 nt, Human papillomavirus type 31
cugucccagugucua

SEQ ID NO: 2689073 - RNA, 22 nt, Human papillomavirus type 31
gaagcaguaauugacagacaga

SEQ ID NO: 2689074 - RNA, 13 nt, Human papillomavirus type 31
uauauuccauuau

SEQ ID NO: 2689075 - RNA, 23 nt, Human papillomavirus type 31
acaauggcugauccagcagguac

SEQ ID NO: 2689076 - RNA, 16 nt, Human papillomavirus type 31
uuauacuaacuggaaa

SEQ ID NO: 2689077 - RNA, 17 nt, Human papillomavirus type 31
aucagacguuauaccua

SEQ ID NO: 2689078 - RNA, 17 nt, Human papillomavirus type 31
uuuauaauccugaaacu

SEQ ID NO: 2689079 - RNA, 13 nt, Human papillomavirus type 31
uccuucuacagua

SEQ ID NO: 2689080 - RNA, 15 nt, Human papillomavirus type 31
uccucccaauaguca

SEQ ID NO: 2689081 - RNA, 13 nt, Human papillomavirus type 31
guuccuacuuguu

SEQ ID NO: 2689082 - RNA, 18 nt, Human papillomavirus type 31
auggcugauccagcaggu

SEQ ID NO: 2689083 - RNA, 16 nt, Human papillomavirus type 31
cagguacagaugggga

SEQ ID NO: 2689084 - RNA, 20 nt, Human papillomavirus type 31
cuacugucuacuuaccaccu

SEQ ID NO: 2689085 - RNA, 14 nt, Human papillomavirus type 31
uaguuguaccaaag

SEQ ID NO: 2689086 - RNA, 14 nt, Human papillomavirus type 31
ugugcugucugugu

SEQ ID NO: 2689087 - RNA, 19 nt, Human papillomavirus type 31
ugaggacuggacaaugcag

SEQ ID NO: 2689088 - RNA, 14 nt, Human papillomavirus type 31
gggaggggacggga

SEQ ID NO: 2689089 - RNA, 15 nt, Human papillomavirus type 31
gugucgguauaugca

SEQ ID NO: 2689090 - RNA, 22 nt, Human papillomavirus type 31
cugaaacucaacgcuuaguuug

SEQ ID NO: 2689091 - RNA, 18 nt, Human papillomavirus type 31
acuuguauauauguauag

SEQ ID NO: 2689092 - RNA, 16 nt, Human papillomavirus type 31
ccagcagguacagaug

SEQ ID NO: 2689093 - RNA, 17 nt, Human papillomavirus type 31
uguguauaccugugugu

SEQ ID NO: 2689094 - RNA, 12 nt, Human papillomavirus type 31
uguauauauguu

SEQ ID NO: 2689095 - RNA, 22 nt, Human papillomavirus type 31
aaacauguaaagcagcagguac

SEQ ID NO: 2689096 - RNA, 22 nt, Human papillomavirus type 31
aauugacagacagacaggggac

SEQ ID NO: 2689097 - RNA, 22 nt, Human papillomavirus type 31
uauagauggccaauguacuguu

SEQ ID NO: 2689098 - RNA, 22 nt, Human papillomavirus type 31
cugucccagugucuaaaguugu

SEQ ID NO: 2689099 - RNA, 15 nt, Human papillomavirus type 31
aggcugugcagguuc

SEQ ID NO: 2689100 - RNA, 15 nt, Human papillomavirus type 31
uuguuuuuguauaua

SEQ ID NO: 2689101 - RNA, 22 nt, Human papillomavirus type 31
cuacuagacuguaacuacaaug

SEQ ID NO: 2689102 - RNA, 17 nt, Human papillomavirus type 31
uauauuaaaauguuuaa

SEQ ID NO: 2689103 - RNA, 13 nt, Human papillomavirus type 31
auguuguccuuau

SEQ ID NO: 2689104 - RNA, 13 nt, Human papillomavirus type 31
auugguauuggua

SEQ ID NO: 2689105 - RNA, 14 nt, Human papillomavirus type 31
uuuugugugcuacu

SEQ ID NO: 2689106 - RNA, 12 nt, Human papillomavirus type 31
uacuuguuccug

SEQ ID NO: 2689107 - RNA, 22 nt, Human papillomavirus type 31
uguuuaagauauaggcugucaa

SEQ ID NO: 2689108 - RNA, 15 nt, Human papillomavirus type 31
cuauguauguuaaua

SEQ ID NO: 2689109 - RNA, 22 nt, Human papillomavirus type 31
acaggaagcggaggaacaugca

SEQ ID NO: 2689110 - RNA, 18 nt, Human papillomavirus type 31
uacacaugcaucuuuuuu

SEQ ID NO: 2689111 - RNA, 18 nt, Human papillomavirus type 31
ccaaacaaauuuggauuu

SEQ ID NO: 2689112 - RNA, 17 nt, Human papillomavirus type 31
aggugaugcaaauauau

SEQ ID NO: 2689113 - RNA, 13 nt, Human papillomavirus type 31
uauuaauugugau

SEQ ID NO: 2689114 - RNA, 17 nt, Human papillomavirus type 31
gaaccaacauauauuau

SEQ ID NO: 2689115 - RNA, 22 nt, Human papillomavirus type 31
ucauauagacuauuggaaacau

SEQ ID NO: 2689116 - RNA, 16 nt, Human papillomavirus type 31
uauuguuccuacuugu

SEQ ID NO: 2689117 - RNA, 22 nt, Human papillomavirus type 31
gaagacucuuugaacuuccaga

SEQ ID NO: 2689118 - RNA, 17 nt, Human papillomavirus type 31
acuguauuuaacugcac

SEQ ID NO: 2689119 - RNA, 14 nt, Human papillomavirus type 31
agugauacugggga

SEQ ID NO: 2689120 - RNA, 13 nt, Human papillomavirus type 31
ugaggacuggaca

SEQ ID NO: 2689121 - RNA, 16 nt, Human papillomavirus type 31
caagucuugaacugua

SEQ ID NO: 2689122 - RNA, 21 nt, Human papillomavirus type 31
agcuauugaacuacaaaugau

SEQ ID NO: 2689123 - RNA, 18 nt, Human papillomavirus type 31
auuucagaggacgaaaau

SEQ ID NO: 2689124 - RNA, 14 nt, Human papillomavirus type 31
uauguauguuuaug

SEQ ID NO: 2689125 - RNA, 16 nt, Human papillomavirus type 31
caaccucuccauuacg

SEQ ID NO: 2689126 - RNA, 12 nt, Human papillomavirus type 31
uuuugugugcua

SEQ ID NO: 2689127 - RNA, 21 nt, Human papillomavirus type 31
gacuauuuagccuaaugauug

SEQ ID NO: 2689128 - RNA, 15 nt, Human papillomavirus type 31
uguagaggugcaauu

SEQ ID NO: 2689129 - RNA, 21 nt, Human papillomavirus type 31
auacaugugucuguaugugua

SEQ ID NO: 2689130 - RNA, 21 nt, Human papillomavirus type 31
uggcugauccagcagguacag

SEQ ID NO: 2689131 - RNA, 16 nt, Human papillomavirus type 31
cggaggaacaugcaga

SEQ ID NO: 2689132 - RNA, 14 nt, Human papillomavirus type 31
gaggacuggacaau

SEQ ID NO: 2689133 - RNA, 15 nt, Human papillomavirus type 31
uuaaaaaaacaugga

SEQ ID NO: 2689134 - RNA, 21 nt, Human papillomavirus type 31
acacccgguccguuuuuugca

SEQ ID NO: 2689135 - RNA, 19 nt, Human papillomavirus type 31
uggacaaugcagcaaacaa

SEQ ID NO: 2689136 - RNA, 16 nt, Human papillomavirus type 31
auauuccauuauuugu

SEQ ID NO: 2689137 - RNA, 17 nt, Human papillomavirus type 31
agguacagauggggagg

SEQ ID NO: 2689138 - RNA, 22 nt, Human papillomavirus type 31
uucuacaguaagcauugugcua

SEQ ID NO: 2689139 - RNA, 14 nt, Human papillomavirus type 31
gaacuacaaaugau

SEQ ID NO: 2689140 - RNA, 13 nt, Human papillomavirus type 31
ugugcuacuauuu

SEQ ID NO: 2689141 - RNA, 19 nt, Human papillomavirus type 31
uuguaugaacaagugucau

SEQ ID NO: 2689142 - RNA, 22 nt, Human papillomavirus type 31
gacaguccagcuggacaagcag

SEQ ID NO: 2689143 - RNA, 18 nt, Human papillomavirus type 31
uauuaauguauaaagcaa

SEQ ID NO: 2689144 - RNA, 15 nt, Human papillomavirus type 31
auacuaacuggaaau

SEQ ID NO: 2689145 - RNA, 17 nt, Human papillomavirus type 31
ucaacaguaacuuuuuu

SEQ ID NO: 2689146 - RNA, 20 nt, Human papillomavirus type 31
uuauauacacccuauuagua

SEQ ID NO: 2689147 - RNA, 19 nt, Human papillomavirus type 31
acuuaaaaggugaugcaaa

SEQ ID NO: 2689148 - RNA, 15 nt, Human papillomavirus type 31
ugacagacagacagg

SEQ ID NO: 2689149 - RNA, 21 nt, Human papillomavirus type 31
gaacuaaauauuucuacagua

SEQ ID NO: 2689150 - RNA, 18 nt, Human papillomavirus type 31
cauacuauuacuauuuua

SEQ ID NO: 2689151 - RNA, 15 nt, Human papillomavirus type 31
uauaugguauaugua

SEQ ID NO: 2689152 - RNA, 16 nt, Human papillomavirus type 31
acuuguauauauguau

SEQ ID NO: 2689153 - RNA, 18 nt, Human papillomavirus type 31
aacacugaauacaaaaau

SEQ ID NO: 2689154 - RNA, 13 nt, Human papillomavirus type 31
guguacagagcac

SEQ ID NO: 2689155 - RNA, 23 nt, Human papillomavirus type 31
uccagcagguacagauggggagg

SEQ ID NO: 2689156 - RNA, 18 nt, Human papillomavirus type 31
cauagacaguccagcugg

SEQ ID NO: 2689157 - RNA, 14 nt, Human papillomavirus type 31
auuauuaccaugcg

SEQ ID NO: 2689158 - RNA, 17 nt, Human papillomavirus type 31
uauaaacaauuguauga

SEQ ID NO: 2689159 - RNA, 18 nt, Human papillomavirus type 31
acacaugcaucuuuuuua

SEQ ID NO: 2689160 - RNA, 20 nt, Human papillomavirus type 31
aaauuuauauaccuauguau

SEQ ID NO: 2689161 - RNA, 12 nt, Human papillomavirus type 31
ugugaucauaua

SEQ ID NO: 2689162 - RNA, 18 nt, Human papillomavirus type 31
guaggccauccauauuau

SEQ ID NO: 2689163 - RNA, 13 nt, Human papillomavirus type 31
cucuaauagauau

SEQ ID NO: 2689164 - RNA, 17 nt, Human papillomavirus type 31
uaaacgugcgucugcua

SEQ ID NO: 2689165 - RNA, 18 nt, Human papillomavirus type 31
aaauaacacugaauacaa

SEQ ID NO: 2689166 - RNA, 17 nt, Human papillomavirus type 31
auguguuagauuugcaa

SEQ ID NO: 2689167 - RNA, 23 nt, Human papillomavirus type 31
cugauacaucuuuuuauaauccu

SEQ ID NO: 2689168 - RNA, 23 nt, Human papillomavirus type 31
gagcaauuacccgacagcucaga

SEQ ID NO: 2689169 - RNA, 21 nt, Human papillomavirus type 31
gcaauuacccgacagcucaga

SEQ ID NO: 2689170 - RNA, 15 nt, Human papillomavirus type 31
uacuguuguuuguau

SEQ ID NO: 2689171 - RNA, 20 nt, Human papillomavirus type 31
uauggguguuuuuuuuggug

SEQ ID NO: 2689172 - RNA, 20 nt, Human papillomavirus type 31
agcauugugcuaugcuuuuu

SEQ ID NO: 2689173 - RNA, 15 nt, Human papillomavirus type 31
uuuguguguuauaua

SEQ ID NO: 2689174 - RNA, 20 nt, Human papillomavirus type 31
aucugaggcaaguauaccua

SEQ ID NO: 2689175 - RNA, 15 nt, Human papillomavirus type 31
caaaugauguuggaa

SEQ ID NO: 2689176 - RNA, 16 nt, Human papillomavirus type 31
aucaggcagaagcaga

SEQ ID NO: 2689177 - RNA, 17 nt, Human papillomavirus type 31
uuauauaccuauguaua

SEQ ID NO: 2689178 - RNA, 14 nt, Human papillomavirus type 31
auauuucuacagua

SEQ ID NO: 2689179 - RNA, 15 nt, Human papillomavirus type 31
gauauaggcugucaa

SEQ ID NO: 2689180 - RNA, 21 nt, Human papillomavirus type 31
guaguccuuuaagugauauua

SEQ ID NO: 2689181 - RNA, 18 nt, Human papillomavirus type 31
gaggaacaugcagaggcu

SEQ ID NO: 2689182 - RNA, 21 nt, Human papillomavirus type 31
gaaacauuaaauaacacugaa

SEQ ID NO: 2689183 - RNA, 19 nt, Human papillomavirus type 31
uauugcaagagcuguuaau

SEQ ID NO: 2689184 - RNA, 23 nt, Human papillomavirus type 31
ugauguuggaaacauuaaauaac

SEQ ID NO: 2689185 - RNA, 18 nt, Human papillomavirus type 31
uauaauccugaaacucaa

SEQ ID NO: 2689186 - RNA, 17 nt, Human papillomavirus type 31
agauauaggcugucaaa

SEQ ID NO: 2689187 - RNA, 14 nt, Human papillomavirus type 31
gacauguacagaug

SEQ ID NO: 2689188 - RNA, 18 nt, Human papillomavirus type 31
agcaaacaagucuugaac

SEQ ID NO: 2689189 - RNA, 17 nt, Human papillomavirus type 31
aauguacuguuguggaa

SEQ ID NO: 2689190 - RNA, 15 nt, Human papillomavirus type 31
ugucauagacagucc

SEQ ID NO: 2689191 - RNA, 23 nt, Human papillomavirus type 31
auacaugugucuguauguguaug

SEQ ID NO: 2689192 - RNA, 14 nt, Human papillomavirus type 31
cgggaugcaauggu

SEQ ID NO: 2689193 - RNA, 21 nt, Human papillomavirus type 31
acaggggacaacauuucagag

SEQ ID NO: 2689194 - RNA, 23 nt, Human papillomavirus type 31
ucagaggacgaaaaugaagacag

SEQ ID NO: 2689195 - RNA, 17 nt, Human papillomavirus type 31
ugcuaugcuuuuugcuu

SEQ ID NO: 2689196 - RNA, 16 nt, Human papillomavirus type 31
uggcugauccagcagg

SEQ ID NO: 2689197 - RNA, 22 nt, Human papillomavirus type 31
acaaaaaugaggacuggacaau

SEQ ID NO: 2689198 - RNA, 13 nt, Human papillomavirus type 31
uguguauguaugc

SEQ ID NO: 2689199 - RNA, 22 nt, Human papillomavirus type 31
guaacauacuauuacuauuuua

SEQ ID NO: 2689200 - RNA, 18 nt, Human papillomavirus type 31
auugacagacagacaggg

SEQ ID NO: 2689201 - RNA, 16 nt, Human papillomavirus type 31
uaaacuauuguuccua

SEQ ID NO: 2689202 - RNA, 20 nt, Human papillomavirus type 31
auguuggaaacauuaaauaa

SEQ ID NO: 2689203 - RNA, 16 nt, Human papillomavirus type 31
agauggggaggggacg

SEQ ID NO: 2689204 - RNA, 14 nt, Human papillomavirus type 31
acaagcuauugaac

SEQ ID NO: 2689205 - RNA, 11 nt, Human papillomavirus type 31
ccagacagcgg

SEQ ID NO: 2689206 - RNA, 15 nt, Human papillomavirus type 31
uauguaauacaugug

SEQ ID NO: 2689207 - RNA, 23 nt, Human papillomavirus type 31
ucuaaaacgaaaguauguaggua

SEQ ID NO: 2689208 - RNA, 17 nt, Human papillomavirus type 31
ugugucgguauaugcaa

SEQ ID NO: 2689209 - RNA, 12 nt, Human papillomavirus type 31
auguuggaaaca

SEQ ID NO: 2689210 - RNA, 19 nt, Human papillomavirus type 31
caaaauauaaacaauugua

SEQ ID NO: 2689211 - RNA, 12 nt, Human papillomavirus type 31
uauaauaaacuu

SEQ ID NO: 2689212 - RNA, 14 nt, Human papillomavirus type 31
uguauauauguaua

SEQ ID NO: 2689213 - RNA, 15 nt, Human papillomavirus type 31
uauagauggccaaug

SEQ ID NO: 2689214 - RNA, 22 nt, Human papillomavirus type 31
ugauguacacaacaccaugcau

SEQ ID NO: 2689215 - RNA, 19 nt, Human papillomavirus type 31
uuuauguagaagcaguaau

SEQ ID NO: 2689216 - RNA, 12 nt, Human papillomavirus type 31
cuugugcugucu

SEQ ID NO: 2689217 - RNA, 18 nt, Human papillomavirus type 31
ugucaacaggauauauga

SEQ ID NO: 2689218 - RNA, 15 nt, Human papillomavirus type 31
uauuguauaugugug

SEQ ID NO: 2689219 - RNA, 15 nt, Human papillomavirus type 31
ccugaggcaacugac

SEQ ID NO: 2689220 - RNA, 22 nt, Human papillomavirus type 31
caguaauugacagacagacagg

SEQ ID NO: 2689221 - RNA, 18 nt, Human papillomavirus type 31
aaauuugaugacacugaa

SEQ ID NO: 2689222 - RNA, 22 nt, Human papillomavirus type 31
guaauugacagacagacagggg

SEQ ID NO: 2689223 - RNA, 13 nt, Human papillomavirus type 31
uggauauacugua

SEQ ID NO: 2689224 - RNA, 12 nt, Human papillomavirus type 31
auagucauguac

SEQ ID NO: 2689225 - RNA, 14 nt, Human papillomavirus type 31
aauaaacuuuuuua

SEQ ID NO: 2689226 - RNA, 16 nt, Human papillomavirus type 31
ugcaacacuacuauua

SEQ ID NO: 2689227 - RNA, 19 nt, Human papillomavirus type 31
ugagcaauuacccgacagc

SEQ ID NO: 2689228 - RNA, 13 nt, Human papillomavirus type 31
caugcacaggaag

SEQ ID NO: 2689229 - RNA, 16 nt, Human papillomavirus type 31
ggccaauguacuguug

SEQ ID NO: 2689230 - RNA, 17 nt, Human papillomavirus type 31
uacuauuugugugucuu

SEQ ID NO: 2689231 - RNA, 20 nt, Human papillomavirus type 31
accuacaggguguuuaaaaa

SEQ ID NO: 2689232 - RNA, 15 nt, Human papillomavirus type 31
caguaauugacagac

SEQ ID NO: 2689233 - RNA, 13 nt, Human papillomavirus type 31
ugauguuggaaac

SEQ ID NO: 2689234 - RNA, 22 nt, Human papillomavirus type 31
ccagcuggacaagcagaaccgg

SEQ ID NO: 2689235 - RNA, 21 nt, Human papillomavirus type 31
gucaacaggauauaugacuau

SEQ ID NO: 2689236 - RNA, 16 nt, Human papillomavirus type 31
uaaaacagcaaaacga

SEQ ID NO: 2689237 - RNA, 14 nt, Human papillomavirus type 31
gcuggacaagcaga

SEQ ID NO: 2689238 - RNA, 16 nt, Human papillomavirus type 31
agucaacaguaacuuu

SEQ ID NO: 2689239 - RNA, 15 nt, Human papillomavirus type 31
caguaaaacagcaaa

SEQ ID NO: 2689240 - RNA, 18 nt, Human papillomavirus type 31
caacaaucaggcagaagc

SEQ ID NO: 2689241 - RNA, 21 nt, Human papillomavirus type 31
ggaggggacgggaugcaaugg

SEQ ID NO: 2689242 - RNA, 16 nt, Human papillomavirus type 31
uuaagugauauuagua

SEQ ID NO: 2689243 - RNA, 18 nt, Human papillomavirus type 31
gaaaauaacaguaaaaca

SEQ ID NO: 2689244 - RNA, 15 nt, Human papillomavirus type 31
uguauagauggccaa

SEQ ID NO: 2689245 - RNA, 16 nt, Human papillomavirus type 31
uccauaccuaaaucug

SEQ ID NO: 2689246 - RNA, 13 nt, Human papillomavirus type 31
gaugcaaugguug

SEQ ID NO: 2689247 - RNA, 13 nt, Human papillomavirus type 31
aaugcagcaaaca

SEQ ID NO: 2689248 - RNA, 16 nt, Human papillomavirus type 31
ugaggacuggacaaug

SEQ ID NO: 2689249 - RNA, 19 nt, Human papillomavirus type 31
ugugcagguucuaaaacga

SEQ ID NO: 2689250 - RNA, 21 nt, Human papillomavirus type 31
uugaauguguauuaauguaua

SEQ ID NO: 2689251 - RNA, 15 nt, Human papillomavirus type 31
cguuuguguguacag

SEQ ID NO: 2689252 - RNA, 21 nt, Human papillomavirus type 31
acuccauuuugauuuuaugca

SEQ ID NO: 2689253 - RNA, 13 nt, Human papillomavirus type 31
auguguguaugua

SEQ ID NO: 2689254 - RNA, 13 nt, Human papillomavirus type 31
cagacagacaggg

SEQ ID NO: 2689255 - RNA, 17 nt, Human papillomavirus type 31
uuuauggguuauugcaa

SEQ ID NO: 2689256 - RNA, 16 nt, Human papillomavirus type 31
caagagaaaugggaau

SEQ ID NO: 2689257 - RNA, 16 nt, Human papillomavirus type 31
cuaaaaaaauaguugu

SEQ ID NO: 2689258 - RNA, 14 nt, Human papillomavirus type 31
ugcaagagcuguua

SEQ ID NO: 2689259 - RNA, 19 nt, Human papillomavirus type 31
ugaacuguauuuaacugca

SEQ ID NO: 2689260 - RNA, 17 nt, Human papillomavirus type 31
uaauguauaaagcaaga

SEQ ID NO: 2689261 - RNA, 21 nt, Human papillomavirus type 31
uuauauaugguauauguaugu

SEQ ID NO: 2689262 - RNA, 16 nt, Human papillomavirus type 31
uaacaguaaaacagca

SEQ ID NO: 2689263 - RNA, 15 nt, Human papillomavirus type 31
gcagaggcugugcag

SEQ ID NO: 2689264 - RNA, 22 nt, Human papillomavirus type 31
uacuguaaaaauaccuaacaca

SEQ ID NO: 2689265 - RNA, 19 nt, Human papillomavirus type 31
gguuaaaagcuauaugcau

SEQ ID NO: 2689266 - RNA, 23 nt, Human papillomavirus type 31
ggaugucauagacaguccagcug

SEQ ID NO: 2689267 - RNA, 16 nt, Human papillomavirus type 31
gaaaaugaagacagua

SEQ ID NO: 2689268 - RNA, 22 nt, Human papillomavirus type 31
uguguacuuguauauauguaua

SEQ ID NO: 2689269 - RNA, 22 nt, Human papillomavirus type 31
cuagacuguaacuacaauggcu

SEQ ID NO: 2689270 - RNA, 20 nt, Human papillomavirus type 31
guccaucagacguuauaccu

SEQ ID NO: 2689271 - RNA, 17 nt, Human papillomavirus type 31
ugcaagacuauguguua

SEQ ID NO: 2689272 - RNA, 19 nt, Human papillomavirus type 31
uugguauaauaaacuuuuu

SEQ ID NO: 2689273 - RNA, 20 nt, Human papillomavirus type 31
aaaaggugaugcaaauauau

SEQ ID NO: 2689274 - RNA, 18 nt, Human papillomavirus type 31
aucagacguuauaccuaa

SEQ ID NO: 2689275 - RNA, 13 nt, Human papillomavirus type 31
guaccaaaggugu

SEQ ID NO: 2689276 - RNA, 22 nt, Human papillomavirus type 31
auuaaauaaauuugaugacacu

SEQ ID NO: 2689277 - RNA, 19 nt, Human papillomavirus type 31
uaggucgcgggcagccauu

SEQ ID NO: 2689278 - RNA, 17 nt, Human papillomavirus type 31
caccugucccagugucu

SEQ ID NO: 2689279 - RNA, 13 nt, Human papillomavirus type 31
uacguugcaagac

SEQ ID NO: 2689280 - RNA, 13 nt, Human papillomavirus type 31
uaaaaguuguaca

SEQ ID NO: 2689281 - RNA, 23 nt, Human papillomavirus type 31
ccugucccagugucuaaaguugu

SEQ ID NO: 2689282 - RNA, 16 nt, Human papillomavirus type 31
auacacaugcaucuuu

SEQ ID NO: 2689283 - RNA, 16 nt, Human papillomavirus type 31
uaauacaugugucugu

SEQ ID NO: 2689284 - RNA, 15 nt, Human papillomavirus type 31
uagguauuagugguc

SEQ ID NO: 2689285 - RNA, 21 nt, Human papillomavirus type 31
caaaugauguuggaaacauua

SEQ ID NO: 2689286 - RNA, 18 nt, Human papillomavirus type 31
uguauguaauacaugugu

SEQ ID NO: 2689287 - RNA, 17 nt, Human papillomavirus type 31
gucaacaggauauauga

SEQ ID NO: 2689288 - RNA, 18 nt, Human papillomavirus type 31
auaggcugucaaaauaua

SEQ ID NO: 2689289 - RNA, 21 nt, Human papillomavirus type 31
acaucuuuuuauaauccugaa

SEQ ID NO: 2689290 - RNA, 22 nt, Human papillomavirus type 31
uguauguuaauaaauaugugua

SEQ ID NO: 2689291 - RNA, 12 nt, Human papillomavirus type 31
uaaauaugugua

SEQ ID NO: 2689292 - RNA, 20 nt, Human papillomavirus type 31
uaaaaggugaugcaaauaua

SEQ ID NO: 2689293 - RNA, 22 nt, Human papillomavirus type 31
uacuauuugugugucuugucau

SEQ ID NO: 2689294 - RNA, 20 nt, Human papillomavirus type 31
agcauugacccuguaggucc

SEQ ID NO: 2689295 - RNA, 14 nt, Human papillomavirus type 31
gaacuuccagacag

SEQ ID NO: 2689296 - RNA, 22 nt, Human papillomavirus type 31
cuuacaagcuauugaacuacaa

SEQ ID NO: 2689297 - RNA, 20 nt, Human papillomavirus type 31
uacauggcauuggacaugua

SEQ ID NO: 2689298 - RNA, 22 nt, Human papillomavirus type 31
ugcaaugguugguuuuauguag

SEQ ID NO: 2689299 - RNA, 18 nt, Human papillomavirus type 31
uuaguacacguccuucua

SEQ ID NO: 2689300 - RNA, 22 nt, Human papillomavirus type 31
ugucauagacaguccagcugga

SEQ ID NO: 2689301 - RNA, 19 nt, Human papillomavirus type 31
acaccaugcauuauacuaa

SEQ ID NO: 2689302 - RNA, 15 nt, Human papillomavirus type 31
gaagcagagacagca

SEQ ID NO: 2689303 - RNA, 21 nt, Human papillomavirus type 31
ugagcaauuacccgacagcuc

SEQ ID NO: 2689304 - RNA, 15 nt, Human papillomavirus type 31
ggccuguguugguuu

SEQ ID NO: 2689305 - RNA, 21 nt, Human papillomavirus type 31
gaucauauagacuauuggaaa

SEQ ID NO: 2689306 - RNA, 22 nt, Human papillomavirus type 31
auggugauguacacaacaccau

SEQ ID NO: 2689307 - RNA, 17 nt, Human papillomavirus type 31
aacauggauauacugua

SEQ ID NO: 2689308 - RNA, 15 nt, Human papillomavirus type 31
cagaagcagagacag

SEQ ID NO: 2689309 - RNA, 22 nt, Human papillomavirus type 31
gcagccauuagguguagguauu

SEQ ID NO: 2689310 - RNA, 18 nt, Human papillomavirus type 31
uauuguaaccuuaacaua

SEQ ID NO: 2689311 - RNA, 21 nt, Human papillomavirus type 31
ggaagcggaggaacaugcaga

SEQ ID NO: 2689312 - RNA, 20 nt, Human papillomavirus type 31
uaaagcaagagaaaugggaa

SEQ ID NO: 2689313 - RNA, 16 nt, Human papillomavirus type 31
ugaggaggaugucaua

SEQ ID NO: 2689314 - RNA, 12 nt, Human papillomavirus type 31
uccugaaacuca

SEQ ID NO: 2689315 - RNA, 15 nt, Human papillomavirus type 31
gaugucauagacagu

SEQ ID NO: 2689316 - RNA, 17 nt, Human papillomavirus type 31
uaaauauuucuacagua

SEQ ID NO: 2689317 - RNA, 13 nt, Human papillomavirus type 31
uuauaauccugaa

SEQ ID NO: 2689318 - RNA, 13 nt, Human papillomavirus type 31
uguguauacuguu

SEQ ID NO: 2689319 - RNA, 22 nt, Human papillomavirus type 31
uauguauaguauguuaugugug

SEQ ID NO: 2689320 - RNA, 19 nt, Human papillomavirus type 31
cuugugcuguauuguauau

SEQ ID NO: 2689321 - RNA, 19 nt, Human papillomavirus type 31
uacaguaggccauccauau

SEQ ID NO: 2689322 - RNA, 23 nt, Human papillomavirus type 31
gacacugaaaacucuaauagaua

SEQ ID NO: 2689323 - RNA, 20 nt, Human papillomavirus type 31
guauguuguccuuauauaca

SEQ ID NO: 2689324 - RNA, 20 nt, Human papillomavirus type 31
uauuuagccuaaugauugaa

SEQ ID NO: 2689325 - RNA, 17 nt, Human papillomavirus type 31
uauguuguguuuauaua

SEQ ID NO: 2689326 - RNA, 22 nt, Human papillomavirus type 31
auguacacaacaccaugcauua

SEQ ID NO: 2689327 - RNA, 17 nt, Human papillomavirus type 31
auguauagauggccaau

SEQ ID NO: 2689328 - RNA, 18 nt, Human papillomavirus type 31
gcagaagcagagacagca

SEQ ID NO: 2689329 - RNA, 17 nt, Human papillomavirus type 31
caggcagaagcagagac

SEQ ID NO: 2689330 - RNA, 15 nt, Human papillomavirus type 31
gagacagcacaggca

SEQ ID NO: 2689331 - RNA, 19 nt, Human papillomavirus type 31
uaucacgcaggcagugcua

SEQ ID NO: 2689332 - RNA, 17 nt, Human papillomavirus type 31
gcaacugaccuccacug

SEQ ID NO: 2689333 - RNA, 14 nt, Human papillomavirus type 31
aacauacuaccauu

SEQ ID NO: 2689334 - RNA, 15 nt, Human papillomavirus type 31
aacuuuuuuacuugu

SEQ ID NO: 2689335 - RNA, 20 nt, Human papillomavirus type 31
cauagacaguccagcuggac

SEQ ID NO: 2689336 - RNA, 22 nt, Human papillomavirus type 31
uaagauauaggcugucaaaaua

SEQ ID NO: 2689337 - RNA, 15 nt, Human papillomavirus type 31
auaugguauauguau

SEQ ID NO: 2689338 - RNA, 14 nt, Human papillomavirus type 31
acauaaaaaugcua

SEQ ID NO: 2689339 - RNA, 17 nt, Human papillomavirus type 31
guaagcauugugcuaug

SEQ ID NO: 2689340 - RNA, 12 nt, Human papillomavirus type 31
acaugcagaggc

SEQ ID NO: 2689341 - RNA, 16 nt, Human papillomavirus type 31
aaagcaagagaaaugg

SEQ ID NO: 2689342 - RNA, 11 nt, Human papillomavirus type 31
uauaugugugu

SEQ ID NO: 2689343 - RNA, 16 nt, Human papillomavirus type 31
uacugucuacuuacca

SEQ ID NO: 2689344 - RNA, 16 nt, Human papillomavirus type 31
ucaggcagaagcagag

SEQ ID NO: 2689345 - RNA, 12 nt, Human papillomavirus type 31
caguccagcugg

SEQ ID NO: 2689346 - RNA, 17 nt, Human papillomavirus type 31
uuaauaaauauguguau

SEQ ID NO: 2689347 - RNA, 16 nt, Human papillomavirus type 31
cagagacagcacaggc

SEQ ID NO: 2689348 - RNA, 17 nt, Human papillomavirus type 31
ugauugaacuaaauauu

SEQ ID NO: 2689349 - RNA, 14 nt, Human papillomavirus type 31
uuugugugucuugu

SEQ ID NO: 2689350 - RNA, 13 nt, Human papillomavirus type 31
gauacuggggagg

SEQ ID NO: 2689351 - RNA, 15 nt, Human papillomavirus type 31
uccauuuugauuuua

SEQ ID NO: 2689352 - RNA, 12 nt, Human papillomavirus type 31
ucugacaauccu

SEQ ID NO: 2689353 - RNA, 15 nt, Human papillomavirus type 31
ucuacaguaagcauu

SEQ ID NO: 2689354 - RNA, 20 nt, Human papillomavirus type 31
guagaagcaguaauugacag

SEQ ID NO: 2689355 - RNA, 19 nt, Human papillomavirus type 31
agaagcagagacagcacag

SEQ ID NO: 2689356 - RNA, 15 nt, Human papillomavirus type 31
uauuauuaccaugcg

SEQ ID NO: 2689357 - RNA, 14 nt, Human papillomavirus type 31
cugaccuccacugu

SEQ ID NO: 2689358 - RNA, 23 nt, Human papillomavirus type 31
caucuuuuuuaagucaacaguaa

SEQ ID NO: 2689359 - RNA, 13 nt, Human papillomavirus type 31
cgcaggcagugcu

SEQ ID NO: 2689360 - RNA, 16 nt, Human papillomavirus type 31
aauagucauguacuua

SEQ ID NO: 2689361 - RNA, 22 nt, Human papillomavirus type 31
auauaugguauauguauguuua

SEQ ID NO: 2689362 - RNA, 21 nt, Human papillomavirus type 31
auauguaacacgaaccaacau

SEQ ID NO: 2689363 - RNA, 17 nt, Human papillomavirus type 31
aagcuauugaacuacaa

SEQ ID NO: 2689364 - RNA, 17 nt, Human papillomavirus type 31
uuggauuuccugauaca

SEQ ID NO: 2689365 - RNA, 17 nt, Human papillomavirus type 31
acgauuuuuuaaauacu

SEQ ID NO: 2689366 - RNA, 15 nt, Human papillomavirus type 31
ugucgguauaugcaa

SEQ ID NO: 2689367 - RNA, 14 nt, Human papillomavirus type 31
aucugacaauccua

SEQ ID NO: 2689368 - RNA, 17 nt, Human papillomavirus type 31
cuuugcuuuugugugcu

SEQ ID NO: 2689369 - RNA, 17 nt, Human papillomavirus type 31
cauauagacuauuggaa

SEQ ID NO: 2689370 - RNA, 16 nt, Human papillomavirus type 31
caugugucuguaugug

SEQ ID NO: 2689371 - RNA, 13 nt, Human papillomavirus type 31
ugauguacacaac

SEQ ID NO: 2689372 - RNA, 14 nt, Human papillomavirus type 31
acaugugucuguau

SEQ ID NO: 2689373 - RNA, 19 nt, Human papillomavirus type 31
ucaguaucaaaggccaaag

SEQ ID NO: 2689374 - RNA, 13 nt, Human papillomavirus type 31
uaauaaauaugug

SEQ ID NO: 2689375 - RNA, 16 nt, Human papillomavirus type 31
auugaacuacaaauga

SEQ ID NO: 2689376 - RNA, 23 nt, Human papillomavirus type 31
ccaugcauuauacuaacuggaaa

SEQ ID NO: 2689377 - RNA, 14 nt, Human papillomavirus type 31
guaaaaauaccuaa

SEQ ID NO: 2689378 - RNA, 20 nt, Human papillomavirus type 31
uaagucaacaguaacuuuuu

SEQ ID NO: 2689379 - RNA, 15 nt, Human papillomavirus type 31
guguguuguguaugu

SEQ ID NO: 2689380 - RNA, 17 nt, Human papillomavirus type 31
ggaggaacaugcagagg

SEQ ID NO: 2689381 - RNA, 23 nt, Human papillomavirus type 31
ugugauuuuauggguuauugcaa

SEQ ID NO: 2689382 - RNA, 17 nt, Human papillomavirus type 31
uagauaugccggugguc

SEQ ID NO: 2689383 - RNA, 19 nt, Human papillomavirus type 31
caaacauguaaagcagcag

SEQ ID NO: 2689384 - RNA, 22 nt, Human papillomavirus type 31
cuacuauuauuaauugugauuu

SEQ ID NO: 2689385 - RNA, 17 nt, Human papillomavirus type 31
uagugauacuggggagg

SEQ ID NO: 2689386 - RNA, 20 nt, Human papillomavirus type 31
ugagcaauuacccgacagcu

SEQ ID NO: 2689387 - RNA, 15 nt, Human papillomavirus type 31
acaguaacuuuuuua

SEQ ID NO: 2689388 - RNA, 19 nt, Human papillomavirus type 31
gauccagcagguacagaug

SEQ ID NO: 2689389 - RNA, 22 nt, Human papillomavirus type 31
cuugaacuguauuuaacugcac

SEQ ID NO: 2689390 - RNA, 23 nt, Human papillomavirus type 31
aauugacagacagacaggggaca

SEQ ID NO: 2689391 - RNA, 12 nt, Human papillomavirus type 31
uugacagacaga

SEQ ID NO: 2689392 - RNA, 19 nt, Human papillomavirus type 31
gaagcagagacagcacagg

SEQ ID NO: 2689393 - RNA, 17 nt, Human papillomavirus type 31
uaguauguuaugugugu

SEQ ID NO: 2689394 - RNA, 14 nt, Human papillomavirus type 31
uauauuaaaauguu

SEQ ID NO: 2689395 - RNA, 17 nt, Human papillomavirus type 31
cagacguuauaccuaaa

SEQ ID NO: 2689396 - RNA, 18 nt, Human papillomavirus type 31
uccauaccuaaaucugac

SEQ ID NO: 2689397 - RNA, 13 nt, Human papillomavirus type 31
aaaugcuauugua

SEQ ID NO: 2689398 - RNA, 17 nt, Human papillomavirus type 31
uaguaaaaguuguacac

SEQ ID NO: 2689399 - RNA, 18 nt, Human papillomavirus type 31
agcaagagaaaugggaau

SEQ ID NO: 2689400 - RNA, 16 nt, Human papillomavirus type 31
agguacagauggggag

SEQ ID NO: 2689401 - RNA, 14 nt, Human papillomavirus type 31
auggguuauugcaa

SEQ ID NO: 2689402 - RNA, 16 nt, Human papillomavirus type 31
gcaaugguugguuuua

SEQ ID NO: 2689403 - RNA, 14 nt, Human papillomavirus type 31
agaccaaauauuaa

SEQ ID NO: 2689404 - RNA, 18 nt, Human papillomavirus type 31
aaaacauggauauacugu

SEQ ID NO: 2689405 - RNA, 17 nt, Human papillomavirus type 31
ugacaauuguaauguau

SEQ ID NO: 2689406 - RNA, 16 nt, Human papillomavirus type 31
ucccaauagucaugua

SEQ ID NO: 2689407 - RNA, 16 nt, Human papillomavirus type 31
guaaccuuaacauaua

SEQ ID NO: 2689408 - RNA, 17 nt, Human papillomavirus type 31
auauaugguauauguau

SEQ ID NO: 2689409 - RNA, 16 nt, Human papillomavirus type 31
ccacuugugcugucug

SEQ ID NO: 2689410 - RNA, 20 nt, Human papillomavirus type 31
cauauagacuauuggaaaca

SEQ ID NO: 2689411 - RNA, 10 nt, Human papillomavirus type 31
cuuacaagcu

SEQ ID NO: 2689412 - RNA, 15 nt, Human papillomavirus type 31
cagcuggacaagcag

SEQ ID NO: 2689413 - RNA, 22 nt, Human papillomavirus type 31
auguaugcguguguacuuguau

SEQ ID NO: 2689414 - RNA, 12 nt, Human papillomavirus type 31
uuggaaacauua

SEQ ID NO: 2689415 - RNA, 19 nt, Human papillomavirus type 31
gaaacauauucgacuugaa

SEQ ID NO: 2689416 - RNA, 15 nt, Human papillomavirus type 31
gggacaacauuucag

SEQ ID NO: 2689417 - RNA, 15 nt, Human papillomavirus type 31
uauaauccugaaacu

SEQ ID NO: 2689418 - RNA, 12 nt, Human papillomavirus type 31
aacauuaaauaa

SEQ ID NO: 2689419 - RNA, 13 nt, Human papillomavirus type 31
uuaaauaaauuug

SEQ ID NO: 2689420 - RNA, 20 nt, Human papillomavirus type 31
uauuugugugucuugucaua

SEQ ID NO: 2689421 - RNA, 16 nt, Human papillomavirus type 31
ggaagcggaggaacau

SEQ ID NO: 2689422 - RNA, 16 nt, Human papillomavirus type 31
uagacaguccagcugg

SEQ ID NO: 2689423 - RNA, 21 nt, Human papillomavirus type 31
caccuacaggguguuuaaaaa

SEQ ID NO: 2689424 - RNA, 14 nt, Human papillomavirus type 31
uaaauauguguaua

SEQ ID NO: 2689425 - RNA, 21 nt, Human papillomavirus type 31
uacaugugucuguauguguau

SEQ ID NO: 2689426 - RNA, 22 nt, Human papillomavirus type 31
cuacuccauuuugauuuuaugc

SEQ ID NO: 2689427 - RNA, 21 nt, Human papillomavirus type 31
uauguaugcguguguacuugu

SEQ ID NO: 2689428 - RNA, 12 nt, Human papillomavirus type 31
aaauauguguau

SEQ ID NO: 2689429 - RNA, 13 nt, Human papillomavirus type 31
gaaaaugaagaca

SEQ ID NO: 2689430 - RNA, 15 nt, Human papillomavirus type 31
agugauacuggggag

SEQ ID NO: 2689431 - RNA, 16 nt, Human papillomavirus type 45
aaacgaugaagcagau

SEQ ID NO: 2689432 - RNA, 20 nt, Human papillomavirus type 45
cauguaugguguuacuguac

SEQ ID NO: 2689433 - RNA, 15 nt, Human papillomavirus type 45
gauuucgguugccug

SEQ ID NO: 2689434 - RNA, 23 nt, Human papillomavirus type 45
cacaagcauauuuuaucaugcag

SEQ ID NO: 2689435 - RNA, 13 nt, Human papillomavirus type 45
caugcgcaggaag

SEQ ID NO: 2689436 - RNA, 14 nt, Human papillomavirus type 45
auuugcuguauaca

SEQ ID NO: 2689437 - RNA, 17 nt, Human papillomavirus type 45
ugcuguauacauuuguu

SEQ ID NO: 2689438 - RNA, 21 nt, Human papillomavirus type 45
gucucgcacaagcauauuuua

SEQ ID NO: 2689439 - RNA, 15 nt, Human papillomavirus type 45
uugcaggaggcagca

SEQ ID NO: 2689440 - RNA, 21 nt, Human papillomavirus type 45
acaguauauauuauauaacug

SEQ ID NO: 2689441 - RNA, 16 nt, Human papillomavirus type 45
uggaaccucagaauga

SEQ ID NO: 2689442 - RNA, 18 nt, Human papillomavirus type 45
uaacagcauuugcuguau

SEQ ID NO: 2689443 - RNA, 15 nt, Human papillomavirus type 45
uacauuuguugcuau

SEQ ID NO: 2689444 - RNA, 13 nt, Human papillomavirus type 45
uaggggagcagcu

SEQ ID NO: 2689445 - RNA, 14 nt, Human papillomavirus type 45
cccauuaacagcau

SEQ ID NO: 2689446 - RNA, 14 nt, Human papillomavirus type 45
acaaaauuuugugu

SEQ ID NO: 2689447 - RNA, 19 nt, Human papillomavirus type 45
gcaaaacgacgguuguuua

SEQ ID NO: 2689448 - RNA, 17 nt, Human papillomavirus type 45
agagacagcacaggcau

SEQ ID NO: 2689449 - RNA, 20 nt, Human papillomavirus type 45
gagcaagagacagcacaggc

SEQ ID NO: 2689450 - RNA, 23 nt, Human papillomavirus type 45
ugccuuuaugugugcugcaaugu

SEQ ID NO: 2689451 - RNA, 23 nt, Human papillomavirus type 45
gaaaaugcaauacuauuuacagc

SEQ ID NO: 2689452 - RNA, 21 nt, Human papillomavirus type 45
ugcgcaggaaguucagaauga

SEQ ID NO: 2689453 - RNA, 18 nt, Human papillomavirus type 45
aaaacgaugaagcagaug

SEQ ID NO: 2689454 - RNA, 15 nt, Human papillomavirus type 45
cgagucagaggagga

SEQ ID NO: 2689455 - RNA, 22 nt, Human papillomavirus type 45
auauuguauacaguauguaaca

SEQ ID NO: 2689456 - RNA, 17 nt, Human papillomavirus type 45
gcaagagacagcacagg

SEQ ID NO: 2689457 - RNA, 21 nt, Human papillomavirus type 45
auuaacauuucaaaaagcaaa

SEQ ID NO: 2689458 - RNA, 19 nt, Human papillomavirus type 45
agcauauuuuaucaugcag

SEQ ID NO: 2689459 - RNA, 11 nt, Human papillomavirus type 45
ugaugcacagg

SEQ ID NO: 2689460 - RNA, 13 nt, Human papillomavirus type 45
ugcaggaggcagc

SEQ ID NO: 2689461 - RNA, 15 nt, Human papillomavirus type 45
uguugguguuucuuu

SEQ ID NO: 2689462 - RNA, 21 nt, Human papillomavirus type 45
cagccaaauaaguuauuggca

SEQ ID NO: 2689463 - RNA, 21 nt, Human papillomavirus type 45
uuugcgugcguguauguauga

SEQ ID NO: 2689464 - RNA, 18 nt, Human papillomavirus type 45
ggcagagcaagagacagc

SEQ ID NO: 2689465 - RNA, 16 nt, Human papillomavirus type 45
cauuugcuguauacau

SEQ ID NO: 2689466 - RNA, 15 nt, Human papillomavirus type 45
aaaagcaaagcacau

SEQ ID NO: 2689467 - RNA, 17 nt, Human papillomavirus type 45
acaguacaguguaacau

SEQ ID NO: 2689468 - RNA, 18 nt, Human papillomavirus type 45
auaugcaugcuuuacaca

SEQ ID NO: 2689469 - RNA, 12 nt, Human papillomavirus type 45
uacuauaaugua

SEQ ID NO: 2689470 - RNA, 19 nt, Human papillomavirus type 45
acauuucaaaaagcaaagc

SEQ ID NO: 2689471 - RNA, 15 nt, Human papillomavirus type 45
acacuacagcagcug

SEQ ID NO: 2689472 - RNA, 17 nt, Human papillomavirus type 45
cuguggcuuauauguga

SEQ ID NO: 2689473 - RNA, 14 nt, Human papillomavirus type 45
caaaacagcagcau

SEQ ID NO: 2689474 - RNA, 16 nt, Human papillomavirus type 45
acagcgucacaaaauu

SEQ ID NO: 2689475 - RNA, 17 nt, Human papillomavirus type 45
uaacauuacuaugcuau

SEQ ID NO: 2689476 - RNA, 15 nt, Human papillomavirus type 45
auacuauuuacagca

SEQ ID NO: 2689477 - RNA, 13 nt, Human papillomavirus type 45
gcaaagcacauaa

SEQ ID NO: 2689478 - RNA, 18 nt, Human papillomavirus type 45
aaauuggaugauacagaa

SEQ ID NO: 2689479 - RNA, 19 nt, Human papillomavirus type 45
uuagcacauauauguaugu

SEQ ID NO: 2689480 - RNA, 19 nt, Human papillomavirus type 45
cagggauaugggacaaaac

SEQ ID NO: 2689481 - RNA, 17 nt, Human papillomavirus type 45
uacuauaauguacagua

SEQ ID NO: 2689482 - RNA, 19 nt, Human papillomavirus type 45
uugcacaaagcaaguauaa

SEQ ID NO: 2689483 - RNA, 15 nt, Human papillomavirus type 45
auuucaaaaagcaaa

SEQ ID NO: 2689484 - RNA, 22 nt, Human papillomavirus type 45
guauggaaauuggucgugggca

SEQ ID NO: 2689485 - RNA, 18 nt, Human papillomavirus type 45
auauauguauguuuguau

SEQ ID NO: 2689486 - RNA, 16 nt, Human papillomavirus type 45
uagcacauauauguau

SEQ ID NO: 2689487 - RNA, 23 nt, Human papillomavirus type 45
aaagggccuugcacaaagcaagu

SEQ ID NO: 2689488 - RNA, 24 nt, Human papillomavirus type 45
auacuacacagcauccauuuuacu

SEQ ID NO: 2689489 - RNA, 15 nt, Human papillomavirus type 45
acacaccauacaaua

SEQ ID NO: 2689490 - RNA, 20 nt, Human papillomavirus type 45
ugcagucugucuaugugugu

SEQ ID NO: 2689491 - RNA, 13 nt, Human papillomavirus type 45
auaauugugguau

SEQ ID NO: 2689492 - RNA, 14 nt, Human papillomavirus type 45
gcaacagauacagg

SEQ ID NO: 2689493 - RNA, 17 nt, Human papillomavirus type 45
uauucuuuccuguauuu

SEQ ID NO: 2689494 - RNA, 17 nt, Human papillomavirus type 45
auaccugugaugugcau

SEQ ID NO: 2689495 - RNA, 20 nt, Human papillomavirus type 45
auguuagcacauauauguau

SEQ ID NO: 2689496 - RNA, 17 nt, Human papillomavirus type 45
cacauaaagcuauugaa

SEQ ID NO: 2689497 - RNA, 20 nt, Human papillomavirus type 45
cauaaagcuauugaacugca

SEQ ID NO: 2689498 - RNA, 17 nt, Human papillomavirus type 45
ugucccgcuugugcagu

SEQ ID NO: 2689499 - RNA, 14 nt, Human papillomavirus type 45
gacaacuguaugaa

SEQ ID NO: 2689500 - RNA, 20 nt, Human papillomavirus type 45
gauggcaacaaggacaacug

SEQ ID NO: 2689501 - RNA, 12 nt, Human papillomavirus type 45
caggcuguuccu

SEQ ID NO: 2689502 - RNA, 15 nt, Human papillomavirus type 45
cuauggaauacagaa

SEQ ID NO: 2689503 - RNA, 18 nt, Human papillomavirus type 45
guaucccaccgugcagca

SEQ ID NO: 2689504 - RNA, 14 nt, Human papillomavirus type 45
acaauaauuacuau

SEQ ID NO: 2689505 - RNA, 21 nt, Human papillomavirus type 45
auuguuccaugcgcaggaagu

SEQ ID NO: 2689506 - RNA, 23 nt, Human papillomavirus type 45
augcaauacuauuuacagcaagg

SEQ ID NO: 2689507 - RNA, 16 nt, Human papillomavirus type 45
aacugcaacagauaca

SEQ ID NO: 2689508 - RNA, 18 nt, Human papillomavirus type 45
cagaaagugcucaugcag

SEQ ID NO: 2689509 - RNA, 19 nt, Human papillomavirus type 45
uuauccauuugugaacagg

SEQ ID NO: 2689510 - RNA, 17 nt, Human papillomavirus type 45
ugugauauauuacugua

SEQ ID NO: 2689511 - RNA, 13 nt, Human papillomavirus type 45
guuugcaggaggc

SEQ ID NO: 2689512 - RNA, 14 nt, Human papillomavirus type 45
ucuaugugugugcu

SEQ ID NO: 2689513 - RNA, 18 nt, Human papillomavirus type 45
gcauuugcuguauacauu

SEQ ID NO: 2689514 - RNA, 17 nt, Human papillomavirus type 45
ugauauauuacuguauu

SEQ ID NO: 2689515 - RNA, 19 nt, Human papillomavirus type 45
aguuugcaggaggcagcaa

SEQ ID NO: 2689516 - RNA, 13 nt, Human papillomavirus type 45
aguuauaaacuug

SEQ ID NO: 2689517 - RNA, 20 nt, Human papillomavirus type 45
uacaguagagagcucggcag

SEQ ID NO: 2689518 - RNA, 15 nt, Human papillomavirus type 45
gcaggaggcagcaag

SEQ ID NO: 2689519 - RNA, 20 nt, Human papillomavirus type 45
uaacauuucaaaaagcaaag

SEQ ID NO: 2689520 - RNA, 19 nt, Human papillomavirus type 45
uuguauguauguauguauu

SEQ ID NO: 2689521 - RNA, 14 nt, Human papillomavirus type 45
uaauaguguugugu

SEQ ID NO: 2689522 - RNA, 20 nt, Human papillomavirus type 45
uguacaguacaguguaacau

SEQ ID NO: 2689523 - RNA, 22 nt, Human papillomavirus type 45
aucaguauaggguguuuagagu

SEQ ID NO: 2689524 - RNA, 15 nt, Human papillomavirus type 45
guauguuguauguau

SEQ ID NO: 2689525 - RNA, 20 nt, Human papillomavirus type 45
acaguauguaacauuacuau

SEQ ID NO: 2689526 - RNA, 17 nt, Human papillomavirus type 45
caaauaaguuauuggca

SEQ ID NO: 2689527 - RNA, 12 nt, Human papillomavirus type 45
uauauuacugua

SEQ ID NO: 2689528 - RNA, 15 nt, Human papillomavirus type 45
ugggacaguauauau

SEQ ID NO: 2689529 - RNA, 18 nt, Human papillomavirus type 45
uaugggacaaaacagcag

SEQ ID NO: 2689530 - RNA, 22 nt, Human papillomavirus type 45
guaaagacauaaacagccaaau

SEQ ID NO: 2689531 - RNA, 20 nt, Human papillomavirus type 45
ccugugaugugcauguuguu

SEQ ID NO: 2689532 - RNA, 19 nt, Human papillomavirus type 45
uggacacugcaagauacau

SEQ ID NO: 2689533 - RNA, 15 nt, Human papillomavirus type 45
cauguuguuguauuu

SEQ ID NO: 2689534 - RNA, 12 nt, Human papillomavirus type 45
guaauggcuggu

SEQ ID NO: 2689535 - RNA, 14 nt, Human papillomavirus type 45
gugcucaugcagcu

SEQ ID NO: 2689536 - RNA, 15 nt, Human papillomavirus type 45
ccuauguuuguauua

SEQ ID NO: 2689537 - RNA, 23 nt, Human papillomavirus type 45
ugguaucccaccgugcagcacgu

SEQ ID NO: 2689538 - RNA, 14 nt, Human papillomavirus type 45
cacaaagcaaguau

SEQ ID NO: 2689539 - RNA, 22 nt, Human papillomavirus type 45
aaauaaguuauuggcaacuuau

SEQ ID NO: 2689540 - RNA, 14 nt, Human papillomavirus type 45
ggaggcagcaagga

SEQ ID NO: 2689541 - RNA, 22 nt, Human papillomavirus type 45
aauggcugguucuuuguagaaa

SEQ ID NO: 2689542 - RNA, 20 nt, Human papillomavirus type 45
ugcuaucuuuaguguuuuua

SEQ ID NO: 2689543 - RNA, 18 nt, Human papillomavirus type 45
ccuaauaaauuuggauua

SEQ ID NO: 2689544 - RNA, 21 nt, Human papillomavirus type 45
uguaggguugcacccuuguga

SEQ ID NO: 2689545 - RNA, 13 nt, Human papillomavirus type 45
cuauuuacagcaa

SEQ ID NO: 2689546 - RNA, 21 nt, Human papillomavirus type 45
aggaccuuagaacacuacagc

SEQ ID NO: 2689547 - RNA, 14 nt, Human papillomavirus type 45
auaauguacaguac

SEQ ID NO: 2689548 - RNA, 19 nt, Human papillomavirus type 45
ggcagagcaagagacagca

SEQ ID NO: 2689549 - RNA, 18 nt, Human papillomavirus type 45
aaugucccgcuugugcag

SEQ ID NO: 2689550 - RNA, 22 nt, Human papillomavirus type 45
ccugaaacacaacguuugguuu

SEQ ID NO: 2689551 - RNA, 14 nt, Human papillomavirus type 45
gaguuagucaugca

SEQ ID NO: 2689552 - RNA, 16 nt, Human papillomavirus type 45
ucaaaaagcaaagcac

SEQ ID NO: 2689553 - RNA, 19 nt, Human papillomavirus type 45
gauaugggacaaaacagca

SEQ ID NO: 2689554 - RNA, 18 nt, Human papillomavirus type 45
cuuuaugugugcugcaau

SEQ ID NO: 2689555 - RNA, 21 nt, Human papillomavirus type 45
guuguaccuaauggugcaggu

SEQ ID NO: 2689556 - RNA, 11 nt, Human papillomavirus type 45
ggaaaaugcaa

SEQ ID NO: 2689557 - RNA, 14 nt, Human papillomavirus type 45
uuaacagcauuugc

SEQ ID NO: 2689558 - RNA, 12 nt, Human papillomavirus type 45
gcacaaagcaag

SEQ ID NO: 2689559 - RNA, 18 nt, Human papillomavirus type 45
augugcauguuguuguau

SEQ ID NO: 2689560 - RNA, 18 nt, Human papillomavirus type 45
aaagcacauaaagcuauu

SEQ ID NO: 2689561 - RNA, 13 nt, Human papillomavirus type 45
uguauuuuuguau

SEQ ID NO: 2689562 - RNA, 23 nt, Human papillomavirus type 45
aacagccaaauaaguuauuggca

SEQ ID NO: 2689563 - RNA, 22 nt, Human papillomavirus type 45
caacuaccagcccgacgagccg

SEQ ID NO: 2689564 - RNA, 12 nt, Human papillomavirus type 45
aauguacaguac

SEQ ID NO: 2689565 - RNA, 20 nt, Human papillomavirus type 45
gggacaaaacagcagcaugu

SEQ ID NO: 2689566 - RNA, 19 nt, Human papillomavirus type 45
aacugcaacagauacaggg

SEQ ID NO: 2689567 - RNA, 22 nt, Human papillomavirus type 45
cuuauacguuuggaaaaugcaa

SEQ ID NO: 2689568 - RNA, 13 nt, Human papillomavirus type 45
uauugaacugcaa

SEQ ID NO: 2689569 - RNA, 17 nt, Human papillomavirus type 45
ugugaugugcauguugu

SEQ ID NO: 2689570 - RNA, 23 nt, Human papillomavirus type 45
uauuuacagcaagggaacauggu

SEQ ID NO: 2689571 - RNA, 14 nt, Human papillomavirus type 45
auauauuacuguau

SEQ ID NO: 2689572 - RNA, 18 nt, Human papillomavirus type 45
uugcacccuugugaguaa

SEQ ID NO: 2689573 - RNA, 19 nt, Human papillomavirus type 45
augugucucgcacaagcau

SEQ ID NO: 2689574 - RNA, 19 nt, Human papillomavirus type 45
cugucuaugugugugcuuu

SEQ ID NO: 2689575 - RNA, 19 nt, Human papillomavirus type 45
cauuacuaugcuaucuuua

SEQ ID NO: 2689576 - RNA, 22 nt, Human papillomavirus type 45
cuugcacaaagcaaguauaaca

SEQ ID NO: 2689577 - RNA, 15 nt, Human papillomavirus type 45
gcaaggaaaacaguc

SEQ ID NO: 2689578 - RNA, 14 nt, Human papillomavirus type 45
ggaaaaugcaauac

SEQ ID NO: 2689579 - RNA, 16 nt, Human papillomavirus type 45
gcuuauaugugaccuu

SEQ ID NO: 2689580 - RNA, 15 nt, Human papillomavirus type 45
uguguguauguguau

SEQ ID NO: 2689581 - RNA, 15 nt, Human papillomavirus type 45
uauaacugagacagg

SEQ ID NO: 2689582 - RNA, 15 nt, Human papillomavirus type 45
cagguguugcaucuu

SEQ ID NO: 2689583 - RNA, 14 nt, Human papillomavirus type 45
auuuacagcaaggg

SEQ ID NO: 2689584 - RNA, 13 nt, Human papillomavirus type 45
cugugaugugcau

SEQ ID NO: 2689585 - RNA, 15 nt, Human papillomavirus type 45
augguuuuguauguu

SEQ ID NO: 2689586 - RNA, 16 nt, Human papillomavirus type 45
acaaggacaacuguau

SEQ ID NO: 2689587 - RNA, 14 nt, Human papillomavirus type 45
uuuuauugugcuuu

SEQ ID NO: 2689588 - RNA, 22 nt, Human papillomavirus type 45
cagguggugccuccuauuaaca

SEQ ID NO: 2689589 - RNA, 13 nt, Human papillomavirus type 45
ggauccagaaggu

SEQ ID NO: 2689590 - RNA, 19 nt, Human papillomavirus type 45
acauuuguugcuauuuacu

SEQ ID NO: 2689591 - RNA, 18 nt, Human papillomavirus type 45
ugucuaugugugugcuuu

SEQ ID NO: 2689592 - RNA, 21 nt, Human papillomavirus type 45
aacuuauacguuuggaaaaug

SEQ ID NO: 2689593 - RNA, 20 nt, Human papillomavirus type 45
ugcaauacuauuuacagcaa

SEQ ID NO: 2689594 - RNA, 23 nt, Human papillomavirus type 45
auagugggcacaaaaaagcaaaa

SEQ ID NO: 2689595 - RNA, 16 nt, Human papillomavirus type 45
acaaaacagcagcaug

SEQ ID NO: 2689596 - RNA, 16 nt, Human papillomavirus type 45
gucuaugugugugcuu

SEQ ID NO: 2689597 - RNA, 13 nt, Human papillomavirus type 45
acaaaaaagcaaa

SEQ ID NO: 2689598 - RNA, 15 nt, Human papillomavirus type 45
aaagcaaagcacaua

SEQ ID NO: 2689599 - RNA, 21 nt, Human papillomavirus type 45
ugcuuuacacaccauacaaua

SEQ ID NO: 2689600 - RNA, 13 nt, Human papillomavirus type 45
auggcaacaagga

SEQ ID NO: 2689601 - RNA, 17 nt, Human papillomavirus type 45
gcuuauaugugaccuuu

SEQ ID NO: 2689602 - RNA, 14 nt, Human papillomavirus type 45
auuguauacaguau

SEQ ID NO: 2689603 - RNA, 14 nt, Human papillomavirus type 45
uguggcauguaugg

SEQ ID NO: 2689604 - RNA, 20 nt, Human papillomavirus type 45
cauaauaccuaaacuggcac

SEQ ID NO: 2689605 - RNA, 15 nt, Human papillomavirus type 45
aaugaugcacaggug

SEQ ID NO: 2689606 - RNA, 17 nt, Human papillomavirus type 45
auuacuauaauguacag

SEQ ID NO: 2689607 - RNA, 15 nt, Human papillomavirus type 45
cauaugcaugcuuua

SEQ ID NO: 2689608 - RNA, 19 nt, Human papillomavirus type 45
uccauuugugaacaggcag

SEQ ID NO: 2689609 - RNA, 15 nt, Human papillomavirus type 45
ugccuuuaugugugc

SEQ ID NO: 2689610 - RNA, 13 nt, Human papillomavirus type 45
ugguguuacugua

SEQ ID NO: 2689611 - RNA, 23 nt, Human papillomavirus type 45
aagugcucaugcagcuacagcug

SEQ ID NO: 2689612 - RNA, 21 nt, Human papillomavirus type 45
auaauaaauuggaugauacag

SEQ ID NO: 2689613 - RNA, 13 nt, Human papillomavirus type 45
cauuuugcugugc

SEQ ID NO: 2689614 - RNA, 23 nt, Human papillomavirus type 45
guucccgauuauuaacuguaggc

SEQ ID NO: 2689615 - RNA, 22 nt, Human papillomavirus type 45
gaaugugccuuguggcauguau

SEQ ID NO: 2689616 - RNA, 23 nt, Human papillomavirus type 45
caacaaggacaacuguaugaacu

SEQ ID NO: 2689617 - RNA, 17 nt, Human papillomavirus type 45
uccccauuaacagcauu

SEQ ID NO: 2689618 - RNA, 20 nt, Human papillomavirus type 45
uaacuguaggcaauccauau

SEQ ID NO: 2689619 - RNA, 18 nt, Human papillomavirus type 45
agcaaagcacauaaagcu

SEQ ID NO: 2689620 - RNA, 16 nt, Human papillomavirus type 45
gcgucacaaaauuuug

SEQ ID NO: 2689621 - RNA, 15 nt, Human papillomavirus type 45
gaggaauggacacug

SEQ ID NO: 2689622 - RNA, 20 nt, Human papillomavirus type 45
ugugucucgcacaagcauau

SEQ ID NO: 2689623 - RNA, 19 nt, Human papillomavirus type 45
caguccauuaggggagcag

SEQ ID NO: 2689624 - RNA, 16 nt, Human papillomavirus type 45
gccuugcacaaagcaa

SEQ ID NO: 2689625 - RNA, 18 nt, Human papillomavirus type 45
uauuaacauuucaaaaag

SEQ ID NO: 2689626 - RNA, 14 nt, Human papillomavirus type 45
acaguauguaacau

SEQ ID NO: 2689627 - RNA, 19 nt, Human papillomavirus type 45
gaccccgggaaacacugca

SEQ ID NO: 2689628 - RNA, 19 nt, Human papillomavirus type 45
acauaaagcuauugaacug

SEQ ID NO: 2689629 - RNA, 21 nt, Human papillomavirus type 45
cauacuacacagcauccauuu

SEQ ID NO: 2689630 - RNA, 14 nt, Human papillomavirus type 45
uauuguauacagua

SEQ ID NO: 2689631 - RNA, 16 nt, Human papillomavirus type 45
agagaaaaaaacaggg

SEQ ID NO: 2689632 - RNA, 18 nt, Human papillomavirus type 45
aaauuucauuaaauagug

SEQ ID NO: 2689633 - RNA, 22 nt, Human papillomavirus type 45
uaaagggccuugcacaaagcaa

SEQ ID NO: 2689634 - RNA, 20 nt, Human papillomavirus type 45
augugccuuguggcauguau

SEQ ID NO: 2689635 - RNA, 16 nt, Human papillomavirus type 45
caauuaagcgagucag

SEQ ID NO: 2689636 - RNA, 20 nt, Human papillomavirus type 45
uaguguuuuuauugugcuuu

SEQ ID NO: 2689637 - RNA, 12 nt, Human papillomavirus type 45
acuguacauaau

SEQ ID NO: 2689638 - RNA, 16 nt, Human papillomavirus type 45
guauauuguauacagu

SEQ ID NO: 2689639 - RNA, 20 nt, Human papillomavirus type 45
uaucagaugaugaggaugaa

SEQ ID NO: 2689640 - RNA, 18 nt, Human papillomavirus type 45
aaugcaauacuauuuaca

SEQ ID NO: 2689641 - RNA, 13 nt, Human papillomavirus type 45
gcaaguauaacaa

SEQ ID NO: 2689642 - RNA, 16 nt, Human papillomavirus type 45
uacagcagcuguuuuu

SEQ ID NO: 2689643 - RNA, 13 nt, Human papillomavirus type 45
augaaugugccuu

SEQ ID NO: 2689644 - RNA, 21 nt, Human papillomavirus type 45
uguaugaaugugccuuguggc

SEQ ID NO: 2689645 - RNA, 13 nt, Human papillomavirus type 45
uugcuguauacau

SEQ ID NO: 2689646 - RNA, 17 nt, Human papillomavirus type 45
caaggaaaacaguccau

SEQ ID NO: 2689647 - RNA, 19 nt, Human papillomavirus type 45
guccauuaggggagcagcu

SEQ ID NO: 2689648 - RNA, 19 nt, Human papillomavirus type 45
guaucccaccgugcagcac

SEQ ID NO: 2689649 - RNA, 20 nt, Human papillomavirus type 45
auuggucgugggcagccuuu

SEQ ID NO: 2689650 - RNA, 15 nt, Human papillomavirus type 45
gaaugaugcacaggu

SEQ ID NO: 2689651 - RNA, 22 nt, Human papillomavirus type 45
uacuauuuguguguauguguau

SEQ ID NO: 2689652 - RNA, 10 nt, Human papillomavirus type 45
uauauguuua

SEQ ID NO: 2689653 - RNA, 14 nt, Human papillomavirus type 45
gacagcacaggcau

SEQ ID NO: 2689654 - RNA, 14 nt, Human papillomavirus type 45
cauauauguauguu

SEQ ID NO: 2689655 - RNA, 18 nt, Human papillomavirus type 45
aacgaaaguuugcaggag

SEQ ID NO: 2689656 - RNA, 18 nt, Human papillomavirus type 45
gacaaaacagcagcaugu

SEQ ID NO: 2689657 - RNA, 15 nt, Human papillomavirus type 45
uguuccaugcgcagg

SEQ ID NO: 2689658 - RNA, 15 nt, Human papillomavirus type 45
aauaaacaggcuguu

SEQ ID NO: 2689659 - RNA, 18 nt, Human papillomavirus type 45
acaguaaagacauaaaca

SEQ ID NO: 2689660 - RNA, 17 nt, Human papillomavirus type 45
gcuuuucugugugccuu

SEQ ID NO: 2689661 - RNA, 22 nt, Human papillomavirus type 45
accagguggugccuccuauuaa

SEQ ID NO: 2689662 - RNA, 20 nt, Human papillomavirus type 45
uuuguauguuguauguaugu

SEQ ID NO: 2689663 - RNA, 23 nt, Human papillomavirus type 45
gccuuaaagggccuugcacaaag

SEQ ID NO: 2689664 - RNA, 21 nt, Human papillomavirus type 45
ucuaugugugugcuuuugcuu

SEQ ID NO: 2689665 - RNA, 19 nt, Human papillomavirus type 45
auguaauaucagaugauga

SEQ ID NO: 2689666 - RNA, 13 nt, Human papillomavirus type 45
ggcagcaaggaaa

SEQ ID NO: 2689667 - RNA, 16 nt, Human papillomavirus type 45
auguaguaugggacag

SEQ ID NO: 2689668 - RNA, 16 nt, Human papillomavirus type 45
auggcaacaaggacaa

SEQ ID NO: 2689669 - RNA, 21 nt, Human papillomavirus type 45
gaaaguuugcaggaggcagca

SEQ ID NO: 2689670 - RNA, 18 nt, Human papillomavirus type 45
ccaugguaucccaccgug

SEQ ID NO: 2689671 - RNA, 17 nt, Human papillomavirus type 45
agguauccgcauaucag

SEQ ID NO: 2689672 - RNA, 17 nt, Human papillomavirus type 45
auacuauuuguguguau

SEQ ID NO: 2689673 - RNA, 19 nt, Human papillomavirus type 45
aagaaauuguauugcauuu

SEQ ID NO: 2689674 - RNA, 15 nt, Human papillomavirus type 45
ugcaggaggcagcaa

SEQ ID NO: 2689675 - RNA, 12 nt, Human papillomavirus type 45
cuguacauaauu

SEQ ID NO: 2689676 - RNA, 14 nt, Human papillomavirus type 45
cauuaacagcauuu

SEQ ID NO: 2689677 - RNA, 21 nt, Human papillomavirus type 45
uaacauaccugugaugugcau

SEQ ID NO: 2689678 - RNA, 14 nt, Human papillomavirus type 45
aacaauuguagaga

SEQ ID NO: 2689679 - RNA, 16 nt, Human papillomavirus type 45
acuguaggcaauccau

SEQ ID NO: 2689680 - RNA, 13 nt, Human papillomavirus type 45
ucaugcaggcagu

SEQ ID NO: 2689681 - RNA, 12 nt, Human papillomavirus type 45
uauguaugaaug

SEQ ID NO: 2689682 - RNA, 13 nt, Human papillomavirus type 45
gaaaaaaacaggg

SEQ ID NO: 2689683 - RNA, 12 nt, Human papillomavirus type 45
augcacaggugu

SEQ ID NO: 2689684 - RNA, 20 nt, Human papillomavirus type 45
uguauacauuuguugcuauu

SEQ ID NO: 2689685 - RNA, 13 nt, Human papillomavirus type 45
cuaccuauguuug

SEQ ID NO: 2689686 - RNA, 23 nt, Human papillomavirus type 45
gaaaacaguccauuaggggagca

SEQ ID NO: 2689687 - RNA, 16 nt, Human papillomavirus type 45
aauccauauuuuaggg

SEQ ID NO: 2689688 - RNA, 20 nt, Human papillomavirus type 45
guauuggccuaaguggccau

SEQ ID NO: 2689689 - RNA, 15 nt, Human papillomavirus type 45
auauauaauccugaa

SEQ ID NO: 2689690 - RNA, 14 nt, Human papillomavirus type 45
cauaugcaugcuuu

SEQ ID NO: 2689691 - RNA, 17 nt, Human papillomavirus type 45
ccauuuugcugugcaac

SEQ ID NO: 2689692 - RNA, 14 nt, Human papillomavirus type 45
gcuauugaacugca

SEQ ID NO: 2689693 - RNA, 14 nt, Human papillomavirus type 45
auaaagcuauugaa

SEQ ID NO: 2689694 - RNA, 15 nt, Human papillomavirus type 45
cauuuugcugugcaa

SEQ ID NO: 2689695 - RNA, 19 nt, Human papillomavirus type 45
guccacgguuacaagaaau

SEQ ID NO: 2689696 - RNA, 14 nt, Human papillomavirus type 45
cgugcguguaugua

SEQ ID NO: 2689697 - RNA, 20 nt, Human papillomavirus type 45
gcaauacuauuuacagcaag

SEQ ID NO: 2689698 - RNA, 22 nt, Human papillomavirus type 45
aagggccuugcacaaagcaagu

SEQ ID NO: 2689699 - RNA, 14 nt, Human papillomavirus type 45
aaaccgugcacgua

SEQ ID NO: 2689700 - RNA, 17 nt, Human papillomavirus type 45
aacuauggaauacagaa

SEQ ID NO: 2689701 - RNA, 23 nt, Human papillomavirus type 45
gauacaugcgaggaacuauggaa

SEQ ID NO: 2689702 - RNA, 16 nt, Human papillomavirus type 45
ugcaggaggcagcaag

SEQ ID NO: 2689703 - RNA, 16 nt, Human papillomavirus type 45
auguauguauguauuu

SEQ ID NO: 2689704 - RNA, 13 nt, Human papillomavirus type 45
aguucagaaugau

SEQ ID NO: 2689705 - RNA, 18 nt, Human papillomavirus type 45
uauaauaaauuggaugau

SEQ ID NO: 2689706 - RNA, 17 nt, Human papillomavirus type 45
caguauguaacauuacu

SEQ ID NO: 2689707 - RNA, 17 nt, Human papillomavirus type 45
uguaugguguuacugua

SEQ ID NO: 2689708 - RNA, 17 nt, Human papillomavirus type 45
cauauuuuaucaugcag

SEQ ID NO: 2689709 - RNA, 16 nt, Human papillomavirus type 45
uauuuuauauguuuaa

SEQ ID NO: 2689710 - RNA, 13 nt, Human papillomavirus type 45
cagaaugaugcac

SEQ ID NO: 2689711 - RNA, 20 nt, Human papillomavirus type 45
gugcagguaauaaacaggcu

SEQ ID NO: 2689712 - RNA, 16 nt, Human papillomavirus type 45
uuguauuuuuguauuu

SEQ ID NO: 2689713 - RNA, 17 nt, Human papillomavirus type 45
auguaugaaugugccuu

SEQ ID NO: 2689714 - RNA, 20 nt, Human papillomavirus type 45
uugugcuuuucugugugccu

SEQ ID NO: 2689715 - RNA, 13 nt, Human papillomavirus type 45
aucagaugaugag

SEQ ID NO: 2689716 - RNA, 15 nt, Human papillomavirus type 45
caagagacagcacag

SEQ ID NO: 2689717 - RNA, 23 nt, Human papillomavirus type 45
auaccuaaacuggcacauuuaca

SEQ ID NO: 2689718 - RNA, 14 nt, Human papillomavirus type 45
aguuugcaggaggc

SEQ ID NO: 2689719 - RNA, 18 nt, Human papillomavirus type 45
aggaggcagcaaggaaaa

SEQ ID NO: 2689720 - RNA, 22 nt, Human papillomavirus type 45
auuggccuaaguggccauccau

SEQ ID NO: 2689721 - RNA, 12 nt, Human papillomavirus type 45
cagcacaggcau

SEQ ID NO: 2689722 - RNA, 21 nt, Human papillomavirus type 45
ugguucuuuguagaaacaauu

SEQ ID NO: 2689723 - RNA, 16 nt, Human papillomavirus type 45
gagacagcacaggcau

SEQ ID NO: 2689724 - RNA, 22 nt, Human papillomavirus type 45
ggcagcaaggaaaacaguccau

SEQ ID NO: 2689725 - RNA, 13 nt, Human papillomavirus type 45
cuacaauggcgga

SEQ ID NO: 2689726 - RNA, 17 nt, Human papillomavirus type 45
uugucagcacugaugau

SEQ ID NO: 2689727 - RNA, 11 nt, Human papillomavirus type 45
auaugggacaa

SEQ ID NO: 2689728 - RNA, 15 nt, Human papillomavirus type 45
cuuuuaaacauaaua

SEQ ID NO: 2689729 - RNA, 13 nt, Human papillomavirus type 45
uauauuacuguau

SEQ ID NO: 2689730 - RNA, 15 nt, Human papillomavirus type 45
uccauuuuacuuaua

SEQ ID NO: 2689731 - RNA, 16 nt, Human papillomavirus type 45
uggcggauccagaagg

SEQ ID NO: 2689732 - RNA, 23 nt, Human papillomavirus type 45
auuguagagaaaaaaacagggga

SEQ ID NO: 2689733 - RNA, 19 nt, Human papillomavirus type 45
acagcagcuguuuuugagc

SEQ ID NO: 2689734 - RNA, 15 nt, Human papillomavirus type 45
uuuaugugugcugca

SEQ ID NO: 2689735 - RNA, 15 nt, Human papillomavirus type 45
uuguguguaugugua

SEQ ID NO: 2689736 - RNA, 16 nt, Human papillomavirus type 45
uauauuguauacagua

SEQ ID NO: 2689737 - RNA, 13 nt, Human papillomavirus type 45
uauuacuguauuu

SEQ ID NO: 2689738 - RNA, 12 nt, Human papillomavirus type 45
agugggcacaaa

SEQ ID NO: 2689739 - RNA, 15 nt, Human papillomavirus type 45
caaaaagcaaagcac

SEQ ID NO: 2689740 - RNA, 15 nt, Human papillomavirus type 45
gcaauccauauuuua

SEQ ID NO: 2689741 - RNA, 14 nt, Human papillomavirus type 45
auuaacauuucaaa

SEQ ID NO: 2689742 - RNA, 23 nt, Human papillomavirus type 45
guauggaaauuggucgugggcag

SEQ ID NO: 2689743 - RNA, 21 nt, Human papillomavirus type 45
aaaccaccagguggugccucc

SEQ ID NO: 2689744 - RNA, 17 nt, Human papillomavirus type 45
gucccgcuugugcaguc

SEQ ID NO: 2689745 - RNA, 17 nt, Human papillomavirus type 45
aggaggcagcaaggaaa

SEQ ID NO: 2689746 - RNA, 16 nt, Human papillomavirus type 45
cagcacaggcauuguu

SEQ ID NO: 2689747 - RNA, 18 nt, Human papillomavirus type 45
guaccuaauggugcaggu

SEQ ID NO: 2689748 - RNA, 14 nt, Human papillomavirus type 45
gcuuuacacaccau

SEQ ID NO: 2689749 - RNA, 23 nt, Human papillomavirus type 45
caagaaauuucauuaaauagugg

SEQ ID NO: 2689750 - RNA, 17 nt, Human papillomavirus type 45
uauaguuguuauuacau

SEQ ID NO: 2689751 - RNA, 15 nt, Human papillomavirus type 45
cugcaagaaauugua

SEQ ID NO: 2689752 - RNA, 18 nt, Human papillomavirus type 45
accaccuucuguggccag

SEQ ID NO: 2689753 - RNA, 14 nt, Human papillomavirus type 45
uauguaacauuacu

SEQ ID NO: 2689754 - RNA, 20 nt, Human papillomavirus type 45
acuauaauguacaguacagu

SEQ ID NO: 2689755 - RNA, 21 nt, Human papillomavirus type 45
caugguauuaccaaacuaaac

SEQ ID NO: 2689756 - RNA, 19 nt, Human papillomavirus type 45
uggcaacaaggacaacugu

SEQ ID NO: 2689757 - RNA, 16 nt, Human papillomavirus type 45
acagcaagggaacaug

SEQ ID NO: 2689758 - RNA, 21 nt, Human papillomavirus type 45
uauuuacuaccuauguuugua

SEQ ID NO: 2689759 - RNA, 22 nt, Human papillomavirus type 45
caauacuauuuguguguaugug

SEQ ID NO: 2689760 - RNA, 21 nt, Human papillomavirus type 45
agcuauugaacugcaaauggc

SEQ ID NO: 2689761 - RNA, 17 nt, Human papillomavirus type 45
acuuauacguuuggaaa

SEQ ID NO: 2689762 - RNA, 14 nt, Human papillomavirus type 45
acuaaccaauaauc

SEQ ID NO: 2689763 - RNA, 13 nt, Human papillomavirus type 45
gcaggcaguuccc

SEQ ID NO: 2689764 - RNA, 16 nt, Human papillomavirus type 45
uacauaauugugguau

SEQ ID NO: 2689765 - RNA, 23 nt, Human papillomavirus type 45
uuuauugugcuuuucugugugcc

SEQ ID NO: 2689766 - RNA, 17 nt, Human papillomavirus type 45
uacauuuguugcuauuu

SEQ ID NO: 2689767 - RNA, 17 nt, Human papillomavirus type 45
uuugauggcaacaagga

SEQ ID NO: 2689768 - RNA, 18 nt, Human papillomavirus type 45
gugaacaggcagagcaag

SEQ ID NO: 2689769 - RNA, 13 nt, Human papillomavirus type 45
uuuauugugcuuu

SEQ ID NO: 2689770 - RNA, 13 nt, Human papillomavirus type 45
aauguacaguaca

SEQ ID NO: 2689771 - RNA, 16 nt, Human papillomavirus type 45
guauguuuguauguau

SEQ ID NO: 2689772 - RNA, 14 nt, Human papillomavirus type 45
guuuggaaaaugca

SEQ ID NO: 2689773 - RNA, 16 nt, Human papillomavirus type 45
auauuguauacaguau

SEQ ID NO: 2689774 - RNA, 15 nt, Human papillomavirus type 45
uaccugugaugugca

SEQ ID NO: 2689775 - RNA, 16 nt, Human papillomavirus type 45
uauguuuguauuacau

SEQ ID NO: 2689776 - RNA, 18 nt, Human papillomavirus type 45
ggccuugcacaaagcaag

SEQ ID NO: 2689777 - RNA, 21 nt, Human papillomavirus type 45
guuguguaggguugcacccuu

SEQ ID NO: 2689778 - RNA, 17 nt, Human papillomavirus type 45
cugguucuuuguagaaa

SEQ ID NO: 2689779 - RNA, 13 nt, Human papillomavirus type 45
aaguauaacaaug

SEQ ID NO: 2689780 - RNA, 21 nt, Human papillomavirus type 45
auauguauguuuguauguaug

SEQ ID NO: 2689781 - RNA, 21 nt, Human papillomavirus type 45
aucuguauauuguauacagua

SEQ ID NO: 2689782 - RNA, 19 nt, Human papillomavirus type 45
guuguaccuaauggugcag

SEQ ID NO: 2689783 - RNA, 21 nt, Human papillomavirus type 45
guagagaaaaaaacaggggau

SEQ ID NO: 2689784 - RNA, 17 nt, Human papillomavirus type 45
ugaaacugcaacagaua

SEQ ID NO: 2689785 - RNA, 16 nt, Human papillomavirus type 45
agagcucggcagagga

SEQ ID NO: 2689786 - RNA, 17 nt, Human papillomavirus type 45
aaguucagaaugaugca

SEQ ID NO: 2689787 - RNA, 19 nt, Human papillomavirus type 45
gguuguaccuaauggugca

SEQ ID NO: 2689788 - RNA, 17 nt, Human papillomavirus type 45
acgagccgaaccacagc

SEQ ID NO: 2689789 - RNA, 15 nt, Human papillomavirus type 45
ccuugcacaaagcaa

SEQ ID NO: 2689790 - RNA, 22 nt, Human papillomavirus type 45
aucuuccaccaccuucuguggc

SEQ ID NO: 2689791 - RNA, 15 nt, Human papillomavirus type 45
uaagugugacggcag

SEQ ID NO: 2689792 - RNA, 17 nt, Human papillomavirus type 45
ugaggaauggacacugc

SEQ ID NO: 2689793 - RNA, 16 nt, Human papillomavirus type 45
accuuuuaaacauaau

SEQ ID NO: 2689794 - RNA, 21 nt, Human papillomavirus type 45
caguauauauuauauaacuga

SEQ ID NO: 2689795 - RNA, 13 nt, Human papillomavirus type 45
uaucaugcaggca

SEQ ID NO: 2689796 - RNA, 13 nt, Human papillomavirus type 45
aaggaaaacaguc

SEQ ID NO: 2689797 - RNA, 16 nt, Human papillomavirus type 45
uaguuguuauuacauc

SEQ ID NO: 2689798 - RNA, 17 nt, Human papillomavirus type 45
gaaacacugcaagaaau

SEQ ID NO: 2689799 - RNA, 14 nt, Human papillomavirus type 45
uaacuguaggcaau

SEQ ID NO: 2689800 - RNA, 17 nt, Human papillomavirus type 45
cauaauaccuaaacugg

SEQ ID NO: 2689801 - RNA, 22 nt, Human papillomavirus type 5
uaacuguaggucauccuuauuu

SEQ ID NO: 2689802 - RNA, 21 nt, Human papillomavirus type 5
gguguccgugucggaggaacc

SEQ ID NO: 2689803 - RNA, 18 nt, Human papillomavirus type 5
gguaguacaucuaaagaa

SEQ ID NO: 2689804 - RNA, 23 nt, Human papillomavirus type 5
aggagccugacaacgaaaggauc

SEQ ID NO: 2689805 - RNA, 14 nt, Human papillomavirus type 5
gauccuaacagauu

SEQ ID NO: 2689806 - RNA, 18 nt, Human papillomavirus type 5
ugcuaccaguugaccugu

SEQ ID NO: 2689807 - RNA, 20 nt, Human papillomavirus type 5
ccuggucauggguggcagga

SEQ ID NO: 2689808 - RNA, 19 nt, Human papillomavirus type 5
gcuccugugcccugacugu

SEQ ID NO: 2689809 - RNA, 21 nt, Human papillomavirus type 5
caguugaccuguuuugugaag

SEQ ID NO: 2689810 - RNA, 17 nt, Human papillomavirus type 5
ggaugauaaguggcaua

SEQ ID NO: 2689811 - RNA, 16 nt, Human papillomavirus type 5
caacgaaaggaucucu

SEQ ID NO: 2689812 - RNA, 16 nt, Human papillomavirus type 5
caaaggaguugauaag

SEQ ID NO: 2689813 - RNA, 13 nt, Human papillomavirus type 5
acucgagcugacu

SEQ ID NO: 2689814 - RNA, 20 nt, Human papillomavirus type 5
ucuccuggugaagugggagg

SEQ ID NO: 2689815 - RNA, 20 nt, Human papillomavirus type 5
agcucagugaggugcagccc

SEQ ID NO: 2689816 - RNA, 15 nt, Human papillomavirus type 5
agaagcgcuccagaa

SEQ ID NO: 2689817 - RNA, 17 nt, Human papillomavirus type 5
aaaggaguugauaaggc

SEQ ID NO: 2689818 - RNA, 21 nt, Human papillomavirus type 5
uccgugcgguugcaggaacug

SEQ ID NO: 2689819 - RNA, 18 nt, Human papillomavirus type 5
aagguaguacaucuaaag

SEQ ID NO: 2689820 - RNA, 22 nt, Human papillomavirus type 5
gcuacaggguacgugccacuug

SEQ ID NO: 2689821 - RNA, 23 nt, Human papillomavirus type 5
uugauaccagcauagaaacauuu

SEQ ID NO: 2689822 - RNA, 23 nt, Human papillomavirus type 5
guuuauuggaagcugacuguagu

SEQ ID NO: 2689823 - RNA, 18 nt, Human papillomavirus type 5
caguaucagaaacaaagg

SEQ ID NO: 2689824 - RNA, 17 nt, Human papillomavirus type 5
ggagugugagcagagcg

SEQ ID NO: 2689825 - RNA, 15 nt, Human papillomavirus type 5
acuaucaugcauuua

SEQ ID NO: 2689826 - RNA, 13 nt, Human papillomavirus type 5
gaacuauuucauc

SEQ ID NO: 2689827 - RNA, 11 nt, Human papillomavirus type 5
cgagcaggaaa

SEQ ID NO: 2689828 - RNA, 12 nt, Human papillomavirus type 5
aaggcuaaagaa

SEQ ID NO: 2689829 - RNA, 18 nt, Human papillomavirus type 5
caggagugugagcagagc

SEQ ID NO: 2689830 - RNA, 21 nt, Human papillomavirus type 5
cuuacgaaaagaaccuguauu

SEQ ID NO: 2689831 - RNA, 20 nt, Human papillomavirus type 5
gcucuuugcagagcaggaca

SEQ ID NO: 2689832 - RNA, 16 nt, Human papillomavirus type 5
acccgguacacucagu

SEQ ID NO: 2689833 - RNA, 17 nt, Human papillomavirus type 5
cgauaccccaaaggagu

SEQ ID NO: 2689834 - RNA, 17 nt, Human papillomavirus type 5
cauacuaacauacccua

SEQ ID NO: 2689835 - RNA, 16 nt, Human papillomavirus type 5
aauagguaggggccag

SEQ ID NO: 2689836 - RNA, 14 nt, Human papillomavirus type 5
cacuucaaaaaagg

SEQ ID NO: 2689837 - RNA, 15 nt, Human papillomavirus type 5
agcgucuaggcaggc

SEQ ID NO: 2689838 - RNA, 22 nt, Human papillomavirus type 5
uuugcucaugagccauggacuc

SEQ ID NO: 2689839 - RNA, 23 nt, Human papillomavirus type 5
aaguuauuuaugacaaugaucca

SEQ ID NO: 2689840 - RNA, 14 nt, Human papillomavirus type 5
agucuuccaaggau

SEQ ID NO: 2689841 - RNA, 19 nt, Human papillomavirus type 5
ccuguuuugugaagaggaa

SEQ ID NO: 2689842 - RNA, 15 nt, Human papillomavirus type 5
aauauagaaucagau

SEQ ID NO: 2689843 - RNA, 12 nt, Human papillomavirus type 5
ggagcucaguga

SEQ ID NO: 2689844 - RNA, 13 nt, Human papillomavirus type 5
aaugaagcugaag

SEQ ID NO: 2689845 - RNA, 22 nt, Human papillomavirus type 5
gugauugguguuuauuggaagc

SEQ ID NO: 2689846 - RNA, 22 nt, Human papillomavirus type 5
gcccugacugucgcggaaacug

SEQ ID NO: 2689847 - RNA, 16 nt, Human papillomavirus type 5
cugcaaacaggcaggc

SEQ ID NO: 2689848 - RNA, 12 nt, Human papillomavirus type 5
gaagcugaagau

SEQ ID NO: 2689849 - RNA, 14 nt, Human papillomavirus type 5
gagucaauuucauu

SEQ ID NO: 2689850 - RNA, 15 nt, Human papillomavirus type 5
gcaagaaguggggug

SEQ ID NO: 2689851 - RNA, 13 nt, Human papillomavirus type 5
agcaauggugcug

SEQ ID NO: 2689852 - RNA, 19 nt, Human papillomavirus type 5
agaaacaaaggcuaaagaa

SEQ ID NO: 2689853 - RNA, 22 nt, Human papillomavirus type 5
uacuggucacccuuauuucaau

SEQ ID NO: 2689854 - RNA, 15 nt, Human papillomavirus type 5
cgugccacuugggga

SEQ ID NO: 2689855 - RNA, 22 nt, Human papillomavirus type 5
aggggcggcuaacacacugaaa

SEQ ID NO: 2689856 - RNA, 14 nt, Human papillomavirus type 5
gcaaacaggcaggc

SEQ ID NO: 2689857 - RNA, 18 nt, Human papillomavirus type 5
gaaacaaaggcuaaagaa

SEQ ID NO: 2689858 - RNA, 13 nt, Human papillomavirus type 5
auucaaagaacaa

SEQ ID NO: 2689859 - RNA, 19 nt, Human papillomavirus type 5
auggugcugcagcuugagu

SEQ ID NO: 2689860 - RNA, 21 nt, Human papillomavirus type 5
cuccgugcgguugcaggaacu

SEQ ID NO: 2689861 - RNA, 14 nt, Human papillomavirus type 5
ggccuuccuugguu

SEQ ID NO: 2689862 - RNA, 19 nt, Human papillomavirus type 5
ggcaggcccagaaugcuca

SEQ ID NO: 2689863 - RNA, 12 nt, Human papillomavirus type 5
acauuuacuaau

SEQ ID NO: 2689864 - RNA, 14 nt, Human papillomavirus type 5
auucccuggaacua

SEQ ID NO: 2689865 - RNA, 15 nt, Human papillomavirus type 5
caccccagcagaagu

SEQ ID NO: 2689866 - RNA, 17 nt, Human papillomavirus type 5
agcagaagucuaagcga

SEQ ID NO: 2689867 - RNA, 20 nt, Human papillomavirus type 5
agcaggaaacggaggaggag

SEQ ID NO: 2689868 - RNA, 13 nt, Human papillomavirus type 5
aguacuaccuggu

SEQ ID NO: 2689869 - RNA, 19 nt, Human papillomavirus type 5
uguauacaauguggaccua

SEQ ID NO: 2689870 - RNA, 20 nt, Human papillomavirus type 5
agaggaauuaccaaacgagc

SEQ ID NO: 2689871 - RNA, 17 nt, Human papillomavirus type 5
uacauuuuguauuugcu

SEQ ID NO: 2689872 - RNA, 15 nt, Human papillomavirus type 5
acaggagugugagca

SEQ ID NO: 2689873 - RNA, 16 nt, Human papillomavirus type 5
gugagcagagcgagga

SEQ ID NO: 2689874 - RNA, 14 nt, Human papillomavirus type 5
uauuggaagcugac

SEQ ID NO: 2689875 - RNA, 17 nt, Human papillomavirus type 5
acuugagucaauuucau

SEQ ID NO: 2689876 - RNA, 18 nt, Human papillomavirus type 5
ucggauuuguuagaugau

SEQ ID NO: 2689877 - RNA, 16 nt, Human papillomavirus type 5
uacuggaagaagcucg

SEQ ID NO: 2689878 - RNA, 18 nt, Human papillomavirus type 5
uacuggucacccuuauuu

SEQ ID NO: 2689879 - RNA, 15 nt, Human papillomavirus type 5
gcuuuugcuacuaac

SEQ ID NO: 2689880 - RNA, 22 nt, Human papillomavirus type 5
ucaugcauuuagugacagauug

SEQ ID NO: 2689881 - RNA, 21 nt, Human papillomavirus type 5
gcacugagcgucuaggcaggc

SEQ ID NO: 2689882 - RNA, 19 nt, Human papillomavirus type 5
auauuuaccaaaccugcaa

SEQ ID NO: 2689883 - RNA, 14 nt, Human papillomavirus type 5
cuggagcucaguga

SEQ ID NO: 2689884 - RNA, 17 nt, Human papillomavirus type 5
uaaugcugcuuuugcua

SEQ ID NO: 2689885 - RNA, 16 nt, Human papillomavirus type 5
auuucaauaaaguaaa

SEQ ID NO: 2689886 - RNA, 16 nt, Human papillomavirus type 5
auccagauaaugccaa

SEQ ID NO: 2689887 - RNA, 18 nt, Human papillomavirus type 5
uuaguccgcgacuugagu

SEQ ID NO: 2689888 - RNA, 20 nt, Human papillomavirus type 5
caaaccugcaaacaggcagg

SEQ ID NO: 2689889 - RNA, 15 nt, Human papillomavirus type 5
gagucacuacagaca

SEQ ID NO: 2689890 - RNA, 16 nt, Human papillomavirus type 5
uggacucagaacagac

SEQ ID NO: 2689891 - RNA, 22 nt, Human papillomavirus type 5
auuugagagagauacagacucu

SEQ ID NO: 2689892 - RNA, 17 nt, Human papillomavirus type 5
cagaacaaacauugcag

SEQ ID NO: 2689893 - RNA, 19 nt, Human papillomavirus type 5
gacagucuuuaacauuuac

SEQ ID NO: 2689894 - RNA, 13 nt, Human papillomavirus type 5
gcugacuguagug

SEQ ID NO: 2689895 - RNA, 23 nt, Human papillomavirus type 5
ugaugaagcggugcgauacccca

SEQ ID NO: 2689896 - RNA, 20 nt, Human papillomavirus type 5
aguugauaaggccuauggca

SEQ ID NO: 2689897 - RNA, 18 nt, Human papillomavirus type 5
cugagcgucuaggcaggc

SEQ ID NO: 2689898 - RNA, 21 nt, Human papillomavirus type 5
gcgauaccccaaaggaguuga

SEQ ID NO: 2689899 - RNA, 20 nt, Human papillomavirus type 5
ugcugguguauuuuuuggug

SEQ ID NO: 2689900 - RNA, 17 nt, Human papillomavirus type 5
cauggguggcaggagau

SEQ ID NO: 2689901 - RNA, 21 nt, Human papillomavirus type 5
uacuaaugcugcuuuugcuac

SEQ ID NO: 2689902 - RNA, 15 nt, Human papillomavirus type 5
cacccuuauuucaau

SEQ ID NO: 2689903 - RNA, 18 nt, Human papillomavirus type 5
auauuauucuggagcuca

SEQ ID NO: 2689904 - RNA, 13 nt, Human papillomavirus type 5
ggaagcugacugu

SEQ ID NO: 2689905 - RNA, 18 nt, Human papillomavirus type 5
guguccgugucggaggaa

SEQ ID NO: 2689906 - RNA, 15 nt, Human papillomavirus type 5
uaguacaucuaaaga

SEQ ID NO: 2689907 - RNA, 16 nt, Human papillomavirus type 5
gugcgguugcaggaac

SEQ ID NO: 2689908 - RNA, 16 nt, Human papillomavirus type 5
auggcaaccuggacag

SEQ ID NO: 2689909 - RNA, 13 nt, Human papillomavirus type 5
ucuuugcagagca

SEQ ID NO: 2689910 - RNA, 18 nt, Human papillomavirus type 5
ggaagcugacuguaguga

SEQ ID NO: 2689911 - RNA, 21 nt, Human papillomavirus type 5
uggcaaaccuuacgaaaagaa

SEQ ID NO: 2689912 - RNA, 17 nt, Human papillomavirus type 5
acuaacauacccuagca

SEQ ID NO: 2689913 - RNA, 12 nt, Human papillomavirus type 5
gcgguugcagga

SEQ ID NO: 2689914 - RNA, 15 nt, Human papillomavirus type 5
ugcaagauauuauuc

SEQ ID NO: 2689915 - RNA, 23 nt, Human papillomavirus type 5
gaaacggaggaggagccugacaa

SEQ ID NO: 2689916 - RNA, 13 nt, Human papillomavirus type 5
gagugugagcaga

SEQ ID NO: 2689917 - RNA, 14 nt, Human papillomavirus type 5
acucgagcugacuu

SEQ ID NO: 2689918 - RNA, 14 nt, Human papillomavirus type 5
gccagaguccaaag

SEQ ID NO: 2689919 - RNA, 15 nt, Human papillomavirus type 5
ucuuuaacauuuacu

SEQ ID NO: 2689920 - RNA, 13 nt, Human papillomavirus type 5
cauccuuauuuca

SEQ ID NO: 2689921 - RNA, 16 nt, Human papillomavirus type 5
auuucgccuaaaauua

SEQ ID NO: 2689922 - RNA, 15 nt, Human papillomavirus type 5
gugccacuuggggaa

SEQ ID NO: 2689923 - RNA, 15 nt, Human papillomavirus type 5
gaagguccugguguc

SEQ ID NO: 2689924 - RNA, 15 nt, Human papillomavirus type 5
ggagauggcacugag

SEQ ID NO: 2689925 - RNA, 14 nt, Human papillomavirus type 5
acugaacuggagca

SEQ ID NO: 2689926 - RNA, 18 nt, Human papillomavirus type 5
uauauuuuuuuuuacauu

SEQ ID NO: 2689927 - RNA, 19 nt, Human papillomavirus type 5
caggccgaggaacuggggg

SEQ ID NO: 2689928 - RNA, 16 nt, Human papillomavirus type 5
agaucugcagcuccug

SEQ ID NO: 2689929 - RNA, 13 nt, Human papillomavirus type 5
ccugacaaagaac

SEQ ID NO: 2689930 - RNA, 19 nt, Human papillomavirus type 5
caguaucagaaacaaaggc

SEQ ID NO: 2689931 - RNA, 22 nt, Human papillomavirus type 5
gcagcuccugugcccugacugu

SEQ ID NO: 2689932 - RNA, 14 nt, Human papillomavirus type 5
ccaaaccugcaaac

SEQ ID NO: 2689933 - RNA, 13 nt, Human papillomavirus type 5
augaagcugaaga

SEQ ID NO: 2689934 - RNA, 17 nt, Human papillomavirus type 5
uguuuaggucauuuagu

SEQ ID NO: 2689935 - RNA, 22 nt, Human papillomavirus type 5
uacaauguggaccuauguguau

SEQ ID NO: 2689936 - RNA, 14 nt, Human papillomavirus type 5
cagcuccugugccc

SEQ ID NO: 2689937 - RNA, 17 nt, Human papillomavirus type 5
ccugcaaacaggcaggc

SEQ ID NO: 2689938 - RNA, 16 nt, Human papillomavirus type 5
cagagcaggacagcgg

SEQ ID NO: 2689939 - RNA, 17 nt, Human papillomavirus type 5
acaacaguugcugacaa

SEQ ID NO: 2689940 - RNA, 13 nt, Human papillomavirus type 5
gcaaccuggacag

SEQ ID NO: 2689941 - RNA, 21 nt, Human papillomavirus type 5
uaggcaggcccagaaugcuca

SEQ ID NO: 2689942 - RNA, 22 nt, Human papillomavirus type 5
aucugauuuugcucaugagcca

SEQ ID NO: 2689943 - RNA, 17 nt, Human papillomavirus type 5
aaugcugcuuuugcuac

SEQ ID NO: 2689944 - RNA, 14 nt, Human papillomavirus type 5
acugcaaacaugac

SEQ ID NO: 2689945 - RNA, 22 nt, Human papillomavirus type 5
uccagauaaugccaauuuguau

SEQ ID NO: 2689946 - RNA, 18 nt, Human papillomavirus type 5
acauuuuguauuugcuau

SEQ ID NO: 2689947 - RNA, 23 nt, Human papillomavirus type 5
gauugguguuuauuggaagcuga

SEQ ID NO: 2689948 - RNA, 23 nt, Human papillomavirus type 5
cugcagcuugagucacuacagac

SEQ ID NO: 2689949 - RNA, 22 nt, Human papillomavirus type 5
uugccaauauagaaucagauca

SEQ ID NO: 2689950 - RNA, 18 nt, Human papillomavirus type 5
ugcauuuagugacagauu

SEQ ID NO: 2689951 - RNA, 22 nt, Human papillomavirus type 5
aguacuggucacccuuauuuca

SEQ ID NO: 2689952 - RNA, 15 nt, Human papillomavirus type 5
uucaucaacaggagu

SEQ ID NO: 2689953 - RNA, 15 nt, Human papillomavirus type 5
agauccuaacagauu

SEQ ID NO: 2689954 - RNA, 13 nt, Human papillomavirus type 5
agaaccuguauua

SEQ ID NO: 2689955 - RNA, 17 nt, Human papillomavirus type 5
gcuccugugcccugacu

SEQ ID NO: 2689956 - RNA, 19 nt, Human papillomavirus type 5
aaggcucuuugcagagcag

SEQ ID NO: 2689957 - RNA, 16 nt, Human papillomavirus type 5
uagggaccuccccaaa

SEQ ID NO: 2689958 - RNA, 19 nt, Human papillomavirus type 5
aaauuaccagauccuaaca

SEQ ID NO: 2689959 - RNA, 19 nt, Human papillomavirus type 5
gucuuuaacauuuacuaau

SEQ ID NO: 2689960 - RNA, 22 nt, Human papillomavirus type 5
caaaggagagauuuugaugaag

SEQ ID NO: 2689961 - RNA, 22 nt, Human papillomavirus type 5
aacuggagcagggcaauucccu

SEQ ID NO: 2689962 - RNA, 23 nt, Human papillomavirus type 5
acuguagugauguagaaaaugau

SEQ ID NO: 2689963 - RNA, 23 nt, Human papillomavirus type 5
gcagcuccugugcccugacuguc

SEQ ID NO: 2689964 - RNA, 12 nt, Human papillomavirus type 5
auggacucuagu

SEQ ID NO: 2689965 - RNA, 16 nt, Human papillomavirus type 5
aucagaucagugccaa

SEQ ID NO: 2689966 - RNA, 17 nt, Human papillomavirus type 5
gccauagcaauggugcu

SEQ ID NO: 2689967 - RNA, 16 nt, Human papillomavirus type 5
ccagaguccaaagcac

SEQ ID NO: 2689968 - RNA, 16 nt, Human papillomavirus type 5
aguacuaccuggucau

SEQ ID NO: 2689969 - RNA, 15 nt, Human papillomavirus type 5
uuuugugaagaggaa

SEQ ID NO: 2689970 - RNA, 21 nt, Human papillomavirus type 5
gacucuguaacucauauuuac

SEQ ID NO: 2689971 - RNA, 21 nt, Human papillomavirus type 5
augauacugaacuggagcagg

SEQ ID NO: 2689972 - RNA, 19 nt, Human papillomavirus type 5
agagcuaaaauuaaauaca

SEQ ID NO: 2689973 - RNA, 13 nt, Human papillomavirus type 5
gguggccuuggua

SEQ ID NO: 2689974 - RNA, 17 nt, Human papillomavirus type 5
uaaacaaugaagcugaa

SEQ ID NO: 2689975 - RNA, 17 nt, Human papillomavirus type 5
caggagauggcacugag

SEQ ID NO: 2689976 - RNA, 15 nt, Human papillomavirus type 5
acagucuuuaacauu

SEQ ID NO: 2689977 - RNA, 16 nt, Human papillomavirus type 5
ucauuuaguacuaccu

SEQ ID NO: 2689978 - RNA, 15 nt, Human papillomavirus type 5
cuuauuucaauguau

SEQ ID NO: 2689979 - RNA, 14 nt, Human papillomavirus type 5
ugggacaauuauuu

SEQ ID NO: 2689980 - RNA, 22 nt, Human papillomavirus type 5
acuggucacccuuauuucaaua

SEQ ID NO: 2689981 - RNA, 23 nt, Human papillomavirus type 5
ugcagcccgaagugcuaccaguu

SEQ ID NO: 2689982 - RNA, 14 nt, Human papillomavirus type 5
gcgucuaggcaggc

SEQ ID NO: 2689983 - RNA, 10 nt, Human papillomavirus type 5
aacugugagg

SEQ ID NO: 2689984 - RNA, 15 nt, Human papillomavirus type 5
cauccuuauuucaau

SEQ ID NO: 2689985 - RNA, 13 nt, Human papillomavirus type 5
aaagcauacagga

SEQ ID NO: 2689986 - RNA, 22 nt, Human papillomavirus type 5
auacucaaaggagagauuuuga

SEQ ID NO: 2689987 - RNA, 15 nt, Human papillomavirus type 5
ggcucuuugcagagc

SEQ ID NO: 2689988 - RNA, 11 nt, Human papillomavirus type 5
cuaaugcugcu

SEQ ID NO: 2689989 - RNA, 23 nt, Human papillomavirus type 5
uacugaccggagaucugcagcuc

SEQ ID NO: 2689990 - RNA, 14 nt, Human papillomavirus type 5
auuggaagcugacu

SEQ ID NO: 2689991 - RNA, 23 nt, Human papillomavirus type 5
aaaggggcggcuaacacacugaa

SEQ ID NO: 2689992 - RNA, 14 nt, Human papillomavirus type 5
agguguuacaaggc

SEQ ID NO: 2689993 - RNA, 15 nt, Human papillomavirus type 5
ccaacagcuacugac

SEQ ID NO: 2689994 - RNA, 19 nt, Human papillomavirus type 5
guugauauuuugcccauug

SEQ ID NO: 2689995 - RNA, 13 nt, Human papillomavirus type 5
uggaagaagcucg

SEQ ID NO: 2689996 - RNA, 13 nt, Human papillomavirus type 5
auuugcuauggcg

SEQ ID NO: 2689997 - RNA, 21 nt, Human papillomavirus type 5
uaccagauccuaacagauuug

SEQ ID NO: 2689998 - RNA, 21 nt, Human papillomavirus type 5
aggucauccuuauuucaaugu

SEQ ID NO: 2689999 - RNA, 22 nt, Human papillomavirus type 5
ugcuuuugcuacuaacauacua

SEQ ID NO: 2690000 - RNA, 18 nt, Human papillomavirus type 5
ggagcucagugaggugca

SEQ ID NO: 2690001 - RNA, 21 nt, Human papillomavirus type 5
uagaaucagaucagugccaaa

SEQ ID NO: 2690002 - RNA, 11 nt, Human papillomavirus type 5
cggaggaggag

SEQ ID NO: 2690003 - RNA, 15 nt, Human papillomavirus type 5
gacaccgguggccag

SEQ ID NO: 2690004 - RNA, 14 nt, Human papillomavirus type 5
agaucugcagcucc

SEQ ID NO: 2690005 - RNA, 11 nt, Human papillomavirus type 5
uggaagcugac

SEQ ID NO: 2690006 - RNA, 15 nt, Human papillomavirus type 5
gaccuccccaaagaa

SEQ ID NO: 2690007 - RNA, 16 nt, Human papillomavirus type 5
agcgcuccagaagguc

SEQ ID NO: 2690008 - RNA, 19 nt, Human papillomavirus type 5
ggauuagggaccuccccaa

SEQ ID NO: 2690009 - RNA, 16 nt, Human papillomavirus type 5
ugcccauugauacagu

SEQ ID NO: 2690010 - RNA, 15 nt, Human papillomavirus type 5
aacagauuugcauua

SEQ ID NO: 2690011 - RNA, 22 nt, Human papillomavirus type 5
agaaugcucauuagcuuuucuu

SEQ ID NO: 2690012 - RNA, 22 nt, Human papillomavirus type 5
ugcaggcacaaauuaaacauug

SEQ ID NO: 2690013 - RNA, 22 nt, Human papillomavirus type 5
caaaagcugucgcacagcuuag

SEQ ID NO: 2690014 - RNA, 19 nt, Human papillomavirus type 5
agcuuuccaacagcuacug

SEQ ID NO: 2690015 - RNA, 16 nt, Human papillomavirus type 5
cuauacucaaaggaga

SEQ ID NO: 2690016 - RNA, 23 nt, Human papillomavirus type 5
cauuuagaagcgcuccagaaggu

SEQ ID NO: 2690017 - RNA, 16 nt, Human papillomavirus type 5
aaugcugcuuuugcua

SEQ ID NO: 2690018 - RNA, 22 nt, Human papillomavirus type 5
agcuccgugcgguugcaggaac

SEQ ID NO: 2690019 - RNA, 14 nt, Human papillomavirus type 5
gugccacuugggga

SEQ ID NO: 2690020 - RNA, 21 nt, Human papillomavirus type 5
cgagcaggaaacggaggagga

SEQ ID NO: 2690021 - RNA, 21 nt, Human papillomavirus type 5
ggagcucagugaggugcagcc

SEQ ID NO: 2690022 - RNA, 16 nt, Human papillomavirus type 5
aaguggcauaaggcaa

SEQ ID NO: 2690023 - RNA, 20 nt, Human papillomavirus type 5
uaucaaccugugccuguaaa

SEQ ID NO: 2690024 - RNA, 18 nt, Human papillomavirus type 5
uacauucaaagaacaaau

SEQ ID NO: 2690025 - RNA, 19 nt, Human papillomavirus type 5
uaccaaacgagcaggaaac

SEQ ID NO: 2690026 - RNA, 14 nt, Human papillomavirus type 5
cuguagugauguag

SEQ ID NO: 2690027 - RNA, 16 nt, Human papillomavirus type 5
ugagucacuacagaca

SEQ ID NO: 2690028 - RNA, 15 nt, Human papillomavirus type 5
aaccugcaaacaggc

SEQ ID NO: 2690029 - RNA, 13 nt, Human papillomavirus type 5
caaugaagcugaa

SEQ ID NO: 2690030 - RNA, 17 nt, Human papillomavirus type 5
cuacugaccggagaucu

SEQ ID NO: 2690031 - RNA, 16 nt, Human papillomavirus type 5
uugguauuaguacagg

SEQ ID NO: 2690032 - RNA, 17 nt, Human papillomavirus type 5
gacaauuauuugagaga

SEQ ID NO: 2690033 - RNA, 19 nt, Human papillomavirus type 5
uaaugcugcuuuugcuacu

SEQ ID NO: 2690034 - RNA, 17 nt, Human papillomavirus type 5
cuaaugcugcuuuugcu

SEQ ID NO: 2690035 - RNA, 18 nt, Human papillomavirus type 5
ggacucgagcugacuuua

SEQ ID NO: 2690036 - RNA, 17 nt, Human papillomavirus type 5
cuuggaagauuacugga

SEQ ID NO: 2690037 - RNA, 22 nt, Human papillomavirus type 5
aggccuauggcaaccuggacag

SEQ ID NO: 2690038 - RNA, 21 nt, Human papillomavirus type 5
acucagucaaguuguugccaa

SEQ ID NO: 2690039 - RNA, 14 nt, Human papillomavirus type 5
guggcaggagaugg

SEQ ID NO: 2690040 - RNA, 16 nt, Human papillomavirus type 5
cuacagacaucugauu

SEQ ID NO: 2690041 - RNA, 13 nt, Human papillomavirus type 5
gucuaggcaggcc

SEQ ID NO: 2690042 - RNA, 12 nt, Human papillomavirus type 5
gaagcugacugu

SEQ ID NO: 2690043 - RNA, 22 nt, Human papillomavirus type 5
cgaaggcucuuugcagagcagg

SEQ ID NO: 2690044 - RNA, 18 nt, Human papillomavirus type 5
caaagcauacaggacgac

SEQ ID NO: 2690045 - RNA, 14 nt, Human papillomavirus type 5
acuggagcagggca

SEQ ID NO: 2690046 - RNA, 13 nt, Human papillomavirus type 5
agaaacaaaggcu

SEQ ID NO: 2690047 - RNA, 13 nt, Human papillomavirus type 5
acaaugaagcuga

SEQ ID NO: 2690048 - RNA, 20 nt, Human papillomavirus type 5
gagaaagguguuacaaggcu

SEQ ID NO: 2690049 - RNA, 13 nt, Human papillomavirus type 5
uccugugcccuga

SEQ ID NO: 2690050 - RNA, 19 nt, Human papillomavirus type 5
cucuuugcagagcaggaca

SEQ ID NO: 2690051 - RNA, 13 nt, Human papillomavirus type 5
aggacgacuugga

SEQ ID NO: 2690052 - RNA, 20 nt, Human papillomavirus type 5
auuuaguacuaccuggucau

SEQ ID NO: 2690053 - RNA, 12 nt, Human papillomavirus type 5
aacaggcaggca

SEQ ID NO: 2690054 - RNA, 16 nt, Human papillomavirus type 5
cuuuaacauuuacuaa

SEQ ID NO: 2690055 - RNA, 12 nt, Human papillomavirus type 5
gaucugcagcuc

SEQ ID NO: 2690056 - RNA, 20 nt, Human papillomavirus type 5
auacauucaaagaacaaaua

SEQ ID NO: 2690057 - RNA, 17 nt, Human papillomavirus type 5
cugagcgucuaggcagg

SEQ ID NO: 2690058 - RNA, 22 nt, Human papillomavirus type 5
aaauuaccagauccuaacagau

SEQ ID NO: 2690059 - RNA, 14 nt, Human papillomavirus type 5
aagcugacuguagu

SEQ ID NO: 2690060 - RNA, 22 nt, Human papillomavirus type 5
gauacugaacuggagcagggca

SEQ ID NO: 2690061 - RNA, 16 nt, Human papillomavirus type 5
caaauaucuacuauca

SEQ ID NO: 2690062 - RNA, 16 nt, Human papillomavirus type 5
gucgcacagcuuaguc

SEQ ID NO: 2690063 - RNA, 16 nt, Human papillomavirus type 5
gucauggguggcagga

SEQ ID NO: 2690064 - RNA, 23 nt, Human papillomavirus type 5
gugcugguguauuuuuugguggc

SEQ ID NO: 2690065 - RNA, 17 nt, Human papillomavirus type 5
guacaggccgaggaacu

SEQ ID NO: 2690066 - RNA, 17 nt, Human papillomavirus type 5
uguuagaugauacugaa

SEQ ID NO: 2690067 - RNA, 18 nt, Human papillomavirus type 5
agaggcuuagaaauaggu

SEQ ID NO: 2690068 - RNA, 22 nt, Human papillomavirus type 5
auuuuaaaauauggcagugcug

SEQ ID NO: 2690069 - RNA, 21 nt, Human papillomavirus type 5
uguaggucauccuuauuucaa

SEQ ID NO: 2690070 - RNA, 15 nt, Human papillomavirus type 5
guauaagucuuccaa

SEQ ID NO: 2690071 - RNA, 22 nt, Human papillomavirus type 5
caagauauuauucuggagcuca

SEQ ID NO: 2690072 - RNA, 13 nt, Human papillomavirus type 5
agaacaaauaucu

SEQ ID NO: 2690073 - RNA, 22 nt, Human papillomavirus type 5
aucaacaggagugugagcagag

SEQ ID NO: 2690074 - RNA, 17 nt, Human papillomavirus type 5
ugacaaugauccagaua

SEQ ID NO: 2690075 - RNA, 22 nt, Human papillomavirus type 5
caggagugugagcagagcgagg

SEQ ID NO: 2690076 - RNA, 19 nt, Human papillomavirus type 5
uacauuuuguauuugcuau

SEQ ID NO: 2690077 - RNA, 19 nt, Human papillomavirus type 5
caaugaagcugaagauguu

SEQ ID NO: 2690078 - RNA, 20 nt, Human papillomavirus type 5
aucagugccaaacacaccgu

SEQ ID NO: 2690079 - RNA, 23 nt, Human papillomavirus type 5
uaaaauauggcagugcuggugua

SEQ ID NO: 2690080 - RNA, 17 nt, Human papillomavirus type 5
agagauacagacucuga

SEQ ID NO: 2690081 - RNA, 14 nt, Human papillomavirus type 5
ugcagagcaggaca

SEQ ID NO: 2690082 - RNA, 15 nt, Human papillomavirus type 5
gcagagcgaggagca

SEQ ID NO: 2690083 - RNA, 23 nt, Human papillomavirus type 5
ccgcgacuugagucaauuucauu

SEQ ID NO: 2690084 - RNA, 21 nt, Human papillomavirus type 5
aacaaaggcuaaagaagccau

SEQ ID NO: 2690085 - RNA, 14 nt, Human papillomavirus type 5
uaacagauuugcau

SEQ ID NO: 2690086 - RNA, 18 nt, Human papillomavirus type 5
gcucagugaggugcagcc

SEQ ID NO: 2690087 - RNA, 16 nt, Human papillomavirus type 5
cuggaacuauuucauc

SEQ ID NO: 2690088 - RNA, 23 nt, Human papillomavirus type 5
ugauugguguuuauuggaagcug

SEQ ID NO: 2690089 - RNA, 20 nt, Human papillomavirus type 5
uaacauuuacuaaugcugcu

SEQ ID NO: 2690090 - RNA, 16 nt, Human papillomavirus type 5
aggaacugugagguca

SEQ ID NO: 2690091 - RNA, 23 nt, Human papillomavirus type 5
ucaacaggagugugagcagagcg

SEQ ID NO: 2690092 - RNA, 18 nt, Human papillomavirus type 5
guuagaugauacugaacu

SEQ ID NO: 2690093 - RNA, 23 nt, Human papillomavirus type 5
agagcuaaaauuaaauacauggg

SEQ ID NO: 2690094 - RNA, 16 nt, Human papillomavirus type 5
acugagcgucuaggca

SEQ ID NO: 2690095 - RNA, 20 nt, Human papillomavirus type 5
uacauuuuguauuugcuaug

SEQ ID NO: 2690096 - RNA, 19 nt, Human papillomavirus type 5
caggagugugagcagagcg

SEQ ID NO: 2690097 - RNA, 20 nt, Human papillomavirus type 5
ccuuccuugguuccugaaac

SEQ ID NO: 2690098 - RNA, 20 nt, Human papillomavirus type 5
uaggucauccuuauuucaau

SEQ ID NO: 2690099 - RNA, 23 nt, Human papillomavirus type 5
cacagcuuaguccgcgacuugag

SEQ ID NO: 2690100 - RNA, 14 nt, Human papillomavirus type 5
aaacgagcaggaaa

SEQ ID NO: 2690101 - RNA, 14 nt, Human papillomavirus type 5
cgagcugacuuuaa

SEQ ID NO: 2690102 - RNA, 13 nt, Human papillomavirus type 5
ugagguuccuaag

SEQ ID NO: 2690103 - RNA, 22 nt, Human papillomavirus type 5
acuuuaaacaaugaagcugaag

SEQ ID NO: 2690104 - RNA, 20 nt, Human papillomavirus type 5
gaccuguuuugugaagagga

SEQ ID NO: 2690105 - RNA, 19 nt, Human papillomavirus type 5
uuuaaacaaugaagcugaa

SEQ ID NO: 2690106 - RNA, 15 nt, Human papillomavirus type 5
ggcccagaaugcuca

SEQ ID NO: 2690107 - RNA, 15 nt, Human papillomavirus type 5
auguauacaauauua

SEQ ID NO: 2690108 - RNA, 14 nt, Human papillomavirus type 6
gucuggguguacag

SEQ ID NO: 2690109 - RNA, 20 nt, Human papillomavirus type 6
agcucagaagaugaggugga

SEQ ID NO: 2690110 - RNA, 16 nt, Human papillomavirus type 6
gugggcaggggacagc

SEQ ID NO: 2690111 - RNA, 21 nt, Human papillomavirus type 6
gcacugggccuccucaaaggc

SEQ ID NO: 2690112 - RNA, 23 nt, Human papillomavirus type 6
ucaaacauguaaacucacuggaa

SEQ ID NO: 2690113 - RNA, 19 nt, Human papillomavirus type 6
gauuaugugguauggacag

SEQ ID NO: 2690114 - RNA, 11 nt, Human papillomavirus type 6
auauguaaaug

SEQ ID NO: 2690115 - RNA, 22 nt, Human papillomavirus type 6
uaauguaauuuauuuguguaau

SEQ ID NO: 2690116 - RNA, 17 nt, Human papillomavirus type 6
ucauccuuauuuuucca

SEQ ID NO: 2690117 - RNA, 20 nt, Human papillomavirus type 6
acauguauggaagugguacc

SEQ ID NO: 2690118 - RNA, 16 nt, Human papillomavirus type 6
uuaugaaauguggcaa

SEQ ID NO: 2690119 - RNA, 15 nt, Human papillomavirus type 6
cacuauagccgaggc

SEQ ID NO: 2690120 - RNA, 12 nt, Human papillomavirus type 6
uauaauugcauu

SEQ ID NO: 2690121 - RNA, 18 nt, Human papillomavirus type 6
aaggcgauaaacacacca

SEQ ID NO: 2690122 - RNA, 22 nt, Human papillomavirus type 6
acaauggauuaugugguaugga

SEQ ID NO: 2690123 - RNA, 22 nt, Human papillomavirus type 6
gucaggauaucaauacagggua

SEQ ID NO: 2690124 - RNA, 15 nt, Human papillomavirus type 6
ccuauuguaauuugu

SEQ ID NO: 2690125 - RNA, 17 nt, Human papillomavirus type 6
uguguauauauguguau

SEQ ID NO: 2690126 - RNA, 21 nt, Human papillomavirus type 6
guuaugaaauguggcaaacac

SEQ ID NO: 2690127 - RNA, 21 nt, Human papillomavirus type 6
aagccacauaggaaugcaagu

SEQ ID NO: 2690128 - RNA, 24 nt, Human papillomavirus type 6
uauaccauggcacauaguagggcc

SEQ ID NO: 2690129 - RNA, 15 nt, Human papillomavirus type 6
guaauacaacuguac

SEQ ID NO: 2690130 - RNA, 17 nt, Human papillomavirus type 6
guauguguguauaugua

SEQ ID NO: 2690131 - RNA, 19 nt, Human papillomavirus type 6
guccgaagcaaaaggacau

SEQ ID NO: 2690132 - RNA, 16 nt, Human papillomavirus type 6
ccacauaggaaugcaa

SEQ ID NO: 2690133 - RNA, 15 nt, Human papillomavirus type 6
ggguguaaguggaca

SEQ ID NO: 2690134 - RNA, 21 nt, Human papillomavirus type 6
aauauauuuuuauauuugcaa

SEQ ID NO: 2690135 - RNA, 21 nt, Human papillomavirus type 6
aagaaacaaguuaugaaaugu

SEQ ID NO: 2690136 - RNA, 16 nt, Human papillomavirus type 6
guugugcaguguacag

SEQ ID NO: 2690137 - RNA, 16 nt, Human papillomavirus type 6
auuuuuauauuugcaa

SEQ ID NO: 2690138 - RNA, 18 nt, Human papillomavirus type 6
aacaccaccuaaacgcug

SEQ ID NO: 2690139 - RNA, 17 nt, Human papillomavirus type 6
auacuuauuguauggau

SEQ ID NO: 2690140 - RNA, 15 nt, Human papillomavirus type 6
cauuuguuguauguu

SEQ ID NO: 2690141 - RNA, 23 nt, Human papillomavirus type 6
caaaacuguugugccaaaggugu

SEQ ID NO: 2690142 - RNA, 19 nt, Human papillomavirus type 6
caaacacaacuguaaugau

SEQ ID NO: 2690143 - RNA, 17 nt, Human papillomavirus type 6
acuccuggguaaaggug

SEQ ID NO: 2690144 - RNA, 19 nt, Human papillomavirus type 6
agaagcuauagugcaacac

SEQ ID NO: 2690145 - RNA, 14 nt, Human papillomavirus type 6
cuaaacaaacaugu

SEQ ID NO: 2690146 - RNA, 16 nt, Human papillomavirus type 6
ucagagaagugcaaca

SEQ ID NO: 2690147 - RNA, 16 nt, Human papillomavirus type 6
ucucuuuuugauccca

SEQ ID NO: 2690148 - RNA, 14 nt, Human papillomavirus type 6
uagguaguccauau

SEQ ID NO: 2690149 - RNA, 21 nt, Human papillomavirus type 6
gaggggucuggguguacagga

SEQ ID NO: 2690150 - RNA, 19 nt, Human papillomavirus type 6
agacaucagagaagugcaa

SEQ ID NO: 2690151 - RNA, 14 nt, Human papillomavirus type 6
uaaacaaacaugua

SEQ ID NO: 2690152 - RNA, 20 nt, Human papillomavirus type 6
uguauccaaaguuguugcca

SEQ ID NO: 2690153 - RNA, 20 nt, Human papillomavirus type 6
uaacaacccccuugcaauuu

SEQ ID NO: 2690154 - RNA, 22 nt, Human papillomavirus type 6
cgauggcggacgauucagguac

SEQ ID NO: 2690155 - RNA, 22 nt, Human papillomavirus type 6
gugguaccuguacaaauagcug

SEQ ID NO: 2690156 - RNA, 15 nt, Human papillomavirus type 6
ugaugacagcaauau

SEQ ID NO: 2690157 - RNA, 22 nt, Human papillomavirus type 6
aauuccuaagguggaacacaac

SEQ ID NO: 2690158 - RNA, 21 nt, Human papillomavirus type 6
guaugggcaugcacaggccua

SEQ ID NO: 2690159 - RNA, 14 nt, Human papillomavirus type 6
agagaagugcaaca

SEQ ID NO: 2690160 - RNA, 19 nt, Human papillomavirus type 6
cauacuuauuguauggaua

SEQ ID NO: 2690161 - RNA, 16 nt, Human papillomavirus type 6
cagguacacaaauauc

SEQ ID NO: 2690162 - RNA, 16 nt, Human papillomavirus type 6
ugaaaauucagggagu

SEQ ID NO: 2690163 - RNA, 17 nt, Human papillomavirus type 6
ucuauuacuagugggcc

SEQ ID NO: 2690164 - RNA, 17 nt, Human papillomavirus type 6
ggaacuucugcaaaacc

SEQ ID NO: 2690165 - RNA, 17 nt, Human papillomavirus type 6
auauauuuuuguuucca

SEQ ID NO: 2690166 - RNA, 17 nt, Human papillomavirus type 6
aguggugguaacccugg

SEQ ID NO: 2690167 - RNA, 14 nt, Human papillomavirus type 6
gcaaacaauacaau

SEQ ID NO: 2690168 - RNA, 20 nt, Human papillomavirus type 6
cuacauugugaacacacagc

SEQ ID NO: 2690169 - RNA, 14 nt, Human papillomavirus type 6
uuauacuuacuauu

SEQ ID NO: 2690170 - RNA, 15 nt, Human papillomavirus type 6
uaauguguaugugug

SEQ ID NO: 2690171 - RNA, 12 nt, Human papillomavirus type 6
caagacagccaa

SEQ ID NO: 2690172 - RNA, 22 nt, Human papillomavirus type 6
aauuugauggcugugcaaacaa

SEQ ID NO: 2690173 - RNA, 19 nt, Human papillomavirus type 6
caccgguuccggcacuggg

SEQ ID NO: 2690174 - RNA, 16 nt, Human papillomavirus type 6
uacagaaacagacauc

SEQ ID NO: 2690175 - RNA, 16 nt, Human papillomavirus type 6
augcgacugugcagga

SEQ ID NO: 2690176 - RNA, 20 nt, Human papillomavirus type 6
auguguguuuaugugcaaua

SEQ ID NO: 2690177 - RNA, 14 nt, Human papillomavirus type 6
ugggcaugcacagg

SEQ ID NO: 2690178 - RNA, 16 nt, Human papillomavirus type 6
ugcauuggaaaugcau

SEQ ID NO: 2690179 - RNA, 22 nt, Human papillomavirus type 6
aauuuguauauauguaaaugug

SEQ ID NO: 2690180 - RNA, 21 nt, Human papillomavirus type 6
gaagcuauagugcaacaccca

SEQ ID NO: 2690181 - RNA, 18 nt, Human papillomavirus type 6
uaaauguguaaauauaug

SEQ ID NO: 2690182 - RNA, 14 nt, Human papillomavirus type 6
uaacccuggacagg

SEQ ID NO: 2690183 - RNA, 13 nt, Human papillomavirus type 6
auauguaaaugug

SEQ ID NO: 2690184 - RNA, 22 nt, Human papillomavirus type 6
uagugccaccauuaaagguguc

SEQ ID NO: 2690185 - RNA, 16 nt, Human papillomavirus type 6
aauacaauggauuaug

SEQ ID NO: 2690186 - RNA, 15 nt, Human papillomavirus type 6
aacaaccagcacauu

SEQ ID NO: 2690187 - RNA, 22 nt, Human papillomavirus type 6
uauuaacaacccccuugcaauu

SEQ ID NO: 2690188 - RNA, 13 nt, Human papillomavirus type 6
augaggaugagga

SEQ ID NO: 2690189 - RNA, 13 nt, Human papillomavirus type 6
uguguuguguaua

SEQ ID NO: 2690190 - RNA, 19 nt, Human papillomavirus type 6
gcucagaagaugaggugga

SEQ ID NO: 2690191 - RNA, 18 nt, Human papillomavirus type 6
uaugauacugcuggugau

SEQ ID NO: 2690192 - RNA, 19 nt, Human papillomavirus type 6
agccacauaggaaugcaag

SEQ ID NO: 2690193 - RNA, 11 nt, Human papillomavirus type 6
aaacaaacaug

SEQ ID NO: 2690194 - RNA, 16 nt, Human papillomavirus type 6
acauuuauuugauuua

SEQ ID NO: 2690195 - RNA, 16 nt, Human papillomavirus type 6
agaggugggcagggga

SEQ ID NO: 2690196 - RNA, 17 nt, Human papillomavirus type 6
uaugugccuuuauugua

SEQ ID NO: 2690197 - RNA, 14 nt, Human papillomavirus type 6
uauguaacuaugca

SEQ ID NO: 2690198 - RNA, 20 nt, Human papillomavirus type 6
gagcaauuaguagacagcuc

SEQ ID NO: 2690199 - RNA, 15 nt, Human papillomavirus type 6
ggaggcggacaccca

SEQ ID NO: 2690200 - RNA, 19 nt, Human papillomavirus type 6
ccaauaauauauuuuuaua

SEQ ID NO: 2690201 - RNA, 20 nt, Human papillomavirus type 6
gccgaggcaguggaaaguga

SEQ ID NO: 2690202 - RNA, 20 nt, Human papillomavirus type 6
uguauguacuguuauguaua

SEQ ID NO: 2690203 - RNA, 16 nt, Human papillomavirus type 6
uuuguauauauguaaa

SEQ ID NO: 2690204 - RNA, 17 nt, Human papillomavirus type 6
uauagugcaacacccaa

SEQ ID NO: 2690205 - RNA, 23 nt, Human papillomavirus type 6
aucugugcuaguacuaacacugc

SEQ ID NO: 2690206 - RNA, 17 nt, Human papillomavirus type 6
cuaagguggaacacaac

SEQ ID NO: 2690207 - RNA, 12 nt, Human papillomavirus type 6
auauuuguaaca

SEQ ID NO: 2690208 - RNA, 13 nt, Human papillomavirus type 6
guauauauguaaa

SEQ ID NO: 2690209 - RNA, 16 nt, Human papillomavirus type 6
caaauaucagacgaug

SEQ ID NO: 2690210 - RNA, 14 nt, Human papillomavirus type 6
gccauugaaaugca

SEQ ID NO: 2690211 - RNA, 22 nt, Human papillomavirus type 6
gcaguguacagaaacagacauc

SEQ ID NO: 2690212 - RNA, 18 nt, Human papillomavirus type 6
gcaguguacagaaacaga

SEQ ID NO: 2690213 - RNA, 18 nt, Human papillomavirus type 6
agaagcuauagugcaaca

SEQ ID NO: 2690214 - RNA, 17 nt, Human papillomavirus type 6
ggguaaaggugcauagu

SEQ ID NO: 2690215 - RNA, 17 nt, Human papillomavirus type 6
uagaccugcaaccucca

SEQ ID NO: 2690216 - RNA, 16 nt, Human papillomavirus type 6
uauagugcaacaccca

SEQ ID NO: 2690217 - RNA, 15 nt, Human papillomavirus type 6
guguaauguguaugu

SEQ ID NO: 2690218 - RNA, 23 nt, Human papillomavirus type 6
cagauccuaacaaauuugcauug

SEQ ID NO: 2690219 - RNA, 13 nt, Human papillomavirus type 6
uagugaggaacaa

SEQ ID NO: 2690220 - RNA, 15 nt, Human papillomavirus type 6
uuguguaauguguau

SEQ ID NO: 2690221 - RNA, 14 nt, Human papillomavirus type 6
guacauguauggaa

SEQ ID NO: 2690222 - RNA, 17 nt, Human papillomavirus type 6
guuauguauauguguuu

SEQ ID NO: 2690223 - RNA, 19 nt, Human papillomavirus type 6
uaacuacauuauuguauau

SEQ ID NO: 2690224 - RNA, 19 nt, Human papillomavirus type 6
uagguguggguguaagugg

SEQ ID NO: 2690225 - RNA, 18 nt, Human papillomavirus type 6
caacaguuuuuaaauguu

SEQ ID NO: 2690226 - RNA, 18 nt, Human papillomavirus type 6
uuguuagcaucauacuua

SEQ ID NO: 2690227 - RNA, 12 nt, Human papillomavirus type 6
cccuggacagga

SEQ ID NO: 2690228 - RNA, 19 nt, Human papillomavirus type 6
agaaacagacaucagagaa

SEQ ID NO: 2690229 - RNA, 19 nt, Human papillomavirus type 6
ugagcaauuaguagacagc

SEQ ID NO: 2690230 - RNA, 15 nt, Human papillomavirus type 6
uguauauguacuguu

SEQ ID NO: 2690231 - RNA, 15 nt, Human papillomavirus type 6
ugauacugcugguga

SEQ ID NO: 2690232 - RNA, 14 nt, Human papillomavirus type 6
aacuguaaugauga

SEQ ID NO: 2690233 - RNA, 13 nt, Human papillomavirus type 6
uauuguguacaca

SEQ ID NO: 2690234 - RNA, 15 nt, Human papillomavirus type 6
caccuauuguaauuu

SEQ ID NO: 2690235 - RNA, 16 nt, Human papillomavirus type 6
cuagaggugggcaggg

SEQ ID NO: 2690236 - RNA, 21 nt, Human papillomavirus type 6
caggccuagaggugggcaggg

SEQ ID NO: 2690237 - RNA, 17 nt, Human papillomavirus type 6
cuauuguggcugcuauu

SEQ ID NO: 2690238 - RNA, 21 nt, Human papillomavirus type 6
guguguauauauguguaugug

SEQ ID NO: 2690239 - RNA, 21 nt, Human papillomavirus type 6
uggugguaacccuggacagga

SEQ ID NO: 2690240 - RNA, 19 nt, Human papillomavirus type 6
gguaacccuggacaggaua

SEQ ID NO: 2690241 - RNA, 13 nt, Human papillomavirus type 6
gugccuccuccua

SEQ ID NO: 2690242 - RNA, 21 nt, Human papillomavirus type 6
uuuuaucaugccagcaguucu

SEQ ID NO: 2690243 - RNA, 23 nt, Human papillomavirus type 6
uauagugcaacacccaacaggua

SEQ ID NO: 2690244 - RNA, 21 nt, Human papillomavirus type 6
aucauagugaggaacaaaggc

SEQ ID NO: 2690245 - RNA, 23 nt, Human papillomavirus type 6
cagauguguaugugcaggacacu

SEQ ID NO: 2690246 - RNA, 20 nt, Human papillomavirus type 6
uguacugcauuggaaaugca

SEQ ID NO: 2690247 - RNA, 15 nt, Human papillomavirus type 6
cagaagaugaggugg

SEQ ID NO: 2690248 - RNA, 16 nt, Human papillomavirus type 6
uuauaauugcauuugu

SEQ ID NO: 2690249 - RNA, 18 nt, Human papillomavirus type 6
ccuagaggugggcagggg

SEQ ID NO: 2690250 - RNA, 13 nt, Human papillomavirus type 6
aguuaugaaaugu

SEQ ID NO: 2690251 - RNA, 19 nt, Human papillomavirus type 6
guagaagcuauagugcaac

SEQ ID NO: 2690252 - RNA, 18 nt, Human papillomavirus type 6
ucagagaagugcaacagc

SEQ ID NO: 2690253 - RNA, 16 nt, Human papillomavirus type 6
uaacuacauuauugua

SEQ ID NO: 2690254 - RNA, 14 nt, Human papillomavirus type 6
gcauuggaaaugca

SEQ ID NO: 2690255 - RNA, 14 nt, Human papillomavirus type 6
gccaaaggugucag

SEQ ID NO: 2690256 - RNA, 22 nt, Human papillomavirus type 6
gguggacuuuauugaugacagc

SEQ ID NO: 2690257 - RNA, 13 nt, Human papillomavirus type 6
cuuacuauugugg

SEQ ID NO: 2690258 - RNA, 17 nt, Human papillomavirus type 6
aaaugcauuuagaauca

SEQ ID NO: 2690259 - RNA, 14 nt, Human papillomavirus type 6
agugggucauccuu

SEQ ID NO: 2690260 - RNA, 22 nt, Human papillomavirus type 6
uccauauguuaguccuauaaac

SEQ ID NO: 2690261 - RNA, 23 nt, Human papillomavirus type 6
uccacgauuggacgccauuaaac

SEQ ID NO: 2690262 - RNA, 15 nt, Human papillomavirus type 6
uacuguuauguauau

SEQ ID NO: 2690263 - RNA, 21 nt, Human papillomavirus type 6
agcucagaagaugagguggac

SEQ ID NO: 2690264 - RNA, 14 nt, Human papillomavirus type 6
auaaacaugccauu

SEQ ID NO: 2690265 - RNA, 23 nt, Human papillomavirus type 6
gugguauggacagauguguaugu

SEQ ID NO: 2690266 - RNA, 20 nt, Human papillomavirus type 6
aguggguaugacauggugga

SEQ ID NO: 2690267 - RNA, 19 nt, Human papillomavirus type 6
uacuguuauauguguguau

SEQ ID NO: 2690268 - RNA, 12 nt, Human papillomavirus type 6
auaccauggcac

SEQ ID NO: 2690269 - RNA, 23 nt, Human papillomavirus type 6
ucagggaguggugguaacccugg

SEQ ID NO: 2690270 - RNA, 16 nt, Human papillomavirus type 6
auuuguaacaguguau

SEQ ID NO: 2690271 - RNA, 13 nt, Human papillomavirus type 6
gauggcugugcaa

SEQ ID NO: 2690272 - RNA, 16 nt, Human papillomavirus type 6
acuauagccgaggcag

SEQ ID NO: 2690273 - RNA, 19 nt, Human papillomavirus type 6
aauguguaaauauauggua

SEQ ID NO: 2690274 - RNA, 14 nt, Human papillomavirus type 6
uuuguuagcaucau

SEQ ID NO: 2690275 - RNA, 20 nt, Human papillomavirus type 6
ugcaacacccaacagguaca

SEQ ID NO: 2690276 - RNA, 14 nt, Human papillomavirus type 6
uguuaccagauccu

SEQ ID NO: 2690277 - RNA, 9 nt, Human papillomavirus type 6
uaugugugu

SEQ ID NO: 2690278 - RNA, 21 nt, Human papillomavirus type 6
acagcaaugaugcuaacaugu

SEQ ID NO: 2690279 - RNA, 14 nt, Human papillomavirus type 6
auagagcuguacaa

SEQ ID NO: 2690280 - RNA, 20 nt, Human papillomavirus type 6
caacuguacauguauggaag

SEQ ID NO: 2690281 - RNA, 14 nt, Human papillomavirus type 6
uagcaucauacuua

SEQ ID NO: 2690282 - RNA, 19 nt, Human papillomavirus type 6
aguguacagaaacagacau

SEQ ID NO: 2690283 - RNA, 23 nt, Human papillomavirus type 6
uacuguuauauauauguguguau

SEQ ID NO: 2690284 - RNA, 19 nt, Human papillomavirus type 6
ugugcaggaccuaaaacga

SEQ ID NO: 2690285 - RNA, 19 nt, Human papillomavirus type 6
caaguguaacaaacacaac

SEQ ID NO: 2690286 - RNA, 14 nt, Human papillomavirus type 6
uguauaccauggca

SEQ ID NO: 2690287 - RNA, 21 nt, Human papillomavirus type 6
ggugauuauauauauaugaau

SEQ ID NO: 2690288 - RNA, 17 nt, Human papillomavirus type 6
uauuguaauuuguauau

SEQ ID NO: 2690289 - RNA, 11 nt, Human papillomavirus type 6
auguguaugug

SEQ ID NO: 2690290 - RNA, 13 nt, Human papillomavirus type 6
aaacacagacauu

SEQ ID NO: 2690291 - RNA, 11 nt, Human papillomavirus type 6
aacaggcagga

SEQ ID NO: 2690292 - RNA, 15 nt, Human papillomavirus type 6
ccuggguaaaggugc

SEQ ID NO: 2690293 - RNA, 13 nt, Human papillomavirus type 6
uauguguguauau

SEQ ID NO: 2690294 - RNA, 19 nt, Human papillomavirus type 6
aggaugguuuaugguagaa

SEQ ID NO: 2690295 - RNA, 18 nt, Human papillomavirus type 6
uccaccaauuuguuacaa

SEQ ID NO: 2690296 - RNA, 18 nt, Human papillomavirus type 6
cacuauagagcuguacaa

SEQ ID NO: 2690297 - RNA, 18 nt, Human papillomavirus type 6
uguuacacccugugacuc

SEQ ID NO: 2690298 - RNA, 22 nt, Human papillomavirus type 6
uguuauauacaccacuacauug

SEQ ID NO: 2690299 - RNA, 17 nt, Human papillomavirus type 6
auuauuaaugcacuaua

SEQ ID NO: 2690300 - RNA, 15 nt, Human papillomavirus type 6
agccgaggcagugga

SEQ ID NO: 2690301 - RNA, 16 nt, Human papillomavirus type 6
auaaugccauugaaau

SEQ ID NO: 2690302 - RNA, 13 nt, Human papillomavirus type 6
aaagacugaguau

SEQ ID NO: 2690303 - RNA, 17 nt, Human papillomavirus type 6
ugcaguguacagaaaca

SEQ ID NO: 2690304 - RNA, 19 nt, Human papillomavirus type 6
aaugacaaacacagacauu

SEQ ID NO: 2690305 - RNA, 21 nt, Human papillomavirus type 6
agauauaggcuaaaugacaaa

SEQ ID NO: 2690306 - RNA, 13 nt, Human papillomavirus type 6
uacaacuguacau

SEQ ID NO: 2690307 - RNA, 23 nt, Human papillomavirus type 6
gccgaggcaguggaaagugaaau

SEQ ID NO: 2690308 - RNA, 21 nt, Human papillomavirus type 6
cugccuguuauaauugcauuu

SEQ ID NO: 2690309 - RNA, 23 nt, Human papillomavirus type 6
cacaauuccuuggaagcacaggc

SEQ ID NO: 2690310 - RNA, 18 nt, Human papillomavirus type 6
uauguacuguuauaugug

SEQ ID NO: 2690311 - RNA, 12 nt, Human papillomavirus type 6
gcauuaugauac

SEQ ID NO: 2690312 - RNA, 16 nt, Human papillomavirus type 6
gccacauaggaaugca

SEQ ID NO: 2690313 - RNA, 14 nt, Human papillomavirus type 6
uccggcacuggggg

SEQ ID NO: 2690314 - RNA, 23 nt, Human papillomavirus type 6
augcauaagacaugaaaguguau

SEQ ID NO: 2690315 - RNA, 20 nt, Human papillomavirus type 6
uacaauggauuaugugguau

SEQ ID NO: 2690316 - RNA, 18 nt, Human papillomavirus type 6
aaacggggcaaaacugua

SEQ ID NO: 2690317 - RNA, 12 nt, Human papillomavirus type 6
ggagccuguggc

SEQ ID NO: 2690318 - RNA, 17 nt, Human papillomavirus type 6
gcucguccuccuguggu

SEQ ID NO: 2690319 - RNA, 17 nt, Human papillomavirus type 6
augaugauuauguaacu

SEQ ID NO: 2690320 - RNA, 14 nt, Human papillomavirus type 6
auguauauguguuu

SEQ ID NO: 2690321 - RNA, 15 nt, Human papillomavirus type 6
auaagacaugaaagu

SEQ ID NO: 2690322 - RNA, 15 nt, Human papillomavirus type 6
cagcucagaagauga

SEQ ID NO: 2690323 - RNA, 13 nt, Human papillomavirus type 6
agugguaccugua

SEQ ID NO: 2690324 - RNA, 14 nt, Human papillomavirus type 6
uauguguguuuaug

SEQ ID NO: 2690325 - RNA, 18 nt, Human papillomavirus type 6
ggauuaugugguauggac

SEQ ID NO: 2690326 - RNA, 18 nt, Human papillomavirus type 6
uuuccuacuaacuuuacu

SEQ ID NO: 2690327 - RNA, 18 nt, Human papillomavirus type 6
acuauagagcuguacaag

SEQ ID NO: 2690328 - RNA, 15 nt, Human papillomavirus type 6
uauauauaugugugu

SEQ ID NO: 2690329 - RNA, 15 nt, Human papillomavirus type 6
uauguauauguaugu

SEQ ID NO: 2690330 - RNA, 12 nt, Human papillomavirus type 6
aggacagugggu

SEQ ID NO: 2690331 - RNA, 13 nt, Human papillomavirus type 6
cuccuaacccugu

SEQ ID NO: 2690332 - RNA, 20 nt, Human papillomavirus type 6
ugcaguguacagaaacagac

SEQ ID NO: 2690333 - RNA, 17 nt, Human papillomavirus type 6
aagugguaccuguacaa

SEQ ID NO: 2690334 - RNA, 15 nt, Human papillomavirus type 6
agacuucuugcagug

SEQ ID NO: 2690335 - RNA, 14 nt, Human papillomavirus type 6
agcuauagugcaac

SEQ ID NO: 2690336 - RNA, 12 nt, Human papillomavirus type 6
gugccuuuauug

SEQ ID NO: 2690337 - RNA, 24 nt, Human papillomavirus type 6
ugaugcuaacaugucaauuuaaug

SEQ ID NO: 2690338 - RNA, 13 nt, Human papillomavirus type 6
auguguguauaua

SEQ ID NO: 2690339 - RNA, 19 nt, Human papillomavirus type 6
acauauuuuaucaugccag

SEQ ID NO: 2690340 - RNA, 14 nt, Human papillomavirus type 6
caacaccauugcag

SEQ ID NO: 2690341 - RNA, 18 nt, Human papillomavirus type 6
gugcaacacccaacaggu

SEQ ID NO: 2690342 - RNA, 22 nt, Human papillomavirus type 6
acaauuaacuacauuauuguau

SEQ ID NO: 2690343 - RNA, 19 nt, Human papillomavirus type 6
agugaccuguugcugugga

SEQ ID NO: 2690344 - RNA, 18 nt, Human papillomavirus type 6
cuagaggugggcagggga

SEQ ID NO: 2690345 - RNA, 22 nt, Human papillomavirus type 6
aaacacuauagccgaggcagug

SEQ ID NO: 2690346 - RNA, 15 nt, Human papillomavirus type 6
auauuacacacaauu

SEQ ID NO: 2690347 - RNA, 18 nt, Human papillomavirus type 6
aaucauuauuaaagacug

SEQ ID NO: 2690348 - RNA, 19 nt, Human papillomavirus type 6
cuagacuucuugcaguggg

SEQ ID NO: 2690349 - RNA, 13 nt, Human papillomavirus type 6
accuaaacgcugu

SEQ ID NO: 2690350 - RNA, 22 nt, Human papillomavirus type 6
uguacacaucugugcuaguacu

SEQ ID NO: 2690351 - RNA, 22 nt, Human papillomavirus type 6
aaguagugccaccauuaaaggu

SEQ ID NO: 2690352 - RNA, 16 nt, Human papillomavirus type 6
guauaucuuguuacac

SEQ ID NO: 2690353 - RNA, 17 nt, Human papillomavirus type 6
uauggauaucugacuuu

SEQ ID NO: 2690354 - RNA, 18 nt, Human papillomavirus type 6
uuccauaaaacgggcuaa

SEQ ID NO: 2690355 - RNA, 16 nt, Human papillomavirus type 6
uauguguuguguauau

SEQ ID NO: 2690356 - RNA, 20 nt, Human papillomavirus type 6
agacugaguauaguauggaa

SEQ ID NO: 2690357 - RNA, 19 nt, Human papillomavirus type 6
caaugcaccuauuguaauu

SEQ ID NO: 2690358 - RNA, 21 nt, Human papillomavirus type 6
ucugacuuuauuguguacaca

SEQ ID NO: 2690359 - RNA, 15 nt, Human papillomavirus type 6
guguaaguggacauc

SEQ ID NO: 2690360 - RNA, 18 nt, Human papillomavirus type 6
acugcauuggaaaugcau

SEQ ID NO: 2690361 - RNA, 23 nt, Human papillomavirus type 6
uguauauguguuuauguacuguu

SEQ ID NO: 2690362 - RNA, 18 nt, Human papillomavirus type 6
agacuucuugcagugggu

SEQ ID NO: 2690363 - RNA, 21 nt, Human papillomavirus type 6
ggcggacgauucagguacaga

SEQ ID NO: 2690364 - RNA, 18 nt, Human papillomavirus type 6
guagaagcuauagugcaa

SEQ ID NO: 2690365 - RNA, 22 nt, Human papillomavirus type 6
augucaauuuaaugauggagau

SEQ ID NO: 2690366 - RNA, 19 nt, Human papillomavirus type 6
uguguauauguacuguuau

SEQ ID NO: 2690367 - RNA, 20 nt, Human papillomavirus type 6
gaaacaaguuaugaaaugug

SEQ ID NO: 2690368 - RNA, 19 nt, Human papillomavirus type 6
agacugaguauaguaugga

SEQ ID NO: 2690369 - RNA, 23 nt, Human papillomavirus type 6
augaugauuauguaacuaugcau

SEQ ID NO: 2690370 - RNA, 18 nt, Human papillomavirus type 6
agguggaggacagugggu

SEQ ID NO: 2690371 - RNA, 16 nt, Human papillomavirus type 6
acaugccauuguaacu

SEQ ID NO: 2690372 - RNA, 18 nt, Human papillomavirus type 6
cauaacaacgauggcgga

SEQ ID NO: 2690373 - RNA, 19 nt, Human papillomavirus type 6
uagaagcuauagugcaaca

SEQ ID NO: 2690374 - RNA, 22 nt, Human papillomavirus type 6
cgacugguugugcaguguacag

SEQ ID NO: 2690375 - RNA, 16 nt, Human papillomavirus type 6
uguacagaaacagaca

SEQ ID NO: 2690376 - RNA, 12 nt, Human papillomavirus type 6
caauuuaaugau

SEQ ID NO: 2690377 - RNA, 23 nt, Human papillomavirus type 6
aacaguuuuuaaauguuguaaaa

SEQ ID NO: 2690378 - RNA, 22 nt, Human papillomavirus type 6
ggaggacaguggguaugacaug

SEQ ID NO: 2690379 - RNA, 21 nt, Human papillomavirus type 6
caacaguuuuuaaauguugua

SEQ ID NO: 2690380 - RNA, 12 nt, Human papillomavirus type 6
gagaagugcaac

SEQ ID NO: 2690381 - RNA, 18 nt, Human papillomavirus type 6
ccgaagcaaaaggacaua

SEQ ID NO: 2690382 - RNA, 16 nt, Human papillomavirus type 6
auuaggugugggugua

SEQ ID NO: 2690383 - RNA, 12 nt, Human papillomavirus type 6
cuaauuguuuaa

SEQ ID NO: 2690384 - RNA, 14 nt, Human papillomavirus type 6
uccuauaaacacua

SEQ ID NO: 2690385 - RNA, 18 nt, Human papillomavirus type 6
acaaacacaacuguaaug

SEQ ID NO: 2690386 - RNA, 14 nt, Human papillomavirus type 6
cagacaucagagaa

SEQ ID NO: 2690387 - RNA, 22 nt, Human papillomavirus type 6
agcgugcgucagcuacacagcu

SEQ ID NO: 2690388 - RNA, 17 nt, Human papillomavirus type 6
gggcaggggacagccau

SEQ ID NO: 2690389 - RNA, 15 nt, Human papillomavirus type 6
auguauauguaugug

SEQ ID NO: 2690390 - RNA, 21 nt, Human papillomavirus type 6
acagaaacagacaucagagaa

SEQ ID NO: 2690391 - RNA, 21 nt, Human papillomavirus type 6
guauuauuauauaaagcaaaa

SEQ ID NO: 2690392 - RNA, 19 nt, Human papillomavirus type 6
uauauauguguaugugugu

SEQ ID NO: 2690393 - RNA, 13 nt, Human papillomavirus type 6
agugcaacaccca

SEQ ID NO: 2690394 - RNA, 16 nt, Human papillomavirus type 6
accuaaacaaacaugu

SEQ ID NO: 2690395 - RNA, 13 nt, Human papillomavirus type 6
uauauauguguau

SEQ ID NO: 2690396 - RNA, 21 nt, Human papillomavirus type 6
acaugccccccagauguaauu

SEQ ID NO: 2690397 - RNA, 22 nt, Human papillomavirus type 6
aguacugaccuaaacaaacaug

SEQ ID NO: 2690398 - RNA, 24 nt, Human papillomavirus type 6
aagcgugcgucagcuacacagcua

SEQ ID NO: 2690399 - RNA, 16 nt, Human papillomavirus type 6
ccuaaacgcuguuuua

SEQ ID NO: 2690400 - RNA, 15 nt, Human papillomavirus type 6
auugcauuuguugua

SEQ ID NO: 2690401 - RNA, 14 nt, Human papillomavirus type 6
uguauauaugugua

SEQ ID NO: 2690402 - RNA, 11 nt, Human papillomavirus type 6
gaagcacaggc

SEQ ID NO: 2690403 - RNA, 17 nt, Human papillomavirus type 6
uauggacagauguguau

SEQ ID NO: 2690404 - RNA, 13 nt, Human papillomavirus type 6
ggguguacaggau

SEQ ID NO: 2690405 - RNA, 18 nt, Human papillomavirus type 6
caggaggcggacacccau

SEQ ID NO: 2690406 - RNA, 22 nt, Human papillomavirus type 6
caggaccuaaaacgaaaguauu

SEQ ID NO: 2690407 - RNA, 22 nt, Human papillomavirus type 6
caacagguacacaaauaucaga

SEQ ID NO: 2690408 - RNA, 12 nt, Human papillomavirus type 6
aaacaauacaau

SEQ ID NO: 2690409 - RNA, 22 nt, Human papillomavirus type 6
acaggguauuuaaggugguguu

SEQ ID NO: 2690410 - RNA, 14 nt, Human papillomavirus type 6
auuguguacacauc

SEQ ID NO: 2690411 - RNA, 12 nt, Human papillomavirus type 6
uuguaacuguaa

SEQ ID NO: 2690412 - RNA, 23 nt, Human papillomavirus type 6
aguguauuauuauauaaagcaaa

SEQ ID NO: 2690413 - RNA, 22 nt, Human papillomavirus type 6
cauaaugccauugaaaugcaaa

SEQ ID NO: 2690414 - RNA, 12 nt, Human papillomavirus type 6
guaacaagugua

SEQ ID NO: 2690415 - RNA, 16 nt, Human papillomavirus type 6
uaacuguaacauauca

SEQ ID NO: 2690416 - RNA, 15 nt, Human papillomavirus type 6
cugacuuuauugugu

SEQ ID NO: 2690417 - RNA, 18 nt, Human papillomavirus type 6
caauuuuuccuacuaacu

SEQ ID NO: 2690418 - RNA, 15 nt, Human papillomavirus type 6
uguguuuaugugcaa

SEQ ID NO: 2690419 - RNA, 15 nt, Human papillomavirus type 6
ugaaaugcaaaugca

SEQ ID NO: 2690420 - RNA, 19 nt, Human papillomavirus type 6
augguauugguguaauaca

SEQ ID NO: 2690421 - RNA, 12 nt, Human papillomavirus type 6
uauauaaagcaa

SEQ ID NO: 2690422 - RNA, 13 nt, Human papillomavirus type 6
auuguaacuguaa

SEQ ID NO: 2690423 - RNA, 17 nt, Human papillomavirus type 6
caaacacaacuguaaug

SEQ ID NO: 2690424 - RNA, 15 nt, Human papillomavirus type 6
acuuuauuguguaca

SEQ ID NO: 2690425 - RNA, 19 nt, Human papillomavirus type 6
uguguuuauguacuguuau

SEQ ID NO: 2690426 - RNA, 22 nt, Human papillomavirus type 6
uacuauuagacacaaacugggg

SEQ ID NO: 2690427 - RNA, 18 nt, Human papillomavirus type 6
guaacuaugcauuaugau

SEQ ID NO: 2690428 - RNA, 18 nt, Human papillomavirus type 6
uaauacaacuguacaugu

SEQ ID NO: 2690429 - RNA, 15 nt, Human papillomavirus type 6
cauuaugauacugcu

SEQ ID NO: 2690430 - RNA, 21 nt, Human papillomavirus type 6
gcuguuucaaaccagggaacu

SEQ ID NO: 2690431 - RNA, 13 nt, Human papillomavirus type 6
ucagguacagaaa

SEQ ID NO: 2690432 - RNA, 15 nt, Human papillomavirus type 6
cucguccuccugugg

SEQ ID NO: 2690433 - RNA, 12 nt, Human papillomavirus type 6
cugacuuuauug

SEQ ID NO: 2690434 - RNA, 21 nt, Human papillomavirus type 6
auuccuuggaagcacaggcau

SEQ ID NO: 2690435 - RNA, 15 nt, Human papillomavirus type 6
acagcaaugaugcua

SEQ ID NO: 2690436 - RNA, 18 nt, Human papillomavirus type 6
ugggaacacuaaacauag

SEQ ID NO: 2690437 - RNA, 17 nt, Human papillomavirus type 6
gccaccauuaaaggugu

SEQ ID NO: 2690438 - RNA, 17 nt, Human papillomavirus type 6
cagccauuagguguggg

SEQ ID NO: 2690439 - RNA, 16 nt, Human papillomavirus type 6
caaguagugccaccau

SEQ ID NO: 2690440 - RNA, 15 nt, Human papillomavirus type 6
ucagagaagugcaac

SEQ ID NO: 2690441 - RNA, 16 nt, Human papillomavirus type 6
uuuuaaauguuguaaa

SEQ ID NO: 2690442 - RNA, 21 nt, Human papillomavirus type 6
ccaacauauuuuaucaugcca

SEQ ID NO: 2690443 - RNA, 18 nt, Human papillomavirus type 6
guuauauauaugugugua

SEQ ID NO: 2690444 - RNA, 19 nt, Human papillomavirus type 6
guauguguguuuaugugca

SEQ ID NO: 2690445 - RNA, 13 nt, Human papillomavirus type 6
guggaaagugaaa

SEQ ID NO: 2690446 - RNA, 18 nt, Human papillomavirus type 6
uauguauauguguuuaug

SEQ ID NO: 2690447 - RNA, 13 nt, Human papillomavirus type 6
auaauugcauuug

SEQ ID NO: 2690448 - RNA, 19 nt, Human papillomavirus type 6
auauauuuuuauauuugca

SEQ ID NO: 2690449 - RNA, 14 nt, Human papillomavirus type 6
acauugugaacaca

SEQ ID NO: 2690450 - RNA, 14 nt, Human papillomavirus type 6
auauauguguguau

SEQ ID NO: 2690451 - RNA, 15 nt, Human papillomavirus type 6
uacuuguguguuacu

SEQ ID NO: 2690452 - RNA, 17 nt, Human papillomavirus type 6
gucaauuuaaugaugga

SEQ ID NO: 2690453 - RNA, 14 nt, Human papillomavirus type 6
uguguaauguguau

SEQ ID NO: 2690454 - RNA, 16 nt, Human papillomavirus type 6
cuacauugugaacaca

SEQ ID NO: 2690455 - RNA, 21 nt, Human papillomavirus type 6
gguugugcaguguacagaaac

SEQ ID NO: 2690456 - RNA, 17 nt, Human papillomavirus type 6
aggaggcggacacccau

SEQ ID NO: 2690457 - RNA, 18 nt, Human papillomavirus type 6
gauggagauaccuggcug

SEQ ID NO: 2690458 - RNA, 22 nt, Human papillomavirus type 6
uuaaaaaacggggcaaaacugu

SEQ ID NO: 2690459 - RNA, 17 nt, Human papillomavirus type 6
cugcauuggaaaugcau

SEQ ID NO: 2690460 - RNA, 21 nt, Human papillomavirus type 6
auaaacaugccauuguaacug

SEQ ID NO: 2690461 - RNA, 13 nt, Human papillomavirus type 6
guccgaagcaaaa

SEQ ID NO: 2690462 - RNA, 15 nt, Human papillomavirus type 6
gaagugcaacagcuu

SEQ ID NO: 2690463 - RNA, 15 nt, Human papillomavirus type 6
aaaggugcauaguau

SEQ ID NO: 2690464 - RNA, 14 nt, Human papillomavirus type 6
uccuccuguggugg

SEQ ID NO: 2690465 - RNA, 22 nt, Human papillomavirus type 6
cacaucugugcuaguacuaaca

SEQ ID NO: 2690466 - RNA, 23 nt, Human papillomavirus type 6
guguaugcuuuguauaccauggc

SEQ ID NO: 2690467 - RNA, 21 nt, Human papillomavirus type 6
ugccauugaaaugcaaaugca

SEQ ID NO: 2690468 - RNA, 16 nt, Human papillomavirus type 6
uauguacuguuaugua

SEQ ID NO: 2690469 - RNA, 14 nt, Human papillomavirus type 6
aucuaauuguuuaa

SEQ ID NO: 2690470 - RNA, 15 nt, Human papillomavirus type 6
uacacaucugugcua

SEQ ID NO: 2690471 - RNA, 14 nt, Human papillomavirus type 6
aaacacaacuguaa

SEQ ID NO: 2690472 - RNA, 14 nt, Human papillomavirus type 6
cuugcaguggguca

SEQ ID NO: 2690473 - RNA, 14 nt, Human papillomavirus type 6
uguaacuguaacau

SEQ ID NO: 2690474 - RNA, 15 nt, Human papillomavirus type 6
guaacccuggacagg

SEQ ID NO: 2690475 - RNA, 16 nt, Human papillomavirus type 6
aggaugaggaggugga

SEQ ID NO: 2690476 - RNA, 18 nt, Human papillomavirus type 6
gugcuaguacuaacacug

SEQ ID NO: 2690477 - RNA, 14 nt, Human papillomavirus type 6
uacagaaacagaca

SEQ ID NO: 2690478 - RNA, 21 nt, Human papillomavirus type 6
ugguagaagcuauagugcaac

SEQ ID NO: 2690479 - RNA, 15 nt, Human papillomavirus type 6
uauauauguguaugu

SEQ ID NO: 2690480 - RNA, 14 nt, Human papillomavirus type 6
gcuguggaugugac

SEQ ID NO: 2690481 - RNA, 22 nt, Human papillomavirus type 6
augugccuccuccuaacccugu

SEQ ID NO: 2690482 - RNA, 17 nt, Human papillomavirus type 6
guauauauguaaaugug

SEQ ID NO: 2690483 - RNA, 15 nt, Human papillomavirus type 6
uuguuacaacguguu

SEQ ID NO: 2690484 - RNA, 12 nt, Human papillomavirus type 6
auauauguguau

SEQ ID NO: 2690485 - RNA, 19 nt, Human papillomavirus type 6
acacaacuguaaugaugau

SEQ ID NO: 2690486 - RNA, 19 nt, Human papillomavirus type 6
gccaaaaaagguaaagcga

SEQ ID NO: 2690487 - RNA, 14 nt, Human papillomavirus type 6
ggaagcacaggcau

SEQ ID NO: 2690488 - RNA, 22 nt, Human papillomavirus type 6
augauuauguaacuaugcauua

SEQ ID NO: 2690489 - RNA, 21 nt, Human papillomavirus type 6
ggccuagaggugggcagggga

SEQ ID NO: 2690490 - RNA, 13 nt, Human papillomavirus type 6
uaauacugccugu

SEQ ID NO: 2690491 - RNA, 13 nt, Human papillomavirus type 6
gacagccaaaaaa

SEQ ID NO: 2690492 - RNA, 13 nt, Human papillomavirus type 6
uuuuaucaugcca

SEQ ID NO: 2690493 - RNA, 21 nt, Human papillomavirus type 6
auggcugugcaaacaauacaa

SEQ ID NO: 2690494 - RNA, 17 nt, Human papillomavirus type 6
aguguaacaaacacaac

SEQ ID NO: 2690495 - RNA, 12 nt, Human papillomavirus type 6
uguguuacuguc

SEQ ID NO: 2690496 - RNA, 20 nt, Human papillomavirus type 6
uaaacuuacaagacagccaa

SEQ ID NO: 2690497 - RNA, 17 nt, Human papillomavirus type 6
ugcauuggaaaugcaua

SEQ ID NO: 2690498 - RNA, 17 nt, Human papillomavirus type 6
cuauagagcuguacaag

SEQ ID NO: 2690499 - RNA, 20 nt, Human papillomavirus type 6
cuguugcuguggaugugaca

SEQ ID NO: 2690500 - RNA, 16 nt, Human papillomavirus type 6
cuaguacuaacacugc

SEQ ID NO: 2690501 - RNA, 20 nt, Human papillomavirus type 6
ugagcaauuaguagacagcu

SEQ ID NO: 2690502 - RNA, 22 nt, Human papillomavirus type 6
ugcuaugagcaauuaguagaca

SEQ ID NO: 2690503 - RNA, 22 nt, Human papillomavirus type 6
auaaacacuauagccgaggcag

SEQ ID NO: 2690504 - RNA, 15 nt, Human papillomavirus type 6
aaacuguagaaguua

SEQ ID NO: 2690505 - RNA, 16 nt, Human papillomavirus type 6
agaagcuauagugcaa

SEQ ID NO: 2690506 - RNA, 21 nt, Human papillomavirus type 6
cacagcaaugaugcuaacaug

SEQ ID NO: 2690507 - RNA, 16 nt, Human papillomavirus type 6
auuaauacugccuguu

SEQ ID NO: 2690508 - RNA, 15 nt, Human papillomavirus type 6
auguguuuauguacu

SEQ ID NO: 2690509 - RNA, 11 nt, Human papillomavirus type 6
uacuagugggc

SEQ ID NO: 2690510 - RNA, 21 nt, Human papillomavirus type 6
cagaaacagacaucagagaag

SEQ ID NO: 2690511 - RNA, 23 nt, Human papillomavirus type 6
augccauugaaaugcaaaugcau

SEQ ID NO: 2690512 - RNA, 14 nt, Human papillomavirus type 6
cauuggaaaugcau

SEQ ID NO: 2690513 - RNA, 18 nt, Human papillomavirus type 6
uuaacaggcaggaggcgg

SEQ ID NO: 2690514 - RNA, 16 nt, Human papillomavirus type 6
uaauguguaugugugu

SEQ ID NO: 2690515 - RNA, 23 nt, Human papillomavirus type 6
acuaacacugcuuuuauacuuac

SEQ ID NO: 2690516 - RNA, 23 nt, Human papillomavirus type 6
ugccauugaaaugcaaaugcauu

SEQ ID NO: 2690517 - RNA, 15 nt, Human papillomavirus type 6
aaacuuacaagacag

SEQ ID NO: 2690518 - RNA, 17 nt, Human papillomavirus type 6
guuagcaucauacuuau

SEQ ID NO: 2690519 - RNA, 12 nt, Human papillomavirus type 6
guuuaugucaau

SEQ ID NO: 2690520 - RNA, 18 nt, Human papillomavirus type 6
guauguacuguuauguau

SEQ ID NO: 2690521 - RNA, 23 nt, Human papillomavirus type 6
ccccuacuauuagacacaaacug

SEQ ID NO: 2690522 - RNA, 21 nt, Human papillomavirus type 6
acagccauuaggugugggugu

SEQ ID NO: 2690523 - RNA, 17 nt, Human papillomavirus type 6
uguguuauguguguaau

SEQ ID NO: 2690524 - RNA, 18 nt, Human papillomavirus type 6
cuugcagugggucauccu

SEQ ID NO: 2690525 - RNA, 20 nt, Human papillomavirus type 6
uuauauauauguguguaugu

SEQ ID NO: 2690526 - RNA, 21 nt, Human papillomavirus type 6
aggagguggaggacagugggu

SEQ ID NO: 2690527 - RNA, 18 nt, Human papillomavirus type 6
gaaaauucagggaguggu

SEQ ID NO: 2690528 - RNA, 19 nt, Human papillomavirus type 6
cagcacauuaauacugccu

SEQ ID NO: 2690529 - RNA, 21 nt, Human papillomavirus type 6
ucagcuacacagcuauaucaa

SEQ ID NO: 2690530 - RNA, 16 nt, Human papillomavirus type 6
caaugcaccuauugua

SEQ ID NO: 2690531 - RNA, 18 nt, Human papillomavirus type 6
gucuggguguacaggaug

SEQ ID NO: 2690532 - RNA, 16 nt, Human papillomavirus type 6
gcacuauagagcugua

SEQ ID NO: 2690533 - RNA, 17 nt, Human papillomavirus type 6
uguguauguacuguuau

SEQ ID NO: 2690534 - RNA, 17 nt, Human papillomavirus type 6
acuguagaaguuaaauu

SEQ ID NO: 2690535 - RNA, 11 nt, Human papillomavirus type 6
uggcacugggc

SEQ ID NO: 2690536 - RNA, 14 nt, Human papillomavirus type 6
agacaugaaagugu

SEQ ID NO: 2690537 - RNA, 13 nt, Human papillomavirus type 6
aaugcaaaugcau

SEQ ID NO: 2690538 - RNA, 16 nt, Human papillomavirus type 6
gaacacuaaacauagu

SEQ ID NO: 2690539 - RNA, 23 nt, Human papillomavirus type 6
uuauguauauguguuuauguacu

SEQ ID NO: 2690540 - RNA, 20 nt, Human papillomavirus type 6
ccuauuguaauuuguauaua

SEQ ID NO: 2690541 - RNA, 20 nt, Human papillomavirus type 6
acaucagagaagugcaacag

SEQ ID NO: 2690542 - RNA, 15 nt, Human papillomavirus type 6
agcaaaaggacauaa

SEQ ID NO: 2690543 - RNA, 14 nt, Human papillomavirus type 6
gaugaggaggugga

SEQ ID NO: 2690544 - RNA, 16 nt, Human papillomavirus type 6
uguguuuaugugcaau

SEQ ID NO: 2690545 - RNA, 17 nt, Human papillomavirus type 6
uuggaagcacaggcauu

SEQ ID NO: 2690546 - RNA, 18 nt, Human papillomavirus type 6
uuauguguguaauguaau

SEQ ID NO: 2690547 - RNA, 21 nt, Human papillomavirus type 6
aguggugguaacccuggacag

SEQ ID NO: 2690548 - RNA, 17 nt, Human papillomavirus type 6
caucagagaagugcaac

SEQ ID NO: 2690549 - RNA, 17 nt, Human papillomavirus type 6
aaacaugccauuguaac

SEQ ID NO: 2690550 - RNA, 15 nt, Human papillomavirus type 6
uggcacauaguaggg

SEQ ID NO: 2690551 - RNA, 12 nt, Human papillomavirus type 6
uauguaaaugug

SEQ ID NO: 2690552 - RNA, 22 nt, Human papillomavirus type 6
agguguggguguaaguggacau

SEQ ID NO: 2690553 - RNA, 14 nt, Human papillomavirus type 6
agcaucauacuuau

SEQ ID NO: 2690554 - RNA, 22 nt, Human papillomavirus type 6
uauaauugcauuuguuguaugu

SEQ ID NO: 2690555 - RNA, 22 nt, Human papillomavirus type 6
uugcauugccugacucgucucu

SEQ ID NO: 2690556 - RNA, 16 nt, Human papillomavirus type 6
cuguauccaaaguugu

SEQ ID NO: 2690557 - RNA, 14 nt, Human papillomavirus type 6
ugcuuuuauacuua

SEQ ID NO: 2690558 - RNA, 23 nt, Human papillomavirus type 6
caggcauuguuuaacaggcagga

SEQ ID NO: 2690559 - RNA, 19 nt, Human papillomavirus type 6
caggaugguuuaugguaga

SEQ ID NO: 2690560 - RNA, 14 nt, Human papillomavirus type 6
uguauguacuguua

SEQ ID NO: 2690561 - RNA, 13 nt, Human papillomavirus type 6
caauuuguuacaa

SEQ ID NO: 2690562 - RNA, 13 nt, Human papillomavirus type 6
gacaucagagaag

SEQ ID NO: 2690563 - RNA, 14 nt, Human papillomavirus type 6
ccacuacauuguga

SEQ ID NO: 2690564 - RNA, 15 nt, Human papillomavirus type 6
uauauguacuguuau

SEQ ID NO: 2690565 - RNA, 12 nt, Human papillomavirus type 6
uaaauguuguaa

SEQ ID NO: 2690566 - RNA, 18 nt, Human papillomavirus type 6
uauguacuguuauguaua

SEQ ID NO: 2690567 - RNA, 14 nt, Human papillomavirus type 6
aguuuuuaaauguu

SEQ ID NO: 2690568 - RNA, 13 nt, Human papillomavirus type 6
ugguaugggcaug

SEQ ID NO: 2690569 - RNA, 19 nt, Human papillomavirus type 6
gacagauguguaugugcag

SEQ ID NO: 2690570 - RNA, 14 nt, Human papillomavirus type 6
uggguaaaggugca

SEQ ID NO: 2690571 - RNA, 23 nt, Human papillomavirus type 6
cuaacuuuacuuguguguuacug

SEQ ID NO: 2690572 - RNA, 14 nt, Human papillomavirus type 6
guacuaacacugcu

SEQ ID NO: 2690573 - RNA, 20 nt, Human papillomavirus type 6
gaaucuaauuguuuaaagug

SEQ ID NO: 2690574 - RNA, 22 nt, Human papillomavirus type 6
uggagccuguggccccuucgga

SEQ ID NO: 2690575 - RNA, 14 nt, Human papillomavirus type 6
aguuaugaaaugug

SEQ ID NO: 2690576 - RNA, 15 nt, Human papillomavirus type 6
aauaucagacgauga

SEQ ID NO: 2690577 - RNA, 21 nt, Human papillomavirus type 6
acaggcauuguuuaacaggca

SEQ ID NO: 2690578 - RNA, 16 nt, Human papillomavirus type 6
uaaugaugauuaugua

SEQ ID NO: 2690579 - RNA, 17 nt, Human papillomavirus type 6
gcgacugugcaggaccu

SEQ ID NO: 2690580 - RNA, 14 nt, Human papillomavirus type 6
cugggguuuauguc

SEQ ID NO: 2690581 - RNA, 18 nt, Human papillomavirus type 6
guauguguguauauguau

SEQ ID NO: 2690582 - RNA, 14 nt, Human papillomavirus type 6
uagccgaggcagug

SEQ ID NO: 2690583 - RNA, 14 nt, Human papillomavirus type 6
cauaagacaugaaa

SEQ ID NO: 2690584 - RNA, 12 nt, Human papillomavirus type 6
cccuugcaauuu

SEQ ID NO: 2690585 - RNA, 22 nt, Human papillomavirus type 6
auguuaguccuauaaacacuau

SEQ ID NO: 2690586 - RNA, 15 nt, Human papillomavirus type 6
acugcauuggaaaug

SEQ ID NO: 2690587 - RNA, 24 nt, Human papillomavirus type 6
uaacacugcuuuuauacuuacuau

SEQ ID NO: 2690588 - RNA, 21 nt, Human papillomavirus type 6
ggacgauucagguacagaaaa

SEQ ID NO: 2690589 - RNA, 17 nt, Human papillomavirus type 6
gucuggguguacaggau

SEQ ID NO: 2690590 - RNA, 16 nt, Human papillomavirus type 6
gggcaugcacaggccu

SEQ ID NO: 2690591 - RNA, 16 nt, Human papillomavirus type 6
acaaguuaugaaaugu

SEQ ID NO: 2690592 - RNA, 16 nt, Human papillomavirus type 6
uguauauguacuguua

SEQ ID NO: 2690593 - RNA, 16 nt, Human papillomavirus type 6
auguguuguguauaua

SEQ ID NO: 2690594 - RNA, 19 nt, Human papillomavirus type 6
uggcucguccuccuguggu

SEQ ID NO: 2690595 - RNA, 23 nt, Human papillomavirus type 6
aauauauauauuuuuguuuccaa

SEQ ID NO: 2690596 - RNA, 20 nt, Human papillomavirus type 6
aggcaggaggcggacaccca

SEQ ID NO: 2690597 - RNA, 17 nt, Human papillomavirus type 6
gacuucuugcagugggu

SEQ ID NO: 2690598 - RNA, 13 nt, Human papillomavirus type 6
acagaaaaugagg

SEQ ID NO: 2690599 - RNA, 22 nt, Human papillomavirus type 6
gacugguugugcaguguacaga

SEQ ID NO: 2690600 - RNA, 18 nt, Human papillomavirus type 6
auguggcaaacaccaccu

SEQ ID NO: 2690601 - RNA, 19 nt, Human papillomavirus type 6
acauaaugccauugaaaug

SEQ ID NO: 2690602 - RNA, 22 nt, Human papillomavirus type 6
uugguguaauacaacuguacau

SEQ ID NO: 2690603 - RNA, 14 nt, Human papillomavirus type 6
acacaucugugcua

SEQ ID NO: 2690604 - RNA, 18 nt, Human papillomavirus type 6
aaaacaguacugaccuaa

SEQ ID NO: 2690605 - RNA, 20 nt, Human papillomavirus type 6
uauauacaccacuacauugu

SEQ ID NO: 2690606 - RNA, 16 nt, Human papillomavirus type 6
aaagcaaaacaaaugg

SEQ ID NO: 2690607 - RNA, 16 nt, Human papillomavirus type 6
uauguauauguaugug

SEQ ID NO: 2690608 - RNA, 16 nt, Human papillomavirus type 6
uacuaacuuuacuugu

SEQ ID NO: 2690609 - RNA, 23 nt, Human papillomavirus type 6
cgacugguugugcaguguacaga

SEQ ID NO: 2690610 - RNA, 20 nt, Human papillomavirus type 6
auuugauuuaauaucaucaa

SEQ ID NO: 2690611 - RNA, 21 nt, Human papillomavirus type 6
uacaagaaacaaguuaugaaa

SEQ ID NO: 2690612 - RNA, 19 nt, Human papillomavirus type 6
cauugaaaugcaaaugcau

SEQ ID NO: 2690613 - RNA, 21 nt, Human papillomavirus type 6
gucaaugcaccuauuguaauu

SEQ ID NO: 2690614 - RNA, 13 nt, Human papillomavirus type 6
gcuauagugcaac

SEQ ID NO: 2690615 - RNA, 18 nt, Human papillomavirus type 6
cuaguacuaacacugcuu

SEQ ID NO: 2690616 - RNA, 19 nt, Human papillomavirus type 6
accacauaaacaugccauu

SEQ ID NO: 2690617 - RNA, 15 nt, Human papillomavirus type 6
cacaacuguaaugau

SEQ ID NO: 2690618 - RNA, 15 nt, Human papillomavirus type 6
uguauguacuguuau

SEQ ID NO: 2690619 - RNA, 13 nt, Human papillomavirus type 6
uaucuuguuacac

SEQ ID NO: 2690620 - RNA, 14 nt, Human papillomavirus type 6
ccauugaaaugcaa

SEQ ID NO: 2690621 - RNA, 14 nt, Human papillomavirus type 6
cagggagugguggu

SEQ ID NO: 2690622 - RNA, 20 nt, Human papillomavirus type 6
agacaugaaaguguauuauu

SEQ ID NO: 2690623 - RNA, 21 nt, Human papillomavirus type 6
auacuuacuauuguggcugcu

SEQ ID NO: 2690624 - RNA, 18 nt, Human papillomavirus type 6
auguauauguauguguug

SEQ ID NO: 2690625 - RNA, 16 nt, Human papillomavirus type 6
acuuuauugaugacag

SEQ ID NO: 2690626 - RNA, 17 nt, Human papillomavirus type 6
aucauuauuaaagacug

SEQ ID NO: 2690627 - RNA, 19 nt, Human papillomavirus type 6
uggcuauguucccuuagga

SEQ ID NO: 2690628 - RNA, 14 nt, Human papillomavirus type 6
uauagccgaggcag

SEQ ID NO: 2690629 - RNA, 14 nt, Human papillomavirus type 6
aauuuaaugaugga

SEQ ID NO: 2690630 - RNA, 12 nt, Human papillomavirus type 6
cuauagugcaac

SEQ ID NO: 2690631 - RNA, 19 nt, Human papillomavirus type 6
cuaacaugucaauuuaaug

SEQ ID NO: 2690632 - RNA, 22 nt, Human papillomavirus type 6
uauguacuguuauauauaugug

SEQ ID NO: 2690633 - RNA, 21 nt, Human papillomavirus type 6
gccauuagguguggguguaag

SEQ ID NO: 2690634 - RNA, 20 nt, Human papillomavirus type 6
guguguauauauguguaugu

SEQ ID NO: 2690635 - RNA, 17 nt, Human papillomavirus type 6
cagacgaugaggaugag

SEQ ID NO: 2690636 - RNA, 13 nt, Human papillomavirus type 6
ggagauaccuggc

SEQ ID NO: 2690637 - RNA, 17 nt, Human papillomavirus type 6
gaugaggagguggagga

SEQ ID NO: 2690638 - RNA, 15 nt, Human papillomavirus type 6
cggggcaaaacugua

SEQ ID NO: 2690639 - RNA, 16 nt, Human papillomavirus type 6
aaacaaguuaugaaau

SEQ ID NO: 2690640 - RNA, 23 nt, Human papillomavirus type 6
uuauauauauguguguauguacu

SEQ ID NO: 2690641 - RNA, 20 nt, Human papillomavirus type 6
cauuaauacugccuguuaua

SEQ ID NO: 2690642 - RNA, 19 nt, Human papillomavirus type 6
auaauugcauuuguuguau

SEQ ID NO: 2690643 - RNA, 23 nt, Human papillomavirus type 6
gggaguggugguaacccuggaca

SEQ ID NO: 2690644 - RNA, 17 nt, Human papillomavirus type 6
acauuacaagaaacaag

SEQ ID NO: 2690645 - RNA, 23 nt, Human papillomavirus type 6
ccuaagccacauaggaaugcaag

SEQ ID NO: 2690646 - RNA, 21 nt, Human papillomavirus type 6
uauguacuguuauaugugugu

SEQ ID NO: 2690647 - RNA, 15 nt, Human papillomavirus type 6
ugcgcaccgaagaca

SEQ ID NO: 2690648 - RNA, 16 nt, Human papillomavirus type 6
uguuuauguacuguua

SEQ ID NO: 2690649 - RNA, 20 nt, Human papillomavirus type 6
ugauggagauaccuggcugg

SEQ ID NO: 2690650 - RNA, 15 nt, Human papillomavirus type 6
auaucaaacauguaa

SEQ ID NO: 2690651 - RNA, 13 nt, Human papillomavirus type 6
auugaugacagca

SEQ ID NO: 2690652 - RNA, 16 nt, Human papillomavirus type 6
uagcaucauacuuauu

SEQ ID NO: 2690653 - RNA, 13 nt, Human papillomavirus type 6
guguguauguacu

SEQ ID NO: 2690654 - RNA, 18 nt, Human papillomavirus type 6
uucagggaguggugguaa

SEQ ID NO: 2690655 - RNA, 14 nt, Human papillomavirus type 6
uagaggugggcagg

SEQ ID NO: 2690656 - RNA, 16 nt, Human papillomavirus type 6
guauauguauguguug

SEQ ID NO: 2690657 - RNA, 19 nt, Human papillomavirus type 6
uguaauacaacuguacaug

SEQ ID NO: 2690658 - RNA, 14 nt, Human papillomavirus type 6
cacagcaaugaugc

SEQ ID NO: 2690659 - RNA, 19 nt, Human papillomavirus type 6
aaagguguccgaagcaaaa

SEQ ID NO: 2690660 - RNA, 16 nt, Human papillomavirus type 6
acuuacaagacagcca

SEQ ID NO: 2690661 - RNA, 13 nt, Human papillomavirus type 6
aaacucacuggaa

SEQ ID NO: 2690662 - RNA, 14 nt, Human papillomavirus type 6
acagcaaugaugcu

SEQ ID NO: 2690663 - RNA, 15 nt, Human papillomavirus type 6
uagcugcaggaacaa

SEQ ID NO: 2690664 - RNA, 19 nt, Human papillomavirus type 6
cuauaucaaacauguaaac

SEQ ID NO: 2690665 - RNA, 13 nt, Human papillomavirus type 6
uggagccuguggc

SEQ ID NO: 2690666 - RNA, 22 nt, Human papillomavirus type 6
uaucuuguuacacccugugacu

SEQ ID NO: 2690667 - RNA, 13 nt, Human papillomavirus type 6
cagacgaugagga

SEQ ID NO: 2690668 - RNA, 13 nt, Human papillomavirus type 6
accgaagacauaa

SEQ ID NO: 2690669 - RNA, 22 nt, Human papillomavirus type 6
uauguacuguuauguauaugug

SEQ ID NO: 2690670 - RNA, 19 nt, Human papillomavirus type 6
aguucuagacuucuugcag

SEQ ID NO: 2690671 - RNA, 13 nt, Human papillomavirus type 6
aauacaacuguac

SEQ ID NO: 2690672 - RNA, 16 nt, Human papillomavirus type 6
acagcucagaagauga

SEQ ID NO: 2690673 - RNA, 16 nt, Human papillomavirus type 6
gacuucuugcaguggg

SEQ ID NO: 2690674 - RNA, 13 nt, Human papillomavirus type 6
auguguguaugua

SEQ ID NO: 2690675 - RNA, 17 nt, Human papillomavirus type 6
acaacuguaaugaugau

SEQ ID NO: 2690676 - RNA, 22 nt, Human papillomavirus type 6
gcuaacaugucaauuuaaugau

SEQ ID NO: 2690677 - RNA, 15 nt, Human papillomavirus type 6
caaacaauacaaugg

SEQ ID NO: 2690678 - RNA, 20 nt, Human papillomavirus type 6
auacaggguauuuaaggugg

SEQ ID NO: 2690679 - RNA, 13 nt, Human papillomavirus type 6
cuuguuauauaca

SEQ ID NO: 2690680 - RNA, 13 nt, Human papillomavirus type 6
ugauuuaauauca

SEQ ID NO: 2690681 - RNA, 18 nt, Human papillomavirus type 6
uaucaugccagcaguucu

SEQ ID NO: 2690682 - RNA, 13 nt, Human papillomavirus type 6
uauaauugcauuu

SEQ ID NO: 2690683 - RNA, 16 nt, Human papillomavirus type 6
aucauacuuauuguau

SEQ ID NO: 2690684 - RNA, 16 nt, Human papillomavirus type 6
aacauuaccaaauagu

SEQ ID NO: 2690685 - RNA, 14 nt, Human papillomavirus type 6
uauguguguauaua

SEQ ID NO: 2690686 - RNA, 13 nt, Human papillomavirus type 6
gcugugcaaacaa

SEQ ID NO: 2690687 - RNA, 12 nt, Human papillomavirus type 6
aagguaaagcga

SEQ ID NO: 2690688 - RNA, 15 nt, Human papillomavirus type 6
gcauuuguuguaugu

SEQ ID NO: 2690689 - RNA, 13 nt, Human papillomavirus type 6
uacugccuguuau

SEQ ID NO: 2690690 - RNA, 13 nt, Human papillomavirus type 6
auauaaagcaaaa

SEQ ID NO: 2690691 - RNA, 13 nt, Human papillomavirus type 8
guugagcaaacaa

SEQ ID NO: 2690692 - RNA, 23 nt, Human papillomavirus type 8
guguugcuauauuucgcuaggca

SEQ ID NO: 2690693 - RNA, 22 nt, Human papillomavirus type 8
cacauuuaucaaaccugcaaac

SEQ ID NO: 2690694 - RNA, 22 nt, Human papillomavirus type 8
agcuguguugcuauauuucgcu

SEQ ID NO: 2690695 - RNA, 16 nt, Human papillomavirus type 8
cagagcaggacagcgg

SEQ ID NO: 2690696 - RNA, 15 nt, Human papillomavirus type 8
gugagcagagcgagg

SEQ ID NO: 2690697 - RNA, 18 nt, Human papillomavirus type 8
caccaguggccagggugc

SEQ ID NO: 2690698 - RNA, 15 nt, Human papillomavirus type 8
gaugaauacauucaa

SEQ ID NO: 2690699 - RNA, 21 nt, Human papillomavirus type 8
agaaaucugaguuugcagaug

SEQ ID NO: 2690700 - RNA, 15 nt, Human papillomavirus type 8
ugacagacugcucac

SEQ ID NO: 2690701 - RNA, 22 nt, Human papillomavirus type 8
acuauguggaagcacauuuacu

SEQ ID NO: 2690702 - RNA, 13 nt, Human papillomavirus type 8
cacagugguacgg

SEQ ID NO: 2690703 - RNA, 22 nt, Human papillomavirus type 8
aagagagacucugucacacaca

SEQ ID NO: 2690704 - RNA, 16 nt, Human papillomavirus type 8
cguguuggaaauacuc

SEQ ID NO: 2690705 - RNA, 21 nt, Human papillomavirus type 8
gccaaucuauuuuggcagcgc

SEQ ID NO: 2690706 - RNA, 15 nt, Human papillomavirus type 8
caaagaacuaacauc

SEQ ID NO: 2690707 - RNA, 18 nt, Human papillomavirus type 8
uugcagaugagccuugga

SEQ ID NO: 2690708 - RNA, 17 nt, Human papillomavirus type 8
auuagguguugggagca

SEQ ID NO: 2690709 - RNA, 11 nt, Human papillomavirus type 8
cggaggaggag

SEQ ID NO: 2690710 - RNA, 18 nt, Human papillomavirus type 8
gagcuagacaucgaaaga

SEQ ID NO: 2690711 - RNA, 20 nt, Human papillomavirus type 8
cagagaccuacagcuucugu

SEQ ID NO: 2690712 - RNA, 17 nt, Human papillomavirus type 8
caauauuuuaaaauaug

SEQ ID NO: 2690713 - RNA, 18 nt, Human papillomavirus type 8
ucacucuaccuaagaaac

SEQ ID NO: 2690714 - RNA, 20 nt, Human papillomavirus type 8
auuacaaaaacuaaaacgaa

SEQ ID NO: 2690715 - RNA, 19 nt, Human papillomavirus type 8
guuuauucugacucagcau

SEQ ID NO: 2690716 - RNA, 20 nt, Human papillomavirus type 8
agcugcugucaggucaagcu

SEQ ID NO: 2690717 - RNA, 14 nt, Human papillomavirus type 8
gacauacugccaau

SEQ ID NO: 2690718 - RNA, 22 nt, Human papillomavirus type 8
agacaaugauuuugaacaauua

SEQ ID NO: 2690719 - RNA, 14 nt, Human papillomavirus type 8
ugaaguuaagugag

SEQ ID NO: 2690720 - RNA, 21 nt, Human papillomavirus type 8
caagaauugcuguucagagac

SEQ ID NO: 2690721 - RNA, 13 nt, Human papillomavirus type 8
gccgugguacagg

SEQ ID NO: 2690722 - RNA, 14 nt, Human papillomavirus type 8
auaauggugacaca

SEQ ID NO: 2690723 - RNA, 12 nt, Human papillomavirus type 8
caaacaacaguu

SEQ ID NO: 2690724 - RNA, 16 nt, Human papillomavirus type 8
caaacgaacaggaaac

SEQ ID NO: 2690725 - RNA, 18 nt, Human papillomavirus type 8
uugucaacgcaacugauu

SEQ ID NO: 2690726 - RNA, 21 nt, Human papillomavirus type 8
ugaacaauuauuugagcgaga

SEQ ID NO: 2690727 - RNA, 18 nt, Human papillomavirus type 8
ggaaauacucccacagug

SEQ ID NO: 2690728 - RNA, 14 nt, Human papillomavirus type 8
gaguaguugccaaa

SEQ ID NO: 2690729 - RNA, 17 nt, Human papillomavirus type 8
caauuauuugagcgaga

SEQ ID NO: 2690730 - RNA, 13 nt, Human papillomavirus type 8
ucuuugcagagca

SEQ ID NO: 2690731 - RNA, 18 nt, Human papillomavirus type 8
uccguguuggaaauacuc

SEQ ID NO: 2690732 - RNA, 17 nt, Human papillomavirus type 8
agggaaauucucuggaa

SEQ ID NO: 2690733 - RNA, 17 nt, Human papillomavirus type 8
uucaauguuuacaacaa

SEQ ID NO: 2690734 - RNA, 18 nt, Human papillomavirus type 8
ccaguugaccugcuuugu

SEQ ID NO: 2690735 - RNA, 17 nt, Human papillomavirus type 8
gcaaaagccaagcaggc

SEQ ID NO: 2690736 - RNA, 12 nt, Human papillomavirus type 8
acuaacacacua

SEQ ID NO: 2690737 - RNA, 15 nt, Human papillomavirus type 8
auguagacaaugauu

SEQ ID NO: 2690738 - RNA, 13 nt, Human papillomavirus type 8
agacuuauaagaa

SEQ ID NO: 2690739 - RNA, 22 nt, Human papillomavirus type 8
gaacuguauucaaaauuguugc

SEQ ID NO: 2690740 - RNA, 19 nt, Human papillomavirus type 8
gcagagcaggacagcggag

SEQ ID NO: 2690741 - RNA, 19 nt, Human papillomavirus type 8
agcuaacucuuaacaauga

SEQ ID NO: 2690742 - RNA, 16 nt, Human papillomavirus type 8
cuauuuuaauaaagug

SEQ ID NO: 2690743 - RNA, 22 nt, Human papillomavirus type 8
gauccaaauagguuugcacugg

SEQ ID NO: 2690744 - RNA, 17 nt, Human papillomavirus type 8
ccauauuucaauguuua

SEQ ID NO: 2690745 - RNA, 15 nt, Human papillomavirus type 8
acuguauucaaaauu

SEQ ID NO: 2690746 - RNA, 21 nt, Human papillomavirus type 8
gcuagacaucgaaagaacugu

SEQ ID NO: 2690747 - RNA, 11 nt, Human papillomavirus type 8
ccugcaaacag

SEQ ID NO: 2690748 - RNA, 22 nt, Human papillomavirus type 8
acagauggcaguguggcaaucg

SEQ ID NO: 2690749 - RNA, 13 nt, Human papillomavirus type 8
gucgccugccaag

SEQ ID NO: 2690750 - RNA, 22 nt, Human papillomavirus type 8
aauguuuguuuauucugacuca

SEQ ID NO: 2690751 - RNA, 17 nt, Human papillomavirus type 8
aggucgccugccaagga

SEQ ID NO: 2690752 - RNA, 14 nt, Human papillomavirus type 8
aucugaguuugcag

SEQ ID NO: 2690753 - RNA, 16 nt, Human papillomavirus type 8
acacuugaggcacaga

SEQ ID NO: 2690754 - RNA, 20 nt, Human papillomavirus type 8
cugauucggguaucaggacc

SEQ ID NO: 2690755 - RNA, 19 nt, Human papillomavirus type 8
aguugaccugcuuugugaa

SEQ ID NO: 2690756 - RNA, 14 nt, Human papillomavirus type 8
accuacagcuucug

SEQ ID NO: 2690757 - RNA, 19 nt, Human papillomavirus type 8
gcaaagcacggaugaauac

SEQ ID NO: 2690758 - RNA, 17 nt, Human papillomavirus type 8
acagauggcaguguggc

SEQ ID NO: 2690759 - RNA, 15 nt, Human papillomavirus type 8
gauguagacaaugau

SEQ ID NO: 2690760 - RNA, 16 nt, Human papillomavirus type 8
ggacauuaguggacac

SEQ ID NO: 2690761 - RNA, 14 nt, Human papillomavirus type 8
cacuagcagugucu

SEQ ID NO: 2690762 - RNA, 23 nt, Human papillomavirus type 8
ucaacaggagugugagcagagcg

SEQ ID NO: 2690763 - RNA, 21 nt, Human papillomavirus type 8
aaacacuugaggcacagauug

SEQ ID NO: 2690764 - RNA, 14 nt, Human papillomavirus type 8
agacucagauauuu

SEQ ID NO: 2690765 - RNA, 20 nt, Human papillomavirus type 8
ugcucggauuaggucgccug

SEQ ID NO: 2690766 - RNA, 14 nt, Human papillomavirus type 8
acauucaaagaacu

SEQ ID NO: 2690767 - RNA, 20 nt, Human papillomavirus type 8
agccuuggacauuaguggac

SEQ ID NO: 2690768 - RNA, 13 nt, Human papillomavirus type 8
aggucgccugcca

SEQ ID NO: 2690769 - RNA, 19 nt, Human papillomavirus type 8
aaggcucuuugcagagcag

SEQ ID NO: 2690770 - RNA, 16 nt, Human papillomavirus type 8
cugucgcgcagcucag

SEQ ID NO: 2690771 - RNA, 13 nt, Human papillomavirus type 8
ugaguaguugcca

SEQ ID NO: 2690772 - RNA, 19 nt, Human papillomavirus type 8
auuacagguucccaaagua

SEQ ID NO: 2690773 - RNA, 17 nt, Human papillomavirus type 8
agauacagacucagaua

SEQ ID NO: 2690774 - RNA, 15 nt, Human papillomavirus type 8
cucugucacacacau

SEQ ID NO: 2690775 - RNA, 21 nt, Human papillomavirus type 8
gucugaagcaaaagccaagca

SEQ ID NO: 2690776 - RNA, 17 nt, Human papillomavirus type 8
gacaaccauuagguguu

SEQ ID NO: 2690777 - RNA, 23 nt, Human papillomavirus type 8
gggacaaccauuagguguuggga

SEQ ID NO: 2690778 - RNA, 14 nt, Human papillomavirus type 8
aagcaaaagccaag

SEQ ID NO: 2690779 - RNA, 14 nt, Human papillomavirus type 8
cugcugucagguca

SEQ ID NO: 2690780 - RNA, 16 nt, Human papillomavirus type 8
gaccuggaucagggaa

SEQ ID NO: 2690781 - RNA, 15 nt, Human papillomavirus type 8
auguugcagcugcag

SEQ ID NO: 2690782 - RNA, 21 nt, Human papillomavirus type 8
ggaauaauguugcagcugcag

SEQ ID NO: 2690783 - RNA, 18 nt, Human papillomavirus type 8
cugcagucacuacagaaa

SEQ ID NO: 2690784 - RNA, 23 nt, Human papillomavirus type 8
ccaggauuggauaucaaccugug

SEQ ID NO: 2690785 - RNA, 18 nt, Human papillomavirus type 8
guguauuuuggaagcuga

SEQ ID NO: 2690786 - RNA, 15 nt, Human papillomavirus type 8
agaaauccaagcgaa

SEQ ID NO: 2690787 - RNA, 19 nt, Human papillomavirus type 8
cuauggacauacugccaau

SEQ ID NO: 2690788 - RNA, 23 nt, Human papillomavirus type 8
ccaaucuauuuuggcagcgcuuu

SEQ ID NO: 2690789 - RNA, 21 nt, Human papillomavirus type 8
aaaguugagcaaacaacaguu

SEQ ID NO: 2690790 - RNA, 17 nt, Human papillomavirus type 8
ggagugugagcagagcg

SEQ ID NO: 2690791 - RNA, 12 nt, Human papillomavirus type 8
cacaccugugga

SEQ ID NO: 2690792 - RNA, 18 nt, Human papillomavirus type 8
acugccaaucgacacuau

SEQ ID NO: 2690793 - RNA, 17 nt, Human papillomavirus type 8
gcuccagaaaaucauuu

SEQ ID NO: 2690794 - RNA, 21 nt, Human papillomavirus type 8
uugcagaggcuuagaaaucag

SEQ ID NO: 2690795 - RNA, 18 nt, Human papillomavirus type 8
cuuaacaaugaagcugaa

SEQ ID NO: 2690796 - RNA, 22 nt, Human papillomavirus type 8
accaguggccagggugcaaagc

SEQ ID NO: 2690797 - RNA, 13 nt, Human papillomavirus type 8
acuagcagugucu

SEQ ID NO: 2690798 - RNA, 18 nt, Human papillomavirus type 8
agguugguaugggcuugc

SEQ ID NO: 2690799 - RNA, 18 nt, Human papillomavirus type 8
guauucaaggaauguuug

SEQ ID NO: 2690800 - RNA, 16 nt, Human papillomavirus type 8
gugagcagagcgagga

SEQ ID NO: 2690801 - RNA, 13 nt, Human papillomavirus type 8
aaggguuaaguga

SEQ ID NO: 2690802 - RNA, 21 nt, Human papillomavirus type 8
guacaaaaccauaaacuuuua

SEQ ID NO: 2690803 - RNA, 19 nt, Human papillomavirus type 8
guauacacuauguggaagc

SEQ ID NO: 2690804 - RNA, 21 nt, Human papillomavirus type 8
uaaagcugucgcgcagcucag

SEQ ID NO: 2690805 - RNA, 16 nt, Human papillomavirus type 8
auguucguucaaacau

SEQ ID NO: 2690806 - RNA, 20 nt, Human papillomavirus type 8
aucggcuaccgguaagguuu

SEQ ID NO: 2690807 - RNA, 17 nt, Human papillomavirus type 8
ucaguuuagugccagaa

SEQ ID NO: 2690808 - RNA, 17 nt, Human papillomavirus type 8
gcuauaggaauaauguu

SEQ ID NO: 2690809 - RNA, 16 nt, Human papillomavirus type 8
aacaggagugugagca

SEQ ID NO: 2690810 - RNA, 16 nt, Human papillomavirus type 8
auaaacagccugacaa

SEQ ID NO: 2690811 - RNA, 20 nt, Human papillomavirus type 8
cuuauaagaaugcuccagaa

SEQ ID NO: 2690812 - RNA, 22 nt, Human papillomavirus type 8
caggagugugagcagagcgagg

SEQ ID NO: 2690813 - RNA, 13 nt, Human papillomavirus type 8
gacuuauuagaua

SEQ ID NO: 2690814 - RNA, 16 nt, Human papillomavirus type 8
gauccaaauagguuug

SEQ ID NO: 2690815 - RNA, 13 nt, Human papillomavirus type 8
acaaugaagcuga

SEQ ID NO: 2690816 - RNA, 14 nt, Human papillomavirus type 8
auauaugauaaaca

SEQ ID NO: 2690817 - RNA, 16 nt, Human papillomavirus type 8
auguuucucaugaggu

SEQ ID NO: 2690818 - RNA, 16 nt, Human papillomavirus type 8
aacucuuaacaaugaa

SEQ ID NO: 2690819 - RNA, 15 nt, Human papillomavirus type 8
aacuguauucaaaau

SEQ ID NO: 2690820 - RNA, 13 nt, Human papillomavirus type 8
agacgauaagugg

SEQ ID NO: 2690821 - RNA, 12 nt, Human papillomavirus type 8
ggcagugcuggu

SEQ ID NO: 2690822 - RNA, 16 nt, Human papillomavirus type 8
acauuaguggacacaa

SEQ ID NO: 2690823 - RNA, 13 nt, Human papillomavirus type 8
augaagcugaaga

SEQ ID NO: 2690824 - RNA, 15 nt, Human papillomavirus type 8
ucacugucaccucag

SEQ ID NO: 2690825 - RNA, 22 nt, Human papillomavirus type 8
acauuacagguucccaaaguau

SEQ ID NO: 2690826 - RNA, 19 nt, Human papillomavirus type 8
gcaaacaggcagguacaug

SEQ ID NO: 2690827 - RNA, 14 nt, Human papillomavirus type 8
aauacauucaaaga

SEQ ID NO: 2690828 - RNA, 22 nt, Human papillomavirus type 8
auuuuaaaauauggcagugcug

SEQ ID NO: 2690829 - RNA, 14 nt, Human papillomavirus type 8
ggaagcacauuuac

SEQ ID NO: 2690830 - RNA, 14 nt, Human papillomavirus type 8
ccaucccuauuuua

SEQ ID NO: 2690831 - RNA, 18 nt, Human papillomavirus type 8
ccaaucuauuuuggcagc

SEQ ID NO: 2690832 - RNA, 22 nt, Human papillomavirus type 8
gcaaacaacaguugcugacaau

SEQ ID NO: 2690833 - RNA, 21 nt, Human papillomavirus type 8
cagaugagccuuggacauuag

SEQ ID NO: 2690834 - RNA, 23 nt, Human papillomavirus type 8
cagacucaguuuagugccagaau

SEQ ID NO: 2690835 - RNA, 15 nt, Human papillomavirus type 8
cgaaaagaagcugug

SEQ ID NO: 2690836 - RNA, 22 nt, Human papillomavirus type 8
ggggccugguauccguguugga

SEQ ID NO: 2690837 - RNA, 22 nt, Human papillomavirus type 8
aagaauugcuguucagagaccu

SEQ ID NO: 2690838 - RNA, 16 nt, Human papillomavirus type 8
uaacaucuacuaucac

SEQ ID NO: 2690839 - RNA, 14 nt, Human papillomavirus type 8
aaacaggcagguac

SEQ ID NO: 2690840 - RNA, 15 nt, Human papillomavirus type 8
accggccgugguaca

SEQ ID NO: 2690841 - RNA, 13 nt, Human papillomavirus type 8
gcuaggcaaaaag

SEQ ID NO: 2690842 - RNA, 21 nt, Human papillomavirus type 8
auggugacacauuacagguuc

SEQ ID NO: 2690843 - RNA, 12 nt, Human papillomavirus type 8
guucguucaaac

SEQ ID NO: 2690844 - RNA, 18 nt, Human papillomavirus type 8
auuagauaauugugaccu

SEQ ID NO: 2690845 - RNA, 17 nt, Human papillomavirus type 8
agagacuuauaagaaug

SEQ ID NO: 2690846 - RNA, 20 nt, Human papillomavirus type 8
acaaugaagcugaagauguu

SEQ ID NO: 2690847 - RNA, 12 nt, Human papillomavirus type 8
aucgggaaauca

SEQ ID NO: 2690848 - RNA, 16 nt, Human papillomavirus type 8
cuuucgcuuaaaguua

SEQ ID NO: 2690849 - RNA, 16 nt, Human papillomavirus type 8
auucaaaauuguugca

SEQ ID NO: 2690850 - RNA, 23 nt, Human papillomavirus type 8
gaccgcacccgguacauaaaggu

SEQ ID NO: 2690851 - RNA, 16 nt, Human papillomavirus type 8
uauuuuggaagcugaa

SEQ ID NO: 2690852 - RNA, 14 nt, Human papillomavirus type 8
cgccugccaaggaa

SEQ ID NO: 2690853 - RNA, 11 nt, Human papillomavirus type 8
uuggcaucucc

SEQ ID NO: 2690854 - RNA, 21 nt, Human papillomavirus type 8
cuuauaagaaugcuccagaaa

SEQ ID NO: 2690855 - RNA, 19 nt, Human papillomavirus type 8
aggaauaauguugcagcug

SEQ ID NO: 2690856 - RNA, 19 nt, Human papillomavirus type 8
agaauagaccauguucguu

SEQ ID NO: 2690857 - RNA, 21 nt, Human papillomavirus type 8
gcuguucagagaccuacagcu

SEQ ID NO: 2690858 - RNA, 22 nt, Human papillomavirus type 8
aguugccaaaacagacucaguu

SEQ ID NO: 2690859 - RNA, 20 nt, Human papillomavirus type 8
agacaucgaaagaacuguau

SEQ ID NO: 2690860 - RNA, 20 nt, Human papillomavirus type 8
ugaacaauuauuugagcgag

SEQ ID NO: 2690861 - RNA, 17 nt, Human papillomavirus type 8
auucugacucagcauca

SEQ ID NO: 2690862 - RNA, 22 nt, Human papillomavirus type 8
uagacaucgaaagaacuguauu

SEQ ID NO: 2690863 - RNA, 23 nt, Human papillomavirus type 8
caggaaacggaggaggagcuaga

SEQ ID NO: 2690864 - RNA, 22 nt, Human papillomavirus type 8
ucccaaaguaucgggaaaucaa

SEQ ID NO: 2690865 - RNA, 14 nt, Human papillomavirus type 8
gucugaagcaaaag

SEQ ID NO: 2690866 - RNA, 19 nt, Human papillomavirus type 8
caggagugugagcagagcg

SEQ ID NO: 2690867 - RNA, 22 nt, Human papillomavirus type 8
uaacucuuaacaaugaagcuga

SEQ ID NO: 2690868 - RNA, 16 nt, Human papillomavirus type 8
auucugacucagcauc

SEQ ID NO: 2690869 - RNA, 20 nt, Human papillomavirus type 8
aacagccugacaaugccaau

SEQ ID NO: 2690870 - RNA, 17 nt, Human papillomavirus type 8
agccaagcaggcuauag

SEQ ID NO: 2690871 - RNA, 20 nt, Human papillomavirus type 8
gaccuuucaagaauugcugu

SEQ ID NO: 2690872 - RNA, 17 nt, Human papillomavirus type 8
acaacaguugcugacaa

SEQ ID NO: 2690873 - RNA, 14 nt, Human papillomavirus type 8
ucugucacacacau

SEQ ID NO: 2690874 - RNA, 11 nt, Human papillomavirus type 8
gaggcacagau

SEQ ID NO: 2690875 - RNA, 16 nt, Human papillomavirus type 8
uccuauggacauacug

SEQ ID NO: 2690876 - RNA, 18 nt, Human papillomavirus type 8
accaguggccagggugca

SEQ ID NO: 2690877 - RNA, 22 nt, Human papillomavirus type 8
aacucuuaacaaugaagcugaa

SEQ ID NO: 2690878 - RNA, 21 nt, Human papillomavirus type 8
accguguggcugcagcugcug

SEQ ID NO: 2690879 - RNA, 15 nt, Human papillomavirus type 8
ggcucuuugcagagc

SEQ ID NO: 2690880 - RNA, 19 nt, Human papillomavirus type 8
gcuacuaacacacuaacau

SEQ ID NO: 2690881 - RNA, 17 nt, Human papillomavirus type 8
accaguggccagggugc

SEQ ID NO: 2690882 - RNA, 19 nt, Human papillomavirus type 8
uuugcuuuuuacuauauuu

SEQ ID NO: 2690883 - RNA, 15 nt, Human papillomavirus type 8
agaaaccgaccgcac

SEQ ID NO: 2690884 - RNA, 15 nt, Human papillomavirus type 8
gcagagcgaggagca

SEQ ID NO: 2690885 - RNA, 16 nt, Human papillomavirus type 8
aagaauugcuguucag

SEQ ID NO: 2690886 - RNA, 19 nt, Human papillomavirus type 8
aacuguauucaaaauuguu

SEQ ID NO: 2690887 - RNA, 13 nt, Human papillomavirus type 8
acuaacacacuaa

SEQ ID NO: 2690888 - RNA, 13 nt, Human papillomavirus type 8
agcugcagucacu

SEQ ID NO: 2690889 - RNA, 17 nt, Human papillomavirus type 8
caauacugacagacugc

SEQ ID NO: 2690890 - RNA, 11 nt, Human papillomavirus type 8
uggaagcugaa

SEQ ID NO: 2690891 - RNA, 18 nt, Human papillomavirus type 8
agaauugcuguucagaga

SEQ ID NO: 2690892 - RNA, 20 nt, Human papillomavirus type 8
cuaaagaaggguuaagugag

SEQ ID NO: 2690893 - RNA, 20 nt, Human papillomavirus type 8
cuauaggaauaauguugcag

SEQ ID NO: 2690894 - RNA, 13 nt, Human papillomavirus type 8
gagugugagcaga

SEQ ID NO: 2690895 - RNA, 18 nt, Human papillomavirus type 8
agccuuggacauuagugg

SEQ ID NO: 2690896 - RNA, 13 nt, Human papillomavirus type 8
acagacucaguuu

SEQ ID NO: 2690897 - RNA, 13 nt, Human papillomavirus type 8
gcgguaacugcaa

SEQ ID NO: 2690898 - RNA, 14 nt, Human papillomavirus type 8
uaucaaaccugcaa

SEQ ID NO: 2690899 - RNA, 20 nt, Human papillomavirus type 8
cauuuacuacacugaugcag

SEQ ID NO: 2690900 - RNA, 14 nt, Human papillomavirus type 8
cccacagugguacg

SEQ ID NO: 2690901 - RNA, 21 nt, Human papillomavirus type 8
ccuggaucagggaaauucucu

SEQ ID NO: 2690902 - RNA, 21 nt, Human papillomavirus type 8
gugagauacaaccugaagugu

SEQ ID NO: 2690903 - RNA, 19 nt, Human papillomavirus type 8
guucaaacaugcucggauu

SEQ ID NO: 2690904 - RNA, 21 nt, Human papillomavirus type 8
acucuuaacaaugaagcugaa

SEQ ID NO: 2690905 - RNA, 21 nt, Human papillomavirus type 8
uauggcagugcugguguauuu

SEQ ID NO: 2690906 - RNA, 19 nt, Human papillomavirus type 8
gaacuaacaucuacuauca

SEQ ID NO: 2690907 - RNA, 14 nt, Human papillomavirus type 8
guccuaaagcuguc

SEQ ID NO: 2690908 - RNA, 22 nt, Human papillomavirus type 8
uaucaaccugugccgccacuag

SEQ ID NO: 2690909 - RNA, 15 nt, Human papillomavirus type 8
gcuaggcaaaaaggc

SEQ ID NO: 2690910 - RNA, 15 nt, Human papillomavirus type 8
gauaaguggcacaaa

SEQ ID NO: 2690911 - RNA, 17 nt, Human papillomavirus type 8
aggaauguuuguuuauu

SEQ ID NO: 2690912 - RNA, 19 nt, Human papillomavirus type 8
guuuguuuauucugacuca

SEQ ID NO: 2690913 - RNA, 16 nt, Human papillomavirus type 8
uguugaaguuaaguga

SEQ ID NO: 2690914 - RNA, 14 nt, Human papillomavirus type 8
cacacuaacauauu

SEQ ID NO: 2690915 - RNA, 22 nt, Human papillomavirus type 8
accguuuucgguacaaaaccau

SEQ ID NO: 2690916 - RNA, 16 nt, Human papillomavirus type 8
guuuucgguacaaaac

SEQ ID NO: 2690917 - RNA, 18 nt, Human papillomavirus type 8
cuugccaaucuauuuugg

SEQ ID NO: 2690918 - RNA, 17 nt, Human papillomavirus type 8
cagauugcgcauuggcu

SEQ ID NO: 2690919 - RNA, 13 nt, Human papillomavirus type 8
accuuucaagaau

SEQ ID NO: 2690920 - RNA, 20 nt, Human papillomavirus type 8
cagcugcagucacuacagaa

SEQ ID NO: 2690921 - RNA, 15 nt, Human papillomavirus type 8
agaagcgguaggucc

SEQ ID NO: 2690922 - RNA, 19 nt, Human papillomavirus type 8
cucuuugcagagcaggaca

SEQ ID NO: 2690923 - RNA, 15 nt, Human papillomavirus type 8
gauggcaguguggca

SEQ ID NO: 2690924 - RNA, 17 nt, Human papillomavirus type 8
auuucaucaacaggagu

SEQ ID NO: 2690925 - RNA, 17 nt, Human papillomavirus type 8
gaaaagaagcuguguug

SEQ ID NO: 2690926 - RNA, 16 nt, Human papillomavirus type 8
gccaauacugacagac

SEQ ID NO: 2690927 - RNA, 17 nt, Human papillomavirus type 8
caaucuauuuuggcagc

SEQ ID NO: 2690928 - RNA, 15 nt, Human papillomavirus type 8
auuuuggaagcugaa

SEQ ID NO: 2690929 - RNA, 22 nt, Human papillomavirus type 8
gauuggauaucaaccugugccg

SEQ ID NO: 2690930 - RNA, 22 nt, Human papillomavirus type 8
acugauucggguaucaggaccu

SEQ ID NO: 2690931 - RNA, 11 nt, Human papillomavirus type 8
gguaacugcaa

SEQ ID NO: 2690932 - RNA, 18 nt, Human papillomavirus type 8
gaacaauuauuugagcga

SEQ ID NO: 2690933 - RNA, 22 nt, Human papillomavirus type 8
caaagcacggaugaauacauuc

SEQ ID NO: 2690934 - RNA, 15 nt, Human papillomavirus type 8
auaugucuguauaca

SEQ ID NO: 2690935 - RNA, 12 nt, Human papillomavirus type 8
uugucaacgcaa

SEQ ID NO: 2690936 - RNA, 20 nt, Human papillomavirus type 8
ugagcgagauacagacucag

SEQ ID NO: 2690937 - RNA, 17 nt, Human papillomavirus type 8
ugcuuugugaagaggaa

SEQ ID NO: 2690938 - RNA, 17 nt, Human papillomavirus type 8
gacagacugcucacugu

SEQ ID NO: 2690939 - RNA, 21 nt, Human papillomavirus type 8
aggaccuuucaagaauugcug

SEQ ID NO: 2690940 - RNA, 17 nt, Human papillomavirus type 8
gcagaacaaacacuuga

SEQ ID NO: 2690941 - RNA, 11 nt, Human papillomavirus type 8
acuauguggaa

SEQ ID NO: 2690942 - RNA, 20 nt, Human papillomavirus type 8
gcucuuugcagagcaggaca

SEQ ID NO: 2690943 - RNA, 22 nt, Human papillomavirus type 8
cgaaggcucuuugcagagcagg

SEQ ID NO: 2690944 - RNA, 13 nt, Human papillomavirus type 8
auacauucaaaga

SEQ ID NO: 2690945 - RNA, 12 nt, Human papillomavirus type 8
ccugccaaggaa

SEQ ID NO: 2690946 - RNA, 14 nt, Human papillomavirus type 8
gaaaagaagcugug

SEQ ID NO: 2690947 - RNA, 19 nt, Human papillomavirus type 8
gaaguauugaucuugccaa

SEQ ID NO: 2690948 - RNA, 14 nt, Human
gcccuguuaaaaga

SEQ ID NO: 2690949 - RNA, 17 nt, Human
gcccuguuaaaagauga

SEQ ID NO: 2690950 - RNA, 13 nt, Human
gcccuguuaaaag

SEQ ID NO: 2690951 - RNA, 16 nt, Human
gcccccaggugccagu

SEQ ID NO: 2690952 - RNA, 23 nt, Human
gccagcaguucagagcugcccuc

SEQ ID NO: 2690953 - RNA, 22 nt, Human
gccagcaguucagagcugcccu

SEQ ID NO: 2690954 - RNA, 22 nt, Human
gccagacaucaacagauaaaua

SEQ ID NO: 2690955 - RNA, 19 nt, Human
gccagauuuuccugaaaac

SEQ ID NO: 2690956 - RNA, 15 nt, Human
gcuccccucggagaa

SEQ ID NO: 2690957 - RNA, 18 nt, Human
gcuccccucggagaagag

SEQ ID NO: 2690958 - RNA, 21 nt, Human
gcuaguaauuggaaaggcagc

SEQ ID NO: 2690959 - RNA, 16 nt, Human
gcuaguaucaaaagaa

SEQ ID NO: 2690960 - RNA, 17 nt, Human
gcuggagcucugcccau

SEQ ID NO: 2690961 - RNA, 14 nt, Human
gcuggagcucugcc

SEQ ID NO: 2690962 - RNA, 20 nt, Human
gcugccuccccuccucugcu

SEQ ID NO: 2690963 - RNA, 17 nt, Human
gcugccuccccuccucu

SEQ ID NO: 2690964 - RNA, 16 nt, Human
gcugccuccccuccuc

SEQ ID NO: 2690965 - RNA, 22 nt, Human
gcugccuccccuccucugcuug

SEQ ID NO: 2690966 - RNA, 21 nt, Human
gcugccuccccuccucugcuu

SEQ ID NO: 2690967 - RNA, 23 nt, Human
aaaauaauuuuuauauuugaaau

SEQ ID NO: 2690968 - RNA, 21 nt, Human
aaaauaauuuuuauauuugaa

SEQ ID NO: 2690969 - RNA, 20 nt, Human
aaaauaauuuuuauauuuga

SEQ ID NO: 2690970 - RNA, 21 nt, Human
gggauuuucagcccucagaau

SEQ ID NO: 2690971 - RNA, 17 nt, Human
gggauugaaggaugcug

SEQ ID NO: 2690972 - RNA, 23 nt, Human
gggcagcugccuccccuccucug

SEQ ID NO: 2690973 - RNA, 20 nt, Human
gggcagcugccuccccuccu

SEQ ID NO: 2690974 - RNA, 19 nt, Human
gggcagcugccuccccucc

SEQ ID NO: 2690975 - RNA, 14 nt, Human
gggcagcugccucc

SEQ ID NO: 2690976 - RNA, 13 nt, Human
gggcagcugccuc

SEQ ID NO: 2690977 - RNA, 12 nt, Human
gggcagcugccu

SEQ ID NO: 2690978 - RNA, 11 nt, Human
gggaggcagag

SEQ ID NO: 2690979 - RNA, 20 nt, Human
gggaggcagagguugcagug

SEQ ID NO: 2690980 - RNA, 22 nt, Human
aaaagcuccauuuuuagugaaa

SEQ ID NO: 2690981 - RNA, 21 nt, Human
aaaacuuuaugcuaagugaaa

SEQ ID NO: 2690982 - RNA, 20 nt, Human
aaagaggcagcuugaaacug

SEQ ID NO: 2690983 - RNA, 18 nt, Human
aaagagaacuuccagauc

SEQ ID NO: 2690984 - RNA, 22 nt, Human
aaagacuauucaaacagucuca

SEQ ID NO: 2690985 - RNA, 13 nt, Human
aaagacuccaaag

SEQ ID NO: 2690986 - RNA, 23 nt, Human
aaagacuauucaaacagucucag

SEQ ID NO: 2690987 - RNA, 16 nt, Human
aaagaaugauuaugaa

SEQ ID NO: 2690988 - RNA, 13 nt, Human
aaaggaauuuaaa

SEQ ID NO: 2690989 - RNA, 15 nt, Human
ggugccaguuauggc

SEQ ID NO: 2690990 - RNA, 20 nt, Human
ggugauuuagcaggaagcug

SEQ ID NO: 2690991 - RNA, 14 nt, Human
ggucugugagaugc

SEQ ID NO: 2690992 - RNA, 24 nt, Human
ggucugugagaugcuagaacuccc

SEQ ID NO: 2690993 - RNA, 16 nt, Human
aaaccacagcaguuga

SEQ ID NO: 2690994 - RNA, 15 nt, Human
aaaccacagcaguug

SEQ ID NO: 2690995 - RNA, 16 nt, Human
aaacucauuucuagca

SEQ ID NO: 2690996 - RNA, 19 nt, Human
aaaauuuuuucucuaggaa

SEQ ID NO: 2690997 - RNA, 17 nt, Human
aaacaaggaugaauuaa

SEQ ID NO: 2690998 - RNA, 14 nt, Human
aaacacaacuauau

SEQ ID NO: 2690999 - RNA, 13 nt, Human
aaacauauauaac

SEQ ID NO: 2691000 - RNA, 19 nt, Human
aaacauauauaacaaugcu

SEQ ID NO: 2691001 - RNA, 16 nt, Human
aaacauauauaacaau

SEQ ID NO: 2691002 - RNA, 21 nt, Human
aaacauauauaacaaugcugu

SEQ ID NO: 2691003 - RNA, 15 nt, Human
ggaggcugagauggg

SEQ ID NO: 2691004 - RNA, 19 nt, Human
ggaggcugagaugggagaa

SEQ ID NO: 2691005 - RNA, 12 nt, Human
ggauuuucagcc

SEQ ID NO: 2691006 - RNA, 23 nt, Human
ggaugguucccuugaugaagaag

SEQ ID NO: 2691007 - RNA, 22 nt, Human
ggaugguucccuugaugaagaa

SEQ ID NO: 2691008 - RNA, 16 nt, Human
ggccuccauccugagg

SEQ ID NO: 2691009 - RNA, 16 nt, Human
gacacacugaagaagc

SEQ ID NO: 2691010 - RNA, 15 nt, Human
gacacacugaagaag

SEQ ID NO: 2691011 - RNA, 21 nt, Human
gacagaaagcagaacagugau

SEQ ID NO: 2691012 - RNA, 17 nt, Human
gacauuugcucauggaa

SEQ ID NO: 2691013 - RNA, 16 nt, Human
gacauuugcucaugga

SEQ ID NO: 2691014 - RNA, 21 nt, Human
gacagugagacucugucucag

SEQ ID NO: 2691015 - RNA, 16 nt, Human
gacgcucucuggccuu

SEQ ID NO: 2691016 - RNA, 17 nt, Human
gacgcucucuggccuuc

SEQ ID NO: 2691017 - RNA, 15 nt, Human
gacgcucucuggccu

SEQ ID NO: 2691018 - RNA, 21 nt, Human
gacucuuaagaagacugcauu

SEQ ID NO: 2691019 - RNA, 14 nt, Human
gacucuuaagaaga

SEQ ID NO: 2691020 - RNA, 23 nt, Human
gaagcaacccaaauguucaucaa

SEQ ID NO: 2691021 - RNA, 14 nt, Human
gaagcaaaauuuuu

SEQ ID NO: 2691022 - RNA, 13 nt, Human
gaacugaaaucau

SEQ ID NO: 2691023 - RNA, 14 nt, Human
gaacugaaaucaua

SEQ ID NO: 2691024 - RNA, 19 nt, Human
gaacccgggaggcagaggu

SEQ ID NO: 2691025 - RNA, 20 nt, Human
gcaaguauuagaauaccaca

SEQ ID NO: 2691026 - RNA, 22 nt, Human
gcaauagucaaauugugugaaa

SEQ ID NO: 2691027 - RNA, 23 nt, Human
gcacaguuuucugagaaagacua

SEQ ID NO: 2691028 - RNA, 20 nt, Human
gcacaguuuucugagaaaga

SEQ ID NO: 2691029 - RNA, 22 nt, Human
gcacaguuuucugagaaagacu

SEQ ID NO: 2691030 - RNA, 16 nt, Human
gauuuaccacuugugu

SEQ ID NO: 2691031 - RNA, 15 nt, Human
gauuuaccacuugug

SEQ ID NO: 2691032 - RNA, 22 nt, Human
gaugguucccuugaugaagaag

SEQ ID NO: 2691033 - RNA, 17 nt, Human
gauguagaggagaaacu

SEQ ID NO: 2691034 - RNA, 18 nt, Human
gauguagaggagaaacug

SEQ ID NO: 2691035 - RNA, 16 nt, Human
gaugaucuuuaaaaua

SEQ ID NO: 2691036 - RNA, 15 nt, Human
gaggacgcucucugg

SEQ ID NO: 2691037 - RNA, 23 nt, Human
gaggcuccacuuggucugugaga

SEQ ID NO: 2691038 - RNA, 19 nt, Human
gaggcuccacuuggucugu

SEQ ID NO: 2691039 - RNA, 18 nt, Human
gaggcuccacuuggucug

SEQ ID NO: 2691040 - RNA, 16 nt, Human
gaguuuaaauuguaau

SEQ ID NO: 2691041 - RNA, 16 nt, Human
cugcacuccagccuga

SEQ ID NO: 2691042 - RNA, 17 nt, Human
cugcacuccagccugag

SEQ ID NO: 2691043 - RNA, 20 nt, Human
cugcacuccagccugagcga

SEQ ID NO: 2691044 - RNA, 20 nt, Human
cugcuuauccguuagccgug

SEQ ID NO: 2691045 - RNA, 21 nt, Human
cuggugccucaccccuugcca

SEQ ID NO: 2691046 - RNA, 12 nt, Human
cuggugccucac

SEQ ID NO: 2691047 - RNA, 15 nt, Human
cugggcagcugccuc

SEQ ID NO: 2691048 - RNA, 14 nt, Human
cugggcagcugccu

SEQ ID NO: 2691049 - RNA, 13 nt, Human
cugggcagcugcc

SEQ ID NO: 2691050 - RNA, 11 nt, Human
cuucagacaua

SEQ ID NO: 2691051 - RNA, 23 nt, Human
cuucaugcugucuacacuaagag

SEQ ID NO: 2691052 - RNA, 20 nt, Human
cuucuguuuuauaauuuugu

SEQ ID NO: 2691053 - RNA, 15 nt, Human
cuucuguuuuauaau

SEQ ID NO: 2691054 - RNA, 20 nt, Human
cuuuaaagggauggcaagau

SEQ ID NO: 2691055 - RNA, 21 nt, Human
cuuugagugucuuaauuaaaa

SEQ ID NO: 2691056 - RNA, 15 nt, Human
ccaggggccaugaau

SEQ ID NO: 2691057 - RNA, 20 nt, Human
ccacuuggucugugagaugc

SEQ ID NO: 2691058 - RNA, 22 nt, Human
ccacuuggucugugagaugcua

SEQ ID NO: 2691059 - RNA, 15 nt, Human
ccacuuggucuguga

SEQ ID NO: 2691060 - RNA, 16 nt, Human
ccacuuggucugugag

SEQ ID NO: 2691061 - RNA, 17 nt, Human
ccacuuggucugugaga

SEQ ID NO: 2691062 - RNA, 19 nt, Human
ccacuuggucugugagaug

SEQ ID NO: 2691063 - RNA, 12 nt, Human
ccacuuggucug

SEQ ID NO: 2691064 - RNA, 13 nt, Human
ccauuuaaagcuu

SEQ ID NO: 2691065 - RNA, 22 nt, Human
ccauuguggucacaggaaguag

SEQ ID NO: 2691066 - RNA, 18 nt, Human
ccaugggcacugugggua

SEQ ID NO: 2691067 - RNA, 15 nt, Human
ccccauuguggucac

SEQ ID NO: 2691068 - RNA, 22 nt, Human
ccucuccugggcagcugccucc

SEQ ID NO: 2691069 - RNA, 21 nt, Human
ccucuccugggcagcugccuc

SEQ ID NO: 2691070 - RNA, 16 nt, Human
ccucuccugggcagcu

SEQ ID NO: 2691071 - RNA, 15 nt, Human
ccucuccugggcagc

SEQ ID NO: 2691072 - RNA, 20 nt, Human
ccucuccugggcagcugccu

SEQ ID NO: 2691073 - RNA, 19 nt, Human
ccucuccugggcagcugcc

SEQ ID NO: 2691074 - RNA, 18 nt, Human
ccucuccugggcagcugc

SEQ ID NO: 2691075 - RNA, 17 nt, Human
ccucuccugggcagcug

SEQ ID NO: 2691076 - RNA, 13 nt, Human
cccucggagaaga

SEQ ID NO: 2691077 - RNA, 14 nt, Human
cccugagcaggauu

SEQ ID NO: 2691078 - RNA, 20 nt, Human
ccuaacgaaguauccuucag

SEQ ID NO: 2691079 - RNA, 19 nt, Human
cucuauguucuaagaagug

SEQ ID NO: 2691080 - RNA, 15 nt, Human
cucuccccaugaugu

SEQ ID NO: 2691081 - RNA, 16 nt, Human
cucuccccaugauguu

SEQ ID NO: 2691082 - RNA, 14 nt, Human
cucucuggccuucg

SEQ ID NO: 2691083 - RNA, 16 nt, Human
cucucuggccuucggc

SEQ ID NO: 2691084 - RNA, 13 nt, Human
cucucuggccuuc

SEQ ID NO: 2691085 - RNA, 21 nt, Human
cucucuguaauaaacucauuu

SEQ ID NO: 2691086 - RNA, 16 nt, Human
cucucuguaauaaacu

SEQ ID NO: 2691087 - RNA, 22 nt, Human
cucccuccaccucccugcaaua

SEQ ID NO: 2691088 - RNA, 21 nt, Human
cucccuccaccucccugcaau

SEQ ID NO: 2691089 - RNA, 20 nt, Human
cucccuccaccucccugcaa

SEQ ID NO: 2691090 - RNA, 19 nt, Human
cucccuccaccucccugca

SEQ ID NO: 2691091 - RNA, 16 nt, Human
cucaguccaugaagau

SEQ ID NO: 2691092 - RNA, 18 nt, Human
cuaucucauuuccaagca

SEQ ID NO: 2691093 - RNA, 18 nt, Human
cuauguucuaagaaguga

SEQ ID NO: 2691094 - RNA, 17 nt, Human
ccuucucuucacaguca

SEQ ID NO: 2691095 - RNA, 20 nt, Human
cuaacgaaguauccuucagc

SEQ ID NO: 2691096 - RNA, 20 nt, Human
cuacaaaaacacagcaaggg

SEQ ID NO: 2691097 - RNA, 12 nt, Human
ccuuuucccaac

SEQ ID NO: 2691098 - RNA, 22 nt, Human
auugaggacacugauauggguc

SEQ ID NO: 2691099 - RNA, 16 nt, Human
auuucagcagcugcag

SEQ ID NO: 2691100 - RNA, 16 nt, Human
auuuuuauauuugaaa

SEQ ID NO: 2691101 - RNA, 19 nt, Human
auuuuuauauuugaaauau

SEQ ID NO: 2691102 - RNA, 21 nt, Human
caaaagguauuuuaaucacca

SEQ ID NO: 2691103 - RNA, 19 nt, Human
auuuucuauaauuuaaaua

SEQ ID NO: 2691104 - RNA, 17 nt, Human
auuuucuauaauuuaaa

SEQ ID NO: 2691105 - RNA, 18 nt, Human
auuuucuauaauuuaaau

SEQ ID NO: 2691106 - RNA, 13 nt, Human
cacaucagcuugc

SEQ ID NO: 2691107 - RNA, 23 nt, Human
cacaucagcuugcccuguuaaaa

SEQ ID NO: 2691108 - RNA, 23 nt, Human
cacugaagaagcaccaaucauga

SEQ ID NO: 2691109 - RNA, 11 nt, Human
cacugaagaag

SEQ ID NO: 2691110 - RNA, 16 nt, Human
cacuccagugagacag

SEQ ID NO: 2691111 - RNA, 21 nt, Human
cacuccagugagacagcucug

SEQ ID NO: 2691112 - RNA, 14 nt, Human
caagcaaguauuag

SEQ ID NO: 2691113 - RNA, 12 nt, Human
caacuccagaaa

SEQ ID NO: 2691114 - RNA, 19 nt, Human
caacuaucucauuuccaag

SEQ ID NO: 2691115 - RNA, 19 nt, Human
caacuauauuguuugcuaa

SEQ ID NO: 2691116 - RNA, 17 nt, Human
caaucagccuaguugau

SEQ ID NO: 2691117 - RNA, 20 nt, Human
cagcugccuccccuccucug

SEQ ID NO: 2691118 - RNA, 19 nt, Human
cagcugccuccccuccucu

SEQ ID NO: 2691119 - RNA, 18 nt, Human
cagcugccuccccuccuc

SEQ ID NO: 2691120 - RNA, 17 nt, Human
cagcugccuccccuccu

SEQ ID NO: 2691121 - RNA, 16 nt, Human
cagcugccuccccucc

SEQ ID NO: 2691122 - RNA, 15 nt, Human
cagcugccuccccuc

SEQ ID NO: 2691123 - RNA, 14 nt, Human
cagcugccuccccu

SEQ ID NO: 2691124 - RNA, 9 nt, Human
cagcugccu

SEQ ID NO: 2691125 - RNA, 10 nt, Human
cagcugccuc

SEQ ID NO: 2691126 - RNA, 11 nt, Human
cagcugccucc

SEQ ID NO: 2691127 - RNA, 20 nt, Human
cagcuuauugucuagugaaa

SEQ ID NO: 2691128 - RNA, 20 nt, Human
cagcuguaugauucccagcc

SEQ ID NO: 2691129 - RNA, 14 nt, Human
cagcuuauugucua

SEQ ID NO: 2691130 - RNA, 20 nt, Human
caggaaagagaacuuccaga

SEQ ID NO: 2691131 - RNA, 16 nt, Human
caggaaagagaacuuc

SEQ ID NO: 2691132 - RNA, 11 nt, Human
caggcuacugu

SEQ ID NO: 2691133 - RNA, 23 nt, Human
cagagcugcccucuccugggcag

SEQ ID NO: 2691134 - RNA, 21 nt, Human
cagagcugcccucuccugggc

SEQ ID NO: 2691135 - RNA, 20 nt, Human
cagagcugcccucuccuggg

SEQ ID NO: 2691136 - RNA, 19 nt, Human
cagagcugcccucuccugg

SEQ ID NO: 2691137 - RNA, 18 nt, Human
cagagcugcccucuccug

SEQ ID NO: 2691138 - RNA, 14 nt, Human
cagccagacuggca

SEQ ID NO: 2691139 - RNA, 15 nt, Human
cagccagacuggcac

SEQ ID NO: 2691140 - RNA, 18 nt, Human
cagccagacuggcacagu

SEQ ID NO: 2691141 - RNA, 23 nt, Human
cagccagcaguucagagcugccc

SEQ ID NO: 2691142 - RNA, 20 nt, Human
cagccagacuggcacaguuu

SEQ ID NO: 2691143 - RNA, 19 nt, Human
cagacuggauaguccgucu

SEQ ID NO: 2691144 - RNA, 22 nt, Human
cagacuggcacaguuuucugag

SEQ ID NO: 2691145 - RNA, 23 nt, Human
cagacuggcacaguuuucugaga

SEQ ID NO: 2691146 - RNA, 17 nt, Human
cagacuggcacaguuuu

SEQ ID NO: 2691147 - RNA, 18 nt, Human
cagacuggcacaguuuuc

SEQ ID NO: 2691148 - RNA, 22 nt, Human
caguucagagcugcccucuccu

SEQ ID NO: 2691149 - RNA, 21 nt, Human
caguucagagcugcccucucc

SEQ ID NO: 2691150 - RNA, 19 nt, Human
caguucagagcugcccucu

SEQ ID NO: 2691151 - RNA, 18 nt, Human
caguucagagcugcccuc

SEQ ID NO: 2691152 - RNA, 24 nt, Human
caguucagagcugcccucuccugg

SEQ ID NO: 2691153 - RNA, 23 nt, Human
caguucagagcugcccucuccug

SEQ ID NO: 2691154 - RNA, 22 nt, Human
caguuauuauauuuacaaaugg

SEQ ID NO: 2691155 - RNA, 17 nt, Human
caguucagagcugcccu

SEQ ID NO: 2691156 - RNA, 16 nt, Human
caguucagagcugccc

SEQ ID NO: 2691157 - RNA, 15 nt, Human
caguucagagcugcc

SEQ ID NO: 2691158 - RNA, 22 nt, Human
cagugauuaccagggacugagg

SEQ ID NO: 2691159 - RNA, 13 nt, Human
caguuauggcuau

SEQ ID NO: 2691160 - RNA, 19 nt, Human
caguuauggcuauaggugc

SEQ ID NO: 2691161 - RNA, 20 nt, Human
caguuauggcuauaggugcu

SEQ ID NO: 2691162 - RNA, 17 nt, Human
caguuauuauauuuaca

SEQ ID NO: 2691163 - RNA, 21 nt, Human
caguuauuauauuuacaaaug

SEQ ID NO: 2691164 - RNA, 16 nt, Human
cauagguuuaauaauu

SEQ ID NO: 2691165 - RNA, 19 nt, Human
cauagcagcuuauucacaa

SEQ ID NO: 2691166 - RNA, 18 nt, Human
cauccugaggcuccacuu

SEQ ID NO: 2691167 - RNA, 19 nt, Human
cauccugaggcuccacuug

SEQ ID NO: 2691168 - RNA, 13 nt, Human
caucagcugcuga

SEQ ID NO: 2691169 - RNA, 19 nt, Human
cauuauauuuauuacugua

SEQ ID NO: 2691170 - RNA, 21 nt, Human
ccaacuccagaaagugacaag

SEQ ID NO: 2691171 - RNA, 14 nt, Human
ccaaaaggcagaag

SEQ ID NO: 2691172 - RNA, 16 nt, Human
cauuuguauaaaauaa

SEQ ID NO: 2691173 - RNA, 14 nt, Human
cauuuguauaaaau

SEQ ID NO: 2691174 - RNA, 22 nt, Human
auuuaccacuuguguuuugcaa

SEQ ID NO: 2691175 - RNA, 15 nt, Human
auuuaccacuugugu

SEQ ID NO: 2691176 - RNA, 16 nt, Human
auuguaguccuguaau

SEQ ID NO: 2691177 - RNA, 17 nt, Human
auuuaaaaaaaaaccug

SEQ ID NO: 2691178 - RNA, 20 nt, Human
auuuauuacuguaagaaaau

SEQ ID NO: 2691179 - RNA, 19 nt, Human
auuuauuacuguaagaaaa

SEQ ID NO: 2691180 - RNA, 21 nt, Human
auuuauuuuaauaauguuuca

SEQ ID NO: 2691181 - RNA, 20 nt, Human
auuucuugagguaaaagcau

SEQ ID NO: 2691182 - RNA, 17 nt, Human
auuggagcucgugggac

SEQ ID NO: 2691183 - RNA, 16 nt, Human
auuggagcucguggaa

SEQ ID NO: 2691184 - RNA, 17 nt, Human
auugaaggaugcugucu

SEQ ID NO: 2691185 - RNA, 24 nt, Human
auuccuagaaacugacacaugcug

SEQ ID NO: 2691186 - RNA, 16 nt, Human
uuuucuauaauuuaaa

SEQ ID NO: 2691187 - RNA, 20 nt, Human
uuuucaggcuagauguaugu

SEQ ID NO: 2691188 - RNA, 22 nt, Human
uuuuauggcacuaguauuucua

SEQ ID NO: 2691189 - RNA, 20 nt, Human
augugcuaguaauuggaaag

SEQ ID NO: 2691190 - RNA, 21 nt, Human
augugcuaguaauuggaaagg

SEQ ID NO: 2691191 - RNA, 19 nt, Human
auguauauuuuauaucaau

SEQ ID NO: 2691192 - RNA, 23 nt, Human
augucgucaaagcugaaauggac

SEQ ID NO: 2691193 - RNA, 17 nt, Human
uuuguaguguuggagaa

SEQ ID NO: 2691194 - RNA, 19 nt, Human
uuugcuaagcauuccaacu

SEQ ID NO: 2691195 - RNA, 20 nt, Human
uuugcuggagcucugcccau

SEQ ID NO: 2691196 - RNA, 22 nt, Human
auucaaacagucucaggaaauc

SEQ ID NO: 2691197 - RNA, 20 nt, Human
auuauauggcuugaguuuaa

SEQ ID NO: 2691198 - RNA, 17 nt, Human
auuccaagugauugaaa

SEQ ID NO: 2691199 - RNA, 17 nt, Human
uuuuuauauuugaaaua

SEQ ID NO: 2691200 - RNA, 15 nt, Human
uuuuugaagcuguau

SEQ ID NO: 2691201 - RNA, 15 nt, Human
uuuuguuuucauuau

SEQ ID NO: 2691202 - RNA, 14 nt, Human
uuuugugaagcaaa

SEQ ID NO: 2691203 - RNA, 16 nt, Human
auuacuguaagaaaau

SEQ ID NO: 2691204 - RNA, 15 nt, Human
auuacuguaagaaaa

SEQ ID NO: 2691205 - RNA, 20 nt, Human
uugucaauaaaauccauaca

SEQ ID NO: 2691206 - RNA, 17 nt, Human
augagguacugagagug

SEQ ID NO: 2691207 - RNA, 18 nt, Human
augagguacugagaguga

SEQ ID NO: 2691208 - RNA, 15 nt, Human
augagguacugagag

SEQ ID NO: 2691209 - RNA, 13 nt, Human
augauuucauuca

SEQ ID NO: 2691210 - RNA, 18 nt, Human
uuuaaaaaaauuccaagu

SEQ ID NO: 2691211 - RNA, 12 nt, Human
augcaaagcacu

SEQ ID NO: 2691212 - RNA, 13 nt, Human
augcaaagcacug

SEQ ID NO: 2691213 - RNA, 14 nt, Human
augcaaagcacuga

SEQ ID NO: 2691214 - RNA, 21 nt, Human
uuuaaauauaugcuaagucuu

SEQ ID NO: 2691215 - RNA, 19 nt, Human
uuucaaacauauauaacaa

SEQ ID NO: 2691216 - RNA, 21 nt, Human
augcuucuguuuuauaauuuu

SEQ ID NO: 2691217 - RNA, 22 nt, Human
augcuguauuuuaaaagaauga

SEQ ID NO: 2691218 - RNA, 19 nt, Human
augcuguauuuuaaaagaa

SEQ ID NO: 2691219 - RNA, 23 nt, Human
augcuguauuuuaaaagaaugau

SEQ ID NO: 2691220 - RNA, 18 nt, Human
augcuacaggauuugaaa

SEQ ID NO: 2691221 - RNA, 22 nt, Human
augccuuuucccaacuccagaa

SEQ ID NO: 2691222 - RNA, 20 nt, Human
augccuuuucccaacuccag

SEQ ID NO: 2691223 - RNA, 14 nt, Human
augccuuuucccaa

SEQ ID NO: 2691224 - RNA, 19 nt, Human
uuuauaugcuucuguuuua

SEQ ID NO: 2691225 - RNA, 21 nt, Human
uuuauaugcuucuguuuuaua

SEQ ID NO: 2691226 - RNA, 12 nt, Human
uugacuuuuuau

SEQ ID NO: 2691227 - RNA, 13 nt, Human
uugacaugggaca

SEQ ID NO: 2691228 - RNA, 19 nt, Human
aucucaaaacugcacuguc

SEQ ID NO: 2691229 - RNA, 20 nt, Human
aucucaaaacugcacuguca

SEQ ID NO: 2691230 - RNA, 15 nt, Human
aucucaaaacugcac

SEQ ID NO: 2691231 - RNA, 15 nt, Human
uuggagaagaacuga

SEQ ID NO: 2691232 - RNA, 22 nt, Human
uuggagaagaacugaaaucaua

SEQ ID NO: 2691233 - RNA, 17 nt, Human
uuggagaagaacugaaa

SEQ ID NO: 2691234 - RNA, 12 nt, Human
aucuuuaaaaua

SEQ ID NO: 2691235 - RNA, 15 nt, Human
aucuuuaaaauacac

SEQ ID NO: 2691236 - RNA, 16 nt, Human
aucuuauaauuuaaaa

SEQ ID NO: 2691237 - RNA, 15 nt, Human
aucuuauaauuuaaa

SEQ ID NO: 2691238 - RNA, 18 nt, Human
augaacuuguaaaggaau

SEQ ID NO: 2691239 - RNA, 23 nt, Human
auaugcaaagcacugacuucuaa

SEQ ID NO: 2691240 - RNA, 16 nt, Human
auaugcaaagcacuga

SEQ ID NO: 2691241 - RNA, 15 nt, Human
auaugcaaagcacug

SEQ ID NO: 2691242 - RNA, 15 nt, Human
uucagcccucagaau

SEQ ID NO: 2691243 - RNA, 15 nt, Human
auauaacaaugcugu

SEQ ID NO: 2691244 - RNA, 12 nt, Human
auauaacaaugc

SEQ ID NO: 2691245 - RNA, 19 nt, Human
auauaagcuuguauuccuu

SEQ ID NO: 2691246 - RNA, 18 nt, Human
auauauaacaaugcugua

SEQ ID NO: 2691247 - RNA, 17 nt, Human
auauauaacaaugcugu

SEQ ID NO: 2691248 - RNA, 19 nt, Human
auauauaacaaugcuguau

SEQ ID NO: 2691249 - RNA, 18 nt, Human
auagucaaauugugugaa

SEQ ID NO: 2691250 - RNA, 17 nt, Human
auagucaaauuguguga

SEQ ID NO: 2691251 - RNA, 15 nt, Human
uucaaacauauauaa

SEQ ID NO: 2691252 - RNA, 21 nt, Human
auaggaauugacccacaagaa

SEQ ID NO: 2691253 - RNA, 14 nt, Human
auagcuacuaauuu

SEQ ID NO: 2691254 - RNA, 17 nt, Human
auagcuacuaauuuuaa

SEQ ID NO: 2691255 - RNA, 18 nt, Human
auagcuacuaauuuuaaa

SEQ ID NO: 2691256 - RNA, 17 nt, Human
uuauuguuuaaaaucau

SEQ ID NO: 2691257 - RNA, 18 nt, Human
uucucaacuccaaacuga

SEQ ID NO: 2691258 - RNA, 14 nt, Human
uucucaacuccaaa

SEQ ID NO: 2691259 - RNA, 23 nt, Human
aucccucccuccaccucccugca

SEQ ID NO: 2691260 - RNA, 14 nt, Human
aucccucccuccac

SEQ ID NO: 2691261 - RNA, 13 nt, Human
aucccucccucca

SEQ ID NO: 2691262 - RNA, 11 nt, Human
aucccucccuc

SEQ ID NO: 2691263 - RNA, 16 nt, Human
uucugcaucagcugcu

SEQ ID NO: 2691264 - RNA, 23 nt, Human
uucugcaucagcugcugaaacaa

SEQ ID NO: 2691265 - RNA, 14 nt, Human
uucugaagaagaug

SEQ ID NO: 2691266 - RNA, 13 nt, Human
uucugaagaagau

SEQ ID NO: 2691267 - RNA, 12 nt, Human
uucugaagaaga

SEQ ID NO: 2691268 - RNA, 19 nt, Human
auauuugaaauauugacuu

SEQ ID NO: 2691269 - RNA, 14 nt, Human
auauuugaaauauu

SEQ ID NO: 2691270 - RNA, 23 nt, Human
auauuugaaauauugacuuuuua

SEQ ID NO: 2691271 - RNA, 12 nt, Human
auauuuuaacuu

SEQ ID NO: 2691272 - RNA, 22 nt, Human
auauuuguaucacaaaucuuaa

SEQ ID NO: 2691273 - RNA, 13 nt, Human
auauuugaaauau

SEQ ID NO: 2691274 - RNA, 14 nt, Human
uguuccuagugaaa

SEQ ID NO: 2691275 - RNA, 18 nt, Human
uguuccuagugaaagagg

SEQ ID NO: 2691276 - RNA, 15 nt, Human
uguuauaaucuuuca

SEQ ID NO: 2691277 - RNA, 13 nt, Human
uguguaaguagau

SEQ ID NO: 2691278 - RNA, 20 nt, Human
uguggucacaggaaguagag

SEQ ID NO: 2691279 - RNA, 15 nt, Human
agugaaagaaaauaa

SEQ ID NO: 2691280 - RNA, 16 nt, Human
agugaacaaauuuaca

SEQ ID NO: 2691281 - RNA, 20 nt, Human
agugaacaaauuuacagaga

SEQ ID NO: 2691282 - RNA, 22 nt, Human
agucucaggaaaucaaauaugc

SEQ ID NO: 2691283 - RNA, 15 nt, Human
ugugagaugcuagaa

SEQ ID NO: 2691284 - RNA, 19 nt, Human
ugugagaugcuagaacucc

SEQ ID NO: 2691285 - RNA, 19 nt, Human
auaaaauccauacauuugu

SEQ ID NO: 2691286 - RNA, 18 nt, Human
auaaaauccauacauuug

SEQ ID NO: 2691287 - RNA, 22 nt, Human
auaaaauaauuuuuauauuuga

SEQ ID NO: 2691288 - RNA, 21 nt, Human
auaaaauaauuuuuauauuug

SEQ ID NO: 2691289 - RNA, 16 nt, Human
auaaaauaauuuuuau

SEQ ID NO: 2691290 - RNA, 18 nt, Human
uuaaguaaugauaacugg

SEQ ID NO: 2691291 - RNA, 22 nt, Human
uuaagaagacugcauuauauuu

SEQ ID NO: 2691292 - RNA, 20 nt, Human
uuaagaagacugcauuauau

SEQ ID NO: 2691293 - RNA, 15 nt, Human
uuacuguaagaaaau

SEQ ID NO: 2691294 - RNA, 12 nt, Human
uuaccugggaaa

SEQ ID NO: 2691295 - RNA, 14 nt, Human
uuaccuuacagaag

SEQ ID NO: 2691296 - RNA, 16 nt, Human
aguuuagcuggaaaag

SEQ ID NO: 2691297 - RNA, 19 nt, Human
uguuuucauuaucucaaaa

SEQ ID NO: 2691298 - RNA, 14 nt, Human
uguuuugcaagcca

SEQ ID NO: 2691299 - RNA, 16 nt, Human
aguucugaagaagaug

SEQ ID NO: 2691300 - RNA, 16 nt, Human
aguucugcagauaaac

SEQ ID NO: 2691301 - RNA, 21 nt, Human
aguucugcagauaaacaguag

SEQ ID NO: 2691302 - RNA, 18 nt, Human
aggggagcaugggaagug

SEQ ID NO: 2691303 - RNA, 16 nt, Human
aggggaauugaggaca

SEQ ID NO: 2691304 - RNA, 21 nt, Human
agggaggacgcucucuggccu

SEQ ID NO: 2691305 - RNA, 22 nt, Human
agggaggacgcucucuggccuu

SEQ ID NO: 2691306 - RNA, 23 nt, Human
agggaggacgcucucuggccuuc

SEQ ID NO: 2691307 - RNA, 13 nt, Human
agggaaauuucag

SEQ ID NO: 2691308 - RNA, 13 nt, Human
aguaaaauccaca

SEQ ID NO: 2691309 - RNA, 20 nt, Human
aguaaugauaacuggaaacu

SEQ ID NO: 2691310 - RNA, 18 nt, Human
aguaaugauaacuggaaa

SEQ ID NO: 2691311 - RNA, 17 nt, Human
aguaaugauaacuggaa

SEQ ID NO: 2691312 - RNA, 16 nt, Human
uguagaggagaaacug

SEQ ID NO: 2691313 - RNA, 16 nt, Human
aguauuucuaugaaau

SEQ ID NO: 2691314 - RNA, 17 nt, Human
aguauuucuaugaaaua

SEQ ID NO: 2691315 - RNA, 18 nt, Human
aguauuucuaugaaauau

SEQ ID NO: 2691316 - RNA, 17 nt, Human
agucaccucauggaauu

SEQ ID NO: 2691317 - RNA, 15 nt, Human
agucaccucauggaa

SEQ ID NO: 2691318 - RNA, 14 nt, Human
agucaccucaugga

SEQ ID NO: 2691319 - RNA, 18 nt, Human
aguauuagaauaccacag

SEQ ID NO: 2691320 - RNA, 13 nt, Human
aguagucagacug

SEQ ID NO: 2691321 - RNA, 13 nt, Human
uguauuacaaauc

SEQ ID NO: 2691322 - RNA, 22 nt, Human
uguauuacaaauccaaugaaau

SEQ ID NO: 2691323 - RNA, 15 nt, Human
uguaucacaaaucuu

SEQ ID NO: 2691324 - RNA, 18 nt, Human
uguaucacaaaucuuaac

SEQ ID NO: 2691325 - RNA, 15 nt, Human
uguaguguuggagaa

SEQ ID NO: 2691326 - RNA, 14 nt, Human
uguaguguuggaga

SEQ ID NO: 2691327 - RNA, 16 nt, Human
uguaaaggaauuuaaa

SEQ ID NO: 2691328 - RNA, 14 nt, Human
agcuguucacagcc

SEQ ID NO: 2691329 - RNA, 16 nt, Human
agcugcccucuccugg

SEQ ID NO: 2691330 - RNA, 15 nt, Human
agcugcccucuccug

SEQ ID NO: 2691331 - RNA, 14 nt, Human
agcugcccucuccu

SEQ ID NO: 2691332 - RNA, 13 nt, Human
agcugcccucucc

SEQ ID NO: 2691333 - RNA, 20 nt, Human
ugcccuguuaaaagaugaaa

SEQ ID NO: 2691334 - RNA, 20 nt, Human
agcuugcccuggugccucac

SEQ ID NO: 2691335 - RNA, 16 nt, Human
agcuugcccuguuaaa

SEQ ID NO: 2691336 - RNA, 18 nt, Human
agcuugcccuguuaaaag

SEQ ID NO: 2691337 - RNA, 19 nt, Human
agcuugcccuguuaaaaga

SEQ ID NO: 2691338 - RNA, 14 nt, Human
ugcuacaaaaacac

SEQ ID NO: 2691339 - RNA, 15 nt, Human
ugcuacaaaaacaca

SEQ ID NO: 2691340 - RNA, 19 nt, Human
ugccuuuucccaacuccag

SEQ ID NO: 2691341 - RNA, 17 nt, Human
ugccuuuucccaacucc

SEQ ID NO: 2691342 - RNA, 20 nt, Human
aggaaaucaaauaugcaaag

SEQ ID NO: 2691343 - RNA, 21 nt, Human
aggaaaucaaauaugcaaagc

SEQ ID NO: 2691344 - RNA, 22 nt, Human
aggaaaucaaauaugcaaagca

SEQ ID NO: 2691345 - RNA, 15 nt, Human
aggcccccaggugcc

SEQ ID NO: 2691346 - RNA, 14 nt, Human
uggaguugaaaauc

SEQ ID NO: 2691347 - RNA, 15 nt, Human
aggcagcuugaaacu

SEQ ID NO: 2691348 - RNA, 20 nt, Human
aggcauuuaggccaugggac

SEQ ID NO: 2691349 - RNA, 21 nt, Human
uggagcucguggaacaguuac

SEQ ID NO: 2691350 - RNA, 17 nt, Human
uggagcucguggaacag

SEQ ID NO: 2691351 - RNA, 21 nt, Human
uggagcucgugggacagucac

SEQ ID NO: 2691352 - RNA, 17 nt, Human
ugcuuuuaaaaaaaaau

SEQ ID NO: 2691353 - RNA, 18 nt, Human
aggagaaacuggaacucu

SEQ ID NO: 2691354 - RNA, 19 nt, Human
aggagaaacuggaacucuc

SEQ ID NO: 2691355 - RNA, 17 nt, Human
aggagaaacuggaacuc

SEQ ID NO: 2691356 - RNA, 13 nt, Human
aggacgcucucug

SEQ ID NO: 2691357 - RNA, 14 nt, Human
aggacgcucucugg

SEQ ID NO: 2691358 - RNA, 16 nt, Human
aggacgcucucuggcc

SEQ ID NO: 2691359 - RNA, 17 nt, Human
aggacgcucucuggccu

SEQ ID NO: 2691360 - RNA, 19 nt, Human
aggacgcucucuggccuuc

SEQ ID NO: 2691361 - RNA, 20 nt, Human
aggacgcucucuggccuucg

SEQ ID NO: 2691362 - RNA, 15 nt, Human
ugcacuccagccuga

SEQ ID NO: 2691363 - RNA, 17 nt, Human
ugcacuccagccugagc

SEQ ID NO: 2691364 - RNA, 22 nt, Human
ugcagaagacaguauggcagcu

SEQ ID NO: 2691365 - RNA, 18 nt, Human
agccccgugggguuccuc

SEQ ID NO: 2691366 - RNA, 13 nt, Human
ugauuucauucaa

SEQ ID NO: 2691367 - RNA, 20 nt, Human
ugcaaagcacugacuucuaa

SEQ ID NO: 2691368 - RNA, 22 nt, Human
ugcaaagcacugacuucuaagu

SEQ ID NO: 2691369 - RNA, 18 nt, Human
ugcaaagcacugacuucu

SEQ ID NO: 2691370 - RNA, 21 nt, Human
ugcaagccagauuuuccugaa

SEQ ID NO: 2691371 - RNA, 15 nt, Human
ugcaagccagauuuu

SEQ ID NO: 2691372 - RNA, 21 nt, Human
ugcaauaaaauggguuuuacu

SEQ ID NO: 2691373 - RNA, 17 nt, Human
ugcaauaaaauggguuu

SEQ ID NO: 2691374 - RNA, 20 nt, Human
ugcauagauucccugagcag

SEQ ID NO: 2691375 - RNA, 13 nt, Human
ugcauacucauua

SEQ ID NO: 2691376 - RNA, 19 nt, Human
ugcauacucauuaggaugg

SEQ ID NO: 2691377 - RNA, 17 nt, Human
ugccaguuauggcuaua

SEQ ID NO: 2691378 - RNA, 13 nt, Human
ugccauaauuacu

SEQ ID NO: 2691379 - RNA, 18 nt, Human
agcagucaggaaagagaa

SEQ ID NO: 2691380 - RNA, 17 nt, Human
agcagucaggaaagaga

SEQ ID NO: 2691381 - RNA, 23 nt, Human
agcaguuugguuucuagcaugaa

SEQ ID NO: 2691382 - RNA, 22 nt, Human
agcaguuugguuucuagcauga

SEQ ID NO: 2691383 - RNA, 20 nt, Human
agcaguuugguuucuagcau

SEQ ID NO: 2691384 - RNA, 19 nt, Human
agcagucaggaaagagaac

SEQ ID NO: 2691385 - RNA, 13 nt, Human
agcauaccaacac

SEQ ID NO: 2691386 - RNA, 19 nt, Human
agcauaccaacacgagcag

SEQ ID NO: 2691387 - RNA, 22 nt, Human
agcauaccaacacgagcaggcu

SEQ ID NO: 2691388 - RNA, 19 nt, Human
agcagggcauggcugggaa

SEQ ID NO: 2691389 - RNA, 20 nt, Human
agcaggaagcugugagagca

SEQ ID NO: 2691390 - RNA, 16 nt, Human
agcaggcuacugucag

SEQ ID NO: 2691391 - RNA, 17 nt, Human
agcaggcuacugucagc

SEQ ID NO: 2691392 - RNA, 19 nt, Human
agcaggcuacugucagcuc

SEQ ID NO: 2691393 - RNA, 20 nt, Human
agcaggcuacugucagcucc

SEQ ID NO: 2691394 - RNA, 14 nt, Human
agcaggcuacuguc

SEQ ID NO: 2691395 - RNA, 15 nt, Human
ugauuaaguaaugau

SEQ ID NO: 2691396 - RNA, 16 nt, Human
ugauuaaguaaugaua

SEQ ID NO: 2691397 - RNA, 22 nt, Human
agcauuuagauguauagguuga

SEQ ID NO: 2691398 - RNA, 20 nt, Human
agcaucacaugaacuuguaa

SEQ ID NO: 2691399 - RNA, 17 nt, Human
ugaaauaagccagacau

SEQ ID NO: 2691400 - RNA, 18 nt, Human
ugaaauaagccagacauc

SEQ ID NO: 2691401 - RNA, 20 nt, Human
ugaaauaagccagacaucaa

SEQ ID NO: 2691402 - RNA, 23 nt, Human
ugaaauaagccagacaucaacag

SEQ ID NO: 2691403 - RNA, 14 nt, Human
agagcugcccucuc

SEQ ID NO: 2691404 - RNA, 13 nt, Human
agagcugcccucu

SEQ ID NO: 2691405 - RNA, 15 nt, Human
agagcugcccucucc

SEQ ID NO: 2691406 - RNA, 15 nt, Human
ugaaauuguauuaca

SEQ ID NO: 2691407 - RNA, 18 nt, Human
ugaaauauuauguuaaaa

SEQ ID NO: 2691408 - RNA, 19 nt, Human
ugaacaaauuuacagagac

SEQ ID NO: 2691409 - RNA, 20 nt, Human
ugaacaaauuuacagagaca

SEQ ID NO: 2691410 - RNA, 18 nt, Human
ugaacaaauuuacagaga

SEQ ID NO: 2691411 - RNA, 23 nt, Human
ugaacuagaguuuagcuggaaaa

SEQ ID NO: 2691412 - RNA, 22 nt, Human
agagcugcccucuccugggcag

SEQ ID NO: 2691413 - RNA, 21 nt, Human
agagcuguucacagccagacu

SEQ ID NO: 2691414 - RNA, 15 nt, Human
agagguugcagugag

SEQ ID NO: 2691415 - RNA, 17 nt, Human
ugacccacaagaaauga

SEQ ID NO: 2691416 - RNA, 17 nt, Human
agaugcaguucugaaga

SEQ ID NO: 2691417 - RNA, 19 nt, Human
agaugcaguucugaagaag

SEQ ID NO: 2691418 - RNA, 18 nt, Human
agaugcaguucugaagaa

SEQ ID NO: 2691419 - RNA, 14 nt, Human
agaugcuagaacuc

SEQ ID NO: 2691420 - RNA, 15 nt, Human
agaugcuagaacucc

SEQ ID NO: 2691421 - RNA, 17 nt, Human
agaguuuagcuggaaaa

SEQ ID NO: 2691422 - RNA, 16 nt, Human
agaguuuagcuggaaa

SEQ ID NO: 2691423 - RNA, 23 nt, Human
agacuauucaaacagucucagga

SEQ ID NO: 2691424 - RNA, 16 nt, Human
ucuuauuucauuucuu

SEQ ID NO: 2691425 - RNA, 15 nt, Human
ucuuauuucauuucu

SEQ ID NO: 2691426 - RNA, 24 nt, Human
agagacagaaagcagaacagugau

SEQ ID NO: 2691427 - RNA, 22 nt, Human
ucuuagaugcaguucugaagaa

SEQ ID NO: 2691428 - RNA, 23 nt, Human
ucuuagaugcaguucugaagaag

SEQ ID NO: 2691429 - RNA, 17 nt, Human
agacacacugaagaagc

SEQ ID NO: 2691430 - RNA, 16 nt, Human
agacacacugaagaag

SEQ ID NO: 2691431 - RNA, 16 nt, Human
acuuguguuuugcaag

SEQ ID NO: 2691432 - RNA, 12 nt, Human
ucucaggaaauc

SEQ ID NO: 2691433 - RNA, 23 nt, Human
acuucuaaguaaaaccacagcag

SEQ ID NO: 2691434 - RNA, 16 nt, Human
acuugucaauaaaauc

SEQ ID NO: 2691435 - RNA, 21 nt, Human
acuugaacccauauuuguaca

SEQ ID NO: 2691436 - RNA, 19 nt, Human
acuugaacccgggaggcag

SEQ ID NO: 2691437 - RNA, 20 nt, Human
acuugaacccgggaggcaga

SEQ ID NO: 2691438 - RNA, 12 nt, Human
ucucuggccuuc

SEQ ID NO: 2691439 - RNA, 23 nt, Human
ucucuggccuucggccuccaucc

SEQ ID NO: 2691440 - RNA, 21 nt, Human
ucucuggccuucggccuccau

SEQ ID NO: 2691441 - RNA, 22 nt, Human
ucucuggccuucggccuccauc

SEQ ID NO: 2691442 - RNA, 12 nt, Human
ucugaagaagau

SEQ ID NO: 2691443 - RNA, 14 nt, Human
agaaaugaaagcag

SEQ ID NO: 2691444 - RNA, 22 nt, Human
ucggguuuuauuguuuaaaauc

SEQ ID NO: 2691445 - RNA, 18 nt, Human
acuguggguagacacaca

SEQ ID NO: 2691446 - RNA, 21 nt, Human
acugucagcuccccucggaga

SEQ ID NO: 2691447 - RNA, 18 nt, Human
acugggacaggggagaac

SEQ ID NO: 2691448 - RNA, 23 nt, Human
ucuaaguaaaaccacagcaguug

SEQ ID NO: 2691449 - RNA, 16 nt, Human
ucuacauacuauggaa

SEQ ID NO: 2691450 - RNA, 21 nt, Human
ucuaaguaaaaccacagcagu

SEQ ID NO: 2691451 - RNA, 22 nt, Human
ucuaaguaaaaccacagcaguu

SEQ ID NO: 2691452 - RNA, 20 nt, Human
ucuaaagccauuguaguccu

SEQ ID NO: 2691453 - RNA, 13 nt, Human
acuggcacaguuu

SEQ ID NO: 2691454 - RNA, 19 nt, Human
acuggcacaguuuucugag

SEQ ID NO: 2691455 - RNA, 20 nt, Human
acuggcacaguuuucugaga

SEQ ID NO: 2691456 - RNA, 20 nt, Human
acugccuucucaacuccaaa

SEQ ID NO: 2691457 - RNA, 19 nt, Human
acugccuucucaacuccaa

SEQ ID NO: 2691458 - RNA, 13 nt, Human
acugccuucucaa

SEQ ID NO: 2691459 - RNA, 15 nt, Human
acugcauuauauuua

SEQ ID NO: 2691460 - RNA, 14 nt, Human
acugcauuauauuu

SEQ ID NO: 2691461 - RNA, 18 nt, Human
ucgcuccaccuugcagcu

SEQ ID NO: 2691462 - RNA, 19 nt, Human
acgagcaggcuacugucag

SEQ ID NO: 2691463 - RNA, 20 nt, Human
acgagcaggcuacugucagc

SEQ ID NO: 2691464 - RNA, 14 nt, Human
acgagaaaacaaua

SEQ ID NO: 2691465 - RNA, 13 nt, Human
accucccugcaau

SEQ ID NO: 2691466 - RNA, 12 nt, Human
accucccugcaa

SEQ ID NO: 2691467 - RNA, 16 nt, Human
ucaugaauuaguuuua

SEQ ID NO: 2691468 - RNA, 22 nt, Human
ucaggaaaucaaauaugcaaag

SEQ ID NO: 2691469 - RNA, 23 nt, Human
ucaggaaaucaaauaugcaaagc

SEQ ID NO: 2691470 - RNA, 21 nt, Human
accuagggugauauuaaccag

SEQ ID NO: 2691471 - RNA, 21 nt, Human
ucaugaauuaguuuuauaugc

SEQ ID NO: 2691472 - RNA, 21 nt, Human
acuccaaagaaauguaaggga

SEQ ID NO: 2691473 - RNA, 15 nt, Human
acuccaaagaaaugu

SEQ ID NO: 2691474 - RNA, 18 nt, Human
acuccaaagaaauguaag

SEQ ID NO: 2691475 - RNA, 14 nt, Human
acuccaaagaaaug

SEQ ID NO: 2691476 - RNA, 11 nt, Human
ucccugagcag

SEQ ID NO: 2691477 - RNA, 17 nt, Human
ucccucccuccaccucc

SEQ ID NO: 2691478 - RNA, 16 nt, Human
ucccucccuccaccuc

SEQ ID NO: 2691479 - RNA, 15 nt, Human
ucccucccuccaccu

SEQ ID NO: 2691480 - RNA, 23 nt, Human
ucccuccaccucccugcaauaaa

SEQ ID NO: 2691481 - RNA, 21 nt, Human
ucccuccaccucccugcaaua

SEQ ID NO: 2691482 - RNA, 14 nt, Human
ucccucccuccacc

SEQ ID NO: 2691483 - RNA, 13 nt, Human
ucccucccuccac

SEQ ID NO: 2691484 - RNA, 17 nt, Human
uccccucggagaagagc

SEQ ID NO: 2691485 - RNA, 16 nt, Human
uccccucggagaagag

SEQ ID NO: 2691486 - RNA, 18 nt, Human
ucccagccagcaguucag

SEQ ID NO: 2691487 - RNA, 17 nt, Human
ucccagccagcaguuca

SEQ ID NO: 2691488 - RNA, 14 nt, Human
ucccagucauuuaa

SEQ ID NO: 2691489 - RNA, 22 nt, Human
ucccagucauuuaauaaaugug

SEQ ID NO: 2691490 - RNA, 21 nt, Human
uccaugaagauguagaggaga

SEQ ID NO: 2691491 - RNA, 13 nt, Human
uccaugaagaugu

SEQ ID NO: 2691492 - RNA, 20 nt, Human
uccauccugaggcuccacuu

SEQ ID NO: 2691493 - RNA, 21 nt, Human
uccauccugaggcuccacuug

SEQ ID NO: 2691494 - RNA, 19 nt, Human
uccauccugaggcuccacu

SEQ ID NO: 2691495 - RNA, 20 nt, Human
ucaggaaaucaaauaugcaa

SEQ ID NO: 2691496 - RNA, 21 nt, Human
ucaggaaaucaaauaugcaaa

SEQ ID NO: 2691497 - RNA, 19 nt, Human
ucaggaaagagaacuucca

SEQ ID NO: 2691498 - RNA, 13 nt, Human
ucaggaaagagaa

SEQ ID NO: 2691499 - RNA, 12 nt, Human
ucagagcugccc

SEQ ID NO: 2691500 - RNA, 23 nt, Human
accauuucuugagguaaaagcau

SEQ ID NO: 2691501 - RNA, 15 nt, Human
accaaucaugaauua

SEQ ID NO: 2691502 - RNA, 13 nt, Human
accaaucaugaau

SEQ ID NO: 2691503 - RNA, 20 nt, Human
ucaauuuuucuuauuucauu

SEQ ID NO: 2691504 - RNA, 23 nt, Human
ucaauuuuucuuauuucauuucu

SEQ ID NO: 2691505 - RNA, 15 nt, Human
ucaauucuugccaaa

SEQ ID NO: 2691506 - RNA, 18 nt, Human
accacuuguguuuugcaa

SEQ ID NO: 2691507 - RNA, 14 nt, Human
accagggacugagg

SEQ ID NO: 2691508 - RNA, 14 nt, Human
acauagaauuaaca

SEQ ID NO: 2691509 - RNA, 18 nt, Human
acauagaauuaacacaug

SEQ ID NO: 2691510 - RNA, 19 nt, Human
acauauauaacaaugcugu

SEQ ID NO: 2691511 - RNA, 13 nt, Human
acaucaacagaua

SEQ ID NO: 2691512 - RNA, 13 nt, Human
uauuucauuucuu

SEQ ID NO: 2691513 - RNA, 21 nt, Human
uaugaaauauuauguuaaaac

SEQ ID NO: 2691514 - RNA, 18 nt, Human
acaguuuucugagaaaga

SEQ ID NO: 2691515 - RNA, 19 nt, Human
acaguuuucugagaaagac

SEQ ID NO: 2691516 - RNA, 20 nt, Human
acaguuuucugagaaagacu

SEQ ID NO: 2691517 - RNA, 21 nt, Human
acaguuuucugagaaagacua

SEQ ID NO: 2691518 - RNA, 16 nt, Human
acaguuuucugagaaa

SEQ ID NO: 2691519 - RNA, 17 nt, Human
acaguuuucugagaaag

SEQ ID NO: 2691520 - RNA, 15 nt, Human
acaguuuucugagaa

SEQ ID NO: 2691521 - RNA, 22 nt, Human
ucaagaugaugaugaucuuuaa

SEQ ID NO: 2691522 - RNA, 21 nt, Human
acaugcugaacaucacagcuu

SEQ ID NO: 2691523 - RNA, 14 nt, Human
acaugcugaacauc

SEQ ID NO: 2691524 - RNA, 21 nt, Human
ucaaaauaugccccauucaac

SEQ ID NO: 2691525 - RNA, 23 nt, Human
ucaaaauaccaugccauuuaaag

SEQ ID NO: 2691526 - RNA, 21 nt, Human
ucaaaauaccaugccauuuaa

SEQ ID NO: 2691527 - RNA, 18 nt, Human
ucaaaagaaagaaaauca

SEQ ID NO: 2691528 - RNA, 14 nt, Human
ucaaagcugaaaug

SEQ ID NO: 2691529 - RNA, 19 nt, Human
acaugauccugcaauucca

SEQ ID NO: 2691530 - RNA, 15 nt, Human
uauauuuauuacugu

SEQ ID NO: 2691531 - RNA, 19 nt, Human
uauauuuauuacuguaaga

SEQ ID NO: 2691532 - RNA, 21 nt, Human
acagcccuucuuuccacagaa

SEQ ID NO: 2691533 - RNA, 20 nt, Human
acagcccuucuuuccacaga

SEQ ID NO: 2691534 - RNA, 13 nt, Human
acacuuaaaaaug

SEQ ID NO: 2691535 - RNA, 15 nt, Human
acacuuaaaaauggu

SEQ ID NO: 2691536 - RNA, 12 nt, Human
uauauuuacaaa

SEQ ID NO: 2691537 - RNA, 14 nt, Human
acacugaagaagca

SEQ ID NO: 2691538 - RNA, 12 nt, Human
acacugaagaag

SEQ ID NO: 2691539 - RNA, 14 nt, Human
acacuccagugaga

SEQ ID NO: 2691540 - RNA, 18 nt, Human
acacaugcugaacaucac

SEQ ID NO: 2691541 - RNA, 19 nt, Human
acacuaagagagaaugaga

SEQ ID NO: 2691542 - RNA, 18 nt, Human
acacuaagagagaaugag

SEQ ID NO: 2691543 - RNA, 17 nt, Human
acacuaagagagaauga

SEQ ID NO: 2691544 - RNA, 12 nt, Human
uaguguuggaga

SEQ ID NO: 2691545 - RNA, 17 nt, Human
uaguguuggagaagaac

SEQ ID NO: 2691546 - RNA, 16 nt, Human
uaguguuggagaagaa

SEQ ID NO: 2691547 - RNA, 14 nt, Human
acacacugaagaag

SEQ ID NO: 2691548 - RNA, 17 nt, Human
acaaugcuguauuuuaa

SEQ ID NO: 2691549 - RNA, 14 nt, Human
acaaugcuguauuu

SEQ ID NO: 2691550 - RNA, 17 nt, Human
acacaacuauauuguuu

SEQ ID NO: 2691551 - RNA, 14 nt, Human
acacaacuauauug

SEQ ID NO: 2691552 - RNA, 20 nt, Human
acacacucaaaucaagaaac

SEQ ID NO: 2691553 - RNA, 13 nt, Human
acacacugaagaa

SEQ ID NO: 2691554 - RNA, 18 nt, Human
uacuaaaaauacaaaaaa

SEQ ID NO: 2691555 - RNA, 14 nt, Human
uacuaaaaauacaa

SEQ ID NO: 2691556 - RNA, 23 nt, Human
uacugggaaagggauuuucagcc

SEQ ID NO: 2691557 - RNA, 17 nt, Human
uacugagagugaacaaa

SEQ ID NO: 2691558 - RNA, 18 nt, Human
aauugaggacacugauau

SEQ ID NO: 2691559 - RNA, 19 nt, Human
aauuucucccagucauuua

SEQ ID NO: 2691560 - RNA, 15 nt, Human
aauuggagcucgugg

SEQ ID NO: 2691561 - RNA, 17 nt, Human
aauuuacagagacagaa

SEQ ID NO: 2691562 - RNA, 18 nt, Human
aauuuacagagacagaaa

SEQ ID NO: 2691563 - RNA, 19 nt, Human
uacuucuuaggguuaugau

SEQ ID NO: 2691564 - RNA, 16 nt, Human
uacuucaugcugucua

SEQ ID NO: 2691565 - RNA, 17 nt, Human
uagauaggccaugggca

SEQ ID NO: 2691566 - RNA, 22 nt, Human
uagauaggucagugcaaauacu

SEQ ID NO: 2691567 - RNA, 20 nt, Human
uagaugcaguucugaagaag

SEQ ID NO: 2691568 - RNA, 21 nt, Human
uagaugcaguucugaagaaga

SEQ ID NO: 2691569 - RNA, 21 nt, Human
aauuuuucuuauuucauuucu

SEQ ID NO: 2691570 - RNA, 22 nt, Human
aauuuuuucucuaggaaauauu

SEQ ID NO: 2691571 - RNA, 22 nt, Human
acaagcucacagaccuuugaac

SEQ ID NO: 2691572 - RNA, 17 nt, Human
acaaauuuacagagaca

SEQ ID NO: 2691573 - RNA, 16 nt, Human
uagcuacuaauuuuaa

SEQ ID NO: 2691574 - RNA, 18 nt, Human
aauaggcguaacuaauuu

SEQ ID NO: 2691575 - RNA, 12 nt, Human
aauaucacuugu

SEQ ID NO: 2691576 - RNA, 15 nt, Human
aauaucacuugucaa

SEQ ID NO: 2691577 - RNA, 15 nt, Human
aauaugcaaagcacu

SEQ ID NO: 2691578 - RNA, 17 nt, Human
aauaugcaaagcacuga

SEQ ID NO: 2691579 - RNA, 24 nt, Human
aauaugcaaagcacugacuucuaa

SEQ ID NO: 2691580 - RNA, 14 nt, Human
aauauuucagauaa

SEQ ID NO: 2691581 - RNA, 15 nt, Human
aauauuucagauaau

SEQ ID NO: 2691582 - RNA, 19 nt, Human
aauaucuuuuuuuuaauaa

SEQ ID NO: 2691583 - RNA, 21 nt, Human
aauaacaaugaaaguugauaa

SEQ ID NO: 2691584 - RNA, 16 nt, Human
aauaauuuuuauauuu

SEQ ID NO: 2691585 - RNA, 19 nt, Human
aauaauuuuuauauuugaa

SEQ ID NO: 2691586 - RNA, 17 nt, Human
aauaauuuuuauauuug

SEQ ID NO: 2691587 - RNA, 20 nt, Human
aauaauuuuuauauuugaaa

SEQ ID NO: 2691588 - RNA, 11 nt, Human
aaugugauaug

SEQ ID NO: 2691589 - RNA, 19 nt, Human
aauggacuuuuguacauag

SEQ ID NO: 2691590 - RNA, 19 nt, Human
uacacuaagagagaaugag

SEQ ID NO: 2691591 - RNA, 13 nt, Human
uacaaaaacacag

SEQ ID NO: 2691592 - RNA, 14 nt, Human
uacaaaaacacagc

SEQ ID NO: 2691593 - RNA, 16 nt, Human
uacaaaaacacagcaa

SEQ ID NO: 2691594 - RNA, 15 nt, Human
uacaaaaacacagca

SEQ ID NO: 2691595 - RNA, 14 nt, Human
aaucuuauaauuua

SEQ ID NO: 2691596 - RNA, 16 nt, Human
aaucuuauaauuuaaa

SEQ ID NO: 2691597 - RNA, 13 nt, Human
aauccuugaagau

SEQ ID NO: 2691598 - RNA, 15 nt, Human
aaucaucaagucuuu

SEQ ID NO: 2691599 - RNA, 17 nt, Human
aaucaugaauuaguuuu

SEQ ID NO: 2691600 - RNA, 19 nt, Human
aaucaugaauuaguuuuau

SEQ ID NO: 2691601 - RNA, 23 nt, Human
aaucaugaauuaguuuuauaugc

SEQ ID NO: 2691602 - RNA, 18 nt, Human
uaaguuuuuuuuuaaaaa

SEQ ID NO: 2691603 - RNA, 16 nt, Human
uaaugauaacuggaaa

SEQ ID NO: 2691604 - RNA, 21 nt, Human
aaugagagacacacugaagaa

SEQ ID NO: 2691605 - RNA, 18 nt, Human
aagaaugauuaugaauua

SEQ ID NO: 2691606 - RNA, 16 nt, Human
aagaaugauuaugaau

SEQ ID NO: 2691607 - RNA, 16 nt, Human
aagaagugaaaaucua

SEQ ID NO: 2691608 - RNA, 22 nt, Human
aagaagugaaaaucuacacucc

SEQ ID NO: 2691609 - RNA, 18 nt, Human
gugcuaguaauuggaaag

SEQ ID NO: 2691610 - RNA, 21 nt, Human
gugggacagucaccucaugga

SEQ ID NO: 2691611 - RNA, 19 nt, Human
aagagcuguucacagccag

SEQ ID NO: 2691612 - RNA, 21 nt, Human
gugugaccacugcagaagaca

SEQ ID NO: 2691613 - RNA, 13 nt, Human
guugacaugggac

SEQ ID NO: 2691614 - RNA, 18 nt, Human
guugacaugggacauuug

SEQ ID NO: 2691615 - RNA, 14 nt, Human
guugacaugggaca

SEQ ID NO: 2691616 - RNA, 23 nt, Human
aagcuuguauuccuuuuucucuc

SEQ ID NO: 2691617 - RNA, 23 nt, Human
guuuucugagaaagacuauucaa

SEQ ID NO: 2691618 - RNA, 13 nt, Human
aagguacuucaaa

SEQ ID NO: 2691619 - RNA, 21 nt, Human
guuucaaacauauauaacaau

SEQ ID NO: 2691620 - RNA, 10 nt, Human
guuuaaaauc

SEQ ID NO: 2691621 - RNA, 16 nt, Human
guuuaaaaucauuucu

SEQ ID NO: 2691622 - RNA, 18 nt, Human
guuguaccgcaaugugac

SEQ ID NO: 2691623 - RNA, 20 nt, Human
aacccauauuuguacaccaa

SEQ ID NO: 2691624 - RNA, 13 nt, Human
aacccaaauguuc

SEQ ID NO: 2691625 - RNA, 18 nt, Human
aacccaaauguucaucaa

SEQ ID NO: 2691626 - RNA, 20 nt, Human
aaccuagggugauauuaacc

SEQ ID NO: 2691627 - RNA, 12 nt, Human
aaccacagcagu

SEQ ID NO: 2691628 - RNA, 22 nt, Human
gucuuaauuaaaagaauauuuu

SEQ ID NO: 2691629 - RNA, 19 nt, Human
gucuuaauuaaaagaauau

SEQ ID NO: 2691630 - RNA, 21 nt, Human
gucuuaauuaaaagaauauuu

SEQ ID NO: 2691631 - RNA, 15 nt, Human
gugaacacaucagcu

SEQ ID NO: 2691632 - RNA, 18 nt, Human
aacucguuaauuuguagu

SEQ ID NO: 2691633 - RNA, 13 nt, Human
aacucccuuucaa

SEQ ID NO: 2691634 - RNA, 14 nt, Human
aacucccuuucaac

SEQ ID NO: 2691635 - RNA, 21 nt, Human
aacuccagaaagugacaagcu

SEQ ID NO: 2691636 - RNA, 14 nt, Human
aacuccagaaagug

SEQ ID NO: 2691637 - RNA, 24 nt, Human
guccaagcauaccaacacgagcag

SEQ ID NO: 2691638 - RNA, 21 nt, Human
guccaagcauuuagauguaua

SEQ ID NO: 2691639 - RNA, 15 nt, Human
aacaaggaugaauua

SEQ ID NO: 2691640 - RNA, 21 nt, Human
aacaagccuccuuuuaaagua

SEQ ID NO: 2691641 - RNA, 22 nt, Human
aacaguagugauaguuguaccg

SEQ ID NO: 2691642 - RNA, 18 nt, Human
aacauuugguaaggggaa

SEQ ID NO: 2691643 - RNA, 19 nt, Human
aaauggcuuccuggcaaua

SEQ ID NO: 2691644 - RNA, 14 nt, Human
aaaugcauuucuaa

SEQ ID NO: 2691645 - RNA, 21 nt, Human
aaaugaaagcagggacuugaa

SEQ ID NO: 2691646 - RNA, 22 nt, Human
aaaugaaagcagggacuugaac

SEQ ID NO: 2691647 - RNA, 14 nt, Human
aaauccuugaagau

SEQ ID NO: 2691648 - RNA, 19 nt, Human
aaaucuacacuccagugag

SEQ ID NO: 2691649 - RNA, 14 nt, Human
guaugauucccagc

SEQ ID NO: 2691650 - RNA, 22 nt, Human
aaauguaagggaaacugccagc

SEQ ID NO: 2691651 - RNA, 17 nt, Human
aaauuucagcagcugca

SEQ ID NO: 2691652 - RNA, 18 nt, Human
aaauuucagcagcugcag

SEQ ID NO: 2691653 - RNA, 15 nt, Human
aaacugcacugucaa

SEQ ID NO: 2691654 - RNA, 21 nt, Human
aaaaucauuucugcaucagcu

SEQ ID NO: 2691655 - RNA, 15 nt, Human
aaagcauuguaaaug

SEQ ID NO: 2691656 - RNA, 17 nt, Human
aaagcauuguaaaugug

SEQ ID NO: 2691657 - RNA, 11 nt, Human
aaaaucauuuc

SEQ ID NO: 2691658 - RNA, 12 nt, Human
aaaaucauuucu

SEQ ID NO: 2691659 - RNA, 10 nt, Human
aaaaucauuu

SEQ ID NO: 2691660 - RNA, 13 nt, Human
aaaagacuccaaa

SEQ ID NO: 2691661 - RNA, 11 nt, Human
aaaagaaugau

SEQ ID NO: 2691662 - RNA, 13 nt, Human
aaaagaauauuuu

SEQ ID NO: 2691663 - RNA, 20 nt, Human
aaaagacaaggaaaaaauaa

SEQ ID NO: 2691664 - RNA, 12 nt, Human
aaaagaauauuu

SEQ ID NO: 2691665 - RNA, 17 nt, Human
aaaagaaagaaaaucag

SEQ ID NO: 2691666 - RNA, 23 nt, Human
aaauguugacaugggacauuugc

SEQ ID NO: 2691667 - RNA, 22 nt, Human
aaauguugacaugggacauuug

SEQ ID NO: 2691668 - RNA, 17 nt, Human
aaauguucaucaaugaa

SEQ ID NO: 2691669 - RNA, 13 nt, Human
aaauguucaucaa

SEQ ID NO: 2691670 - RNA, 18 nt, Human
aaaucucaauauuucaga

SEQ ID NO: 2691671 - RNA, 21 nt, Human
aaauauuuauuuuaauaaugu

SEQ ID NO: 2691672 - RNA, 22 nt, Human
aagacagagccccacccucaga

SEQ ID NO: 2691673 - RNA, 15 nt, Human
aagaacugaaaucau

SEQ ID NO: 2691674 - RNA, 11 nt, Human
aagaacugaaa

SEQ ID NO: 2691675 - RNA, 13 nt, Human
aagaacugaaauc

SEQ ID NO: 2691676 - RNA, 12 nt, Human
aagaacugaaau

SEQ ID NO: 2691677 - RNA, 20 nt, Human
aacgcaggcccccaggugcc

SEQ ID NO: 2691678 - RNA, 15 nt, Human
aagaagacugcauua

SEQ ID NO: 2691679 - RNA, 20 nt, Human
aagaagacugcauuauauuu

SEQ ID NO: 2691680 - RNA, 21 nt, Human
aagacaaggaaaaaauaacaa

SEQ ID NO: 2691681 - RNA, 16 nt, Human
aaucucaauauuucag

SEQ ID NO: 2691682 - RNA, 20 nt, Human
aaugaauacuuuauaaagga

SEQ ID NO: 2691683 - RNA, 19 nt, Human
acugauaugggucuugaua

SEQ ID NO: 2691684 - RNA, 13 nt, Human
acugacacaugcu

SEQ ID NO: 2691685 - RNA, 19 nt, Human
acucguuaauuuguagugu

SEQ ID NO: 2691686 - RNA, 14 nt, Human
acucguuaauuugu

SEQ ID NO: 2691687 - RNA, 14 nt, Human
acucccuuucaaca

SEQ ID NO: 2691688 - RNA, 21 nt, Human
acuucagacauagaauuaaca

SEQ ID NO: 2691689 - RNA, 13 nt, Human
acuuggucuguga

SEQ ID NO: 2691690 - RNA, 22 nt, Human
acuuaaaaaugguuuaaauggu

SEQ ID NO: 2691691 - RNA, 17 nt, Human
acuucaaauccuugaag

SEQ ID NO: 2691692 - RNA, 18 nt, Human
acuucaaauccuugaaga

SEQ ID NO: 2691693 - RNA, 17 nt, Human
acuguaaaauaauaacu

SEQ ID NO: 2691694 - RNA, 21 nt, Human
acccugucucuacuaaaaaua

SEQ ID NO: 2691695 - RNA, 20 nt, Human
acccucagaugcacaugagc

SEQ ID NO: 2691696 - RNA, 20 nt, Human
accucugccucagaaaacaa

SEQ ID NO: 2691697 - RNA, 14 nt, Human
acgcacacugucug

SEQ ID NO: 2691698 - RNA, 21 nt, Human
acauuuguauaaaauaauuuu

SEQ ID NO: 2691699 - RNA, 19 nt, Human
acauuuguauaaaauaauu

SEQ ID NO: 2691700 - RNA, 16 nt, Human
acauuuguauaaaaua

SEQ ID NO: 2691701 - RNA, 16 nt, Human
acauuugcucauggaa

SEQ ID NO: 2691702 - RNA, 15 nt, Human
acauuugcucaugga

SEQ ID NO: 2691703 - RNA, 19 nt, Human
acagugauuaccagggacu

SEQ ID NO: 2691704 - RNA, 22 nt, Human
acaggaugguucccuugaugaa

SEQ ID NO: 2691705 - RNA, 24 nt, Human
acaggaugguucccuugaugaaga

SEQ ID NO: 2691706 - RNA, 15 nt, Human
acaccaauauucaua

SEQ ID NO: 2691707 - RNA, 22 nt, Human
aauuucauaccuaucaucuuaa

SEQ ID NO: 2691708 - RNA, 11 nt, Human
aauuguaauag

SEQ ID NO: 2691709 - RNA, 14 nt, Human
agccagcaguucag

SEQ ID NO: 2691710 - RNA, 17 nt, Human
agcacugacuucuaagu

SEQ ID NO: 2691711 - RNA, 19 nt, Human
agcacugacuucuaaguaa

SEQ ID NO: 2691712 - RNA, 20 nt, Human
agauagauaggucagugcaa

SEQ ID NO: 2691713 - RNA, 23 nt, Human
agcaaaauuuuuucucuaggaaa

SEQ ID NO: 2691714 - RNA, 21 nt, Human
agaagacugcauuauauuuau

SEQ ID NO: 2691715 - RNA, 20 nt, Human
agaagagcuguucacagcca

SEQ ID NO: 2691716 - RNA, 13 nt, Human
agaagauagcagg

SEQ ID NO: 2691717 - RNA, 13 nt, Human
agaagagcuguuc

SEQ ID NO: 2691718 - RNA, 22 nt, Human
agaacagugauuaccagggacu

SEQ ID NO: 2691719 - RNA, 19 nt, Human
agacaaggaaaaaauaaca

SEQ ID NO: 2691720 - RNA, 18 nt, Human
aggaaaaaauaacaauga

SEQ ID NO: 2691721 - RNA, 18 nt, Human
agcuguaugauucccagc

SEQ ID NO: 2691722 - RNA, 17 nt, Human
agcuguaugauucccag

SEQ ID NO: 2691723 - RNA, 14 nt, Human
agcugcugaaacaa

SEQ ID NO: 2691724 - RNA, 15 nt, Human
agcugcugaaacaac

SEQ ID NO: 2691725 - RNA, 16 nt, Human
agcugcugaaacaaca

SEQ ID NO: 2691726 - RNA, 20 nt, Human
agcugcugaaacaacaaaua

SEQ ID NO: 2691727 - RNA, 13 nt, Human
agcgacagugaga

SEQ ID NO: 2691728 - RNA, 15 nt, Human
agcgacagugagacu

SEQ ID NO: 2691729 - RNA, 12 nt, Human
agcuacaaaugc

SEQ ID NO: 2691730 - RNA, 13 nt, Human
agcuacaaaugca

SEQ ID NO: 2691731 - RNA, 20 nt, Human
aggcagagguugcagugagc

SEQ ID NO: 2691732 - RNA, 23 nt, Human
aggccaugggcacuguggguaga

SEQ ID NO: 2691733 - RNA, 17 nt, Human
agggacaggauaagagg

SEQ ID NO: 2691734 - RNA, 20 nt, Human
agggauuagggagagaagau

SEQ ID NO: 2691735 - RNA, 20 nt, Human
augggacauuugcucaugga

SEQ ID NO: 2691736 - RNA, 15 nt, Human
augggacagggagga

SEQ ID NO: 2691737 - RNA, 14 nt, Human
augggaaagcauug

SEQ ID NO: 2691738 - RNA, 20 nt, Human
augggaaagcauuguaaaug

SEQ ID NO: 2691739 - RNA, 23 nt, Human
auggcuuccuggcaauagucaaa

SEQ ID NO: 2691740 - RNA, 14 nt, Human
aucaaaagaaagaa

SEQ ID NO: 2691741 - RNA, 12 nt, Human
auccuugaagau

SEQ ID NO: 2691742 - RNA, 21 nt, Human
aucaugaauuaguuuuauaug

SEQ ID NO: 2691743 - RNA, 13 nt, Human
agucauuuaauaa

SEQ ID NO: 2691744 - RNA, 13 nt, Human
agugauuaccagg

SEQ ID NO: 2691745 - RNA, 19 nt, Human
agugaugucacuagggcag

SEQ ID NO: 2691746 - RNA, 13 nt, Human
aguacucauacau

SEQ ID NO: 2691747 - RNA, 16 nt, Human
auaaaagacagugaaa

SEQ ID NO: 2691748 - RNA, 15 nt, Human
auaaaagacagugaa

SEQ ID NO: 2691749 - RNA, 14 nt, Human
aguugaaaagacuc

SEQ ID NO: 2691750 - RNA, 21 nt, Human
cacaguuuucugagaaagacu

SEQ ID NO: 2691751 - RNA, 22 nt, Human
cacaguuuucugagaaagacua

SEQ ID NO: 2691752 - RNA, 16 nt, Human
cacaugaaguccaagc

SEQ ID NO: 2691753 - RNA, 20 nt, Human
cacaugaaguccaagcauuu

SEQ ID NO: 2691754 - RNA, 17 nt, Human
cacaugaaguccaagca

SEQ ID NO: 2691755 - RNA, 13 nt, Human
cacaagaaaugaa

SEQ ID NO: 2691756 - RNA, 15 nt, Human
cacaagaaaugaaag

SEQ ID NO: 2691757 - RNA, 23 nt, Human
cacaagaaaugaaagcagggacu

SEQ ID NO: 2691758 - RNA, 23 nt, Human
cacaagacccaaaaggcagaagc

SEQ ID NO: 2691759 - RNA, 16 nt, Human
caaauuuacagagaca

SEQ ID NO: 2691760 - RNA, 17 nt, Human
caaauuuacagagacag

SEQ ID NO: 2691761 - RNA, 23 nt, Human
caaauuuacagagacagaaagca

SEQ ID NO: 2691762 - RNA, 19 nt, Human
caagcauuuagauguauag

SEQ ID NO: 2691763 - RNA, 16 nt, Human
caagcauuuagaugua

SEQ ID NO: 2691764 - RNA, 21 nt, Human
caagcauaccaacacgagcag

SEQ ID NO: 2691765 - RNA, 16 nt, Human
caagcauaccaacacg

SEQ ID NO: 2691766 - RNA, 13 nt, Human
caagaaaugaaag

SEQ ID NO: 2691767 - RNA, 19 nt, Human
caagacugcacaucaaaau

SEQ ID NO: 2691768 - RNA, 14 nt, Human
caaagaaauguaag

SEQ ID NO: 2691769 - RNA, 19 nt, Human
auuuuaauaauguuucaaa

SEQ ID NO: 2691770 - RNA, 18 nt, Human
auuuuaauaauguuucaa

SEQ ID NO: 2691771 - RNA, 13 nt, Human
uuuuccugaaaac

SEQ ID NO: 2691772 - RNA, 20 nt, Human
uuuuauaugcuucuguuuua

SEQ ID NO: 2691773 - RNA, 15 nt, Human
uuuuauaugcuucug

SEQ ID NO: 2691774 - RNA, 20 nt, Human
uuuuauaucaauuuaaaaaa

SEQ ID NO: 2691775 - RNA, 10 nt, Human
uuuuauauuu

SEQ ID NO: 2691776 - RNA, 21 nt, Human
uuugcauagauucccugagca

SEQ ID NO: 2691777 - RNA, 21 nt, Human
uuuguauaaaauaauuuuuau

SEQ ID NO: 2691778 - RNA, 20 nt, Human
uuuagaaacacaacuauauu

SEQ ID NO: 2691779 - RNA, 12 nt, Human
uuuagaaacaca

SEQ ID NO: 2691780 - RNA, 22 nt, Human
uuuccucaaaacuucagacaua

SEQ ID NO: 2691781 - RNA, 22 nt, Human
uuucugagaaagacuauucaaa

SEQ ID NO: 2691782 - RNA, 15 nt, Human
uuucagauaaucaca

SEQ ID NO: 2691783 - RNA, 15 nt, Human
uuucagcagcugcag

SEQ ID NO: 2691784 - RNA, 21 nt, Human
uuucagauaaucacaauacau

SEQ ID NO: 2691785 - RNA, 23 nt, Human
uucucuccucuccccaugauguu

SEQ ID NO: 2691786 - RNA, 18 nt, Human
uucccuugaugaagaagu

SEQ ID NO: 2691787 - RNA, 12 nt, Human
uuccuagugaaa

SEQ ID NO: 2691788 - RNA, 22 nt, Human
uucggccuccauccugaggcuc

SEQ ID NO: 2691789 - RNA, 18 nt, Human
uucggccuccauccugag

SEQ ID NO: 2691790 - RNA, 19 nt, Human
uucggccuccauccugagg

SEQ ID NO: 2691791 - RNA, 19 nt, Human
uuccacuuauaggaauuga

SEQ ID NO: 2691792 - RNA, 23 nt, Human
uucagagcugcccucuccugggc

SEQ ID NO: 2691793 - RNA, 22 nt, Human
uucagagcugcccucuccuggg

SEQ ID NO: 2691794 - RNA, 21 nt, Human
uucagagcugcccucuccugg

SEQ ID NO: 2691795 - RNA, 12 nt, Human
uugaugaagaag

SEQ ID NO: 2691796 - RNA, 18 nt, Human
uugcauagauucccugag

SEQ ID NO: 2691797 - RNA, 14 nt, Human
uugaggacacugau

SEQ ID NO: 2691798 - RNA, 15 nt, Human
uugaggacacugaua

SEQ ID NO: 2691799 - RNA, 23 nt, Human
uugaaacugagaugugaacacau

SEQ ID NO: 2691800 - RNA, 16 nt, Human
uugaaaagacuccaaa

SEQ ID NO: 2691801 - RNA, 18 nt, Human
uugaaaagacuccaaaga

SEQ ID NO: 2691802 - RNA, 22 nt, Human
uugaaaagacuccaaagaaaug

SEQ ID NO: 2691803 - RNA, 23 nt, Human
uugaaaagacuccaaagaaaugu

SEQ ID NO: 2691804 - RNA, 15 nt, Human
uucuuauuucauuuc

SEQ ID NO: 2691805 - RNA, 15 nt, Human
uucugagaaagacua

SEQ ID NO: 2691806 - RNA, 14 nt, Human
uucugagcauuuaa

SEQ ID NO: 2691807 - RNA, 16 nt, Human
uuguaaaggaauuuaa

SEQ ID NO: 2691808 - RNA, 11 nt, Human
uuguaaaugug

SEQ ID NO: 2691809 - RNA, 14 nt, Human
uuguaaaugugcuu

SEQ ID NO: 2691810 - RNA, 18 nt, Human
uuguaaaugugcuuuuaa

SEQ ID NO: 2691811 - RNA, 19 nt, Human
uuguaucacaaaucuuaac

SEQ ID NO: 2691812 - RNA, 14 nt, Human
uuguauuacaaauc

SEQ ID NO: 2691813 - RNA, 12 nt, Human
uugggaggcuga

SEQ ID NO: 2691814 - RNA, 22 nt, Human
ugugaccacugcagaagacagu

SEQ ID NO: 2691815 - RNA, 21 nt, Human
ugucucaguccaugaagaugu

SEQ ID NO: 2691816 - RNA, 22 nt, Human
ugucucaguccaugaagaugua

SEQ ID NO: 2691817 - RNA, 14 nt, Human
ugugcguccugucg

SEQ ID NO: 2691818 - RNA, 15 nt, Human
uguaccgcaauguga

SEQ ID NO: 2691819 - RNA, 17 nt, Human
uguagauaauacaguuc

SEQ ID NO: 2691820 - RNA, 15 nt, Human
uguaaucacagcuac

SEQ ID NO: 2691821 - RNA, 14 nt, Human
uguaaucacagcua

SEQ ID NO: 2691822 - RNA, 16 nt, Human
uguaugauucccagcc

SEQ ID NO: 2691823 - RNA, 21 nt, Human
uguuggagaagaacugaaauc

SEQ ID NO: 2691824 - RNA, 14 nt, Human
uguuuaaaaucauu

SEQ ID NO: 2691825 - RNA, 13 nt, Human
uguuuaaaaucau

SEQ ID NO: 2691826 - RNA, 12 nt, Human
uguuauaaucuu

SEQ ID NO: 2691827 - RNA, 14 nt, Human
uguuagugcaaauu

SEQ ID NO: 2691828 - RNA, 16 nt, Human
uguucacagccagacu

SEQ ID NO: 2691829 - RNA, 19 nt, Human
ugugugcguccugucggag

SEQ ID NO: 2691830 - RNA, 21 nt, Human
uuaccacuuguguuuugcaag

SEQ ID NO: 2691831 - RNA, 20 nt, Human
uuacagagacagaaagcaga

SEQ ID NO: 2691832 - RNA, 15 nt, Human
uuacauuuguauaaa

SEQ ID NO: 2691833 - RNA, 14 nt, Human
uuacauuuguauaa

SEQ ID NO: 2691834 - RNA, 22 nt, Human
uuaaugucaauucuugccaaau

SEQ ID NO: 2691835 - RNA, 16 nt, Human
uuaauaauguuucaaa

SEQ ID NO: 2691836 - RNA, 18 nt, Human
uuaauaauguuucaaaca

SEQ ID NO: 2691837 - RNA, 20 nt, Human
uuaaagcuuauuaaaacuca

SEQ ID NO: 2691838 - RNA, 13 nt, Human
uuaaaagaaugau

SEQ ID NO: 2691839 - RNA, 19 nt, Human
uuaaaagaaugauuaugaa

SEQ ID NO: 2691840 - RNA, 17 nt, Human
uggccuucggccuccau

SEQ ID NO: 2691841 - RNA, 18 nt, Human
uggccuucggccuccauc

SEQ ID NO: 2691842 - RNA, 20 nt, Human
ugggacauuugcucauggaa

SEQ ID NO: 2691843 - RNA, 19 nt, Human
ugggacauuugcucaugga

SEQ ID NO: 2691844 - RNA, 21 nt, Human
ugggacagucaccucauggaa

SEQ ID NO: 2691845 - RNA, 20 nt, Human
ugggacagucaccucaugga

SEQ ID NO: 2691846 - RNA, 18 nt, Human
ugggacagucaccucaug

SEQ ID NO: 2691847 - RNA, 16 nt, Human
uggguagacacacaug

SEQ ID NO: 2691848 - RNA, 17 nt, Human
uggguagacacacauga

SEQ ID NO: 2691849 - RNA, 14 nt, Human
ugcuucuguuuuau

SEQ ID NO: 2691850 - RNA, 14 nt, Human
uggaacucucgagc

SEQ ID NO: 2691851 - RNA, 15 nt, Human
ugcauuauauuuauu

SEQ ID NO: 2691852 - RNA, 20 nt, Human
ugcauuauauuuauuacugu

SEQ ID NO: 2691853 - RNA, 14 nt, Human
ugcauuauauuuau

SEQ ID NO: 2691854 - RNA, 22 nt, Human
ugcaucagcugcugaaacaaca

SEQ ID NO: 2691855 - RNA, 20 nt, Human
ugccaucccucccuccaccu

SEQ ID NO: 2691856 - RNA, 19 nt, Human
ugccaucccucccuccacc

SEQ ID NO: 2691857 - RNA, 15 nt, Human
ugccaucccucccuc

SEQ ID NO: 2691858 - RNA, 22 nt, Human
ugccaucccucccuccaccucc

SEQ ID NO: 2691859 - RNA, 21 nt, Human
ugccaucccucccuccaccuc

SEQ ID NO: 2691860 - RNA, 15 nt, Human
ugcacaucaaaauau

SEQ ID NO: 2691861 - RNA, 17 nt, Human
ugcagauaaacaguagu

SEQ ID NO: 2691862 - RNA, 16 nt, Human
ugcagauaaacaguag

SEQ ID NO: 2691863 - RNA, 20 nt, Human
ugcuagaacucccuuucaac

SEQ ID NO: 2691864 - RNA, 21 nt, Human
ugcuagaacucccuuucaaca

SEQ ID NO: 2691865 - RNA, 19 nt, Human
ugcuagaacucccuuucaa

SEQ ID NO: 2691866 - RNA, 18 nt, Human
ugcuagaacucccuuuca

SEQ ID NO: 2691867 - RNA, 11 nt, Human
ugcucauggaa

SEQ ID NO: 2691868 - RNA, 17 nt, Human
ugccuucucaacuccaa

SEQ ID NO: 2691869 - RNA, 22 nt, Human
ugccuucucaacuccaaacuga

SEQ ID NO: 2691870 - RNA, 23 nt, Human
ugccuccccuccucugcuugcca

SEQ ID NO: 2691871 - RNA, 22 nt, Human
ugccuccccuccucugcuugcc

SEQ ID NO: 2691872 - RNA, 19 nt, Human
ugccuccccuccucugcuu

SEQ ID NO: 2691873 - RNA, 18 nt, Human
ugccuccccuccucugcu

SEQ ID NO: 2691874 - RNA, 24 nt, Human
ucuguaauaaacucauuucuagca

SEQ ID NO: 2691875 - RNA, 23 nt, Human
ucuguaauaaacucauuucuagc

SEQ ID NO: 2691876 - RNA, 19 nt, Human
ucuguaauaaacucauuuc

SEQ ID NO: 2691877 - RNA, 23 nt, Human
ucuggccuucggccuccauccug

SEQ ID NO: 2691878 - RNA, 22 nt, Human
ucuguuuuauaauuuugugaag

SEQ ID NO: 2691879 - RNA, 20 nt, Human
ucuguuuuauaauuuuguga

SEQ ID NO: 2691880 - RNA, 19 nt, Human
ugaaaacuuuaugcuaagu

SEQ ID NO: 2691881 - RNA, 15 nt, Human
ugaaaagacuccaaa

SEQ ID NO: 2691882 - RNA, 16 nt, Human
ugaaaagacuccaaag

SEQ ID NO: 2691883 - RNA, 17 nt, Human
ugaaaagacuccaaaga

SEQ ID NO: 2691884 - RNA, 19 nt, Human
ugaaaagacuccaaagaaa

SEQ ID NO: 2691885 - RNA, 22 nt, Human
ugaaaagacuccaaagaaaugu

SEQ ID NO: 2691886 - RNA, 18 nt, Human
ugaaacccugucucuacu

SEQ ID NO: 2691887 - RNA, 18 nt, Human
ugaaagcagggacuugaa

SEQ ID NO: 2691888 - RNA, 19 nt, Human
ugaaagcagggacuugaac

SEQ ID NO: 2691889 - RNA, 23 nt, Human
ugaaagcagggacuugaacccau

SEQ ID NO: 2691890 - RNA, 22 nt, Human
ugaaguccaagcauuuagaugu

SEQ ID NO: 2691891 - RNA, 21 nt, Human
ugaaguccaagcauuuagaug

SEQ ID NO: 2691892 - RNA, 22 nt, Human
ugaacuuguaaaggaauuuaaa

SEQ ID NO: 2691893 - RNA, 14 nt, Human
ugaacacaucagcu

SEQ ID NO: 2691894 - RNA, 17 nt, Human
ucuacacuccagugaga

SEQ ID NO: 2691895 - RNA, 21 nt, Human
ucuacacuaagagagaaugag

SEQ ID NO: 2691896 - RNA, 15 nt, Human
uccuugcaucaauuu

SEQ ID NO: 2691897 - RNA, 18 nt, Human
ucuccugggcagcugccu

SEQ ID NO: 2691898 - RNA, 17 nt, Human
ucuccugggcagcugcc

SEQ ID NO: 2691899 - RNA, 16 nt, Human
ucuccugggcagcugc

SEQ ID NO: 2691900 - RNA, 15 nt, Human
ucuccugggcagcug

SEQ ID NO: 2691901 - RNA, 13 nt, Human
ucuccugggcagc

SEQ ID NO: 2691902 - RNA, 14 nt, Human
ucuccugggcagcu

SEQ ID NO: 2691903 - RNA, 21 nt, Human
ucucagugucaaugcagcccc

SEQ ID NO: 2691904 - RNA, 20 nt, Human
ucuccugggcagcugccucc

SEQ ID NO: 2691905 - RNA, 19 nt, Human
ucuccugggcagcugccuc

SEQ ID NO: 2691906 - RNA, 21 nt, Human
ucuccugggcagcugccuccc

SEQ ID NO: 2691907 - RNA, 19 nt, Human
ucucuaggaaauauuuauu

SEQ ID NO: 2691908 - RNA, 13 nt, Human
ucucuaggaaaua

SEQ ID NO: 2691909 - RNA, 18 nt, Human
ucucuucacagucacauu

SEQ ID NO: 2691910 - RNA, 12 nt, Human
uccacuuggucu

SEQ ID NO: 2691911 - RNA, 13 nt, Human
uccacuuggucug

SEQ ID NO: 2691912 - RNA, 17 nt, Human
uccagauccuggaaauc

SEQ ID NO: 2691913 - RNA, 16 nt, Human
uccagauccuggaaau

SEQ ID NO: 2691914 - RNA, 14 nt, Human
uccagauccuggaa

SEQ ID NO: 2691915 - RNA, 20 nt, Human
uccaagcauuuagauguaua

SEQ ID NO: 2691916 - RNA, 14 nt, Human
uccaccuacaugag

SEQ ID NO: 2691917 - RNA, 12 nt, Human
uccaccucccug

SEQ ID NO: 2691918 - RNA, 23 nt, Human
uccaccucccugcaauaaaaugg

SEQ ID NO: 2691919 - RNA, 23 nt, Human
uccaaacugacucuuaagaagac

SEQ ID NO: 2691920 - RNA, 12 nt, Human
uccaaagaaaug

SEQ ID NO: 2691921 - RNA, 16 nt, Human
ucauuucugcaucagc

SEQ ID NO: 2691922 - RNA, 22 nt, Human
ucauuucugcaucagcugcuga

SEQ ID NO: 2691923 - RNA, 14 nt, Human
ucauuucuuugagu

SEQ ID NO: 2691924 - RNA, 23 nt, Human
uccaagcauaccaacacgagcag

SEQ ID NO: 2691925 - RNA, 17 nt, Human
uccaagcauuuagaugu

SEQ ID NO: 2691926 - RNA, 16 nt, Human
ucccaaauuucauacc

SEQ ID NO: 2691927 - RNA, 17 nt, Human
ucacuugucaauaaaau

SEQ ID NO: 2691928 - RNA, 22 nt, Human
ucagacauagaauuaacacaug

SEQ ID NO: 2691929 - RNA, 19 nt, Human
ucagacauagaauuaacac

SEQ ID NO: 2691930 - RNA, 14 nt, Human
ucacaggaaguaga

SEQ ID NO: 2691931 - RNA, 19 nt, Human
ucacaggaaguagaggagg

SEQ ID NO: 2691932 - RNA, 23 nt, Human
ucacaggacagcccuucuuucca

SEQ ID NO: 2691933 - RNA, 19 nt, Human
ucaacuccaaacugacucu

SEQ ID NO: 2691934 - RNA, 13 nt, Human
ucaaaacugcacu

SEQ ID NO: 2691935 - RNA, 22 nt, Human
uauuucuaugaaauauuauguu

SEQ ID NO: 2691936 - RNA, 21 nt, Human
uauuucuaugaaauauuaugu

SEQ ID NO: 2691937 - RNA, 18 nt, Human
uaaauauaugcuaagucu

SEQ ID NO: 2691938 - RNA, 17 nt, Human
uaaauaaaaauaauccu

SEQ ID NO: 2691939 - RNA, 14 nt, Human
uaaaggaauuuaaa

SEQ ID NO: 2691940 - RNA, 17 nt, Human
uaaaauggguuuuacug

SEQ ID NO: 2691941 - RNA, 18 nt, Human
uaaaauccauacauuugu

SEQ ID NO: 2691942 - RNA, 19 nt, Human
uaaaauccauacauuugug

SEQ ID NO: 2691943 - RNA, 14 nt, Human
uaaaagaugaaaau

SEQ ID NO: 2691944 - RNA, 16 nt, Human
guuuucauuaucucaa

SEQ ID NO: 2691945 - RNA, 18 nt, Human
guuuucaggcuagaugua

SEQ ID NO: 2691946 - RNA, 16 nt, Human
uaaaaaagaaacauuu

SEQ ID NO: 2691947 - RNA, 13 nt, Human
guuuagaaagcuu

SEQ ID NO: 2691948 - RNA, 17 nt, Human
guuuagaaagcuugccc

SEQ ID NO: 2691949 - RNA, 20 nt, Human
guuuaggauguugaaaaagu

SEQ ID NO: 2691950 - RNA, 20 nt, Human
uaagccagacaucaacagau

SEQ ID NO: 2691951 - RNA, 21 nt, Human
uaagccagacaucaacagaua

SEQ ID NO: 2691952 - RNA, 13 nt, Human
uaagccagacauc

SEQ ID NO: 2691953 - RNA, 18 nt, Human
uaagcauuccaacuaucu

SEQ ID NO: 2691954 - RNA, 16 nt, Human
uaagcauuccaacuau

SEQ ID NO: 2691955 - RNA, 20 nt, Human
uaagcauuccaacuaucuca

SEQ ID NO: 2691956 - RNA, 23 nt, Human
uaagagggauuagggagagaaga

SEQ ID NO: 2691957 - RNA, 23 nt, Human
uaaauugacacuuaaaaaugguu

SEQ ID NO: 2691958 - RNA, 14 nt, Human
uaauguuucaaaca

SEQ ID NO: 2691959 - RNA, 15 nt, Human
uaauguuucaaacau

SEQ ID NO: 2691960 - RNA, 20 nt, Human
uaauuaaaagaauauuuuaa

SEQ ID NO: 2691961 - RNA, 22 nt, Human
uaauuggaaaggcagcucuaaa

SEQ ID NO: 2691962 - RNA, 23 nt, Human
uaauuuguaguguuggagaagaa

SEQ ID NO: 2691963 - RNA, 20 nt, Human
uaauuuguaguguuggagaa

SEQ ID NO: 2691964 - RNA, 15 nt, Human
uaauaauguuucaaa

SEQ ID NO: 2691965 - RNA, 19 nt, Human
uaaugccacuaaauugaca

SEQ ID NO: 2691966 - RNA, 14 nt, Human
uacaggauuugaaa

SEQ ID NO: 2691967 - RNA, 13 nt, Human
uacagaauuuuau

SEQ ID NO: 2691968 - RNA, 16 nt, Human
uaccaacacgagcagg

SEQ ID NO: 2691969 - RNA, 16 nt, Human
uacauuuguauaaaau

SEQ ID NO: 2691970 - RNA, 11 nt, Human
uacauuugugu

SEQ ID NO: 2691971 - RNA, 17 nt, Human
uacauuuguauaaaaua

SEQ ID NO: 2691972 - RNA, 21 nt, Human
uacaugagguacugagaguga

SEQ ID NO: 2691973 - RNA, 22 nt, Human
uacaugagguacugagagugaa

SEQ ID NO: 2691974 - RNA, 23 nt, Human
uaccacaggaaccacaagacugc

SEQ ID NO: 2691975 - RNA, 23 nt, Human
uacugauguuccuagugaaagag

SEQ ID NO: 2691976 - RNA, 19 nt, Human
uacugagagugaacaaauu

SEQ ID NO: 2691977 - RNA, 23 nt, Human
uaccuuuguucccaaauuucaua

SEQ ID NO: 2691978 - RNA, 20 nt, Human
uagcagggcauggcugggaa

SEQ ID NO: 2691979 - RNA, 16 nt, Human
uagauguauguacuuc

SEQ ID NO: 2691980 - RNA, 20 nt, Human
uagauguauguacuucaugc

SEQ ID NO: 2691981 - RNA, 18 nt, Human
uagaguuuagcuggaaaa

SEQ ID NO: 2691982 - RNA, 17 nt, Human
uagaguuuagcuggaaa

SEQ ID NO: 2691983 - RNA, 13 nt, Human
uaggccaugggac

SEQ ID NO: 2691984 - RNA, 23 nt, Human
uaggaauugacccacaagaaaug

SEQ ID NO: 2691985 - RNA, 20 nt, Human
uaggaauugacccacaagaa

SEQ ID NO: 2691986 - RNA, 21 nt, Human
uaguuguaccgcaaugugacu

SEQ ID NO: 2691987 - RNA, 18 nt, Human
uagucaaauugugugaaa

SEQ ID NO: 2691988 - RNA, 13 nt, Human
uauauuugaaaua

SEQ ID NO: 2691989 - RNA, 14 nt, Human
uauauuugaaauau

SEQ ID NO: 2691990 - RNA, 23 nt, Human
uauauuuauuacuguaagaaaau

SEQ ID NO: 2691991 - RNA, 20 nt, Human
uauauuuauuacuguaagaa

SEQ ID NO: 2691992 - RNA, 19 nt, Human
uauauuuuuuguuaaauga

SEQ ID NO: 2691993 - RNA, 21 nt, Human
ggugcuacaaaaacacagcaa

SEQ ID NO: 2691994 - RNA, 23 nt, Human
ggugcuacaaaaacacagcaagg

SEQ ID NO: 2691995 - RNA, 22 nt, Human
ggcuugaguuuaaauuguaaua

SEQ ID NO: 2691996 - RNA, 20 nt, Human
ggaaaaaauaacaaugaaag

SEQ ID NO: 2691997 - RNA, 17 nt, Human
gcuuuuaaaaaaaaaua

SEQ ID NO: 2691998 - RNA, 16 nt, Human
gcuugccaucccuccc

SEQ ID NO: 2691999 - RNA, 18 nt, Human
gcuugcccuguuaaaaga

SEQ ID NO: 2692000 - RNA, 17 nt, Human
gcuugcccuggugccuc

SEQ ID NO: 2692001 - RNA, 19 nt, Human
gcuugcccuggugccucac

SEQ ID NO: 2692002 - RNA, 21 nt, Human
gcuugccaucccucccuccac

SEQ ID NO: 2692003 - RNA, 18 nt, Human
gcuugccaucccucccuc

SEQ ID NO: 2692004 - RNA, 15 nt, Human
gcuguucacagccag

SEQ ID NO: 2692005 - RNA, 16 nt, Human
gcuguucacagccaga

SEQ ID NO: 2692006 - RNA, 23 nt, Human
gcuguucacagccagacuggcac

SEQ ID NO: 2692007 - RNA, 18 nt, Human
ggaaauauuuauuuuaau

SEQ ID NO: 2692008 - RNA, 17 nt, Human
ggaaauauuuauuuuaa

SEQ ID NO: 2692009 - RNA, 12 nt, Human
ggaaauauuuau

SEQ ID NO: 2692010 - RNA, 15 nt, Human
ggaaauauuuauuuu

SEQ ID NO: 2692011 - RNA, 13 nt, Human
ggaaauauuuauu

SEQ ID NO: 2692012 - RNA, 16 nt, Human
ggaaaucaaauaugca

SEQ ID NO: 2692013 - RNA, 18 nt, Human
gcuagauguauguacuuc

SEQ ID NO: 2692014 - RNA, 22 nt, Human
gcuguauuuuaaaagaaugauu

SEQ ID NO: 2692015 - RNA, 19 nt, Human
ggaggacgcucucuggccu

SEQ ID NO: 2692016 - RNA, 20 nt, Human
ggaggacgcucucuggccuu

SEQ ID NO: 2692017 - RNA, 21 nt, Human
ggaggacgcucucuggccuuc

SEQ ID NO: 2692018 - RNA, 22 nt, Human
ggccaugggacagggaggacgc

SEQ ID NO: 2692019 - RNA, 21 nt, Human
ggcagcugccuccccuccucu

SEQ ID NO: 2692020 - RNA, 18 nt, Human
ggcagcugccuccccucc

SEQ ID NO: 2692021 - RNA, 22 nt, Human
ggcagcugccuccccuccucug

SEQ ID NO: 2692022 - RNA, 19 nt, Human
gcccuucuuuccacagaag

SEQ ID NO: 2692023 - RNA, 16 nt, Human
gccuccccuccucugc

SEQ ID NO: 2692024 - RNA, 14 nt, Human
gccuccccuccucu

SEQ ID NO: 2692025 - RNA, 13 nt, Human
gccuccccuccuc

SEQ ID NO: 2692026 - RNA, 12 nt, Human
gccuccccuccu

SEQ ID NO: 2692027 - RNA, 11 nt, Human
gccuccccucc

SEQ ID NO: 2692028 - RNA, 19 nt, Human
gcguccugucggagcccug

SEQ ID NO: 2692029 - RNA, 22 nt, Human
gcguccugucggagcccugucu

SEQ ID NO: 2692030 - RNA, 18 nt, Human
gccuguaaucacagcuac

SEQ ID NO: 2692031 - RNA, 19 nt, Human
gccuucggccuccauccug

SEQ ID NO: 2692032 - RNA, 18 nt, Human
gccuuggggcugaugcag

SEQ ID NO: 2692033 - RNA, 18 nt, Human
gccuucggccuccauccu

SEQ ID NO: 2692034 - RNA, 22 nt, Human
gcgacagugagacucugucuca

SEQ ID NO: 2692035 - RNA, 22 nt, Human
gccacguucuuacuaguuuccc

SEQ ID NO: 2692036 - RNA, 14 nt, Human
gccaucccucccuc

SEQ ID NO: 2692037 - RNA, 13 nt, Human
gccaucccucccu

SEQ ID NO: 2692038 - RNA, 11 nt, Human
gccaucccucc

SEQ ID NO: 2692039 - RNA, 14 nt, Human
gccaugggacaggg

SEQ ID NO: 2692040 - RNA, 19 nt, Human
gccaugggacagggaggac

SEQ ID NO: 2692041 - RNA, 16 nt, Human
gccaucccucccucca

SEQ ID NO: 2692042 - RNA, 15 nt, Human
gccaucccucccucc

SEQ ID NO: 2692043 - RNA, 22 nt, Human
gccauuuaaagcuuauuaaaac

SEQ ID NO: 2692044 - RNA, 16 nt, Human
gcccacagcuguauga

SEQ ID NO: 2692045 - RNA, 17 nt, Human
gccccgugggguuccuc

SEQ ID NO: 2692046 - RNA, 19 nt, Human
gccccugcacuccagccug

SEQ ID NO: 2692047 - RNA, 16 nt, Human
gcccucuccugggcag

SEQ ID NO: 2692048 - RNA, 15 nt, Human
gcccucuccugggca

SEQ ID NO: 2692049 - RNA, 21 nt, Human
gcccucuccugggcagcugcc

SEQ ID NO: 2692050 - RNA, 19 nt, Human
gcccucuccugggcagcug

SEQ ID NO: 2692051 - RNA, 18 nt, Human
gcccucuccugggcagcu

SEQ ID NO: 2692052 - RNA, 18 nt, Human
gcauagauucccugagca

SEQ ID NO: 2692053 - RNA, 14 nt, Human
gcaguucugaagaa

SEQ ID NO: 2692054 - RNA, 13 nt, Human
gcaguucugaaga

SEQ ID NO: 2692055 - RNA, 15 nt, Human
gcaggcuacugucag

SEQ ID NO: 2692056 - RNA, 20 nt, Human
gcacagccucuuagaugcag

SEQ ID NO: 2692057 - RNA, 15 nt, Human
gcacugucaagauga

SEQ ID NO: 2692058 - RNA, 14 nt, Human
gcagaagacaguau

SEQ ID NO: 2692059 - RNA, 14 nt, Human
gauuaaguaaugau

SEQ ID NO: 2692060 - RNA, 22 nt, Human
gauuaaguaaugauaacuggaa

SEQ ID NO: 2692061 - RNA, 16 nt, Human
gaugcuagaacucccu

SEQ ID NO: 2692062 - RNA, 12 nt, Human
gcaagauguggg

SEQ ID NO: 2692063 - RNA, 16 nt, Human
gcaagaugugggcagu

SEQ ID NO: 2692064 - RNA, 17 nt, Human
gauaggucagugcaaau

SEQ ID NO: 2692065 - RNA, 23 nt, Human
gaucagcuuauugucuagugaaa

SEQ ID NO: 2692066 - RNA, 13 nt, Human
gauaaacaguagu

SEQ ID NO: 2692067 - RNA, 14 nt, Human
gauccuggaaauca

SEQ ID NO: 2692068 - RNA, 13 nt, Human
gaucuuuaaaaua

SEQ ID NO: 2692069 - RNA, 15 nt, Human
gaacauaaaauacaa

SEQ ID NO: 2692070 - RNA, 14 nt, Human
gaacaucacagcuu

SEQ ID NO: 2692071 - RNA, 16 nt, Human
gaacagugauuaccag

SEQ ID NO: 2692072 - RNA, 20 nt, Human
gaacagugauuaccagggac

SEQ ID NO: 2692073 - RNA, 16 nt, Human
gaaauuguauuacaaa

SEQ ID NO: 2692074 - RNA, 18 nt, Human
gaaauuguauuacaaauc

SEQ ID NO: 2692075 - RNA, 19 nt, Human
gaagacugcauuauauuua

SEQ ID NO: 2692076 - RNA, 12 nt, Human
gaagaacugaaa

SEQ ID NO: 2692077 - RNA, 18 nt, Human
gaagauguagaggagaaa

SEQ ID NO: 2692078 - RNA, 16 nt, Human
gaauauuuuaacuucc

SEQ ID NO: 2692079 - RNA, 22 nt, Human
gaaguccaagcauuuagaugua

SEQ ID NO: 2692080 - RNA, 12 nt, Human
gaaguccaagca

SEQ ID NO: 2692081 - RNA, 16 nt, Human
gaaguauccuucagcc

SEQ ID NO: 2692082 - RNA, 14 nt, Human
gaaguauccuucag

SEQ ID NO: 2692083 - RNA, 21 nt, Human
gacagagccccacccucagau

SEQ ID NO: 2692084 - RNA, 23 nt, Human
gacaggaugguucccuugaugaa

SEQ ID NO: 2692085 - RNA, 18 nt, Human
gacccaaaaggcagaagc

SEQ ID NO: 2692086 - RNA, 19 nt, Human
gacccaaaaggcagaagca

SEQ ID NO: 2692087 - RNA, 20 nt, Human
gacccaaaaggcagaagcaa

SEQ ID NO: 2692088 - RNA, 16 nt, Human
gaccacugcagaagac

SEQ ID NO: 2692089 - RNA, 18 nt, Human
gaccacugcagaagacag

SEQ ID NO: 2692090 - RNA, 22 nt, Human
gacuggauaguccgucucugcu

SEQ ID NO: 2692091 - RNA, 18 nt, Human
gacuggcacaguuuucug

SEQ ID NO: 2692092 - RNA, 22 nt, Human
gacuggcacaguuuucugagaa

SEQ ID NO: 2692093 - RNA, 17 nt, Human
gacuggauaguccgucu

SEQ ID NO: 2692094 - RNA, 14 nt, Human
gacuggcacaguuu

SEQ ID NO: 2692095 - RNA, 16 nt, Human
gacugaggggagggga

SEQ ID NO: 2692096 - RNA, 24 nt, Human
gacugcauuauauuuauuacugua

SEQ ID NO: 2692097 - RNA, 22 nt, Human
cuugcagcucuccccuucucug

SEQ ID NO: 2692098 - RNA, 14 nt, Human
cuugcccuguuaaa

SEQ ID NO: 2692099 - RNA, 18 nt, Human
cuugcccuggugccucac

SEQ ID NO: 2692100 - RNA, 19 nt, Human
cuugccaucccucccucca

SEQ ID NO: 2692101 - RNA, 16 nt, Human
cuugccaucccucccu

SEQ ID NO: 2692102 - RNA, 15 nt, Human
cuugccaucccuccc

SEQ ID NO: 2692103 - RNA, 17 nt, Human
cuugccaucccucccuc

SEQ ID NO: 2692104 - RNA, 14 nt, Human
cuugccaucccucc

SEQ ID NO: 2692105 - RNA, 20 nt, Human
cuugcuugauuguauggugg

SEQ ID NO: 2692106 - RNA, 22 nt, Human
cuugcccuguuaaaagaugaaa

SEQ ID NO: 2692107 - RNA, 16 nt, Human
cuuggacucauuuuaa

SEQ ID NO: 2692108 - RNA, 16 nt, Human
cuuggggcugaugcag

SEQ ID NO: 2692109 - RNA, 18 nt, Human
cuuggggcugaugcaguu

SEQ ID NO: 2692110 - RNA, 17 nt, Human
cuuguacuuuauuuucu

SEQ ID NO: 2692111 - RNA, 19 nt, Human
cuuuccucaaaacuucaga

SEQ ID NO: 2692112 - RNA, 14 nt, Human
gaaaacaaggauga

SEQ ID NO: 2692113 - RNA, 14 nt, Human
gaaaaguauguuag

SEQ ID NO: 2692114 - RNA, 20 nt, Human
gaaaaguauguuagugcaaa

SEQ ID NO: 2692115 - RNA, 19 nt, Human
gaaaauaacaauaaaagac

SEQ ID NO: 2692116 - RNA, 18 nt, Human
cuuaaugccacuaaauug

SEQ ID NO: 2692117 - RNA, 19 nt, Human
cuguuuuauaauuuuguga

SEQ ID NO: 2692118 - RNA, 19 nt, Human
cuuacuaguuucccuugca

SEQ ID NO: 2692119 - RNA, 19 nt, Human
cuuagaugcaguucugaag

SEQ ID NO: 2692120 - RNA, 19 nt, Human
cuuauaggaauugacccac

SEQ ID NO: 2692121 - RNA, 14 nt, Human
cuuauaauuuaaaa

SEQ ID NO: 2692122 - RNA, 21 nt, Human
cuuaggguuaugauuaaguaa

SEQ ID NO: 2692123 - RNA, 13 nt, Human
cuuauaauuuaaa

SEQ ID NO: 2692124 - RNA, 19 nt, Human
cuuccagauccuggaaauc

SEQ ID NO: 2692125 - RNA, 18 nt, Human
cuucagcgguuuauauaa

SEQ ID NO: 2692126 - RNA, 19 nt, Human
cuuccuuggacucauuuua

SEQ ID NO: 2692127 - RNA, 18 nt, Human
cuucggccuccauccuga

SEQ ID NO: 2692128 - RNA, 19 nt, Human
cuucggccuccauccugag

SEQ ID NO: 2692129 - RNA, 17 nt, Human
cuucggccuccauccug

SEQ ID NO: 2692130 - RNA, 16 nt, Human
cucccuucucuucaca

SEQ ID NO: 2692131 - RNA, 13 nt, Human
cucccuuucaaca

SEQ ID NO: 2692132 - RNA, 12 nt, Human
cucccuuucaac

SEQ ID NO: 2692133 - RNA, 13 nt, Human
cucggagaagagc

SEQ ID NO: 2692134 - RNA, 20 nt, Human
cucggagaagagcuguucac

SEQ ID NO: 2692135 - RNA, 12 nt, Human
cucggagaagag

SEQ ID NO: 2692136 - RNA, 17 nt, Human
cucauuaggauggcuag

SEQ ID NO: 2692137 - RNA, 18 nt, Human
cucauuaggauggcuagu

SEQ ID NO: 2692138 - RNA, 21 nt, Human
cuccauccugaggcuccacuu

SEQ ID NO: 2692139 - RNA, 20 nt, Human
cuccauccugaggcuccacu

SEQ ID NO: 2692140 - RNA, 23 nt, Human
cuccauccugaggcuccacuugg

SEQ ID NO: 2692141 - RNA, 17 nt, Human
cucccagucauuuaaua

SEQ ID NO: 2692142 - RNA, 17 nt, Human
cuccaccucccugcaau

SEQ ID NO: 2692143 - RNA, 16 nt, Human
cuccaccucccugcaa

SEQ ID NO: 2692144 - RNA, 15 nt, Human
cuccaccucccugca

SEQ ID NO: 2692145 - RNA, 14 nt, Human
cuccaccucccugc

SEQ ID NO: 2692146 - RNA, 23 nt, Human
cuccaccucccugcaauaaaaug

SEQ ID NO: 2692147 - RNA, 23 nt, Human
cucugcauacucauuaggauggc

SEQ ID NO: 2692148 - RNA, 21 nt, Human
cucuccugggcagcugccucc

SEQ ID NO: 2692149 - RNA, 13 nt, Human
cucuuaagaagac

SEQ ID NO: 2692150 - RNA, 13 nt, Human
cugauguuccuag

SEQ ID NO: 2692151 - RNA, 18 nt, Human
cugauguuccuagugaaa

SEQ ID NO: 2692152 - RNA, 20 nt, Human
cugauguuccuagugaaaga

SEQ ID NO: 2692153 - RNA, 21 nt, Human
cugauguuccuagugaaagag

SEQ ID NO: 2692154 - RNA, 23 nt, Human
cugcagaagacaguauggcagcu

SEQ ID NO: 2692155 - RNA, 13 nt, Human
cugcagaagacag

SEQ ID NO: 2692156 - RNA, 15 nt, Human
cugccuaagugcagc

SEQ ID NO: 2692157 - RNA, 13 nt, Human
cugcugaaacaac

SEQ ID NO: 2692158 - RNA, 23 nt, Human
cuggaauaauccuaaacauauga

SEQ ID NO: 2692159 - RNA, 16 nt, Human
cuggccaacgggguga

SEQ ID NO: 2692160 - RNA, 18 nt, Human
cuggcacaguuuucugag

SEQ ID NO: 2692161 - RNA, 19 nt, Human
cuggcacaguuuucugaga

SEQ ID NO: 2692162 - RNA, 22 nt, Human
cugggaacccaaguccaagcau

SEQ ID NO: 2692163 - RNA, 21 nt, Human
cuggucccagccagcaguuca

SEQ ID NO: 2692164 - RNA, 22 nt, Human
ccgggaggcagagguugcagug

SEQ ID NO: 2692165 - RNA, 16 nt, Human
cccuugaugaagaagu

SEQ ID NO: 2692166 - RNA, 15 nt, Human
cccuugaugaagaag

SEQ ID NO: 2692167 - RNA, 23 nt, Human
ccucuuagaugcaguucugaaga

SEQ ID NO: 2692168 - RNA, 23 nt, Human
ccugaaagaggaaugaaguacuc

SEQ ID NO: 2692169 - RNA, 18 nt, Human
ccugaaagaggaaugaag

SEQ ID NO: 2692170 - RNA, 18 nt, Human
ccugaggcuccacuuggu

SEQ ID NO: 2692171 - RNA, 20 nt, Human
ccugaggcuccacuuggucu

SEQ ID NO: 2692172 - RNA, 17 nt, Human
ccugaggcuccacuugg

SEQ ID NO: 2692173 - RNA, 14 nt, Human
ccucuccugggcag

SEQ ID NO: 2692174 - RNA, 13 nt, Human
ccucuccugggca

SEQ ID NO: 2692175 - RNA, 12 nt, Human
ccucuccugggc

SEQ ID NO: 2692176 - RNA, 11 nt, Human
ccucuccuggg

SEQ ID NO: 2692177 - RNA, 21 nt, Human
ccucugcuugccaucccuccc

SEQ ID NO: 2692178 - RNA, 20 nt, Human
ccucugcuugccaucccucc

SEQ ID NO: 2692179 - RNA, 20 nt, Human
ccucagaaaacaaggaugaa

SEQ ID NO: 2692180 - RNA, 14 nt, Human
ccuccccuccucug

SEQ ID NO: 2692181 - RNA, 15 nt, Human
ccuccccuccucugc

SEQ ID NO: 2692182 - RNA, 11 nt, Human
ccuccucugcu

SEQ ID NO: 2692183 - RNA, 16 nt, Human
ccucccugcaauaaaa

SEQ ID NO: 2692184 - RNA, 12 nt, Human
ccucccugcaau

SEQ ID NO: 2692185 - RNA, 18 nt, Human
ccuccccuccucugcuug

SEQ ID NO: 2692186 - RNA, 17 nt, Human
ccuccccuccucugcuu

SEQ ID NO: 2692187 - RNA, 18 nt, Human
ccugggcagcugccuccc

SEQ ID NO: 2692188 - RNA, 17 nt, Human
ccugggcagcugccucc

SEQ ID NO: 2692189 - RNA, 16 nt, Human
ccugggcagcugccuc

SEQ ID NO: 2692190 - RNA, 15 nt, Human
ccugggcagcugccu

SEQ ID NO: 2692191 - RNA, 20 nt, Human
ccugggcagcugccuccccu

SEQ ID NO: 2692192 - RNA, 11 nt, Human
cgcaaugugac

SEQ ID NO: 2692193 - RNA, 16 nt, Human
cggccuccauccugag

SEQ ID NO: 2692194 - RNA, 17 nt, Human
cggccuccauccugagg

SEQ ID NO: 2692195 - RNA, 18 nt, Human
cauuugcucauggaauug

SEQ ID NO: 2692196 - RNA, 13 nt, Human
cauuugcucaugg

SEQ ID NO: 2692197 - RNA, 17 nt, Human
cauuuaggccaugggac

SEQ ID NO: 2692198 - RNA, 22 nt, Human
ccaagcauaccaacacgagcag

SEQ ID NO: 2692199 - RNA, 17 nt, Human
ccaagcauuuagaugua

SEQ ID NO: 2692200 - RNA, 14 nt, Human
ccaagcaaguauua

SEQ ID NO: 2692201 - RNA, 23 nt, Human
ccaaauuucauaccuaucaucuu

SEQ ID NO: 2692202 - RNA, 22 nt, Human
ccaaacugacucuuaagaagac

SEQ ID NO: 2692203 - RNA, 20 nt, Human
ccacaggaaccacaagacug

SEQ ID NO: 2692204 - RNA, 16 nt, Human
ccaauauucauagcag

SEQ ID NO: 2692205 - RNA, 13 nt, Human
ccacugcagaaga

SEQ ID NO: 2692206 - RNA, 18 nt, Human
ccacugcagaagacagua

SEQ ID NO: 2692207 - RNA, 17 nt, Human
ccaggugccaguuaugg

SEQ ID NO: 2692208 - RNA, 13 nt, Human
cccaaaaggcaga

SEQ ID NO: 2692209 - RNA, 18 nt, Human
cccaaaaggcagaagcaa

SEQ ID NO: 2692210 - RNA, 14 nt, Human
ccaugaagauguag

SEQ ID NO: 2692211 - RNA, 16 nt, Human
ccaugauguuuagaaa

SEQ ID NO: 2692212 - RNA, 18 nt, Human
ccaucaaggguacacugc

SEQ ID NO: 2692213 - RNA, 13 nt, Human
cccaggugccagu

SEQ ID NO: 2692214 - RNA, 15 nt, Human
gcucugcccauccug

SEQ ID NO: 2692215 - RNA, 21 nt, Human
gcucugcccauccugccccug

SEQ ID NO: 2692216 - RNA, 12 nt, Human
gcugaacaucac

SEQ ID NO: 2692217 - RNA, 16 nt, Human
gcugaaacaacaaaua

SEQ ID NO: 2692218 - RNA, 20 nt, Human
gcuccacuuggucugugaga

SEQ ID NO: 2692219 - RNA, 12 nt, Human
gcuguauuuuaa

SEQ ID NO: 2692220 - RNA, 13 nt, Human
gcuguauuuuaaa

SEQ ID NO: 2692221 - RNA, 17 nt, Human
gcuuauuuccucauuuu

SEQ ID NO: 2692222 - RNA, 19 nt, Human
gcuuccuggcaauagucaa

SEQ ID NO: 2692223 - RNA, 16 nt, Human
gccuccauccugaggc

SEQ ID NO: 2692224 - RNA, 20 nt, Human
gccuccauccugaggcucca

SEQ ID NO: 2692225 - RNA, 17 nt, Human
gcuacuugggaggcuga

SEQ ID NO: 2692226 - RNA, 15 nt, Human
gcuacugucagcucc

SEQ ID NO: 2692227 - RNA, 18 nt, Human
gcuacaaaaacacagcaa

SEQ ID NO: 2692228 - RNA, 19 nt, Human
gcuacaaaaacacagcaag

SEQ ID NO: 2692229 - RNA, 17 nt, Human
gcuacaaaaacacagca

SEQ ID NO: 2692230 - RNA, 18 nt, Human
gccccacccucagaugca

SEQ ID NO: 2692231 - RNA, 15 nt, Human
gccccacccucagau

SEQ ID NO: 2692232 - RNA, 22 nt, Human
gccaugugcuaguaauuggaaa

SEQ ID NO: 2692233 - RNA, 19 nt, Human
gccagcaguucagagcugc

SEQ ID NO: 2692234 - RNA, 14 nt, Human
gccagcaguucaga

SEQ ID NO: 2692235 - RNA, 13 nt, Human
gccagcaguucag

SEQ ID NO: 2692236 - RNA, 21 nt, Human
gccagcaguucagagcugccc

SEQ ID NO: 2692237 - RNA, 20 nt, Human
gccagcaguucagagcugcc

SEQ ID NO: 2692238 - RNA, 22 nt, Human
gccaguuauggcuauaggugcu

SEQ ID NO: 2692239 - RNA, 16 nt, Human
gccauaugaaaaggcu

SEQ ID NO: 2692240 - RNA, 22 nt, Human
ggauguugaaaaaguucugcag

SEQ ID NO: 2692241 - RNA, 12 nt, Human
ggauggcaagau

SEQ ID NO: 2692242 - RNA, 13 nt, Human
ggccuccauccug

SEQ ID NO: 2692243 - RNA, 23 nt, Human
ggccuucggccuccauccugagg

SEQ ID NO: 2692244 - RNA, 19 nt, Human
gggacauuugcucauggaa

SEQ ID NO: 2692245 - RNA, 21 nt, Human
gggacauuugcucauggaauu

SEQ ID NO: 2692246 - RNA, 20 nt, Human
gggacauuugcucauggaau

SEQ ID NO: 2692247 - RNA, 13 nt, Human
aaaaccacagcag

SEQ ID NO: 2692248 - RNA, 14 nt, Human
aaaaccacagcagu

SEQ ID NO: 2692249 - RNA, 17 nt, Human
aaaagaugaaaauauuu

SEQ ID NO: 2692250 - RNA, 13 nt, Human
aaaacucauuuuu

SEQ ID NO: 2692251 - RNA, 22 nt, Human
aaaaauggaacauaaaauacaa

SEQ ID NO: 2692252 - RNA, 12 nt, Human
aaaaccacagca

SEQ ID NO: 2692253 - RNA, 16 nt, Human
gggauuguaaaauggu

SEQ ID NO: 2692254 - RNA, 17 nt, Human
gggauuguaaaauggug

SEQ ID NO: 2692255 - RNA, 15 nt, Human
aaaaugugauaugua

SEQ ID NO: 2692256 - RNA, 22 nt, Human
aaaauuuuuucucuaggaaaua

SEQ ID NO: 2692257 - RNA, 20 nt, Human
aaacaagcacuaaacaaaga

SEQ ID NO: 2692258 - RNA, 20 nt, Human
aaacagucucaggaaaucaa

SEQ ID NO: 2692259 - RNA, 15 nt, Human
gggcgugguggugag

SEQ ID NO: 2692260 - RNA, 19 nt, Human
aaaaguauguuagugcaaa

SEQ ID NO: 2692261 - RNA, 14 nt, Human
aaagacuauucaaa

SEQ ID NO: 2692262 - RNA, 15 nt, Human
aaagacuauucaaac

SEQ ID NO: 2692263 - RNA, 17 nt, Human
aaagcagggacuugaac

SEQ ID NO: 2692264 - RNA, 16 nt, Human
ggugugaccacugcag

SEQ ID NO: 2692265 - RNA, 16 nt, Human
gguuuagaaagcuugc

SEQ ID NO: 2692266 - RNA, 20 nt, Human
aaauaauuuuuauauuugaa

SEQ ID NO: 2692267 - RNA, 18 nt, Human
aaauaauuuuuauauuug

SEQ ID NO: 2692268 - RNA, 15 nt, Human
aaauaauuuuuauau

SEQ ID NO: 2692269 - RNA, 20 nt, Human
gaaugagagacacacugaag

SEQ ID NO: 2692270 - RNA, 23 nt, Human
gaaugagagacacacugaagaag

SEQ ID NO: 2692271 - RNA, 22 nt, Human
gaaugagagacacacugaagaa

SEQ ID NO: 2692272 - RNA, 14 nt, Human
gacacacugaagaa

SEQ ID NO: 2692273 - RNA, 12 nt, Human
gacacacaugaa

SEQ ID NO: 2692274 - RNA, 13 nt, Human
gacacacugaaga

SEQ ID NO: 2692275 - RNA, 11 nt, Human
gaauuaguuuu

SEQ ID NO: 2692276 - RNA, 14 nt, Human
gacagugaaagaaa

SEQ ID NO: 2692277 - RNA, 17 nt, Human
gacagucaccucaugga

SEQ ID NO: 2692278 - RNA, 16 nt, Human
gacacuuaaaaauggu

SEQ ID NO: 2692279 - RNA, 22 nt, Human
gacuauucaaacagucucagga

SEQ ID NO: 2692280 - RNA, 16 nt, Human
gacucuuaagaagacu

SEQ ID NO: 2692281 - RNA, 15 nt, Human
gacucuuaagaagac

SEQ ID NO: 2692282 - RNA, 18 nt, Human
gacucuuaagaagacugc

SEQ ID NO: 2692283 - RNA, 17 nt, Human
gacucuuaagaagacug

SEQ ID NO: 2692284 - RNA, 14 nt, Human
gagaaucacuugaa

SEQ ID NO: 2692285 - RNA, 15 nt, Human
gagaaucacuugaac

SEQ ID NO: 2692286 - RNA, 19 nt, Human
gcagggacuugaacccaua

SEQ ID NO: 2692287 - RNA, 22 nt, Human
gcagcugccuccccuccucugc

SEQ ID NO: 2692288 - RNA, 18 nt, Human
gcagcugccuccccuccu

SEQ ID NO: 2692289 - RNA, 17 nt, Human
gcagcugccuccccucc

SEQ ID NO: 2692290 - RNA, 16 nt, Human
gcagcugccuccccuc

SEQ ID NO: 2692291 - RNA, 15 nt, Human
gcagcugccuccccu

SEQ ID NO: 2692292 - RNA, 13 nt, Human
gcagcugccuccc

SEQ ID NO: 2692293 - RNA, 12 nt, Human
gcagcugccucc

SEQ ID NO: 2692294 - RNA, 11 nt, Human
gcagcugccuc

SEQ ID NO: 2692295 - RNA, 21 nt, Human
gcacaugagcuggcgggauug

SEQ ID NO: 2692296 - RNA, 14 nt, Human
gcacaguuuucuga

SEQ ID NO: 2692297 - RNA, 17 nt, Human
gcacaguuuucugagaa

SEQ ID NO: 2692298 - RNA, 18 nt, Human
gcacaguuuucugagaaa

SEQ ID NO: 2692299 - RNA, 17 nt, Human
gauuagggagagaagau

SEQ ID NO: 2692300 - RNA, 14 nt, Human
gaugugaacacauc

SEQ ID NO: 2692301 - RNA, 16 nt, Human
gaugugaacacaucag

SEQ ID NO: 2692302 - RNA, 14 nt, Human
gauuaccagggacu

SEQ ID NO: 2692303 - RNA, 20 nt, Human
gauauguaccuaacgaagua

SEQ ID NO: 2692304 - RNA, 16 nt, Human
gaguuuagcuggaaaa

SEQ ID NO: 2692305 - RNA, 21 nt, Human
gagugcucaguagucagacug

SEQ ID NO: 2692306 - RNA, 10 nt, Human
cugggacagg

SEQ ID NO: 2692307 - RNA, 22 nt, Human
cugggcagcugccuccccuccu

SEQ ID NO: 2692308 - RNA, 21 nt, Human
cugggcagcugccuccccucc

SEQ ID NO: 2692309 - RNA, 20 nt, Human
cugggcagcugccuccccuc

SEQ ID NO: 2692310 - RNA, 19 nt, Human
cugggcagcugccuccccu

SEQ ID NO: 2692311 - RNA, 16 nt, Human
cugggcagcugccucc

SEQ ID NO: 2692312 - RNA, 16 nt, Human
cugugagaugcuagaa

SEQ ID NO: 2692313 - RNA, 21 nt, Human
cugucagcuccccucggagaa

SEQ ID NO: 2692314 - RNA, 23 nt, Human
cugucagcuccccucggagaaga

SEQ ID NO: 2692315 - RNA, 21 nt, Human
cuggaaaucaggguuaguauu

SEQ ID NO: 2692316 - RNA, 14 nt, Human
gaaagacuauucaa

SEQ ID NO: 2692317 - RNA, 15 nt, Human
gaaagacuauucaaa

SEQ ID NO: 2692318 - RNA, 17 nt, Human
gaaagacuauucaaaca

SEQ ID NO: 2692319 - RNA, 19 nt, Human
gaaaucaaauaugcaaagc

SEQ ID NO: 2692320 - RNA, 20 nt, Human
gaaaucaaauaugcaaagca

SEQ ID NO: 2692321 - RNA, 22 nt, Human
gaaauauuuauuuuaauaaugu

SEQ ID NO: 2692322 - RNA, 18 nt, Human
gaaauauuuauuuuaaua

SEQ ID NO: 2692323 - RNA, 18 nt, Human
gaaaucaaauaugcaaag

SEQ ID NO: 2692324 - RNA, 17 nt, Human
gaaauauuuauuuuaau

SEQ ID NO: 2692325 - RNA, 15 nt, Human
cuucacuguaaaaua

SEQ ID NO: 2692326 - RNA, 22 nt, Human
cuucuaaguaaaaccacagcag

SEQ ID NO: 2692327 - RNA, 23 nt, Human
cuucuaaguaaaaccacagcagu

SEQ ID NO: 2692328 - RNA, 12 nt, Human
cuugaugaagaa

SEQ ID NO: 2692329 - RNA, 13 nt, Human
cuugaugaagaag

SEQ ID NO: 2692330 - RNA, 20 nt, Human
cucuuagaugcaguucugaa

SEQ ID NO: 2692331 - RNA, 15 nt, Human
cucuuagaugcaguu

SEQ ID NO: 2692332 - RNA, 12 nt, Human
cucucuggccuu

SEQ ID NO: 2692333 - RNA, 11 nt, Human
cucucuggccu

SEQ ID NO: 2692334 - RNA, 16 nt, Human
cucccugcaauaaaau

SEQ ID NO: 2692335 - RNA, 14 nt, Human
cucccugcaauaaa

SEQ ID NO: 2692336 - RNA, 21 nt, Human
cuccagugagacagcucugca

SEQ ID NO: 2692337 - RNA, 23 nt, Human
cuaguugaucagcuuauugucua

SEQ ID NO: 2692338 - RNA, 16 nt, Human
cuagaacucccuuuca

SEQ ID NO: 2692339 - RNA, 17 nt, Human
cuagaacucccuuucaa

SEQ ID NO: 2692340 - RNA, 18 nt, Human
cuagaacucccuuucaac

SEQ ID NO: 2692341 - RNA, 19 nt, Human
cuagaacucccuuucaaca

SEQ ID NO: 2692342 - RNA, 15 nt, Human
cguggugauuuagca

SEQ ID NO: 2692343 - RNA, 15 nt, Human
cuacaugagguacug

SEQ ID NO: 2692344 - RNA, 20 nt, Human
cuaagugaaauaagccagac

SEQ ID NO: 2692345 - RNA, 23 nt, Human
cuaagugaaauaagccagacauc

SEQ ID NO: 2692346 - RNA, 15 nt, Human
cgacagugagacucu

SEQ ID NO: 2692347 - RNA, 16 nt, Human
cgacagugagacucug

SEQ ID NO: 2692348 - RNA, 17 nt, Human
cccuucuuuccacagaa

SEQ ID NO: 2692349 - RNA, 13 nt, Human
cccuucucuguau

SEQ ID NO: 2692350 - RNA, 24 nt, Human
ccguagacgugcacgcacacuguc

SEQ ID NO: 2692351 - RNA, 16 nt, Human
ccguagguuauuuuca

SEQ ID NO: 2692352 - RNA, 20 nt, Human
ccucauguccacugguucuu

SEQ ID NO: 2692353 - RNA, 15 nt, Human
ccucauguccacugg

SEQ ID NO: 2692354 - RNA, 17 nt, Human
ccucugcuugccauccc

SEQ ID NO: 2692355 - RNA, 13 nt, Human
ccucugcuugcca

SEQ ID NO: 2692356 - RNA, 15 nt, Human
ccagauccuggaaau

SEQ ID NO: 2692357 - RNA, 23 nt, Human
cccgggaggcagagguugcagug

SEQ ID NO: 2692358 - RNA, 22 nt, Human
cccauuguggucacaggaagua

SEQ ID NO: 2692359 - RNA, 23 nt, Human
cccauuguggucacaggaaguag

SEQ ID NO: 2692360 - RNA, 20 nt, Human
cccagccagcaguucagagc

SEQ ID NO: 2692361 - RNA, 17 nt, Human
cccagccagcaguucag

SEQ ID NO: 2692362 - RNA, 16 nt, Human
cccagccagcaguuca

SEQ ID NO: 2692363 - RNA, 20 nt, Human
cccauauuuguacaccaaua

SEQ ID NO: 2692364 - RNA, 22 nt, Human
cagcaguucagagcugcccucu

SEQ ID NO: 2692365 - RNA, 21 nt, Human
cagcaguucagagcugcccuc

SEQ ID NO: 2692366 - RNA, 20 nt, Human
cagcaguucagagcugcccu

SEQ ID NO: 2692367 - RNA, 19 nt, Human
cagcaguucagagcugccc

SEQ ID NO: 2692368 - RNA, 18 nt, Human
cagcaguucagagcugcc

SEQ ID NO: 2692369 - RNA, 19 nt, Human
cagccccgugggguuccuc

SEQ ID NO: 2692370 - RNA, 23 nt, Human
cagccugagcgacagugagacuc

SEQ ID NO: 2692371 - RNA, 22 nt, Human
cagggaggacgcucucuggccu

SEQ ID NO: 2692372 - RNA, 19 nt, Human
cagggaggacgcucucugg

SEQ ID NO: 2692373 - RNA, 16 nt, Human
cagcuuauucacaaga

SEQ ID NO: 2692374 - RNA, 17 nt, Human
cagcuuauucacaagac

SEQ ID NO: 2692375 - RNA, 19 nt, Human
caggaaaucaaauaugcaa

SEQ ID NO: 2692376 - RNA, 21 nt, Human
caggaaaucaaauaugcaaag

SEQ ID NO: 2692377 - RNA, 22 nt, Human
caggaaaucaaauaugcaaagc

SEQ ID NO: 2692378 - RNA, 24 nt, Human
caggacagcccuucuuuccacaga

SEQ ID NO: 2692379 - RNA, 23 nt, Human
caggacagcccuucuuuccacag

SEQ ID NO: 2692380 - RNA, 18 nt, Human
ccaaauguucaucaauga

SEQ ID NO: 2692381 - RNA, 15 nt, Human
cauuaggauggcuag

SEQ ID NO: 2692382 - RNA, 12 nt, Human
cauuuccaagca

SEQ ID NO: 2692383 - RNA, 17 nt, Human
cauagauucccugagca

SEQ ID NO: 2692384 - RNA, 18 nt, Human
cauagauucccugagcag

SEQ ID NO: 2692385 - RNA, 20 nt, Human
cauagcagcuuauucacaag

SEQ ID NO: 2692386 - RNA, 17 nt, Human
caucagcugcugaaaca

SEQ ID NO: 2692387 - RNA, 18 nt, Human
caucagcugcugaaacaa

SEQ ID NO: 2692388 - RNA, 15 nt, Human
caucagcugcugaaa

SEQ ID NO: 2692389 - RNA, 20 nt, Human
caucagcuugcccuguuaaa

SEQ ID NO: 2692390 - RNA, 16 nt, Human
caugaauuaguuuuau

SEQ ID NO: 2692391 - RNA, 22 nt, Human
cacugguucuucuuggucucag

SEQ ID NO: 2692392 - RNA, 16 nt, Human
cacuugucaauaaaau

SEQ ID NO: 2692393 - RNA, 19 nt, Human
cacuuguguuuugcaagcc

SEQ ID NO: 2692394 - RNA, 22 nt, Human
cacuuguguuuugcaagccaga

SEQ ID NO: 2692395 - RNA, 21 nt, Human
cacugcagaagacaguauggc

SEQ ID NO: 2692396 - RNA, 20 nt, Human
cacuagggcagggacaggau

SEQ ID NO: 2692397 - RNA, 21 nt, Human
cacuagggcagggacaggaua

SEQ ID NO: 2692398 - RNA, 14 nt, Human
caaguccaagcaua

SEQ ID NO: 2692399 - RNA, 15 nt, Human
caauucuugccaaau

SEQ ID NO: 2692400 - RNA, 17 nt, Human
caaugcuguauuuuaaa

SEQ ID NO: 2692401 - RNA, 16 nt, Human
caaugcuguauuuuaa

SEQ ID NO: 2692402 - RNA, 15 nt, Human
caaugcuguauuuua

SEQ ID NO: 2692403 - RNA, 18 nt, Human
cacaagacugcacaucaa

SEQ ID NO: 2692404 - RNA, 22 nt, Human
cacacaugaaguccaagcauuu

SEQ ID NO: 2692405 - RNA, 17 nt, Human
cacacaugaaguccaag

SEQ ID NO: 2692406 - RNA, 21 nt, Human
cacagccucuuagaugcaguu

SEQ ID NO: 2692407 - RNA, 17 nt, Human
cacagccucuuagaugc

SEQ ID NO: 2692408 - RNA, 14 nt, Human
auuguaaaauggug

SEQ ID NO: 2692409 - RNA, 23 nt, Human
auuguaauaggcguaacuaauuu

SEQ ID NO: 2692410 - RNA, 19 nt, Human
auucauagcagcuuauuca

SEQ ID NO: 2692411 - RNA, 22 nt, Human
auucauagcagcuuauucacaa

SEQ ID NO: 2692412 - RNA, 18 nt, Human
auuaugaauuacauuugu

SEQ ID NO: 2692413 - RNA, 19 nt, Human
auucacaagacccaaaagg

SEQ ID NO: 2692414 - RNA, 16 nt, Human
auuagggagagaagau

SEQ ID NO: 2692415 - RNA, 17 nt, Human
auuaugaauuacauuug

SEQ ID NO: 2692416 - RNA, 14 nt, Human
auuaugaauuacau

SEQ ID NO: 2692417 - RNA, 17 nt, Human
auuuuauagcuacuaau

SEQ ID NO: 2692418 - RNA, 19 nt, Human
auuuuauagcuacuaauuu

SEQ ID NO: 2692419 - RNA, 17 nt, Human
auuugcucauggaauug

SEQ ID NO: 2692420 - RNA, 14 nt, Human
auuugcucauggaa

SEQ ID NO: 2692421 - RNA, 13 nt, Human
caaacccaguguu

SEQ ID NO: 2692422 - RNA, 24 nt, Human
caaacccaguguuuuaggagcaug

SEQ ID NO: 2692423 - RNA, 15 nt, Human
caaaaggcagaagca

SEQ ID NO: 2692424 - RNA, 20 nt, Human
caaaaaaaaaaaaaaauuag

SEQ ID NO: 2692425 - RNA, 20 nt, Human
caaagcacugacuucuaagu

SEQ ID NO: 2692426 - RNA, 22 nt, Human
caaagcacugacuucuaaguaa

SEQ ID NO: 2692427 - RNA, 23 nt, Human
caacacgagcaggcuacugucag

SEQ ID NO: 2692428 - RNA, 15 nt, Human
caaauccuugaagau

SEQ ID NO: 2692429 - RNA, 19 nt, Human
augagagacacacugaaga

SEQ ID NO: 2692430 - RNA, 17 nt, Human
augagagacacacugaa

SEQ ID NO: 2692431 - RNA, 14 nt, Human
augagagacacacu

SEQ ID NO: 2692432 - RNA, 13 nt, Human
augagagacacac

SEQ ID NO: 2692433 - RNA, 17 nt, Human
uuguauaaaauaauuuu

SEQ ID NO: 2692434 - RNA, 16 nt, Human
uuguaucacaaaucuu

SEQ ID NO: 2692435 - RNA, 15 nt, Human
uuguauaaaauaauu

SEQ ID NO: 2692436 - RNA, 16 nt, Human
uuguauaaaauaauuu

SEQ ID NO: 2692437 - RNA, 18 nt, Human
augaagauguagaggaga

SEQ ID NO: 2692438 - RNA, 13 nt, Human
augaaugaauggc

SEQ ID NO: 2692439 - RNA, 17 nt, Human
augaaauauuauguuaa

SEQ ID NO: 2692440 - RNA, 13 nt, Human
augaaauauuaug

SEQ ID NO: 2692441 - RNA, 18 nt, Human
augaaauauuauguuaaa

SEQ ID NO: 2692442 - RNA, 15 nt, Human
augaaagcagggacu

SEQ ID NO: 2692443 - RNA, 13 nt, Human
aucuuuuucuaac

SEQ ID NO: 2692444 - RNA, 18 nt, Human
uugauggugguauguuuu

SEQ ID NO: 2692445 - RNA, 19 nt, Human
uugauggugguauguuuuc

SEQ ID NO: 2692446 - RNA, 23 nt, Human
aucucauuuccaagcaaguauua

SEQ ID NO: 2692447 - RNA, 21 nt, Human
aucucauuuccaagcaaguau

SEQ ID NO: 2692448 - RNA, 13 nt, Human
aucucaauauuuc

SEQ ID NO: 2692449 - RNA, 13 nt, Human
uugcccuguuaaa

SEQ ID NO: 2692450 - RNA, 22 nt, Human
uuuagcuggaaaaguauguuag

SEQ ID NO: 2692451 - RNA, 20 nt, Human
uuuagcuggaaaaguauguu

SEQ ID NO: 2692452 - RNA, 13 nt, Human
uuuauauaagcuu

SEQ ID NO: 2692453 - RNA, 15 nt, Human
augcuagaacucccu

SEQ ID NO: 2692454 - RNA, 16 nt, Human
augcuagaacucccuu

SEQ ID NO: 2692455 - RNA, 19 nt, Human
augcuagaacucccuuuca

SEQ ID NO: 2692456 - RNA, 22 nt, Human
augcugucuacacuaagagaga

SEQ ID NO: 2692457 - RNA, 20 nt, Human
auggcuaguaucaaaagaaa

SEQ ID NO: 2692458 - RNA, 17 nt, Human
augcaguucugaagaag

SEQ ID NO: 2692459 - RNA, 15 nt, Human
augcaguucugaaga

SEQ ID NO: 2692460 - RNA, 19 nt, Human
augcaguucugaagaagau

SEQ ID NO: 2692461 - RNA, 18 nt, Human
augcaguucugaagaaga

SEQ ID NO: 2692462 - RNA, 15 nt, Human
augccacuaaauuga

SEQ ID NO: 2692463 - RNA, 17 nt, Human
augccacuaaauugaca

SEQ ID NO: 2692464 - RNA, 14 nt, Human
uuguuuucauuauc

SEQ ID NO: 2692465 - RNA, 15 nt, Human
augcaaagcacugac

SEQ ID NO: 2692466 - RNA, 12 nt, Human
augauucccagc

SEQ ID NO: 2692467 - RNA, 22 nt, Human
augauuaugaauuacauuugua

SEQ ID NO: 2692468 - RNA, 21 nt, Human
augagagacacacugaagaag

SEQ ID NO: 2692469 - RNA, 20 nt, Human
augagagacacacugaagaa

SEQ ID NO: 2692470 - RNA, 23 nt, Human
augagagacacacugaagaagca

SEQ ID NO: 2692471 - RNA, 23 nt, Human
uugugugaaagguacuucaaauc

SEQ ID NO: 2692472 - RNA, 19 nt, Human
uugaaauauugacuuuuua

SEQ ID NO: 2692473 - RNA, 14 nt, Human
auccauacauuugu

SEQ ID NO: 2692474 - RNA, 20 nt, Human
aucauuucugcaucagcugc

SEQ ID NO: 2692475 - RNA, 13 nt, Human
uucuauaauuuaa

SEQ ID NO: 2692476 - RNA, 14 nt, Human
uucuauaauuuaaa

SEQ ID NO: 2692477 - RNA, 21 nt, Human
uucuaaguaaaaccacagcag

SEQ ID NO: 2692478 - RNA, 19 nt, Human
uucuaaguaaaaccacagc

SEQ ID NO: 2692479 - RNA, 20 nt, Human
uucuaaguaaaaccacagca

SEQ ID NO: 2692480 - RNA, 17 nt, Human
uucuaaguaaaaccaca

SEQ ID NO: 2692481 - RNA, 20 nt, Human
aucaaauaugcaaagcacug

SEQ ID NO: 2692482 - RNA, 12 nt, Human
uucccaaauuuc

SEQ ID NO: 2692483 - RNA, 18 nt, Human
uucccaacuccagaaagu

SEQ ID NO: 2692484 - RNA, 18 nt, Human
uucaaacagucucaggaa

SEQ ID NO: 2692485 - RNA, 14 nt, Human
uucaaacauauaua

SEQ ID NO: 2692486 - RNA, 22 nt, Human
auaggaauugacccacaagaaa

SEQ ID NO: 2692487 - RNA, 17 nt, Human
auaggcguaacuaauuu

SEQ ID NO: 2692488 - RNA, 23 nt, Human
uucacaagacccaaaaggcagaa

SEQ ID NO: 2692489 - RNA, 20 nt, Human
auaguuguaccgcaauguga

SEQ ID NO: 2692490 - RNA, 17 nt, Human
auauaacaaugcuguau

SEQ ID NO: 2692491 - RNA, 14 nt, Human
auauauaacaaugc

SEQ ID NO: 2692492 - RNA, 18 nt, Human
auuuguaguguuggagaa

SEQ ID NO: 2692493 - RNA, 23 nt, Human
auuugguaaggggaauugaggac

SEQ ID NO: 2692494 - RNA, 22 nt, Human
auuuauuacuguaagaaaauau

SEQ ID NO: 2692495 - RNA, 15 nt, Human
auuuguaucacaaau

SEQ ID NO: 2692496 - RNA, 21 nt, Human
auuuguauaaaauaauuuuua

SEQ ID NO: 2692497 - RNA, 16 nt, Human
auuuuaauaauguuuc

SEQ ID NO: 2692498 - RNA, 15 nt, Human
auuuuaauaauguuu

SEQ ID NO: 2692499 - RNA, 14 nt, Human
auuuuaauaauguu

SEQ ID NO: 2692500 - RNA, 21 nt, Human
auugacccacaagaaaugaaa

SEQ ID NO: 2692501 - RNA, 20 nt, Human
auugacacuuaaaaaugguu

SEQ ID NO: 2692502 - RNA, 13 nt, Human
auugugccccugc

SEQ ID NO: 2692503 - RNA, 15 nt, Human
auuguauuacaaauc

SEQ ID NO: 2692504 - RNA, 14 nt, Human
auuguauuacaaau

SEQ ID NO: 2692505 - RNA, 19 nt, Human
auuuaaagcuuauuaaaac

SEQ ID NO: 2692506 - RNA, 16 nt, Human
auuuacaaaugggaaa

SEQ ID NO: 2692507 - RNA, 20 nt, Human
auuccacuuauaggaauuga

SEQ ID NO: 2692508 - RNA, 14 nt, Human
auucaaacagucuc

SEQ ID NO: 2692509 - RNA, 15 nt, Human
auucaaacagucuca

SEQ ID NO: 2692510 - RNA, 13 nt, Human
auuacauuuguau

SEQ ID NO: 2692511 - RNA, 16 nt, Human
auuacauuuguauaaa

SEQ ID NO: 2692512 - RNA, 15 nt, Human
auuacauuuguauaa

SEQ ID NO: 2692513 - RNA, 23 nt, Human
uuuuuuaaaaaagaaacauuugg

SEQ ID NO: 2692514 - RNA, 15 nt, Human
auuaaguaaugauaa

SEQ ID NO: 2692515 - RNA, 13 nt, Human
auuaaguaaugau

SEQ ID NO: 2692516 - RNA, 16 nt, Human
auuauauuuacaaaug

SEQ ID NO: 2692517 - RNA, 20 nt, Human
auuauuaccuuacagaaguu

SEQ ID NO: 2692518 - RNA, 18 nt, Human
auuaucucaaaacugcac

SEQ ID NO: 2692519 - RNA, 23 nt, Human
auuaucucaaaacugcacuguca

SEQ ID NO: 2692520 - RNA, 17 nt, Human
auuauauuuacaaaugg

SEQ ID NO: 2692521 - RNA, 14 nt, Human
uuuuauaauuuugu

SEQ ID NO: 2692522 - RNA, 23 nt, Human
uuuuauggaggcuuugcauagau

SEQ ID NO: 2692523 - RNA, 19 nt, Human
uuuuauggcacuaguauuu

SEQ ID NO: 2692524 - RNA, 19 nt, Human
auguucaucaaugaaugaa

SEQ ID NO: 2692525 - RNA, 15 nt, Human
auguugacaugggac

SEQ ID NO: 2692526 - RNA, 16 nt, Human
auuaaaagaauauuuu

SEQ ID NO: 2692527 - RNA, 18 nt, Human
auguuucaaacauauaua

SEQ ID NO: 2692528 - RNA, 21 nt, Human
auguuucaaacauauauaaca

SEQ ID NO: 2692529 - RNA, 13 nt, Human
uuuuaaaaaagaa

SEQ ID NO: 2692530 - RNA, 15 nt, Human
uuuuaaaagaaugau

SEQ ID NO: 2692531 - RNA, 14 nt, Human
uuuuaaaagaauga

SEQ ID NO: 2692532 - RNA, 12 nt, Human
uuugcucaugga

SEQ ID NO: 2692533 - RNA, 11 nt, Human
uuugcucaugg

SEQ ID NO: 2692534 - RNA, 15 nt, Human
auggcuauaggugcu

SEQ ID NO: 2692535 - RNA, 13 nt, Human
uuugcucauggaa

SEQ ID NO: 2692536 - RNA, 15 nt, Human
auaaauaguuuauga

SEQ ID NO: 2692537 - RNA, 14 nt, Human
auaaauaaaaauaa

SEQ ID NO: 2692538 - RNA, 13 nt, Human
auaaauaaaaaua

SEQ ID NO: 2692539 - RNA, 22 nt, Human
auaacgauaaaagacagugaaa

SEQ ID NO: 2692540 - RNA, 14 nt, Human
uuagggagagaaga

SEQ ID NO: 2692541 - RNA, 18 nt, Human
auaauccuaaacauauga

SEQ ID NO: 2692542 - RNA, 14 nt, Human
aguuuaaauuguaa

SEQ ID NO: 2692543 - RNA, 13 nt, Human
uguuucaaacaua

SEQ ID NO: 2692544 - RNA, 12 nt, Human
auaaaauaauuu

SEQ ID NO: 2692545 - RNA, 15 nt, Human
auaaaauaauuuuua

SEQ ID NO: 2692546 - RNA, 19 nt, Human
aguuuucugagaaagacua

SEQ ID NO: 2692547 - RNA, 18 nt, Human
aguuuucugagaaagacu

SEQ ID NO: 2692548 - RNA, 23 nt, Human
aguuuucugagaaagacuauuca

SEQ ID NO: 2692549 - RNA, 19 nt, Human
aguucggugagcuacaaau

SEQ ID NO: 2692550 - RNA, 16 nt, Human
aguguuggagaagaac

SEQ ID NO: 2692551 - RNA, 14 nt, Human
aguguuggagaaga

SEQ ID NO: 2692552 - RNA, 18 nt, Human
aguguuggagaagaacug

SEQ ID NO: 2692553 - RNA, 17 nt, Human
aguguuggagaagaacu

SEQ ID NO: 2692554 - RNA, 23 nt, Human
aguguuggagaagaacugaaauc

SEQ ID NO: 2692555 - RNA, 21 nt, Human
agugcaaauugucacaggaca

SEQ ID NO: 2692556 - RNA, 18 nt, Human
agugcaaauugucacagg

SEQ ID NO: 2692557 - RNA, 22 nt, Human
agugcaaauugucacaggacag

SEQ ID NO: 2692558 - RNA, 21 nt, Human
agugccuguaaucacagcuac

SEQ ID NO: 2692559 - RNA, 23 nt, Human
agguacuucaaauccuugaagau

SEQ ID NO: 2692560 - RNA, 17 nt, Human
aggguuaugauuaagua

SEQ ID NO: 2692561 - RNA, 20 nt, Human
ugguaaggggaauugaggac

SEQ ID NO: 2692562 - RNA, 17 nt, Human
agggcagggacaggaua

SEQ ID NO: 2692563 - RNA, 23 nt, Human
agucagacuggauaguccgucuc

SEQ ID NO: 2692564 - RNA, 15 nt, Human
agucaggaaagagaa

SEQ ID NO: 2692565 - RNA, 16 nt, Human
agucaggaaagagaac

SEQ ID NO: 2692566 - RNA, 23 nt, Human
ugucauuugcuggagcucugccc

SEQ ID NO: 2692567 - RNA, 15 nt, Human
aguauuucuaugaaa

SEQ ID NO: 2692568 - RNA, 13 nt, Human
aguauuucuauga

SEQ ID NO: 2692569 - RNA, 22 nt, Human
aguauuucuaugaaauauuaug

SEQ ID NO: 2692570 - RNA, 20 nt, Human
ugucaaucagccuaguugau

SEQ ID NO: 2692571 - RNA, 21 nt, Human
ugucaauaaaauccauacauu

SEQ ID NO: 2692572 - RNA, 18 nt, Human
uguagaggagaaacugga

SEQ ID NO: 2692573 - RNA, 15 nt, Human
aguaaaaccacagca

SEQ ID NO: 2692574 - RNA, 19 nt, Human
aguagauaggccaugggca

SEQ ID NO: 2692575 - RNA, 14 nt, Human
ugcucauggaauug

SEQ ID NO: 2692576 - RNA, 12 nt, Human
aggaaauauuua

SEQ ID NO: 2692577 - RNA, 23 nt, Human
aggaaaucaaauaugcaaagcac

SEQ ID NO: 2692578 - RNA, 13 nt, Human
aggaaauauuuau

SEQ ID NO: 2692579 - RNA, 17 nt, Human
aggacacugauaugggu

SEQ ID NO: 2692580 - RNA, 22 nt, Human
ugcuguauuuuaaaagaaugau

SEQ ID NO: 2692581 - RNA, 21 nt, Human
ugcuguauuuuaaaagaauga

SEQ ID NO: 2692582 - RNA, 13 nt, Human
ugcuguauuuuaa

SEQ ID NO: 2692583 - RNA, 17 nt, Human
agcuugaaacugagaug

SEQ ID NO: 2692584 - RNA, 20 nt, Human
ugcuacaaaaacacagcaag

SEQ ID NO: 2692585 - RNA, 16 nt, Human
ugcuacaaaaacacag

SEQ ID NO: 2692586 - RNA, 17 nt, Human
ugcuacaaaaacacagc

SEQ ID NO: 2692587 - RNA, 18 nt, Human
ugcuacaaaaacacagca

SEQ ID NO: 2692588 - RNA, 19 nt, Human
ugcuacaaaaacacagcaa

SEQ ID NO: 2692589 - RNA, 16 nt, Human
agcugccuccccuccu

SEQ ID NO: 2692590 - RNA, 15 nt, Human
agcugccuccccucc

SEQ ID NO: 2692591 - RNA, 22 nt, Human
agcugcccucuccugggcagcu

SEQ ID NO: 2692592 - RNA, 16 nt, Human
agcuguucacagccag

SEQ ID NO: 2692593 - RNA, 19 nt, Human
agcuguucacagccagacu

SEQ ID NO: 2692594 - RNA, 18 nt, Human
uggcacaguuuucugaga

SEQ ID NO: 2692595 - RNA, 19 nt, Human
uggcacaguuuucugagaa

SEQ ID NO: 2692596 - RNA, 14 nt, Human
uggccuucggccuc

SEQ ID NO: 2692597 - RNA, 14 nt, Human
uggagaagaacuga

SEQ ID NO: 2692598 - RNA, 13 nt, Human
uggagaagaacug

SEQ ID NO: 2692599 - RNA, 14 nt, Human
uggagcucguggaa

SEQ ID NO: 2692600 - RNA, 20 nt, Human
agccuuggggcugaugcagu

SEQ ID NO: 2692601 - RNA, 17 nt, Human
agcuacuugggaggcug

SEQ ID NO: 2692602 - RNA, 18 nt, Human
agcuacuugggaggcuga

SEQ ID NO: 2692603 - RNA, 19 nt, Human
agcuacuaauuuuaaaaug

SEQ ID NO: 2692604 - RNA, 18 nt, Human
agcccauggcacucuaug

SEQ ID NO: 2692605 - RNA, 20 nt, Human
agccucauguccacugguuc

SEQ ID NO: 2692606 - RNA, 15 nt, Human
agccucauguccacu

SEQ ID NO: 2692607 - RNA, 22 nt, Human
agccugaaagaggaaugaagua

SEQ ID NO: 2692608 - RNA, 19 nt, Human
agccagacuggcacaguuu

SEQ ID NO: 2692609 - RNA, 14 nt, Human
agccagacuggcac

SEQ ID NO: 2692610 - RNA, 14 nt, Human
ugaugaucuuuaaa

SEQ ID NO: 2692611 - RNA, 17 nt, Human
ugaugaucuuuaaaaua

SEQ ID NO: 2692612 - RNA, 12 nt, Human
ugauuaaaccaa

SEQ ID NO: 2692613 - RNA, 14 nt, Human
ugauuaccagggac

SEQ ID NO: 2692614 - RNA, 17 nt, Human
ugaugaagaaguugaua

SEQ ID NO: 2692615 - RNA, 18 nt, Human
ugagugucuuaauuaaaa

SEQ ID NO: 2692616 - RNA, 23 nt, Human
agcauaaauguugacaugggaca

SEQ ID NO: 2692617 - RNA, 22 nt, Human
ugaguaacugauuuguaacaag

SEQ ID NO: 2692618 - RNA, 17 nt, Human
agcauuguaaaugugcu

SEQ ID NO: 2692619 - RNA, 18 nt, Human
agcauuguaaaugugcuu

SEQ ID NO: 2692620 - RNA, 17 nt, Human
agcaugucgucaaagcu

SEQ ID NO: 2692621 - RNA, 20 nt, Human
agcaugucgucaaagcugaa

SEQ ID NO: 2692622 - RNA, 12 nt, Human
ugauaugggucu

SEQ ID NO: 2692623 - RNA, 19 nt, Human
ugaaacucguuaauuugua

SEQ ID NO: 2692624 - RNA, 22 nt, Human
ugaaacugagaugugaacacau

SEQ ID NO: 2692625 - RNA, 22 nt, Human
ugaaaaaguucugcagauaaac

SEQ ID NO: 2692626 - RNA, 20 nt, Human
ugaaaagcuccauuuuuagu

SEQ ID NO: 2692627 - RNA, 23 nt, Human
agagcaguuugguuucuagcaug

SEQ ID NO: 2692628 - RNA, 21 nt, Human
agagcaguuugguuucuagca

SEQ ID NO: 2692629 - RNA, 17 nt, Human
agacaucaacagauaaa

SEQ ID NO: 2692630 - RNA, 18 nt, Human
agacaucaacagauaaau

SEQ ID NO: 2692631 - RNA, 14 nt, Human
agacauagaauuaa

SEQ ID NO: 2692632 - RNA, 21 nt, Human
agacauagaauuaacacauga

SEQ ID NO: 2692633 - RNA, 14 nt, Human
agaaucacuugaac

SEQ ID NO: 2692634 - RNA, 15 nt, Human
ucuucacaacagauu

SEQ ID NO: 2692635 - RNA, 16 nt, Human
agacuauucaaacagu

SEQ ID NO: 2692636 - RNA, 15 nt, Human
agacuauucaaacag

SEQ ID NO: 2692637 - RNA, 12 nt, Human
agacuauucaaa

SEQ ID NO: 2692638 - RNA, 14 nt, Human
agacuauucaaaca

SEQ ID NO: 2692639 - RNA, 17 nt, Human
ugacacuuaaaaauggu

SEQ ID NO: 2692640 - RNA, 16 nt, Human
ugacacuuaaaaaugg

SEQ ID NO: 2692641 - RNA, 16 nt, Human
agaugcaguucugaag

SEQ ID NO: 2692642 - RNA, 24 nt, Human
ugacuucuaaguaaaaccacagca

SEQ ID NO: 2692643 - RNA, 22 nt, Human
ugacuucuaaguaaaaccacag

SEQ ID NO: 2692644 - RNA, 23 nt, Human
ugacuucuaaguaaaaccacagc

SEQ ID NO: 2692645 - RNA, 15 nt, Human
ugacuucuaaguaaa

SEQ ID NO: 2692646 - RNA, 15 nt, Human
agauucccugagcag

SEQ ID NO: 2692647 - RNA, 23 nt, Human
agcaacgcaggcccccaggugcc

SEQ ID NO: 2692648 - RNA, 15 nt, Human
ugaauacuuuauaaa

SEQ ID NO: 2692649 - RNA, 10 nt, Human
ucuggccuuc

SEQ ID NO: 2692650 - RNA, 13 nt, Human
agaaguugauaug

SEQ ID NO: 2692651 - RNA, 17 nt, Human
agaacucccuuucaaca

SEQ ID NO: 2692652 - RNA, 15 nt, Human
agaacucccuuucaa

SEQ ID NO: 2692653 - RNA, 16 nt, Human
agaacucccuuucaac

SEQ ID NO: 2692654 - RNA, 20 nt, Human
ucugcccauccugccccuga

SEQ ID NO: 2692655 - RNA, 19 nt, Human
agaagcaccaaucaugaau

SEQ ID NO: 2692656 - RNA, 19 nt, Human
agaagcaacccaaauguuc

SEQ ID NO: 2692657 - RNA, 23 nt, Human
agaaacuuaagguuaccuuuguu

SEQ ID NO: 2692658 - RNA, 15 nt, Human
agaaacauuugguaa

SEQ ID NO: 2692659 - RNA, 16 nt, Human
agaaaacaaggaugaa

SEQ ID NO: 2692660 - RNA, 16 nt, Human
agaaacacaacuauau

SEQ ID NO: 2692661 - RNA, 16 nt, Human
agaaagacuauucaaa

SEQ ID NO: 2692662 - RNA, 20 nt, Human
agaaagcagaacagugauua

SEQ ID NO: 2692663 - RNA, 17 nt, Human
agaaagcagaacaguga

SEQ ID NO: 2692664 - RNA, 18 nt, Human
agaaagcagaacagugau

SEQ ID NO: 2692665 - RNA, 20 nt, Human
acuuccagauccuggaaauc

SEQ ID NO: 2692666 - RNA, 13 nt, Human
ucuauaauuuaaa

SEQ ID NO: 2692667 - RNA, 12 nt, Human
ucuagcaugaag

SEQ ID NO: 2692668 - RNA, 18 nt, Human
acuucuaaguaaaaccac

SEQ ID NO: 2692669 - RNA, 19 nt, Human
acuucuaaguaaaaccaca

SEQ ID NO: 2692670 - RNA, 13 nt, Human
acuucuaaguaaa

SEQ ID NO: 2692671 - RNA, 21 nt, Human
acuucuaaguaaaaccacagc

SEQ ID NO: 2692672 - RNA, 17 nt, Human
ucucaaaacugcacugu

SEQ ID NO: 2692673 - RNA, 23 nt, Human
acuugaacccgggaggcagaggu

SEQ ID NO: 2692674 - RNA, 21 nt, Human
acuugaacccgggaggcagag

SEQ ID NO: 2692675 - RNA, 22 nt, Human
acugaagaagcaccaaucauga

SEQ ID NO: 2692676 - RNA, 22 nt, Human
acugucagcuccccucggagaa

SEQ ID NO: 2692677 - RNA, 23 nt, Human
acugucagcuccccucggagaag

SEQ ID NO: 2692678 - RNA, 17 nt, Human
ucuaccaaaaaucucaa

SEQ ID NO: 2692679 - RNA, 13 nt, Human
acuguggguagac

SEQ ID NO: 2692680 - RNA, 16 nt, Human
acccaaauguucauca

SEQ ID NO: 2692681 - RNA, 20 nt, Human
acccaaauguucaucaauga

SEQ ID NO: 2692682 - RNA, 12 nt, Human
ucagcccucaga

SEQ ID NO: 2692683 - RNA, 13 nt, Human
ucagcccucagaa

SEQ ID NO: 2692684 - RNA, 14 nt, Human
ucagagcugcccuc

SEQ ID NO: 2692685 - RNA, 13 nt, Human
ucagagcugcccu

SEQ ID NO: 2692686 - RNA, 16 nt, Human
ucagagcugcccucuc

SEQ ID NO: 2692687 - RNA, 15 nt, Human
ucagagcugcccucu

SEQ ID NO: 2692688 - RNA, 17 nt, Human
ucagagcugcccucucc

SEQ ID NO: 2692689 - RNA, 18 nt, Human
ucagagcugcccucuccu

SEQ ID NO: 2692690 - RNA, 13 nt, Human
ucaguagucagac

SEQ ID NO: 2692691 - RNA, 13 nt, Human
ucaaacagucuca

SEQ ID NO: 2692692 - RNA, 20 nt, Human
ucaaacagucucaggaaauc

SEQ ID NO: 2692693 - RNA, 21 nt, Human
ucaaacagucucaggaaauca

SEQ ID NO: 2692694 - RNA, 22 nt, Human
uauuuuaauaauguuucaaaca

SEQ ID NO: 2692695 - RNA, 19 nt, Human
uauuuuaauaauguuucaa

SEQ ID NO: 2692696 - RNA, 14 nt, Human
uauuuuaaaagaau

SEQ ID NO: 2692697 - RNA, 18 nt, Human
uauuuuaaaagaaugauu

SEQ ID NO: 2692698 - RNA, 14 nt, Human
accaacacgagcag

SEQ ID NO: 2692699 - RNA, 19 nt, Human
accaacacgagcaggcuac

SEQ ID NO: 2692700 - RNA, 16 nt, Human
accacaagacugcaca

SEQ ID NO: 2692701 - RNA, 22 nt, Human
ucacagcuuauuuccucauuuu

SEQ ID NO: 2692702 - RNA, 17 nt, Human
ucacagccagacuggca

SEQ ID NO: 2692703 - RNA, 23 nt, Human
ucacagccagacuggcacaguuu

SEQ ID NO: 2692704 - RNA, 16 nt, Human
ucacagaccuuugaac

SEQ ID NO: 2692705 - RNA, 12 nt, Human
ucaauuuaaaaa

SEQ ID NO: 2692706 - RNA, 13 nt, Human
ucaauuuaaaaaa

SEQ ID NO: 2692707 - RNA, 23 nt, Human
ucaauauuucagauaaucacaau

SEQ ID NO: 2692708 - RNA, 22 nt, Human
uccaugaagauguagaggagaa

SEQ ID NO: 2692709 - RNA, 14 nt, Human
uccagugagacagc

SEQ ID NO: 2692710 - RNA, 15 nt, Human
acgcucucuggccuu

SEQ ID NO: 2692711 - RNA, 16 nt, Human
acgcucucuggccuuc

SEQ ID NO: 2692712 - RNA, 17 nt, Human
acgcucucuggccuucg

SEQ ID NO: 2692713 - RNA, 12 nt, Human
accugagcccca

SEQ ID NO: 2692714 - RNA, 17 nt, Human
accugagccccaaaagg

SEQ ID NO: 2692715 - RNA, 16 nt, Human
ucauaauaaguugcau

SEQ ID NO: 2692716 - RNA, 17 nt, Human
uccucuccccaugaugu

SEQ ID NO: 2692717 - RNA, 22 nt, Human
uccugaaaacccuugccaugug

SEQ ID NO: 2692718 - RNA, 21 nt, Human
uccugaaaacccuugccaugu

SEQ ID NO: 2692719 - RNA, 18 nt, Human
acuccagaaagugacaag

SEQ ID NO: 2692720 - RNA, 14 nt, Human
acuccagaaaguga

SEQ ID NO: 2692721 - RNA, 14 nt, Human
ucccuccaccuccc

SEQ ID NO: 2692722 - RNA, 17 nt, Human
ucccuccaccucccugc

SEQ ID NO: 2692723 - RNA, 15 nt, Human
ucccuccaccucccu

SEQ ID NO: 2692724 - RNA, 19 nt, Human
ucccuccaccucccugcaa

SEQ ID NO: 2692725 - RNA, 21 nt, Human
acuccaaacugacucuuaaga

SEQ ID NO: 2692726 - RNA, 20 nt, Human
acuagaguuuagcuggaaaa

SEQ ID NO: 2692727 - RNA, 24 nt, Human
uccccuccucugcuugccaucccu

SEQ ID NO: 2692728 - RNA, 18 nt, Human
uccccuccucugcuugcc

SEQ ID NO: 2692729 - RNA, 15 nt, Human
uccccuccucugcuu

SEQ ID NO: 2692730 - RNA, 14 nt, Human
uccccuccucugcu

SEQ ID NO: 2692731 - RNA, 13 nt, Human
acuauucaaacag

SEQ ID NO: 2692732 - RNA, 14 nt, Human
acuauucaaacagu

SEQ ID NO: 2692733 - RNA, 16 nt, Human
acuauucaaacagucu

SEQ ID NO: 2692734 - RNA, 18 nt, Human
acuauucaaacagucuca

SEQ ID NO: 2692735 - RNA, 13 nt, Human
acacaacuauauu

SEQ ID NO: 2692736 - RNA, 13 nt, Human
uaggauguugaaa

SEQ ID NO: 2692737 - RNA, 14 nt, Human
uagaggguguguaa

SEQ ID NO: 2692738 - RNA, 14 nt, Human
acaaaaacacagca

SEQ ID NO: 2692739 - RNA, 15 nt, Human
acaaaaacacagcaa

SEQ ID NO: 2692740 - RNA, 13 nt, Human
acaaaaacacagc

SEQ ID NO: 2692741 - RNA, 13 nt, Human
uagacacacauga

SEQ ID NO: 2692742 - RNA, 17 nt, Human
uagaacucccuuucaac

SEQ ID NO: 2692743 - RNA, 18 nt, Human
uagaacucccuuucaaca

SEQ ID NO: 2692744 - RNA, 16 nt, Human
uagaacucccuuucaa

SEQ ID NO: 2692745 - RNA, 15 nt, Human
uagaaacacaacuau

SEQ ID NO: 2692746 - RNA, 18 nt, Human
acagcaagggugauggga

SEQ ID NO: 2692747 - RNA, 19 nt, Human
acagcccuucuuuccacag

SEQ ID NO: 2692748 - RNA, 15 nt, Human
uaugccccauucaac

SEQ ID NO: 2692749 - RNA, 23 nt, Human
acagcuguaugauucccagccag

SEQ ID NO: 2692750 - RNA, 20 nt, Human
acagcuguaugauucccagc

SEQ ID NO: 2692751 - RNA, 19 nt, Human
acagcuguaugauucccag

SEQ ID NO: 2692752 - RNA, 14 nt, Human
acagcuguaugauu

SEQ ID NO: 2692753 - RNA, 22 nt, Human
acaggaaccacaagacugcaca

SEQ ID NO: 2692754 - RNA, 14 nt, Human
uaucacaaaucuua

SEQ ID NO: 2692755 - RNA, 16 nt, Human
uaucacaaaucuuaac

SEQ ID NO: 2692756 - RNA, 20 nt, Human
uaucacaaaucuuaacuuga

SEQ ID NO: 2692757 - RNA, 14 nt, Human
acagaccuuugaac

SEQ ID NO: 2692758 - RNA, 19 nt, Human
acagaaagcagaacaguga

SEQ ID NO: 2692759 - RNA, 12 nt, Human
uauaggaauuga

SEQ ID NO: 2692760 - RNA, 16 nt, Human
uauaggugcuacaaaa

SEQ ID NO: 2692761 - RNA, 13 nt, Human
acacucaaaucaa

SEQ ID NO: 2692762 - RNA, 18 nt, Human
acacucaaaucaagaaac

SEQ ID NO: 2692763 - RNA, 17 nt, Human
acacucaaaucaagaaa

SEQ ID NO: 2692764 - RNA, 13 nt, Human
aauuacauuugua

SEQ ID NO: 2692765 - RNA, 14 nt, Human
aauuacauuuguau

SEQ ID NO: 2692766 - RNA, 19 nt, Human
uaccagggacugaggggag

SEQ ID NO: 2692767 - RNA, 16 nt, Human
uaccaugccauuuaaa

SEQ ID NO: 2692768 - RNA, 13 nt, Human
aauguucaucaau

SEQ ID NO: 2692769 - RNA, 16 nt, Human
aauguucaucaaugaa

SEQ ID NO: 2692770 - RNA, 20 nt, Human
aauguucaucaaugaaugaa

SEQ ID NO: 2692771 - RNA, 23 nt, Human
aaugauuaugaauuacauuugua

SEQ ID NO: 2692772 - RNA, 22 nt, Human
aaugagagacacacugaagaag

SEQ ID NO: 2692773 - RNA, 16 nt, Human
aaugauuucauucaau

SEQ ID NO: 2692774 - RNA, 21 nt, Human
uaauuuuuauauuugaaauau

SEQ ID NO: 2692775 - RNA, 19 nt, Human
uaauuuuuauauuugaaau

SEQ ID NO: 2692776 - RNA, 18 nt, Human
uaauuuuuauauuugaaa

SEQ ID NO: 2692777 - RNA, 22 nt, Human
uaauuccguagguuauuuucag

SEQ ID NO: 2692778 - RNA, 17 nt, Human
uacagagacagaaagca

SEQ ID NO: 2692779 - RNA, 20 nt, Human
aauguaagggaaacugccag

SEQ ID NO: 2692780 - RNA, 21 nt, Human
aaugcuguauuuuaaaagaau

SEQ ID NO: 2692781 - RNA, 20 nt, Human
aaugcuguauuuuaaaagaa

SEQ ID NO: 2692782 - RNA, 22 nt, Human
aaugcuguauuuuaaaagaaug

SEQ ID NO: 2692783 - RNA, 21 nt, Human
uacaaaaaaaaaaaaaaauua

SEQ ID NO: 2692784 - RNA, 15 nt, Human
aauauuuauuuuaau

SEQ ID NO: 2692785 - RNA, 16 nt, Human
aaucagccuaguugau

SEQ ID NO: 2692786 - RNA, 15 nt, Human
uaagcaaaaugugau

SEQ ID NO: 2692787 - RNA, 21 nt, Human
uaagcaaaaugugauauguac

SEQ ID NO: 2692788 - RNA, 14 nt, Human
uaagcaaaauguga

SEQ ID NO: 2692789 - RNA, 18 nt, Human
uaagguuaccuuuguucc

SEQ ID NO: 2692790 - RNA, 13 nt, Human
uaaguaaaaccac

SEQ ID NO: 2692791 - RNA, 15 nt, Human
uaaguaaaaccacag

SEQ ID NO: 2692792 - RNA, 16 nt, Human
uaaguaaaaccacagc

SEQ ID NO: 2692793 - RNA, 17 nt, Human
uaaguaaaaccacagca

SEQ ID NO: 2692794 - RNA, 18 nt, Human
uaaguaaaaccacagcag

SEQ ID NO: 2692795 - RNA, 19 nt, Human
uaaguaaaaccacagcagu

SEQ ID NO: 2692796 - RNA, 20 nt, Human
uaaguaaugauaacuggaaa

SEQ ID NO: 2692797 - RNA, 20 nt, Human
aauccucaguuuuugugaaa

SEQ ID NO: 2692798 - RNA, 13 nt, Human
uaagaagugaaaa

SEQ ID NO: 2692799 - RNA, 21 nt, Human
uaacuuccuuggacucauuuu

SEQ ID NO: 2692800 - RNA, 19 nt, Human
aauagucaaauugugugaa

SEQ ID NO: 2692801 - RNA, 13 nt, Human
uaacaaugcugua

SEQ ID NO: 2692802 - RNA, 18 nt, Human
aauaccaugccauuuaaa

SEQ ID NO: 2692803 - RNA, 23 nt, Human
aauaccacaggaaccacaagacu

SEQ ID NO: 2692804 - RNA, 23 nt, Human
aauacaucccuuaccugggaaag

SEQ ID NO: 2692805 - RNA, 13 nt, Human
aagcauuguaaau

SEQ ID NO: 2692806 - RNA, 16 nt, Human
aagcauuuagauguau

SEQ ID NO: 2692807 - RNA, 20 nt, Human
aagcucacagaccuuugaac

SEQ ID NO: 2692808 - RNA, 14 nt, Human
aagcuccagguaga

SEQ ID NO: 2692809 - RNA, 13 nt, Human
aagcuccagguag

SEQ ID NO: 2692810 - RNA, 20 nt, Human
guuauuauauuuacaaaugg

SEQ ID NO: 2692811 - RNA, 23 nt, Human
aagaggaaugaaguacucauaca

SEQ ID NO: 2692812 - RNA, 17 nt, Human
aagacugcauuauauuu

SEQ ID NO: 2692813 - RNA, 16 nt, Human
aagacugcacaucaaa

SEQ ID NO: 2692814 - RNA, 13 nt, Human
aagaugaaaauau

SEQ ID NO: 2692815 - RNA, 14 nt, Human
aagaugaaaauauu

SEQ ID NO: 2692816 - RNA, 13 nt, Human
aagauguagagga

SEQ ID NO: 2692817 - RNA, 20 nt, Human
uaaaauaauuuuuauauuug

SEQ ID NO: 2692818 - RNA, 20 nt, Human
uaaaagacagugaaagaaaa

SEQ ID NO: 2692819 - RNA, 16 nt, Human
uaaaagaauauuuuaa

SEQ ID NO: 2692820 - RNA, 23 nt, Human
uaaaagaauauuuuaacuuccuu

SEQ ID NO: 2692821 - RNA, 12 nt, Human
uaaaagaaugau

SEQ ID NO: 2692822 - RNA, 19 nt, Human
aaguaaugauaacuggaaa

SEQ ID NO: 2692823 - RNA, 14 nt, Human
aaguaaugauaacu

SEQ ID NO: 2692824 - RNA, 13 nt, Human
aaguauuagaaua

SEQ ID NO: 2692825 - RNA, 16 nt, Human
aagucuuucacauuua

SEQ ID NO: 2692826 - RNA, 22 nt, Human
aagucuuauauauuguagauaa

SEQ ID NO: 2692827 - RNA, 14 nt, Human
aagguacuucaaau

SEQ ID NO: 2692828 - RNA, 19 nt, Human
aagggugaugggaaagcau

SEQ ID NO: 2692829 - RNA, 21 nt, Human
guauaaaauaauuuuuauauu

SEQ ID NO: 2692830 - RNA, 15 nt, Human
guauaaaauaauuuu

SEQ ID NO: 2692831 - RNA, 16 nt, Human
guauauuuuauaucaa

SEQ ID NO: 2692832 - RNA, 16 nt, Human
aaauguaagggaaacu

SEQ ID NO: 2692833 - RNA, 17 nt, Human
guaguguuggagaagaa

SEQ ID NO: 2692834 - RNA, 20 nt, Human
guaguguuggagaagaacug

SEQ ID NO: 2692835 - RNA, 15 nt, Human
aaauggguuuuacug

SEQ ID NO: 2692836 - RNA, 14 nt, Human
aaauggguuuuacu

SEQ ID NO: 2692837 - RNA, 16 nt, Human
gucaaauugugugaaa

SEQ ID NO: 2692838 - RNA, 18 nt, Human
guauguacuucaugcugu

SEQ ID NO: 2692839 - RNA, 16 nt, Human
aacagauaaauaguuu

SEQ ID NO: 2692840 - RNA, 15 nt, Human
aacagugauuaccag

SEQ ID NO: 2692841 - RNA, 22 nt, Human
aacagugauuaccagggacuga

SEQ ID NO: 2692842 - RNA, 15 nt, Human
aacacagcaagggug

SEQ ID NO: 2692843 - RNA, 22 nt, Human
aacaaugcuguauuuuaaaaga

SEQ ID NO: 2692844 - RNA, 17 nt, Human
aacaaugcuguauuuua

SEQ ID NO: 2692845 - RNA, 16 nt, Human
aacacaacuauauugu

SEQ ID NO: 2692846 - RNA, 15 nt, Human
aacacaacuauauug

SEQ ID NO: 2692847 - RNA, 15 nt, Human
aacaaugcuguauuu

SEQ ID NO: 2692848 - RNA, 14 nt, Human
aacaaugcuguauu

SEQ ID NO: 2692849 - RNA, 12 nt, Human
aacaauaaaaga

SEQ ID NO: 2692850 - RNA, 20 nt, Human
aaauuuuuucucuaggaaau

SEQ ID NO: 2692851 - RNA, 21 nt, Human
gugagaugcuagaacucccuu

SEQ ID NO: 2692852 - RNA, 12 nt, Human
aacugaaaucau

SEQ ID NO: 2692853 - RNA, 19 nt, Human
aacugcacugucaagauga

SEQ ID NO: 2692854 - RNA, 19 nt, Human
aacuggacugguucaaaug

SEQ ID NO: 2692855 - RNA, 17 nt, Human
aacugggacaggggaga

SEQ ID NO: 2692856 - RNA, 17 nt, Human
gugaugggaaagcauug

SEQ ID NO: 2692857 - RNA, 18 nt, Human
aacuuccagauccuggaa

SEQ ID NO: 2692858 - RNA, 21 nt, Human
aacuucagcgguuuauauaag

SEQ ID NO: 2692859 - RNA, 18 nt, Human
aacccaaguccaagcaua

SEQ ID NO: 2692860 - RNA, 23 nt, Human
aacccaaauguucaucaaugaau

SEQ ID NO: 2692861 - RNA, 16 nt, Human
aacccgggaggcagag

SEQ ID NO: 2692862 - RNA, 18 nt, Human
aaccugagccccaaaagg

SEQ ID NO: 2692863 - RNA, 20 nt, Human
aaccugagccccaaaaggua

SEQ ID NO: 2692864 - RNA, 16 nt, Human
gucuuucacauuuaaa

SEQ ID NO: 2692865 - RNA, 18 nt, Human
aaccuugaaaacuuuaug

SEQ ID NO: 2692866 - RNA, 21 nt, Human
aacuagaguuuagcuggaaaa

SEQ ID NO: 2692867 - RNA, 12 nt, Human
aacucauuucua

SEQ ID NO: 2692868 - RNA, 22 nt, Human
acuugggaggcugagaugggag

SEQ ID NO: 2692869 - RNA, 12 nt, Human
acuuuaugcuaa

SEQ ID NO: 2692870 - RNA, 17 nt, Human
acuuuaugcuaagugaa

SEQ ID NO: 2692871 - RNA, 19 nt, Human
acuucagcgguuuauauaa

SEQ ID NO: 2692872 - RNA, 18 nt, Human
acuucagcgguuuauaua

SEQ ID NO: 2692873 - RNA, 17 nt, Human
acuucagcgguuuauau

SEQ ID NO: 2692874 - RNA, 20 nt, Human
acuucaaauccuugaagauu

SEQ ID NO: 2692875 - RNA, 19 nt, Human
acuucaaauccuugaagau

SEQ ID NO: 2692876 - RNA, 13 nt, Human
acuuaaaaauggu

SEQ ID NO: 2692877 - RNA, 14 nt, Human
acuuaaaaaugguu

SEQ ID NO: 2692878 - RNA, 21 nt, Human
acuuaaaaaugguuuaaaugg

SEQ ID NO: 2692879 - RNA, 15 nt, Human
acucugucucagucc

SEQ ID NO: 2692880 - RNA, 17 nt, Human
acucugucucaguccau

SEQ ID NO: 2692881 - RNA, 20 nt, Human
acucuuaagaagacugcauu

SEQ ID NO: 2692882 - RNA, 15 nt, Human
acucuuaagaagacu

SEQ ID NO: 2692883 - RNA, 14 nt, Human
acucuuaagaagac

SEQ ID NO: 2692884 - RNA, 18 nt, Human
accucugccucagaaaac

SEQ ID NO: 2692885 - RNA, 17 nt, Human
accucugccucagaaaa

SEQ ID NO: 2692886 - RNA, 18 nt, Human
acuaguauuucuaugaaa

SEQ ID NO: 2692887 - RNA, 19 nt, Human
acuaguauuucuaugaaau

SEQ ID NO: 2692888 - RNA, 19 nt, Human
acggacgaaccuugaaaac

SEQ ID NO: 2692889 - RNA, 19 nt, Human
accaaggcugauuaaacca

SEQ ID NO: 2692890 - RNA, 20 nt, Human
accaaggcugauuaaaccaa

SEQ ID NO: 2692891 - RNA, 20 nt, Human
acaucccuuaccugggaaag

SEQ ID NO: 2692892 - RNA, 21 nt, Human
acagugauuaccagggacuga

SEQ ID NO: 2692893 - RNA, 20 nt, Human
acagugauuaccagggacug

SEQ ID NO: 2692894 - RNA, 18 nt, Human
aauuuugugaagcaaaau

SEQ ID NO: 2692895 - RNA, 17 nt, Human
aauuuugugaagcaaaa

SEQ ID NO: 2692896 - RNA, 13 nt, Human
acaagaaaugaaa

SEQ ID NO: 2692897 - RNA, 15 nt, Human
acaagaaaugaaagc

SEQ ID NO: 2692898 - RNA, 16 nt, Human
acaagaaaugaaagca

SEQ ID NO: 2692899 - RNA, 21 nt, Human
acaaggaugaauuaaguuuuu

SEQ ID NO: 2692900 - RNA, 16 nt, Human
acagaagcuccaggua

SEQ ID NO: 2692901 - RNA, 19 nt, Human
aaaggcagaagcaacccaa

SEQ ID NO: 2692902 - RNA, 19 nt, Human
aaagcauuguaaaugugcu

SEQ ID NO: 2692903 - RNA, 20 nt, Human
aaagcauuguaaaugugcuu

SEQ ID NO: 2692904 - RNA, 21 nt, Human
aaacccugucucuacuaaaaa

SEQ ID NO: 2692905 - RNA, 19 nt, Human
aaacccuugccaugugcua

SEQ ID NO: 2692906 - RNA, 13 nt, Human
aaagaaacauuug

SEQ ID NO: 2692907 - RNA, 19 nt, Human
aaaauccauacauuugugu

SEQ ID NO: 2692908 - RNA, 12 nt, Human
aacacaucagcu

SEQ ID NO: 2692909 - RNA, 22 nt, Human
aaauugacacuuaaaaaugguu

SEQ ID NO: 2692910 - RNA, 20 nt, Human
aaauguucaucaaugaauga

SEQ ID NO: 2692911 - RNA, 14 nt, Human
aaaucuuaacuuga

SEQ ID NO: 2692912 - RNA, 23 nt, Human
aacugagaugugaacacaucagc

SEQ ID NO: 2692913 - RNA, 16 nt, Human
aauccauacauuugug

SEQ ID NO: 2692914 - RNA, 17 nt, Human
aauccauacauuugugu

SEQ ID NO: 2692915 - RNA, 16 nt, Human
aaugauaacuggaaac

SEQ ID NO: 2692916 - RNA, 15 nt, Human
aaugauaacuggaaa

SEQ ID NO: 2692917 - RNA, 14 nt, Human
aaugauaacuggaa

SEQ ID NO: 2692918 - RNA, 22 nt, Human
aaucauuucugcaucagcugcu

SEQ ID NO: 2692919 - RNA, 15 nt, Human
aaucaaauaugcaaa

SEQ ID NO: 2692920 - RNA, 16 nt, Human
aaucaaauaugcaaag

SEQ ID NO: 2692921 - RNA, 22 nt, Human
aaucaaauaugcaaagcacuga

SEQ ID NO: 2692922 - RNA, 12 nt, Human
aauaauguuuca

SEQ ID NO: 2692923 - RNA, 19 nt, Human
aauaauguuucaaacauau

SEQ ID NO: 2692924 - RNA, 14 nt, Human
aauaauguuucaaa

SEQ ID NO: 2692925 - RNA, 10 nt, Human
aauaaaccau

SEQ ID NO: 2692926 - RNA, 22 nt, Human
aaguugauaugccuuuucccaa

SEQ ID NO: 2692927 - RNA, 17 nt, Human
aaguucugcagauaaac

SEQ ID NO: 2692928 - RNA, 14 nt, Human
aagauagcagggca

SEQ ID NO: 2692929 - RNA, 15 nt, Human
aagcagggacuugaa

SEQ ID NO: 2692930 - RNA, 15 nt, Human
aagagaacuuccaga

SEQ ID NO: 2692931 - RNA, 23 nt, Human
aagacagugaaagaaaauaacaa

SEQ ID NO: 2692932 - RNA, 19 nt, Human
aagccagauuuuccugaaa

SEQ ID NO: 2692933 - RNA, 12 nt, Human
aaguagaggagg

SEQ ID NO: 2692934 - RNA, 15 nt, Human
aagggauuuucagcc

SEQ ID NO: 2692935 - RNA, 14 nt, Human
aagggauggcaaga

SEQ ID NO: 2692936 - RNA, 17 nt, Human
aagggauggcaagaugu

SEQ ID NO: 2692937 - RNA, 23 nt, Human
aagggauuuucagcccucagaau

SEQ ID NO: 2692938 - RNA, 21 nt, Human
aagggauuuucagcccucaga

SEQ ID NO: 2692939 - RNA, 24 nt, Human
agcaaaauuuuuucucuaggaaau

SEQ ID NO: 2692940 - RNA, 16 nt, Human
agauguagaggagaaa

SEQ ID NO: 2692941 - RNA, 19 nt, Human
agauguagaggagaaacug

SEQ ID NO: 2692942 - RNA, 22 nt, Human
agaagagcuguucacagccaga

SEQ ID NO: 2692943 - RNA, 21 nt, Human
agaagagcuguucacagccag

SEQ ID NO: 2692944 - RNA, 18 nt, Human
agaagacugcauuauauu

SEQ ID NO: 2692945 - RNA, 21 nt, Human
agaagugaaaaucuacacucc

SEQ ID NO: 2692946 - RNA, 17 nt, Human
agaaugauuaugaauua

SEQ ID NO: 2692947 - RNA, 22 nt, Human
agaaugagagacacacugaaga

SEQ ID NO: 2692948 - RNA, 17 nt, Human
agaaugagagacacacu

SEQ ID NO: 2692949 - RNA, 17 nt, Human
agacccaaaaggcagaa

SEQ ID NO: 2692950 - RNA, 19 nt, Human
agacccaaaaggcagaagc

SEQ ID NO: 2692951 - RNA, 20 nt, Human
agacuggauaguccgucucu

SEQ ID NO: 2692952 - RNA, 16 nt, Human
agacuggauaguccgu

SEQ ID NO: 2692953 - RNA, 18 nt, Human
agacucugucucagucca

SEQ ID NO: 2692954 - RNA, 13 nt, Human
agaggaaugaagu

SEQ ID NO: 2692955 - RNA, 21 nt, Human
aggccaugggcacugugggua

SEQ ID NO: 2692956 - RNA, 15 nt, Human
agggacugaggggag

SEQ ID NO: 2692957 - RNA, 22 nt, Human
agggauuuucagcccucagaau

SEQ ID NO: 2692958 - RNA, 17 nt, Human
agggauuuucagcccuc

SEQ ID NO: 2692959 - RNA, 15 nt, Human
agggauuagggagag

SEQ ID NO: 2692960 - RNA, 13 nt, Human
aggaaguagagga

SEQ ID NO: 2692961 - RNA, 20 nt, Human
agcuuauuuccucauuuuua

SEQ ID NO: 2692962 - RNA, 20 nt, Human
agcuccccucggagaagagc

SEQ ID NO: 2692963 - RNA, 17 nt, Human
agcuccccucggagaag

SEQ ID NO: 2692964 - RNA, 19 nt, Human
agcuccccucggagaagag

SEQ ID NO: 2692965 - RNA, 17 nt, Human
agcgacagugagacucu

SEQ ID NO: 2692966 - RNA, 18 nt, Human
augaugaucuuuaaaaua

SEQ ID NO: 2692967 - RNA, 21 nt, Human
augaugaucuuuaaaauacac

SEQ ID NO: 2692968 - RNA, 16 nt, Human
augaucuuuaaaauac

SEQ ID NO: 2692969 - RNA, 21 nt, Human
augucaaucagccuaguugau

SEQ ID NO: 2692970 - RNA, 16 nt, Human
augucaaucagccuag

SEQ ID NO: 2692971 - RNA, 15 nt, Human
augugaacacaucag

SEQ ID NO: 2692972 - RNA, 15 nt, Human
auguuccuagugaaa

SEQ ID NO: 2692973 - RNA, 16 nt, Human
auguuccuagugaaag

SEQ ID NO: 2692974 - RNA, 17 nt, Human
auguuccuagugaaaga

SEQ ID NO: 2692975 - RNA, 22 nt, Human
aucagcuugcccuguuaaaaga

SEQ ID NO: 2692976 - RNA, 13 nt, Human
aucagcuuauugu

SEQ ID NO: 2692977 - RNA, 17 nt, Human
aucaugaauuaguuuua

SEQ ID NO: 2692978 - RNA, 14 nt, Human
aucaaauaugcaaa

SEQ ID NO: 2692979 - RNA, 21 nt, Human
aucgcuccaccuugcagcucu

SEQ ID NO: 2692980 - RNA, 17 nt, Human
aucgcuccaccuugcag

SEQ ID NO: 2692981 - RNA, 19 nt, Human
auccucaguuuuugugaaa

SEQ ID NO: 2692982 - RNA, 13 nt, Human
augaaguacucau

SEQ ID NO: 2692983 - RNA, 21 nt, Human
augaaguacucauacauguua

SEQ ID NO: 2692984 - RNA, 23 nt, Human
augaaguccaagcauuuagaugu

SEQ ID NO: 2692985 - RNA, 20 nt, Human
augaaguccaagcauuuaga

SEQ ID NO: 2692986 - RNA, 19 nt, Human
aguugaaaagacuccaaag

SEQ ID NO: 2692987 - RNA, 20 nt, Human
aguugaaaagacuccaaaga

SEQ ID NO: 2692988 - RNA, 18 nt, Human
aguugaaaagacuccaaa

SEQ ID NO: 2692989 - RNA, 20 nt, Human
aguucagagcugcccucucc

SEQ ID NO: 2692990 - RNA, 22 nt, Human
aguucagagcugcccucuccug

SEQ ID NO: 2692991 - RNA, 21 nt, Human
aguucagagcugcccucuccu

SEQ ID NO: 2692992 - RNA, 23 nt, Human
aguucagagcugcccucuccugg

SEQ ID NO: 2692993 - RNA, 19 nt, Human
agugucaaugcagccccca

SEQ ID NO: 2692994 - RNA, 11 nt, Human
aguccaagcau

SEQ ID NO: 2692995 - RNA, 15 nt, Human
auagcagcuuauuca

SEQ ID NO: 2692996 - RNA, 14 nt, Human
auauuauguuaaaa

SEQ ID NO: 2692997 - RNA, 13 nt, Human
auauuauguuaaa

SEQ ID NO: 2692998 - RNA, 21 nt, Human
auaacaaugcuguauuuuaaa

SEQ ID NO: 2692999 - RNA, 20 nt, Human
auaacaaugcuguauuuuaa

SEQ ID NO: 2693000 - RNA, 19 nt, Human
auaacaaugcuguauuuua

SEQ ID NO: 2693001 - RNA, 17 nt, Human
auaacaaugcuguauuu

SEQ ID NO: 2693002 - RNA, 15 nt, Human
auaacaaugcuguau

SEQ ID NO: 2693003 - RNA, 14 nt, Human
auaacaaugaaagu

SEQ ID NO: 2693004 - RNA, 18 nt, Human
auaauguuucaaacauau

SEQ ID NO: 2693005 - RNA, 21 nt, Human
auaagccagacaucaacagau

SEQ ID NO: 2693006 - RNA, 22 nt, Human
auaagccagacaucaacagaua

SEQ ID NO: 2693007 - RNA, 13 nt, Human
auaauguuucaaa

SEQ ID NO: 2693008 - RNA, 14 nt, Human
caaaacugcacugu

SEQ ID NO: 2693009 - RNA, 17 nt, Human
caaaacugcacugucaa

SEQ ID NO: 2693010 - RNA, 18 nt, Human
caaaacugcacugucaag

SEQ ID NO: 2693011 - RNA, 16 nt, Human
caaacugacucuuaag

SEQ ID NO: 2693012 - RNA, 21 nt, Human
caaacugacucuuaagaagac

SEQ ID NO: 2693013 - RNA, 17 nt, Human
caaacugacucuuaaga

SEQ ID NO: 2693014 - RNA, 15 nt, Human
caagaaaugaaagca

SEQ ID NO: 2693015 - RNA, 17 nt, Human
caagaaaugaaagcagg

SEQ ID NO: 2693016 - RNA, 19 nt, Human
caagaaaugaaagcaggga

SEQ ID NO: 2693017 - RNA, 14 nt, Human
caaauguucaucaa

SEQ ID NO: 2693018 - RNA, 18 nt, Human
caaauguucaucaaugaa

SEQ ID NO: 2693019 - RNA, 12 nt, Human
caaauaugcaaa

SEQ ID NO: 2693020 - RNA, 13 nt, Human
caaauaugcaaag

SEQ ID NO: 2693021 - RNA, 20 nt, Human
caaggaaaaaauaacaauga

SEQ ID NO: 2693022 - RNA, 18 nt, Human
caaggaaaaaauaacaau

SEQ ID NO: 2693023 - RNA, 19 nt, Human
caauagucaaauuguguga

SEQ ID NO: 2693024 - RNA, 17 nt, Human
caauagucaaauugugu

SEQ ID NO: 2693025 - RNA, 21 nt, Human
caagggugaugggaaagcauu

SEQ ID NO: 2693026 - RNA, 23 nt, Human
caagggugaugggaaagcauugu

SEQ ID NO: 2693027 - RNA, 13 nt, Human
cacacugaagaag

SEQ ID NO: 2693028 - RNA, 21 nt, Human
cacagcaguugaaaagacucc

SEQ ID NO: 2693029 - RNA, 19 nt, Human
cacagcaguugaaaagacu

SEQ ID NO: 2693030 - RNA, 17 nt, Human
cacagccagacuggcac

SEQ ID NO: 2693031 - RNA, 18 nt, Human
cacagccagacuggcaca

SEQ ID NO: 2693032 - RNA, 18 nt, Human
cacaagaaaugaaagcag

SEQ ID NO: 2693033 - RNA, 20 nt, Human
cacaagaaaugaaagcaggg

SEQ ID NO: 2693034 - RNA, 21 nt, Human
cacaagaaaugaaagcaggga

SEQ ID NO: 2693035 - RNA, 21 nt, Human
caauaucuuuuuuuuaauaaa

SEQ ID NO: 2693036 - RNA, 22 nt, Human
caauuuuucuuauuucauuucu

SEQ ID NO: 2693037 - RNA, 21 nt, Human
uguuaaaagaugaaaauauuu

SEQ ID NO: 2693038 - RNA, 22 nt, Human
ugugugaaagguacuucaaauc

SEQ ID NO: 2693039 - RNA, 21 nt, Human
ugugugaaagguacuucaaau

SEQ ID NO: 2693040 - RNA, 20 nt, Human
ugugugaaagguacuucaaa

SEQ ID NO: 2693041 - RNA, 19 nt, Human
uguguuuugcaagccagau

SEQ ID NO: 2693042 - RNA, 13 nt, Human
uguguuuugcaag

SEQ ID NO: 2693043 - RNA, 17 nt, Human
uguuuaaaaucauuucu

SEQ ID NO: 2693044 - RNA, 18 nt, Human
uguuuaaaaucauuucug

SEQ ID NO: 2693045 - RNA, 20 nt, Human
uguuggagaagaacugaaau

SEQ ID NO: 2693046 - RNA, 19 nt, Human
uguuggagaagaacugaaa

SEQ ID NO: 2693047 - RNA, 14 nt, Human
uguuggagaagaac

SEQ ID NO: 2693048 - RNA, 17 nt, Human
uguuggagaagaacuga

SEQ ID NO: 2693049 - RNA, 16 nt, Human
uguuggagaagaacug

SEQ ID NO: 2693050 - RNA, 20 nt, Human
uguugacaugggacauuugc

SEQ ID NO: 2693051 - RNA, 20 nt, Human
uuacauuuguauaaaauaau

SEQ ID NO: 2693052 - RNA, 22 nt, Human
uuaaaaaaaaaccugagcccca

SEQ ID NO: 2693053 - RNA, 18 nt, Human
uuaaaauacacacucaaa

SEQ ID NO: 2693054 - RNA, 20 nt, Human
uguaauaaacucauuucuag

SEQ ID NO: 2693055 - RNA, 16 nt, Human
uguaccgcaaugugac

SEQ ID NO: 2693056 - RNA, 22 nt, Human
uguaguguuggagaagaacuga

SEQ ID NO: 2693057 - RNA, 15 nt, Human
uguaugauucccagc

SEQ ID NO: 2693058 - RNA, 19 nt, Human
ugugcuaguaauuggaaag

SEQ ID NO: 2693059 - RNA, 22 nt, Human
uggaauaauccuaaacauauga

SEQ ID NO: 2693060 - RNA, 23 nt, Human
uggaaacuucagcgguuuauaua

SEQ ID NO: 2693061 - RNA, 20 nt, Human
uggaacauaaaauacaaugu

SEQ ID NO: 2693062 - RNA, 21 nt, Human
uggaacauaaaauacaauguu

SEQ ID NO: 2693063 - RNA, 11 nt, Human
uggagggaagc

SEQ ID NO: 2693064 - RNA, 21 nt, Human
ugguauguuuucaggcuagau

SEQ ID NO: 2693065 - RNA, 16 nt, Human
uggcuuccuggcaaua

SEQ ID NO: 2693066 - RNA, 21 nt, Human
uggcuugaguuuaaauuguaa

SEQ ID NO: 2693067 - RNA, 14 nt, Human
ugggaguacaaaag

SEQ ID NO: 2693068 - RNA, 19 nt, Human
ugccaaauauaaauaaaaa

SEQ ID NO: 2693069 - RNA, 22 nt, Human
ugccaaauauaaauaaaaauaa

SEQ ID NO: 2693070 - RNA, 17 nt, Human
ugccaaauauaaauaaa

SEQ ID NO: 2693071 - RNA, 18 nt, Human
ugccaaauauaaauaaaa

SEQ ID NO: 2693072 - RNA, 20 nt, Human
ugccacuaaauugacacuua

SEQ ID NO: 2693073 - RNA, 12 nt, Human
ugccaucccucc

SEQ ID NO: 2693074 - RNA, 11 nt, Human
ugccaucccuc

SEQ ID NO: 2693075 - RNA, 14 nt, Human
ugccaucccucccu

SEQ ID NO: 2693076 - RNA, 22 nt, Human
ugcaguucugaagaagauggua

SEQ ID NO: 2693077 - RNA, 19 nt, Human
ugcaguucugaagaagaug

SEQ ID NO: 2693078 - RNA, 18 nt, Human
ugcaguucugaagaagau

SEQ ID NO: 2693079 - RNA, 17 nt, Human
ugcaguucugaagaaga

SEQ ID NO: 2693080 - RNA, 16 nt, Human
ugcaguucugaagaag

SEQ ID NO: 2693081 - RNA, 15 nt, Human
ugcaguucugaagaa

SEQ ID NO: 2693082 - RNA, 19 nt, Human
ugcagugagccgagauugu

SEQ ID NO: 2693083 - RNA, 19 nt, Human
ugcacgcacacugucugcc

SEQ ID NO: 2693084 - RNA, 17 nt, Human
ugcugaaacaacaaaua

SEQ ID NO: 2693085 - RNA, 19 nt, Human
ugcuaagcauuccaacuau

SEQ ID NO: 2693086 - RNA, 15 nt, Human
ugcuaagcauuccaa

SEQ ID NO: 2693087 - RNA, 16 nt, Human
ugcucaguagucagac

SEQ ID NO: 2693088 - RNA, 15 nt, Human
ugccuucucaacucc

SEQ ID NO: 2693089 - RNA, 18 nt, Human
ugccuguaaucacagcua

SEQ ID NO: 2693090 - RNA, 19 nt, Human
uccucugcuugccaucccu

SEQ ID NO: 2693091 - RNA, 17 nt, Human
uccucugcuugccaucc

SEQ ID NO: 2693092 - RNA, 16 nt, Human
uccucugcuugccauc

SEQ ID NO: 2693093 - RNA, 15 nt, Human
uccucugcuugccau

SEQ ID NO: 2693094 - RNA, 14 nt, Human
uccucugcuugcca

SEQ ID NO: 2693095 - RNA, 16 nt, Human
uccugaggcuccacuu

SEQ ID NO: 2693096 - RNA, 17 nt, Human
uccugaggcuccacuug

SEQ ID NO: 2693097 - RNA, 21 nt, Human
uccugaggcuccacuuggucu

SEQ ID NO: 2693098 - RNA, 15 nt, Human
uccugaggcuccacu

SEQ ID NO: 2693099 - RNA, 17 nt, Human
uccuugcaucaauuuuu

SEQ ID NO: 2693100 - RNA, 15 nt, Human
ucggccuccauccug

SEQ ID NO: 2693101 - RNA, 16 nt, Human
ucggccuccauccuga

SEQ ID NO: 2693102 - RNA, 15 nt, Human
ucggagcccugucuc

SEQ ID NO: 2693103 - RNA, 14 nt, Human
ucggagcccugucu

SEQ ID NO: 2693104 - RNA, 12 nt, Human
ucuacuaaaaau

SEQ ID NO: 2693105 - RNA, 19 nt, Human
ucuacuaaaaauacaaaaa

SEQ ID NO: 2693106 - RNA, 15 nt, Human
ucuacuaaaaauaca

SEQ ID NO: 2693107 - RNA, 12 nt, Human
uccauacauuug

SEQ ID NO: 2693108 - RNA, 19 nt, Human
ucauggaauuggagcucgu

SEQ ID NO: 2693109 - RNA, 21 nt, Human
ucauggaauuggagcucgugg

SEQ ID NO: 2693110 - RNA, 18 nt, Human
ucaguccaugaagaugua

SEQ ID NO: 2693111 - RNA, 22 nt, Human
ucagcuccccucggagaagagc

SEQ ID NO: 2693112 - RNA, 21 nt, Human
ucagcuccccucggagaagag

SEQ ID NO: 2693113 - RNA, 16 nt, Human
ucagcugcugaaacaa

SEQ ID NO: 2693114 - RNA, 16 nt, Human
ucuucuuggucucagu

SEQ ID NO: 2693115 - RNA, 19 nt, Human
ucuugccaaauauaaauaa

SEQ ID NO: 2693116 - RNA, 22 nt, Human
ucuuaggguuaugauuaaguaa

SEQ ID NO: 2693117 - RNA, 13 nt, Human
ucuuauaauuuaa

SEQ ID NO: 2693118 - RNA, 14 nt, Human
ucuuauaauuuaaa

SEQ ID NO: 2693119 - RNA, 17 nt, Human
ucuuuccacagaagcuc

SEQ ID NO: 2693120 - RNA, 14 nt, Human
ucugucucagucca

SEQ ID NO: 2693121 - RNA, 15 nt, Human
ugagcaggauuuuaa

SEQ ID NO: 2693122 - RNA, 20 nt, Human
ugagcaggauuuuaaucuuu

SEQ ID NO: 2693123 - RNA, 15 nt, Human
ugagaaagacuauuc

SEQ ID NO: 2693124 - RNA, 13 nt, Human
ugacucuuaagaa

SEQ ID NO: 2693125 - RNA, 16 nt, Human
ugacucuuaagaagac

SEQ ID NO: 2693126 - RNA, 15 nt, Human
ugacucuuaagaaga

SEQ ID NO: 2693127 - RNA, 14 nt, Human
ugacucuuaagaag

SEQ ID NO: 2693128 - RNA, 15 nt, Human
ugaaugaauggcuaa

SEQ ID NO: 2693129 - RNA, 20 nt, Human
ugaaugaauggcuaagcaaa

SEQ ID NO: 2693130 - RNA, 16 nt, Human
ugaccacugcagaaga

SEQ ID NO: 2693131 - RNA, 17 nt, Human
ugaccacugcagaagac

SEQ ID NO: 2693132 - RNA, 18 nt, Human
ugaccacugcagaagaca

SEQ ID NO: 2693133 - RNA, 14 nt, Human
ugaauuaaguuuuu

SEQ ID NO: 2693134 - RNA, 13 nt, Human
ugaauuacauuug

SEQ ID NO: 2693135 - RNA, 14 nt, Human
ugaauuacauuugu

SEQ ID NO: 2693136 - RNA, 16 nt, Human
uaccuaucaucuuaag

SEQ ID NO: 2693137 - RNA, 22 nt, Human
uaccaaaaaucucaauauuuca

SEQ ID NO: 2693138 - RNA, 22 nt, Human
uaccuaacgaaguauccuucag

SEQ ID NO: 2693139 - RNA, 23 nt, Human
uacugucagcuccccucggagaa

SEQ ID NO: 2693140 - RNA, 23 nt, Human
uacaguucggugagcuacaaaug

SEQ ID NO: 2693141 - RNA, 14 nt, Human
uacacuccagugag

SEQ ID NO: 2693142 - RNA, 17 nt, Human
uacacacucaaaucaag

SEQ ID NO: 2693143 - RNA, 16 nt, Human
uacacacucaaaucaa

SEQ ID NO: 2693144 - RNA, 12 nt, Human
uaauuuuuauau

SEQ ID NO: 2693145 - RNA, 18 nt, Human
uaauuuugugaagcaaaa

SEQ ID NO: 2693146 - RNA, 17 nt, Human
uaauuuuuauauuugaa

SEQ ID NO: 2693147 - RNA, 16 nt, Human
uaauuuuuauauuuga

SEQ ID NO: 2693148 - RNA, 13 nt, Human
uaauuuugugaag

SEQ ID NO: 2693149 - RNA, 23 nt, Human
uagaauaccacaggaaccacaag

SEQ ID NO: 2693150 - RNA, 15 nt, Human
uagaauuaacacaug

SEQ ID NO: 2693151 - RNA, 16 nt, Human
uagaauuaacacauga

SEQ ID NO: 2693152 - RNA, 18 nt, Human
uagaauuaacacaugauc

SEQ ID NO: 2693153 - RNA, 16 nt, Human
uagcaugaagacagag

SEQ ID NO: 2693154 - RNA, 14 nt, Human
uagauaggccaugg

SEQ ID NO: 2693155 - RNA, 20 nt, Human
uaggugcuacaaaaacacag

SEQ ID NO: 2693156 - RNA, 22 nt, Human
uaggugcuacaaaaacacagca

SEQ ID NO: 2693157 - RNA, 23 nt, Human
uaggugcuacaaaaacacagcaa

SEQ ID NO: 2693158 - RNA, 18 nt, Human
uaggugcuacaaaaacac

SEQ ID NO: 2693159 - RNA, 17 nt, Human
uaguauuguccaggucu

SEQ ID NO: 2693160 - RNA, 19 nt, Human
uauauaacaaugcuguauu

SEQ ID NO: 2693161 - RNA, 17 nt, Human
uauauaacaaugcugua

SEQ ID NO: 2693162 - RNA, 14 nt, Human
uaucaaaagaaaga

SEQ ID NO: 2693163 - RNA, 21 nt, Human
uauauuuuuuguuaaaugauu

SEQ ID NO: 2693164 - RNA, 20 nt, Human
uauauuugaaauauugacuu

SEQ ID NO: 2693165 - RNA, 16 nt, Human
uauaugcuucuguuuu

SEQ ID NO: 2693166 - RNA, 14 nt, Human
uauaugcuucuguu

SEQ ID NO: 2693167 - RNA, 17 nt, Human
uaaccaggggccaugaa

SEQ ID NO: 2693168 - RNA, 21 nt, Human
uaagaaaauaucacuugucaa

SEQ ID NO: 2693169 - RNA, 23 nt, Human
uaagagagaaugagagacacacu

SEQ ID NO: 2693170 - RNA, 14 nt, Human
uaagagagaaugag

SEQ ID NO: 2693171 - RNA, 13 nt, Human
uaagagagaauga

SEQ ID NO: 2693172 - RNA, 15 nt, Human
uaacuggaaacuuca

SEQ ID NO: 2693173 - RNA, 20 nt, Human
uaaauggcuuccuggcaaua

SEQ ID NO: 2693174 - RNA, 20 nt, Human
uaaauugacacuuaaaaaug

SEQ ID NO: 2693175 - RNA, 16 nt, Human
uaaaugugcuuuuaaa

SEQ ID NO: 2693176 - RNA, 16 nt, Human
uaaaugugccuucauu

SEQ ID NO: 2693177 - RNA, 13 nt, Human
uaagugaaauaag

SEQ ID NO: 2693178 - RNA, 14 nt, Human
uaauaauguuucaa

SEQ ID NO: 2693179 - RNA, 22 nt, Human
uaauguuucaaacauauauaac

SEQ ID NO: 2693180 - RNA, 22 nt, Human
uaaugauaacuggaaacuucag

SEQ ID NO: 2693181 - RNA, 17 nt, Human
uaaugauaacuggaaac

SEQ ID NO: 2693182 - RNA, 23 nt, Human
uaaugauaacuggaaacuucagc

SEQ ID NO: 2693183 - RNA, 14 nt, Human
uaaaguguuugaaa

SEQ ID NO: 2693184 - RNA, 19 nt, Human
uaaaaaugguuuaaauggu

SEQ ID NO: 2693185 - RNA, 15 nt, Human
uaaaaaugguuuaaa

SEQ ID NO: 2693186 - RNA, 18 nt, Human
uaaaaaugguuuaaaugg

SEQ ID NO: 2693187 - RNA, 22 nt, Human
uaaaacaagcacuaaacaaaga

SEQ ID NO: 2693188 - RNA, 18 nt, Human
uaaaaucauuucugcauc

SEQ ID NO: 2693189 - RNA, 22 nt, Human
uaaaaucauuucugcaucagcu

SEQ ID NO: 2693190 - RNA, 17 nt, Human
uaaaauccauacauuug

SEQ ID NO: 2693191 - RNA, 15 nt, Human
uaaaauccauacauu

SEQ ID NO: 2693192 - RNA, 10 nt, Human
uaaaaucauu

SEQ ID NO: 2693193 - RNA, 13 nt, Human
uaaaaucauuucu

SEQ ID NO: 2693194 - RNA, 13 nt, Human
uaaaaccacagca

SEQ ID NO: 2693195 - RNA, 20 nt, Human
guuuauauaagcuuguauuc

SEQ ID NO: 2693196 - RNA, 21 nt, Human
guuuagcuggaaaaguauguu

SEQ ID NO: 2693197 - RNA, 20 nt, Human
guuuagcuggaaaaguaugu

SEQ ID NO: 2693198 - RNA, 21 nt, Human
gugcuacaaaaacacagcaag

SEQ ID NO: 2693199 - RNA, 15 nt, Human
gugcuacaaaaacac

SEQ ID NO: 2693200 - RNA, 20 nt, Human
gugcuacaaaaacacagcaa

SEQ ID NO: 2693201 - RNA, 21 nt, Human
guguaaguagauaggccaugg

SEQ ID NO: 2693202 - RNA, 14 nt, Human
gugugcguccuguc

SEQ ID NO: 2693203 - RNA, 16 nt, Human
gugugcguccugucgg

SEQ ID NO: 2693204 - RNA, 20 nt, Human
guuaaaagaugaaaauauuu

SEQ ID NO: 2693205 - RNA, 14 nt, Human
guuaaaagaugaaa

SEQ ID NO: 2693206 - RNA, 16 nt, Human
guuaaaagaugaaaau

SEQ ID NO: 2693207 - RNA, 16 nt, Human
guucaucaaugaauga

SEQ ID NO: 2693208 - RNA, 19 nt, Human
guucagagcugcccucucc

SEQ ID NO: 2693209 - RNA, 17 nt, Human
guucagagcugcccucu

SEQ ID NO: 2693210 - RNA, 16 nt, Human
guucagagcugcccuc

SEQ ID NO: 2693211 - RNA, 15 nt, Human
guucagagcugcccu

SEQ ID NO: 2693212 - RNA, 22 nt, Human
guucagagcugcccucuccugg

SEQ ID NO: 2693213 - RNA, 20 nt, Human
guucagagcugcccucuccu

SEQ ID NO: 2693214 - RNA, 23 nt, Human
guucagagcugcccucuccuggg

SEQ ID NO: 2693215 - RNA, 14 nt, Human
guucagagcugccc

SEQ ID NO: 2693216 - RNA, 13 nt, Human
guucagagcugcc

SEQ ID NO: 2693217 - RNA, 23 nt, Human
guuaccucugccucagaaaacaa

SEQ ID NO: 2693218 - RNA, 20 nt, Human
guugauggugguauguuuuc

SEQ ID NO: 2693219 - RNA, 21 nt, Human
guugauggugguauguuuuca

SEQ ID NO: 2693220 - RNA, 17 nt, Human
guugaaaagacuccaaa

SEQ ID NO: 2693221 - RNA, 22 nt, Human
guugaaaagacuccaaagaaau

SEQ ID NO: 2693222 - RNA, 23 nt, Human
guugaaaagacuccaaagaaaug

SEQ ID NO: 2693223 - RNA, 13 nt, Human
guucugaagaaga

SEQ ID NO: 2693224 - RNA, 12 nt, Human
guucugaagaag

SEQ ID NO: 2693225 - RNA, 15 nt, Human
guucugaagaagaug

SEQ ID NO: 2693226 - RNA, 14 nt, Human
guucugaagaagau

SEQ ID NO: 2693227 - RNA, 16 nt, Human
gugacaagcucacaga

SEQ ID NO: 2693228 - RNA, 13 nt, Human
gugaacacaucag

SEQ ID NO: 2693229 - RNA, 21 nt, Human
gugaacaaauuuacagagaca

SEQ ID NO: 2693230 - RNA, 13 nt, Human
gugcguccugucg

SEQ ID NO: 2693231 - RNA, 13 nt, Human
gucugacuguuuc

SEQ ID NO: 2693232 - RNA, 23 nt, Human
gucggguuuuauuguuuaaaauc

SEQ ID NO: 2693233 - RNA, 12 nt, Human
gucggagcccug

SEQ ID NO: 2693234 - RNA, 16 nt, Human
gucggagcccugucuc

SEQ ID NO: 2693235 - RNA, 18 nt, Human
gucgucaaagcugaaaug

SEQ ID NO: 2693236 - RNA, 15 nt, Human
gucugugagaugcua

SEQ ID NO: 2693237 - RNA, 16 nt, Human
gucugugagaugcuag

SEQ ID NO: 2693238 - RNA, 17 nt, Human
gucugugagaugcuaga

SEQ ID NO: 2693239 - RNA, 21 nt, Human
gucugugagaugcuagaacuc

SEQ ID NO: 2693240 - RNA, 22 nt, Human
gucugugagaugcuagaacucc

SEQ ID NO: 2693241 - RNA, 23 nt, Human
gucugugagaugcuagaacuccc

SEQ ID NO: 2693242 - RNA, 17 nt, Human
guauguuagugcaaauu

SEQ ID NO: 2693243 - RNA, 18 nt, Human
gcuauaggugcuacaaaa

SEQ ID NO: 2693244 - RNA, 15 nt, Human
guaguguuggagaag

SEQ ID NO: 2693245 - RNA, 14 nt, Human
guaguguuggagaa

SEQ ID NO: 2693246 - RNA, 19 nt, Human
gucagcuccccucggagaa

SEQ ID NO: 2693247 - RNA, 20 nt, Human
guauuuuaaaagaaugauua

SEQ ID NO: 2693248 - RNA, 13 nt, Human
guauuuuaaucac

SEQ ID NO: 2693249 - RNA, 18 nt, Human
guauuuuaaaagaaugau

SEQ ID NO: 2693250 - RNA, 15 nt, Human
gucaaugcagccccc

SEQ ID NO: 2693251 - RNA, 22 nt, Human
gucaauaaaauccauacauuug

SEQ ID NO: 2693252 - RNA, 23 nt, Human
gucaauaaaauccauacauuugu

SEQ ID NO: 2693253 - RNA, 23 nt, Human
gucagcuccccucggagaagagc

SEQ ID NO: 2693254 - RNA, 21 nt, Human
gucagcuccccucggagaaga

SEQ ID NO: 2693255 - RNA, 22 nt, Human
gucagcuccccucggagaagag

SEQ ID NO: 2693256 - RNA, 18 nt, Human
uuuuuaaaaaagaaacau

SEQ ID NO: 2693257 - RNA, 18 nt, Human
uuuuggucuggagggaag

SEQ ID NO: 2693258 - RNA, 14 nt, Human
uuuuccugaaaacc

SEQ ID NO: 2693259 - RNA, 19 nt, Human
uuuuucucuaggaaauauu

SEQ ID NO: 2693260 - RNA, 17 nt, Human
uuucuuauuucauuucu

SEQ ID NO: 2693261 - RNA, 18 nt, Human
uuugaaucaucaagucuu

SEQ ID NO: 2693262 - RNA, 18 nt, Human
uuuccucauuuuuauaau

SEQ ID NO: 2693263 - RNA, 13 nt, Human
uuucugagaaaga

SEQ ID NO: 2693264 - RNA, 15 nt, Human
uuucugagaaagacu

SEQ ID NO: 2693265 - RNA, 13 nt, Human
uuugguuucuagc

SEQ ID NO: 2693266 - RNA, 16 nt, Human
uuuguauaaaauaauu

SEQ ID NO: 2693267 - RNA, 14 nt, Human
uuuguauaaaauaa

SEQ ID NO: 2693268 - RNA, 13 nt, Human
uuuguauaaaaua

SEQ ID NO: 2693269 - RNA, 21 nt, Human
uuuuaaaagaaugauuaugaa

SEQ ID NO: 2693270 - RNA, 20 nt, Human
uuuuaauaauguuucaaaca

SEQ ID NO: 2693271 - RNA, 23 nt, Human
gccaucccucccuccaccucccu

SEQ ID NO: 2693272 - RNA, 18 nt, Human
gccaucccucccuccacc

SEQ ID NO: 2693273 - RNA, 19 nt, Human
gccaugggcacugugggua

SEQ ID NO: 2693274 - RNA, 22 nt, Human
gccuccccuccucugcuugcca

SEQ ID NO: 2693275 - RNA, 20 nt, Human
gccuccccuccucugcuugc

SEQ ID NO: 2693276 - RNA, 23 nt, Human
gccuccccuccucugcuugccau

SEQ ID NO: 2693277 - RNA, 19 nt, Human
gccuccccuccucugcuug

SEQ ID NO: 2693278 - RNA, 17 nt, Human
gccuccccuccucugcu

SEQ ID NO: 2693279 - RNA, 20 nt, Human
gccgggcgugguggugagug

SEQ ID NO: 2693280 - RNA, 22 nt, Human
gccgugugugugcguccugucg

SEQ ID NO: 2693281 - RNA, 23 nt, Human
gccguggugauuuagcaggaagc

SEQ ID NO: 2693282 - RNA, 13 nt, Human
gcuauaggugcua

SEQ ID NO: 2693283 - RNA, 19 nt, Human
gcuagaacucccuuucaac

SEQ ID NO: 2693284 - RNA, 12 nt, Human
gcgacagugaga

SEQ ID NO: 2693285 - RNA, 18 nt, Human
gcagauaaacaguaguga

SEQ ID NO: 2693286 - RNA, 20 nt, Human
gcagccccgugggguuccuc

SEQ ID NO: 2693287 - RNA, 12 nt, Human
gcaucagcugcu

SEQ ID NO: 2693288 - RNA, 13 nt, Human
gcauuauauuuau

SEQ ID NO: 2693289 - RNA, 17 nt, Human
gcauagguuuaauaauu

SEQ ID NO: 2693290 - RNA, 13 nt, Human
gcauagaaguaaa

SEQ ID NO: 2693291 - RNA, 17 nt, Human
gcaguucugaagaagau

SEQ ID NO: 2693292 - RNA, 18 nt, Human
gcaguucagagcugcccu

SEQ ID NO: 2693293 - RNA, 17 nt, Human
gcaguucagagcugccc

SEQ ID NO: 2693294 - RNA, 15 nt, Human
gcaguucugaagaag

SEQ ID NO: 2693295 - RNA, 16 nt, Human
gcaguucagagcugcc

SEQ ID NO: 2693296 - RNA, 15 nt, Human
gauuuuccugaaaac

SEQ ID NO: 2693297 - RNA, 19 nt, Human
gauuuucagcccucagaau

SEQ ID NO: 2693298 - RNA, 15 nt, Human
gauuuucagcccuca

SEQ ID NO: 2693299 - RNA, 11 nt, Human
gauuuucagcc

SEQ ID NO: 2693300 - RNA, 23 nt, Human
gcaaagcacugacuucuaaguaa

SEQ ID NO: 2693301 - RNA, 10 nt, Human
gcaagccaga

SEQ ID NO: 2693302 - RNA, 14 nt, Human
gcaagggugauggg

SEQ ID NO: 2693303 - RNA, 22 nt, Human
gauaaauaguuuaugauuccac

SEQ ID NO: 2693304 - RNA, 23 nt, Human
gauagauaggucagugcaaauac

SEQ ID NO: 2693305 - RNA, 13 nt, Human
gauagcagggcau

SEQ ID NO: 2693306 - RNA, 21 nt, Human
gauggcuaguaucaaaagaaa

SEQ ID NO: 2693307 - RNA, 14 nt, Human
gaugaaaauauuug

SEQ ID NO: 2693308 - RNA, 13 nt, Human
gauccuggaaauc

SEQ ID NO: 2693309 - RNA, 13 nt, Human
gagaaagacuauu

SEQ ID NO: 2693310 - RNA, 15 nt, Human
gagaaagacuauuca

SEQ ID NO: 2693311 - RNA, 17 nt, Human
gagaaagacuauucaaa

SEQ ID NO: 2693312 - RNA, 18 nt, Human
gagaaagacuauucaaac

SEQ ID NO: 2693313 - RNA, 16 nt, Human
gagaagaacugaaauc

SEQ ID NO: 2693314 - RNA, 14 nt, Human
gagaagaacugaaa

SEQ ID NO: 2693315 - RNA, 13 nt, Human
gagaagaacugaa

SEQ ID NO: 2693316 - RNA, 15 nt, Human
gagaagagcuguuca

SEQ ID NO: 2693317 - RNA, 22 nt, Human
gagaagagcuguucacagccag

SEQ ID NO: 2693318 - RNA, 18 nt, Human
gagacacacugaagaagc

SEQ ID NO: 2693319 - RNA, 15 nt, Human
gagacagcucugcau

SEQ ID NO: 2693320 - RNA, 18 nt, Human
gagacagcucugcauacu

SEQ ID NO: 2693321 - RNA, 13 nt, Human
gagacagcucugc

SEQ ID NO: 2693322 - RNA, 15 nt, Human
gagagugaacaaauu

SEQ ID NO: 2693323 - RNA, 19 nt, Human
gagagugaacaaauuuaca

SEQ ID NO: 2693324 - RNA, 17 nt, Human
gagauacagaauuuuau

SEQ ID NO: 2693325 - RNA, 19 nt, Human
gagagacacacugaagaag

SEQ ID NO: 2693326 - RNA, 16 nt, Human
gagcucgugggacagu

SEQ ID NO: 2693327 - RNA, 23 nt, Human
gagcugcccucuccugggcagcu

SEQ ID NO: 2693328 - RNA, 21 nt, Human
gagcugcccucuccugggcag

SEQ ID NO: 2693329 - RNA, 19 nt, Human
gagcugcccucuccugggc

SEQ ID NO: 2693330 - RNA, 18 nt, Human
gagcugcccucuccuggg

SEQ ID NO: 2693331 - RNA, 14 nt, Human
gacaucaacagaua

SEQ ID NO: 2693332 - RNA, 22 nt, Human
gacaugggacauuugcucaugg

SEQ ID NO: 2693333 - RNA, 17 nt, Human
gacaugggacauuugcu

SEQ ID NO: 2693334 - RNA, 23 nt, Human
gaccugauuucugagcauuuaau

SEQ ID NO: 2693335 - RNA, 13 nt, Human
cuucuuuccacag

SEQ ID NO: 2693336 - RNA, 19 nt, Human
cuucuuuccacagaagcuc

SEQ ID NO: 2693337 - RNA, 14 nt, Human
cuugaacccgggag

SEQ ID NO: 2693338 - RNA, 19 nt, Human
cuugaacccgggaggcaga

SEQ ID NO: 2693339 - RNA, 20 nt, Human
cuugaacccgggaggcagag

SEQ ID NO: 2693340 - RNA, 16 nt, Human
cuugagugcucaguag

SEQ ID NO: 2693341 - RNA, 23 nt, Human
cuugcaucaauuuuucuuauuuc

SEQ ID NO: 2693342 - RNA, 21 nt, Human
cuugcaugguuuagaaagcuu

SEQ ID NO: 2693343 - RNA, 18 nt, Human
cuuguaaaggaauuuaaa

SEQ ID NO: 2693344 - RNA, 17 nt, Human
cuugccaaauauaaaua

SEQ ID NO: 2693345 - RNA, 21 nt, Human
gaaagcuugcccuggugccuc

SEQ ID NO: 2693346 - RNA, 16 nt, Human
gaaacugacacaugcu

SEQ ID NO: 2693347 - RNA, 13 nt, Human
gaaacugccagca

SEQ ID NO: 2693348 - RNA, 15 nt, Human
gaaacugccagcaac

SEQ ID NO: 2693349 - RNA, 13 nt, Human
gaaagcagaacag

SEQ ID NO: 2693350 - RNA, 14 nt, Human
gaaagcagaacagu

SEQ ID NO: 2693351 - RNA, 22 nt, Human
gaaagacuauucaaacagucuc

SEQ ID NO: 2693352 - RNA, 23 nt, Human
gaaagacuauucaaacagucuca

SEQ ID NO: 2693353 - RNA, 19 nt, Human
gaaagacuauucaaacagu

SEQ ID NO: 2693354 - RNA, 24 nt, Human
gaacaguuaccucugccucagaaa

SEQ ID NO: 2693355 - RNA, 13 nt, Human
gaaauauuuauuu

SEQ ID NO: 2693356 - RNA, 16 nt, Human
gaaauauuuauuuuaa

SEQ ID NO: 2693357 - RNA, 15 nt, Human
gaaauauuuauuuua

SEQ ID NO: 2693358 - RNA, 14 nt, Human
gaaggaugcugucu

SEQ ID NO: 2693359 - RNA, 23 nt, Human
gaaguccaagcauuuagauguau

SEQ ID NO: 2693360 - RNA, 17 nt, Human
gaagauguagaggagaa

SEQ ID NO: 2693361 - RNA, 23 nt, Human
gaagagcuguucacagccagacu

SEQ ID NO: 2693362 - RNA, 13 nt, Human
gaagagcuguuca

SEQ ID NO: 2693363 - RNA, 15 nt, Human
gaagagcuguucaca

SEQ ID NO: 2693364 - RNA, 20 nt, Human
gaagagcuguucacagccag

SEQ ID NO: 2693365 - RNA, 22 nt, Human
gaacuuguaaaggaauuuaaaa

SEQ ID NO: 2693366 - RNA, 15 nt, Human
gaaccacaagacugc

SEQ ID NO: 2693367 - RNA, 14 nt, Human
gaaccacaagacug

SEQ ID NO: 2693368 - RNA, 16 nt, Human
gaacucccuuucaaca

SEQ ID NO: 2693369 - RNA, 15 nt, Human
cuguaugauucccag

SEQ ID NO: 2693370 - RNA, 16 nt, Human
cuguauuuuaaaagaa

SEQ ID NO: 2693371 - RNA, 13 nt, Human
cuguauuuuaaaa

SEQ ID NO: 2693372 - RNA, 18 nt, Human
cugucucuacuaaaaaua

SEQ ID NO: 2693373 - RNA, 17 nt, Human
cugucuccucucucugu

SEQ ID NO: 2693374 - RNA, 20 nt, Human
cugucuccucucucuguaau

SEQ ID NO: 2693375 - RNA, 22 nt, Human
cuguaauaaacucauuucuagc

SEQ ID NO: 2693376 - RNA, 16 nt, Human
cuggccuucggccucc

SEQ ID NO: 2693377 - RNA, 17 nt, Human
cuggccuucggccucca

SEQ ID NO: 2693378 - RNA, 18 nt, Human
cuggccuucggccuccau

SEQ ID NO: 2693379 - RNA, 21 nt, Human
cuggccuucggccuccauccu

SEQ ID NO: 2693380 - RNA, 15 nt, Human
cuggccuucggccuc

SEQ ID NO: 2693381 - RNA, 20 nt, Human
cugggaaagggauuuucagc

SEQ ID NO: 2693382 - RNA, 15 nt, Human
cugccagcaacgcag

SEQ ID NO: 2693383 - RNA, 12 nt, Human
cugcacugucaa

SEQ ID NO: 2693384 - RNA, 15 nt, Human
cugcuugccaucccu

SEQ ID NO: 2693385 - RNA, 16 nt, Human
cugcuugccaucccuc

SEQ ID NO: 2693386 - RNA, 22 nt, Human
cugcuugccaucccucccucca

SEQ ID NO: 2693387 - RNA, 20 nt, Human
cugcuugccaucccucccuc

SEQ ID NO: 2693388 - RNA, 19 nt, Human
cugcuugccaucccucccu

SEQ ID NO: 2693389 - RNA, 18 nt, Human
cugcuugccaucccuccc

SEQ ID NO: 2693390 - RNA, 15 nt, Human
cugcccucuccuggg

SEQ ID NO: 2693391 - RNA, 14 nt, Human
cugcccucuccugg

SEQ ID NO: 2693392 - RNA, 13 nt, Human
cugcccucuccug

SEQ ID NO: 2693393 - RNA, 12 nt, Human
cugcccucuccu

SEQ ID NO: 2693394 - RNA, 23 nt, Human
cugaagaagcaccaaucaugaau

SEQ ID NO: 2693395 - RNA, 17 nt, Human
cugaacaucacagcuua

SEQ ID NO: 2693396 - RNA, 22 nt, Human
cucuucuuuaaagggauggcaa

SEQ ID NO: 2693397 - RNA, 20 nt, Human
cucugcuugccaucccuccc

SEQ ID NO: 2693398 - RNA, 17 nt, Human
cucugcuugccaucccu

SEQ ID NO: 2693399 - RNA, 14 nt, Human
cucugcuugccauc

SEQ ID NO: 2693400 - RNA, 12 nt, Human
cucugcuugcca

SEQ ID NO: 2693401 - RNA, 12 nt, Human
cucuggccuucg

SEQ ID NO: 2693402 - RNA, 19 nt, Human
cucuggccuucggccucca

SEQ ID NO: 2693403 - RNA, 17 nt, Human
cugacucuuaagaagac

SEQ ID NO: 2693404 - RNA, 16 nt, Human
cugacuucuaaguaaa

SEQ ID NO: 2693405 - RNA, 13 nt, Human
cugacuucuaagu

SEQ ID NO: 2693406 - RNA, 15 nt, Human
cugacuucuaaguaa

SEQ ID NO: 2693407 - RNA, 22 nt, Human
cugagaaagacuauucaaacag

SEQ ID NO: 2693408 - RNA, 23 nt, Human
cugagaaagacuauucaaacagu

SEQ ID NO: 2693409 - RNA, 16 nt, Human
cugagcgacagugaga

SEQ ID NO: 2693410 - RNA, 20 nt, Human
cugagcgacagugagacucu

SEQ ID NO: 2693411 - RNA, 14 nt, Human
cuccauccugaggc

SEQ ID NO: 2693412 - RNA, 16 nt, Human
cuccauccugaggcuc

SEQ ID NO: 2693413 - RNA, 18 nt, Human
cuccauccugaggcucca

SEQ ID NO: 2693414 - RNA, 17 nt, Human
cucccuccaccucccug

SEQ ID NO: 2693415 - RNA, 15 nt, Human
cucccuccaccuccc

SEQ ID NO: 2693416 - RNA, 17 nt, Human
cucuaggaaauauuuau

SEQ ID NO: 2693417 - RNA, 15 nt, Human
cucuaggaaauauuu

SEQ ID NO: 2693418 - RNA, 12 nt, Human
cucuccugggca

SEQ ID NO: 2693419 - RNA, 19 nt, Human
cucuccugggcagcugccu

SEQ ID NO: 2693420 - RNA, 18 nt, Human
cucuccugggcagcugcc

SEQ ID NO: 2693421 - RNA, 16 nt, Human
cucuccugggcagcug

SEQ ID NO: 2693422 - RNA, 15 nt, Human
cucuccugggcagcu

SEQ ID NO: 2693423 - RNA, 20 nt, Human
cucuccugggcagcugccuc

SEQ ID NO: 2693424 - RNA, 17 nt, Human
cggugagcuacaaaugc

SEQ ID NO: 2693425 - RNA, 22 nt, Human
cggucggguuuuauuguuuaaa

SEQ ID NO: 2693426 - RNA, 21 nt, Human
cggguuuuauuguuuaaaauc

SEQ ID NO: 2693427 - RNA, 12 nt, Human
cggccuccaucc

SEQ ID NO: 2693428 - RNA, 14 nt, Human
cggccuccauccug

SEQ ID NO: 2693429 - RNA, 14 nt, Human
cgcucucuggccuu

SEQ ID NO: 2693430 - RNA, 15 nt, Human
cgcucucuggccuuc

SEQ ID NO: 2693431 - RNA, 18 nt, Human
cgcucucuggccuucggc

SEQ ID NO: 2693432 - RNA, 18 nt, Human
cgugcacgcacacugucu

SEQ ID NO: 2693433 - RNA, 23 nt, Human
cuaaauugacacuuaaaaauggu

SEQ ID NO: 2693434 - RNA, 17 nt, Human
cuacacuccagugagac

SEQ ID NO: 2693435 - RNA, 16 nt, Human
cuacacuccagugaga

SEQ ID NO: 2693436 - RNA, 15 nt, Human
cuaagcaaaauguga

SEQ ID NO: 2693437 - RNA, 18 nt, Human
cuaagcaaaaugugauau

SEQ ID NO: 2693438 - RNA, 14 nt, Human
cuaagcaaaaugug

SEQ ID NO: 2693439 - RNA, 19 nt, Human
cuacuugggaggcugagau

SEQ ID NO: 2693440 - RNA, 15 nt, Human
cuacuugggaggcug

SEQ ID NO: 2693441 - RNA, 18 nt, Human
cuacuugggaggcugaga

SEQ ID NO: 2693442 - RNA, 17 nt, Human
cucaccccuugccauaa

SEQ ID NO: 2693443 - RNA, 13 nt, Human
cucacauuuauau

SEQ ID NO: 2693444 - RNA, 22 nt, Human
cuauauuuuuuguuaaaugauu

SEQ ID NO: 2693445 - RNA, 18 nt, Human
cuaugaaauauuauguua

SEQ ID NO: 2693446 - RNA, 13 nt, Human
cuaugaaauauua

SEQ ID NO: 2693447 - RNA, 20 nt, Human
cuauauuuuuuguuaaauga

SEQ ID NO: 2693448 - RNA, 19 nt, Human
cuauauuguuugcuaagca

SEQ ID NO: 2693449 - RNA, 20 nt, Human
cuaguauuucuaugaaauau

SEQ ID NO: 2693450 - RNA, 19 nt, Human
cuaguauuucuaugaaaua

SEQ ID NO: 2693451 - RNA, 22 nt, Human
cuaguauuucuaugaaauauua

SEQ ID NO: 2693452 - RNA, 15 nt, Human
cuaguaucaaaagaa

SEQ ID NO: 2693453 - RNA, 17 nt, Human
cuaguaucaaaagaaag

SEQ ID NO: 2693454 - RNA, 23 nt, Human
cuaguaucaaaagaaagaaaauc

SEQ ID NO: 2693455 - RNA, 15 nt, Human
cccugcaauaaaaug

SEQ ID NO: 2693456 - RNA, 14 nt, Human
cccugcaauaaaau

SEQ ID NO: 2693457 - RNA, 14 nt, Human
ccccaggugccagu

SEQ ID NO: 2693458 - RNA, 12 nt, Human
cccucccuccac

SEQ ID NO: 2693459 - RNA, 13 nt, Human
cccucccuccacc

SEQ ID NO: 2693460 - RNA, 20 nt, Human
cccucccuccaccucccugc

SEQ ID NO: 2693461 - RNA, 12 nt, Human
ccuccauccuga

SEQ ID NO: 2693462 - RNA, 13 nt, Human
ccuccauccugag

SEQ ID NO: 2693463 - RNA, 13 nt, Human
ccuccccuccucu

SEQ ID NO: 2693464 - RNA, 12 nt, Human
ccuccccuccuc

SEQ ID NO: 2693465 - RNA, 20 nt, Human
ccucagaugcacaugagcug

SEQ ID NO: 2693466 - RNA, 13 nt, Human
ccuaaacauauga

SEQ ID NO: 2693467 - RNA, 16 nt, Human
ccauccugaggcucca

SEQ ID NO: 2693468 - RNA, 15 nt, Human
ccauccugaggcucc

SEQ ID NO: 2693469 - RNA, 23 nt, Human
ccauggcacucuauguucuaaga

SEQ ID NO: 2693470 - RNA, 17 nt, Human
cccaguguuuuaggagc

SEQ ID NO: 2693471 - RNA, 16 nt, Human
cccaguguuuuaggag

SEQ ID NO: 2693472 - RNA, 14 nt, Human
cauuugcucaugga

SEQ ID NO: 2693473 - RNA, 15 nt, Human
cauuugcucauggaa

SEQ ID NO: 2693474 - RNA, 16 nt, Human
cauuugcucauggaau

SEQ ID NO: 2693475 - RNA, 17 nt, Human
ccaaagaaauguaaggg

SEQ ID NO: 2693476 - RNA, 23 nt, Human
cauuucugcaucagcugcugaaa

SEQ ID NO: 2693477 - RNA, 19 nt, Human
cauuuaaagcuuauuaaaa

SEQ ID NO: 2693478 - RNA, 18 nt, Human
ccaaggcuagaaccaccu

SEQ ID NO: 2693479 - RNA, 19 nt, Human
ccaaggcugauuaaaccaa

SEQ ID NO: 2693480 - RNA, 20 nt, Human
ccaauauucauagcagcuua

SEQ ID NO: 2693481 - RNA, 16 nt, Human
ccacaagaaaugaaag

SEQ ID NO: 2693482 - RNA, 22 nt, Human
ccacaagaaaugaaagcaggga

SEQ ID NO: 2693483 - RNA, 14 nt, Human
ccaacacgagcagg

SEQ ID NO: 2693484 - RNA, 21 nt, Human
ccaacacgagcaggcuacugu

SEQ ID NO: 2693485 - RNA, 17 nt, Human
caugggacagggaggac

SEQ ID NO: 2693486 - RNA, 23 nt, Human
caugcugucuacacuaagagaga

SEQ ID NO: 2693487 - RNA, 20 nt, Human
cauauauaacaaugcuguau

SEQ ID NO: 2693488 - RNA, 22 nt, Human
caucaagucuuucacauuuaaa

SEQ ID NO: 2693489 - RNA, 18 nt, Human
caucaaugaaugaaugaa

SEQ ID NO: 2693490 - RNA, 13 nt, Human
caucccucccucc

SEQ ID NO: 2693491 - RNA, 12 nt, Human
caucccucccuc

SEQ ID NO: 2693492 - RNA, 14 nt, Human
caucccucccucca

SEQ ID NO: 2693493 - RNA, 14 nt, Human
caucuagugagcag

SEQ ID NO: 2693494 - RNA, 22 nt, Human
caucuagugagcagucaggaaa

SEQ ID NO: 2693495 - RNA, 14 nt, Human
caguuuucugagaa

SEQ ID NO: 2693496 - RNA, 15 nt, Human
caguuuucugagaaa

SEQ ID NO: 2693497 - RNA, 19 nt, Human
caguuuucugagaaagacu

SEQ ID NO: 2693498 - RNA, 20 nt, Human
caguuuucugagaaagacua

SEQ ID NO: 2693499 - RNA, 21 nt, Human
caguugaaaagacuccaaaga

SEQ ID NO: 2693500 - RNA, 22 nt, Human
caguugaaaagacuccaaagaa

SEQ ID NO: 2693501 - RNA, 23 nt, Human
caguugaaaagacuccaaagaaa

SEQ ID NO: 2693502 - RNA, 14 nt, Human
caguugaaaagacu

SEQ ID NO: 2693503 - RNA, 18 nt, Human
caguugaaaagacuccaa

SEQ ID NO: 2693504 - RNA, 17 nt, Human
cauaccaacacgagcag

SEQ ID NO: 2693505 - RNA, 22 nt, Human
caguucggugagcuacaaaugc

SEQ ID NO: 2693506 - RNA, 16 nt, Human
caguucugaagaagau

SEQ ID NO: 2693507 - RNA, 15 nt, Human
caguucugaagaaga

SEQ ID NO: 2693508 - RNA, 22 nt, Human
caguucugaagaagaugguacc

SEQ ID NO: 2693509 - RNA, 14 nt, Human
caguucugaagaag

SEQ ID NO: 2693510 - RNA, 13 nt, Human
caguucugaagaa

SEQ ID NO: 2693511 - RNA, 12 nt, Human
caguucugaaga

SEQ ID NO: 2693512 - RNA, 21 nt, Human
caguuaccucugccucagaaa

SEQ ID NO: 2693513 - RNA, 20 nt, Human
caguguuuuaggagcaugag

SEQ ID NO: 2693514 - RNA, 16 nt, Human
caguguuuuaggagca

SEQ ID NO: 2693515 - RNA, 14 nt, Human
cagugucaaugcag

SEQ ID NO: 2693516 - RNA, 21 nt, Human
gccuucggccuccauccugag

SEQ ID NO: 2693517 - RNA, 20 nt, Human
gccuucggccuccauccuga

SEQ ID NO: 2693518 - RNA, 12 nt, Human
gccuccauccug

SEQ ID NO: 2693519 - RNA, 15 nt, Human
gccucuuagaugcag

SEQ ID NO: 2693520 - RNA, 19 nt, Human
gcuccaccuugcagcucuc

SEQ ID NO: 2693521 - RNA, 15 nt, Human
gcuccacuuggucug

SEQ ID NO: 2693522 - RNA, 18 nt, Human
gcuccacuuggucuguga

SEQ ID NO: 2693523 - RNA, 19 nt, Human
gcuccacuuggucugugag

SEQ ID NO: 2693524 - RNA, 21 nt, Human
gcuccccucggagaagagcug

SEQ ID NO: 2693525 - RNA, 16 nt, Human
gcuagaacucccuuuc

SEQ ID NO: 2693526 - RNA, 18 nt, Human
gcuagaacucccuuucaa

SEQ ID NO: 2693527 - RNA, 12 nt, Human
gcuagaacuccc

SEQ ID NO: 2693528 - RNA, 13 nt, Human
gcuagaacucccu

SEQ ID NO: 2693529 - RNA, 14 nt, Human
gcuagaacucccuu

SEQ ID NO: 2693530 - RNA, 15 nt, Human
gcuagaacucccuuu

SEQ ID NO: 2693531 - RNA, 13 nt, Human
ggagaaacuggaa

SEQ ID NO: 2693532 - RNA, 22 nt, Human
ggacucauuuuaaaaaauggaa

SEQ ID NO: 2693533 - RNA, 14 nt, Human
ggccuccauccuga

SEQ ID NO: 2693534 - RNA, 15 nt, Human
ggccuccauccugag

SEQ ID NO: 2693535 - RNA, 21 nt, Human
ggcacaguuuucugagaaaga

SEQ ID NO: 2693536 - RNA, 14 nt, Human
ggcuccacuugguc

SEQ ID NO: 2693537 - RNA, 17 nt, Human
aaaaaugguuuaaaugg

SEQ ID NO: 2693538 - RNA, 15 nt, Human
aaaacuucagacaua

SEQ ID NO: 2693539 - RNA, 14 nt, Human
aaaaauaacaauga

SEQ ID NO: 2693540 - RNA, 20 nt, Human
gggaacccaaguccaagcau

SEQ ID NO: 2693541 - RNA, 22 nt, Human
gggacagucaccucauggaauu

SEQ ID NO: 2693542 - RNA, 21 nt, Human
gggacagucaccucauggaau

SEQ ID NO: 2693543 - RNA, 20 nt, Human
gggacagucaccucauggaa

SEQ ID NO: 2693544 - RNA, 11 nt, Human
aaacacagcaa

SEQ ID NO: 2693545 - RNA, 12 nt, Human
aaacacagcaag

SEQ ID NO: 2693546 - RNA, 14 nt, Human
aaacacagcaaggg

SEQ ID NO: 2693547 - RNA, 19 nt, Human
ggggaauugaggacacuga

SEQ ID NO: 2693548 - RNA, 15 nt, Human
aaacagucucaggaa

SEQ ID NO: 2693549 - RNA, 14 nt, Human
aaacaguagugaua

SEQ ID NO: 2693550 - RNA, 12 nt, Human
aaaccacagcag

SEQ ID NO: 2693551 - RNA, 15 nt, Human
aaacucguuaauuug

SEQ ID NO: 2693552 - RNA, 17 nt, Human
aaagcacugacuucuaa

SEQ ID NO: 2693553 - RNA, 21 nt, Human
aaagcacugacuucuaaguaa

SEQ ID NO: 2693554 - RNA, 14 nt, Human
aaagguacuucaaa

SEQ ID NO: 2693555 - RNA, 20 nt, Human
aaagggauggcaagaugugg

SEQ ID NO: 2693556 - RNA, 19 nt, Human
aaacuucagacauagaauu

SEQ ID NO: 2693557 - RNA, 23 nt, Human
aaacuucagcgguuuauauaagc

SEQ ID NO: 2693558 - RNA, 13 nt, Human
aaagacagugaaa

SEQ ID NO: 2693559 - RNA, 18 nt, Human
aaagacuauucaaacagu

SEQ ID NO: 2693560 - RNA, 19 nt, Human
aaagacuauucaaacaguc

SEQ ID NO: 2693561 - RNA, 17 nt, Human
aaagacuauucaaacag

SEQ ID NO: 2693562 - RNA, 21 nt, Human
aaagacuauucaaacagucuc

SEQ ID NO: 2693563 - RNA, 15 nt, Human
aaagacuccaaagaa

SEQ ID NO: 2693564 - RNA, 21 nt, Human
aaagacuccaaagaaauguaa

SEQ ID NO: 2693565 - RNA, 14 nt, Human
aaagacuccaaaga

SEQ ID NO: 2693566 - RNA, 15 nt, Human
aaagaggcagcuuga

SEQ ID NO: 2693567 - RNA, 15 nt, Human
aaagaggaaugaagu

SEQ ID NO: 2693568 - RNA, 23 nt, Human
aaaguucugcagauaaacaguag

SEQ ID NO: 2693569 - RNA, 20 nt, Human
aaagguauuuuaaucaccaa

SEQ ID NO: 2693570 - RNA, 18 nt, Human
aaaguauguuagugcaaa

SEQ ID NO: 2693571 - RNA, 19 nt, Human
aaauacacacucaaaucaa

SEQ ID NO: 2693572 - RNA, 23 nt, Human
aaauaauuuuuauauuugaaaua

SEQ ID NO: 2693573 - RNA, 22 nt, Human
aaauaauuuuuauauuugaaau

SEQ ID NO: 2693574 - RNA, 15 nt, Human
aaauacacacucaaa

SEQ ID NO: 2693575 - RNA, 21 nt, Human
aaauaauuuuuauauuugaaa

SEQ ID NO: 2693576 - RNA, 23 nt, Human
guacacugccuucucaacuccaa

SEQ ID NO: 2693577 - RNA, 20 nt, Human
guaauaggcguaacuaauuu

SEQ ID NO: 2693578 - RNA, 18 nt, Human
aaauccauacauuugugu

SEQ ID NO: 2693579 - RNA, 15 nt, Human
aaauccauacauuug

SEQ ID NO: 2693580 - RNA, 17 nt, Human
aaauauuauguuaaaac

SEQ ID NO: 2693581 - RNA, 12 nt, Human
aaaucauuucug

SEQ ID NO: 2693582 - RNA, 19 nt, Human
aaaucauuucugcaucagc

SEQ ID NO: 2693583 - RNA, 21 nt, Human
aaaucauuucugcaucagcug

SEQ ID NO: 2693584 - RNA, 22 nt, Human
aaaucauuucugcaucagcugc

SEQ ID NO: 2693585 - RNA, 23 nt, Human
aaaucauuucugcaucagcugcu

SEQ ID NO: 2693586 - RNA, 22 nt, Human
guacuucaaauccuugaagauu

SEQ ID NO: 2693587 - RNA, 21 nt, Human
guacuucaaauccuugaagau

SEQ ID NO: 2693588 - RNA, 15 nt, Human
guacuucaugcuguc

SEQ ID NO: 2693589 - RNA, 20 nt, Human
guagacgugcacgcacacug

SEQ ID NO: 2693590 - RNA, 23 nt, Human
guagacgugcacgcacacugucu

SEQ ID NO: 2693591 - RNA, 15 nt, Human
gacuauucaaacagu

SEQ ID NO: 2693592 - RNA, 16 nt, Human
gacuauucaaacaguc

SEQ ID NO: 2693593 - RNA, 20 nt, Human
gacaguauggcagcuuuccu

SEQ ID NO: 2693594 - RNA, 14 nt, Human
gacagaaagcagaa

SEQ ID NO: 2693595 - RNA, 20 nt, Human
gacagaaagcagaacaguga

SEQ ID NO: 2693596 - RNA, 21 nt, Human
gacagcccuucuuuccacaga

SEQ ID NO: 2693597 - RNA, 13 nt, Human
gagcgacagugag

SEQ ID NO: 2693598 - RNA, 15 nt, Human
gagcgacagugagac

SEQ ID NO: 2693599 - RNA, 22 nt, Human
gcaguugaaaagacuccaaaga

SEQ ID NO: 2693600 - RNA, 15 nt, Human
gcagcuuauucacaa

SEQ ID NO: 2693601 - RNA, 16 nt, Human
gcauuguaaaugugcu

SEQ ID NO: 2693602 - RNA, 21 nt, Human
gaugcugucuucguacuggga

SEQ ID NO: 2693603 - RNA, 16 nt, Human
gcaauaaaauggguuu

SEQ ID NO: 2693604 - RNA, 18 nt, Human
gcaauagucaaauugugu

SEQ ID NO: 2693605 - RNA, 13 nt, Human
cuucucacauuua

SEQ ID NO: 2693606 - RNA, 20 nt, Human
cuucucacauuuauauuuuu

SEQ ID NO: 2693607 - RNA, 21 nt, Human
cuucuaaguaaaaccacagca

SEQ ID NO: 2693608 - RNA, 13 nt, Human
cuucuaaguaaaa

SEQ ID NO: 2693609 - RNA, 17 nt, Human
cuucuaaguaaaaccac

SEQ ID NO: 2693610 - RNA, 16 nt, Human
cuuggucugugagaug

SEQ ID NO: 2693611 - RNA, 19 nt, Human
cuuggucugugagaugcua

SEQ ID NO: 2693612 - RNA, 18 nt, Human
gaaagaaaaucaggcugg

SEQ ID NO: 2693613 - RNA, 20 nt, Human
gaaagggauuuucagcccuc

SEQ ID NO: 2693614 - RNA, 12 nt, Human
gaaagggauuuu

SEQ ID NO: 2693615 - RNA, 21 nt, Human
gaaaacuuuaugcuaagugaa

SEQ ID NO: 2693616 - RNA, 16 nt, Human
gaaaagacuccaaaga

SEQ ID NO: 2693617 - RNA, 17 nt, Human
gaaaagacuccaaagaa

SEQ ID NO: 2693618 - RNA, 14 nt, Human
gaaaagacuccaaa

SEQ ID NO: 2693619 - RNA, 16 nt, Human
gaacccaaguccaagc

SEQ ID NO: 2693620 - RNA, 17 nt, Human
gaacccaaguccaagca

SEQ ID NO: 2693621 - RNA, 17 nt, Human
gaacccgggaggcagag

SEQ ID NO: 2693622 - RNA, 19 nt, Human
cuggauaguccgucucugc

SEQ ID NO: 2693623 - RNA, 18 nt, Human
cuggauaguccgucucug

SEQ ID NO: 2693624 - RNA, 21 nt, Human
cuuaaaaaugguuuaaauggu

SEQ ID NO: 2693625 - RNA, 19 nt, Human
cuguuauaaucuuucacag

SEQ ID NO: 2693626 - RNA, 13 nt, Human
cuguuauaaucuu

SEQ ID NO: 2693627 - RNA, 23 nt, Human
cugucggagcccugucuccucuc

SEQ ID NO: 2693628 - RNA, 17 nt, Human
cugucggagcccugucu

SEQ ID NO: 2693629 - RNA, 23 nt, Human
cuaugucauuugcuggagcucug

SEQ ID NO: 2693630 - RNA, 13 nt, Human
cucaaaacugcac

SEQ ID NO: 2693631 - RNA, 23 nt, Human
cucagaaaacaaggaugaauuaa

SEQ ID NO: 2693632 - RNA, 19 nt, Human
cucagaaaacaaggaugaa

SEQ ID NO: 2693633 - RNA, 14 nt, Human
cuaacuggacuggu

SEQ ID NO: 2693634 - RNA, 15 nt, Human
cgguuuauauaagcu

SEQ ID NO: 2693635 - RNA, 23 nt, Human
cggagaagagcuguucacagcca

SEQ ID NO: 2693636 - RNA, 24 nt, Human
cggagaagagcuguucacagccag

SEQ ID NO: 2693637 - RNA, 19 nt, Human
cucucuggccuucggccuc

SEQ ID NO: 2693638 - RNA, 22 nt, Human
cucucuggccuucggccuccau

SEQ ID NO: 2693639 - RNA, 17 nt, Human
cucucuggccuucggcc

SEQ ID NO: 2693640 - RNA, 21 nt, Human
cugacacaugcugaacaucac

SEQ ID NO: 2693641 - RNA, 13 nt, Human
cugaaagaggaau

SEQ ID NO: 2693642 - RNA, 17 nt, Human
cugaaagaggaaugaag

SEQ ID NO: 2693643 - RNA, 24 nt, Human
cccagccagcaguucagagcugcc

SEQ ID NO: 2693644 - RNA, 13 nt, Human
ccccugcacucca

SEQ ID NO: 2693645 - RNA, 22 nt, Human
cccuccucugcuugccaucccu

SEQ ID NO: 2693646 - RNA, 13 nt, Human
cccuccucugcuu

SEQ ID NO: 2693647 - RNA, 15 nt, Human
ccaucccucccucca

SEQ ID NO: 2693648 - RNA, 14 nt, Human
ccaucccucccucc

SEQ ID NO: 2693649 - RNA, 13 nt, Human
ccaucccucccuc

SEQ ID NO: 2693650 - RNA, 13 nt, Human
cccaacuccagaa

SEQ ID NO: 2693651 - RNA, 17 nt, Human
ccugucucuacuaaaaa

SEQ ID NO: 2693652 - RNA, 21 nt, Human
ccucauuuuuauaaugucccu

SEQ ID NO: 2693653 - RNA, 16 nt, Human
ccucccuucucuucac

SEQ ID NO: 2693654 - RNA, 12 nt, Human
ccucggagaaga

SEQ ID NO: 2693655 - RNA, 14 nt, Human
ccucggagaagagc

SEQ ID NO: 2693656 - RNA, 23 nt, Human
cacuccagccugagcgacaguga

SEQ ID NO: 2693657 - RNA, 12 nt, Human
cacuccagccug

SEQ ID NO: 2693658 - RNA, 13 nt, Human
cacuccagccuga

SEQ ID NO: 2693659 - RNA, 12 nt, Human
cagaacagugau

SEQ ID NO: 2693660 - RNA, 17 nt, Human
cagaacagugauuacca

SEQ ID NO: 2693661 - RNA, 11 nt, Human
cagaacaguga

SEQ ID NO: 2693662 - RNA, 18 nt, Human
cagaacagugauuaccag

SEQ ID NO: 2693663 - RNA, 17 nt, Human
cacuuguguuuugcaag

SEQ ID NO: 2693664 - RNA, 15 nt, Human
cacuuaaaaaugguu

SEQ ID NO: 2693665 - RNA, 23 nt, Human
caauaaaauccauacauuugugu

SEQ ID NO: 2693666 - RNA, 20 nt, Human
caauaaaauccauacauuug

SEQ ID NO: 2693667 - RNA, 15 nt, Human
caauaaaauggguuu

SEQ ID NO: 2693668 - RNA, 17 nt, Human
caaacauauauaacaau

SEQ ID NO: 2693669 - RNA, 16 nt, Human
caaacagucucaggaa

SEQ ID NO: 2693670 - RNA, 17 nt, Human
caaacagucucaggaaa

SEQ ID NO: 2693671 - RNA, 15 nt, Human
caaacagucucagga

SEQ ID NO: 2693672 - RNA, 21 nt, Human
caaaaggauaaugaauacuuu

SEQ ID NO: 2693673 - RNA, 15 nt, Human
auuuuuauauuugaa

SEQ ID NO: 2693674 - RNA, 21 nt, Human
auuuuauaucaauuuaaaaaa

SEQ ID NO: 2693675 - RNA, 19 nt, Human
caagacccaaaaggcagaa

SEQ ID NO: 2693676 - RNA, 21 nt, Human
caaaucuuaacuugaaggagu

SEQ ID NO: 2693677 - RNA, 22 nt, Human
auuaugaauuacauuuguauaa

SEQ ID NO: 2693678 - RNA, 20 nt, Human
auuaugaauuacauuuguau

SEQ ID NO: 2693679 - RNA, 19 nt, Human
auuaugaauuacauuugua

SEQ ID NO: 2693680 - RNA, 15 nt, Human
auuguuuaaaaucau

SEQ ID NO: 2693681 - RNA, 20 nt, Human
auuucauaccuaucaucuua

SEQ ID NO: 2693682 - RNA, 14 nt, Human
auuucuaugaaaua

SEQ ID NO: 2693683 - RNA, 16 nt, Human
auuuaauaaaugugcc

SEQ ID NO: 2693684 - RNA, 18 nt, Human
ccacagaagcuccaggua

SEQ ID NO: 2693685 - RNA, 18 nt, Human
ccaccagucugacuguuu

SEQ ID NO: 2693686 - RNA, 16 nt, Human
ccacagaagcuccagg

SEQ ID NO: 2693687 - RNA, 13 nt, Human
cauuaucucaaaa

SEQ ID NO: 2693688 - RNA, 12 nt, Human
cauuaucucaaa

SEQ ID NO: 2693689 - RNA, 17 nt, Human
cagggaggacgcucucu

SEQ ID NO: 2693690 - RNA, 18 nt, Human
cagggaggacgcucucug

SEQ ID NO: 2693691 - RNA, 15 nt, Human
cagucucaggaaauc

SEQ ID NO: 2693692 - RNA, 15 nt, Human
cagucaccucaugga

SEQ ID NO: 2693693 - RNA, 15 nt, Human
cagagcugcccucuc

SEQ ID NO: 2693694 - RNA, 13 nt, Human
cagagcugcccuc

SEQ ID NO: 2693695 - RNA, 17 nt, Human
cagagcugcccucuccu

SEQ ID NO: 2693696 - RNA, 22 nt, Human
cagcacagccucuuagaugcag

SEQ ID NO: 2693697 - RNA, 14 nt, Human
cagccagcaguuca

SEQ ID NO: 2693698 - RNA, 21 nt, Human
cagccagcaguucagagcugc

SEQ ID NO: 2693699 - RNA, 15 nt, Human
cagccagcaguucag

SEQ ID NO: 2693700 - RNA, 22 nt, Human
cagccagcaguucagagcugcc

SEQ ID NO: 2693701 - RNA, 20 nt, Human
cagcaguugaaaagacucca

SEQ ID NO: 2693702 - RNA, 21 nt, Human
cagcaguugaaaagacuccaa

SEQ ID NO: 2693703 - RNA, 17 nt, Human
cagcaguugaaaagacu

SEQ ID NO: 2693704 - RNA, 22 nt, Human
cagcaguugaaaagacuccaaa

SEQ ID NO: 2693705 - RNA, 19 nt, Human
cagccugagcgacagugag

SEQ ID NO: 2693706 - RNA, 22 nt, Human
cagccugagcgacagugagacu

SEQ ID NO: 2693707 - RNA, 18 nt, Human
cagccugagcgacaguga

SEQ ID NO: 2693708 - RNA, 20 nt, Human
cagcccuucuuuccacagaa

SEQ ID NO: 2693709 - RNA, 19 nt, Human
cagcccuucuuuccacaga

SEQ ID NO: 2693710 - RNA, 15 nt, Human
cagcccuucuuucca

SEQ ID NO: 2693711 - RNA, 22 nt, Human
cagcugccuccccuccucugcu

SEQ ID NO: 2693712 - RNA, 21 nt, Human
cagcugccuccccuccucugc

SEQ ID NO: 2693713 - RNA, 24 nt, Human
cagcugccuccccuccucugcuug

SEQ ID NO: 2693714 - RNA, 23 nt, Human
cagcugccuccccuccucugcuu

SEQ ID NO: 2693715 - RNA, 20 nt, Human
cagcuccccucggagaagag

SEQ ID NO: 2693716 - RNA, 17 nt, Human
cagcuccccucggagaa

SEQ ID NO: 2693717 - RNA, 18 nt, Human
cagcuccccucggagaag

SEQ ID NO: 2693718 - RNA, 16 nt, Human
cagcuccccucggaga

SEQ ID NO: 2693719 - RNA, 23 nt, Human
caggaaaucaaauaugcaaagca

SEQ ID NO: 2693720 - RNA, 18 nt, Human
auuauauuuauuacugua

SEQ ID NO: 2693721 - RNA, 15 nt, Human
auuauauuuauuacu

SEQ ID NO: 2693722 - RNA, 21 nt, Human
auuauguuaaaacugggacag

SEQ ID NO: 2693723 - RNA, 16 nt, Human
auucaaacagucucag

SEQ ID NO: 2693724 - RNA, 18 nt, Human
auucaaacagucucagga

SEQ ID NO: 2693725 - RNA, 19 nt, Human
auucaaacagucucaggaa

SEQ ID NO: 2693726 - RNA, 20 nt, Human
auucaaacagucucaggaaa

SEQ ID NO: 2693727 - RNA, 15 nt, Human
auuauauuuacaaau

SEQ ID NO: 2693728 - RNA, 19 nt, Human
auugacacuuaaaaauggu

SEQ ID NO: 2693729 - RNA, 15 nt, Human
auugacacuuaaaaa

SEQ ID NO: 2693730 - RNA, 17 nt, Human
auugacacuuaaaaaug

SEQ ID NO: 2693731 - RNA, 18 nt, Human
auuuuuuguuaaaugauu

SEQ ID NO: 2693732 - RNA, 23 nt, Human
auuuuuucucuaggaaauauuua

SEQ ID NO: 2693733 - RNA, 20 nt, Human
auuuuuucucuaggaaauau

SEQ ID NO: 2693734 - RNA, 21 nt, Human
auuuuuguuuucauuaucuca

SEQ ID NO: 2693735 - RNA, 22 nt, Human
auuuuugugauuuugugauuga

SEQ ID NO: 2693736 - RNA, 19 nt, Human
auuuuucuuauuucauuuc

SEQ ID NO: 2693737 - RNA, 20 nt, Human
auuuuucuuauuucauuucu

SEQ ID NO: 2693738 - RNA, 15 nt, Human
auuuuucuuauuuca

SEQ ID NO: 2693739 - RNA, 14 nt, Human
auuuuccugaaaac

SEQ ID NO: 2693740 - RNA, 14 nt, Human
auuuucuauaauuu

SEQ ID NO: 2693741 - RNA, 15 nt, Human
auuuucuauaauuua

SEQ ID NO: 2693742 - RNA, 12 nt, Human
auuuuaauaaug

SEQ ID NO: 2693743 - RNA, 16 nt, Human
auuuuaaaagaaugau

SEQ ID NO: 2693744 - RNA, 23 nt, Human
auuuuaaaagaaugauuaugaau

SEQ ID NO: 2693745 - RNA, 14 nt, Human
auuuguauaaaaua

SEQ ID NO: 2693746 - RNA, 22 nt, Human
auuuguaguguuggagaagaac

SEQ ID NO: 2693747 - RNA, 19 nt, Human
auuuguaguguuggagaag

SEQ ID NO: 2693748 - RNA, 14 nt, Human
auuuauuuuaauaa

SEQ ID NO: 2693749 - RNA, 13 nt, Human
auugucuagugaa

SEQ ID NO: 2693750 - RNA, 13 nt, Human
auugacuuuuuau

SEQ ID NO: 2693751 - RNA, 19 nt, Human
auuggagcucgugggacag

SEQ ID NO: 2693752 - RNA, 19 nt, Human
auuggacaguaaaauccac

SEQ ID NO: 2693753 - RNA, 20 nt, Human
augcuagaacucccuuucaa

SEQ ID NO: 2693754 - RNA, 21 nt, Human
augcuagaacucccuuucaac

SEQ ID NO: 2693755 - RNA, 22 nt, Human
augcuagaacucccuuucaaca

SEQ ID NO: 2693756 - RNA, 16 nt, Human
uuucaaacauauauaa

SEQ ID NO: 2693757 - RNA, 17 nt, Human
uuucaaacauauauaac

SEQ ID NO: 2693758 - RNA, 19 nt, Human
auggcuaagcaaaauguga

SEQ ID NO: 2693759 - RNA, 16 nt, Human
auggcacuaguauuuc

SEQ ID NO: 2693760 - RNA, 14 nt, Human
auggcacuaguauu

SEQ ID NO: 2693761 - RNA, 15 nt, Human
augauaacuggaaac

SEQ ID NO: 2693762 - RNA, 14 nt, Human
augauuaaguaaug

SEQ ID NO: 2693763 - RNA, 18 nt, Human
augauuaaguaaugauaa

SEQ ID NO: 2693764 - RNA, 17 nt, Human
augccauuuaaagcuua

SEQ ID NO: 2693765 - RNA, 21 nt, Human
augccauuuaaagcuuauuaa

SEQ ID NO: 2693766 - RNA, 13 nt, Human
augcaguucugaa

SEQ ID NO: 2693767 - RNA, 18 nt, Human
uuuaaauauaugcuaagu

SEQ ID NO: 2693768 - RNA, 15 nt, Human
uuugaaauauugacu

SEQ ID NO: 2693769 - RNA, 18 nt, Human
uuucucccagucauuuaa

SEQ ID NO: 2693770 - RNA, 17 nt, Human
uuucucccagucauuua

SEQ ID NO: 2693771 - RNA, 21 nt, Human
augguucccuugaugaagaag

SEQ ID NO: 2693772 - RNA, 14 nt, Human
uuugcaagccagau

SEQ ID NO: 2693773 - RNA, 16 nt, Human
auguacuucaugcugu

SEQ ID NO: 2693774 - RNA, 12 nt, Human
auguagaggaga

SEQ ID NO: 2693775 - RNA, 13 nt, Human
auguagaggagaa

SEQ ID NO: 2693776 - RNA, 17 nt, Human
auguagaggagaaacug

SEQ ID NO: 2693777 - RNA, 19 nt, Human
auguagaggagaaacugga

SEQ ID NO: 2693778 - RNA, 16 nt, Human
auguccacugguucuu

SEQ ID NO: 2693779 - RNA, 17 nt, Human
auguccacugguucuuc

SEQ ID NO: 2693780 - RNA, 17 nt, Human
uuugugaagcaaaauuu

SEQ ID NO: 2693781 - RNA, 21 nt, Human
uuuguaguguuggagaagaac

SEQ ID NO: 2693782 - RNA, 19 nt, Human
uuuguaguguuggagaaga

SEQ ID NO: 2693783 - RNA, 14 nt, Human
uucggccuccaucc

SEQ ID NO: 2693784 - RNA, 15 nt, Human
uucggccuccauccu

SEQ ID NO: 2693785 - RNA, 23 nt, Human
uucuaagaagugaaaaucuacac

SEQ ID NO: 2693786 - RNA, 13 nt, Human
uucuaagaaguga

SEQ ID NO: 2693787 - RNA, 15 nt, Human
uucuaaguaaaacca

SEQ ID NO: 2693788 - RNA, 16 nt, Human
uucuaaguaaaaccac

SEQ ID NO: 2693789 - RNA, 19 nt, Human
uucuagcaugaagacagag

SEQ ID NO: 2693790 - RNA, 17 nt, Human
aucaggguuaguauugu

SEQ ID NO: 2693791 - RNA, 22 nt, Human
aucacuugucaauaaaauccau

SEQ ID NO: 2693792 - RNA, 20 nt, Human
auauuuuuuguuaaaugauu

SEQ ID NO: 2693793 - RNA, 18 nt, Human
auauuuuuuguuaaauga

SEQ ID NO: 2693794 - RNA, 14 nt, Human
aucaacagauaaau

SEQ ID NO: 2693795 - RNA, 19 nt, Human
uuccguagguuauuuucag

SEQ ID NO: 2693796 - RNA, 12 nt, Human
uucucuaggaaa

SEQ ID NO: 2693797 - RNA, 19 nt, Human
uugaacccgggaggcagag

SEQ ID NO: 2693798 - RNA, 17 nt, Human
uugaaauuguauuacaa

SEQ ID NO: 2693799 - RNA, 18 nt, Human
uugaacccgggaggcaga

SEQ ID NO: 2693800 - RNA, 13 nt, Human
uugcaucaauuuu

SEQ ID NO: 2693801 - RNA, 22 nt, Human
uugcaagccagauuuuccugaa

SEQ ID NO: 2693802 - RNA, 14 nt, Human
aucucauuuccaag

SEQ ID NO: 2693803 - RNA, 17 nt, Human
uugaagggaaauuucag

SEQ ID NO: 2693804 - RNA, 19 nt, Human
aucuacacuccagugagac

SEQ ID NO: 2693805 - RNA, 18 nt, Human
aucuacacuccagugaga

SEQ ID NO: 2693806 - RNA, 14 nt, Human
aucuuauaauuuaa

SEQ ID NO: 2693807 - RNA, 16 nt, Human
augaauuacauuugua

SEQ ID NO: 2693808 - RNA, 15 nt, Human
augaauuacauuugu

SEQ ID NO: 2693809 - RNA, 15 nt, Human
augaauuaaguuuuu

SEQ ID NO: 2693810 - RNA, 23 nt, Human
augaauggcuaagcaaaauguga

SEQ ID NO: 2693811 - RNA, 14 nt, Human
auaagccagacauc

SEQ ID NO: 2693812 - RNA, 14 nt, Human
auaaucuuucacag

SEQ ID NO: 2693813 - RNA, 15 nt, Human
uuagggagagaagau

SEQ ID NO: 2693814 - RNA, 16 nt, Human
uuaggguuaugauuaa

SEQ ID NO: 2693815 - RNA, 14 nt, Human
uuaggguuaugauu

SEQ ID NO: 2693816 - RNA, 22 nt, Human
uuaaaaucauuucugcaucagc

SEQ ID NO: 2693817 - RNA, 14 nt, Human
uuaaaaucauuucu

SEQ ID NO: 2693818 - RNA, 16 nt, Human
uuaaaaaauggaacau

SEQ ID NO: 2693819 - RNA, 19 nt, Human
uuaaaaaagaaacauuugg

SEQ ID NO: 2693820 - RNA, 15 nt, Human
aguuuagcuggaaaa

SEQ ID NO: 2693821 - RNA, 17 nt, Human
aguuuaaauuguaauag

SEQ ID NO: 2693822 - RNA, 20 nt, Human
aguuuaaauuguaauaggcg

SEQ ID NO: 2693823 - RNA, 16 nt, Human
aguuuuauaugcuucu

SEQ ID NO: 2693824 - RNA, 15 nt, Human
uuauuauauuuacaa

SEQ ID NO: 2693825 - RNA, 14 nt, Human
uuauuauauuuaca

SEQ ID NO: 2693826 - RNA, 19 nt, Human
uuauguuaaaacugggaca

SEQ ID NO: 2693827 - RNA, 16 nt, Human
auacucauuaggaugg

SEQ ID NO: 2693828 - RNA, 18 nt, Human
auagauaggucagugcaa

SEQ ID NO: 2693829 - RNA, 17 nt, Human
auagaauuaacacauga

SEQ ID NO: 2693830 - RNA, 13 nt, Human
auagaaguaaaaa

SEQ ID NO: 2693831 - RNA, 19 nt, Human
uuaugauuaaguaaugaua

SEQ ID NO: 2693832 - RNA, 21 nt, Human
uuaugaauuacauuuguauaa

SEQ ID NO: 2693833 - RNA, 17 nt, Human
uuaugaauuacauuugu

SEQ ID NO: 2693834 - RNA, 16 nt, Human
uuaugaauuacauuug

SEQ ID NO: 2693835 - RNA, 14 nt, Human
uuaugaauuacauu

SEQ ID NO: 2693836 - RNA, 19 nt, Human
uuauauuugaaauauugac

SEQ ID NO: 2693837 - RNA, 17 nt, Human
auacuauggaauuucuc

SEQ ID NO: 2693838 - RNA, 14 nt, Human
agugcaaauuguca

SEQ ID NO: 2693839 - RNA, 22 nt, Human
agugaacaaauuuacagagaca

SEQ ID NO: 2693840 - RNA, 23 nt, Human
agugaacaaauuuacagagacag

SEQ ID NO: 2693841 - RNA, 21 nt, Human
agugaacaaauuuacagagac

SEQ ID NO: 2693842 - RNA, 18 nt, Human
agucuuucacauuuaaau

SEQ ID NO: 2693843 - RNA, 16 nt, Human
agucuuucacauuuaa

SEQ ID NO: 2693844 - RNA, 22 nt, Human
uguugcccacagcuguaugauu

SEQ ID NO: 2693845 - RNA, 15 nt, Human
uguucuaagaaguga

SEQ ID NO: 2693846 - RNA, 13 nt, Human
aguaaugauaacu

SEQ ID NO: 2693847 - RNA, 13 nt, Human
aguaauuggaaag

SEQ ID NO: 2693848 - RNA, 12 nt, Human
aguaauuggaaa

SEQ ID NO: 2693849 - RNA, 16 nt, Human
aguaaaaccacagcag

SEQ ID NO: 2693850 - RNA, 17 nt, Human
aguaaaaccacagcagu

SEQ ID NO: 2693851 - RNA, 19 nt, Human
aguaaaaccacagcaguug

SEQ ID NO: 2693852 - RNA, 20 nt, Human
aguaaaaccacagcaguuga

SEQ ID NO: 2693853 - RNA, 16 nt, Human
uguaguguuggagaag

SEQ ID NO: 2693854 - RNA, 18 nt, Human
uguaguguuggagaagaa

SEQ ID NO: 2693855 - RNA, 17 nt, Human
uguaguguuggagaaga

SEQ ID NO: 2693856 - RNA, 13 nt, Human
uguaagggaaacu

SEQ ID NO: 2693857 - RNA, 18 nt, Human
uguaagggaaacugccag

SEQ ID NO: 2693858 - RNA, 19 nt, Human
uguaagggaaacugccagc

SEQ ID NO: 2693859 - RNA, 14 nt, Human
agguugcagugagc

SEQ ID NO: 2693860 - RNA, 16 nt, Human
aggugcuacaaaaaca

SEQ ID NO: 2693861 - RNA, 16 nt, Human
agucucaggaaaucaa

SEQ ID NO: 2693862 - RNA, 13 nt, Human
agucucaggaaau

SEQ ID NO: 2693863 - RNA, 14 nt, Human
agucaggaaagaga

SEQ ID NO: 2693864 - RNA, 20 nt, Human
uguccagccccguagacgug

SEQ ID NO: 2693865 - RNA, 19 nt, Human
ugggaggcugagaugggag

SEQ ID NO: 2693866 - RNA, 13 nt, Human
agggagagaagau

SEQ ID NO: 2693867 - RNA, 14 nt, Human
agggagagaagaua

SEQ ID NO: 2693868 - RNA, 23 nt, Human
agggacuucugucuucacaacag

SEQ ID NO: 2693869 - RNA, 22 nt, Human
agggcuguuauaaucuuucaca

SEQ ID NO: 2693870 - RNA, 20 nt, Human
ugggaacccaaguccaagca

SEQ ID NO: 2693871 - RNA, 16 nt, Human
agggaaacugccagca

SEQ ID NO: 2693872 - RNA, 19 nt, Human
agggaaacugccagcaacg

SEQ ID NO: 2693873 - RNA, 21 nt, Human
agggaaacugccagcaacgca

SEQ ID NO: 2693874 - RNA, 23 nt, Human
agggaaacugccagcaacgcagg

SEQ ID NO: 2693875 - RNA, 14 nt, Human
agggaaacugccag

SEQ ID NO: 2693876 - RNA, 15 nt, Human
agggaaacugccagc

SEQ ID NO: 2693877 - RNA, 14 nt, Human
ugggaaagcauugu

SEQ ID NO: 2693878 - RNA, 16 nt, Human
ugggaaagcauuguaa

SEQ ID NO: 2693879 - RNA, 17 nt, Human
ugggaaagcauuguaaa

SEQ ID NO: 2693880 - RNA, 18 nt, Human
ugggaaagcauuguaaau

SEQ ID NO: 2693881 - RNA, 21 nt, Human
ugggaaagcauuguaaaugug

SEQ ID NO: 2693882 - RNA, 18 nt, Human
ugggaaacaaaaggauaa

SEQ ID NO: 2693883 - RNA, 23 nt, Human
uggcuauaggugcuacaaaaaca

SEQ ID NO: 2693884 - RNA, 18 nt, Human
uggcuaagcaaaauguga

SEQ ID NO: 2693885 - RNA, 15 nt, Human
uggcuauaggugcua

SEQ ID NO: 2693886 - RNA, 19 nt, Human
uggcuauaggugcuacaaa

SEQ ID NO: 2693887 - RNA, 11 nt, Human
aggcuccacuu

SEQ ID NO: 2693888 - RNA, 17 nt, Human
aggcuccacuuggucug

SEQ ID NO: 2693889 - RNA, 21 nt, Human
aggcuccacuuggucugugag

SEQ ID NO: 2693890 - RNA, 22 nt, Human
aggcuccacuuggucugugaga

SEQ ID NO: 2693891 - RNA, 16 nt, Human
uggagaagaacugaaa

SEQ ID NO: 2693892 - RNA, 20 nt, Human
aggcagcucuaaaugucaau

SEQ ID NO: 2693893 - RNA, 18 nt, Human
aggaaauauuuauuuuaa

SEQ ID NO: 2693894 - RNA, 14 nt, Human
aggaaauauuuauu

SEQ ID NO: 2693895 - RNA, 19 nt, Human
aggaaaucaaauaugcaaa

SEQ ID NO: 2693896 - RNA, 19 nt, Human
aggaauugacccacaagaa

SEQ ID NO: 2693897 - RNA, 21 nt, Human
agcuuauugucuagugaaacu

SEQ ID NO: 2693898 - RNA, 20 nt, Human
agcuuauuaaaacucauuuu

SEQ ID NO: 2693899 - RNA, 15 nt, Human
agcuuauuaaaacuc

SEQ ID NO: 2693900 - RNA, 19 nt, Human
aggaaagagaacuuccaga

SEQ ID NO: 2693901 - RNA, 13 nt, Human
aggaaagagaacu

SEQ ID NO: 2693902 - RNA, 14 nt, Human
ugcuaguaauugga

SEQ ID NO: 2693903 - RNA, 16 nt, Human
ugcuaguaauuggaaa

SEQ ID NO: 2693904 - RNA, 23 nt, Human
agcugccuccccuccucugcuug

SEQ ID NO: 2693905 - RNA, 22 nt, Human
agcugccuccccuccucugcuu

SEQ ID NO: 2693906 - RNA, 21 nt, Human
agcugccuccccuccucugcu

SEQ ID NO: 2693907 - RNA, 20 nt, Human
agcugccuccccuccucugc

SEQ ID NO: 2693908 - RNA, 19 nt, Human
agcugccuccccuccucug

SEQ ID NO: 2693909 - RNA, 18 nt, Human
agcugccuccccuccucu

SEQ ID NO: 2693910 - RNA, 17 nt, Human
agcugccuccccuccuc

SEQ ID NO: 2693911 - RNA, 13 nt, Human
agcuggaaaagua

SEQ ID NO: 2693912 - RNA, 14 nt, Human
ugcagugagccgag

SEQ ID NO: 2693913 - RNA, 19 nt, Human
agccugagcgacagugaga

SEQ ID NO: 2693914 - RNA, 18 nt, Human
agccugagcgacagugag

SEQ ID NO: 2693915 - RNA, 17 nt, Human
agcccuucuuuccacag

SEQ ID NO: 2693916 - RNA, 19 nt, Human
agcccuucuuuccacagaa

SEQ ID NO: 2693917 - RNA, 18 nt, Human
agcccuucuuuccacaga

SEQ ID NO: 2693918 - RNA, 19 nt, Human
agcuauggugucauaggcu

SEQ ID NO: 2693919 - RNA, 18 nt, Human
ucuguuuuauaauuuugu

SEQ ID NO: 2693920 - RNA, 18 nt, Human
ucuuaauuaaaagaauau

SEQ ID NO: 2693921 - RNA, 21 nt, Human
ucuuaauuaaaagaauauuuu

SEQ ID NO: 2693922 - RNA, 14 nt, Human
ucuuaauuaaaaga

SEQ ID NO: 2693923 - RNA, 21 nt, Human
agacuggauaguccgucucug

SEQ ID NO: 2693924 - RNA, 18 nt, Human
agacuggcacaguuuucu

SEQ ID NO: 2693925 - RNA, 14 nt, Human
agacuggcacaguu

SEQ ID NO: 2693926 - RNA, 15 nt, Human
agacuggcacaguuu

SEQ ID NO: 2693927 - RNA, 17 nt, Human
agagacacacugaagaa

SEQ ID NO: 2693928 - RNA, 15 nt, Human
agagaaugagagaca

SEQ ID NO: 2693929 - RNA, 20 nt, Human
agagacacacugaagaagca

SEQ ID NO: 2693930 - RNA, 18 nt, Human
agagacacacugaagaag

SEQ ID NO: 2693931 - RNA, 17 nt, Human
ucuuuaaaauacacacu

SEQ ID NO: 2693932 - RNA, 21 nt, Human
ucuuuaaagggauggcaagau

SEQ ID NO: 2693933 - RNA, 16 nt, Human
agacuccaaagaaaug

SEQ ID NO: 2693934 - RNA, 19 nt, Human
agacuccaaagaaauguaa

SEQ ID NO: 2693935 - RNA, 13 nt, Human
agacuccaaagaa

SEQ ID NO: 2693936 - RNA, 14 nt, Human
agacuccaaagaaa

SEQ ID NO: 2693937 - RNA, 12 nt, Human
agacuccaaaga

SEQ ID NO: 2693938 - RNA, 18 nt, Human
agacuauucaaacagucu

SEQ ID NO: 2693939 - RNA, 20 nt, Human
agacuauucaaacagucuca

SEQ ID NO: 2693940 - RNA, 21 nt, Human
agacuauucaaacagucucag

SEQ ID NO: 2693941 - RNA, 19 nt, Human
agaaagacuauucaaacag

SEQ ID NO: 2693942 - RNA, 18 nt, Human
agaaagacuauucaaaca

SEQ ID NO: 2693943 - RNA, 20 nt, Human
agaaagacuauucaaacagu

SEQ ID NO: 2693944 - RNA, 23 nt, Human
agaaagacuauucaaacagucuc

SEQ ID NO: 2693945 - RNA, 21 nt, Human
ucugacuguuuccaucaaggg

SEQ ID NO: 2693946 - RNA, 14 nt, Human
ucugagaaagacua

SEQ ID NO: 2693947 - RNA, 15 nt, Human
ucugagaaagacuau

SEQ ID NO: 2693948 - RNA, 19 nt, Human
ucugagaaagacuauucaa

SEQ ID NO: 2693949 - RNA, 20 nt, Human
ucugagaaagacuauucaaa

SEQ ID NO: 2693950 - RNA, 23 nt, Human
ucugagaaagacuauucaaacag

SEQ ID NO: 2693951 - RNA, 21 nt, Human
ucugagaaagacuauucaaac

SEQ ID NO: 2693952 - RNA, 22 nt, Human
ucugagaaagacuauucaaaca

SEQ ID NO: 2693953 - RNA, 14 nt, Human
agaacucccuuuca

SEQ ID NO: 2693954 - RNA, 21 nt, Human
agaagaacugaaaucauacuu

SEQ ID NO: 2693955 - RNA, 11 nt, Human
ucugcuugcca

SEQ ID NO: 2693956 - RNA, 14 nt, Human
agaagcuccaggua

SEQ ID NO: 2693957 - RNA, 14 nt, Human
ucugcuugccaucc

SEQ ID NO: 2693958 - RNA, 12 nt, Human
ucugcuugccau

SEQ ID NO: 2693959 - RNA, 15 nt, Human
ucucccagucauuua

SEQ ID NO: 2693960 - RNA, 15 nt, Human
ucuccucucucugua

SEQ ID NO: 2693961 - RNA, 22 nt, Human
acuuuuuauggcacuaguauuu

SEQ ID NO: 2693962 - RNA, 19 nt, Human
agaaaacaaggaugaauua

SEQ ID NO: 2693963 - RNA, 13 nt, Human
agaaacuggaacu

SEQ ID NO: 2693964 - RNA, 15 nt, Human
agaaacuggaacucu

SEQ ID NO: 2693965 - RNA, 14 nt, Human
agaaagaaaaucag

SEQ ID NO: 2693966 - RNA, 13 nt, Human
ucucuucuuuaaa

SEQ ID NO: 2693967 - RNA, 12 nt, Human
ucucuucuuuaa

SEQ ID NO: 2693968 - RNA, 16 nt, Human
ucucuggccuucggcc

SEQ ID NO: 2693969 - RNA, 17 nt, Human
ucucuggccuucggccu

SEQ ID NO: 2693970 - RNA, 13 nt, Human
ucucuggccuucg

SEQ ID NO: 2693971 - RNA, 16 nt, Human
agauuuaccacuugug

SEQ ID NO: 2693972 - RNA, 16 nt, Human
agauugugccccugca

SEQ ID NO: 2693973 - RNA, 15 nt, Human
ugacuguuuccauca

SEQ ID NO: 2693974 - RNA, 19 nt, Human
agaugaugaugaucuuuaa

SEQ ID NO: 2693975 - RNA, 23 nt, Human
agaugcuagaacucccuuucaac

SEQ ID NO: 2693976 - RNA, 22 nt, Human
agaugcuagaacucccuuucaa

SEQ ID NO: 2693977 - RNA, 20 nt, Human
ugaagaagcaccaaucauga

SEQ ID NO: 2693978 - RNA, 14 nt, Human
ugaagaagauggua

SEQ ID NO: 2693979 - RNA, 18 nt, Human
ugaagauguagaggagaa

SEQ ID NO: 2693980 - RNA, 17 nt, Human
ugaagauguagaggaga

SEQ ID NO: 2693981 - RNA, 14 nt, Human
agagugaacaaauu

SEQ ID NO: 2693982 - RNA, 22 nt, Human
agagugaacaaauuuacagaga

SEQ ID NO: 2693983 - RNA, 16 nt, Human
ugagcuacaaaugcau

SEQ ID NO: 2693984 - RNA, 13 nt, Human
ugagcuacaaaug

SEQ ID NO: 2693985 - RNA, 14 nt, Human
ugagcuacaaaugc

SEQ ID NO: 2693986 - RNA, 15 nt, Human
ugaggacacugauau

SEQ ID NO: 2693987 - RNA, 17 nt, Human
ugagguacugagaguga

SEQ ID NO: 2693988 - RNA, 22 nt, Human
ugagguacugagagugaacaaa

SEQ ID NO: 2693989 - RNA, 13 nt, Human
ugagcgacaguga

SEQ ID NO: 2693990 - RNA, 14 nt, Human
ugagcgacagugag

SEQ ID NO: 2693991 - RNA, 16 nt, Human
ugagcgacagugagac

SEQ ID NO: 2693992 - RNA, 20 nt, Human
ugagcgacagugagacucug

SEQ ID NO: 2693993 - RNA, 14 nt, Human
agcagaacagugau

SEQ ID NO: 2693994 - RNA, 14 nt, Human
agcaacgcaggccc

SEQ ID NO: 2693995 - RNA, 22 nt, Human
agcacagccucuuagaugcagu

SEQ ID NO: 2693996 - RNA, 16 nt, Human
agcaccaaucaugaau

SEQ ID NO: 2693997 - RNA, 23 nt, Human
accacuuguguuuugcaagccag

SEQ ID NO: 2693998 - RNA, 19 nt, Human
accacuuguguuuugcaag

SEQ ID NO: 2693999 - RNA, 14 nt, Human
accacugcagaaga

SEQ ID NO: 2694000 - RNA, 19 nt, Human
accacugcagaagacagua

SEQ ID NO: 2694001 - RNA, 13 nt, Human
accacugcagaag

SEQ ID NO: 2694002 - RNA, 11 nt, Human
accacagcagu

SEQ ID NO: 2694003 - RNA, 12 nt, Human
uauuucauuucu

SEQ ID NO: 2694004 - RNA, 21 nt, Human
acccaaauguucaucaaugaa

SEQ ID NO: 2694005 - RNA, 18 nt, Human
acccaaaaggcagaagca

SEQ ID NO: 2694006 - RNA, 13 nt, Human
acccaaaaggcag

SEQ ID NO: 2694007 - RNA, 15 nt, Human
acccaaaaggcagaa

SEQ ID NO: 2694008 - RNA, 18 nt, Human
ucagaugcacaugagcug

SEQ ID NO: 2694009 - RNA, 22 nt, Human
ucaugaauuaguuuuauaugcu

SEQ ID NO: 2694010 - RNA, 21 nt, Human
uccagccugagcgacagugag

SEQ ID NO: 2694011 - RNA, 20 nt, Human
uccagccugagcgacaguga

SEQ ID NO: 2694012 - RNA, 21 nt, Human
uccaacuaucucauuuccaag

SEQ ID NO: 2694013 - RNA, 17 nt, Human
acugaggggaggggagc

SEQ ID NO: 2694014 - RNA, 22 nt, Human
acugaggggaggggagcauggg

SEQ ID NO: 2694015 - RNA, 17 nt, Human
uccugggcagcugccuc

SEQ ID NO: 2694016 - RNA, 16 nt, Human
uccugggcagcugccu

SEQ ID NO: 2694017 - RNA, 15 nt, Human
uccugggcagcugcc

SEQ ID NO: 2694018 - RNA, 23 nt, Human
uccugggcagcugccuccccucc

SEQ ID NO: 2694019 - RNA, 22 nt, Human
uccugggcagcugccuccccuc

SEQ ID NO: 2694020 - RNA, 19 nt, Human
uccugggcagcugccuccc

SEQ ID NO: 2694021 - RNA, 18 nt, Human
uccugggcagcugccucc

SEQ ID NO: 2694022 - RNA, 22 nt, Human
acugccuucucaacuccaaacu

SEQ ID NO: 2694023 - RNA, 21 nt, Human
acuggcacaguuuucugagaa

SEQ ID NO: 2694024 - RNA, 22 nt, Human
acuggcacaguuuucugagaaa

SEQ ID NO: 2694025 - RNA, 13 nt, Human
uccuucagccuga

SEQ ID NO: 2694026 - RNA, 13 nt, Human
acuaaaaauacaa

SEQ ID NO: 2694027 - RNA, 12 nt, Human
uccccuccucug

SEQ ID NO: 2694028 - RNA, 20 nt, Human
uccucaaaacuucagacaua

SEQ ID NO: 2694029 - RNA, 20 nt, Human
acucauuuuaaaaaauggaa

SEQ ID NO: 2694030 - RNA, 22 nt, Human
uauaaaauaauuuuuauauuug

SEQ ID NO: 2694031 - RNA, 21 nt, Human
uauaaaauaauuuuuauauuu

SEQ ID NO: 2694032 - RNA, 22 nt, Human
acacaucagcuugcccuguuaa

SEQ ID NO: 2694033 - RNA, 23 nt, Human
uauaaaauaauuuuuauauuuga

SEQ ID NO: 2694034 - RNA, 22 nt, Human
uagugagcagucaggaaagaga

SEQ ID NO: 2694035 - RNA, 16 nt, Human
uaguuuuauaugcuuc

SEQ ID NO: 2694036 - RNA, 15 nt, Human
uaguuuuauaugcuu

SEQ ID NO: 2694037 - RNA, 19 nt, Human
uauaauuuugugaagcaaa

SEQ ID NO: 2694038 - RNA, 14 nt, Human
uauaauuuugugaa

SEQ ID NO: 2694039 - RNA, 18 nt, Human
uauaacaaugcuguauuu

SEQ ID NO: 2694040 - RNA, 21 nt, Human
uauaggugcuacaaaaacaca

SEQ ID NO: 2694041 - RNA, 20 nt, Human
uauaggugcuacaaaaacac

SEQ ID NO: 2694042 - RNA, 23 nt, Human
uauaggugcuacaaaaacacagc

SEQ ID NO: 2694043 - RNA, 14 nt, Human
uauaggaauugacc

SEQ ID NO: 2694044 - RNA, 19 nt, Human
uauaggaauugacccacaa

SEQ ID NO: 2694045 - RNA, 13 nt, Human
uauaggaauugac

SEQ ID NO: 2694046 - RNA, 16 nt, Human
uauggcuauaggugcu

SEQ ID NO: 2694047 - RNA, 17 nt, Human
uauggcuauaggugcua

SEQ ID NO: 2694048 - RNA, 14 nt, Human
uauauuuacaaaug

SEQ ID NO: 2694049 - RNA, 15 nt, Human
uauauuuacaaaugg

SEQ ID NO: 2694050 - RNA, 21 nt, Human
acaguauggcagcuuuccuca

SEQ ID NO: 2694051 - RNA, 14 nt, Human
acagugagacucug

SEQ ID NO: 2694052 - RNA, 18 nt, Human
acagugagacucugucuc

SEQ ID NO: 2694053 - RNA, 21 nt, Human
acaguuaccucugccucagaa

SEQ ID NO: 2694054 - RNA, 17 nt, Human
acagucucaggaaauca

SEQ ID NO: 2694055 - RNA, 20 nt, Human
acagugaaagaaaauaacaa

SEQ ID NO: 2694056 - RNA, 13 nt, Human
acagucucaggaa

SEQ ID NO: 2694057 - RNA, 14 nt, Human
acagucucaggaaa

SEQ ID NO: 2694058 - RNA, 15 nt, Human
acagucucaggaaau

SEQ ID NO: 2694059 - RNA, 16 nt, Human
acagucucaggaaauc

SEQ ID NO: 2694060 - RNA, 12 nt, Human
uauuaaaacuca

SEQ ID NO: 2694061 - RNA, 15 nt, Human
uauuagaauaccaca

SEQ ID NO: 2694062 - RNA, 23 nt, Human
uauucauagcagcuuauucacaa

SEQ ID NO: 2694063 - RNA, 19 nt, Human
acaguucggugagcuacaa

SEQ ID NO: 2694064 - RNA, 22 nt, Human
acaguucggugagcuacaaaug

SEQ ID NO: 2694065 - RNA, 23 nt, Human
acaguucggugagcuacaaaugc

SEQ ID NO: 2694066 - RNA, 17 nt, Human
uauugucuagugaaacu

SEQ ID NO: 2694067 - RNA, 18 nt, Human
uauuuauuuuaauaaugu

SEQ ID NO: 2694068 - RNA, 16 nt, Human
uauuuauuuuaauaau

SEQ ID NO: 2694069 - RNA, 14 nt, Human
uauuuauuuuaaua

SEQ ID NO: 2694070 - RNA, 16 nt, Human
uagaugcaguucugaa

SEQ ID NO: 2694071 - RNA, 19 nt, Human
uagaugcaguucugaagaa

SEQ ID NO: 2694072 - RNA, 17 nt, Human
uagaugcaguucugaag

SEQ ID NO: 2694073 - RNA, 21 nt, Human
uagcaugucgucaaagcugaa

SEQ ID NO: 2694074 - RNA, 18 nt, Human
uagcaugucgucaaagcu

SEQ ID NO: 2694075 - RNA, 18 nt, Human
acaagcacuaaacaaaga

SEQ ID NO: 2694076 - RNA, 22 nt, Human
acaagaaaugaaagcagggacu

SEQ ID NO: 2694077 - RNA, 15 nt, Human
uagaacucccuuuca

SEQ ID NO: 2694078 - RNA, 21 nt, Human
uacuucaaauccuugaagauu

SEQ ID NO: 2694079 - RNA, 19 nt, Human
aauuuuuauauuugaaaua

SEQ ID NO: 2694080 - RNA, 16 nt, Human
acaaaaacacagcaag

SEQ ID NO: 2694081 - RNA, 19 nt, Human
aauuuuuucucuaggaaau

SEQ ID NO: 2694082 - RNA, 19 nt, Human
uacuucaaauccuugaaga

SEQ ID NO: 2694083 - RNA, 14 nt, Human
uacuucaaauccuu

SEQ ID NO: 2694084 - RNA, 20 nt, Human
aauuucucccagucauuuaa

SEQ ID NO: 2694085 - RNA, 23 nt, Human
aauugugugaaagguacuucaaa

SEQ ID NO: 2694086 - RNA, 13 nt, Human
uacuguaagaaaa

SEQ ID NO: 2694087 - RNA, 21 nt, Human
aauucuugccaaauauaaaua

SEQ ID NO: 2694088 - RNA, 13 nt, Human
aauugacccacaa

SEQ ID NO: 2694089 - RNA, 16 nt, Human
aauugacccacaagaa

SEQ ID NO: 2694090 - RNA, 19 nt, Human
aauugacccacaagaaaug

SEQ ID NO: 2694091 - RNA, 18 nt, Human
aauguugacaugggacau

SEQ ID NO: 2694092 - RNA, 16 nt, Human
aaugguuuaaaugguc

SEQ ID NO: 2694093 - RNA, 17 nt, Human
uacaaaaacacagcaag

SEQ ID NO: 2694094 - RNA, 18 nt, Human
uacaaaaacacagcaagg

SEQ ID NO: 2694095 - RNA, 19 nt, Human
uaacaaugcuguauuuuaa

SEQ ID NO: 2694096 - RNA, 13 nt, Human
uaaucuuucacag

SEQ ID NO: 2694097 - RNA, 15 nt, Human
aaugaaugaaugaau

SEQ ID NO: 2694098 - RNA, 23 nt, Human
aacuaucucauuuccaagcaagu

SEQ ID NO: 2694099 - RNA, 20 nt, Human
aacuaucucauuuccaagca

SEQ ID NO: 2694100 - RNA, 13 nt, Human
aacuauauuguuu

SEQ ID NO: 2694101 - RNA, 20 nt, Human
aacugaaaucauacuucuua

SEQ ID NO: 2694102 - RNA, 13 nt, Human
aacugaaaucaua

SEQ ID NO: 2694103 - RNA, 13 nt, Human
gucuucacaacag

SEQ ID NO: 2694104 - RNA, 23 nt, Human
gucucaguccaugaagauguaga

SEQ ID NO: 2694105 - RNA, 16 nt, Human
aacauauauaacaaug

SEQ ID NO: 2694106 - RNA, 19 nt, Human
aacagauuauuaccuuaca

SEQ ID NO: 2694107 - RNA, 17 nt, Human
aacagucucaggaaauc

SEQ ID NO: 2694108 - RNA, 19 nt, Human
aacagucucaggaaaucaa

SEQ ID NO: 2694109 - RNA, 14 nt, Human
guggguagacacac

SEQ ID NO: 2694110 - RNA, 18 nt, Human
aagagcuguucacagcca

SEQ ID NO: 2694111 - RNA, 16 nt, Human
aagacuccaaagaaau

SEQ ID NO: 2694112 - RNA, 17 nt, Human
aagacuccaaagaaaug

SEQ ID NO: 2694113 - RNA, 14 nt, Human
aagacuccaaagaa

SEQ ID NO: 2694114 - RNA, 14 nt, Human
aagacuauucaaac

SEQ ID NO: 2694115 - RNA, 13 nt, Human
aagacuauucaaa

SEQ ID NO: 2694116 - RNA, 16 nt, Human
aagcaaguauuagaau

SEQ ID NO: 2694117 - RNA, 19 nt, Human
aagauguagaggagaaacu

SEQ ID NO: 2694118 - RNA, 13 nt, Human
aagcaaaauguga

SEQ ID NO: 2694119 - RNA, 22 nt, Human
aagauguagaggagaaacugga

SEQ ID NO: 2694120 - RNA, 19 nt, Human
aagcaaaauuuuuucucua

SEQ ID NO: 2694121 - RNA, 22 nt, Human
aagaagcaccaaucaugaauua

SEQ ID NO: 2694122 - RNA, 13 nt, Human
aagaaaauaucac

SEQ ID NO: 2694123 - RNA, 13 nt, Human
aagacccaaaagg

SEQ ID NO: 2694124 - RNA, 13 nt, Human
aagaauauuuuaa

SEQ ID NO: 2694125 - RNA, 15 nt, Human
guuuucugagaaaga

SEQ ID NO: 2694126 - RNA, 22 nt, Human
guuuuauaauuuugugaagcaa

SEQ ID NO: 2694127 - RNA, 15 nt, Human
guuuuauaauuuugu

SEQ ID NO: 2694128 - RNA, 21 nt, Human
guuucuagcaugaagacagag

SEQ ID NO: 2694129 - RNA, 17 nt, Human
aaguaaaaccacagcag

SEQ ID NO: 2694130 - RNA, 18 nt, Human
aaguaaaaccacagcagu

SEQ ID NO: 2694131 - RNA, 14 nt, Human
aaguaaaaccacag

SEQ ID NO: 2694132 - RNA, 15 nt, Human
aaguaaaaccacagc

SEQ ID NO: 2694133 - RNA, 16 nt, Human
aaguaaaaccacagca

SEQ ID NO: 2694134 - RNA, 21 nt, Human
aagggugaugggaaagcauug

SEQ ID NO: 2694135 - RNA, 16 nt, Human
guuuucugagaaagac

SEQ ID NO: 2694136 - RNA, 17 nt, Human
guuuucugagaaagacu

SEQ ID NO: 2694137 - RNA, 22 nt, Human
guuuucugagaaagacuauuca

SEQ ID NO: 2694138 - RNA, 21 nt, Human
aaguauguuagugcaaauugu

SEQ ID NO: 2694139 - RNA, 23 nt, Human
aaguauguuagugcaaauuguca

SEQ ID NO: 2694140 - RNA, 23 nt, Human
guuuuuuuuuaaaaaagaaacau

SEQ ID NO: 2694141 - RNA, 13 nt, Human
aaggauaaugaau

SEQ ID NO: 2694142 - RNA, 16 nt, Human
aaggaaaaaauaacaa

SEQ ID NO: 2694143 - RNA, 19 nt, Human
aaggaaaaaauaacaauga

SEQ ID NO: 2694144 - RNA, 17 nt, Human
uaaacucauuucuagca

SEQ ID NO: 2694145 - RNA, 12 nt, Human
uaaacucauuuc

SEQ ID NO: 2694146 - RNA, 19 nt, Human
uaaaccaaggcuagaacca

SEQ ID NO: 2694147 - RNA, 12 nt, Human
aauaaaugugcc

SEQ ID NO: 2694148 - RNA, 21 nt, Human
aauaaaugugccuucauuuuu

SEQ ID NO: 2694149 - RNA, 15 nt, Human
aauaacaauaaaaga

SEQ ID NO: 2694150 - RNA, 15 nt, Human
aauaacgauaaaaga

SEQ ID NO: 2694151 - RNA, 22 nt, Human
aauaaaauccauacauuugugu

SEQ ID NO: 2694152 - RNA, 12 nt, Human
aauaaaaauaau

SEQ ID NO: 2694153 - RNA, 15 nt, Human
uaaauguugacaugg

SEQ ID NO: 2694154 - RNA, 17 nt, Human
uaaaugauuucauucaa

SEQ ID NO: 2694155 - RNA, 17 nt, Human
uaacaaugcuguauuuu

SEQ ID NO: 2694156 - RNA, 15 nt, Human
uaacaaugcuguauu

SEQ ID NO: 2694157 - RNA, 14 nt, Human
aauacacacucaaa

SEQ ID NO: 2694158 - RNA, 18 nt, Human
aaaaacacagcaagggug

SEQ ID NO: 2694159 - RNA, 13 nt, Human
aaaaacacagcaa

SEQ ID NO: 2694160 - RNA, 21 nt, Human
aucagcugcugaaacaacaaa

SEQ ID NO: 2694161 - RNA, 15 nt, Human
auauuuauuuuaaua

SEQ ID NO: 2694162 - RNA, 14 nt, Human
auauuuauuuuaau

SEQ ID NO: 2694163 - RNA, 17 nt, Human
auauuuauuuuaauaau

SEQ ID NO: 2694164 - RNA, 22 nt, Human
aucagcugcugaaacaacaaau

SEQ ID NO: 2694165 - RNA, 23 nt, Human
aucagcugcugaaacaacaaaua

SEQ ID NO: 2694166 - RNA, 18 nt, Human
augugggcagugauguca

SEQ ID NO: 2694167 - RNA, 17 nt, Human
auguucuaagaagugaa

SEQ ID NO: 2694168 - RNA, 14 nt, Human
auguaagggaaacu

SEQ ID NO: 2694169 - RNA, 16 nt, Human
auguaagggaaacugc

SEQ ID NO: 2694170 - RNA, 19 nt, Human
auguaagggaaacugccag

SEQ ID NO: 2694171 - RNA, 12 nt, Human
aguccuguaaug

SEQ ID NO: 2694172 - RNA, 19 nt, Human
agucaaauugugugaaagg

SEQ ID NO: 2694173 - RNA, 23 nt, Human
agucaaauugugugaaagguacu

SEQ ID NO: 2694174 - RNA, 22 nt, Human
aguugaaaaucuuauaauuuaa

SEQ ID NO: 2694175 - RNA, 21 nt, Human
aguugaaaagacuccaaagaa

SEQ ID NO: 2694176 - RNA, 22 nt, Human
aguugaaaagacuccaaagaaa

SEQ ID NO: 2694177 - RNA, 23 nt, Human
aguugaaaaucuuauaauuuaaa

SEQ ID NO: 2694178 - RNA, 21 nt, Human
agugucuuaauuaaaagaaua

SEQ ID NO: 2694179 - RNA, 17 nt, Human
agugucuuaauuaaaag

SEQ ID NO: 2694180 - RNA, 18 nt, Human
agugucuuaauuaaaaga

SEQ ID NO: 2694181 - RNA, 15 nt, Human
agugucuuaauuaaa

SEQ ID NO: 2694182 - RNA, 15 nt, Human
auaaugucccuucac

SEQ ID NO: 2694183 - RNA, 23 nt, Human
auaauguuucaaacauauauaac

SEQ ID NO: 2694184 - RNA, 17 nt, Human
auacacacucaaaucaa

SEQ ID NO: 2694185 - RNA, 18 nt, Human
auacacacucaaaucaag

SEQ ID NO: 2694186 - RNA, 20 nt, Human
auacacacucaaaucaagaa

SEQ ID NO: 2694187 - RNA, 18 nt, Human
auaaaggauuaaugucaa

SEQ ID NO: 2694188 - RNA, 13 nt, Human
auauuuauuuuaa

SEQ ID NO: 2694189 - RNA, 22 nt, Human
auauuuauuacuguaagaaaau

SEQ ID NO: 2694190 - RNA, 16 nt, Human
auauuauguuaaaacu

SEQ ID NO: 2694191 - RNA, 22 nt, Human
auaugcuucuguuuuauaauuu

SEQ ID NO: 2694192 - RNA, 20 nt, Human
auaugcuucuguuuuauaau

SEQ ID NO: 2694193 - RNA, 18 nt, Human
auagcagcuuauucacaa

SEQ ID NO: 2694194 - RNA, 15 nt, Human
auaggugcuacaaaa

SEQ ID NO: 2694195 - RNA, 21 nt, Human
auaggugcuacaaaaacacag

SEQ ID NO: 2694196 - RNA, 23 nt, Human
auaggugcuacaaaaacacagca

SEQ ID NO: 2694197 - RNA, 14 nt, Human
auaggugcuacaaa

SEQ ID NO: 2694198 - RNA, 15 nt, Human
auagguuuaauaauu

SEQ ID NO: 2694199 - RNA, 14 nt, Human
auagucaaauugug

SEQ ID NO: 2694200 - RNA, 16 nt, Human
aggcuagauguaugua

SEQ ID NO: 2694201 - RNA, 15 nt, Human
aggcuagauguaugu

SEQ ID NO: 2694202 - RNA, 17 nt, Human
aggcuagauguauguac

SEQ ID NO: 2694203 - RNA, 21 nt, Human
aggcuagaaccaccugccuau

SEQ ID NO: 2694204 - RNA, 17 nt, Human
aggcuacugucagcucc

SEQ ID NO: 2694205 - RNA, 23 nt, Human
aggugcuacaaaaacacagcaag

SEQ ID NO: 2694206 - RNA, 24 nt, Human
aggugcuacaaaaacacagcaagg

SEQ ID NO: 2694207 - RNA, 20 nt, Human
agguaaaagcaucacaugaa

SEQ ID NO: 2694208 - RNA, 19 nt, Human
aggugcuacaaaaacacag

SEQ ID NO: 2694209 - RNA, 20 nt, Human
aggugcuacaaaaacacagc

SEQ ID NO: 2694210 - RNA, 21 nt, Human
aggugcuacaaaaacacagca

SEQ ID NO: 2694211 - RNA, 22 nt, Human
aggugcuacaaaaacacagcaa

SEQ ID NO: 2694212 - RNA, 18 nt, Human
aggugcuacaaaaacaca

SEQ ID NO: 2694213 - RNA, 22 nt, Human
agcuccccucggagaagagcug

SEQ ID NO: 2694214 - RNA, 23 nt, Human
aggaugguucccuugaugaagaa

SEQ ID NO: 2694215 - RNA, 17 nt, Human
agagaacuuccagaucc

SEQ ID NO: 2694216 - RNA, 21 nt, Human
agacugcauuauauuuauuac

SEQ ID NO: 2694217 - RNA, 22 nt, Human
agacgugcacgcacacugucug

SEQ ID NO: 2694218 - RNA, 21 nt, Human
agacgugcacgcacacugucu

SEQ ID NO: 2694219 - RNA, 16 nt, Human
agcacugacuucuaag

SEQ ID NO: 2694220 - RNA, 23 nt, Human
agcaguucagagcugcccucucc

SEQ ID NO: 2694221 - RNA, 13 nt, Human
agcaguugaaaag

SEQ ID NO: 2694222 - RNA, 16 nt, Human
agcaguugaaaagacu

SEQ ID NO: 2694223 - RNA, 23 nt, Human
aauguuucaaacauauauaacaa

SEQ ID NO: 2694224 - RNA, 21 nt, Human
aaugauuaugaauuacauuug

SEQ ID NO: 2694225 - RNA, 15 nt, Human
aaugauuaugaauua

SEQ ID NO: 2694226 - RNA, 15 nt, Human
aauccaaugaaauga

SEQ ID NO: 2694227 - RNA, 20 nt, Human
aaggcagcucuaaaugucaa

SEQ ID NO: 2694228 - RNA, 18 nt, Human
aaguccaagcauuuagau

SEQ ID NO: 2694229 - RNA, 17 nt, Human
aaguccaagcauaccaa

SEQ ID NO: 2694230 - RNA, 21 nt, Human
aaguagggacuucugucuuca

SEQ ID NO: 2694231 - RNA, 23 nt, Human
aagggaaacugccagcaacgcag

SEQ ID NO: 2694232 - RNA, 16 nt, Human
aagggaaacugccagc

SEQ ID NO: 2694233 - RNA, 17 nt, Human
aagggaaacugccagca

SEQ ID NO: 2694234 - RNA, 19 nt, Human
aaauugacacuuaaaaaug

SEQ ID NO: 2694235 - RNA, 17 nt, Human
aaaucuuauaauuuaaa

SEQ ID NO: 2694236 - RNA, 22 nt, Human
aaauguuguucucuucuuuaaa

SEQ ID NO: 2694237 - RNA, 18 nt, Human
aacaaauuuacagagaca

SEQ ID NO: 2694238 - RNA, 16 nt, Human
aacacaucagcuugcc

SEQ ID NO: 2694239 - RNA, 22 nt, Human
aaccacuggaaaguuuaugguu

SEQ ID NO: 2694240 - RNA, 17 nt, Human
aaccuagggugauauua

SEQ ID NO: 2694241 - RNA, 18 nt, Human
aacugacucuuaagaaga

SEQ ID NO: 2694242 - RNA, 15 nt, Human
aacugacucuuaaga

SEQ ID NO: 2694243 - RNA, 20 nt, Human
aacugacucuuaagaagacu

SEQ ID NO: 2694244 - RNA, 19 nt, Human
aacugacucuuaagaagac

SEQ ID NO: 2694245 - RNA, 20 nt, Human
aacugagaugugaacacauc

SEQ ID NO: 2694246 - RNA, 20 nt, Human
aacuuuaugcuaagugaaau

SEQ ID NO: 2694247 - RNA, 21 nt, Human
aacuuuaugcuaagugaaaua

SEQ ID NO: 2694248 - RNA, 16 nt, Human
aaaaagaaacauuugg

SEQ ID NO: 2694249 - RNA, 18 nt, Human
aaaaguucugcagauaaa

SEQ ID NO: 2694250 - RNA, 21 nt, Human
aaaaucuacacuccagugaga

SEQ ID NO: 2694251 - RNA, 16 nt, Human
aaaaucucaauauuuc

SEQ ID NO: 2694252 - RNA, 21 nt, Human
aaacugagaugugaacacauc

SEQ ID NO: 2694253 - RNA, 23 nt, Human
aaacugagaugugaacacaucag

SEQ ID NO: 2694254 - RNA, 15 nt, Human
aaagaaauguaaggg

SEQ ID NO: 2694255 - RNA, 15 nt, Human
aaaucaaauaugcaa

SEQ ID NO: 2694256 - RNA, 12 nt, Human
aaaucaaauaug

SEQ ID NO: 2694257 - RNA, 14 nt, Human
aaaucaaauaugca

SEQ ID NO: 2694258 - RNA, 20 nt, Human
aaauauuuauuuuaauaaug

SEQ ID NO: 2694259 - RNA, 13 nt, Human
aaauauuuauuuu

SEQ ID NO: 2694260 - RNA, 15 nt, Human
aaauauuuauuuuaa

SEQ ID NO: 2694261 - RNA, 14 nt, Human
aaaggcagaagcaa

SEQ ID NO: 2694262 - RNA, 13 nt, Human
aauuuugugaagc

SEQ ID NO: 2694263 - RNA, 14 nt, Human
acacgagcaggcua

SEQ ID NO: 2694264 - RNA, 19 nt, Human
acacgagcaggcuacuguc

SEQ ID NO: 2694265 - RNA, 21 nt, Human
acacgagcaggcuacugucag

SEQ ID NO: 2694266 - RNA, 22 nt, Human
acagcaguugaaaagacuccaa

SEQ ID NO: 2694267 - RNA, 23 nt, Human
acagcaguugaaaagacuccaaa

SEQ ID NO: 2694268 - RNA, 21 nt, Human
acagcaguugaaaagacucca

SEQ ID NO: 2694269 - RNA, 17 nt, Human
acccacaagaaaugaaa

SEQ ID NO: 2694270 - RNA, 21 nt, Human
acccacaagaaaugaaagcag

SEQ ID NO: 2694271 - RNA, 19 nt, Human
acccaguguuuuaggagca

SEQ ID NO: 2694272 - RNA, 22 nt, Human
acccaguguuuuaggagcauga

SEQ ID NO: 2694273 - RNA, 21 nt, Human
acuuggucugugagaugcuag

SEQ ID NO: 2694274 - RNA, 22 nt, Human
acuucugucuucacaacagauu

SEQ ID NO: 2694275 - RNA, 21 nt, Human
acuucugucuucacaacagau

SEQ ID NO: 2694276 - RNA, 12 nt, Human
acuucagacaua

SEQ ID NO: 2694277 - RNA, 13 nt, Human
acugccagcaacg

SEQ ID NO: 2694278 - RNA, 20 nt, Human
acucugucucaguccaugaa

SEQ ID NO: 2694279 - RNA, 18 nt, Human
acucugucucaguccaug

SEQ ID NO: 2694280 - RNA, 13 nt, Human
acuguaagaaaau

SEQ ID NO: 2694281 - RNA, 19 nt, Human
acuguaagaaaauaucacu

SEQ ID NO: 2694282 - RNA, 22 nt, Human
acuguaagaaaauaucacuugu

SEQ ID NO: 2694283 - RNA, 22 nt, Human
acuuuauuuucuauaauuuaaa

SEQ ID NO: 2694284 - RNA, 16 nt, Human
agaaaaucaggcuggc

SEQ ID NO: 2694285 - RNA, 14 nt, Human
agaaaauaacaaua

SEQ ID NO: 2694286 - RNA, 13 nt, Human
acuaagagagaau

SEQ ID NO: 2694287 - RNA, 19 nt, Human
acgcaggcccccaggugcc

SEQ ID NO: 2694288 - RNA, 22 nt, Human
acgcaggcccccaggugccagu

SEQ ID NO: 2694289 - RNA, 21 nt, Human
acuauucaaacagucucagga

SEQ ID NO: 2694290 - RNA, 20 nt, Human
acuaguauuucuaugaaaua

SEQ ID NO: 2694291 - RNA, 17 nt, Human
acucuauguucuaagaa

SEQ ID NO: 2694292 - RNA, 17 nt, Human
caagcacuaaacaaaga

SEQ ID NO: 2694293 - RNA, 15 nt, Human
caaauuuacagagac

SEQ ID NO: 2694294 - RNA, 14 nt, Human
caaauuuacagaga

SEQ ID NO: 2694295 - RNA, 14 nt, Human
caaauaugcaaagc

SEQ ID NO: 2694296 - RNA, 21 nt, Human
caaauguucaucaaugaauga

SEQ ID NO: 2694297 - RNA, 20 nt, Human
caaauguucaucaaugaaug

SEQ ID NO: 2694298 - RNA, 18 nt, Human
caaauaugcaaagcacug

SEQ ID NO: 2694299 - RNA, 16 nt, Human
caaauaugcaaagcac

SEQ ID NO: 2694300 - RNA, 17 nt, Human
caaauaugcaaagcacu

SEQ ID NO: 2694301 - RNA, 15 nt, Human
cacaguuuucugaga

SEQ ID NO: 2694302 - RNA, 14 nt, Human
cacaguuuucugag

SEQ ID NO: 2694303 - RNA, 19 nt, Human
cacaggaaccacaagacug

SEQ ID NO: 2694304 - RNA, 20 nt, Human
cacaggaaccacaagacugc

SEQ ID NO: 2694305 - RNA, 15 nt, Human
cacaggaaguagagg

SEQ ID NO: 2694306 - RNA, 22 nt, Human
cacagcaguugaaaagacucca

SEQ ID NO: 2694307 - RNA, 13 nt, Human
cacaacuauauug

SEQ ID NO: 2694308 - RNA, 14 nt, Human
cacacugaagaagc

SEQ ID NO: 2694309 - RNA, 19 nt, Human
cacacucaaaucaagaaac

SEQ ID NO: 2694310 - RNA, 11 nt, Human
cacaacagauu

SEQ ID NO: 2694311 - RNA, 22 nt, Human
caaugaaugaaugaauggcuaa

SEQ ID NO: 2694312 - RNA, 16 nt, Human
uugcuaagcauuccaa

SEQ ID NO: 2694313 - RNA, 18 nt, Human
uugcuaagcauuccaacu

SEQ ID NO: 2694314 - RNA, 16 nt, Human
uuguaccgcaauguga

SEQ ID NO: 2694315 - RNA, 20 nt, Human
uuguaaaauggugugaccac

SEQ ID NO: 2694316 - RNA, 20 nt, Human
uugguaaggggaauugagga

SEQ ID NO: 2694317 - RNA, 15 nt, Human
uuggucugugagaug

SEQ ID NO: 2694318 - RNA, 12 nt, Human
uuguaaaauggu

SEQ ID NO: 2694319 - RNA, 13 nt, Human
uuguaaaauggug

SEQ ID NO: 2694320 - RNA, 20 nt, Human
uugauaugccuuuucccaac

SEQ ID NO: 2694321 - RNA, 13 nt, Human
uugccaucccucc

SEQ ID NO: 2694322 - RNA, 18 nt, Human
uugccaucccucccucca

SEQ ID NO: 2694323 - RNA, 17 nt, Human
uugccaucccucccucc

SEQ ID NO: 2694324 - RNA, 16 nt, Human
uugccaucccucccuc

SEQ ID NO: 2694325 - RNA, 14 nt, Human
uugccaucccuccc

SEQ ID NO: 2694326 - RNA, 23 nt, Human
uugccaucccucccuccaccucc

SEQ ID NO: 2694327 - RNA, 22 nt, Human
uugccaucccucccuccaccuc

SEQ ID NO: 2694328 - RNA, 23 nt, Human
uugcagcucuccccuucucugua

SEQ ID NO: 2694329 - RNA, 24 nt, Human
uucuaaguaaaaccacagcaguug

SEQ ID NO: 2694330 - RNA, 19 nt, Human
uucuuaggguuaugauuaa

SEQ ID NO: 2694331 - RNA, 18 nt, Human
uucuuuccacagaagcuc

SEQ ID NO: 2694332 - RNA, 21 nt, Human
uugaaaaucuuauaauuuaaa

SEQ ID NO: 2694333 - RNA, 12 nt, Human
uuucucuaggaa

SEQ ID NO: 2694334 - RNA, 18 nt, Human
uuugguaaggggaauuga

SEQ ID NO: 2694335 - RNA, 21 nt, Human
uuugaaauuguauuacaaauc

SEQ ID NO: 2694336 - RNA, 18 nt, Human
uuguuuaaaaucauuucu

SEQ ID NO: 2694337 - RNA, 17 nt, Human
uuguuuaaaaucauuuc

SEQ ID NO: 2694338 - RNA, 12 nt, Human
uuuaaaaugucu

SEQ ID NO: 2694339 - RNA, 17 nt, Human
uuuaaaagaaugauuau

SEQ ID NO: 2694340 - RNA, 14 nt, Human
uuuaaaagaaugau

SEQ ID NO: 2694341 - RNA, 16 nt, Human
uuuaaaaucauuucug

SEQ ID NO: 2694342 - RNA, 19 nt, Human
uuuaaaauacacacucaaa

SEQ ID NO: 2694343 - RNA, 13 nt, Human
uuuacagagacag

SEQ ID NO: 2694344 - RNA, 19 nt, Human
uuuaauaauguuucaaaca

SEQ ID NO: 2694345 - RNA, 15 nt, Human
uuuaauaauguuuca

SEQ ID NO: 2694346 - RNA, 14 nt, Human
uuuaauaauguuuc

SEQ ID NO: 2694347 - RNA, 13 nt, Human
uuuaauaaaccau

SEQ ID NO: 2694348 - RNA, 21 nt, Human
uuauggcacuaguauuucuau

SEQ ID NO: 2694349 - RNA, 17 nt, Human
uuauggcuauaggugcu

SEQ ID NO: 2694350 - RNA, 16 nt, Human
uuauuacuguaagaaa

SEQ ID NO: 2694351 - RNA, 18 nt, Human
uuauuacuguaagaaaau

SEQ ID NO: 2694352 - RNA, 17 nt, Human
uuauuacuguaagaaaa

SEQ ID NO: 2694353 - RNA, 16 nt, Human
uucagacauagaauua

SEQ ID NO: 2694354 - RNA, 20 nt, Human
uucagacauagaauuaacac

SEQ ID NO: 2694355 - RNA, 14 nt, Human
uucagagcugcccu

SEQ ID NO: 2694356 - RNA, 13 nt, Human
uucagagcugccc

SEQ ID NO: 2694357 - RNA, 16 nt, Human
uuauuuuaauaauguu

SEQ ID NO: 2694358 - RNA, 15 nt, Human
uuauuuuaauaaugu

SEQ ID NO: 2694359 - RNA, 15 nt, Human
uuauugucuagugaa

SEQ ID NO: 2694360 - RNA, 17 nt, Human
uuauuuuaauaauguuu

SEQ ID NO: 2694361 - RNA, 17 nt, Human
uucaaauccuugaagau

SEQ ID NO: 2694362 - RNA, 19 nt, Human
uuccagauccuggaaauca

SEQ ID NO: 2694363 - RNA, 17 nt, Human
uuccuuggacucauuuu

SEQ ID NO: 2694364 - RNA, 20 nt, Human
uuccuuggacucauuuuaaa

SEQ ID NO: 2694365 - RNA, 17 nt, Human
uucccuugaugaagaag

SEQ ID NO: 2694366 - RNA, 17 nt, Human
uuacuaguuucccuugc

SEQ ID NO: 2694367 - RNA, 19 nt, Human
uuagaaacacaacuauauu

SEQ ID NO: 2694368 - RNA, 13 nt, Human
uuagcuggaaaag

SEQ ID NO: 2694369 - RNA, 12 nt, Human
uuagcuggaaaa

SEQ ID NO: 2694370 - RNA, 21 nt, Human
uuagaugcaguucugaagaag

SEQ ID NO: 2694371 - RNA, 20 nt, Human
uuagaugcaguucugaagaa

SEQ ID NO: 2694372 - RNA, 18 nt, Human
uuaggauguugaaaaagu

SEQ ID NO: 2694373 - RNA, 22 nt, Human
uguuucaaacauauauaacaau

SEQ ID NO: 2694374 - RNA, 21 nt, Human
uguuucaaacauauauaacaa

SEQ ID NO: 2694375 - RNA, 19 nt, Human
uguuucaaacauauauaac

SEQ ID NO: 2694376 - RNA, 21 nt, Human
uuaaaagaauauuuuaacuuc

SEQ ID NO: 2694377 - RNA, 22 nt, Human
uuaaaagaauauuuuaacuucc

SEQ ID NO: 2694378 - RNA, 15 nt, Human
uuaaaagaugaaaau

SEQ ID NO: 2694379 - RNA, 18 nt, Human
uuaaaagaugaaaauauu

SEQ ID NO: 2694380 - RNA, 19 nt, Human
uuaaaauacacacucaaau

SEQ ID NO: 2694381 - RNA, 15 nt, Human
ugggcagcugccucc

SEQ ID NO: 2694382 - RNA, 14 nt, Human
ugggcagcugccuc

SEQ ID NO: 2694383 - RNA, 13 nt, Human
ugggcagcugccu

SEQ ID NO: 2694384 - RNA, 19 nt, Human
ugggcagcugccuccccuc

SEQ ID NO: 2694385 - RNA, 17 nt, Human
ugggcagcugccucccc

SEQ ID NO: 2694386 - RNA, 22 nt, Human
uggugauuuagcaggaagcugu

SEQ ID NO: 2694387 - RNA, 16 nt, Human
uggugauuuagcagga

SEQ ID NO: 2694388 - RNA, 16 nt, Human
uggucccagccagcag

SEQ ID NO: 2694389 - RNA, 22 nt, Human
uggucacaggaaguagaggagg

SEQ ID NO: 2694390 - RNA, 17 nt, Human
uggucacaggaaguaga

SEQ ID NO: 2694391 - RNA, 13 nt, Human
ugguauguuuuca

SEQ ID NO: 2694392 - RNA, 20 nt, Human
uggcaauagucaaauugugu

SEQ ID NO: 2694393 - RNA, 15 nt, Human
uggcacuaguauuuc

SEQ ID NO: 2694394 - RNA, 16 nt, Human
ugccacuaaauugaca

SEQ ID NO: 2694395 - RNA, 13 nt, Human
ugcaucagcugcu

SEQ ID NO: 2694396 - RNA, 19 nt, Human
ugcaucagcugcugaaaca

SEQ ID NO: 2694397 - RNA, 14 nt, Human
ugcaguucugaaga

SEQ ID NO: 2694398 - RNA, 12 nt, Human
ugcaguucugaa

SEQ ID NO: 2694399 - RNA, 22 nt, Human
ugcaucaauuuuucuuauuuca

SEQ ID NO: 2694400 - RNA, 20 nt, Human
ugcugggggggauuguaaaa

SEQ ID NO: 2694401 - RNA, 13 nt, Human
ugcuagaacuccc

SEQ ID NO: 2694402 - RNA, 14 nt, Human
ugcuagaacucccu

SEQ ID NO: 2694403 - RNA, 15 nt, Human
ugcuagaacucccuu

SEQ ID NO: 2694404 - RNA, 17 nt, Human
ugcuagaacucccuuuc

SEQ ID NO: 2694405 - RNA, 18 nt, Human
ugaggcuccacuuggucu

SEQ ID NO: 2694406 - RNA, 20 nt, Human
ugaggcuccacuuggucugu

SEQ ID NO: 2694407 - RNA, 16 nt, Human
ugauaacuggaaacuu

SEQ ID NO: 2694408 - RNA, 13 nt, Human
ugagccccaaaag

SEQ ID NO: 2694409 - RNA, 16 nt, Human
ugagagugaacaaauu

SEQ ID NO: 2694410 - RNA, 17 nt, Human
ugaucagcuuauugucu

SEQ ID NO: 2694411 - RNA, 24 nt, Human
ugaucagcuuauugucuagugaaa

SEQ ID NO: 2694412 - RNA, 14 nt, Human
ugaucuuuaaaaua

SEQ ID NO: 2694413 - RNA, 17 nt, Human
ugaucuuuaaaauacac

SEQ ID NO: 2694414 - RNA, 23 nt, Human
ugaugcuacaggauuugaaauug

SEQ ID NO: 2694415 - RNA, 20 nt, Human
ugaugcuacaggauuugaaa

SEQ ID NO: 2694416 - RNA, 15 nt, Human
ugauggugguauguu

SEQ ID NO: 2694417 - RNA, 22 nt, Human
ugauuaugaauuacauuuguau

SEQ ID NO: 2694418 - RNA, 21 nt, Human
ugauuaugaauuacauuugua

SEQ ID NO: 2694419 - RNA, 19 nt, Human
ugauuaugaauuacauuug

SEQ ID NO: 2694420 - RNA, 17 nt, Human
ugauuaugaauuacauu

SEQ ID NO: 2694421 - RNA, 13 nt, Human
ugauuauauguca

SEQ ID NO: 2694422 - RNA, 22 nt, Human
ugauguuuagaaacacaacuau

SEQ ID NO: 2694423 - RNA, 16 nt, Human
ugauuaccagggacug

SEQ ID NO: 2694424 - RNA, 12 nt, Human
ucuuugccaagu

SEQ ID NO: 2694425 - RNA, 19 nt, Human
ucuuuccacagaagcucca

SEQ ID NO: 2694426 - RNA, 17 nt, Human
ucuuucacauuuaaaua

SEQ ID NO: 2694427 - RNA, 16 nt, Human
ugaaauauugacuuuu

SEQ ID NO: 2694428 - RNA, 19 nt, Human
ugaaauggacuuuuguaca

SEQ ID NO: 2694429 - RNA, 22 nt, Human
ugaaacaacaaauaggaauugu

SEQ ID NO: 2694430 - RNA, 18 nt, Human
ugaaagaggcagcuugaa

SEQ ID NO: 2694431 - RNA, 16 nt, Human
ugaaagguacuucaaa

SEQ ID NO: 2694432 - RNA, 15 nt, Human
ugaaagguacuucaa

SEQ ID NO: 2694433 - RNA, 18 nt, Human
ugaauuacauuuguauaa

SEQ ID NO: 2694434 - RNA, 16 nt, Human
ugaauuacauuuguau

SEQ ID NO: 2694435 - RNA, 15 nt, Human
ugaauuacauuugua

SEQ ID NO: 2694436 - RNA, 13 nt, Human
ugaaguccaagca

SEQ ID NO: 2694437 - RNA, 11 nt, Human
ugaaguccaag

SEQ ID NO: 2694438 - RNA, 18 nt, Human
ugacaugggacauuugcu

SEQ ID NO: 2694439 - RNA, 17 nt, Human
ugacaugggacauuugc

SEQ ID NO: 2694440 - RNA, 16 nt, Human
ugacaugggacauuug

SEQ ID NO: 2694441 - RNA, 20 nt, Human
ugaccacugcagaagacagu

SEQ ID NO: 2694442 - RNA, 20 nt, Human
ugacaagcucacagaccuuu

SEQ ID NO: 2694443 - RNA, 15 nt, Human
ugacaagcucacaga

SEQ ID NO: 2694444 - RNA, 12 nt, Human
ugacaagcucac

SEQ ID NO: 2694445 - RNA, 23 nt, Human
ucucaguccaugaagauguagag

SEQ ID NO: 2694446 - RNA, 14 nt, Human
ucggagaagagcug

SEQ ID NO: 2694447 - RNA, 16 nt, Human
ucggagaagagcuguu

SEQ ID NO: 2694448 - RNA, 12 nt, Human
ucggagaagagc

SEQ ID NO: 2694449 - RNA, 17 nt, Human
ucuacacuaagagagaa

SEQ ID NO: 2694450 - RNA, 18 nt, Human
ucuaugaaauauuauguu

SEQ ID NO: 2694451 - RNA, 17 nt, Human
uccugccccugagccca

SEQ ID NO: 2694452 - RNA, 18 nt, Human
uccugccccugagcccau

SEQ ID NO: 2694453 - RNA, 19 nt, Human
uccugaggcuccacuuggu

SEQ ID NO: 2694454 - RNA, 20 nt, Human
uccugaggcuccacuugguc

SEQ ID NO: 2694455 - RNA, 17 nt, Human
uccuggcaauagucaaa

SEQ ID NO: 2694456 - RNA, 20 nt, Human
ucccuucacaaacccagugu

SEQ ID NO: 2694457 - RNA, 14 nt, Human
uccuagugaaagag

SEQ ID NO: 2694458 - RNA, 23 nt, Human
uccuagugaaagaggcagcuuga

SEQ ID NO: 2694459 - RNA, 22 nt, Human
uccucauuuuuauaaugucccu

SEQ ID NO: 2694460 - RNA, 19 nt, Human
uccagguagagggugugua

SEQ ID NO: 2694461 - RNA, 15 nt, Human
uccauacauuugugu

SEQ ID NO: 2694462 - RNA, 20 nt, Human
uccaugggccauaugaaaag

SEQ ID NO: 2694463 - RNA, 23 nt, Human
uccacuuggucugugagaugcua

SEQ ID NO: 2694464 - RNA, 21 nt, Human
uccacuuggucugugagaugc

SEQ ID NO: 2694465 - RNA, 17 nt, Human
uccacuuggucugugag

SEQ ID NO: 2694466 - RNA, 17 nt, Human
ucaucaaugaaugaaug

SEQ ID NO: 2694467 - RNA, 11 nt, Human
ucauagcagcu

SEQ ID NO: 2694468 - RNA, 12 nt, Human
ucauagcagcuu

SEQ ID NO: 2694469 - RNA, 16 nt, Human
ucauuaggauggcuag

SEQ ID NO: 2694470 - RNA, 14 nt, Human
uccaaagaaaugua

SEQ ID NO: 2694471 - RNA, 17 nt, Human
uccaaagaaauguaagg

SEQ ID NO: 2694472 - RNA, 16 nt, Human
uaggucagugcaaaua

SEQ ID NO: 2694473 - RNA, 16 nt, Human
uaggccaugggacagg

SEQ ID NO: 2694474 - RNA, 18 nt, Human
uaggccaugggacaggga

SEQ ID NO: 2694475 - RNA, 12 nt, Human
uaggaauugacc

SEQ ID NO: 2694476 - RNA, 15 nt, Human
uagugcaaauuguca

SEQ ID NO: 2694477 - RNA, 14 nt, Human
uagugcaaauuguc

SEQ ID NO: 2694478 - RNA, 14 nt, Human
uagucaaauugugu

SEQ ID NO: 2694479 - RNA, 13 nt, Human
uagucaaauugug

SEQ ID NO: 2694480 - RNA, 16 nt, Human
uaguauuucuaugaaa

SEQ ID NO: 2694481 - RNA, 19 nt, Human
uaguauuucuaugaaauau

SEQ ID NO: 2694482 - RNA, 18 nt, Human
uaguauuucuaugaaaua

SEQ ID NO: 2694483 - RNA, 13 nt, Human
uaguaucaaaaga

SEQ ID NO: 2694484 - RNA, 13 nt, Human
uauauaacaaugc

SEQ ID NO: 2694485 - RNA, 13 nt, Human
uauaugcuucugu

SEQ ID NO: 2694486 - RNA, 16 nt, Human
uaugcuucuguuuuau

SEQ ID NO: 2694487 - RNA, 15 nt, Human
uaugcuucuguuuua

SEQ ID NO: 2694488 - RNA, 16 nt, Human
uaugauucccagccag

SEQ ID NO: 2694489 - RNA, 15 nt, Human
uaugcaaagcacuga

SEQ ID NO: 2694490 - RNA, 13 nt, Human
uaugcaaagcacu

SEQ ID NO: 2694491 - RNA, 14 nt, Human
uaugcaaagcacug

SEQ ID NO: 2694492 - RNA, 12 nt, Human
uaugcaaagcac

SEQ ID NO: 2694493 - RNA, 17 nt, Human
uaugaauuacauuugua

SEQ ID NO: 2694494 - RNA, 23 nt, Human
uaugaauuacauuuguauaaaau

SEQ ID NO: 2694495 - RNA, 15 nt, Human
uauccuucagccuga

SEQ ID NO: 2694496 - RNA, 14 nt, Human
uauccuucagccug

SEQ ID NO: 2694497 - RNA, 17 nt, Human
uauguucuaagaaguga

SEQ ID NO: 2694498 - RNA, 19 nt, Human
uauggaggcuuugcauaga

SEQ ID NO: 2694499 - RNA, 12 nt, Human
uauguuaaaacu

SEQ ID NO: 2694500 - RNA, 19 nt, Human
uauguuagugcaaauuguc

SEQ ID NO: 2694501 - RNA, 17 nt, Human
uauuauauuuacaaaug

SEQ ID NO: 2694502 - RNA, 16 nt, Human
uauuauguuaaaacug

SEQ ID NO: 2694503 - RNA, 20 nt, Human
uauuguuuaaaaucauuucu

SEQ ID NO: 2694504 - RNA, 15 nt, Human
uauuucuaugaaaua

SEQ ID NO: 2694505 - RNA, 14 nt, Human
uauuucuaugaaau

SEQ ID NO: 2694506 - RNA, 13 nt, Human
uauuuauuacugu

SEQ ID NO: 2694507 - RNA, 13 nt, Human
uauuucuaugaaa

SEQ ID NO: 2694508 - RNA, 14 nt, Human
uauuuauuacugua

SEQ ID NO: 2694509 - RNA, 15 nt, Human
uauuguuuaaaauca

SEQ ID NO: 2694510 - RNA, 16 nt, Human
uauuguuuaaaaucau

SEQ ID NO: 2694511 - RNA, 17 nt, Human
uauuguuuaaaaucauu

SEQ ID NO: 2694512 - RNA, 14 nt, Human
ucaauaaaauccau

SEQ ID NO: 2694513 - RNA, 22 nt, Human
ucacaagacccaaaaggcagaa

SEQ ID NO: 2694514 - RNA, 12 nt, Human
ucacauuuaaau

SEQ ID NO: 2694515 - RNA, 22 nt, Human
ucaacuccaaacugacucuuaa

SEQ ID NO: 2694516 - RNA, 16 nt, Human
ucaaauaugcaaagca

SEQ ID NO: 2694517 - RNA, 17 nt, Human
ucaaauaugcaaagcac

SEQ ID NO: 2694518 - RNA, 18 nt, Human
ucaaauaugcaaagcacu

SEQ ID NO: 2694519 - RNA, 19 nt, Human
ucaaauaugcaaagcacug

SEQ ID NO: 2694520 - RNA, 15 nt, Human
ucaaauccuugaaga

SEQ ID NO: 2694521 - RNA, 16 nt, Human
ucaaauccuugaagau

SEQ ID NO: 2694522 - RNA, 22 nt, Human
ucaaacagucucaggaaaucaa

SEQ ID NO: 2694523 - RNA, 17 nt, Human
ucaaacauauauaacaa

SEQ ID NO: 2694524 - RNA, 14 nt, Human
gugagcuacaaaug

SEQ ID NO: 2694525 - RNA, 16 nt, Human
gugagcagucaggaaa

SEQ ID NO: 2694526 - RNA, 19 nt, Human
gugaaagaaaauaacaaua

SEQ ID NO: 2694527 - RNA, 20 nt, Human
gugaaacucguuaauuugua

SEQ ID NO: 2694528 - RNA, 18 nt, Human
gugcaaauugucacagga

SEQ ID NO: 2694529 - RNA, 21 nt, Human
guccugucggagcccugucuc

SEQ ID NO: 2694530 - RNA, 20 nt, Human
guccugucggagcccugucu

SEQ ID NO: 2694531 - RNA, 18 nt, Human
guccugucggagcccugu

SEQ ID NO: 2694532 - RNA, 17 nt, Human
gucuacacuaagagaga

SEQ ID NO: 2694533 - RNA, 23 nt, Human
gucuacacuaagagagaaugaga

SEQ ID NO: 2694534 - RNA, 20 nt, Human
gucccagccagcaguucaga

SEQ ID NO: 2694535 - RNA, 21 nt, Human
gucaauaaaauccauacauuu

SEQ ID NO: 2694536 - RNA, 15 nt, Human
gucaauaaaauccau

SEQ ID NO: 2694537 - RNA, 14 nt, Human
gucaccucauggaa

SEQ ID NO: 2694538 - RNA, 17 nt, Human
guauuuuaaaagaauga

SEQ ID NO: 2694539 - RNA, 16 nt, Human
guauuuuaaaagaaug

SEQ ID NO: 2694540 - RNA, 17 nt, Human
guauuucuaugaaauau

SEQ ID NO: 2694541 - RNA, 22 nt, Human
guauuucuaugaaauauuaugu

SEQ ID NO: 2694542 - RNA, 19 nt, Human
ggugcuacaaaaacacagc

SEQ ID NO: 2694543 - RNA, 21 nt, Human
ggguagccacuggacugacga

SEQ ID NO: 2694544 - RNA, 22 nt, Human
gguacuucaaauccuugaagau

SEQ ID NO: 2694545 - RNA, 22 nt, Human
gguagacacacaugaaguccaa

SEQ ID NO: 2694546 - RNA, 15 nt, Human
gguagacacacauga

SEQ ID NO: 2694547 - RNA, 23 nt, Human
guaaaaccacagcaguugaaaag

SEQ ID NO: 2694548 - RNA, 14 nt, Human
guaaaaccacagca

SEQ ID NO: 2694549 - RNA, 15 nt, Human
guaaaaccacagcag

SEQ ID NO: 2694550 - RNA, 16 nt, Human
guaaaaccacagcagu

SEQ ID NO: 2694551 - RNA, 18 nt, Human
guaaaaccacagcaguug

SEQ ID NO: 2694552 - RNA, 17 nt, Human
guaagggaaacugccag

SEQ ID NO: 2694553 - RNA, 18 nt, Human
guaagggaaacugccagc

SEQ ID NO: 2694554 - RNA, 23 nt, Human
guacuuuauuuucuauaauuuaa

SEQ ID NO: 2694555 - RNA, 15 nt, Human
guagaggagaaacug

SEQ ID NO: 2694556 - RNA, 15 nt, Human
guaccgcaaugugac

SEQ ID NO: 2694557 - RNA, 15 nt, Human
guaauuggaaaggca

SEQ ID NO: 2694558 - RNA, 19 nt, Human
guaaugauaacuggaaacu

SEQ ID NO: 2694559 - RNA, 14 nt, Human
gcucucuggccuuc

SEQ ID NO: 2694560 - RNA, 15 nt, Human
gcucucuggccuucg

SEQ ID NO: 2694561 - RNA, 19 nt, Human
gcucucuggccuucggccu

SEQ ID NO: 2694562 - RNA, 20 nt, Human
gcucucuggccuucggccuc

SEQ ID NO: 2694563 - RNA, 12 nt, Human
gcucucuggccu

SEQ ID NO: 2694564 - RNA, 13 nt, Human
gcucucuggccuu

SEQ ID NO: 2694565 - RNA, 11 nt, Human
gcucucuggcc

SEQ ID NO: 2694566 - RNA, 17 nt, Human
gcuaagcaaaaugugau

SEQ ID NO: 2694567 - RNA, 14 nt, Human
gcuaagcauuccaa

SEQ ID NO: 2694568 - RNA, 23 nt, Human
gcccucuccugggcagcugccuc

SEQ ID NO: 2694569 - RNA, 22 nt, Human
gcccucuccugggcagcugccu

SEQ ID NO: 2694570 - RNA, 14 nt, Human
gcccucuccugggc

SEQ ID NO: 2694571 - RNA, 13 nt, Human
gcccucuccuggg

SEQ ID NO: 2694572 - RNA, 12 nt, Human
gcccucuccugg

SEQ ID NO: 2694573 - RNA, 22 nt, Human
gccuauauuuuuuguuaaauga

SEQ ID NO: 2694574 - RNA, 17 nt, Human
gccuaagugcagccccg

SEQ ID NO: 2694575 - RNA, 20 nt, Human
gcugucuacacuaagagaga

SEQ ID NO: 2694576 - RNA, 17 nt, Human
ggaaaucaaauaugcaa

SEQ ID NO: 2694577 - RNA, 23 nt, Human
ggaaagggauuuucagcccucag

SEQ ID NO: 2694578 - RNA, 20 nt, Human
ggaagugacgguuuaauggg

SEQ ID NO: 2694579 - RNA, 22 nt, Human
ggaauuggagcucgugggacag

SEQ ID NO: 2694580 - RNA, 16 nt, Human
ggaauuggagcucgug

SEQ ID NO: 2694581 - RNA, 23 nt, Human
ggaauuucucccagucauuuaau

SEQ ID NO: 2694582 - RNA, 15 nt, Human
ggagaaucacuugaa

SEQ ID NO: 2694583 - RNA, 19 nt, Human
ggagaaucacuugaacccg

SEQ ID NO: 2694584 - RNA, 13 nt, Human
ggacgcucucugg

SEQ ID NO: 2694585 - RNA, 14 nt, Human
ggacgcucucuggc

SEQ ID NO: 2694586 - RNA, 14 nt, Human
ggcauggcugggaa

SEQ ID NO: 2694587 - RNA, 17 nt, Human
ggauuagggagagaaga

SEQ ID NO: 2694588 - RNA, 15 nt, Human
ggauuguaaaauggu

SEQ ID NO: 2694589 - RNA, 16 nt, Human
gcaaauugucacagga

SEQ ID NO: 2694590 - RNA, 20 nt, Human
gaugcuagaacucccuuuca

SEQ ID NO: 2694591 - RNA, 22 nt, Human
gaugcuagaacucccuuucaac

SEQ ID NO: 2694592 - RNA, 18 nt, Human
gaugcuagaacucccuuu

SEQ ID NO: 2694593 - RNA, 13 nt, Human
gcacacugucugc

SEQ ID NO: 2694594 - RNA, 18 nt, Human
gcacugacuucuaaguaa

SEQ ID NO: 2694595 - RNA, 15 nt, Human
gcacugacuucuaag

SEQ ID NO: 2694596 - RNA, 22 nt, Human
gauaaauggcuuccuggcaaua

SEQ ID NO: 2694597 - RNA, 12 nt, Human
gagcccugucuc

SEQ ID NO: 2694598 - RNA, 20 nt, Human
gagacagcucugcauacuca

SEQ ID NO: 2694599 - RNA, 21 nt, Human
gagaaugagagacacacugaa

SEQ ID NO: 2694600 - RNA, 20 nt, Human
gagaaugagagacacacuga

SEQ ID NO: 2694601 - RNA, 22 nt, Human
gagaaccuagggugauauuaac

SEQ ID NO: 2694602 - RNA, 21 nt, Human
gagaaccuagggugauauuaa

SEQ ID NO: 2694603 - RNA, 23 nt, Human
gagaacuuccagauccuggaaau

SEQ ID NO: 2694604 - RNA, 22 nt, Human
gagaacuuccagauccuggaaa

SEQ ID NO: 2694605 - RNA, 17 nt, Human
gagaaugagagacacac

SEQ ID NO: 2694606 - RNA, 13 nt, Human
gagaagagcuguu

SEQ ID NO: 2694607 - RNA, 16 nt, Human
gacuucuaaguaaaac

SEQ ID NO: 2694608 - RNA, 17 nt, Human
gacuucuaaguaaaacc

SEQ ID NO: 2694609 - RNA, 18 nt, Human
gacuucuaaguaaaacca

SEQ ID NO: 2694610 - RNA, 20 nt, Human
gacuucugucuucacaacag

SEQ ID NO: 2694611 - RNA, 23 nt, Human
gacuucugucuucacaacagauu

SEQ ID NO: 2694612 - RNA, 19 nt, Human
gacuucuaaguaaaaccac

SEQ ID NO: 2694613 - RNA, 23 nt, Human
gacuucuaaguaaaaccacagca

SEQ ID NO: 2694614 - RNA, 24 nt, Human
gacuucuaaguaaaaccacagcag

SEQ ID NO: 2694615 - RNA, 16 nt, Human
gacuccaaagaaaugu

SEQ ID NO: 2694616 - RNA, 18 nt, Human
gacuccaaagaaauguaa

SEQ ID NO: 2694617 - RNA, 21 nt, Human
gacucauuuuaaaaaauggaa

SEQ ID NO: 2694618 - RNA, 11 nt, Human
gacuccaaaga

SEQ ID NO: 2694619 - RNA, 12 nt, Human
gacuccaaagaa

SEQ ID NO: 2694620 - RNA, 15 nt, Human
gacuccaaagaaaug

SEQ ID NO: 2694621 - RNA, 16 nt, Human
gacugcauuauauuua

SEQ ID NO: 2694622 - RNA, 14 nt, Human
gacugcauuauauu

SEQ ID NO: 2694623 - RNA, 16 nt, Human
gacuggauaguccguc

SEQ ID NO: 2694624 - RNA, 19 nt, Human
gacagagccccacccucag

SEQ ID NO: 2694625 - RNA, 20 nt, Human
gacauagaauuaacacauga

SEQ ID NO: 2694626 - RNA, 17 nt, Human
gacagggaggacgcucu

SEQ ID NO: 2694627 - RNA, 18 nt, Human
gacagggaggacgcucuc

SEQ ID NO: 2694628 - RNA, 16 nt, Human
gacaugggacauuugc

SEQ ID NO: 2694629 - RNA, 21 nt, Human
gaccacugcagaagacaguau

SEQ ID NO: 2694630 - RNA, 16 nt, Human
gacccaaaaggcagaa

SEQ ID NO: 2694631 - RNA, 15 nt, Human
gacccacaagaaaug

SEQ ID NO: 2694632 - RNA, 22 nt, Human
gacccacaagaaaugaaagcag

SEQ ID NO: 2694633 - RNA, 16 nt, Human
gacaaggaaaaaauaa

SEQ ID NO: 2694634 - RNA, 15 nt, Human
gacaagcucacagac

SEQ ID NO: 2694635 - RNA, 16 nt, Human
gaauuggagcucgugg

SEQ ID NO: 2694636 - RNA, 16 nt, Human
gaauugacccacaaga

SEQ ID NO: 2694637 - RNA, 21 nt, Human
gaauugacccacaagaaauga

SEQ ID NO: 2694638 - RNA, 21 nt, Human
cuguuaaaagaugaaaauauu

SEQ ID NO: 2694639 - RNA, 23 nt, Human
cuguuaaaagaugaaaauauuug

SEQ ID NO: 2694640 - RNA, 20 nt, Human
cuguuaaaagaugaaaauau

SEQ ID NO: 2694641 - RNA, 22 nt, Human
cugggggggauuguaaaauggu

SEQ ID NO: 2694642 - RNA, 23 nt, Human
cuguaaucacagcuacuugggag

SEQ ID NO: 2694643 - RNA, 20 nt, Human
cugucuacacuaagagagaa

SEQ ID NO: 2694644 - RNA, 22 nt, Human
cuguauuuuaaaagaaugauua

SEQ ID NO: 2694645 - RNA, 19 nt, Human
cuguauuuuaaaagaauga

SEQ ID NO: 2694646 - RNA, 20 nt, Human
cuguauuuuaaaagaaugau

SEQ ID NO: 2694647 - RNA, 12 nt, Human
cuggagcucugc

SEQ ID NO: 2694648 - RNA, 13 nt, Human
cuggagcucugcc

SEQ ID NO: 2694649 - RNA, 16 nt, Human
cuggagcucugcccau

SEQ ID NO: 2694650 - RNA, 23 nt, Human
cuggccuucggccuccauccuga

SEQ ID NO: 2694651 - RNA, 22 nt, Human
cuggccuucggccuccauccug

SEQ ID NO: 2694652 - RNA, 21 nt, Human
cuggcacaguuuucugagaaa

SEQ ID NO: 2694653 - RNA, 22 nt, Human
cuggcacaguuuucugagaaag

SEQ ID NO: 2694654 - RNA, 20 nt, Human
cuggcacaguuuucugagaa

SEQ ID NO: 2694655 - RNA, 18 nt, Human
cugcugaaacaacaaaua

SEQ ID NO: 2694656 - RNA, 13 nt, Human
cugccuccccucc

SEQ ID NO: 2694657 - RNA, 19 nt, Human
cugcccucuccugggcagc

SEQ ID NO: 2694658 - RNA, 18 nt, Human
cugcccucuccugggcag

SEQ ID NO: 2694659 - RNA, 16 nt, Human
cugcccucuccugggc

SEQ ID NO: 2694660 - RNA, 21 nt, Human
cugcccucuccugggcagcug

SEQ ID NO: 2694661 - RNA, 20 nt, Human
cugcccucuccugggcagcu

SEQ ID NO: 2694662 - RNA, 21 nt, Human
cuucugucuucacaacagauu

SEQ ID NO: 2694663 - RNA, 22 nt, Human
cuucugucuucacaacagauua

SEQ ID NO: 2694664 - RNA, 18 nt, Human
cuucugucuucacaacag

SEQ ID NO: 2694665 - RNA, 22 nt, Human
cuuagaugcaguucugaagaag

SEQ ID NO: 2694666 - RNA, 20 nt, Human
cuuagaugcaguucugaaga

SEQ ID NO: 2694667 - RNA, 15 nt, Human
cuuauuucauuucuu

SEQ ID NO: 2694668 - RNA, 15 nt, Human
cuuauuuccucauuu

SEQ ID NO: 2694669 - RNA, 14 nt, Human
cuuauuucauuucu

SEQ ID NO: 2694670 - RNA, 23 nt, Human
cuugucaauaaaauccauacauu

SEQ ID NO: 2694671 - RNA, 19 nt, Human
cuugaguuuaaauuguaau

SEQ ID NO: 2694672 - RNA, 18 nt, Human
gaaaauauuuguaucaca

SEQ ID NO: 2694673 - RNA, 22 nt, Human
gaaaaucuacacuccagugaga

SEQ ID NO: 2694674 - RNA, 18 nt, Human
gaaaaucuuauaauuuaa

SEQ ID NO: 2694675 - RNA, 14 nt, Human
gaaagcagggacuu

SEQ ID NO: 2694676 - RNA, 22 nt, Human
gaaagcagaacagugauuacca

SEQ ID NO: 2694677 - RNA, 17 nt, Human
gaaagcagaacagugau

SEQ ID NO: 2694678 - RNA, 20 nt, Human
gaaagaggcagcuugaaacu

SEQ ID NO: 2694679 - RNA, 21 nt, Human
gaaagaggaaugaaguacuca

SEQ ID NO: 2694680 - RNA, 17 nt, Human
gaaagagaacuuccaga

SEQ ID NO: 2694681 - RNA, 14 nt, Human
gaaacccugucucu

SEQ ID NO: 2694682 - RNA, 23 nt, Human
gaaacucguuaauuuguaguguu

SEQ ID NO: 2694683 - RNA, 11 nt, Human
gaaacauuugg

SEQ ID NO: 2694684 - RNA, 16 nt, Human
gaaacacaacuauauu

SEQ ID NO: 2694685 - RNA, 13 nt, Human
ccugaggcuccac

SEQ ID NO: 2694686 - RNA, 14 nt, Human
ccugaggcuccacu

SEQ ID NO: 2694687 - RNA, 13 nt, Human
ccugaaagaggaa

SEQ ID NO: 2694688 - RNA, 17 nt, Human
ccugccccugagcccau

SEQ ID NO: 2694689 - RNA, 14 nt, Human
ccugggcagcugcc

SEQ ID NO: 2694690 - RNA, 13 nt, Human
ccugggcagcugc

SEQ ID NO: 2694691 - RNA, 15 nt, Human
ccuuggacucauuuu

SEQ ID NO: 2694692 - RNA, 18 nt, Human
ccuucggccuccauccug

SEQ ID NO: 2694693 - RNA, 16 nt, Human
ccuucggccuccaucc

SEQ ID NO: 2694694 - RNA, 17 nt, Human
ccuucggccuccauccu

SEQ ID NO: 2694695 - RNA, 22 nt, Human
cuaggaaauauuuauuuuaaua

SEQ ID NO: 2694696 - RNA, 19 nt, Human
cuaaauugacacuuaaaaa

SEQ ID NO: 2694697 - RNA, 15 nt, Human
cuaagagagaaugag

SEQ ID NO: 2694698 - RNA, 14 nt, Human
cuaagagagaauga

SEQ ID NO: 2694699 - RNA, 20 nt, Human
cgggaggcagagguugcagu

SEQ ID NO: 2694700 - RNA, 14 nt, Human
cuacacuaagagag

SEQ ID NO: 2694701 - RNA, 23 nt, Human
cuacacgagauacagaauuuuau

SEQ ID NO: 2694702 - RNA, 21 nt, Human
cuaagcuucacuguaaaauaa

SEQ ID NO: 2694703 - RNA, 14 nt, Human
cuaaguaaaaccac

SEQ ID NO: 2694704 - RNA, 18 nt, Human
cuaaguaaaaccacagca

SEQ ID NO: 2694705 - RNA, 19 nt, Human
cuaaguaaaaccacagcag

SEQ ID NO: 2694706 - RNA, 20 nt, Human
cuaggaaauauuuauuuuaa

SEQ ID NO: 2694707 - RNA, 19 nt, Human
cuaggaaauauuuauuuua

SEQ ID NO: 2694708 - RNA, 15 nt, Human
cuaggaaauauuuau

SEQ ID NO: 2694709 - RNA, 14 nt, Human
cuaggaaauauuua

SEQ ID NO: 2694710 - RNA, 15 nt, Human
cuauaggugcuacaa

SEQ ID NO: 2694711 - RNA, 19 nt, Human
cuagaguuuagcuggaaaa

SEQ ID NO: 2694712 - RNA, 18 nt, Human
cuagaguuuagcuggaaa

SEQ ID NO: 2694713 - RNA, 19 nt, Human
cuaugaaauauuauguuaa

SEQ ID NO: 2694714 - RNA, 12 nt, Human
cuauaauuuaaa

SEQ ID NO: 2694715 - RNA, 13 nt, Human
cuauaauuuaaau

SEQ ID NO: 2694716 - RNA, 21 nt, Human
cucagaugcacaugagcuggc

SEQ ID NO: 2694717 - RNA, 22 nt, Human
cucaggaaaucaaauaugcaaa

SEQ ID NO: 2694718 - RNA, 14 nt, Human
cuccccucggagaa

SEQ ID NO: 2694719 - RNA, 23 nt, Human
cucauuuuuauaaugucccuuca

SEQ ID NO: 2694720 - RNA, 12 nt, Human
cucauuuccaag

SEQ ID NO: 2694721 - RNA, 14 nt, Human
cucauuuccaagca

SEQ ID NO: 2694722 - RNA, 13 nt, Human
cucauuuccaagc

SEQ ID NO: 2694723 - RNA, 17 nt, Human
cucauuuccaagcaagu

SEQ ID NO: 2694724 - RNA, 17 nt, Human
ccccuccucugcuugcc

SEQ ID NO: 2694725 - RNA, 14 nt, Human
ccccuccucugcuu

SEQ ID NO: 2694726 - RNA, 13 nt, Human
ccccuccucugcu

SEQ ID NO: 2694727 - RNA, 15 nt, Human
ccccucggagaagag

SEQ ID NO: 2694728 - RNA, 15 nt, Human
ccuaacgaaguaucc

SEQ ID NO: 2694729 - RNA, 22 nt, Human
cccucuccugggcagcugccuc

SEQ ID NO: 2694730 - RNA, 21 nt, Human
cccucuccugggcagcugccu

SEQ ID NO: 2694731 - RNA, 20 nt, Human
cccucuccugggcagcugcc

SEQ ID NO: 2694732 - RNA, 23 nt, Human
cccucuccugggcagcugccucc

SEQ ID NO: 2694733 - RNA, 12 nt, Human
ccaggugccagu

SEQ ID NO: 2694734 - RNA, 13 nt, Human
ccaggugccaguu

SEQ ID NO: 2694735 - RNA, 20 nt, Human
ccauccugaggcuccacuug

SEQ ID NO: 2694736 - RNA, 18 nt, Human
ccauccugaggcuccacu

SEQ ID NO: 2694737 - RNA, 20 nt, Human
ccagguagaggguguguaag

SEQ ID NO: 2694738 - RNA, 19 nt, Human
ccagccugagcgacaguga

SEQ ID NO: 2694739 - RNA, 15 nt, Human
ccacugguucuucuu

SEQ ID NO: 2694740 - RNA, 14 nt, Human
ccagacaucaacag

SEQ ID NO: 2694741 - RNA, 15 nt, Human
ccaccucccugcaau

SEQ ID NO: 2694742 - RNA, 21 nt, Human
ccaccucccugcaauaaaaug

SEQ ID NO: 2694743 - RNA, 19 nt, Human
ccaccucccugcaauaaaa

SEQ ID NO: 2694744 - RNA, 12 nt, Human
aaaaacacagca

SEQ ID NO: 2694745 - RNA, 17 nt, Human
aaaacaaggaugaauua

SEQ ID NO: 2694746 - RNA, 12 nt, Human
aaaacacagcaa

SEQ ID NO: 2694747 - RNA, 13 nt, Human
aaaacacagcaag

SEQ ID NO: 2694748 - RNA, 18 nt, Human
aaaacacagcaaggguga

SEQ ID NO: 2694749 - RNA, 14 nt, Human
aaaacaaggaugaa

SEQ ID NO: 2694750 - RNA, 15 nt, Human
agcaugaagacagag

SEQ ID NO: 2694751 - RNA, 12 nt, Human
agcaugaagaca

SEQ ID NO: 2694752 - RNA, 19 nt, Human
agccagauuuuccugaaaa

SEQ ID NO: 2694753 - RNA, 15 nt, Human
agccagauuuuccug

SEQ ID NO: 2694754 - RNA, 19 nt, Human
agcaguucagagcugcccu

SEQ ID NO: 2694755 - RNA, 20 nt, Human
agcaguucagagcugcccuc

SEQ ID NO: 2694756 - RNA, 18 nt, Human
agcaguucagagcugccc

SEQ ID NO: 2694757 - RNA, 17 nt, Human
agcaguucagagcugcc

SEQ ID NO: 2694758 - RNA, 15 nt, Human
agcaguucagagcug

SEQ ID NO: 2694759 - RNA, 16 nt, Human
agcaguucagagcugc

SEQ ID NO: 2694760 - RNA, 23 nt, Human
agcaguugaaaagacuccaaaga

SEQ ID NO: 2694761 - RNA, 21 nt, Human
agcaguugaaaagacuccaaa

SEQ ID NO: 2694762 - RNA, 14 nt, Human
agauguagaggaga

SEQ ID NO: 2694763 - RNA, 21 nt, Human
agaugggagaaucacuugaac

SEQ ID NO: 2694764 - RNA, 19 nt, Human
agccccacccucagaugca

SEQ ID NO: 2694765 - RNA, 21 nt, Human
agccgggcgugguggugagug

SEQ ID NO: 2694766 - RNA, 21 nt, Human
agauaggucagugcaaauacu

SEQ ID NO: 2694767 - RNA, 17 nt, Human
agacugcauuauauuua

SEQ ID NO: 2694768 - RNA, 14 nt, Human
aggauguugaaaaa

SEQ ID NO: 2694769 - RNA, 17 nt, Human
aggauguugaaaaaguu

SEQ ID NO: 2694770 - RNA, 18 nt, Human
agcuucacuguaaaauaa

SEQ ID NO: 2694771 - RNA, 14 nt, Human
agcuguaugauucc

SEQ ID NO: 2694772 - RNA, 21 nt, Human
auguaagggaaacugccagca

SEQ ID NO: 2694773 - RNA, 22 nt, Human
auguaagggaaacugccagcaa

SEQ ID NO: 2694774 - RNA, 20 nt, Human
auguaagggaaacugccagc

SEQ ID NO: 2694775 - RNA, 22 nt, Human
aucuuauaauuuaaaauaugcu

SEQ ID NO: 2694776 - RNA, 17 nt, Human
aucagcugcugaaacaa

SEQ ID NO: 2694777 - RNA, 21 nt, Human
aguccaagcauuuagauguau

SEQ ID NO: 2694778 - RNA, 16 nt, Human
aguccaagcauuuaga

SEQ ID NO: 2694779 - RNA, 17 nt, Human
agucaaauugugugaaa

SEQ ID NO: 2694780 - RNA, 15 nt, Human
agucaaauuguguga

SEQ ID NO: 2694781 - RNA, 13 nt, Human
agucaaauugugu

SEQ ID NO: 2694782 - RNA, 18 nt, Human
agugauuaccagggacug

SEQ ID NO: 2694783 - RNA, 15 nt, Human
agugauuaccaggga

SEQ ID NO: 2694784 - RNA, 18 nt, Human
aguuguaccgcaauguga

SEQ ID NO: 2694785 - RNA, 19 nt, Human
aguuguaccgcaaugugac

SEQ ID NO: 2694786 - RNA, 19 nt, Human
auauuuauuacuguaagaa

SEQ ID NO: 2694787 - RNA, 14 nt, Human
auauuuauuacugu

SEQ ID NO: 2694788 - RNA, 18 nt, Human
auauuuauuuuaauaaug

SEQ ID NO: 2694789 - RNA, 23 nt, Human
auauuucagauaaucacaauaca

SEQ ID NO: 2694790 - RNA, 23 nt, Human
auaugcuucuguuuuauaauuuu

SEQ ID NO: 2694791 - RNA, 15 nt, Human
auaucaauuuaaaaa

SEQ ID NO: 2694792 - RNA, 18 nt, Human
auaucacuugucaauaaa

SEQ ID NO: 2694793 - RNA, 14 nt, Human
auaauuacuauguc

SEQ ID NO: 2694794 - RNA, 16 nt, Human
acuaagagagaaugag

SEQ ID NO: 2694795 - RNA, 15 nt, Human
acuaagagagaauga

SEQ ID NO: 2694796 - RNA, 16 nt, Human
acgugcacgcacacug

SEQ ID NO: 2694797 - RNA, 12 nt, Human
acucccuuucaa

SEQ ID NO: 2694798 - RNA, 13 nt, Human
acucccuuucaac

SEQ ID NO: 2694799 - RNA, 14 nt, Human
acuagcuauggugu

SEQ ID NO: 2694800 - RNA, 14 nt, Human
acucaaaucaagaa

SEQ ID NO: 2694801 - RNA, 12 nt, Human
acuggaacucuc

SEQ ID NO: 2694802 - RNA, 19 nt, Human
acuuguaaaggaauuuaaa

SEQ ID NO: 2694803 - RNA, 20 nt, Human
acuuguaaaggaauuuaaaa

SEQ ID NO: 2694804 - RNA, 14 nt, Human
acuuggucugugag

SEQ ID NO: 2694805 - RNA, 15 nt, Human
acuuggucugugaga

SEQ ID NO: 2694806 - RNA, 18 nt, Human
acuuguaaaggaauuuaa

SEQ ID NO: 2694807 - RNA, 16 nt, Human
acccaaguccaagcau

SEQ ID NO: 2694808 - RNA, 15 nt, Human
acccacaagaaauga

SEQ ID NO: 2694809 - RNA, 14 nt, Human
acauuuguauaaaa

SEQ ID NO: 2694810 - RNA, 18 nt, Human
acauuugcucauggaauu

SEQ ID NO: 2694811 - RNA, 13 nt, Human
acauguuacaaca

SEQ ID NO: 2694812 - RNA, 15 nt, Human
acagcaguugaaaag

SEQ ID NO: 2694813 - RNA, 18 nt, Human
acagcaguugaaaagacu

SEQ ID NO: 2694814 - RNA, 16 nt, Human
acagccagacuggcac

SEQ ID NO: 2694815 - RNA, 13 nt, Human
acagccagacugg

SEQ ID NO: 2694816 - RNA, 15 nt, Human
acagccagacuggca

SEQ ID NO: 2694817 - RNA, 20 nt, Human
acagcucugcauacucauua

SEQ ID NO: 2694818 - RNA, 13 nt, Human
acaacuauauugu

SEQ ID NO: 2694819 - RNA, 15 nt, Human
aacacgagcaggcua

SEQ ID NO: 2694820 - RNA, 23 nt, Human
aacugacacaugcugaacaucac

SEQ ID NO: 2694821 - RNA, 13 nt, Human
aagaaauguaagg

SEQ ID NO: 2694822 - RNA, 14 nt, Human
aagaaauguaaggg

SEQ ID NO: 2694823 - RNA, 16 nt, Human
aaacugacucuuaaga

SEQ ID NO: 2694824 - RNA, 14 nt, Human
aaacugccagcaac

SEQ ID NO: 2694825 - RNA, 15 nt, Human
aaacugccagcaacg

SEQ ID NO: 2694826 - RNA, 17 nt, Human
aaacugacucuuaagaa

SEQ ID NO: 2694827 - RNA, 19 nt, Human
aaacugccagcaacgcagg

SEQ ID NO: 2694828 - RNA, 17 nt, Human
aaagaugaaaauauuug

SEQ ID NO: 2694829 - RNA, 13 nt, Human
aaagaugaaaaua

SEQ ID NO: 2694830 - RNA, 16 nt, Human
aaagaugaaaauauuu

SEQ ID NO: 2694831 - RNA, 12 nt, Human
aaauaacaauga

SEQ ID NO: 2694832 - RNA, 18 nt, Human
aaauggcuuccuggcaau

SEQ ID NO: 2694833 - RNA, 16 nt, Human
aaaucaaauaugcaaa

SEQ ID NO: 2694834 - RNA, 18 nt, Human
aaaucaaauaugcaaagc

SEQ ID NO: 2694835 - RNA, 19 nt, Human
aaaucaaauaugcaaagca

SEQ ID NO: 2694836 - RNA, 20 nt, Human
aauuaguuuuauaugcuucu

SEQ ID NO: 2694837 - RNA, 17 nt, Human
aauuaguuuuauaugcu

SEQ ID NO: 2694838 - RNA, 14 nt, Human
aauuaguuuuauau

SEQ ID NO: 2694839 - RNA, 16 nt, Human
aauauuauguuaaaac

SEQ ID NO: 2694840 - RNA, 13 nt, Human
aaucacaauacau

SEQ ID NO: 2694841 - RNA, 15 nt, Human
aaucaagaaacuuaa

SEQ ID NO: 2694842 - RNA, 14 nt, Human
aauccauacauuug

SEQ ID NO: 2694843 - RNA, 13 nt, Human
aauccauacauuu

SEQ ID NO: 2694844 - RNA, 17 nt, Human
aaugauaacuggaaacu

SEQ ID NO: 2694845 - RNA, 20 nt, Human
aaugauaacuggaaacuuca

SEQ ID NO: 2694846 - RNA, 19 nt, Human
aauaaaauggguuuuacug

SEQ ID NO: 2694847 - RNA, 14 nt, Human
aauaaaauggguuu

SEQ ID NO: 2694848 - RNA, 21 nt, Human
aauaauccuaaacauaugaau

SEQ ID NO: 2694849 - RNA, 13 nt, Human
aagccagauuuuc

SEQ ID NO: 2694850 - RNA, 16 nt, Human
aagauuuaccacuugu

SEQ ID NO: 2694851 - RNA, 21 nt, Human
gaaaagacuccaaagaaaugu

SEQ ID NO: 2694852 - RNA, 20 nt, Human
gaaaagacuccaaagaaaug

SEQ ID NO: 2694853 - RNA, 18 nt, Human
gaaaagacuccaaagaaa

SEQ ID NO: 2694854 - RNA, 23 nt, Human
gaaacuucagcgguuuauauaag

SEQ ID NO: 2694855 - RNA, 23 nt, Human
gaacaaauuuacagagacagaaa

SEQ ID NO: 2694856 - RNA, 17 nt, Human
gaacaaauuuacagaga

SEQ ID NO: 2694857 - RNA, 18 nt, Human
gaacaaauuuacagagac

SEQ ID NO: 2694858 - RNA, 18 nt, Human
gaaaugaaagcagggacu

SEQ ID NO: 2694859 - RNA, 23 nt, Human
gaaaucaaauaugcaaagcacug

SEQ ID NO: 2694860 - RNA, 17 nt, Human
gaaaugaaagcagggac

SEQ ID NO: 2694861 - RNA, 17 nt, Human
gaaaucaaauaugcaaa

SEQ ID NO: 2694862 - RNA, 21 nt, Human
gaaaucaaauaugcaaagcac

SEQ ID NO: 2694863 - RNA, 16 nt, Human
gaaaucaaauaugcaa

SEQ ID NO: 2694864 - RNA, 22 nt, Human
cuucucuguauuccuagaaacu

SEQ ID NO: 2694865 - RNA, 23 nt, Human
cuuggucucagugucaaugcagc

SEQ ID NO: 2694866 - RNA, 23 nt, Human
cuggaaaaguauguuagugcaaa

SEQ ID NO: 2694867 - RNA, 14 nt, Human
cugccuccccuccu

SEQ ID NO: 2694868 - RNA, 18 nt, Human
cugccuccccuccucugc

SEQ ID NO: 2694869 - RNA, 17 nt, Human
cugccuccccuccucug

SEQ ID NO: 2694870 - RNA, 20 nt, Human
cugccuccccuccucugcuu

SEQ ID NO: 2694871 - RNA, 19 nt, Human
cugccuccccuccucugcu

SEQ ID NO: 2694872 - RNA, 21 nt, Human
cugccuccccuccucugcuug

SEQ ID NO: 2694873 - RNA, 20 nt, Human
cuguaagaaaauaucacuug

SEQ ID NO: 2694874 - RNA, 21 nt, Human
cugugagaugcuagaacuccc

SEQ ID NO: 2694875 - RNA, 23 nt, Human
cugugagaugcuagaacucccuu

SEQ ID NO: 2694876 - RNA, 22 nt, Human
cuguucacagccagacuggcac

SEQ ID NO: 2694877 - RNA, 12 nt, Human
cuguucacagcc

SEQ ID NO: 2694878 - RNA, 19 nt, Human
cuguucacagccagacugg

SEQ ID NO: 2694879 - RNA, 13 nt, Human
cuuaaaaaugguu

SEQ ID NO: 2694880 - RNA, 20 nt, Human
cuuaaaaaugguuuaaaugg

SEQ ID NO: 2694881 - RNA, 12 nt, Human
cuuaaaaauggu

SEQ ID NO: 2694882 - RNA, 14 nt, Human
gacgcucucuggcc

SEQ ID NO: 2694883 - RNA, 18 nt, Human
gacagucaccucauggaa

SEQ ID NO: 2694884 - RNA, 12 nt, Human
gacagcucugca

SEQ ID NO: 2694885 - RNA, 14 nt, Human
gaaugaauggcuaa

SEQ ID NO: 2694886 - RNA, 20 nt, Human
gaauuacauuuguauaaaau

SEQ ID NO: 2694887 - RNA, 18 nt, Human
gaauuacauuuguauaaa

SEQ ID NO: 2694888 - RNA, 15 nt, Human
gaauuacauuuguau

SEQ ID NO: 2694889 - RNA, 13 nt, Human
gaauuacauuugu

SEQ ID NO: 2694890 - RNA, 14 nt, Human
gaauuaacacauga

SEQ ID NO: 2694891 - RNA, 15 nt, Human
gaauuaacacaugau

SEQ ID NO: 2694892 - RNA, 22 nt, Human
gaaugauuaugaauuacauuug

SEQ ID NO: 2694893 - RNA, 14 nt, Human
gaaugauuaugaau

SEQ ID NO: 2694894 - RNA, 15 nt, Human
gaaugaauggcuaag

SEQ ID NO: 2694895 - RNA, 20 nt, Human
gaaugaauggcuaagcaaaa

SEQ ID NO: 2694896 - RNA, 22 nt, Human
gagcuguucacagccagacugg

SEQ ID NO: 2694897 - RNA, 17 nt, Human
gagcuguucacagccag

SEQ ID NO: 2694898 - RNA, 20 nt, Human
gagcuguucacagccagacu

SEQ ID NO: 2694899 - RNA, 14 nt, Human
gagcagucaggaaa

SEQ ID NO: 2694900 - RNA, 17 nt, Human
gagccccacccucagau

SEQ ID NO: 2694901 - RNA, 16 nt, Human
gagccccacccucaga

SEQ ID NO: 2694902 - RNA, 21 nt, Human
gaggacgcucucuggccuucg

SEQ ID NO: 2694903 - RNA, 20 nt, Human
gaggacgcucucuggccuuc

SEQ ID NO: 2694904 - RNA, 12 nt, Human
gaggagaaacug

SEQ ID NO: 2694905 - RNA, 14 nt, Human
gaggagaaacugga

SEQ ID NO: 2694906 - RNA, 15 nt, Human
gaggcuccacuuggu

SEQ ID NO: 2694907 - RNA, 12 nt, Human
gaggcuccacuu

SEQ ID NO: 2694908 - RNA, 17 nt, Human
gaggcuccacuuggucu

SEQ ID NO: 2694909 - RNA, 18 nt, Human
gaggcugagaugggagaa

SEQ ID NO: 2694910 - RNA, 21 nt, Human
gagauugugccccugcacucc

SEQ ID NO: 2694911 - RNA, 16 nt, Human
gagaugcuagaacucc

SEQ ID NO: 2694912 - RNA, 20 nt, Human
gagaugcuagaacucccuuu

SEQ ID NO: 2694913 - RNA, 22 nt, Human
gacuuuuuauggcacuaguauu

SEQ ID NO: 2694914 - RNA, 22 nt, Human
gcaguuguugcccacagcugua

SEQ ID NO: 2694915 - RNA, 13 nt, Human
gcagugaugucac

SEQ ID NO: 2694916 - RNA, 20 nt, Human
gcaucuagcaugucgucaaa

SEQ ID NO: 2694917 - RNA, 15 nt, Human
gcagcucuccccuuc

SEQ ID NO: 2694918 - RNA, 12 nt, Human
gcagaacaguga

SEQ ID NO: 2694919 - RNA, 13 nt, Human
gcagaacagugau

SEQ ID NO: 2694920 - RNA, 18 nt, Human
gcagaacagugauuacca

SEQ ID NO: 2694921 - RNA, 22 nt, Human
gcagaacagugauuaccaggga

SEQ ID NO: 2694922 - RNA, 18 nt, Human
gcuguauuuuaaaagaau

SEQ ID NO: 2694923 - RNA, 20 nt, Human
gcuguauuuuaaaagaauga

SEQ ID NO: 2694924 - RNA, 21 nt, Human
gcuguauuuuaaaagaaugau

SEQ ID NO: 2694925 - RNA, 13 nt, Human
gcugcugaaacaa

SEQ ID NO: 2694926 - RNA, 14 nt, Human
gcugccuccccucc

SEQ ID NO: 2694927 - RNA, 13 nt, Human
ggaaacugccagc

SEQ ID NO: 2694928 - RNA, 16 nt, Human
ggaaaaaauaacaaug

SEQ ID NO: 2694929 - RNA, 19 nt, Human
ggaaaucaggguuaguauu

SEQ ID NO: 2694930 - RNA, 21 nt, Human
ggacagucaccucauggaauu

SEQ ID NO: 2694931 - RNA, 18 nt, Human
ggacagucaccucaugga

SEQ ID NO: 2694932 - RNA, 17 nt, Human
ggacagucaccucaugg

SEQ ID NO: 2694933 - RNA, 13 nt, Human
gcauuuagaugua

SEQ ID NO: 2694934 - RNA, 19 nt, Human
gcauuuaggccaugggaca

SEQ ID NO: 2694935 - RNA, 12 nt, Human
gcauuuagaugu

SEQ ID NO: 2694936 - RNA, 11 nt, Human
gccccaaaagg

SEQ ID NO: 2694937 - RNA, 22 nt, Human
gccucauguccacugguucuuc

SEQ ID NO: 2694938 - RNA, 13 nt, Human
gccuccauccuga

SEQ ID NO: 2694939 - RNA, 14 nt, Human
gccuccauccugag

SEQ ID NO: 2694940 - RNA, 15 nt, Human
gccuccauccugagg

SEQ ID NO: 2694941 - RNA, 23 nt, Human
gccuucggccuccauccugaggc

SEQ ID NO: 2694942 - RNA, 13 nt, Human
aaaaauacaaaaa

SEQ ID NO: 2694943 - RNA, 18 nt, Human
ggccuucggccuccaucc

SEQ ID NO: 2694944 - RNA, 22 nt, Human
ggccuucggccuccauccugag

SEQ ID NO: 2694945 - RNA, 16 nt, Human
ggccuucggccuccau

SEQ ID NO: 2694946 - RNA, 20 nt, Human
ggcuaagcuucacuguaaaa

SEQ ID NO: 2694947 - RNA, 16 nt, Human
aaaaugguuuaaaugg

SEQ ID NO: 2694948 - RNA, 18 nt, Human
aaaaugguuuaaaugguc

SEQ ID NO: 2694949 - RNA, 16 nt, Human
aaaauggguuuuacug

SEQ ID NO: 2694950 - RNA, 17 nt, Human
aaaaucucaauauuuca

SEQ ID NO: 2694951 - RNA, 11 nt, Human
aaaauaauuuu

SEQ ID NO: 2694952 - RNA, 17 nt, Human
aaaauaauuuuuauauu

SEQ ID NO: 2694953 - RNA, 16 nt, Human
aaaauaauuuuuauau

SEQ ID NO: 2694954 - RNA, 14 nt, Human
aaaauacacacuca

SEQ ID NO: 2694955 - RNA, 14 nt, Human
ggucagugcaaaua

SEQ ID NO: 2694956 - RNA, 20 nt, Human
ggguuuuauuguuuaaaauc

SEQ ID NO: 2694957 - RNA, 13 nt, Human
aaauaugcaaagc

SEQ ID NO: 2694958 - RNA, 15 nt, Human
aaauaugcaaagcac

SEQ ID NO: 2694959 - RNA, 16 nt, Human
aaauaugcaaagcacu

SEQ ID NO: 2694960 - RNA, 17 nt, Human
aaauaugcaaagcacug

SEQ ID NO: 2694961 - RNA, 21 nt, Human
aaauaccaugccauuuaaagc

SEQ ID NO: 2694962 - RNA, 18 nt, Human
aaauauaugcuaagucuu

SEQ ID NO: 2694963 - RNA, 22 nt, Human
aaauaucacuugucaauaaaau

SEQ ID NO: 2694964 - RNA, 13 nt, Human
guaauaaacucau

SEQ ID NO: 2694965 - RNA, 12 nt, Human
aaacuuuaugcu

SEQ ID NO: 2694966 - RNA, 19 nt, Human
aaacuuuaugcuaagugaa

SEQ ID NO: 2694967 - RNA, 16 nt, Human
aaagcagaacagugau

SEQ ID NO: 2694968 - RNA, 22 nt, Human
aaagggcuguuauaaucuuuca

SEQ ID NO: 2694969 - RNA, 20 nt, Human
aaagggcuguuauaaucuuu

SEQ ID NO: 2694970 - RNA, 13 nt, Human
aaagcuuauuaaa

SEQ ID NO: 2694971 - RNA, 17 nt, Human
aaaguauguuagugcaa

SEQ ID NO: 2694972 - RNA, 19 nt, Human
gguuuuauuguuuaaaauc

SEQ ID NO: 2694973 - RNA, 12 nt, Human
gguuucuagcau

SEQ ID NO: 2694974 - RNA, 16 nt, Human
cacaagacugcacauc

SEQ ID NO: 2694975 - RNA, 12 nt, Human
caauuuaaaaaa

SEQ ID NO: 2694976 - RNA, 23 nt, Human
caaugcuguauuuuaaaagaaug

SEQ ID NO: 2694977 - RNA, 14 nt, Human
caaugcuguauuuu

SEQ ID NO: 2694978 - RNA, 21 nt, Human
caauauuucagauaaucacaa

SEQ ID NO: 2694979 - RNA, 20 nt, Human
caauauuucagauaaucaca

SEQ ID NO: 2694980 - RNA, 12 nt, Human
caauauuucaga

SEQ ID NO: 2694981 - RNA, 20 nt, Human
caaguauuagaauaccacag

SEQ ID NO: 2694982 - RNA, 14 nt, Human
caaguauuagaaua

SEQ ID NO: 2694983 - RNA, 22 nt, Human
caccuugcagcucuccccuucu

SEQ ID NO: 2694984 - RNA, 15 nt, Human
caccuugcagcucuc

SEQ ID NO: 2694985 - RNA, 13 nt, Human
caccuugcagcuc

SEQ ID NO: 2694986 - RNA, 21 nt, Human
caccuacaugagguacugaga

SEQ ID NO: 2694987 - RNA, 23 nt, Human
caccucaaaauaccaugccauuu

SEQ ID NO: 2694988 - RNA, 17 nt, Human
cacuuggucugugagau

SEQ ID NO: 2694989 - RNA, 20 nt, Human
cacuuggucugugagaugcu

SEQ ID NO: 2694990 - RNA, 19 nt, Human
caacccaaauguucaucaa

SEQ ID NO: 2694991 - RNA, 21 nt, Human
caacuaucucauuuccaagca

SEQ ID NO: 2694992 - RNA, 15 nt, Human
caacacgagcaggcu

SEQ ID NO: 2694993 - RNA, 17 nt, Human
auucuugccaaauauaa

SEQ ID NO: 2694994 - RNA, 18 nt, Human
auugacuuuuuauggcac

SEQ ID NO: 2694995 - RNA, 18 nt, Human
auucacaagacccaaaag

SEQ ID NO: 2694996 - RNA, 14 nt, Human
auuguaaaugugcu

SEQ ID NO: 2694997 - RNA, 15 nt, Human
auuguaaaugugcuu

SEQ ID NO: 2694998 - RNA, 17 nt, Human
auuguaaaugugcuuuu

SEQ ID NO: 2694999 - RNA, 13 nt, Human
auuguaaaauggu

SEQ ID NO: 2695000 - RNA, 19 nt, Human
auuguuuaaaaucauuucu

SEQ ID NO: 2695001 - RNA, 18 nt, Human
auuucuaugaaauauuau

SEQ ID NO: 2695002 - RNA, 15 nt, Human
auuucuaugaaauau

SEQ ID NO: 2695003 - RNA, 20 nt, Human
auuucuaugaaauauuaugu

SEQ ID NO: 2695004 - RNA, 19 nt, Human
caggugccaguuauggcua

SEQ ID NO: 2695005 - RNA, 16 nt, Human
cagucaccucauggaa

SEQ ID NO: 2695006 - RNA, 15 nt, Human
cagucacauuccaag

SEQ ID NO: 2695007 - RNA, 19 nt, Human
cagucaccucauggaauug

SEQ ID NO: 2695008 - RNA, 20 nt, Human
cagucugacuguuuccauca

SEQ ID NO: 2695009 - RNA, 13 nt, Human
cagcaguucagag

SEQ ID NO: 2695010 - RNA, 17 nt, Human
cagagguugcagugagc

SEQ ID NO: 2695011 - RNA, 16 nt, Human
cagagguugcagugag

SEQ ID NO: 2695012 - RNA, 12 nt, Human
cagauccuggaa

SEQ ID NO: 2695013 - RNA, 21 nt, Human
cagcuccccucggagaagagc

SEQ ID NO: 2695014 - RNA, 22 nt, Human
cagcuccccucggagaagagcu

SEQ ID NO: 2695015 - RNA, 14 nt, Human
caugauguuuagaa

SEQ ID NO: 2695016 - RNA, 23 nt, Human
ccacagcaguugaaaagacucca

SEQ ID NO: 2695017 - RNA, 17 nt, Human
ccacagcaguugaaaag

SEQ ID NO: 2695018 - RNA, 18 nt, Human
ccacagcaguugaaaaga

SEQ ID NO: 2695019 - RNA, 12 nt, Human
ccacagcaguug

SEQ ID NO: 2695020 - RNA, 17 nt, Human
cauuuguauaaaauaau

SEQ ID NO: 2695021 - RNA, 20 nt, Human
cauuuguauaaaauaauuuu

SEQ ID NO: 2695022 - RNA, 19 nt, Human
cauuuguauaaaauaauuu

SEQ ID NO: 2695023 - RNA, 17 nt, Human
ccaaauguucaucaaug

SEQ ID NO: 2695024 - RNA, 18 nt, Human
ccccugcacuccagccug

SEQ ID NO: 2695025 - RNA, 14 nt, Human
ccauacauuugugu

SEQ ID NO: 2695026 - RNA, 13 nt, Human
ccauacauuugug

SEQ ID NO: 2695027 - RNA, 22 nt, Human
ccauuuaaagcuuauuaaaacu

SEQ ID NO: 2695028 - RNA, 19 nt, Human
cccugucuccucucucugu

SEQ ID NO: 2695029 - RNA, 23 nt, Human
ccucauggaauuggagcucgugg

SEQ ID NO: 2695030 - RNA, 15 nt, Human
ccuguaaucacagcu

SEQ ID NO: 2695031 - RNA, 21 nt, Human
ccugucggagcccugucuccu

SEQ ID NO: 2695032 - RNA, 17 nt, Human
ccugucggagcccuguc

SEQ ID NO: 2695033 - RNA, 16 nt, Human
ccugucggagcccugu

SEQ ID NO: 2695034 - RNA, 22 nt, Human
ccugucggagcccugucuccuc

SEQ ID NO: 2695035 - RNA, 15 nt, Human
cugaaacaacaaaua

SEQ ID NO: 2695036 - RNA, 16 nt, Human
cucuccccuucucugu

SEQ ID NO: 2695037 - RNA, 21 nt, Human
cucuuagaugcaguucugaag

SEQ ID NO: 2695038 - RNA, 22 nt, Human
cucuuagaugcaguucugaaga

SEQ ID NO: 2695039 - RNA, 16 nt, Human
cuccacuuggucugug

SEQ ID NO: 2695040 - RNA, 17 nt, Human
cuccacuuggucuguga

SEQ ID NO: 2695041 - RNA, 21 nt, Human
cuccacuuggucugugagaug

SEQ ID NO: 2695042 - RNA, 22 nt, Human
cuccacuuggucugugagaugc

SEQ ID NO: 2695043 - RNA, 13 nt, Human
cuccacuuggucu

SEQ ID NO: 2695044 - RNA, 15 nt, Human
cuccacuuggucugu

SEQ ID NO: 2695045 - RNA, 18 nt, Human
cucaguagucagacugga

SEQ ID NO: 2695046 - RNA, 19 nt, Human
cuccccaugauguuuagaa

SEQ ID NO: 2695047 - RNA, 23 nt, Human
cuccacuuggucugugagaugcu

SEQ ID NO: 2695048 - RNA, 14 nt, Human
cuccucugcuugcc

SEQ ID NO: 2695049 - RNA, 12 nt, Human
cuccucugcuug

SEQ ID NO: 2695050 - RNA, 12 nt, Human
cuccugggcagc

SEQ ID NO: 2695051 - RNA, 17 nt, Human
cuccugggcagcugccu

SEQ ID NO: 2695052 - RNA, 16 nt, Human
cuccugggcagcugcc

SEQ ID NO: 2695053 - RNA, 15 nt, Human
cuccugggcagcugc

SEQ ID NO: 2695054 - RNA, 14 nt, Human
cuccugggcagcug

SEQ ID NO: 2695055 - RNA, 19 nt, Human
cuccugggcagcugccucc

SEQ ID NO: 2695056 - RNA, 18 nt, Human
cuccugggcagcugccuc

SEQ ID NO: 2695057 - RNA, 22 nt, Human
cuccugggcagcugccuccccu

SEQ ID NO: 2695058 - RNA, 20 nt, Human
cuccucugcuugccaucccu

SEQ ID NO: 2695059 - RNA, 17 nt, Human
cuccucugcuugccauc

SEQ ID NO: 2695060 - RNA, 16 nt, Human
cuccucugcuugccau

SEQ ID NO: 2695061 - RNA, 15 nt, Human
cuccucugcuugcca

SEQ ID NO: 2695062 - RNA, 22 nt, Human
cuccucugcuugccaucccucc

SEQ ID NO: 2695063 - RNA, 21 nt, Human
cuccucugcuugccaucccuc

SEQ ID NO: 2695064 - RNA, 14 nt, Human
cucguuaauuugua

SEQ ID NO: 2695065 - RNA, 12 nt, Human
cuagaacucccu

SEQ ID NO: 2695066 - RNA, 13 nt, Human
cuagaacucccuu

SEQ ID NO: 2695067 - RNA, 22 nt, Human
cuaaguaaaaccacagcaguug

SEQ ID NO: 2695068 - RNA, 23 nt, Human
cuaaguaaaaccacagcaguuga

SEQ ID NO: 2695069 - RNA, 20 nt, Human
cgugugugugcguccugucg

SEQ ID NO: 2695070 - RNA, 20 nt, Human
cuaaguaaaaccacagcagu

SEQ ID NO: 2695071 - RNA, 20 nt, Human
cuacaugagguacugagagu

SEQ ID NO: 2695072 - RNA, 18 nt, Human
cuacaugagguacugaga

SEQ ID NO: 2695073 - RNA, 18 nt, Human
cuacauacuauggaauuu

SEQ ID NO: 2695074 - RNA, 16 nt, Human
cuacaaaaacacagca

SEQ ID NO: 2695075 - RNA, 17 nt, Human
cuacaaaaacacagcaa

SEQ ID NO: 2695076 - RNA, 18 nt, Human
cuacaaaaacacagcaag

SEQ ID NO: 2695077 - RNA, 15 nt, Human
cuacaaaaacacagc

SEQ ID NO: 2695078 - RNA, 16 nt, Human
cuagcaugaagacaga

SEQ ID NO: 2695079 - RNA, 23 nt, Human
cucaaaauaccaugccauuuaaa

SEQ ID NO: 2695080 - RNA, 17 nt, Human
cucaaaacugcacuguc

SEQ ID NO: 2695081 - RNA, 18 nt, Human
cgcaggcccccaggugcc

SEQ ID NO: 2695082 - RNA, 22 nt, Human
cguggugauuuagcaggaagcu

SEQ ID NO: 2695083 - RNA, 23 nt, Human
auuaaguaaugauaacuggaaac

SEQ ID NO: 2695084 - RNA, 21 nt, Human
auuaaguaaugauaacuggaa

SEQ ID NO: 2695085 - RNA, 19 nt, Human
uuuuugugaaaagcuccau

SEQ ID NO: 2695086 - RNA, 17 nt, Human
auuacauuuguauaaaa

SEQ ID NO: 2695087 - RNA, 20 nt, Human
auuacauuuguauaaaauaa

SEQ ID NO: 2695088 - RNA, 18 nt, Human
auuacauuuguauaaaau

SEQ ID NO: 2695089 - RNA, 12 nt, Human
auuaccagggac

SEQ ID NO: 2695090 - RNA, 19 nt, Human
uuuuuauauuugaaauauu

SEQ ID NO: 2695091 - RNA, 14 nt, Human
uuuuaauaauguuu

SEQ ID NO: 2695092 - RNA, 13 nt, Human
uuuuaauaauguu

SEQ ID NO: 2695093 - RNA, 12 nt, Human
uuuuaauaaugu

SEQ ID NO: 2695094 - RNA, 16 nt, Human
uuuuaauaauguuuca

SEQ ID NO: 2695095 - RNA, 19 nt, Human
augugcuaguaauuggaaa

SEQ ID NO: 2695096 - RNA, 18 nt, Human
auguucaucaaugaauga

SEQ ID NO: 2695097 - RNA, 15 nt, Human
auuaaaagaauauuu

SEQ ID NO: 2695098 - RNA, 15 nt, Human
auguuuucaggcuag

SEQ ID NO: 2695099 - RNA, 21 nt, Human
auguuuucaggcuagauguau

SEQ ID NO: 2695100 - RNA, 17 nt, Human
auguuuucaggcuagau

SEQ ID NO: 2695101 - RNA, 15 nt, Human
uuuucugagaaagac

SEQ ID NO: 2695102 - RNA, 18 nt, Human
uuuucugagaaagacuau

SEQ ID NO: 2695103 - RNA, 16 nt, Human
uuuucucuaggaaaua

SEQ ID NO: 2695104 - RNA, 14 nt, Human
uuuucucuaggaaa

SEQ ID NO: 2695105 - RNA, 22 nt, Human
auuuucaguuauuauauuuaca

SEQ ID NO: 2695106 - RNA, 22 nt, Human
auuuuaaaagaaugauuaugaa

SEQ ID NO: 2695107 - RNA, 18 nt, Human
auuuuaaaagaaugauua

SEQ ID NO: 2695108 - RNA, 18 nt, Human
auuuguauaaaauaauuu

SEQ ID NO: 2695109 - RNA, 15 nt, Human
auuuguauaaaauaa

SEQ ID NO: 2695110 - RNA, 19 nt, Human
auuuguauaaaauaauuuu

SEQ ID NO: 2695111 - RNA, 17 nt, Human
auuuuaaaagaaugauu

SEQ ID NO: 2695112 - RNA, 18 nt, Human
auugacccacaagaaaug

SEQ ID NO: 2695113 - RNA, 14 nt, Human
auuugaaauauuga

SEQ ID NO: 2695114 - RNA, 20 nt, Human
auuuauuuuaauaauguuuc

SEQ ID NO: 2695115 - RNA, 19 nt, Human
auuuauuuuaauaauguuu

SEQ ID NO: 2695116 - RNA, 12 nt, Human
auuucauuucuu

SEQ ID NO: 2695117 - RNA, 17 nt, Human
auuuauuuuaauaaugu

SEQ ID NO: 2695118 - RNA, 13 nt, Human
auuuagauguaua

SEQ ID NO: 2695119 - RNA, 20 nt, Human
augaaauauuauguuaaaac

SEQ ID NO: 2695120 - RNA, 21 nt, Human
augaaauauuauguuaaaacu

SEQ ID NO: 2695121 - RNA, 11 nt, Human
uugcucaugga

SEQ ID NO: 2695122 - RNA, 12 nt, Human
uugcucauggaa

SEQ ID NO: 2695123 - RNA, 23 nt, Human
augaauuaguuuuauaugcuucu

SEQ ID NO: 2695124 - RNA, 21 nt, Human
augaauuaguuuuauaugcuu

SEQ ID NO: 2695125 - RNA, 22 nt, Human
augaauuacauuuguauaaaau

SEQ ID NO: 2695126 - RNA, 23 nt, Human
uuguaguguuggagaagaacuga

SEQ ID NO: 2695127 - RNA, 13 nt, Human
uuguauaaaauaa

SEQ ID NO: 2695128 - RNA, 19 nt, Human
uuguauaaaauaauuuuua

SEQ ID NO: 2695129 - RNA, 17 nt, Human
augaauuacauuuguau

SEQ ID NO: 2695130 - RNA, 19 nt, Human
augaauuacauuuguauaa

SEQ ID NO: 2695131 - RNA, 18 nt, Human
augaauuacauuuguaua

SEQ ID NO: 2695132 - RNA, 20 nt, Human
uuuaaaaaagaaacauuugg

SEQ ID NO: 2695133 - RNA, 18 nt, Human
uugugaagcaaaauuuuu

SEQ ID NO: 2695134 - RNA, 14 nt, Human
augauaacuggaaa

SEQ ID NO: 2695135 - RNA, 16 nt, Human
auggaacauaaaauac

SEQ ID NO: 2695136 - RNA, 16 nt, Human
uuuauuuuaauaaugu

SEQ ID NO: 2695137 - RNA, 19 nt, Human
uuuauuacuguaagaaaau

SEQ ID NO: 2695138 - RNA, 23 nt, Human
augcugucuacacuaagagagaa

SEQ ID NO: 2695139 - RNA, 14 nt, Human
augcuguauuuuaa

SEQ ID NO: 2695140 - RNA, 23 nt, Human
auggaauuggagcucgugggaca

SEQ ID NO: 2695141 - RNA, 17 nt, Human
uuuauaugcuucuguuu

SEQ ID NO: 2695142 - RNA, 16 nt, Human
uuuauuacuguaagaa

SEQ ID NO: 2695143 - RNA, 24 nt, Human
uuuaaagcuuauuaaaacucauuu

SEQ ID NO: 2695144 - RNA, 13 nt, Human
augcuaagugaaa

SEQ ID NO: 2695145 - RNA, 13 nt, Human
uuucuaugaaaua

SEQ ID NO: 2695146 - RNA, 20 nt, Human
uuucuaugaaauauuauguu

SEQ ID NO: 2695147 - RNA, 14 nt, Human
uuucuaugaaauau

SEQ ID NO: 2695148 - RNA, 14 nt, Human
uuucugcaucagcu

SEQ ID NO: 2695149 - RNA, 14 nt, Human
uuugaaauauugac

SEQ ID NO: 2695150 - RNA, 17 nt, Human
auggaauuucucccagu

SEQ ID NO: 2695151 - RNA, 16 nt, Human
auggcuauaggugcua

SEQ ID NO: 2695152 - RNA, 19 nt, Human
auggcuauaggugcuacaa

SEQ ID NO: 2695153 - RNA, 21 nt, Human
auggcuauaggugcuacaaaa

SEQ ID NO: 2695154 - RNA, 23 nt, Human
auggcuauaggugcuacaaaaac

SEQ ID NO: 2695155 - RNA, 21 nt, Human
augggacauuugcucauggaa

SEQ ID NO: 2695156 - RNA, 22 nt, Human
augggacauuugcucauggaau

SEQ ID NO: 2695157 - RNA, 14 nt, Human
uucauuaucucaaa

SEQ ID NO: 2695158 - RNA, 13 nt, Human
auaugcaaagcac

SEQ ID NO: 2695159 - RNA, 14 nt, Human
auaugcaaagcacu

SEQ ID NO: 2695160 - RNA, 23 nt, Human
auauguaccuaacgaaguauccu

SEQ ID NO: 2695161 - RNA, 13 nt, Human
auauaugcuaagu

SEQ ID NO: 2695162 - RNA, 15 nt, Human
uucaucaaugaauga

SEQ ID NO: 2695163 - RNA, 17 nt, Human
uucagcgguuuauauaa

SEQ ID NO: 2695164 - RNA, 14 nt, Human
auauuguuugcuaa

SEQ ID NO: 2695165 - RNA, 13 nt, Human
auauuuacaaaug

SEQ ID NO: 2695166 - RNA, 15 nt, Human
aucaaauaugcaaag

SEQ ID NO: 2695167 - RNA, 16 nt, Human
aucaaggguacacugc

SEQ ID NO: 2695168 - RNA, 16 nt, Human
aucaaauaugcaaagc

SEQ ID NO: 2695169 - RNA, 17 nt, Human
aucaaauaugcaaagca

SEQ ID NO: 2695170 - RNA, 18 nt, Human
aucaaauaugcaaagcac

SEQ ID NO: 2695171 - RNA, 21 nt, Human
aucaaggguacacugccuucu

SEQ ID NO: 2695172 - RNA, 13 nt, Human
aucaauuuaaaaa

SEQ ID NO: 2695173 - RNA, 14 nt, Human
aucaauuuuucuua

SEQ ID NO: 2695174 - RNA, 19 nt, Human
aucaauuuuucuuauuuca

SEQ ID NO: 2695175 - RNA, 23 nt, Human
aucacuugaacccgggaggcaga

SEQ ID NO: 2695176 - RNA, 17 nt, Human
uucuguuuuauaauuuu

SEQ ID NO: 2695177 - RNA, 16 nt, Human
uucuguuuuauaauuu

SEQ ID NO: 2695178 - RNA, 21 nt, Human
aucccucccuccaccucccug

SEQ ID NO: 2695179 - RNA, 20 nt, Human
aucccucccuccaccucccu

SEQ ID NO: 2695180 - RNA, 18 nt, Human
aucccucccuccaccucc

SEQ ID NO: 2695181 - RNA, 17 nt, Human
aucccucccuccaccuc

SEQ ID NO: 2695182 - RNA, 16 nt, Human
aucccucccuccaccu

SEQ ID NO: 2695183 - RNA, 19 nt, Human
uugacacuuaaaaaugguu

SEQ ID NO: 2695184 - RNA, 17 nt, Human
uugacacuuaaaaaugg

SEQ ID NO: 2695185 - RNA, 16 nt, Human
uugaaggaugcugucu

SEQ ID NO: 2695186 - RNA, 14 nt, Human
uugaaggaugcugu

SEQ ID NO: 2695187 - RNA, 21 nt, Human
uugaaggaugcugucuucgua

SEQ ID NO: 2695188 - RNA, 16 nt, Human
auccugcaauuccacu

SEQ ID NO: 2695189 - RNA, 22 nt, Human
auccugaggcuccacuuggucu

SEQ ID NO: 2695190 - RNA, 13 nt, Human
auccugccccuga

SEQ ID NO: 2695191 - RNA, 11 nt, Human
auccugaggcu

SEQ ID NO: 2695192 - RNA, 13 nt, Human
auccugaggcucc

SEQ ID NO: 2695193 - RNA, 16 nt, Human
auccugaggcuccacu

SEQ ID NO: 2695194 - RNA, 18 nt, Human
auccugaggcuccacuug

SEQ ID NO: 2695195 - RNA, 22 nt, Human
uggcacaguuuucugagaaaga

SEQ ID NO: 2695196 - RNA, 20 nt, Human
uggcacaguuuucugagaaa

SEQ ID NO: 2695197 - RNA, 18 nt, Human
uggacgagaaaacaauaa

SEQ ID NO: 2695198 - RNA, 20 nt, Human
ugggaaagggauuuucagcc

SEQ ID NO: 2695199 - RNA, 18 nt, Human
aggaagcugugagagcag

SEQ ID NO: 2695200 - RNA, 23 nt, Human
aggaauugacccacaagaaauga

SEQ ID NO: 2695201 - RNA, 11 nt, Human
aggaauuuaaa

SEQ ID NO: 2695202 - RNA, 23 nt, Human
ugcuguauuuuaaaagaaugauu

SEQ ID NO: 2695203 - RNA, 13 nt, Human
ugcuggagcucug

SEQ ID NO: 2695204 - RNA, 14 nt, Human
ugcuggagcucugc

SEQ ID NO: 2695205 - RNA, 23 nt, Human
aggacagcccuucuuuccacaga

SEQ ID NO: 2695206 - RNA, 14 nt, Human
aggacacugauaug

SEQ ID NO: 2695207 - RNA, 11 nt, Human
aggagaaacug

SEQ ID NO: 2695208 - RNA, 13 nt, Human
uggaaaggcagcu

SEQ ID NO: 2695209 - RNA, 15 nt, Human
ugcuugccaucccuc

SEQ ID NO: 2695210 - RNA, 16 nt, Human
ugcuugccaucccucc

SEQ ID NO: 2695211 - RNA, 22 nt, Human
uggaauuucucccagucauuua

SEQ ID NO: 2695212 - RNA, 18 nt, Human
uggaauuggagcucgugg

SEQ ID NO: 2695213 - RNA, 21 nt, Human
agccagcaguucagagcugcc

SEQ ID NO: 2695214 - RNA, 20 nt, Human
agccagcaguucagagcugc

SEQ ID NO: 2695215 - RNA, 22 nt, Human
agccagcaguucagagcugccc

SEQ ID NO: 2695216 - RNA, 19 nt, Human
agccagcaguucagagcug

SEQ ID NO: 2695217 - RNA, 17 nt, Human
agccagcaguucagagc

SEQ ID NO: 2695218 - RNA, 15 nt, Human
agccagcaguucaga

SEQ ID NO: 2695219 - RNA, 18 nt, Human
ugauuaaguaaugauaac

SEQ ID NO: 2695220 - RNA, 23 nt, Human
ugauuaaguaaugauaacuggaa

SEQ ID NO: 2695221 - RNA, 12 nt, Human
ugaugaagaagu

SEQ ID NO: 2695222 - RNA, 11 nt, Human
ugaugaagaag

SEQ ID NO: 2695223 - RNA, 14 nt, Human
ugaugggaaagcau

SEQ ID NO: 2695224 - RNA, 19 nt, Human
ugaugggaaagcauuguaa

SEQ ID NO: 2695225 - RNA, 20 nt, Human
ugauuuagcaggaagcugug

SEQ ID NO: 2695226 - RNA, 17 nt, Human
ugauuuagcaggaagcu

SEQ ID NO: 2695227 - RNA, 15 nt, Human
ugcagaagacaguau

SEQ ID NO: 2695228 - RNA, 14 nt, Human
ugcagaagacagua

SEQ ID NO: 2695229 - RNA, 18 nt, Human
agcccugucuccucucuc

SEQ ID NO: 2695230 - RNA, 11 nt, Human
agcccugucuc

SEQ ID NO: 2695231 - RNA, 20 nt, Human
ugcagcucuccccuucucug

SEQ ID NO: 2695232 - RNA, 22 nt, Human
ugcagcucuccccuucucugua

SEQ ID NO: 2695233 - RNA, 16 nt, Human
ugccccauucaacauc

SEQ ID NO: 2695234 - RNA, 22 nt, Human
ugccauuuaaagcuuauuaaaa

SEQ ID NO: 2695235 - RNA, 12 nt, Human
ugcccucuccug

SEQ ID NO: 2695236 - RNA, 15 nt, Human
ugcccucuccugggc

SEQ ID NO: 2695237 - RNA, 14 nt, Human
ugcccucuccuggg

SEQ ID NO: 2695238 - RNA, 13 nt, Human
ugcccucuccugg

SEQ ID NO: 2695239 - RNA, 20 nt, Human
ugcccucuccugggcagcug

SEQ ID NO: 2695240 - RNA, 18 nt, Human
ugcccucuccugggcagc

SEQ ID NO: 2695241 - RNA, 17 nt, Human
ugcccucuccugggcag

SEQ ID NO: 2695242 - RNA, 16 nt, Human
ugcccucuccugggca

SEQ ID NO: 2695243 - RNA, 23 nt, Human
ugcccucuccugggcagcugccu

SEQ ID NO: 2695244 - RNA, 22 nt, Human
ugcccucuccugggcagcugcc

SEQ ID NO: 2695245 - RNA, 23 nt, Human
agcucugcccauccugccccuga

SEQ ID NO: 2695246 - RNA, 18 nt, Human
agcugcccucuccugggc

SEQ ID NO: 2695247 - RNA, 17 nt, Human
agcugcccucuccuggg

SEQ ID NO: 2695248 - RNA, 20 nt, Human
agcugcccucuccugggcag

SEQ ID NO: 2695249 - RNA, 19 nt, Human
agcugcccucuccugggca

SEQ ID NO: 2695250 - RNA, 21 nt, Human
agcugcccucuccugggcagc

SEQ ID NO: 2695251 - RNA, 19 nt, Human
ugcccuguuaaaagaugaa

SEQ ID NO: 2695252 - RNA, 15 nt, Human
ugccucaccccuugc

SEQ ID NO: 2695253 - RNA, 11 nt, Human
ugccuccccuc

SEQ ID NO: 2695254 - RNA, 15 nt, Human
ugccuccccuccucu

SEQ ID NO: 2695255 - RNA, 14 nt, Human
ugccuccccuccuc

SEQ ID NO: 2695256 - RNA, 13 nt, Human
ugccuccccuccu

SEQ ID NO: 2695257 - RNA, 12 nt, Human
ugccuccccucc

SEQ ID NO: 2695258 - RNA, 16 nt, Human
ugccuccccuccucug

SEQ ID NO: 2695259 - RNA, 18 nt, Human
ugccucagaaaacaagga

SEQ ID NO: 2695260 - RNA, 19 nt, Human
uguuugcuaagcauuccaa

SEQ ID NO: 2695261 - RNA, 15 nt, Human
uguuugcuaagcauu

SEQ ID NO: 2695262 - RNA, 20 nt, Human
uguuuuauaauuuugugaag

SEQ ID NO: 2695263 - RNA, 13 nt, Human
uguuuuauaauuu

SEQ ID NO: 2695264 - RNA, 14 nt, Human
uguuuuaggagcau

SEQ ID NO: 2695265 - RNA, 21 nt, Human
aguugauaugccuuuucccaa

SEQ ID NO: 2695266 - RNA, 14 nt, Human
aguucugaagaaga

SEQ ID NO: 2695267 - RNA, 13 nt, Human
aguucugaagaag

SEQ ID NO: 2695268 - RNA, 15 nt, Human
aguucugaagaagau

SEQ ID NO: 2695269 - RNA, 16 nt, Human
aguuugguuucuagca

SEQ ID NO: 2695270 - RNA, 20 nt, Human
uuaaaaaugguuuaaauggu

SEQ ID NO: 2695271 - RNA, 22 nt, Human
aguugcauagguuuaauaauuu

SEQ ID NO: 2695272 - RNA, 18 nt, Human
uuaaaaaagaaacauuug

SEQ ID NO: 2695273 - RNA, 15 nt, Human
uuaaaaaagaaacau

SEQ ID NO: 2695274 - RNA, 20 nt, Human
aguuauuauauuuacaaaug

SEQ ID NO: 2695275 - RNA, 19 nt, Human
aguuauggcuauaggugcu

SEQ ID NO: 2695276 - RNA, 19 nt, Human
aguucagagcugcccucuc

SEQ ID NO: 2695277 - RNA, 18 nt, Human
aguucagagcugcccucu

SEQ ID NO: 2695278 - RNA, 17 nt, Human
aguucagagcugcccuc

SEQ ID NO: 2695279 - RNA, 16 nt, Human
aguucagagcugcccu

SEQ ID NO: 2695280 - RNA, 15 nt, Human
aguucagagcugccc

SEQ ID NO: 2695281 - RNA, 14 nt, Human
aguucagagcugcc

SEQ ID NO: 2695282 - RNA, 20 nt, Human
aguucggugagcuacaaaug

SEQ ID NO: 2695283 - RNA, 21 nt, Human
auacaguucggugagcuacaa

SEQ ID NO: 2695284 - RNA, 20 nt, Human
auacaucccuuaccugggaa

SEQ ID NO: 2695285 - RNA, 22 nt, Human
auaccacaggaaccacaagacu

SEQ ID NO: 2695286 - RNA, 22 nt, Human
auaauuuuuauauuugaaauau

SEQ ID NO: 2695287 - RNA, 21 nt, Human
auaauuuuuauauuugaaaua

SEQ ID NO: 2695288 - RNA, 22 nt, Human
auacaaaaaaaaaaaaaaauua

SEQ ID NO: 2695289 - RNA, 20 nt, Human
auaauuuugugaagcaaaau

SEQ ID NO: 2695290 - RNA, 15 nt, Human
auaauuuugugaagc

SEQ ID NO: 2695291 - RNA, 14 nt, Human
auaauuuugugaag

SEQ ID NO: 2695292 - RNA, 13 nt, Human
auaauuuugugaa

SEQ ID NO: 2695293 - RNA, 19 nt, Human
auaauuuuuauauuugaaa

SEQ ID NO: 2695294 - RNA, 16 nt, Human
auaauuuuuauauuug

SEQ ID NO: 2695295 - RNA, 14 nt, Human
auaauuuuuauauu

SEQ ID NO: 2695296 - RNA, 18 nt, Human
uuauauaagcuuguauuc

SEQ ID NO: 2695297 - RNA, 21 nt, Human
uuagccguggugauuuagcag

SEQ ID NO: 2695298 - RNA, 15 nt, Human
auaaacucauuucua

SEQ ID NO: 2695299 - RNA, 12 nt, Human
aguuuucugaga

SEQ ID NO: 2695300 - RNA, 13 nt, Human
aguuuucugagaa

SEQ ID NO: 2695301 - RNA, 14 nt, Human
aguuuucugagaaa

SEQ ID NO: 2695302 - RNA, 17 nt, Human
aguuuucugagaaagac

SEQ ID NO: 2695303 - RNA, 19 nt, Human
auaaaugugccuucauuuu

SEQ ID NO: 2695304 - RNA, 12 nt, Human
auaacuggaaac

SEQ ID NO: 2695305 - RNA, 21 nt, Human
auaaucuuucacaggggacag

SEQ ID NO: 2695306 - RNA, 14 nt, Human
auaaugaauacuuu

SEQ ID NO: 2695307 - RNA, 18 nt, Human
uuagcaggaagcugugag

SEQ ID NO: 2695308 - RNA, 22 nt, Human
uuagaugcaguucugaagaaga

SEQ ID NO: 2695309 - RNA, 23 nt, Human
uuagaugcaguucugaagaagau

SEQ ID NO: 2695310 - RNA, 20 nt, Human
ugucagcuccccucggagaa

SEQ ID NO: 2695311 - RNA, 21 nt, Human
ugucagcuccccucggagaag

SEQ ID NO: 2695312 - RNA, 23 nt, Human
ugucagcuccccucggagaagag

SEQ ID NO: 2695313 - RNA, 16 nt, Human
aguauuguccaggucu

SEQ ID NO: 2695314 - RNA, 15 nt, Human
aguauuguccagguc

SEQ ID NO: 2695315 - RNA, 20 nt, Human
agucacauuccaagccucau

SEQ ID NO: 2695316 - RNA, 21 nt, Human
aguauguuagugcaaauuguc

SEQ ID NO: 2695317 - RNA, 18 nt, Human
aguauguuagugcaaauu

SEQ ID NO: 2695318 - RNA, 21 nt, Human
aguauuagaauaccacaggaa

SEQ ID NO: 2695319 - RNA, 14 nt, Human
ugucuuaauuaaaa

SEQ ID NO: 2695320 - RNA, 15 nt, Human
ugucuccucucucug

SEQ ID NO: 2695321 - RNA, 17 nt, Human
ugucucuacuaaaaaua

SEQ ID NO: 2695322 - RNA, 14 nt, Human
ugucuucacaacag

SEQ ID NO: 2695323 - RNA, 16 nt, Human
agugagccgagauugu

SEQ ID NO: 2695324 - RNA, 21 nt, Human
agugagcagucaggaaagaga

SEQ ID NO: 2695325 - RNA, 20 nt, Human
agugaaacucguuaauuugu

SEQ ID NO: 2695326 - RNA, 22 nt, Human
agugaaagaggcagcuugaaac

SEQ ID NO: 2695327 - RNA, 14 nt, Human
agugagacagcucu

SEQ ID NO: 2695328 - RNA, 16 nt, Human
agugaaagaggcagcu

SEQ ID NO: 2695329 - RNA, 17 nt, Human
agugaaagaaaauaaca

SEQ ID NO: 2695330 - RNA, 14 nt, Human
ugugaagcaaaauu

SEQ ID NO: 2695331 - RNA, 22 nt, Human
ugugagaugcuagaacucccuu

SEQ ID NO: 2695332 - RNA, 15 nt, Human
aggucagugcaaaua

SEQ ID NO: 2695333 - RNA, 20 nt, Human
aggguuuauguuuaggaugu

SEQ ID NO: 2695334 - RNA, 22 nt, Human
uggucugugagaugcuagaacu

SEQ ID NO: 2695335 - RNA, 22 nt, Human
ugguccaugggccauaugaaaa

SEQ ID NO: 2695336 - RNA, 21 nt, Human
agggugaugggaaagcauugu

SEQ ID NO: 2695337 - RNA, 22 nt, Human
agggugaugggaaagcauugua

SEQ ID NO: 2695338 - RNA, 23 nt, Human
uggugugaccacugcagaagaca

SEQ ID NO: 2695339 - RNA, 15 nt, Human
ugguuucuagcauga

SEQ ID NO: 2695340 - RNA, 18 nt, Human
uguaagaaaauaucacuu

SEQ ID NO: 2695341 - RNA, 17 nt, Human
uguaagaaaauaucacu

SEQ ID NO: 2695342 - RNA, 14 nt, Human
ugaaauaagccaga

SEQ ID NO: 2695343 - RNA, 20 nt, Human
agagcugcccucuccugggc

SEQ ID NO: 2695344 - RNA, 19 nt, Human
agagcugcccucuccuggg

SEQ ID NO: 2695345 - RNA, 18 nt, Human
agagcugcccucuccugg

SEQ ID NO: 2695346 - RNA, 17 nt, Human
agagcugcccucuccug

SEQ ID NO: 2695347 - RNA, 16 nt, Human
agagcugcccucuccu

SEQ ID NO: 2695348 - RNA, 13 nt, Human
ugaacaaauuuac

SEQ ID NO: 2695349 - RNA, 22 nt, Human
ugaacccauauuuguacaccaa

SEQ ID NO: 2695350 - RNA, 18 nt, Human
ugaacccgggaggcagag

SEQ ID NO: 2695351 - RNA, 22 nt, Human
ugaagaagcaccaaucaugaau

SEQ ID NO: 2695352 - RNA, 17 nt, Human
ugaaguacucauacaug

SEQ ID NO: 2695353 - RNA, 20 nt, Human
ugaagauuuaccacuugugu

SEQ ID NO: 2695354 - RNA, 17 nt, Human
ugaagauuuaccacuug

SEQ ID NO: 2695355 - RNA, 18 nt, Human
agagcuguucacagccag

SEQ ID NO: 2695356 - RNA, 19 nt, Human
agagcuguucacagccaga

SEQ ID NO: 2695357 - RNA, 23 nt, Human
agacuggcacaguuuucugagaa

SEQ ID NO: 2695358 - RNA, 20 nt, Human
agacuggcacaguuuucuga

SEQ ID NO: 2695359 - RNA, 21 nt, Human
agacuggcacaguuuucugag

SEQ ID NO: 2695360 - RNA, 22 nt, Human
agacuccaaagaaauguaaggg

SEQ ID NO: 2695361 - RNA, 14 nt, Human
agagacagaaagca

SEQ ID NO: 2695362 - RNA, 15 nt, Human
agagacagaaagcag

SEQ ID NO: 2695363 - RNA, 16 nt, Human
agagacacacugaaga

SEQ ID NO: 2695364 - RNA, 17 nt, Human
ugaaagaggaaugaagu

SEQ ID NO: 2695365 - RNA, 18 nt, Human
ugaaagaggaaugaagua

SEQ ID NO: 2695366 - RNA, 17 nt, Human
ugaaaauauuuguauca

SEQ ID NO: 2695367 - RNA, 20 nt, Human
ugaaaaucuuauaauuuaaa

SEQ ID NO: 2695368 - RNA, 21 nt, Human
ugaaaauauuuguaucacaaa

SEQ ID NO: 2695369 - RNA, 22 nt, Human
ugaaaauauuuguaucacaaau

SEQ ID NO: 2695370 - RNA, 13 nt, Human
ugaaagaaaauaa

SEQ ID NO: 2695371 - RNA, 24 nt, Human
ugagaugugaacacaucagcuugc

SEQ ID NO: 2695372 - RNA, 18 nt, Human
ugagaugugaacacauca

SEQ ID NO: 2695373 - RNA, 19 nt, Human
ugagaugugaacacaucag

SEQ ID NO: 2695374 - RNA, 13 nt, Human
ugagaugugaaca

SEQ ID NO: 2695375 - RNA, 23 nt, Human
ugagagcaguuugguuucuagca

SEQ ID NO: 2695376 - RNA, 21 nt, Human
ugagagcaguuugguuucuag

SEQ ID NO: 2695377 - RNA, 22 nt, Human
ugagagacacacugaagaagca

SEQ ID NO: 2695378 - RNA, 21 nt, Human
ugagagacacacugaagaagc

SEQ ID NO: 2695379 - RNA, 20 nt, Human
ugagagacacacugaagaag

SEQ ID NO: 2695380 - RNA, 19 nt, Human
ugagagacacacugaagaa

SEQ ID NO: 2695381 - RNA, 17 nt, Human
ugagagacacacugaag

SEQ ID NO: 2695382 - RNA, 16 nt, Human
ugagagacacacugaa

SEQ ID NO: 2695383 - RNA, 12 nt, Human
ugagacagcucu

SEQ ID NO: 2695384 - RNA, 20 nt, Human
ugagacucugucucagucca

SEQ ID NO: 2695385 - RNA, 14 nt, Human
agauuuuccugaaa

SEQ ID NO: 2695386 - RNA, 15 nt, Human
agauuuuccugaaaa

SEQ ID NO: 2695387 - RNA, 16 nt, Human
agauuuuccugaaaac

SEQ ID NO: 2695388 - RNA, 20 nt, Human
agcaagggugaugggaaagc

SEQ ID NO: 2695389 - RNA, 22 nt, Human
agcaagggugaugggaaagcau

SEQ ID NO: 2695390 - RNA, 16 nt, Human
agcaagggugauggga

SEQ ID NO: 2695391 - RNA, 21 nt, Human
agauugugccccugcacucca

SEQ ID NO: 2695392 - RNA, 22 nt, Human
agaugugaacacaucagcuugc

SEQ ID NO: 2695393 - RNA, 17 nt, Human
agaugugaacacaucag

SEQ ID NO: 2695394 - RNA, 22 nt, Human
agauguauguacuucaugcugu

SEQ ID NO: 2695395 - RNA, 15 nt, Human
ugacacuuaaaaaug

SEQ ID NO: 2695396 - RNA, 16 nt, Human
agaugcacaugagcug

SEQ ID NO: 2695397 - RNA, 20 nt, Human
agaugcaguucugaagaaga

SEQ ID NO: 2695398 - RNA, 13 nt, Human
agaugcacaugag

SEQ ID NO: 2695399 - RNA, 19 nt, Human
agaugcuagaacucccuuu

SEQ ID NO: 2695400 - RNA, 21 nt, Human
agaugcaguucugaagaagau

SEQ ID NO: 2695401 - RNA, 21 nt, Human
agaugcuagaacucccuuuca

SEQ ID NO: 2695402 - RNA, 14 nt, Human
agauccuggaaauc

SEQ ID NO: 2695403 - RNA, 13 nt, Human
agauccuggaaau

SEQ ID NO: 2695404 - RNA, 23 nt, Human
ucugcuugccaucccucccucca

SEQ ID NO: 2695405 - RNA, 20 nt, Human
ucugcuugccaucccucccu

SEQ ID NO: 2695406 - RNA, 17 nt, Human
ucugcuugccaucccuc

SEQ ID NO: 2695407 - RNA, 16 nt, Human
ucugcuugccaucccu

SEQ ID NO: 2695408 - RNA, 18 nt, Human
agaagaugguaccaccag

SEQ ID NO: 2695409 - RNA, 14 nt, Human
agaagaacugaaau

SEQ ID NO: 2695410 - RNA, 13 nt, Human
agaagaacugaaa

SEQ ID NO: 2695411 - RNA, 18 nt, Human
ucugcagauaaacaguag

SEQ ID NO: 2695412 - RNA, 15 nt, Human
ucugcagauaaacag

SEQ ID NO: 2695413 - RNA, 15 nt, Human
agacacacaugaagu

SEQ ID NO: 2695414 - RNA, 12 nt, Human
agacacacauga

SEQ ID NO: 2695415 - RNA, 22 nt, Human
agacagagccccacccucagau

SEQ ID NO: 2695416 - RNA, 24 nt, Human
agacagagccccacccucagaugc

SEQ ID NO: 2695417 - RNA, 14 nt, Human
ucugugagaugcua

SEQ ID NO: 2695418 - RNA, 23 nt, Human
ucugugagaugcuagaacucccu

SEQ ID NO: 2695419 - RNA, 17 nt, Human
ucugugagaugcuagaa

SEQ ID NO: 2695420 - RNA, 22 nt, Human
ucugugagaugcuagaacuccc

SEQ ID NO: 2695421 - RNA, 15 nt, Human
agaauuaacacauga

SEQ ID NO: 2695422 - RNA, 23 nt, Human
agaauuaacacaugauccugcaa

SEQ ID NO: 2695423 - RNA, 14 nt, Human
ucuaaguaaaacca

SEQ ID NO: 2695424 - RNA, 15 nt, Human
ucuaaguaaaaccac

SEQ ID NO: 2695425 - RNA, 19 nt, Human
ucuaaguaaaaccacagca

SEQ ID NO: 2695426 - RNA, 20 nt, Human
ucuaaguaaaaccacagcag

SEQ ID NO: 2695427 - RNA, 14 nt, Human
uccugggcagcugc

SEQ ID NO: 2695428 - RNA, 13 nt, Human
uccugggcagcug

SEQ ID NO: 2695429 - RNA, 12 nt, Human
uccugggcagcu

SEQ ID NO: 2695430 - RNA, 17 nt, Human
ucuaggaaauauuuauu

SEQ ID NO: 2695431 - RNA, 16 nt, Human
ucuaggaaauauuuau

SEQ ID NO: 2695432 - RNA, 15 nt, Human
acuugucaauaaaau

SEQ ID NO: 2695433 - RNA, 15 nt, Human
ucucauuuccaagca

SEQ ID NO: 2695434 - RNA, 14 nt, Human
ucucaggaaaucaa

SEQ ID NO: 2695435 - RNA, 21 nt, Human
ucucaggaaaucaaauaugca

SEQ ID NO: 2695436 - RNA, 23 nt, Human
ucucaggaaaucaaauaugcaaa

SEQ ID NO: 2695437 - RNA, 17 nt, Human
acuauauuguuugcuaa

SEQ ID NO: 2695438 - RNA, 22 nt, Human
acuauauuguuugcuaagcauu

SEQ ID NO: 2695439 - RNA, 15 nt, Human
acuaucucauuucca

SEQ ID NO: 2695440 - RNA, 17 nt, Human
acuaucucauuuccaag

SEQ ID NO: 2695441 - RNA, 16 nt, Human
acuaucucauuuccaa

SEQ ID NO: 2695442 - RNA, 15 nt, Human
acuaauuuuaaaaug

SEQ ID NO: 2695443 - RNA, 11 nt, Human
uccauccugag

SEQ ID NO: 2695444 - RNA, 12 nt, Human
uccauccugagg

SEQ ID NO: 2695445 - RNA, 15 nt, Human
uccauccugaggcuc

SEQ ID NO: 2695446 - RNA, 18 nt, Human
uccagugagacagcucug

SEQ ID NO: 2695447 - RNA, 11 nt, Human
acgcucucugg

SEQ ID NO: 2695448 - RNA, 14 nt, Human
acgcucucuggccu

SEQ ID NO: 2695449 - RNA, 20 nt, Human
accuuuuggucuggagggaa

SEQ ID NO: 2695450 - RNA, 22 nt, Human
uccacugguucuucuuggucuc

SEQ ID NO: 2695451 - RNA, 19 nt, Human
accuugaaaacuuuaugcu

SEQ ID NO: 2695452 - RNA, 12 nt, Human
acugaagaagca

SEQ ID NO: 2695453 - RNA, 16 nt, Human
acugacucuuaagaag

SEQ ID NO: 2695454 - RNA, 15 nt, Human
acugacucuuaagaa

SEQ ID NO: 2695455 - RNA, 14 nt, Human
acugacucuuaaga

SEQ ID NO: 2695456 - RNA, 13 nt, Human
acugacucuuaag

SEQ ID NO: 2695457 - RNA, 20 nt, Human
acugacucuuaagaagacug

SEQ ID NO: 2695458 - RNA, 18 nt, Human
acugacucuuaagaagac

SEQ ID NO: 2695459 - RNA, 17 nt, Human
acugacucuuaagaaga

SEQ ID NO: 2695460 - RNA, 13 nt, Human
acugacuucuaag

SEQ ID NO: 2695461 - RNA, 15 nt, Human
acugacuucuaagua

SEQ ID NO: 2695462 - RNA, 16 nt, Human
acugacuucuaaguaa

SEQ ID NO: 2695463 - RNA, 22 nt, Human
acugacuucuaaguaaaaccac

SEQ ID NO: 2695464 - RNA, 18 nt, Human
acugagagugaacaaauu

SEQ ID NO: 2695465 - RNA, 22 nt, Human
acugagaugugaacacaucagc

SEQ ID NO: 2695466 - RNA, 17 nt, Human
acugagaugugaacaca

SEQ ID NO: 2695467 - RNA, 16 nt, Human
uccuggaaaucagggu

SEQ ID NO: 2695468 - RNA, 21 nt, Human
acucuuaagaagacugcauua

SEQ ID NO: 2695469 - RNA, 19 nt, Human
acuccagugagacagcucu

SEQ ID NO: 2695470 - RNA, 14 nt, Human
ucagcccucagaau

SEQ ID NO: 2695471 - RNA, 15 nt, Human
acccgggaggcagag

SEQ ID NO: 2695472 - RNA, 17 nt, Human
acccgggaggcagaggu

SEQ ID NO: 2695473 - RNA, 16 nt, Human
accuagggugauauua

SEQ ID NO: 2695474 - RNA, 15 nt, Human
ucaguuuuugugaaa

SEQ ID NO: 2695475 - RNA, 17 nt, Human
ucaguuuuugugaaaag

SEQ ID NO: 2695476 - RNA, 14 nt, Human
acaugggacauuug

SEQ ID NO: 2695477 - RNA, 11 nt, Human
acaugggacau

SEQ ID NO: 2695478 - RNA, 20 nt, Human
acaugggacauuugcucaug

SEQ ID NO: 2695479 - RNA, 15 nt, Human
acaugggacauuugc

SEQ ID NO: 2695480 - RNA, 21 nt, Human
acaugggacauuugcucaugg

SEQ ID NO: 2695481 - RNA, 16 nt, Human
acaugagguacugaga

SEQ ID NO: 2695482 - RNA, 20 nt, Human
acaugagguacugagaguga

SEQ ID NO: 2695483 - RNA, 16 nt, Human
acaugaaguccaagca

SEQ ID NO: 2695484 - RNA, 23 nt, Human
acaugagguacugagagugaaca

SEQ ID NO: 2695485 - RNA, 15 nt, Human
ucaaauugugugaaa

SEQ ID NO: 2695486 - RNA, 18 nt, Human
ucaaauugugugaaaggu

SEQ ID NO: 2695487 - RNA, 23 nt, Human
accaaaaaucucaauauuucaga

SEQ ID NO: 2695488 - RNA, 19 nt, Human
ucaauauuucagauaauca

SEQ ID NO: 2695489 - RNA, 15 nt, Human
ucaauauuucagaua

SEQ ID NO: 2695490 - RNA, 23 nt, Human
ucaaugaaugaaugaauggcuaa

SEQ ID NO: 2695491 - RNA, 22 nt, Human
ucaauaucuuuuuuuuaauaaa

SEQ ID NO: 2695492 - RNA, 16 nt, Human
ucaauucuugccaaau

SEQ ID NO: 2695493 - RNA, 21 nt, Human
ucacaacagauuauuaccuua

SEQ ID NO: 2695494 - RNA, 14 nt, Human
ucaccucauggaau

SEQ ID NO: 2695495 - RNA, 13 nt, Human
ucaccucauggaa

SEQ ID NO: 2695496 - RNA, 12 nt, Human
ucaccucaugga

SEQ ID NO: 2695497 - RNA, 23 nt, Human
ucacuugaacccgggaggcagag

SEQ ID NO: 2695498 - RNA, 14 nt, Human
accagucugacugu

SEQ ID NO: 2695499 - RNA, 20 nt, Human
uaacgauaaaagacagugaa

SEQ ID NO: 2695500 - RNA, 18 nt, Human
uaagaagugaaaaucuac

SEQ ID NO: 2695501 - RNA, 16 nt, Human
aauagucaaauugugu

SEQ ID NO: 2695502 - RNA, 22 nt, Human
aauaucacuugucaauaaaauc

SEQ ID NO: 2695503 - RNA, 20 nt, Human
aauaucacuugucaauaaaa

SEQ ID NO: 2695504 - RNA, 21 nt, Human
aaucaggguuaguauugucca

SEQ ID NO: 2695505 - RNA, 16 nt, Human
aaucaggguuaguauu

SEQ ID NO: 2695506 - RNA, 22 nt, Human
aaucaggguuaguauuguccag

SEQ ID NO: 2695507 - RNA, 24 nt, Human
aauaugccccauucaacaucuagu

SEQ ID NO: 2695508 - RNA, 21 nt, Human
aauaugccccauucaacaucu

SEQ ID NO: 2695509 - RNA, 19 nt, Human
aauauuuauuuuaauaaug

SEQ ID NO: 2695510 - RNA, 18 nt, Human
aauauuuauuuuaauaau

SEQ ID NO: 2695511 - RNA, 22 nt, Human
aaugaauggcuaagcaaaaugu

SEQ ID NO: 2695512 - RNA, 15 nt, Human
aaucaugaauuaguu

SEQ ID NO: 2695513 - RNA, 12 nt, Human
aaucaugaauua

SEQ ID NO: 2695514 - RNA, 12 nt, Human
uaauaaacucau

SEQ ID NO: 2695515 - RNA, 16 nt, Human
uaagcuuguauuccuu

SEQ ID NO: 2695516 - RNA, 19 nt, Human
uaaguaaugauaacuggaa

SEQ ID NO: 2695517 - RNA, 19 nt, Human
aaucuacacuccagugaga

SEQ ID NO: 2695518 - RNA, 19 nt, Human
aaucuuauaauuuaaaaua

SEQ ID NO: 2695519 - RNA, 23 nt, Human
aaucgcuccaccuugcagcucuc

SEQ ID NO: 2695520 - RNA, 18 nt, Human
uaccaccagucugacugu

SEQ ID NO: 2695521 - RNA, 20 nt, Human
uacaucccuuaccugggaaa

SEQ ID NO: 2695522 - RNA, 18 nt, Human
uacacuaagagagaauga

SEQ ID NO: 2695523 - RNA, 14 nt, Human
uacacuaagagaga

SEQ ID NO: 2695524 - RNA, 16 nt, Human
aaugcuguauuuuaaa

SEQ ID NO: 2695525 - RNA, 18 nt, Human
aauuccaagugauugaaa

SEQ ID NO: 2695526 - RNA, 22 nt, Human
aauuccacuuauaggaauugac

SEQ ID NO: 2695527 - RNA, 14 nt, Human
uacuguaagaaaau

SEQ ID NO: 2695528 - RNA, 21 nt, Human
aauugacccacaagaaaugaa

SEQ ID NO: 2695529 - RNA, 22 nt, Human
aauugacccacaagaaaugaaa

SEQ ID NO: 2695530 - RNA, 16 nt, Human
uauuaaaacucauuuu

SEQ ID NO: 2695531 - RNA, 21 nt, Human
uauguuuucaggcuagaugua

SEQ ID NO: 2695532 - RNA, 17 nt, Human
acaggaaguagaggagg

SEQ ID NO: 2695533 - RNA, 23 nt, Human
uauucaaacagucucaggaaauc

SEQ ID NO: 2695534 - RNA, 15 nt, Human
uauucaaacagucuc

SEQ ID NO: 2695535 - RNA, 14 nt, Human
uauuacuguaagaa

SEQ ID NO: 2695536 - RNA, 16 nt, Human
acagucaccucaugga

SEQ ID NO: 2695537 - RNA, 18 nt, Human
acagucaccucauggaau

SEQ ID NO: 2695538 - RNA, 17 nt, Human
acagucaccucauggaa

SEQ ID NO: 2695539 - RNA, 20 nt, Human
acagggaggacgcucucugg

SEQ ID NO: 2695540 - RNA, 21 nt, Human
acagggaggacgcucucuggc

SEQ ID NO: 2695541 - RNA, 20 nt, Human
uaugauuaaguaaugauaac

SEQ ID NO: 2695542 - RNA, 16 nt, Human
uaugauuaaguaauga

SEQ ID NO: 2695543 - RNA, 21 nt, Human
uaugauuaaguaaugauaacu

SEQ ID NO: 2695544 - RNA, 19 nt, Human
uaugccccauucaacaucu

SEQ ID NO: 2695545 - RNA, 16 nt, Human
acagccucuuagaugc

SEQ ID NO: 2695546 - RNA, 15 nt, Human
uauauuguuugcuaa

SEQ ID NO: 2695547 - RNA, 17 nt, Human
uaucucaaaacugcacu

SEQ ID NO: 2695548 - RNA, 15 nt, Human
acacaucagcuugcc

SEQ ID NO: 2695549 - RNA, 15 nt, Human
acacaugaaguccaa

SEQ ID NO: 2695550 - RNA, 18 nt, Human
acacaugauccugcaauu

SEQ ID NO: 2695551 - RNA, 13 nt, Human
acacuaagagaga

SEQ ID NO: 2695552 - RNA, 14 nt, Human
acacuaagagagaa

SEQ ID NO: 2695553 - RNA, 19 nt, Human
acacucaaaucaagaaacu

SEQ ID NO: 2695554 - RNA, 22 nt, Human
acaaugcuguauuuuaaaagaa

SEQ ID NO: 2695555 - RNA, 18 nt, Human
acaaugcuguauuuuaaa

SEQ ID NO: 2695556 - RNA, 15 nt, Human
acacacucaaaucaa

SEQ ID NO: 2695557 - RNA, 23 nt, Human
uaguguuggagaagaacugaaau

SEQ ID NO: 2695558 - RNA, 22 nt, Human
uagugaaacucguuaauuugua

SEQ ID NO: 2695559 - RNA, 18 nt, Human
acaaauuuacagagacag

SEQ ID NO: 2695560 - RNA, 19 nt, Human
acaaauuuacagagacaga

SEQ ID NO: 2695561 - RNA, 20 nt, Human
acaagacccaaaaggcagaa

SEQ ID NO: 2695562 - RNA, 15 nt, Human
uagaugcaguucuga

SEQ ID NO: 2695563 - RNA, 22 nt, Human
uagaggagaaacuggaacucuc

SEQ ID NO: 2695564 - RNA, 19 nt, Human
uagaggagaaacuggaacu

SEQ ID NO: 2695565 - RNA, 18 nt, Human
acaaaaggauaaugaaua

SEQ ID NO: 2695566 - RNA, 14 nt, Human
acaagacugcacau

SEQ ID NO: 2695567 - RNA, 13 nt, Human
acaagacugcaca

SEQ ID NO: 2695568 - RNA, 23 nt, Human
acaauacaucccuuaccugggaa

SEQ ID NO: 2695569 - RNA, 12 nt, Human
uaggagcaugag

SEQ ID NO: 2695570 - RNA, 19 nt, Human
uaggaaauauuuauuuuaa

SEQ ID NO: 2695571 - RNA, 18 nt, Human
uaggaaauauuuauuuua

SEQ ID NO: 2695572 - RNA, 14 nt, Human
uagggagagaagau

SEQ ID NO: 2695573 - RNA, 15 nt, Human
uagggagagaagaua

SEQ ID NO: 2695574 - RNA, 24 nt, Human
aacucauuuuuguuuucauuaucu

SEQ ID NO: 2695575 - RNA, 21 nt, Human
aacucauuuuuguuuucauua

SEQ ID NO: 2695576 - RNA, 14 nt, Human
gucuuaauuaaaag

SEQ ID NO: 2695577 - RNA, 19 nt, Human
gucuuauauauuguagaua

SEQ ID NO: 2695578 - RNA, 11 nt, Human
aagaaacauuu

SEQ ID NO: 2695579 - RNA, 14 nt, Human
aagaaagaaaauca

SEQ ID NO: 2695580 - RNA, 13 nt, Human
aagaaagaaaauc

SEQ ID NO: 2695581 - RNA, 16 nt, Human
aagaaagaaaaucagg

SEQ ID NO: 2695582 - RNA, 22 nt, Human
gugcuacaaaaacacagcaagg

SEQ ID NO: 2695583 - RNA, 18 nt, Human
gugcacgcacacugucug

SEQ ID NO: 2695584 - RNA, 17 nt, Human
gugauuaccagggacug

SEQ ID NO: 2695585 - RNA, 11 nt, Human
gugauuaccag

SEQ ID NO: 2695586 - RNA, 16 nt, Human
gugauuaccagggacu

SEQ ID NO: 2695587 - RNA, 23 nt, Human
aacuuccuuggacucauuuuaaa

SEQ ID NO: 2695588 - RNA, 22 nt, Human
aacuuccuuggacucauuuuaa

SEQ ID NO: 2695589 - RNA, 18 nt, Human
aacuucagcgguuuauau

SEQ ID NO: 2695590 - RNA, 13 nt, Human
aacuucagacaua

SEQ ID NO: 2695591 - RNA, 22 nt, Human
guccaugaagauguagaggaga

SEQ ID NO: 2695592 - RNA, 23 nt, Human
guccaugaagauguagaggagaa

SEQ ID NO: 2695593 - RNA, 17 nt, Human
aacacaacuauauuguu

SEQ ID NO: 2695594 - RNA, 20 nt, Human
aacacagcaagggugauggg

SEQ ID NO: 2695595 - RNA, 18 nt, Human
aacacagcaagggugaug

SEQ ID NO: 2695596 - RNA, 12 nt, Human
aacauauauaac

SEQ ID NO: 2695597 - RNA, 14 nt, Human
aacagucucaggaa

SEQ ID NO: 2695598 - RNA, 14 nt, Human
aacauaaaauacaa

SEQ ID NO: 2695599 - RNA, 13 nt, Human
aacagucucagga

SEQ ID NO: 2695600 - RNA, 21 nt, Human
gucaauuuuguuauguauauu

SEQ ID NO: 2695601 - RNA, 13 nt, Human
gucacaggaagua

SEQ ID NO: 2695602 - RNA, 15 nt, Human
gucacaggaaguaga

SEQ ID NO: 2695603 - RNA, 20 nt, Human
gucacaggaaguagaggagg

SEQ ID NO: 2695604 - RNA, 13 nt, Human
gucaggaaagaga

SEQ ID NO: 2695605 - RNA, 14 nt, Human
gucaggaaagagaa

SEQ ID NO: 2695606 - RNA, 17 nt, Human
aaauuccaagugauuga

SEQ ID NO: 2695607 - RNA, 17 nt, Human
aaauuguauuacaaauc

SEQ ID NO: 2695608 - RNA, 18 nt, Human
aaaugugccuucauuuuu

SEQ ID NO: 2695609 - RNA, 15 nt, Human
aaaugugcuuuuaaa

SEQ ID NO: 2695610 - RNA, 11 nt, Human
aaaucauuucu

SEQ ID NO: 2695611 - RNA, 18 nt, Human
aagcuuauuaaaacucau

SEQ ID NO: 2695612 - RNA, 18 nt, Human
guucccuugaugaagaag

SEQ ID NO: 2695613 - RNA, 21 nt, Human
aagccuuggggcugaugcagu

SEQ ID NO: 2695614 - RNA, 17 nt, Human
guuauuauauuuacaaa

SEQ ID NO: 2695615 - RNA, 19 nt, Human
guuauuauauuuacaaaug

SEQ ID NO: 2695616 - RNA, 15 nt, Human
aagauagcagggcau

SEQ ID NO: 2695617 - RNA, 22 nt, Human
gugucuuaauuaaaagaauauu

SEQ ID NO: 2695618 - RNA, 17 nt, Human
aagcaacccaaauguuc

SEQ ID NO: 2695619 - RNA, 18 nt, Human
aagcauuguaaaugugcu

SEQ ID NO: 2695620 - RNA, 19 nt, Human
aagcacugacuucuaagua

SEQ ID NO: 2695621 - RNA, 20 nt, Human
aagcacugacuucuaaguaa

SEQ ID NO: 2695622 - RNA, 19 nt, Human
aagcauuguaaaugugcuu

SEQ ID NO: 2695623 - RNA, 16 nt, Human
aagcacugacuucuaa

SEQ ID NO: 2695624 - RNA, 17 nt, Human
aagcacugacuucuaag

SEQ ID NO: 2695625 - RNA, 16 nt, Human
aagcacuaaacaaaga

SEQ ID NO: 2695626 - RNA, 14 nt, Human
uaaaaccacagcag

SEQ ID NO: 2695627 - RNA, 15 nt, Human
uaaaaccacagcagu

SEQ ID NO: 2695628 - RNA, 21 nt, Human
uaaaaaaaaaccugagcccca

SEQ ID NO: 2695629 - RNA, 13 nt, Human
uaaaagaauauuu

SEQ ID NO: 2695630 - RNA, 21 nt, Human
uaaaauacacacucaaaucaa

SEQ ID NO: 2695631 - RNA, 22 nt, Human
uaaaauaauuuuuauauuugaa

SEQ ID NO: 2695632 - RNA, 9 nt, Human
uaaaauggu

SEQ ID NO: 2695633 - RNA, 19 nt, Human
aaguauguuagugcaaauu

SEQ ID NO: 2695634 - RNA, 18 nt, Human
aaguauguuagugcaaau

SEQ ID NO: 2695635 - RNA, 14 nt, Human
guuuaugauuccac

SEQ ID NO: 2695636 - RNA, 15 nt, Human
aagggcuguuauaau

SEQ ID NO: 2695637 - RNA, 17 nt, Human
aaggggaauugaggaca

SEQ ID NO: 2695638 - RNA, 17 nt, Human
aagggcuguuauaaucu

SEQ ID NO: 2695639 - RNA, 16 nt, Human
cacaguuuucugagaa

SEQ ID NO: 2695640 - RNA, 17 nt, Human
cacaguuuucugagaaa

SEQ ID NO: 2695641 - RNA, 19 nt, Human
cacaguuuucugagaaaga

SEQ ID NO: 2695642 - RNA, 20 nt, Human
cacaguuuucugagaaagac

SEQ ID NO: 2695643 - RNA, 22 nt, Human
caaaauuuuuucucuaggaaau

SEQ ID NO: 2695644 - RNA, 21 nt, Human
caaaauuuuuucucuaggaaa

SEQ ID NO: 2695645 - RNA, 16 nt, Human
caaaauuuuuucucua

SEQ ID NO: 2695646 - RNA, 15 nt, Human
caaauugugugaaag

SEQ ID NO: 2695647 - RNA, 19 nt, Human
caaauaugcaaagcacuga

SEQ ID NO: 2695648 - RNA, 21 nt, Human
caaauaugcaaagcacugacu

SEQ ID NO: 2695649 - RNA, 13 nt, Human
caaaaacacagca

SEQ ID NO: 2695650 - RNA, 14 nt, Human
caaaaacacagcaa

SEQ ID NO: 2695651 - RNA, 15 nt, Human
caaaaacacagcaag

SEQ ID NO: 2695652 - RNA, 17 nt, Human
caaaaacacagcaaggg

SEQ ID NO: 2695653 - RNA, 13 nt, Human
auuuuccugaaaa

SEQ ID NO: 2695654 - RNA, 19 nt, Human
caaaaaucucaauauuuca

SEQ ID NO: 2695655 - RNA, 23 nt, Human
caaaacuucagacauagaauuaa

SEQ ID NO: 2695656 - RNA, 23 nt, Human
caauacaucccuuaccugggaaa

SEQ ID NO: 2695657 - RNA, 22 nt, Human
caaugugacuuaaugccacuaa

SEQ ID NO: 2695658 - RNA, 21 nt, Human
caagccagauuuuccugaaaa

SEQ ID NO: 2695659 - RNA, 17 nt, Human
caaggcugauuaaacca

SEQ ID NO: 2695660 - RNA, 17 nt, Human
uucugucuucacaacag

SEQ ID NO: 2695661 - RNA, 14 nt, Human
uugaugaagaaguu

SEQ ID NO: 2695662 - RNA, 13 nt, Human
uugaugaagaagu

SEQ ID NO: 2695663 - RNA, 23 nt, Human
uugaugaagaaguugauaugccu

SEQ ID NO: 2695664 - RNA, 14 nt, Human
uugacccacaagaa

SEQ ID NO: 2695665 - RNA, 17 nt, Human
uugacccacaagaaaug

SEQ ID NO: 2695666 - RNA, 14 nt, Human
uucuaugaaauauu

SEQ ID NO: 2695667 - RNA, 21 nt, Human
uucuaugaaauauuauguuaa

SEQ ID NO: 2695668 - RNA, 16 nt, Human
uucugagaaagacuau

SEQ ID NO: 2695669 - RNA, 21 nt, Human
uucugagaaagacuauucaaa

SEQ ID NO: 2695670 - RNA, 15 nt, Human
uucuacauacuaugg

SEQ ID NO: 2695671 - RNA, 18 nt, Human
uucggugagcuacaaaug

SEQ ID NO: 2695672 - RNA, 23 nt, Human
uucaguuauuauauuuacaaaug

SEQ ID NO: 2695673 - RNA, 18 nt, Human
uuccagauccuggaaauc

SEQ ID NO: 2695674 - RNA, 19 nt, Human
uuauuuuaauaauguuuca

SEQ ID NO: 2695675 - RNA, 20 nt, Human
uuauuuuaauaauguuucaa

SEQ ID NO: 2695676 - RNA, 22 nt, Human
uucacaagacccaaaaggcaga

SEQ ID NO: 2695677 - RNA, 20 nt, Human
uucagauaaucacaauacau

SEQ ID NO: 2695678 - RNA, 20 nt, Human
uucagagcugcccucuccug

SEQ ID NO: 2695679 - RNA, 19 nt, Human
uucagagcugcccucuccu

SEQ ID NO: 2695680 - RNA, 18 nt, Human
uucagagcugcccucucc

SEQ ID NO: 2695681 - RNA, 17 nt, Human
uucagagcugcccucuc

SEQ ID NO: 2695682 - RNA, 15 nt, Human
uucagagcugcccuc

SEQ ID NO: 2695683 - RNA, 18 nt, Human
uuauaauuuugugaagca

SEQ ID NO: 2695684 - RNA, 17 nt, Human
uuauaauuuugugaagc

SEQ ID NO: 2695685 - RNA, 16 nt, Human
uuauaauuuugugaag

SEQ ID NO: 2695686 - RNA, 12 nt, Human
uuauaauuuaaa

SEQ ID NO: 2695687 - RNA, 15 nt, Human
uuauaauuuugugaa

SEQ ID NO: 2695688 - RNA, 14 nt, Human
uuauaauuuuguga

SEQ ID NO: 2695689 - RNA, 11 nt, Human
uuauaaucuuu

SEQ ID NO: 2695690 - RNA, 15 nt, Human
uuauauuugaaauau

SEQ ID NO: 2695691 - RNA, 13 nt, Human
uuauauuugaaau

SEQ ID NO: 2695692 - RNA, 12 nt, Human
uuauauuugaaa

SEQ ID NO: 2695693 - RNA, 20 nt, Human
uuauauuuauuacuguaaga

SEQ ID NO: 2695694 - RNA, 16 nt, Human
uuauauuuacaaaugg

SEQ ID NO: 2695695 - RNA, 11 nt, Human
uuaucucaaaa

SEQ ID NO: 2695696 - RNA, 22 nt, Human
uuaugauuaaguaaugauaacu

SEQ ID NO: 2695697 - RNA, 18 nt, Human
uuauggcuauaggugcua

SEQ ID NO: 2695698 - RNA, 16 nt, Human
uuggucugugagaugc

SEQ ID NO: 2695699 - RNA, 15 nt, Human
uugucuagugaaacu

SEQ ID NO: 2695700 - RNA, 12 nt, Human
uugugccccugc

SEQ ID NO: 2695701 - RNA, 18 nt, Human
uuguguuuugcaagccag

SEQ ID NO: 2695702 - RNA, 14 nt, Human
uuguuuaaaaucau

SEQ ID NO: 2695703 - RNA, 22 nt, Human
uuuauuguuuaaaaucauuucu

SEQ ID NO: 2695704 - RNA, 22 nt, Human
uuuauaauuuugugaagcaaaa

SEQ ID NO: 2695705 - RNA, 17 nt, Human
uuuauggcacuaguauu

SEQ ID NO: 2695706 - RNA, 13 nt, Human
uuuaccacuugug

SEQ ID NO: 2695707 - RNA, 13 nt, Human
uuuaauaauguuu

SEQ ID NO: 2695708 - RNA, 19 nt, Human
uuuaacucuauaauguguu

SEQ ID NO: 2695709 - RNA, 19 nt, Human
uuuguauaaaauaauuuuu

SEQ ID NO: 2695710 - RNA, 18 nt, Human
uuuguauaaaauaauuuu

SEQ ID NO: 2695711 - RNA, 17 nt, Human
uuuguauaaaauaauuu

SEQ ID NO: 2695712 - RNA, 15 nt, Human
uuuccacagaagcuc

SEQ ID NO: 2695713 - RNA, 23 nt, Human
uuuuauaauuuugugaagcaaaa

SEQ ID NO: 2695714 - RNA, 21 nt, Human
uuuuauaauuuugugaagcaa

SEQ ID NO: 2695715 - RNA, 21 nt, Human
uuuuaaaguaacccuacaaaa

SEQ ID NO: 2695716 - RNA, 18 nt, Human
uuuuauauuugaaauauu

SEQ ID NO: 2695717 - RNA, 13 nt, Human
uuuuauauuugaa

SEQ ID NO: 2695718 - RNA, 13 nt, Human
uuuucuuauuuca

SEQ ID NO: 2695719 - RNA, 16 nt, Human
ugcacugucaagauga

SEQ ID NO: 2695720 - RNA, 17 nt, Human
ugcacgcacacugucug

SEQ ID NO: 2695721 - RNA, 16 nt, Human
ugcacgcacacugucu

SEQ ID NO: 2695722 - RNA, 17 nt, Human
ugcaugguuuagaaagc

SEQ ID NO: 2695723 - RNA, 19 nt, Human
ugcagauaaacaguaguga

SEQ ID NO: 2695724 - RNA, 21 nt, Human
ugcauuauauuuauuacugua

SEQ ID NO: 2695725 - RNA, 24 nt, Human
ugauaguuguaccgcaaugugacu

SEQ ID NO: 2695726 - RNA, 15 nt, Human
ugagcagucaggaaa

SEQ ID NO: 2695727 - RNA, 17 nt, Human
ugagcagucaggaaaga

SEQ ID NO: 2695728 - RNA, 20 nt, Human
ugagcagucaggaaagagaa

SEQ ID NO: 2695729 - RNA, 14 nt, Human
ugagaugcuagaac

SEQ ID NO: 2695730 - RNA, 16 nt, Human
ugagaugcuagaacuc

SEQ ID NO: 2695731 - RNA, 20 nt, Human
ugagaugcuagaacucccuu

SEQ ID NO: 2695732 - RNA, 14 nt, Human
ugagacagcucugc

SEQ ID NO: 2695733 - RNA, 16 nt, Human
ugagacagcucugcau

SEQ ID NO: 2695734 - RNA, 18 nt, Human
ugagaaagacuauucaaa

SEQ ID NO: 2695735 - RNA, 20 nt, Human
ugagaaagacuauucaaaca

SEQ ID NO: 2695736 - RNA, 16 nt, Human
ugagaaagacuauuca

SEQ ID NO: 2695737 - RNA, 17 nt, Human
ugagaaagacuauucaa

SEQ ID NO: 2695738 - RNA, 12 nt, Human
ugacucuuaaga

SEQ ID NO: 2695739 - RNA, 23 nt, Human
ugggcagcugccuccccuccucu

SEQ ID NO: 2695740 - RNA, 22 nt, Human
ugggcagcugccuccccuccuc

SEQ ID NO: 2695741 - RNA, 20 nt, Human
ugggcagcugccuccccucc

SEQ ID NO: 2695742 - RNA, 12 nt, Human
ugggcagcugcc

SEQ ID NO: 2695743 - RNA, 14 nt, Human
ugggacagggagga

SEQ ID NO: 2695744 - RNA, 22 nt, Human
uggccuucggccuccauccuga

SEQ ID NO: 2695745 - RNA, 20 nt, Human
uggccuucggccuccauccu

SEQ ID NO: 2695746 - RNA, 23 nt, Human
uggccuucggccuccauccugag

SEQ ID NO: 2695747 - RNA, 22 nt, Human
ugcuucuguuuuauaauuuugu

SEQ ID NO: 2695748 - RNA, 22 nt, Human
uggaaaaguauguuagugcaaa

SEQ ID NO: 2695749 - RNA, 17 nt, Human
ugcuucuguuuuauaau

SEQ ID NO: 2695750 - RNA, 19 nt, Human
uguauuuuaaaagaaugau

SEQ ID NO: 2695751 - RNA, 18 nt, Human
uguauuuuaaaagaauga

SEQ ID NO: 2695752 - RNA, 14 nt, Human
uguauaaaauaauu

SEQ ID NO: 2695753 - RNA, 13 nt, Human
uguauaaaauaau

SEQ ID NO: 2695754 - RNA, 21 nt, Human
uguaguguuggagaagaacug

SEQ ID NO: 2695755 - RNA, 20 nt, Human
uguaguguuggagaagaacu

SEQ ID NO: 2695756 - RNA, 19 nt, Human
uguaguguuggagaagaac

SEQ ID NO: 2695757 - RNA, 12 nt, Human
ugucuuaauuaa

SEQ ID NO: 2695758 - RNA, 17 nt, Human
ugucuacacuaagagag

SEQ ID NO: 2695759 - RNA, 22 nt, Human
ugucuacacuaagagagaauga

SEQ ID NO: 2695760 - RNA, 14 nt, Human
uggguagacacaca

SEQ ID NO: 2695761 - RNA, 20 nt, Human
ugguucccuugaugaagaag

SEQ ID NO: 2695762 - RNA, 17 nt, Human
ugguucccuugaugaag

SEQ ID NO: 2695763 - RNA, 16 nt, Human
ugguucccuugaugaa

SEQ ID NO: 2695764 - RNA, 11 nt, Human
uguaaaauggu

SEQ ID NO: 2695765 - RNA, 12 nt, Human
uguaaaauggug

SEQ ID NO: 2695766 - RNA, 17 nt, Human
ucuggccuucggccucc

SEQ ID NO: 2695767 - RNA, 18 nt, Human
ucuggccuucggccucca

SEQ ID NO: 2695768 - RNA, 12 nt, Human
ucuuaagaagac

SEQ ID NO: 2695769 - RNA, 18 nt, Human
ucuuaagaagacugcauu

SEQ ID NO: 2695770 - RNA, 15 nt, Human
ucugucuucacaaca

SEQ ID NO: 2695771 - RNA, 19 nt, Human
ucugcaucagcugcugaaa

SEQ ID NO: 2695772 - RNA, 21 nt, Human
ucugcaucagcugcugaaaca

SEQ ID NO: 2695773 - RNA, 14 nt, Human
ucugcaucagcugc

SEQ ID NO: 2695774 - RNA, 22 nt, Human
ucucuguaauaaacucauuucu

SEQ ID NO: 2695775 - RNA, 18 nt, Human
ucucuguaauaaacucau

SEQ ID NO: 2695776 - RNA, 16 nt, Human
ucccugcaauaaaaug

SEQ ID NO: 2695777 - RNA, 16 nt, Human
ucccuugaugaagaag

SEQ ID NO: 2695778 - RNA, 15 nt, Human
ucccuugaugaagaa

SEQ ID NO: 2695779 - RNA, 22 nt, Human
uccucugcuugccaucccuccc

SEQ ID NO: 2695780 - RNA, 21 nt, Human
uccucugcuugccaucccucc

SEQ ID NO: 2695781 - RNA, 20 nt, Human
uccucugcuugccaucccuc

SEQ ID NO: 2695782 - RNA, 22 nt, Human
ucuagugagcagucaggaaaga

SEQ ID NO: 2695783 - RNA, 19 nt, Human
ucuagugagcagucaggaa

SEQ ID NO: 2695784 - RNA, 15 nt, Human
ucucaacuccaaacu

SEQ ID NO: 2695785 - RNA, 17 nt, Human
ucuaugaaauauuaugu

SEQ ID NO: 2695786 - RNA, 14 nt, Human
ucuaugaaauauua

SEQ ID NO: 2695787 - RNA, 13 nt, Human
ucuaugaaauauu

SEQ ID NO: 2695788 - RNA, 22 nt, Human
ucgugggacagucaccucaugg

SEQ ID NO: 2695789 - RNA, 21 nt, Human
ucguggaacaguuaccucugc

SEQ ID NO: 2695790 - RNA, 18 nt, Human
ucggccuccauccugagg

SEQ ID NO: 2695791 - RNA, 17 nt, Human
ucggccuccauccugag

SEQ ID NO: 2695792 - RNA, 13 nt, Human
ucguuaauuugua

SEQ ID NO: 2695793 - RNA, 20 nt, Human
uccugccuaagugcagcccc

SEQ ID NO: 2695794 - RNA, 19 nt, Human
uccugucggagcccugucu

SEQ ID NO: 2695795 - RNA, 22 nt, Human
uccugucggagcccugucuccu

SEQ ID NO: 2695796 - RNA, 16 nt, Human
uccuuggacucauuuu

SEQ ID NO: 2695797 - RNA, 14 nt, Human
ucaccaaggcugau

SEQ ID NO: 2695798 - RNA, 16 nt, Human
ucacagucacauucca

SEQ ID NO: 2695799 - RNA, 17 nt, Human
ucacaagacccaaaagg

SEQ ID NO: 2695800 - RNA, 18 nt, Human
ucacaagacccaaaaggc

SEQ ID NO: 2695801 - RNA, 13 nt, Human
ucacaagacccaa

SEQ ID NO: 2695802 - RNA, 13 nt, Human
ucaaugcagcccc

SEQ ID NO: 2695803 - RNA, 21 nt, Human
ucaauaaaauccauacauuug

SEQ ID NO: 2695804 - RNA, 14 nt, Human
ucaaauaugcaaag

SEQ ID NO: 2695805 - RNA, 20 nt, Human
ucaaaucaagaaacuuaagg

SEQ ID NO: 2695806 - RNA, 14 nt, Human
ucaaauugugugaa

SEQ ID NO: 2695807 - RNA, 16 nt, Human
uauuauucccauucua

SEQ ID NO: 2695808 - RNA, 17 nt, Human
uauguacuucaugcugu

SEQ ID NO: 2695809 - RNA, 13 nt, Human
uauguacuucaug

SEQ ID NO: 2695810 - RNA, 16 nt, Human
ucauuuccaagcaagu

SEQ ID NO: 2695811 - RNA, 13 nt, Human
ucauuuccaagca

SEQ ID NO: 2695812 - RNA, 19 nt, Human
ucauuaucucaaaacugca

SEQ ID NO: 2695813 - RNA, 20 nt, Human
ucauuaucucaaaacugcac

SEQ ID NO: 2695814 - RNA, 13 nt, Human
ucauuaucucaaa

SEQ ID NO: 2695815 - RNA, 18 nt, Human
ucauaccuaucaucuuaa

SEQ ID NO: 2695816 - RNA, 15 nt, Human
uccacuuggucugug

SEQ ID NO: 2695817 - RNA, 16 nt, Human
uccacuuggucuguga

SEQ ID NO: 2695818 - RNA, 14 nt, Human
uccacuuggucugu

SEQ ID NO: 2695819 - RNA, 17 nt, Human
uccaccucccugcaaua

SEQ ID NO: 2695820 - RNA, 16 nt, Human
uccaccucccugcaau

SEQ ID NO: 2695821 - RNA, 15 nt, Human
uccaccucccugcaa

SEQ ID NO: 2695822 - RNA, 14 nt, Human
uccaccucccugca

SEQ ID NO: 2695823 - RNA, 13 nt, Human
uccaccucccugc

SEQ ID NO: 2695824 - RNA, 19 nt, Human
uccacagaagcuccaggua

SEQ ID NO: 2695825 - RNA, 17 nt, Human
ucaggcuagauguaugu

SEQ ID NO: 2695826 - RNA, 13 nt, Human
ucaggcuagaugu

SEQ ID NO: 2695827 - RNA, 18 nt, Human
ucagcuccccucggagaa

SEQ ID NO: 2695828 - RNA, 17 nt, Human
ucagcuccccucggaga

SEQ ID NO: 2695829 - RNA, 23 nt, Human
ucagagcugcccucuccugggca

SEQ ID NO: 2695830 - RNA, 22 nt, Human
ucagagcugcccucuccugggc

SEQ ID NO: 2695831 - RNA, 21 nt, Human
ucagagcugcccucuccuggg

SEQ ID NO: 2695832 - RNA, 20 nt, Human
ucagagcugcccucuccugg

SEQ ID NO: 2695833 - RNA, 19 nt, Human
ucagagcugcccucuccug

SEQ ID NO: 2695834 - RNA, 23 nt, Human
ggagcccugucuccucucucugu

SEQ ID NO: 2695835 - RNA, 18 nt, Human
ggagcccugucuccucuc

SEQ ID NO: 2695836 - RNA, 16 nt, Human
ggaggacgcucucugg

SEQ ID NO: 2695837 - RNA, 19 nt, Human
ggaggggagcaugggaagu

SEQ ID NO: 2695838 - RNA, 15 nt, Human
ggacgcucucuggcc

SEQ ID NO: 2695839 - RNA, 16 nt, Human
ggacgcucucuggccu

SEQ ID NO: 2695840 - RNA, 19 nt, Human
ggacgcucucuggccuucg

SEQ ID NO: 2695841 - RNA, 23 nt, Human
ggagaagagcuguucacagccag

SEQ ID NO: 2695842 - RNA, 14 nt, Human
ggagaagaacugaa

SEQ ID NO: 2695843 - RNA, 11 nt, Human
ggagaagaacu

SEQ ID NO: 2695844 - RNA, 15 nt, Human
ggagaagagcuguuc

SEQ ID NO: 2695845 - RNA, 20 nt, Human
ggacauuugcucauggaauu

SEQ ID NO: 2695846 - RNA, 17 nt, Human
ggacauuugcucaugga

SEQ ID NO: 2695847 - RNA, 16 nt, Human
ggacauuugcucaugg

SEQ ID NO: 2695848 - RNA, 16 nt, Human
ggcagcugccuccccu

SEQ ID NO: 2695849 - RNA, 13 nt, Human
ggcagcugccucc

SEQ ID NO: 2695850 - RNA, 12 nt, Human
ggcagcugccuc

SEQ ID NO: 2695851 - RNA, 11 nt, Human
ggcagcugccu

SEQ ID NO: 2695852 - RNA, 21 nt, Human
ggcagagguugcagugagccg

SEQ ID NO: 2695853 - RNA, 19 nt, Human
ggauugaaggaugcugucu

SEQ ID NO: 2695854 - RNA, 17 nt, Human
gggaggacgcucucugg

SEQ ID NO: 2695855 - RNA, 20 nt, Human
gggaggacgcucucuggccu

SEQ ID NO: 2695856 - RNA, 21 nt, Human
gggacugaggggaggggagca

SEQ ID NO: 2695857 - RNA, 14 nt, Human
gggaauugaggaca

SEQ ID NO: 2695858 - RNA, 20 nt, Human
ggcuaguaucaaaagaaaga

SEQ ID NO: 2695859 - RNA, 23 nt, Human
ggcuauaggugcuacaaaaacac

SEQ ID NO: 2695860 - RNA, 16 nt, Human
ggcuccacuuggucug

SEQ ID NO: 2695861 - RNA, 17 nt, Human
gccugagcgacagugag

SEQ ID NO: 2695862 - RNA, 20 nt, Human
gccugagcgacagugagacu

SEQ ID NO: 2695863 - RNA, 16 nt, Human
gcuagauguauguacu

SEQ ID NO: 2695864 - RNA, 14 nt, Human
gcuagauguaugua

SEQ ID NO: 2695865 - RNA, 13 nt, Human
gcuagauguaugu

SEQ ID NO: 2695866 - RNA, 21 nt, Human
gcuauaggugcuacaaaaaca

SEQ ID NO: 2695867 - RNA, 19 nt, Human
gcuauaggugcuacaaaaa

SEQ ID NO: 2695868 - RNA, 20 nt, Human
gcuccauuuuuagugaaaua

SEQ ID NO: 2695869 - RNA, 21 nt, Human
gcuggaaaaguauguuagugc

SEQ ID NO: 2695870 - RNA, 23 nt, Human
gcuggaaaaguauguuagugcaa

SEQ ID NO: 2695871 - RNA, 23 nt, Human
gcugcccucuccugggcagcugc

SEQ ID NO: 2695872 - RNA, 22 nt, Human
gcugcccucuccugggcagcug

SEQ ID NO: 2695873 - RNA, 20 nt, Human
gcugcccucuccugggcagc

SEQ ID NO: 2695874 - RNA, 18 nt, Human
gcugcccucuccugggca

SEQ ID NO: 2695875 - RNA, 17 nt, Human
gcugcccucuccugggc

SEQ ID NO: 2695876 - RNA, 16 nt, Human
gcugcccucuccuggg

SEQ ID NO: 2695877 - RNA, 15 nt, Human
gcugcccucuccugg

SEQ ID NO: 2695878 - RNA, 14 nt, Human
gcugcccucuccug

SEQ ID NO: 2695879 - RNA, 13 nt, Human
gcugcccucuccu

SEQ ID NO: 2695880 - RNA, 21 nt, Human
gcugauuaaaccaaggcuaga

SEQ ID NO: 2695881 - RNA, 12 nt, Human
gcugcccucucc

SEQ ID NO: 2695882 - RNA, 23 nt, Human
gcuggucccagccagcaguucag

SEQ ID NO: 2695883 - RNA, 19 nt, Human
gcuucuguuuuauaauuuu

SEQ ID NO: 2695884 - RNA, 23 nt, Human
gcaguucagagcugcccucuccu

SEQ ID NO: 2695885 - RNA, 22 nt, Human
gcaguucagagcugcccucucc

SEQ ID NO: 2695886 - RNA, 20 nt, Human
gcaguucagagcugcccucu

SEQ ID NO: 2695887 - RNA, 19 nt, Human
gcaguucagagcugcccuc

SEQ ID NO: 2695888 - RNA, 21 nt, Human
gcaguugaaaagacuccaaag

SEQ ID NO: 2695889 - RNA, 16 nt, Human
gcaguugaaaagacuc

SEQ ID NO: 2695890 - RNA, 19 nt, Human
gcaguugaaaagacuccaa

SEQ ID NO: 2695891 - RNA, 15 nt, Human
gcaguugaaaagacu

SEQ ID NO: 2695892 - RNA, 22 nt, Human
gcaucagcugcugaaacaacaa

SEQ ID NO: 2695893 - RNA, 23 nt, Human
gcaucagcugcugaaacaacaaa

SEQ ID NO: 2695894 - RNA, 16 nt, Human
gcacgcacacugucug

SEQ ID NO: 2695895 - RNA, 15 nt, Human
gcacgcacacugucu

SEQ ID NO: 2695896 - RNA, 19 nt, Human
gcacuguggguagacacac

SEQ ID NO: 2695897 - RNA, 18 nt, Human
gcacagccucuuagaugc

SEQ ID NO: 2695898 - RNA, 15 nt, Human
gcacagccucuuaga

SEQ ID NO: 2695899 - RNA, 18 nt, Human
gcagagguugcagugagc

SEQ ID NO: 2695900 - RNA, 23 nt, Human
gcagagguugcagugagccgaga

SEQ ID NO: 2695901 - RNA, 16 nt, Human
gcaggaagcugugaga

SEQ ID NO: 2695902 - RNA, 19 nt, Human
gccagacuggcacaguuuu

SEQ ID NO: 2695903 - RNA, 15 nt, Human
gccagacuggcacag

SEQ ID NO: 2695904 - RNA, 18 nt, Human
gccagacuggcacaguuu

SEQ ID NO: 2695905 - RNA, 23 nt, Human
gccaugggacagggaggacgcuc

SEQ ID NO: 2695906 - RNA, 22 nt, Human
gccaugggacagggaggacgcu

SEQ ID NO: 2695907 - RNA, 19 nt, Human
gagugucuuaauuaaaaga

SEQ ID NO: 2695908 - RNA, 19 nt, Human
gagugaacaaauuuacaga

SEQ ID NO: 2695909 - RNA, 22 nt, Human
gagugaacaaauuuacagagac

SEQ ID NO: 2695910 - RNA, 23 nt, Human
gagugaacaaauuuacagagaca

SEQ ID NO: 2695911 - RNA, 21 nt, Human
gaguugaaaaucuuauaauuu

SEQ ID NO: 2695912 - RNA, 13 nt, Human
gauugugccccug

SEQ ID NO: 2695913 - RNA, 19 nt, Human
gauguugaaaaaguucugc

SEQ ID NO: 2695914 - RNA, 18 nt, Human
gaugcaguucugaagaag

SEQ ID NO: 2695915 - RNA, 16 nt, Human
gaugggaaagcauugu

SEQ ID NO: 2695916 - RNA, 14 nt, Human
gaucuuuaaaauac

SEQ ID NO: 2695917 - RNA, 19 nt, Human
gaggcagagguugcaguga

SEQ ID NO: 2695918 - RNA, 21 nt, Human
gagcaggcuacugucagcucc

SEQ ID NO: 2695919 - RNA, 12 nt, Human
gagcuacaaaug

SEQ ID NO: 2695920 - RNA, 13 nt, Human
gagcuacaaaugc

SEQ ID NO: 2695921 - RNA, 14 nt, Human
gagcuacaaaugca

SEQ ID NO: 2695922 - RNA, 16 nt, Human
gagcugcccucuccug

SEQ ID NO: 2695923 - RNA, 15 nt, Human
gagcugcccucuccu

SEQ ID NO: 2695924 - RNA, 17 nt, Human
gagcugcccucuccugg

SEQ ID NO: 2695925 - RNA, 14 nt, Human
gagcugcccucucc

SEQ ID NO: 2695926 - RNA, 19 nt, Human
cucuuaagaagacugcauu

SEQ ID NO: 2695927 - RNA, 22 nt, Human
cucuggccuucggccuccaucc

SEQ ID NO: 2695928 - RNA, 21 nt, Human
cucuggccuucggccuccauc

SEQ ID NO: 2695929 - RNA, 16 nt, Human
cugagcaggauuuuaa

SEQ ID NO: 2695930 - RNA, 16 nt, Human
cugagaugugaacaca

SEQ ID NO: 2695931 - RNA, 20 nt, Human
cugagaugugaacacaucag

SEQ ID NO: 2695932 - RNA, 19 nt, Human
cugagaaagacuauucaaa

SEQ ID NO: 2695933 - RNA, 20 nt, Human
cugagaaagacuauucaaac

SEQ ID NO: 2695934 - RNA, 21 nt, Human
cugagaugugaacacaucagc

SEQ ID NO: 2695935 - RNA, 12 nt, Human
cugagaaagacu

SEQ ID NO: 2695936 - RNA, 13 nt, Human
cugagaaagacua

SEQ ID NO: 2695937 - RNA, 15 nt, Human
cugagaaagacuauu

SEQ ID NO: 2695938 - RNA, 18 nt, Human
cugagaaagacuauucaa

SEQ ID NO: 2695939 - RNA, 23 nt, Human
cugacgacuugagugcucaguag

SEQ ID NO: 2695940 - RNA, 14 nt, Human
cugaagaagauggu

SEQ ID NO: 2695941 - RNA, 20 nt, Human
cugcaucagcugcugaaaca

SEQ ID NO: 2695942 - RNA, 21 nt, Human
cugaggcuccacuuggucugu

SEQ ID NO: 2695943 - RNA, 15 nt, Human
cugaggcuccacuug

SEQ ID NO: 2695944 - RNA, 22 nt, Human
cugcaauaaaauggguuuuacu

SEQ ID NO: 2695945 - RNA, 15 nt, Human
cugcaauaaaauggg

SEQ ID NO: 2695946 - RNA, 16 nt, Human
cuaguaauuggaaagg

SEQ ID NO: 2695947 - RNA, 20 nt, Human
cuagugaaacucguuaauuu

SEQ ID NO: 2695948 - RNA, 18 nt, Human
cuagugaaagaggcagcu

SEQ ID NO: 2695949 - RNA, 19 nt, Human
cuagugaaagaggcagcuu

SEQ ID NO: 2695950 - RNA, 21 nt, Human
cuagugagcagucaggaaaga

SEQ ID NO: 2695951 - RNA, 23 nt, Human
cuauucaaacagucucaggaaau

SEQ ID NO: 2695952 - RNA, 18 nt, Human
cuauucaaacagucucag

SEQ ID NO: 2695953 - RNA, 16 nt, Human
cuauucaaacagucuc

SEQ ID NO: 2695954 - RNA, 21 nt, Human
cuauaggugcuacaaaaacac

SEQ ID NO: 2695955 - RNA, 22 nt, Human
cuauaggugcuacaaaaacaca

SEQ ID NO: 2695956 - RNA, 20 nt, Human
cuauaggugcuacaaaaaca

SEQ ID NO: 2695957 - RNA, 18 nt, Human
cuauauuguuugcuaagc

SEQ ID NO: 2695958 - RNA, 21 nt, Human
cucauuuccaagcaaguauua

SEQ ID NO: 2695959 - RNA, 14 nt, Human
cucauuucuagcag

SEQ ID NO: 2695960 - RNA, 13 nt, Human
cuccaaagaaaug

SEQ ID NO: 2695961 - RNA, 12 nt, Human
cuccaaagaaau

SEQ ID NO: 2695962 - RNA, 21 nt, Human
cuccaaacugacucuuaagaa

SEQ ID NO: 2695963 - RNA, 17 nt, Human
cuccaccuugcagcucu

SEQ ID NO: 2695964 - RNA, 12 nt, Human
cuccauccugag

SEQ ID NO: 2695965 - RNA, 11 nt, Human
cuccauccuga

SEQ ID NO: 2695966 - RNA, 13 nt, Human
cuccccuccucug

SEQ ID NO: 2695967 - RNA, 11 nt, Human
cuccccuccuc

SEQ ID NO: 2695968 - RNA, 13 nt, Human
cuccauccugagg

SEQ ID NO: 2695969 - RNA, 20 nt, Human
cuccccuccucugcuugcca

SEQ ID NO: 2695970 - RNA, 21 nt, Human
cuugccaucccucccuccacc

SEQ ID NO: 2695971 - RNA, 22 nt, Human
cuugccaucccucccuccaccu

SEQ ID NO: 2695972 - RNA, 19 nt, Human
cuuguaaaggaauuuaaaa

SEQ ID NO: 2695973 - RNA, 13 nt, Human
cuuuccacagaag

SEQ ID NO: 2695974 - RNA, 21 nt, Human
cuuuauuuucuauaauuuaaa

SEQ ID NO: 2695975 - RNA, 18 nt, Human
cuuuaaagggauggcaag

SEQ ID NO: 2695976 - RNA, 22 nt, Human
gaaaacaauaacgauaaaagac

SEQ ID NO: 2695977 - RNA, 12 nt, Human
gaaaauaucacu

SEQ ID NO: 2695978 - RNA, 19 nt, Human
gaaaaucuuauaauuuaaa

SEQ ID NO: 2695979 - RNA, 19 nt, Human
gaaaauaacgauaaaagac

SEQ ID NO: 2695980 - RNA, 20 nt, Human
gaaaaucuuauaauuuaaaa

SEQ ID NO: 2695981 - RNA, 20 nt, Human
gaauaauccuaaacauauga

SEQ ID NO: 2695982 - RNA, 14 nt, Human
gaauacuuuauaaa

SEQ ID NO: 2695983 - RNA, 17 nt, Human
gaagacugcauuauauu

SEQ ID NO: 2695984 - RNA, 21 nt, Human
gaagccuuggggcugaugcag

SEQ ID NO: 2695985 - RNA, 16 nt, Human
gaaauauuauguuaaa

SEQ ID NO: 2695986 - RNA, 13 nt, Human
gaaauauuauguu

SEQ ID NO: 2695987 - RNA, 22 nt, Human
gaaauguaagggaaacugccag

SEQ ID NO: 2695988 - RNA, 21 nt, Human
gaagaagcaccaaucaugaau

SEQ ID NO: 2695989 - RNA, 21 nt, Human
gaacuuguaaaggaauuuaaa

SEQ ID NO: 2695990 - RNA, 22 nt, Human
gaacuuccagauccuggaaauc

SEQ ID NO: 2695991 - RNA, 15 nt, Human
gaacucccuuucaac

SEQ ID NO: 2695992 - RNA, 14 nt, Human
gaacucccuuucaa

SEQ ID NO: 2695993 - RNA, 22 nt, Human
gaacuagaguuuagcuggaaaa

SEQ ID NO: 2695994 - RNA, 21 nt, Human
gaacuagaguuuagcuggaaa

SEQ ID NO: 2695995 - RNA, 18 nt, Human
cugucuucacaacagauu

SEQ ID NO: 2695996 - RNA, 19 nt, Human
cuguuaaaagaugaaaaua

SEQ ID NO: 2695997 - RNA, 15 nt, Human
cuguuaaaagaugaa

SEQ ID NO: 2695998 - RNA, 16 nt, Human
cuguuaaaagaugaaa

SEQ ID NO: 2695999 - RNA, 23 nt, Human
cuuaagaagacugcauuauauuu

SEQ ID NO: 2696000 - RNA, 21 nt, Human
cuuaagaagacugcauuauau

SEQ ID NO: 2696001 - RNA, 19 nt, Human
cuuaauuaaaagaauauuu

SEQ ID NO: 2696002 - RNA, 20 nt, Human
cuuaauuaaaagaauauuuu

SEQ ID NO: 2696003 - RNA, 16 nt, Human
cuuaauuaaaagaaua

SEQ ID NO: 2696004 - RNA, 17 nt, Human
cuuaauuaaaagaauau

SEQ ID NO: 2696005 - RNA, 14 nt, Human
cuguuuuauaauuu

SEQ ID NO: 2696006 - RNA, 15 nt, Human
cuguuuuauaauuuu

SEQ ID NO: 2696007 - RNA, 12 nt, Human
cuucacaacaga

SEQ ID NO: 2696008 - RNA, 14 nt, Human
cuucacaacagauu

SEQ ID NO: 2696009 - RNA, 17 nt, Human
cuucaaauccuugaaga

SEQ ID NO: 2696010 - RNA, 16 nt, Human
cuucagcgguuuauau

SEQ ID NO: 2696011 - RNA, 15 nt, Human
cuucagccugaaaga

SEQ ID NO: 2696012 - RNA, 20 nt, Human
cuuccuuggacucauuuuaa

SEQ ID NO: 2696013 - RNA, 20 nt, Human
cuucggccuccauccugagg

SEQ ID NO: 2696014 - RNA, 17 nt, Human
ccucccuccaccucccu

SEQ ID NO: 2696015 - RNA, 20 nt, Human
ccucccuccaccucccugca

SEQ ID NO: 2696016 - RNA, 18 nt, Human
ccuccucugcuugccauc

SEQ ID NO: 2696017 - RNA, 13 nt, Human
ccuccucugcuug

SEQ ID NO: 2696018 - RNA, 16 nt, Human
ccuccucugcuugcca

SEQ ID NO: 2696019 - RNA, 14 nt, Human
ccuccauccugagg

SEQ ID NO: 2696020 - RNA, 22 nt, Human
ccuccaccucccugcaauaaaa

SEQ ID NO: 2696021 - RNA, 17 nt, Human
ccuccaccucccugcaa

SEQ ID NO: 2696022 - RNA, 15 nt, Human
ccuccaccucccugc

SEQ ID NO: 2696023 - RNA, 14 nt, Human
ccuccaccucccug

SEQ ID NO: 2696024 - RNA, 13 nt, Human
ccuccaccucccu

SEQ ID NO: 2696025 - RNA, 16 nt, Human
ccgggcguggugguga

SEQ ID NO: 2696026 - RNA, 13 nt, Human
cccacaagaaaug

SEQ ID NO: 2696027 - RNA, 20 nt, Human
cccacaagaaaugaaagcag

SEQ ID NO: 2696028 - RNA, 12 nt, Human
cccuccaccucc

SEQ ID NO: 2696029 - RNA, 14 nt, Human
cccuccaccucccu

SEQ ID NO: 2696030 - RNA, 17 nt, Human
cccuccaccucccugca

SEQ ID NO: 2696031 - RNA, 15 nt, Human
cccuccaccucccug

SEQ ID NO: 2696032 - RNA, 19 nt, Human
cccuccaccucccugcaau

SEQ ID NO: 2696033 - RNA, 15 nt, Human
cccucuccugggcag

SEQ ID NO: 2696034 - RNA, 14 nt, Human
cccucuccugggca

SEQ ID NO: 2696035 - RNA, 13 nt, Human
cccucuccugggc

SEQ ID NO: 2696036 - RNA, 12 nt, Human
cccucuccuggg

SEQ ID NO: 2696037 - RNA, 11 nt, Human
cccucuccugg

SEQ ID NO: 2696038 - RNA, 15 nt, Human
cccgugggguuccuc

SEQ ID NO: 2696039 - RNA, 22 nt, Human
ccugggcagcugccuccccucc

SEQ ID NO: 2696040 - RNA, 23 nt, Human
ccuggaaaucaggguuaguauug

SEQ ID NO: 2696041 - RNA, 11 nt, Human
ccugagcccca

SEQ ID NO: 2696042 - RNA, 16 nt, Human
ccugcaauaaaauggg

SEQ ID NO: 2696043 - RNA, 18 nt, Human
cgagcaggcuacugucag

SEQ ID NO: 2696044 - RNA, 20 nt, Human
ccuguuaaaagaugaaaaua

SEQ ID NO: 2696045 - RNA, 21 nt, Human
ccuguuaaaagaugaaaauau

SEQ ID NO: 2696046 - RNA, 14 nt, Human
ccuucggccuccau

SEQ ID NO: 2696047 - RNA, 19 nt, Human
ccuucggccuccauccuga

SEQ ID NO: 2696048 - RNA, 20 nt, Human
ccuucggccuccauccugag

SEQ ID NO: 2696049 - RNA, 12 nt, Human
ccuucagccuga

SEQ ID NO: 2696050 - RNA, 20 nt, Human
ccuugaaaacuuuaugcuaa

SEQ ID NO: 2696051 - RNA, 14 nt, Human
ccuugaugaagaag

SEQ ID NO: 2696052 - RNA, 19 nt, Human
ccuuggggcugaugcaguu

SEQ ID NO: 2696053 - RNA, 19 nt, Human
ccaguguuuuaggagcaug

SEQ ID NO: 2696054 - RNA, 14 nt, Human
ccaguuauggcuau

SEQ ID NO: 2696055 - RNA, 21 nt, Human
ccaguuauggcuauaggugcu

SEQ ID NO: 2696056 - RNA, 16 nt, Human
ccaugggacagggagg

SEQ ID NO: 2696057 - RNA, 19 nt, Human
ccaugggacagggaggacg

SEQ ID NO: 2696058 - RNA, 22 nt, Human
ccagccagcaguucagagcugc

SEQ ID NO: 2696059 - RNA, 23 nt, Human
ccagcaguucagagcugcccucu

SEQ ID NO: 2696060 - RNA, 22 nt, Human
ccagcaguucagagcugcccuc

SEQ ID NO: 2696061 - RNA, 21 nt, Human
ccagcaguucagagcugcccu

SEQ ID NO: 2696062 - RNA, 20 nt, Human
ccagcaguucagagcugccc

SEQ ID NO: 2696063 - RNA, 19 nt, Human
ccagcaguucagagcugcc

SEQ ID NO: 2696064 - RNA, 18 nt, Human
ccagcaguucagagcugc

SEQ ID NO: 2696065 - RNA, 13 nt, Human
ccagcaguucaga

SEQ ID NO: 2696066 - RNA, 14 nt, Human
ccaccucccugcaa

SEQ ID NO: 2696067 - RNA, 19 nt, Human
caugagguacugagaguga

SEQ ID NO: 2696068 - RNA, 16 nt, Human
caugagguacugagag

SEQ ID NO: 2696069 - RNA, 19 nt, Human
caugaagauguagaggaga

SEQ ID NO: 2696070 - RNA, 18 nt, Human
caugaagauguagaggag

SEQ ID NO: 2696071 - RNA, 15 nt, Human
cauauauaacaaugc

SEQ ID NO: 2696072 - RNA, 13 nt, Human
cauauauaacaau

SEQ ID NO: 2696073 - RNA, 23 nt, Human
caucccucccuccaccucccugc

SEQ ID NO: 2696074 - RNA, 22 nt, Human
caucccucccuccaccucccug

SEQ ID NO: 2696075 - RNA, 18 nt, Human
caucccuuaccugggaaa

SEQ ID NO: 2696076 - RNA, 20 nt, Human
caucccucccuccaccuccc

SEQ ID NO: 2696077 - RNA, 23 nt, Human
caugggacagggaggacgcucuc

SEQ ID NO: 2696078 - RNA, 20 nt, Human
cauggaauuggagcucgugg

SEQ ID NO: 2696079 - RNA, 20 nt, Human
caugugcuaguaauuggaaa

SEQ ID NO: 2696080 - RNA, 21 nt, Human
cauuguaaaugugcuuuuaaa

SEQ ID NO: 2696081 - RNA, 13 nt, Human
cauucuggaauaa

SEQ ID NO: 2696082 - RNA, 22 nt, Human
cauuccaacuaucucauuucca

SEQ ID NO: 2696083 - RNA, 13 nt, Human
caguccaugaaga

SEQ ID NO: 2696084 - RNA, 18 nt, Human
cagucaggaaagagaacu

SEQ ID NO: 2696085 - RNA, 15 nt, Human
cagucaggaaagaga

SEQ ID NO: 2696086 - RNA, 22 nt, Human
cagucaggaaagagaacuucca

SEQ ID NO: 2696087 - RNA, 12 nt, Human
caguagugauag

SEQ ID NO: 2696088 - RNA, 12 nt, Human
caguauggcagc

SEQ ID NO: 2696089 - RNA, 15 nt, Human
cagugagacagcucu

SEQ ID NO: 2696090 - RNA, 16 nt, Human
cagugaaagaaaauaa

SEQ ID NO: 2696091 - RNA, 20 nt, Human
cagugaaagaaaauaacaau

SEQ ID NO: 2696092 - RNA, 18 nt, Human
cagugauuaccagggacu

SEQ ID NO: 2696093 - RNA, 17 nt, Human
cagugauuaccagggac

SEQ ID NO: 2696094 - RNA, 23 nt, Human
caggaugguucccuugaugaaga

SEQ ID NO: 2696095 - RNA, 21 nt, Human
caggaugguucccuugaugaa

SEQ ID NO: 2696096 - RNA, 16 nt, Human
caggauuuuaaucuuu

SEQ ID NO: 2696097 - RNA, 20 nt, Human
caggcccccaggugccaguu

SEQ ID NO: 2696098 - RNA, 14 nt, Human
caggcccccaggug

SEQ ID NO: 2696099 - RNA, 19 nt, Human
caggcccccaggugccagu

SEQ ID NO: 2696100 - RNA, 18 nt, Human
cagggacaggauaagagg

SEQ ID NO: 2696101 - RNA, 17 nt, Human
cagggcauggcugggaa

SEQ ID NO: 2696102 - RNA, 16 nt, Human
caggggacaggauggu

SEQ ID NO: 2696103 - RNA, 11 nt, Human
caggggacagg

SEQ ID NO: 2696104 - RNA, 14 nt, Human
caggcuacugucag

SEQ ID NO: 2696105 - RNA, 19 nt, Human
caggcuagauguauguacu

SEQ ID NO: 2696106 - RNA, 13 nt, Human
caggcuagaugua

SEQ ID NO: 2696107 - RNA, 19 nt, Human
cagcaagggugaugggaaa

SEQ ID NO: 2696108 - RNA, 22 nt, Human
cagcaagggugaugggaaagca

SEQ ID NO: 2696109 - RNA, 23 nt, Human
cagcaagggugaugggaaagcau

SEQ ID NO: 2696110 - RNA, 15 nt, Human
cagauuuuccugaaa

SEQ ID NO: 2696111 - RNA, 14 nt, Human
cagauuuuccugaa

SEQ ID NO: 2696112 - RNA, 23 nt, Human
cagcaacgcaggcccccaggugc

SEQ ID NO: 2696113 - RNA, 19 nt, Human
cagcuacuugggaggcuga

SEQ ID NO: 2696114 - RNA, 16 nt, Human
cagccuaguugaucag

SEQ ID NO: 2696115 - RNA, 13 nt, Human
cagcccucagaau

SEQ ID NO: 2696116 - RNA, 16 nt, Human
cagcucuccccuucuc

SEQ ID NO: 2696117 - RNA, 20 nt, Human
cagcucugcauacucauuag

SEQ ID NO: 2696118 - RNA, 20 nt, Human
cagcugcugaaacaacaaau

SEQ ID NO: 2696119 - RNA, 21 nt, Human
cagcugcugaaacaacaaaua

SEQ ID NO: 2696120 - RNA, 18 nt, Human
cagcuguaugauucccag

SEQ ID NO: 2696121 - RNA, 18 nt, Human
caggaaccacaagacugc

SEQ ID NO: 2696122 - RNA, 23 nt, Human
cagcuuuccucaaaacuucagac

SEQ ID NO: 2696123 - RNA, 18 nt, Human
cagcuugaaacugagaug

SEQ ID NO: 2696124 - RNA, 19 nt, Human
cagcuguaugauucccagc

SEQ ID NO: 2696125 - RNA, 14 nt, Human
caggaagcugugag

SEQ ID NO: 2696126 - RNA, 13 nt, Human
caggaagcuguga

SEQ ID NO: 2696127 - RNA, 22 nt, Human
caggaagcugugagagcaguuu

SEQ ID NO: 2696128 - RNA, 16 nt, Human
caggaaguagaggagg

SEQ ID NO: 2696129 - RNA, 15 nt, Human
caggaaguagaggag

SEQ ID NO: 2696130 - RNA, 17 nt, Human
cagaugcacaugagcug

SEQ ID NO: 2696131 - RNA, 13 nt, Human
cagauccuggaaa

SEQ ID NO: 2696132 - RNA, 14 nt, Human
cagauccuggaaau

SEQ ID NO: 2696133 - RNA, 14 nt, Human
cagauaaacaguag

SEQ ID NO: 2696134 - RNA, 23 nt, Human
cagauaaauaguuuaugauucca

SEQ ID NO: 2696135 - RNA, 14 nt, Human
cagauaaucacaau

SEQ ID NO: 2696136 - RNA, 20 nt, Human
cagagccccacccucagaug

SEQ ID NO: 2696137 - RNA, 18 nt, Human
cagaaagcagaacaguga

SEQ ID NO: 2696138 - RNA, 23 nt, Human
cagaacagugauuaccagggacu

SEQ ID NO: 2696139 - RNA, 19 nt, Human
cagaaagcagaacagugau

SEQ ID NO: 2696140 - RNA, 23 nt, Human
cagaaucgcuccaccuugcagcu

SEQ ID NO: 2696141 - RNA, 21 nt, Human
cagaaucgcuccaccuugcag

SEQ ID NO: 2696142 - RNA, 19 nt, Human
cagaagcaacccaaauguu

SEQ ID NO: 2696143 - RNA, 20 nt, Human
cagaagcaacccaaauguuc

SEQ ID NO: 2696144 - RNA, 17 nt, Human
cagacauagaauuaaca

SEQ ID NO: 2696145 - RNA, 19 nt, Human
cagacauagaauuaacaca

SEQ ID NO: 2696146 - RNA, 20 nt, Human
cacccucagaugcacaugag

SEQ ID NO: 2696147 - RNA, 14 nt, Human
caccucauggaauu

SEQ ID NO: 2696148 - RNA, 12 nt, Human
caccucauggaa

SEQ ID NO: 2696149 - RNA, 11 nt, Human
caccucaugga

SEQ ID NO: 2696150 - RNA, 10 nt, Human
caccucccug

SEQ ID NO: 2696151 - RNA, 14 nt, Human
caccucccugcaau

SEQ ID NO: 2696152 - RNA, 13 nt, Human
caccucccugcaa

SEQ ID NO: 2696153 - RNA, 19 nt, Human
cacuaguauuucuaugaaa

SEQ ID NO: 2696154 - RNA, 14 nt, Human
cacuaguauuucua

SEQ ID NO: 2696155 - RNA, 17 nt, Human
cacuaagagagaaugag

SEQ ID NO: 2696156 - RNA, 21 nt, Human
cacuaaauugacacuuaaaaa

SEQ ID NO: 2696157 - RNA, 16 nt, Human
cacucaaaucaagaaa

SEQ ID NO: 2696158 - RNA, 15 nt, Human
cacgcacacugucug

SEQ ID NO: 2696159 - RNA, 22 nt, Human
cacgagcaggcuacugucagcu

SEQ ID NO: 2696160 - RNA, 17 nt, Human
cacgagcaggcuacugu

SEQ ID NO: 2696161 - RNA, 19 nt, Human
cacgagcaggcuacuguca

SEQ ID NO: 2696162 - RNA, 20 nt, Human
cacgagcaggcuacugucag

SEQ ID NO: 2696163 - RNA, 13 nt, Human
cacuaaacaaaga

SEQ ID NO: 2696164 - RNA, 22 nt, Human
cacguucuuacuaguuucccuu

SEQ ID NO: 2696165 - RNA, 20 nt, Human
cacugccuucucaacuccaa

SEQ ID NO: 2696166 - RNA, 21 nt, Human
cacugacuucuaaguaaaacc

SEQ ID NO: 2696167 - RNA, 14 nt, Human
cacugacuucuaag

SEQ ID NO: 2696168 - RNA, 15 nt, Human
cacugacuucuaagu

SEQ ID NO: 2696169 - RNA, 16 nt, Human
cacugacuucuaagua

SEQ ID NO: 2696170 - RNA, 20 nt, Human
cacugacuucuaaguaaaac

SEQ ID NO: 2696171 - RNA, 14 nt, Human
cacugucaagauga

SEQ ID NO: 2696172 - RNA, 24 nt, Human
cacuguggguagacacacaugaag

SEQ ID NO: 2696173 - RNA, 22 nt, Human
cacuguggguagacacacauga

SEQ ID NO: 2696174 - RNA, 19 nt, Human
cacuguggguagacacaca

SEQ ID NO: 2696175 - RNA, 15 nt, Human
cacuuggucugugag

SEQ ID NO: 2696176 - RNA, 20 nt, Human
cacuugaacccgggaggcag

SEQ ID NO: 2696177 - RNA, 21 nt, Human
cacuugaacccgggaggcaga

SEQ ID NO: 2696178 - RNA, 23 nt, Human
cacuugaacccgggaggcagagg

SEQ ID NO: 2696179 - RNA, 22 nt, Human
gaauaauccuaaacauaugaau

SEQ ID NO: 2696180 - RNA, 16 nt, Human
auuacauuuguauaaa

SEQ ID NO: 2696181 - RNA, 13 nt, Human
auuacuguaagaa

SEQ ID NO: 2696182 - RNA, 16 nt, Human
caugggacagggagga

SEQ ID NO: 2696183 - RNA, 21 nt, Human
auuuccaagcaaguauuagaa

SEQ ID NO: 2696184 - RNA, 13 nt, Human
gccaaauauaaau

SEQ ID NO: 2696185 - RNA, 22 nt, Human
gacagugaaagaaaauaacaau

SEQ ID NO: 2696186 - RNA, 20 nt, Human
gacaaggaaaaaauaacaau

SEQ ID NO: 2696187 - RNA, 21 nt, Human parainfluenza virus 1 strain Washington/1964
uauccagagccaacucaaaaa

SEQ ID NO: 2696188 - RNA, 21 nt, Human parainfluenza virus 1 strain Washington/1964
cgcauguuaaaaucugcaaau

SEQ ID NO: 2696189 - RNA, 10 nt, Human parainfluenza virus 1 strain Washington/1964
ugauggccaa

SEQ ID NO: 2696190 - RNA, 23 nt, Human parainfluenza virus 1 strain Washington/1964
caaaaucaauauccagagccaac

SEQ ID NO: 2696191 - RNA, 16 nt, Human parainfluenza virus 1 strain Washington/1964
ucacuugagaauaaag

SEQ ID NO: 2696192 - RNA, 20 nt, Human parainfluenza virus 1 strain Washington/1964
ugaaaucacaacaugaauuu

SEQ ID NO: 2696193 - RNA, 18 nt, Human parainfluenza virus 1 strain Washington/1964
aagaacgaagagucagca

SEQ ID NO: 2696194 - RNA, 18 nt, Human parainfluenza virus 1 strain Washington/1964
cuauaucaauuaugugaa

SEQ ID NO: 2696195 - RNA, 15 nt, Human parainfluenza virus 1 strain Washington/1964
aucaauauccagagc

SEQ ID NO: 2696196 - RNA, 18 nt, Human parainfluenza virus 1 strain Washington/1964
acuucaccaaucaggugu

SEQ ID NO: 2696197 - RNA, 22 nt, Human parainfluenza virus 1 strain Washington/1964
agagccaacucaaaaagcuccc

SEQ ID NO: 2696198 - RNA, 13 nt, Human parainfluenza virus 1 strain Washington/1964
aaaucuauccaca

SEQ ID NO: 2696199 - RNA, 13 nt, Human parainfluenza virus 1 strain Washington/1964
uaaugacacccau

SEQ ID NO: 2696200 - RNA, 14 nt, Human parainfluenza virus 1 strain Washington/1964
cugcaaauuacaaa

SEQ ID NO: 2696201 - RNA, 14 nt, Human parainfluenza virus 1 strain Washington/1964
caacucaaaaagcu

SEQ ID NO: 2696202 - RNA, 18 nt, Human parainfluenza virus 1 strain Washington/1964
cuaaaucguaccauuaau

SEQ ID NO: 2696203 - RNA, 16 nt, Human parainfluenza virus 1 strain Washington/1964
cccuuuaacugacuca

SEQ ID NO: 2696204 - RNA, 21 nt, Human parainfluenza virus 1 strain Washington/1964
ugagccucaagcauccaaugc

SEQ ID NO: 2696205 - RNA, 15 nt, Human parainfluenza virus 1 strain Washington/1964
cuucaccaaucaggu

SEQ ID NO: 2696206 - RNA, 22 nt, Human parainfluenza virus 1 strain Washington/1964
gagccaacucaaaaagcucccu

SEQ ID NO: 2696207 - RNA, 16 nt, Human parainfluenza virus 1 strain Washington/1964
aaucuacaauuucaac

SEQ ID NO: 2696208 - RNA, 15 nt, Human parainfluenza virus 1 strain Washington/1964
uccacaacuucacca

SEQ ID NO: 2696209 - RNA, 20 nt, Human parainfluenza virus 1 strain Washington/1964
cagaucaaaaguaagaaaaa

SEQ ID NO: 2696210 - RNA, 12 nt, Human parainfluenza virus 1 strain Washington/1964
gucuucacaaaa

SEQ ID NO: 2696211 - RNA, 18 nt, Human parainfluenza virus 1 strain Washington/1964
aucaagacccaacacuau

SEQ ID NO: 2696212 - RNA, 18 nt, Human parainfluenza virus 1 strain Washington/1964
aaccagcaaucaaaauca

SEQ ID NO: 2696213 - RNA, 16 nt, Human parainfluenza virus 1 strain Washington/1964
auacaaucaguucaaa

SEQ ID NO: 2696214 - RNA, 17 nt, Human parainfluenza virus 1 strain Washington/1964
caauauccagagccaac

SEQ ID NO: 2696215 - RNA, 20 nt, Human parainfluenza virus 1 strain Washington/1964
ugagagaugacaucaaaaau

SEQ ID NO: 2696216 - RNA, 21 nt, Human parainfluenza virus 1 strain Washington/1964
acuuggacaauagaagccaga

SEQ ID NO: 2696217 - RNA, 14 nt, Human parainfluenza virus 1 strain Washington/1964
uaugacaaauagaa

SEQ ID NO: 2696218 - RNA, 18 nt, Human parainfluenza virus 1 strain Washington/1964
ggacaauagaagccagau

SEQ ID NO: 2696219 - RNA, 19 nt, Human parainfluenza virus 1 strain Washington/1964
gcucuaggaggucaagagu

SEQ ID NO: 2696220 - RNA, 13 nt, Human parainfluenza virus 1 strain Washington/1964
aucaguucaaaua

SEQ ID NO: 2696221 - RNA, 15 nt, Human parainfluenza virus 1 strain Washington/1964
cgguacuagaagaaa

SEQ ID NO: 2696222 - RNA, 23 nt, Human parainfluenza virus 1 strain Washington/1964
cucaauaaugacacccauuagcu

SEQ ID NO: 2696223 - RNA, 14 nt, Human parainfluenza virus 1 strain Washington/1964
caauauccagagcc

SEQ ID NO: 2696224 - RNA, 15 nt, Human parainfluenza virus 1 strain Washington/1964
uguaaugaaaucaca

SEQ ID NO: 2696225 - RNA, 19 nt, Human parainfluenza virus 1 strain Washington/1964
ccaacacuauaucaauuau

SEQ ID NO: 2696226 - RNA, 13 nt, Human parainfluenza virus 1 strain Washington/1964
cuagaagaaaaca

SEQ ID NO: 2696227 - RNA, 20 nt, Human parainfluenza virus 1 strain Washington/1964
gaagccagaucaaaaguaag

SEQ ID NO: 2696228 - RNA, 17 nt, Human parainfluenza virus 1 strain Washington/1964
augacaaauagaauaag

SEQ ID NO: 2696229 - RNA, 13 nt, Human parainfluenza virus 1 strain Washington/1964
cuacaauuucaac

SEQ ID NO: 2696230 - RNA, 20 nt, Human parainfluenza virus 1 strain Washington/1964
aucguaccauuaaucaaaua

SEQ ID NO: 2696231 - RNA, 13 nt, Human parainfluenza virus 1 strain Washington/1964
auauccagagcca

SEQ ID NO: 2696232 - RNA, 17 nt, Human parainfluenza virus 1 strain Washington/1964
gcaaucaaaaucaauau

SEQ ID NO: 2696233 - RNA, 19 nt, Human parainfluenza virus 1 strain Washington/1964
cuuggacaauagaagccag

SEQ ID NO: 2696234 - RNA, 19 nt, Human parainfluenza virus 1 strain Washington/1964
ugaagaugccguucuacaa

SEQ ID NO: 2696235 - RNA, 12 nt, Human parainfluenza virus 1 strain Washington/1964
uauccagagcca

SEQ ID NO: 2696236 - RNA, 15 nt, Human parainfluenza virus 1 strain Washington/1964
aaucaguucaaauaa

SEQ ID NO: 2696237 - RNA, 14 nt, Human parainfluenza virus 1 strain Washington/1964
cauuguagcauaca

SEQ ID NO: 2696238 - RNA, 21 nt, Human parainfluenza virus 1 strain Washington/1964
ggacaauagaagccagaucaa

SEQ ID NO: 2696239 - RNA, 19 nt, Human parainfluenza virus 1 strain Washington/1964
uagaagccagaucaaaagu

SEQ ID NO: 2696240 - RNA, 20 nt, Human parainfluenza virus 1 strain Washington/1964
uucacaaaagggaaagacaa

SEQ ID NO: 2696241 - RNA, 20 nt, Human parainfluenza virus 1 strain Washington/1964
agaacgaagagucagcagcc

SEQ ID NO: 2696242 - RNA, 22 nt, Human parainfluenza virus 1 strain Washington/1964
aauauccagagccaacucaaaa

SEQ ID NO: 2696243 - RNA, 14 nt, Human parainfluenza virus 1 strain Washington/1964
auauaauuacagau

SEQ ID NO: 2696244 - RNA, 20 nt, Human parainfluenza virus 1 strain Washington/1964
caauuaugugaaaaccagau

SEQ ID NO: 2696245 - RNA, 16 nt, Human parainfluenza virus 1 strain Washington/1964
ggacaauagaagccag

SEQ ID NO: 2696246 - RNA, 20 nt, Human parainfluenza virus 1 strain Washington/1964
ccagaucaaaaguaagaaaa

SEQ ID NO: 2696247 - RNA, 17 nt, Human parainfluenza virus 1 strain Washington/1964
ucagcagccacuccaaa

SEQ ID NO: 2696248 - RNA, 23 nt, Human parainfluenza virus 1 strain Washington/1964
acuuaaacaaauucaagaggaaa

SEQ ID NO: 2696249 - RNA, 13 nt, Human parainfluenza virus 1 strain Washington/1964
cucaucuuuauua

SEQ ID NO: 2696250 - RNA, 18 nt, Human parainfluenza virus 1 strain Washington/1964
caauuucaaccagcaauc

SEQ ID NO: 2696251 - RNA, 13 nt, Human parainfluenza virus 1 strain Washington/1964
auuucaaccagca

SEQ ID NO: 2696252 - RNA, 16 nt, Human parainfluenza virus 1 strain Washington/1964
gagccucaagcaucca

SEQ ID NO: 2696253 - RNA, 20 nt, Human parainfluenza virus 1 strain Washington/1964
gaucaagacccaacacuaua

SEQ ID NO: 2696254 - RNA, 16 nt, Human parainfluenza virus 1 strain Washington/1964
uggacaauagaagcca

SEQ ID NO: 2696255 - RNA, 16 nt, Human parainfluenza virus 1 strain Washington/1964
gagagaugacaucaaa

SEQ ID NO: 2696256 - RNA, 16 nt, Human parainfluenza virus 1 strain Washington/1964
guuuaaagagaugagu

SEQ ID NO: 2696257 - RNA, 21 nt, Human parainfluenza virus 1 strain Washington/1964
uaccaacccaaguccagagcu

SEQ ID NO: 2696258 - RNA, 17 nt, Human parainfluenza virus 1 strain Washington/1964
aauauccagagccaacu

SEQ ID NO: 2696259 - RNA, 16 nt, Human parainfluenza virus 1 strain Washington/1964
cugaaaaacacacucu

SEQ ID NO: 2696260 - RNA, 12 nt, Human parainfluenza virus 1 strain Washington/1964
caugaauagaca

SEQ ID NO: 2696261 - RNA, 19 nt, Human parainfluenza virus 1 strain Washington/1964
aucaaguacauuguagcau

SEQ ID NO: 2696262 - RNA, 15 nt, Human parainfluenza virus 1 strain Washington/1964
aauuucaaccagcaa

SEQ ID NO: 2696263 - RNA, 21 nt, Human parainfluenza virus 1 strain Washington/1964
auagaagccagaucaaaagua

SEQ ID NO: 2696264 - RNA, 14 nt, Human parainfluenza virus 1 strain Washington/1964
aacaagugaaaaua

SEQ ID NO: 2696265 - RNA, 23 nt, Human parainfluenza virus 1 strain Washington/1964
uacuuggacaauagaagccagau

SEQ ID NO: 2696266 - RNA, 14 nt, Human parainfluenza virus 1 strain Washington/1964
uguagcauacauac

SEQ ID NO: 2696267 - RNA, 20 nt, Human parainfluenza virus 1 strain Washington/1964
aaagcucccucaaaacaauu

SEQ ID NO: 2696268 - RNA, 20 nt, Human parainfluenza virus 1 strain Washington/1964
ucggaauaccaaaaagaaca

SEQ ID NO: 2696269 - RNA, 12 nt, Human parainfluenza virus 1 strain Washington/1964
uacaauuucaac

SEQ ID NO: 2696270 - RNA, 14 nt, Human parainfluenza virus 1 strain Washington/1964
cagggaucuucaca

SEQ ID NO: 2696271 - RNA, 20 nt, Human parainfluenza virus 1 strain Washington/1964
acuucaccaaucagguguac

SEQ ID NO: 2696272 - RNA, 17 nt, Human parainfluenza virus 1 strain Washington/1964
cacuccucaauaaugac

SEQ ID NO: 2696273 - RNA, 21 nt, Human parainfluenza virus 1 strain Washington/1964
caaagcaugaauagacauuua

SEQ ID NO: 2696274 - RNA, 20 nt, Human parainfluenza virus 1 strain Washington/1964
acuauaucaauuaugugaaa

SEQ ID NO: 2696275 - RNA, 23 nt, Human parainfluenza virus 1 strain Washington/1964
uccguccacugaaaaacacacuc

SEQ ID NO: 2696276 - RNA, 13 nt, Human parainfluenza virus 1 strain Washington/1964
augaguuaacaag

SEQ ID NO: 2696277 - RNA, 21 nt, Human parainfluenza virus 1 strain Washington/1964
ccucuaagcagaguagagaag

SEQ ID NO: 2696278 - RNA, 21 nt, Human parainfluenza virus 1 strain Washington/1964
gaaucuacaauuucaaccagc

SEQ ID NO: 2696279 - RNA, 20 nt, Human parainfluenza virus 1 strain Washington/1964
acaauuucaaccagcaauca

SEQ ID NO: 2696280 - RNA, 22 nt, Human parainfluenza virus 1 strain Washington/1964
gagucagcagccacuccaaaga

SEQ ID NO: 2696281 - RNA, 24 nt, Human parainfluenza virus 1 strain Washington/1964
gagccaacucaaaaagcucccuca

SEQ ID NO: 2696282 - RNA, 14 nt, Human parainfluenza virus 1 strain Washington/1964
gauacuacaagguc

SEQ ID NO: 2696283 - RNA, 16 nt, Human parainfluenza virus 1 strain Washington/1964
aaggucaaaaagacaa

SEQ ID NO: 2696284 - RNA, 21 nt, Human parainfluenza virus 1 strain Washington/1964
cagagccaacucaaaaagcuc

SEQ ID NO: 2696285 - RNA, 20 nt, Human parainfluenza virus 1 strain Washington/1964
gcauacauacaacaaucaaa

SEQ ID NO: 2696286 - RNA, 13 nt, Human parainfluenza virus 1 strain Washington/1964
cuuuauuaucuaa

SEQ ID NO: 2696287 - RNA, 14 nt, Human parainfluenza virus 1 strain Washington/1964
uacaaagaaaugac

SEQ ID NO: 2696288 - RNA, 21 nt, Human parainfluenza virus 1 strain Washington/1964
ucaaaaucaauauccagagcc

SEQ ID NO: 2696289 - RNA, 12 nt, Human parainfluenza virus 1 strain Washington/1964
caaguaagaaaa

SEQ ID NO: 2696290 - RNA, 20 nt, Human parainfluenza virus 1 strain Washington/1964
acuuggacaauagaagccag

SEQ ID NO: 2696291 - RNA, 21 nt, Human parainfluenza virus 1 strain Washington/1964
caauuucaaccagcaaucaaa

SEQ ID NO: 2696292 - RNA, 15 nt, Human parainfluenza virus 1 strain Washington/1964
agaagccagaucaaa

SEQ ID NO: 2696293 - RNA, 16 nt, Human parainfluenza virus 1 strain Washington/1964
caaaaagcucccucaa

SEQ ID NO: 2696294 - RNA, 12 nt, Human parainfluenza virus 1 strain Washington/1964
ucagguguacaa

SEQ ID NO: 2696295 - RNA, 15 nt, Human parainfluenza virus 1 strain Washington/1964
aauuaugugaaaacc

SEQ ID NO: 2696296 - RNA, 16 nt, Human parainfluenza virus 1 strain Washington/1964
cuuggacaauagaagc

SEQ ID NO: 2696297 - RNA, 17 nt, Human parainfluenza virus 1 strain Washington/1964
aaucacuugagaauaaa

SEQ ID NO: 2696298 - RNA, 14 nt, Human parainfluenza virus 1 strain Washington/1964
caauagaagccaga

SEQ ID NO: 2696299 - RNA, 20 nt, Human parainfluenza virus 1 strain Washington/1964
guuaaaaucugcaaauuaca

SEQ ID NO: 2696300 - RNA, 15 nt, Human parainfluenza virus 1 strain Washington/1964
ucugcaaauuacaaa

SEQ ID NO: 2696301 - RNA, 24 nt, Human parainfluenza virus 1 strain Washington/1964
gcuugaagaugccguucuacaaag

SEQ ID NO: 2696302 - RNA, 21 nt, Human parainfluenza virus 1 strain Washington/1964
aaucaaaucuauccacaacuu

SEQ ID NO: 2696303 - RNA, 15 nt, Human parainfluenza virus 1 strain Washington/1964
cagagccaacucaaa

SEQ ID NO: 2696304 - RNA, 11 nt, Human parainfluenza virus 1 strain Washington/1964
ucuucacaaac

SEQ ID NO: 2696305 - RNA, 12 nt, Human parainfluenza virus 1 strain Washington/1964
auuaaucaaaua

SEQ ID NO: 2696306 - RNA, 15 nt, Human parainfluenza virus 1 strain Washington/1964
uuaugugaaaaccag

SEQ ID NO: 2696307 - RNA, 22 nt, Human parainfluenza virus 1 strain Washington/1964
aaucuacaauuucaaccagcaa

SEQ ID NO: 2696308 - RNA, 18 nt, Human parainfluenza virus 1 strain Washington/1964
acuugauaagagaggaug

SEQ ID NO: 2696309 - RNA, 17 nt, Human parainfluenza virus 1 strain Washington/1964
uuggacaauagaagcca

SEQ ID NO: 2696310 - RNA, 23 nt, Human parainfluenza virus 1 strain Washington/1964
caaggucaccaucagucuucaca

SEQ ID NO: 2696311 - RNA, 15 nt, Human parainfluenza virus 1 strain Washington/1964
gaucaaaaguaagaa

SEQ ID NO: 2696312 - RNA, 23 nt, Human parainfluenza virus 1 strain Washington/1964
guaccauuaaucaaauacagauc

SEQ ID NO: 2696313 - RNA, 16 nt, Human parainfluenza virus 1 strain Washington/1964
cagagccaacucaaaa

SEQ ID NO: 2696314 - RNA, 18 nt, Human parainfluenza virus 1 strain Washington/1964
uggacaauagaagccaga

SEQ ID NO: 2696315 - RNA, 21 nt, Human parainfluenza virus 1 strain Washington/1964
aggauacuuggacaauagaag

SEQ ID NO: 2696316 - RNA, 13 nt, Human parainfluenza virus 1 strain Washington/1964
gagccaacucaaa

SEQ ID NO: 2696317 - RNA, 21 nt, Human parainfluenza virus 1 strain Washington/1964
aauucgauacaaucaguucaa

SEQ ID NO: 2696318 - RNA, 20 nt, Human parainfluenza virus 1 strain Washington/1964
ccaagagguuaaaaauguaa

SEQ ID NO: 2696319 - RNA, 19 nt, Human parainfluenza virus 1 strain Washington/1964
agagccaacucaaaaagcu

SEQ ID NO: 2696320 - RNA, 23 nt, Human parainfluenza virus 1 strain Washington/1964
aaaaagcucccucaaaacaauua

SEQ ID NO: 2696321 - RNA, 19 nt, Human parainfluenza virus 1 strain Washington/1964
guguacaacaaguaagaaa

SEQ ID NO: 2696322 - RNA, 14 nt, Human parainfluenza virus 1 strain Washington/1964
auccagagccaacu

SEQ ID NO: 2696323 - RNA, 17 nt, Human parainfluenza virus 1 strain Washington/1964
ccagcaaucaaaaucaa

SEQ ID NO: 2696324 - RNA, 19 nt, Human parainfluenza virus 1 strain Washington/1964
aggucaaaaagacaagguu

SEQ ID NO: 2696325 - RNA, 17 nt, Human parainfluenza virus 1 strain Washington/1964
agccagaucaaaaguaa

SEQ ID NO: 2696326 - RNA, 22 nt, Human parainfluenza virus 1 strain Washington/1964
uggaagcucuaggaggucaaga

SEQ ID NO: 2696327 - RNA, 18 nt, Human parainfluenza virus 1 strain Washington/1964
gucaccaucagucuucac

SEQ ID NO: 2696328 - RNA, 15 nt, Human parainfluenza virus 1 strain Washington/1964
agaaaacaacaauga

SEQ ID NO: 2696329 - RNA, 22 nt, Human parainfluenza virus 1 strain Washington/1964
uaccaaaaagaacagaacucac

SEQ ID NO: 2696330 - RNA, 22 nt, Human parainfluenza virus 1 strain Washington/1964
caacaaucaaaucuauccacaa

SEQ ID NO: 2696331 - RNA, 18 nt, Human parainfluenza virus 1 strain Washington/1964
cucaaaacaauuaagaaa

SEQ ID NO: 2696332 - RNA, 16 nt, Human parainfluenza virus 1 strain Washington/1964
cuaguuaucgaaaaca

SEQ ID NO: 2696333 - RNA, 20 nt, Human parainfluenza virus 1 strain Washington/1964
auacauacaacaaucaaauc

SEQ ID NO: 2696334 - RNA, 14 nt, Human parainfluenza virus 1 strain Washington/1964
aucaaaaucaauau

SEQ ID NO: 2696335 - RNA, 21 nt, Human parainfluenza virus 1 strain Washington/1964
aucaaaucuauccacaacuuc

SEQ ID NO: 2696336 - RNA, 19 nt, Human parainfluenza virus 1 strain Washington/1964
ccaacucaaaaagcucccu

SEQ ID NO: 2696337 - RNA, 23 nt, Human parainfluenza virus 1 strain Washington/1964
aucuacaauuucaaccagcaauc

SEQ ID NO: 2696338 - RNA, 19 nt, Human parainfluenza virus 1 strain Washington/1964
aagaugccguucuacaaag

SEQ ID NO: 2696339 - RNA, 14 nt, Human parainfluenza virus 1 strain Washington/1964
augagccucaagca

SEQ ID NO: 2696340 - RNA, 23 nt, Human parainfluenza virus 1 strain Washington/1964
gagccaacucaaaaagcucccuc

SEQ ID NO: 2696341 - RNA, 22 nt, Human parainfluenza virus 1 strain Washington/1964
ucagcagccacuccaaagaaca

SEQ ID NO: 2696342 - RNA, 15 nt, Human parainfluenza virus 1 strain Washington/1964
uacuuaaacaaauuc

SEQ ID NO: 2696343 - RNA, 19 nt, Human parainfluenza virus 1 strain Washington/1964
acucaaaaagcucccucaa

SEQ ID NO: 2696344 - RNA, 17 nt, Human parainfluenza virus 1 strain Washington/1964
gaaucuacaauuucaac

SEQ ID NO: 2696345 - RNA, 18 nt, Human parainfluenza virus 1 strain Washington/1964
cagaucaaaaguaagaaa

SEQ ID NO: 2696346 - RNA, 14 nt, Human parainfluenza virus 1 strain Washington/1964
uuaaucaaauacag

SEQ ID NO: 2696347 - RNA, 12 nt, Human parainfluenza virus 1 strain Washington/1964
ucaaguacauug

SEQ ID NO: 2696348 - RNA, 19 nt, Human parainfluenza virus 1 strain Washington/1964
ucccucaaaacaauuaaga

SEQ ID NO: 2696349 - RNA, 19 nt, Human parainfluenza virus 1 strain Washington/1964
gagccaacucaaaaagcuc

SEQ ID NO: 2696350 - RNA, 13 nt, Human parainfluenza virus 1 strain Washington/1964
ucuacaauuucaa

SEQ ID NO: 2696351 - RNA, 16 nt, Human parainfluenza virus 1 strain Washington/1964
auuucaaccagcaauc

SEQ ID NO: 2696352 - RNA, 13 nt, Human parainfluenza virus 1 strain Washington/1964
uauccagagccaa

SEQ ID NO: 2696353 - RNA, 16 nt, Human parainfluenza virus 1 strain Washington/1964
gugauacuacaagguc

SEQ ID NO: 2696354 - RNA, 20 nt, Human parainfluenza virus 1 strain Washington/1964
acaguccucuaagcagagua

SEQ ID NO: 2696355 - RNA, 16 nt, Human parainfluenza virus 1 strain Washington/1964
acaauagaagccagau

SEQ ID NO: 2696356 - RNA, 21 nt, Human parainfluenza virus 1 strain Washington/1964
ccaacucaaaaagcucccuca

SEQ ID NO: 2696357 - RNA, 18 nt, Human parainfluenza virus 1 strain Washington/1964
aaaucaauauccagagcc

SEQ ID NO: 2696358 - RNA, 13 nt, Human parainfluenza virus 1 strain Washington/1964
aucagucuucaca

SEQ ID NO: 2696359 - RNA, 20 nt, Human parainfluenza virus 1 strain Washington/1964
aauauccagagccaacucaa

SEQ ID NO: 2696360 - RNA, 18 nt, Human parainfluenza virus 1 strain Washington/1964
cagugauacuacaagguc

SEQ ID NO: 2696361 - RNA, 15 nt, Human parainfluenza virus 1 strain Washington/1964
cuucucaucuuuauu

SEQ ID NO: 2696362 - RNA, 13 nt, Human parainfluenza virus 1 strain Washington/1964
cagagccaacuca

SEQ ID NO: 2696363 - RNA, 14 nt, Human parainfluenza virus 1 strain Washington/1964
ucuauccacacucc

SEQ ID NO: 2696364 - RNA, 15 nt, Human parainfluenza virus 1 strain Washington/1964
ccagagccaacucaa

SEQ ID NO: 2696365 - RNA, 15 nt, Human parainfluenza virus 1 strain Washington/1964
caaucaaaaucaaua

SEQ ID NO: 2696366 - RNA, 22 nt, Human parainfluenza virus 1 strain Washington/1964
aacacuauaucaauuaugugaa

SEQ ID NO: 2696367 - RNA, 22 nt, Human parainfluenza virus 1 strain Washington/1964
acuccucaauaaugacacccau

SEQ ID NO: 2696368 - RNA, 16 nt, Human parainfluenza virus 1 strain Washington/1964
ugacaaauagaauaag

SEQ ID NO: 2696369 - RNA, 13 nt, Human parainfluenza virus 1 strain Washington/1964
caaauagaauaag

SEQ ID NO: 2696370 - RNA, 22 nt, Human parainfluenza virus 1 strain Washington/1964
acacuauaucaauuaugugaaa

SEQ ID NO: 2696371 - RNA, 15 nt, Human parainfluenza virus 1 strain Washington/1964
uaaaaucugcaaauu

SEQ ID NO: 2696372 - RNA, 22 nt, Human parainfluenza virus 1 strain Washington/1964
ugugaaaaccagauaugaugua

SEQ ID NO: 2696373 - RNA, 14 nt, Human parainfluenza virus 1 strain Washington/1964
ucuucucaucuuua

SEQ ID NO: 2696374 - RNA, 17 nt, Human parainfluenza virus 1 strain Washington/1964
cauuaaucaaauacaga

SEQ ID NO: 2696375 - RNA, 19 nt, Human parainfluenza virus 1 strain Washington/1964
cuuaaacaaauucaagagg

SEQ ID NO: 2696376 - RNA, 23 nt, Human parainfluenza virus 1 strain Washington/1964
auacuuggacaauagaagccaga

SEQ ID NO: 2696377 - RNA, 22 nt, Human parainfluenza virus 1 strain Washington/1964
ucccucaaaacaauuaagaaaa

SEQ ID NO: 2696378 - RNA, 14 nt, Human parainfluenza virus 1 strain Washington/1964
aacaaagcaugaau

SEQ ID NO: 2696379 - RNA, 16 nt, Human parainfluenza virus 1 strain Washington/1964
ucaauauccagagcca

SEQ ID NO: 2696380 - RNA, 14 nt, Human parainfluenza virus 1 strain Washington/1964
acaacaaacaaugc

SEQ ID NO: 2696381 - RNA, 21 nt, Human parainfluenza virus 1 strain Washington/1964
acuccucaauaaugacaccca

SEQ ID NO: 2696382 - RNA, 18 nt, Human parainfluenza virus 1 strain Washington/1964
aaagcaugaauagacauu

SEQ ID NO: 2696383 - RNA, 17 nt, Human parainfluenza virus 1 strain Washington/1964
agugauacuacaagguc

SEQ ID NO: 2696384 - RNA, 23 nt, Human parainfluenza virus 1 strain Washington/1964
auuucaaccagcaaucaaaauca

SEQ ID NO: 2696385 - RNA, 21 nt, Human parainfluenza virus 1 strain Washington/1964
gaaaucccuuuaacugacuca

SEQ ID NO: 2696386 - RNA, 17 nt, Human parainfluenza virus 1 strain Washington/1964
auccagggaucuucaca

SEQ ID NO: 2696387 - RNA, 17 nt, Human parainfluenza virus 1 strain Washington/1964
gucaaaaagacaagguu

SEQ ID NO: 2696388 - RNA, 21 nt, Human parainfluenza virus 1 strain Washington/1964
aaaccagauaugauguauaaa

SEQ ID NO: 2696389 - RNA, 19 nt, Human parainfluenza virus 1 strain Washington/1964
caacucaaaaagcucccuc

SEQ ID NO: 2696390 - RNA, 17 nt, Human parainfluenza virus 1 strain Washington/1964
aaaguccaccaacuccc

SEQ ID NO: 2696391 - RNA, 17 nt, Human parainfluenza virus 1 strain Washington/1964
aaccagcaaucaaaauc

SEQ ID NO: 2696392 - RNA, 21 nt, Human parainfluenza virus 1 strain Washington/1964
aaaaccagauaugauguauaa

SEQ ID NO: 2696393 - RNA, 18 nt, Human parainfluenza virus 1 strain Washington/1964
caacucaaaaagcucccu

SEQ ID NO: 2696394 - RNA, 14 nt, Human parainfluenza virus 1 strain Washington/1964
aaucccuuuaacug

SEQ ID NO: 2696395 - RNA, 14 nt, Human parainfluenza virus 1 strain Washington/1964
uccagagccaacuc

SEQ ID NO: 2696396 - RNA, 14 nt, Human parainfluenza virus 1 strain Washington/1964
aaucaauauccaga

SEQ ID NO: 2696397 - RNA, 14 nt, Human parainfluenza virus 1 strain Washington/1964
gcaaucaaaaucaa

SEQ ID NO: 2696398 - RNA, 13 nt, Human parainfluenza virus 1 strain Washington/1964
aaacaauuaagaa

SEQ ID NO: 2696399 - RNA, 21 nt, Human parainfluenza virus 1 strain Washington/1964
ucaaaucuauccacaacuuca

SEQ ID NO: 2696400 - RNA, 20 nt, Human parainfluenza virus 1 strain Washington/1964
gccagaucaaaaguaagaaa

SEQ ID NO: 2696401 - RNA, 23 nt, Human parainfluenza virus 1 strain Washington/1964
guuaaaaucugcaaauuacaaag

SEQ ID NO: 2696402 - RNA, 22 nt, Human parainfluenza virus 1 strain Washington/1964
uaacuaaacaugaaucuacaau

SEQ ID NO: 2696403 - RNA, 20 nt, Human parainfluenza virus 1 strain Washington/1964
aaaagcucccucaaaacaau

SEQ ID NO: 2696404 - RNA, 16 nt, Human parainfluenza virus 1 strain Washington/1964
auuuauaugacaaaua

SEQ ID NO: 2696405 - RNA, 14 nt, Human parainfluenza virus 1 strain Washington/1964
uacaauuucaacca

SEQ ID NO: 2696406 - RNA, 19 nt, Human parainfluenza virus 1 strain Washington/1964
acuuggacaauagaagcca

SEQ ID NO: 2696407 - RNA, 19 nt, Human parainfluenza virus 1 strain Washington/1964
aauuuaaaaacaaagcaug

SEQ ID NO: 2696408 - RNA, 17 nt, Human parainfluenza virus 1 strain Washington/1964
caugaauagacauuuau

SEQ ID NO: 2696409 - RNA, 14 nt, Human parainfluenza virus 1 strain Washington/1964
uguaaugaaaucac

SEQ ID NO: 2696410 - RNA, 21 nt, Human parainfluenza virus 1 strain Washington/1964
agaaggcuuacaucaaauccc

SEQ ID NO: 2696411 - RNA, 17 nt, Human parainfluenza virus 1 strain Washington/1964
augaaaucacaacauga

SEQ ID NO: 2696412 - RNA, 21 nt, Human parainfluenza virus 1 strain Washington/1964
uucaaccagcaaucaaaauca

SEQ ID NO: 2696413 - RNA, 20 nt, Human parainfluenza virus 1 strain Washington/1964
uaaacaugaaucuacaauuu

SEQ ID NO: 2696414 - RNA, 16 nt, Human parainfluenza virus 1 strain Washington/1964
cucaaaacaauuaaga

SEQ ID NO: 2696415 - RNA, 13 nt, Human parainfluenza virus 1 strain Washington/1964
ccagaucaaaagu

SEQ ID NO: 2696416 - RNA, 21 nt, Human parainfluenza virus 1 strain Washington/1964
cucccucaaaacaauuaagaa

SEQ ID NO: 2696417 - RNA, 19 nt, Human parainfluenza virus 1 strain Washington/1964
cgacgcaaccgcaaaugaa

SEQ ID NO: 2696418 - RNA, 19 nt, Human parainfluenza virus 1 strain Washington/1964
acaacaaucaaaucuaucc

SEQ ID NO: 2696419 - RNA, 15 nt, Human parainfluenza virus 1 strain Washington/1964
uuuauaugacaaaua

SEQ ID NO: 2696420 - RNA, 12 nt, Human parainfluenza virus 1 strain Washington/1964
ugaaucuacaau

SEQ ID NO: 2696421 - RNA, 21 nt, Human parainfluenza virus 1 strain Washington/1964
uguagcauacauacaacaauc

SEQ ID NO: 2696422 - RNA, 22 nt, Human parainfluenza virus 1 strain Washington/1964
cuugagaauaaaguagaagaaa

SEQ ID NO: 2696423 - RNA, 20 nt, Human parainfluenza virus 1 strain Washington/1964
uaccauuaaucaaauacaga

SEQ ID NO: 2696424 - RNA, 16 nt, Human parainfluenza virus 1 strain Washington/1964
ucaaccagcaaucaaa

SEQ ID NO: 2696425 - RNA, 18 nt, Human parainfluenza virus 1 strain Washington/1964
auagacauuuauaugaca

SEQ ID NO: 2696426 - RNA, 21 nt, Human parainfluenza virus 1 strain Washington/1964
caggauacuuggacaauagaa

SEQ ID NO: 2696427 - RNA, 19 nt, Human parainfluenza virus 1 strain Washington/1964
acaauuucaaccagcaauc

SEQ ID NO: 2696428 - RNA, 15 nt, Human parainfluenza virus 1 strain Washington/1964
ccuuuaacugacuca

SEQ ID NO: 2696429 - RNA, 17 nt, Human parainfluenza virus 1 strain Washington/1964
gauaagaaaucccuuua

SEQ ID NO: 2696430 - RNA, 15 nt, Human parainfluenza virus 1 strain Washington/1964
aaucuacaauuucaa

SEQ ID NO: 2696431 - RNA, 21 nt, Human parainfluenza virus 1 strain Washington/1964
cuuggacaauagaagccagau

SEQ ID NO: 2696432 - RNA, 17 nt, Human parainfluenza virus 1 strain Washington/1964
acaauuucaaccagcaa

SEQ ID NO: 2696433 - RNA, 14 nt, Human parainfluenza virus 1 strain Washington/1964
caaaaagcucccuc

SEQ ID NO: 2696434 - RNA, 22 nt, Human parainfluenza virus 1 strain Washington/1964
cccaacacuauaucaauuaugu

SEQ ID NO: 2696435 - RNA, 17 nt, Human parainfluenza virus 1 strain Washington/1964
aaucaaaucuauccaca

SEQ ID NO: 2696436 - RNA, 12 nt, Human parainfluenza virus 1 strain Washington/1964
acuccacaaauc

SEQ ID NO: 2696437 - RNA, 16 nt, Human parainfluenza virus 1 strain Washington/1964
cagggaucuucacaaa

SEQ ID NO: 2696438 - RNA, 22 nt, Human parainfluenza virus 1 strain Washington/1964
auuaucuaauuuguuuaaagag

SEQ ID NO: 2696439 - RNA, 20 nt, Human parainfluenza virus 1 strain Washington/1964
aaaaucugcaaauuacaaag

SEQ ID NO: 2696440 - RNA, 14 nt, Human parainfluenza virus 1 strain Washington/1964
gaugagauggccaa

SEQ ID NO: 2696441 - RNA, 21 nt, Human parainfluenza virus 1 strain Washington/1964
agaagccagaucaaaaguaag

SEQ ID NO: 2696442 - RNA, 18 nt, Human parainfluenza virus 1 strain Washington/1964
ggucaaaaagacaagguu

SEQ ID NO: 2696443 - RNA, 23 nt, Human parainfluenza virus 1 strain Washington/1964
gcaaucaaaaucaauauccagag

SEQ ID NO: 2696444 - RNA, 21 nt, Human parainfluenza virus 1 strain Washington/1964
ugaguuaacaagauaagaaau

SEQ ID NO: 2696445 - RNA, 16 nt, Human parainfluenza virus 1 strain Washington/1964
agacaauaaggucaaa

SEQ ID NO: 2696446 - RNA, 23 nt, Human parainfluenza virus 1 strain Washington/1964
augaaucuacaauuucaaccagc

SEQ ID NO: 2696447 - RNA, 22 nt, Human parainfluenza virus 1 strain Washington/1964
uaccauuaaucaaauacagauc

SEQ ID NO: 2696448 - RNA, 22 nt, Human parainfluenza virus 1 strain Washington/1964
gauacuuggacaauagaagcca

SEQ ID NO: 2696449 - RNA, 18 nt, Human parainfluenza virus 1 strain Washington/1964
agccaacucaaaaagcuc

SEQ ID NO: 2696450 - RNA, 17 nt, Human parainfluenza virus 1 strain Washington/1964
gacaauagaagccagau

SEQ ID NO: 2696451 - RNA, 20 nt, Human parainfluenza virus 1 strain Washington/1964
ucuaauuuguuuaaagagau

SEQ ID NO: 2696452 - RNA, 18 nt, Human parainfluenza virus 1 strain Washington/1964
agccagaucaaaaguaag

SEQ ID NO: 2696453 - RNA, 20 nt, Human parainfluenza virus 1 strain Washington/1964
uacauacaacaaucaaaucu

SEQ ID NO: 2696454 - RNA, 17 nt, Human parainfluenza virus 1 strain Washington/1964
aaaacaaagcaugaaua

SEQ ID NO: 2696455 - RNA, 22 nt, Human parainfluenza virus 1 strain Washington/1964
uugagaauaaaguagaagaaaa

SEQ ID NO: 2696456 - RNA, 18 nt, Human parainfluenza virus 1 strain Washington/1964
gauacuuggacaauagaa

SEQ ID NO: 2696457 - RNA, 13 nt, Human parainfluenza virus 1 strain Washington/1964
caagaggaaauaa

SEQ ID NO: 2696458 - RNA, 18 nt, Human parainfluenza virus 1 strain Washington/1964
aaucaauauccagagcca

SEQ ID NO: 2696459 - RNA, 15 nt, Human parainfluenza virus 1 strain Washington/1964
caauauccagagcca

SEQ ID NO: 2696460 - RNA, 17 nt, Human parainfluenza virus 1 strain Washington/1964
caaccagcaaucaaaau

SEQ ID NO: 2696461 - RNA, 14 nt, Human parainfluenza virus 1 strain Washington/1964
agaucaaaaguaag

SEQ ID NO: 2696462 - RNA, 21 nt, Human parainfluenza virus 1 strain Washington/1964
ccucaauaaugacacccauua

SEQ ID NO: 2696463 - RNA, 16 nt, Human parainfluenza virus 1 strain Washington/1964
uacaacaaucaaaucu

SEQ ID NO: 2696464 - RNA, 18 nt, Human parainfluenza virus 1 strain Washington/1964
auuucaaccagcaaucaa

SEQ ID NO: 2696465 - RNA, 12 nt, Human parainfluenza virus 1 strain Washington/1964
aagcucccucaa

SEQ ID NO: 2696466 - RNA, 17 nt, Human parainfluenza virus 1 strain Washington/1964
auacuuggacaauagaa

SEQ ID NO: 2696467 - RNA, 19 nt, Human parainfluenza virus 1 strain Washington/1964
caaaaucaauauccagagc

SEQ ID NO: 2696468 - RNA, 12 nt, Human parainfluenza virus 1 strain Washington/1964
ugauacuacaag

SEQ ID NO: 2696469 - RNA, 23 nt, Human parainfluenza virus 1 strain Washington/1964
ucagaacuccacaaaucaacaag

SEQ ID NO: 2696470 - RNA, 16 nt, Human parainfluenza virus 1 strain Washington/1964
ucugcacucacucaaa

SEQ ID NO: 2696471 - RNA, 13 nt, Human parainfluenza virus 1 strain Washington/1964
ucaagaguucaag

SEQ ID NO: 2696472 - RNA, 21 nt, Human parainfluenza virus 1 strain Washington/1964
uuuaaaaacaaagcaugaaua

SEQ ID NO: 2696473 - RNA, 13 nt, Human parainfluenza virus 1 strain Washington/1964
uaaagagaugagu

SEQ ID NO: 2696474 - RNA, 17 nt, Human parainfluenza virus 1 strain Washington/1964
ggacaauagaagccaga

SEQ ID NO: 2696475 - RNA, 17 nt, Human parainfluenza virus 1 strain Washington/1964
auaucaauuaugugaaa

SEQ ID NO: 2696476 - RNA, 12 nt, Human parainfluenza virus 1 strain Washington/1964
ucgauacaauca

SEQ ID NO: 2696477 - RNA, 18 nt, Human parainfluenza virus 1 strain Washington/1964
cauuguagcauacauaca

SEQ ID NO: 2696478 - RNA, 15 nt, Human parainfluenza virus 1 strain Washington/1964
caaucagguguacaa

SEQ ID NO: 2696479 - RNA, 19 nt, Human parainfluenza virus 1 strain Washington/1964
agaugaguuaacaagauaa

SEQ ID NO: 2696480 - RNA, 17 nt, Human parainfluenza virus 1 strain Washington/1964
uagaagaaaacaacaau

SEQ ID NO: 2696481 - RNA, 20 nt, Human parainfluenza virus 1 strain Washington/1964
gagccaacucaaaaagcucc

SEQ ID NO: 2696482 - RNA, 16 nt, Human parainfluenza virus 1 strain Washington/1964
caaagcaugaauagac

SEQ ID NO: 2696483 - RNA, 15 nt, Human parainfluenza virus 1 strain Washington/1964
caaaugaagaggaaa

SEQ ID NO: 2696484 - RNA, 18 nt, Human parainfluenza virus 1 strain Washington/1964
ugaguuaacaagauaaga

SEQ ID NO: 2696485 - RNA, 13 nt, Human parainfluenza virus 1 strain Washington/1964
caaaaagcucccu

SEQ ID NO: 2696486 - RNA, 22 nt, Human parainfluenza virus 1 strain Washington/1964
ucauaaaaacauaguaagaaaa

SEQ ID NO: 2696487 - RNA, 21 nt, Human parainfluenza virus 1 strain Washington/1964
uaaugacacccauuagcucua

SEQ ID NO: 2696488 - RNA, 22 nt, Human parainfluenza virus 1 strain Washington/1964
cuucaccaaucagguguacaac

SEQ ID NO: 2696489 - RNA, 15 nt, Human parainfluenza virus 1 strain Washington/1964
aguugaaaaaucacu

SEQ ID NO: 2696490 - RNA, 15 nt, Human parainfluenza virus 1 strain Washington/1964
aagccagaucaaaag

SEQ ID NO: 2696491 - RNA, 20 nt, Human parainfluenza virus 1 strain Washington/1964
aaccacaaccacagaaaaac

SEQ ID NO: 2696492 - RNA, 18 nt, Human parainfluenza virus 1 strain Washington/1964
guuuaaagagaugaguua

SEQ ID NO: 2696493 - RNA, 12 nt, Human parainfluenza virus 1 strain Washington/1964
cauuagcucuaa

SEQ ID NO: 2696494 - RNA, 20 nt, Human parainfluenza virus 1 strain Washington/1964
uaccaaaaagaacagaacuc

SEQ ID NO: 2696495 - RNA, 18 nt, Human parainfluenza virus 1 strain Washington/1964
ucauccagggaucuucac

SEQ ID NO: 2696496 - RNA, 16 nt, Human parainfluenza virus 1 strain Washington/1964
ucaauaaugacaccca

SEQ ID NO: 2696497 - RNA, 18 nt, Human parainfluenza virus 1 strain Washington/1964
uucacuaacuaacuaaac

SEQ ID NO: 2696498 - RNA, 14 nt, Human parainfluenza virus 1 strain Washington/1964
auuuauaugacaaa

SEQ ID NO: 2696499 - RNA, 18 nt, Human parainfluenza virus 1 strain Washington/1964
ucaguucaaauaagaaaa

SEQ ID NO: 2696500 - RNA, 22 nt, Human parainfluenza virus 1 strain Washington/1964
cuccucaauaaugacacccauu

SEQ ID NO: 2696501 - RNA, 14 nt, Human parainfluenza virus 1 strain Washington/1964
acacagaguucaga

SEQ ID NO: 2696502 - RNA, 22 nt, Human parainfluenza virus 1 strain Washington/1964
ucuucacaaaagggaaagacaa

SEQ ID NO: 2696503 - RNA, 17 nt, Human parainfluenza virus 1 strain Washington/1964
ucaauauccagagccaa

SEQ ID NO: 2696504 - RNA, 20 nt, Human parainfluenza virus 1 strain Washington/1964
cucaauaaugacacccauua

SEQ ID NO: 2696505 - RNA, 16 nt, Human parainfluenza virus 1 strain Washington/1964
cuaaaucguaccauua

SEQ ID NO: 2696506 - RNA, 15 nt, Human
auaaaagacagugaa

SEQ ID NO: 2696507 - RNA, 16 nt, Human
auaaaagacagugaaa

SEQ ID NO: 2696508 - RNA, 13 nt, Human
aguacucauacau

SEQ ID NO: 2696509 - RNA, 19 nt, Human
agugaugucacuagggcag

SEQ ID NO: 2696510 - RNA, 13 nt, Human
agugauuaccagg

SEQ ID NO: 2696511 - RNA, 13 nt, Human
agucauuuaauaa

SEQ ID NO: 2696512 - RNA, 21 nt, Human
aucaugaauuaguuuuauaug

SEQ ID NO: 2696513 - RNA, 12 nt, Human
auccuugaagau

SEQ ID NO: 2696514 - RNA, 14 nt, Human
aucaaaagaaagaa

SEQ ID NO: 2696515 - RNA, 23 nt, Human
auggcuuccuggcaauagucaaa

SEQ ID NO: 2696516 - RNA, 20 nt, Human
augggaaagcauuguaaaug

SEQ ID NO: 2696517 - RNA, 14 nt, Human
augggaaagcauug

SEQ ID NO: 2696518 - RNA, 15 nt, Human
augggacagggagga

SEQ ID NO: 2696519 - RNA, 20 nt, Human
augggacauuugcucaugga

SEQ ID NO: 2696520 - RNA, 20 nt, Human
agggauuagggagagaagau

SEQ ID NO: 2696521 - RNA, 17 nt, Human
agggacaggauaagagg

SEQ ID NO: 2696522 - RNA, 23 nt, Human
aggccaugggcacuguggguaga

SEQ ID NO: 2696523 - RNA, 20 nt, Human
aggcagagguugcagugagc

SEQ ID NO: 2696524 - RNA, 13 nt, Human
agcuacaaaugca

SEQ ID NO: 2696525 - RNA, 12 nt, Human
agcuacaaaugc

SEQ ID NO: 2696526 - RNA, 15 nt, Human
agcgacagugagacu

SEQ ID NO: 2696527 - RNA, 13 nt, Human
agcgacagugaga

SEQ ID NO: 2696528 - RNA, 20 nt, Human
agcugcugaaacaacaaaua

SEQ ID NO: 2696529 - RNA, 16 nt, Human
agcugcugaaacaaca

SEQ ID NO: 2696530 - RNA, 15 nt, Human
agcugcugaaacaac

SEQ ID NO: 2696531 - RNA, 14 nt, Human
agcugcugaaacaa

SEQ ID NO: 2696532 - RNA, 17 nt, Human
agcuguaugauucccag

SEQ ID NO: 2696533 - RNA, 18 nt, Human
agcuguaugauucccagc

SEQ ID NO: 2696534 - RNA, 18 nt, Human
aggaaaaaauaacaauga

SEQ ID NO: 2696535 - RNA, 19 nt, Human
agacaaggaaaaaauaaca

SEQ ID NO: 2696536 - RNA, 22 nt, Human
agaacagugauuaccagggacu

SEQ ID NO: 2696537 - RNA, 13 nt, Human
agaagagcuguuc

SEQ ID NO: 2696538 - RNA, 13 nt, Human
agaagauagcagg

SEQ ID NO: 2696539 - RNA, 20 nt, Human
agaagagcuguucacagcca

SEQ ID NO: 2696540 - RNA, 21 nt, Human
agaagacugcauuauauuuau

SEQ ID NO: 2696541 - RNA, 23 nt, Human
agcaaaauuuuuucucuaggaaa

SEQ ID NO: 2696542 - RNA, 20 nt, Human
agauagauaggucagugcaa

SEQ ID NO: 2696543 - RNA, 19 nt, Human
agcacugacuucuaaguaa

SEQ ID NO: 2696544 - RNA, 17 nt, Human
agcacugacuucuaagu

SEQ ID NO: 2696545 - RNA, 14 nt, Human
agccagcaguucag

SEQ ID NO: 2696546 - RNA, 11 nt, Human
aauuguaauag

SEQ ID NO: 2696547 - RNA, 22 nt, Human
aauuucauaccuaucaucuuaa

SEQ ID NO: 2696548 - RNA, 15 nt, Human
acaccaauauucaua

SEQ ID NO: 2696549 - RNA, 24 nt, Human
acaggaugguucccuugaugaaga

SEQ ID NO: 2696550 - RNA, 22 nt, Human
acaggaugguucccuugaugaa

SEQ ID NO: 2696551 - RNA, 19 nt, Human
acagugauuaccagggacu

SEQ ID NO: 2696552 - RNA, 15 nt, Human
acauuugcucaugga

SEQ ID NO: 2696553 - RNA, 16 nt, Human
acauuuguauaaaaua

SEQ ID NO: 2696554 - RNA, 19 nt, Human
acauuuguauaaaauaauu

SEQ ID NO: 2696555 - RNA, 21 nt, Human
acauuuguauaaaauaauuuu

SEQ ID NO: 2696556 - RNA, 14 nt, Human
acgcacacugucug

SEQ ID NO: 2696557 - RNA, 20 nt, Human
accucugccucagaaaacaa

SEQ ID NO: 2696558 - RNA, 20 nt, Human
acccucagaugcacaugagc

SEQ ID NO: 2696559 - RNA, 21 nt, Human
acccugucucuacuaaaaaua

SEQ ID NO: 2696560 - RNA, 17 nt, Human
acuguaaaauaauaacu

SEQ ID NO: 2696561 - RNA, 18 nt, Human
acuucaaauccuugaaga

SEQ ID NO: 2696562 - RNA, 17 nt, Human
acuucaaauccuugaag

SEQ ID NO: 2696563 - RNA, 22 nt, Human
acuuaaaaaugguuuaaauggu

SEQ ID NO: 2696564 - RNA, 21 nt, Human
acuuaaaaaugguuuaaaugg

SEQ ID NO: 2696565 - RNA, 13 nt, Human
acuuggucuguga

SEQ ID NO: 2696566 - RNA, 21 nt, Human
acuucagacauagaauuaaca

SEQ ID NO: 2696567 - RNA, 14 nt, Human
acucccuuucaaca

SEQ ID NO: 2696568 - RNA, 14 nt, Human
acucguuaauuugu

SEQ ID NO: 2696569 - RNA, 19 nt, Human
acucguuaauuuguagugu

SEQ ID NO: 2696570 - RNA, 13 nt, Human
acugacacaugcu

SEQ ID NO: 2696571 - RNA, 19 nt, Human
acugauaugggucuugaua

SEQ ID NO: 2696572 - RNA, 20 nt, Human
aaugaauacuuuauaaagga

SEQ ID NO: 2696573 - RNA, 16 nt, Human
aaucucaauauuucag

SEQ ID NO: 2696574 - RNA, 21 nt, Human
aagacaaggaaaaaauaacaa

SEQ ID NO: 2696575 - RNA, 20 nt, Human
aagaagacugcauuauauuu

SEQ ID NO: 2696576 - RNA, 15 nt, Human
aagaagacugcauua

SEQ ID NO: 2696577 - RNA, 20 nt, Human
aacgcaggcccccaggugcc

SEQ ID NO: 2696578 - RNA, 12 nt, Human
aagaacugaaau

SEQ ID NO: 2696579 - RNA, 13 nt, Human
aagaacugaaauc

SEQ ID NO: 2696580 - RNA, 11 nt, Human
aagaacugaaa

SEQ ID NO: 2696581 - RNA, 15 nt, Human
aagaacugaaaucau

SEQ ID NO: 2696582 - RNA, 22 nt, Human
aagacagagccccacccucaga

SEQ ID NO: 2696583 - RNA, 21 nt, Human
aaauauuuauuuuaauaaugu

SEQ ID NO: 2696584 - RNA, 18 nt, Human
aaaucucaauauuucaga

SEQ ID NO: 2696585 - RNA, 13 nt, Human
aaauguucaucaa

SEQ ID NO: 2696586 - RNA, 17 nt, Human
aaauguucaucaaugaa

SEQ ID NO: 2696587 - RNA, 22 nt, Human
aaauguugacaugggacauuug

SEQ ID NO: 2696588 - RNA, 23 nt, Human
aaauguugacaugggacauuugc

SEQ ID NO: 2696589 - RNA, 17 nt, Human
aaaagaaagaaaaucag

SEQ ID NO: 2696590 - RNA, 12 nt, Human
aaaagaauauuu

SEQ ID NO: 2696591 - RNA, 20 nt, Human
aaaagacaaggaaaaaauaa

SEQ ID NO: 2696592 - RNA, 13 nt, Human
aaaagaauauuuu

SEQ ID NO: 2696593 - RNA, 11 nt, Human
aaaagaaugau

SEQ ID NO: 2696594 - RNA, 13 nt, Human
aaaagacuccaaa

SEQ ID NO: 2696595 - RNA, 10 nt, Human
aaaaucauuu

SEQ ID NO: 2696596 - RNA, 12 nt, Human
aaaaucauuucu

SEQ ID NO: 2696597 - RNA, 11 nt, Human
aaaaucauuuc

SEQ ID NO: 2696598 - RNA, 17 nt, Human
aaagcauuguaaaugug

SEQ ID NO: 2696599 - RNA, 15 nt, Human
aaagcauuguaaaug

SEQ ID NO: 2696600 - RNA, 21 nt, Human
aaaaucauuucugcaucagcu

SEQ ID NO: 2696601 - RNA, 15 nt, Human
aaacugcacugucaa

SEQ ID NO: 2696602 - RNA, 16 nt, Human
gcccccaggugccagu

SEQ ID NO: 2696603 - RNA, 13 nt, Human
gcccuguuaaaag

SEQ ID NO: 2696604 - RNA, 17 nt, Human
gcccuguuaaaagauga

SEQ ID NO: 2696605 - RNA, 14 nt, Human
gcccuguuaaaaga

SEQ ID NO: 2696606 - RNA, 19 nt, Human
gccagauuuuccugaaaac

SEQ ID NO: 2696607 - RNA, 22 nt, Human
gccagacaucaacagauaaaua

SEQ ID NO: 2696608 - RNA, 22 nt, Human
gccagcaguucagagcugcccu

SEQ ID NO: 2696609 - RNA, 23 nt, Human
gccagcaguucagagcugcccuc

SEQ ID NO: 2696610 - RNA, 16 nt, Human
gcuaguaucaaaagaa

SEQ ID NO: 2696611 - RNA, 21 nt, Human
gcuaguaauuggaaaggcagc

SEQ ID NO: 2696612 - RNA, 18 nt, Human
gcuccccucggagaagag

SEQ ID NO: 2696613 - RNA, 15 nt, Human
gcuccccucggagaa

SEQ ID NO: 2696614 - RNA, 21 nt, Human
gcugccuccccuccucugcuu

SEQ ID NO: 2696615 - RNA, 22 nt, Human
gcugccuccccuccucugcuug

SEQ ID NO: 2696616 - RNA, 16 nt, Human
gcugccuccccuccuc

SEQ ID NO: 2696617 - RNA, 17 nt, Human
gcugccuccccuccucu

SEQ ID NO: 2696618 - RNA, 20 nt, Human
gcugccuccccuccucugcu

SEQ ID NO: 2696619 - RNA, 14 nt, Human
gcuggagcucugcc

SEQ ID NO: 2696620 - RNA, 17 nt, Human
gcuggagcucugcccau

SEQ ID NO: 2696621 - RNA, 19 nt, Human
ggaggcugagaugggagaa

SEQ ID NO: 2696622 - RNA, 15 nt, Human
ggaggcugagauggg

SEQ ID NO: 2696623 - RNA, 22 nt, Human
ggaugguucccuugaugaagaa

SEQ ID NO: 2696624 - RNA, 23 nt, Human
ggaugguucccuugaugaagaag

SEQ ID NO: 2696625 - RNA, 12 nt, Human
ggauuuucagcc

SEQ ID NO: 2696626 - RNA, 16 nt, Human
ggccuccauccugagg

SEQ ID NO: 2696627 - RNA, 21 nt, Human
aaacauauauaacaaugcugu

SEQ ID NO: 2696628 - RNA, 16 nt, Human
aaacauauauaacaau

SEQ ID NO: 2696629 - RNA, 19 nt, Human
aaacauauauaacaaugcu

SEQ ID NO: 2696630 - RNA, 13 nt, Human
aaacauauauaac

SEQ ID NO: 2696631 - RNA, 14 nt, Human
aaacacaacuauau

SEQ ID NO: 2696632 - RNA, 17 nt, Human
aaacaaggaugaauuaa

SEQ ID NO: 2696633 - RNA, 19 nt, Human
aaaauuuuuucucuaggaa

SEQ ID NO: 2696634 - RNA, 16 nt, Human
aaacucauuucuagca

SEQ ID NO: 2696635 - RNA, 15 nt, Human
aaaccacagcaguug

SEQ ID NO: 2696636 - RNA, 16 nt, Human
aaaccacagcaguuga

SEQ ID NO: 2696637 - RNA, 24 nt, Human
ggucugugagaugcuagaacuccc

SEQ ID NO: 2696638 - RNA, 14 nt, Human
ggucugugagaugc

SEQ ID NO: 2696639 - RNA, 20 nt, Human
ggugauuuagcaggaagcug

SEQ ID NO: 2696640 - RNA, 15 nt, Human
ggugccaguuauggc

SEQ ID NO: 2696641 - RNA, 13 nt, Human
aaaggaauuuaaa

SEQ ID NO: 2696642 - RNA, 16 nt, Human
aaagaaugauuaugaa

SEQ ID NO: 2696643 - RNA, 23 nt, Human
aaagacuauucaaacagucucag

SEQ ID NO: 2696644 - RNA, 13 nt, Human
aaagacuccaaag

SEQ ID NO: 2696645 - RNA, 22 nt, Human
aaagacuauucaaacagucuca

SEQ ID NO: 2696646 - RNA, 18 nt, Human
aaagagaacuuccagauc

SEQ ID NO: 2696647 - RNA, 20 nt, Human
aaagaggcagcuugaaacug

SEQ ID NO: 2696648 - RNA, 21 nt, Human
aaaacuuuaugcuaagugaaa

SEQ ID NO: 2696649 - RNA, 22 nt, Human
aaaagcuccauuuuuagugaaa

SEQ ID NO: 2696650 - RNA, 20 nt, Human
gggaggcagagguugcagug

SEQ ID NO: 2696651 - RNA, 11 nt, Human
gggaggcagag

SEQ ID NO: 2696652 - RNA, 12 nt, Human
gggcagcugccu

SEQ ID NO: 2696653 - RNA, 13 nt, Human
gggcagcugccuc

SEQ ID NO: 2696654 - RNA, 14 nt, Human
gggcagcugccucc

SEQ ID NO: 2696655 - RNA, 19 nt, Human
gggcagcugccuccccucc

SEQ ID NO: 2696656 - RNA, 20 nt, Human
gggcagcugccuccccuccu

SEQ ID NO: 2696657 - RNA, 23 nt, Human
gggcagcugccuccccuccucug

SEQ ID NO: 2696658 - RNA, 17 nt, Human
gggauugaaggaugcug

SEQ ID NO: 2696659 - RNA, 21 nt, Human
gggauuuucagcccucagaau

SEQ ID NO: 2696660 - RNA, 20 nt, Human
aaaauaauuuuuauauuuga

SEQ ID NO: 2696661 - RNA, 21 nt, Human
aaaauaauuuuuauauuugaa

SEQ ID NO: 2696662 - RNA, 23 nt, Human
aaaauaauuuuuauauuugaaau

SEQ ID NO: 2696663 - RNA, 16 nt, Human
gacauuugcucaugga

SEQ ID NO: 2696664 - RNA, 17 nt, Human
gacauuugcucauggaa

SEQ ID NO: 2696665 - RNA, 21 nt, Human
gacagugagacucugucucag

SEQ ID NO: 2696666 - RNA, 21 nt, Human
gacagaaagcagaacagugau

SEQ ID NO: 2696667 - RNA, 15 nt, Human
gacacacugaagaag

SEQ ID NO: 2696668 - RNA, 16 nt, Human
gacacacugaagaagc

SEQ ID NO: 2696669 - RNA, 14 nt, Human
gacucuuaagaaga

SEQ ID NO: 2696670 - RNA, 18 nt, Human
gacucuuaagaagacugc

SEQ ID NO: 2696671 - RNA, 21 nt, Human
gacucuuaagaagacugcauu

SEQ ID NO: 2696672 - RNA, 15 nt, Human
gacgcucucuggccu

SEQ ID NO: 2696673 - RNA, 17 nt, Human
gacgcucucuggccuuc

SEQ ID NO: 2696674 - RNA, 16 nt, Human
gacgcucucuggccuu

SEQ ID NO: 2696675 - RNA, 19 nt, Human
gaacccgggaggcagaggu

SEQ ID NO: 2696676 - RNA, 14 nt, Human
gaacugaaaucaua

SEQ ID NO: 2696677 - RNA, 13 nt, Human
gaacugaaaucau

SEQ ID NO: 2696678 - RNA, 14 nt, Human
gaagcaaaauuuuu

SEQ ID NO: 2696679 - RNA, 23 nt, Human
gaagcaacccaaauguucaucaa

SEQ ID NO: 2696680 - RNA, 20 nt, Human
gcaaguauuagaauaccaca

SEQ ID NO: 2696681 - RNA, 22 nt, Human
gcaauagucaaauugugugaaa

SEQ ID NO: 2696682 - RNA, 22 nt, Human
gcacaguuuucugagaaagacu

SEQ ID NO: 2696683 - RNA, 20 nt, Human
gcacaguuuucugagaaaga

SEQ ID NO: 2696684 - RNA, 23 nt, Human
gcacaguuuucugagaaagacua

SEQ ID NO: 2696685 - RNA, 16 nt, Human
gaugaucuuuaaaaua

SEQ ID NO: 2696686 - RNA, 18 nt, Human
gauguagaggagaaacug

SEQ ID NO: 2696687 - RNA, 17 nt, Human
gauguagaggagaaacu

SEQ ID NO: 2696688 - RNA, 22 nt, Human
gaugguucccuugaugaagaag

SEQ ID NO: 2696689 - RNA, 15 nt, Human
gauuuaccacuugug

SEQ ID NO: 2696690 - RNA, 16 nt, Human
gauuuaccacuugugu

SEQ ID NO: 2696691 - RNA, 16 nt, Human
gaguuuaaauuguaau

SEQ ID NO: 2696692 - RNA, 18 nt, Human
gaggcuccacuuggucug

SEQ ID NO: 2696693 - RNA, 19 nt, Human
gaggcuccacuuggucugu

SEQ ID NO: 2696694 - RNA, 23 nt, Human
gaggcuccacuuggucugugaga

SEQ ID NO: 2696695 - RNA, 15 nt, Human
gaggacgcucucugg

SEQ ID NO: 2696696 - RNA, 23 nt, Human
cuucaugcugucuacacuaagag

SEQ ID NO: 2696697 - RNA, 11 nt, Human
cuucagacaua

SEQ ID NO: 2696698 - RNA, 15 nt, Human
cuucuguuuuauaau

SEQ ID NO: 2696699 - RNA, 20 nt, Human
cuucuguuuuauaauuuugu

SEQ ID NO: 2696700 - RNA, 20 nt, Human
cuuuaaagggauggcaagau

SEQ ID NO: 2696701 - RNA, 21 nt, Human
cuuugagugucuuaauuaaaa

SEQ ID NO: 2696702 - RNA, 20 nt, Human
cugcuuauccguuagccgug

SEQ ID NO: 2696703 - RNA, 12 nt, Human
cuggugccucac

SEQ ID NO: 2696704 - RNA, 21 nt, Human
cuggugccucaccccuugcca

SEQ ID NO: 2696705 - RNA, 13 nt, Human
cugggcagcugcc

SEQ ID NO: 2696706 - RNA, 14 nt, Human
cugggcagcugccu

SEQ ID NO: 2696707 - RNA, 15 nt, Human
cugggcagcugccuc

SEQ ID NO: 2696708 - RNA, 20 nt, Human
cugcacuccagccugagcga

SEQ ID NO: 2696709 - RNA, 17 nt, Human
cugcacuccagccugag

SEQ ID NO: 2696710 - RNA, 16 nt, Human
cugcacuccagccuga

SEQ ID NO: 2696711 - RNA, 14 nt, Human
cauuuguauaaaau

SEQ ID NO: 2696712 - RNA, 16 nt, Human
cauuuguauaaaauaa

SEQ ID NO: 2696713 - RNA, 14 nt, Human
ccaaaaggcagaag

SEQ ID NO: 2696714 - RNA, 21 nt, Human
ccaacuccagaaagugacaag

SEQ ID NO: 2696715 - RNA, 19 nt, Human
cauuauauuuauuacugua

SEQ ID NO: 2696716 - RNA, 13 nt, Human
caucagcugcuga

SEQ ID NO: 2696717 - RNA, 19 nt, Human
cauccugaggcuccacuug

SEQ ID NO: 2696718 - RNA, 18 nt, Human
cauccugaggcuccacuu

SEQ ID NO: 2696719 - RNA, 19 nt, Human
cauagcagcuuauucacaa

SEQ ID NO: 2696720 - RNA, 16 nt, Human
cauagguuuaauaauu

SEQ ID NO: 2696721 - RNA, 21 nt, Human
caguuauuauauuuacaaaug

SEQ ID NO: 2696722 - RNA, 17 nt, Human
caguuauuauauuuaca

SEQ ID NO: 2696723 - RNA, 20 nt, Human
caguuauggcuauaggugcu

SEQ ID NO: 2696724 - RNA, 19 nt, Human
caguuauggcuauaggugc

SEQ ID NO: 2696725 - RNA, 13 nt, Human
caguuauggcuau

SEQ ID NO: 2696726 - RNA, 22 nt, Human
cagugauuaccagggacugagg

SEQ ID NO: 2696727 - RNA, 15 nt, Human
caguucagagcugcc

SEQ ID NO: 2696728 - RNA, 16 nt, Human
caguucagagcugccc

SEQ ID NO: 2696729 - RNA, 17 nt, Human
caguucagagcugcccu

SEQ ID NO: 2696730 - RNA, 22 nt, Human
caguuauuauauuuacaaaugg

SEQ ID NO: 2696731 - RNA, 23 nt, Human
caguucagagcugcccucuccug

SEQ ID NO: 2696732 - RNA, 24 nt, Human
caguucagagcugcccucuccugg

SEQ ID NO: 2696733 - RNA, 18 nt, Human
caguucagagcugcccuc

SEQ ID NO: 2696734 - RNA, 19 nt, Human
caguucagagcugcccucu

SEQ ID NO: 2696735 - RNA, 21 nt, Human
caguucagagcugcccucucc

SEQ ID NO: 2696736 - RNA, 22 nt, Human
caguucagagcugcccucuccu

SEQ ID NO: 2696737 - RNA, 18 nt, Human
cagacuggcacaguuuuc

SEQ ID NO: 2696738 - RNA, 17 nt, Human
cagacuggcacaguuuu

SEQ ID NO: 2696739 - RNA, 23 nt, Human
cagacuggcacaguuuucugaga

SEQ ID NO: 2696740 - RNA, 22 nt, Human
cagacuggcacaguuuucugag

SEQ ID NO: 2696741 - RNA, 19 nt, Human
cagacuggauaguccgucu

SEQ ID NO: 2696742 - RNA, 23 nt, Human
cagccagcaguucagagcugccc

SEQ ID NO: 2696743 - RNA, 18 nt, Human
cagccagacuggcacagu

SEQ ID NO: 2696744 - RNA, 15 nt, Human
cagccagacuggcac

SEQ ID NO: 2696745 - RNA, 14 nt, Human
cagccagacuggca

SEQ ID NO: 2696746 - RNA, 18 nt, Human
cagagcugcccucuccug

SEQ ID NO: 2696747 - RNA, 19 nt, Human
cagagcugcccucuccugg

SEQ ID NO: 2696748 - RNA, 20 nt, Human
cagagcugcccucuccuggg

SEQ ID NO: 2696749 - RNA, 21 nt, Human
cagagcugcccucuccugggc

SEQ ID NO: 2696750 - RNA, 23 nt, Human
cagagcugcccucuccugggcag

SEQ ID NO: 2696751 - RNA, 11 nt, Human
caggcuacugu

SEQ ID NO: 2696752 - RNA, 16 nt, Human
caggaaagagaacuuc

SEQ ID NO: 2696753 - RNA, 20 nt, Human
caggaaagagaacuuccaga

SEQ ID NO: 2696754 - RNA, 14 nt, Human
cagcuuauugucua

SEQ ID NO: 2696755 - RNA, 20 nt, Human
cagcuguaugauucccagcc

SEQ ID NO: 2696756 - RNA, 20 nt, Human
cagcuuauugucuagugaaa

SEQ ID NO: 2696757 - RNA, 17 nt, Human
cagcuuauucacaagac

SEQ ID NO: 2696758 - RNA, 11 nt, Human
cagcugccucc

SEQ ID NO: 2696759 - RNA, 10 nt, Human
cagcugccuc

SEQ ID NO: 2696760 - RNA, 9 nt, Human
cagcugccu

SEQ ID NO: 2696761 - RNA, 14 nt, Human
cagcugccuccccu

SEQ ID NO: 2696762 - RNA, 15 nt, Human
cagcugccuccccuc

SEQ ID NO: 2696763 - RNA, 16 nt, Human
cagcugccuccccucc

SEQ ID NO: 2696764 - RNA, 17 nt, Human
cagcugccuccccuccu

SEQ ID NO: 2696765 - RNA, 18 nt, Human
cagcugccuccccuccuc

SEQ ID NO: 2696766 - RNA, 19 nt, Human
cagcugccuccccuccucu

SEQ ID NO: 2696767 - RNA, 20 nt, Human
cagcugccuccccuccucug

SEQ ID NO: 2696768 - RNA, 19 nt, Human
cagcuguaugauucccagc

SEQ ID NO: 2696769 - RNA, 17 nt, Human
caaucagccuaguugau

SEQ ID NO: 2696770 - RNA, 19 nt, Human
caacuauauuguuugcuaa

SEQ ID NO: 2696771 - RNA, 19 nt, Human
caacuaucucauuuccaag

SEQ ID NO: 2696772 - RNA, 12 nt, Human
caacuccagaaa

SEQ ID NO: 2696773 - RNA, 14 nt, Human
caagcaaguauuag

SEQ ID NO: 2696774 - RNA, 21 nt, Human
cacuccagugagacagcucug

SEQ ID NO: 2696775 - RNA, 16 nt, Human
cacuccagugagacag

SEQ ID NO: 2696776 - RNA, 11 nt, Human
cacugaagaag

SEQ ID NO: 2696777 - RNA, 23 nt, Human
cacugaagaagcaccaaucauga

SEQ ID NO: 2696778 - RNA, 23 nt, Human
cacaucagcuugcccuguuaaaa

SEQ ID NO: 2696779 - RNA, 13 nt, Human
cacaucagcuugc

SEQ ID NO: 2696780 - RNA, 18 nt, Human
auuuucuauaauuuaaau

SEQ ID NO: 2696781 - RNA, 17 nt, Human
auuuucuauaauuuaaa

SEQ ID NO: 2696782 - RNA, 19 nt, Human
auuuucuauaauuuaaaua

SEQ ID NO: 2696783 - RNA, 21 nt, Human
caaaagguauuuuaaucacca

SEQ ID NO: 2696784 - RNA, 17 nt, Human
caaacauauauaacaau

SEQ ID NO: 2696785 - RNA, 19 nt, Human
auuuuuauauuugaaauau

SEQ ID NO: 2696786 - RNA, 16 nt, Human
auuuuuauauuugaaa

SEQ ID NO: 2696787 - RNA, 16 nt, Human
auuucagcagcugcag

SEQ ID NO: 2696788 - RNA, 22 nt, Human
auugaggacacugauauggguc

SEQ ID NO: 2696789 - RNA, 12 nt, Human
ccuuuucccaac

SEQ ID NO: 2696790 - RNA, 20 nt, Human
cuacaaaaacacagcaaggg

SEQ ID NO: 2696791 - RNA, 20 nt, Human
cuaacgaaguauccuucagc

SEQ ID NO: 2696792 - RNA, 17 nt, Human
ccuucucuucacaguca

SEQ ID NO: 2696793 - RNA, 18 nt, Human
cuauguucuaagaaguga

SEQ ID NO: 2696794 - RNA, 18 nt, Human
cuaucucauuuccaagca

SEQ ID NO: 2696795 - RNA, 23 nt, Human
cuaugucauuugcuggagcucug

SEQ ID NO: 2696796 - RNA, 16 nt, Human
cucaguccaugaagau

SEQ ID NO: 2696797 - RNA, 19 nt, Human
cucccuccaccucccugca

SEQ ID NO: 2696798 - RNA, 20 nt, Human
cucccuccaccucccugcaa

SEQ ID NO: 2696799 - RNA, 21 nt, Human
cucccuccaccucccugcaau

SEQ ID NO: 2696800 - RNA, 22 nt, Human
cucccuccaccucccugcaaua

SEQ ID NO: 2696801 - RNA, 16 nt, Human
cucucuguaauaaacu

SEQ ID NO: 2696802 - RNA, 21 nt, Human
cucucuguaauaaacucauuu

SEQ ID NO: 2696803 - RNA, 13 nt, Human
cucucuggccuuc

SEQ ID NO: 2696804 - RNA, 16 nt, Human
cucucuggccuucggc

SEQ ID NO: 2696805 - RNA, 14 nt, Human
cucucuggccuucg

SEQ ID NO: 2696806 - RNA, 16 nt, Human
cucuccccaugauguu

SEQ ID NO: 2696807 - RNA, 15 nt, Human
cucuccccaugaugu

SEQ ID NO: 2696808 - RNA, 19 nt, Human
cucuauguucuaagaagug

SEQ ID NO: 2696809 - RNA, 20 nt, Human
ccuaacgaaguauccuucag

SEQ ID NO: 2696810 - RNA, 14 nt, Human
cccugagcaggauu

SEQ ID NO: 2696811 - RNA, 13 nt, Human
cccucggagaaga

SEQ ID NO: 2696812 - RNA, 17 nt, Human
ccucuccugggcagcug

SEQ ID NO: 2696813 - RNA, 18 nt, Human
ccucuccugggcagcugc

SEQ ID NO: 2696814 - RNA, 19 nt, Human
ccucuccugggcagcugcc

SEQ ID NO: 2696815 - RNA, 20 nt, Human
ccucuccugggcagcugccu

SEQ ID NO: 2696816 - RNA, 15 nt, Human
ccucuccugggcagc

SEQ ID NO: 2696817 - RNA, 16 nt, Human
ccucuccugggcagcu

SEQ ID NO: 2696818 - RNA, 21 nt, Human
ccucuccugggcagcugccuc

SEQ ID NO: 2696819 - RNA, 22 nt, Human
ccucuccugggcagcugccucc

SEQ ID NO: 2696820 - RNA, 15 nt, Human
ccccauuguggucac

SEQ ID NO: 2696821 - RNA, 18 nt, Human
ccaugggcacugugggua

SEQ ID NO: 2696822 - RNA, 22 nt, Human
ccauuguggucacaggaaguag

SEQ ID NO: 2696823 - RNA, 13 nt, Human
ccauuuaaagcuu

SEQ ID NO: 2696824 - RNA, 12 nt, Human
ccacuuggucug

SEQ ID NO: 2696825 - RNA, 19 nt, Human
ccacuuggucugugagaug

SEQ ID NO: 2696826 - RNA, 17 nt, Human
ccacuuggucugugaga

SEQ ID NO: 2696827 - RNA, 16 nt, Human
ccacuuggucugugag

SEQ ID NO: 2696828 - RNA, 15 nt, Human
ccacuuggucuguga

SEQ ID NO: 2696829 - RNA, 22 nt, Human
ccacuuggucugugagaugcua

SEQ ID NO: 2696830 - RNA, 20 nt, Human
ccacuuggucugugagaugc

SEQ ID NO: 2696831 - RNA, 15 nt, Human
ccaggggccaugaau

SEQ ID NO: 2696832 - RNA, 18 nt, Human
aaauuucagcagcugcag

SEQ ID NO: 2696833 - RNA, 17 nt, Human
aaauuucagcagcugca

SEQ ID NO: 2696834 - RNA, 22 nt, Human
aaauguaagggaaacugccagc

SEQ ID NO: 2696835 - RNA, 14 nt, Human
guaugauucccagc

SEQ ID NO: 2696836 - RNA, 19 nt, Human
aaaucuacacuccagugag

SEQ ID NO: 2696837 - RNA, 14 nt, Human
aaauccuugaagau

SEQ ID NO: 2696838 - RNA, 22 nt, Human
aaaugaaagcagggacuugaac

SEQ ID NO: 2696839 - RNA, 21 nt, Human
aaaugaaagcagggacuugaa

SEQ ID NO: 2696840 - RNA, 14 nt, Human
aaaugcauuucuaa

SEQ ID NO: 2696841 - RNA, 19 nt, Human
aaauggcuuccuggcaaua

SEQ ID NO: 2696842 - RNA, 18 nt, Human
aacauuugguaaggggaa

SEQ ID NO: 2696843 - RNA, 22 nt, Human
aacaguagugauaguuguaccg

SEQ ID NO: 2696844 - RNA, 21 nt, Human
aacaagccuccuuuuaaagua

SEQ ID NO: 2696845 - RNA, 15 nt, Human
aacaaggaugaauua

SEQ ID NO: 2696846 - RNA, 21 nt, Human
guccaagcauuuagauguaua

SEQ ID NO: 2696847 - RNA, 24 nt, Human
guccaagcauaccaacacgagcag

SEQ ID NO: 2696848 - RNA, 14 nt, Human
aacuccagaaagug

SEQ ID NO: 2696849 - RNA, 21 nt, Human
aacuccagaaagugacaagcu

SEQ ID NO: 2696850 - RNA, 14 nt, Human
aacucccuuucaac

SEQ ID NO: 2696851 - RNA, 13 nt, Human
aacucccuuucaa

SEQ ID NO: 2696852 - RNA, 18 nt, Human
aacucguuaauuuguagu

SEQ ID NO: 2696853 - RNA, 15 nt, Human
gugaacacaucagcu

SEQ ID NO: 2696854 - RNA, 21 nt, Human
gucuuaauuaaaagaauauuu

SEQ ID NO: 2696855 - RNA, 19 nt, Human
gucuuaauuaaaagaauau

SEQ ID NO: 2696856 - RNA, 22 nt, Human
gucuuaauuaaaagaauauuuu

SEQ ID NO: 2696857 - RNA, 12 nt, Human
aaccacagcagu

SEQ ID NO: 2696858 - RNA, 20 nt, Human
aaccuagggugauauuaacc

SEQ ID NO: 2696859 - RNA, 18 nt, Human
aacccaaauguucaucaa

SEQ ID NO: 2696860 - RNA, 13 nt, Human
aacccaaauguuc

SEQ ID NO: 2696861 - RNA, 20 nt, Human
aacccauauuuguacaccaa

SEQ ID NO: 2696862 - RNA, 18 nt, Human
guuguaccgcaaugugac

SEQ ID NO: 2696863 - RNA, 16 nt, Human
guuuaaaaucauuucu

SEQ ID NO: 2696864 - RNA, 10 nt, Human
guuuaaaauc

SEQ ID NO: 2696865 - RNA, 21 nt, Human
guuucaaacauauauaacaau

SEQ ID NO: 2696866 - RNA, 13 nt, Human
aagguacuucaaa

SEQ ID NO: 2696867 - RNA, 23 nt, Human
guuuucugagaaagacuauucaa

SEQ ID NO: 2696868 - RNA, 23 nt, Human
aagcuuguauuccuuuuucucuc

SEQ ID NO: 2696869 - RNA, 14 nt, Human
guugacaugggaca

SEQ ID NO: 2696870 - RNA, 18 nt, Human
guugacaugggacauuug

SEQ ID NO: 2696871 - RNA, 13 nt, Human
guugacaugggac

SEQ ID NO: 2696872 - RNA, 21 nt, Human
gugugaccacugcagaagaca

SEQ ID NO: 2696873 - RNA, 19 nt, Human
aagagcuguucacagccag

SEQ ID NO: 2696874 - RNA, 21 nt, Human
gugggacagucaccucaugga

SEQ ID NO: 2696875 - RNA, 18 nt, Human
gugcuaguaauuggaaag

SEQ ID NO: 2696876 - RNA, 22 nt, Human
aagaagugaaaaucuacacucc

SEQ ID NO: 2696877 - RNA, 16 nt, Human
aagaagugaaaaucua

SEQ ID NO: 2696878 - RNA, 16 nt, Human
aagaaugauuaugaau

SEQ ID NO: 2696879 - RNA, 18 nt, Human
aagaaugauuaugaauua

SEQ ID NO: 2696880 - RNA, 21 nt, Human
aaugagagacacacugaagaa

SEQ ID NO: 2696881 - RNA, 16 nt, Human
uaaugauaacuggaaa

SEQ ID NO: 2696882 - RNA, 18 nt, Human
uaaguuuuuuuuuaaaaa

SEQ ID NO: 2696883 - RNA, 23 nt, Human
aaucaugaauuaguuuuauaugc

SEQ ID NO: 2696884 - RNA, 19 nt, Human
aaucaugaauuaguuuuau

SEQ ID NO: 2696885 - RNA, 17 nt, Human
aaucaugaauuaguuuu

SEQ ID NO: 2696886 - RNA, 15 nt, Human
aaucaucaagucuuu

SEQ ID NO: 2696887 - RNA, 13 nt, Human
aauccuugaagau

SEQ ID NO: 2696888 - RNA, 16 nt, Human
aaucuuauaauuuaaa

SEQ ID NO: 2696889 - RNA, 14 nt, Human
aaucuuauaauuua

SEQ ID NO: 2696890 - RNA, 15 nt, Human
uacaaaaacacagca

SEQ ID NO: 2696891 - RNA, 16 nt, Human
uacaaaaacacagcaa

SEQ ID NO: 2696892 - RNA, 14 nt, Human
uacaaaaacacagc

SEQ ID NO: 2696893 - RNA, 13 nt, Human
uacaaaaacacag

SEQ ID NO: 2696894 - RNA, 19 nt, Human
uacacuaagagagaaugag

SEQ ID NO: 2696895 - RNA, 19 nt, Human
aauggacuuuuguacauag

SEQ ID NO: 2696896 - RNA, 11 nt, Human
aaugugauaug

SEQ ID NO: 2696897 - RNA, 20 nt, Human
aauaauuuuuauauuugaaa

SEQ ID NO: 2696898 - RNA, 17 nt, Human
aauaauuuuuauauuug

SEQ ID NO: 2696899 - RNA, 19 nt, Human
aauaauuuuuauauuugaa

SEQ ID NO: 2696900 - RNA, 16 nt, Human
aauaauuuuuauauuu

SEQ ID NO: 2696901 - RNA, 21 nt, Human
aauaacaaugaaaguugauaa

SEQ ID NO: 2696902 - RNA, 19 nt, Human
aauaucuuuuuuuuaauaa

SEQ ID NO: 2696903 - RNA, 15 nt, Human
aauauuucagauaau

SEQ ID NO: 2696904 - RNA, 14 nt, Human
aauauuucagauaa

SEQ ID NO: 2696905 - RNA, 24 nt, Human
aauaugcaaagcacugacuucuaa

SEQ ID NO: 2696906 - RNA, 17 nt, Human
aauaugcaaagcacuga

SEQ ID NO: 2696907 - RNA, 15 nt, Human
aauaugcaaagcacu

SEQ ID NO: 2696908 - RNA, 15 nt, Human
aauaucacuugucaa

SEQ ID NO: 2696909 - RNA, 12 nt, Human
aauaucacuugu

SEQ ID NO: 2696910 - RNA, 18 nt, Human
aauaggcguaacuaauuu

SEQ ID NO: 2696911 - RNA, 16 nt, Human
uagcuacuaauuuuaa

SEQ ID NO: 2696912 - RNA, 17 nt, Human
acaaauuuacagagaca

SEQ ID NO: 2696913 - RNA, 22 nt, Human
acaagcucacagaccuuugaac

SEQ ID NO: 2696914 - RNA, 22 nt, Human
aauuuuuucucuaggaaauauu

SEQ ID NO: 2696915 - RNA, 21 nt, Human
aauuuuucuuauuucauuucu

SEQ ID NO: 2696916 - RNA, 21 nt, Human
uagaugcaguucugaagaaga

SEQ ID NO: 2696917 - RNA, 20 nt, Human
uagaugcaguucugaagaag

SEQ ID NO: 2696918 - RNA, 22 nt, Human
uagauaggucagugcaaauacu

SEQ ID NO: 2696919 - RNA, 17 nt, Human
uagauaggccaugggca

SEQ ID NO: 2696920 - RNA, 16 nt, Human
uacuucaugcugucua

SEQ ID NO: 2696921 - RNA, 19 nt, Human
uacuucuuaggguuaugau

SEQ ID NO: 2696922 - RNA, 18 nt, Human
aauuuacagagacagaaa

SEQ ID NO: 2696923 - RNA, 17 nt, Human
aauuuacagagacagaa

SEQ ID NO: 2696924 - RNA, 15 nt, Human
aauuggagcucgugg

SEQ ID NO: 2696925 - RNA, 19 nt, Human
aauuucucccagucauuua

SEQ ID NO: 2696926 - RNA, 18 nt, Human
aauugaggacacugauau

SEQ ID NO: 2696927 - RNA, 17 nt, Human
uacugagagugaacaaa

SEQ ID NO: 2696928 - RNA, 23 nt, Human
uacugggaaagggauuuucagcc

SEQ ID NO: 2696929 - RNA, 14 nt, Human
uacuaaaaauacaa

SEQ ID NO: 2696930 - RNA, 18 nt, Human
uacuaaaaauacaaaaaa

SEQ ID NO: 2696931 - RNA, 13 nt, Human
acacacugaagaa

SEQ ID NO: 2696932 - RNA, 20 nt, Human
acacacucaaaucaagaaac

SEQ ID NO: 2696933 - RNA, 14 nt, Human
acacaacuauauug

SEQ ID NO: 2696934 - RNA, 17 nt, Human
acacaacuauauuguuu

SEQ ID NO: 2696935 - RNA, 14 nt, Human
acaaugcuguauuu

SEQ ID NO: 2696936 - RNA, 17 nt, Human
acaaugcuguauuuuaa

SEQ ID NO: 2696937 - RNA, 14 nt, Human
acacacugaagaag

SEQ ID NO: 2696938 - RNA, 16 nt, Human
uaguguuggagaagaa

SEQ ID NO: 2696939 - RNA, 17 nt, Human
uaguguuggagaagaac

SEQ ID NO: 2696940 - RNA, 12 nt, Human
uaguguuggaga

SEQ ID NO: 2696941 - RNA, 17 nt, Human
acacuaagagagaauga

SEQ ID NO: 2696942 - RNA, 18 nt, Human
acacuaagagagaaugag

SEQ ID NO: 2696943 - RNA, 19 nt, Human
acacuaagagagaaugaga

SEQ ID NO: 2696944 - RNA, 18 nt, Human
acacaugcugaacaucac

SEQ ID NO: 2696945 - RNA, 23 nt, Human
uauaaaauaauuuuuauauuuga

SEQ ID NO: 2696946 - RNA, 14 nt, Human
acacuccagugaga

SEQ ID NO: 2696947 - RNA, 12 nt, Human
acacugaagaag

SEQ ID NO: 2696948 - RNA, 14 nt, Human
acacugaagaagca

SEQ ID NO: 2696949 - RNA, 12 nt, Human
uauauuuacaaa

SEQ ID NO: 2696950 - RNA, 15 nt, Human
acacuuaaaaauggu

SEQ ID NO: 2696951 - RNA, 13 nt, Human
acacuuaaaaaug

SEQ ID NO: 2696952 - RNA, 20 nt, Human
acagcccuucuuuccacaga

SEQ ID NO: 2696953 - RNA, 21 nt, Human
acagcccuucuuuccacagaa

SEQ ID NO: 2696954 - RNA, 19 nt, Human
uauauuuauuacuguaaga

SEQ ID NO: 2696955 - RNA, 15 nt, Human
uauauuuauuacugu

SEQ ID NO: 2696956 - RNA, 19 nt, Human
acaugauccugcaauucca

SEQ ID NO: 2696957 - RNA, 14 nt, Human
ucaaagcugaaaug

SEQ ID NO: 2696958 - RNA, 18 nt, Human
ucaaaagaaagaaaauca

SEQ ID NO: 2696959 - RNA, 21 nt, Human
ucaaaauaccaugccauuuaa

SEQ ID NO: 2696960 - RNA, 23 nt, Human
ucaaaauaccaugccauuuaaag

SEQ ID NO: 2696961 - RNA, 21 nt, Human
ucaaaauaugccccauucaac

SEQ ID NO: 2696962 - RNA, 14 nt, Human
acaugcugaacauc

SEQ ID NO: 2696963 - RNA, 21 nt, Human
acaugcugaacaucacagcuu

SEQ ID NO: 2696964 - RNA, 22 nt, Human
ucaagaugaugaugaucuuuaa

SEQ ID NO: 2696965 - RNA, 15 nt, Human
acaguuuucugagaa

SEQ ID NO: 2696966 - RNA, 17 nt, Human
acaguuuucugagaaag

SEQ ID NO: 2696967 - RNA, 16 nt, Human
acaguuuucugagaaa

SEQ ID NO: 2696968 - RNA, 21 nt, Human
acaguuuucugagaaagacua

SEQ ID NO: 2696969 - RNA, 20 nt, Human
acaguuuucugagaaagacu

SEQ ID NO: 2696970 - RNA, 19 nt, Human
acaguuuucugagaaagac

SEQ ID NO: 2696971 - RNA, 18 nt, Human
acaguuuucugagaaaga

SEQ ID NO: 2696972 - RNA, 21 nt, Human
uaugaaauauuauguuaaaac

SEQ ID NO: 2696973 - RNA, 13 nt, Human
uauuucauuucuu

SEQ ID NO: 2696974 - RNA, 13 nt, Human
acaucaacagaua

SEQ ID NO: 2696975 - RNA, 19 nt, Human
acauauauaacaaugcugu

SEQ ID NO: 2696976 - RNA, 18 nt, Human
acauagaauuaacacaug

SEQ ID NO: 2696977 - RNA, 14 nt, Human
acauagaauuaaca

SEQ ID NO: 2696978 - RNA, 14 nt, Human
accagggacugagg

SEQ ID NO: 2696979 - RNA, 18 nt, Human
accacuuguguuuugcaa

SEQ ID NO: 2696980 - RNA, 15 nt, Human
ucaauucuugccaaa

SEQ ID NO: 2696981 - RNA, 23 nt, Human
ucaauuuuucuuauuucauuucu

SEQ ID NO: 2696982 - RNA, 20 nt, Human
ucaauuuuucuuauuucauu

SEQ ID NO: 2696983 - RNA, 13 nt, Human
accaaucaugaau

SEQ ID NO: 2696984 - RNA, 15 nt, Human
accaaucaugaauua

SEQ ID NO: 2696985 - RNA, 23 nt, Human
accauuucuugagguaaaagcau

SEQ ID NO: 2696986 - RNA, 12 nt, Human
ucagagcugccc

SEQ ID NO: 2696987 - RNA, 13 nt, Human
ucaggaaagagaa

SEQ ID NO: 2696988 - RNA, 19 nt, Human
ucaggaaagagaacuucca

SEQ ID NO: 2696989 - RNA, 21 nt, Human
ucaggaaaucaaauaugcaaa

SEQ ID NO: 2696990 - RNA, 20 nt, Human
ucaggaaaucaaauaugcaa

SEQ ID NO: 2696991 - RNA, 19 nt, Human
uccauccugaggcuccacu

SEQ ID NO: 2696992 - RNA, 21 nt, Human
uccauccugaggcuccacuug

SEQ ID NO: 2696993 - RNA, 20 nt, Human
uccauccugaggcuccacuu

SEQ ID NO: 2696994 - RNA, 13 nt, Human
uccaugaagaugu

SEQ ID NO: 2696995 - RNA, 21 nt, Human
uccaugaagauguagaggaga

SEQ ID NO: 2696996 - RNA, 22 nt, Human
ucccagucauuuaauaaaugug

SEQ ID NO: 2696997 - RNA, 14 nt, Human
ucccagucauuuaa

SEQ ID NO: 2696998 - RNA, 17 nt, Human
ucccagccagcaguuca

SEQ ID NO: 2696999 - RNA, 18 nt, Human
ucccagccagcaguucag

SEQ ID NO: 2697000 - RNA, 16 nt, Human
uccccucggagaagag

SEQ ID NO: 2697001 - RNA, 17 nt, Human
uccccucggagaagagc

SEQ ID NO: 2697002 - RNA, 13 nt, Human
ucccucccuccac

SEQ ID NO: 2697003 - RNA, 14 nt, Human
ucccucccuccacc

SEQ ID NO: 2697004 - RNA, 21 nt, Human
ucccuccaccucccugcaaua

SEQ ID NO: 2697005 - RNA, 23 nt, Human
ucccuccaccucccugcaauaaa

SEQ ID NO: 2697006 - RNA, 15 nt, Human
ucccucccuccaccu

SEQ ID NO: 2697007 - RNA, 16 nt, Human
ucccucccuccaccuc

SEQ ID NO: 2697008 - RNA, 11 nt, Human
ucccugagcag

SEQ ID NO: 2697009 - RNA, 14 nt, Human
acuccaaagaaaug

SEQ ID NO: 2697010 - RNA, 18 nt, Human
acuccaaagaaauguaag

SEQ ID NO: 2697011 - RNA, 15 nt, Human
acuccaaagaaaugu

SEQ ID NO: 2697012 - RNA, 21 nt, Human
acuccaaagaaauguaaggga

SEQ ID NO: 2697013 - RNA, 21 nt, Human
ucaugaauuaguuuuauaugc

SEQ ID NO: 2697014 - RNA, 21 nt, Human
accuagggugauauuaaccag

SEQ ID NO: 2697015 - RNA, 23 nt, Human
ucaggaaaucaaauaugcaaagc

SEQ ID NO: 2697016 - RNA, 22 nt, Human
ucaggaaaucaaauaugcaaag

SEQ ID NO: 2697017 - RNA, 16 nt, Human
ucaugaauuaguuuua

SEQ ID NO: 2697018 - RNA, 12 nt, Human
accucccugcaa

SEQ ID NO: 2697019 - RNA, 13 nt, Human
accucccugcaau

SEQ ID NO: 2697020 - RNA, 14 nt, Human
acgagaaaacaaua

SEQ ID NO: 2697021 - RNA, 20 nt, Human
acgagcaggcuacugucagc

SEQ ID NO: 2697022 - RNA, 19 nt, Human
acgagcaggcuacugucag

SEQ ID NO: 2697023 - RNA, 21 nt, Human
uccaacuaucucauuuccaag

SEQ ID NO: 2697024 - RNA, 18 nt, Human
ucgcuccaccuugcagcu

SEQ ID NO: 2697025 - RNA, 14 nt, Human
acugcauuauauuu

SEQ ID NO: 2697026 - RNA, 15 nt, Human
acugcauuauauuua

SEQ ID NO: 2697027 - RNA, 13 nt, Human
acugccuucucaa

SEQ ID NO: 2697028 - RNA, 19 nt, Human
acugccuucucaacuccaa

SEQ ID NO: 2697029 - RNA, 20 nt, Human
acugccuucucaacuccaaa

SEQ ID NO: 2697030 - RNA, 20 nt, Human
acuggcacaguuuucugaga

SEQ ID NO: 2697031 - RNA, 19 nt, Human
acuggcacaguuuucugag

SEQ ID NO: 2697032 - RNA, 13 nt, Human
acuggcacaguuu

SEQ ID NO: 2697033 - RNA, 20 nt, Human
ucuaaagccauuguaguccu

SEQ ID NO: 2697034 - RNA, 22 nt, Human
ucuaaguaaaaccacagcaguu

SEQ ID NO: 2697035 - RNA, 21 nt, Human
ucuaaguaaaaccacagcagu

SEQ ID NO: 2697036 - RNA, 16 nt, Human
ucuacauacuauggaa

SEQ ID NO: 2697037 - RNA, 23 nt, Human
ucuaaguaaaaccacagcaguug

SEQ ID NO: 2697038 - RNA, 18 nt, Human
acugggacaggggagaac

SEQ ID NO: 2697039 - RNA, 21 nt, Human
acugucagcuccccucggaga

SEQ ID NO: 2697040 - RNA, 18 nt, Human
acuguggguagacacaca

SEQ ID NO: 2697041 - RNA, 22 nt, Human
ucggguuuuauuguuuaaaauc

SEQ ID NO: 2697042 - RNA, 14 nt, Human
agaaaugaaagcag

SEQ ID NO: 2697043 - RNA, 12 nt, Human
ucugaagaagau

SEQ ID NO: 2697044 - RNA, 22 nt, Human
ucucuggccuucggccuccauc

SEQ ID NO: 2697045 - RNA, 21 nt, Human
ucucuggccuucggccuccau

SEQ ID NO: 2697046 - RNA, 23 nt, Human
ucucuggccuucggccuccaucc

SEQ ID NO: 2697047 - RNA, 12 nt, Human
ucucuggccuuc

SEQ ID NO: 2697048 - RNA, 20 nt, Human
acuugaacccgggaggcaga

SEQ ID NO: 2697049 - RNA, 19 nt, Human
acuugaacccgggaggcag

SEQ ID NO: 2697050 - RNA, 21 nt, Human
acuugaacccauauuuguaca

SEQ ID NO: 2697051 - RNA, 16 nt, Human
acuugucaauaaaauc

SEQ ID NO: 2697052 - RNA, 23 nt, Human
acuucuaaguaaaaccacagcag

SEQ ID NO: 2697053 - RNA, 12 nt, Human
ucucaggaaauc

SEQ ID NO: 2697054 - RNA, 16 nt, Human
acuuguguuuugcaag

SEQ ID NO: 2697055 - RNA, 16 nt, Human
agacacacugaagaag

SEQ ID NO: 2697056 - RNA, 17 nt, Human
agacacacugaagaagc

SEQ ID NO: 2697057 - RNA, 23 nt, Human
ucuuagaugcaguucugaagaag

SEQ ID NO: 2697058 - RNA, 22 nt, Human
ucuuagaugcaguucugaagaa

SEQ ID NO: 2697059 - RNA, 24 nt, Human
agagacagaaagcagaacagugau

SEQ ID NO: 2697060 - RNA, 15 nt, Human
ucuuauuucauuucu

SEQ ID NO: 2697061 - RNA, 16 nt, Human
ucuuauuucauuucuu

SEQ ID NO: 2697062 - RNA, 23 nt, Human
agacuauucaaacagucucagga

SEQ ID NO: 2697063 - RNA, 16 nt, Human
agaguuuagcuggaaa

SEQ ID NO: 2697064 - RNA, 17 nt, Human
agaguuuagcuggaaaa

SEQ ID NO: 2697065 - RNA, 15 nt, Human
agaugcuagaacucc

SEQ ID NO: 2697066 - RNA, 14 nt, Human
agaugcuagaacuc

SEQ ID NO: 2697067 - RNA, 18 nt, Human
agaugcaguucugaagaa

SEQ ID NO: 2697068 - RNA, 19 nt, Human
agaugcaguucugaagaag

SEQ ID NO: 2697069 - RNA, 17 nt, Human
agaugcaguucugaaga

SEQ ID NO: 2697070 - RNA, 17 nt, Human
ugacccacaagaaauga

SEQ ID NO: 2697071 - RNA, 15 nt, Human
agagguugcagugag

SEQ ID NO: 2697072 - RNA, 21 nt, Human
agagcuguucacagccagacu

SEQ ID NO: 2697073 - RNA, 19 nt, Human
agagcuguucacagccaga

SEQ ID NO: 2697074 - RNA, 22 nt, Human
agagcugcccucuccugggcag

SEQ ID NO: 2697075 - RNA, 23 nt, Human
ugaacuagaguuuagcuggaaaa

SEQ ID NO: 2697076 - RNA, 18 nt, Human
ugaacaaauuuacagaga

SEQ ID NO: 2697077 - RNA, 20 nt, Human
ugaacaaauuuacagagaca

SEQ ID NO: 2697078 - RNA, 19 nt, Human
ugaacaaauuuacagagac

SEQ ID NO: 2697079 - RNA, 18 nt, Human
ugaaauauuauguuaaaa

SEQ ID NO: 2697080 - RNA, 15 nt, Human
ugaaauuguauuaca

SEQ ID NO: 2697081 - RNA, 15 nt, Human
agagcugcccucucc

SEQ ID NO: 2697082 - RNA, 13 nt, Human
agagcugcccucu

SEQ ID NO: 2697083 - RNA, 14 nt, Human
agagcugcccucuc

SEQ ID NO: 2697084 - RNA, 23 nt, Human
ugaaauaagccagacaucaacag

SEQ ID NO: 2697085 - RNA, 20 nt, Human
ugaaauaagccagacaucaa

SEQ ID NO: 2697086 - RNA, 18 nt, Human
ugaaauaagccagacauc

SEQ ID NO: 2697087 - RNA, 17 nt, Human
ugaaauaagccagacau

SEQ ID NO: 2697088 - RNA, 20 nt, Human
agcaucacaugaacuuguaa

SEQ ID NO: 2697089 - RNA, 22 nt, Human
agcauuuagauguauagguuga

SEQ ID NO: 2697090 - RNA, 16 nt, Human
ugauuaaguaaugaua

SEQ ID NO: 2697091 - RNA, 15 nt, Human
ugauuaaguaaugau

SEQ ID NO: 2697092 - RNA, 14 nt, Human
agcaggcuacuguc

SEQ ID NO: 2697093 - RNA, 20 nt, Human
agcaggcuacugucagcucc

SEQ ID NO: 2697094 - RNA, 19 nt, Human
agcaggcuacugucagcuc

SEQ ID NO: 2697095 - RNA, 17 nt, Human
agcaggcuacugucagc

SEQ ID NO: 2697096 - RNA, 16 nt, Human
agcaggcuacugucag

SEQ ID NO: 2697097 - RNA, 20 nt, Human
agcaggaagcugugagagca

SEQ ID NO: 2697098 - RNA, 19 nt, Human
agcagggcauggcugggaa

SEQ ID NO: 2697099 - RNA, 22 nt, Human
agcauaccaacacgagcaggcu

SEQ ID NO: 2697100 - RNA, 19 nt, Human
agcauaccaacacgagcag

SEQ ID NO: 2697101 - RNA, 13 nt, Human
agcauaccaacac

SEQ ID NO: 2697102 - RNA, 19 nt, Human
agcagucaggaaagagaac

SEQ ID NO: 2697103 - RNA, 20 nt, Human
agcaguuugguuucuagcau

SEQ ID NO: 2697104 - RNA, 22 nt, Human
agcaguuugguuucuagcauga

SEQ ID NO: 2697105 - RNA, 23 nt, Human
agcaguuugguuucuagcaugaa

SEQ ID NO: 2697106 - RNA, 17 nt, Human
agcagucaggaaagaga

SEQ ID NO: 2697107 - RNA, 18 nt, Human
agcagucaggaaagagaa

SEQ ID NO: 2697108 - RNA, 13 nt, Human
ugccauaauuacu

SEQ ID NO: 2697109 - RNA, 17 nt, Human
ugccaguuauggcuaua

SEQ ID NO: 2697110 - RNA, 19 nt, Human
agccugagcgacagugaga

SEQ ID NO: 2697111 - RNA, 19 nt, Human
ugcauacucauuaggaugg

SEQ ID NO: 2697112 - RNA, 13 nt, Human
ugcauacucauua

SEQ ID NO: 2697113 - RNA, 20 nt, Human
ugcauagauucccugagcag

SEQ ID NO: 2697114 - RNA, 17 nt, Human
ugcaauaaaauggguuu

SEQ ID NO: 2697115 - RNA, 21 nt, Human
ugcaauaaaauggguuuuacu

SEQ ID NO: 2697116 - RNA, 15 nt, Human
ugcaagccagauuuu

SEQ ID NO: 2697117 - RNA, 21 nt, Human
ugcaagccagauuuuccugaa

SEQ ID NO: 2697118 - RNA, 18 nt, Human
ugcaaagcacugacuucu

SEQ ID NO: 2697119 - RNA, 22 nt, Human
ugcaaagcacugacuucuaagu

SEQ ID NO: 2697120 - RNA, 20 nt, Human
ugcaaagcacugacuucuaa

SEQ ID NO: 2697121 - RNA, 13 nt, Human
ugauuucauucaa

SEQ ID NO: 2697122 - RNA, 22 nt, Human
ugcagaagacaguauggcagcu

SEQ ID NO: 2697123 - RNA, 17 nt, Human
ugcacuccagccugagc

SEQ ID NO: 2697124 - RNA, 15 nt, Human
ugcacuccagccuga

SEQ ID NO: 2697125 - RNA, 20 nt, Human
aggacgcucucuggccuucg

SEQ ID NO: 2697126 - RNA, 19 nt, Human
aggacgcucucuggccuuc

SEQ ID NO: 2697127 - RNA, 17 nt, Human
aggacgcucucuggccu

SEQ ID NO: 2697128 - RNA, 16 nt, Human
aggacgcucucuggcc

SEQ ID NO: 2697129 - RNA, 14 nt, Human
aggacgcucucugg

SEQ ID NO: 2697130 - RNA, 13 nt, Human
aggacgcucucug

SEQ ID NO: 2697131 - RNA, 17 nt, Human
aggagaaacuggaacuc

SEQ ID NO: 2697132 - RNA, 19 nt, Human
aggagaaacuggaacucuc

SEQ ID NO: 2697133 - RNA, 18 nt, Human
aggagaaacuggaacucu

SEQ ID NO: 2697134 - RNA, 17 nt, Human
ugcuuuuaaaaaaaaau

SEQ ID NO: 2697135 - RNA, 21 nt, Human
uggagcucgugggacagucac

SEQ ID NO: 2697136 - RNA, 17 nt, Human
uggagcucguggaacag

SEQ ID NO: 2697137 - RNA, 21 nt, Human
uggagcucguggaacaguuac

SEQ ID NO: 2697138 - RNA, 20 nt, Human
aggcauuuaggccaugggac

SEQ ID NO: 2697139 - RNA, 15 nt, Human
aggcagcuugaaacu

SEQ ID NO: 2697140 - RNA, 14 nt, Human
uggaguugaaaauc

SEQ ID NO: 2697141 - RNA, 15 nt, Human
aggcccccaggugcc

SEQ ID NO: 2697142 - RNA, 22 nt, Human
aggaaaucaaauaugcaaagca

SEQ ID NO: 2697143 - RNA, 21 nt, Human
aggaaaucaaauaugcaaagc

SEQ ID NO: 2697144 - RNA, 20 nt, Human
aggaaaucaaauaugcaaag

SEQ ID NO: 2697145 - RNA, 17 nt, Human
ugccuuuucccaacucc

SEQ ID NO: 2697146 - RNA, 19 nt, Human
ugccuuuucccaacuccag

SEQ ID NO: 2697147 - RNA, 14 nt, Human
ugcuacaaaaacac

SEQ ID NO: 2697148 - RNA, 19 nt, Human
agcuugcccuguuaaaaga

SEQ ID NO: 2697149 - RNA, 18 nt, Human
agcuugcccuguuaaaag

SEQ ID NO: 2697150 - RNA, 16 nt, Human
agcuugcccuguuaaa

SEQ ID NO: 2697151 - RNA, 20 nt, Human
agcuugcccuggugccucac

SEQ ID NO: 2697152 - RNA, 20 nt, Human
ugcccuguuaaaagaugaaa

SEQ ID NO: 2697153 - RNA, 13 nt, Human
agcugcccucucc

SEQ ID NO: 2697154 - RNA, 14 nt, Human
agcugcccucuccu

SEQ ID NO: 2697155 - RNA, 15 nt, Human
agcugcccucuccug

SEQ ID NO: 2697156 - RNA, 16 nt, Human
agcugcccucuccugg

SEQ ID NO: 2697157 - RNA, 14 nt, Human
agcuguucacagcc

SEQ ID NO: 2697158 - RNA, 16 nt, Human
uguaaaggaauuuaaa

SEQ ID NO: 2697159 - RNA, 14 nt, Human
uguaguguuggaga

SEQ ID NO: 2697160 - RNA, 15 nt, Human
uguaguguuggagaa

SEQ ID NO: 2697161 - RNA, 18 nt, Human
uguaucacaaaucuuaac

SEQ ID NO: 2697162 - RNA, 15 nt, Human
uguaucacaaaucuu

SEQ ID NO: 2697163 - RNA, 22 nt, Human
uguauuacaaauccaaugaaau

SEQ ID NO: 2697164 - RNA, 13 nt, Human
uguauuacaaauc

SEQ ID NO: 2697165 - RNA, 13 nt, Human
aguagucagacug

SEQ ID NO: 2697166 - RNA, 18 nt, Human
aguauuagaauaccacag

SEQ ID NO: 2697167 - RNA, 14 nt, Human
agucaccucaugga

SEQ ID NO: 2697168 - RNA, 15 nt, Human
agucaccucauggaa

SEQ ID NO: 2697169 - RNA, 17 nt, Human
agucaccucauggaauu

SEQ ID NO: 2697170 - RNA, 18 nt, Human
aguauuucuaugaaauau

SEQ ID NO: 2697171 - RNA, 17 nt, Human
aguauuucuaugaaaua

SEQ ID NO: 2697172 - RNA, 16 nt, Human
aguauuucuaugaaau

SEQ ID NO: 2697173 - RNA, 16 nt, Human
uguagaggagaaacug

SEQ ID NO: 2697174 - RNA, 17 nt, Human
aguaaugauaacuggaa

SEQ ID NO: 2697175 - RNA, 18 nt, Human
aguaaugauaacuggaaa

SEQ ID NO: 2697176 - RNA, 20 nt, Human
aguaaugauaacuggaaacu

SEQ ID NO: 2697177 - RNA, 13 nt, Human
aguaaaauccaca

SEQ ID NO: 2697178 - RNA, 13 nt, Human
agggaaauuucag

SEQ ID NO: 2697179 - RNA, 23 nt, Human
agggaggacgcucucuggccuuc

SEQ ID NO: 2697180 - RNA, 22 nt, Human
agggaggacgcucucuggccuu

SEQ ID NO: 2697181 - RNA, 21 nt, Human
agggaggacgcucucuggccu

SEQ ID NO: 2697182 - RNA, 18 nt, Human
aggggagcaugggaagug

SEQ ID NO: 2697183 - RNA, 21 nt, Human
aguucugcagauaaacaguag

SEQ ID NO: 2697184 - RNA, 16 nt, Human
aguucugcagauaaac

SEQ ID NO: 2697185 - RNA, 16 nt, Human
aguucugaagaagaug

SEQ ID NO: 2697186 - RNA, 14 nt, Human
uguuuugcaagcca

SEQ ID NO: 2697187 - RNA, 19 nt, Human
uguuuucauuaucucaaaa

SEQ ID NO: 2697188 - RNA, 16 nt, Human
aguuuagcuggaaaag

SEQ ID NO: 2697189 - RNA, 14 nt, Human
uuaccuuacagaag

SEQ ID NO: 2697190 - RNA, 12 nt, Human
uuaccugggaaa

SEQ ID NO: 2697191 - RNA, 15 nt, Human
uuacuguaagaaaau

SEQ ID NO: 2697192 - RNA, 20 nt, Human
uuaagaagacugcauuauau

SEQ ID NO: 2697193 - RNA, 22 nt, Human
uuaagaagacugcauuauauuu

SEQ ID NO: 2697194 - RNA, 18 nt, Human
uuaaguaaugauaacugg

SEQ ID NO: 2697195 - RNA, 16 nt, Human
auaaaauaauuuuuau

SEQ ID NO: 2697196 - RNA, 21 nt, Human
auaaaauaauuuuuauauuug

SEQ ID NO: 2697197 - RNA, 18 nt, Human
auaaaauccauacauuug

SEQ ID NO: 2697198 - RNA, 19 nt, Human
auaaaauccauacauuugu

SEQ ID NO: 2697199 - RNA, 19 nt, Human
ugugagaugcuagaacucc

SEQ ID NO: 2697200 - RNA, 15 nt, Human
ugugagaugcuagaa

SEQ ID NO: 2697201 - RNA, 22 nt, Human
agucucaggaaaucaaauaugc

SEQ ID NO: 2697202 - RNA, 20 nt, Human
agugaacaaauuuacagaga

SEQ ID NO: 2697203 - RNA, 16 nt, Human
agugaacaaauuuaca

SEQ ID NO: 2697204 - RNA, 15 nt, Human
agugaaagaaaauaa

SEQ ID NO: 2697205 - RNA, 20 nt, Human
uguggucacaggaaguagag

SEQ ID NO: 2697206 - RNA, 13 nt, Human
uguguaaguagau

SEQ ID NO: 2697207 - RNA, 15 nt, Human
uguuauaaucuuuca

SEQ ID NO: 2697208 - RNA, 18 nt, Human
uguuccuagugaaagagg

SEQ ID NO: 2697209 - RNA, 14 nt, Human
uguuccuagugaaa

SEQ ID NO: 2697210 - RNA, 13 nt, Human
auauuugaaauau

SEQ ID NO: 2697211 - RNA, 22 nt, Human
auauuuguaucacaaaucuuaa

SEQ ID NO: 2697212 - RNA, 12 nt, Human
auauuuuaacuu

SEQ ID NO: 2697213 - RNA, 23 nt, Human
auauuugaaauauugacuuuuua

SEQ ID NO: 2697214 - RNA, 14 nt, Human
auauuugaaauauu

SEQ ID NO: 2697215 - RNA, 19 nt, Human
auauuugaaauauugacuu

SEQ ID NO: 2697216 - RNA, 12 nt, Human
uucugaagaaga

SEQ ID NO: 2697217 - RNA, 13 nt, Human
uucugaagaagau

SEQ ID NO: 2697218 - RNA, 14 nt, Human
uucugaagaagaug

SEQ ID NO: 2697219 - RNA, 23 nt, Human
uucugcaucagcugcugaaacaa

SEQ ID NO: 2697220 - RNA, 16 nt, Human
uucugcaucagcugcu

SEQ ID NO: 2697221 - RNA, 11 nt, Human
aucccucccuc

SEQ ID NO: 2697222 - RNA, 13 nt, Human
aucccucccucca

SEQ ID NO: 2697223 - RNA, 14 nt, Human
aucccucccuccac

SEQ ID NO: 2697224 - RNA, 23 nt, Human
aucccucccuccaccucccugca

SEQ ID NO: 2697225 - RNA, 14 nt, Human
uucucaacuccaaa

SEQ ID NO: 2697226 - RNA, 18 nt, Human
uucucaacuccaaacuga

SEQ ID NO: 2697227 - RNA, 17 nt, Human
uuauuguuuaaaaucau

SEQ ID NO: 2697228 - RNA, 18 nt, Human
auagcuacuaauuuuaaa

SEQ ID NO: 2697229 - RNA, 17 nt, Human
auagcuacuaauuuuaa

SEQ ID NO: 2697230 - RNA, 14 nt, Human
auagcuacuaauuu

SEQ ID NO: 2697231 - RNA, 21 nt, Human
auaggaauugacccacaagaa

SEQ ID NO: 2697232 - RNA, 15 nt, Human
uucaaacauauauaa

SEQ ID NO: 2697233 - RNA, 17 nt, Human
auagucaaauuguguga

SEQ ID NO: 2697234 - RNA, 18 nt, Human
auagucaaauugugugaa

SEQ ID NO: 2697235 - RNA, 19 nt, Human
auauauaacaaugcuguau

SEQ ID NO: 2697236 - RNA, 17 nt, Human
auauauaacaaugcugu

SEQ ID NO: 2697237 - RNA, 18 nt, Human
auauauaacaaugcugua

SEQ ID NO: 2697238 - RNA, 19 nt, Human
auauaagcuuguauuccuu

SEQ ID NO: 2697239 - RNA, 12 nt, Human
auauaacaaugc

SEQ ID NO: 2697240 - RNA, 15 nt, Human
auauaacaaugcugu

SEQ ID NO: 2697241 - RNA, 15 nt, Human
uucagcccucagaau

SEQ ID NO: 2697242 - RNA, 15 nt, Human
auaugcaaagcacug

SEQ ID NO: 2697243 - RNA, 16 nt, Human
auaugcaaagcacuga

SEQ ID NO: 2697244 - RNA, 23 nt, Human
auaugcaaagcacugacuucuaa

SEQ ID NO: 2697245 - RNA, 18 nt, Human
augaacuuguaaaggaau

SEQ ID NO: 2697246 - RNA, 15 nt, Human
aucuuauaauuuaaa

SEQ ID NO: 2697247 - RNA, 16 nt, Human
aucuuauaauuuaaaa

SEQ ID NO: 2697248 - RNA, 15 nt, Human
aucuuuaaaauacac

SEQ ID NO: 2697249 - RNA, 12 nt, Human
aucuuuaaaaua

SEQ ID NO: 2697250 - RNA, 17 nt, Human
uuggagaagaacugaaa

SEQ ID NO: 2697251 - RNA, 22 nt, Human
uuggagaagaacugaaaucaua

SEQ ID NO: 2697252 - RNA, 15 nt, Human
uuggagaagaacuga

SEQ ID NO: 2697253 - RNA, 15 nt, Human
aucucaaaacugcac

SEQ ID NO: 2697254 - RNA, 20 nt, Human
aucucaaaacugcacuguca

SEQ ID NO: 2697255 - RNA, 19 nt, Human
aucucaaaacugcacuguc

SEQ ID NO: 2697256 - RNA, 13 nt, Human
uugacaugggaca

SEQ ID NO: 2697257 - RNA, 12 nt, Human
uugacuuuuuau

SEQ ID NO: 2697258 - RNA, 21 nt, Human
uuuauaugcuucuguuuuaua

SEQ ID NO: 2697259 - RNA, 19 nt, Human
uuuauaugcuucuguuuua

SEQ ID NO: 2697260 - RNA, 14 nt, Human
augccuuuucccaa

SEQ ID NO: 2697261 - RNA, 20 nt, Human
augccuuuucccaacuccag

SEQ ID NO: 2697262 - RNA, 22 nt, Human
augccuuuucccaacuccagaa

SEQ ID NO: 2697263 - RNA, 18 nt, Human
augcuacaggauuugaaa

SEQ ID NO: 2697264 - RNA, 23 nt, Human
augcuguauuuuaaaagaaugau

SEQ ID NO: 2697265 - RNA, 19 nt, Human
augcuguauuuuaaaagaa

SEQ ID NO: 2697266 - RNA, 22 nt, Human
augcuguauuuuaaaagaauga

SEQ ID NO: 2697267 - RNA, 21 nt, Human
augcuucuguuuuauaauuuu

SEQ ID NO: 2697268 - RNA, 19 nt, Human
uuucaaacauauauaacaa

SEQ ID NO: 2697269 - RNA, 17 nt, Human
uuucaaacauauauaac

SEQ ID NO: 2697270 - RNA, 21 nt, Human
uuuaaauauaugcuaagucuu

SEQ ID NO: 2697271 - RNA, 14 nt, Human
augcaaagcacuga

SEQ ID NO: 2697272 - RNA, 13 nt, Human
augcaaagcacug

SEQ ID NO: 2697273 - RNA, 12 nt, Human
augcaaagcacu

SEQ ID NO: 2697274 - RNA, 18 nt, Human
uuuaaaaaaauuccaagu

SEQ ID NO: 2697275 - RNA, 13 nt, Human
augauuucauuca

SEQ ID NO: 2697276 - RNA, 15 nt, Human
augagguacugagag

SEQ ID NO: 2697277 - RNA, 18 nt, Human
augagguacugagaguga

SEQ ID NO: 2697278 - RNA, 17 nt, Human
augagguacugagagug

SEQ ID NO: 2697279 - RNA, 20 nt, Human
uugucaauaaaauccauaca

SEQ ID NO: 2697280 - RNA, 15 nt, Human
auuacuguaagaaaa

SEQ ID NO: 2697281 - RNA, 16 nt, Human
auuacuguaagaaaau

SEQ ID NO: 2697282 - RNA, 14 nt, Human
uuuugugaagcaaa

SEQ ID NO: 2697283 - RNA, 15 nt, Human
uuuuguuuucauuau

SEQ ID NO: 2697284 - RNA, 15 nt, Human
uuuuugaagcuguau

SEQ ID NO: 2697285 - RNA, 17 nt, Human
auuccaagugauugaaa

SEQ ID NO: 2697286 - RNA, 20 nt, Human
auuauauggcuugaguuuaa

SEQ ID NO: 2697287 - RNA, 22 nt, Human
auucaaacagucucaggaaauc

SEQ ID NO: 2697288 - RNA, 20 nt, Human
uuugcuggagcucugcccau

SEQ ID NO: 2697289 - RNA, 19 nt, Human
uuugcuaagcauuccaacu

SEQ ID NO: 2697290 - RNA, 17 nt, Human
uuuguaguguuggagaa

SEQ ID NO: 2697291 - RNA, 23 nt, Human
augucgucaaagcugaaauggac

SEQ ID NO: 2697292 - RNA, 19 nt, Human
auguauauuuuauaucaau

SEQ ID NO: 2697293 - RNA, 21 nt, Human
augugcuaguaauuggaaagg

SEQ ID NO: 2697294 - RNA, 20 nt, Human
augugcuaguaauuggaaag

SEQ ID NO: 2697295 - RNA, 22 nt, Human
uuuuauggcacuaguauuucua

SEQ ID NO: 2697296 - RNA, 20 nt, Human
uuuucaggcuagauguaugu

SEQ ID NO: 2697297 - RNA, 16 nt, Human
uuuucuauaauuuaaa

SEQ ID NO: 2697298 - RNA, 16 nt, Human
uuuucucuaggaaaua

SEQ ID NO: 2697299 - RNA, 24 nt, Human
auuccuagaaacugacacaugcug

SEQ ID NO: 2697300 - RNA, 17 nt, Human
auugaaggaugcugucu

SEQ ID NO: 2697301 - RNA, 16 nt, Human
auuggagcucguggaa

SEQ ID NO: 2697302 - RNA, 17 nt, Human
auuggagcucgugggac

SEQ ID NO: 2697303 - RNA, 20 nt, Human
auuucuugagguaaaagcau

SEQ ID NO: 2697304 - RNA, 21 nt, Human
auuuauuuuaauaauguuuca

SEQ ID NO: 2697305 - RNA, 19 nt, Human
auuuauuacuguaagaaaa

SEQ ID NO: 2697306 - RNA, 20 nt, Human
auuuauuacuguaagaaaau

SEQ ID NO: 2697307 - RNA, 17 nt, Human
auuuaaaaaaaaaccug

SEQ ID NO: 2697308 - RNA, 16 nt, Human
auuguaguccuguaau

SEQ ID NO: 2697309 - RNA, 15 nt, Human
auuuaccacuugugu

SEQ ID NO: 2697310 - RNA, 22 nt, Human
auuuaccacuuguguuuugcaa

SEQ ID NO: 2697311 - RNA, 18 nt, Human
auuuuaauaauguuucaa

SEQ ID NO: 2697312 - RNA, 19 nt, Human
auuuuaauaauguuucaaa

SEQ ID NO: 2697313 - RNA, 14 nt, Human
caaagaaauguaag

SEQ ID NO: 2697314 - RNA, 19 nt, Human
caagacugcacaucaaaau

SEQ ID NO: 2697315 - RNA, 13 nt, Human
caagaaaugaaag

SEQ ID NO: 2697316 - RNA, 16 nt, Human
caagcauaccaacacg

SEQ ID NO: 2697317 - RNA, 21 nt, Human
caagcauaccaacacgagcag

SEQ ID NO: 2697318 - RNA, 16 nt, Human
caagcauuuagaugua

SEQ ID NO: 2697319 - RNA, 19 nt, Human
caagcauuuagauguauag

SEQ ID NO: 2697320 - RNA, 23 nt, Human
caaauuuacagagacagaaagca

SEQ ID NO: 2697321 - RNA, 17 nt, Human
caaauuuacagagacag

SEQ ID NO: 2697322 - RNA, 16 nt, Human
caaauuuacagagaca

SEQ ID NO: 2697323 - RNA, 23 nt, Human
cacaagacccaaaaggcagaagc

SEQ ID NO: 2697324 - RNA, 23 nt, Human
cacaagaaaugaaagcagggacu

SEQ ID NO: 2697325 - RNA, 15 nt, Human
cacaagaaaugaaag

SEQ ID NO: 2697326 - RNA, 13 nt, Human
cacaagaaaugaa

SEQ ID NO: 2697327 - RNA, 17 nt, Human
cacaugaaguccaagca

SEQ ID NO: 2697328 - RNA, 20 nt, Human
cacaugaaguccaagcauuu

SEQ ID NO: 2697329 - RNA, 16 nt, Human
cacaugaaguccaagc

SEQ ID NO: 2697330 - RNA, 20 nt, Human
cacaguuuucugagaaagac

SEQ ID NO: 2697331 - RNA, 22 nt, Human
cacaguuuucugagaaagacua

SEQ ID NO: 2697332 - RNA, 21 nt, Human
cacaguuuucugagaaagacu

SEQ ID NO: 2697333 - RNA, 13 nt, Human
cccaggugccagu

SEQ ID NO: 2697334 - RNA, 18 nt, Human
ccaucaaggguacacugc

SEQ ID NO: 2697335 - RNA, 16 nt, Human
ccaugauguuuagaaa

SEQ ID NO: 2697336 - RNA, 14 nt, Human
ccaugaagauguag

SEQ ID NO: 2697337 - RNA, 18 nt, Human
cccaaaaggcagaagcaa

SEQ ID NO: 2697338 - RNA, 13 nt, Human
cccaaaaggcaga

SEQ ID NO: 2697339 - RNA, 17 nt, Human
ccaggugccaguuaugg

SEQ ID NO: 2697340 - RNA, 18 nt, Human
ccacugcagaagacagua

SEQ ID NO: 2697341 - RNA, 13 nt, Human
ccacugcagaaga

SEQ ID NO: 2697342 - RNA, 16 nt, Human
ccaauauucauagcag

SEQ ID NO: 2697343 - RNA, 20 nt, Human
ccacaggaaccacaagacug

SEQ ID NO: 2697344 - RNA, 22 nt, Human
ccaaacugacucuuaagaagac

SEQ ID NO: 2697345 - RNA, 23 nt, Human
ccaaauuucauaccuaucaucuu

SEQ ID NO: 2697346 - RNA, 14 nt, Human
ccaagcaaguauua

SEQ ID NO: 2697347 - RNA, 17 nt, Human
ccaagcauuuagaugua

SEQ ID NO: 2697348 - RNA, 22 nt, Human
ccaagcauaccaacacgagcag

SEQ ID NO: 2697349 - RNA, 17 nt, Human
cauuuaggccaugggac

SEQ ID NO: 2697350 - RNA, 13 nt, Human
cauuugcucaugg

SEQ ID NO: 2697351 - RNA, 18 nt, Human
cauuugcucauggaauug

SEQ ID NO: 2697352 - RNA, 17 nt, Human
cggccuccauccugagg

SEQ ID NO: 2697353 - RNA, 16 nt, Human
cggccuccauccugag

SEQ ID NO: 2697354 - RNA, 14 nt, Human
cggccuccauccug

SEQ ID NO: 2697355 - RNA, 11 nt, Human
cgcaaugugac

SEQ ID NO: 2697356 - RNA, 20 nt, Human
ccugggcagcugccuccccu

SEQ ID NO: 2697357 - RNA, 15 nt, Human
ccugggcagcugccu

SEQ ID NO: 2697358 - RNA, 16 nt, Human
ccugggcagcugccuc

SEQ ID NO: 2697359 - RNA, 17 nt, Human
ccugggcagcugccucc

SEQ ID NO: 2697360 - RNA, 18 nt, Human
ccugggcagcugccuccc

SEQ ID NO: 2697361 - RNA, 12 nt, Human
ccuucagccuga

SEQ ID NO: 2697362 - RNA, 17 nt, Human
ccuccccuccucugcuu

SEQ ID NO: 2697363 - RNA, 18 nt, Human
ccuccccuccucugcuug

SEQ ID NO: 2697364 - RNA, 12 nt, Human
ccucccugcaau

SEQ ID NO: 2697365 - RNA, 16 nt, Human
ccucccugcaauaaaa

SEQ ID NO: 2697366 - RNA, 11 nt, Human
ccuccucugcu

SEQ ID NO: 2697367 - RNA, 15 nt, Human
ccuccccuccucugc

SEQ ID NO: 2697368 - RNA, 14 nt, Human
ccuccccuccucug

SEQ ID NO: 2697369 - RNA, 20 nt, Human
ccucagaaaacaaggaugaa

SEQ ID NO: 2697370 - RNA, 20 nt, Human
ccucugcuugccaucccucc

SEQ ID NO: 2697371 - RNA, 21 nt, Human
ccucugcuugccaucccuccc

SEQ ID NO: 2697372 - RNA, 11 nt, Human
ccucuccuggg

SEQ ID NO: 2697373 - RNA, 12 nt, Human
ccucuccugggc

SEQ ID NO: 2697374 - RNA, 13 nt, Human
ccucuccugggca

SEQ ID NO: 2697375 - RNA, 14 nt, Human
ccucuccugggcag

SEQ ID NO: 2697376 - RNA, 17 nt, Human
ccugaggcuccacuugg

SEQ ID NO: 2697377 - RNA, 20 nt, Human
ccugaggcuccacuuggucu

SEQ ID NO: 2697378 - RNA, 18 nt, Human
ccugaggcuccacuuggu

SEQ ID NO: 2697379 - RNA, 18 nt, Human
ccugaaagaggaaugaag

SEQ ID NO: 2697380 - RNA, 23 nt, Human
ccugaaagaggaaugaaguacuc

SEQ ID NO: 2697381 - RNA, 23 nt, Human
ccucuuagaugcaguucugaaga

SEQ ID NO: 2697382 - RNA, 15 nt, Human
cccuugaugaagaag

SEQ ID NO: 2697383 - RNA, 16 nt, Human
cccuugaugaagaagu

SEQ ID NO: 2697384 - RNA, 22 nt, Human
ccgggaggcagagguugcagug

SEQ ID NO: 2697385 - RNA, 21 nt, Human
cuggucccagccagcaguuca

SEQ ID NO: 2697386 - RNA, 22 nt, Human
cugggaacccaaguccaagcau

SEQ ID NO: 2697387 - RNA, 19 nt, Human
cuggcacaguuuucugaga

SEQ ID NO: 2697388 - RNA, 18 nt, Human
cuggcacaguuuucugag

SEQ ID NO: 2697389 - RNA, 16 nt, Human
cuggccaacgggguga

SEQ ID NO: 2697390 - RNA, 23 nt, Human
cuggaauaauccuaaacauauga

SEQ ID NO: 2697391 - RNA, 13 nt, Human
cugcugaaacaac

SEQ ID NO: 2697392 - RNA, 15 nt, Human
cugccuaagugcagc

SEQ ID NO: 2697393 - RNA, 13 nt, Human
cugcagaagacag

SEQ ID NO: 2697394 - RNA, 23 nt, Human
cugcagaagacaguauggcagcu

SEQ ID NO: 2697395 - RNA, 21 nt, Human
cugauguuccuagugaaagag

SEQ ID NO: 2697396 - RNA, 20 nt, Human
cugauguuccuagugaaaga

SEQ ID NO: 2697397 - RNA, 18 nt, Human
cugauguuccuagugaaa

SEQ ID NO: 2697398 - RNA, 13 nt, Human
cugauguuccuag

SEQ ID NO: 2697399 - RNA, 13 nt, Human
cucuuaagaagac

SEQ ID NO: 2697400 - RNA, 21 nt, Human
cucuccugggcagcugccucc

SEQ ID NO: 2697401 - RNA, 23 nt, Human
cucugcauacucauuaggauggc

SEQ ID NO: 2697402 - RNA, 23 nt, Human
cuccaccucccugcaauaaaaug

SEQ ID NO: 2697403 - RNA, 14 nt, Human
cuccaccucccugc

SEQ ID NO: 2697404 - RNA, 15 nt, Human
cuccaccucccugca

SEQ ID NO: 2697405 - RNA, 16 nt, Human
cuccaccucccugcaa

SEQ ID NO: 2697406 - RNA, 17 nt, Human
cuccaccucccugcaau

SEQ ID NO: 2697407 - RNA, 17 nt, Human
cucccagucauuuaaua

SEQ ID NO: 2697408 - RNA, 23 nt, Human
cuccauccugaggcuccacuugg

SEQ ID NO: 2697409 - RNA, 20 nt, Human
cuccauccugaggcuccacu

SEQ ID NO: 2697410 - RNA, 21 nt, Human
cuccauccugaggcuccacuu

SEQ ID NO: 2697411 - RNA, 18 nt, Human
cucauuaggauggcuagu

SEQ ID NO: 2697412 - RNA, 17 nt, Human
cucauuaggauggcuag

SEQ ID NO: 2697413 - RNA, 12 nt, Human
cucggagaagag

SEQ ID NO: 2697414 - RNA, 20 nt, Human
cucggagaagagcuguucac

SEQ ID NO: 2697415 - RNA, 13 nt, Human
cucggagaagagc

SEQ ID NO: 2697416 - RNA, 12 nt, Human
cucccuuucaac

SEQ ID NO: 2697417 - RNA, 13 nt, Human
cucccuuucaaca

SEQ ID NO: 2697418 - RNA, 16 nt, Human
cucccuucucuucaca

SEQ ID NO: 2697419 - RNA, 17 nt, Human
cuucggccuccauccug

SEQ ID NO: 2697420 - RNA, 19 nt, Human
cuucggccuccauccugag

SEQ ID NO: 2697421 - RNA, 18 nt, Human
cuucggccuccauccuga

SEQ ID NO: 2697422 - RNA, 19 nt, Human
cuuccuuggacucauuuua

SEQ ID NO: 2697423 - RNA, 18 nt, Human
cuucagcgguuuauauaa

SEQ ID NO: 2697424 - RNA, 19 nt, Human
cuuccagauccuggaaauc

SEQ ID NO: 2697425 - RNA, 13 nt, Human
cuuauaauuuaaa

SEQ ID NO: 2697426 - RNA, 21 nt, Human
cuuaggguuaugauuaaguaa

SEQ ID NO: 2697427 - RNA, 14 nt, Human
cuuauaauuuaaaa

SEQ ID NO: 2697428 - RNA, 19 nt, Human
cuuauaggaauugacccac

SEQ ID NO: 2697429 - RNA, 19 nt, Human
cuuagaugcaguucugaag

SEQ ID NO: 2697430 - RNA, 19 nt, Human
cuuacuaguuucccuugca

SEQ ID NO: 2697431 - RNA, 19 nt, Human
cuguuuuauaauuuuguga

SEQ ID NO: 2697432 - RNA, 18 nt, Human
cuuaaugccacuaaauug

SEQ ID NO: 2697433 - RNA, 19 nt, Human
gaaaauaacaauaaaagac

SEQ ID NO: 2697434 - RNA, 20 nt, Human
gaaaaguauguuagugcaaa

SEQ ID NO: 2697435 - RNA, 14 nt, Human
gaaaaguauguuag

SEQ ID NO: 2697436 - RNA, 14 nt, Human
gaaaacaaggauga

SEQ ID NO: 2697437 - RNA, 19 nt, Human
cuuuccucaaaacuucaga

SEQ ID NO: 2697438 - RNA, 17 nt, Human
cuuguacuuuauuuucu

SEQ ID NO: 2697439 - RNA, 18 nt, Human
cuuggggcugaugcaguu

SEQ ID NO: 2697440 - RNA, 16 nt, Human
cuuggggcugaugcag

SEQ ID NO: 2697441 - RNA, 16 nt, Human
cuuggacucauuuuaa

SEQ ID NO: 2697442 - RNA, 22 nt, Human
cuugcccuguuaaaagaugaaa

SEQ ID NO: 2697443 - RNA, 20 nt, Human
cuugcuugauuguauggugg

SEQ ID NO: 2697444 - RNA, 14 nt, Human
cuugccaucccucc

SEQ ID NO: 2697445 - RNA, 17 nt, Human
cuugccaucccucccuc

SEQ ID NO: 2697446 - RNA, 15 nt, Human
cuugccaucccuccc

SEQ ID NO: 2697447 - RNA, 16 nt, Human
cuugccaucccucccu

SEQ ID NO: 2697448 - RNA, 19 nt, Human
cuugccaucccucccucca

SEQ ID NO: 2697449 - RNA, 18 nt, Human
cuugcccuggugccucac

SEQ ID NO: 2697450 - RNA, 14 nt, Human
cuugcccuguuaaa

SEQ ID NO: 2697451 - RNA, 22 nt, Human
cuugcagcucuccccuucucug

SEQ ID NO: 2697452 - RNA, 24 nt, Human
gacugcauuauauuuauuacugua

SEQ ID NO: 2697453 - RNA, 16 nt, Human
gacugaggggagggga

SEQ ID NO: 2697454 - RNA, 14 nt, Human
gacuggcacaguuu

SEQ ID NO: 2697455 - RNA, 17 nt, Human
gacuggauaguccgucu

SEQ ID NO: 2697456 - RNA, 22 nt, Human
gacuggcacaguuuucugagaa

SEQ ID NO: 2697457 - RNA, 18 nt, Human
gacuggcacaguuuucug

SEQ ID NO: 2697458 - RNA, 22 nt, Human
gacuggauaguccgucucugcu

SEQ ID NO: 2697459 - RNA, 18 nt, Human
gaccacugcagaagacag

SEQ ID NO: 2697460 - RNA, 16 nt, Human
gaccacugcagaagac

SEQ ID NO: 2697461 - RNA, 20 nt, Human
gacccaaaaggcagaagcaa

SEQ ID NO: 2697462 - RNA, 19 nt, Human
gacccaaaaggcagaagca

SEQ ID NO: 2697463 - RNA, 18 nt, Human
gacccaaaaggcagaagc

SEQ ID NO: 2697464 - RNA, 23 nt, Human
gacaggaugguucccuugaugaa

SEQ ID NO: 2697465 - RNA, 14 nt, Human
gacaucaacagaua

SEQ ID NO: 2697466 - RNA, 21 nt, Human
gacagagccccacccucagau

SEQ ID NO: 2697467 - RNA, 14 nt, Human
gaaguauccuucag

SEQ ID NO: 2697468 - RNA, 16 nt, Human
gaaguauccuucagcc

SEQ ID NO: 2697469 - RNA, 12 nt, Human
gaaguccaagca

SEQ ID NO: 2697470 - RNA, 22 nt, Human
gaaguccaagcauuuagaugua

SEQ ID NO: 2697471 - RNA, 16 nt, Human
gaauauuuuaacuucc

SEQ ID NO: 2697472 - RNA, 18 nt, Human
gaagauguagaggagaaa

SEQ ID NO: 2697473 - RNA, 17 nt, Human
gaagauguagaggagaa

SEQ ID NO: 2697474 - RNA, 12 nt, Human
gaagaacugaaa

SEQ ID NO: 2697475 - RNA, 19 nt, Human
gaagacugcauuauauuua

SEQ ID NO: 2697476 - RNA, 18 nt, Human
gaaauuguauuacaaauc

SEQ ID NO: 2697477 - RNA, 16 nt, Human
gaaauuguauuacaaa

SEQ ID NO: 2697478 - RNA, 20 nt, Human
gaacagugauuaccagggac

SEQ ID NO: 2697479 - RNA, 16 nt, Human
gaacagugauuaccag

SEQ ID NO: 2697480 - RNA, 14 nt, Human
gaacaucacagcuu

SEQ ID NO: 2697481 - RNA, 15 nt, Human
gaacauaaaauacaa

SEQ ID NO: 2697482 - RNA, 13 nt, Human
gaucuuuaaaaua

SEQ ID NO: 2697483 - RNA, 14 nt, Human
gauccuggaaauca

SEQ ID NO: 2697484 - RNA, 13 nt, Human
gauaaacaguagu

SEQ ID NO: 2697485 - RNA, 23 nt, Human
gaucagcuuauugucuagugaaa

SEQ ID NO: 2697486 - RNA, 17 nt, Human
gauaggucagugcaaau

SEQ ID NO: 2697487 - RNA, 16 nt, Human
gcaagaugugggcagu

SEQ ID NO: 2697488 - RNA, 12 nt, Human
gcaagauguggg

SEQ ID NO: 2697489 - RNA, 16 nt, Human
gaugcuagaacucccu

SEQ ID NO: 2697490 - RNA, 22 nt, Human
gauuaaguaaugauaacuggaa

SEQ ID NO: 2697491 - RNA, 14 nt, Human
gauuaaguaaugau

SEQ ID NO: 2697492 - RNA, 14 nt, Human
gcagaagacaguau

SEQ ID NO: 2697493 - RNA, 15 nt, Human
gcacugucaagauga

SEQ ID NO: 2697494 - RNA, 20 nt, Human
gcacagccucuuagaugcag

SEQ ID NO: 2697495 - RNA, 15 nt, Human
gcaggcuacugucag

SEQ ID NO: 2697496 - RNA, 13 nt, Human
gcaguucugaaga

SEQ ID NO: 2697497 - RNA, 14 nt, Human
gcaguucugaagaa

SEQ ID NO: 2697498 - RNA, 18 nt, Human
gcauagauucccugagca

SEQ ID NO: 2697499 - RNA, 18 nt, Human
gcccucuccugggcagcu

SEQ ID NO: 2697500 - RNA, 19 nt, Human
gcccucuccugggcagcug

SEQ ID NO: 2697501 - RNA, 21 nt, Human
gcccucuccugggcagcugcc

SEQ ID NO: 2697502 - RNA, 15 nt, Human
gcccucuccugggca

SEQ ID NO: 2697503 - RNA, 16 nt, Human
gcccucuccugggcag

SEQ ID NO: 2697504 - RNA, 19 nt, Human
gccccugcacuccagccug

SEQ ID NO: 2697505 - RNA, 17 nt, Human
gccccgugggguuccuc

SEQ ID NO: 2697506 - RNA, 16 nt, Human
gcccacagcuguauga

SEQ ID NO: 2697507 - RNA, 22 nt, Human
gccauuuaaagcuuauuaaaac

SEQ ID NO: 2697508 - RNA, 15 nt, Human
gccaucccucccucc

SEQ ID NO: 2697509 - RNA, 16 nt, Human
gccaucccucccucca

SEQ ID NO: 2697510 - RNA, 19 nt, Human
gccaugggacagggaggac

SEQ ID NO: 2697511 - RNA, 14 nt, Human
gccaugggacaggg

SEQ ID NO: 2697512 - RNA, 11 nt, Human
gccaucccucc

SEQ ID NO: 2697513 - RNA, 13 nt, Human
gccaucccucccu

SEQ ID NO: 2697514 - RNA, 14 nt, Human
gccaucccucccuc

SEQ ID NO: 2697515 - RNA, 22 nt, Human
gccacguucuuacuaguuuccc

SEQ ID NO: 2697516 - RNA, 22 nt, Human
gcgacagugagacucugucuca

SEQ ID NO: 2697517 - RNA, 18 nt, Human
gccuucggccuccauccu

SEQ ID NO: 2697518 - RNA, 19 nt, Human
gccuucggccuccauccug

SEQ ID NO: 2697519 - RNA, 18 nt, Human
gccuguaaucacagcuac

SEQ ID NO: 2697520 - RNA, 22 nt, Human
gcguccugucggagcccugucu

SEQ ID NO: 2697521 - RNA, 19 nt, Human
gcguccugucggagcccug

SEQ ID NO: 2697522 - RNA, 11 nt, Human
gccuccccucc

SEQ ID NO: 2697523 - RNA, 12 nt, Human
gccuccccuccu

SEQ ID NO: 2697524 - RNA, 13 nt, Human
gccuccccuccuc

SEQ ID NO: 2697525 - RNA, 14 nt, Human
gccuccccuccucu

SEQ ID NO: 2697526 - RNA, 16 nt, Human
gccuccccuccucugc

SEQ ID NO: 2697527 - RNA, 19 nt, Human
gcccuucuuuccacagaag

SEQ ID NO: 2697528 - RNA, 22 nt, Human
ggcagcugccuccccuccucug

SEQ ID NO: 2697529 - RNA, 18 nt, Human
ggcagcugccuccccucc

SEQ ID NO: 2697530 - RNA, 21 nt, Human
ggcagcugccuccccuccucu

SEQ ID NO: 2697531 - RNA, 22 nt, Human
ggccaugggacagggaggacgc

SEQ ID NO: 2697532 - RNA, 21 nt, Human
ggaggacgcucucuggccuuc

SEQ ID NO: 2697533 - RNA, 20 nt, Human
ggaggacgcucucuggccuu

SEQ ID NO: 2697534 - RNA, 19 nt, Human
ggaggacgcucucuggccu

SEQ ID NO: 2697535 - RNA, 22 nt, Human
gcuguauuuuaaaagaaugauu

SEQ ID NO: 2697536 - RNA, 18 nt, Human
gcuagauguauguacuuc

SEQ ID NO: 2697537 - RNA, 16 nt, Human
ggaaaucaaauaugca

SEQ ID NO: 2697538 - RNA, 13 nt, Human
ggaaauauuuauu

SEQ ID NO: 2697539 - RNA, 15 nt, Human
ggaaauauuuauuuu

SEQ ID NO: 2697540 - RNA, 12 nt, Human
ggaaauauuuau

SEQ ID NO: 2697541 - RNA, 17 nt, Human
ggaaauauuuauuuuaa

SEQ ID NO: 2697542 - RNA, 18 nt, Human
ggaaauauuuauuuuaau

SEQ ID NO: 2697543 - RNA, 23 nt, Human
gcuguucacagccagacuggcac

SEQ ID NO: 2697544 - RNA, 16 nt, Human
gcuguucacagccaga

SEQ ID NO: 2697545 - RNA, 15 nt, Human
gcuguucacagccag

SEQ ID NO: 2697546 - RNA, 18 nt, Human
gcuugccaucccucccuc

SEQ ID NO: 2697547 - RNA, 21 nt, Human
gcuugccaucccucccuccac

SEQ ID NO: 2697548 - RNA, 19 nt, Human
gcuugcccuggugccucac

SEQ ID NO: 2697549 - RNA, 17 nt, Human
gcuugcccuggugccuc

SEQ ID NO: 2697550 - RNA, 18 nt, Human
gcuugcccuguuaaaaga

SEQ ID NO: 2697551 - RNA, 16 nt, Human
gcuugccaucccuccc

SEQ ID NO: 2697552 - RNA, 17 nt, Human
gcuuuuaaaaaaaaaua

SEQ ID NO: 2697553 - RNA, 20 nt, Human
ggaaaaaauaacaaugaaag

SEQ ID NO: 2697554 - RNA, 22 nt, Human
ggcuugaguuuaaauuguaaua

SEQ ID NO: 2697555 - RNA, 23 nt, Human
ggugcuacaaaaacacagcaagg

SEQ ID NO: 2697556 - RNA, 21 nt, Human
ggugcuacaaaaacacagcaa

SEQ ID NO: 2697557 - RNA, 19 nt, Human
uauauuuuuuguuaaauga

SEQ ID NO: 2697558 - RNA, 20 nt, Human
uauauuuauuacuguaagaa

SEQ ID NO: 2697559 - RNA, 23 nt, Human
uauauuuauuacuguaagaaaau

SEQ ID NO: 2697560 - RNA, 14 nt, Human
uauauuugaaauau

SEQ ID NO: 2697561 - RNA, 13 nt, Human
uauauuugaaaua

SEQ ID NO: 2697562 - RNA, 18 nt, Human
uagucaaauugugugaaa

SEQ ID NO: 2697563 - RNA, 21 nt, Human
uaguuguaccgcaaugugacu

SEQ ID NO: 2697564 - RNA, 20 nt, Human
uaggaauugacccacaagaa

SEQ ID NO: 2697565 - RNA, 23 nt, Human
uaggaauugacccacaagaaaug

SEQ ID NO: 2697566 - RNA, 13 nt, Human
uaggccaugggac

SEQ ID NO: 2697567 - RNA, 17 nt, Human
uagaguuuagcuggaaa

SEQ ID NO: 2697568 - RNA, 18 nt, Human
uagaguuuagcuggaaaa

SEQ ID NO: 2697569 - RNA, 20 nt, Human
uagauguauguacuucaugc

SEQ ID NO: 2697570 - RNA, 16 nt, Human
uagauguauguacuuc

SEQ ID NO: 2697571 - RNA, 20 nt, Human
uagcagggcauggcugggaa

SEQ ID NO: 2697572 - RNA, 23 nt, Human
uaccuuuguucccaaauuucaua

SEQ ID NO: 2697573 - RNA, 19 nt, Human
uacugagagugaacaaauu

SEQ ID NO: 2697574 - RNA, 23 nt, Human
uacugauguuccuagugaaagag

SEQ ID NO: 2697575 - RNA, 23 nt, Human
uaccacaggaaccacaagacugc

SEQ ID NO: 2697576 - RNA, 22 nt, Human
uacaugagguacugagagugaa

SEQ ID NO: 2697577 - RNA, 21 nt, Human
uacaugagguacugagaguga

SEQ ID NO: 2697578 - RNA, 17 nt, Human
uacauuuguauaaaaua

SEQ ID NO: 2697579 - RNA, 11 nt, Human
uacauuugugu

SEQ ID NO: 2697580 - RNA, 16 nt, Human
uacauuuguauaaaau

SEQ ID NO: 2697581 - RNA, 16 nt, Human
uaccaacacgagcagg

SEQ ID NO: 2697582 - RNA, 13 nt, Human
uacagaauuuuau

SEQ ID NO: 2697583 - RNA, 14 nt, Human
uacaggauuugaaa

SEQ ID NO: 2697584 - RNA, 19 nt, Human
uaaugccacuaaauugaca

SEQ ID NO: 2697585 - RNA, 15 nt, Human
uaauaauguuucaaa

SEQ ID NO: 2697586 - RNA, 20 nt, Human
uaauuuguaguguuggagaa

SEQ ID NO: 2697587 - RNA, 23 nt, Human
uaauuuguaguguuggagaagaa

SEQ ID NO: 2697588 - RNA, 22 nt, Human
uaauuggaaaggcagcucuaaa

SEQ ID NO: 2697589 - RNA, 20 nt, Human
uaauuaaaagaauauuuuaa

SEQ ID NO: 2697590 - RNA, 15 nt, Human
uaauguuucaaacau

SEQ ID NO: 2697591 - RNA, 14 nt, Human
uaauguuucaaaca

SEQ ID NO: 2697592 - RNA, 23 nt, Human
uaaauugacacuuaaaaaugguu

SEQ ID NO: 2697593 - RNA, 23 nt, Human
uaagagggauuagggagagaaga

SEQ ID NO: 2697594 - RNA, 20 nt, Human
uaagcauuccaacuaucuca

SEQ ID NO: 2697595 - RNA, 16 nt, Human
uaagcauuccaacuau

SEQ ID NO: 2697596 - RNA, 18 nt, Human
uaagcauuccaacuaucu

SEQ ID NO: 2697597 - RNA, 13 nt, Human
uaagccagacauc

SEQ ID NO: 2697598 - RNA, 21 nt, Human
uaagccagacaucaacagaua

SEQ ID NO: 2697599 - RNA, 20 nt, Human
uaagccagacaucaacagau

SEQ ID NO: 2697600 - RNA, 20 nt, Human
guuuaggauguugaaaaagu

SEQ ID NO: 2697601 - RNA, 17 nt, Human
guuuagaaagcuugccc

SEQ ID NO: 2697602 - RNA, 13 nt, Human
guuuagaaagcuu

SEQ ID NO: 2697603 - RNA, 16 nt, Human
uaaaaaagaaacauuu

SEQ ID NO: 2697604 - RNA, 18 nt, Human
guuuucaggcuagaugua

SEQ ID NO: 2697605 - RNA, 16 nt, Human
guuuucauuaucucaa

SEQ ID NO: 2697606 - RNA, 14 nt, Human
uaaaagaugaaaau

SEQ ID NO: 2697607 - RNA, 19 nt, Human
uaaaauccauacauuugug

SEQ ID NO: 2697608 - RNA, 18 nt, Human
uaaaauccauacauuugu

SEQ ID NO: 2697609 - RNA, 17 nt, Human
uaaaauggguuuuacug

SEQ ID NO: 2697610 - RNA, 14 nt, Human
uaaaggaauuuaaa

SEQ ID NO: 2697611 - RNA, 17 nt, Human
uaaauaaaaauaauccu

SEQ ID NO: 2697612 - RNA, 18 nt, Human
uaaauauaugcuaagucu

SEQ ID NO: 2697613 - RNA, 21 nt, Human
uauuucuaugaaauauuaugu

SEQ ID NO: 2697614 - RNA, 22 nt, Human
uauuucuaugaaauauuauguu

SEQ ID NO: 2697615 - RNA, 13 nt, Human
ucaaaacugcacu

SEQ ID NO: 2697616 - RNA, 19 nt, Human
ucaacuccaaacugacucu

SEQ ID NO: 2697617 - RNA, 23 nt, Human
ucacaggacagcccuucuuucca

SEQ ID NO: 2697618 - RNA, 19 nt, Human
ucacaggaaguagaggagg

SEQ ID NO: 2697619 - RNA, 14 nt, Human
ucacaggaaguaga

SEQ ID NO: 2697620 - RNA, 19 nt, Human
ucagacauagaauuaacac

SEQ ID NO: 2697621 - RNA, 22 nt, Human
ucagacauagaauuaacacaug

SEQ ID NO: 2697622 - RNA, 17 nt, Human
ucacuugucaauaaaau

SEQ ID NO: 2697623 - RNA, 16 nt, Human
ucccaaauuucauacc

SEQ ID NO: 2697624 - RNA, 17 nt, Human
ucccucccuccaccucc

SEQ ID NO: 2697625 - RNA, 17 nt, Human
uccaagcauuuagaugu

SEQ ID NO: 2697626 - RNA, 23 nt, Human
uccaagcauaccaacacgagcag

SEQ ID NO: 2697627 - RNA, 14 nt, Human
ucauuucuuugagu

SEQ ID NO: 2697628 - RNA, 22 nt, Human
ucauuucugcaucagcugcuga

SEQ ID NO: 2697629 - RNA, 16 nt, Human
ucauuucugcaucagc

SEQ ID NO: 2697630 - RNA, 12 nt, Human
uccaaagaaaug

SEQ ID NO: 2697631 - RNA, 23 nt, Human
uccaaacugacucuuaagaagac

SEQ ID NO: 2697632 - RNA, 23 nt, Human
uccaccucccugcaauaaaaugg

SEQ ID NO: 2697633 - RNA, 12 nt, Human
uccaccucccug

SEQ ID NO: 2697634 - RNA, 14 nt, Human
uccaccuacaugag

SEQ ID NO: 2697635 - RNA, 20 nt, Human
uccaagcauuuagauguaua

SEQ ID NO: 2697636 - RNA, 14 nt, Human
uccagauccuggaa

SEQ ID NO: 2697637 - RNA, 16 nt, Human
uccagauccuggaaau

SEQ ID NO: 2697638 - RNA, 17 nt, Human
uccagauccuggaaauc

SEQ ID NO: 2697639 - RNA, 13 nt, Human
uccacuuggucug

SEQ ID NO: 2697640 - RNA, 12 nt, Human
uccacuuggucu

SEQ ID NO: 2697641 - RNA, 18 nt, Human
ucucuucacagucacauu

SEQ ID NO: 2697642 - RNA, 13 nt, Human
ucucuaggaaaua

SEQ ID NO: 2697643 - RNA, 19 nt, Human
ucucuaggaaauauuuauu

SEQ ID NO: 2697644 - RNA, 21 nt, Human
ucuccugggcagcugccuccc

SEQ ID NO: 2697645 - RNA, 19 nt, Human
ucuccugggcagcugccuc

SEQ ID NO: 2697646 - RNA, 20 nt, Human
ucuccugggcagcugccucc

SEQ ID NO: 2697647 - RNA, 21 nt, Human
ucucagugucaaugcagcccc

SEQ ID NO: 2697648 - RNA, 14 nt, Human
ucuccugggcagcu

SEQ ID NO: 2697649 - RNA, 13 nt, Human
ucuccugggcagc

SEQ ID NO: 2697650 - RNA, 15 nt, Human
ucuccugggcagcug

SEQ ID NO: 2697651 - RNA, 16 nt, Human
ucuccugggcagcugc

SEQ ID NO: 2697652 - RNA, 17 nt, Human
ucuccugggcagcugcc

SEQ ID NO: 2697653 - RNA, 18 nt, Human
ucuccugggcagcugccu

SEQ ID NO: 2697654 - RNA, 15 nt, Human
uccuugcaucaauuu

SEQ ID NO: 2697655 - RNA, 21 nt, Human
ucuacacuaagagagaaugag

SEQ ID NO: 2697656 - RNA, 17 nt, Human
ucuacacuccagugaga

SEQ ID NO: 2697657 - RNA, 14 nt, Human
ugaacacaucagcu

SEQ ID NO: 2697658 - RNA, 22 nt, Human
ugaacuuguaaaggaauuuaaa

SEQ ID NO: 2697659 - RNA, 21 nt, Human
ugaaguccaagcauuuagaug

SEQ ID NO: 2697660 - RNA, 22 nt, Human
ugaaguccaagcauuuagaugu

SEQ ID NO: 2697661 - RNA, 23 nt, Human
ugaaagcagggacuugaacccau

SEQ ID NO: 2697662 - RNA, 19 nt, Human
ugaaagcagggacuugaac

SEQ ID NO: 2697663 - RNA, 18 nt, Human
ugaaagcagggacuugaa

SEQ ID NO: 2697664 - RNA, 18 nt, Human
ugaaacccugucucuacu

SEQ ID NO: 2697665 - RNA, 22 nt, Human
ugaaaagacuccaaagaaaugu

SEQ ID NO: 2697666 - RNA, 19 nt, Human
ugaaaagacuccaaagaaa

SEQ ID NO: 2697667 - RNA, 17 nt, Human
ugaaaagacuccaaaga

SEQ ID NO: 2697668 - RNA, 16 nt, Human
ugaaaagacuccaaag

SEQ ID NO: 2697669 - RNA, 15 nt, Human
ugaaaagacuccaaa

SEQ ID NO: 2697670 - RNA, 19 nt, Human
ugaaaacuuuaugcuaagu

SEQ ID NO: 2697671 - RNA, 20 nt, Human
ucuguuuuauaauuuuguga

SEQ ID NO: 2697672 - RNA, 22 nt, Human
ucuguuuuauaauuuugugaag

SEQ ID NO: 2697673 - RNA, 23 nt, Human
ucuggccuucggccuccauccug

SEQ ID NO: 2697674 - RNA, 19 nt, Human
ucuguaauaaacucauuuc

SEQ ID NO: 2697675 - RNA, 23 nt, Human
ucuguaauaaacucauuucuagc

SEQ ID NO: 2697676 - RNA, 24 nt, Human
ucuguaauaaacucauuucuagca

SEQ ID NO: 2697677 - RNA, 18 nt, Human
ugccuccccuccucugcu

SEQ ID NO: 2697678 - RNA, 19 nt, Human
ugccuccccuccucugcuu

SEQ ID NO: 2697679 - RNA, 22 nt, Human
ugccuccccuccucugcuugcc

SEQ ID NO: 2697680 - RNA, 23 nt, Human
ugccuccccuccucugcuugcca

SEQ ID NO: 2697681 - RNA, 22 nt, Human
ugccuucucaacuccaaacuga

SEQ ID NO: 2697682 - RNA, 17 nt, Human
ugccuucucaacuccaa

SEQ ID NO: 2697683 - RNA, 18 nt, Human
ugcuagaacucccuuuca

SEQ ID NO: 2697684 - RNA, 19 nt, Human
ugcuagaacucccuuucaa

SEQ ID NO: 2697685 - RNA, 21 nt, Human
ugcuagaacucccuuucaaca

SEQ ID NO: 2697686 - RNA, 20 nt, Human
ugcuagaacucccuuucaac

SEQ ID NO: 2697687 - RNA, 16 nt, Human
ugcagauaaacaguag

SEQ ID NO: 2697688 - RNA, 17 nt, Human
ugcagauaaacaguagu

SEQ ID NO: 2697689 - RNA, 15 nt, Human
ugcacaucaaaauau

SEQ ID NO: 2697690 - RNA, 21 nt, Human
ugccaucccucccuccaccuc

SEQ ID NO: 2697691 - RNA, 22 nt, Human
ugccaucccucccuccaccucc

SEQ ID NO: 2697692 - RNA, 15 nt, Human
ugccaucccucccuc

SEQ ID NO: 2697693 - RNA, 19 nt, Human
ugccaucccucccuccacc

SEQ ID NO: 2697694 - RNA, 20 nt, Human
ugccaucccucccuccaccu

SEQ ID NO: 2697695 - RNA, 22 nt, Human
ugcaucagcugcugaaacaaca

SEQ ID NO: 2697696 - RNA, 19 nt, Human
ugcaucagcugcugaaaca

SEQ ID NO: 2697697 - RNA, 14 nt, Human
ugcauuauauuuau

SEQ ID NO: 2697698 - RNA, 20 nt, Human
ugcauuauauuuauuacugu

SEQ ID NO: 2697699 - RNA, 15 nt, Human
ugcauuauauuuauu

SEQ ID NO: 2697700 - RNA, 14 nt, Human
uggaacucucgagc

SEQ ID NO: 2697701 - RNA, 14 nt, Human
ugcuucuguuuuau

SEQ ID NO: 2697702 - RNA, 17 nt, Human
uggguagacacacauga

SEQ ID NO: 2697703 - RNA, 16 nt, Human
uggguagacacacaug

SEQ ID NO: 2697704 - RNA, 18 nt, Human
ugggacagucaccucaug

SEQ ID NO: 2697705 - RNA, 20 nt, Human
ugggacagucaccucaugga

SEQ ID NO: 2697706 - RNA, 21 nt, Human
ugggacagucaccucauggaa

SEQ ID NO: 2697707 - RNA, 19 nt, Human
ugggacauuugcucaugga

SEQ ID NO: 2697708 - RNA, 20 nt, Human
ugggacauuugcucauggaa

SEQ ID NO: 2697709 - RNA, 18 nt, Human
uggccuucggccuccauc

SEQ ID NO: 2697710 - RNA, 17 nt, Human
uggccuucggccuccau

SEQ ID NO: 2697711 - RNA, 14 nt, Human
uggccuucggccuc

SEQ ID NO: 2697712 - RNA, 19 nt, Human
uuaaaagaaugauuaugaa

SEQ ID NO: 2697713 - RNA, 13 nt, Human
uuaaaagaaugau

SEQ ID NO: 2697714 - RNA, 20 nt, Human
uuaaagcuuauuaaaacuca

SEQ ID NO: 2697715 - RNA, 18 nt, Human
uuaauaauguuucaaaca

SEQ ID NO: 2697716 - RNA, 16 nt, Human
uuaauaauguuucaaa

SEQ ID NO: 2697717 - RNA, 22 nt, Human
uuaaugucaauucuugccaaau

SEQ ID NO: 2697718 - RNA, 14 nt, Human
uuacauuuguauaa

SEQ ID NO: 2697719 - RNA, 15 nt, Human
uuacauuuguauaaa

SEQ ID NO: 2697720 - RNA, 20 nt, Human
uuacagagacagaaagcaga

SEQ ID NO: 2697721 - RNA, 21 nt, Human
uuaccacuuguguuuugcaag

SEQ ID NO: 2697722 - RNA, 19 nt, Human
ugugugcguccugucggag

SEQ ID NO: 2697723 - RNA, 16 nt, Human
uguucacagccagacu

SEQ ID NO: 2697724 - RNA, 14 nt, Human
uguuagugcaaauu

SEQ ID NO: 2697725 - RNA, 12 nt, Human
uguuauaaucuu

SEQ ID NO: 2697726 - RNA, 13 nt, Human
uguuuaaaaucau

SEQ ID NO: 2697727 - RNA, 14 nt, Human
uguuuaaaaucauu

SEQ ID NO: 2697728 - RNA, 21 nt, Human
uguuggagaagaacugaaauc

SEQ ID NO: 2697729 - RNA, 16 nt, Human
uguaugauucccagcc

SEQ ID NO: 2697730 - RNA, 14 nt, Human
uguaaucacagcua

SEQ ID NO: 2697731 - RNA, 15 nt, Human
uguaaucacagcuac

SEQ ID NO: 2697732 - RNA, 17 nt, Human
uguagauaauacaguuc

SEQ ID NO: 2697733 - RNA, 15 nt, Human
uguaccgcaauguga

SEQ ID NO: 2697734 - RNA, 14 nt, Human
ugugcguccugucg

SEQ ID NO: 2697735 - RNA, 22 nt, Human
ugucucaguccaugaagaugua

SEQ ID NO: 2697736 - RNA, 21 nt, Human
ugucucaguccaugaagaugu

SEQ ID NO: 2697737 - RNA, 22 nt, Human
ugugaccacugcagaagacagu

SEQ ID NO: 2697738 - RNA, 12 nt, Human
uugggaggcuga

SEQ ID NO: 2697739 - RNA, 14 nt, Human
uuguauuacaaauc

SEQ ID NO: 2697740 - RNA, 19 nt, Human
uuguaucacaaaucuuaac

SEQ ID NO: 2697741 - RNA, 18 nt, Human
uuguaaaugugcuuuuaa

SEQ ID NO: 2697742 - RNA, 14 nt, Human
uuguaaaugugcuu

SEQ ID NO: 2697743 - RNA, 11 nt, Human
uuguaaaugug

SEQ ID NO: 2697744 - RNA, 16 nt, Human
uuguaaaggaauuuaa

SEQ ID NO: 2697745 - RNA, 14 nt, Human
uucugagcauuuaa

SEQ ID NO: 2697746 - RNA, 15 nt, Human
uucugagaaagacua

SEQ ID NO: 2697747 - RNA, 15 nt, Human
uucuuauuucauuuc

SEQ ID NO: 2697748 - RNA, 23 nt, Human
uugaaaagacuccaaagaaaugu

SEQ ID NO: 2697749 - RNA, 22 nt, Human
uugaaaagacuccaaagaaaug

SEQ ID NO: 2697750 - RNA, 18 nt, Human
uugaaaagacuccaaaga

SEQ ID NO: 2697751 - RNA, 16 nt, Human
uugaaaagacuccaaa

SEQ ID NO: 2697752 - RNA, 23 nt, Human
uugaaacugagaugugaacacau

SEQ ID NO: 2697753 - RNA, 15 nt, Human
uugaggacacugaua

SEQ ID NO: 2697754 - RNA, 14 nt, Human
uugaggacacugau

SEQ ID NO: 2697755 - RNA, 18 nt, Human
uugcauagauucccugag

SEQ ID NO: 2697756 - RNA, 12 nt, Human
uugaugaagaag

SEQ ID NO: 2697757 - RNA, 21 nt, Human
uucagagcugcccucuccugg

SEQ ID NO: 2697758 - RNA, 22 nt, Human
uucagagcugcccucuccuggg

SEQ ID NO: 2697759 - RNA, 23 nt, Human
uucagagcugcccucuccugggc

SEQ ID NO: 2697760 - RNA, 19 nt, Human
uuccacuuauaggaauuga

SEQ ID NO: 2697761 - RNA, 19 nt, Human
uucggccuccauccugagg

SEQ ID NO: 2697762 - RNA, 18 nt, Human
uucggccuccauccugag

SEQ ID NO: 2697763 - RNA, 22 nt, Human
uucggccuccauccugaggcuc

SEQ ID NO: 2697764 - RNA, 12 nt, Human
uuccuagugaaa

SEQ ID NO: 2697765 - RNA, 18 nt, Human
uucccuugaugaagaagu

SEQ ID NO: 2697766 - RNA, 23 nt, Human
uucucuccucuccccaugauguu

SEQ ID NO: 2697767 - RNA, 21 nt, Human
uuucagauaaucacaauacau

SEQ ID NO: 2697768 - RNA, 15 nt, Human
uuucagcagcugcag

SEQ ID NO: 2697769 - RNA, 15 nt, Human
uuucagauaaucaca

SEQ ID NO: 2697770 - RNA, 22 nt, Human
uuucugagaaagacuauucaaa

SEQ ID NO: 2697771 - RNA, 12 nt, Human
uuuagaaacaca

SEQ ID NO: 2697772 - RNA, 20 nt, Human
uuuagaaacacaacuauauu

SEQ ID NO: 2697773 - RNA, 21 nt, Human
uuuguauaaaauaauuuuuau

SEQ ID NO: 2697774 - RNA, 21 nt, Human
uuugcauagauucccugagca

SEQ ID NO: 2697775 - RNA, 10 nt, Human
uuuuauauuu

SEQ ID NO: 2697776 - RNA, 20 nt, Human
uuuuauaucaauuuaaaaaa

SEQ ID NO: 2697777 - RNA, 15 nt, Human
uuuuauaugcuucug

SEQ ID NO: 2697778 - RNA, 20 nt, Human
uuuuauaugcuucuguuuua

SEQ ID NO: 2697779 - RNA, 13 nt, Human
uuuuccugaaaac

SEQ ID NO: 2697780 - RNA, 13 nt, Human
auaauguuucaaa

SEQ ID NO: 2697781 - RNA, 22 nt, Human
auaagccagacaucaacagaua

SEQ ID NO: 2697782 - RNA, 21 nt, Human
auaagccagacaucaacagau

SEQ ID NO: 2697783 - RNA, 18 nt, Human
auaauguuucaaacauau

SEQ ID NO: 2697784 - RNA, 14 nt, Human
auaacaaugaaagu

SEQ ID NO: 2697785 - RNA, 15 nt, Human
auaacaaugcuguau

SEQ ID NO: 2697786 - RNA, 17 nt, Human
auaacaaugcuguauuu

SEQ ID NO: 2697787 - RNA, 19 nt, Human
auaacaaugcuguauuuua

SEQ ID NO: 2697788 - RNA, 20 nt, Human
auaacaaugcuguauuuuaa

SEQ ID NO: 2697789 - RNA, 21 nt, Human
auaacaaugcuguauuuuaaa

SEQ ID NO: 2697790 - RNA, 13 nt, Human
auauuauguuaaa

SEQ ID NO: 2697791 - RNA, 14 nt, Human
auauuauguuaaaa

SEQ ID NO: 2697792 - RNA, 15 nt, Human
auagcagcuuauuca

SEQ ID NO: 2697793 - RNA, 11 nt, Human
aguccaagcau

SEQ ID NO: 2697794 - RNA, 19 nt, Human
agugucaaugcagccccca

SEQ ID NO: 2697795 - RNA, 23 nt, Human
aguucagagcugcccucuccugg

SEQ ID NO: 2697796 - RNA, 21 nt, Human
aguucagagcugcccucuccu

SEQ ID NO: 2697797 - RNA, 22 nt, Human
aguucagagcugcccucuccug

SEQ ID NO: 2697798 - RNA, 20 nt, Human
aguucagagcugcccucucc

SEQ ID NO: 2697799 - RNA, 18 nt, Human
aguugaaaagacuccaaa

SEQ ID NO: 2697800 - RNA, 14 nt, Human
aguugaaaagacuc

SEQ ID NO: 2697801 - RNA, 20 nt, Human
aguugaaaagacuccaaaga

SEQ ID NO: 2697802 - RNA, 19 nt, Human
aguugaaaagacuccaaag

SEQ ID NO: 2697803 - RNA, 20 nt, Human
augaaguccaagcauuuaga

SEQ ID NO: 2697804 - RNA, 23 nt, Human
augaaguccaagcauuuagaugu

SEQ ID NO: 2697805 - RNA, 21 nt, Human
augaaguacucauacauguua

SEQ ID NO: 2697806 - RNA, 13 nt, Human
augaaguacucau

SEQ ID NO: 2697807 - RNA, 19 nt, Human
auccucaguuuuugugaaa

SEQ ID NO: 2697808 - RNA, 17 nt, Human
aucgcuccaccuugcag

SEQ ID NO: 2697809 - RNA, 21 nt, Human
aucgcuccaccuugcagcucu

SEQ ID NO: 2697810 - RNA, 14 nt, Human
aucaaauaugcaaa

SEQ ID NO: 2697811 - RNA, 17 nt, Human
aucaugaauuaguuuua

SEQ ID NO: 2697812 - RNA, 13 nt, Human
aucagcuuauugu

SEQ ID NO: 2697813 - RNA, 22 nt, Human
aucagcuugcccuguuaaaaga

SEQ ID NO: 2697814 - RNA, 17 nt, Human
auguuccuagugaaaga

SEQ ID NO: 2697815 - RNA, 16 nt, Human
auguuccuagugaaag

SEQ ID NO: 2697816 - RNA, 15 nt, Human
auguuccuagugaaa

SEQ ID NO: 2697817 - RNA, 15 nt, Human
augugaacacaucag

SEQ ID NO: 2697818 - RNA, 16 nt, Human
augucaaucagccuag

SEQ ID NO: 2697819 - RNA, 21 nt, Human
augucaaucagccuaguugau

SEQ ID NO: 2697820 - RNA, 16 nt, Human
augaucuuuaaaauac

SEQ ID NO: 2697821 - RNA, 21 nt, Human
augaugaucuuuaaaauacac

SEQ ID NO: 2697822 - RNA, 18 nt, Human
augaugaucuuuaaaaua

SEQ ID NO: 2697823 - RNA, 17 nt, Human
agcgacagugagacucu

SEQ ID NO: 2697824 - RNA, 19 nt, Human
agcuccccucggagaagag

SEQ ID NO: 2697825 - RNA, 17 nt, Human
agcuccccucggagaag

SEQ ID NO: 2697826 - RNA, 20 nt, Human
agcuccccucggagaagagc

SEQ ID NO: 2697827 - RNA, 20 nt, Human
agcuuauuuccucauuuuua

SEQ ID NO: 2697828 - RNA, 13 nt, Human
aggaaguagagga

SEQ ID NO: 2697829 - RNA, 15 nt, Human
agggauuagggagag

SEQ ID NO: 2697830 - RNA, 17 nt, Human
agggauuuucagcccuc

SEQ ID NO: 2697831 - RNA, 22 nt, Human
agggauuuucagcccucagaau

SEQ ID NO: 2697832 - RNA, 15 nt, Human
agggacugaggggag

SEQ ID NO: 2697833 - RNA, 21 nt, Human
aggccaugggcacugugggua

SEQ ID NO: 2697834 - RNA, 13 nt, Human
agaggaaugaagu

SEQ ID NO: 2697835 - RNA, 18 nt, Human
agacucugucucagucca

SEQ ID NO: 2697836 - RNA, 16 nt, Human
agacuggauaguccgu

SEQ ID NO: 2697837 - RNA, 20 nt, Human
agacuggauaguccgucucu

SEQ ID NO: 2697838 - RNA, 19 nt, Human
agacccaaaaggcagaagc

SEQ ID NO: 2697839 - RNA, 17 nt, Human
agacccaaaaggcagaa

SEQ ID NO: 2697840 - RNA, 17 nt, Human
agaaugagagacacacu

SEQ ID NO: 2697841 - RNA, 22 nt, Human
agaaugagagacacacugaaga

SEQ ID NO: 2697842 - RNA, 17 nt, Human
agaaugauuaugaauua

SEQ ID NO: 2697843 - RNA, 21 nt, Human
agaagugaaaaucuacacucc

SEQ ID NO: 2697844 - RNA, 18 nt, Human
agaagacugcauuauauu

SEQ ID NO: 2697845 - RNA, 21 nt, Human
agaagagcuguucacagccag

SEQ ID NO: 2697846 - RNA, 22 nt, Human
agaagagcuguucacagccaga

SEQ ID NO: 2697847 - RNA, 19 nt, Human
agauguagaggagaaacug

SEQ ID NO: 2697848 - RNA, 16 nt, Human
agauguagaggagaaa

SEQ ID NO: 2697849 - RNA, 24 nt, Human
agcaaaauuuuuucucuaggaaau

SEQ ID NO: 2697850 - RNA, 21 nt, Human
aagggauuuucagcccucaga

SEQ ID NO: 2697851 - RNA, 23 nt, Human
aagggauuuucagcccucagaau

SEQ ID NO: 2697852 - RNA, 17 nt, Human
aagggauggcaagaugu

SEQ ID NO: 2697853 - RNA, 14 nt, Human
aagggauggcaaga

SEQ ID NO: 2697854 - RNA, 15 nt, Human
aagggauuuucagcc

SEQ ID NO: 2697855 - RNA, 12 nt, Human
aaguagaggagg

SEQ ID NO: 2697856 - RNA, 19 nt, Human
aagccagauuuuccugaaa

SEQ ID NO: 2697857 - RNA, 23 nt, Human
aagacagugaaagaaaauaacaa

SEQ ID NO: 2697858 - RNA, 15 nt, Human
aagagaacuuccaga

SEQ ID NO: 2697859 - RNA, 15 nt, Human
aagcagggacuugaa

SEQ ID NO: 2697860 - RNA, 14 nt, Human
aagauagcagggca

SEQ ID NO: 2697861 - RNA, 17 nt, Human
aaguucugcagauaaac

SEQ ID NO: 2697862 - RNA, 22 nt, Human
aaguugauaugccuuuucccaa

SEQ ID NO: 2697863 - RNA, 10 nt, Human
aauaaaccau

SEQ ID NO: 2697864 - RNA, 14 nt, Human
aauaauguuucaaa

SEQ ID NO: 2697865 - RNA, 19 nt, Human
aauaauguuucaaacauau

SEQ ID NO: 2697866 - RNA, 12 nt, Human
aauaauguuuca

SEQ ID NO: 2697867 - RNA, 22 nt, Human
aaucaaauaugcaaagcacuga

SEQ ID NO: 2697868 - RNA, 16 nt, Human
aaucaaauaugcaaag

SEQ ID NO: 2697869 - RNA, 15 nt, Human
aaucaaauaugcaaa

SEQ ID NO: 2697870 - RNA, 22 nt, Human
aaucauuucugcaucagcugcu

SEQ ID NO: 2697871 - RNA, 14 nt, Human
aaugauaacuggaa

SEQ ID NO: 2697872 - RNA, 15 nt, Human
aaugauaacuggaaa

SEQ ID NO: 2697873 - RNA, 16 nt, Human
aaugauaacuggaaac

SEQ ID NO: 2697874 - RNA, 17 nt, Human
aauccauacauuugugu

SEQ ID NO: 2697875 - RNA, 16 nt, Human
aauccauacauuugug

SEQ ID NO: 2697876 - RNA, 15 nt, Human
aauccaaugaaauga

SEQ ID NO: 2697877 - RNA, 23 nt, Human
aacugagaugugaacacaucagc

SEQ ID NO: 2697878 - RNA, 14 nt, Human
aaaucuuaacuuga

SEQ ID NO: 2697879 - RNA, 20 nt, Human
aaauguucaucaaugaauga

SEQ ID NO: 2697880 - RNA, 22 nt, Human
aaauugacacuuaaaaaugguu

SEQ ID NO: 2697881 - RNA, 12 nt, Human
aacacaucagcu

SEQ ID NO: 2697882 - RNA, 19 nt, Human
aaaauccauacauuugugu

SEQ ID NO: 2697883 - RNA, 13 nt, Human
aaagaaacauuug

SEQ ID NO: 2697884 - RNA, 19 nt, Human
aaacccuugccaugugcua

SEQ ID NO: 2697885 - RNA, 21 nt, Human
aaacccugucucuacuaaaaa

SEQ ID NO: 2697886 - RNA, 20 nt, Human
aaagcauuguaaaugugcuu

SEQ ID NO: 2697887 - RNA, 19 nt, Human
aaagcauuguaaaugugcu

SEQ ID NO: 2697888 - RNA, 19 nt, Human
aaaggcagaagcaacccaa

SEQ ID NO: 2697889 - RNA, 16 nt, Human
acagaagcuccaggua

SEQ ID NO: 2697890 - RNA, 21 nt, Human
acaaggaugaauuaaguuuuu

SEQ ID NO: 2697891 - RNA, 16 nt, Human
acaagaaaugaaagca

SEQ ID NO: 2697892 - RNA, 15 nt, Human
acaagaaaugaaagc

SEQ ID NO: 2697893 - RNA, 13 nt, Human
acaagaaaugaaa

SEQ ID NO: 2697894 - RNA, 17 nt, Human
aauuuugugaagcaaaa

SEQ ID NO: 2697895 - RNA, 18 nt, Human
aauuuugugaagcaaaau

SEQ ID NO: 2697896 - RNA, 20 nt, Human
acagugauuaccagggacug

SEQ ID NO: 2697897 - RNA, 21 nt, Human
acagugauuaccagggacuga

SEQ ID NO: 2697898 - RNA, 20 nt, Human
acaucccuuaccugggaaag

SEQ ID NO: 2697899 - RNA, 20 nt, Human
accaaggcugauuaaaccaa

SEQ ID NO: 2697900 - RNA, 19 nt, Human
accaaggcugauuaaacca

SEQ ID NO: 2697901 - RNA, 19 nt, Human
acggacgaaccuugaaaac

SEQ ID NO: 2697902 - RNA, 19 nt, Human
acuaguauuucuaugaaau

SEQ ID NO: 2697903 - RNA, 18 nt, Human
acuaguauuucuaugaaa

SEQ ID NO: 2697904 - RNA, 17 nt, Human
accucugccucagaaaa

SEQ ID NO: 2697905 - RNA, 18 nt, Human
accucugccucagaaaac

SEQ ID NO: 2697906 - RNA, 14 nt, Human
acucuuaagaagac

SEQ ID NO: 2697907 - RNA, 15 nt, Human
acucuuaagaagacu

SEQ ID NO: 2697908 - RNA, 20 nt, Human
acucuuaagaagacugcauu

SEQ ID NO: 2697909 - RNA, 17 nt, Human
acucugucucaguccau

SEQ ID NO: 2697910 - RNA, 15 nt, Human
acucugucucagucc

SEQ ID NO: 2697911 - RNA, 14 nt, Human
acuuaaaaaugguu

SEQ ID NO: 2697912 - RNA, 13 nt, Human
acuuaaaaauggu

SEQ ID NO: 2697913 - RNA, 19 nt, Human
acuucaaauccuugaagau

SEQ ID NO: 2697914 - RNA, 20 nt, Human
acuucaaauccuugaagauu

SEQ ID NO: 2697915 - RNA, 17 nt, Human
acuucagcgguuuauau

SEQ ID NO: 2697916 - RNA, 18 nt, Human
acuucagcgguuuauaua

SEQ ID NO: 2697917 - RNA, 19 nt, Human
acuucagcgguuuauauaa

SEQ ID NO: 2697918 - RNA, 17 nt, Human
acuuuaugcuaagugaa

SEQ ID NO: 2697919 - RNA, 12 nt, Human
acuuuaugcuaa

SEQ ID NO: 2697920 - RNA, 22 nt, Human
acuugggaggcugagaugggag

SEQ ID NO: 2697921 - RNA, 20 nt, Human
gcuccacuuggucugugaga

SEQ ID NO: 2697922 - RNA, 16 nt, Human
gcugaaacaacaaaua

SEQ ID NO: 2697923 - RNA, 12 nt, Human
gcugaacaucac

SEQ ID NO: 2697924 - RNA, 21 nt, Human
gcucugcccauccugccccug

SEQ ID NO: 2697925 - RNA, 15 nt, Human
gcucugcccauccug

SEQ ID NO: 2697926 - RNA, 13 nt, Human
gcuguauuuuaaa

SEQ ID NO: 2697927 - RNA, 12 nt, Human
gcuguauuuuaa

SEQ ID NO: 2697928 - RNA, 17 nt, Human
gcuuauuuccucauuuu

SEQ ID NO: 2697929 - RNA, 19 nt, Human
gcuuccuggcaauagucaa

SEQ ID NO: 2697930 - RNA, 20 nt, Human
gccuccauccugaggcucca

SEQ ID NO: 2697931 - RNA, 16 nt, Human
gccuccauccugaggc

SEQ ID NO: 2697932 - RNA, 15 nt, Human
gccuccauccugagg

SEQ ID NO: 2697933 - RNA, 17 nt, Human
gcuacaaaaacacagca

SEQ ID NO: 2697934 - RNA, 19 nt, Human
gcuacaaaaacacagcaag

SEQ ID NO: 2697935 - RNA, 18 nt, Human
gcuacaaaaacacagcaa

SEQ ID NO: 2697936 - RNA, 15 nt, Human
gcuacugucagcucc

SEQ ID NO: 2697937 - RNA, 17 nt, Human
gcuacuugggaggcuga

SEQ ID NO: 2697938 - RNA, 15 nt, Human
gccccacccucagau

SEQ ID NO: 2697939 - RNA, 18 nt, Human
gccccacccucagaugca

SEQ ID NO: 2697940 - RNA, 22 nt, Human
gccaugugcuaguaauuggaaa

SEQ ID NO: 2697941 - RNA, 20 nt, Human
gccagcaguucagagcugcc

SEQ ID NO: 2697942 - RNA, 21 nt, Human
gccagcaguucagagcugccc

SEQ ID NO: 2697943 - RNA, 13 nt, Human
gccagcaguucag

SEQ ID NO: 2697944 - RNA, 14 nt, Human
gccagcaguucaga

SEQ ID NO: 2697945 - RNA, 19 nt, Human
gccagcaguucagagcugc

SEQ ID NO: 2697946 - RNA, 22 nt, Human
gccaguuauggcuauaggugcu

SEQ ID NO: 2697947 - RNA, 16 nt, Human
gccauaugaaaaggcu

SEQ ID NO: 2697948 - RNA, 22 nt, Human
ggauguugaaaaaguucugcag

SEQ ID NO: 2697949 - RNA, 12 nt, Human
ggauggcaagau

SEQ ID NO: 2697950 - RNA, 23 nt, Human
ggccuucggccuccauccugagg

SEQ ID NO: 2697951 - RNA, 22 nt, Human
ggccuucggccuccauccugag

SEQ ID NO: 2697952 - RNA, 13 nt, Human
ggccuccauccug

SEQ ID NO: 2697953 - RNA, 20 nt, Human
gggacauuugcucauggaau

SEQ ID NO: 2697954 - RNA, 21 nt, Human
gggacauuugcucauggaauu

SEQ ID NO: 2697955 - RNA, 19 nt, Human
gggacauuugcucauggaa

SEQ ID NO: 2697956 - RNA, 12 nt, Human
aaaaccacagca

SEQ ID NO: 2697957 - RNA, 22 nt, Human
aaaaauggaacauaaaauacaa

SEQ ID NO: 2697958 - RNA, 13 nt, Human
aaaacucauuuuu

SEQ ID NO: 2697959 - RNA, 17 nt, Human
aaaagaugaaaauauuu

SEQ ID NO: 2697960 - RNA, 14 nt, Human
aaaaccacagcagu

SEQ ID NO: 2697961 - RNA, 13 nt, Human
aaaaccacagcag

SEQ ID NO: 2697962 - RNA, 17 nt, Human
gggauuguaaaauggug

SEQ ID NO: 2697963 - RNA, 16 nt, Human
gggauuguaaaauggu

SEQ ID NO: 2697964 - RNA, 19 nt, Human
aaaaguauguuagugcaaa

SEQ ID NO: 2697965 - RNA, 15 nt, Human
gggcgugguggugag

SEQ ID NO: 2697966 - RNA, 20 nt, Human
aaacagucucaggaaaucaa

SEQ ID NO: 2697967 - RNA, 20 nt, Human
aaacaagcacuaaacaaaga

SEQ ID NO: 2697968 - RNA, 22 nt, Human
aaaauuuuuucucuaggaaaua

SEQ ID NO: 2697969 - RNA, 15 nt, Human
aaaaugugauaugua

SEQ ID NO: 2697970 - RNA, 15 nt, Human
aaauaauuuuuauau

SEQ ID NO: 2697971 - RNA, 18 nt, Human
aaauaauuuuuauauuug

SEQ ID NO: 2697972 - RNA, 20 nt, Human
aaauaauuuuuauauuugaa

SEQ ID NO: 2697973 - RNA, 16 nt, Human
gguuuagaaagcuugc

SEQ ID NO: 2697974 - RNA, 12 nt, Human
gguuucuagcau

SEQ ID NO: 2697975 - RNA, 16 nt, Human
ggugugaccacugcag

SEQ ID NO: 2697976 - RNA, 17 nt, Human
aaagcagggacuugaac

SEQ ID NO: 2697977 - RNA, 15 nt, Human
aaagacuauucaaac

SEQ ID NO: 2697978 - RNA, 14 nt, Human
aaagacuauucaaa

SEQ ID NO: 2697979 - RNA, 22 nt, Human
gaaugagagacacacugaagaa

SEQ ID NO: 2697980 - RNA, 23 nt, Human
gaaugagagacacacugaagaag

SEQ ID NO: 2697981 - RNA, 20 nt, Human
gaaugagagacacacugaag

SEQ ID NO: 2697982 - RNA, 16 nt, Human
gacacuuaaaaauggu

SEQ ID NO: 2697983 - RNA, 17 nt, Human
gacagucaccucaugga

SEQ ID NO: 2697984 - RNA, 14 nt, Human
gacagugaaagaaa

SEQ ID NO: 2697985 - RNA, 11 nt, Human
gaauuaguuuu

SEQ ID NO: 2697986 - RNA, 13 nt, Human
gacacacugaaga

SEQ ID NO: 2697987 - RNA, 12 nt, Human
gacacacaugaa

SEQ ID NO: 2697988 - RNA, 14 nt, Human
gacacacugaagaa

SEQ ID NO: 2697989 - RNA, 17 nt, Human
gacucuuaagaagacug

SEQ ID NO: 2697990 - RNA, 15 nt, Human
gacucuuaagaagac

SEQ ID NO: 2697991 - RNA, 16 nt, Human
gacucuuaagaagacu

SEQ ID NO: 2697992 - RNA, 22 nt, Human
gacuauucaaacagucucagga

SEQ ID NO: 2697993 - RNA, 15 nt, Human
gagaaucacuugaac

SEQ ID NO: 2697994 - RNA, 14 nt, Human
gagaaucacuugaa

SEQ ID NO: 2697995 - RNA, 11 nt, Human
gcagcugccuc

SEQ ID NO: 2697996 - RNA, 12 nt, Human
gcagcugccucc

SEQ ID NO: 2697997 - RNA, 13 nt, Human
gcagcugccuccc

SEQ ID NO: 2697998 - RNA, 15 nt, Human
gcagcugccuccccu

SEQ ID NO: 2697999 - RNA, 16 nt, Human
gcagcugccuccccuc

SEQ ID NO: 2698000 - RNA, 17 nt, Human
gcagcugccuccccucc

SEQ ID NO: 2698001 - RNA, 18 nt, Human
gcagcugccuccccuccu

SEQ ID NO: 2698002 - RNA, 22 nt, Human
gcagcugccuccccuccucugc

SEQ ID NO: 2698003 - RNA, 19 nt, Human
gcagggacuugaacccaua

SEQ ID NO: 2698004 - RNA, 18 nt, Human
gcacaguuuucugagaaa

SEQ ID NO: 2698005 - RNA, 17 nt, Human
gcacaguuuucugagaa

SEQ ID NO: 2698006 - RNA, 14 nt, Human
gcacaguuuucuga

SEQ ID NO: 2698007 - RNA, 21 nt, Human
gcacaugagcuggcgggauug

SEQ ID NO: 2698008 - RNA, 14 nt, Human
gauuaccagggacu

SEQ ID NO: 2698009 - RNA, 16 nt, Human
gaugugaacacaucag

SEQ ID NO: 2698010 - RNA, 14 nt, Human
gaugugaacacauc

SEQ ID NO: 2698011 - RNA, 17 nt, Human
gauuagggagagaagau

SEQ ID NO: 2698012 - RNA, 20 nt, Human
gauauguaccuaacgaagua

SEQ ID NO: 2698013 - RNA, 21 nt, Human
gagugcucaguagucagacug

SEQ ID NO: 2698014 - RNA, 16 nt, Human
gaguuuagcuggaaaa

SEQ ID NO: 2698015 - RNA, 17 nt, Human
gaaagacuauucaaaca

SEQ ID NO: 2698016 - RNA, 15 nt, Human
gaaagacuauucaaa

SEQ ID NO: 2698017 - RNA, 14 nt, Human
gaaagacuauucaa

SEQ ID NO: 2698018 - RNA, 17 nt, Human
gaaauauuuauuuuaau

SEQ ID NO: 2698019 - RNA, 18 nt, Human
gaaaucaaauaugcaaag

SEQ ID NO: 2698020 - RNA, 18 nt, Human
gaaauauuuauuuuaaua

SEQ ID NO: 2698021 - RNA, 22 nt, Human
gaaauauuuauuuuaauaaugu

SEQ ID NO: 2698022 - RNA, 20 nt, Human
gaaaucaaauaugcaaagca

SEQ ID NO: 2698023 - RNA, 19 nt, Human
gaaaucaaauaugcaaagc

SEQ ID NO: 2698024 - RNA, 15 nt, Human
cuucacuguaaaaua

SEQ ID NO: 2698025 - RNA, 13 nt, Human
cuugaugaagaag

SEQ ID NO: 2698026 - RNA, 12 nt, Human
cuugaugaagaa

SEQ ID NO: 2698027 - RNA, 23 nt, Human
cuucuaaguaaaaccacagcagu

SEQ ID NO: 2698028 - RNA, 22 nt, Human
cuucuaaguaaaaccacagcag

SEQ ID NO: 2698029 - RNA, 10 nt, Human
cugggacagg

SEQ ID NO: 2698030 - RNA, 16 nt, Human
cugggcagcugccucc

SEQ ID NO: 2698031 - RNA, 19 nt, Human
cugggcagcugccuccccu

SEQ ID NO: 2698032 - RNA, 20 nt, Human
cugggcagcugccuccccuc

SEQ ID NO: 2698033 - RNA, 21 nt, Human
cugggcagcugccuccccucc

SEQ ID NO: 2698034 - RNA, 22 nt, Human
cugggcagcugccuccccuccu

SEQ ID NO: 2698035 - RNA, 16 nt, Human
cugugagaugcuagaa

SEQ ID NO: 2698036 - RNA, 23 nt, Human
cugucagcuccccucggagaaga

SEQ ID NO: 2698037 - RNA, 21 nt, Human
cugucagcuccccucggagaa

SEQ ID NO: 2698038 - RNA, 21 nt, Human
cuggaaaucaggguuaguauu

SEQ ID NO: 2698039 - RNA, 15 nt, Human
caaauccuugaagau

SEQ ID NO: 2698040 - RNA, 23 nt, Human
caacacgagcaggcuacugucag

SEQ ID NO: 2698041 - RNA, 22 nt, Human
caaagcacugacuucuaaguaa

SEQ ID NO: 2698042 - RNA, 20 nt, Human
caaagcacugacuucuaagu

SEQ ID NO: 2698043 - RNA, 20 nt, Human
caaaaaaaaaaaaaaauuag

SEQ ID NO: 2698044 - RNA, 15 nt, Human
caaaaggcagaagca

SEQ ID NO: 2698045 - RNA, 24 nt, Human
caaacccaguguuuuaggagcaug

SEQ ID NO: 2698046 - RNA, 13 nt, Human
caaacccaguguu

SEQ ID NO: 2698047 - RNA, 14 nt, Human
auuugcucauggaa

SEQ ID NO: 2698048 - RNA, 17 nt, Human
auuugcucauggaauug

SEQ ID NO: 2698049 - RNA, 19 nt, Human
auuuuauagcuacuaauuu

SEQ ID NO: 2698050 - RNA, 17 nt, Human
auuuuauagcuacuaau

SEQ ID NO: 2698051 - RNA, 14 nt, Human
auuaugaauuacau

SEQ ID NO: 2698052 - RNA, 17 nt, Human
auuaugaauuacauuug

SEQ ID NO: 2698053 - RNA, 16 nt, Human
auuagggagagaagau

SEQ ID NO: 2698054 - RNA, 19 nt, Human
auucacaagacccaaaagg

SEQ ID NO: 2698055 - RNA, 18 nt, Human
auuaugaauuacauuugu

SEQ ID NO: 2698056 - RNA, 22 nt, Human
auucauagcagcuuauucacaa

SEQ ID NO: 2698057 - RNA, 19 nt, Human
auucauagcagcuuauuca

SEQ ID NO: 2698058 - RNA, 23 nt, Human
auuguaauaggcguaacuaauuu

SEQ ID NO: 2698059 - RNA, 14 nt, Human
auuguaaaauggug

SEQ ID NO: 2698060 - RNA, 17 nt, Human
cacagccucuuagaugc

SEQ ID NO: 2698061 - RNA, 21 nt, Human
cacagccucuuagaugcaguu

SEQ ID NO: 2698062 - RNA, 17 nt, Human
cacacaugaaguccaag

SEQ ID NO: 2698063 - RNA, 22 nt, Human
cacacaugaaguccaagcauuu

SEQ ID NO: 2698064 - RNA, 18 nt, Human
cacaagacugcacaucaa

SEQ ID NO: 2698065 - RNA, 15 nt, Human
caaugcuguauuuua

SEQ ID NO: 2698066 - RNA, 16 nt, Human
caaugcuguauuuuaa

SEQ ID NO: 2698067 - RNA, 17 nt, Human
caaugcuguauuuuaaa

SEQ ID NO: 2698068 - RNA, 15 nt, Human
caauucuugccaaau

SEQ ID NO: 2698069 - RNA, 14 nt, Human
caaguccaagcaua

SEQ ID NO: 2698070 - RNA, 21 nt, Human
cacuagggcagggacaggaua

SEQ ID NO: 2698071 - RNA, 20 nt, Human
cacuagggcagggacaggau

SEQ ID NO: 2698072 - RNA, 21 nt, Human
cacugcagaagacaguauggc

SEQ ID NO: 2698073 - RNA, 22 nt, Human
cacuuguguuuugcaagccaga

SEQ ID NO: 2698074 - RNA, 19 nt, Human
cacuuguguuuugcaagcc

SEQ ID NO: 2698075 - RNA, 16 nt, Human
cacuugucaauaaaau

SEQ ID NO: 2698076 - RNA, 22 nt, Human
cacugguucuucuuggucucag

SEQ ID NO: 2698077 - RNA, 16 nt, Human
caugaauuaguuuuau

SEQ ID NO: 2698078 - RNA, 20 nt, Human
caucagcuugcccuguuaaa

SEQ ID NO: 2698079 - RNA, 15 nt, Human
caucagcugcugaaa

SEQ ID NO: 2698080 - RNA, 18 nt, Human
caucagcugcugaaacaa

SEQ ID NO: 2698081 - RNA, 17 nt, Human
caucagcugcugaaaca

SEQ ID NO: 2698082 - RNA, 20 nt, Human
cauagcagcuuauucacaag

SEQ ID NO: 2698083 - RNA, 18 nt, Human
cauagauucccugagcag

SEQ ID NO: 2698084 - RNA, 17 nt, Human
cauagauucccugagca

SEQ ID NO: 2698085 - RNA, 15 nt, Human
cauuaggauggcuag

SEQ ID NO: 2698086 - RNA, 18 nt, Human
ccaaauguucaucaauga

SEQ ID NO: 2698087 - RNA, 23 nt, Human
caggacagcccuucuuuccacag

SEQ ID NO: 2698088 - RNA, 24 nt, Human
caggacagcccuucuuuccacaga

SEQ ID NO: 2698089 - RNA, 21 nt, Human
caggaaaucaaauaugcaaag

SEQ ID NO: 2698090 - RNA, 19 nt, Human
caggaaaucaaauaugcaa

SEQ ID NO: 2698091 - RNA, 16 nt, Human
cagcuuauucacaaga

SEQ ID NO: 2698092 - RNA, 19 nt, Human
cagggaggacgcucucugg

SEQ ID NO: 2698093 - RNA, 22 nt, Human
cagggaggacgcucucuggccu

SEQ ID NO: 2698094 - RNA, 23 nt, Human
cagccugagcgacagugagacuc

SEQ ID NO: 2698095 - RNA, 19 nt, Human
cagccccgugggguuccuc

SEQ ID NO: 2698096 - RNA, 18 nt, Human
cagcaguucagagcugcc

SEQ ID NO: 2698097 - RNA, 19 nt, Human
cagcaguucagagcugccc

SEQ ID NO: 2698098 - RNA, 20 nt, Human
cagcaguucagagcugcccu

SEQ ID NO: 2698099 - RNA, 21 nt, Human
cagcaguucagagcugcccuc

SEQ ID NO: 2698100 - RNA, 22 nt, Human
cagcaguucagagcugcccucu

SEQ ID NO: 2698101 - RNA, 20 nt, Human
cagccagacuggcacaguuu

SEQ ID NO: 2698102 - RNA, 20 nt, Human
cccauauuuguacaccaaua

SEQ ID NO: 2698103 - RNA, 16 nt, Human
cccagccagcaguuca

SEQ ID NO: 2698104 - RNA, 17 nt, Human
cccagccagcaguucag

SEQ ID NO: 2698105 - RNA, 20 nt, Human
cccagccagcaguucagagc

SEQ ID NO: 2698106 - RNA, 23 nt, Human
cccauuguggucacaggaaguag

SEQ ID NO: 2698107 - RNA, 22 nt, Human
cccauuguggucacaggaagua

SEQ ID NO: 2698108 - RNA, 23 nt, Human
cccgggaggcagagguugcagug

SEQ ID NO: 2698109 - RNA, 15 nt, Human
ccagauccuggaaau

SEQ ID NO: 2698110 - RNA, 13 nt, Human
ccucugcuugcca

SEQ ID NO: 2698111 - RNA, 17 nt, Human
ccucugcuugccauccc

SEQ ID NO: 2698112 - RNA, 15 nt, Human
ccucauguccacugg

SEQ ID NO: 2698113 - RNA, 20 nt, Human
ccucauguccacugguucuu

SEQ ID NO: 2698114 - RNA, 16 nt, Human
ccguagguuauuuuca

SEQ ID NO: 2698115 - RNA, 24 nt, Human
ccguagacgugcacgcacacuguc

SEQ ID NO: 2698116 - RNA, 13 nt, Human
cccuucucuguau

SEQ ID NO: 2698117 - RNA, 17 nt, Human
cccuucuuuccacagaa

SEQ ID NO: 2698118 - RNA, 16 nt, Human
cgacagugagacucug

SEQ ID NO: 2698119 - RNA, 15 nt, Human
cgacagugagacucu

SEQ ID NO: 2698120 - RNA, 23 nt, Human
cuaagugaaauaagccagacauc

SEQ ID NO: 2698121 - RNA, 20 nt, Human
cuaagugaaauaagccagac

SEQ ID NO: 2698122 - RNA, 15 nt, Human
cuacaugagguacug

SEQ ID NO: 2698123 - RNA, 15 nt, Human
cguggugauuuagca

SEQ ID NO: 2698124 - RNA, 19 nt, Human
cuagaacucccuuucaaca

SEQ ID NO: 2698125 - RNA, 18 nt, Human
cuagaacucccuuucaac

SEQ ID NO: 2698126 - RNA, 17 nt, Human
cuagaacucccuuucaa

SEQ ID NO: 2698127 - RNA, 16 nt, Human
cuagaacucccuuuca

SEQ ID NO: 2698128 - RNA, 16 nt, Human
cuagcaugaagacaga

SEQ ID NO: 2698129 - RNA, 23 nt, Human
cuaguugaucagcuuauugucua

SEQ ID NO: 2698130 - RNA, 21 nt, Human
cuccagugagacagcucugca

SEQ ID NO: 2698131 - RNA, 14 nt, Human
cucccugcaauaaa

SEQ ID NO: 2698132 - RNA, 16 nt, Human
cucccugcaauaaaau

SEQ ID NO: 2698133 - RNA, 11 nt, Human
cucucuggccu

SEQ ID NO: 2698134 - RNA, 12 nt, Human
cucucuggccuu

SEQ ID NO: 2698135 - RNA, 15 nt, Human
cucuuagaugcaguu

SEQ ID NO: 2698136 - RNA, 20 nt, Human
cucuuagaugcaguucugaa

SEQ ID NO: 2698137 - RNA, 12 nt, Human
aacucauuucua

SEQ ID NO: 2698138 - RNA, 21 nt, Human
aacuagaguuuagcuggaaaa

SEQ ID NO: 2698139 - RNA, 23 nt, Human
aacuaucucauuuccaagcaagu

SEQ ID NO: 2698140 - RNA, 18 nt, Human
aaccuugaaaacuuuaug

SEQ ID NO: 2698141 - RNA, 16 nt, Human
gucuuucacauuuaaa

SEQ ID NO: 2698142 - RNA, 20 nt, Human
aaccugagccccaaaaggua

SEQ ID NO: 2698143 - RNA, 18 nt, Human
aaccugagccccaaaagg

SEQ ID NO: 2698144 - RNA, 16 nt, Human
aacccgggaggcagag

SEQ ID NO: 2698145 - RNA, 23 nt, Human
aacccaaauguucaucaaugaau

SEQ ID NO: 2698146 - RNA, 18 nt, Human
aacccaaguccaagcaua

SEQ ID NO: 2698147 - RNA, 21 nt, Human
aacuucagcgguuuauauaag

SEQ ID NO: 2698148 - RNA, 18 nt, Human
aacuuccagauccuggaa

SEQ ID NO: 2698149 - RNA, 17 nt, Human
gugaugggaaagcauug

SEQ ID NO: 2698150 - RNA, 17 nt, Human
aacugggacaggggaga

SEQ ID NO: 2698151 - RNA, 19 nt, Human
aacuggacugguucaaaug

SEQ ID NO: 2698152 - RNA, 19 nt, Human
aacugcacugucaagauga

SEQ ID NO: 2698153 - RNA, 12 nt, Human
aacugaaaucau

SEQ ID NO: 2698154 - RNA, 21 nt, Human
gugagaugcuagaacucccuu

SEQ ID NO: 2698155 - RNA, 20 nt, Human
aaauuuuuucucuaggaaau

SEQ ID NO: 2698156 - RNA, 12 nt, Human
aacaauaaaaga

SEQ ID NO: 2698157 - RNA, 14 nt, Human
aacaaugcuguauu

SEQ ID NO: 2698158 - RNA, 15 nt, Human
aacaaugcuguauuu

SEQ ID NO: 2698159 - RNA, 15 nt, Human
aacacaacuauauug

SEQ ID NO: 2698160 - RNA, 16 nt, Human
aacacaacuauauugu

SEQ ID NO: 2698161 - RNA, 17 nt, Human
aacaaugcuguauuuua

SEQ ID NO: 2698162 - RNA, 22 nt, Human
aacaaugcuguauuuuaaaaga

SEQ ID NO: 2698163 - RNA, 15 nt, Human
aacacagcaagggug

SEQ ID NO: 2698164 - RNA, 22 nt, Human
aacagugauuaccagggacuga

SEQ ID NO: 2698165 - RNA, 15 nt, Human
aacagugauuaccag

SEQ ID NO: 2698166 - RNA, 16 nt, Human
aacagauaaauaguuu

SEQ ID NO: 2698167 - RNA, 18 nt, Human
guauguacuucaugcugu

SEQ ID NO: 2698168 - RNA, 16 nt, Human
gucaaauugugugaaa

SEQ ID NO: 2698169 - RNA, 14 nt, Human
aaauggguuuuacu

SEQ ID NO: 2698170 - RNA, 15 nt, Human
aaauggguuuuacug

SEQ ID NO: 2698171 - RNA, 20 nt, Human
guaguguuggagaagaacug

SEQ ID NO: 2698172 - RNA, 17 nt, Human
guaguguuggagaagaa

SEQ ID NO: 2698173 - RNA, 16 nt, Human
aaauguaagggaaacu

SEQ ID NO: 2698174 - RNA, 16 nt, Human
guauauuuuauaucaa

SEQ ID NO: 2698175 - RNA, 15 nt, Human
guauaaaauaauuuu

SEQ ID NO: 2698176 - RNA, 21 nt, Human
guauaaaauaauuuuuauauu

SEQ ID NO: 2698177 - RNA, 19 nt, Human
aagggugaugggaaagcau

SEQ ID NO: 2698178 - RNA, 14 nt, Human
aagguacuucaaau

SEQ ID NO: 2698179 - RNA, 22 nt, Human
aagucuuauauauuguagauaa

SEQ ID NO: 2698180 - RNA, 16 nt, Human
aagucuuucacauuua

SEQ ID NO: 2698181 - RNA, 13 nt, Human
aaguauuagaaua

SEQ ID NO: 2698182 - RNA, 14 nt, Human
aaguaaugauaacu

SEQ ID NO: 2698183 - RNA, 19 nt, Human
aaguaaugauaacuggaaa

SEQ ID NO: 2698184 - RNA, 12 nt, Human
uaaaagaaugau

SEQ ID NO: 2698185 - RNA, 23 nt, Human
uaaaagaauauuuuaacuuccuu

SEQ ID NO: 2698186 - RNA, 16 nt, Human
uaaaagaauauuuuaa

SEQ ID NO: 2698187 - RNA, 20 nt, Human
uaaaagacagugaaagaaaa

SEQ ID NO: 2698188 - RNA, 20 nt, Human
uaaaauaauuuuuauauuug

SEQ ID NO: 2698189 - RNA, 13 nt, Human
aagauguagagga

SEQ ID NO: 2698190 - RNA, 14 nt, Human
aagaugaaaauauu

SEQ ID NO: 2698191 - RNA, 13 nt, Human
aagaugaaaauau

SEQ ID NO: 2698192 - RNA, 16 nt, Human
aagacugcacaucaaa

SEQ ID NO: 2698193 - RNA, 17 nt, Human
aagacugcauuauauuu

SEQ ID NO: 2698194 - RNA, 23 nt, Human
aagaggaaugaaguacucauaca

SEQ ID NO: 2698195 - RNA, 20 nt, Human
guuauuauauuuacaaaugg

SEQ ID NO: 2698196 - RNA, 13 nt, Human
aagcuccagguag

SEQ ID NO: 2698197 - RNA, 14 nt, Human
aagcuccagguaga

SEQ ID NO: 2698198 - RNA, 20 nt, Human
aagcucacagaccuuugaac

SEQ ID NO: 2698199 - RNA, 16 nt, Human
aagcauuuagauguau

SEQ ID NO: 2698200 - RNA, 13 nt, Human
aagcauuguaaau

SEQ ID NO: 2698201 - RNA, 23 nt, Human
aauacaucccuuaccugggaaag

SEQ ID NO: 2698202 - RNA, 23 nt, Human
aauaccacaggaaccacaagacu

SEQ ID NO: 2698203 - RNA, 18 nt, Human
aauaccaugccauuuaaa

SEQ ID NO: 2698204 - RNA, 19 nt, Human
aauagucaaauugugugaa

SEQ ID NO: 2698205 - RNA, 21 nt, Human
uaacuuccuuggacucauuuu

SEQ ID NO: 2698206 - RNA, 13 nt, Human
uaagaagugaaaa

SEQ ID NO: 2698207 - RNA, 20 nt, Human
aauccucaguuuuugugaaa

SEQ ID NO: 2698208 - RNA, 20 nt, Human
uaaguaaugauaacuggaaa

SEQ ID NO: 2698209 - RNA, 19 nt, Human
uaaguaaaaccacagcagu

SEQ ID NO: 2698210 - RNA, 18 nt, Human
uaaguaaaaccacagcag

SEQ ID NO: 2698211 - RNA, 17 nt, Human
uaaguaaaaccacagca

SEQ ID NO: 2698212 - RNA, 16 nt, Human
uaaguaaaaccacagc

SEQ ID NO: 2698213 - RNA, 15 nt, Human
uaaguaaaaccacag

SEQ ID NO: 2698214 - RNA, 13 nt, Human
uaaguaaaaccac

SEQ ID NO: 2698215 - RNA, 18 nt, Human
uaagguuaccuuuguucc

SEQ ID NO: 2698216 - RNA, 14 nt, Human
uaagcaaaauguga

SEQ ID NO: 2698217 - RNA, 21 nt, Human
uaagcaaaaugugauauguac

SEQ ID NO: 2698218 - RNA, 15 nt, Human
uaagcaaaaugugau

SEQ ID NO: 2698219 - RNA, 16 nt, Human
aaucagccuaguugau

SEQ ID NO: 2698220 - RNA, 15 nt, Human
aauauuuauuuuaau

SEQ ID NO: 2698221 - RNA, 21 nt, Human
uacaaaaaaaaaaaaaaauua

SEQ ID NO: 2698222 - RNA, 22 nt, Human
aaugcuguauuuuaaaagaaug

SEQ ID NO: 2698223 - RNA, 20 nt, Human
aaugcuguauuuuaaaagaa

SEQ ID NO: 2698224 - RNA, 21 nt, Human
aaugcuguauuuuaaaagaau

SEQ ID NO: 2698225 - RNA, 20 nt, Human
aauguaagggaaacugccag

SEQ ID NO: 2698226 - RNA, 17 nt, Human
uacagagacagaaagca

SEQ ID NO: 2698227 - RNA, 22 nt, Human
uaauuccguagguuauuuucag

SEQ ID NO: 2698228 - RNA, 18 nt, Human
uaauuuuuauauuugaaa

SEQ ID NO: 2698229 - RNA, 19 nt, Human
uaauuuuuauauuugaaau

SEQ ID NO: 2698230 - RNA, 21 nt, Human
uaauuuuuauauuugaaauau

SEQ ID NO: 2698231 - RNA, 16 nt, Human
aaugauuucauucaau

SEQ ID NO: 2698232 - RNA, 22 nt, Human
aaugagagacacacugaagaag

SEQ ID NO: 2698233 - RNA, 23 nt, Human
aaugauuaugaauuacauuugua

SEQ ID NO: 2698234 - RNA, 20 nt, Human
aauguucaucaaugaaugaa

SEQ ID NO: 2698235 - RNA, 16 nt, Human
aauguucaucaaugaa

SEQ ID NO: 2698236 - RNA, 13 nt, Human
aauguucaucaau

SEQ ID NO: 2698237 - RNA, 16 nt, Human
uaccaugccauuuaaa

SEQ ID NO: 2698238 - RNA, 19 nt, Human
uaccagggacugaggggag

SEQ ID NO: 2698239 - RNA, 14 nt, Human
aauuacauuuguau

SEQ ID NO: 2698240 - RNA, 13 nt, Human
aauuacauuugua

SEQ ID NO: 2698241 - RNA, 17 nt, Human
acacucaaaucaagaaa

SEQ ID NO: 2698242 - RNA, 18 nt, Human
acacucaaaucaagaaac

SEQ ID NO: 2698243 - RNA, 13 nt, Human
acacucaaaucaa

SEQ ID NO: 2698244 - RNA, 16 nt, Human
uauaggugcuacaaaa

SEQ ID NO: 2698245 - RNA, 12 nt, Human
uauaggaauuga

SEQ ID NO: 2698246 - RNA, 19 nt, Human
acagaaagcagaacaguga

SEQ ID NO: 2698247 - RNA, 14 nt, Human
acagaccuuugaac

SEQ ID NO: 2698248 - RNA, 20 nt, Human
uaucacaaaucuuaacuuga

SEQ ID NO: 2698249 - RNA, 16 nt, Human
uaucacaaaucuuaac

SEQ ID NO: 2698250 - RNA, 14 nt, Human
uaucacaaaucuua

SEQ ID NO: 2698251 - RNA, 14 nt, Human
acagcuguaugauu

SEQ ID NO: 2698252 - RNA, 19 nt, Human
acagcuguaugauucccag

SEQ ID NO: 2698253 - RNA, 20 nt, Human
acagcuguaugauucccagc

SEQ ID NO: 2698254 - RNA, 23 nt, Human
acagcuguaugauucccagccag

SEQ ID NO: 2698255 - RNA, 19 nt, Human
acagcccuucuuuccacag

SEQ ID NO: 2698256 - RNA, 18 nt, Human
acagcaagggugauggga

SEQ ID NO: 2698257 - RNA, 15 nt, Human
uagaaacacaacuau

SEQ ID NO: 2698258 - RNA, 16 nt, Human
uagaacucccuuucaa

SEQ ID NO: 2698259 - RNA, 18 nt, Human
uagaacucccuuucaaca

SEQ ID NO: 2698260 - RNA, 17 nt, Human
uagaacucccuuucaac

SEQ ID NO: 2698261 - RNA, 13 nt, Human
uagacacacauga

SEQ ID NO: 2698262 - RNA, 13 nt, Human
acaaaaacacagc

SEQ ID NO: 2698263 - RNA, 15 nt, Human
acaaaaacacagcaa

SEQ ID NO: 2698264 - RNA, 14 nt, Human
acaaaaacacagca

SEQ ID NO: 2698265 - RNA, 14 nt, Human
uagaggguguguaa

SEQ ID NO: 2698266 - RNA, 13 nt, Human
uaggauguugaaa

SEQ ID NO: 2698267 - RNA, 13 nt, Human
acacaacuauauu

SEQ ID NO: 2698268 - RNA, 18 nt, Human
acuauucaaacagucuca

SEQ ID NO: 2698269 - RNA, 16 nt, Human
acuauucaaacagucu

SEQ ID NO: 2698270 - RNA, 14 nt, Human
acuauucaaacagu

SEQ ID NO: 2698271 - RNA, 13 nt, Human
acuauucaaacag

SEQ ID NO: 2698272 - RNA, 14 nt, Human
uccccuccucugcu

SEQ ID NO: 2698273 - RNA, 15 nt, Human
uccccuccucugcuu

SEQ ID NO: 2698274 - RNA, 18 nt, Human
uccccuccucugcuugcc

SEQ ID NO: 2698275 - RNA, 24 nt, Human
uccccuccucugcuugccaucccu

SEQ ID NO: 2698276 - RNA, 20 nt, Human
acuagaguuuagcuggaaaa

SEQ ID NO: 2698277 - RNA, 21 nt, Human
acuccaaacugacucuuaaga

SEQ ID NO: 2698278 - RNA, 19 nt, Human
ucccuccaccucccugcaa

SEQ ID NO: 2698279 - RNA, 15 nt, Human
ucccuccaccucccu

SEQ ID NO: 2698280 - RNA, 17 nt, Human
ucccuccaccucccugc

SEQ ID NO: 2698281 - RNA, 14 nt, Human
ucccuccaccuccc

SEQ ID NO: 2698282 - RNA, 14 nt, Human
acuccagaaaguga

SEQ ID NO: 2698283 - RNA, 18 nt, Human
acuccagaaagugacaag

SEQ ID NO: 2698284 - RNA, 21 nt, Human
uccugaaaacccuugccaugu

SEQ ID NO: 2698285 - RNA, 22 nt, Human
uccugaaaacccuugccaugug

SEQ ID NO: 2698286 - RNA, 17 nt, Human
uccucuccccaugaugu

SEQ ID NO: 2698287 - RNA, 16 nt, Human
ucauaauaaguugcau

SEQ ID NO: 2698288 - RNA, 17 nt, Human
accugagccccaaaagg

SEQ ID NO: 2698289 - RNA, 12 nt, Human
accugagcccca

SEQ ID NO: 2698290 - RNA, 17 nt, Human
acgcucucuggccuucg

SEQ ID NO: 2698291 - RNA, 16 nt, Human
acgcucucuggccuuc

SEQ ID NO: 2698292 - RNA, 15 nt, Human
acgcucucuggccuu

SEQ ID NO: 2698293 - RNA, 14 nt, Human
uccagugagacagc

SEQ ID NO: 2698294 - RNA, 22 nt, Human
uccaugaagauguagaggagaa

SEQ ID NO: 2698295 - RNA, 23 nt, Human
ucaauauuucagauaaucacaau

SEQ ID NO: 2698296 - RNA, 13 nt, Human
ucaauuuaaaaaa

SEQ ID NO: 2698297 - RNA, 12 nt, Human
ucaauuuaaaaa

SEQ ID NO: 2698298 - RNA, 16 nt, Human
ucacagaccuuugaac

SEQ ID NO: 2698299 - RNA, 23 nt, Human
ucacagccagacuggcacaguuu

SEQ ID NO: 2698300 - RNA, 17 nt, Human
ucacagccagacuggca

SEQ ID NO: 2698301 - RNA, 22 nt, Human
ucacagcuuauuuccucauuuu

SEQ ID NO: 2698302 - RNA, 16 nt, Human
accacaagacugcaca

SEQ ID NO: 2698303 - RNA, 19 nt, Human
accaacacgagcaggcuac

SEQ ID NO: 2698304 - RNA, 14 nt, Human
accaacacgagcag

SEQ ID NO: 2698305 - RNA, 18 nt, Human
uauuuuaaaagaaugauu

SEQ ID NO: 2698306 - RNA, 14 nt, Human
uauuuuaaaagaau

SEQ ID NO: 2698307 - RNA, 19 nt, Human
uauuuuaauaauguuucaa

SEQ ID NO: 2698308 - RNA, 22 nt, Human
uauuuuaauaauguuucaaaca

SEQ ID NO: 2698309 - RNA, 21 nt, Human
ucaaacagucucaggaaauca

SEQ ID NO: 2698310 - RNA, 20 nt, Human
ucaaacagucucaggaaauc

SEQ ID NO: 2698311 - RNA, 13 nt, Human
ucaaacagucuca

SEQ ID NO: 2698312 - RNA, 13 nt, Human
ucaguagucagac

SEQ ID NO: 2698313 - RNA, 18 nt, Human
ucagagcugcccucuccu

SEQ ID NO: 2698314 - RNA, 17 nt, Human
ucagagcugcccucucc

SEQ ID NO: 2698315 - RNA, 15 nt, Human
ucagagcugcccucu

SEQ ID NO: 2698316 - RNA, 16 nt, Human
ucagagcugcccucuc

SEQ ID NO: 2698317 - RNA, 13 nt, Human
ucagagcugcccu

SEQ ID NO: 2698318 - RNA, 14 nt, Human
ucagagcugcccuc

SEQ ID NO: 2698319 - RNA, 13 nt, Human
ucagcccucagaa

SEQ ID NO: 2698320 - RNA, 12 nt, Human
ucagcccucaga

SEQ ID NO: 2698321 - RNA, 20 nt, Human
acccaaauguucaucaauga

SEQ ID NO: 2698322 - RNA, 16 nt, Human
acccaaauguucauca

SEQ ID NO: 2698323 - RNA, 13 nt, Human
acuguggguagac

SEQ ID NO: 2698324 - RNA, 17 nt, Human
ucuaccaaaaaucucaa

SEQ ID NO: 2698325 - RNA, 23 nt, Human
acugucagcuccccucggagaag

SEQ ID NO: 2698326 - RNA, 22 nt, Human
acugucagcuccccucggagaa

SEQ ID NO: 2698327 - RNA, 22 nt, Human
acugaagaagcaccaaucauga

SEQ ID NO: 2698328 - RNA, 21 nt, Human
acuugaacccgggaggcagag

SEQ ID NO: 2698329 - RNA, 23 nt, Human
acuugaacccgggaggcagaggu

SEQ ID NO: 2698330 - RNA, 17 nt, Human
ucucaaaacugcacugu

SEQ ID NO: 2698331 - RNA, 21 nt, Human
acuucuaaguaaaaccacagc

SEQ ID NO: 2698332 - RNA, 13 nt, Human
acuucuaaguaaa

SEQ ID NO: 2698333 - RNA, 19 nt, Human
acuucuaaguaaaaccaca

SEQ ID NO: 2698334 - RNA, 18 nt, Human
acuucuaaguaaaaccac

SEQ ID NO: 2698335 - RNA, 12 nt, Human
ucuagcaugaag

SEQ ID NO: 2698336 - RNA, 13 nt, Human
ucuauaauuuaaa

SEQ ID NO: 2698337 - RNA, 20 nt, Human
acuuccagauccuggaaauc

SEQ ID NO: 2698338 - RNA, 18 nt, Human
agaaagcagaacagugau

SEQ ID NO: 2698339 - RNA, 17 nt, Human
agaaagcagaacaguga

SEQ ID NO: 2698340 - RNA, 20 nt, Human
agaaagcagaacagugauua

SEQ ID NO: 2698341 - RNA, 16 nt, Human
agaaagacuauucaaa

SEQ ID NO: 2698342 - RNA, 16 nt, Human
agaaacacaacuauau

SEQ ID NO: 2698343 - RNA, 16 nt, Human
agaaaacaaggaugaa

SEQ ID NO: 2698344 - RNA, 23 nt, Human
agaaacuuaagguuaccuuuguu

SEQ ID NO: 2698345 - RNA, 19 nt, Human
agaagcaacccaaauguuc

SEQ ID NO: 2698346 - RNA, 19 nt, Human
agaagcaccaaucaugaau

SEQ ID NO: 2698347 - RNA, 20 nt, Human
ucugcccauccugccccuga

SEQ ID NO: 2698348 - RNA, 16 nt, Human
agaacucccuuucaac

SEQ ID NO: 2698349 - RNA, 15 nt, Human
agaacucccuuucaa

SEQ ID NO: 2698350 - RNA, 17 nt, Human
agaacucccuuucaaca

SEQ ID NO: 2698351 - RNA, 13 nt, Human
agaaguugauaug

SEQ ID NO: 2698352 - RNA, 10 nt, Human
ucuggccuuc

SEQ ID NO: 2698353 - RNA, 15 nt, Human
ugaauacuuuauaaa

SEQ ID NO: 2698354 - RNA, 23 nt, Human
agcaacgcaggcccccaggugcc

SEQ ID NO: 2698355 - RNA, 15 nt, Human
agauucccugagcag

SEQ ID NO: 2698356 - RNA, 15 nt, Human
ugacuucuaaguaaa

SEQ ID NO: 2698357 - RNA, 23 nt, Human
ugacuucuaaguaaaaccacagc

SEQ ID NO: 2698358 - RNA, 22 nt, Human
ugacuucuaaguaaaaccacag

SEQ ID NO: 2698359 - RNA, 24 nt, Human
ugacuucuaaguaaaaccacagca

SEQ ID NO: 2698360 - RNA, 16 nt, Human
agaugcaguucugaag

SEQ ID NO: 2698361 - RNA, 16 nt, Human
ugacacuuaaaaaugg

SEQ ID NO: 2698362 - RNA, 17 nt, Human
ugacacuuaaaaauggu

SEQ ID NO: 2698363 - RNA, 14 nt, Human
agacuauucaaaca

SEQ ID NO: 2698364 - RNA, 12 nt, Human
agacuauucaaa

SEQ ID NO: 2698365 - RNA, 15 nt, Human
agacuauucaaacag

SEQ ID NO: 2698366 - RNA, 15 nt, Human
ucuucacaacagauu

SEQ ID NO: 2698367 - RNA, 14 nt, Human
agaaucacuugaac

SEQ ID NO: 2698368 - RNA, 21 nt, Human
agacauagaauuaacacauga

SEQ ID NO: 2698369 - RNA, 14 nt, Human
agacauagaauuaa

SEQ ID NO: 2698370 - RNA, 18 nt, Human
agacaucaacagauaaau

SEQ ID NO: 2698371 - RNA, 17 nt, Human
agacaucaacagauaaa

SEQ ID NO: 2698372 - RNA, 21 nt, Human
agagcaguuugguuucuagca

SEQ ID NO: 2698373 - RNA, 23 nt, Human
agagcaguuugguuucuagcaug

SEQ ID NO: 2698374 - RNA, 20 nt, Human
ugaaaagcuccauuuuuagu

SEQ ID NO: 2698375 - RNA, 22 nt, Human
ugaaaaaguucugcagauaaac

SEQ ID NO: 2698376 - RNA, 22 nt, Human
ugaaacugagaugugaacacau

SEQ ID NO: 2698377 - RNA, 19 nt, Human
ugaaacucguuaauuugua

SEQ ID NO: 2698378 - RNA, 12 nt, Human
ugauaugggucu

SEQ ID NO: 2698379 - RNA, 20 nt, Human
agcaugucgucaaagcugaa

SEQ ID NO: 2698380 - RNA, 17 nt, Human
agcaugucgucaaagcu

SEQ ID NO: 2698381 - RNA, 18 nt, Human
agcauuguaaaugugcuu

SEQ ID NO: 2698382 - RNA, 17 nt, Human
agcauuguaaaugugcu

SEQ ID NO: 2698383 - RNA, 22 nt, Human
ugaguaacugauuuguaacaag

SEQ ID NO: 2698384 - RNA, 23 nt, Human
agcauaaauguugacaugggaca

SEQ ID NO: 2698385 - RNA, 18 nt, Human
ugagugucuuaauuaaaa

SEQ ID NO: 2698386 - RNA, 17 nt, Human
ugaugaagaaguugaua

SEQ ID NO: 2698387 - RNA, 14 nt, Human
ugauuaccagggac

SEQ ID NO: 2698388 - RNA, 12 nt, Human
ugauuaaaccaa

SEQ ID NO: 2698389 - RNA, 17 nt, Human
ugaugaucuuuaaaaua

SEQ ID NO: 2698390 - RNA, 14 nt, Human
ugaugaucuuuaaa

SEQ ID NO: 2698391 - RNA, 14 nt, Human
agccagacuggcac

SEQ ID NO: 2698392 - RNA, 19 nt, Human
agccagacuggcacaguuu

SEQ ID NO: 2698393 - RNA, 22 nt, Human
agccugaaagaggaaugaagua

SEQ ID NO: 2698394 - RNA, 15 nt, Human
agccucauguccacu

SEQ ID NO: 2698395 - RNA, 20 nt, Human
agccucauguccacugguuc

SEQ ID NO: 2698396 - RNA, 18 nt, Human
agcccauggcacucuaug

SEQ ID NO: 2698397 - RNA, 18 nt, Human
agccccgugggguuccuc

SEQ ID NO: 2698398 - RNA, 18 nt, Human
agcuacuugggaggcuga

SEQ ID NO: 2698399 - RNA, 17 nt, Human
agcuacuugggaggcug

SEQ ID NO: 2698400 - RNA, 20 nt, Human
agccuuggggcugaugcagu

SEQ ID NO: 2698401 - RNA, 14 nt, Human
uggagcucguggaa

SEQ ID NO: 2698402 - RNA, 13 nt, Human
uggagaagaacug

SEQ ID NO: 2698403 - RNA, 14 nt, Human
uggagaagaacuga

SEQ ID NO: 2698404 - RNA, 13 nt, Human
uggaaaggcagcu

SEQ ID NO: 2698405 - RNA, 19 nt, Human
uggcacaguuuucugagaa

SEQ ID NO: 2698406 - RNA, 18 nt, Human
uggcacaguuuucugaga

SEQ ID NO: 2698407 - RNA, 19 nt, Human
agcuguucacagccagacu

SEQ ID NO: 2698408 - RNA, 16 nt, Human
agcuguucacagccag

SEQ ID NO: 2698409 - RNA, 22 nt, Human
agcugcccucuccugggcagcu

SEQ ID NO: 2698410 - RNA, 15 nt, Human
agcugccuccccucc

SEQ ID NO: 2698411 - RNA, 16 nt, Human
agcugccuccccuccu

SEQ ID NO: 2698412 - RNA, 19 nt, Human
ugcuacaaaaacacagcaa

SEQ ID NO: 2698413 - RNA, 18 nt, Human
ugcuacaaaaacacagca

SEQ ID NO: 2698414 - RNA, 17 nt, Human
ugcuacaaaaacacagc

SEQ ID NO: 2698415 - RNA, 16 nt, Human
ugcuacaaaaacacag

SEQ ID NO: 2698416 - RNA, 15 nt, Human
ugcuacaaaaacaca

SEQ ID NO: 2698417 - RNA, 20 nt, Human
ugcuacaaaaacacagcaag

SEQ ID NO: 2698418 - RNA, 17 nt, Human
agcuugaaacugagaug

SEQ ID NO: 2698419 - RNA, 13 nt, Human
ugcuguauuuuaa

SEQ ID NO: 2698420 - RNA, 21 nt, Human
ugcuguauuuuaaaagaauga

SEQ ID NO: 2698421 - RNA, 22 nt, Human
ugcuguauuuuaaaagaaugau

SEQ ID NO: 2698422 - RNA, 17 nt, Human
aggacacugauaugggu

SEQ ID NO: 2698423 - RNA, 13 nt, Human
aggaaauauuuau

SEQ ID NO: 2698424 - RNA, 23 nt, Human
aggaaaucaaauaugcaaagcac

SEQ ID NO: 2698425 - RNA, 12 nt, Human
aggaaauauuua

SEQ ID NO: 2698426 - RNA, 14 nt, Human
ugcucauggaauug

SEQ ID NO: 2698427 - RNA, 11 nt, Human
ugcucauggaa

SEQ ID NO: 2698428 - RNA, 19 nt, Human
aguagauaggccaugggca

SEQ ID NO: 2698429 - RNA, 15 nt, Human
aguaaaaccacagca

SEQ ID NO: 2698430 - RNA, 18 nt, Human
uguagaggagaaacugga

SEQ ID NO: 2698431 - RNA, 21 nt, Human
ugucaauaaaauccauacauu

SEQ ID NO: 2698432 - RNA, 20 nt, Human
ugucaaucagccuaguugau

SEQ ID NO: 2698433 - RNA, 22 nt, Human
aguauuucuaugaaauauuaug

SEQ ID NO: 2698434 - RNA, 13 nt, Human
aguauuucuauga

SEQ ID NO: 2698435 - RNA, 15 nt, Human
aguauuucuaugaaa

SEQ ID NO: 2698436 - RNA, 23 nt, Human
ugucauuugcuggagcucugccc

SEQ ID NO: 2698437 - RNA, 16 nt, Human
agucaggaaagagaac

SEQ ID NO: 2698438 - RNA, 15 nt, Human
agucaggaaagagaa

SEQ ID NO: 2698439 - RNA, 23 nt, Human
agucagacuggauaguccgucuc

SEQ ID NO: 2698440 - RNA, 17 nt, Human
agggcagggacaggaua

SEQ ID NO: 2698441 - RNA, 20 nt, Human
ugguaaggggaauugaggac

SEQ ID NO: 2698442 - RNA, 17 nt, Human
aggguuaugauuaagua

SEQ ID NO: 2698443 - RNA, 23 nt, Human
agguacuucaaauccuugaagau

SEQ ID NO: 2698444 - RNA, 21 nt, Human
agugccuguaaucacagcuac

SEQ ID NO: 2698445 - RNA, 22 nt, Human
agugcaaauugucacaggacag

SEQ ID NO: 2698446 - RNA, 18 nt, Human
agugcaaauugucacagg

SEQ ID NO: 2698447 - RNA, 21 nt, Human
agugcaaauugucacaggaca

SEQ ID NO: 2698448 - RNA, 23 nt, Human
aguguuggagaagaacugaaauc

SEQ ID NO: 2698449 - RNA, 17 nt, Human
aguguuggagaagaacu

SEQ ID NO: 2698450 - RNA, 18 nt, Human
aguguuggagaagaacug

SEQ ID NO: 2698451 - RNA, 14 nt, Human
aguguuggagaaga

SEQ ID NO: 2698452 - RNA, 16 nt, Human
aguguuggagaagaac

SEQ ID NO: 2698453 - RNA, 19 nt, Human
aguucggugagcuacaaau

SEQ ID NO: 2698454 - RNA, 23 nt, Human
aguuuucugagaaagacuauuca

SEQ ID NO: 2698455 - RNA, 18 nt, Human
aguuuucugagaaagacu

SEQ ID NO: 2698456 - RNA, 19 nt, Human
aguuuucugagaaagacua

SEQ ID NO: 2698457 - RNA, 15 nt, Human
auaaaauaauuuuua

SEQ ID NO: 2698458 - RNA, 22 nt, Human
auaaaauaauuuuuauauuuga

SEQ ID NO: 2698459 - RNA, 12 nt, Human
auaaaauaauuu

SEQ ID NO: 2698460 - RNA, 13 nt, Human
uguuucaaacaua

SEQ ID NO: 2698461 - RNA, 14 nt, Human
aguuuaaauuguaa

SEQ ID NO: 2698462 - RNA, 18 nt, Human
auaauccuaaacauauga

SEQ ID NO: 2698463 - RNA, 14 nt, Human
uuagggagagaaga

SEQ ID NO: 2698464 - RNA, 22 nt, Human
auaacgauaaaagacagugaaa

SEQ ID NO: 2698465 - RNA, 13 nt, Human
auaaauaaaaaua

SEQ ID NO: 2698466 - RNA, 14 nt, Human
auaaauaaaaauaa

SEQ ID NO: 2698467 - RNA, 15 nt, Human
auaaauaguuuauga

SEQ ID NO: 2698468 - RNA, 13 nt, Human
uuugcucauggaa

SEQ ID NO: 2698469 - RNA, 15 nt, Human
auggcuauaggugcu

SEQ ID NO: 2698470 - RNA, 11 nt, Human
uuugcucaugg

SEQ ID NO: 2698471 - RNA, 12 nt, Human
uuugcucaugga

SEQ ID NO: 2698472 - RNA, 14 nt, Human
uuuuaaaagaauga

SEQ ID NO: 2698473 - RNA, 15 nt, Human
uuuuaaaagaaugau

SEQ ID NO: 2698474 - RNA, 13 nt, Human
uuuuaaaaaagaa

SEQ ID NO: 2698475 - RNA, 21 nt, Human
auguuucaaacauauauaaca

SEQ ID NO: 2698476 - RNA, 18 nt, Human
auguuucaaacauauaua

SEQ ID NO: 2698477 - RNA, 16 nt, Human
auuaaaagaauauuuu

SEQ ID NO: 2698478 - RNA, 15 nt, Human
auguugacaugggac

SEQ ID NO: 2698479 - RNA, 19 nt, Human
auguucaucaaugaaugaa

SEQ ID NO: 2698480 - RNA, 19 nt, Human
uuuuauggcacuaguauuu

SEQ ID NO: 2698481 - RNA, 23 nt, Human
uuuuauggaggcuuugcauagau

SEQ ID NO: 2698482 - RNA, 14 nt, Human
uuuuauaauuuugu

SEQ ID NO: 2698483 - RNA, 17 nt, Human
auuauauuuacaaaugg

SEQ ID NO: 2698484 - RNA, 23 nt, Human
auuaucucaaaacugcacuguca

SEQ ID NO: 2698485 - RNA, 18 nt, Human
auuaucucaaaacugcac

SEQ ID NO: 2698486 - RNA, 20 nt, Human
auuauuaccuuacagaaguu

SEQ ID NO: 2698487 - RNA, 16 nt, Human
auuauauuuacaaaug

SEQ ID NO: 2698488 - RNA, 13 nt, Human
auuaaguaaugau

SEQ ID NO: 2698489 - RNA, 15 nt, Human
auuaaguaaugauaa

SEQ ID NO: 2698490 - RNA, 23 nt, Human
uuuuuuaaaaaagaaacauuugg

SEQ ID NO: 2698491 - RNA, 15 nt, Human
auuacauuuguauaa

SEQ ID NO: 2698492 - RNA, 16 nt, Human
auuacauuuguauaaa

SEQ ID NO: 2698493 - RNA, 13 nt, Human
auuacauuuguau

SEQ ID NO: 2698494 - RNA, 15 nt, Human
auucaaacagucuca

SEQ ID NO: 2698495 - RNA, 14 nt, Human
auucaaacagucuc

SEQ ID NO: 2698496 - RNA, 20 nt, Human
auuccacuuauaggaauuga

SEQ ID NO: 2698497 - RNA, 16 nt, Human
auuuacaaaugggaaa

SEQ ID NO: 2698498 - RNA, 19 nt, Human
auuuaaagcuuauuaaaac

SEQ ID NO: 2698499 - RNA, 14 nt, Human
auuguauuacaaau

SEQ ID NO: 2698500 - RNA, 13 nt, Human
auugugccccugc

SEQ ID NO: 2698501 - RNA, 20 nt, Human
auugacacuuaaaaaugguu

SEQ ID NO: 2698502 - RNA, 21 nt, Human
auugacccacaagaaaugaaa

SEQ ID NO: 2698503 - RNA, 14 nt, Human
auuuuaauaauguu

SEQ ID NO: 2698504 - RNA, 15 nt, Human
auuuuaauaauguuu

SEQ ID NO: 2698505 - RNA, 16 nt, Human
auuuuaauaauguuuc

SEQ ID NO: 2698506 - RNA, 21 nt, Human
auuuguauaaaauaauuuuua

SEQ ID NO: 2698507 - RNA, 15 nt, Human
auuuguaucacaaau

SEQ ID NO: 2698508 - RNA, 22 nt, Human
auuuauuacuguaagaaaauau

SEQ ID NO: 2698509 - RNA, 23 nt, Human
auuugguaaggggaauugaggac

SEQ ID NO: 2698510 - RNA, 18 nt, Human
auuuguaguguuggagaa

SEQ ID NO: 2698511 - RNA, 14 nt, Human
auauauaacaaugc

SEQ ID NO: 2698512 - RNA, 17 nt, Human
auauaacaaugcuguau

SEQ ID NO: 2698513 - RNA, 20 nt, Human
auaguuguaccgcaauguga

SEQ ID NO: 2698514 - RNA, 23 nt, Human
uucacaagacccaaaaggcagaa

SEQ ID NO: 2698515 - RNA, 22 nt, Human
uucacaagacccaaaaggcaga

SEQ ID NO: 2698516 - RNA, 17 nt, Human
auaggcguaacuaauuu

SEQ ID NO: 2698517 - RNA, 22 nt, Human
auaggaauugacccacaagaaa

SEQ ID NO: 2698518 - RNA, 14 nt, Human
uucaaacauauaua

SEQ ID NO: 2698519 - RNA, 18 nt, Human
uucaaacagucucaggaa

SEQ ID NO: 2698520 - RNA, 18 nt, Human
uucccaacuccagaaagu

SEQ ID NO: 2698521 - RNA, 12 nt, Human
uucccaaauuuc

SEQ ID NO: 2698522 - RNA, 20 nt, Human
aucaaauaugcaaagcacug

SEQ ID NO: 2698523 - RNA, 17 nt, Human
uucuaaguaaaaccaca

SEQ ID NO: 2698524 - RNA, 20 nt, Human
uucuaaguaaaaccacagca

SEQ ID NO: 2698525 - RNA, 19 nt, Human
uucuaaguaaaaccacagc

SEQ ID NO: 2698526 - RNA, 21 nt, Human
uucuaaguaaaaccacagcag

SEQ ID NO: 2698527 - RNA, 14 nt, Human
uucuauaauuuaaa

SEQ ID NO: 2698528 - RNA, 13 nt, Human
uucuauaauuuaa

SEQ ID NO: 2698529 - RNA, 20 nt, Human
aucauuucugcaucagcugc

SEQ ID NO: 2698530 - RNA, 14 nt, Human
auccauacauuugu

SEQ ID NO: 2698531 - RNA, 19 nt, Human
uugaaauauugacuuuuua

SEQ ID NO: 2698532 - RNA, 23 nt, Human
uugugugaaagguacuucaaauc

SEQ ID NO: 2698533 - RNA, 23 nt, Human
augagagacacacugaagaagca

SEQ ID NO: 2698534 - RNA, 20 nt, Human
augagagacacacugaagaa

SEQ ID NO: 2698535 - RNA, 21 nt, Human
augagagacacacugaagaag

SEQ ID NO: 2698536 - RNA, 22 nt, Human
augauuaugaauuacauuugua

SEQ ID NO: 2698537 - RNA, 12 nt, Human
augauucccagc

SEQ ID NO: 2698538 - RNA, 15 nt, Human
augcaaagcacugac

SEQ ID NO: 2698539 - RNA, 14 nt, Human
uuguuuucauuauc

SEQ ID NO: 2698540 - RNA, 17 nt, Human
augccacuaaauugaca

SEQ ID NO: 2698541 - RNA, 15 nt, Human
augccacuaaauuga

SEQ ID NO: 2698542 - RNA, 18 nt, Human
augcaguucugaagaaga

SEQ ID NO: 2698543 - RNA, 19 nt, Human
augcaguucugaagaagau

SEQ ID NO: 2698544 - RNA, 15 nt, Human
augcaguucugaaga

SEQ ID NO: 2698545 - RNA, 17 nt, Human
augcaguucugaagaag

SEQ ID NO: 2698546 - RNA, 20 nt, Human
auggcuaguaucaaaagaaa

SEQ ID NO: 2698547 - RNA, 22 nt, Human
augcugucuacacuaagagaga

SEQ ID NO: 2698548 - RNA, 19 nt, Human
augcuagaacucccuuuca

SEQ ID NO: 2698549 - RNA, 16 nt, Human
augcuagaacucccuu

SEQ ID NO: 2698550 - RNA, 15 nt, Human
augcuagaacucccu

SEQ ID NO: 2698551 - RNA, 13 nt, Human
uuuauauaagcuu

SEQ ID NO: 2698552 - RNA, 20 nt, Human
uuuagcuggaaaaguauguu

SEQ ID NO: 2698553 - RNA, 22 nt, Human
uuuagcuggaaaaguauguuag

SEQ ID NO: 2698554 - RNA, 13 nt, Human
uugcccuguuaaa

SEQ ID NO: 2698555 - RNA, 13 nt, Human
aucucaauauuuc

SEQ ID NO: 2698556 - RNA, 21 nt, Human
aucucauuuccaagcaaguau

SEQ ID NO: 2698557 - RNA, 23 nt, Human
aucucauuuccaagcaaguauua

SEQ ID NO: 2698558 - RNA, 19 nt, Human
uugauggugguauguuuuc

SEQ ID NO: 2698559 - RNA, 18 nt, Human
uugauggugguauguuuu

SEQ ID NO: 2698560 - RNA, 13 nt, Human
aucuuuuucuaac

SEQ ID NO: 2698561 - RNA, 15 nt, Human
augaaagcagggacu

SEQ ID NO: 2698562 - RNA, 18 nt, Human
augaaauauuauguuaaa

SEQ ID NO: 2698563 - RNA, 13 nt, Human
augaaauauuaug

SEQ ID NO: 2698564 - RNA, 17 nt, Human
augaaauauuauguuaa

SEQ ID NO: 2698565 - RNA, 13 nt, Human
augaaugaauggc

SEQ ID NO: 2698566 - RNA, 18 nt, Human
augaagauguagaggaga

SEQ ID NO: 2698567 - RNA, 16 nt, Human
uuguauaaaauaauuu

SEQ ID NO: 2698568 - RNA, 15 nt, Human
uuguauaaaauaauu

SEQ ID NO: 2698569 - RNA, 16 nt, Human
uuguaucacaaaucuu

SEQ ID NO: 2698570 - RNA, 17 nt, Human
uuguauaaaauaauuuu

SEQ ID NO: 2698571 - RNA, 13 nt, Human
augagagacacac

SEQ ID NO: 2698572 - RNA, 14 nt, Human
augagagacacacu

SEQ ID NO: 2698573 - RNA, 17 nt, Human
augagagacacacugaa

SEQ ID NO: 2698574 - RNA, 19 nt, Human
augagagacacacugaaga

SEQ ID NO: 2698575 - RNA, 22 nt, Human
caauuuuucuuauuucauuucu

SEQ ID NO: 2698576 - RNA, 21 nt, Human
caauaucuuuuuuuuaauaaa

SEQ ID NO: 2698577 - RNA, 21 nt, Human
cacaagaaaugaaagcaggga

SEQ ID NO: 2698578 - RNA, 20 nt, Human
cacaagaaaugaaagcaggg

SEQ ID NO: 2698579 - RNA, 18 nt, Human
cacaagaaaugaaagcag

SEQ ID NO: 2698580 - RNA, 18 nt, Human
cacagccagacuggcaca

SEQ ID NO: 2698581 - RNA, 17 nt, Human
cacagccagacuggcac

SEQ ID NO: 2698582 - RNA, 19 nt, Human
cacagcaguugaaaagacu

SEQ ID NO: 2698583 - RNA, 21 nt, Human
cacagcaguugaaaagacucc

SEQ ID NO: 2698584 - RNA, 13 nt, Human
cacacugaagaag

SEQ ID NO: 2698585 - RNA, 23 nt, Human
caagggugaugggaaagcauugu

SEQ ID NO: 2698586 - RNA, 21 nt, Human
caagggugaugggaaagcauu

SEQ ID NO: 2698587 - RNA, 17 nt, Human
caauagucaaauugugu

SEQ ID NO: 2698588 - RNA, 19 nt, Human
caauagucaaauuguguga

SEQ ID NO: 2698589 - RNA, 18 nt, Human
caaggaaaaaauaacaau

SEQ ID NO: 2698590 - RNA, 20 nt, Human
caaggaaaaaauaacaauga

SEQ ID NO: 2698591 - RNA, 13 nt, Human
caaauaugcaaag

SEQ ID NO: 2698592 - RNA, 12 nt, Human
caaauaugcaaa

SEQ ID NO: 2698593 - RNA, 18 nt, Human
caaauguucaucaaugaa

SEQ ID NO: 2698594 - RNA, 14 nt, Human
caaauguucaucaa

SEQ ID NO: 2698595 - RNA, 19 nt, Human
caagaaaugaaagcaggga

SEQ ID NO: 2698596 - RNA, 17 nt, Human
caagaaaugaaagcagg

SEQ ID NO: 2698597 - RNA, 15 nt, Human
caagaaaugaaagca

SEQ ID NO: 2698598 - RNA, 17 nt, Human
caaacugacucuuaaga

SEQ ID NO: 2698599 - RNA, 21 nt, Human
caaacugacucuuaagaagac

SEQ ID NO: 2698600 - RNA, 16 nt, Human
caaacugacucuuaag

SEQ ID NO: 2698601 - RNA, 18 nt, Human
caaaacugcacugucaag

SEQ ID NO: 2698602 - RNA, 17 nt, Human
caaaacugcacugucaa

SEQ ID NO: 2698603 - RNA, 14 nt, Human
caaaacugcacugu

SEQ ID NO: 2698604 - RNA, 14 nt, Human
cagugucaaugcag

SEQ ID NO: 2698605 - RNA, 16 nt, Human
caguguuuuaggagca

SEQ ID NO: 2698606 - RNA, 20 nt, Human
caguguuuuaggagcaugag

SEQ ID NO: 2698607 - RNA, 21 nt, Human
caguuaccucugccucagaaa

SEQ ID NO: 2698608 - RNA, 12 nt, Human
caguucugaaga

SEQ ID NO: 2698609 - RNA, 13 nt, Human
caguucugaagaa

SEQ ID NO: 2698610 - RNA, 14 nt, Human
caguucugaagaag

SEQ ID NO: 2698611 - RNA, 22 nt, Human
caguucugaagaagaugguacc

SEQ ID NO: 2698612 - RNA, 15 nt, Human
caguucugaagaaga

SEQ ID NO: 2698613 - RNA, 16 nt, Human
caguucugaagaagau

SEQ ID NO: 2698614 - RNA, 22 nt, Human
caguucggugagcuacaaaugc

SEQ ID NO: 2698615 - RNA, 17 nt, Human
cauaccaacacgagcag

SEQ ID NO: 2698616 - RNA, 18 nt, Human
caguugaaaagacuccaa

SEQ ID NO: 2698617 - RNA, 14 nt, Human
caguugaaaagacu

SEQ ID NO: 2698618 - RNA, 23 nt, Human
caguugaaaagacuccaaagaaa

SEQ ID NO: 2698619 - RNA, 22 nt, Human
caguugaaaagacuccaaagaa

SEQ ID NO: 2698620 - RNA, 21 nt, Human
caguugaaaagacuccaaaga

SEQ ID NO: 2698621 - RNA, 20 nt, Human
caguuuucugagaaagacua

SEQ ID NO: 2698622 - RNA, 19 nt, Human
caguuuucugagaaagacu

SEQ ID NO: 2698623 - RNA, 15 nt, Human
caguuuucugagaaa

SEQ ID NO: 2698624 - RNA, 14 nt, Human
caguuuucugagaa

SEQ ID NO: 2698625 - RNA, 22 nt, Human
caucuagugagcagucaggaaa

SEQ ID NO: 2698626 - RNA, 14 nt, Human
caucuagugagcag

SEQ ID NO: 2698627 - RNA, 14 nt, Human
caucccucccucca

SEQ ID NO: 2698628 - RNA, 12 nt, Human
caucccucccuc

SEQ ID NO: 2698629 - RNA, 13 nt, Human
caucccucccucc

SEQ ID NO: 2698630 - RNA, 18 nt, Human
caucaaugaaugaaugaa

SEQ ID NO: 2698631 - RNA, 22 nt, Human
caucaagucuuucacauuuaaa

SEQ ID NO: 2698632 - RNA, 20 nt, Human
cauauauaacaaugcuguau

SEQ ID NO: 2698633 - RNA, 23 nt, Human
caugcugucuacacuaagagaga

SEQ ID NO: 2698634 - RNA, 17 nt, Human
caugggacagggaggac

SEQ ID NO: 2698635 - RNA, 21 nt, Human
ccaacacgagcaggcuacugu

SEQ ID NO: 2698636 - RNA, 14 nt, Human
ccaacacgagcagg

SEQ ID NO: 2698637 - RNA, 22 nt, Human
ccacaagaaaugaaagcaggga

SEQ ID NO: 2698638 - RNA, 16 nt, Human
ccacaagaaaugaaag

SEQ ID NO: 2698639 - RNA, 20 nt, Human
ccaauauucauagcagcuua

SEQ ID NO: 2698640 - RNA, 19 nt, Human
ccaaggcugauuaaaccaa

SEQ ID NO: 2698641 - RNA, 18 nt, Human
ccaaggcuagaaccaccu

SEQ ID NO: 2698642 - RNA, 19 nt, Human
cauuuaaagcuuauuaaaa

SEQ ID NO: 2698643 - RNA, 12 nt, Human
cauuuccaagca

SEQ ID NO: 2698644 - RNA, 23 nt, Human
cauuucugcaucagcugcugaaa

SEQ ID NO: 2698645 - RNA, 17 nt, Human
ccaaagaaauguaaggg

SEQ ID NO: 2698646 - RNA, 16 nt, Human
cauuugcucauggaau

SEQ ID NO: 2698647 - RNA, 15 nt, Human
cauuugcucauggaa

SEQ ID NO: 2698648 - RNA, 14 nt, Human
cauuugcucaugga

SEQ ID NO: 2698649 - RNA, 16 nt, Human
cccaguguuuuaggag

SEQ ID NO: 2698650 - RNA, 17 nt, Human
cccaguguuuuaggagc

SEQ ID NO: 2698651 - RNA, 23 nt, Human
ccauggcacucuauguucuaaga

SEQ ID NO: 2698652 - RNA, 15 nt, Human
ccauccugaggcucc

SEQ ID NO: 2698653 - RNA, 16 nt, Human
ccauccugaggcucca

SEQ ID NO: 2698654 - RNA, 13 nt, Human
ccuaaacauauga

SEQ ID NO: 2698655 - RNA, 20 nt, Human
ccucagaugcacaugagcug

SEQ ID NO: 2698656 - RNA, 12 nt, Human
ccuccccuccuc

SEQ ID NO: 2698657 - RNA, 13 nt, Human
ccuccccuccucu

SEQ ID NO: 2698658 - RNA, 13 nt, Human
ccuccauccugag

SEQ ID NO: 2698659 - RNA, 12 nt, Human
ccuccauccuga

SEQ ID NO: 2698660 - RNA, 20 nt, Human
cccucccuccaccucccugc

SEQ ID NO: 2698661 - RNA, 13 nt, Human
cccucccuccacc

SEQ ID NO: 2698662 - RNA, 12 nt, Human
cccucccuccac

SEQ ID NO: 2698663 - RNA, 14 nt, Human
ccccaggugccagu

SEQ ID NO: 2698664 - RNA, 14 nt, Human
cccugcaauaaaau

SEQ ID NO: 2698665 - RNA, 15 nt, Human
cccugcaauaaaaug

SEQ ID NO: 2698666 - RNA, 23 nt, Human
cuaguaucaaaagaaagaaaauc

SEQ ID NO: 2698667 - RNA, 17 nt, Human
cuaguaucaaaagaaag

SEQ ID NO: 2698668 - RNA, 15 nt, Human
cuaguaucaaaagaa

SEQ ID NO: 2698669 - RNA, 22 nt, Human
cuaguauuucuaugaaauauua

SEQ ID NO: 2698670 - RNA, 19 nt, Human
cuaguauuucuaugaaaua

SEQ ID NO: 2698671 - RNA, 20 nt, Human
cuaguauuucuaugaaauau

SEQ ID NO: 2698672 - RNA, 22 nt, Human
cuaggaaauauuuauuuuaaua

SEQ ID NO: 2698673 - RNA, 19 nt, Human
cuauauuguuugcuaagca

SEQ ID NO: 2698674 - RNA, 20 nt, Human
cuauauuuuuuguuaaauga

SEQ ID NO: 2698675 - RNA, 13 nt, Human
cuaugaaauauua

SEQ ID NO: 2698676 - RNA, 18 nt, Human
cuaugaaauauuauguua

SEQ ID NO: 2698677 - RNA, 22 nt, Human
cuauauuuuuuguuaaaugauu

SEQ ID NO: 2698678 - RNA, 13 nt, Human
cucacauuuauau

SEQ ID NO: 2698679 - RNA, 17 nt, Human
cucaccccuugccauaa

SEQ ID NO: 2698680 - RNA, 18 nt, Human
cuacuugggaggcugaga

SEQ ID NO: 2698681 - RNA, 15 nt, Human
cuacuugggaggcug

SEQ ID NO: 2698682 - RNA, 19 nt, Human
cuacuugggaggcugagau

SEQ ID NO: 2698683 - RNA, 14 nt, Human
cuaagcaaaaugug

SEQ ID NO: 2698684 - RNA, 18 nt, Human
cuaagcaaaaugugauau

SEQ ID NO: 2698685 - RNA, 15 nt, Human
cuaagcaaaauguga

SEQ ID NO: 2698686 - RNA, 16 nt, Human
cuacacuccagugaga

SEQ ID NO: 2698687 - RNA, 17 nt, Human
cuacacuccagugagac

SEQ ID NO: 2698688 - RNA, 23 nt, Human
cuaaauugacacuuaaaaauggu

SEQ ID NO: 2698689 - RNA, 18 nt, Human
cgugcacgcacacugucu

SEQ ID NO: 2698690 - RNA, 18 nt, Human
cgcucucuggccuucggc

SEQ ID NO: 2698691 - RNA, 15 nt, Human
cgcucucuggccuuc

SEQ ID NO: 2698692 - RNA, 14 nt, Human
cgcucucuggccuu

SEQ ID NO: 2698693 - RNA, 12 nt, Human
cggccuccaucc

SEQ ID NO: 2698694 - RNA, 21 nt, Human
cggguuuuauuguuuaaaauc

SEQ ID NO: 2698695 - RNA, 22 nt, Human
cggucggguuuuauuguuuaaa

SEQ ID NO: 2698696 - RNA, 17 nt, Human
cggugagcuacaaaugc

SEQ ID NO: 2698697 - RNA, 20 nt, Human
cucuccugggcagcugccuc

SEQ ID NO: 2698698 - RNA, 15 nt, Human
cucuccugggcagcu

SEQ ID NO: 2698699 - RNA, 16 nt, Human
cucuccugggcagcug

SEQ ID NO: 2698700 - RNA, 18 nt, Human
cucuccugggcagcugcc

SEQ ID NO: 2698701 - RNA, 19 nt, Human
cucuccugggcagcugccu

SEQ ID NO: 2698702 - RNA, 12 nt, Human
cucuccugggca

SEQ ID NO: 2698703 - RNA, 15 nt, Human
cucuaggaaauauuu

SEQ ID NO: 2698704 - RNA, 17 nt, Human
cucuaggaaauauuuau

SEQ ID NO: 2698705 - RNA, 15 nt, Human
cucccuccaccuccc

SEQ ID NO: 2698706 - RNA, 17 nt, Human
cucccuccaccucccug

SEQ ID NO: 2698707 - RNA, 18 nt, Human
cuccauccugaggcucca

SEQ ID NO: 2698708 - RNA, 16 nt, Human
cuccauccugaggcuc

SEQ ID NO: 2698709 - RNA, 14 nt, Human
cuccauccugaggc

SEQ ID NO: 2698710 - RNA, 20 nt, Human
cugagcgacagugagacucu

SEQ ID NO: 2698711 - RNA, 16 nt, Human
cugagcgacagugaga

SEQ ID NO: 2698712 - RNA, 23 nt, Human
cugagaaagacuauucaaacagu

SEQ ID NO: 2698713 - RNA, 22 nt, Human
cugagaaagacuauucaaacag

SEQ ID NO: 2698714 - RNA, 15 nt, Human
cugacuucuaaguaa

SEQ ID NO: 2698715 - RNA, 13 nt, Human
cugacuucuaagu

SEQ ID NO: 2698716 - RNA, 16 nt, Human
cugacuucuaaguaaa

SEQ ID NO: 2698717 - RNA, 17 nt, Human
cugacucuuaagaagac

SEQ ID NO: 2698718 - RNA, 19 nt, Human
cucuggccuucggccucca

SEQ ID NO: 2698719 - RNA, 12 nt, Human
cucuggccuucg

SEQ ID NO: 2698720 - RNA, 12 nt, Human
cucugcuugcca

SEQ ID NO: 2698721 - RNA, 14 nt, Human
cucugcuugccauc

SEQ ID NO: 2698722 - RNA, 17 nt, Human
cucugcuugccaucccu

SEQ ID NO: 2698723 - RNA, 20 nt, Human
cucugcuugccaucccuccc

SEQ ID NO: 2698724 - RNA, 22 nt, Human
cucuucuuuaaagggauggcaa

SEQ ID NO: 2698725 - RNA, 17 nt, Human
cugaacaucacagcuua

SEQ ID NO: 2698726 - RNA, 23 nt, Human
cugaagaagcaccaaucaugaau

SEQ ID NO: 2698727 - RNA, 12 nt, Human
cugcccucuccu

SEQ ID NO: 2698728 - RNA, 13 nt, Human
cugcccucuccug

SEQ ID NO: 2698729 - RNA, 14 nt, Human
cugcccucuccugg

SEQ ID NO: 2698730 - RNA, 15 nt, Human
cugcccucuccuggg

SEQ ID NO: 2698731 - RNA, 18 nt, Human
cugcuugccaucccuccc

SEQ ID NO: 2698732 - RNA, 19 nt, Human
cugcuugccaucccucccu

SEQ ID NO: 2698733 - RNA, 20 nt, Human
cugcuugccaucccucccuc

SEQ ID NO: 2698734 - RNA, 22 nt, Human
cugcuugccaucccucccucca

SEQ ID NO: 2698735 - RNA, 16 nt, Human
cugcuugccaucccuc

SEQ ID NO: 2698736 - RNA, 15 nt, Human
cugcuugccaucccu

SEQ ID NO: 2698737 - RNA, 12 nt, Human
cugcacugucaa

SEQ ID NO: 2698738 - RNA, 15 nt, Human
cugccagcaacgcag

SEQ ID NO: 2698739 - RNA, 20 nt, Human
cugggaaagggauuuucagc

SEQ ID NO: 2698740 - RNA, 15 nt, Human
cuggccuucggccuc

SEQ ID NO: 2698741 - RNA, 21 nt, Human
cuggccuucggccuccauccu

SEQ ID NO: 2698742 - RNA, 18 nt, Human
cuggccuucggccuccau

SEQ ID NO: 2698743 - RNA, 17 nt, Human
cuggccuucggccucca

SEQ ID NO: 2698744 - RNA, 16 nt, Human
cuggccuucggccucc

SEQ ID NO: 2698745 - RNA, 22 nt, Human
cuguaauaaacucauuucuagc

SEQ ID NO: 2698746 - RNA, 20 nt, Human
cugucuccucucucuguaau

SEQ ID NO: 2698747 - RNA, 17 nt, Human
cugucuccucucucugu

SEQ ID NO: 2698748 - RNA, 18 nt, Human
cugucucuacuaaaaaua

SEQ ID NO: 2698749 - RNA, 13 nt, Human
cuguauuuuaaaa

SEQ ID NO: 2698750 - RNA, 16 nt, Human
cuguauuuuaaaagaa

SEQ ID NO: 2698751 - RNA, 15 nt, Human
cuguaugauucccag

SEQ ID NO: 2698752 - RNA, 16 nt, Human
gaacucccuuucaaca

SEQ ID NO: 2698753 - RNA, 14 nt, Human
gaaccacaagacug

SEQ ID NO: 2698754 - RNA, 15 nt, Human
gaaccacaagacugc

SEQ ID NO: 2698755 - RNA, 22 nt, Human
gaacuuguaaaggaauuuaaaa

SEQ ID NO: 2698756 - RNA, 20 nt, Human
gaagagcuguucacagccag

SEQ ID NO: 2698757 - RNA, 15 nt, Human
gaagagcuguucaca

SEQ ID NO: 2698758 - RNA, 13 nt, Human
gaagagcuguuca

SEQ ID NO: 2698759 - RNA, 23 nt, Human
gaagagcuguucacagccagacu

SEQ ID NO: 2698760 - RNA, 23 nt, Human
gaaguccaagcauuuagauguau

SEQ ID NO: 2698761 - RNA, 14 nt, Human
gaaggaugcugucu

SEQ ID NO: 2698762 - RNA, 15 nt, Human
gaaauauuuauuuua

SEQ ID NO: 2698763 - RNA, 16 nt, Human
gaaauauuuauuuuaa

SEQ ID NO: 2698764 - RNA, 13 nt, Human
gaaauauuuauuu

SEQ ID NO: 2698765 - RNA, 22 nt, Human
gaaauguaagggaaacugccag

SEQ ID NO: 2698766 - RNA, 24 nt, Human
gaacaguuaccucugccucagaaa

SEQ ID NO: 2698767 - RNA, 19 nt, Human
gaaagacuauucaaacagu

SEQ ID NO: 2698768 - RNA, 23 nt, Human
gaaagacuauucaaacagucuca

SEQ ID NO: 2698769 - RNA, 22 nt, Human
gaaagacuauucaaacagucuc

SEQ ID NO: 2698770 - RNA, 14 nt, Human
gaaagcagaacagu

SEQ ID NO: 2698771 - RNA, 13 nt, Human
gaaagcagaacag

SEQ ID NO: 2698772 - RNA, 15 nt, Human
gaaacugccagcaac

SEQ ID NO: 2698773 - RNA, 13 nt, Human
gaaacugccagca

SEQ ID NO: 2698774 - RNA, 16 nt, Human
gaaacugacacaugcu

SEQ ID NO: 2698775 - RNA, 21 nt, Human
gaaagcuugcccuggugccuc

SEQ ID NO: 2698776 - RNA, 17 nt, Human
cuugccaaauauaaaua

SEQ ID NO: 2698777 - RNA, 18 nt, Human
cuuguaaaggaauuuaaa

SEQ ID NO: 2698778 - RNA, 21 nt, Human
cuugcaugguuuagaaagcuu

SEQ ID NO: 2698779 - RNA, 23 nt, Human
cuugcaucaauuuuucuuauuuc

SEQ ID NO: 2698780 - RNA, 16 nt, Human
cuugagugcucaguag

SEQ ID NO: 2698781 - RNA, 20 nt, Human
cuugaacccgggaggcagag

SEQ ID NO: 2698782 - RNA, 19 nt, Human
cuugaacccgggaggcaga

SEQ ID NO: 2698783 - RNA, 14 nt, Human
cuugaacccgggag

SEQ ID NO: 2698784 - RNA, 19 nt, Human
cuucuuuccacagaagcuc

SEQ ID NO: 2698785 - RNA, 13 nt, Human
cuucuuuccacag

SEQ ID NO: 2698786 - RNA, 23 nt, Human
gaccugauuucugagcauuuaau

SEQ ID NO: 2698787 - RNA, 17 nt, Human
gacaugggacauuugcu

SEQ ID NO: 2698788 - RNA, 22 nt, Human
gacaugggacauuugcucaugg

SEQ ID NO: 2698789 - RNA, 18 nt, Human
gagcugcccucuccuggg

SEQ ID NO: 2698790 - RNA, 19 nt, Human
gagcugcccucuccugggc

SEQ ID NO: 2698791 - RNA, 21 nt, Human
gagcugcccucuccugggcag

SEQ ID NO: 2698792 - RNA, 23 nt, Human
gagcugcccucuccugggcagcu

SEQ ID NO: 2698793 - RNA, 16 nt, Human
gagcucgugggacagu

SEQ ID NO: 2698794 - RNA, 19 nt, Human
gagagacacacugaagaag

SEQ ID NO: 2698795 - RNA, 17 nt, Human
gagauacagaauuuuau

SEQ ID NO: 2698796 - RNA, 19 nt, Human
gagagugaacaaauuuaca

SEQ ID NO: 2698797 - RNA, 15 nt, Human
gagagugaacaaauu

SEQ ID NO: 2698798 - RNA, 13 nt, Human
gagacagcucugc

SEQ ID NO: 2698799 - RNA, 18 nt, Human
gagacagcucugcauacu

SEQ ID NO: 2698800 - RNA, 15 nt, Human
gagacagcucugcau

SEQ ID NO: 2698801 - RNA, 18 nt, Human
gagacacacugaagaagc

SEQ ID NO: 2698802 - RNA, 22 nt, Human
gagaagagcuguucacagccag

SEQ ID NO: 2698803 - RNA, 15 nt, Human
gagaagagcuguuca

SEQ ID NO: 2698804 - RNA, 13 nt, Human
gagaagaacugaa

SEQ ID NO: 2698805 - RNA, 14 nt, Human
gagaagaacugaaa

SEQ ID NO: 2698806 - RNA, 16 nt, Human
gagaagaacugaaauc

SEQ ID NO: 2698807 - RNA, 18 nt, Human
gagaaagacuauucaaac

SEQ ID NO: 2698808 - RNA, 17 nt, Human
gagaaagacuauucaaa

SEQ ID NO: 2698809 - RNA, 15 nt, Human
gagaaagacuauuca

SEQ ID NO: 2698810 - RNA, 13 nt, Human
gagaaagacuauu

SEQ ID NO: 2698811 - RNA, 13 nt, Human
gauccuggaaauc

SEQ ID NO: 2698812 - RNA, 14 nt, Human
gaugaaaauauuug

SEQ ID NO: 2698813 - RNA, 21 nt, Human
gauggcuaguaucaaaagaaa

SEQ ID NO: 2698814 - RNA, 23 nt, Human
gauagauaggucagugcaaauac

SEQ ID NO: 2698815 - RNA, 22 nt, Human
gauaaauaguuuaugauuccac

SEQ ID NO: 2698816 - RNA, 14 nt, Human
gcaagggugauggg

SEQ ID NO: 2698817 - RNA, 10 nt, Human
gcaagccaga

SEQ ID NO: 2698818 - RNA, 23 nt, Human
gcaaagcacugacuucuaaguaa

SEQ ID NO: 2698819 - RNA, 11 nt, Human
gauuuucagcc

SEQ ID NO: 2698820 - RNA, 15 nt, Human
gauuuucagcccuca

SEQ ID NO: 2698821 - RNA, 19 nt, Human
gauuuucagcccucagaau

SEQ ID NO: 2698822 - RNA, 15 nt, Human
gauuuuccugaaaac

SEQ ID NO: 2698823 - RNA, 16 nt, Human
gcaguucagagcugcc

SEQ ID NO: 2698824 - RNA, 15 nt, Human
gcaguucugaagaag

SEQ ID NO: 2698825 - RNA, 17 nt, Human
gcaguucagagcugccc

SEQ ID NO: 2698826 - RNA, 18 nt, Human
gcaguucagagcugcccu

SEQ ID NO: 2698827 - RNA, 17 nt, Human
gcaguucugaagaagau

SEQ ID NO: 2698828 - RNA, 13 nt, Human
gcauagaaguaaa

SEQ ID NO: 2698829 - RNA, 17 nt, Human
gcauagguuuaauaauu

SEQ ID NO: 2698830 - RNA, 13 nt, Human
gcauuauauuuau

SEQ ID NO: 2698831 - RNA, 12 nt, Human
gcaucagcugcu

SEQ ID NO: 2698832 - RNA, 20 nt, Human
gcagccccgugggguuccuc

SEQ ID NO: 2698833 - RNA, 18 nt, Human
gcagauaaacaguaguga

SEQ ID NO: 2698834 - RNA, 12 nt, Human
gcgacagugaga

SEQ ID NO: 2698835 - RNA, 19 nt, Human
gcuagaacucccuuucaac

SEQ ID NO: 2698836 - RNA, 13 nt, Human
gcuauaggugcua

SEQ ID NO: 2698837 - RNA, 23 nt, Human
gccguggugauuuagcaggaagc

SEQ ID NO: 2698838 - RNA, 22 nt, Human
gccgugugugugcguccugucg

SEQ ID NO: 2698839 - RNA, 20 nt, Human
gccgggcgugguggugagug

SEQ ID NO: 2698840 - RNA, 17 nt, Human
gccuccccuccucugcu

SEQ ID NO: 2698841 - RNA, 19 nt, Human
gccuccccuccucugcuug

SEQ ID NO: 2698842 - RNA, 23 nt, Human
gccuccccuccucugcuugccau

SEQ ID NO: 2698843 - RNA, 20 nt, Human
gccuccccuccucugcuugc

SEQ ID NO: 2698844 - RNA, 22 nt, Human
gccuccccuccucugcuugcca

SEQ ID NO: 2698845 - RNA, 19 nt, Human
gccaugggcacugugggua

SEQ ID NO: 2698846 - RNA, 18 nt, Human
gccaucccucccuccacc

SEQ ID NO: 2698847 - RNA, 23 nt, Human
gccaucccucccuccaccucccu

SEQ ID NO: 2698848 - RNA, 20 nt, Human
uuuuaauaauguuucaaaca

SEQ ID NO: 2698849 - RNA, 21 nt, Human
uuuuaaaagaaugauuaugaa

SEQ ID NO: 2698850 - RNA, 13 nt, Human
uuuguauaaaaua

SEQ ID NO: 2698851 - RNA, 14 nt, Human
uuuguauaaaauaa

SEQ ID NO: 2698852 - RNA, 16 nt, Human
uuuguauaaaauaauu

SEQ ID NO: 2698853 - RNA, 13 nt, Human
uuugguuucuagc

SEQ ID NO: 2698854 - RNA, 15 nt, Human
uuucugagaaagacu

SEQ ID NO: 2698855 - RNA, 13 nt, Human
uuucugagaaaga

SEQ ID NO: 2698856 - RNA, 18 nt, Human
uuuccucauuuuuauaau

SEQ ID NO: 2698857 - RNA, 22 nt, Human
uuuccucaaaacuucagacaua

SEQ ID NO: 2698858 - RNA, 18 nt, Human
uuugaaucaucaagucuu

SEQ ID NO: 2698859 - RNA, 17 nt, Human
uuucuuauuucauuucu

SEQ ID NO: 2698860 - RNA, 19 nt, Human
uuuuucucuaggaaauauu

SEQ ID NO: 2698861 - RNA, 14 nt, Human
uuuuccugaaaacc

SEQ ID NO: 2698862 - RNA, 18 nt, Human
uuuuggucuggagggaag

SEQ ID NO: 2698863 - RNA, 18 nt, Human
uuuuuaaaaaagaaacau

SEQ ID NO: 2698864 - RNA, 22 nt, Human
gucagcuccccucggagaagag

SEQ ID NO: 2698865 - RNA, 21 nt, Human
gucagcuccccucggagaaga

SEQ ID NO: 2698866 - RNA, 23 nt, Human
gucagcuccccucggagaagagc

SEQ ID NO: 2698867 - RNA, 23 nt, Human
gucaauaaaauccauacauuugu

SEQ ID NO: 2698868 - RNA, 22 nt, Human
gucaauaaaauccauacauuug

SEQ ID NO: 2698869 - RNA, 15 nt, Human
gucaaugcagccccc

SEQ ID NO: 2698870 - RNA, 18 nt, Human
guauuuuaaaagaaugau

SEQ ID NO: 2698871 - RNA, 13 nt, Human
guauuuuaaucac

SEQ ID NO: 2698872 - RNA, 20 nt, Human
guauuuuaaaagaaugauua

SEQ ID NO: 2698873 - RNA, 19 nt, Human
gucagcuccccucggagaa

SEQ ID NO: 2698874 - RNA, 14 nt, Human
guaguguuggagaa

SEQ ID NO: 2698875 - RNA, 15 nt, Human
guaguguuggagaag

SEQ ID NO: 2698876 - RNA, 18 nt, Human
gcuauaggugcuacaaaa

SEQ ID NO: 2698877 - RNA, 17 nt, Human
guauguuagugcaaauu

SEQ ID NO: 2698878 - RNA, 23 nt, Human
gucugugagaugcuagaacuccc

SEQ ID NO: 2698879 - RNA, 22 nt, Human
gucugugagaugcuagaacucc

SEQ ID NO: 2698880 - RNA, 21 nt, Human
gucugugagaugcuagaacuc

SEQ ID NO: 2698881 - RNA, 17 nt, Human
gucugugagaugcuaga

SEQ ID NO: 2698882 - RNA, 16 nt, Human
gucugugagaugcuag

SEQ ID NO: 2698883 - RNA, 15 nt, Human
gucugugagaugcua

SEQ ID NO: 2698884 - RNA, 18 nt, Human
gucgucaaagcugaaaug

SEQ ID NO: 2698885 - RNA, 16 nt, Human
gucggagcccugucuc

SEQ ID NO: 2698886 - RNA, 12 nt, Human
gucggagcccug

SEQ ID NO: 2698887 - RNA, 23 nt, Human
gucggguuuuauuguuuaaaauc

SEQ ID NO: 2698888 - RNA, 13 nt, Human
gucugacuguuuc

SEQ ID NO: 2698889 - RNA, 13 nt, Human
gugcguccugucg

SEQ ID NO: 2698890 - RNA, 21 nt, Human
gugaacaaauuuacagagaca

SEQ ID NO: 2698891 - RNA, 13 nt, Human
gugaacacaucag

SEQ ID NO: 2698892 - RNA, 16 nt, Human
gugacaagcucacaga

SEQ ID NO: 2698893 - RNA, 14 nt, Human
guucugaagaagau

SEQ ID NO: 2698894 - RNA, 15 nt, Human
guucugaagaagaug

SEQ ID NO: 2698895 - RNA, 12 nt, Human
guucugaagaag

SEQ ID NO: 2698896 - RNA, 13 nt, Human
guucugaagaaga

SEQ ID NO: 2698897 - RNA, 23 nt, Human
guugaaaagacuccaaagaaaug

SEQ ID NO: 2698898 - RNA, 22 nt, Human
guugaaaagacuccaaagaaau

SEQ ID NO: 2698899 - RNA, 17 nt, Human
guugaaaagacuccaaa

SEQ ID NO: 2698900 - RNA, 21 nt, Human
guugauggugguauguuuuca

SEQ ID NO: 2698901 - RNA, 20 nt, Human
guugauggugguauguuuuc

SEQ ID NO: 2698902 - RNA, 23 nt, Human
guuaccucugccucagaaaacaa

SEQ ID NO: 2698903 - RNA, 13 nt, Human
guucagagcugcc

SEQ ID NO: 2698904 - RNA, 14 nt, Human
guucagagcugccc

SEQ ID NO: 2698905 - RNA, 23 nt, Human
guucagagcugcccucuccuggg

SEQ ID NO: 2698906 - RNA, 20 nt, Human
guucagagcugcccucuccu

SEQ ID NO: 2698907 - RNA, 22 nt, Human
guucagagcugcccucuccugg

SEQ ID NO: 2698908 - RNA, 15 nt, Human
guucagagcugcccu

SEQ ID NO: 2698909 - RNA, 16 nt, Human
guucagagcugcccuc

SEQ ID NO: 2698910 - RNA, 17 nt, Human
guucagagcugcccucu

SEQ ID NO: 2698911 - RNA, 19 nt, Human
guucagagcugcccucucc

SEQ ID NO: 2698912 - RNA, 16 nt, Human
guucaucaaugaauga

SEQ ID NO: 2698913 - RNA, 16 nt, Human
guuaaaagaugaaaau

SEQ ID NO: 2698914 - RNA, 14 nt, Human
guuaaaagaugaaa

SEQ ID NO: 2698915 - RNA, 20 nt, Human
guuaaaagaugaaaauauuu

SEQ ID NO: 2698916 - RNA, 16 nt, Human
gugugcguccugucgg

SEQ ID NO: 2698917 - RNA, 14 nt, Human
gugugcguccuguc

SEQ ID NO: 2698918 - RNA, 21 nt, Human
guguaaguagauaggccaugg

SEQ ID NO: 2698919 - RNA, 20 nt, Human
gugcuacaaaaacacagcaa

SEQ ID NO: 2698920 - RNA, 15 nt, Human
gugcuacaaaaacac

SEQ ID NO: 2698921 - RNA, 20 nt, Human
guuuagcuggaaaaguaugu

SEQ ID NO: 2698922 - RNA, 21 nt, Human
guuuagcuggaaaaguauguu

SEQ ID NO: 2698923 - RNA, 20 nt, Human
guuuauauaagcuuguauuc

SEQ ID NO: 2698924 - RNA, 13 nt, Human
uaaaaccacagca

SEQ ID NO: 2698925 - RNA, 13 nt, Human
uaaaaucauuucu

SEQ ID NO: 2698926 - RNA, 10 nt, Human
uaaaaucauu

SEQ ID NO: 2698927 - RNA, 15 nt, Human
uaaaauccauacauu

SEQ ID NO: 2698928 - RNA, 17 nt, Human
uaaaauccauacauuug

SEQ ID NO: 2698929 - RNA, 22 nt, Human
uaaaaucauuucugcaucagcu

SEQ ID NO: 2698930 - RNA, 18 nt, Human
uaaaaucauuucugcauc

SEQ ID NO: 2698931 - RNA, 22 nt, Human
uaaaacaagcacuaaacaaaga

SEQ ID NO: 2698932 - RNA, 18 nt, Human
uaaaaaugguuuaaaugg

SEQ ID NO: 2698933 - RNA, 15 nt, Human
uaaaaaugguuuaaa

SEQ ID NO: 2698934 - RNA, 19 nt, Human
uaaaaaugguuuaaauggu

SEQ ID NO: 2698935 - RNA, 14 nt, Human
uaaaguguuugaaa

SEQ ID NO: 2698936 - RNA, 23 nt, Human
uaaugauaacuggaaacuucagc

SEQ ID NO: 2698937 - RNA, 17 nt, Human
uaaugauaacuggaaac

SEQ ID NO: 2698938 - RNA, 22 nt, Human
uaaugauaacuggaaacuucag

SEQ ID NO: 2698939 - RNA, 22 nt, Human
uaauguuucaaacauauauaac

SEQ ID NO: 2698940 - RNA, 14 nt, Human
uaauaauguuucaa

SEQ ID NO: 2698941 - RNA, 13 nt, Human
uaagugaaauaag

SEQ ID NO: 2698942 - RNA, 16 nt, Human
uaaaugugccuucauu

SEQ ID NO: 2698943 - RNA, 16 nt, Human
uaaaugugcuuuuaaa

SEQ ID NO: 2698944 - RNA, 20 nt, Human
uaaauugacacuuaaaaaug

SEQ ID NO: 2698945 - RNA, 20 nt, Human
uaaauggcuuccuggcaaua

SEQ ID NO: 2698946 - RNA, 15 nt, Human
uaacuggaaacuuca

SEQ ID NO: 2698947 - RNA, 13 nt, Human
uaagagagaauga

SEQ ID NO: 2698948 - RNA, 14 nt, Human
uaagagagaaugag

SEQ ID NO: 2698949 - RNA, 23 nt, Human
uaagagagaaugagagacacacu

SEQ ID NO: 2698950 - RNA, 21 nt, Human
uaagaaaauaucacuugucaa

SEQ ID NO: 2698951 - RNA, 17 nt, Human
uaaccaggggccaugaa

SEQ ID NO: 2698952 - RNA, 14 nt, Human
uauaugcuucuguu

SEQ ID NO: 2698953 - RNA, 16 nt, Human
uauaugcuucuguuuu

SEQ ID NO: 2698954 - RNA, 20 nt, Human
uauauuugaaauauugacuu

SEQ ID NO: 2698955 - RNA, 21 nt, Human
uauauuuuuuguuaaaugauu

SEQ ID NO: 2698956 - RNA, 14 nt, Human
uaucaaaagaaaga

SEQ ID NO: 2698957 - RNA, 17 nt, Human
uauauaacaaugcugua

SEQ ID NO: 2698958 - RNA, 19 nt, Human
uauauaacaaugcuguauu

SEQ ID NO: 2698959 - RNA, 17 nt, Human
uaguauuguccaggucu

SEQ ID NO: 2698960 - RNA, 18 nt, Human
uaggugcuacaaaaacac

SEQ ID NO: 2698961 - RNA, 23 nt, Human
uaggugcuacaaaaacacagcaa

SEQ ID NO: 2698962 - RNA, 22 nt, Human
uaggugcuacaaaaacacagca

SEQ ID NO: 2698963 - RNA, 20 nt, Human
uaggugcuacaaaaacacag

SEQ ID NO: 2698964 - RNA, 14 nt, Human
uagauaggccaugg

SEQ ID NO: 2698965 - RNA, 16 nt, Human
uagcaugaagacagag

SEQ ID NO: 2698966 - RNA, 18 nt, Human
uagaauuaacacaugauc

SEQ ID NO: 2698967 - RNA, 16 nt, Human
uagaauuaacacauga

SEQ ID NO: 2698968 - RNA, 15 nt, Human
uagaauuaacacaug

SEQ ID NO: 2698969 - RNA, 23 nt, Human
uagaauaccacaggaaccacaag

SEQ ID NO: 2698970 - RNA, 13 nt, Human
uaauuuugugaag

SEQ ID NO: 2698971 - RNA, 16 nt, Human
uaauuuuuauauuuga

SEQ ID NO: 2698972 - RNA, 17 nt, Human
uaauuuuuauauuugaa

SEQ ID NO: 2698973 - RNA, 18 nt, Human
uaauuuugugaagcaaaa

SEQ ID NO: 2698974 - RNA, 12 nt, Human
uaauuuuuauau

SEQ ID NO: 2698975 - RNA, 16 nt, Human
uacacacucaaaucaa

SEQ ID NO: 2698976 - RNA, 17 nt, Human
uacacacucaaaucaag

SEQ ID NO: 2698977 - RNA, 14 nt, Human
uacacuccagugag

SEQ ID NO: 2698978 - RNA, 23 nt, Human
uacaguucggugagcuacaaaug

SEQ ID NO: 2698979 - RNA, 23 nt, Human
uacugucagcuccccucggagaa

SEQ ID NO: 2698980 - RNA, 22 nt, Human
uaccuaacgaaguauccuucag

SEQ ID NO: 2698981 - RNA, 22 nt, Human
uaccaaaaaucucaauauuuca

SEQ ID NO: 2698982 - RNA, 16 nt, Human
uaccuaucaucuuaag

SEQ ID NO: 2698983 - RNA, 14 nt, Human
ugaauuacauuugu

SEQ ID NO: 2698984 - RNA, 13 nt, Human
ugaauuacauuug

SEQ ID NO: 2698985 - RNA, 14 nt, Human
ugaauuaaguuuuu

SEQ ID NO: 2698986 - RNA, 18 nt, Human
ugaccacugcagaagaca

SEQ ID NO: 2698987 - RNA, 17 nt, Human
ugaccacugcagaagac

SEQ ID NO: 2698988 - RNA, 16 nt, Human
ugaccacugcagaaga

SEQ ID NO: 2698989 - RNA, 15 nt, Human
ugaaugaauggcuaa

SEQ ID NO: 2698990 - RNA, 14 nt, Human
ugacucuuaagaag

SEQ ID NO: 2698991 - RNA, 15 nt, Human
ugacucuuaagaaga

SEQ ID NO: 2698992 - RNA, 16 nt, Human
ugacucuuaagaagac

SEQ ID NO: 2698993 - RNA, 13 nt, Human
ugacucuuaagaa

SEQ ID NO: 2698994 - RNA, 15 nt, Human
ugagaaagacuauuc

SEQ ID NO: 2698995 - RNA, 20 nt, Human
ugagcaggauuuuaaucuuu

SEQ ID NO: 2698996 - RNA, 15 nt, Human
ugagcaggauuuuaa

SEQ ID NO: 2698997 - RNA, 14 nt, Human
ucugucucagucca

SEQ ID NO: 2698998 - RNA, 17 nt, Human
ucuuuccacagaagcuc

SEQ ID NO: 2698999 - RNA, 14 nt, Human
ucuuauaauuuaaa

SEQ ID NO: 2699000 - RNA, 13 nt, Human
ucuuauaauuuaa

SEQ ID NO: 2699001 - RNA, 22 nt, Human
ucuuaggguuaugauuaaguaa

SEQ ID NO: 2699002 - RNA, 19 nt, Human
ucuugccaaauauaaauaa

SEQ ID NO: 2699003 - RNA, 16 nt, Human
ucuucuuggucucagu

SEQ ID NO: 2699004 - RNA, 16 nt, Human
ucagcugcugaaacaa

SEQ ID NO: 2699005 - RNA, 21 nt, Human
ucagcuccccucggagaagag

SEQ ID NO: 2699006 - RNA, 22 nt, Human
ucagcuccccucggagaagagc

SEQ ID NO: 2699007 - RNA, 18 nt, Human
ucaguccaugaagaugua

SEQ ID NO: 2699008 - RNA, 21 nt, Human
ucauggaauuggagcucgugg

SEQ ID NO: 2699009 - RNA, 19 nt, Human
ucauggaauuggagcucgu

SEQ ID NO: 2699010 - RNA, 12 nt, Human
uccauacauuug

SEQ ID NO: 2699011 - RNA, 15 nt, Human
ucuacuaaaaauaca

SEQ ID NO: 2699012 - RNA, 19 nt, Human
ucuacuaaaaauacaaaaa

SEQ ID NO: 2699013 - RNA, 12 nt, Human
ucuacuaaaaau

SEQ ID NO: 2699014 - RNA, 14 nt, Human
ucggagcccugucu

SEQ ID NO: 2699015 - RNA, 15 nt, Human
ucggagcccugucuc

SEQ ID NO: 2699016 - RNA, 16 nt, Human
ucggccuccauccuga

SEQ ID NO: 2699017 - RNA, 15 nt, Human
ucggccuccauccug

SEQ ID NO: 2699018 - RNA, 17 nt, Human
uccuugcaucaauuuuu

SEQ ID NO: 2699019 - RNA, 15 nt, Human
uccugaggcuccacu

SEQ ID NO: 2699020 - RNA, 21 nt, Human
uccugaggcuccacuuggucu

SEQ ID NO: 2699021 - RNA, 17 nt, Human
uccugaggcuccacuug

SEQ ID NO: 2699022 - RNA, 16 nt, Human
uccugaggcuccacuu

SEQ ID NO: 2699023 - RNA, 14 nt, Human
uccucugcuugcca

SEQ ID NO: 2699024 - RNA, 15 nt, Human
uccucugcuugccau

SEQ ID NO: 2699025 - RNA, 16 nt, Human
uccucugcuugccauc

SEQ ID NO: 2699026 - RNA, 17 nt, Human
uccucugcuugccaucc

SEQ ID NO: 2699027 - RNA, 18 nt, Human
ugccuguaaucacagcua

SEQ ID NO: 2699028 - RNA, 15 nt, Human
ugccuucucaacucc

SEQ ID NO: 2699029 - RNA, 16 nt, Human
ugcucaguagucagac

SEQ ID NO: 2699030 - RNA, 15 nt, Human
ugcuaagcauuccaa

SEQ ID NO: 2699031 - RNA, 19 nt, Human
ugcuaagcauuccaacuau

SEQ ID NO: 2699032 - RNA, 17 nt, Human
ugcugaaacaacaaaua

SEQ ID NO: 2699033 - RNA, 19 nt, Human
ugcacgcacacugucugcc

SEQ ID NO: 2699034 - RNA, 19 nt, Human
ugcagugagccgagauugu

SEQ ID NO: 2699035 - RNA, 15 nt, Human
ugcaguucugaagaa

SEQ ID NO: 2699036 - RNA, 16 nt, Human
ugcaguucugaagaag

SEQ ID NO: 2699037 - RNA, 17 nt, Human
ugcaguucugaagaaga

SEQ ID NO: 2699038 - RNA, 18 nt, Human
ugcaguucugaagaagau

SEQ ID NO: 2699039 - RNA, 14 nt, Human
ugcaguucugaaga

SEQ ID NO: 2699040 - RNA, 19 nt, Human
ugcaguucugaagaagaug

SEQ ID NO: 2699041 - RNA, 22 nt, Human
ugcaguucugaagaagauggua

SEQ ID NO: 2699042 - RNA, 14 nt, Human
ugccaucccucccu

SEQ ID NO: 2699043 - RNA, 11 nt, Human
ugccaucccuc

SEQ ID NO: 2699044 - RNA, 12 nt, Human
ugccaucccucc

SEQ ID NO: 2699045 - RNA, 20 nt, Human
ugccacuaaauugacacuua

SEQ ID NO: 2699046 - RNA, 18 nt, Human
ugccaaauauaaauaaaa

SEQ ID NO: 2699047 - RNA, 17 nt, Human
ugccaaauauaaauaaa

SEQ ID NO: 2699048 - RNA, 22 nt, Human
ugccaaauauaaauaaaaauaa

SEQ ID NO: 2699049 - RNA, 19 nt, Human
ugccaaauauaaauaaaaa

SEQ ID NO: 2699050 - RNA, 14 nt, Human
ugggaguacaaaag

SEQ ID NO: 2699051 - RNA, 21 nt, Human
uggcuugaguuuaaauuguaa

SEQ ID NO: 2699052 - RNA, 16 nt, Human
uggcuuccuggcaaua

SEQ ID NO: 2699053 - RNA, 21 nt, Human
ugguauguuuucaggcuagau

SEQ ID NO: 2699054 - RNA, 11 nt, Human
uggagggaagc

SEQ ID NO: 2699055 - RNA, 21 nt, Human
uggaacauaaaauacaauguu

SEQ ID NO: 2699056 - RNA, 20 nt, Human
uggaacauaaaauacaaugu

SEQ ID NO: 2699057 - RNA, 23 nt, Human
uggaaacuucagcgguuuauaua

SEQ ID NO: 2699058 - RNA, 22 nt, Human
uggaauaauccuaaacauauga

SEQ ID NO: 2699059 - RNA, 19 nt, Human
ugugcuaguaauuggaaag

SEQ ID NO: 2699060 - RNA, 15 nt, Human
uguaugauucccagc

SEQ ID NO: 2699061 - RNA, 22 nt, Human
uguaguguuggagaagaacuga

SEQ ID NO: 2699062 - RNA, 16 nt, Human
uguaccgcaaugugac

SEQ ID NO: 2699063 - RNA, 20 nt, Human
uguaauaaacucauuucuag

SEQ ID NO: 2699064 - RNA, 18 nt, Human
uuaaaauacacacucaaa

SEQ ID NO: 2699065 - RNA, 22 nt, Human
uuaaaaaaaaaccugagcccca

SEQ ID NO: 2699066 - RNA, 20 nt, Human
uuacauuuguauaaaauaau

SEQ ID NO: 2699067 - RNA, 20 nt, Human
uguugacaugggacauuugc

SEQ ID NO: 2699068 - RNA, 16 nt, Human
uguuggagaagaacug

SEQ ID NO: 2699069 - RNA, 17 nt, Human
uguuggagaagaacuga

SEQ ID NO: 2699070 - RNA, 14 nt, Human
uguuggagaagaac

SEQ ID NO: 2699071 - RNA, 19 nt, Human
uguuggagaagaacugaaa

SEQ ID NO: 2699072 - RNA, 20 nt, Human
uguuggagaagaacugaaau

SEQ ID NO: 2699073 - RNA, 18 nt, Human
uguuuaaaaucauuucug

SEQ ID NO: 2699074 - RNA, 17 nt, Human
uguuuaaaaucauuucu

SEQ ID NO: 2699075 - RNA, 13 nt, Human
uguguuuugcaag

SEQ ID NO: 2699076 - RNA, 19 nt, Human
uguguuuugcaagccagau

SEQ ID NO: 2699077 - RNA, 20 nt, Human
ugugugaaagguacuucaaa

SEQ ID NO: 2699078 - RNA, 21 nt, Human
ugugugaaagguacuucaaau

SEQ ID NO: 2699079 - RNA, 22 nt, Human
ugugugaaagguacuucaaauc

SEQ ID NO: 2699080 - RNA, 21 nt, Human
uguuaaaagaugaaaauauuu

SEQ ID NO: 2699081 - RNA, 13 nt, Human
aaaaacacagcaa

SEQ ID NO: 2699082 - RNA, 18 nt, Human
aaaaacacagcaagggug

SEQ ID NO: 2699083 - RNA, 12 nt, Human
aaaaacacagca

SEQ ID NO: 2699084 - RNA, 17 nt, Human
acucuauguucuaagaa

SEQ ID NO: 2699085 - RNA, 20 nt, Human
acuaguauuucuaugaaaua

SEQ ID NO: 2699086 - RNA, 21 nt, Human
acuauucaaacagucucagga

SEQ ID NO: 2699087 - RNA, 22 nt, Human
acgcaggcccccaggugccagu

SEQ ID NO: 2699088 - RNA, 19 nt, Human
acgcaggcccccaggugcc

SEQ ID NO: 2699089 - RNA, 13 nt, Human
acuaagagagaau

SEQ ID NO: 2699090 - RNA, 14 nt, Human
agaaaauaacaaua

SEQ ID NO: 2699091 - RNA, 16 nt, Human
agaaaaucaggcuggc

SEQ ID NO: 2699092 - RNA, 22 nt, Human
acuuuauuuucuauaauuuaaa

SEQ ID NO: 2699093 - RNA, 22 nt, Human
acuguaagaaaauaucacuugu

SEQ ID NO: 2699094 - RNA, 19 nt, Human
acuguaagaaaauaucacu

SEQ ID NO: 2699095 - RNA, 13 nt, Human
acuguaagaaaau

SEQ ID NO: 2699096 - RNA, 18 nt, Human
acucugucucaguccaug

SEQ ID NO: 2699097 - RNA, 20 nt, Human
acucugucucaguccaugaa

SEQ ID NO: 2699098 - RNA, 13 nt, Human
acugccagcaacg

SEQ ID NO: 2699099 - RNA, 12 nt, Human
acuucagacaua

SEQ ID NO: 2699100 - RNA, 21 nt, Human
acuucugucuucacaacagau

SEQ ID NO: 2699101 - RNA, 22 nt, Human
acuucugucuucacaacagauu

SEQ ID NO: 2699102 - RNA, 21 nt, Human
acuuggucugugagaugcuag

SEQ ID NO: 2699103 - RNA, 22 nt, Human
acccaguguuuuaggagcauga

SEQ ID NO: 2699104 - RNA, 19 nt, Human
acccaguguuuuaggagca

SEQ ID NO: 2699105 - RNA, 21 nt, Human
acccacaagaaaugaaagcag

SEQ ID NO: 2699106 - RNA, 17 nt, Human
acccacaagaaaugaaa

SEQ ID NO: 2699107 - RNA, 21 nt, Human
acagcaguugaaaagacucca

SEQ ID NO: 2699108 - RNA, 23 nt, Human
acagcaguugaaaagacuccaaa

SEQ ID NO: 2699109 - RNA, 22 nt, Human
acagcaguugaaaagacuccaa

SEQ ID NO: 2699110 - RNA, 21 nt, Human
acacgagcaggcuacugucag

SEQ ID NO: 2699111 - RNA, 19 nt, Human
acacgagcaggcuacuguc

SEQ ID NO: 2699112 - RNA, 14 nt, Human
acacgagcaggcua

SEQ ID NO: 2699113 - RNA, 13 nt, Human
aauuuugugaagc

SEQ ID NO: 2699114 - RNA, 14 nt, Human
aaaggcagaagcaa

SEQ ID NO: 2699115 - RNA, 15 nt, Human
aaauauuuauuuuaa

SEQ ID NO: 2699116 - RNA, 13 nt, Human
aaauauuuauuuu

SEQ ID NO: 2699117 - RNA, 20 nt, Human
aaauauuuauuuuaauaaug

SEQ ID NO: 2699118 - RNA, 14 nt, Human
aaaucaaauaugca

SEQ ID NO: 2699119 - RNA, 12 nt, Human
aaaucaaauaug

SEQ ID NO: 2699120 - RNA, 15 nt, Human
aaaucaaauaugcaa

SEQ ID NO: 2699121 - RNA, 15 nt, Human
aaagaaauguaaggg

SEQ ID NO: 2699122 - RNA, 23 nt, Human
aaacugagaugugaacacaucag

SEQ ID NO: 2699123 - RNA, 21 nt, Human
aaacugagaugugaacacauc

SEQ ID NO: 2699124 - RNA, 16 nt, Human
aaaaucucaauauuuc

SEQ ID NO: 2699125 - RNA, 21 nt, Human
aaaaucuacacuccagugaga

SEQ ID NO: 2699126 - RNA, 18 nt, Human
aaaaguucugcagauaaa

SEQ ID NO: 2699127 - RNA, 16 nt, Human
aaaaagaaacauuugg

SEQ ID NO: 2699128 - RNA, 21 nt, Human
aacuuuaugcuaagugaaaua

SEQ ID NO: 2699129 - RNA, 20 nt, Human
aacuuuaugcuaagugaaau

SEQ ID NO: 2699130 - RNA, 20 nt, Human
aacugagaugugaacacauc

SEQ ID NO: 2699131 - RNA, 19 nt, Human
aacugacucuuaagaagac

SEQ ID NO: 2699132 - RNA, 20 nt, Human
aacugacucuuaagaagacu

SEQ ID NO: 2699133 - RNA, 15 nt, Human
aacugacucuuaaga

SEQ ID NO: 2699134 - RNA, 18 nt, Human
aacugacucuuaagaaga

SEQ ID NO: 2699135 - RNA, 17 nt, Human
aaccuagggugauauua

SEQ ID NO: 2699136 - RNA, 22 nt, Human
aaccacuggaaaguuuaugguu

SEQ ID NO: 2699137 - RNA, 16 nt, Human
aacacaucagcuugcc

SEQ ID NO: 2699138 - RNA, 18 nt, Human
aacaaauuuacagagaca

SEQ ID NO: 2699139 - RNA, 22 nt, Human
aaauguuguucucuucuuuaaa

SEQ ID NO: 2699140 - RNA, 17 nt, Human
aaaucuuauaauuuaaa

SEQ ID NO: 2699141 - RNA, 19 nt, Human
aaauugacacuuaaaaaug

SEQ ID NO: 2699142 - RNA, 17 nt, Human
aagggaaacugccagca

SEQ ID NO: 2699143 - RNA, 16 nt, Human
aagggaaacugccagc

SEQ ID NO: 2699144 - RNA, 23 nt, Human
aagggaaacugccagcaacgcag

SEQ ID NO: 2699145 - RNA, 21 nt, Human
aaguagggacuucugucuuca

SEQ ID NO: 2699146 - RNA, 17 nt, Human
aaguccaagcauaccaa

SEQ ID NO: 2699147 - RNA, 18 nt, Human
aaguccaagcauuuagau

SEQ ID NO: 2699148 - RNA, 20 nt, Human
aaggcagcucuaaaugucaa

SEQ ID NO: 2699149 - RNA, 15 nt, Human
aaugauuaugaauua

SEQ ID NO: 2699150 - RNA, 21 nt, Human
aaugauuaugaauuacauuug

SEQ ID NO: 2699151 - RNA, 23 nt, Human
aauguuucaaacauauauaacaa

SEQ ID NO: 2699152 - RNA, 16 nt, Human
agcaguugaaaagacu

SEQ ID NO: 2699153 - RNA, 13 nt, Human
agcaguugaaaag

SEQ ID NO: 2699154 - RNA, 23 nt, Human
agcaguucagagcugcccucucc

SEQ ID NO: 2699155 - RNA, 20 nt, Human
agcaguucagagcugcccuc

SEQ ID NO: 2699156 - RNA, 15 nt, Human
agcaugaagacagag

SEQ ID NO: 2699157 - RNA, 16 nt, Human
agcacugacuucuaag

SEQ ID NO: 2699158 - RNA, 21 nt, Human
agacgugcacgcacacugucu

SEQ ID NO: 2699159 - RNA, 22 nt, Human
agacgugcacgcacacugucug

SEQ ID NO: 2699160 - RNA, 21 nt, Human
agacugcauuauauuuauuac

SEQ ID NO: 2699161 - RNA, 17 nt, Human
agagaacuuccagaucc

SEQ ID NO: 2699162 - RNA, 23 nt, Human
aggaugguucccuugaugaagaa

SEQ ID NO: 2699163 - RNA, 22 nt, Human
agcuccccucggagaagagcug

SEQ ID NO: 2699164 - RNA, 18 nt, Human
aggugcuacaaaaacaca

SEQ ID NO: 2699165 - RNA, 22 nt, Human
aggugcuacaaaaacacagcaa

SEQ ID NO: 2699166 - RNA, 21 nt, Human
aggugcuacaaaaacacagca

SEQ ID NO: 2699167 - RNA, 20 nt, Human
aggugcuacaaaaacacagc

SEQ ID NO: 2699168 - RNA, 19 nt, Human
aggugcuacaaaaacacag

SEQ ID NO: 2699169 - RNA, 20 nt, Human
agguaaaagcaucacaugaa

SEQ ID NO: 2699170 - RNA, 24 nt, Human
aggugcuacaaaaacacagcaagg

SEQ ID NO: 2699171 - RNA, 23 nt, Human
aggugcuacaaaaacacagcaag

SEQ ID NO: 2699172 - RNA, 17 nt, Human
aggcuacugucagcucc

SEQ ID NO: 2699173 - RNA, 21 nt, Human
aggcuagaaccaccugccuau

SEQ ID NO: 2699174 - RNA, 17 nt, Human
aggcuagauguauguac

SEQ ID NO: 2699175 - RNA, 15 nt, Human
aggcuagauguaugu

SEQ ID NO: 2699176 - RNA, 16 nt, Human
aggcuagauguaugua

SEQ ID NO: 2699177 - RNA, 14 nt, Human
auagucaaauugug

SEQ ID NO: 2699178 - RNA, 15 nt, Human
auagguuuaauaauu

SEQ ID NO: 2699179 - RNA, 14 nt, Human
auaggugcuacaaa

SEQ ID NO: 2699180 - RNA, 23 nt, Human
auaggugcuacaaaaacacagca

SEQ ID NO: 2699181 - RNA, 21 nt, Human
auaggugcuacaaaaacacag

SEQ ID NO: 2699182 - RNA, 15 nt, Human
auaggugcuacaaaa

SEQ ID NO: 2699183 - RNA, 18 nt, Human
auagcagcuuauucacaa

SEQ ID NO: 2699184 - RNA, 20 nt, Human
auaugcuucuguuuuauaau

SEQ ID NO: 2699185 - RNA, 22 nt, Human
auaugcuucuguuuuauaauuu

SEQ ID NO: 2699186 - RNA, 16 nt, Human
auauuauguuaaaacu

SEQ ID NO: 2699187 - RNA, 22 nt, Human
auauuuauuacuguaagaaaau

SEQ ID NO: 2699188 - RNA, 13 nt, Human
auauuuauuuuaa

SEQ ID NO: 2699189 - RNA, 18 nt, Human
auaaaggauuaaugucaa

SEQ ID NO: 2699190 - RNA, 20 nt, Human
auacacacucaaaucaagaa

SEQ ID NO: 2699191 - RNA, 18 nt, Human
auacacacucaaaucaag

SEQ ID NO: 2699192 - RNA, 17 nt, Human
auacacacucaaaucaa

SEQ ID NO: 2699193 - RNA, 23 nt, Human
auaauguuucaaacauauauaac

SEQ ID NO: 2699194 - RNA, 15 nt, Human
auaaugucccuucac

SEQ ID NO: 2699195 - RNA, 15 nt, Human
agugucuuaauuaaa

SEQ ID NO: 2699196 - RNA, 18 nt, Human
agugucuuaauuaaaaga

SEQ ID NO: 2699197 - RNA, 17 nt, Human
agugucuuaauuaaaag

SEQ ID NO: 2699198 - RNA, 21 nt, Human
agugucuuaauuaaaagaaua

SEQ ID NO: 2699199 - RNA, 23 nt, Human
aguugaaaaucuuauaauuuaaa

SEQ ID NO: 2699200 - RNA, 22 nt, Human
aguugaaaagacuccaaagaaa

SEQ ID NO: 2699201 - RNA, 21 nt, Human
aguugaaaagacuccaaagaa

SEQ ID NO: 2699202 - RNA, 22 nt, Human
aguugaaaaucuuauaauuuaa

SEQ ID NO: 2699203 - RNA, 23 nt, Human
agucaaauugugugaaagguacu

SEQ ID NO: 2699204 - RNA, 19 nt, Human
agucaaauugugugaaagg

SEQ ID NO: 2699205 - RNA, 12 nt, Human
aguccuguaaug

SEQ ID NO: 2699206 - RNA, 19 nt, Human
auguaagggaaacugccag

SEQ ID NO: 2699207 - RNA, 16 nt, Human
auguaagggaaacugc

SEQ ID NO: 2699208 - RNA, 14 nt, Human
auguaagggaaacu

SEQ ID NO: 2699209 - RNA, 17 nt, Human
auguucuaagaagugaa

SEQ ID NO: 2699210 - RNA, 18 nt, Human
augugggcagugauguca

SEQ ID NO: 2699211 - RNA, 23 nt, Human
aucagcugcugaaacaacaaaua

SEQ ID NO: 2699212 - RNA, 22 nt, Human
aucagcugcugaaacaacaaau

SEQ ID NO: 2699213 - RNA, 17 nt, Human
auauuuauuuuaauaau

SEQ ID NO: 2699214 - RNA, 14 nt, Human
auauuuauuuuaau

SEQ ID NO: 2699215 - RNA, 15 nt, Human
auauuuauuuuaaua

SEQ ID NO: 2699216 - RNA, 21 nt, Human
aucagcugcugaaacaacaaa

SEQ ID NO: 2699217 - RNA, 15 nt, Human
gccucuuagaugcag

SEQ ID NO: 2699218 - RNA, 12 nt, Human
gccuccauccug

SEQ ID NO: 2699219 - RNA, 20 nt, Human
gccuucggccuccauccuga

SEQ ID NO: 2699220 - RNA, 21 nt, Human
gccuucggccuccauccugag

SEQ ID NO: 2699221 - RNA, 18 nt, Human
gcuagaacucccuuucaa

SEQ ID NO: 2699222 - RNA, 16 nt, Human
gcuagaacucccuuuc

SEQ ID NO: 2699223 - RNA, 15 nt, Human
gcuagaacucccuuu

SEQ ID NO: 2699224 - RNA, 14 nt, Human
gcuagaacucccuu

SEQ ID NO: 2699225 - RNA, 13 nt, Human
gcuagaacucccu

SEQ ID NO: 2699226 - RNA, 12 nt, Human
gcuagaacuccc

SEQ ID NO: 2699227 - RNA, 21 nt, Human
gcuccccucggagaagagcug

SEQ ID NO: 2699228 - RNA, 19 nt, Human
gcuccacuuggucugugag

SEQ ID NO: 2699229 - RNA, 18 nt, Human
gcuccacuuggucuguga

SEQ ID NO: 2699230 - RNA, 15 nt, Human
gcuccacuuggucug

SEQ ID NO: 2699231 - RNA, 19 nt, Human
gcuccaccuugcagcucuc

SEQ ID NO: 2699232 - RNA, 22 nt, Human
ggacucauuuuaaaaaauggaa

SEQ ID NO: 2699233 - RNA, 13 nt, Human
ggagaaacuggaa

SEQ ID NO: 2699234 - RNA, 15 nt, Human
ggccuccauccugag

SEQ ID NO: 2699235 - RNA, 14 nt, Human
ggccuccauccuga

SEQ ID NO: 2699236 - RNA, 21 nt, Human
ggcacaguuuucugagaaaga

SEQ ID NO: 2699237 - RNA, 14 nt, Human
ggcuccacuugguc

SEQ ID NO: 2699238 - RNA, 20 nt, Human
gggacagucaccucauggaa

SEQ ID NO: 2699239 - RNA, 21 nt, Human
gggacagucaccucauggaau

SEQ ID NO: 2699240 - RNA, 22 nt, Human
gggacagucaccucauggaauu

SEQ ID NO: 2699241 - RNA, 20 nt, Human
gggaacccaaguccaagcau

SEQ ID NO: 2699242 - RNA, 14 nt, Human
aaaaauaacaauga

SEQ ID NO: 2699243 - RNA, 15 nt, Human
aaaacuucagacaua

SEQ ID NO: 2699244 - RNA, 17 nt, Human
aaaaaugguuuaaaugg

SEQ ID NO: 2699245 - RNA, 23 nt, Human
guagacgugcacgcacacugucu

SEQ ID NO: 2699246 - RNA, 20 nt, Human
guagacgugcacgcacacug

SEQ ID NO: 2699247 - RNA, 15 nt, Human
guacuucaugcuguc

SEQ ID NO: 2699248 - RNA, 21 nt, Human
guacuucaaauccuugaagau

SEQ ID NO: 2699249 - RNA, 22 nt, Human
guacuucaaauccuugaagauu

SEQ ID NO: 2699250 - RNA, 23 nt, Human
aaaucauuucugcaucagcugcu

SEQ ID NO: 2699251 - RNA, 22 nt, Human
aaaucauuucugcaucagcugc

SEQ ID NO: 2699252 - RNA, 21 nt, Human
aaaucauuucugcaucagcug

SEQ ID NO: 2699253 - RNA, 19 nt, Human
aaaucauuucugcaucagc

SEQ ID NO: 2699254 - RNA, 11 nt, Human
aaaucauuucu

SEQ ID NO: 2699255 - RNA, 12 nt, Human
aaaucauuucug

SEQ ID NO: 2699256 - RNA, 17 nt, Human
aaauauuauguuaaaac

SEQ ID NO: 2699257 - RNA, 15 nt, Human
aaauccauacauuug

SEQ ID NO: 2699258 - RNA, 18 nt, Human
aaauccauacauuugugu

SEQ ID NO: 2699259 - RNA, 20 nt, Human
guaauaggcguaacuaauuu

SEQ ID NO: 2699260 - RNA, 23 nt, Human
guacacugccuucucaacuccaa

SEQ ID NO: 2699261 - RNA, 21 nt, Human
aaauaauuuuuauauuugaaa

SEQ ID NO: 2699262 - RNA, 15 nt, Human
aaauacacacucaaa

SEQ ID NO: 2699263 - RNA, 22 nt, Human
aaauaauuuuuauauuugaaau

SEQ ID NO: 2699264 - RNA, 23 nt, Human
aaauaauuuuuauauuugaaaua

SEQ ID NO: 2699265 - RNA, 19 nt, Human
aaauacacacucaaaucaa

SEQ ID NO: 2699266 - RNA, 18 nt, Human
aaaguauguuagugcaaa

SEQ ID NO: 2699267 - RNA, 20 nt, Human
aaagguauuuuaaucaccaa

SEQ ID NO: 2699268 - RNA, 23 nt, Human
aaaguucugcagauaaacaguag

SEQ ID NO: 2699269 - RNA, 15 nt, Human
aaagaggaaugaagu

SEQ ID NO: 2699270 - RNA, 15 nt, Human
aaagaggcagcuuga

SEQ ID NO: 2699271 - RNA, 14 nt, Human
aaagacuccaaaga

SEQ ID NO: 2699272 - RNA, 21 nt, Human
aaagacuccaaagaaauguaa

SEQ ID NO: 2699273 - RNA, 15 nt, Human
aaagacuccaaagaa

SEQ ID NO: 2699274 - RNA, 21 nt, Human
aaagacuauucaaacagucuc

SEQ ID NO: 2699275 - RNA, 17 nt, Human
aaagacuauucaaacag

SEQ ID NO: 2699276 - RNA, 19 nt, Human
aaagacuauucaaacaguc

SEQ ID NO: 2699277 - RNA, 18 nt, Human
aaagacuauucaaacagu

SEQ ID NO: 2699278 - RNA, 13 nt, Human
aaagacagugaaa

SEQ ID NO: 2699279 - RNA, 23 nt, Human
aaacuucagcgguuuauauaagc

SEQ ID NO: 2699280 - RNA, 19 nt, Human
aaacuucagacauagaauu

SEQ ID NO: 2699281 - RNA, 20 nt, Human
aaagggauggcaagaugugg

SEQ ID NO: 2699282 - RNA, 14 nt, Human
aaagguacuucaaa

SEQ ID NO: 2699283 - RNA, 21 nt, Human
aaagcacugacuucuaaguaa

SEQ ID NO: 2699284 - RNA, 17 nt, Human
aaagcacugacuucuaa

SEQ ID NO: 2699285 - RNA, 15 nt, Human
aaacucguuaauuug

SEQ ID NO: 2699286 - RNA, 12 nt, Human
aaaccacagcag

SEQ ID NO: 2699287 - RNA, 14 nt, Human
aaacaguagugaua

SEQ ID NO: 2699288 - RNA, 15 nt, Human
aaacagucucaggaa

SEQ ID NO: 2699289 - RNA, 19 nt, Human
ggggaauugaggacacuga

SEQ ID NO: 2699290 - RNA, 14 nt, Human
aaacacagcaaggg

SEQ ID NO: 2699291 - RNA, 12 nt, Human
aaacacagcaag

SEQ ID NO: 2699292 - RNA, 11 nt, Human
aaacacagcaa

SEQ ID NO: 2699293 - RNA, 16 nt, Human
gacuauucaaacaguc

SEQ ID NO: 2699294 - RNA, 15 nt, Human
gacuauucaaacagu

SEQ ID NO: 2699295 - RNA, 20 nt, Human
gacaguauggcagcuuuccu

SEQ ID NO: 2699296 - RNA, 21 nt, Human
gacagcccuucuuuccacaga

SEQ ID NO: 2699297 - RNA, 20 nt, Human
gacagaaagcagaacaguga

SEQ ID NO: 2699298 - RNA, 14 nt, Human
gacagaaagcagaa

SEQ ID NO: 2699299 - RNA, 15 nt, Human
gagcgacagugagac

SEQ ID NO: 2699300 - RNA, 13 nt, Human
gagcgacagugag

SEQ ID NO: 2699301 - RNA, 22 nt, Human
gcaguugaaaagacuccaaaga

SEQ ID NO: 2699302 - RNA, 15 nt, Human
gcagcuuauucacaa

SEQ ID NO: 2699303 - RNA, 16 nt, Human
gcauuguaaaugugcu

SEQ ID NO: 2699304 - RNA, 18 nt, Human
gcaauagucaaauugugu

SEQ ID NO: 2699305 - RNA, 16 nt, Human
gcaauaaaauggguuu

SEQ ID NO: 2699306 - RNA, 21 nt, Human
gaugcugucuucguacuggga

SEQ ID NO: 2699307 - RNA, 12 nt, Human
gaaagggauuuu

SEQ ID NO: 2699308 - RNA, 20 nt, Human
gaaagggauuuucagcccuc

SEQ ID NO: 2699309 - RNA, 18 nt, Human
gaaagaaaaucaggcugg

SEQ ID NO: 2699310 - RNA, 14 nt, Human
gaaaagacuccaaa

SEQ ID NO: 2699311 - RNA, 17 nt, Human
gaaaagacuccaaagaa

SEQ ID NO: 2699312 - RNA, 16 nt, Human
gaaaagacuccaaaga

SEQ ID NO: 2699313 - RNA, 21 nt, Human
gaaaacuuuaugcuaagugaa

SEQ ID NO: 2699314 - RNA, 17 nt, Human
gaacccgggaggcagag

SEQ ID NO: 2699315 - RNA, 17 nt, Human
gaacccaaguccaagca

SEQ ID NO: 2699316 - RNA, 16 nt, Human
gaacccaaguccaagc

SEQ ID NO: 2699317 - RNA, 19 nt, Human
cuuggucugugagaugcua

SEQ ID NO: 2699318 - RNA, 16 nt, Human
cuuggucugugagaug

SEQ ID NO: 2699319 - RNA, 17 nt, Human
cuucuaaguaaaaccac

SEQ ID NO: 2699320 - RNA, 13 nt, Human
cuucuaaguaaaa

SEQ ID NO: 2699321 - RNA, 21 nt, Human
cuucuaaguaaaaccacagca

SEQ ID NO: 2699322 - RNA, 20 nt, Human
cuucucacauuuauauuuuu

SEQ ID NO: 2699323 - RNA, 13 nt, Human
cuucucacauuua

SEQ ID NO: 2699324 - RNA, 18 nt, Human
cuggauaguccgucucug

SEQ ID NO: 2699325 - RNA, 19 nt, Human
cuggauaguccgucucugc

SEQ ID NO: 2699326 - RNA, 21 nt, Human
cuuaaaaaugguuuaaauggu

SEQ ID NO: 2699327 - RNA, 13 nt, Human
cuguuauaaucuu

SEQ ID NO: 2699328 - RNA, 19 nt, Human
cuguuauaaucuuucacag

SEQ ID NO: 2699329 - RNA, 17 nt, Human
cugucggagcccugucu

SEQ ID NO: 2699330 - RNA, 23 nt, Human
cugucggagcccugucuccucuc

SEQ ID NO: 2699331 - RNA, 17 nt, Human
cugaaagaggaaugaag

SEQ ID NO: 2699332 - RNA, 13 nt, Human
cugaaagaggaau

SEQ ID NO: 2699333 - RNA, 21 nt, Human
cugacacaugcugaacaucac

SEQ ID NO: 2699334 - RNA, 17 nt, Human
cucucuggccuucggcc

SEQ ID NO: 2699335 - RNA, 22 nt, Human
cucucuggccuucggccuccau

SEQ ID NO: 2699336 - RNA, 19 nt, Human
cucucuggccuucggccuc

SEQ ID NO: 2699337 - RNA, 24 nt, Human
cggagaagagcuguucacagccag

SEQ ID NO: 2699338 - RNA, 23 nt, Human
cggagaagagcuguucacagcca

SEQ ID NO: 2699339 - RNA, 15 nt, Human
cgguuuauauaagcu

SEQ ID NO: 2699340 - RNA, 14 nt, Human
cuaacuggacuggu

SEQ ID NO: 2699341 - RNA, 19 nt, Human
cucagaaaacaaggaugaa

SEQ ID NO: 2699342 - RNA, 23 nt, Human
cucagaaaacaaggaugaauuaa

SEQ ID NO: 2699343 - RNA, 13 nt, Human
cucaaaacugcac

SEQ ID NO: 2699344 - RNA, 14 nt, Human
ccucggagaagagc

SEQ ID NO: 2699345 - RNA, 12 nt, Human
ccucggagaaga

SEQ ID NO: 2699346 - RNA, 16 nt, Human
ccucccuucucuucac

SEQ ID NO: 2699347 - RNA, 17 nt, Human
ccugucucuacuaaaaa

SEQ ID NO: 2699348 - RNA, 13 nt, Human
cccaacuccagaa

SEQ ID NO: 2699349 - RNA, 13 nt, Human
ccaucccucccuc

SEQ ID NO: 2699350 - RNA, 14 nt, Human
ccaucccucccucc

SEQ ID NO: 2699351 - RNA, 15 nt, Human
ccaucccucccucca

SEQ ID NO: 2699352 - RNA, 13 nt, Human
cccuccucugcuu

SEQ ID NO: 2699353 - RNA, 22 nt, Human
cccuccucugcuugccaucccu

SEQ ID NO: 2699354 - RNA, 13 nt, Human
ccccugcacucca

SEQ ID NO: 2699355 - RNA, 24 nt, Human
cccagccagcaguucagagcugcc

SEQ ID NO: 2699356 - RNA, 23 nt, Human
caggaaaucaaauaugcaaagca

SEQ ID NO: 2699357 - RNA, 22 nt, Human
caggaaaucaaauaugcaaagc

SEQ ID NO: 2699358 - RNA, 16 nt, Human
cagcuccccucggaga

SEQ ID NO: 2699359 - RNA, 18 nt, Human
cagcuccccucggagaag

SEQ ID NO: 2699360 - RNA, 17 nt, Human
cagcuccccucggagaa

SEQ ID NO: 2699361 - RNA, 20 nt, Human
cagcuccccucggagaagag

SEQ ID NO: 2699362 - RNA, 23 nt, Human
cagcugccuccccuccucugcuu

SEQ ID NO: 2699363 - RNA, 24 nt, Human
cagcugccuccccuccucugcuug

SEQ ID NO: 2699364 - RNA, 21 nt, Human
cagcugccuccccuccucugc

SEQ ID NO: 2699365 - RNA, 22 nt, Human
cagcugccuccccuccucugcu

SEQ ID NO: 2699366 - RNA, 15 nt, Human
cagcccuucuuucca

SEQ ID NO: 2699367 - RNA, 19 nt, Human
cagcccuucuuuccacaga

SEQ ID NO: 2699368 - RNA, 20 nt, Human
cagcccuucuuuccacagaa

SEQ ID NO: 2699369 - RNA, 18 nt, Human
cagccugagcgacaguga

SEQ ID NO: 2699370 - RNA, 22 nt, Human
cagccugagcgacagugagacu

SEQ ID NO: 2699371 - RNA, 19 nt, Human
cagccugagcgacagugag

SEQ ID NO: 2699372 - RNA, 22 nt, Human
cagcaguugaaaagacuccaaa

SEQ ID NO: 2699373 - RNA, 17 nt, Human
cagcaguugaaaagacu

SEQ ID NO: 2699374 - RNA, 21 nt, Human
cagcaguugaaaagacuccaa

SEQ ID NO: 2699375 - RNA, 20 nt, Human
cagcaguugaaaagacucca

SEQ ID NO: 2699376 - RNA, 22 nt, Human
cagccagcaguucagagcugcc

SEQ ID NO: 2699377 - RNA, 15 nt, Human
cagccagcaguucag

SEQ ID NO: 2699378 - RNA, 21 nt, Human
cagccagcaguucagagcugc

SEQ ID NO: 2699379 - RNA, 14 nt, Human
cagccagcaguuca

SEQ ID NO: 2699380 - RNA, 22 nt, Human
cagcacagccucuuagaugcag

SEQ ID NO: 2699381 - RNA, 17 nt, Human
cagagcugcccucuccu

SEQ ID NO: 2699382 - RNA, 13 nt, Human
cagagcugcccuc

SEQ ID NO: 2699383 - RNA, 15 nt, Human
cagagcugcccucuc

SEQ ID NO: 2699384 - RNA, 15 nt, Human
cagucaccucaugga

SEQ ID NO: 2699385 - RNA, 15 nt, Human
cagucucaggaaauc

SEQ ID NO: 2699386 - RNA, 18 nt, Human
cagggaggacgcucucug

SEQ ID NO: 2699387 - RNA, 17 nt, Human
cagggaggacgcucucu

SEQ ID NO: 2699388 - RNA, 12 nt, Human
cauuaucucaaa

SEQ ID NO: 2699389 - RNA, 13 nt, Human
cauuaucucaaaa

SEQ ID NO: 2699390 - RNA, 16 nt, Human
ccacagaagcuccagg

SEQ ID NO: 2699391 - RNA, 18 nt, Human
ccaccagucugacuguuu

SEQ ID NO: 2699392 - RNA, 18 nt, Human
ccacagaagcuccaggua

SEQ ID NO: 2699393 - RNA, 16 nt, Human
auuuaauaaaugugcc

SEQ ID NO: 2699394 - RNA, 14 nt, Human
auuucuaugaaaua

SEQ ID NO: 2699395 - RNA, 20 nt, Human
auuucauaccuaucaucuua

SEQ ID NO: 2699396 - RNA, 15 nt, Human
auuguuuaaaaucau

SEQ ID NO: 2699397 - RNA, 19 nt, Human
auuaugaauuacauuugua

SEQ ID NO: 2699398 - RNA, 20 nt, Human
auuaugaauuacauuuguau

SEQ ID NO: 2699399 - RNA, 22 nt, Human
auuaugaauuacauuuguauaa

SEQ ID NO: 2699400 - RNA, 21 nt, Human
caaaucuuaacuugaaggagu

SEQ ID NO: 2699401 - RNA, 19 nt, Human
caagacccaaaaggcagaa

SEQ ID NO: 2699402 - RNA, 21 nt, Human
auuuuauaucaauuuaaaaaa

SEQ ID NO: 2699403 - RNA, 15 nt, Human
auuuuuauauuugaa

SEQ ID NO: 2699404 - RNA, 21 nt, Human
caaaaggauaaugaauacuuu

SEQ ID NO: 2699405 - RNA, 15 nt, Human
caaacagucucagga

SEQ ID NO: 2699406 - RNA, 17 nt, Human
caaacagucucaggaaa

SEQ ID NO: 2699407 - RNA, 16 nt, Human
caaacagucucaggaa

SEQ ID NO: 2699408 - RNA, 15 nt, Human
caauaaaauggguuu

SEQ ID NO: 2699409 - RNA, 20 nt, Human
caauaaaauccauacauuug

SEQ ID NO: 2699410 - RNA, 23 nt, Human
caauaaaauccauacauuugugu

SEQ ID NO: 2699411 - RNA, 15 nt, Human
cacuuaaaaaugguu

SEQ ID NO: 2699412 - RNA, 17 nt, Human
cacuuguguuuugcaag

SEQ ID NO: 2699413 - RNA, 18 nt, Human
cagaacagugauuaccag

SEQ ID NO: 2699414 - RNA, 11 nt, Human
cagaacaguga

SEQ ID NO: 2699415 - RNA, 17 nt, Human
cagaacagugauuacca

SEQ ID NO: 2699416 - RNA, 12 nt, Human
cagaacagugau

SEQ ID NO: 2699417 - RNA, 13 nt, Human
cacuccagccuga

SEQ ID NO: 2699418 - RNA, 12 nt, Human
cacuccagccug

SEQ ID NO: 2699419 - RNA, 23 nt, Human
cacuccagccugagcgacaguga

SEQ ID NO: 2699420 - RNA, 14 nt, Human
aauacacacucaaa

SEQ ID NO: 2699421 - RNA, 15 nt, Human
uaacaaugcuguauu

SEQ ID NO: 2699422 - RNA, 17 nt, Human
uaacaaugcuguauuuu

SEQ ID NO: 2699423 - RNA, 13 nt, Human
uaacaaugcugua

SEQ ID NO: 2699424 - RNA, 17 nt, Human
uaaaugauuucauucaa

SEQ ID NO: 2699425 - RNA, 15 nt, Human
uaaauguugacaugg

SEQ ID NO: 2699426 - RNA, 12 nt, Human
aauaaaaauaau

SEQ ID NO: 2699427 - RNA, 22 nt, Human
aauaaaauccauacauuugugu

SEQ ID NO: 2699428 - RNA, 15 nt, Human
aauaacgauaaaaga

SEQ ID NO: 2699429 - RNA, 15 nt, Human
aauaacaauaaaaga

SEQ ID NO: 2699430 - RNA, 21 nt, Human
aauaaaugugccuucauuuuu

SEQ ID NO: 2699431 - RNA, 12 nt, Human
aauaaaugugcc

SEQ ID NO: 2699432 - RNA, 19 nt, Human
uaaaccaaggcuagaacca

SEQ ID NO: 2699433 - RNA, 12 nt, Human
uaaacucauuuc

SEQ ID NO: 2699434 - RNA, 17 nt, Human
uaaacucauuucuagca

SEQ ID NO: 2699435 - RNA, 19 nt, Human
aaggaaaaaauaacaauga

SEQ ID NO: 2699436 - RNA, 16 nt, Human
aaggaaaaaauaacaa

SEQ ID NO: 2699437 - RNA, 13 nt, Human
aaggauaaugaau

SEQ ID NO: 2699438 - RNA, 23 nt, Human
guuuuuuuuuaaaaaagaaacau

SEQ ID NO: 2699439 - RNA, 23 nt, Human
aaguauguuagugcaaauuguca

SEQ ID NO: 2699440 - RNA, 21 nt, Human
aaguauguuagugcaaauugu

SEQ ID NO: 2699441 - RNA, 22 nt, Human
guuuucugagaaagacuauuca

SEQ ID NO: 2699442 - RNA, 17 nt, Human
guuuucugagaaagacu

SEQ ID NO: 2699443 - RNA, 16 nt, Human
guuuucugagaaagac

SEQ ID NO: 2699444 - RNA, 21 nt, Human
aagggugaugggaaagcauug

SEQ ID NO: 2699445 - RNA, 16 nt, Human
aaguaaaaccacagca

SEQ ID NO: 2699446 - RNA, 15 nt, Human
aaguaaaaccacagc

SEQ ID NO: 2699447 - RNA, 14 nt, Human
aaguaaaaccacag

SEQ ID NO: 2699448 - RNA, 18 nt, Human
aaguaaaaccacagcagu

SEQ ID NO: 2699449 - RNA, 17 nt, Human
aaguaaaaccacagcag

SEQ ID NO: 2699450 - RNA, 21 nt, Human
guuucuagcaugaagacagag

SEQ ID NO: 2699451 - RNA, 15 nt, Human
guuuuauaauuuugu

SEQ ID NO: 2699452 - RNA, 22 nt, Human
guuuuauaauuuugugaagcaa

SEQ ID NO: 2699453 - RNA, 15 nt, Human
guuuucugagaaaga

SEQ ID NO: 2699454 - RNA, 13 nt, Human
aagaauauuuuaa

SEQ ID NO: 2699455 - RNA, 13 nt, Human
aagacccaaaagg

SEQ ID NO: 2699456 - RNA, 13 nt, Human
aagaaaauaucac

SEQ ID NO: 2699457 - RNA, 22 nt, Human
aagaagcaccaaucaugaauua

SEQ ID NO: 2699458 - RNA, 19 nt, Human
aagcaaaauuuuuucucua

SEQ ID NO: 2699459 - RNA, 22 nt, Human
aagauguagaggagaaacugga

SEQ ID NO: 2699460 - RNA, 13 nt, Human
aagcaaaauguga

SEQ ID NO: 2699461 - RNA, 19 nt, Human
aagauguagaggagaaacu

SEQ ID NO: 2699462 - RNA, 16 nt, Human
aagcaaguauuagaau

SEQ ID NO: 2699463 - RNA, 13 nt, Human
aagacuauucaaa

SEQ ID NO: 2699464 - RNA, 14 nt, Human
aagacuauucaaac

SEQ ID NO: 2699465 - RNA, 14 nt, Human
aagacuccaaagaa

SEQ ID NO: 2699466 - RNA, 17 nt, Human
aagacuccaaagaaaug

SEQ ID NO: 2699467 - RNA, 16 nt, Human
aagacuccaaagaaau

SEQ ID NO: 2699468 - RNA, 18 nt, Human
aagagcuguucacagcca

SEQ ID NO: 2699469 - RNA, 14 nt, Human
guggguagacacac

SEQ ID NO: 2699470 - RNA, 19 nt, Human
aacagucucaggaaaucaa

SEQ ID NO: 2699471 - RNA, 17 nt, Human
aacagucucaggaaauc

SEQ ID NO: 2699472 - RNA, 19 nt, Human
aacagauuauuaccuuaca

SEQ ID NO: 2699473 - RNA, 16 nt, Human
aacauauauaacaaug

SEQ ID NO: 2699474 - RNA, 23 nt, Human
gucucaguccaugaagauguaga

SEQ ID NO: 2699475 - RNA, 13 nt, Human
gucuucacaacag

SEQ ID NO: 2699476 - RNA, 13 nt, Human
aacugaaaucaua

SEQ ID NO: 2699477 - RNA, 20 nt, Human
aacugaaaucauacuucuua

SEQ ID NO: 2699478 - RNA, 13 nt, Human
aacuauauuguuu

SEQ ID NO: 2699479 - RNA, 20 nt, Human
aacuaucucauuuccaagca

SEQ ID NO: 2699480 - RNA, 15 nt, Human
aaugaaugaaugaau

SEQ ID NO: 2699481 - RNA, 13 nt, Human
uaaucuuucacag

SEQ ID NO: 2699482 - RNA, 19 nt, Human
uaacaaugcuguauuuuaa

SEQ ID NO: 2699483 - RNA, 18 nt, Human
uacaaaaacacagcaagg

SEQ ID NO: 2699484 - RNA, 17 nt, Human
uacaaaaacacagcaag

SEQ ID NO: 2699485 - RNA, 16 nt, Human
aaugguuuaaaugguc

SEQ ID NO: 2699486 - RNA, 18 nt, Human
aauguugacaugggacau

SEQ ID NO: 2699487 - RNA, 19 nt, Human
aauugacccacaagaaaug

SEQ ID NO: 2699488 - RNA, 16 nt, Human
aauugacccacaagaa

SEQ ID NO: 2699489 - RNA, 13 nt, Human
aauugacccacaa

SEQ ID NO: 2699490 - RNA, 21 nt, Human
aauucuugccaaauauaaaua

SEQ ID NO: 2699491 - RNA, 13 nt, Human
uacuguaagaaaa

SEQ ID NO: 2699492 - RNA, 23 nt, Human
aauugugugaaagguacuucaaa

SEQ ID NO: 2699493 - RNA, 20 nt, Human
aauuucucccagucauuuaa

SEQ ID NO: 2699494 - RNA, 14 nt, Human
uacuucaaauccuu

SEQ ID NO: 2699495 - RNA, 19 nt, Human
uacuucaaauccuugaaga

SEQ ID NO: 2699496 - RNA, 19 nt, Human
aauuuuuucucuaggaaau

SEQ ID NO: 2699497 - RNA, 16 nt, Human
acaaaaacacagcaag

SEQ ID NO: 2699498 - RNA, 19 nt, Human
aauuuuuauauuugaaaua

SEQ ID NO: 2699499 - RNA, 21 nt, Human
uacuucaaauccuugaagauu

SEQ ID NO: 2699500 - RNA, 15 nt, Human
uagaacucccuuuca

SEQ ID NO: 2699501 - RNA, 22 nt, Human
acaagaaaugaaagcagggacu

SEQ ID NO: 2699502 - RNA, 18 nt, Human
acaagcacuaaacaaaga

SEQ ID NO: 2699503 - RNA, 18 nt, Human
uagcaugucgucaaagcu

SEQ ID NO: 2699504 - RNA, 21 nt, Human
uagcaugucgucaaagcugaa

SEQ ID NO: 2699505 - RNA, 17 nt, Human
uagaugcaguucugaag

SEQ ID NO: 2699506 - RNA, 19 nt, Human
uagaugcaguucugaagaa

SEQ ID NO: 2699507 - RNA, 16 nt, Human
uagaugcaguucugaa

SEQ ID NO: 2699508 - RNA, 14 nt, Human
uauuuauuuuaaua

SEQ ID NO: 2699509 - RNA, 16 nt, Human
uauuuauuuuaauaau

SEQ ID NO: 2699510 - RNA, 18 nt, Human
uauuuauuuuaauaaugu

SEQ ID NO: 2699511 - RNA, 17 nt, Human
uauugucuagugaaacu

SEQ ID NO: 2699512 - RNA, 23 nt, Human
acaguucggugagcuacaaaugc

SEQ ID NO: 2699513 - RNA, 22 nt, Human
acaguucggugagcuacaaaug

SEQ ID NO: 2699514 - RNA, 19 nt, Human
acaguucggugagcuacaa

SEQ ID NO: 2699515 - RNA, 23 nt, Human
uauucauagcagcuuauucacaa

SEQ ID NO: 2699516 - RNA, 15 nt, Human
uauuagaauaccaca

SEQ ID NO: 2699517 - RNA, 12 nt, Human
uauuaaaacuca

SEQ ID NO: 2699518 - RNA, 16 nt, Human
acagucucaggaaauc

SEQ ID NO: 2699519 - RNA, 15 nt, Human
acagucucaggaaau

SEQ ID NO: 2699520 - RNA, 14 nt, Human
acagucucaggaaa

SEQ ID NO: 2699521 - RNA, 13 nt, Human
acagucucaggaa

SEQ ID NO: 2699522 - RNA, 20 nt, Human
acagugaaagaaaauaacaa

SEQ ID NO: 2699523 - RNA, 17 nt, Human
acagucucaggaaauca

SEQ ID NO: 2699524 - RNA, 21 nt, Human
acaguuaccucugccucagaa

SEQ ID NO: 2699525 - RNA, 18 nt, Human
acagugagacucugucuc

SEQ ID NO: 2699526 - RNA, 14 nt, Human
acagugagacucug

SEQ ID NO: 2699527 - RNA, 21 nt, Human
acaguauggcagcuuuccuca

SEQ ID NO: 2699528 - RNA, 15 nt, Human
uauauuuacaaaugg

SEQ ID NO: 2699529 - RNA, 14 nt, Human
uauauuuacaaaug

SEQ ID NO: 2699530 - RNA, 17 nt, Human
uauggcuauaggugcua

SEQ ID NO: 2699531 - RNA, 16 nt, Human
uauggcuauaggugcu

SEQ ID NO: 2699532 - RNA, 13 nt, Human
uauaggaauugac

SEQ ID NO: 2699533 - RNA, 19 nt, Human
uauaggaauugacccacaa

SEQ ID NO: 2699534 - RNA, 14 nt, Human
uauaggaauugacc

SEQ ID NO: 2699535 - RNA, 23 nt, Human
uauaggugcuacaaaaacacagc

SEQ ID NO: 2699536 - RNA, 20 nt, Human
uauaggugcuacaaaaacac

SEQ ID NO: 2699537 - RNA, 21 nt, Human
uauaggugcuacaaaaacaca

SEQ ID NO: 2699538 - RNA, 18 nt, Human
uauaacaaugcuguauuu

SEQ ID NO: 2699539 - RNA, 14 nt, Human
uauaauuuugugaa

SEQ ID NO: 2699540 - RNA, 15 nt, Human
uaguuuuauaugcuu

SEQ ID NO: 2699541 - RNA, 16 nt, Human
uaguuuuauaugcuuc

SEQ ID NO: 2699542 - RNA, 22 nt, Human
uagugagcagucaggaaagaga

SEQ ID NO: 2699543 - RNA, 22 nt, Human
acacaucagcuugcccuguuaa

SEQ ID NO: 2699544 - RNA, 21 nt, Human
uauaaaauaauuuuuauauuu

SEQ ID NO: 2699545 - RNA, 22 nt, Human
uauaaaauaauuuuuauauuug

SEQ ID NO: 2699546 - RNA, 20 nt, Human
acucauuuuaaaaaauggaa

SEQ ID NO: 2699547 - RNA, 20 nt, Human
uccucaaaacuucagacaua

SEQ ID NO: 2699548 - RNA, 12 nt, Human
uccccuccucug

SEQ ID NO: 2699549 - RNA, 13 nt, Human
acuaaaaauacaa

SEQ ID NO: 2699550 - RNA, 13 nt, Human
uccuucagccuga

SEQ ID NO: 2699551 - RNA, 22 nt, Human
acuggcacaguuuucugagaaa

SEQ ID NO: 2699552 - RNA, 21 nt, Human
acuggcacaguuuucugagaa

SEQ ID NO: 2699553 - RNA, 22 nt, Human
acugccuucucaacuccaaacu

SEQ ID NO: 2699554 - RNA, 18 nt, Human
uccugggcagcugccucc

SEQ ID NO: 2699555 - RNA, 19 nt, Human
uccugggcagcugccuccc

SEQ ID NO: 2699556 - RNA, 22 nt, Human
uccugggcagcugccuccccuc

SEQ ID NO: 2699557 - RNA, 23 nt, Human
uccugggcagcugccuccccucc

SEQ ID NO: 2699558 - RNA, 15 nt, Human
uccugggcagcugcc

SEQ ID NO: 2699559 - RNA, 16 nt, Human
uccugggcagcugccu

SEQ ID NO: 2699560 - RNA, 17 nt, Human
uccugggcagcugccuc

SEQ ID NO: 2699561 - RNA, 22 nt, Human
acugaggggaggggagcauggg

SEQ ID NO: 2699562 - RNA, 17 nt, Human
acugaggggaggggagc

SEQ ID NO: 2699563 - RNA, 20 nt, Human
uccagccugagcgacaguga

SEQ ID NO: 2699564 - RNA, 21 nt, Human
uccagccugagcgacagugag

SEQ ID NO: 2699565 - RNA, 22 nt, Human
ucaugaauuaguuuuauaugcu

SEQ ID NO: 2699566 - RNA, 18 nt, Human
ucagaugcacaugagcug

SEQ ID NO: 2699567 - RNA, 15 nt, Human
acccaaaaggcagaa

SEQ ID NO: 2699568 - RNA, 13 nt, Human
acccaaaaggcag

SEQ ID NO: 2699569 - RNA, 18 nt, Human
acccaaaaggcagaagca

SEQ ID NO: 2699570 - RNA, 21 nt, Human
acccaaauguucaucaaugaa

SEQ ID NO: 2699571 - RNA, 12 nt, Human
uauuucauuucu

SEQ ID NO: 2699572 - RNA, 11 nt, Human
accacagcagu

SEQ ID NO: 2699573 - RNA, 13 nt, Human
accacugcagaag

SEQ ID NO: 2699574 - RNA, 19 nt, Human
accacugcagaagacagua

SEQ ID NO: 2699575 - RNA, 14 nt, Human
accacugcagaaga

SEQ ID NO: 2699576 - RNA, 19 nt, Human
accacuuguguuuugcaag

SEQ ID NO: 2699577 - RNA, 23 nt, Human
accacuuguguuuugcaagccag

SEQ ID NO: 2699578 - RNA, 16 nt, Human
agcaccaaucaugaau

SEQ ID NO: 2699579 - RNA, 22 nt, Human
agcacagccucuuagaugcagu

SEQ ID NO: 2699580 - RNA, 14 nt, Human
agcaacgcaggccc

SEQ ID NO: 2699581 - RNA, 14 nt, Human
agcagaacagugau

SEQ ID NO: 2699582 - RNA, 20 nt, Human
ugagcgacagugagacucug

SEQ ID NO: 2699583 - RNA, 16 nt, Human
ugagcgacagugagac

SEQ ID NO: 2699584 - RNA, 14 nt, Human
ugagcgacagugag

SEQ ID NO: 2699585 - RNA, 13 nt, Human
ugagcgacaguga

SEQ ID NO: 2699586 - RNA, 22 nt, Human
ugagguacugagagugaacaaa

SEQ ID NO: 2699587 - RNA, 17 nt, Human
ugagguacugagaguga

SEQ ID NO: 2699588 - RNA, 15 nt, Human
ugaggacacugauau

SEQ ID NO: 2699589 - RNA, 14 nt, Human
ugagcuacaaaugc

SEQ ID NO: 2699590 - RNA, 13 nt, Human
ugagcuacaaaug

SEQ ID NO: 2699591 - RNA, 16 nt, Human
ugagcuacaaaugcau

SEQ ID NO: 2699592 - RNA, 22 nt, Human
agagugaacaaauuuacagaga

SEQ ID NO: 2699593 - RNA, 14 nt, Human
agagugaacaaauu

SEQ ID NO: 2699594 - RNA, 17 nt, Human
ugaagauguagaggaga

SEQ ID NO: 2699595 - RNA, 18 nt, Human
ugaagauguagaggagaa

SEQ ID NO: 2699596 - RNA, 14 nt, Human
ugaagaagauggua

SEQ ID NO: 2699597 - RNA, 20 nt, Human
ugaagaagcaccaaucauga

SEQ ID NO: 2699598 - RNA, 22 nt, Human
agaugcuagaacucccuuucaa

SEQ ID NO: 2699599 - RNA, 23 nt, Human
agaugcuagaacucccuuucaac

SEQ ID NO: 2699600 - RNA, 19 nt, Human
agaugaugaugaucuuuaa

SEQ ID NO: 2699601 - RNA, 15 nt, Human
ugacuguuuccauca

SEQ ID NO: 2699602 - RNA, 16 nt, Human
agauugugccccugca

SEQ ID NO: 2699603 - RNA, 16 nt, Human
agauuuaccacuugug

SEQ ID NO: 2699604 - RNA, 13 nt, Human
ucucuggccuucg

SEQ ID NO: 2699605 - RNA, 17 nt, Human
ucucuggccuucggccu

SEQ ID NO: 2699606 - RNA, 16 nt, Human
ucucuggccuucggcc

SEQ ID NO: 2699607 - RNA, 12 nt, Human
ucucuucuuuaa

SEQ ID NO: 2699608 - RNA, 13 nt, Human
ucucuucuuuaaa

SEQ ID NO: 2699609 - RNA, 14 nt, Human
agaaagaaaaucag

SEQ ID NO: 2699610 - RNA, 15 nt, Human
agaaacuggaacucu

SEQ ID NO: 2699611 - RNA, 13 nt, Human
agaaacuggaacu

SEQ ID NO: 2699612 - RNA, 15 nt, Human
agaaacauuugguaa

SEQ ID NO: 2699613 - RNA, 19 nt, Human
agaaaacaaggaugaauua

SEQ ID NO: 2699614 - RNA, 22 nt, Human
acuuuuuauggcacuaguauuu

SEQ ID NO: 2699615 - RNA, 15 nt, Human
ucuccucucucugua

SEQ ID NO: 2699616 - RNA, 15 nt, Human
ucucccagucauuua

SEQ ID NO: 2699617 - RNA, 12 nt, Human
ucugcuugccau

SEQ ID NO: 2699618 - RNA, 14 nt, Human
ucugcuugccaucc

SEQ ID NO: 2699619 - RNA, 14 nt, Human
agaagcuccaggua

SEQ ID NO: 2699620 - RNA, 11 nt, Human
ucugcuugcca

SEQ ID NO: 2699621 - RNA, 21 nt, Human
agaagaacugaaaucauacuu

SEQ ID NO: 2699622 - RNA, 14 nt, Human
agaacucccuuuca

SEQ ID NO: 2699623 - RNA, 22 nt, Human
ucugagaaagacuauucaaaca

SEQ ID NO: 2699624 - RNA, 21 nt, Human
ucugagaaagacuauucaaac

SEQ ID NO: 2699625 - RNA, 23 nt, Human
ucugagaaagacuauucaaacag

SEQ ID NO: 2699626 - RNA, 20 nt, Human
ucugagaaagacuauucaaa

SEQ ID NO: 2699627 - RNA, 19 nt, Human
ucugagaaagacuauucaa

SEQ ID NO: 2699628 - RNA, 15 nt, Human
ucugagaaagacuau

SEQ ID NO: 2699629 - RNA, 14 nt, Human
ucugagaaagacua

SEQ ID NO: 2699630 - RNA, 21 nt, Human
ucugacuguuuccaucaaggg

SEQ ID NO: 2699631 - RNA, 23 nt, Human
agaaagacuauucaaacagucuc

SEQ ID NO: 2699632 - RNA, 20 nt, Human
agaaagacuauucaaacagu

SEQ ID NO: 2699633 - RNA, 18 nt, Human
agaaagacuauucaaaca

SEQ ID NO: 2699634 - RNA, 19 nt, Human
agaaagacuauucaaacag

SEQ ID NO: 2699635 - RNA, 21 nt, Human
agacuauucaaacagucucag

SEQ ID NO: 2699636 - RNA, 20 nt, Human
agacuauucaaacagucuca

SEQ ID NO: 2699637 - RNA, 18 nt, Human
agacuauucaaacagucu

SEQ ID NO: 2699638 - RNA, 12 nt, Human
agacuccaaaga

SEQ ID NO: 2699639 - RNA, 14 nt, Human
agacuccaaagaaa

SEQ ID NO: 2699640 - RNA, 13 nt, Human
agacuccaaagaa

SEQ ID NO: 2699641 - RNA, 16 nt, Human
agacuauucaaacagu

SEQ ID NO: 2699642 - RNA, 19 nt, Human
agacuccaaagaaauguaa

SEQ ID NO: 2699643 - RNA, 16 nt, Human
agacuccaaagaaaug

SEQ ID NO: 2699644 - RNA, 21 nt, Human
ucuuuaaagggauggcaagau

SEQ ID NO: 2699645 - RNA, 17 nt, Human
ucuuuaaaauacacacu

SEQ ID NO: 2699646 - RNA, 18 nt, Human
agagacacacugaagaag

SEQ ID NO: 2699647 - RNA, 20 nt, Human
agagacacacugaagaagca

SEQ ID NO: 2699648 - RNA, 15 nt, Human
agagaaugagagaca

SEQ ID NO: 2699649 - RNA, 17 nt, Human
agagacacacugaagaa

SEQ ID NO: 2699650 - RNA, 15 nt, Human
agacuggcacaguuu

SEQ ID NO: 2699651 - RNA, 14 nt, Human
agacuggcacaguu

SEQ ID NO: 2699652 - RNA, 18 nt, Human
agacuggcacaguuuucu

SEQ ID NO: 2699653 - RNA, 21 nt, Human
agacuggauaguccgucucug

SEQ ID NO: 2699654 - RNA, 14 nt, Human
ucuuaauuaaaaga

SEQ ID NO: 2699655 - RNA, 21 nt, Human
ucuuaauuaaaagaauauuuu

SEQ ID NO: 2699656 - RNA, 18 nt, Human
ucuuaauuaaaagaauau

SEQ ID NO: 2699657 - RNA, 18 nt, Human
ucuguuuuauaauuuugu

SEQ ID NO: 2699658 - RNA, 19 nt, Human
agcuauggugucauaggcu

SEQ ID NO: 2699659 - RNA, 19 nt, Human
agcuacuaauuuuaaaaug

SEQ ID NO: 2699660 - RNA, 18 nt, Human
agcccuucuuuccacaga

SEQ ID NO: 2699661 - RNA, 19 nt, Human
agcccuucuuuccacagaa

SEQ ID NO: 2699662 - RNA, 17 nt, Human
agcccuucuuuccacag

SEQ ID NO: 2699663 - RNA, 18 nt, Human
agccugagcgacagugag

SEQ ID NO: 2699664 - RNA, 14 nt, Human
ugcagugagccgag

SEQ ID NO: 2699665 - RNA, 13 nt, Human
agcuggaaaagua

SEQ ID NO: 2699666 - RNA, 17 nt, Human
agcugccuccccuccuc

SEQ ID NO: 2699667 - RNA, 18 nt, Human
agcugccuccccuccucu

SEQ ID NO: 2699668 - RNA, 19 nt, Human
agcugccuccccuccucug

SEQ ID NO: 2699669 - RNA, 20 nt, Human
agcugccuccccuccucugc

SEQ ID NO: 2699670 - RNA, 21 nt, Human
agcugccuccccuccucugcu

SEQ ID NO: 2699671 - RNA, 22 nt, Human
agcugccuccccuccucugcuu

SEQ ID NO: 2699672 - RNA, 23 nt, Human
agcugccuccccuccucugcuug

SEQ ID NO: 2699673 - RNA, 16 nt, Human
ugcuaguaauuggaaa

SEQ ID NO: 2699674 - RNA, 14 nt, Human
ugcuaguaauugga

SEQ ID NO: 2699675 - RNA, 13 nt, Human
aggaaagagaacu

SEQ ID NO: 2699676 - RNA, 19 nt, Human
aggaaagagaacuuccaga

SEQ ID NO: 2699677 - RNA, 15 nt, Human
agcuuauuaaaacuc

SEQ ID NO: 2699678 - RNA, 20 nt, Human
agcuuauuaaaacucauuuu

SEQ ID NO: 2699679 - RNA, 21 nt, Human
agcuuauugucuagugaaacu

SEQ ID NO: 2699680 - RNA, 19 nt, Human
aggaauugacccacaagaa

SEQ ID NO: 2699681 - RNA, 19 nt, Human
aggaaaucaaauaugcaaa

SEQ ID NO: 2699682 - RNA, 14 nt, Human
aggaaauauuuauu

SEQ ID NO: 2699683 - RNA, 18 nt, Human
aggaaauauuuauuuuaa

SEQ ID NO: 2699684 - RNA, 20 nt, Human
aggcagcucuaaaugucaau

SEQ ID NO: 2699685 - RNA, 16 nt, Human
uggagaagaacugaaa

SEQ ID NO: 2699686 - RNA, 22 nt, Human
aggcuccacuuggucugugaga

SEQ ID NO: 2699687 - RNA, 21 nt, Human
aggcuccacuuggucugugag

SEQ ID NO: 2699688 - RNA, 17 nt, Human
aggcuccacuuggucug

SEQ ID NO: 2699689 - RNA, 11 nt, Human
aggcuccacuu

SEQ ID NO: 2699690 - RNA, 19 nt, Human
uggcuauaggugcuacaaa

SEQ ID NO: 2699691 - RNA, 15 nt, Human
uggcuauaggugcua

SEQ ID NO: 2699692 - RNA, 18 nt, Human
uggcuaagcaaaauguga

SEQ ID NO: 2699693 - RNA, 23 nt, Human
uggcuauaggugcuacaaaaaca

SEQ ID NO: 2699694 - RNA, 18 nt, Human
ugggaaacaaaaggauaa

SEQ ID NO: 2699695 - RNA, 21 nt, Human
ugggaaagcauuguaaaugug

SEQ ID NO: 2699696 - RNA, 18 nt, Human
ugggaaagcauuguaaau

SEQ ID NO: 2699697 - RNA, 17 nt, Human
ugggaaagcauuguaaa

SEQ ID NO: 2699698 - RNA, 16 nt, Human
ugggaaagcauuguaa

SEQ ID NO: 2699699 - RNA, 14 nt, Human
ugggaaagcauugu

SEQ ID NO: 2699700 - RNA, 15 nt, Human
agggaaacugccagc

SEQ ID NO: 2699701 - RNA, 14 nt, Human
agggaaacugccag

SEQ ID NO: 2699702 - RNA, 23 nt, Human
agggaaacugccagcaacgcagg

SEQ ID NO: 2699703 - RNA, 21 nt, Human
agggaaacugccagcaacgca

SEQ ID NO: 2699704 - RNA, 19 nt, Human
agggaaacugccagcaacg

SEQ ID NO: 2699705 - RNA, 16 nt, Human
agggaaacugccagca

SEQ ID NO: 2699706 - RNA, 20 nt, Human
ugggaacccaaguccaagca

SEQ ID NO: 2699707 - RNA, 22 nt, Human
agggcuguuauaaucuuucaca

SEQ ID NO: 2699708 - RNA, 23 nt, Human
agggacuucugucuucacaacag

SEQ ID NO: 2699709 - RNA, 14 nt, Human
agggagagaagaua

SEQ ID NO: 2699710 - RNA, 13 nt, Human
agggagagaagau

SEQ ID NO: 2699711 - RNA, 19 nt, Human
ugggaggcugagaugggag

SEQ ID NO: 2699712 - RNA, 20 nt, Human
uguccagccccguagacgug

SEQ ID NO: 2699713 - RNA, 14 nt, Human
agucaggaaagaga

SEQ ID NO: 2699714 - RNA, 13 nt, Human
agucucaggaaau

SEQ ID NO: 2699715 - RNA, 16 nt, Human
agucucaggaaaucaa

SEQ ID NO: 2699716 - RNA, 16 nt, Human
aggugcuacaaaaaca

SEQ ID NO: 2699717 - RNA, 14 nt, Human
agguugcagugagc

SEQ ID NO: 2699718 - RNA, 19 nt, Human
uguaagggaaacugccagc

SEQ ID NO: 2699719 - RNA, 18 nt, Human
uguaagggaaacugccag

SEQ ID NO: 2699720 - RNA, 13 nt, Human
uguaagggaaacu

SEQ ID NO: 2699721 - RNA, 17 nt, Human
uguaguguuggagaaga

SEQ ID NO: 2699722 - RNA, 18 nt, Human
uguaguguuggagaagaa

SEQ ID NO: 2699723 - RNA, 16 nt, Human
uguaguguuggagaag

SEQ ID NO: 2699724 - RNA, 20 nt, Human
aguaaaaccacagcaguuga

SEQ ID NO: 2699725 - RNA, 19 nt, Human
aguaaaaccacagcaguug

SEQ ID NO: 2699726 - RNA, 17 nt, Human
aguaaaaccacagcagu

SEQ ID NO: 2699727 - RNA, 16 nt, Human
aguaaaaccacagcag

SEQ ID NO: 2699728 - RNA, 12 nt, Human
aguaauuggaaa

SEQ ID NO: 2699729 - RNA, 13 nt, Human
aguaauuggaaag

SEQ ID NO: 2699730 - RNA, 13 nt, Human
aguaaugauaacu

SEQ ID NO: 2699731 - RNA, 15 nt, Human
uguucuaagaaguga

SEQ ID NO: 2699732 - RNA, 22 nt, Human
uguugcccacagcuguaugauu

SEQ ID NO: 2699733 - RNA, 16 nt, Human
agucuuucacauuuaa

SEQ ID NO: 2699734 - RNA, 18 nt, Human
agucuuucacauuuaaau

SEQ ID NO: 2699735 - RNA, 21 nt, Human
agugaacaaauuuacagagac

SEQ ID NO: 2699736 - RNA, 23 nt, Human
agugaacaaauuuacagagacag

SEQ ID NO: 2699737 - RNA, 22 nt, Human
agugaacaaauuuacagagaca

SEQ ID NO: 2699738 - RNA, 14 nt, Human
agugcaaauuguca

SEQ ID NO: 2699739 - RNA, 17 nt, Human
auacuauggaauuucuc

SEQ ID NO: 2699740 - RNA, 19 nt, Human
uuauauuugaaauauugac

SEQ ID NO: 2699741 - RNA, 14 nt, Human
uuaugaauuacauu

SEQ ID NO: 2699742 - RNA, 16 nt, Human
uuaugaauuacauuug

SEQ ID NO: 2699743 - RNA, 17 nt, Human
uuaugaauuacauuugu

SEQ ID NO: 2699744 - RNA, 21 nt, Human
uuaugaauuacauuuguauaa

SEQ ID NO: 2699745 - RNA, 19 nt, Human
uuaugauuaaguaaugaua

SEQ ID NO: 2699746 - RNA, 13 nt, Human
auagaaguaaaaa

SEQ ID NO: 2699747 - RNA, 17 nt, Human
auagaauuaacacauga

SEQ ID NO: 2699748 - RNA, 18 nt, Human
auagauaggucagugcaa

SEQ ID NO: 2699749 - RNA, 16 nt, Human
auacucauuaggaugg

SEQ ID NO: 2699750 - RNA, 19 nt, Human
uuauguuaaaacugggaca

SEQ ID NO: 2699751 - RNA, 14 nt, Human
uuauuauauuuaca

SEQ ID NO: 2699752 - RNA, 15 nt, Human
uuauuauauuuacaa

SEQ ID NO: 2699753 - RNA, 16 nt, Human
aguuuuauaugcuucu

SEQ ID NO: 2699754 - RNA, 20 nt, Human
aguuuaaauuguaauaggcg

SEQ ID NO: 2699755 - RNA, 17 nt, Human
aguuuaaauuguaauag

SEQ ID NO: 2699756 - RNA, 15 nt, Human
aguuuagcuggaaaa

SEQ ID NO: 2699757 - RNA, 19 nt, Human
uuaaaaaagaaacauuugg

SEQ ID NO: 2699758 - RNA, 16 nt, Human
uuaaaaaauggaacau

SEQ ID NO: 2699759 - RNA, 14 nt, Human
uuaaaaucauuucu

SEQ ID NO: 2699760 - RNA, 22 nt, Human
uuaaaaucauuucugcaucagc

SEQ ID NO: 2699761 - RNA, 14 nt, Human
uuaggguuaugauu

SEQ ID NO: 2699762 - RNA, 16 nt, Human
uuaggguuaugauuaa

SEQ ID NO: 2699763 - RNA, 15 nt, Human
uuagggagagaagau

SEQ ID NO: 2699764 - RNA, 14 nt, Human
auaaucuuucacag

SEQ ID NO: 2699765 - RNA, 14 nt, Human
auaagccagacauc

SEQ ID NO: 2699766 - RNA, 23 nt, Human
augaauggcuaagcaaaauguga

SEQ ID NO: 2699767 - RNA, 15 nt, Human
augaauuaaguuuuu

SEQ ID NO: 2699768 - RNA, 15 nt, Human
augaauuacauuugu

SEQ ID NO: 2699769 - RNA, 16 nt, Human
augaauuacauuugua

SEQ ID NO: 2699770 - RNA, 14 nt, Human
aucuuauaauuuaa

SEQ ID NO: 2699771 - RNA, 18 nt, Human
aucuacacuccagugaga

SEQ ID NO: 2699772 - RNA, 19 nt, Human
aucuacacuccagugagac

SEQ ID NO: 2699773 - RNA, 17 nt, Human
uugaagggaaauuucag

SEQ ID NO: 2699774 - RNA, 14 nt, Human
aucucauuuccaag

SEQ ID NO: 2699775 - RNA, 22 nt, Human
uugcaagccagauuuuccugaa

SEQ ID NO: 2699776 - RNA, 13 nt, Human
uugcaucaauuuu

SEQ ID NO: 2699777 - RNA, 18 nt, Human
uugaacccgggaggcaga

SEQ ID NO: 2699778 - RNA, 17 nt, Human
uugaaauuguauuacaa

SEQ ID NO: 2699779 - RNA, 19 nt, Human
uugaacccgggaggcagag

SEQ ID NO: 2699780 - RNA, 12 nt, Human
uucucuaggaaa

SEQ ID NO: 2699781 - RNA, 19 nt, Human
uuccguagguuauuuucag

SEQ ID NO: 2699782 - RNA, 14 nt, Human
aucaacagauaaau

SEQ ID NO: 2699783 - RNA, 18 nt, Human
auauuuuuuguuaaauga

SEQ ID NO: 2699784 - RNA, 20 nt, Human
auauuuuuuguuaaaugauu

SEQ ID NO: 2699785 - RNA, 22 nt, Human
aucacuugucaauaaaauccau

SEQ ID NO: 2699786 - RNA, 17 nt, Human
aucaggguuaguauugu

SEQ ID NO: 2699787 - RNA, 19 nt, Human
uucuagcaugaagacagag

SEQ ID NO: 2699788 - RNA, 16 nt, Human
uucuaaguaaaaccac

SEQ ID NO: 2699789 - RNA, 15 nt, Human
uucuaaguaaaacca

SEQ ID NO: 2699790 - RNA, 13 nt, Human
uucuaagaaguga

SEQ ID NO: 2699791 - RNA, 23 nt, Human
uucuaagaagugaaaaucuacac

SEQ ID NO: 2699792 - RNA, 15 nt, Human
uucggccuccauccu

SEQ ID NO: 2699793 - RNA, 14 nt, Human
uucggccuccaucc

SEQ ID NO: 2699794 - RNA, 19 nt, Human
uuuguaguguuggagaaga

SEQ ID NO: 2699795 - RNA, 21 nt, Human
uuuguaguguuggagaagaac

SEQ ID NO: 2699796 - RNA, 17 nt, Human
uuugugaagcaaaauuu

SEQ ID NO: 2699797 - RNA, 17 nt, Human
auguccacugguucuuc

SEQ ID NO: 2699798 - RNA, 16 nt, Human
auguccacugguucuu

SEQ ID NO: 2699799 - RNA, 19 nt, Human
auguagaggagaaacugga

SEQ ID NO: 2699800 - RNA, 17 nt, Human
auguagaggagaaacug

SEQ ID NO: 2699801 - RNA, 13 nt, Human
auguagaggagaa

SEQ ID NO: 2699802 - RNA, 12 nt, Human
auguagaggaga

SEQ ID NO: 2699803 - RNA, 16 nt, Human
auguacuucaugcugu

SEQ ID NO: 2699804 - RNA, 14 nt, Human
uuugcaagccagau

SEQ ID NO: 2699805 - RNA, 21 nt, Human
augguucccuugaugaagaag

SEQ ID NO: 2699806 - RNA, 17 nt, Human
uuucucccagucauuua

SEQ ID NO: 2699807 - RNA, 18 nt, Human
uuucucccagucauuuaa

SEQ ID NO: 2699808 - RNA, 15 nt, Human
uuugaaauauugacu

SEQ ID NO: 2699809 - RNA, 18 nt, Human
uuuaaauauaugcuaagu

SEQ ID NO: 2699810 - RNA, 13 nt, Human
augcaguucugaa

SEQ ID NO: 2699811 - RNA, 21 nt, Human
augccauuuaaagcuuauuaa

SEQ ID NO: 2699812 - RNA, 17 nt, Human
augccauuuaaagcuua

SEQ ID NO: 2699813 - RNA, 18 nt, Human
augauuaaguaaugauaa

SEQ ID NO: 2699814 - RNA, 14 nt, Human
augauuaaguaaug

SEQ ID NO: 2699815 - RNA, 15 nt, Human
augauaacuggaaac

SEQ ID NO: 2699816 - RNA, 14 nt, Human
auggcacuaguauu

SEQ ID NO: 2699817 - RNA, 16 nt, Human
auggcacuaguauuuc

SEQ ID NO: 2699818 - RNA, 19 nt, Human
auggcuaagcaaaauguga

SEQ ID NO: 2699819 - RNA, 16 nt, Human
uuucaaacauauauaa

SEQ ID NO: 2699820 - RNA, 22 nt, Human
augcuagaacucccuuucaaca

SEQ ID NO: 2699821 - RNA, 21 nt, Human
augcuagaacucccuuucaac

SEQ ID NO: 2699822 - RNA, 20 nt, Human
augcuagaacucccuuucaa

SEQ ID NO: 2699823 - RNA, 19 nt, Human
auuggacaguaaaauccac

SEQ ID NO: 2699824 - RNA, 19 nt, Human
auuggagcucgugggacag

SEQ ID NO: 2699825 - RNA, 13 nt, Human
auugacuuuuuau

SEQ ID NO: 2699826 - RNA, 13 nt, Human
auugucuagugaa

SEQ ID NO: 2699827 - RNA, 14 nt, Human
auuuauuuuaauaa

SEQ ID NO: 2699828 - RNA, 19 nt, Human
auuuguaguguuggagaag

SEQ ID NO: 2699829 - RNA, 22 nt, Human
auuuguaguguuggagaagaac

SEQ ID NO: 2699830 - RNA, 14 nt, Human
auuuguauaaaaua

SEQ ID NO: 2699831 - RNA, 23 nt, Human
auuuuaaaagaaugauuaugaau

SEQ ID NO: 2699832 - RNA, 16 nt, Human
auuuuaaaagaaugau

SEQ ID NO: 2699833 - RNA, 12 nt, Human
auuuuaauaaug

SEQ ID NO: 2699834 - RNA, 15 nt, Human
auuuucuauaauuua

SEQ ID NO: 2699835 - RNA, 14 nt, Human
auuuucuauaauuu

SEQ ID NO: 2699836 - RNA, 14 nt, Human
auuuuccugaaaac

SEQ ID NO: 2699837 - RNA, 15 nt, Human
auuuuucuuauuuca

SEQ ID NO: 2699838 - RNA, 20 nt, Human
auuuuucuuauuucauuucu

SEQ ID NO: 2699839 - RNA, 19 nt, Human
auuuuucuuauuucauuuc

SEQ ID NO: 2699840 - RNA, 22 nt, Human
auuuuugugauuuugugauuga

SEQ ID NO: 2699841 - RNA, 21 nt, Human
auuuuuguuuucauuaucuca

SEQ ID NO: 2699842 - RNA, 20 nt, Human
auuuuuucucuaggaaauau

SEQ ID NO: 2699843 - RNA, 23 nt, Human
auuuuuucucuaggaaauauuua

SEQ ID NO: 2699844 - RNA, 18 nt, Human
auuuuuuguuaaaugauu

SEQ ID NO: 2699845 - RNA, 17 nt, Human
auugacacuuaaaaaug

SEQ ID NO: 2699846 - RNA, 15 nt, Human
auugacacuuaaaaa

SEQ ID NO: 2699847 - RNA, 19 nt, Human
auugacacuuaaaaauggu

SEQ ID NO: 2699848 - RNA, 15 nt, Human
auuauauuuacaaau

SEQ ID NO: 2699849 - RNA, 20 nt, Human
auucaaacagucucaggaaa

SEQ ID NO: 2699850 - RNA, 19 nt, Human
auucaaacagucucaggaa

SEQ ID NO: 2699851 - RNA, 18 nt, Human
auucaaacagucucagga

SEQ ID NO: 2699852 - RNA, 16 nt, Human
auucaaacagucucag

SEQ ID NO: 2699853 - RNA, 21 nt, Human
auuauguuaaaacugggacag

SEQ ID NO: 2699854 - RNA, 15 nt, Human
auuauauuuauuacu

SEQ ID NO: 2699855 - RNA, 18 nt, Human
auuauauuuauuacugua

SEQ ID NO: 2699856 - RNA, 22 nt, Human
caaugaaugaaugaauggcuaa

SEQ ID NO: 2699857 - RNA, 11 nt, Human
cacaacagauu

SEQ ID NO: 2699858 - RNA, 19 nt, Human
cacacucaaaucaagaaac

SEQ ID NO: 2699859 - RNA, 14 nt, Human
cacacugaagaagc

SEQ ID NO: 2699860 - RNA, 13 nt, Human
cacaacuauauug

SEQ ID NO: 2699861 - RNA, 22 nt, Human
cacagcaguugaaaagacucca

SEQ ID NO: 2699862 - RNA, 15 nt, Human
cacaggaaguagagg

SEQ ID NO: 2699863 - RNA, 20 nt, Human
cacaggaaccacaagacugc

SEQ ID NO: 2699864 - RNA, 19 nt, Human
cacaggaaccacaagacug

SEQ ID NO: 2699865 - RNA, 14 nt, Human
cacaguuuucugag

SEQ ID NO: 2699866 - RNA, 15 nt, Human
cacaguuuucugaga

SEQ ID NO: 2699867 - RNA, 17 nt, Human
caaauaugcaaagcacu

SEQ ID NO: 2699868 - RNA, 16 nt, Human
caaauaugcaaagcac

SEQ ID NO: 2699869 - RNA, 18 nt, Human
caaauaugcaaagcacug

SEQ ID NO: 2699870 - RNA, 20 nt, Human
caaauguucaucaaugaaug

SEQ ID NO: 2699871 - RNA, 21 nt, Human
caaauguucaucaaugaauga

SEQ ID NO: 2699872 - RNA, 14 nt, Human
caaauaugcaaagc

SEQ ID NO: 2699873 - RNA, 14 nt, Human
caaauuuacagaga

SEQ ID NO: 2699874 - RNA, 15 nt, Human
caaauuuacagagac

SEQ ID NO: 2699875 - RNA, 17 nt, Human
caagcacuaaacaaaga

SEQ ID NO: 2699876 - RNA, 19 nt, Human
ccaccucccugcaauaaaa

SEQ ID NO: 2699877 - RNA, 21 nt, Human
ccaccucccugcaauaaaaug

SEQ ID NO: 2699878 - RNA, 15 nt, Human
ccaccucccugcaau

SEQ ID NO: 2699879 - RNA, 14 nt, Human
ccagacaucaacag

SEQ ID NO: 2699880 - RNA, 15 nt, Human
ccacugguucuucuu

SEQ ID NO: 2699881 - RNA, 19 nt, Human
ccagccugagcgacaguga

SEQ ID NO: 2699882 - RNA, 20 nt, Human
ccagguagaggguguguaag

SEQ ID NO: 2699883 - RNA, 18 nt, Human
ccauccugaggcuccacu

SEQ ID NO: 2699884 - RNA, 20 nt, Human
ccauccugaggcuccacuug

SEQ ID NO: 2699885 - RNA, 13 nt, Human
ccaggugccaguu

SEQ ID NO: 2699886 - RNA, 12 nt, Human
ccaggugccagu

SEQ ID NO: 2699887 - RNA, 23 nt, Human
cccucuccugggcagcugccucc

SEQ ID NO: 2699888 - RNA, 20 nt, Human
cccucuccugggcagcugcc

SEQ ID NO: 2699889 - RNA, 21 nt, Human
cccucuccugggcagcugccu

SEQ ID NO: 2699890 - RNA, 22 nt, Human
cccucuccugggcagcugccuc

SEQ ID NO: 2699891 - RNA, 15 nt, Human
ccuaacgaaguaucc

SEQ ID NO: 2699892 - RNA, 15 nt, Human
ccccucggagaagag

SEQ ID NO: 2699893 - RNA, 13 nt, Human
ccccuccucugcu

SEQ ID NO: 2699894 - RNA, 14 nt, Human
ccccuccucugcuu

SEQ ID NO: 2699895 - RNA, 17 nt, Human
ccccuccucugcuugcc

SEQ ID NO: 2699896 - RNA, 17 nt, Human
cucauuuccaagcaagu

SEQ ID NO: 2699897 - RNA, 13 nt, Human
cucauuuccaagc

SEQ ID NO: 2699898 - RNA, 14 nt, Human
cucauuuccaagca

SEQ ID NO: 2699899 - RNA, 12 nt, Human
cucauuuccaag

SEQ ID NO: 2699900 - RNA, 23 nt, Human
cucauuuuuauaaugucccuuca

SEQ ID NO: 2699901 - RNA, 14 nt, Human
cuccccucggagaa

SEQ ID NO: 2699902 - RNA, 22 nt, Human
cucaggaaaucaaauaugcaaa

SEQ ID NO: 2699903 - RNA, 21 nt, Human
cucagaugcacaugagcuggc

SEQ ID NO: 2699904 - RNA, 13 nt, Human
cuauaauuuaaau

SEQ ID NO: 2699905 - RNA, 12 nt, Human
cuauaauuuaaa

SEQ ID NO: 2699906 - RNA, 19 nt, Human
cuaugaaauauuauguuaa

SEQ ID NO: 2699907 - RNA, 18 nt, Human
cuagaguuuagcuggaaa

SEQ ID NO: 2699908 - RNA, 19 nt, Human
cuagaguuuagcuggaaaa

SEQ ID NO: 2699909 - RNA, 15 nt, Human
cuauaggugcuacaa

SEQ ID NO: 2699910 - RNA, 14 nt, Human
cuaggaaauauuua

SEQ ID NO: 2699911 - RNA, 15 nt, Human
cuaggaaauauuuau

SEQ ID NO: 2699912 - RNA, 19 nt, Human
cuaggaaauauuuauuuua

SEQ ID NO: 2699913 - RNA, 20 nt, Human
cuaggaaauauuuauuuuaa

SEQ ID NO: 2699914 - RNA, 19 nt, Human
cuaaguaaaaccacagcag

SEQ ID NO: 2699915 - RNA, 18 nt, Human
cuaaguaaaaccacagca

SEQ ID NO: 2699916 - RNA, 14 nt, Human
cuaaguaaaaccac

SEQ ID NO: 2699917 - RNA, 21 nt, Human
cuaagcuucacuguaaaauaa

SEQ ID NO: 2699918 - RNA, 23 nt, Human
cuacacgagauacagaauuuuau

SEQ ID NO: 2699919 - RNA, 14 nt, Human
cuacacuaagagag

SEQ ID NO: 2699920 - RNA, 20 nt, Human
cgggaggcagagguugcagu

SEQ ID NO: 2699921 - RNA, 14 nt, Human
cuaagagagaauga

SEQ ID NO: 2699922 - RNA, 15 nt, Human
cuaagagagaaugag

SEQ ID NO: 2699923 - RNA, 19 nt, Human
cuaaauugacacuuaaaaa

SEQ ID NO: 2699924 - RNA, 17 nt, Human
ccuucggccuccauccu

SEQ ID NO: 2699925 - RNA, 16 nt, Human
ccuucggccuccaucc

SEQ ID NO: 2699926 - RNA, 18 nt, Human
ccuucggccuccauccug

SEQ ID NO: 2699927 - RNA, 15 nt, Human
ccuuggacucauuuu

SEQ ID NO: 2699928 - RNA, 13 nt, Human
ccugggcagcugc

SEQ ID NO: 2699929 - RNA, 14 nt, Human
ccugggcagcugcc

SEQ ID NO: 2699930 - RNA, 17 nt, Human
ccugccccugagcccau

SEQ ID NO: 2699931 - RNA, 13 nt, Human
ccugaaagaggaa

SEQ ID NO: 2699932 - RNA, 14 nt, Human
ccugaggcuccacu

SEQ ID NO: 2699933 - RNA, 13 nt, Human
ccugaggcuccac

SEQ ID NO: 2699934 - RNA, 16 nt, Human
gaaacacaacuauauu

SEQ ID NO: 2699935 - RNA, 11 nt, Human
gaaacauuugg

SEQ ID NO: 2699936 - RNA, 23 nt, Human
gaaacucguuaauuuguaguguu

SEQ ID NO: 2699937 - RNA, 14 nt, Human
gaaacccugucucu

SEQ ID NO: 2699938 - RNA, 17 nt, Human
gaaagagaacuuccaga

SEQ ID NO: 2699939 - RNA, 21 nt, Human
gaaagaggaaugaaguacuca

SEQ ID NO: 2699940 - RNA, 20 nt, Human
gaaagaggcagcuugaaacu

SEQ ID NO: 2699941 - RNA, 17 nt, Human
gaaagcagaacagugau

SEQ ID NO: 2699942 - RNA, 22 nt, Human
gaaagcagaacagugauuacca

SEQ ID NO: 2699943 - RNA, 14 nt, Human
gaaagcagggacuu

SEQ ID NO: 2699944 - RNA, 18 nt, Human
gaaaaucuuauaauuuaa

SEQ ID NO: 2699945 - RNA, 22 nt, Human
gaaaaucuacacuccagugaga

SEQ ID NO: 2699946 - RNA, 18 nt, Human
gaaaauauuuguaucaca

SEQ ID NO: 2699947 - RNA, 19 nt, Human
cuugaguuuaaauuguaau

SEQ ID NO: 2699948 - RNA, 23 nt, Human
cuugucaauaaaauccauacauu

SEQ ID NO: 2699949 - RNA, 14 nt, Human
cuuauuucauuucu

SEQ ID NO: 2699950 - RNA, 15 nt, Human
cuuauuuccucauuu

SEQ ID NO: 2699951 - RNA, 15 nt, Human
cuuauuucauuucuu

SEQ ID NO: 2699952 - RNA, 20 nt, Human
cuuagaugcaguucugaaga

SEQ ID NO: 2699953 - RNA, 22 nt, Human
cuuagaugcaguucugaagaag

SEQ ID NO: 2699954 - RNA, 18 nt, Human
cuucugucuucacaacag

SEQ ID NO: 2699955 - RNA, 22 nt, Human
cuucugucuucacaacagauua

SEQ ID NO: 2699956 - RNA, 21 nt, Human
cuucugucuucacaacagauu

SEQ ID NO: 2699957 - RNA, 20 nt, Human
cugcccucuccugggcagcu

SEQ ID NO: 2699958 - RNA, 21 nt, Human
cugcccucuccugggcagcug

SEQ ID NO: 2699959 - RNA, 16 nt, Human
cugcccucuccugggc

SEQ ID NO: 2699960 - RNA, 18 nt, Human
cugcccucuccugggcag

SEQ ID NO: 2699961 - RNA, 19 nt, Human
cugcccucuccugggcagc

SEQ ID NO: 2699962 - RNA, 13 nt, Human
cugccuccccucc

SEQ ID NO: 2699963 - RNA, 18 nt, Human
cugcugaaacaacaaaua

SEQ ID NO: 2699964 - RNA, 20 nt, Human
cuggcacaguuuucugagaa

SEQ ID NO: 2699965 - RNA, 22 nt, Human
cuggcacaguuuucugagaaag

SEQ ID NO: 2699966 - RNA, 21 nt, Human
cuggcacaguuuucugagaaa

SEQ ID NO: 2699967 - RNA, 22 nt, Human
cuggccuucggccuccauccug

SEQ ID NO: 2699968 - RNA, 23 nt, Human
cuggccuucggccuccauccuga

SEQ ID NO: 2699969 - RNA, 16 nt, Human
cuggagcucugcccau

SEQ ID NO: 2699970 - RNA, 13 nt, Human
cuggagcucugcc

SEQ ID NO: 2699971 - RNA, 12 nt, Human
cuggagcucugc

SEQ ID NO: 2699972 - RNA, 20 nt, Human
cuguauuuuaaaagaaugau

SEQ ID NO: 2699973 - RNA, 19 nt, Human
cuguauuuuaaaagaauga

SEQ ID NO: 2699974 - RNA, 22 nt, Human
cuguauuuuaaaagaaugauua

SEQ ID NO: 2699975 - RNA, 20 nt, Human
cugucuacacuaagagagaa

SEQ ID NO: 2699976 - RNA, 23 nt, Human
cuguaaucacagcuacuugggag

SEQ ID NO: 2699977 - RNA, 22 nt, Human
cugggggggauuguaaaauggu

SEQ ID NO: 2699978 - RNA, 20 nt, Human
cuguuaaaagaugaaaauau

SEQ ID NO: 2699979 - RNA, 23 nt, Human
cuguuaaaagaugaaaauauuug

SEQ ID NO: 2699980 - RNA, 21 nt, Human
cuguuaaaagaugaaaauauu

SEQ ID NO: 2699981 - RNA, 21 nt, Human
gaauugacccacaagaaauga

SEQ ID NO: 2699982 - RNA, 16 nt, Human
gaauugacccacaaga

SEQ ID NO: 2699983 - RNA, 16 nt, Human
gaauuggagcucgugg

SEQ ID NO: 2699984 - RNA, 15 nt, Human
gacaagcucacagac

SEQ ID NO: 2699985 - RNA, 16 nt, Human
gacaaggaaaaaauaa

SEQ ID NO: 2699986 - RNA, 22 nt, Human
gacccacaagaaaugaaagcag

SEQ ID NO: 2699987 - RNA, 15 nt, Human
gacccacaagaaaug

SEQ ID NO: 2699988 - RNA, 16 nt, Human
gacccaaaaggcagaa

SEQ ID NO: 2699989 - RNA, 21 nt, Human
gaccacugcagaagacaguau

SEQ ID NO: 2699990 - RNA, 16 nt, Human
gacaugggacauuugc

SEQ ID NO: 2699991 - RNA, 18 nt, Human
gacagggaggacgcucuc

SEQ ID NO: 2699992 - RNA, 17 nt, Human
gacagggaggacgcucu

SEQ ID NO: 2699993 - RNA, 20 nt, Human
gacauagaauuaacacauga

SEQ ID NO: 2699994 - RNA, 19 nt, Human
gacagagccccacccucag

SEQ ID NO: 2699995 - RNA, 16 nt, Human
gacuggauaguccguc

SEQ ID NO: 2699996 - RNA, 14 nt, Human
gacugcauuauauu

SEQ ID NO: 2699997 - RNA, 16 nt, Human
gacugcauuauauuua

SEQ ID NO: 2699998 - RNA, 15 nt, Human
gacuccaaagaaaug

SEQ ID NO: 2699999 - RNA, 12 nt, Human
gacuccaaagaa

SEQ ID NO: 2700000 - RNA, 11 nt, Human
gacuccaaaga

SEQ ID NO: 2700001 - RNA, 21 nt, Human
gacucauuuuaaaaaauggaa

SEQ ID NO: 2700002 - RNA, 18 nt, Human
gacuccaaagaaauguaa

SEQ ID NO: 2700003 - RNA, 16 nt, Human
gacuccaaagaaaugu

SEQ ID NO: 2700004 - RNA, 24 nt, Human
gacuucuaaguaaaaccacagcag

SEQ ID NO: 2700005 - RNA, 23 nt, Human
gacuucuaaguaaaaccacagca

SEQ ID NO: 2700006 - RNA, 19 nt, Human
gacuucuaaguaaaaccac

SEQ ID NO: 2700007 - RNA, 23 nt, Human
gacuucugucuucacaacagauu

SEQ ID NO: 2700008 - RNA, 20 nt, Human
gacuucugucuucacaacag

SEQ ID NO: 2700009 - RNA, 18 nt, Human
gacuucuaaguaaaacca

SEQ ID NO: 2700010 - RNA, 17 nt, Human
gacuucuaaguaaaacc

SEQ ID NO: 2700011 - RNA, 16 nt, Human
gacuucuaaguaaaac

SEQ ID NO: 2700012 - RNA, 13 nt, Human
gagaagagcuguu

SEQ ID NO: 2700013 - RNA, 17 nt, Human
gagaaugagagacacac

SEQ ID NO: 2700014 - RNA, 22 nt, Human
gagaacuuccagauccuggaaa

SEQ ID NO: 2700015 - RNA, 23 nt, Human
gagaacuuccagauccuggaaau

SEQ ID NO: 2700016 - RNA, 21 nt, Human
gagaaccuagggugauauuaa

SEQ ID NO: 2700017 - RNA, 22 nt, Human
gagaaccuagggugauauuaac

SEQ ID NO: 2700018 - RNA, 20 nt, Human
gagaaugagagacacacuga

SEQ ID NO: 2700019 - RNA, 21 nt, Human
gagaaugagagacacacugaa

SEQ ID NO: 2700020 - RNA, 20 nt, Human
gagacagcucugcauacuca

SEQ ID NO: 2700021 - RNA, 12 nt, Human
gagcccugucuc

SEQ ID NO: 2700022 - RNA, 22 nt, Human
gauaaauggcuuccuggcaaua

SEQ ID NO: 2700023 - RNA, 15 nt, Human
gcacugacuucuaag

SEQ ID NO: 2700024 - RNA, 18 nt, Human
gcacugacuucuaaguaa

SEQ ID NO: 2700025 - RNA, 13 nt, Human
gcacacugucugc

SEQ ID NO: 2700026 - RNA, 18 nt, Human
gaugcuagaacucccuuu

SEQ ID NO: 2700027 - RNA, 22 nt, Human
gaugcuagaacucccuuucaac

SEQ ID NO: 2700028 - RNA, 20 nt, Human
gaugcuagaacucccuuuca

SEQ ID NO: 2700029 - RNA, 16 nt, Human
gcaaauugucacagga

SEQ ID NO: 2700030 - RNA, 15 nt, Human
ggauuguaaaauggu

SEQ ID NO: 2700031 - RNA, 14 nt, Human
ggcauggcugggaa

SEQ ID NO: 2700032 - RNA, 14 nt, Human
ggacgcucucuggc

SEQ ID NO: 2700033 - RNA, 13 nt, Human
ggacgcucucugg

SEQ ID NO: 2700034 - RNA, 19 nt, Human
ggagaaucacuugaacccg

SEQ ID NO: 2700035 - RNA, 15 nt, Human
ggagaaucacuugaa

SEQ ID NO: 2700036 - RNA, 23 nt, Human
ggaauuucucccagucauuuaau

SEQ ID NO: 2700037 - RNA, 16 nt, Human
ggaauuggagcucgug

SEQ ID NO: 2700038 - RNA, 22 nt, Human
ggaauuggagcucgugggacag

SEQ ID NO: 2700039 - RNA, 20 nt, Human
ggaagugacgguuuaauggg

SEQ ID NO: 2700040 - RNA, 23 nt, Human
ggaaagggauuuucagcccucag

SEQ ID NO: 2700041 - RNA, 17 nt, Human
ggaaaucaaauaugcaa

SEQ ID NO: 2700042 - RNA, 20 nt, Human
gcugucuacacuaagagaga

SEQ ID NO: 2700043 - RNA, 17 nt, Human
gccuaagugcagccccg

SEQ ID NO: 2700044 - RNA, 22 nt, Human
gccuauauuuuuuguuaaauga

SEQ ID NO: 2700045 - RNA, 12 nt, Human
gcccucuccugg

SEQ ID NO: 2700046 - RNA, 13 nt, Human
gcccucuccuggg

SEQ ID NO: 2700047 - RNA, 14 nt, Human
gcccucuccugggc

SEQ ID NO: 2700048 - RNA, 22 nt, Human
gcccucuccugggcagcugccu

SEQ ID NO: 2700049 - RNA, 23 nt, Human
gcccucuccugggcagcugccuc

SEQ ID NO: 2700050 - RNA, 14 nt, Human
gcuaagcauuccaa

SEQ ID NO: 2700051 - RNA, 17 nt, Human
gcuaagcaaaaugugau

SEQ ID NO: 2700052 - RNA, 11 nt, Human
gcucucuggcc

SEQ ID NO: 2700053 - RNA, 13 nt, Human
gcucucuggccuu

SEQ ID NO: 2700054 - RNA, 12 nt, Human
gcucucuggccu

SEQ ID NO: 2700055 - RNA, 20 nt, Human
gcucucuggccuucggccuc

SEQ ID NO: 2700056 - RNA, 19 nt, Human
gcucucuggccuucggccu

SEQ ID NO: 2700057 - RNA, 15 nt, Human
gcucucuggccuucg

SEQ ID NO: 2700058 - RNA, 14 nt, Human
gcucucuggccuuc

SEQ ID NO: 2700059 - RNA, 19 nt, Human
guaaugauaacuggaaacu

SEQ ID NO: 2700060 - RNA, 15 nt, Human
guaauuggaaaggca

SEQ ID NO: 2700061 - RNA, 15 nt, Human
guaccgcaaugugac

SEQ ID NO: 2700062 - RNA, 15 nt, Human
guagaggagaaacug

SEQ ID NO: 2700063 - RNA, 23 nt, Human
guacuuuauuuucuauaauuuaa

SEQ ID NO: 2700064 - RNA, 18 nt, Human
guaagggaaacugccagc

SEQ ID NO: 2700065 - RNA, 17 nt, Human
guaagggaaacugccag

SEQ ID NO: 2700066 - RNA, 18 nt, Human
guaaaaccacagcaguug

SEQ ID NO: 2700067 - RNA, 16 nt, Human
guaaaaccacagcagu

SEQ ID NO: 2700068 - RNA, 15 nt, Human
guaaaaccacagcag

SEQ ID NO: 2700069 - RNA, 14 nt, Human
guaaaaccacagca

SEQ ID NO: 2700070 - RNA, 23 nt, Human
guaaaaccacagcaguugaaaag

SEQ ID NO: 2700071 - RNA, 15 nt, Human
gguagacacacauga

SEQ ID NO: 2700072 - RNA, 22 nt, Human
gguagacacacaugaaguccaa

SEQ ID NO: 2700073 - RNA, 22 nt, Human
gguacuucaaauccuugaagau

SEQ ID NO: 2700074 - RNA, 21 nt, Human
ggguagccacuggacugacga

SEQ ID NO: 2700075 - RNA, 19 nt, Human
ggugcuacaaaaacacagc

SEQ ID NO: 2700076 - RNA, 22 nt, Human
guauuucuaugaaauauuaugu

SEQ ID NO: 2700077 - RNA, 17 nt, Human
guauuucuaugaaauau

SEQ ID NO: 2700078 - RNA, 16 nt, Human
guauuuuaaaagaaug

SEQ ID NO: 2700079 - RNA, 17 nt, Human
guauuuuaaaagaauga

SEQ ID NO: 2700080 - RNA, 14 nt, Human
gucaccucauggaa

SEQ ID NO: 2700081 - RNA, 15 nt, Human
gucaauaaaauccau

SEQ ID NO: 2700082 - RNA, 21 nt, Human
gucaauaaaauccauacauuu

SEQ ID NO: 2700083 - RNA, 20 nt, Human
gucccagccagcaguucaga

SEQ ID NO: 2700084 - RNA, 23 nt, Human
gucuacacuaagagagaaugaga

SEQ ID NO: 2700085 - RNA, 17 nt, Human
gucuacacuaagagaga

SEQ ID NO: 2700086 - RNA, 18 nt, Human
guccugucggagcccugu

SEQ ID NO: 2700087 - RNA, 20 nt, Human
guccugucggagcccugucu

SEQ ID NO: 2700088 - RNA, 21 nt, Human
guccugucggagcccugucuc

SEQ ID NO: 2700089 - RNA, 18 nt, Human
gugcaaauugucacagga

SEQ ID NO: 2700090 - RNA, 20 nt, Human
gugaaacucguuaauuugua

SEQ ID NO: 2700091 - RNA, 19 nt, Human
gugaaagaaaauaacaaua

SEQ ID NO: 2700092 - RNA, 16 nt, Human
gugagcagucaggaaa

SEQ ID NO: 2700093 - RNA, 14 nt, Human
gugagcuacaaaug

SEQ ID NO: 2700094 - RNA, 17 nt, Human
ucaaacauauauaacaa

SEQ ID NO: 2700095 - RNA, 22 nt, Human
ucaaacagucucaggaaaucaa

SEQ ID NO: 2700096 - RNA, 16 nt, Human
ucaaauccuugaagau

SEQ ID NO: 2700097 - RNA, 15 nt, Human
ucaaauccuugaaga

SEQ ID NO: 2700098 - RNA, 19 nt, Human
ucaaauaugcaaagcacug

SEQ ID NO: 2700099 - RNA, 18 nt, Human
ucaaauaugcaaagcacu

SEQ ID NO: 2700100 - RNA, 17 nt, Human
ucaaauaugcaaagcac

SEQ ID NO: 2700101 - RNA, 16 nt, Human
ucaaauaugcaaagca

SEQ ID NO: 2700102 - RNA, 22 nt, Human
ucaacuccaaacugacucuuaa

SEQ ID NO: 2700103 - RNA, 12 nt, Human
ucacauuuaaau

SEQ ID NO: 2700104 - RNA, 22 nt, Human
ucacaagacccaaaaggcagaa

SEQ ID NO: 2700105 - RNA, 14 nt, Human
ucaauaaaauccau

SEQ ID NO: 2700106 - RNA, 17 nt, Human
uauuguuuaaaaucauu

SEQ ID NO: 2700107 - RNA, 16 nt, Human
uauuguuuaaaaucau

SEQ ID NO: 2700108 - RNA, 15 nt, Human
uauuguuuaaaauca

SEQ ID NO: 2700109 - RNA, 14 nt, Human
uauuuauuacugua

SEQ ID NO: 2700110 - RNA, 13 nt, Human
uauuucuaugaaa

SEQ ID NO: 2700111 - RNA, 13 nt, Human
uauuuauuacugu

SEQ ID NO: 2700112 - RNA, 14 nt, Human
uauuucuaugaaau

SEQ ID NO: 2700113 - RNA, 15 nt, Human
uauuucuaugaaaua

SEQ ID NO: 2700114 - RNA, 20 nt, Human
uauuguuuaaaaucauuucu

SEQ ID NO: 2700115 - RNA, 16 nt, Human
uauuauguuaaaacug

SEQ ID NO: 2700116 - RNA, 17 nt, Human
uauuauauuuacaaaug

SEQ ID NO: 2700117 - RNA, 19 nt, Human
uauguuagugcaaauuguc

SEQ ID NO: 2700118 - RNA, 12 nt, Human
uauguuaaaacu

SEQ ID NO: 2700119 - RNA, 19 nt, Human
uauggaggcuuugcauaga

SEQ ID NO: 2700120 - RNA, 17 nt, Human
uauguucuaagaaguga

SEQ ID NO: 2700121 - RNA, 14 nt, Human
uauccuucagccug

SEQ ID NO: 2700122 - RNA, 15 nt, Human
uauccuucagccuga

SEQ ID NO: 2700123 - RNA, 23 nt, Human
uaugaauuacauuuguauaaaau

SEQ ID NO: 2700124 - RNA, 17 nt, Human
uaugaauuacauuugua

SEQ ID NO: 2700125 - RNA, 12 nt, Human
uaugcaaagcac

SEQ ID NO: 2700126 - RNA, 14 nt, Human
uaugcaaagcacug

SEQ ID NO: 2700127 - RNA, 13 nt, Human
uaugcaaagcacu

SEQ ID NO: 2700128 - RNA, 15 nt, Human
uaugcaaagcacuga

SEQ ID NO: 2700129 - RNA, 16 nt, Human
uaugauucccagccag

SEQ ID NO: 2700130 - RNA, 15 nt, Human
uaugcuucuguuuua

SEQ ID NO: 2700131 - RNA, 16 nt, Human
uaugcuucuguuuuau

SEQ ID NO: 2700132 - RNA, 13 nt, Human
uauaugcuucugu

SEQ ID NO: 2700133 - RNA, 13 nt, Human
uauauaacaaugc

SEQ ID NO: 2700134 - RNA, 13 nt, Human
uaguaucaaaaga

SEQ ID NO: 2700135 - RNA, 18 nt, Human
uaguauuucuaugaaaua

SEQ ID NO: 2700136 - RNA, 19 nt, Human
uaguauuucuaugaaauau

SEQ ID NO: 2700137 - RNA, 16 nt, Human
uaguauuucuaugaaa

SEQ ID NO: 2700138 - RNA, 13 nt, Human
uagucaaauugug

SEQ ID NO: 2700139 - RNA, 14 nt, Human
uagucaaauugugu

SEQ ID NO: 2700140 - RNA, 14 nt, Human
uagugcaaauuguc

SEQ ID NO: 2700141 - RNA, 15 nt, Human
uagugcaaauuguca

SEQ ID NO: 2700142 - RNA, 12 nt, Human
uaggaauugacc

SEQ ID NO: 2700143 - RNA, 18 nt, Human
uaggccaugggacaggga

SEQ ID NO: 2700144 - RNA, 16 nt, Human
uaggccaugggacagg

SEQ ID NO: 2700145 - RNA, 16 nt, Human
uaggucagugcaaaua

SEQ ID NO: 2700146 - RNA, 17 nt, Human
uccaaagaaauguaagg

SEQ ID NO: 2700147 - RNA, 14 nt, Human
uccaaagaaaugua

SEQ ID NO: 2700148 - RNA, 16 nt, Human
ucauuaggauggcuag

SEQ ID NO: 2700149 - RNA, 12 nt, Human
ucauagcagcuu

SEQ ID NO: 2700150 - RNA, 11 nt, Human
ucauagcagcu

SEQ ID NO: 2700151 - RNA, 17 nt, Human
ucaucaaugaaugaaug

SEQ ID NO: 2700152 - RNA, 17 nt, Human
uccacuuggucugugag

SEQ ID NO: 2700153 - RNA, 21 nt, Human
uccacuuggucugugagaugc

SEQ ID NO: 2700154 - RNA, 23 nt, Human
uccacuuggucugugagaugcua

SEQ ID NO: 2700155 - RNA, 20 nt, Human
uccaugggccauaugaaaag

SEQ ID NO: 2700156 - RNA, 15 nt, Human
uccauacauuugugu

SEQ ID NO: 2700157 - RNA, 19 nt, Human
uccagguagagggugugua

SEQ ID NO: 2700158 - RNA, 22 nt, Human
uccucauuuuuauaaugucccu

SEQ ID NO: 2700159 - RNA, 23 nt, Human
uccuagugaaagaggcagcuuga

SEQ ID NO: 2700160 - RNA, 14 nt, Human
uccuagugaaagag

SEQ ID NO: 2700161 - RNA, 20 nt, Human
ucccuucacaaacccagugu

SEQ ID NO: 2700162 - RNA, 20 nt, Human
uccugaggcuccacuugguc

SEQ ID NO: 2700163 - RNA, 19 nt, Human
uccugaggcuccacuuggu

SEQ ID NO: 2700164 - RNA, 18 nt, Human
uccugccccugagcccau

SEQ ID NO: 2700165 - RNA, 17 nt, Human
uccugccccugagccca

SEQ ID NO: 2700166 - RNA, 18 nt, Human
ucuaugaaauauuauguu

SEQ ID NO: 2700167 - RNA, 17 nt, Human
ucuacacuaagagagaa

SEQ ID NO: 2700168 - RNA, 12 nt, Human
ucggagaagagc

SEQ ID NO: 2700169 - RNA, 16 nt, Human
ucggagaagagcuguu

SEQ ID NO: 2700170 - RNA, 14 nt, Human
ucggagaagagcug

SEQ ID NO: 2700171 - RNA, 23 nt, Human
ucucaguccaugaagauguagag

SEQ ID NO: 2700172 - RNA, 12 nt, Human
ugacaagcucac

SEQ ID NO: 2700173 - RNA, 15 nt, Human
ugacaagcucacaga

SEQ ID NO: 2700174 - RNA, 20 nt, Human
ugacaagcucacagaccuuu

SEQ ID NO: 2700175 - RNA, 20 nt, Human
ugaccacugcagaagacagu

SEQ ID NO: 2700176 - RNA, 16 nt, Human
ugacaugggacauuug

SEQ ID NO: 2700177 - RNA, 17 nt, Human
ugacaugggacauuugc

SEQ ID NO: 2700178 - RNA, 18 nt, Human
ugacaugggacauuugcu

SEQ ID NO: 2700179 - RNA, 11 nt, Human
ugaaguccaag

SEQ ID NO: 2700180 - RNA, 13 nt, Human
ugaaguccaagca

SEQ ID NO: 2700181 - RNA, 15 nt, Human
ugaauuacauuugua

SEQ ID NO: 2700182 - RNA, 16 nt, Human
ugaauuacauuuguau

SEQ ID NO: 2700183 - RNA, 18 nt, Human
ugaauuacauuuguauaa

SEQ ID NO: 2700184 - RNA, 20 nt, Human
ugaaugaauggcuaagcaaa

SEQ ID NO: 2700185 - RNA, 15 nt, Human
ugaaagguacuucaa

SEQ ID NO: 2700186 - RNA, 16 nt, Human
ugaaagguacuucaaa

SEQ ID NO: 2700187 - RNA, 18 nt, Human
ugaaagaggcagcuugaa

SEQ ID NO: 2700188 - RNA, 22 nt, Human
ugaaacaacaaauaggaauugu

SEQ ID NO: 2700189 - RNA, 19 nt, Human
ugaaauggacuuuuguaca

SEQ ID NO: 2700190 - RNA, 16 nt, Human
ugaaauauugacuuuu

SEQ ID NO: 2700191 - RNA, 17 nt, Human
ucuuucacauuuaaaua

SEQ ID NO: 2700192 - RNA, 19 nt, Human
ucuuuccacagaagcucca

SEQ ID NO: 2700193 - RNA, 12 nt, Human
ucuuugccaagu

SEQ ID NO: 2700194 - RNA, 16 nt, Human
ugauuaccagggacug

SEQ ID NO: 2700195 - RNA, 22 nt, Human
ugauguuuagaaacacaacuau

SEQ ID NO: 2700196 - RNA, 13 nt, Human
ugauuauauguca

SEQ ID NO: 2700197 - RNA, 17 nt, Human
ugauuaugaauuacauu

SEQ ID NO: 2700198 - RNA, 19 nt, Human
ugauuaugaauuacauuug

SEQ ID NO: 2700199 - RNA, 21 nt, Human
ugauuaugaauuacauuugua

SEQ ID NO: 2700200 - RNA, 22 nt, Human
ugauuaugaauuacauuuguau

SEQ ID NO: 2700201 - RNA, 15 nt, Human
ugauggugguauguu

SEQ ID NO: 2700202 - RNA, 20 nt, Human
ugaugcuacaggauuugaaa

SEQ ID NO: 2700203 - RNA, 23 nt, Human
ugaugcuacaggauuugaaauug

SEQ ID NO: 2700204 - RNA, 17 nt, Human
ugaucuuuaaaauacac

SEQ ID NO: 2700205 - RNA, 14 nt, Human
ugaucuuuaaaaua

SEQ ID NO: 2700206 - RNA, 24 nt, Human
ugaucagcuuauugucuagugaaa

SEQ ID NO: 2700207 - RNA, 17 nt, Human
ugaucagcuuauugucu

SEQ ID NO: 2700208 - RNA, 16 nt, Human
ugagagugaacaaauu

SEQ ID NO: 2700209 - RNA, 13 nt, Human
ugagccccaaaag

SEQ ID NO: 2700210 - RNA, 16 nt, Human
ugauaacuggaaacuu

SEQ ID NO: 2700211 - RNA, 20 nt, Human
ugaggcuccacuuggucugu

SEQ ID NO: 2700212 - RNA, 18 nt, Human
ugaggcuccacuuggucu

SEQ ID NO: 2700213 - RNA, 17 nt, Human
ugcuagaacucccuuuc

SEQ ID NO: 2700214 - RNA, 15 nt, Human
ugcuagaacucccuu

SEQ ID NO: 2700215 - RNA, 14 nt, Human
ugcuagaacucccu

SEQ ID NO: 2700216 - RNA, 13 nt, Human
ugcuagaacuccc

SEQ ID NO: 2700217 - RNA, 20 nt, Human
ugcugggggggauuguaaaa

SEQ ID NO: 2700218 - RNA, 22 nt, Human
ugcaucaauuuuucuuauuuca

SEQ ID NO: 2700219 - RNA, 12 nt, Human
ugcaguucugaa

SEQ ID NO: 2700220 - RNA, 13 nt, Human
ugcaucagcugcu

SEQ ID NO: 2700221 - RNA, 16 nt, Human
ugccacuaaauugaca

SEQ ID NO: 2700222 - RNA, 15 nt, Human
uggcacuaguauuuc

SEQ ID NO: 2700223 - RNA, 20 nt, Human
uggcaauagucaaauugugu

SEQ ID NO: 2700224 - RNA, 13 nt, Human
ugguauguuuuca

SEQ ID NO: 2700225 - RNA, 17 nt, Human
uggucacaggaaguaga

SEQ ID NO: 2700226 - RNA, 22 nt, Human
uggucacaggaaguagaggagg

SEQ ID NO: 2700227 - RNA, 16 nt, Human
uggucccagccagcag

SEQ ID NO: 2700228 - RNA, 16 nt, Human
uggugauuuagcagga

SEQ ID NO: 2700229 - RNA, 22 nt, Human
uggugauuuagcaggaagcugu

SEQ ID NO: 2700230 - RNA, 17 nt, Human
ugggcagcugccucccc

SEQ ID NO: 2700231 - RNA, 19 nt, Human
ugggcagcugccuccccuc

SEQ ID NO: 2700232 - RNA, 13 nt, Human
ugggcagcugccu

SEQ ID NO: 2700233 - RNA, 14 nt, Human
ugggcagcugccuc

SEQ ID NO: 2700234 - RNA, 15 nt, Human
ugggcagcugccucc

SEQ ID NO: 2700235 - RNA, 19 nt, Human
uuaaaauacacacucaaau

SEQ ID NO: 2700236 - RNA, 18 nt, Human
uuaaaagaugaaaauauu

SEQ ID NO: 2700237 - RNA, 15 nt, Human
uuaaaagaugaaaau

SEQ ID NO: 2700238 - RNA, 22 nt, Human
uuaaaagaauauuuuaacuucc

SEQ ID NO: 2700239 - RNA, 21 nt, Human
uuaaaagaauauuuuaacuuc

SEQ ID NO: 2700240 - RNA, 19 nt, Human
uguuucaaacauauauaac

SEQ ID NO: 2700241 - RNA, 21 nt, Human
uguuucaaacauauauaacaa

SEQ ID NO: 2700242 - RNA, 22 nt, Human
uguuucaaacauauauaacaau

SEQ ID NO: 2700243 - RNA, 18 nt, Human
uuaggauguugaaaaagu

SEQ ID NO: 2700244 - RNA, 20 nt, Human
uuagaugcaguucugaagaa

SEQ ID NO: 2700245 - RNA, 21 nt, Human
uuagaugcaguucugaagaag

SEQ ID NO: 2700246 - RNA, 12 nt, Human
uuagcuggaaaa

SEQ ID NO: 2700247 - RNA, 13 nt, Human
uuagcuggaaaag

SEQ ID NO: 2700248 - RNA, 19 nt, Human
uuagaaacacaacuauauu

SEQ ID NO: 2700249 - RNA, 17 nt, Human
uuacuaguuucccuugc

SEQ ID NO: 2700250 - RNA, 17 nt, Human
uucccuugaugaagaag

SEQ ID NO: 2700251 - RNA, 20 nt, Human
uuccuuggacucauuuuaaa

SEQ ID NO: 2700252 - RNA, 17 nt, Human
uuccuuggacucauuuu

SEQ ID NO: 2700253 - RNA, 19 nt, Human
uuccagauccuggaaauca

SEQ ID NO: 2700254 - RNA, 17 nt, Human
uucaaauccuugaagau

SEQ ID NO: 2700255 - RNA, 17 nt, Human
uuauuuuaauaauguuu

SEQ ID NO: 2700256 - RNA, 15 nt, Human
uuauugucuagugaa

SEQ ID NO: 2700257 - RNA, 15 nt, Human
uuauuuuaauaaugu

SEQ ID NO: 2700258 - RNA, 16 nt, Human
uuauuuuaauaauguu

SEQ ID NO: 2700259 - RNA, 13 nt, Human
uucagagcugccc

SEQ ID NO: 2700260 - RNA, 14 nt, Human
uucagagcugcccu

SEQ ID NO: 2700261 - RNA, 20 nt, Human
uucagacauagaauuaacac

SEQ ID NO: 2700262 - RNA, 16 nt, Human
uucagacauagaauua

SEQ ID NO: 2700263 - RNA, 17 nt, Human
uuauuacuguaagaaaa

SEQ ID NO: 2700264 - RNA, 18 nt, Human
uuauuacuguaagaaaau

SEQ ID NO: 2700265 - RNA, 16 nt, Human
uuauuacuguaagaaa

SEQ ID NO: 2700266 - RNA, 17 nt, Human
uuauggcuauaggugcu

SEQ ID NO: 2700267 - RNA, 21 nt, Human
uuauggcacuaguauuucuau

SEQ ID NO: 2700268 - RNA, 13 nt, Human
uuuaauaaaccau

SEQ ID NO: 2700269 - RNA, 14 nt, Human
uuuaauaauguuuc

SEQ ID NO: 2700270 - RNA, 15 nt, Human
uuuaauaauguuuca

SEQ ID NO: 2700271 - RNA, 19 nt, Human
uuuaauaauguuucaaaca

SEQ ID NO: 2700272 - RNA, 13 nt, Human
uuuacagagacag

SEQ ID NO: 2700273 - RNA, 19 nt, Human
uuuaaaauacacacucaaa

SEQ ID NO: 2700274 - RNA, 16 nt, Human
uuuaaaaucauuucug

SEQ ID NO: 2700275 - RNA, 14 nt, Human
uuuaaaagaaugau

SEQ ID NO: 2700276 - RNA, 17 nt, Human
uuuaaaagaaugauuau

SEQ ID NO: 2700277 - RNA, 12 nt, Human
uuuaaaaugucu

SEQ ID NO: 2700278 - RNA, 17 nt, Human
uuguuuaaaaucauuuc

SEQ ID NO: 2700279 - RNA, 18 nt, Human
uuguuuaaaaucauuucu

SEQ ID NO: 2700280 - RNA, 21 nt, Human
uuugaaauuguauuacaaauc

SEQ ID NO: 2700281 - RNA, 18 nt, Human
uuugguaaggggaauuga

SEQ ID NO: 2700282 - RNA, 12 nt, Human
uuucucuaggaa

SEQ ID NO: 2700283 - RNA, 21 nt, Human
uugaaaaucuuauaauuuaaa

SEQ ID NO: 2700284 - RNA, 18 nt, Human
uucuuuccacagaagcuc

SEQ ID NO: 2700285 - RNA, 19 nt, Human
uucuuaggguuaugauuaa

SEQ ID NO: 2700286 - RNA, 24 nt, Human
uucuaaguaaaaccacagcaguug

SEQ ID NO: 2700287 - RNA, 23 nt, Human
uugcagcucuccccuucucugua

SEQ ID NO: 2700288 - RNA, 22 nt, Human
uugccaucccucccuccaccuc

SEQ ID NO: 2700289 - RNA, 23 nt, Human
uugccaucccucccuccaccucc

SEQ ID NO: 2700290 - RNA, 14 nt, Human
uugccaucccuccc

SEQ ID NO: 2700291 - RNA, 16 nt, Human
uugccaucccucccuc

SEQ ID NO: 2700292 - RNA, 17 nt, Human
uugccaucccucccucc

SEQ ID NO: 2700293 - RNA, 18 nt, Human
uugccaucccucccucca

SEQ ID NO: 2700294 - RNA, 13 nt, Human
uugccaucccucc

SEQ ID NO: 2700295 - RNA, 20 nt, Human
uugauaugccuuuucccaac

SEQ ID NO: 2700296 - RNA, 13 nt, Human
uuguaaaauggug

SEQ ID NO: 2700297 - RNA, 12 nt, Human
uuguaaaauggu

SEQ ID NO: 2700298 - RNA, 15 nt, Human
uuggucugugagaug

SEQ ID NO: 2700299 - RNA, 20 nt, Human
uugguaaggggaauugagga

SEQ ID NO: 2700300 - RNA, 20 nt, Human
uuguaaaauggugugaccac

SEQ ID NO: 2700301 - RNA, 16 nt, Human
uuguaccgcaauguga

SEQ ID NO: 2700302 - RNA, 18 nt, Human
uugcuaagcauuccaacu

SEQ ID NO: 2700303 - RNA, 16 nt, Human
uugcuaagcauuccaa

SEQ ID NO: 2700304 - RNA, 22 nt, Human
cucuuagaugcaguucugaaga

SEQ ID NO: 2700305 - RNA, 21 nt, Human
cucuuagaugcaguucugaag

SEQ ID NO: 2700306 - RNA, 16 nt, Human
cucuccccuucucugu

SEQ ID NO: 2700307 - RNA, 15 nt, Human
cugaaacaacaaaua

SEQ ID NO: 2700308 - RNA, 14 nt, Human
cucguuaauuugua

SEQ ID NO: 2700309 - RNA, 21 nt, Human
cuccucugcuugccaucccuc

SEQ ID NO: 2700310 - RNA, 22 nt, Human
cuccucugcuugccaucccucc

SEQ ID NO: 2700311 - RNA, 15 nt, Human
cuccucugcuugcca

SEQ ID NO: 2700312 - RNA, 16 nt, Human
cuccucugcuugccau

SEQ ID NO: 2700313 - RNA, 17 nt, Human
cuccucugcuugccauc

SEQ ID NO: 2700314 - RNA, 20 nt, Human
cuccucugcuugccaucccu

SEQ ID NO: 2700315 - RNA, 22 nt, Human
cuccugggcagcugccuccccu

SEQ ID NO: 2700316 - RNA, 18 nt, Human
cuccugggcagcugccuc

SEQ ID NO: 2700317 - RNA, 19 nt, Human
cuccugggcagcugccucc

SEQ ID NO: 2700318 - RNA, 14 nt, Human
cuccugggcagcug

SEQ ID NO: 2700319 - RNA, 15 nt, Human
cuccugggcagcugc

SEQ ID NO: 2700320 - RNA, 16 nt, Human
cuccugggcagcugcc

SEQ ID NO: 2700321 - RNA, 17 nt, Human
cuccugggcagcugccu

SEQ ID NO: 2700322 - RNA, 12 nt, Human
cuccugggcagc

SEQ ID NO: 2700323 - RNA, 12 nt, Human
cuccucugcuug

SEQ ID NO: 2700324 - RNA, 14 nt, Human
cuccucugcuugcc

SEQ ID NO: 2700325 - RNA, 23 nt, Human
cuccacuuggucugugagaugcu

SEQ ID NO: 2700326 - RNA, 19 nt, Human
cuccccaugauguuuagaa

SEQ ID NO: 2700327 - RNA, 18 nt, Human
cucaguagucagacugga

SEQ ID NO: 2700328 - RNA, 15 nt, Human
cuccacuuggucugu

SEQ ID NO: 2700329 - RNA, 13 nt, Human
cuccacuuggucu

SEQ ID NO: 2700330 - RNA, 22 nt, Human
cuccacuuggucugugagaugc

SEQ ID NO: 2700331 - RNA, 21 nt, Human
cuccacuuggucugugagaug

SEQ ID NO: 2700332 - RNA, 17 nt, Human
cuccacuuggucuguga

SEQ ID NO: 2700333 - RNA, 16 nt, Human
cuccacuuggucugug

SEQ ID NO: 2700334 - RNA, 22 nt, Human
cguggugauuuagcaggaagcu

SEQ ID NO: 2700335 - RNA, 18 nt, Human
cgcaggcccccaggugcc

SEQ ID NO: 2700336 - RNA, 17 nt, Human
cucaaaacugcacuguc

SEQ ID NO: 2700337 - RNA, 23 nt, Human
cucaaaauaccaugccauuuaaa

SEQ ID NO: 2700338 - RNA, 15 nt, Human
cuacaaaaacacagc

SEQ ID NO: 2700339 - RNA, 18 nt, Human
cuacaaaaacacagcaag

SEQ ID NO: 2700340 - RNA, 17 nt, Human
cuacaaaaacacagcaa

SEQ ID NO: 2700341 - RNA, 16 nt, Human
cuacaaaaacacagca

SEQ ID NO: 2700342 - RNA, 18 nt, Human
cuacauacuauggaauuu

SEQ ID NO: 2700343 - RNA, 18 nt, Human
cuacaugagguacugaga

SEQ ID NO: 2700344 - RNA, 20 nt, Human
cuacaugagguacugagagu

SEQ ID NO: 2700345 - RNA, 20 nt, Human
cuaaguaaaaccacagcagu

SEQ ID NO: 2700346 - RNA, 20 nt, Human
cgugugugugcguccugucg

SEQ ID NO: 2700347 - RNA, 23 nt, Human
cuaaguaaaaccacagcaguuga

SEQ ID NO: 2700348 - RNA, 22 nt, Human
cuaaguaaaaccacagcaguug

SEQ ID NO: 2700349 - RNA, 13 nt, Human
cuagaacucccuu

SEQ ID NO: 2700350 - RNA, 12 nt, Human
cuagaacucccu

SEQ ID NO: 2700351 - RNA, 22 nt, Human
ccugucggagcccugucuccuc

SEQ ID NO: 2700352 - RNA, 16 nt, Human
ccugucggagcccugu

SEQ ID NO: 2700353 - RNA, 17 nt, Human
ccugucggagcccuguc

SEQ ID NO: 2700354 - RNA, 21 nt, Human
ccugucggagcccugucuccu

SEQ ID NO: 2700355 - RNA, 15 nt, Human
ccuguaaucacagcu

SEQ ID NO: 2700356 - RNA, 23 nt, Human
ccucauggaauuggagcucgugg

SEQ ID NO: 2700357 - RNA, 21 nt, Human
ccucauuuuuauaaugucccu

SEQ ID NO: 2700358 - RNA, 19 nt, Human
cccugucuccucucucugu

SEQ ID NO: 2700359 - RNA, 22 nt, Human
ccauuuaaagcuuauuaaaacu

SEQ ID NO: 2700360 - RNA, 13 nt, Human
ccauacauuugug

SEQ ID NO: 2700361 - RNA, 14 nt, Human
ccauacauuugugu

SEQ ID NO: 2700362 - RNA, 18 nt, Human
ccccugcacuccagccug

SEQ ID NO: 2700363 - RNA, 17 nt, Human
ccaaauguucaucaaug

SEQ ID NO: 2700364 - RNA, 19 nt, Human
cauuuguauaaaauaauuu

SEQ ID NO: 2700365 - RNA, 20 nt, Human
cauuuguauaaaauaauuuu

SEQ ID NO: 2700366 - RNA, 17 nt, Human
cauuuguauaaaauaau

SEQ ID NO: 2700367 - RNA, 12 nt, Human
ccacagcaguug

SEQ ID NO: 2700368 - RNA, 18 nt, Human
ccacagcaguugaaaaga

SEQ ID NO: 2700369 - RNA, 17 nt, Human
ccacagcaguugaaaag

SEQ ID NO: 2700370 - RNA, 23 nt, Human
ccacagcaguugaaaagacucca

SEQ ID NO: 2700371 - RNA, 14 nt, Human
caugauguuuagaa

SEQ ID NO: 2700372 - RNA, 22 nt, Human
cagcuccccucggagaagagcu

SEQ ID NO: 2700373 - RNA, 21 nt, Human
cagcuccccucggagaagagc

SEQ ID NO: 2700374 - RNA, 12 nt, Human
cagauccuggaa

SEQ ID NO: 2700375 - RNA, 16 nt, Human
cagagguugcagugag

SEQ ID NO: 2700376 - RNA, 17 nt, Human
cagagguugcagugagc

SEQ ID NO: 2700377 - RNA, 13 nt, Human
cagcaguucagag

SEQ ID NO: 2700378 - RNA, 20 nt, Human
cagucugacuguuuccauca

SEQ ID NO: 2700379 - RNA, 19 nt, Human
cagucaccucauggaauug

SEQ ID NO: 2700380 - RNA, 15 nt, Human
cagucacauuccaag

SEQ ID NO: 2700381 - RNA, 16 nt, Human
cagucaccucauggaa

SEQ ID NO: 2700382 - RNA, 19 nt, Human
caggugccaguuauggcua

SEQ ID NO: 2700383 - RNA, 20 nt, Human
auuucuaugaaauauuaugu

SEQ ID NO: 2700384 - RNA, 15 nt, Human
auuucuaugaaauau

SEQ ID NO: 2700385 - RNA, 18 nt, Human
auuucuaugaaauauuau

SEQ ID NO: 2700386 - RNA, 19 nt, Human
auuguuuaaaaucauuucu

SEQ ID NO: 2700387 - RNA, 13 nt, Human
auuguaaaauggu

SEQ ID NO: 2700388 - RNA, 17 nt, Human
auuguaaaugugcuuuu

SEQ ID NO: 2700389 - RNA, 15 nt, Human
auuguaaaugugcuu

SEQ ID NO: 2700390 - RNA, 14 nt, Human
auuguaaaugugcu

SEQ ID NO: 2700391 - RNA, 18 nt, Human
auucacaagacccaaaag

SEQ ID NO: 2700392 - RNA, 18 nt, Human
auugacuuuuuauggcac

SEQ ID NO: 2700393 - RNA, 17 nt, Human
auucuugccaaauauaa

SEQ ID NO: 2700394 - RNA, 15 nt, Human
caacacgagcaggcu

SEQ ID NO: 2700395 - RNA, 21 nt, Human
caacuaucucauuuccaagca

SEQ ID NO: 2700396 - RNA, 19 nt, Human
caacccaaauguucaucaa

SEQ ID NO: 2700397 - RNA, 20 nt, Human
cacuuggucugugagaugcu

SEQ ID NO: 2700398 - RNA, 17 nt, Human
cacuuggucugugagau

SEQ ID NO: 2700399 - RNA, 23 nt, Human
caccucaaaauaccaugccauuu

SEQ ID NO: 2700400 - RNA, 21 nt, Human
caccuacaugagguacugaga

SEQ ID NO: 2700401 - RNA, 13 nt, Human
caccuugcagcuc

SEQ ID NO: 2700402 - RNA, 15 nt, Human
caccuugcagcucuc

SEQ ID NO: 2700403 - RNA, 22 nt, Human
caccuugcagcucuccccuucu

SEQ ID NO: 2700404 - RNA, 14 nt, Human
caaguauuagaaua

SEQ ID NO: 2700405 - RNA, 20 nt, Human
caaguauuagaauaccacag

SEQ ID NO: 2700406 - RNA, 12 nt, Human
caauauuucaga

SEQ ID NO: 2700407 - RNA, 20 nt, Human
caauauuucagauaaucaca

SEQ ID NO: 2700408 - RNA, 21 nt, Human
caauauuucagauaaucacaa

SEQ ID NO: 2700409 - RNA, 14 nt, Human
caaugcuguauuuu

SEQ ID NO: 2700410 - RNA, 23 nt, Human
caaugcuguauuuuaaaagaaug

SEQ ID NO: 2700411 - RNA, 12 nt, Human
caauuuaaaaaa

SEQ ID NO: 2700412 - RNA, 16 nt, Human
cacaagacugcacauc

SEQ ID NO: 2700413 - RNA, 18 nt, Human
gaaaagacuccaaagaaa

SEQ ID NO: 2700414 - RNA, 20 nt, Human
gaaaagacuccaaagaaaug

SEQ ID NO: 2700415 - RNA, 21 nt, Human
gaaaagacuccaaagaaaugu

SEQ ID NO: 2700416 - RNA, 23 nt, Human
gaaacuucagcgguuuauauaag

SEQ ID NO: 2700417 - RNA, 16 nt, Human
gaaaucaaauaugcaa

SEQ ID NO: 2700418 - RNA, 21 nt, Human
gaaaucaaauaugcaaagcac

SEQ ID NO: 2700419 - RNA, 17 nt, Human
gaaaucaaauaugcaaa

SEQ ID NO: 2700420 - RNA, 17 nt, Human
gaaaugaaagcagggac

SEQ ID NO: 2700421 - RNA, 23 nt, Human
gaaaucaaauaugcaaagcacug

SEQ ID NO: 2700422 - RNA, 18 nt, Human
gaaaugaaagcagggacu

SEQ ID NO: 2700423 - RNA, 18 nt, Human
gaacaaauuuacagagac

SEQ ID NO: 2700424 - RNA, 17 nt, Human
gaacaaauuuacagaga

SEQ ID NO: 2700425 - RNA, 23 nt, Human
gaacaaauuuacagagacagaaa

SEQ ID NO: 2700426 - RNA, 22 nt, Human
cuucucuguauuccuagaaacu

SEQ ID NO: 2700427 - RNA, 23 nt, Human
cuuggucucagugucaaugcagc

SEQ ID NO: 2700428 - RNA, 23 nt, Human
cuggaaaaguauguuagugcaaa

SEQ ID NO: 2700429 - RNA, 21 nt, Human
cugccuccccuccucugcuug

SEQ ID NO: 2700430 - RNA, 19 nt, Human
cugccuccccuccucugcu

SEQ ID NO: 2700431 - RNA, 20 nt, Human
cugccuccccuccucugcuu

SEQ ID NO: 2700432 - RNA, 17 nt, Human
cugccuccccuccucug

SEQ ID NO: 2700433 - RNA, 18 nt, Human
cugccuccccuccucugc

SEQ ID NO: 2700434 - RNA, 14 nt, Human
cugccuccccuccu

SEQ ID NO: 2700435 - RNA, 23 nt, Human
cugugagaugcuagaacucccuu

SEQ ID NO: 2700436 - RNA, 21 nt, Human
cugugagaugcuagaacuccc

SEQ ID NO: 2700437 - RNA, 19 nt, Human
cuguucacagccagacugg

SEQ ID NO: 2700438 - RNA, 12 nt, Human
cuguucacagcc

SEQ ID NO: 2700439 - RNA, 22 nt, Human
cuguucacagccagacuggcac

SEQ ID NO: 2700440 - RNA, 12 nt, Human
cuuaaaaauggu

SEQ ID NO: 2700441 - RNA, 20 nt, Human
cuuaaaaaugguuuaaaugg

SEQ ID NO: 2700442 - RNA, 13 nt, Human
cuuaaaaaugguu

SEQ ID NO: 2700443 - RNA, 20 nt, Human
cuguaagaaaauaucacuug

SEQ ID NO: 2700444 - RNA, 14 nt, Human
gacgcucucuggcc

SEQ ID NO: 2700445 - RNA, 12 nt, Human
gacagcucugca

SEQ ID NO: 2700446 - RNA, 18 nt, Human
gacagucaccucauggaa

SEQ ID NO: 2700447 - RNA, 14 nt, Human
gaaugaauggcuaa

SEQ ID NO: 2700448 - RNA, 20 nt, Human
gaaugaauggcuaagcaaaa

SEQ ID NO: 2700449 - RNA, 15 nt, Human
gaaugaauggcuaag

SEQ ID NO: 2700450 - RNA, 14 nt, Human
gaaugauuaugaau

SEQ ID NO: 2700451 - RNA, 22 nt, Human
gaaugauuaugaauuacauuug

SEQ ID NO: 2700452 - RNA, 15 nt, Human
gaauuaacacaugau

SEQ ID NO: 2700453 - RNA, 14 nt, Human
gaauuaacacauga

SEQ ID NO: 2700454 - RNA, 13 nt, Human
gaauuacauuugu

SEQ ID NO: 2700455 - RNA, 15 nt, Human
gaauuacauuuguau

SEQ ID NO: 2700456 - RNA, 18 nt, Human
gaauuacauuuguauaaa

SEQ ID NO: 2700457 - RNA, 20 nt, Human
gaauuacauuuguauaaaau

SEQ ID NO: 2700458 - RNA, 22 nt, Human
gacuuuuuauggcacuaguauu

SEQ ID NO: 2700459 - RNA, 20 nt, Human
gagaugcuagaacucccuuu

SEQ ID NO: 2700460 - RNA, 16 nt, Human
gagaugcuagaacucc

SEQ ID NO: 2700461 - RNA, 21 nt, Human
gagauugugccccugcacucc

SEQ ID NO: 2700462 - RNA, 18 nt, Human
gaggcugagaugggagaa

SEQ ID NO: 2700463 - RNA, 17 nt, Human
gaggcuccacuuggucu

SEQ ID NO: 2700464 - RNA, 12 nt, Human
gaggcuccacuu

SEQ ID NO: 2700465 - RNA, 15 nt, Human
gaggcuccacuuggu

SEQ ID NO: 2700466 - RNA, 14 nt, Human
gaggagaaacugga

SEQ ID NO: 2700467 - RNA, 12 nt, Human
gaggagaaacug

SEQ ID NO: 2700468 - RNA, 20 nt, Human
gaggacgcucucuggccuuc

SEQ ID NO: 2700469 - RNA, 21 nt, Human
gaggacgcucucuggccuucg

SEQ ID NO: 2700470 - RNA, 16 nt, Human
gagccccacccucaga

SEQ ID NO: 2700471 - RNA, 17 nt, Human
gagccccacccucagau

SEQ ID NO: 2700472 - RNA, 14 nt, Human
gagcagucaggaaa

SEQ ID NO: 2700473 - RNA, 20 nt, Human
gagcuguucacagccagacu

SEQ ID NO: 2700474 - RNA, 17 nt, Human
gagcuguucacagccag

SEQ ID NO: 2700475 - RNA, 22 nt, Human
gagcuguucacagccagacugg

SEQ ID NO: 2700476 - RNA, 13 nt, Human
gcagugaugucac

SEQ ID NO: 2700477 - RNA, 22 nt, Human
gcaguuguugcccacagcugua

SEQ ID NO: 2700478 - RNA, 20 nt, Human
gcaucuagcaugucgucaaa

SEQ ID NO: 2700479 - RNA, 15 nt, Human
gcagcucuccccuuc

SEQ ID NO: 2700480 - RNA, 22 nt, Human
gcagaacagugauuaccaggga

SEQ ID NO: 2700481 - RNA, 18 nt, Human
gcagaacagugauuacca

SEQ ID NO: 2700482 - RNA, 13 nt, Human
gcagaacagugau

SEQ ID NO: 2700483 - RNA, 12 nt, Human
gcagaacaguga

SEQ ID NO: 2700484 - RNA, 14 nt, Human
gcugccuccccucc

SEQ ID NO: 2700485 - RNA, 13 nt, Human
gcugcugaaacaa

SEQ ID NO: 2700486 - RNA, 21 nt, Human
gcuguauuuuaaaagaaugau

SEQ ID NO: 2700487 - RNA, 20 nt, Human
gcuguauuuuaaaagaauga

SEQ ID NO: 2700488 - RNA, 18 nt, Human
gcuguauuuuaaaagaau

SEQ ID NO: 2700489 - RNA, 19 nt, Human
ggaaaucaggguuaguauu

SEQ ID NO: 2700490 - RNA, 17 nt, Human
ggacagucaccucaugg

SEQ ID NO: 2700491 - RNA, 18 nt, Human
ggacagucaccucaugga

SEQ ID NO: 2700492 - RNA, 21 nt, Human
ggacagucaccucauggaauu

SEQ ID NO: 2700493 - RNA, 16 nt, Human
ggaaaaaauaacaaug

SEQ ID NO: 2700494 - RNA, 13 nt, Human
ggaaacugccagc

SEQ ID NO: 2700495 - RNA, 12 nt, Human
gcauuuagaugu

SEQ ID NO: 2700496 - RNA, 19 nt, Human
gcauuuaggccaugggaca

SEQ ID NO: 2700497 - RNA, 13 nt, Human
gcauuuagaugua

SEQ ID NO: 2700498 - RNA, 11 nt, Human
gccccaaaagg

SEQ ID NO: 2700499 - RNA, 14 nt, Human
gccuccauccugag

SEQ ID NO: 2700500 - RNA, 13 nt, Human
gccuccauccuga

SEQ ID NO: 2700501 - RNA, 22 nt, Human
gccucauguccacugguucuuc

SEQ ID NO: 2700502 - RNA, 23 nt, Human
gccuucggccuccauccugaggc

SEQ ID NO: 2700503 - RNA, 13 nt, Human
aaaaauacaaaaa

SEQ ID NO: 2700504 - RNA, 20 nt, Human
ggcuaagcuucacuguaaaa

SEQ ID NO: 2700505 - RNA, 16 nt, Human
ggccuucggccuccau

SEQ ID NO: 2700506 - RNA, 18 nt, Human
ggccuucggccuccaucc

SEQ ID NO: 2700507 - RNA, 19 nt, Human
gguuuuauuguuuaaaauc

SEQ ID NO: 2700508 - RNA, 17 nt, Human
aaaguauguuagugcaa

SEQ ID NO: 2700509 - RNA, 13 nt, Human
aaagcuuauuaaa

SEQ ID NO: 2700510 - RNA, 20 nt, Human
aaagggcuguuauaaucuuu

SEQ ID NO: 2700511 - RNA, 22 nt, Human
aaagggcuguuauaaucuuuca

SEQ ID NO: 2700512 - RNA, 16 nt, Human
aaagcagaacagugau

SEQ ID NO: 2700513 - RNA, 19 nt, Human
aaacuuuaugcuaagugaa

SEQ ID NO: 2700514 - RNA, 12 nt, Human
aaacuuuaugcu

SEQ ID NO: 2700515 - RNA, 13 nt, Human
guaauaaacucau

SEQ ID NO: 2700516 - RNA, 22 nt, Human
aaauaucacuugucaauaaaau

SEQ ID NO: 2700517 - RNA, 18 nt, Human
aaauauaugcuaagucuu

SEQ ID NO: 2700518 - RNA, 21 nt, Human
aaauaccaugccauuuaaagc

SEQ ID NO: 2700519 - RNA, 17 nt, Human
aaauaugcaaagcacug

SEQ ID NO: 2700520 - RNA, 16 nt, Human
aaauaugcaaagcacu

SEQ ID NO: 2700521 - RNA, 15 nt, Human
aaauaugcaaagcac

SEQ ID NO: 2700522 - RNA, 13 nt, Human
aaauaugcaaagc

SEQ ID NO: 2700523 - RNA, 20 nt, Human
ggguuuuauuguuuaaaauc

SEQ ID NO: 2700524 - RNA, 14 nt, Human
ggucagugcaaaua

SEQ ID NO: 2700525 - RNA, 14 nt, Human
aaaauacacacuca

SEQ ID NO: 2700526 - RNA, 16 nt, Human
aaaauaauuuuuauau

SEQ ID NO: 2700527 - RNA, 17 nt, Human
aaaauaauuuuuauauu

SEQ ID NO: 2700528 - RNA, 11 nt, Human
aaaauaauuuu

SEQ ID NO: 2700529 - RNA, 17 nt, Human
aaaaucucaauauuuca

SEQ ID NO: 2700530 - RNA, 16 nt, Human
aaaauggguuuuacug

SEQ ID NO: 2700531 - RNA, 18 nt, Human
aaaaugguuuaaaugguc

SEQ ID NO: 2700532 - RNA, 16 nt, Human
aaaaugguuuaaaugg

SEQ ID NO: 2700533 - RNA, 17 nt, Human
aagggcuguuauaaucu

SEQ ID NO: 2700534 - RNA, 17 nt, Human
aaggggaauugaggaca

SEQ ID NO: 2700535 - RNA, 15 nt, Human
aagggcuguuauaau

SEQ ID NO: 2700536 - RNA, 14 nt, Human
guuuaugauuccac

SEQ ID NO: 2700537 - RNA, 18 nt, Human
aaguauguuagugcaaau

SEQ ID NO: 2700538 - RNA, 19 nt, Human
aaguauguuagugcaaauu

SEQ ID NO: 2700539 - RNA, 9 nt, Human
uaaaauggu

SEQ ID NO: 2700540 - RNA, 22 nt, Human
uaaaauaauuuuuauauuugaa

SEQ ID NO: 2700541 - RNA, 21 nt, Human
uaaaauacacacucaaaucaa

SEQ ID NO: 2700542 - RNA, 13 nt, Human
uaaaagaauauuu

SEQ ID NO: 2700543 - RNA, 21 nt, Human
uaaaaaaaaaccugagcccca

SEQ ID NO: 2700544 - RNA, 15 nt, Human
uaaaaccacagcagu

SEQ ID NO: 2700545 - RNA, 14 nt, Human
uaaaaccacagcag

SEQ ID NO: 2700546 - RNA, 16 nt, Human
aagcacuaaacaaaga

SEQ ID NO: 2700547 - RNA, 17 nt, Human
aagcacugacuucuaag

SEQ ID NO: 2700548 - RNA, 16 nt, Human
aagcacugacuucuaa

SEQ ID NO: 2700549 - RNA, 19 nt, Human
aagcauuguaaaugugcuu

SEQ ID NO: 2700550 - RNA, 20 nt, Human
aagcacugacuucuaaguaa

SEQ ID NO: 2700551 - RNA, 19 nt, Human
aagcacugacuucuaagua

SEQ ID NO: 2700552 - RNA, 18 nt, Human
aagcauuguaaaugugcu

SEQ ID NO: 2700553 - RNA, 17 nt, Human
aagcaacccaaauguuc

SEQ ID NO: 2700554 - RNA, 22 nt, Human
gugucuuaauuaaaagaauauu

SEQ ID NO: 2700555 - RNA, 15 nt, Human
aagauagcagggcau

SEQ ID NO: 2700556 - RNA, 19 nt, Human
guuauuauauuuacaaaug

SEQ ID NO: 2700557 - RNA, 17 nt, Human
guuauuauauuuacaaa

SEQ ID NO: 2700558 - RNA, 21 nt, Human
aagccuuggggcugaugcagu

SEQ ID NO: 2700559 - RNA, 18 nt, Human
guucccuugaugaagaag

SEQ ID NO: 2700560 - RNA, 18 nt, Human
aagcuuauuaaaacucau

SEQ ID NO: 2700561 - RNA, 15 nt, Human
aaaugugcuuuuaaa

SEQ ID NO: 2700562 - RNA, 18 nt, Human
aaaugugccuucauuuuu

SEQ ID NO: 2700563 - RNA, 17 nt, Human
aaauuguauuacaaauc

SEQ ID NO: 2700564 - RNA, 17 nt, Human
aaauuccaagugauuga

SEQ ID NO: 2700565 - RNA, 14 nt, Human
gucaggaaagagaa

SEQ ID NO: 2700566 - RNA, 13 nt, Human
gucaggaaagaga

SEQ ID NO: 2700567 - RNA, 20 nt, Human
gucacaggaaguagaggagg

SEQ ID NO: 2700568 - RNA, 15 nt, Human
gucacaggaaguaga

SEQ ID NO: 2700569 - RNA, 13 nt, Human
gucacaggaagua

SEQ ID NO: 2700570 - RNA, 21 nt, Human
gucaauuuuguuauguauauu

SEQ ID NO: 2700571 - RNA, 13 nt, Human
aacagucucagga

SEQ ID NO: 2700572 - RNA, 14 nt, Human
aacauaaaauacaa

SEQ ID NO: 2700573 - RNA, 14 nt, Human
aacagucucaggaa

SEQ ID NO: 2700574 - RNA, 12 nt, Human
aacauauauaac

SEQ ID NO: 2700575 - RNA, 18 nt, Human
aacacagcaagggugaug

SEQ ID NO: 2700576 - RNA, 20 nt, Human
aacacagcaagggugauggg

SEQ ID NO: 2700577 - RNA, 17 nt, Human
aacacaacuauauuguu

SEQ ID NO: 2700578 - RNA, 23 nt, Human
guccaugaagauguagaggagaa

SEQ ID NO: 2700579 - RNA, 22 nt, Human
guccaugaagauguagaggaga

SEQ ID NO: 2700580 - RNA, 13 nt, Human
aacuucagacaua

SEQ ID NO: 2700581 - RNA, 18 nt, Human
aacuucagcgguuuauau

SEQ ID NO: 2700582 - RNA, 22 nt, Human
aacuuccuuggacucauuuuaa

SEQ ID NO: 2700583 - RNA, 23 nt, Human
aacuuccuuggacucauuuuaaa

SEQ ID NO: 2700584 - RNA, 16 nt, Human
gugauuaccagggacu

SEQ ID NO: 2700585 - RNA, 11 nt, Human
gugauuaccag

SEQ ID NO: 2700586 - RNA, 17 nt, Human
gugauuaccagggacug

SEQ ID NO: 2700587 - RNA, 18 nt, Human
gugcacgcacacugucug

SEQ ID NO: 2700588 - RNA, 22 nt, Human
gugcuacaaaaacacagcaagg

SEQ ID NO: 2700589 - RNA, 21 nt, Human
gugcuacaaaaacacagcaag

SEQ ID NO: 2700590 - RNA, 16 nt, Human
aagaaagaaaaucagg

SEQ ID NO: 2700591 - RNA, 13 nt, Human
aagaaagaaaauc

SEQ ID NO: 2700592 - RNA, 14 nt, Human
aagaaagaaaauca

SEQ ID NO: 2700593 - RNA, 11 nt, Human
aagaaacauuu

SEQ ID NO: 2700594 - RNA, 19 nt, Human
gucuuauauauuguagaua

SEQ ID NO: 2700595 - RNA, 14 nt, Human
gucuuaauuaaaag

SEQ ID NO: 2700596 - RNA, 21 nt, Human
aacucauuuuuguuuucauua

SEQ ID NO: 2700597 - RNA, 24 nt, Human
aacucauuuuuguuuucauuaucu

SEQ ID NO: 2700598 - RNA, 15 nt, Human
uagggagagaagaua

SEQ ID NO: 2700599 - RNA, 14 nt, Human
uagggagagaagau

SEQ ID NO: 2700600 - RNA, 18 nt, Human
uaggaaauauuuauuuua

SEQ ID NO: 2700601 - RNA, 19 nt, Human
uaggaaauauuuauuuuaa

SEQ ID NO: 2700602 - RNA, 12 nt, Human
uaggagcaugag

SEQ ID NO: 2700603 - RNA, 23 nt, Human
acaauacaucccuuaccugggaa

SEQ ID NO: 2700604 - RNA, 13 nt, Human
acaagacugcaca

SEQ ID NO: 2700605 - RNA, 14 nt, Human
acaagacugcacau

SEQ ID NO: 2700606 - RNA, 18 nt, Human
acaaaaggauaaugaaua

SEQ ID NO: 2700607 - RNA, 19 nt, Human
uagaggagaaacuggaacu

SEQ ID NO: 2700608 - RNA, 22 nt, Human
uagaggagaaacuggaacucuc

SEQ ID NO: 2700609 - RNA, 15 nt, Human
uagaugcaguucuga

SEQ ID NO: 2700610 - RNA, 20 nt, Human
acaagacccaaaaggcagaa

SEQ ID NO: 2700611 - RNA, 19 nt, Human
acaaauuuacagagacaga

SEQ ID NO: 2700612 - RNA, 18 nt, Human
acaaauuuacagagacag

SEQ ID NO: 2700613 - RNA, 22 nt, Human
uagugaaacucguuaauuugua

SEQ ID NO: 2700614 - RNA, 23 nt, Human
uaguguuggagaagaacugaaau

SEQ ID NO: 2700615 - RNA, 15 nt, Human
acacacucaaaucaa

SEQ ID NO: 2700616 - RNA, 18 nt, Human
acaaugcuguauuuuaaa

SEQ ID NO: 2700617 - RNA, 22 nt, Human
acaaugcuguauuuuaaaagaa

SEQ ID NO: 2700618 - RNA, 19 nt, Human
acacucaaaucaagaaacu

SEQ ID NO: 2700619 - RNA, 14 nt, Human
acacuaagagagaa

SEQ ID NO: 2700620 - RNA, 13 nt, Human
acacuaagagaga

SEQ ID NO: 2700621 - RNA, 18 nt, Human
acacaugauccugcaauu

SEQ ID NO: 2700622 - RNA, 15 nt, Human
acacaugaaguccaa

SEQ ID NO: 2700623 - RNA, 15 nt, Human
acacaucagcuugcc

SEQ ID NO: 2700624 - RNA, 17 nt, Human
uaucucaaaacugcacu

SEQ ID NO: 2700625 - RNA, 15 nt, Human
uauauuguuugcuaa

SEQ ID NO: 2700626 - RNA, 19 nt, Human
uauaauuuugugaagcaaa

SEQ ID NO: 2700627 - RNA, 16 nt, Human
acagccucuuagaugc

SEQ ID NO: 2700628 - RNA, 19 nt, Human
uaugccccauucaacaucu

SEQ ID NO: 2700629 - RNA, 15 nt, Human
uaugccccauucaac

SEQ ID NO: 2700630 - RNA, 21 nt, Human
uaugauuaaguaaugauaacu

SEQ ID NO: 2700631 - RNA, 16 nt, Human
uaugauuaaguaauga

SEQ ID NO: 2700632 - RNA, 20 nt, Human
uaugauuaaguaaugauaac

SEQ ID NO: 2700633 - RNA, 21 nt, Human
acagggaggacgcucucuggc

SEQ ID NO: 2700634 - RNA, 20 nt, Human
acagggaggacgcucucugg

SEQ ID NO: 2700635 - RNA, 17 nt, Human
acagucaccucauggaa

SEQ ID NO: 2700636 - RNA, 18 nt, Human
acagucaccucauggaau

SEQ ID NO: 2700637 - RNA, 16 nt, Human
acagucaccucaugga

SEQ ID NO: 2700638 - RNA, 14 nt, Human
uauuacuguaagaa

SEQ ID NO: 2700639 - RNA, 15 nt, Human
uauucaaacagucuc

SEQ ID NO: 2700640 - RNA, 23 nt, Human
uauucaaacagucucaggaaauc

SEQ ID NO: 2700641 - RNA, 17 nt, Human
acaggaaguagaggagg

SEQ ID NO: 2700642 - RNA, 22 nt, Human
acaggaaccacaagacugcaca

SEQ ID NO: 2700643 - RNA, 21 nt, Human
uauguuuucaggcuagaugua

SEQ ID NO: 2700644 - RNA, 16 nt, Human
uauuaaaacucauuuu

SEQ ID NO: 2700645 - RNA, 22 nt, Human
aauugacccacaagaaaugaaa

SEQ ID NO: 2700646 - RNA, 21 nt, Human
aauugacccacaagaaaugaa

SEQ ID NO: 2700647 - RNA, 14 nt, Human
uacuguaagaaaau

SEQ ID NO: 2700648 - RNA, 22 nt, Human
aauuccacuuauaggaauugac

SEQ ID NO: 2700649 - RNA, 18 nt, Human
aauuccaagugauugaaa

SEQ ID NO: 2700650 - RNA, 16 nt, Human
aaugcuguauuuuaaa

SEQ ID NO: 2700651 - RNA, 14 nt, Human
uacacuaagagaga

SEQ ID NO: 2700652 - RNA, 18 nt, Human
uacacuaagagagaauga

SEQ ID NO: 2700653 - RNA, 20 nt, Human
uacaucccuuaccugggaaa

SEQ ID NO: 2700654 - RNA, 18 nt, Human
uaccaccagucugacugu

SEQ ID NO: 2700655 - RNA, 23 nt, Human
aaucgcuccaccuugcagcucuc

SEQ ID NO: 2700656 - RNA, 19 nt, Human
aaucuuauaauuuaaaaua

SEQ ID NO: 2700657 - RNA, 19 nt, Human
aaucuacacuccagugaga

SEQ ID NO: 2700658 - RNA, 19 nt, Human
uaaguaaugauaacuggaa

SEQ ID NO: 2700659 - RNA, 16 nt, Human
uaagcuuguauuccuu

SEQ ID NO: 2700660 - RNA, 12 nt, Human
uaauaaacucau

SEQ ID NO: 2700661 - RNA, 12 nt, Human
aaucaugaauua

SEQ ID NO: 2700662 - RNA, 15 nt, Human
aaucaugaauuaguu

SEQ ID NO: 2700663 - RNA, 22 nt, Human
aaugaauggcuaagcaaaaugu

SEQ ID NO: 2700664 - RNA, 18 nt, Human
aauauuuauuuuaauaau

SEQ ID NO: 2700665 - RNA, 19 nt, Human
aauauuuauuuuaauaaug

SEQ ID NO: 2700666 - RNA, 21 nt, Human
aauaugccccauucaacaucu

SEQ ID NO: 2700667 - RNA, 24 nt, Human
aauaugccccauucaacaucuagu

SEQ ID NO: 2700668 - RNA, 22 nt, Human
aaucaggguuaguauuguccag

SEQ ID NO: 2700669 - RNA, 16 nt, Human
aaucaggguuaguauu

SEQ ID NO: 2700670 - RNA, 21 nt, Human
aaucaggguuaguauugucca

SEQ ID NO: 2700671 - RNA, 20 nt, Human
aauaucacuugucaauaaaa

SEQ ID NO: 2700672 - RNA, 22 nt, Human
aauaucacuugucaauaaaauc

SEQ ID NO: 2700673 - RNA, 16 nt, Human
aauagucaaauugugu

SEQ ID NO: 2700674 - RNA, 18 nt, Human
uaagaagugaaaaucuac

SEQ ID NO: 2700675 - RNA, 20 nt, Human
uaacgauaaaagacagugaa

SEQ ID NO: 2700676 - RNA, 14 nt, Human
accagucugacugu

SEQ ID NO: 2700677 - RNA, 23 nt, Human
ucacuugaacccgggaggcagag

SEQ ID NO: 2700678 - RNA, 12 nt, Human
ucaccucaugga

SEQ ID NO: 2700679 - RNA, 13 nt, Human
ucaccucauggaa

SEQ ID NO: 2700680 - RNA, 14 nt, Human
ucaccucauggaau

SEQ ID NO: 2700681 - RNA, 21 nt, Human
ucacaacagauuauuaccuua

SEQ ID NO: 2700682 - RNA, 16 nt, Human
ucaauucuugccaaau

SEQ ID NO: 2700683 - RNA, 22 nt, Human
ucaauaucuuuuuuuuaauaaa

SEQ ID NO: 2700684 - RNA, 23 nt, Human
ucaaugaaugaaugaauggcuaa

SEQ ID NO: 2700685 - RNA, 15 nt, Human
ucaauauuucagaua

SEQ ID NO: 2700686 - RNA, 19 nt, Human
ucaauauuucagauaauca

SEQ ID NO: 2700687 - RNA, 23 nt, Human
accaaaaaucucaauauuucaga

SEQ ID NO: 2700688 - RNA, 18 nt, Human
ucaaauugugugaaaggu

SEQ ID NO: 2700689 - RNA, 15 nt, Human
ucaaauugugugaaa

SEQ ID NO: 2700690 - RNA, 23 nt, Human
acaugagguacugagagugaaca

SEQ ID NO: 2700691 - RNA, 16 nt, Human
acaugaaguccaagca

SEQ ID NO: 2700692 - RNA, 20 nt, Human
acaugagguacugagaguga

SEQ ID NO: 2700693 - RNA, 16 nt, Human
acaugagguacugaga

SEQ ID NO: 2700694 - RNA, 21 nt, Human
acaugggacauuugcucaugg

SEQ ID NO: 2700695 - RNA, 15 nt, Human
acaugggacauuugc

SEQ ID NO: 2700696 - RNA, 20 nt, Human
acaugggacauuugcucaug

SEQ ID NO: 2700697 - RNA, 11 nt, Human
acaugggacau

SEQ ID NO: 2700698 - RNA, 14 nt, Human
acaugggacauuug

SEQ ID NO: 2700699 - RNA, 17 nt, Human
ucaguuuuugugaaaag

SEQ ID NO: 2700700 - RNA, 15 nt, Human
ucaguuuuugugaaa

SEQ ID NO: 2700701 - RNA, 16 nt, Human
accuagggugauauua

SEQ ID NO: 2700702 - RNA, 17 nt, Human
acccgggaggcagaggu

SEQ ID NO: 2700703 - RNA, 15 nt, Human
acccgggaggcagag

SEQ ID NO: 2700704 - RNA, 14 nt, Human
ucagcccucagaau

SEQ ID NO: 2700705 - RNA, 19 nt, Human
acuccagugagacagcucu

SEQ ID NO: 2700706 - RNA, 21 nt, Human
acucuuaagaagacugcauua

SEQ ID NO: 2700707 - RNA, 16 nt, Human
uccuggaaaucagggu

SEQ ID NO: 2700708 - RNA, 17 nt, Human
acugagaugugaacaca

SEQ ID NO: 2700709 - RNA, 22 nt, Human
acugagaugugaacacaucagc

SEQ ID NO: 2700710 - RNA, 18 nt, Human
acugagagugaacaaauu

SEQ ID NO: 2700711 - RNA, 22 nt, Human
acugacuucuaaguaaaaccac

SEQ ID NO: 2700712 - RNA, 16 nt, Human
acugacuucuaaguaa

SEQ ID NO: 2700713 - RNA, 15 nt, Human
acugacuucuaagua

SEQ ID NO: 2700714 - RNA, 13 nt, Human
acugacuucuaag

SEQ ID NO: 2700715 - RNA, 17 nt, Human
acugacucuuaagaaga

SEQ ID NO: 2700716 - RNA, 18 nt, Human
acugacucuuaagaagac

SEQ ID NO: 2700717 - RNA, 20 nt, Human
acugacucuuaagaagacug

SEQ ID NO: 2700718 - RNA, 13 nt, Human
acugacucuuaag

SEQ ID NO: 2700719 - RNA, 14 nt, Human
acugacucuuaaga

SEQ ID NO: 2700720 - RNA, 15 nt, Human
acugacucuuaagaa

SEQ ID NO: 2700721 - RNA, 16 nt, Human
acugacucuuaagaag

SEQ ID NO: 2700722 - RNA, 12 nt, Human
acugaagaagca

SEQ ID NO: 2700723 - RNA, 19 nt, Human
accuugaaaacuuuaugcu

SEQ ID NO: 2700724 - RNA, 22 nt, Human
uccacugguucuucuuggucuc

SEQ ID NO: 2700725 - RNA, 20 nt, Human
accuuuuggucuggagggaa

SEQ ID NO: 2700726 - RNA, 14 nt, Human
acgcucucuggccu

SEQ ID NO: 2700727 - RNA, 11 nt, Human
acgcucucugg

SEQ ID NO: 2700728 - RNA, 18 nt, Human
uccagugagacagcucug

SEQ ID NO: 2700729 - RNA, 15 nt, Human
uccauccugaggcuc

SEQ ID NO: 2700730 - RNA, 12 nt, Human
uccauccugagg

SEQ ID NO: 2700731 - RNA, 11 nt, Human
uccauccugag

SEQ ID NO: 2700732 - RNA, 15 nt, Human
acuaauuuuaaaaug

SEQ ID NO: 2700733 - RNA, 16 nt, Human
acuaucucauuuccaa

SEQ ID NO: 2700734 - RNA, 17 nt, Human
acuaucucauuuccaag

SEQ ID NO: 2700735 - RNA, 15 nt, Human
acuaucucauuucca

SEQ ID NO: 2700736 - RNA, 22 nt, Human
acuauauuguuugcuaagcauu

SEQ ID NO: 2700737 - RNA, 17 nt, Human
acuauauuguuugcuaa

SEQ ID NO: 2700738 - RNA, 23 nt, Human
ucucaggaaaucaaauaugcaaa

SEQ ID NO: 2700739 - RNA, 21 nt, Human
ucucaggaaaucaaauaugca

SEQ ID NO: 2700740 - RNA, 14 nt, Human
ucucaggaaaucaa

SEQ ID NO: 2700741 - RNA, 15 nt, Human
ucucauuuccaagca

SEQ ID NO: 2700742 - RNA, 15 nt, Human
acuugucaauaaaau

SEQ ID NO: 2700743 - RNA, 16 nt, Human
ucuaggaaauauuuau

SEQ ID NO: 2700744 - RNA, 17 nt, Human
ucuaggaaauauuuauu

SEQ ID NO: 2700745 - RNA, 12 nt, Human
uccugggcagcu

SEQ ID NO: 2700746 - RNA, 13 nt, Human
uccugggcagcug

SEQ ID NO: 2700747 - RNA, 14 nt, Human
uccugggcagcugc

SEQ ID NO: 2700748 - RNA, 20 nt, Human
ucuaaguaaaaccacagcag

SEQ ID NO: 2700749 - RNA, 19 nt, Human
ucuaaguaaaaccacagca

SEQ ID NO: 2700750 - RNA, 15 nt, Human
ucuaaguaaaaccac

SEQ ID NO: 2700751 - RNA, 14 nt, Human
ucuaaguaaaacca

SEQ ID NO: 2700752 - RNA, 23 nt, Human
agaauuaacacaugauccugcaa

SEQ ID NO: 2700753 - RNA, 15 nt, Human
agaauuaacacauga

SEQ ID NO: 2700754 - RNA, 22 nt, Human
ucugugagaugcuagaacuccc

SEQ ID NO: 2700755 - RNA, 17 nt, Human
ucugugagaugcuagaa

SEQ ID NO: 2700756 - RNA, 23 nt, Human
ucugugagaugcuagaacucccu

SEQ ID NO: 2700757 - RNA, 14 nt, Human
ucugugagaugcua

SEQ ID NO: 2700758 - RNA, 24 nt, Human
agacagagccccacccucagaugc

SEQ ID NO: 2700759 - RNA, 22 nt, Human
agacagagccccacccucagau

SEQ ID NO: 2700760 - RNA, 12 nt, Human
agacacacauga

SEQ ID NO: 2700761 - RNA, 15 nt, Human
agacacacaugaagu

SEQ ID NO: 2700762 - RNA, 15 nt, Human
ucugcagauaaacag

SEQ ID NO: 2700763 - RNA, 18 nt, Human
ucugcagauaaacaguag

SEQ ID NO: 2700764 - RNA, 13 nt, Human
agaagaacugaaa

SEQ ID NO: 2700765 - RNA, 14 nt, Human
agaagaacugaaau

SEQ ID NO: 2700766 - RNA, 18 nt, Human
agaagaugguaccaccag

SEQ ID NO: 2700767 - RNA, 16 nt, Human
ucugcuugccaucccu

SEQ ID NO: 2700768 - RNA, 17 nt, Human
ucugcuugccaucccuc

SEQ ID NO: 2700769 - RNA, 20 nt, Human
ucugcuugccaucccucccu

SEQ ID NO: 2700770 - RNA, 23 nt, Human
ucugcuugccaucccucccucca

SEQ ID NO: 2700771 - RNA, 13 nt, Human
agauccuggaaau

SEQ ID NO: 2700772 - RNA, 14 nt, Human
agauccuggaaauc

SEQ ID NO: 2700773 - RNA, 21 nt, Human
agaugcuagaacucccuuuca

SEQ ID NO: 2700774 - RNA, 21 nt, Human
agaugcaguucugaagaagau

SEQ ID NO: 2700775 - RNA, 19 nt, Human
agaugcuagaacucccuuu

SEQ ID NO: 2700776 - RNA, 13 nt, Human
agaugcacaugag

SEQ ID NO: 2700777 - RNA, 20 nt, Human
agaugcaguucugaagaaga

SEQ ID NO: 2700778 - RNA, 16 nt, Human
agaugcacaugagcug

SEQ ID NO: 2700779 - RNA, 15 nt, Human
ugacacuuaaaaaug

SEQ ID NO: 2700780 - RNA, 22 nt, Human
agauguauguacuucaugcugu

SEQ ID NO: 2700781 - RNA, 17 nt, Human
agaugugaacacaucag

SEQ ID NO: 2700782 - RNA, 22 nt, Human
agaugugaacacaucagcuugc

SEQ ID NO: 2700783 - RNA, 21 nt, Human
agauugugccccugcacucca

SEQ ID NO: 2700784 - RNA, 16 nt, Human
agcaagggugauggga

SEQ ID NO: 2700785 - RNA, 22 nt, Human
agcaagggugaugggaaagcau

SEQ ID NO: 2700786 - RNA, 20 nt, Human
agcaagggugaugggaaagc

SEQ ID NO: 2700787 - RNA, 16 nt, Human
agauuuuccugaaaac

SEQ ID NO: 2700788 - RNA, 15 nt, Human
agauuuuccugaaaa

SEQ ID NO: 2700789 - RNA, 14 nt, Human
agauuuuccugaaa

SEQ ID NO: 2700790 - RNA, 20 nt, Human
ugagacucugucucagucca

SEQ ID NO: 2700791 - RNA, 12 nt, Human
ugagacagcucu

SEQ ID NO: 2700792 - RNA, 16 nt, Human
ugagagacacacugaa

SEQ ID NO: 2700793 - RNA, 17 nt, Human
ugagagacacacugaag

SEQ ID NO: 2700794 - RNA, 19 nt, Human
ugagagacacacugaagaa

SEQ ID NO: 2700795 - RNA, 20 nt, Human
ugagagacacacugaagaag

SEQ ID NO: 2700796 - RNA, 21 nt, Human
ugagagacacacugaagaagc

SEQ ID NO: 2700797 - RNA, 22 nt, Human
ugagagacacacugaagaagca

SEQ ID NO: 2700798 - RNA, 21 nt, Human
ugagagcaguuugguuucuag

SEQ ID NO: 2700799 - RNA, 23 nt, Human
ugagagcaguuugguuucuagca

SEQ ID NO: 2700800 - RNA, 13 nt, Human
ugagaugugaaca

SEQ ID NO: 2700801 - RNA, 19 nt, Human
ugagaugugaacacaucag

SEQ ID NO: 2700802 - RNA, 18 nt, Human
ugagaugugaacacauca

SEQ ID NO: 2700803 - RNA, 24 nt, Human
ugagaugugaacacaucagcuugc

SEQ ID NO: 2700804 - RNA, 13 nt, Human
ugaaagaaaauaa

SEQ ID NO: 2700805 - RNA, 22 nt, Human
ugaaaauauuuguaucacaaau

SEQ ID NO: 2700806 - RNA, 21 nt, Human
ugaaaauauuuguaucacaaa

SEQ ID NO: 2700807 - RNA, 20 nt, Human
ugaaaaucuuauaauuuaaa

SEQ ID NO: 2700808 - RNA, 17 nt, Human
ugaaaauauuuguauca

SEQ ID NO: 2700809 - RNA, 18 nt, Human
ugaaagaggaaugaagua

SEQ ID NO: 2700810 - RNA, 17 nt, Human
ugaaagaggaaugaagu

SEQ ID NO: 2700811 - RNA, 16 nt, Human
agagacacacugaaga

SEQ ID NO: 2700812 - RNA, 15 nt, Human
agagacagaaagcag

SEQ ID NO: 2700813 - RNA, 14 nt, Human
agagacagaaagca

SEQ ID NO: 2700814 - RNA, 22 nt, Human
agacuccaaagaaauguaaggg

SEQ ID NO: 2700815 - RNA, 21 nt, Human
agacuggcacaguuuucugag

SEQ ID NO: 2700816 - RNA, 20 nt, Human
agacuggcacaguuuucuga

SEQ ID NO: 2700817 - RNA, 23 nt, Human
agacuggcacaguuuucugagaa

SEQ ID NO: 2700818 - RNA, 18 nt, Human
agagcuguucacagccag

SEQ ID NO: 2700819 - RNA, 17 nt, Human
ugaagauuuaccacuug

SEQ ID NO: 2700820 - RNA, 20 nt, Human
ugaagauuuaccacuugugu

SEQ ID NO: 2700821 - RNA, 17 nt, Human
ugaaguacucauacaug

SEQ ID NO: 2700822 - RNA, 22 nt, Human
ugaagaagcaccaaucaugaau

SEQ ID NO: 2700823 - RNA, 18 nt, Human
ugaacccgggaggcagag

SEQ ID NO: 2700824 - RNA, 22 nt, Human
ugaacccauauuuguacaccaa

SEQ ID NO: 2700825 - RNA, 13 nt, Human
ugaacaaauuuac

SEQ ID NO: 2700826 - RNA, 16 nt, Human
agagcugcccucuccu

SEQ ID NO: 2700827 - RNA, 17 nt, Human
agagcugcccucuccug

SEQ ID NO: 2700828 - RNA, 18 nt, Human
agagcugcccucuccugg

SEQ ID NO: 2700829 - RNA, 19 nt, Human
agagcugcccucuccuggg

SEQ ID NO: 2700830 - RNA, 20 nt, Human
agagcugcccucuccugggc

SEQ ID NO: 2700831 - RNA, 14 nt, Human
ugaaauaagccaga

SEQ ID NO: 2700832 - RNA, 17 nt, Human
uguaagaaaauaucacu

SEQ ID NO: 2700833 - RNA, 18 nt, Human
uguaagaaaauaucacuu

SEQ ID NO: 2700834 - RNA, 15 nt, Human
ugguuucuagcauga

SEQ ID NO: 2700835 - RNA, 23 nt, Human
uggugugaccacugcagaagaca

SEQ ID NO: 2700836 - RNA, 22 nt, Human
agggugaugggaaagcauugua

SEQ ID NO: 2700837 - RNA, 21 nt, Human
agggugaugggaaagcauugu

SEQ ID NO: 2700838 - RNA, 16 nt, Human
aggggaauugaggaca

SEQ ID NO: 2700839 - RNA, 22 nt, Human
ugguccaugggccauaugaaaa

SEQ ID NO: 2700840 - RNA, 22 nt, Human
uggucugugagaugcuagaacu

SEQ ID NO: 2700841 - RNA, 20 nt, Human
aggguuuauguuuaggaugu

SEQ ID NO: 2700842 - RNA, 15 nt, Human
aggucagugcaaaua

SEQ ID NO: 2700843 - RNA, 22 nt, Human
ugugagaugcuagaacucccuu

SEQ ID NO: 2700844 - RNA, 14 nt, Human
ugugaagcaaaauu

SEQ ID NO: 2700845 - RNA, 17 nt, Human
agugaaagaaaauaaca

SEQ ID NO: 2700846 - RNA, 16 nt, Human
agugaaagaggcagcu

SEQ ID NO: 2700847 - RNA, 14 nt, Human
agugagacagcucu

SEQ ID NO: 2700848 - RNA, 22 nt, Human
agugaaagaggcagcuugaaac

SEQ ID NO: 2700849 - RNA, 20 nt, Human
agugaaacucguuaauuugu

SEQ ID NO: 2700850 - RNA, 21 nt, Human
agugagcagucaggaaagaga

SEQ ID NO: 2700851 - RNA, 16 nt, Human
agugagccgagauugu

SEQ ID NO: 2700852 - RNA, 14 nt, Human
ugucuucacaacag

SEQ ID NO: 2700853 - RNA, 17 nt, Human
ugucucuacuaaaaaua

SEQ ID NO: 2700854 - RNA, 15 nt, Human
ugucuccucucucug

SEQ ID NO: 2700855 - RNA, 14 nt, Human
ugucuuaauuaaaa

SEQ ID NO: 2700856 - RNA, 21 nt, Human
aguauuagaauaccacaggaa

SEQ ID NO: 2700857 - RNA, 18 nt, Human
aguauguuagugcaaauu

SEQ ID NO: 2700858 - RNA, 21 nt, Human
aguauguuagugcaaauuguc

SEQ ID NO: 2700859 - RNA, 20 nt, Human
agucacauuccaagccucau

SEQ ID NO: 2700860 - RNA, 15 nt, Human
aguauuguccagguc

SEQ ID NO: 2700861 - RNA, 16 nt, Human
aguauuguccaggucu

SEQ ID NO: 2700862 - RNA, 23 nt, Human
ugucagcuccccucggagaagag

SEQ ID NO: 2700863 - RNA, 21 nt, Human
ugucagcuccccucggagaag

SEQ ID NO: 2700864 - RNA, 20 nt, Human
ugucagcuccccucggagaa

SEQ ID NO: 2700865 - RNA, 23 nt, Human
uuagaugcaguucugaagaagau

SEQ ID NO: 2700866 - RNA, 22 nt, Human
uuagaugcaguucugaagaaga

SEQ ID NO: 2700867 - RNA, 18 nt, Human
uuagcaggaagcugugag

SEQ ID NO: 2700868 - RNA, 14 nt, Human
auaaugaauacuuu

SEQ ID NO: 2700869 - RNA, 21 nt, Human
auaaucuuucacaggggacag

SEQ ID NO: 2700870 - RNA, 12 nt, Human
auaacuggaaac

SEQ ID NO: 2700871 - RNA, 19 nt, Human
auaaaugugccuucauuuu

SEQ ID NO: 2700872 - RNA, 17 nt, Human
aguuuucugagaaagac

SEQ ID NO: 2700873 - RNA, 14 nt, Human
aguuuucugagaaa

SEQ ID NO: 2700874 - RNA, 13 nt, Human
aguuuucugagaa

SEQ ID NO: 2700875 - RNA, 12 nt, Human
aguuuucugaga

SEQ ID NO: 2700876 - RNA, 15 nt, Human
auaaacucauuucua

SEQ ID NO: 2700877 - RNA, 21 nt, Human
uuagccguggugauuuagcag

SEQ ID NO: 2700878 - RNA, 18 nt, Human
uuauauaagcuuguauuc

SEQ ID NO: 2700879 - RNA, 14 nt, Human
auaauuuuuauauu

SEQ ID NO: 2700880 - RNA, 16 nt, Human
auaauuuuuauauuug

SEQ ID NO: 2700881 - RNA, 19 nt, Human
auaauuuuuauauuugaaa

SEQ ID NO: 2700882 - RNA, 13 nt, Human
auaauuuugugaa

SEQ ID NO: 2700883 - RNA, 14 nt, Human
auaauuuugugaag

SEQ ID NO: 2700884 - RNA, 15 nt, Human
auaauuuugugaagc

SEQ ID NO: 2700885 - RNA, 20 nt, Human
auaauuuugugaagcaaaau

SEQ ID NO: 2700886 - RNA, 22 nt, Human
auacaaaaaaaaaaaaaaauua

SEQ ID NO: 2700887 - RNA, 21 nt, Human
auaauuuuuauauuugaaaua

SEQ ID NO: 2700888 - RNA, 22 nt, Human
auaauuuuuauauuugaaauau

SEQ ID NO: 2700889 - RNA, 22 nt, Human
auaccacaggaaccacaagacu

SEQ ID NO: 2700890 - RNA, 20 nt, Human
auacaucccuuaccugggaa

SEQ ID NO: 2700891 - RNA, 21 nt, Human
auacaguucggugagcuacaa

SEQ ID NO: 2700892 - RNA, 20 nt, Human
aguucggugagcuacaaaug

SEQ ID NO: 2700893 - RNA, 14 nt, Human
aguucagagcugcc

SEQ ID NO: 2700894 - RNA, 15 nt, Human
aguucagagcugccc

SEQ ID NO: 2700895 - RNA, 16 nt, Human
aguucagagcugcccu

SEQ ID NO: 2700896 - RNA, 17 nt, Human
aguucagagcugcccuc

SEQ ID NO: 2700897 - RNA, 18 nt, Human
aguucagagcugcccucu

SEQ ID NO: 2700898 - RNA, 19 nt, Human
aguucagagcugcccucuc

SEQ ID NO: 2700899 - RNA, 19 nt, Human
aguuauggcuauaggugcu

SEQ ID NO: 2700900 - RNA, 20 nt, Human
aguuauuauauuuacaaaug

SEQ ID NO: 2700901 - RNA, 15 nt, Human
uuaaaaaagaaacau

SEQ ID NO: 2700902 - RNA, 18 nt, Human
uuaaaaaagaaacauuug

SEQ ID NO: 2700903 - RNA, 22 nt, Human
aguugcauagguuuaauaauuu

SEQ ID NO: 2700904 - RNA, 20 nt, Human
uuaaaaaugguuuaaauggu

SEQ ID NO: 2700905 - RNA, 16 nt, Human
aguuugguuucuagca

SEQ ID NO: 2700906 - RNA, 15 nt, Human
aguucugaagaagau

SEQ ID NO: 2700907 - RNA, 13 nt, Human
aguucugaagaag

SEQ ID NO: 2700908 - RNA, 14 nt, Human
aguucugaagaaga

SEQ ID NO: 2700909 - RNA, 21 nt, Human
aguugauaugccuuuucccaa

SEQ ID NO: 2700910 - RNA, 14 nt, Human
uguuuuaggagcau

SEQ ID NO: 2700911 - RNA, 13 nt, Human
uguuuuauaauuu

SEQ ID NO: 2700912 - RNA, 20 nt, Human
uguuuuauaauuuugugaag

SEQ ID NO: 2700913 - RNA, 15 nt, Human
uguuugcuaagcauu

SEQ ID NO: 2700914 - RNA, 19 nt, Human
uguuugcuaagcauuccaa

SEQ ID NO: 2700915 - RNA, 18 nt, Human
ugccucagaaaacaagga

SEQ ID NO: 2700916 - RNA, 16 nt, Human
ugccuccccuccucug

SEQ ID NO: 2700917 - RNA, 12 nt, Human
ugccuccccucc

SEQ ID NO: 2700918 - RNA, 13 nt, Human
ugccuccccuccu

SEQ ID NO: 2700919 - RNA, 14 nt, Human
ugccuccccuccuc

SEQ ID NO: 2700920 - RNA, 15 nt, Human
ugccuccccuccucu

SEQ ID NO: 2700921 - RNA, 11 nt, Human
ugccuccccuc

SEQ ID NO: 2700922 - RNA, 15 nt, Human
ugccucaccccuugc

SEQ ID NO: 2700923 - RNA, 19 nt, Human
ugcccuguuaaaagaugaa

SEQ ID NO: 2700924 - RNA, 21 nt, Human
agcugcccucuccugggcagc

SEQ ID NO: 2700925 - RNA, 19 nt, Human
agcugcccucuccugggca

SEQ ID NO: 2700926 - RNA, 20 nt, Human
agcugcccucuccugggcag

SEQ ID NO: 2700927 - RNA, 17 nt, Human
agcugcccucuccuggg

SEQ ID NO: 2700928 - RNA, 18 nt, Human
agcugcccucuccugggc

SEQ ID NO: 2700929 - RNA, 23 nt, Human
agcucugcccauccugccccuga

SEQ ID NO: 2700930 - RNA, 22 nt, Human
ugcccucuccugggcagcugcc

SEQ ID NO: 2700931 - RNA, 23 nt, Human
ugcccucuccugggcagcugccu

SEQ ID NO: 2700932 - RNA, 16 nt, Human
ugcccucuccugggca

SEQ ID NO: 2700933 - RNA, 17 nt, Human
ugcccucuccugggcag

SEQ ID NO: 2700934 - RNA, 18 nt, Human
ugcccucuccugggcagc

SEQ ID NO: 2700935 - RNA, 20 nt, Human
ugcccucuccugggcagcug

SEQ ID NO: 2700936 - RNA, 13 nt, Human
ugcccucuccugg

SEQ ID NO: 2700937 - RNA, 14 nt, Human
ugcccucuccuggg

SEQ ID NO: 2700938 - RNA, 15 nt, Human
ugcccucuccugggc

SEQ ID NO: 2700939 - RNA, 12 nt, Human
ugcccucuccug

SEQ ID NO: 2700940 - RNA, 22 nt, Human
ugccauuuaaagcuuauuaaaa

SEQ ID NO: 2700941 - RNA, 16 nt, Human
ugccccauucaacauc

SEQ ID NO: 2700942 - RNA, 22 nt, Human
ugcagcucuccccuucucugua

SEQ ID NO: 2700943 - RNA, 20 nt, Human
ugcagcucuccccuucucug

SEQ ID NO: 2700944 - RNA, 11 nt, Human
agcccugucuc

SEQ ID NO: 2700945 - RNA, 18 nt, Human
agcccugucuccucucuc

SEQ ID NO: 2700946 - RNA, 14 nt, Human
ugcagaagacagua

SEQ ID NO: 2700947 - RNA, 15 nt, Human
ugcagaagacaguau

SEQ ID NO: 2700948 - RNA, 17 nt, Human
ugauuuagcaggaagcu

SEQ ID NO: 2700949 - RNA, 20 nt, Human
ugauuuagcaggaagcugug

SEQ ID NO: 2700950 - RNA, 19 nt, Human
ugaugggaaagcauuguaa

SEQ ID NO: 2700951 - RNA, 14 nt, Human
ugaugggaaagcau

SEQ ID NO: 2700952 - RNA, 11 nt, Human
ugaugaagaag

SEQ ID NO: 2700953 - RNA, 12 nt, Human
ugaugaagaagu

SEQ ID NO: 2700954 - RNA, 23 nt, Human
ugauuaaguaaugauaacuggaa

SEQ ID NO: 2700955 - RNA, 18 nt, Human
ugauuaaguaaugauaac

SEQ ID NO: 2700956 - RNA, 15 nt, Human
agccagcaguucaga

SEQ ID NO: 2700957 - RNA, 17 nt, Human
agccagcaguucagagc

SEQ ID NO: 2700958 - RNA, 19 nt, Human
agccagcaguucagagcug

SEQ ID NO: 2700959 - RNA, 22 nt, Human
agccagcaguucagagcugccc

SEQ ID NO: 2700960 - RNA, 20 nt, Human
agccagcaguucagagcugc

SEQ ID NO: 2700961 - RNA, 21 nt, Human
agccagcaguucagagcugcc

SEQ ID NO: 2700962 - RNA, 18 nt, Human
uggaauuggagcucgugg

SEQ ID NO: 2700963 - RNA, 22 nt, Human
uggaauuucucccagucauuua

SEQ ID NO: 2700964 - RNA, 16 nt, Human
ugcuugccaucccucc

SEQ ID NO: 2700965 - RNA, 15 nt, Human
ugcuugccaucccuc

SEQ ID NO: 2700966 - RNA, 11 nt, Human
aggagaaacug

SEQ ID NO: 2700967 - RNA, 14 nt, Human
aggacacugauaug

SEQ ID NO: 2700968 - RNA, 23 nt, Human
aggacagcccuucuuuccacaga

SEQ ID NO: 2700969 - RNA, 14 nt, Human
ugcuggagcucugc

SEQ ID NO: 2700970 - RNA, 13 nt, Human
ugcuggagcucug

SEQ ID NO: 2700971 - RNA, 23 nt, Human
ugcuguauuuuaaaagaaugauu

SEQ ID NO: 2700972 - RNA, 11 nt, Human
aggaauuuaaa

SEQ ID NO: 2700973 - RNA, 23 nt, Human
aggaauugacccacaagaaauga

SEQ ID NO: 2700974 - RNA, 18 nt, Human
aggaagcugugagagcag

SEQ ID NO: 2700975 - RNA, 20 nt, Human
ugggaaagggauuuucagcc

SEQ ID NO: 2700976 - RNA, 18 nt, Human
uggacgagaaaacaauaa

SEQ ID NO: 2700977 - RNA, 20 nt, Human
uggcacaguuuucugagaaa

SEQ ID NO: 2700978 - RNA, 22 nt, Human
uggcacaguuuucugagaaaga

SEQ ID NO: 2700979 - RNA, 18 nt, Human
auccugaggcuccacuug

SEQ ID NO: 2700980 - RNA, 16 nt, Human
auccugaggcuccacu

SEQ ID NO: 2700981 - RNA, 13 nt, Human
auccugaggcucc

SEQ ID NO: 2700982 - RNA, 11 nt, Human
auccugaggcu

SEQ ID NO: 2700983 - RNA, 13 nt, Human
auccugccccuga

SEQ ID NO: 2700984 - RNA, 22 nt, Human
auccugaggcuccacuuggucu

SEQ ID NO: 2700985 - RNA, 16 nt, Human
auccugcaauuccacu

SEQ ID NO: 2700986 - RNA, 21 nt, Human
uugaaggaugcugucuucgua

SEQ ID NO: 2700987 - RNA, 14 nt, Human
uugaaggaugcugu

SEQ ID NO: 2700988 - RNA, 16 nt, Human
uugaaggaugcugucu

SEQ ID NO: 2700989 - RNA, 17 nt, Human
uugacacuuaaaaaugg

SEQ ID NO: 2700990 - RNA, 19 nt, Human
uugacacuuaaaaaugguu

SEQ ID NO: 2700991 - RNA, 16 nt, Human
aucccucccuccaccu

SEQ ID NO: 2700992 - RNA, 17 nt, Human
aucccucccuccaccuc

SEQ ID NO: 2700993 - RNA, 18 nt, Human
aucccucccuccaccucc

SEQ ID NO: 2700994 - RNA, 20 nt, Human
aucccucccuccaccucccu

SEQ ID NO: 2700995 - RNA, 21 nt, Human
aucccucccuccaccucccug

SEQ ID NO: 2700996 - RNA, 16 nt, Human
uucuguuuuauaauuu

SEQ ID NO: 2700997 - RNA, 17 nt, Human
uucuguuuuauaauuuu

SEQ ID NO: 2700998 - RNA, 23 nt, Human
aucacuugaacccgggaggcaga

SEQ ID NO: 2700999 - RNA, 19 nt, Human
aucaauuuuucuuauuuca

SEQ ID NO: 2701000 - RNA, 14 nt, Human
aucaauuuuucuua

SEQ ID NO: 2701001 - RNA, 13 nt, Human
aucaauuuaaaaa

SEQ ID NO: 2701002 - RNA, 21 nt, Human
aucaaggguacacugccuucu

SEQ ID NO: 2701003 - RNA, 18 nt, Human
aucaaauaugcaaagcac

SEQ ID NO: 2701004 - RNA, 17 nt, Human
aucaaauaugcaaagca

SEQ ID NO: 2701005 - RNA, 16 nt, Human
aucaaauaugcaaagc

SEQ ID NO: 2701006 - RNA, 16 nt, Human
aucaaggguacacugc

SEQ ID NO: 2701007 - RNA, 15 nt, Human
aucaaauaugcaaag

SEQ ID NO: 2701008 - RNA, 13 nt, Human
auauuuacaaaug

SEQ ID NO: 2701009 - RNA, 14 nt, Human
auauuguuugcuaa

SEQ ID NO: 2701010 - RNA, 17 nt, Human
uucagcgguuuauauaa

SEQ ID NO: 2701011 - RNA, 15 nt, Human
uucaucaaugaauga

SEQ ID NO: 2701012 - RNA, 13 nt, Human
auauaugcuaagu

SEQ ID NO: 2701013 - RNA, 23 nt, Human
auauguaccuaacgaaguauccu

SEQ ID NO: 2701014 - RNA, 14 nt, Human
auaugcaaagcacu

SEQ ID NO: 2701015 - RNA, 13 nt, Human
auaugcaaagcac

SEQ ID NO: 2701016 - RNA, 14 nt, Human
uucauuaucucaaa

SEQ ID NO: 2701017 - RNA, 22 nt, Human
augggacauuugcucauggaau

SEQ ID NO: 2701018 - RNA, 21 nt, Human
augggacauuugcucauggaa

SEQ ID NO: 2701019 - RNA, 23 nt, Human
auggcuauaggugcuacaaaaac

SEQ ID NO: 2701020 - RNA, 21 nt, Human
auggcuauaggugcuacaaaa

SEQ ID NO: 2701021 - RNA, 19 nt, Human
auggcuauaggugcuacaa

SEQ ID NO: 2701022 - RNA, 16 nt, Human
auggcuauaggugcua

SEQ ID NO: 2701023 - RNA, 17 nt, Human
auggaauuucucccagu

SEQ ID NO: 2701024 - RNA, 14 nt, Human
uuugaaauauugac

SEQ ID NO: 2701025 - RNA, 14 nt, Human
uuucugcaucagcu

SEQ ID NO: 2701026 - RNA, 14 nt, Human
uuucuaugaaauau

SEQ ID NO: 2701027 - RNA, 20 nt, Human
uuucuaugaaauauuauguu

SEQ ID NO: 2701028 - RNA, 13 nt, Human
uuucuaugaaaua

SEQ ID NO: 2701029 - RNA, 13 nt, Human
augcuaagugaaa

SEQ ID NO: 2701030 - RNA, 24 nt, Human
uuuaaagcuuauuaaaacucauuu

SEQ ID NO: 2701031 - RNA, 16 nt, Human
uuuauuacuguaagaa

SEQ ID NO: 2701032 - RNA, 17 nt, Human
uuuauaugcuucuguuu

SEQ ID NO: 2701033 - RNA, 23 nt, Human
auggaauuggagcucgugggaca

SEQ ID NO: 2701034 - RNA, 14 nt, Human
augcuguauuuuaa

SEQ ID NO: 2701035 - RNA, 23 nt, Human
augcugucuacacuaagagagaa

SEQ ID NO: 2701036 - RNA, 19 nt, Human
uuuauuacuguaagaaaau

SEQ ID NO: 2701037 - RNA, 16 nt, Human
uuuauuuuaauaaugu

SEQ ID NO: 2701038 - RNA, 16 nt, Human
auggaacauaaaauac

SEQ ID NO: 2701039 - RNA, 14 nt, Human
augauaacuggaaa

SEQ ID NO: 2701040 - RNA, 18 nt, Human
uugugaagcaaaauuuuu

SEQ ID NO: 2701041 - RNA, 20 nt, Human
uuuaaaaaagaaacauuugg

SEQ ID NO: 2701042 - RNA, 18 nt, Human
augaauuacauuuguaua

SEQ ID NO: 2701043 - RNA, 19 nt, Human
augaauuacauuuguauaa

SEQ ID NO: 2701044 - RNA, 17 nt, Human
augaauuacauuuguau

SEQ ID NO: 2701045 - RNA, 19 nt, Human
uuguauaaaauaauuuuua

SEQ ID NO: 2701046 - RNA, 13 nt, Human
uuguauaaaauaa

SEQ ID NO: 2701047 - RNA, 23 nt, Human
uuguaguguuggagaagaacuga

SEQ ID NO: 2701048 - RNA, 22 nt, Human
augaauuacauuuguauaaaau

SEQ ID NO: 2701049 - RNA, 21 nt, Human
augaauuaguuuuauaugcuu

SEQ ID NO: 2701050 - RNA, 23 nt, Human
augaauuaguuuuauaugcuucu

SEQ ID NO: 2701051 - RNA, 12 nt, Human
uugcucauggaa

SEQ ID NO: 2701052 - RNA, 11 nt, Human
uugcucaugga

SEQ ID NO: 2701053 - RNA, 21 nt, Human
augaaauauuauguuaaaacu

SEQ ID NO: 2701054 - RNA, 20 nt, Human
augaaauauuauguuaaaac

SEQ ID NO: 2701055 - RNA, 13 nt, Human
auuuagauguaua

SEQ ID NO: 2701056 - RNA, 17 nt, Human
auuuauuuuaauaaugu

SEQ ID NO: 2701057 - RNA, 12 nt, Human
auuucauuucuu

SEQ ID NO: 2701058 - RNA, 19 nt, Human
auuuauuuuaauaauguuu

SEQ ID NO: 2701059 - RNA, 20 nt, Human
auuuauuuuaauaauguuuc

SEQ ID NO: 2701060 - RNA, 14 nt, Human
auuugaaauauuga

SEQ ID NO: 2701061 - RNA, 18 nt, Human
auugacccacaagaaaug

SEQ ID NO: 2701062 - RNA, 15 nt, Human
auuguauuacaaauc

SEQ ID NO: 2701063 - RNA, 17 nt, Human
auuuuaaaagaaugauu

SEQ ID NO: 2701064 - RNA, 19 nt, Human
auuuguauaaaauaauuuu

SEQ ID NO: 2701065 - RNA, 15 nt, Human
auuuguauaaaauaa

SEQ ID NO: 2701066 - RNA, 18 nt, Human
auuuguauaaaauaauuu

SEQ ID NO: 2701067 - RNA, 18 nt, Human
auuuuaaaagaaugauua

SEQ ID NO: 2701068 - RNA, 22 nt, Human
auuuuaaaagaaugauuaugaa

SEQ ID NO: 2701069 - RNA, 22 nt, Human
auuuucaguuauuauauuuaca

SEQ ID NO: 2701070 - RNA, 14 nt, Human
uuuucucuaggaaa

SEQ ID NO: 2701071 - RNA, 18 nt, Human
uuuucugagaaagacuau

SEQ ID NO: 2701072 - RNA, 15 nt, Human
uuuucugagaaagac

SEQ ID NO: 2701073 - RNA, 17 nt, Human
auguuuucaggcuagau

SEQ ID NO: 2701074 - RNA, 21 nt, Human
auguuuucaggcuagauguau

SEQ ID NO: 2701075 - RNA, 15 nt, Human
auguuuucaggcuag

SEQ ID NO: 2701076 - RNA, 15 nt, Human
auuaaaagaauauuu

SEQ ID NO: 2701077 - RNA, 18 nt, Human
auguucaucaaugaauga

SEQ ID NO: 2701078 - RNA, 19 nt, Human
augugcuaguaauuggaaa

SEQ ID NO: 2701079 - RNA, 16 nt, Human
uuuuaauaauguuuca

SEQ ID NO: 2701080 - RNA, 12 nt, Human
uuuuaauaaugu

SEQ ID NO: 2701081 - RNA, 13 nt, Human
uuuuaauaauguu

SEQ ID NO: 2701082 - RNA, 14 nt, Human
uuuuaauaauguuu

SEQ ID NO: 2701083 - RNA, 19 nt, Human
uuuuuauauuugaaauauu

SEQ ID NO: 2701084 - RNA, 17 nt, Human
uuuuuauauuugaaaua

SEQ ID NO: 2701085 - RNA, 12 nt, Human
auuaccagggac

SEQ ID NO: 2701086 - RNA, 18 nt, Human
auuacauuuguauaaaau

SEQ ID NO: 2701087 - RNA, 20 nt, Human
auuacauuuguauaaaauaa

SEQ ID NO: 2701088 - RNA, 17 nt, Human
auuacauuuguauaaaa

SEQ ID NO: 2701089 - RNA, 19 nt, Human
uuuuugugaaaagcuccau

SEQ ID NO: 2701090 - RNA, 21 nt, Human
auuaaguaaugauaacuggaa

SEQ ID NO: 2701091 - RNA, 23 nt, Human
auuaaguaaugauaacuggaaac

SEQ ID NO: 2701092 - RNA, 14 nt, Human
aaaacaaggaugaa

SEQ ID NO: 2701093 - RNA, 18 nt, Human
aaaacacagcaaggguga

SEQ ID NO: 2701094 - RNA, 13 nt, Human
aaaacacagcaag

SEQ ID NO: 2701095 - RNA, 12 nt, Human
aaaacacagcaa

SEQ ID NO: 2701096 - RNA, 17 nt, Human
aaaacaaggaugaauua

SEQ ID NO: 2701097 - RNA, 16 nt, Human
aagauuuaccacuugu

SEQ ID NO: 2701098 - RNA, 13 nt, Human
aagccagauuuuc

SEQ ID NO: 2701099 - RNA, 21 nt, Human
aauaauccuaaacauaugaau

SEQ ID NO: 2701100 - RNA, 14 nt, Human
aauaaaauggguuu

SEQ ID NO: 2701101 - RNA, 19 nt, Human
aauaaaauggguuuuacug

SEQ ID NO: 2701102 - RNA, 20 nt, Human
aaugauaacuggaaacuuca

SEQ ID NO: 2701103 - RNA, 17 nt, Human
aaugauaacuggaaacu

SEQ ID NO: 2701104 - RNA, 13 nt, Human
aauccauacauuu

SEQ ID NO: 2701105 - RNA, 14 nt, Human
aauccauacauuug

SEQ ID NO: 2701106 - RNA, 15 nt, Human
aaucaagaaacuuaa

SEQ ID NO: 2701107 - RNA, 13 nt, Human
aaucacaauacau

SEQ ID NO: 2701108 - RNA, 16 nt, Human
aauauuauguuaaaac

SEQ ID NO: 2701109 - RNA, 14 nt, Human
aauuaguuuuauau

SEQ ID NO: 2701110 - RNA, 17 nt, Human
aauuaguuuuauaugcu

SEQ ID NO: 2701111 - RNA, 20 nt, Human
aauuaguuuuauaugcuucu

SEQ ID NO: 2701112 - RNA, 19 nt, Human
aaaucaaauaugcaaagca

SEQ ID NO: 2701113 - RNA, 18 nt, Human
aaaucaaauaugcaaagc

SEQ ID NO: 2701114 - RNA, 16 nt, Human
aaaucaaauaugcaaa

SEQ ID NO: 2701115 - RNA, 18 nt, Human
aaauggcuuccuggcaau

SEQ ID NO: 2701116 - RNA, 12 nt, Human
aaauaacaauga

SEQ ID NO: 2701117 - RNA, 16 nt, Human
aaagaugaaaauauuu

SEQ ID NO: 2701118 - RNA, 13 nt, Human
aaagaugaaaaua

SEQ ID NO: 2701119 - RNA, 17 nt, Human
aaagaugaaaauauuug

SEQ ID NO: 2701120 - RNA, 19 nt, Human
aaacugccagcaacgcagg

SEQ ID NO: 2701121 - RNA, 17 nt, Human
aaacugacucuuaagaa

SEQ ID NO: 2701122 - RNA, 15 nt, Human
aaacugccagcaacg

SEQ ID NO: 2701123 - RNA, 14 nt, Human
aaacugccagcaac

SEQ ID NO: 2701124 - RNA, 16 nt, Human
aaacugacucuuaaga

SEQ ID NO: 2701125 - RNA, 14 nt, Human
aagaaauguaaggg

SEQ ID NO: 2701126 - RNA, 13 nt, Human
aagaaauguaagg

SEQ ID NO: 2701127 - RNA, 23 nt, Human
aacugacacaugcugaacaucac

SEQ ID NO: 2701128 - RNA, 15 nt, Human
aacacgagcaggcua

SEQ ID NO: 2701129 - RNA, 13 nt, Human
acaacuauauugu

SEQ ID NO: 2701130 - RNA, 20 nt, Human
acagcucugcauacucauua

SEQ ID NO: 2701131 - RNA, 15 nt, Human
acagccagacuggca

SEQ ID NO: 2701132 - RNA, 13 nt, Human
acagccagacugg

SEQ ID NO: 2701133 - RNA, 16 nt, Human
acagccagacuggcac

SEQ ID NO: 2701134 - RNA, 18 nt, Human
acagcaguugaaaagacu

SEQ ID NO: 2701135 - RNA, 15 nt, Human
acagcaguugaaaag

SEQ ID NO: 2701136 - RNA, 13 nt, Human
acauguuacaaca

SEQ ID NO: 2701137 - RNA, 18 nt, Human
acauuugcucauggaauu

SEQ ID NO: 2701138 - RNA, 16 nt, Human
acauuugcucauggaa

SEQ ID NO: 2701139 - RNA, 14 nt, Human
acauuuguauaaaa

SEQ ID NO: 2701140 - RNA, 15 nt, Human
acccacaagaaauga

SEQ ID NO: 2701141 - RNA, 16 nt, Human
acccaaguccaagcau

SEQ ID NO: 2701142 - RNA, 18 nt, Human
acuuguaaaggaauuuaa

SEQ ID NO: 2701143 - RNA, 15 nt, Human
acuuggucugugaga

SEQ ID NO: 2701144 - RNA, 14 nt, Human
acuuggucugugag

SEQ ID NO: 2701145 - RNA, 20 nt, Human
acuuguaaaggaauuuaaaa

SEQ ID NO: 2701146 - RNA, 19 nt, Human
acuuguaaaggaauuuaaa

SEQ ID NO: 2701147 - RNA, 12 nt, Human
acuggaacucuc

SEQ ID NO: 2701148 - RNA, 14 nt, Human
acucaaaucaagaa

SEQ ID NO: 2701149 - RNA, 14 nt, Human
acuagcuauggugu

SEQ ID NO: 2701150 - RNA, 13 nt, Human
acucccuuucaac

SEQ ID NO: 2701151 - RNA, 12 nt, Human
acucccuuucaa

SEQ ID NO: 2701152 - RNA, 16 nt, Human
acgugcacgcacacug

SEQ ID NO: 2701153 - RNA, 15 nt, Human
acuaagagagaauga

SEQ ID NO: 2701154 - RNA, 16 nt, Human
acuaagagagaaugag

SEQ ID NO: 2701155 - RNA, 14 nt, Human
auaauuacuauguc

SEQ ID NO: 2701156 - RNA, 18 nt, Human
auaucacuugucaauaaa

SEQ ID NO: 2701157 - RNA, 15 nt, Human
auaucaauuuaaaaa

SEQ ID NO: 2701158 - RNA, 23 nt, Human
auaugcuucuguuuuauaauuuu

SEQ ID NO: 2701159 - RNA, 23 nt, Human
auauuucagauaaucacaauaca

SEQ ID NO: 2701160 - RNA, 18 nt, Human
auauuuauuuuaauaaug

SEQ ID NO: 2701161 - RNA, 14 nt, Human
auauuuauuacugu

SEQ ID NO: 2701162 - RNA, 19 nt, Human
auauuuauuacuguaagaa

SEQ ID NO: 2701163 - RNA, 19 nt, Human
aguuguaccgcaaugugac

SEQ ID NO: 2701164 - RNA, 18 nt, Human
aguuguaccgcaauguga

SEQ ID NO: 2701165 - RNA, 15 nt, Human
agugauuaccaggga

SEQ ID NO: 2701166 - RNA, 18 nt, Human
agugauuaccagggacug

SEQ ID NO: 2701167 - RNA, 13 nt, Human
agucaaauugugu

SEQ ID NO: 2701168 - RNA, 15 nt, Human
agucaaauuguguga

SEQ ID NO: 2701169 - RNA, 17 nt, Human
agucaaauugugugaaa

SEQ ID NO: 2701170 - RNA, 16 nt, Human
aguccaagcauuuaga

SEQ ID NO: 2701171 - RNA, 21 nt, Human
aguccaagcauuuagauguau

SEQ ID NO: 2701172 - RNA, 17 nt, Human
aucagcugcugaaacaa

SEQ ID NO: 2701173 - RNA, 22 nt, Human
aucuuauaauuuaaaauaugcu

SEQ ID NO: 2701174 - RNA, 20 nt, Human
auguaagggaaacugccagc

SEQ ID NO: 2701175 - RNA, 22 nt, Human
auguaagggaaacugccagcaa

SEQ ID NO: 2701176 - RNA, 21 nt, Human
auguaagggaaacugccagca

SEQ ID NO: 2701177 - RNA, 14 nt, Human
agcuguaugauucc

SEQ ID NO: 2701178 - RNA, 18 nt, Human
agcuucacuguaaaauaa

SEQ ID NO: 2701179 - RNA, 17 nt, Human
aggauguugaaaaaguu

SEQ ID NO: 2701180 - RNA, 14 nt, Human
aggauguugaaaaa

SEQ ID NO: 2701181 - RNA, 17 nt, Human
agacugcauuauauuua

SEQ ID NO: 2701182 - RNA, 21 nt, Human
agauaggucagugcaaauacu

SEQ ID NO: 2701183 - RNA, 21 nt, Human
agccgggcgugguggugagug

SEQ ID NO: 2701184 - RNA, 19 nt, Human
agccccacccucagaugca

SEQ ID NO: 2701185 - RNA, 21 nt, Human
agaugggagaaucacuugaac

SEQ ID NO: 2701186 - RNA, 14 nt, Human
agauguagaggaga

SEQ ID NO: 2701187 - RNA, 21 nt, Human
agcaguugaaaagacuccaaa

SEQ ID NO: 2701188 - RNA, 23 nt, Human
agcaguugaaaagacuccaaaga

SEQ ID NO: 2701189 - RNA, 16 nt, Human
agcaguucagagcugc

SEQ ID NO: 2701190 - RNA, 15 nt, Human
agcaguucagagcug

SEQ ID NO: 2701191 - RNA, 17 nt, Human
agcaguucagagcugcc

SEQ ID NO: 2701192 - RNA, 18 nt, Human
agcaguucagagcugccc

SEQ ID NO: 2701193 - RNA, 19 nt, Human
agcaguucagagcugcccu

SEQ ID NO: 2701194 - RNA, 15 nt, Human
agccagauuuuccug

SEQ ID NO: 2701195 - RNA, 19 nt, Human
agccagauuuuccugaaaa

SEQ ID NO: 2701196 - RNA, 12 nt, Human
agcaugaagaca

SEQ ID NO: 2701197 - RNA, 17 nt, Human
caaggcugauuaaacca

SEQ ID NO: 2701198 - RNA, 21 nt, Human
caagccagauuuuccugaaaa

SEQ ID NO: 2701199 - RNA, 22 nt, Human
caaugugacuuaaugccacuaa

SEQ ID NO: 2701200 - RNA, 23 nt, Human
caauacaucccuuaccugggaaa

SEQ ID NO: 2701201 - RNA, 23 nt, Human
caaaacuucagacauagaauuaa

SEQ ID NO: 2701202 - RNA, 19 nt, Human
caaaaaucucaauauuuca

SEQ ID NO: 2701203 - RNA, 13 nt, Human
auuuuccugaaaa

SEQ ID NO: 2701204 - RNA, 17 nt, Human
caaaaacacagcaaggg

SEQ ID NO: 2701205 - RNA, 15 nt, Human
caaaaacacagcaag

SEQ ID NO: 2701206 - RNA, 14 nt, Human
caaaaacacagcaa

SEQ ID NO: 2701207 - RNA, 13 nt, Human
caaaaacacagca

SEQ ID NO: 2701208 - RNA, 21 nt, Human
caaauaugcaaagcacugacu

SEQ ID NO: 2701209 - RNA, 19 nt, Human
caaauaugcaaagcacuga

SEQ ID NO: 2701210 - RNA, 15 nt, Human
caaauugugugaaag

SEQ ID NO: 2701211 - RNA, 16 nt, Human
caaaauuuuuucucua

SEQ ID NO: 2701212 - RNA, 21 nt, Human
caaaauuuuuucucuaggaaa

SEQ ID NO: 2701213 - RNA, 22 nt, Human
caaaauuuuuucucuaggaaau

SEQ ID NO: 2701214 - RNA, 19 nt, Human
cacaguuuucugagaaaga

SEQ ID NO: 2701215 - RNA, 17 nt, Human
cacaguuuucugagaaa

SEQ ID NO: 2701216 - RNA, 16 nt, Human
cacaguuuucugagaa

SEQ ID NO: 2701217 - RNA, 23 nt, Human
cacuugaacccgggaggcagagg

SEQ ID NO: 2701218 - RNA, 21 nt, Human
cacuugaacccgggaggcaga

SEQ ID NO: 2701219 - RNA, 20 nt, Human
cacuugaacccgggaggcag

SEQ ID NO: 2701220 - RNA, 15 nt, Human
cacuuggucugugag

SEQ ID NO: 2701221 - RNA, 19 nt, Human
cacuguggguagacacaca

SEQ ID NO: 2701222 - RNA, 22 nt, Human
cacuguggguagacacacauga

SEQ ID NO: 2701223 - RNA, 24 nt, Human
cacuguggguagacacacaugaag

SEQ ID NO: 2701224 - RNA, 14 nt, Human
cacugucaagauga

SEQ ID NO: 2701225 - RNA, 20 nt, Human
cacugacuucuaaguaaaac

SEQ ID NO: 2701226 - RNA, 16 nt, Human
cacugacuucuaagua

SEQ ID NO: 2701227 - RNA, 15 nt, Human
cacugacuucuaagu

SEQ ID NO: 2701228 - RNA, 14 nt, Human
cacugacuucuaag

SEQ ID NO: 2701229 - RNA, 21 nt, Human
cacugacuucuaaguaaaacc

SEQ ID NO: 2701230 - RNA, 20 nt, Human
cacugccuucucaacuccaa

SEQ ID NO: 2701231 - RNA, 22 nt, Human
cacguucuuacuaguuucccuu

SEQ ID NO: 2701232 - RNA, 13 nt, Human
cacuaaacaaaga

SEQ ID NO: 2701233 - RNA, 20 nt, Human
cacgagcaggcuacugucag

SEQ ID NO: 2701234 - RNA, 19 nt, Human
cacgagcaggcuacuguca

SEQ ID NO: 2701235 - RNA, 17 nt, Human
cacgagcaggcuacugu

SEQ ID NO: 2701236 - RNA, 22 nt, Human
cacgagcaggcuacugucagcu

SEQ ID NO: 2701237 - RNA, 15 nt, Human
cacgcacacugucug

SEQ ID NO: 2701238 - RNA, 16 nt, Human
cacucaaaucaagaaa

SEQ ID NO: 2701239 - RNA, 21 nt, Human
cacuaaauugacacuuaaaaa

SEQ ID NO: 2701240 - RNA, 17 nt, Human
cacuaagagagaaugag

SEQ ID NO: 2701241 - RNA, 14 nt, Human
cacuaguauuucua

SEQ ID NO: 2701242 - RNA, 19 nt, Human
cacuaguauuucuaugaaa

SEQ ID NO: 2701243 - RNA, 13 nt, Human
caccucccugcaa

SEQ ID NO: 2701244 - RNA, 14 nt, Human
caccucccugcaau

SEQ ID NO: 2701245 - RNA, 10 nt, Human
caccucccug

SEQ ID NO: 2701246 - RNA, 11 nt, Human
caccucaugga

SEQ ID NO: 2701247 - RNA, 12 nt, Human
caccucauggaa

SEQ ID NO: 2701248 - RNA, 14 nt, Human
caccucauggaauu

SEQ ID NO: 2701249 - RNA, 20 nt, Human
cacccucagaugcacaugag

SEQ ID NO: 2701250 - RNA, 19 nt, Human
cagacauagaauuaacaca

SEQ ID NO: 2701251 - RNA, 17 nt, Human
cagacauagaauuaaca

SEQ ID NO: 2701252 - RNA, 20 nt, Human
cagaagcaacccaaauguuc

SEQ ID NO: 2701253 - RNA, 19 nt, Human
cagaagcaacccaaauguu

SEQ ID NO: 2701254 - RNA, 21 nt, Human
cagaaucgcuccaccuugcag

SEQ ID NO: 2701255 - RNA, 23 nt, Human
cagaaucgcuccaccuugcagcu

SEQ ID NO: 2701256 - RNA, 19 nt, Human
cagaaagcagaacagugau

SEQ ID NO: 2701257 - RNA, 23 nt, Human
cagaacagugauuaccagggacu

SEQ ID NO: 2701258 - RNA, 18 nt, Human
cagaaagcagaacaguga

SEQ ID NO: 2701259 - RNA, 20 nt, Human
cagagccccacccucagaug

SEQ ID NO: 2701260 - RNA, 14 nt, Human
cagauaaucacaau

SEQ ID NO: 2701261 - RNA, 23 nt, Human
cagauaaauaguuuaugauucca

SEQ ID NO: 2701262 - RNA, 14 nt, Human
cagauaaacaguag

SEQ ID NO: 2701263 - RNA, 14 nt, Human
cagauccuggaaau

SEQ ID NO: 2701264 - RNA, 13 nt, Human
cagauccuggaaa

SEQ ID NO: 2701265 - RNA, 17 nt, Human
cagaugcacaugagcug

SEQ ID NO: 2701266 - RNA, 15 nt, Human
caggaaguagaggag

SEQ ID NO: 2701267 - RNA, 16 nt, Human
caggaaguagaggagg

SEQ ID NO: 2701268 - RNA, 22 nt, Human
caggaagcugugagagcaguuu

SEQ ID NO: 2701269 - RNA, 13 nt, Human
caggaagcuguga

SEQ ID NO: 2701270 - RNA, 14 nt, Human
caggaagcugugag

SEQ ID NO: 2701271 - RNA, 18 nt, Human
cagcuugaaacugagaug

SEQ ID NO: 2701272 - RNA, 23 nt, Human
cagcuuuccucaaaacuucagac

SEQ ID NO: 2701273 - RNA, 18 nt, Human
caggaaccacaagacugc

SEQ ID NO: 2701274 - RNA, 18 nt, Human
cagcuguaugauucccag

SEQ ID NO: 2701275 - RNA, 21 nt, Human
cagcugcugaaacaacaaaua

SEQ ID NO: 2701276 - RNA, 20 nt, Human
cagcugcugaaacaacaaau

SEQ ID NO: 2701277 - RNA, 20 nt, Human
cagcucugcauacucauuag

SEQ ID NO: 2701278 - RNA, 16 nt, Human
cagcucuccccuucuc

SEQ ID NO: 2701279 - RNA, 13 nt, Human
cagcccucagaau

SEQ ID NO: 2701280 - RNA, 16 nt, Human
cagccuaguugaucag

SEQ ID NO: 2701281 - RNA, 19 nt, Human
cagcuacuugggaggcuga

SEQ ID NO: 2701282 - RNA, 23 nt, Human
cagcaacgcaggcccccaggugc

SEQ ID NO: 2701283 - RNA, 14 nt, Human
cagauuuuccugaa

SEQ ID NO: 2701284 - RNA, 15 nt, Human
cagauuuuccugaaa

SEQ ID NO: 2701285 - RNA, 23 nt, Human
cagcaagggugaugggaaagcau

SEQ ID NO: 2701286 - RNA, 22 nt, Human
cagcaagggugaugggaaagca

SEQ ID NO: 2701287 - RNA, 19 nt, Human
cagcaagggugaugggaaa

SEQ ID NO: 2701288 - RNA, 13 nt, Human
caggcuagaugua

SEQ ID NO: 2701289 - RNA, 19 nt, Human
caggcuagauguauguacu

SEQ ID NO: 2701290 - RNA, 14 nt, Human
caggcuacugucag

SEQ ID NO: 2701291 - RNA, 11 nt, Human
caggggacagg

SEQ ID NO: 2701292 - RNA, 16 nt, Human
caggggacaggauggu

SEQ ID NO: 2701293 - RNA, 17 nt, Human
cagggcauggcugggaa

SEQ ID NO: 2701294 - RNA, 18 nt, Human
cagggacaggauaagagg

SEQ ID NO: 2701295 - RNA, 19 nt, Human
caggcccccaggugccagu

SEQ ID NO: 2701296 - RNA, 14 nt, Human
caggcccccaggug

SEQ ID NO: 2701297 - RNA, 20 nt, Human
caggcccccaggugccaguu

SEQ ID NO: 2701298 - RNA, 16 nt, Human
caggauuuuaaucuuu

SEQ ID NO: 2701299 - RNA, 21 nt, Human
caggaugguucccuugaugaa

SEQ ID NO: 2701300 - RNA, 23 nt, Human
caggaugguucccuugaugaaga

SEQ ID NO: 2701301 - RNA, 17 nt, Human
cagugauuaccagggac

SEQ ID NO: 2701302 - RNA, 18 nt, Human
cagugauuaccagggacu

SEQ ID NO: 2701303 - RNA, 20 nt, Human
cagugaaagaaaauaacaau

SEQ ID NO: 2701304 - RNA, 16 nt, Human
cagugaaagaaaauaa

SEQ ID NO: 2701305 - RNA, 15 nt, Human
cagugagacagcucu

SEQ ID NO: 2701306 - RNA, 12 nt, Human
caguauggcagc

SEQ ID NO: 2701307 - RNA, 12 nt, Human
caguagugauag

SEQ ID NO: 2701308 - RNA, 22 nt, Human
cagucaggaaagagaacuucca

SEQ ID NO: 2701309 - RNA, 15 nt, Human
cagucaggaaagaga

SEQ ID NO: 2701310 - RNA, 18 nt, Human
cagucaggaaagagaacu

SEQ ID NO: 2701311 - RNA, 13 nt, Human
caguccaugaaga

SEQ ID NO: 2701312 - RNA, 22 nt, Human
cauuccaacuaucucauuucca

SEQ ID NO: 2701313 - RNA, 13 nt, Human
cauucuggaauaa

SEQ ID NO: 2701314 - RNA, 21 nt, Human
cauuguaaaugugcuuuuaaa

SEQ ID NO: 2701315 - RNA, 20 nt, Human
caugugcuaguaauuggaaa

SEQ ID NO: 2701316 - RNA, 20 nt, Human
cauggaauuggagcucgugg

SEQ ID NO: 2701317 - RNA, 23 nt, Human
caugggacagggaggacgcucuc

SEQ ID NO: 2701318 - RNA, 20 nt, Human
caucccucccuccaccuccc

SEQ ID NO: 2701319 - RNA, 18 nt, Human
caucccuuaccugggaaa

SEQ ID NO: 2701320 - RNA, 22 nt, Human
caucccucccuccaccucccug

SEQ ID NO: 2701321 - RNA, 23 nt, Human
caucccucccuccaccucccugc

SEQ ID NO: 2701322 - RNA, 13 nt, Human
cauauauaacaau

SEQ ID NO: 2701323 - RNA, 15 nt, Human
cauauauaacaaugc

SEQ ID NO: 2701324 - RNA, 18 nt, Human
caugaagauguagaggag

SEQ ID NO: 2701325 - RNA, 19 nt, Human
caugaagauguagaggaga

SEQ ID NO: 2701326 - RNA, 16 nt, Human
caugagguacugagag

SEQ ID NO: 2701327 - RNA, 19 nt, Human
caugagguacugagaguga

SEQ ID NO: 2701328 - RNA, 14 nt, Human
ccaccucccugcaa

SEQ ID NO: 2701329 - RNA, 13 nt, Human
ccagcaguucaga

SEQ ID NO: 2701330 - RNA, 18 nt, Human
ccagcaguucagagcugc

SEQ ID NO: 2701331 - RNA, 19 nt, Human
ccagcaguucagagcugcc

SEQ ID NO: 2701332 - RNA, 20 nt, Human
ccagcaguucagagcugccc

SEQ ID NO: 2701333 - RNA, 21 nt, Human
ccagcaguucagagcugcccu

SEQ ID NO: 2701334 - RNA, 22 nt, Human
ccagcaguucagagcugcccuc

SEQ ID NO: 2701335 - RNA, 23 nt, Human
ccagcaguucagagcugcccucu

SEQ ID NO: 2701336 - RNA, 22 nt, Human
ccagccagcaguucagagcugc

SEQ ID NO: 2701337 - RNA, 19 nt, Human
ccaugggacagggaggacg

SEQ ID NO: 2701338 - RNA, 16 nt, Human
ccaugggacagggagg

SEQ ID NO: 2701339 - RNA, 21 nt, Human
ccaguuauggcuauaggugcu

SEQ ID NO: 2701340 - RNA, 14 nt, Human
ccaguuauggcuau

SEQ ID NO: 2701341 - RNA, 19 nt, Human
ccaguguuuuaggagcaug

SEQ ID NO: 2701342 - RNA, 19 nt, Human
ccuuggggcugaugcaguu

SEQ ID NO: 2701343 - RNA, 14 nt, Human
ccuugaugaagaag

SEQ ID NO: 2701344 - RNA, 20 nt, Human
ccuugaaaacuuuaugcuaa

SEQ ID NO: 2701345 - RNA, 20 nt, Human
ccuucggccuccauccugag

SEQ ID NO: 2701346 - RNA, 19 nt, Human
ccuucggccuccauccuga

SEQ ID NO: 2701347 - RNA, 14 nt, Human
ccuucggccuccau

SEQ ID NO: 2701348 - RNA, 21 nt, Human
ccuguuaaaagaugaaaauau

SEQ ID NO: 2701349 - RNA, 20 nt, Human
ccuguuaaaagaugaaaaua

SEQ ID NO: 2701350 - RNA, 18 nt, Human
cgagcaggcuacugucag

SEQ ID NO: 2701351 - RNA, 16 nt, Human
ccugcaauaaaauggg

SEQ ID NO: 2701352 - RNA, 11 nt, Human
ccugagcccca

SEQ ID NO: 2701353 - RNA, 23 nt, Human
ccuggaaaucaggguuaguauug

SEQ ID NO: 2701354 - RNA, 22 nt, Human
ccugggcagcugccuccccucc

SEQ ID NO: 2701355 - RNA, 15 nt, Human
cccgugggguuccuc

SEQ ID NO: 2701356 - RNA, 11 nt, Human
cccucuccugg

SEQ ID NO: 2701357 - RNA, 12 nt, Human
cccucuccuggg

SEQ ID NO: 2701358 - RNA, 13 nt, Human
cccucuccugggc

SEQ ID NO: 2701359 - RNA, 14 nt, Human
cccucuccugggca

SEQ ID NO: 2701360 - RNA, 15 nt, Human
cccucuccugggcag

SEQ ID NO: 2701361 - RNA, 19 nt, Human
cccuccaccucccugcaau

SEQ ID NO: 2701362 - RNA, 15 nt, Human
cccuccaccucccug

SEQ ID NO: 2701363 - RNA, 17 nt, Human
cccuccaccucccugca

SEQ ID NO: 2701364 - RNA, 14 nt, Human
cccuccaccucccu

SEQ ID NO: 2701365 - RNA, 12 nt, Human
cccuccaccucc

SEQ ID NO: 2701366 - RNA, 20 nt, Human
cccacaagaaaugaaagcag

SEQ ID NO: 2701367 - RNA, 13 nt, Human
cccacaagaaaug

SEQ ID NO: 2701368 - RNA, 16 nt, Human
ccgggcguggugguga

SEQ ID NO: 2701369 - RNA, 13 nt, Human
ccuccaccucccu

SEQ ID NO: 2701370 - RNA, 14 nt, Human
ccuccaccucccug

SEQ ID NO: 2701371 - RNA, 15 nt, Human
ccuccaccucccugc

SEQ ID NO: 2701372 - RNA, 17 nt, Human
ccuccaccucccugcaa

SEQ ID NO: 2701373 - RNA, 22 nt, Human
ccuccaccucccugcaauaaaa

SEQ ID NO: 2701374 - RNA, 14 nt, Human
ccuccauccugagg

SEQ ID NO: 2701375 - RNA, 16 nt, Human
ccuccucugcuugcca

SEQ ID NO: 2701376 - RNA, 13 nt, Human
ccuccucugcuug

SEQ ID NO: 2701377 - RNA, 18 nt, Human
ccuccucugcuugccauc

SEQ ID NO: 2701378 - RNA, 20 nt, Human
ccucccuccaccucccugca

SEQ ID NO: 2701379 - RNA, 17 nt, Human
ccucccuccaccucccu

SEQ ID NO: 2701380 - RNA, 20 nt, Human
cuucggccuccauccugagg

SEQ ID NO: 2701381 - RNA, 20 nt, Human
cuuccuuggacucauuuuaa

SEQ ID NO: 2701382 - RNA, 15 nt, Human
cuucagccugaaaga

SEQ ID NO: 2701383 - RNA, 16 nt, Human
cuucagcgguuuauau

SEQ ID NO: 2701384 - RNA, 17 nt, Human
cuucaaauccuugaaga

SEQ ID NO: 2701385 - RNA, 14 nt, Human
cuucacaacagauu

SEQ ID NO: 2701386 - RNA, 12 nt, Human
cuucacaacaga

SEQ ID NO: 2701387 - RNA, 15 nt, Human
cuguuuuauaauuuu

SEQ ID NO: 2701388 - RNA, 14 nt, Human
cuguuuuauaauuu

SEQ ID NO: 2701389 - RNA, 17 nt, Human
cuuaauuaaaagaauau

SEQ ID NO: 2701390 - RNA, 16 nt, Human
cuuaauuaaaagaaua

SEQ ID NO: 2701391 - RNA, 20 nt, Human
cuuaauuaaaagaauauuuu

SEQ ID NO: 2701392 - RNA, 19 nt, Human
cuuaauuaaaagaauauuu

SEQ ID NO: 2701393 - RNA, 21 nt, Human
cuuaagaagacugcauuauau

SEQ ID NO: 2701394 - RNA, 23 nt, Human
cuuaagaagacugcauuauauuu

SEQ ID NO: 2701395 - RNA, 16 nt, Human
cuguuaaaagaugaaa

SEQ ID NO: 2701396 - RNA, 15 nt, Human
cuguuaaaagaugaa

SEQ ID NO: 2701397 - RNA, 19 nt, Human
cuguuaaaagaugaaaaua

SEQ ID NO: 2701398 - RNA, 18 nt, Human
cugucuucacaacagauu

SEQ ID NO: 2701399 - RNA, 21 nt, Human
gaacuagaguuuagcuggaaa

SEQ ID NO: 2701400 - RNA, 22 nt, Human
gaacuagaguuuagcuggaaaa

SEQ ID NO: 2701401 - RNA, 14 nt, Human
gaacucccuuucaa

SEQ ID NO: 2701402 - RNA, 15 nt, Human
gaacucccuuucaac

SEQ ID NO: 2701403 - RNA, 22 nt, Human
gaacuuccagauccuggaaauc

SEQ ID NO: 2701404 - RNA, 21 nt, Human
gaacuuguaaaggaauuuaaa

SEQ ID NO: 2701405 - RNA, 21 nt, Human
gaagaagcaccaaucaugaau

SEQ ID NO: 2701406 - RNA, 13 nt, Human
gaaauauuauguu

SEQ ID NO: 2701407 - RNA, 16 nt, Human
gaaauauuauguuaaa

SEQ ID NO: 2701408 - RNA, 21 nt, Human
gaagccuuggggcugaugcag

SEQ ID NO: 2701409 - RNA, 17 nt, Human
gaagacugcauuauauu

SEQ ID NO: 2701410 - RNA, 14 nt, Human
gaauacuuuauaaa

SEQ ID NO: 2701411 - RNA, 20 nt, Human
gaauaauccuaaacauauga

SEQ ID NO: 2701412 - RNA, 20 nt, Human
gaaaaucuuauaauuuaaaa

SEQ ID NO: 2701413 - RNA, 19 nt, Human
gaaaauaacgauaaaagac

SEQ ID NO: 2701414 - RNA, 19 nt, Human
gaaaaucuuauaauuuaaa

SEQ ID NO: 2701415 - RNA, 12 nt, Human
gaaaauaucacu

SEQ ID NO: 2701416 - RNA, 22 nt, Human
gaaaacaauaacgauaaaagac

SEQ ID NO: 2701417 - RNA, 18 nt, Human
cuuuaaagggauggcaag

SEQ ID NO: 2701418 - RNA, 21 nt, Human
cuuuauuuucuauaauuuaaa

SEQ ID NO: 2701419 - RNA, 13 nt, Human
cuuuccacagaag

SEQ ID NO: 2701420 - RNA, 19 nt, Human
cuuguaaaggaauuuaaaa

SEQ ID NO: 2701421 - RNA, 22 nt, Human
cuugccaucccucccuccaccu

SEQ ID NO: 2701422 - RNA, 21 nt, Human
cuugccaucccucccuccacc

SEQ ID NO: 2701423 - RNA, 20 nt, Human
cuccccuccucugcuugcca

SEQ ID NO: 2701424 - RNA, 13 nt, Human
cuccauccugagg

SEQ ID NO: 2701425 - RNA, 11 nt, Human
cuccccuccuc

SEQ ID NO: 2701426 - RNA, 13 nt, Human
cuccccuccucug

SEQ ID NO: 2701427 - RNA, 11 nt, Human
cuccauccuga

SEQ ID NO: 2701428 - RNA, 12 nt, Human
cuccauccugag

SEQ ID NO: 2701429 - RNA, 17 nt, Human
cuccaccuugcagcucu

SEQ ID NO: 2701430 - RNA, 21 nt, Human
cuccaaacugacucuuaagaa

SEQ ID NO: 2701431 - RNA, 12 nt, Human
cuccaaagaaau

SEQ ID NO: 2701432 - RNA, 13 nt, Human
cuccaaagaaaug

SEQ ID NO: 2701433 - RNA, 14 nt, Human
cucauuucuagcag

SEQ ID NO: 2701434 - RNA, 21 nt, Human
cucauuuccaagcaaguauua

SEQ ID NO: 2701435 - RNA, 18 nt, Human
cuauauuguuugcuaagc

SEQ ID NO: 2701436 - RNA, 20 nt, Human
cuauaggugcuacaaaaaca

SEQ ID NO: 2701437 - RNA, 22 nt, Human
cuauaggugcuacaaaaacaca

SEQ ID NO: 2701438 - RNA, 21 nt, Human
cuauaggugcuacaaaaacac

SEQ ID NO: 2701439 - RNA, 16 nt, Human
cuauucaaacagucuc

SEQ ID NO: 2701440 - RNA, 18 nt, Human
cuauucaaacagucucag

SEQ ID NO: 2701441 - RNA, 23 nt, Human
cuauucaaacagucucaggaaau

SEQ ID NO: 2701442 - RNA, 21 nt, Human
cuagugagcagucaggaaaga

SEQ ID NO: 2701443 - RNA, 19 nt, Human
cuagugaaagaggcagcuu

SEQ ID NO: 2701444 - RNA, 18 nt, Human
cuagugaaagaggcagcu

SEQ ID NO: 2701445 - RNA, 20 nt, Human
cuagugaaacucguuaauuu

SEQ ID NO: 2701446 - RNA, 16 nt, Human
cuaguaauuggaaagg

SEQ ID NO: 2701447 - RNA, 15 nt, Human
cugcaauaaaauggg

SEQ ID NO: 2701448 - RNA, 22 nt, Human
cugcaauaaaauggguuuuacu

SEQ ID NO: 2701449 - RNA, 15 nt, Human
cugaggcuccacuug

SEQ ID NO: 2701450 - RNA, 21 nt, Human
cugaggcuccacuuggucugu

SEQ ID NO: 2701451 - RNA, 20 nt, Human
cugcaucagcugcugaaaca

SEQ ID NO: 2701452 - RNA, 14 nt, Human
cugaagaagauggu

SEQ ID NO: 2701453 - RNA, 23 nt, Human
cugacgacuugagugcucaguag

SEQ ID NO: 2701454 - RNA, 18 nt, Human
cugagaaagacuauucaa

SEQ ID NO: 2701455 - RNA, 15 nt, Human
cugagaaagacuauu

SEQ ID NO: 2701456 - RNA, 13 nt, Human
cugagaaagacua

SEQ ID NO: 2701457 - RNA, 12 nt, Human
cugagaaagacu

SEQ ID NO: 2701458 - RNA, 21 nt, Human
cugagaugugaacacaucagc

SEQ ID NO: 2701459 - RNA, 20 nt, Human
cugagaaagacuauucaaac

SEQ ID NO: 2701460 - RNA, 19 nt, Human
cugagaaagacuauucaaa

SEQ ID NO: 2701461 - RNA, 20 nt, Human
cugagaugugaacacaucag

SEQ ID NO: 2701462 - RNA, 16 nt, Human
cugagaugugaacaca

SEQ ID NO: 2701463 - RNA, 16 nt, Human
cugagcaggauuuuaa

SEQ ID NO: 2701464 - RNA, 21 nt, Human
cucuggccuucggccuccauc

SEQ ID NO: 2701465 - RNA, 22 nt, Human
cucuggccuucggccuccaucc

SEQ ID NO: 2701466 - RNA, 19 nt, Human
cucuuaagaagacugcauu

SEQ ID NO: 2701467 - RNA, 14 nt, Human
gagcugcccucucc

SEQ ID NO: 2701468 - RNA, 17 nt, Human
gagcugcccucuccugg

SEQ ID NO: 2701469 - RNA, 15 nt, Human
gagcugcccucuccu

SEQ ID NO: 2701470 - RNA, 16 nt, Human
gagcugcccucuccug

SEQ ID NO: 2701471 - RNA, 14 nt, Human
gagcuacaaaugca

SEQ ID NO: 2701472 - RNA, 13 nt, Human
gagcuacaaaugc

SEQ ID NO: 2701473 - RNA, 12 nt, Human
gagcuacaaaug

SEQ ID NO: 2701474 - RNA, 21 nt, Human
gagcaggcuacugucagcucc

SEQ ID NO: 2701475 - RNA, 19 nt, Human
gaggcagagguugcaguga

SEQ ID NO: 2701476 - RNA, 14 nt, Human
gaucuuuaaaauac

SEQ ID NO: 2701477 - RNA, 16 nt, Human
gaugggaaagcauugu

SEQ ID NO: 2701478 - RNA, 18 nt, Human
gaugcaguucugaagaag

SEQ ID NO: 2701479 - RNA, 19 nt, Human
gauguugaaaaaguucugc

SEQ ID NO: 2701480 - RNA, 13 nt, Human
gauugugccccug

SEQ ID NO: 2701481 - RNA, 21 nt, Human
gaguugaaaaucuuauaauuu

SEQ ID NO: 2701482 - RNA, 23 nt, Human
gagugaacaaauuuacagagaca

SEQ ID NO: 2701483 - RNA, 22 nt, Human
gagugaacaaauuuacagagac

SEQ ID NO: 2701484 - RNA, 19 nt, Human
gagugaacaaauuuacaga

SEQ ID NO: 2701485 - RNA, 19 nt, Human
gagugucuuaauuaaaaga

SEQ ID NO: 2701486 - RNA, 13 nt, Human
gauagcagggcau

SEQ ID NO: 2701487 - RNA, 22 nt, Human
gccaugggacagggaggacgcu

SEQ ID NO: 2701488 - RNA, 23 nt, Human
gccaugggacagggaggacgcuc

SEQ ID NO: 2701489 - RNA, 18 nt, Human
gccagacuggcacaguuu

SEQ ID NO: 2701490 - RNA, 15 nt, Human
gccagacuggcacag

SEQ ID NO: 2701491 - RNA, 19 nt, Human
gccagacuggcacaguuuu

SEQ ID NO: 2701492 - RNA, 16 nt, Human
gcaggaagcugugaga

SEQ ID NO: 2701493 - RNA, 23 nt, Human
gcagagguugcagugagccgaga

SEQ ID NO: 2701494 - RNA, 18 nt, Human
gcagagguugcagugagc

SEQ ID NO: 2701495 - RNA, 15 nt, Human
gcacagccucuuaga

SEQ ID NO: 2701496 - RNA, 18 nt, Human
gcacagccucuuagaugc

SEQ ID NO: 2701497 - RNA, 19 nt, Human
gcacuguggguagacacac

SEQ ID NO: 2701498 - RNA, 15 nt, Human
gcacgcacacugucu

SEQ ID NO: 2701499 - RNA, 16 nt, Human
gcacgcacacugucug

SEQ ID NO: 2701500 - RNA, 23 nt, Human
gcaucagcugcugaaacaacaaa

SEQ ID NO: 2701501 - RNA, 22 nt, Human
gcaucagcugcugaaacaacaa

SEQ ID NO: 2701502 - RNA, 15 nt, Human
gcaguugaaaagacu

SEQ ID NO: 2701503 - RNA, 19 nt, Human
gcaguugaaaagacuccaa

SEQ ID NO: 2701504 - RNA, 16 nt, Human
gcaguugaaaagacuc

SEQ ID NO: 2701505 - RNA, 21 nt, Human
gcaguugaaaagacuccaaag

SEQ ID NO: 2701506 - RNA, 19 nt, Human
gcaguucagagcugcccuc

SEQ ID NO: 2701507 - RNA, 20 nt, Human
gcaguucagagcugcccucu

SEQ ID NO: 2701508 - RNA, 22 nt, Human
gcaguucagagcugcccucucc

SEQ ID NO: 2701509 - RNA, 23 nt, Human
gcaguucagagcugcccucuccu

SEQ ID NO: 2701510 - RNA, 19 nt, Human
gcuucuguuuuauaauuuu

SEQ ID NO: 2701511 - RNA, 23 nt, Human
gcuggucccagccagcaguucag

SEQ ID NO: 2701512 - RNA, 12 nt, Human
gcugcccucucc

SEQ ID NO: 2701513 - RNA, 21 nt, Human
gcugauuaaaccaaggcuaga

SEQ ID NO: 2701514 - RNA, 13 nt, Human
gcugcccucuccu

SEQ ID NO: 2701515 - RNA, 14 nt, Human
gcugcccucuccug

SEQ ID NO: 2701516 - RNA, 15 nt, Human
gcugcccucuccugg

SEQ ID NO: 2701517 - RNA, 16 nt, Human
gcugcccucuccuggg

SEQ ID NO: 2701518 - RNA, 17 nt, Human
gcugcccucuccugggc

SEQ ID NO: 2701519 - RNA, 18 nt, Human
gcugcccucuccugggca

SEQ ID NO: 2701520 - RNA, 20 nt, Human
gcugcccucuccugggcagc

SEQ ID NO: 2701521 - RNA, 22 nt, Human
gcugcccucuccugggcagcug

SEQ ID NO: 2701522 - RNA, 23 nt, Human
gcugcccucuccugggcagcugc

SEQ ID NO: 2701523 - RNA, 23 nt, Human
gcuggaaaaguauguuagugcaa

SEQ ID NO: 2701524 - RNA, 21 nt, Human
gcuggaaaaguauguuagugc

SEQ ID NO: 2701525 - RNA, 20 nt, Human
gcuccauuuuuagugaaaua

SEQ ID NO: 2701526 - RNA, 19 nt, Human
gcuauaggugcuacaaaaa

SEQ ID NO: 2701527 - RNA, 21 nt, Human
gcuauaggugcuacaaaaaca

SEQ ID NO: 2701528 - RNA, 13 nt, Human
gcuagauguaugu

SEQ ID NO: 2701529 - RNA, 14 nt, Human
gcuagauguaugua

SEQ ID NO: 2701530 - RNA, 16 nt, Human
gcuagauguauguacu

SEQ ID NO: 2701531 - RNA, 20 nt, Human
gccugagcgacagugagacu

SEQ ID NO: 2701532 - RNA, 17 nt, Human
gccugagcgacagugag

SEQ ID NO: 2701533 - RNA, 18 nt, Human
gccuuggggcugaugcag

SEQ ID NO: 2701534 - RNA, 16 nt, Human
ggcuccacuuggucug

SEQ ID NO: 2701535 - RNA, 23 nt, Human
ggcuauaggugcuacaaaaacac

SEQ ID NO: 2701536 - RNA, 20 nt, Human
ggcuaguaucaaaagaaaga

SEQ ID NO: 2701537 - RNA, 14 nt, Human
gggaauugaggaca

SEQ ID NO: 2701538 - RNA, 21 nt, Human
gggacugaggggaggggagca

SEQ ID NO: 2701539 - RNA, 20 nt, Human
gggaggacgcucucuggccu

SEQ ID NO: 2701540 - RNA, 17 nt, Human
gggaggacgcucucugg

SEQ ID NO: 2701541 - RNA, 19 nt, Human
ggauugaaggaugcugucu

SEQ ID NO: 2701542 - RNA, 21 nt, Human
ggcagagguugcagugagccg

SEQ ID NO: 2701543 - RNA, 17 nt, Human
ggauuagggagagaaga

SEQ ID NO: 2701544 - RNA, 11 nt, Human
ggcagcugccu

SEQ ID NO: 2701545 - RNA, 12 nt, Human
ggcagcugccuc

SEQ ID NO: 2701546 - RNA, 13 nt, Human
ggcagcugccucc

SEQ ID NO: 2701547 - RNA, 16 nt, Human
ggcagcugccuccccu

SEQ ID NO: 2701548 - RNA, 16 nt, Human
ggacauuugcucaugg

SEQ ID NO: 2701549 - RNA, 17 nt, Human
ggacauuugcucaugga

SEQ ID NO: 2701550 - RNA, 20 nt, Human
ggacauuugcucauggaauu

SEQ ID NO: 2701551 - RNA, 15 nt, Human
ggagaagagcuguuc

SEQ ID NO: 2701552 - RNA, 11 nt, Human
ggagaagaacu

SEQ ID NO: 2701553 - RNA, 14 nt, Human
ggagaagaacugaa

SEQ ID NO: 2701554 - RNA, 23 nt, Human
ggagaagagcuguucacagccag

SEQ ID NO: 2701555 - RNA, 19 nt, Human
ggacgcucucuggccuucg

SEQ ID NO: 2701556 - RNA, 16 nt, Human
ggacgcucucuggccu

SEQ ID NO: 2701557 - RNA, 15 nt, Human
ggacgcucucuggcc

SEQ ID NO: 2701558 - RNA, 19 nt, Human
ggaggggagcaugggaagu

SEQ ID NO: 2701559 - RNA, 16 nt, Human
ggaggacgcucucugg

SEQ ID NO: 2701560 - RNA, 18 nt, Human
ggagcccugucuccucuc

SEQ ID NO: 2701561 - RNA, 23 nt, Human
ggagcccugucuccucucucugu

SEQ ID NO: 2701562 - RNA, 19 nt, Human
ucagagcugcccucuccug

SEQ ID NO: 2701563 - RNA, 20 nt, Human
ucagagcugcccucuccugg

SEQ ID NO: 2701564 - RNA, 21 nt, Human
ucagagcugcccucuccuggg

SEQ ID NO: 2701565 - RNA, 22 nt, Human
ucagagcugcccucuccugggc

SEQ ID NO: 2701566 - RNA, 23 nt, Human
ucagagcugcccucuccugggca

SEQ ID NO: 2701567 - RNA, 17 nt, Human
ucagcuccccucggaga

SEQ ID NO: 2701568 - RNA, 18 nt, Human
ucagcuccccucggagaa

SEQ ID NO: 2701569 - RNA, 13 nt, Human
ucaggcuagaugu

SEQ ID NO: 2701570 - RNA, 17 nt, Human
ucaggcuagauguaugu

SEQ ID NO: 2701571 - RNA, 19 nt, Human
uccacagaagcuccaggua

SEQ ID NO: 2701572 - RNA, 13 nt, Human
uccaccucccugc

SEQ ID NO: 2701573 - RNA, 14 nt, Human
uccaccucccugca

SEQ ID NO: 2701574 - RNA, 15 nt, Human
uccaccucccugcaa

SEQ ID NO: 2701575 - RNA, 16 nt, Human
uccaccucccugcaau

SEQ ID NO: 2701576 - RNA, 17 nt, Human
uccaccucccugcaaua

SEQ ID NO: 2701577 - RNA, 14 nt, Human
uccacuuggucugu

SEQ ID NO: 2701578 - RNA, 16 nt, Human
uccacuuggucuguga

SEQ ID NO: 2701579 - RNA, 15 nt, Human
uccacuuggucugug

SEQ ID NO: 2701580 - RNA, 18 nt, Human
ucauaccuaucaucuuaa

SEQ ID NO: 2701581 - RNA, 13 nt, Human
ucauuaucucaaa

SEQ ID NO: 2701582 - RNA, 20 nt, Human
ucauuaucucaaaacugcac

SEQ ID NO: 2701583 - RNA, 19 nt, Human
ucauuaucucaaaacugca

SEQ ID NO: 2701584 - RNA, 13 nt, Human
ucauuuccaagca

SEQ ID NO: 2701585 - RNA, 16 nt, Human
ucauuuccaagcaagu

SEQ ID NO: 2701586 - RNA, 13 nt, Human
uauguacuucaug

SEQ ID NO: 2701587 - RNA, 17 nt, Human
uauguacuucaugcugu

SEQ ID NO: 2701588 - RNA, 16 nt, Human
uauuauucccauucua

SEQ ID NO: 2701589 - RNA, 14 nt, Human
ucaaauugugugaa

SEQ ID NO: 2701590 - RNA, 20 nt, Human
ucaaaucaagaaacuuaagg

SEQ ID NO: 2701591 - RNA, 14 nt, Human
ucaaauaugcaaag

SEQ ID NO: 2701592 - RNA, 21 nt, Human
ucaauaaaauccauacauuug

SEQ ID NO: 2701593 - RNA, 13 nt, Human
ucaaugcagcccc

SEQ ID NO: 2701594 - RNA, 13 nt, Human
ucacaagacccaa

SEQ ID NO: 2701595 - RNA, 18 nt, Human
ucacaagacccaaaaggc

SEQ ID NO: 2701596 - RNA, 17 nt, Human
ucacaagacccaaaagg

SEQ ID NO: 2701597 - RNA, 16 nt, Human
ucacagucacauucca

SEQ ID NO: 2701598 - RNA, 14 nt, Human
ucaccaaggcugau

SEQ ID NO: 2701599 - RNA, 16 nt, Human
uccuuggacucauuuu

SEQ ID NO: 2701600 - RNA, 22 nt, Human
uccugucggagcccugucuccu

SEQ ID NO: 2701601 - RNA, 19 nt, Human
uccugucggagcccugucu

SEQ ID NO: 2701602 - RNA, 20 nt, Human
uccugccuaagugcagcccc

SEQ ID NO: 2701603 - RNA, 17 nt, Human
uccuggcaauagucaaa

SEQ ID NO: 2701604 - RNA, 13 nt, Human
ucguuaauuugua

SEQ ID NO: 2701605 - RNA, 17 nt, Human
ucggccuccauccugag

SEQ ID NO: 2701606 - RNA, 18 nt, Human
ucggccuccauccugagg

SEQ ID NO: 2701607 - RNA, 21 nt, Human
ucguggaacaguuaccucugc

SEQ ID NO: 2701608 - RNA, 22 nt, Human
ucgugggacagucaccucaugg

SEQ ID NO: 2701609 - RNA, 13 nt, Human
ucuaugaaauauu

SEQ ID NO: 2701610 - RNA, 14 nt, Human
ucuaugaaauauua

SEQ ID NO: 2701611 - RNA, 17 nt, Human
ucuaugaaauauuaugu

SEQ ID NO: 2701612 - RNA, 15 nt, Human
ucucaacuccaaacu

SEQ ID NO: 2701613 - RNA, 19 nt, Human
ucuagugagcagucaggaa

SEQ ID NO: 2701614 - RNA, 22 nt, Human
ucuagugagcagucaggaaaga

SEQ ID NO: 2701615 - RNA, 20 nt, Human
uccucugcuugccaucccuc

SEQ ID NO: 2701616 - RNA, 19 nt, Human
uccucugcuugccaucccu

SEQ ID NO: 2701617 - RNA, 21 nt, Human
uccucugcuugccaucccucc

SEQ ID NO: 2701618 - RNA, 22 nt, Human
uccucugcuugccaucccuccc

SEQ ID NO: 2701619 - RNA, 15 nt, Human
ucccuugaugaagaa

SEQ ID NO: 2701620 - RNA, 16 nt, Human
ucccuugaugaagaag

SEQ ID NO: 2701621 - RNA, 16 nt, Human
ucccugcaauaaaaug

SEQ ID NO: 2701622 - RNA, 18 nt, Human
ucucuguaauaaacucau

SEQ ID NO: 2701623 - RNA, 22 nt, Human
ucucuguaauaaacucauuucu

SEQ ID NO: 2701624 - RNA, 14 nt, Human
ucugcaucagcugc

SEQ ID NO: 2701625 - RNA, 21 nt, Human
ucugcaucagcugcugaaaca

SEQ ID NO: 2701626 - RNA, 19 nt, Human
ucugcaucagcugcugaaa

SEQ ID NO: 2701627 - RNA, 15 nt, Human
ucugucuucacaaca

SEQ ID NO: 2701628 - RNA, 18 nt, Human
ucuuaagaagacugcauu

SEQ ID NO: 2701629 - RNA, 12 nt, Human
ucuuaagaagac

SEQ ID NO: 2701630 - RNA, 18 nt, Human
ucuggccuucggccucca

SEQ ID NO: 2701631 - RNA, 17 nt, Human
ucuggccuucggccucc

SEQ ID NO: 2701632 - RNA, 12 nt, Human
uguaaaauggug

SEQ ID NO: 2701633 - RNA, 11 nt, Human
uguaaaauggu

SEQ ID NO: 2701634 - RNA, 16 nt, Human
ugguucccuugaugaa

SEQ ID NO: 2701635 - RNA, 17 nt, Human
ugguucccuugaugaag

SEQ ID NO: 2701636 - RNA, 20 nt, Human
ugguucccuugaugaagaag

SEQ ID NO: 2701637 - RNA, 14 nt, Human
uggguagacacaca

SEQ ID NO: 2701638 - RNA, 22 nt, Human
ugucuacacuaagagagaauga

SEQ ID NO: 2701639 - RNA, 17 nt, Human
ugucuacacuaagagag

SEQ ID NO: 2701640 - RNA, 12 nt, Human
ugucuuaauuaa

SEQ ID NO: 2701641 - RNA, 19 nt, Human
uguaguguuggagaagaac

SEQ ID NO: 2701642 - RNA, 20 nt, Human
uguaguguuggagaagaacu

SEQ ID NO: 2701643 - RNA, 21 nt, Human
uguaguguuggagaagaacug

SEQ ID NO: 2701644 - RNA, 13 nt, Human
uguauaaaauaau

SEQ ID NO: 2701645 - RNA, 14 nt, Human
uguauaaaauaauu

SEQ ID NO: 2701646 - RNA, 18 nt, Human
uguauuuuaaaagaauga

SEQ ID NO: 2701647 - RNA, 19 nt, Human
uguauuuuaaaagaaugau

SEQ ID NO: 2701648 - RNA, 17 nt, Human
ugcuucuguuuuauaau

SEQ ID NO: 2701649 - RNA, 22 nt, Human
uggaaaaguauguuagugcaaa

SEQ ID NO: 2701650 - RNA, 22 nt, Human
ugcuucuguuuuauaauuuugu

SEQ ID NO: 2701651 - RNA, 23 nt, Human
uggccuucggccuccauccugag

SEQ ID NO: 2701652 - RNA, 20 nt, Human
uggccuucggccuccauccu

SEQ ID NO: 2701653 - RNA, 22 nt, Human
uggccuucggccuccauccuga

SEQ ID NO: 2701654 - RNA, 14 nt, Human
ugggacagggagga

SEQ ID NO: 2701655 - RNA, 12 nt, Human
ugggcagcugcc

SEQ ID NO: 2701656 - RNA, 20 nt, Human
ugggcagcugccuccccucc

SEQ ID NO: 2701657 - RNA, 22 nt, Human
ugggcagcugccuccccuccuc

SEQ ID NO: 2701658 - RNA, 23 nt, Human
ugggcagcugccuccccuccucu

SEQ ID NO: 2701659 - RNA, 12 nt, Human
ugacucuuaaga

SEQ ID NO: 2701660 - RNA, 17 nt, Human
ugagaaagacuauucaa

SEQ ID NO: 2701661 - RNA, 16 nt, Human
ugagaaagacuauuca

SEQ ID NO: 2701662 - RNA, 20 nt, Human
ugagaaagacuauucaaaca

SEQ ID NO: 2701663 - RNA, 18 nt, Human
ugagaaagacuauucaaa

SEQ ID NO: 2701664 - RNA, 16 nt, Human
ugagacagcucugcau

SEQ ID NO: 2701665 - RNA, 14 nt, Human
ugagacagcucugc

SEQ ID NO: 2701666 - RNA, 20 nt, Human
ugagaugcuagaacucccuu

SEQ ID NO: 2701667 - RNA, 16 nt, Human
ugagaugcuagaacuc

SEQ ID NO: 2701668 - RNA, 14 nt, Human
ugagaugcuagaac

SEQ ID NO: 2701669 - RNA, 20 nt, Human
ugagcagucaggaaagagaa

SEQ ID NO: 2701670 - RNA, 17 nt, Human
ugagcagucaggaaaga

SEQ ID NO: 2701671 - RNA, 15 nt, Human
ugagcagucaggaaa

SEQ ID NO: 2701672 - RNA, 24 nt, Human
ugauaguuguaccgcaaugugacu

SEQ ID NO: 2701673 - RNA, 21 nt, Human
ugcauuauauuuauuacugua

SEQ ID NO: 2701674 - RNA, 19 nt, Human
ugcagauaaacaguaguga

SEQ ID NO: 2701675 - RNA, 17 nt, Human
ugcaugguuuagaaagc

SEQ ID NO: 2701676 - RNA, 16 nt, Human
ugcacgcacacugucu

SEQ ID NO: 2701677 - RNA, 17 nt, Human
ugcacgcacacugucug

SEQ ID NO: 2701678 - RNA, 16 nt, Human
ugcacugucaagauga

SEQ ID NO: 2701679 - RNA, 13 nt, Human
uuuucuuauuuca

SEQ ID NO: 2701680 - RNA, 13 nt, Human
uuuuauauuugaa

SEQ ID NO: 2701681 - RNA, 18 nt, Human
uuuuauauuugaaauauu

SEQ ID NO: 2701682 - RNA, 21 nt, Human
uuuuaaaguaacccuacaaaa

SEQ ID NO: 2701683 - RNA, 21 nt, Human
uuuuauaauuuugugaagcaa

SEQ ID NO: 2701684 - RNA, 23 nt, Human
uuuuauaauuuugugaagcaaaa

SEQ ID NO: 2701685 - RNA, 15 nt, Human
uuuccacagaagcuc

SEQ ID NO: 2701686 - RNA, 17 nt, Human
uuuguauaaaauaauuu

SEQ ID NO: 2701687 - RNA, 18 nt, Human
uuuguauaaaauaauuuu

SEQ ID NO: 2701688 - RNA, 19 nt, Human
uuuguauaaaauaauuuuu

SEQ ID NO: 2701689 - RNA, 19 nt, Human
uuuaacucuauaauguguu

SEQ ID NO: 2701690 - RNA, 13 nt, Human
uuuaauaauguuu

SEQ ID NO: 2701691 - RNA, 13 nt, Human
uuuaccacuugug

SEQ ID NO: 2701692 - RNA, 17 nt, Human
uuuauggcacuaguauu

SEQ ID NO: 2701693 - RNA, 22 nt, Human
uuuauaauuuugugaagcaaaa

SEQ ID NO: 2701694 - RNA, 22 nt, Human
uuuauuguuuaaaaucauuucu

SEQ ID NO: 2701695 - RNA, 14 nt, Human
uuguuuaaaaucau

SEQ ID NO: 2701696 - RNA, 18 nt, Human
uuguguuuugcaagccag

SEQ ID NO: 2701697 - RNA, 12 nt, Human
uugugccccugc

SEQ ID NO: 2701698 - RNA, 15 nt, Human
uugucuagugaaacu

SEQ ID NO: 2701699 - RNA, 16 nt, Human
uuggucugugagaugc

SEQ ID NO: 2701700 - RNA, 18 nt, Human
uuauggcuauaggugcua

SEQ ID NO: 2701701 - RNA, 22 nt, Human
uuaugauuaaguaaugauaacu

SEQ ID NO: 2701702 - RNA, 11 nt, Human
uuaucucaaaa

SEQ ID NO: 2701703 - RNA, 16 nt, Human
uuauauuuacaaaugg

SEQ ID NO: 2701704 - RNA, 20 nt, Human
uuauauuuauuacuguaaga

SEQ ID NO: 2701705 - RNA, 12 nt, Human
uuauauuugaaa

SEQ ID NO: 2701706 - RNA, 13 nt, Human
uuauauuugaaau

SEQ ID NO: 2701707 - RNA, 15 nt, Human
uuauauuugaaauau

SEQ ID NO: 2701708 - RNA, 11 nt, Human
uuauaaucuuu

SEQ ID NO: 2701709 - RNA, 14 nt, Human
uuauaauuuuguga

SEQ ID NO: 2701710 - RNA, 15 nt, Human
uuauaauuuugugaa

SEQ ID NO: 2701711 - RNA, 12 nt, Human
uuauaauuuaaa

SEQ ID NO: 2701712 - RNA, 16 nt, Human
uuauaauuuugugaag

SEQ ID NO: 2701713 - RNA, 17 nt, Human
uuauaauuuugugaagc

SEQ ID NO: 2701714 - RNA, 18 nt, Human
uuauaauuuugugaagca

SEQ ID NO: 2701715 - RNA, 15 nt, Human
uucagagcugcccuc

SEQ ID NO: 2701716 - RNA, 17 nt, Human
uucagagcugcccucuc

SEQ ID NO: 2701717 - RNA, 18 nt, Human
uucagagcugcccucucc

SEQ ID NO: 2701718 - RNA, 19 nt, Human
uucagagcugcccucuccu

SEQ ID NO: 2701719 - RNA, 20 nt, Human
uucagagcugcccucuccug

SEQ ID NO: 2701720 - RNA, 20 nt, Human
uucagauaaucacaauacau

SEQ ID NO: 2701721 - RNA, 20 nt, Human
uuauuuuaauaauguuucaa

SEQ ID NO: 2701722 - RNA, 19 nt, Human
uuauuuuaauaauguuuca

SEQ ID NO: 2701723 - RNA, 18 nt, Human
uuccagauccuggaaauc

SEQ ID NO: 2701724 - RNA, 23 nt, Human
uucaguuauuauauuuacaaaug

SEQ ID NO: 2701725 - RNA, 18 nt, Human
uucggugagcuacaaaug

SEQ ID NO: 2701726 - RNA, 15 nt, Human
uucuacauacuaugg

SEQ ID NO: 2701727 - RNA, 21 nt, Human
uucugagaaagacuauucaaa

SEQ ID NO: 2701728 - RNA, 16 nt, Human
uucugagaaagacuau

SEQ ID NO: 2701729 - RNA, 21 nt, Human
uucuaugaaauauuauguuaa

SEQ ID NO: 2701730 - RNA, 14 nt, Human
uucuaugaaauauu

SEQ ID NO: 2701731 - RNA, 17 nt, Human
uugacccacaagaaaug

SEQ ID NO: 2701732 - RNA, 14 nt, Human
uugacccacaagaa

SEQ ID NO: 2701733 - RNA, 23 nt, Human
uugaugaagaaguugauaugccu

SEQ ID NO: 2701734 - RNA, 13 nt, Human
uugaugaagaagu

SEQ ID NO: 2701735 - RNA, 14 nt, Human
uugaugaagaaguu

SEQ ID NO: 2701736 - RNA, 17 nt, Human
uucugucuucacaacag

SEQ ID NO: 2701737 - RNA, 15 nt, Human
gcuagaacucccuuu

SEQ ID NO: 2701738 - RNA, 21 nt, Human parainfluenza virus 2
ccaagaaagauuuaacaggca

SEQ ID NO: 2701739 - RNA, 14 nt, Human parainfluenza virus 2
ccacucacacacuc

SEQ ID NO: 2701740 - RNA, 11 nt, Human parainfluenza virus 2
gucaacugauu

SEQ ID NO: 2701741 - RNA, 18 nt, Human parainfluenza virus 2
ugauuauaagaacucaug

SEQ ID NO: 2701742 - RNA, 15 nt, Human parainfluenza virus 2
cacagaaucacagcu

SEQ ID NO: 2701743 - RNA, 17 nt, Human parainfluenza virus 2
uaaaaaugaaaugacua

SEQ ID NO: 2701744 - RNA, 13 nt, Human parainfluenza virus 2
auacacauccaca

SEQ ID NO: 2701745 - RNA, 15 nt, Human parainfluenza virus 2
caacaccaagaaaca

SEQ ID NO: 2701746 - RNA, 23 nt, Human parainfluenza virus 2
cacucagagauacagcugccacu

SEQ ID NO: 2701747 - RNA, 17 nt, Human parainfluenza virus 2
ucucaucauuuacuguu

SEQ ID NO: 2701748 - RNA, 19 nt, Human parainfluenza virus 2
aaaggcucucuaucuuaug

SEQ ID NO: 2701749 - RNA, 13 nt, Human parainfluenza virus 2
gcauccaaucaag

SEQ ID NO: 2701750 - RNA, 16 nt, Human parainfluenza virus 2
acucaugauaguuuua

SEQ ID NO: 2701751 - RNA, 17 nt, Human parainfluenza virus 2
gaggagaucagaaagag

SEQ ID NO: 2701752 - RNA, 20 nt, Human parainfluenza virus 2
gucacacaagagacacucaa

SEQ ID NO: 2701753 - RNA, 15 nt, Human parainfluenza virus 2
agauaccaaugaaua

SEQ ID NO: 2701754 - RNA, 11 nt, Human parainfluenza virus 2
auguuaucaua

SEQ ID NO: 2701755 - RNA, 16 nt, Human parainfluenza virus 2
caaacuagacucacau

SEQ ID NO: 2701756 - RNA, 14 nt, Human parainfluenza virus 2
cucaaccaaaagac

SEQ ID NO: 2701757 - RNA, 17 nt, Human parainfluenza virus 2
acacacucauccagaca

SEQ ID NO: 2701758 - RNA, 15 nt, Human parainfluenza virus 2
caacaccucacauca

SEQ ID NO: 2701759 - RNA, 16 nt, Human parainfluenza virus 2
uccacaucacucagag

SEQ ID NO: 2701760 - RNA, 17 nt, Human parainfluenza virus 2
cauccacaucacucaga

SEQ ID NO: 2701761 - RNA, 17 nt, Human parainfluenza virus 2
cuugcaacuucugcaac

SEQ ID NO: 2701762 - RNA, 13 nt, Human parainfluenza virus 2
auccagacaaauc

SEQ ID NO: 2701763 - RNA, 13 nt, Human parainfluenza virus 2
agaaggcuggaca

SEQ ID NO: 2701764 - RNA, 19 nt, Human parainfluenza virus 2
uugucaacaccaagaaaca

SEQ ID NO: 2701765 - RNA, 20 nt, Human parainfluenza virus 2
cagauaccaagacugaguuc

SEQ ID NO: 2701766 - RNA, 17 nt, Human parainfluenza virus 2
ucaacaccaagaaacaa

SEQ ID NO: 2701767 - RNA, 15 nt, Human parainfluenza virus 2
ccagauauacacauc

SEQ ID NO: 2701768 - RNA, 15 nt, Human parainfluenza virus 2
ucaacaccaagaaac

SEQ ID NO: 2701769 - RNA, 12 nt, Human parainfluenza virus 2
gaaggcuggaca

SEQ ID NO: 2701770 - RNA, 17 nt, Human parainfluenza virus 2
acucaacaugcauccaa

SEQ ID NO: 2701771 - RNA, 15 nt, Human parainfluenza virus 2
caauuuuagucaacu

SEQ ID NO: 2701772 - RNA, 16 nt, Human parainfluenza virus 2
aguauaauaguuuaaa

SEQ ID NO: 2701773 - RNA, 13 nt, Human parainfluenza virus 2
uucugcuguuuuu

SEQ ID NO: 2701774 - RNA, 15 nt, Human parainfluenza virus 2
acuuagguucaauuu

SEQ ID NO: 2701775 - RNA, 19 nt, Human parainfluenza virus 2
ugcagcuugcaaaugacug

SEQ ID NO: 2701776 - RNA, 21 nt, Human parainfluenza virus 2
cgaaagccugaauccaagaaa

SEQ ID NO: 2701777 - RNA, 20 nt, Human parainfluenza virus 2
cucaaggcgaguguugcaac

SEQ ID NO: 2701778 - RNA, 15 nt, Human parainfluenza virus 2
aguuuuauuuaagaa

SEQ ID NO: 2701779 - RNA, 20 nt, Human parainfluenza virus 2
guccgaacugaucaaucuaa

SEQ ID NO: 2701780 - RNA, 18 nt, Human parainfluenza virus 2
ccaaucaagauccagacu

SEQ ID NO: 2701781 - RNA, 19 nt, Human parainfluenza virus 2
caaggcgaguguugcaacu

SEQ ID NO: 2701782 - RNA, 21 nt, Human parainfluenza virus 2
cacagccgaaccaugcucaac

SEQ ID NO: 2701783 - RNA, 13 nt, Human parainfluenza virus 2
ucacaucaauaga

SEQ ID NO: 2701784 - RNA, 14 nt, Human parainfluenza virus 2
uauaucucuuagaa

SEQ ID NO: 2701785 - RNA, 17 nt, Human parainfluenza virus 2
ucacacaagagacacuc

SEQ ID NO: 2701786 - RNA, 20 nt, Human parainfluenza virus 2
uacaccaacuaaugucccug

SEQ ID NO: 2701787 - RNA, 15 nt, Human parainfluenza virus 2
agaaccaacuuccaa

SEQ ID NO: 2701788 - RNA, 21 nt, Human parainfluenza virus 2
aauuuucucaucauuuacugu

SEQ ID NO: 2701789 - RNA, 17 nt, Human parainfluenza virus 2
uuaaaaaugaaaugacu

SEQ ID NO: 2701790 - RNA, 20 nt, Human parainfluenza virus 2
cacucucaucaacaaaaagg

SEQ ID NO: 2701791 - RNA, 13 nt, Human parainfluenza virus 2
guuaaauuuaagu

SEQ ID NO: 2701792 - RNA, 18 nt, Human parainfluenza virus 2
aucaaucuuaaaaaugaa

SEQ ID NO: 2701793 - RNA, 18 nt, Human parainfluenza virus 2
aaucaaacuagacucaca

SEQ ID NO: 2701794 - RNA, 13 nt, Human parainfluenza virus 2
acacucauccaga

SEQ ID NO: 2701795 - RNA, 20 nt, Human parainfluenza virus 2
augcagcuugcaaaugacug

SEQ ID NO: 2701796 - RNA, 12 nt, Human parainfluenza virus 2
ccaagaaacaac

SEQ ID NO: 2701797 - RNA, 17 nt, Human parainfluenza virus 2
uggcuguauuagaaugu

SEQ ID NO: 2701798 - RNA, 15 nt, Human parainfluenza virus 2
aucaagauccagacu

SEQ ID NO: 2701799 - RNA, 20 nt, Human parainfluenza virus 2
aacaaugauuauaagaacuc

SEQ ID NO: 2701800 - RNA, 18 nt, Human parainfluenza virus 2
auacagcugccacucaca

SEQ ID NO: 2701801 - RNA, 17 nt, Human parainfluenza virus 2
accacagaaucacagcu

SEQ ID NO: 2701802 - RNA, 16 nt, Human parainfluenza virus 2
cuagucacuauacaau

SEQ ID NO: 2701803 - RNA, 13 nt, Human parainfluenza virus 2
ucauacaaccaga

SEQ ID NO: 2701804 - RNA, 23 nt, Human parainfluenza virus 2
caacuaguggaggcuucacagcc

SEQ ID NO: 2701805 - RNA, 20 nt, Human parainfluenza virus 2
uaugauaacaacaauuaaaa

SEQ ID NO: 2701806 - RNA, 22 nt, Human parainfluenza virus 2
caugauaguuuuauuuaagaaa

SEQ ID NO: 2701807 - RNA, 12 nt, Human parainfluenza virus 2
acucaacaugca

SEQ ID NO: 2701808 - RNA, 17 nt, Human parainfluenza virus 2
gaacucaugauaguuuu

SEQ ID NO: 2701809 - RNA, 13 nt, Human parainfluenza virus 2
aggcuucacagcc

SEQ ID NO: 2701810 - RNA, 19 nt, Human parainfluenza virus 2
caaugucauacaaccagau

SEQ ID NO: 2701811 - RNA, 23 nt, Human parainfluenza virus 2
ccacucacacacucauccagaca

SEQ ID NO: 2701812 - RNA, 13 nt, Human parainfluenza virus 2
uuauuuaagaaaa

SEQ ID NO: 2701813 - RNA, 13 nt, Human parainfluenza virus 2
uguuauagauucu

SEQ ID NO: 2701814 - RNA, 18 nt, Human parainfluenza virus 2
gaacucaugauaguuuua

SEQ ID NO: 2701815 - RNA, 13 nt, Human parainfluenza virus 2
caacaccaagaaa

SEQ ID NO: 2701816 - RNA, 22 nt, Human parainfluenza virus 2
aagaacucaugauaguuuuauu

SEQ ID NO: 2701817 - RNA, 23 nt, Human parainfluenza virus 2
ccagacuccauccauccaaaaac

SEQ ID NO: 2701818 - RNA, 16 nt, Human parainfluenza virus 2
ugauuauuaugugaua

SEQ ID NO: 2701819 - RNA, 11 nt, Human parainfluenza virus 2
aggcuggacau

SEQ ID NO: 2701820 - RNA, 17 nt, Human parainfluenza virus 2
ucaaacuagacucacau

SEQ ID NO: 2701821 - RNA, 17 nt, Human parainfluenza virus 2
uauacguuuuggcugua

SEQ ID NO: 2701822 - RNA, 13 nt, Human parainfluenza virus 2
ccauaugaagcaa

SEQ ID NO: 2701823 - RNA, 18 nt, Human parainfluenza virus 2
cuccauccauccaaaaac

SEQ ID NO: 2701824 - RNA, 16 nt, Human parainfluenza virus 2
ccacaauugucaacac

SEQ ID NO: 2701825 - RNA, 19 nt, Human parainfluenza virus 2
uuaacaggcauaaaacuaa

SEQ ID NO: 2701826 - RNA, 14 nt, Human parainfluenza virus 2
acucaugauaguuu

SEQ ID NO: 2701827 - RNA, 13 nt, Human parainfluenza virus 2
uuuggcuguauua

SEQ ID NO: 2701828 - RNA, 21 nt, Human parainfluenza virus 2
ucaugauaguuuuauuuaaga

SEQ ID NO: 2701829 - RNA, 21 nt, Human parainfluenza virus 2
ucaacaugcauccaaucaaga

SEQ ID NO: 2701830 - RNA, 15 nt, Human parainfluenza virus 2
caugauaaauuuaau

SEQ ID NO: 2701831 - RNA, 22 nt, Human parainfluenza virus 2
uugaaugaagacuccagauuca

SEQ ID NO: 2701832 - RNA, 19 nt, Human parainfluenza virus 2
aaaaauuaacauuaagccu

SEQ ID NO: 2701833 - RNA, 19 nt, Human parainfluenza virus 2
augauaguuuuauuuaaga

SEQ ID NO: 2701834 - RNA, 18 nt, Human parainfluenza virus 2
auuauaagaacucaugau

SEQ ID NO: 2701835 - RNA, 17 nt, Human parainfluenza virus 2
agccugaauccaagaaa

SEQ ID NO: 2701836 - RNA, 14 nt, Human parainfluenza virus 2
auacgcucugcaau

SEQ ID NO: 2701837 - RNA, 15 nt, Human parainfluenza virus 2
aguacaauuuaagaa

SEQ ID NO: 2701838 - RNA, 21 nt, Human parainfluenza virus 2
acuaguggaggcuucacagcc

SEQ ID NO: 2701839 - RNA, 12 nt, Human parainfluenza virus 2
ccaaacaacacc

SEQ ID NO: 2701840 - RNA, 19 nt, Human parainfluenza virus 2
acaaugauuauaagaacuc

SEQ ID NO: 2701841 - RNA, 19 nt, Human parainfluenza virus 2
cuaagauucaggcagcaac

SEQ ID NO: 2701842 - RNA, 20 nt, Human parainfluenza virus 2
ggcuucacagccgaacaggu

SEQ ID NO: 2701843 - RNA, 17 nt, Human parainfluenza virus 2
cauccauccaaaaacac

SEQ ID NO: 2701844 - RNA, 14 nt, Human parainfluenza virus 2
aaaugaaaugacua

SEQ ID NO: 2701845 - RNA, 16 nt, Human parainfluenza virus 2
uagaaccacaaucaag

SEQ ID NO: 2701846 - RNA, 14 nt, Human parainfluenza virus 2
caacuucugcaacu

SEQ ID NO: 2701847 - RNA, 21 nt, Human parainfluenza virus 2
gcuguuuuucccauaugaagc

SEQ ID NO: 2701848 - RNA, 21 nt, Human parainfluenza virus 2
gccgaaccaugcucaaccaaa

SEQ ID NO: 2701849 - RNA, 15 nt, Human parainfluenza virus 2
cagccgaaccaugcu

SEQ ID NO: 2701850 - RNA, 12 nt, Human parainfluenza virus 2
auaaucaacaau

SEQ ID NO: 2701851 - RNA, 19 nt, Human parainfluenza virus 2
caggcagcaaccacagaau

SEQ ID NO: 2701852 - RNA, 12 nt, Human parainfluenza virus 2
uucugcuguuuu

SEQ ID NO: 2701853 - RNA, 15 nt, Human parainfluenza virus 2
cacauccacaucacu

SEQ ID NO: 2701854 - RNA, 23 nt, Human parainfluenza virus 2
uagaccuacacucucaucaacaa

SEQ ID NO: 2701855 - RNA, 15 nt, Human parainfluenza virus 2
ggcagcaaccacaga

SEQ ID NO: 2701856 - RNA, 11 nt, Human parainfluenza virus 2
ucacucagaga

SEQ ID NO: 2701857 - RNA, 14 nt, Human parainfluenza virus 2
gaaacaaccacagc

SEQ ID NO: 2701858 - RNA, 20 nt, Human parainfluenza virus 2
auauaaaaugaggugcaguc

SEQ ID NO: 2701859 - RNA, 18 nt, Human parainfluenza virus 2
auuuucucaucauuuacu

SEQ ID NO: 2701860 - RNA, 14 nt, Human parainfluenza virus 2
augcagcuugcaaa

SEQ ID NO: 2701861 - RNA, 18 nt, Human parainfluenza virus 2
cagcaucugagaauagaa

SEQ ID NO: 2701862 - RNA, 22 nt, Human parainfluenza virus 2
acaccaagaaacaaccacagcc

SEQ ID NO: 2701863 - RNA, 15 nt, Human parainfluenza virus 2
ugcucaaccaaaaga

SEQ ID NO: 2701864 - RNA, 13 nt, Human parainfluenza virus 2
acauuaagccucc

SEQ ID NO: 2701865 - RNA, 14 nt, Human parainfluenza virus 2
auuagaauguuaua

SEQ ID NO: 2701866 - RNA, 21 nt, Human parainfluenza virus 2
acuaagauucaggcagcaacc

SEQ ID NO: 2701867 - RNA, 17 nt, Human parainfluenza virus 2
aggcgaguguugcaacu

SEQ ID NO: 2701868 - RNA, 17 nt, Human parainfluenza virus 2
caagaaacaaccacagc

SEQ ID NO: 2701869 - RNA, 19 nt, Human parainfluenza virus 2
ccacagaaucacagcuuaa

SEQ ID NO: 2701870 - RNA, 15 nt, Human parainfluenza virus 2
ugcauccaaucaaga

SEQ ID NO: 2701871 - RNA, 18 nt, Human parainfluenza virus 2
cacaauugucaacaccaa

SEQ ID NO: 2701872 - RNA, 14 nt, Human parainfluenza virus 2
ucaauaauaauuga

SEQ ID NO: 2701873 - RNA, 18 nt, Human parainfluenza virus 2
aagaacucaugauaguuu

SEQ ID NO: 2701874 - RNA, 17 nt, Human parainfluenza virus 2
cagccgaaccaugcuca

SEQ ID NO: 2701875 - RNA, 19 nt, Human parainfluenza virus 2
uauugaaugaagacuccag

SEQ ID NO: 2701876 - RNA, 15 nt, Human parainfluenza virus 2
auuauaagaacucau

SEQ ID NO: 2701877 - RNA, 15 nt, Human parainfluenza virus 2
caaucaagucauacu

SEQ ID NO: 2701878 - RNA, 19 nt, Human parainfluenza virus 2
caaugauuauaagaacuca

SEQ ID NO: 2701879 - RNA, 13 nt, Human parainfluenza virus 2
gacucacaucauu

SEQ ID NO: 2701880 - RNA, 20 nt, Human parainfluenza virus 2
uaagauucaggcagcaacca

SEQ ID NO: 2701881 - RNA, 16 nt, Human parainfluenza virus 2
agaaggcuggacauga

SEQ ID NO: 2701882 - RNA, 19 nt, Human parainfluenza virus 2
gauacagcugccacucaca

SEQ ID NO: 2701883 - RNA, 21 nt, Human parainfluenza virus 2
ccacagccgaaccaugcucaa

SEQ ID NO: 2701884 - RNA, 13 nt, Human parainfluenza virus 2
uccauccauccaa

SEQ ID NO: 2701885 - RNA, 18 nt, Human parainfluenza virus 2
ucaacaccgacuuagguu

SEQ ID NO: 2701886 - RNA, 20 nt, Human parainfluenza virus 2
uacuacuagucacuauacaa

SEQ ID NO: 2701887 - RNA, 16 nt, Human parainfluenza virus 2
auuauaagaacucaug

SEQ ID NO: 2701888 - RNA, 17 nt, Human parainfluenza virus 2
uauaagaacucaugaua

SEQ ID NO: 2701889 - RNA, 13 nt, Human parainfluenza virus 2
agcguaguacaau

SEQ ID NO: 2701890 - RNA, 19 nt, Human parainfluenza virus 2
ugcagucacacaagagaca

SEQ ID NO: 2701891 - RNA, 15 nt, Human parainfluenza virus 2
uugacccuuaagaac

SEQ ID NO: 2701892 - RNA, 13 nt, Human parainfluenza virus 2
agacucacaucau

SEQ ID NO: 2701893 - RNA, 15 nt, Human parainfluenza virus 2
agauacagcugccac

SEQ ID NO: 2701894 - RNA, 15 nt, Human parainfluenza virus 2
agagauacagcugcc

SEQ ID NO: 2701895 - RNA, 17 nt, Human parainfluenza virus 2
cugaauccaagaaagau

SEQ ID NO: 2701896 - RNA, 10 nt, Human parainfluenza virus 2
cacucagaga

SEQ ID NO: 2701897 - RNA, 17 nt, Human parainfluenza virus 2
ccacaauugucaacacc

SEQ ID NO: 2701898 - RNA, 17 nt, Human parainfluenza virus 2
ccaaaagacccaaacaa

SEQ ID NO: 2701899 - RNA, 15 nt, Human parainfluenza virus 2
uacacaauguuccag

SEQ ID NO: 2701900 - RNA, 17 nt, Human parainfluenza virus 2
ucacacacucauccaga

SEQ ID NO: 2701901 - RNA, 14 nt, Human parainfluenza virus 2
gcugccacucacac

SEQ ID NO: 2701902 - RNA, 17 nt, Human parainfluenza virus 2
cugcaauauaaaaugag

SEQ ID NO: 2701903 - RNA, 13 nt, Human parainfluenza virus 2
cagacuccaucca

SEQ ID NO: 2701904 - RNA, 17 nt, Human parainfluenza virus 2
aaagaguuuacacaaug

SEQ ID NO: 2701905 - RNA, 20 nt, Human parainfluenza virus 2
ccaaaagacccaaacaacac

SEQ ID NO: 2701906 - RNA, 17 nt, Human parainfluenza virus 2
caacaccaagaaacaac

SEQ ID NO: 2701907 - RNA, 12 nt, Human parainfluenza virus 2
cauaugaagcaa

SEQ ID NO: 2701908 - RNA, 13 nt, Human parainfluenza virus 2
caugauaguuuua

SEQ ID NO: 2701909 - RNA, 18 nt, Human parainfluenza virus 2
guuauacguuuuggcugu

SEQ ID NO: 2701910 - RNA, 19 nt, Human parainfluenza virus 2
cguaguacaauuuaagaaa

SEQ ID NO: 2701911 - RNA, 21 nt, Human parainfluenza virus 2
ccuucagacuguagaagggaa

SEQ ID NO: 2701912 - RNA, 19 nt, Human parainfluenza virus 2
cacucagagauacagcugc

SEQ ID NO: 2701913 - RNA, 14 nt, Human parainfluenza virus 2
acaagagacacuca

SEQ ID NO: 2701914 - RNA, 14 nt, Human parainfluenza virus 2
agaaggcuggacau

SEQ ID NO: 2701915 - RNA, 21 nt, Human parainfluenza virus 2
caugcauccaaucaagaucca

SEQ ID NO: 2701916 - RNA, 13 nt, Human parainfluenza virus 2
uacagcugccacu

SEQ ID NO: 2701917 - RNA, 17 nt, Human parainfluenza virus 2
cagucacacaagagaca

SEQ ID NO: 2701918 - RNA, 10 nt, Human parainfluenza virus 2
agaacucaug

SEQ ID NO: 2701919 - RNA, 20 nt, Human parainfluenza virus 2
gcuggacaugauaaauuuaa

SEQ ID NO: 2701920 - RNA, 13 nt, Human parainfluenza virus 2
acaucaauagaag

SEQ ID NO: 2701921 - RNA, 14 nt, Human parainfluenza virus 2
gcagcaaccacaga

SEQ ID NO: 2701922 - RNA, 22 nt, Human parainfluenza virus 2
auuuacuguuguaauucaaucu

SEQ ID NO: 2701923 - RNA, 18 nt, Human parainfluenza virus 2
uaucuuaugcaauaguua

SEQ ID NO: 2701924 - RNA, 23 nt, Human parainfluenza virus 2
aacaccaagaaacaaccacagcc

SEQ ID NO: 2701925 - RNA, 11 nt, Human parainfluenza virus 2
aucacucagag

SEQ ID NO: 2701926 - RNA, 13 nt, Human parainfluenza virus 2
guccgaacugauc

SEQ ID NO: 2701927 - RNA, 15 nt, Human parainfluenza virus 2
gucaacaccaagaaa

SEQ ID NO: 2701928 - RNA, 19 nt, Human parainfluenza virus 2
auaguuuuauuuaagaaaa

SEQ ID NO: 2701929 - RNA, 11 nt, Human parainfluenza virus 2
cucaacaugca

SEQ ID NO: 2701930 - RNA, 18 nt, Human parainfluenza virus 2
aagguaugauaacaacaa

SEQ ID NO: 2701931 - RNA, 16 nt, Human parainfluenza virus 2
cguaguacaauuuaag

SEQ ID NO: 2701932 - RNA, 13 nt, Human parainfluenza virus 2
uuaacgaaauuaa

SEQ ID NO: 2701933 - RNA, 14 nt, Human parainfluenza virus 2
ccguuaaauuuaag

SEQ ID NO: 2701934 - RNA, 18 nt, Human parainfluenza virus 2
ccaagaaacaaccacagc

SEQ ID NO: 2701935 - RNA, 11 nt, Human parainfluenza virus 2
uccacaucacu

SEQ ID NO: 2701936 - RNA, 23 nt, Human parainfluenza virus 2
auucaggcagcaaccacagaauc

SEQ ID NO: 2701937 - RNA, 14 nt, Human parainfluenza virus 2
uaacgaaauuaaac

SEQ ID NO: 2701938 - RNA, 21 nt, Human parainfluenza virus 2
uacuguuguaauucaaucuua

SEQ ID NO: 2701939 - RNA, 23 nt, Human parainfluenza virus 2
auaauaguuuaaaaauuaacauu

SEQ ID NO: 2701940 - RNA, 17 nt, Human parainfluenza virus 2
cagcugccacucacaca

SEQ ID NO: 2701941 - RNA, 15 nt, Human parainfluenza virus 2
gagaucagaaagagu

SEQ ID NO: 2701942 - RNA, 17 nt, Human parainfluenza virus 2
caaaagacccaaacaac

SEQ ID NO: 2701943 - RNA, 19 nt, Human parainfluenza virus 2
auucuugcaacuucugcaa

SEQ ID NO: 2701944 - RNA, 21 nt, Human parainfluenza virus 2
caccaagaaacaaccacagcc

SEQ ID NO: 2701945 - RNA, 12 nt, Human parainfluenza virus 2
caucauuuacug

SEQ ID NO: 2701946 - RNA, 17 nt, Human parainfluenza virus 2
auuauaagaacucauga

SEQ ID NO: 2701947 - RNA, 21 nt, Human parainfluenza virus 2
cacucacacacucauccagac

SEQ ID NO: 2701948 - RNA, 21 nt, Human parainfluenza virus 2
acaaugauuauaagaacucau

SEQ ID NO: 2701949 - RNA, 18 nt, Human parainfluenza virus 2
auagaaggcuggacauga

SEQ ID NO: 2701950 - RNA, 16 nt, Human parainfluenza virus 2
gauuauaagaacucau

SEQ ID NO: 2701951 - RNA, 22 nt, Human parainfluenza virus 2
uugaugcagcuugcaaaugacu

SEQ ID NO: 2701952 - RNA, 16 nt, Human parainfluenza virus 2
gcuuaacgaaauuaaa

SEQ ID NO: 2701953 - RNA, 21 nt, Human parainfluenza virus 2
uccaaucaagauccagacucc

SEQ ID NO: 2701954 - RNA, 21 nt, Human parainfluenza virus 2
caaccaaaagacccaaacaac

SEQ ID NO: 2701955 - RNA, 20 nt, Human parainfluenza virus 2
caagagacacucaacaugca

SEQ ID NO: 2701956 - RNA, 21 nt, Human parainfluenza virus 2
gaaagccugaauccaagaaag

SEQ ID NO: 2701957 - RNA, 12 nt, Human parainfluenza virus 2
acaccaagaaac

SEQ ID NO: 2701958 - RNA, 17 nt, Human parainfluenza virus 2
agacuccauccauccaa

SEQ ID NO: 2701959 - RNA, 19 nt, Human parainfluenza virus 2
agauaaaauucuugcaacu

SEQ ID NO: 2701960 - RNA, 15 nt, Human parainfluenza virus 2
cggaaacaauucucu

SEQ ID NO: 2701961 - RNA, 14 nt, Human parainfluenza virus 2
uguuguaauucaau

SEQ ID NO: 2701962 - RNA, 21 nt, Human
cugacacaugcugaacaucac

SEQ ID NO: 2701963 - RNA, 13 nt, Human
cugaaagaggaau

SEQ ID NO: 2701964 - RNA, 17 nt, Human
cugaaagaggaaugaag

SEQ ID NO: 2701965 - RNA, 19 nt, Human
cucucuggccuucggccuc

SEQ ID NO: 2701966 - RNA, 22 nt, Human
cucucuggccuucggccuccau

SEQ ID NO: 2701967 - RNA, 17 nt, Human
cucucuggccuucggcc

SEQ ID NO: 2701968 - RNA, 13 nt, Human
cucaaaacugcac

SEQ ID NO: 2701969 - RNA, 23 nt, Human
cucagaaaacaaggaugaauuaa

SEQ ID NO: 2701970 - RNA, 19 nt, Human
cucagaaaacaaggaugaa

SEQ ID NO: 2701971 - RNA, 14 nt, Human
cuaacuggacuggu

SEQ ID NO: 2701972 - RNA, 15 nt, Human
cgguuuauauaagcu

SEQ ID NO: 2701973 - RNA, 23 nt, Human
cggagaagagcuguucacagcca

SEQ ID NO: 2701974 - RNA, 24 nt, Human
cggagaagagcuguucacagccag

SEQ ID NO: 2701975 - RNA, 24 nt, Human
cccagccagcaguucagagcugcc

SEQ ID NO: 2701976 - RNA, 13 nt, Human
ccccugcacucca

SEQ ID NO: 2701977 - RNA, 22 nt, Human
cccuccucugcuugccaucccu

SEQ ID NO: 2701978 - RNA, 13 nt, Human
cccuccucugcuu

SEQ ID NO: 2701979 - RNA, 15 nt, Human
ccaucccucccucca

SEQ ID NO: 2701980 - RNA, 14 nt, Human
ccaucccucccucc

SEQ ID NO: 2701981 - RNA, 13 nt, Human
ccaucccucccuc

SEQ ID NO: 2701982 - RNA, 13 nt, Human
cccaacuccagaa

SEQ ID NO: 2701983 - RNA, 17 nt, Human
ccugucucuacuaaaaa

SEQ ID NO: 2701984 - RNA, 16 nt, Human
ccucccuucucuucac

SEQ ID NO: 2701985 - RNA, 12 nt, Human
ccucggagaaga

SEQ ID NO: 2701986 - RNA, 14 nt, Human
ccucggagaagagc

SEQ ID NO: 2701987 - RNA, 23 nt, Human
cacuccagccugagcgacaguga

SEQ ID NO: 2701988 - RNA, 12 nt, Human
cacuccagccug

SEQ ID NO: 2701989 - RNA, 13 nt, Human
cacuccagccuga

SEQ ID NO: 2701990 - RNA, 12 nt, Human
cagaacagugau

SEQ ID NO: 2701991 - RNA, 17 nt, Human
cagaacagugauuacca

SEQ ID NO: 2701992 - RNA, 11 nt, Human
cagaacaguga

SEQ ID NO: 2701993 - RNA, 18 nt, Human
cagaacagugauuaccag

SEQ ID NO: 2701994 - RNA, 17 nt, Human
cacuuguguuuugcaag

SEQ ID NO: 2701995 - RNA, 15 nt, Human
cacuuaaaaaugguu

SEQ ID NO: 2701996 - RNA, 23 nt, Human
caauaaaauccauacauuugugu

SEQ ID NO: 2701997 - RNA, 20 nt, Human
caauaaaauccauacauuug

SEQ ID NO: 2701998 - RNA, 15 nt, Human
caauaaaauggguuu

SEQ ID NO: 2701999 - RNA, 16 nt, Human
caaacagucucaggaa

SEQ ID NO: 2702000 - RNA, 17 nt, Human
caaacagucucaggaaa

SEQ ID NO: 2702001 - RNA, 15 nt, Human
caaacagucucagga

SEQ ID NO: 2702002 - RNA, 21 nt, Human
caaaaggauaaugaauacuuu

SEQ ID NO: 2702003 - RNA, 24 nt, Human
caaacccaguguuuuaggagcaug

SEQ ID NO: 2702004 - RNA, 15 nt, Human
auuuuuauauuugaa

SEQ ID NO: 2702005 - RNA, 21 nt, Human
auuuuauaucaauuuaaaaaa

SEQ ID NO: 2702006 - RNA, 19 nt, Human
caagacccaaaaggcagaa

SEQ ID NO: 2702007 - RNA, 21 nt, Human
caaaucuuaacuugaaggagu

SEQ ID NO: 2702008 - RNA, 22 nt, Human
auuaugaauuacauuuguauaa

SEQ ID NO: 2702009 - RNA, 20 nt, Human
auuaugaauuacauuuguau

SEQ ID NO: 2702010 - RNA, 19 nt, Human
auuaugaauuacauuugua

SEQ ID NO: 2702011 - RNA, 15 nt, Human
auuguuuaaaaucau

SEQ ID NO: 2702012 - RNA, 20 nt, Human
auuucauaccuaucaucuua

SEQ ID NO: 2702013 - RNA, 14 nt, Human
auuucuaugaaaua

SEQ ID NO: 2702014 - RNA, 16 nt, Human
auuuaauaaaugugcc

SEQ ID NO: 2702015 - RNA, 18 nt, Human
ccacagaagcuccaggua

SEQ ID NO: 2702016 - RNA, 18 nt, Human
ccaccagucugacuguuu

SEQ ID NO: 2702017 - RNA, 16 nt, Human
ccacagaagcuccagg

SEQ ID NO: 2702018 - RNA, 13 nt, Human
cauuaucucaaaa

SEQ ID NO: 2702019 - RNA, 12 nt, Human
cauuaucucaaa

SEQ ID NO: 2702020 - RNA, 17 nt, Human
cagggaggacgcucucu

SEQ ID NO: 2702021 - RNA, 18 nt, Human
cagggaggacgcucucug

SEQ ID NO: 2702022 - RNA, 15 nt, Human
cagucucaggaaauc

SEQ ID NO: 2702023 - RNA, 15 nt, Human
cagucaccucaugga

SEQ ID NO: 2702024 - RNA, 15 nt, Human
cagagcugcccucuc

SEQ ID NO: 2702025 - RNA, 13 nt, Human
cagagcugcccuc

SEQ ID NO: 2702026 - RNA, 17 nt, Human
cagagcugcccucuccu

SEQ ID NO: 2702027 - RNA, 22 nt, Human
cagcacagccucuuagaugcag

SEQ ID NO: 2702028 - RNA, 14 nt, Human
cagccagcaguuca

SEQ ID NO: 2702029 - RNA, 21 nt, Human
cagccagcaguucagagcugc

SEQ ID NO: 2702030 - RNA, 15 nt, Human
cagccagcaguucag

SEQ ID NO: 2702031 - RNA, 22 nt, Human
cagccagcaguucagagcugcc

SEQ ID NO: 2702032 - RNA, 20 nt, Human
cagcaguugaaaagacucca

SEQ ID NO: 2702033 - RNA, 21 nt, Human
cagcaguugaaaagacuccaa

SEQ ID NO: 2702034 - RNA, 17 nt, Human
cagcaguugaaaagacu

SEQ ID NO: 2702035 - RNA, 22 nt, Human
cagcaguugaaaagacuccaaa

SEQ ID NO: 2702036 - RNA, 19 nt, Human
cagccugagcgacagugag

SEQ ID NO: 2702037 - RNA, 22 nt, Human
cagccugagcgacagugagacu

SEQ ID NO: 2702038 - RNA, 18 nt, Human
cagccugagcgacaguga

SEQ ID NO: 2702039 - RNA, 20 nt, Human
cagcccuucuuuccacagaa

SEQ ID NO: 2702040 - RNA, 19 nt, Human
cagcccuucuuuccacaga

SEQ ID NO: 2702041 - RNA, 15 nt, Human
cagcccuucuuucca

SEQ ID NO: 2702042 - RNA, 22 nt, Human
cagcugccuccccuccucugcu

SEQ ID NO: 2702043 - RNA, 21 nt, Human
cagcugccuccccuccucugc

SEQ ID NO: 2702044 - RNA, 24 nt, Human
cagcugccuccccuccucugcuug

SEQ ID NO: 2702045 - RNA, 23 nt, Human
cagcugccuccccuccucugcuu

SEQ ID NO: 2702046 - RNA, 17 nt, Human
cagcuccccucggagaa

SEQ ID NO: 2702047 - RNA, 18 nt, Human
cagcuccccucggagaag

SEQ ID NO: 2702048 - RNA, 16 nt, Human
cagcuccccucggaga

SEQ ID NO: 2702049 - RNA, 22 nt, Human
caggaaaucaaauaugcaaagc

SEQ ID NO: 2702050 - RNA, 23 nt, Human
caggaaaucaaauaugcaaagca

SEQ ID NO: 2702051 - RNA, 12 nt, Human
gccuccauccug

SEQ ID NO: 2702052 - RNA, 15 nt, Human
gccucuuagaugcag

SEQ ID NO: 2702053 - RNA, 21 nt, Human
gccuucggccuccauccugag

SEQ ID NO: 2702054 - RNA, 20 nt, Human
gccuucggccuccauccuga

SEQ ID NO: 2702055 - RNA, 19 nt, Human
gcuccaccuugcagcucuc

SEQ ID NO: 2702056 - RNA, 15 nt, Human
gcuccacuuggucug

SEQ ID NO: 2702057 - RNA, 18 nt, Human
gcuccacuuggucuguga

SEQ ID NO: 2702058 - RNA, 19 nt, Human
gcuccacuuggucugugag

SEQ ID NO: 2702059 - RNA, 21 nt, Human
gcuccccucggagaagagcug

SEQ ID NO: 2702060 - RNA, 12 nt, Human
gcuagaacuccc

SEQ ID NO: 2702061 - RNA, 13 nt, Human
gcuagaacucccu

SEQ ID NO: 2702062 - RNA, 14 nt, Human
gcuagaacucccuu

SEQ ID NO: 2702063 - RNA, 15 nt, Human
gcuagaacucccuuu

SEQ ID NO: 2702064 - RNA, 16 nt, Human
gcuagaacucccuuuc

SEQ ID NO: 2702065 - RNA, 18 nt, Human
gcuagaacucccuuucaa

SEQ ID NO: 2702066 - RNA, 13 nt, Human
ggagaaacuggaa

SEQ ID NO: 2702067 - RNA, 22 nt, Human
ggacucauuuuaaaaaauggaa

SEQ ID NO: 2702068 - RNA, 21 nt, Human
ggcacaguuuucugagaaaga

SEQ ID NO: 2702069 - RNA, 14 nt, Human
ggccuccauccuga

SEQ ID NO: 2702070 - RNA, 15 nt, Human
ggccuccauccugag

SEQ ID NO: 2702071 - RNA, 13 nt, Human
ggccuccauccug

SEQ ID NO: 2702072 - RNA, 17 nt, Human
aaaaaugguuuaaaugg

SEQ ID NO: 2702073 - RNA, 15 nt, Human
aaaacuucagacaua

SEQ ID NO: 2702074 - RNA, 14 nt, Human
aaaaauaacaauga

SEQ ID NO: 2702075 - RNA, 20 nt, Human
gggaacccaaguccaagcau

SEQ ID NO: 2702076 - RNA, 22 nt, Human
gggacagucaccucauggaauu

SEQ ID NO: 2702077 - RNA, 21 nt, Human
gggacagucaccucauggaau

SEQ ID NO: 2702078 - RNA, 20 nt, Human
gggacagucaccucauggaa

SEQ ID NO: 2702079 - RNA, 14 nt, Human
ggcuccacuugguc

SEQ ID NO: 2702080 - RNA, 11 nt, Human
aaacacagcaa

SEQ ID NO: 2702081 - RNA, 12 nt, Human
aaacacagcaag

SEQ ID NO: 2702082 - RNA, 14 nt, Human
aaacacagcaaggg

SEQ ID NO: 2702083 - RNA, 19 nt, Human
ggggaauugaggacacuga

SEQ ID NO: 2702084 - RNA, 15 nt, Human
aaacagucucaggaa

SEQ ID NO: 2702085 - RNA, 14 nt, Human
aaacaguagugaua

SEQ ID NO: 2702086 - RNA, 12 nt, Human
aaaccacagcag

SEQ ID NO: 2702087 - RNA, 15 nt, Human
aaacucguuaauuug

SEQ ID NO: 2702088 - RNA, 17 nt, Human
aaagcacugacuucuaa

SEQ ID NO: 2702089 - RNA, 21 nt, Human
aaagcacugacuucuaaguaa

SEQ ID NO: 2702090 - RNA, 14 nt, Human
aaagguacuucaaa

SEQ ID NO: 2702091 - RNA, 20 nt, Human
aaagggauggcaagaugugg

SEQ ID NO: 2702092 - RNA, 19 nt, Human
aaacuucagacauagaauu

SEQ ID NO: 2702093 - RNA, 23 nt, Human
aaacuucagcgguuuauauaagc

SEQ ID NO: 2702094 - RNA, 13 nt, Human
aaagacagugaaa

SEQ ID NO: 2702095 - RNA, 18 nt, Human
aaagacuauucaaacagu

SEQ ID NO: 2702096 - RNA, 19 nt, Human
aaagacuauucaaacaguc

SEQ ID NO: 2702097 - RNA, 17 nt, Human
aaagacuauucaaacag

SEQ ID NO: 2702098 - RNA, 21 nt, Human
aaagacuauucaaacagucuc

SEQ ID NO: 2702099 - RNA, 15 nt, Human
aaagacuccaaagaa

SEQ ID NO: 2702100 - RNA, 21 nt, Human
aaagacuccaaagaaauguaa

SEQ ID NO: 2702101 - RNA, 14 nt, Human
aaagacuccaaaga

SEQ ID NO: 2702102 - RNA, 15 nt, Human
aaagaggcagcuuga

SEQ ID NO: 2702103 - RNA, 15 nt, Human
aaagaggaaugaagu

SEQ ID NO: 2702104 - RNA, 23 nt, Human
aaaguucugcagauaaacaguag

SEQ ID NO: 2702105 - RNA, 20 nt, Human
aaagguauuuuaaucaccaa

SEQ ID NO: 2702106 - RNA, 18 nt, Human
aaaguauguuagugcaaa

SEQ ID NO: 2702107 - RNA, 19 nt, Human
aaauacacacucaaaucaa

SEQ ID NO: 2702108 - RNA, 23 nt, Human
aaauaauuuuuauauuugaaaua

SEQ ID NO: 2702109 - RNA, 22 nt, Human
aaauaauuuuuauauuugaaau

SEQ ID NO: 2702110 - RNA, 15 nt, Human
aaauacacacucaaa

SEQ ID NO: 2702111 - RNA, 21 nt, Human
aaauaauuuuuauauuugaaa

SEQ ID NO: 2702112 - RNA, 23 nt, Human
guacacugccuucucaacuccaa

SEQ ID NO: 2702113 - RNA, 20 nt, Human
guaauaggcguaacuaauuu

SEQ ID NO: 2702114 - RNA, 18 nt, Human
aaauccauacauuugugu

SEQ ID NO: 2702115 - RNA, 15 nt, Human
aaauccauacauuug

SEQ ID NO: 2702116 - RNA, 17 nt, Human
aaauauuauguuaaaac

SEQ ID NO: 2702117 - RNA, 12 nt, Human
aaaucauuucug

SEQ ID NO: 2702118 - RNA, 11 nt, Human
aaaucauuucu

SEQ ID NO: 2702119 - RNA, 19 nt, Human
aaaucauuucugcaucagc

SEQ ID NO: 2702120 - RNA, 21 nt, Human
aaaucauuucugcaucagcug

SEQ ID NO: 2702121 - RNA, 22 nt, Human
aaaucauuucugcaucagcugc

SEQ ID NO: 2702122 - RNA, 23 nt, Human
aaaucauuucugcaucagcugcu

SEQ ID NO: 2702123 - RNA, 22 nt, Human
guacuucaaauccuugaagauu

SEQ ID NO: 2702124 - RNA, 21 nt, Human
guacuucaaauccuugaagau

SEQ ID NO: 2702125 - RNA, 15 nt, Human
guacuucaugcuguc

SEQ ID NO: 2702126 - RNA, 20 nt, Human
guagacgugcacgcacacug

SEQ ID NO: 2702127 - RNA, 23 nt, Human
guagacgugcacgcacacugucu

SEQ ID NO: 2702128 - RNA, 14 nt, Human
gacagaaagcagaa

SEQ ID NO: 2702129 - RNA, 20 nt, Human
gacagaaagcagaacaguga

SEQ ID NO: 2702130 - RNA, 21 nt, Human
gacagcccuucuuuccacaga

SEQ ID NO: 2702131 - RNA, 15 nt, Human
gacuauucaaacagu

SEQ ID NO: 2702132 - RNA, 16 nt, Human
gacuauucaaacaguc

SEQ ID NO: 2702133 - RNA, 13 nt, Human
gagcgacagugag

SEQ ID NO: 2702134 - RNA, 15 nt, Human
gagcgacagugagac

SEQ ID NO: 2702135 - RNA, 22 nt, Human
gcaguugaaaagacuccaaaga

SEQ ID NO: 2702136 - RNA, 15 nt, Human
gcagcuuauucacaa

SEQ ID NO: 2702137 - RNA, 16 nt, Human
gcauuguaaaugugcu

SEQ ID NO: 2702138 - RNA, 16 nt, Human
gcaauaaaauggguuu

SEQ ID NO: 2702139 - RNA, 18 nt, Human
gcaauagucaaauugugu

SEQ ID NO: 2702140 - RNA, 21 nt, Human
gaugcugucuucguacuggga

SEQ ID NO: 2702141 - RNA, 18 nt, Human
gaaagaaaaucaggcugg

SEQ ID NO: 2702142 - RNA, 20 nt, Human
gaaagggauuuucagcccuc

SEQ ID NO: 2702143 - RNA, 12 nt, Human
gaaagggauuuu

SEQ ID NO: 2702144 - RNA, 21 nt, Human
gaaaacuuuaugcuaagugaa

SEQ ID NO: 2702145 - RNA, 16 nt, Human
gaaaagacuccaaaga

SEQ ID NO: 2702146 - RNA, 17 nt, Human
gaaaagacuccaaagaa

SEQ ID NO: 2702147 - RNA, 14 nt, Human
gaaaagacuccaaa

SEQ ID NO: 2702148 - RNA, 16 nt, Human
gaacccaaguccaagc

SEQ ID NO: 2702149 - RNA, 17 nt, Human
gaacccaaguccaagca

SEQ ID NO: 2702150 - RNA, 17 nt, Human
gaacccgggaggcagag

SEQ ID NO: 2702151 - RNA, 16 nt, Human
cuuggucugugagaug

SEQ ID NO: 2702152 - RNA, 19 nt, Human
cuuggucugugagaugcua

SEQ ID NO: 2702153 - RNA, 13 nt, Human
cuucucacauuua

SEQ ID NO: 2702154 - RNA, 20 nt, Human
cuucucacauuuauauuuuu

SEQ ID NO: 2702155 - RNA, 21 nt, Human
cuucuaaguaaaaccacagca

SEQ ID NO: 2702156 - RNA, 13 nt, Human
cuucuaaguaaaa

SEQ ID NO: 2702157 - RNA, 17 nt, Human
cuucuaaguaaaaccac

SEQ ID NO: 2702158 - RNA, 19 nt, Human
cuggauaguccgucucugc

SEQ ID NO: 2702159 - RNA, 18 nt, Human
cuggauaguccgucucug

SEQ ID NO: 2702160 - RNA, 23 nt, Human
cugucggagcccugucuccucuc

SEQ ID NO: 2702161 - RNA, 17 nt, Human
cugucggagcccugucu

SEQ ID NO: 2702162 - RNA, 19 nt, Human
cuguuauaaucuuucacag

SEQ ID NO: 2702163 - RNA, 13 nt, Human
cuguuauaaucuu

SEQ ID NO: 2702164 - RNA, 21 nt, Human
cuuaaaaaugguuuaaauggu

SEQ ID NO: 2702165 - RNA, 18 nt, Human
auuauauuuauuacugua

SEQ ID NO: 2702166 - RNA, 15 nt, Human
auuauauuuauuacu

SEQ ID NO: 2702167 - RNA, 21 nt, Human
auuauguuaaaacugggacag

SEQ ID NO: 2702168 - RNA, 16 nt, Human
auucaaacagucucag

SEQ ID NO: 2702169 - RNA, 18 nt, Human
auucaaacagucucagga

SEQ ID NO: 2702170 - RNA, 19 nt, Human
auucaaacagucucaggaa

SEQ ID NO: 2702171 - RNA, 20 nt, Human
auucaaacagucucaggaaa

SEQ ID NO: 2702172 - RNA, 15 nt, Human
auuauauuuacaaau

SEQ ID NO: 2702173 - RNA, 19 nt, Human
auugacacuuaaaaauggu

SEQ ID NO: 2702174 - RNA, 15 nt, Human
auugacacuuaaaaa

SEQ ID NO: 2702175 - RNA, 17 nt, Human
auugacacuuaaaaaug

SEQ ID NO: 2702176 - RNA, 18 nt, Human
auuuuuuguuaaaugauu

SEQ ID NO: 2702177 - RNA, 23 nt, Human
auuuuuucucuaggaaauauuua

SEQ ID NO: 2702178 - RNA, 20 nt, Human
auuuuuucucuaggaaauau

SEQ ID NO: 2702179 - RNA, 21 nt, Human
auuuuuguuuucauuaucuca

SEQ ID NO: 2702180 - RNA, 22 nt, Human
auuuuugugauuuugugauuga

SEQ ID NO: 2702181 - RNA, 19 nt, Human
auuuuucuuauuucauuuc

SEQ ID NO: 2702182 - RNA, 20 nt, Human
auuuuucuuauuucauuucu

SEQ ID NO: 2702183 - RNA, 15 nt, Human
auuuuucuuauuuca

SEQ ID NO: 2702184 - RNA, 14 nt, Human
auuuuccugaaaac

SEQ ID NO: 2702185 - RNA, 14 nt, Human
auuuucuauaauuu

SEQ ID NO: 2702186 - RNA, 15 nt, Human
auuuucuauaauuua

SEQ ID NO: 2702187 - RNA, 12 nt, Human
auuuuaauaaug

SEQ ID NO: 2702188 - RNA, 16 nt, Human
auuuuaaaagaaugau

SEQ ID NO: 2702189 - RNA, 23 nt, Human
auuuuaaaagaaugauuaugaau

SEQ ID NO: 2702190 - RNA, 14 nt, Human
auuuguauaaaaua

SEQ ID NO: 2702191 - RNA, 22 nt, Human
auuuguaguguuggagaagaac

SEQ ID NO: 2702192 - RNA, 19 nt, Human
auuuguaguguuggagaag

SEQ ID NO: 2702193 - RNA, 14 nt, Human
auuuauuuuaauaa

SEQ ID NO: 2702194 - RNA, 13 nt, Human
auugucuagugaa

SEQ ID NO: 2702195 - RNA, 13 nt, Human
auugacuuuuuau

SEQ ID NO: 2702196 - RNA, 19 nt, Human
auuggagcucgugggacag

SEQ ID NO: 2702197 - RNA, 19 nt, Human
auuggacaguaaaauccac

SEQ ID NO: 2702198 - RNA, 20 nt, Human
augcuagaacucccuuucaa

SEQ ID NO: 2702199 - RNA, 21 nt, Human
augcuagaacucccuuucaac

SEQ ID NO: 2702200 - RNA, 22 nt, Human
augcuagaacucccuuucaaca

SEQ ID NO: 2702201 - RNA, 16 nt, Human
uuucaaacauauauaa

SEQ ID NO: 2702202 - RNA, 19 nt, Human
auggcuaagcaaaauguga

SEQ ID NO: 2702203 - RNA, 16 nt, Human
auggcacuaguauuuc

SEQ ID NO: 2702204 - RNA, 14 nt, Human
auggcacuaguauu

SEQ ID NO: 2702205 - RNA, 15 nt, Human
augauaacuggaaac

SEQ ID NO: 2702206 - RNA, 14 nt, Human
augauuaaguaaug

SEQ ID NO: 2702207 - RNA, 18 nt, Human
augauuaaguaaugauaa

SEQ ID NO: 2702208 - RNA, 17 nt, Human
augccauuuaaagcuua

SEQ ID NO: 2702209 - RNA, 21 nt, Human
augccauuuaaagcuuauuaa

SEQ ID NO: 2702210 - RNA, 13 nt, Human
augcaguucugaa

SEQ ID NO: 2702211 - RNA, 18 nt, Human
uuuaaauauaugcuaagu

SEQ ID NO: 2702212 - RNA, 15 nt, Human
uuugaaauauugacu

SEQ ID NO: 2702213 - RNA, 18 nt, Human
uuucucccagucauuuaa

SEQ ID NO: 2702214 - RNA, 17 nt, Human
uuucucccagucauuua

SEQ ID NO: 2702215 - RNA, 21 nt, Human
augguucccuugaugaagaag

SEQ ID NO: 2702216 - RNA, 14 nt, Human
uuugcaagccagau

SEQ ID NO: 2702217 - RNA, 16 nt, Human
auguacuucaugcugu

SEQ ID NO: 2702218 - RNA, 12 nt, Human
auguagaggaga

SEQ ID NO: 2702219 - RNA, 13 nt, Human
auguagaggagaa

SEQ ID NO: 2702220 - RNA, 17 nt, Human
auguagaggagaaacug

SEQ ID NO: 2702221 - RNA, 19 nt, Human
auguagaggagaaacugga

SEQ ID NO: 2702222 - RNA, 16 nt, Human
auguccacugguucuu

SEQ ID NO: 2702223 - RNA, 17 nt, Human
auguccacugguucuuc

SEQ ID NO: 2702224 - RNA, 17 nt, Human
uuugugaagcaaaauuu

SEQ ID NO: 2702225 - RNA, 21 nt, Human
uuuguaguguuggagaagaac

SEQ ID NO: 2702226 - RNA, 19 nt, Human
uuuguaguguuggagaaga

SEQ ID NO: 2702227 - RNA, 14 nt, Human
uucggccuccaucc

SEQ ID NO: 2702228 - RNA, 15 nt, Human
uucggccuccauccu

SEQ ID NO: 2702229 - RNA, 23 nt, Human
uucuaagaagugaaaaucuacac

SEQ ID NO: 2702230 - RNA, 13 nt, Human
uucuaagaaguga

SEQ ID NO: 2702231 - RNA, 15 nt, Human
uucuaaguaaaacca

SEQ ID NO: 2702232 - RNA, 16 nt, Human
uucuaaguaaaaccac

SEQ ID NO: 2702233 - RNA, 19 nt, Human
uucuagcaugaagacagag

SEQ ID NO: 2702234 - RNA, 17 nt, Human
aucaggguuaguauugu

SEQ ID NO: 2702235 - RNA, 22 nt, Human
aucacuugucaauaaaauccau

SEQ ID NO: 2702236 - RNA, 20 nt, Human
auauuuuuuguuaaaugauu

SEQ ID NO: 2702237 - RNA, 18 nt, Human
auauuuuuuguuaaauga

SEQ ID NO: 2702238 - RNA, 14 nt, Human
aucaacagauaaau

SEQ ID NO: 2702239 - RNA, 19 nt, Human
uuccguagguuauuuucag

SEQ ID NO: 2702240 - RNA, 12 nt, Human
uucucuaggaaa

SEQ ID NO: 2702241 - RNA, 19 nt, Human
uugaacccgggaggcagag

SEQ ID NO: 2702242 - RNA, 17 nt, Human
uugaaauuguauuacaa

SEQ ID NO: 2702243 - RNA, 18 nt, Human
uugaacccgggaggcaga

SEQ ID NO: 2702244 - RNA, 13 nt, Human
uugcaucaauuuu

SEQ ID NO: 2702245 - RNA, 22 nt, Human
uugcaagccagauuuuccugaa

SEQ ID NO: 2702246 - RNA, 14 nt, Human
aucucauuuccaag

SEQ ID NO: 2702247 - RNA, 17 nt, Human
uugaagggaaauuucag

SEQ ID NO: 2702248 - RNA, 19 nt, Human
aucuacacuccagugagac

SEQ ID NO: 2702249 - RNA, 18 nt, Human
aucuacacuccagugaga

SEQ ID NO: 2702250 - RNA, 14 nt, Human
aucuuauaauuuaa

SEQ ID NO: 2702251 - RNA, 16 nt, Human
augaauuacauuugua

SEQ ID NO: 2702252 - RNA, 15 nt, Human
augaauuacauuugu

SEQ ID NO: 2702253 - RNA, 15 nt, Human
augaauuaaguuuuu

SEQ ID NO: 2702254 - RNA, 23 nt, Human
augaauggcuaagcaaaauguga

SEQ ID NO: 2702255 - RNA, 14 nt, Human
auaagccagacauc

SEQ ID NO: 2702256 - RNA, 14 nt, Human
auaaucuuucacag

SEQ ID NO: 2702257 - RNA, 15 nt, Human
uuagggagagaagau

SEQ ID NO: 2702258 - RNA, 14 nt, Human
uuagggagagaaga

SEQ ID NO: 2702259 - RNA, 16 nt, Human
uuaggguuaugauuaa

SEQ ID NO: 2702260 - RNA, 14 nt, Human
uuaggguuaugauu

SEQ ID NO: 2702261 - RNA, 22 nt, Human
uuaaaaucauuucugcaucagc

SEQ ID NO: 2702262 - RNA, 14 nt, Human
uuaaaaucauuucu

SEQ ID NO: 2702263 - RNA, 16 nt, Human
uuaaaaaauggaacau

SEQ ID NO: 2702264 - RNA, 19 nt, Human
uuaaaaaagaaacauuugg

SEQ ID NO: 2702265 - RNA, 15 nt, Human
aguuuagcuggaaaa

SEQ ID NO: 2702266 - RNA, 17 nt, Human
aguuuaaauuguaauag

SEQ ID NO: 2702267 - RNA, 20 nt, Human
aguuuaaauuguaauaggcg

SEQ ID NO: 2702268 - RNA, 16 nt, Human
aguuuuauaugcuucu

SEQ ID NO: 2702269 - RNA, 15 nt, Human
uuauuauauuuacaa

SEQ ID NO: 2702270 - RNA, 14 nt, Human
uuauuauauuuaca

SEQ ID NO: 2702271 - RNA, 19 nt, Human
uuauguuaaaacugggaca

SEQ ID NO: 2702272 - RNA, 16 nt, Human
auacucauuaggaugg

SEQ ID NO: 2702273 - RNA, 18 nt, Human
auagauaggucagugcaa

SEQ ID NO: 2702274 - RNA, 17 nt, Human
auagaauuaacacauga

SEQ ID NO: 2702275 - RNA, 13 nt, Human
auagaaguaaaaa

SEQ ID NO: 2702276 - RNA, 19 nt, Human
uuaugauuaaguaaugaua

SEQ ID NO: 2702277 - RNA, 21 nt, Human
uuaugaauuacauuuguauaa

SEQ ID NO: 2702278 - RNA, 17 nt, Human
uuaugaauuacauuugu

SEQ ID NO: 2702279 - RNA, 16 nt, Human
uuaugaauuacauuug

SEQ ID NO: 2702280 - RNA, 14 nt, Human
uuaugaauuacauu

SEQ ID NO: 2702281 - RNA, 19 nt, Human
uuauauuugaaauauugac

SEQ ID NO: 2702282 - RNA, 15 nt, Human
uuauauuugaaauau

SEQ ID NO: 2702283 - RNA, 17 nt, Human
auacuauggaauuucuc

SEQ ID NO: 2702284 - RNA, 14 nt, Human
agugcaaauuguca

SEQ ID NO: 2702285 - RNA, 22 nt, Human
agugaacaaauuuacagagaca

SEQ ID NO: 2702286 - RNA, 23 nt, Human
agugaacaaauuuacagagacag

SEQ ID NO: 2702287 - RNA, 21 nt, Human
agugaacaaauuuacagagac

SEQ ID NO: 2702288 - RNA, 16 nt, Human
agucuuucacauuuaa

SEQ ID NO: 2702289 - RNA, 22 nt, Human
uguugcccacagcuguaugauu

SEQ ID NO: 2702290 - RNA, 15 nt, Human
uguucuaagaaguga

SEQ ID NO: 2702291 - RNA, 23 nt, Human
aguguuggagaagaacugaaauc

SEQ ID NO: 2702292 - RNA, 13 nt, Human
aguaauuggaaag

SEQ ID NO: 2702293 - RNA, 12 nt, Human
aguaauuggaaa

SEQ ID NO: 2702294 - RNA, 16 nt, Human
aguaaaaccacagcag

SEQ ID NO: 2702295 - RNA, 17 nt, Human
aguaaaaccacagcagu

SEQ ID NO: 2702296 - RNA, 19 nt, Human
aguaaaaccacagcaguug

SEQ ID NO: 2702297 - RNA, 20 nt, Human
aguaaaaccacagcaguuga

SEQ ID NO: 2702298 - RNA, 16 nt, Human
uguaguguuggagaag

SEQ ID NO: 2702299 - RNA, 18 nt, Human
uguaguguuggagaagaa

SEQ ID NO: 2702300 - RNA, 17 nt, Human
uguaguguuggagaaga

SEQ ID NO: 2702301 - RNA, 13 nt, Human
uguaagggaaacu

SEQ ID NO: 2702302 - RNA, 18 nt, Human
uguaagggaaacugccag

SEQ ID NO: 2702303 - RNA, 19 nt, Human
uguaagggaaacugccagc

SEQ ID NO: 2702304 - RNA, 14 nt, Human
agguugcagugagc

SEQ ID NO: 2702305 - RNA, 16 nt, Human
aggugcuacaaaaaca

SEQ ID NO: 2702306 - RNA, 16 nt, Human
agucucaggaaaucaa

SEQ ID NO: 2702307 - RNA, 13 nt, Human
agucucaggaaau

SEQ ID NO: 2702308 - RNA, 14 nt, Human
agucaggaaagaga

SEQ ID NO: 2702309 - RNA, 20 nt, Human
uguccagccccguagacgug

SEQ ID NO: 2702310 - RNA, 19 nt, Human
ugggaggcugagaugggag

SEQ ID NO: 2702311 - RNA, 13 nt, Human
agggagagaagau

SEQ ID NO: 2702312 - RNA, 14 nt, Human
agggagagaagaua

SEQ ID NO: 2702313 - RNA, 23 nt, Human
agggacuucugucuucacaacag

SEQ ID NO: 2702314 - RNA, 22 nt, Human
agggcuguuauaaucuuucaca

SEQ ID NO: 2702315 - RNA, 20 nt, Human
ugggaacccaaguccaagca

SEQ ID NO: 2702316 - RNA, 16 nt, Human
agggaaacugccagca

SEQ ID NO: 2702317 - RNA, 19 nt, Human
agggaaacugccagcaacg

SEQ ID NO: 2702318 - RNA, 21 nt, Human
agggaaacugccagcaacgca

SEQ ID NO: 2702319 - RNA, 23 nt, Human
agggaaacugccagcaacgcagg

SEQ ID NO: 2702320 - RNA, 14 nt, Human
agggaaacugccag

SEQ ID NO: 2702321 - RNA, 15 nt, Human
agggaaacugccagc

SEQ ID NO: 2702322 - RNA, 14 nt, Human
ugggaaagcauugu

SEQ ID NO: 2702323 - RNA, 16 nt, Human
ugggaaagcauuguaa

SEQ ID NO: 2702324 - RNA, 17 nt, Human
ugggaaagcauuguaaa

SEQ ID NO: 2702325 - RNA, 18 nt, Human
ugggaaagcauuguaaau

SEQ ID NO: 2702326 - RNA, 18 nt, Human
ugggaaacaaaaggauaa

SEQ ID NO: 2702327 - RNA, 23 nt, Human
uggcuauaggugcuacaaaaaca

SEQ ID NO: 2702328 - RNA, 18 nt, Human
uggcuaagcaaaauguga

SEQ ID NO: 2702329 - RNA, 15 nt, Human
uggcuauaggugcua

SEQ ID NO: 2702330 - RNA, 19 nt, Human
uggcuauaggugcuacaaa

SEQ ID NO: 2702331 - RNA, 11 nt, Human
aggcuccacuu

SEQ ID NO: 2702332 - RNA, 17 nt, Human
aggcuccacuuggucug

SEQ ID NO: 2702333 - RNA, 21 nt, Human
aggcuccacuuggucugugag

SEQ ID NO: 2702334 - RNA, 22 nt, Human
aggcuccacuuggucugugaga

SEQ ID NO: 2702335 - RNA, 16 nt, Human
uggagaagaacugaaa

SEQ ID NO: 2702336 - RNA, 20 nt, Human
aggcagcucuaaaugucaau

SEQ ID NO: 2702337 - RNA, 18 nt, Human
aggaaauauuuauuuuaa

SEQ ID NO: 2702338 - RNA, 14 nt, Human
aggaaauauuuauu

SEQ ID NO: 2702339 - RNA, 19 nt, Human
aggaaaucaaauaugcaaa

SEQ ID NO: 2702340 - RNA, 19 nt, Human
aggaauugacccacaagaa

SEQ ID NO: 2702341 - RNA, 21 nt, Human
agcuuauugucuagugaaacu

SEQ ID NO: 2702342 - RNA, 20 nt, Human
agcuuauuaaaacucauuuu

SEQ ID NO: 2702343 - RNA, 15 nt, Human
agcuuauuaaaacuc

SEQ ID NO: 2702344 - RNA, 19 nt, Human
aggaaagagaacuuccaga

SEQ ID NO: 2702345 - RNA, 13 nt, Human
aggaaagagaacu

SEQ ID NO: 2702346 - RNA, 14 nt, Human
ugcuaguaauugga

SEQ ID NO: 2702347 - RNA, 16 nt, Human
ugcuaguaauuggaaa

SEQ ID NO: 2702348 - RNA, 23 nt, Human
agcugccuccccuccucugcuug

SEQ ID NO: 2702349 - RNA, 22 nt, Human
agcugccuccccuccucugcuu

SEQ ID NO: 2702350 - RNA, 21 nt, Human
agcugccuccccuccucugcu

SEQ ID NO: 2702351 - RNA, 20 nt, Human
agcugccuccccuccucugc

SEQ ID NO: 2702352 - RNA, 19 nt, Human
agcugccuccccuccucug

SEQ ID NO: 2702353 - RNA, 18 nt, Human
agcugccuccccuccucu

SEQ ID NO: 2702354 - RNA, 17 nt, Human
agcugccuccccuccuc

SEQ ID NO: 2702355 - RNA, 13 nt, Human
agcuggaaaagua

SEQ ID NO: 2702356 - RNA, 14 nt, Human
ugcagugagccgag

SEQ ID NO: 2702357 - RNA, 18 nt, Human
agccugagcgacagugag

SEQ ID NO: 2702358 - RNA, 17 nt, Human
agcccuucuuuccacag

SEQ ID NO: 2702359 - RNA, 19 nt, Human
agcccuucuuuccacagaa

SEQ ID NO: 2702360 - RNA, 18 nt, Human
agcccuucuuuccacaga

SEQ ID NO: 2702361 - RNA, 19 nt, Human
agcuacuaauuuuaaaaug

SEQ ID NO: 2702362 - RNA, 19 nt, Human
agcuauggugucauaggcu

SEQ ID NO: 2702363 - RNA, 18 nt, Human
ucuguuuuauaauuuugu

SEQ ID NO: 2702364 - RNA, 18 nt, Human
ucuuaauuaaaagaauau

SEQ ID NO: 2702365 - RNA, 21 nt, Human
ucuuaauuaaaagaauauuuu

SEQ ID NO: 2702366 - RNA, 14 nt, Human
ucuuaauuaaaaga

SEQ ID NO: 2702367 - RNA, 21 nt, Human
agacuggauaguccgucucug

SEQ ID NO: 2702368 - RNA, 18 nt, Human
agacuggcacaguuuucu

SEQ ID NO: 2702369 - RNA, 14 nt, Human
agacuggcacaguu

SEQ ID NO: 2702370 - RNA, 15 nt, Human
agacuggcacaguuu

SEQ ID NO: 2702371 - RNA, 17 nt, Human
agagacacacugaagaa

SEQ ID NO: 2702372 - RNA, 15 nt, Human
agagaaugagagaca

SEQ ID NO: 2702373 - RNA, 20 nt, Human
agagacacacugaagaagca

SEQ ID NO: 2702374 - RNA, 18 nt, Human
agagacacacugaagaag

SEQ ID NO: 2702375 - RNA, 17 nt, Human
ucuuuaaaauacacacu

SEQ ID NO: 2702376 - RNA, 21 nt, Human
ucuuuaaagggauggcaagau

SEQ ID NO: 2702377 - RNA, 16 nt, Human
agacuccaaagaaaug

SEQ ID NO: 2702378 - RNA, 19 nt, Human
agacuccaaagaaauguaa

SEQ ID NO: 2702379 - RNA, 16 nt, Human
agacuauucaaacagu

SEQ ID NO: 2702380 - RNA, 13 nt, Human
agacuccaaagaa

SEQ ID NO: 2702381 - RNA, 14 nt, Human
agacuccaaagaaa

SEQ ID NO: 2702382 - RNA, 12 nt, Human
agacuccaaaga

SEQ ID NO: 2702383 - RNA, 18 nt, Human
agacuauucaaacagucu

SEQ ID NO: 2702384 - RNA, 20 nt, Human
agacuauucaaacagucuca

SEQ ID NO: 2702385 - RNA, 21 nt, Human
agacuauucaaacagucucag

SEQ ID NO: 2702386 - RNA, 19 nt, Human
agaaagacuauucaaacag

SEQ ID NO: 2702387 - RNA, 18 nt, Human
agaaagacuauucaaaca

SEQ ID NO: 2702388 - RNA, 20 nt, Human
agaaagacuauucaaacagu

SEQ ID NO: 2702389 - RNA, 23 nt, Human
agaaagacuauucaaacagucuc

SEQ ID NO: 2702390 - RNA, 21 nt, Human
ucugacuguuuccaucaaggg

SEQ ID NO: 2702391 - RNA, 14 nt, Human
ucugagaaagacua

SEQ ID NO: 2702392 - RNA, 15 nt, Human
ucugagaaagacuau

SEQ ID NO: 2702393 - RNA, 19 nt, Human
ucugagaaagacuauucaa

SEQ ID NO: 2702394 - RNA, 20 nt, Human
ucugagaaagacuauucaaa

SEQ ID NO: 2702395 - RNA, 23 nt, Human
ucugagaaagacuauucaaacag

SEQ ID NO: 2702396 - RNA, 21 nt, Human
ucugagaaagacuauucaaac

SEQ ID NO: 2702397 - RNA, 22 nt, Human
ucugagaaagacuauucaaaca

SEQ ID NO: 2702398 - RNA, 14 nt, Human
agaacucccuuuca

SEQ ID NO: 2702399 - RNA, 21 nt, Human
agaagaacugaaaucauacuu

SEQ ID NO: 2702400 - RNA, 11 nt, Human
ucugcuugcca

SEQ ID NO: 2702401 - RNA, 14 nt, Human
ucugcuugccaucc

SEQ ID NO: 2702402 - RNA, 12 nt, Human
ucugcuugccau

SEQ ID NO: 2702403 - RNA, 15 nt, Human
ucucccagucauuua

SEQ ID NO: 2702404 - RNA, 15 nt, Human
ucuccucucucugua

SEQ ID NO: 2702405 - RNA, 22 nt, Human
acuuuuuauggcacuaguauuu

SEQ ID NO: 2702406 - RNA, 19 nt, Human
agaaaacaaggaugaauua

SEQ ID NO: 2702407 - RNA, 15 nt, Human
agaaacauuugguaa

SEQ ID NO: 2702408 - RNA, 13 nt, Human
agaaacuggaacu

SEQ ID NO: 2702409 - RNA, 15 nt, Human
agaaacuggaacucu

SEQ ID NO: 2702410 - RNA, 14 nt, Human
agaaagaaaaucag

SEQ ID NO: 2702411 - RNA, 13 nt, Human
ucucuucuuuaaa

SEQ ID NO: 2702412 - RNA, 12 nt, Human
ucucuucuuuaa

SEQ ID NO: 2702413 - RNA, 16 nt, Human
ucucuggccuucggcc

SEQ ID NO: 2702414 - RNA, 17 nt, Human
ucucuggccuucggccu

SEQ ID NO: 2702415 - RNA, 13 nt, Human
ucucuggccuucg

SEQ ID NO: 2702416 - RNA, 16 nt, Human
agauuuaccacuugug

SEQ ID NO: 2702417 - RNA, 16 nt, Human
agauugugccccugca

SEQ ID NO: 2702418 - RNA, 15 nt, Human
ugacuguuuccauca

SEQ ID NO: 2702419 - RNA, 19 nt, Human
agaugaugaugaucuuuaa

SEQ ID NO: 2702420 - RNA, 23 nt, Human
agaugcuagaacucccuuucaac

SEQ ID NO: 2702421 - RNA, 22 nt, Human
agaugcuagaacucccuuucaa

SEQ ID NO: 2702422 - RNA, 20 nt, Human
ugaagaagcaccaaucauga

SEQ ID NO: 2702423 - RNA, 14 nt, Human
ugaagaagauggua

SEQ ID NO: 2702424 - RNA, 18 nt, Human
ugaagauguagaggagaa

SEQ ID NO: 2702425 - RNA, 17 nt, Human
ugaagauguagaggaga

SEQ ID NO: 2702426 - RNA, 14 nt, Human
agagugaacaaauu

SEQ ID NO: 2702427 - RNA, 22 nt, Human
agagugaacaaauuuacagaga

SEQ ID NO: 2702428 - RNA, 16 nt, Human
ugagcuacaaaugcau

SEQ ID NO: 2702429 - RNA, 13 nt, Human
ugagcuacaaaug

SEQ ID NO: 2702430 - RNA, 14 nt, Human
ugagcuacaaaugc

SEQ ID NO: 2702431 - RNA, 15 nt, Human
ugaggacacugauau

SEQ ID NO: 2702432 - RNA, 17 nt, Human
ugagguacugagaguga

SEQ ID NO: 2702433 - RNA, 22 nt, Human
ugagguacugagagugaacaaa

SEQ ID NO: 2702434 - RNA, 13 nt, Human
ugagcgacaguga

SEQ ID NO: 2702435 - RNA, 14 nt, Human
ugagcgacagugag

SEQ ID NO: 2702436 - RNA, 16 nt, Human
ugagcgacagugagac

SEQ ID NO: 2702437 - RNA, 20 nt, Human
ugagcgacagugagacucug

SEQ ID NO: 2702438 - RNA, 14 nt, Human
agcagaacagugau

SEQ ID NO: 2702439 - RNA, 14 nt, Human
agcaacgcaggccc

SEQ ID NO: 2702440 - RNA, 22 nt, Human
agcacagccucuuagaugcagu

SEQ ID NO: 2702441 - RNA, 16 nt, Human
agcaccaaucaugaau

SEQ ID NO: 2702442 - RNA, 23 nt, Human
accacuuguguuuugcaagccag

SEQ ID NO: 2702443 - RNA, 19 nt, Human
accacuuguguuuugcaag

SEQ ID NO: 2702444 - RNA, 14 nt, Human
accacugcagaaga

SEQ ID NO: 2702445 - RNA, 19 nt, Human
accacugcagaagacagua

SEQ ID NO: 2702446 - RNA, 13 nt, Human
accacugcagaag

SEQ ID NO: 2702447 - RNA, 11 nt, Human
accacagcagu

SEQ ID NO: 2702448 - RNA, 12 nt, Human
uauuucauuucu

SEQ ID NO: 2702449 - RNA, 21 nt, Human
acccaaauguucaucaaugaa

SEQ ID NO: 2702450 - RNA, 18 nt, Human
acccaaaaggcagaagca

SEQ ID NO: 2702451 - RNA, 13 nt, Human
acccaaaaggcag

SEQ ID NO: 2702452 - RNA, 15 nt, Human
acccaaaaggcagaa

SEQ ID NO: 2702453 - RNA, 18 nt, Human
ucagaugcacaugagcug

SEQ ID NO: 2702454 - RNA, 22 nt, Human
ucaugaauuaguuuuauaugcu

SEQ ID NO: 2702455 - RNA, 21 nt, Human
uccagccugagcgacagugag

SEQ ID NO: 2702456 - RNA, 20 nt, Human
uccagccugagcgacaguga

SEQ ID NO: 2702457 - RNA, 17 nt, Human
acugaggggaggggagc

SEQ ID NO: 2702458 - RNA, 22 nt, Human
acugaggggaggggagcauggg

SEQ ID NO: 2702459 - RNA, 17 nt, Human
uccugggcagcugccuc

SEQ ID NO: 2702460 - RNA, 16 nt, Human
uccugggcagcugccu

SEQ ID NO: 2702461 - RNA, 15 nt, Human
uccugggcagcugcc

SEQ ID NO: 2702462 - RNA, 14 nt, Human
uccugggcagcugc

SEQ ID NO: 2702463 - RNA, 23 nt, Human
uccugggcagcugccuccccucc

SEQ ID NO: 2702464 - RNA, 22 nt, Human
uccugggcagcugccuccccuc

SEQ ID NO: 2702465 - RNA, 19 nt, Human
uccugggcagcugccuccc

SEQ ID NO: 2702466 - RNA, 18 nt, Human
uccugggcagcugccucc

SEQ ID NO: 2702467 - RNA, 22 nt, Human
acugccuucucaacuccaaacu

SEQ ID NO: 2702468 - RNA, 20 nt, Human
acugccuucucaacuccaaa

SEQ ID NO: 2702469 - RNA, 21 nt, Human
acuggcacaguuuucugagaa

SEQ ID NO: 2702470 - RNA, 22 nt, Human
acuggcacaguuuucugagaaa

SEQ ID NO: 2702471 - RNA, 13 nt, Human
uccuucagccuga

SEQ ID NO: 2702472 - RNA, 13 nt, Human
acuaaaaauacaa

SEQ ID NO: 2702473 - RNA, 12 nt, Human
uccccuccucug

SEQ ID NO: 2702474 - RNA, 20 nt, Human
uccucaaaacuucagacaua

SEQ ID NO: 2702475 - RNA, 20 nt, Human
acucauuuuaaaaaauggaa

SEQ ID NO: 2702476 - RNA, 22 nt, Human
uauaaaauaauuuuuauauuug

SEQ ID NO: 2702477 - RNA, 21 nt, Human
uauaaaauaauuuuuauauuu

SEQ ID NO: 2702478 - RNA, 22 nt, Human
acacaucagcuugcccuguuaa

SEQ ID NO: 2702479 - RNA, 22 nt, Human
uagugagcagucaggaaagaga

SEQ ID NO: 2702480 - RNA, 16 nt, Human
uaguuuuauaugcuuc

SEQ ID NO: 2702481 - RNA, 15 nt, Human
uaguuuuauaugcuu

SEQ ID NO: 2702482 - RNA, 14 nt, Human
uauaauuuugugaa

SEQ ID NO: 2702483 - RNA, 18 nt, Human
uauaacaaugcuguauuu

SEQ ID NO: 2702484 - RNA, 21 nt, Human
uauaggugcuacaaaaacaca

SEQ ID NO: 2702485 - RNA, 20 nt, Human
uauaggugcuacaaaaacac

SEQ ID NO: 2702486 - RNA, 23 nt, Human
uauaggugcuacaaaaacacagc

SEQ ID NO: 2702487 - RNA, 14 nt, Human
uauaggaauugacc

SEQ ID NO: 2702488 - RNA, 19 nt, Human
uauaggaauugacccacaa

SEQ ID NO: 2702489 - RNA, 13 nt, Human
uauaggaauugac

SEQ ID NO: 2702490 - RNA, 16 nt, Human
uauggcuauaggugcu

SEQ ID NO: 2702491 - RNA, 17 nt, Human
uauggcuauaggugcua

SEQ ID NO: 2702492 - RNA, 14 nt, Human
uauauuuacaaaug

SEQ ID NO: 2702493 - RNA, 15 nt, Human
uauauuuacaaaugg

SEQ ID NO: 2702494 - RNA, 21 nt, Human
acaguauggcagcuuuccuca

SEQ ID NO: 2702495 - RNA, 14 nt, Human
acagugagacucug

SEQ ID NO: 2702496 - RNA, 18 nt, Human
acagugagacucugucuc

SEQ ID NO: 2702497 - RNA, 21 nt, Human
acaguuaccucugccucagaa

SEQ ID NO: 2702498 - RNA, 17 nt, Human
acagucucaggaaauca

SEQ ID NO: 2702499 - RNA, 20 nt, Human
acagugaaagaaaauaacaa

SEQ ID NO: 2702500 - RNA, 13 nt, Human
acagucucaggaa

SEQ ID NO: 2702501 - RNA, 14 nt, Human
acagucucaggaaa

SEQ ID NO: 2702502 - RNA, 15 nt, Human
acagucucaggaaau

SEQ ID NO: 2702503 - RNA, 16 nt, Human
acagucucaggaaauc

SEQ ID NO: 2702504 - RNA, 12 nt, Human
uauuaaaacuca

SEQ ID NO: 2702505 - RNA, 15 nt, Human
uauuagaauaccaca

SEQ ID NO: 2702506 - RNA, 23 nt, Human
uauucauagcagcuuauucacaa

SEQ ID NO: 2702507 - RNA, 19 nt, Human
acaguucggugagcuacaa

SEQ ID NO: 2702508 - RNA, 22 nt, Human
acaguucggugagcuacaaaug

SEQ ID NO: 2702509 - RNA, 23 nt, Human
acaguucggugagcuacaaaugc

SEQ ID NO: 2702510 - RNA, 17 nt, Human
uauugucuagugaaacu

SEQ ID NO: 2702511 - RNA, 18 nt, Human
uauuuauuuuaauaaugu

SEQ ID NO: 2702512 - RNA, 16 nt, Human
uauuuauuuuaauaau

SEQ ID NO: 2702513 - RNA, 14 nt, Human
uauuuauuuuaaua

SEQ ID NO: 2702514 - RNA, 16 nt, Human
uagaugcaguucugaa

SEQ ID NO: 2702515 - RNA, 19 nt, Human
uagaugcaguucugaagaa

SEQ ID NO: 2702516 - RNA, 17 nt, Human
uagaugcaguucugaag

SEQ ID NO: 2702517 - RNA, 21 nt, Human
uagcaugucgucaaagcugaa

SEQ ID NO: 2702518 - RNA, 18 nt, Human
uagcaugucgucaaagcu

SEQ ID NO: 2702519 - RNA, 18 nt, Human
acaagcacuaaacaaaga

SEQ ID NO: 2702520 - RNA, 22 nt, Human
acaagaaaugaaagcagggacu

SEQ ID NO: 2702521 - RNA, 15 nt, Human
uagaacucccuuuca

SEQ ID NO: 2702522 - RNA, 21 nt, Human
uacuucaaauccuugaagauu

SEQ ID NO: 2702523 - RNA, 18 nt, Human
uagaacucccuuucaaca

SEQ ID NO: 2702524 - RNA, 19 nt, Human
aauuuuuauauuugaaaua

SEQ ID NO: 2702525 - RNA, 16 nt, Human
acaaaaacacagcaag

SEQ ID NO: 2702526 - RNA, 19 nt, Human
aauuuuuucucuaggaaau

SEQ ID NO: 2702527 - RNA, 19 nt, Human
uacuucaaauccuugaaga

SEQ ID NO: 2702528 - RNA, 14 nt, Human
uacuucaaauccuu

SEQ ID NO: 2702529 - RNA, 20 nt, Human
aauuucucccagucauuuaa

SEQ ID NO: 2702530 - RNA, 23 nt, Human
aauugugugaaagguacuucaaa

SEQ ID NO: 2702531 - RNA, 13 nt, Human
uacuguaagaaaa

SEQ ID NO: 2702532 - RNA, 21 nt, Human
aauucuugccaaauauaaaua

SEQ ID NO: 2702533 - RNA, 13 nt, Human
aauugacccacaa

SEQ ID NO: 2702534 - RNA, 16 nt, Human
aauugacccacaagaa

SEQ ID NO: 2702535 - RNA, 19 nt, Human
aauugacccacaagaaaug

SEQ ID NO: 2702536 - RNA, 18 nt, Human
aauguugacaugggacau

SEQ ID NO: 2702537 - RNA, 16 nt, Human
aaugguuuaaaugguc

SEQ ID NO: 2702538 - RNA, 17 nt, Human
uacaaaaacacagcaag

SEQ ID NO: 2702539 - RNA, 18 nt, Human
uacaaaaacacagcaagg

SEQ ID NO: 2702540 - RNA, 15 nt, Human
aaugaaugaaugaau

SEQ ID NO: 2702541 - RNA, 20 nt, Human
aacuaucucauuuccaagca

SEQ ID NO: 2702542 - RNA, 13 nt, Human
aacuauauuguuu

SEQ ID NO: 2702543 - RNA, 20 nt, Human
aacugaaaucauacuucuua

SEQ ID NO: 2702544 - RNA, 13 nt, Human
aacugaaaucaua

SEQ ID NO: 2702545 - RNA, 13 nt, Human
gucuucacaacag

SEQ ID NO: 2702546 - RNA, 23 nt, Human
gucucaguccaugaagauguaga

SEQ ID NO: 2702547 - RNA, 16 nt, Human
aacauauauaacaaug

SEQ ID NO: 2702548 - RNA, 19 nt, Human
aacagauuauuaccuuaca

SEQ ID NO: 2702549 - RNA, 17 nt, Human
aacagucucaggaaauc

SEQ ID NO: 2702550 - RNA, 19 nt, Human
aacagucucaggaaaucaa

SEQ ID NO: 2702551 - RNA, 14 nt, Human
guggguagacacac

SEQ ID NO: 2702552 - RNA, 18 nt, Human
aagagcuguucacagcca

SEQ ID NO: 2702553 - RNA, 16 nt, Human
aagacuccaaagaaau

SEQ ID NO: 2702554 - RNA, 17 nt, Human
aagacuccaaagaaaug

SEQ ID NO: 2702555 - RNA, 14 nt, Human
aagacuccaaagaa

SEQ ID NO: 2702556 - RNA, 14 nt, Human
aagacuauucaaac

SEQ ID NO: 2702557 - RNA, 13 nt, Human
aagacuauucaaa

SEQ ID NO: 2702558 - RNA, 16 nt, Human
aagcaaguauuagaau

SEQ ID NO: 2702559 - RNA, 19 nt, Human
aagauguagaggagaaacu

SEQ ID NO: 2702560 - RNA, 13 nt, Human
aagcaaaauguga

SEQ ID NO: 2702561 - RNA, 22 nt, Human
aagauguagaggagaaacugga

SEQ ID NO: 2702562 - RNA, 19 nt, Human
aagcaaaauuuuuucucua

SEQ ID NO: 2702563 - RNA, 22 nt, Human
aagaagcaccaaucaugaauua

SEQ ID NO: 2702564 - RNA, 13 nt, Human
aagaaaauaucac

SEQ ID NO: 2702565 - RNA, 13 nt, Human
aagacccaaaagg

SEQ ID NO: 2702566 - RNA, 13 nt, Human
aagaauauuuuaa

SEQ ID NO: 2702567 - RNA, 15 nt, Human
guuuucugagaaaga

SEQ ID NO: 2702568 - RNA, 22 nt, Human
guuuuauaauuuugugaagcaa

SEQ ID NO: 2702569 - RNA, 15 nt, Human
guuuuauaauuuugu

SEQ ID NO: 2702570 - RNA, 21 nt, Human
guuucuagcaugaagacagag

SEQ ID NO: 2702571 - RNA, 17 nt, Human
aaguaaaaccacagcag

SEQ ID NO: 2702572 - RNA, 18 nt, Human
aaguaaaaccacagcagu

SEQ ID NO: 2702573 - RNA, 14 nt, Human
aaguaaaaccacag

SEQ ID NO: 2702574 - RNA, 15 nt, Human
aaguaaaaccacagc

SEQ ID NO: 2702575 - RNA, 16 nt, Human
aaguaaaaccacagca

SEQ ID NO: 2702576 - RNA, 21 nt, Human
aagggugaugggaaagcauug

SEQ ID NO: 2702577 - RNA, 16 nt, Human
guuuucugagaaagac

SEQ ID NO: 2702578 - RNA, 17 nt, Human
guuuucugagaaagacu

SEQ ID NO: 2702579 - RNA, 22 nt, Human
guuuucugagaaagacuauuca

SEQ ID NO: 2702580 - RNA, 21 nt, Human
aaguauguuagugcaaauugu

SEQ ID NO: 2702581 - RNA, 23 nt, Human
aaguauguuagugcaaauuguca

SEQ ID NO: 2702582 - RNA, 23 nt, Human
guuuuuuuuuaaaaaagaaacau

SEQ ID NO: 2702583 - RNA, 13 nt, Human
aaggauaaugaau

SEQ ID NO: 2702584 - RNA, 16 nt, Human
aaggaaaaaauaacaa

SEQ ID NO: 2702585 - RNA, 19 nt, Human
aaggaaaaaauaacaauga

SEQ ID NO: 2702586 - RNA, 17 nt, Human
uaaacucauuucuagca

SEQ ID NO: 2702587 - RNA, 12 nt, Human
uaaacucauuuc

SEQ ID NO: 2702588 - RNA, 19 nt, Human
uaaaccaaggcuagaacca

SEQ ID NO: 2702589 - RNA, 12 nt, Human
aauaaaugugcc

SEQ ID NO: 2702590 - RNA, 21 nt, Human
aauaaaugugccuucauuuuu

SEQ ID NO: 2702591 - RNA, 15 nt, Human
aauaacaauaaaaga

SEQ ID NO: 2702592 - RNA, 15 nt, Human
aauaacgauaaaaga

SEQ ID NO: 2702593 - RNA, 22 nt, Human
aauaaaauccauacauuugugu

SEQ ID NO: 2702594 - RNA, 12 nt, Human
aauaaaaauaau

SEQ ID NO: 2702595 - RNA, 15 nt, Human
uaaauguugacaugg

SEQ ID NO: 2702596 - RNA, 17 nt, Human
uaaaugauuucauucaa

SEQ ID NO: 2702597 - RNA, 13 nt, Human
uaacaaugcugua

SEQ ID NO: 2702598 - RNA, 17 nt, Human
uaacaaugcuguauuuu

SEQ ID NO: 2702599 - RNA, 15 nt, Human
uaacaaugcuguauu

SEQ ID NO: 2702600 - RNA, 14 nt, Human
aauacacacucaaa

SEQ ID NO: 2702601 - RNA, 12 nt, Human
aaaaacacagca

SEQ ID NO: 2702602 - RNA, 18 nt, Human
aaaaacacagcaagggug

SEQ ID NO: 2702603 - RNA, 13 nt, Human
aaaaacacagcaa

SEQ ID NO: 2702604 - RNA, 21 nt, Human
aucagcugcugaaacaacaaa

SEQ ID NO: 2702605 - RNA, 15 nt, Human
auauuuauuuuaaua

SEQ ID NO: 2702606 - RNA, 14 nt, Human
auauuuauuuuaau

SEQ ID NO: 2702607 - RNA, 17 nt, Human
auauuuauuuuaauaau

SEQ ID NO: 2702608 - RNA, 22 nt, Human
aucagcugcugaaacaacaaau

SEQ ID NO: 2702609 - RNA, 23 nt, Human
aucagcugcugaaacaacaaaua

SEQ ID NO: 2702610 - RNA, 18 nt, Human
augugggcagugauguca

SEQ ID NO: 2702611 - RNA, 17 nt, Human
auguucuaagaagugaa

SEQ ID NO: 2702612 - RNA, 14 nt, Human
auguaagggaaacu

SEQ ID NO: 2702613 - RNA, 16 nt, Human
auguaagggaaacugc

SEQ ID NO: 2702614 - RNA, 19 nt, Human
auguaagggaaacugccag

SEQ ID NO: 2702615 - RNA, 12 nt, Human
aguccuguaaug

SEQ ID NO: 2702616 - RNA, 19 nt, Human
agucaaauugugugaaagg

SEQ ID NO: 2702617 - RNA, 23 nt, Human
agucaaauugugugaaagguacu

SEQ ID NO: 2702618 - RNA, 22 nt, Human
aguugaaaaucuuauaauuuaa

SEQ ID NO: 2702619 - RNA, 21 nt, Human
aguugaaaagacuccaaagaa

SEQ ID NO: 2702620 - RNA, 22 nt, Human
aguugaaaagacuccaaagaaa

SEQ ID NO: 2702621 - RNA, 23 nt, Human
aguugaaaaucuuauaauuuaaa

SEQ ID NO: 2702622 - RNA, 21 nt, Human
agugucuuaauuaaaagaaua

SEQ ID NO: 2702623 - RNA, 17 nt, Human
agugucuuaauuaaaag

SEQ ID NO: 2702624 - RNA, 18 nt, Human
agugucuuaauuaaaaga

SEQ ID NO: 2702625 - RNA, 15 nt, Human
agugucuuaauuaaa

SEQ ID NO: 2702626 - RNA, 15 nt, Human
auaaugucccuucac

SEQ ID NO: 2702627 - RNA, 23 nt, Human
auaauguuucaaacauauauaac

SEQ ID NO: 2702628 - RNA, 17 nt, Human
auacacacucaaaucaa

SEQ ID NO: 2702629 - RNA, 18 nt, Human
auacacacucaaaucaag

SEQ ID NO: 2702630 - RNA, 20 nt, Human
auacacacucaaaucaagaa

SEQ ID NO: 2702631 - RNA, 18 nt, Human
auaaaggauuaaugucaa

SEQ ID NO: 2702632 - RNA, 13 nt, Human
auauuuauuuuaa

SEQ ID NO: 2702633 - RNA, 22 nt, Human
auauuuauuacuguaagaaaau

SEQ ID NO: 2702634 - RNA, 16 nt, Human
auauuauguuaaaacu

SEQ ID NO: 2702635 - RNA, 22 nt, Human
auaugcuucuguuuuauaauuu

SEQ ID NO: 2702636 - RNA, 20 nt, Human
auaugcuucuguuuuauaau

SEQ ID NO: 2702637 - RNA, 18 nt, Human
auagcagcuuauucacaa

SEQ ID NO: 2702638 - RNA, 15 nt, Human
auaggugcuacaaaa

SEQ ID NO: 2702639 - RNA, 21 nt, Human
auaggugcuacaaaaacacag

SEQ ID NO: 2702640 - RNA, 23 nt, Human
auaggugcuacaaaaacacagca

SEQ ID NO: 2702641 - RNA, 14 nt, Human
auaggugcuacaaa

SEQ ID NO: 2702642 - RNA, 15 nt, Human
auagguuuaauaauu

SEQ ID NO: 2702643 - RNA, 14 nt, Human
auagucaaauugug

SEQ ID NO: 2702644 - RNA, 16 nt, Human
aggcuagauguaugua

SEQ ID NO: 2702645 - RNA, 15 nt, Human
aggcuagauguaugu

SEQ ID NO: 2702646 - RNA, 17 nt, Human
aggcuagauguauguac

SEQ ID NO: 2702647 - RNA, 21 nt, Human
aggcuagaaccaccugccuau

SEQ ID NO: 2702648 - RNA, 17 nt, Human
aggcuacugucagcucc

SEQ ID NO: 2702649 - RNA, 23 nt, Human
aggugcuacaaaaacacagcaag

SEQ ID NO: 2702650 - RNA, 24 nt, Human
aggugcuacaaaaacacagcaagg

SEQ ID NO: 2702651 - RNA, 20 nt, Human
agguaaaagcaucacaugaa

SEQ ID NO: 2702652 - RNA, 19 nt, Human
aggugcuacaaaaacacag

SEQ ID NO: 2702653 - RNA, 20 nt, Human
aggugcuacaaaaacacagc

SEQ ID NO: 2702654 - RNA, 21 nt, Human
aggugcuacaaaaacacagca

SEQ ID NO: 2702655 - RNA, 22 nt, Human
aggugcuacaaaaacacagcaa

SEQ ID NO: 2702656 - RNA, 18 nt, Human
aggugcuacaaaaacaca

SEQ ID NO: 2702657 - RNA, 22 nt, Human
agcuccccucggagaagagcug

SEQ ID NO: 2702658 - RNA, 23 nt, Human
aggaugguucccuugaugaagaa

SEQ ID NO: 2702659 - RNA, 17 nt, Human
agagaacuuccagaucc

SEQ ID NO: 2702660 - RNA, 21 nt, Human
agacugcauuauauuuauuac

SEQ ID NO: 2702661 - RNA, 22 nt, Human
agacgugcacgcacacugucug

SEQ ID NO: 2702662 - RNA, 21 nt, Human
agacgugcacgcacacugucu

SEQ ID NO: 2702663 - RNA, 16 nt, Human
agcacugacuucuaag

SEQ ID NO: 2702664 - RNA, 15 nt, Human
agcaugaagacagag

SEQ ID NO: 2702665 - RNA, 20 nt, Human
agcaguucagagcugcccuc

SEQ ID NO: 2702666 - RNA, 23 nt, Human
agcaguucagagcugcccucucc

SEQ ID NO: 2702667 - RNA, 13 nt, Human
agcaguugaaaag

SEQ ID NO: 2702668 - RNA, 16 nt, Human
agcaguugaaaagacu

SEQ ID NO: 2702669 - RNA, 23 nt, Human
aauguuucaaacauauauaacaa

SEQ ID NO: 2702670 - RNA, 21 nt, Human
aaugauuaugaauuacauuug

SEQ ID NO: 2702671 - RNA, 15 nt, Human
aaugauuaugaauua

SEQ ID NO: 2702672 - RNA, 20 nt, Human
aaggcagcucuaaaugucaa

SEQ ID NO: 2702673 - RNA, 18 nt, Human
aaguccaagcauuuagau

SEQ ID NO: 2702674 - RNA, 17 nt, Human
aaguccaagcauaccaa

SEQ ID NO: 2702675 - RNA, 21 nt, Human
aaguagggacuucugucuuca

SEQ ID NO: 2702676 - RNA, 23 nt, Human
aagggaaacugccagcaacgcag

SEQ ID NO: 2702677 - RNA, 16 nt, Human
aagggaaacugccagc

SEQ ID NO: 2702678 - RNA, 17 nt, Human
aagggaaacugccagca

SEQ ID NO: 2702679 - RNA, 19 nt, Human
aaauugacacuuaaaaaug

SEQ ID NO: 2702680 - RNA, 17 nt, Human
aaaucuuauaauuuaaa

SEQ ID NO: 2702681 - RNA, 22 nt, Human
aaauguuguucucuucuuuaaa

SEQ ID NO: 2702682 - RNA, 18 nt, Human
aacaaauuuacagagaca

SEQ ID NO: 2702683 - RNA, 16 nt, Human
aacacaucagcuugcc

SEQ ID NO: 2702684 - RNA, 22 nt, Human
aaccacuggaaaguuuaugguu

SEQ ID NO: 2702685 - RNA, 17 nt, Human
aaccuagggugauauua

SEQ ID NO: 2702686 - RNA, 18 nt, Human
aacugacucuuaagaaga

SEQ ID NO: 2702687 - RNA, 15 nt, Human
aacugacucuuaaga

SEQ ID NO: 2702688 - RNA, 20 nt, Human
aacugacucuuaagaagacu

SEQ ID NO: 2702689 - RNA, 19 nt, Human
aacugacucuuaagaagac

SEQ ID NO: 2702690 - RNA, 20 nt, Human
aacugagaugugaacacauc

SEQ ID NO: 2702691 - RNA, 20 nt, Human
aacuuuaugcuaagugaaau

SEQ ID NO: 2702692 - RNA, 21 nt, Human
aacuuuaugcuaagugaaaua

SEQ ID NO: 2702693 - RNA, 16 nt, Human
aaaaagaaacauuugg

SEQ ID NO: 2702694 - RNA, 18 nt, Human
aaaaguucugcagauaaa

SEQ ID NO: 2702695 - RNA, 21 nt, Human
aaaaucuacacuccagugaga

SEQ ID NO: 2702696 - RNA, 16 nt, Human
aaaaucucaauauuuc

SEQ ID NO: 2702697 - RNA, 21 nt, Human
aaacugagaugugaacacauc

SEQ ID NO: 2702698 - RNA, 23 nt, Human
aaacugagaugugaacacaucag

SEQ ID NO: 2702699 - RNA, 15 nt, Human
aaagaaauguaaggg

SEQ ID NO: 2702700 - RNA, 15 nt, Human
aaaucaaauaugcaa

SEQ ID NO: 2702701 - RNA, 12 nt, Human
aaaucaaauaug

SEQ ID NO: 2702702 - RNA, 14 nt, Human
aaaucaaauaugca

SEQ ID NO: 2702703 - RNA, 20 nt, Human
aaauauuuauuuuaauaaug

SEQ ID NO: 2702704 - RNA, 13 nt, Human
aaauauuuauuuu

SEQ ID NO: 2702705 - RNA, 15 nt, Human
aaauauuuauuuuaa

SEQ ID NO: 2702706 - RNA, 14 nt, Human
aaaggcagaagcaa

SEQ ID NO: 2702707 - RNA, 14 nt, Human
acacgagcaggcua

SEQ ID NO: 2702708 - RNA, 19 nt, Human
acacgagcaggcuacuguc

SEQ ID NO: 2702709 - RNA, 21 nt, Human
acacgagcaggcuacugucag

SEQ ID NO: 2702710 - RNA, 22 nt, Human
acagcaguugaaaagacuccaa

SEQ ID NO: 2702711 - RNA, 23 nt, Human
acagcaguugaaaagacuccaaa

SEQ ID NO: 2702712 - RNA, 21 nt, Human
acagcaguugaaaagacucca

SEQ ID NO: 2702713 - RNA, 17 nt, Human
acccacaagaaaugaaa

SEQ ID NO: 2702714 - RNA, 21 nt, Human
acccacaagaaaugaaagcag

SEQ ID NO: 2702715 - RNA, 19 nt, Human
acccaguguuuuaggagca

SEQ ID NO: 2702716 - RNA, 22 nt, Human
acccaguguuuuaggagcauga

SEQ ID NO: 2702717 - RNA, 21 nt, Human
acuuggucugugagaugcuag

SEQ ID NO: 2702718 - RNA, 22 nt, Human
acuucugucuucacaacagauu

SEQ ID NO: 2702719 - RNA, 21 nt, Human
acuucugucuucacaacagau

SEQ ID NO: 2702720 - RNA, 12 nt, Human
acuucagacaua

SEQ ID NO: 2702721 - RNA, 13 nt, Human
acugccagcaacg

SEQ ID NO: 2702722 - RNA, 20 nt, Human
acucugucucaguccaugaa

SEQ ID NO: 2702723 - RNA, 18 nt, Human
acucugucucaguccaug

SEQ ID NO: 2702724 - RNA, 13 nt, Human
acuguaagaaaau

SEQ ID NO: 2702725 - RNA, 19 nt, Human
acuguaagaaaauaucacu

SEQ ID NO: 2702726 - RNA, 22 nt, Human
acuguaagaaaauaucacuugu

SEQ ID NO: 2702727 - RNA, 22 nt, Human
acuuuauuuucuauaauuuaaa

SEQ ID NO: 2702728 - RNA, 16 nt, Human
agaaaaucaggcuggc

SEQ ID NO: 2702729 - RNA, 14 nt, Human
agaaaauaacaaua

SEQ ID NO: 2702730 - RNA, 13 nt, Human
acuaagagagaau

SEQ ID NO: 2702731 - RNA, 19 nt, Human
acgcaggcccccaggugcc

SEQ ID NO: 2702732 - RNA, 22 nt, Human
acgcaggcccccaggugccagu

SEQ ID NO: 2702733 - RNA, 21 nt, Human
acuauucaaacagucucagga

SEQ ID NO: 2702734 - RNA, 20 nt, Human
acuaguauuucuaugaaaua

SEQ ID NO: 2702735 - RNA, 17 nt, Human
acucuauguucuaagaa

SEQ ID NO: 2702736 - RNA, 17 nt, Human
caagcacuaaacaaaga

SEQ ID NO: 2702737 - RNA, 15 nt, Human
caaauuuacagagac

SEQ ID NO: 2702738 - RNA, 14 nt, Human
caaauuuacagaga

SEQ ID NO: 2702739 - RNA, 14 nt, Human
caaauaugcaaagc

SEQ ID NO: 2702740 - RNA, 21 nt, Human
caaauguucaucaaugaauga

SEQ ID NO: 2702741 - RNA, 20 nt, Human
caaauguucaucaaugaaug

SEQ ID NO: 2702742 - RNA, 18 nt, Human
caaauaugcaaagcacug

SEQ ID NO: 2702743 - RNA, 16 nt, Human
caaauaugcaaagcac

SEQ ID NO: 2702744 - RNA, 17 nt, Human
caaauaugcaaagcacu

SEQ ID NO: 2702745 - RNA, 15 nt, Human
cacaguuuucugaga

SEQ ID NO: 2702746 - RNA, 14 nt, Human
cacaguuuucugag

SEQ ID NO: 2702747 - RNA, 19 nt, Human
cacaggaaccacaagacug

SEQ ID NO: 2702748 - RNA, 20 nt, Human
cacaggaaccacaagacugc

SEQ ID NO: 2702749 - RNA, 15 nt, Human
cacaggaaguagagg

SEQ ID NO: 2702750 - RNA, 22 nt, Human
cacagcaguugaaaagacucca

SEQ ID NO: 2702751 - RNA, 13 nt, Human
cacaacuauauug

SEQ ID NO: 2702752 - RNA, 14 nt, Human
cacacugaagaagc

SEQ ID NO: 2702753 - RNA, 19 nt, Human
cacacucaaaucaagaaac

SEQ ID NO: 2702754 - RNA, 11 nt, Human
cacaacagauu

SEQ ID NO: 2702755 - RNA, 22 nt, Human
caaugaaugaaugaauggcuaa

SEQ ID NO: 2702756 - RNA, 16 nt, Human
uugcuaagcauuccaa

SEQ ID NO: 2702757 - RNA, 18 nt, Human
uugcuaagcauuccaacu

SEQ ID NO: 2702758 - RNA, 16 nt, Human
uuguaccgcaauguga

SEQ ID NO: 2702759 - RNA, 20 nt, Human
uuguaaaauggugugaccac

SEQ ID NO: 2702760 - RNA, 20 nt, Human
uugguaaggggaauugagga

SEQ ID NO: 2702761 - RNA, 15 nt, Human
uuggucugugagaug

SEQ ID NO: 2702762 - RNA, 12 nt, Human
uuguaaaauggu

SEQ ID NO: 2702763 - RNA, 13 nt, Human
uuguaaaauggug

SEQ ID NO: 2702764 - RNA, 20 nt, Human
uugauaugccuuuucccaac

SEQ ID NO: 2702765 - RNA, 13 nt, Human
uugccaucccucc

SEQ ID NO: 2702766 - RNA, 18 nt, Human
uugccaucccucccucca

SEQ ID NO: 2702767 - RNA, 17 nt, Human
uugccaucccucccucc

SEQ ID NO: 2702768 - RNA, 16 nt, Human
uugccaucccucccuc

SEQ ID NO: 2702769 - RNA, 14 nt, Human
uugccaucccuccc

SEQ ID NO: 2702770 - RNA, 23 nt, Human
uugccaucccucccuccaccucc

SEQ ID NO: 2702771 - RNA, 22 nt, Human
uugccaucccucccuccaccuc

SEQ ID NO: 2702772 - RNA, 23 nt, Human
uugcagcucuccccuucucugua

SEQ ID NO: 2702773 - RNA, 24 nt, Human
uucuaaguaaaaccacagcaguug

SEQ ID NO: 2702774 - RNA, 19 nt, Human
uucuuaggguuaugauuaa

SEQ ID NO: 2702775 - RNA, 18 nt, Human
uucuuuccacagaagcuc

SEQ ID NO: 2702776 - RNA, 21 nt, Human
uugaaaaucuuauaauuuaaa

SEQ ID NO: 2702777 - RNA, 12 nt, Human
uuucucuaggaa

SEQ ID NO: 2702778 - RNA, 18 nt, Human
uuugguaaggggaauuga

SEQ ID NO: 2702779 - RNA, 21 nt, Human
uuugaaauuguauuacaaauc

SEQ ID NO: 2702780 - RNA, 18 nt, Human
uuguuuaaaaucauuucu

SEQ ID NO: 2702781 - RNA, 17 nt, Human
uuguuuaaaaucauuuc

SEQ ID NO: 2702782 - RNA, 12 nt, Human
uuuaaaaugucu

SEQ ID NO: 2702783 - RNA, 17 nt, Human
uuuaaaagaaugauuau

SEQ ID NO: 2702784 - RNA, 14 nt, Human
uuuaaaagaaugau

SEQ ID NO: 2702785 - RNA, 16 nt, Human
uuuaaaaucauuucug

SEQ ID NO: 2702786 - RNA, 19 nt, Human
uuuaaaauacacacucaaa

SEQ ID NO: 2702787 - RNA, 13 nt, Human
uuuacagagacag

SEQ ID NO: 2702788 - RNA, 19 nt, Human
uuuaauaauguuucaaaca

SEQ ID NO: 2702789 - RNA, 15 nt, Human
uuuaauaauguuuca

SEQ ID NO: 2702790 - RNA, 14 nt, Human
uuuaauaauguuuc

SEQ ID NO: 2702791 - RNA, 13 nt, Human
uuuaauaaaccau

SEQ ID NO: 2702792 - RNA, 21 nt, Human
uuauggcacuaguauuucuau

SEQ ID NO: 2702793 - RNA, 17 nt, Human
uuauggcuauaggugcu

SEQ ID NO: 2702794 - RNA, 16 nt, Human
uuauuacuguaagaaa

SEQ ID NO: 2702795 - RNA, 18 nt, Human
uuauuacuguaagaaaau

SEQ ID NO: 2702796 - RNA, 17 nt, Human
uuauuacuguaagaaaa

SEQ ID NO: 2702797 - RNA, 16 nt, Human
uucagacauagaauua

SEQ ID NO: 2702798 - RNA, 20 nt, Human
uucagacauagaauuaacac

SEQ ID NO: 2702799 - RNA, 14 nt, Human
uucagagcugcccu

SEQ ID NO: 2702800 - RNA, 13 nt, Human
uucagagcugccc

SEQ ID NO: 2702801 - RNA, 16 nt, Human
uuauuuuaauaauguu

SEQ ID NO: 2702802 - RNA, 15 nt, Human
uuauuuuaauaaugu

SEQ ID NO: 2702803 - RNA, 15 nt, Human
uuauugucuagugaa

SEQ ID NO: 2702804 - RNA, 17 nt, Human
uucaaauccuugaagau

SEQ ID NO: 2702805 - RNA, 19 nt, Human
uuccagauccuggaaauca

SEQ ID NO: 2702806 - RNA, 17 nt, Human
uuccuuggacucauuuu

SEQ ID NO: 2702807 - RNA, 20 nt, Human
uuccuuggacucauuuuaaa

SEQ ID NO: 2702808 - RNA, 17 nt, Human
uucccuugaugaagaag

SEQ ID NO: 2702809 - RNA, 17 nt, Human
uuacuaguuucccuugc

SEQ ID NO: 2702810 - RNA, 19 nt, Human
uuagaaacacaacuauauu

SEQ ID NO: 2702811 - RNA, 13 nt, Human
uuagcuggaaaag

SEQ ID NO: 2702812 - RNA, 12 nt, Human
uuagcuggaaaa

SEQ ID NO: 2702813 - RNA, 21 nt, Human
uuagaugcaguucugaagaag

SEQ ID NO: 2702814 - RNA, 20 nt, Human
uuagaugcaguucugaagaa

SEQ ID NO: 2702815 - RNA, 18 nt, Human
uuaggauguugaaaaagu

SEQ ID NO: 2702816 - RNA, 22 nt, Human
uguuucaaacauauauaacaau

SEQ ID NO: 2702817 - RNA, 21 nt, Human
uguuucaaacauauauaacaa

SEQ ID NO: 2702818 - RNA, 19 nt, Human
uguuucaaacauauauaac

SEQ ID NO: 2702819 - RNA, 21 nt, Human
uuaaaagaauauuuuaacuuc

SEQ ID NO: 2702820 - RNA, 22 nt, Human
uuaaaagaauauuuuaacuucc

SEQ ID NO: 2702821 - RNA, 15 nt, Human
uuaaaagaugaaaau

SEQ ID NO: 2702822 - RNA, 18 nt, Human
uuaaaagaugaaaauauu

SEQ ID NO: 2702823 - RNA, 19 nt, Human
uuaaaauacacacucaaau

SEQ ID NO: 2702824 - RNA, 15 nt, Human
ugggcagcugccucc

SEQ ID NO: 2702825 - RNA, 14 nt, Human
ugggcagcugccuc

SEQ ID NO: 2702826 - RNA, 13 nt, Human
ugggcagcugccu

SEQ ID NO: 2702827 - RNA, 12 nt, Human
ugggcagcugcc

SEQ ID NO: 2702828 - RNA, 19 nt, Human
ugggcagcugccuccccuc

SEQ ID NO: 2702829 - RNA, 17 nt, Human
ugggcagcugccucccc

SEQ ID NO: 2702830 - RNA, 22 nt, Human
uggugauuuagcaggaagcugu

SEQ ID NO: 2702831 - RNA, 16 nt, Human
uggugauuuagcagga

SEQ ID NO: 2702832 - RNA, 16 nt, Human
uggucccagccagcag

SEQ ID NO: 2702833 - RNA, 22 nt, Human
uggucacaggaaguagaggagg

SEQ ID NO: 2702834 - RNA, 17 nt, Human
uggucacaggaaguaga

SEQ ID NO: 2702835 - RNA, 13 nt, Human
ugguauguuuuca

SEQ ID NO: 2702836 - RNA, 20 nt, Human
uggcaauagucaaauugugu

SEQ ID NO: 2702837 - RNA, 15 nt, Human
uggcacuaguauuuc

SEQ ID NO: 2702838 - RNA, 16 nt, Human
ugccacuaaauugaca

SEQ ID NO: 2702839 - RNA, 13 nt, Human
ugcaucagcugcu

SEQ ID NO: 2702840 - RNA, 12 nt, Human
ugcaguucugaa

SEQ ID NO: 2702841 - RNA, 22 nt, Human
ugcaucaauuuuucuuauuuca

SEQ ID NO: 2702842 - RNA, 20 nt, Human
ugcugggggggauuguaaaa

SEQ ID NO: 2702843 - RNA, 13 nt, Human
ugcuagaacuccc

SEQ ID NO: 2702844 - RNA, 14 nt, Human
ugcuagaacucccu

SEQ ID NO: 2702845 - RNA, 15 nt, Human
ugcuagaacucccuu

SEQ ID NO: 2702846 - RNA, 17 nt, Human
ugcuagaacucccuuuc

SEQ ID NO: 2702847 - RNA, 18 nt, Human
ugaggcuccacuuggucu

SEQ ID NO: 2702848 - RNA, 20 nt, Human
ugaggcuccacuuggucugu

SEQ ID NO: 2702849 - RNA, 16 nt, Human
ugauaacuggaaacuu

SEQ ID NO: 2702850 - RNA, 13 nt, Human
ugagccccaaaag

SEQ ID NO: 2702851 - RNA, 16 nt, Human
ugagagugaacaaauu

SEQ ID NO: 2702852 - RNA, 17 nt, Human
ugaucagcuuauugucu

SEQ ID NO: 2702853 - RNA, 24 nt, Human
ugaucagcuuauugucuagugaaa

SEQ ID NO: 2702854 - RNA, 14 nt, Human
ugaucuuuaaaaua

SEQ ID NO: 2702855 - RNA, 17 nt, Human
ugaucuuuaaaauacac

SEQ ID NO: 2702856 - RNA, 23 nt, Human
ugaugcuacaggauuugaaauug

SEQ ID NO: 2702857 - RNA, 20 nt, Human
ugaugcuacaggauuugaaa

SEQ ID NO: 2702858 - RNA, 15 nt, Human
ugauggugguauguu

SEQ ID NO: 2702859 - RNA, 22 nt, Human
ugauuaugaauuacauuuguau

SEQ ID NO: 2702860 - RNA, 21 nt, Human
ugauuaugaauuacauuugua

SEQ ID NO: 2702861 - RNA, 19 nt, Human
ugauuaugaauuacauuug

SEQ ID NO: 2702862 - RNA, 17 nt, Human
ugauuaugaauuacauu

SEQ ID NO: 2702863 - RNA, 13 nt, Human
ugauuauauguca

SEQ ID NO: 2702864 - RNA, 22 nt, Human
ugauguuuagaaacacaacuau

SEQ ID NO: 2702865 - RNA, 16 nt, Human
ugauuaccagggacug

SEQ ID NO: 2702866 - RNA, 12 nt, Human
ucuuugccaagu

SEQ ID NO: 2702867 - RNA, 19 nt, Human
ucuuuccacagaagcucca

SEQ ID NO: 2702868 - RNA, 17 nt, Human
ucuuucacauuuaaaua

SEQ ID NO: 2702869 - RNA, 16 nt, Human
ugaaauauugacuuuu

SEQ ID NO: 2702870 - RNA, 19 nt, Human
ugaaauggacuuuuguaca

SEQ ID NO: 2702871 - RNA, 22 nt, Human
ugaaacaacaaauaggaauugu

SEQ ID NO: 2702872 - RNA, 18 nt, Human
ugaaagaggcagcuugaa

SEQ ID NO: 2702873 - RNA, 16 nt, Human
ugaaagguacuucaaa

SEQ ID NO: 2702874 - RNA, 15 nt, Human
ugaaagguacuucaa

SEQ ID NO: 2702875 - RNA, 20 nt, Human
ugaaugaauggcuaagcaaa

SEQ ID NO: 2702876 - RNA, 18 nt, Human
ugaauuacauuuguauaa

SEQ ID NO: 2702877 - RNA, 16 nt, Human
ugaauuacauuuguau

SEQ ID NO: 2702878 - RNA, 15 nt, Human
ugaauuacauuugua

SEQ ID NO: 2702879 - RNA, 13 nt, Human
ugaaguccaagca

SEQ ID NO: 2702880 - RNA, 11 nt, Human
ugaaguccaag

SEQ ID NO: 2702881 - RNA, 18 nt, Human
ugacaugggacauuugcu

SEQ ID NO: 2702882 - RNA, 17 nt, Human
ugacaugggacauuugc

SEQ ID NO: 2702883 - RNA, 16 nt, Human
ugacaugggacauuug

SEQ ID NO: 2702884 - RNA, 20 nt, Human
ugaccacugcagaagacagu

SEQ ID NO: 2702885 - RNA, 20 nt, Human
ugacaagcucacagaccuuu

SEQ ID NO: 2702886 - RNA, 15 nt, Human
ugacaagcucacaga

SEQ ID NO: 2702887 - RNA, 12 nt, Human
ugacaagcucac

SEQ ID NO: 2702888 - RNA, 23 nt, Human
ucucaguccaugaagauguagag

SEQ ID NO: 2702889 - RNA, 14 nt, Human
ucggagaagagcug

SEQ ID NO: 2702890 - RNA, 16 nt, Human
ucggagaagagcuguu

SEQ ID NO: 2702891 - RNA, 12 nt, Human
ucggagaagagc

SEQ ID NO: 2702892 - RNA, 17 nt, Human
ucuacacuaagagagaa

SEQ ID NO: 2702893 - RNA, 18 nt, Human
ucuaugaaauauuauguu

SEQ ID NO: 2702894 - RNA, 17 nt, Human
uccugccccugagccca

SEQ ID NO: 2702895 - RNA, 18 nt, Human
uccugccccugagcccau

SEQ ID NO: 2702896 - RNA, 19 nt, Human
uccugaggcuccacuuggu

SEQ ID NO: 2702897 - RNA, 20 nt, Human
uccugaggcuccacuugguc

SEQ ID NO: 2702898 - RNA, 20 nt, Human
ucccuucacaaacccagugu

SEQ ID NO: 2702899 - RNA, 14 nt, Human
uccuagugaaagag

SEQ ID NO: 2702900 - RNA, 23 nt, Human
uccuagugaaagaggcagcuuga

SEQ ID NO: 2702901 - RNA, 22 nt, Human
uccucauuuuuauaaugucccu

SEQ ID NO: 2702902 - RNA, 19 nt, Human
uccagguagagggugugua

SEQ ID NO: 2702903 - RNA, 15 nt, Human
uccauacauuugugu

SEQ ID NO: 2702904 - RNA, 20 nt, Human
uccaugggccauaugaaaag

SEQ ID NO: 2702905 - RNA, 23 nt, Human
uccacuuggucugugagaugcua

SEQ ID NO: 2702906 - RNA, 21 nt, Human
uccacuuggucugugagaugc

SEQ ID NO: 2702907 - RNA, 17 nt, Human
uccacuuggucugugag

SEQ ID NO: 2702908 - RNA, 17 nt, Human
ucaucaaugaaugaaug

SEQ ID NO: 2702909 - RNA, 11 nt, Human
ucauagcagcu

SEQ ID NO: 2702910 - RNA, 12 nt, Human
ucauagcagcuu

SEQ ID NO: 2702911 - RNA, 16 nt, Human
ucauuaggauggcuag

SEQ ID NO: 2702912 - RNA, 14 nt, Human
uccaaagaaaugua

SEQ ID NO: 2702913 - RNA, 17 nt, Human
uccaaagaaauguaagg

SEQ ID NO: 2702914 - RNA, 16 nt, Human
uaggucagugcaaaua

SEQ ID NO: 2702915 - RNA, 16 nt, Human
uaggccaugggacagg

SEQ ID NO: 2702916 - RNA, 18 nt, Human
uaggccaugggacaggga

SEQ ID NO: 2702917 - RNA, 12 nt, Human
uaggaauugacc

SEQ ID NO: 2702918 - RNA, 15 nt, Human
uagugcaaauuguca

SEQ ID NO: 2702919 - RNA, 14 nt, Human
uagugcaaauuguc

SEQ ID NO: 2702920 - RNA, 14 nt, Human
uagucaaauugugu

SEQ ID NO: 2702921 - RNA, 13 nt, Human
uagucaaauugug

SEQ ID NO: 2702922 - RNA, 16 nt, Human
uaguauuucuaugaaa

SEQ ID NO: 2702923 - RNA, 19 nt, Human
uaguauuucuaugaaauau

SEQ ID NO: 2702924 - RNA, 18 nt, Human
uaguauuucuaugaaaua

SEQ ID NO: 2702925 - RNA, 13 nt, Human
uaguaucaaaaga

SEQ ID NO: 2702926 - RNA, 13 nt, Human
uauauaacaaugc

SEQ ID NO: 2702927 - RNA, 13 nt, Human
uauaugcuucugu

SEQ ID NO: 2702928 - RNA, 16 nt, Human
uaugcuucuguuuuau

SEQ ID NO: 2702929 - RNA, 15 nt, Human
uaugcuucuguuuua

SEQ ID NO: 2702930 - RNA, 16 nt, Human
uaugauucccagccag

SEQ ID NO: 2702931 - RNA, 15 nt, Human
uaugcaaagcacuga

SEQ ID NO: 2702932 - RNA, 13 nt, Human
uaugcaaagcacu

SEQ ID NO: 2702933 - RNA, 14 nt, Human
uaugcaaagcacug

SEQ ID NO: 2702934 - RNA, 12 nt, Human
uaugcaaagcac

SEQ ID NO: 2702935 - RNA, 17 nt, Human
uaugaauuacauuugua

SEQ ID NO: 2702936 - RNA, 23 nt, Human
uaugaauuacauuuguauaaaau

SEQ ID NO: 2702937 - RNA, 15 nt, Human
uauccuucagccuga

SEQ ID NO: 2702938 - RNA, 14 nt, Human
uauccuucagccug

SEQ ID NO: 2702939 - RNA, 17 nt, Human
uauguucuaagaaguga

SEQ ID NO: 2702940 - RNA, 19 nt, Human
uauggaggcuuugcauaga

SEQ ID NO: 2702941 - RNA, 12 nt, Human
uauguuaaaacu

SEQ ID NO: 2702942 - RNA, 19 nt, Human
uauguuagugcaaauuguc

SEQ ID NO: 2702943 - RNA, 17 nt, Human
uauuauauuuacaaaug

SEQ ID NO: 2702944 - RNA, 16 nt, Human
uauuauguuaaaacug

SEQ ID NO: 2702945 - RNA, 20 nt, Human
uauuguuuaaaaucauuucu

SEQ ID NO: 2702946 - RNA, 15 nt, Human
uauuucuaugaaaua

SEQ ID NO: 2702947 - RNA, 14 nt, Human
uauuucuaugaaau

SEQ ID NO: 2702948 - RNA, 13 nt, Human
uauuuauuacugu

SEQ ID NO: 2702949 - RNA, 13 nt, Human
uauuucuaugaaa

SEQ ID NO: 2702950 - RNA, 14 nt, Human
uauuuauuacugua

SEQ ID NO: 2702951 - RNA, 15 nt, Human
uauuguuuaaaauca

SEQ ID NO: 2702952 - RNA, 16 nt, Human
uauuguuuaaaaucau

SEQ ID NO: 2702953 - RNA, 17 nt, Human
uauuguuuaaaaucauu

SEQ ID NO: 2702954 - RNA, 14 nt, Human
ucaauaaaauccau

SEQ ID NO: 2702955 - RNA, 22 nt, Human
ucacaagacccaaaaggcagaa

SEQ ID NO: 2702956 - RNA, 12 nt, Human
ucacauuuaaau

SEQ ID NO: 2702957 - RNA, 22 nt, Human
ucaacuccaaacugacucuuaa

SEQ ID NO: 2702958 - RNA, 16 nt, Human
ucaaauaugcaaagca

SEQ ID NO: 2702959 - RNA, 17 nt, Human
ucaaauaugcaaagcac

SEQ ID NO: 2702960 - RNA, 18 nt, Human
ucaaauaugcaaagcacu

SEQ ID NO: 2702961 - RNA, 19 nt, Human
ucaaauaugcaaagcacug

SEQ ID NO: 2702962 - RNA, 15 nt, Human
ucaaauccuugaaga

SEQ ID NO: 2702963 - RNA, 16 nt, Human
ucaaauccuugaagau

SEQ ID NO: 2702964 - RNA, 22 nt, Human
ucaaacagucucaggaaaucaa

SEQ ID NO: 2702965 - RNA, 17 nt, Human
ucaaacauauauaacaa

SEQ ID NO: 2702966 - RNA, 14 nt, Human
gugagcuacaaaug

SEQ ID NO: 2702967 - RNA, 16 nt, Human
gugagcagucaggaaa

SEQ ID NO: 2702968 - RNA, 19 nt, Human
gugaaagaaaauaacaaua

SEQ ID NO: 2702969 - RNA, 20 nt, Human
gugaaacucguuaauuugua

SEQ ID NO: 2702970 - RNA, 18 nt, Human
gugcaaauugucacagga

SEQ ID NO: 2702971 - RNA, 21 nt, Human
guccugucggagcccugucuc

SEQ ID NO: 2702972 - RNA, 20 nt, Human
guccugucggagcccugucu

SEQ ID NO: 2702973 - RNA, 18 nt, Human
guccugucggagcccugu

SEQ ID NO: 2702974 - RNA, 17 nt, Human
gucuacacuaagagaga

SEQ ID NO: 2702975 - RNA, 23 nt, Human
gucuacacuaagagagaaugaga

SEQ ID NO: 2702976 - RNA, 20 nt, Human
gucccagccagcaguucaga

SEQ ID NO: 2702977 - RNA, 21 nt, Human
gucaauaaaauccauacauuu

SEQ ID NO: 2702978 - RNA, 15 nt, Human
gucaauaaaauccau

SEQ ID NO: 2702979 - RNA, 14 nt, Human
gucaccucauggaa

SEQ ID NO: 2702980 - RNA, 17 nt, Human
guauuuuaaaagaauga

SEQ ID NO: 2702981 - RNA, 16 nt, Human
guauuuuaaaagaaug

SEQ ID NO: 2702982 - RNA, 17 nt, Human
guauuucuaugaaauau

SEQ ID NO: 2702983 - RNA, 22 nt, Human
guauuucuaugaaauauuaugu

SEQ ID NO: 2702984 - RNA, 19 nt, Human
ggugcuacaaaaacacagc

SEQ ID NO: 2702985 - RNA, 21 nt, Human
ggguagccacuggacugacga

SEQ ID NO: 2702986 - RNA, 22 nt, Human
gguacuucaaauccuugaagau

SEQ ID NO: 2702987 - RNA, 22 nt, Human
gguagacacacaugaaguccaa

SEQ ID NO: 2702988 - RNA, 15 nt, Human
gguagacacacauga

SEQ ID NO: 2702989 - RNA, 23 nt, Human
guaaaaccacagcaguugaaaag

SEQ ID NO: 2702990 - RNA, 14 nt, Human
guaaaaccacagca

SEQ ID NO: 2702991 - RNA, 15 nt, Human
guaaaaccacagcag

SEQ ID NO: 2702992 - RNA, 16 nt, Human
guaaaaccacagcagu

SEQ ID NO: 2702993 - RNA, 18 nt, Human
guaaaaccacagcaguug

SEQ ID NO: 2702994 - RNA, 17 nt, Human
guaagggaaacugccag

SEQ ID NO: 2702995 - RNA, 18 nt, Human
guaagggaaacugccagc

SEQ ID NO: 2702996 - RNA, 23 nt, Human
guacuuuauuuucuauaauuuaa

SEQ ID NO: 2702997 - RNA, 15 nt, Human
guagaggagaaacug

SEQ ID NO: 2702998 - RNA, 15 nt, Human
guaccgcaaugugac

SEQ ID NO: 2702999 - RNA, 15 nt, Human
guaauuggaaaggca

SEQ ID NO: 2703000 - RNA, 19 nt, Human
guaaugauaacuggaaacu

SEQ ID NO: 2703001 - RNA, 14 nt, Human
gcucucuggccuuc

SEQ ID NO: 2703002 - RNA, 15 nt, Human
gcucucuggccuucg

SEQ ID NO: 2703003 - RNA, 19 nt, Human
gcucucuggccuucggccu

SEQ ID NO: 2703004 - RNA, 20 nt, Human
gcucucuggccuucggccuc

SEQ ID NO: 2703005 - RNA, 12 nt, Human
gcucucuggccu

SEQ ID NO: 2703006 - RNA, 13 nt, Human
gcucucuggccuu

SEQ ID NO: 2703007 - RNA, 11 nt, Human
gcucucuggcc

SEQ ID NO: 2703008 - RNA, 17 nt, Human
gcuaagcaaaaugugau

SEQ ID NO: 2703009 - RNA, 14 nt, Human
gcuaagcauuccaa

SEQ ID NO: 2703010 - RNA, 23 nt, Human
gcccucuccugggcagcugccuc

SEQ ID NO: 2703011 - RNA, 22 nt, Human
gcccucuccugggcagcugccu

SEQ ID NO: 2703012 - RNA, 14 nt, Human
gcccucuccugggc

SEQ ID NO: 2703013 - RNA, 13 nt, Human
gcccucuccuggg

SEQ ID NO: 2703014 - RNA, 12 nt, Human
gcccucuccugg

SEQ ID NO: 2703015 - RNA, 22 nt, Human
gccuauauuuuuuguuaaauga

SEQ ID NO: 2703016 - RNA, 17 nt, Human
gccuaagugcagccccg

SEQ ID NO: 2703017 - RNA, 20 nt, Human
gcugucuacacuaagagaga

SEQ ID NO: 2703018 - RNA, 17 nt, Human
ggaaaucaaauaugcaa

SEQ ID NO: 2703019 - RNA, 23 nt, Human
ggaaagggauuuucagcccucag

SEQ ID NO: 2703020 - RNA, 20 nt, Human
ggaagugacgguuuaauggg

SEQ ID NO: 2703021 - RNA, 22 nt, Human
ggaauuggagcucgugggacag

SEQ ID NO: 2703022 - RNA, 16 nt, Human
ggaauuggagcucgug

SEQ ID NO: 2703023 - RNA, 23 nt, Human
ggaauuucucccagucauuuaau

SEQ ID NO: 2703024 - RNA, 15 nt, Human
ggagaaucacuugaa

SEQ ID NO: 2703025 - RNA, 19 nt, Human
ggagaaucacuugaacccg

SEQ ID NO: 2703026 - RNA, 13 nt, Human
ggacgcucucugg

SEQ ID NO: 2703027 - RNA, 14 nt, Human
ggacgcucucuggc

SEQ ID NO: 2703028 - RNA, 14 nt, Human
ggcauggcugggaa

SEQ ID NO: 2703029 - RNA, 15 nt, Human
ggauuguaaaauggu

SEQ ID NO: 2703030 - RNA, 16 nt, Human
gcaaauugucacagga

SEQ ID NO: 2703031 - RNA, 20 nt, Human
gaugcuagaacucccuuuca

SEQ ID NO: 2703032 - RNA, 22 nt, Human
gaugcuagaacucccuuucaac

SEQ ID NO: 2703033 - RNA, 18 nt, Human
gaugcuagaacucccuuu

SEQ ID NO: 2703034 - RNA, 13 nt, Human
gcacacugucugc

SEQ ID NO: 2703035 - RNA, 18 nt, Human
gcacugacuucuaaguaa

SEQ ID NO: 2703036 - RNA, 15 nt, Human
gcacugacuucuaag

SEQ ID NO: 2703037 - RNA, 22 nt, Human
gauaaauggcuuccuggcaaua

SEQ ID NO: 2703038 - RNA, 12 nt, Human
gagcccugucuc

SEQ ID NO: 2703039 - RNA, 20 nt, Human
gagacagcucugcauacuca

SEQ ID NO: 2703040 - RNA, 21 nt, Human
gagaaugagagacacacugaa

SEQ ID NO: 2703041 - RNA, 20 nt, Human
gagaaugagagacacacuga

SEQ ID NO: 2703042 - RNA, 22 nt, Human
gagaaccuagggugauauuaac

SEQ ID NO: 2703043 - RNA, 21 nt, Human
gagaaccuagggugauauuaa

SEQ ID NO: 2703044 - RNA, 23 nt, Human
gagaacuuccagauccuggaaau

SEQ ID NO: 2703045 - RNA, 22 nt, Human
gagaacuuccagauccuggaaa

SEQ ID NO: 2703046 - RNA, 17 nt, Human
gagaaugagagacacac

SEQ ID NO: 2703047 - RNA, 16 nt, Human
gacuucuaaguaaaac

SEQ ID NO: 2703048 - RNA, 17 nt, Human
gacuucuaaguaaaacc

SEQ ID NO: 2703049 - RNA, 18 nt, Human
gacuucuaaguaaaacca

SEQ ID NO: 2703050 - RNA, 20 nt, Human
gacuucugucuucacaacag

SEQ ID NO: 2703051 - RNA, 23 nt, Human
gacuucugucuucacaacagauu

SEQ ID NO: 2703052 - RNA, 19 nt, Human
gacuucuaaguaaaaccac

SEQ ID NO: 2703053 - RNA, 23 nt, Human
gacuucuaaguaaaaccacagca

SEQ ID NO: 2703054 - RNA, 24 nt, Human
gacuucuaaguaaaaccacagcag

SEQ ID NO: 2703055 - RNA, 16 nt, Human
gacuccaaagaaaugu

SEQ ID NO: 2703056 - RNA, 18 nt, Human
gacuccaaagaaauguaa

SEQ ID NO: 2703057 - RNA, 21 nt, Human
gacucauuuuaaaaaauggaa

SEQ ID NO: 2703058 - RNA, 11 nt, Human
gacuccaaaga

SEQ ID NO: 2703059 - RNA, 12 nt, Human
gacuccaaagaa

SEQ ID NO: 2703060 - RNA, 15 nt, Human
gacuccaaagaaaug

SEQ ID NO: 2703061 - RNA, 16 nt, Human
gacugcauuauauuua

SEQ ID NO: 2703062 - RNA, 14 nt, Human
gacugcauuauauu

SEQ ID NO: 2703063 - RNA, 16 nt, Human
gacuggauaguccguc

SEQ ID NO: 2703064 - RNA, 19 nt, Human
gacagagccccacccucag

SEQ ID NO: 2703065 - RNA, 20 nt, Human
gacauagaauuaacacauga

SEQ ID NO: 2703066 - RNA, 17 nt, Human
gacagggaggacgcucu

SEQ ID NO: 2703067 - RNA, 18 nt, Human
gacagggaggacgcucuc

SEQ ID NO: 2703068 - RNA, 16 nt, Human
gacaugggacauuugc

SEQ ID NO: 2703069 - RNA, 21 nt, Human
gaccacugcagaagacaguau

SEQ ID NO: 2703070 - RNA, 16 nt, Human
gacccaaaaggcagaa

SEQ ID NO: 2703071 - RNA, 15 nt, Human
gacccacaagaaaug

SEQ ID NO: 2703072 - RNA, 22 nt, Human
gacccacaagaaaugaaagcag

SEQ ID NO: 2703073 - RNA, 16 nt, Human
gacaaggaaaaaauaa

SEQ ID NO: 2703074 - RNA, 15 nt, Human
gacaagcucacagac

SEQ ID NO: 2703075 - RNA, 16 nt, Human
gaauuggagcucgugg

SEQ ID NO: 2703076 - RNA, 16 nt, Human
gaauugacccacaaga

SEQ ID NO: 2703077 - RNA, 21 nt, Human
gaauugacccacaagaaauga

SEQ ID NO: 2703078 - RNA, 21 nt, Human
cuguuaaaagaugaaaauauu

SEQ ID NO: 2703079 - RNA, 23 nt, Human
cuguuaaaagaugaaaauauuug

SEQ ID NO: 2703080 - RNA, 20 nt, Human
cuguuaaaagaugaaaauau

SEQ ID NO: 2703081 - RNA, 22 nt, Human
cugggggggauuguaaaauggu

SEQ ID NO: 2703082 - RNA, 23 nt, Human
cuguaaucacagcuacuugggag

SEQ ID NO: 2703083 - RNA, 20 nt, Human
cugucuacacuaagagagaa

SEQ ID NO: 2703084 - RNA, 22 nt, Human
cuguauuuuaaaagaaugauua

SEQ ID NO: 2703085 - RNA, 19 nt, Human
cuguauuuuaaaagaauga

SEQ ID NO: 2703086 - RNA, 20 nt, Human
cuguauuuuaaaagaaugau

SEQ ID NO: 2703087 - RNA, 12 nt, Human
cuggagcucugc

SEQ ID NO: 2703088 - RNA, 13 nt, Human
cuggagcucugcc

SEQ ID NO: 2703089 - RNA, 16 nt, Human
cuggagcucugcccau

SEQ ID NO: 2703090 - RNA, 23 nt, Human
cuggccuucggccuccauccuga

SEQ ID NO: 2703091 - RNA, 22 nt, Human
cuggccuucggccuccauccug

SEQ ID NO: 2703092 - RNA, 21 nt, Human
cuggcacaguuuucugagaaa

SEQ ID NO: 2703093 - RNA, 22 nt, Human
cuggcacaguuuucugagaaag

SEQ ID NO: 2703094 - RNA, 20 nt, Human
cuggcacaguuuucugagaa

SEQ ID NO: 2703095 - RNA, 18 nt, Human
cugcugaaacaacaaaua

SEQ ID NO: 2703096 - RNA, 13 nt, Human
cugccuccccucc

SEQ ID NO: 2703097 - RNA, 19 nt, Human
cugcccucuccugggcagc

SEQ ID NO: 2703098 - RNA, 18 nt, Human
cugcccucuccugggcag

SEQ ID NO: 2703099 - RNA, 16 nt, Human
cugcccucuccugggc

SEQ ID NO: 2703100 - RNA, 21 nt, Human
cugcccucuccugggcagcug

SEQ ID NO: 2703101 - RNA, 20 nt, Human
cugcccucuccugggcagcu

SEQ ID NO: 2703102 - RNA, 21 nt, Human
cuucugucuucacaacagauu

SEQ ID NO: 2703103 - RNA, 22 nt, Human
cuucugucuucacaacagauua

SEQ ID NO: 2703104 - RNA, 18 nt, Human
cuucugucuucacaacag

SEQ ID NO: 2703105 - RNA, 22 nt, Human
cuuagaugcaguucugaagaag

SEQ ID NO: 2703106 - RNA, 20 nt, Human
cuuagaugcaguucugaaga

SEQ ID NO: 2703107 - RNA, 15 nt, Human
cuuauuucauuucuu

SEQ ID NO: 2703108 - RNA, 15 nt, Human
cuuauuuccucauuu

SEQ ID NO: 2703109 - RNA, 14 nt, Human
cuuauuucauuucu

SEQ ID NO: 2703110 - RNA, 23 nt, Human
cuugucaauaaaauccauacauu

SEQ ID NO: 2703111 - RNA, 19 nt, Human
cuugaguuuaaauuguaau

SEQ ID NO: 2703112 - RNA, 18 nt, Human
gaaaauauuuguaucaca

SEQ ID NO: 2703113 - RNA, 22 nt, Human
gaaaaucuacacuccagugaga

SEQ ID NO: 2703114 - RNA, 18 nt, Human
gaaaaucuuauaauuuaa

SEQ ID NO: 2703115 - RNA, 14 nt, Human
gaaagcagggacuu

SEQ ID NO: 2703116 - RNA, 22 nt, Human
gaaagcagaacagugauuacca

SEQ ID NO: 2703117 - RNA, 17 nt, Human
gaaagcagaacagugau

SEQ ID NO: 2703118 - RNA, 20 nt, Human
gaaagaggcagcuugaaacu

SEQ ID NO: 2703119 - RNA, 21 nt, Human
gaaagaggaaugaaguacuca

SEQ ID NO: 2703120 - RNA, 17 nt, Human
gaaagagaacuuccaga

SEQ ID NO: 2703121 - RNA, 14 nt, Human
gaaacccugucucu

SEQ ID NO: 2703122 - RNA, 23 nt, Human
gaaacucguuaauuuguaguguu

SEQ ID NO: 2703123 - RNA, 11 nt, Human
gaaacauuugg

SEQ ID NO: 2703124 - RNA, 16 nt, Human
gaaacacaacuauauu

SEQ ID NO: 2703125 - RNA, 13 nt, Human
ccugaggcuccac

SEQ ID NO: 2703126 - RNA, 14 nt, Human
ccugaggcuccacu

SEQ ID NO: 2703127 - RNA, 17 nt, Human
ccugccccugagcccau

SEQ ID NO: 2703128 - RNA, 14 nt, Human
ccugggcagcugcc

SEQ ID NO: 2703129 - RNA, 13 nt, Human
ccugggcagcugc

SEQ ID NO: 2703130 - RNA, 15 nt, Human
ccuuggacucauuuu

SEQ ID NO: 2703131 - RNA, 18 nt, Human
ccuucggccuccauccug

SEQ ID NO: 2703132 - RNA, 16 nt, Human
ccuucggccuccaucc

SEQ ID NO: 2703133 - RNA, 17 nt, Human
ccuucggccuccauccu

SEQ ID NO: 2703134 - RNA, 19 nt, Human
cuaaauugacacuuaaaaa

SEQ ID NO: 2703135 - RNA, 15 nt, Human
cuaagagagaaugag

SEQ ID NO: 2703136 - RNA, 14 nt, Human
cuaagagagaauga

SEQ ID NO: 2703137 - RNA, 20 nt, Human
cgggaggcagagguugcagu

SEQ ID NO: 2703138 - RNA, 14 nt, Human
cuacacuaagagag

SEQ ID NO: 2703139 - RNA, 23 nt, Human
cuacacgagauacagaauuuuau

SEQ ID NO: 2703140 - RNA, 21 nt, Human
cuaagcuucacuguaaaauaa

SEQ ID NO: 2703141 - RNA, 14 nt, Human
cuaaguaaaaccac

SEQ ID NO: 2703142 - RNA, 18 nt, Human
cuaaguaaaaccacagca

SEQ ID NO: 2703143 - RNA, 19 nt, Human
cuaaguaaaaccacagcag

SEQ ID NO: 2703144 - RNA, 20 nt, Human
cuaggaaauauuuauuuuaa

SEQ ID NO: 2703145 - RNA, 19 nt, Human
cuaggaaauauuuauuuua

SEQ ID NO: 2703146 - RNA, 15 nt, Human
cuaggaaauauuuau

SEQ ID NO: 2703147 - RNA, 14 nt, Human
cuaggaaauauuua

SEQ ID NO: 2703148 - RNA, 19 nt, Human
cuagaguuuagcuggaaaa

SEQ ID NO: 2703149 - RNA, 18 nt, Human
cuagaguuuagcuggaaa

SEQ ID NO: 2703150 - RNA, 19 nt, Human
cuaugaaauauuauguuaa

SEQ ID NO: 2703151 - RNA, 12 nt, Human
cuauaauuuaaa

SEQ ID NO: 2703152 - RNA, 13 nt, Human
cuauaauuuaaau

SEQ ID NO: 2703153 - RNA, 21 nt, Human
cucagaugcacaugagcuggc

SEQ ID NO: 2703154 - RNA, 22 nt, Human
cucaggaaaucaaauaugcaaa

SEQ ID NO: 2703155 - RNA, 14 nt, Human
cuccccucggagaa

SEQ ID NO: 2703156 - RNA, 23 nt, Human
cucauuuuuauaaugucccuuca

SEQ ID NO: 2703157 - RNA, 12 nt, Human
cucauuuccaag

SEQ ID NO: 2703158 - RNA, 14 nt, Human
cucauuuccaagca

SEQ ID NO: 2703159 - RNA, 13 nt, Human
cucauuuccaagc

SEQ ID NO: 2703160 - RNA, 17 nt, Human
cucauuuccaagcaagu

SEQ ID NO: 2703161 - RNA, 17 nt, Human
ccccuccucugcuugcc

SEQ ID NO: 2703162 - RNA, 14 nt, Human
ccccuccucugcuu

SEQ ID NO: 2703163 - RNA, 13 nt, Human
ccccuccucugcu

SEQ ID NO: 2703164 - RNA, 15 nt, Human
ccccucggagaagag

SEQ ID NO: 2703165 - RNA, 15 nt, Human
ccuaacgaaguaucc

SEQ ID NO: 2703166 - RNA, 22 nt, Human
cccucuccugggcagcugccuc

SEQ ID NO: 2703167 - RNA, 21 nt, Human
cccucuccugggcagcugccu

SEQ ID NO: 2703168 - RNA, 20 nt, Human
cccucuccugggcagcugcc

SEQ ID NO: 2703169 - RNA, 23 nt, Human
cccucuccugggcagcugccucc

SEQ ID NO: 2703170 - RNA, 12 nt, Human
ccaggugccagu

SEQ ID NO: 2703171 - RNA, 13 nt, Human
ccaggugccaguu

SEQ ID NO: 2703172 - RNA, 20 nt, Human
ccauccugaggcuccacuug

SEQ ID NO: 2703173 - RNA, 18 nt, Human
ccauccugaggcuccacu

SEQ ID NO: 2703174 - RNA, 20 nt, Human
ccagguagaggguguguaag

SEQ ID NO: 2703175 - RNA, 19 nt, Human
ccagccugagcgacaguga

SEQ ID NO: 2703176 - RNA, 15 nt, Human
ccacugguucuucuu

SEQ ID NO: 2703177 - RNA, 14 nt, Human
ccagacaucaacag

SEQ ID NO: 2703178 - RNA, 15 nt, Human
ccaccucccugcaau

SEQ ID NO: 2703179 - RNA, 21 nt, Human
ccaccucccugcaauaaaaug

SEQ ID NO: 2703180 - RNA, 19 nt, Human
ccaccucccugcaauaaaa

SEQ ID NO: 2703181 - RNA, 21 nt, Human
gaaaagacuccaaagaaaugu

SEQ ID NO: 2703182 - RNA, 20 nt, Human
gaaaagacuccaaagaaaug

SEQ ID NO: 2703183 - RNA, 18 nt, Human
gaaaagacuccaaagaaa

SEQ ID NO: 2703184 - RNA, 23 nt, Human
gaacaaauuuacagagacagaaa

SEQ ID NO: 2703185 - RNA, 17 nt, Human
gaacaaauuuacagaga

SEQ ID NO: 2703186 - RNA, 18 nt, Human
gaacaaauuuacagagac

SEQ ID NO: 2703187 - RNA, 18 nt, Human
gaaaugaaagcagggacu

SEQ ID NO: 2703188 - RNA, 23 nt, Human
gaaaucaaauaugcaaagcacug

SEQ ID NO: 2703189 - RNA, 17 nt, Human
gaaaugaaagcagggac

SEQ ID NO: 2703190 - RNA, 21 nt, Human
gaaaucaaauaugcaaagcac

SEQ ID NO: 2703191 - RNA, 16 nt, Human
gaaaucaaauaugcaa

SEQ ID NO: 2703192 - RNA, 23 nt, Human
gaaacuucagcgguuuauauaag

SEQ ID NO: 2703193 - RNA, 22 nt, Human
cuucucuguauuccuagaaacu

SEQ ID NO: 2703194 - RNA, 23 nt, Human
cuuggucucagugucaaugcagc

SEQ ID NO: 2703195 - RNA, 14 nt, Human
cugccuccccuccu

SEQ ID NO: 2703196 - RNA, 18 nt, Human
cugccuccccuccucugc

SEQ ID NO: 2703197 - RNA, 17 nt, Human
cugccuccccuccucug

SEQ ID NO: 2703198 - RNA, 20 nt, Human
cugccuccccuccucugcuu

SEQ ID NO: 2703199 - RNA, 19 nt, Human
cugccuccccuccucugcu

SEQ ID NO: 2703200 - RNA, 21 nt, Human
cugccuccccuccucugcuug

SEQ ID NO: 2703201 - RNA, 23 nt, Human
cuggaaaaguauguuagugcaaa

SEQ ID NO: 2703202 - RNA, 21 nt, Human
cugugagaugcuagaacuccc

SEQ ID NO: 2703203 - RNA, 23 nt, Human
cugugagaugcuagaacucccuu

SEQ ID NO: 2703204 - RNA, 22 nt, Human
cuguucacagccagacuggcac

SEQ ID NO: 2703205 - RNA, 12 nt, Human
cuguucacagcc

SEQ ID NO: 2703206 - RNA, 19 nt, Human
cuguucacagccagacugg

SEQ ID NO: 2703207 - RNA, 13 nt, Human
cuuaaaaaugguu

SEQ ID NO: 2703208 - RNA, 20 nt, Human
cuuaaaaaugguuuaaaugg

SEQ ID NO: 2703209 - RNA, 12 nt, Human
cuuaaaaauggu

SEQ ID NO: 2703210 - RNA, 20 nt, Human
cuguaagaaaauaucacuug

SEQ ID NO: 2703211 - RNA, 14 nt, Human
gacgcucucuggcc

SEQ ID NO: 2703212 - RNA, 18 nt, Human
gacagucaccucauggaa

SEQ ID NO: 2703213 - RNA, 12 nt, Human
gacagcucugca

SEQ ID NO: 2703214 - RNA, 14 nt, Human
gaaugaauggcuaa

SEQ ID NO: 2703215 - RNA, 20 nt, Human
gaauuacauuuguauaaaau

SEQ ID NO: 2703216 - RNA, 18 nt, Human
gaauuacauuuguauaaa

SEQ ID NO: 2703217 - RNA, 15 nt, Human
gaauuacauuuguau

SEQ ID NO: 2703218 - RNA, 13 nt, Human
gaauuacauuugu

SEQ ID NO: 2703219 - RNA, 14 nt, Human
gaauuaacacauga

SEQ ID NO: 2703220 - RNA, 15 nt, Human
gaauuaacacaugau

SEQ ID NO: 2703221 - RNA, 22 nt, Human
gaaugauuaugaauuacauuug

SEQ ID NO: 2703222 - RNA, 14 nt, Human
gaaugauuaugaau

SEQ ID NO: 2703223 - RNA, 15 nt, Human
gaaugaauggcuaag

SEQ ID NO: 2703224 - RNA, 20 nt, Human
gaaugaauggcuaagcaaaa

SEQ ID NO: 2703225 - RNA, 22 nt, Human
gacuuuuuauggcacuaguauu

SEQ ID NO: 2703226 - RNA, 21 nt, Human
gagauugugccccugcacucc

SEQ ID NO: 2703227 - RNA, 16 nt, Human
gagaugcuagaacucc

SEQ ID NO: 2703228 - RNA, 20 nt, Human
gagaugcuagaacucccuuu

SEQ ID NO: 2703229 - RNA, 22 nt, Human
gagcuguucacagccagacugg

SEQ ID NO: 2703230 - RNA, 17 nt, Human
gagcuguucacagccag

SEQ ID NO: 2703231 - RNA, 20 nt, Human
gagcuguucacagccagacu

SEQ ID NO: 2703232 - RNA, 14 nt, Human
gagcagucaggaaa

SEQ ID NO: 2703233 - RNA, 17 nt, Human
gagccccacccucagau

SEQ ID NO: 2703234 - RNA, 16 nt, Human
gagccccacccucaga

SEQ ID NO: 2703235 - RNA, 21 nt, Human
gaggacgcucucuggccuucg

SEQ ID NO: 2703236 - RNA, 20 nt, Human
gaggacgcucucuggccuuc

SEQ ID NO: 2703237 - RNA, 12 nt, Human
gaggagaaacug

SEQ ID NO: 2703238 - RNA, 14 nt, Human
gaggagaaacugga

SEQ ID NO: 2703239 - RNA, 15 nt, Human
gaggcuccacuuggu

SEQ ID NO: 2703240 - RNA, 12 nt, Human
gaggcuccacuu

SEQ ID NO: 2703241 - RNA, 17 nt, Human
gaggcuccacuuggucu

SEQ ID NO: 2703242 - RNA, 18 nt, Human
gaggcugagaugggagaa

SEQ ID NO: 2703243 - RNA, 20 nt, Human
gcaucuagcaugucgucaaa

SEQ ID NO: 2703244 - RNA, 22 nt, Human
gcaguuguugcccacagcugua

SEQ ID NO: 2703245 - RNA, 13 nt, Human
gcagugaugucac

SEQ ID NO: 2703246 - RNA, 12 nt, Human
gcagaacaguga

SEQ ID NO: 2703247 - RNA, 13 nt, Human
gcagaacagugau

SEQ ID NO: 2703248 - RNA, 18 nt, Human
gcagaacagugauuacca

SEQ ID NO: 2703249 - RNA, 22 nt, Human
gcagaacagugauuaccaggga

SEQ ID NO: 2703250 - RNA, 15 nt, Human
gcagcucuccccuuc

SEQ ID NO: 2703251 - RNA, 13 nt, Human
gcugcugaaacaa

SEQ ID NO: 2703252 - RNA, 18 nt, Human
gcuguauuuuaaaagaau

SEQ ID NO: 2703253 - RNA, 20 nt, Human
gcuguauuuuaaaagaauga

SEQ ID NO: 2703254 - RNA, 21 nt, Human
gcuguauuuuaaaagaaugau

SEQ ID NO: 2703255 - RNA, 14 nt, Human
gcugccuccccucc

SEQ ID NO: 2703256 - RNA, 19 nt, Human
ggaaaucaggguuaguauu

SEQ ID NO: 2703257 - RNA, 21 nt, Human
ggacagucaccucauggaauu

SEQ ID NO: 2703258 - RNA, 18 nt, Human
ggacagucaccucaugga

SEQ ID NO: 2703259 - RNA, 17 nt, Human
ggacagucaccucaugg

SEQ ID NO: 2703260 - RNA, 13 nt, Human
ggaaacugccagc

SEQ ID NO: 2703261 - RNA, 16 nt, Human
ggaaaaaauaacaaug

SEQ ID NO: 2703262 - RNA, 11 nt, Human
gccccaaaagg

SEQ ID NO: 2703263 - RNA, 13 nt, Human
gcauuuagaugua

SEQ ID NO: 2703264 - RNA, 19 nt, Human
gcauuuaggccaugggaca

SEQ ID NO: 2703265 - RNA, 12 nt, Human
gcauuuagaugu

SEQ ID NO: 2703266 - RNA, 22 nt, Human
gccucauguccacugguucuuc

SEQ ID NO: 2703267 - RNA, 13 nt, Human
gccuccauccuga

SEQ ID NO: 2703268 - RNA, 14 nt, Human
gccuccauccugag

SEQ ID NO: 2703269 - RNA, 23 nt, Human
gccuucggccuccauccugaggc

SEQ ID NO: 2703270 - RNA, 13 nt, Human
aaaaauacaaaaa

SEQ ID NO: 2703271 - RNA, 18 nt, Human
ggccuucggccuccaucc

SEQ ID NO: 2703272 - RNA, 16 nt, Human
ggccuucggccuccau

SEQ ID NO: 2703273 - RNA, 20 nt, Human
ggcuaagcuucacuguaaaa

SEQ ID NO: 2703274 - RNA, 16 nt, Human
aaaaugguuuaaaugg

SEQ ID NO: 2703275 - RNA, 18 nt, Human
aaaaugguuuaaaugguc

SEQ ID NO: 2703276 - RNA, 16 nt, Human
aaaauggguuuuacug

SEQ ID NO: 2703277 - RNA, 17 nt, Human
aaaaucucaauauuuca

SEQ ID NO: 2703278 - RNA, 11 nt, Human
aaaauaauuuu

SEQ ID NO: 2703279 - RNA, 17 nt, Human
aaaauaauuuuuauauu

SEQ ID NO: 2703280 - RNA, 16 nt, Human
aaaauaauuuuuauau

SEQ ID NO: 2703281 - RNA, 14 nt, Human
aaaauacacacuca

SEQ ID NO: 2703282 - RNA, 14 nt, Human
ggucagugcaaaua

SEQ ID NO: 2703283 - RNA, 20 nt, Human
ggguuuuauuguuuaaaauc

SEQ ID NO: 2703284 - RNA, 13 nt, Human
aaauaugcaaagc

SEQ ID NO: 2703285 - RNA, 15 nt, Human
aaauaugcaaagcac

SEQ ID NO: 2703286 - RNA, 16 nt, Human
aaauaugcaaagcacu

SEQ ID NO: 2703287 - RNA, 17 nt, Human
aaauaugcaaagcacug

SEQ ID NO: 2703288 - RNA, 21 nt, Human
aaauaccaugccauuuaaagc

SEQ ID NO: 2703289 - RNA, 18 nt, Human
aaauauaugcuaagucuu

SEQ ID NO: 2703290 - RNA, 22 nt, Human
aaauaucacuugucaauaaaau

SEQ ID NO: 2703291 - RNA, 13 nt, Human
guaauaaacucau

SEQ ID NO: 2703292 - RNA, 12 nt, Human
aaacuuuaugcu

SEQ ID NO: 2703293 - RNA, 19 nt, Human
aaacuuuaugcuaagugaa

SEQ ID NO: 2703294 - RNA, 16 nt, Human
aaagcagaacagugau

SEQ ID NO: 2703295 - RNA, 22 nt, Human
aaagggcuguuauaaucuuuca

SEQ ID NO: 2703296 - RNA, 20 nt, Human
aaagggcuguuauaaucuuu

SEQ ID NO: 2703297 - RNA, 13 nt, Human
aaagcuuauuaaa

SEQ ID NO: 2703298 - RNA, 17 nt, Human
aaaguauguuagugcaa

SEQ ID NO: 2703299 - RNA, 19 nt, Human
gguuuuauuguuuaaaauc

SEQ ID NO: 2703300 - RNA, 16 nt, Human
cacaagacugcacauc

SEQ ID NO: 2703301 - RNA, 12 nt, Human
caauuuaaaaaa

SEQ ID NO: 2703302 - RNA, 23 nt, Human
caaugcuguauuuuaaaagaaug

SEQ ID NO: 2703303 - RNA, 14 nt, Human
caaugcuguauuuu

SEQ ID NO: 2703304 - RNA, 21 nt, Human
caauauuucagauaaucacaa

SEQ ID NO: 2703305 - RNA, 20 nt, Human
caauauuucagauaaucaca

SEQ ID NO: 2703306 - RNA, 12 nt, Human
caauauuucaga

SEQ ID NO: 2703307 - RNA, 20 nt, Human
caaguauuagaauaccacag

SEQ ID NO: 2703308 - RNA, 14 nt, Human
caaguauuagaaua

SEQ ID NO: 2703309 - RNA, 22 nt, Human
caccuugcagcucuccccuucu

SEQ ID NO: 2703310 - RNA, 15 nt, Human
caccuugcagcucuc

SEQ ID NO: 2703311 - RNA, 13 nt, Human
caccuugcagcuc

SEQ ID NO: 2703312 - RNA, 21 nt, Human
caccuacaugagguacugaga

SEQ ID NO: 2703313 - RNA, 23 nt, Human
caccucaaaauaccaugccauuu

SEQ ID NO: 2703314 - RNA, 17 nt, Human
cacuuggucugugagau

SEQ ID NO: 2703315 - RNA, 20 nt, Human
cacuuggucugugagaugcu

SEQ ID NO: 2703316 - RNA, 19 nt, Human
caacccaaauguucaucaa

SEQ ID NO: 2703317 - RNA, 21 nt, Human
caacuaucucauuuccaagca

SEQ ID NO: 2703318 - RNA, 15 nt, Human
caacacgagcaggcu

SEQ ID NO: 2703319 - RNA, 15 nt, Human
caaauccuugaagau

SEQ ID NO: 2703320 - RNA, 17 nt, Human
auucuugccaaauauaa

SEQ ID NO: 2703321 - RNA, 18 nt, Human
auugacuuuuuauggcac

SEQ ID NO: 2703322 - RNA, 18 nt, Human
auucacaagacccaaaag

SEQ ID NO: 2703323 - RNA, 14 nt, Human
auuguaaaugugcu

SEQ ID NO: 2703324 - RNA, 15 nt, Human
auuguaaaugugcuu

SEQ ID NO: 2703325 - RNA, 17 nt, Human
auuguaaaugugcuuuu

SEQ ID NO: 2703326 - RNA, 19 nt, Human
auuguuuaaaaucauuucu

SEQ ID NO: 2703327 - RNA, 18 nt, Human
auuucuaugaaauauuau

SEQ ID NO: 2703328 - RNA, 15 nt, Human
auuucuaugaaauau

SEQ ID NO: 2703329 - RNA, 20 nt, Human
auuucuaugaaauauuaugu

SEQ ID NO: 2703330 - RNA, 19 nt, Human
caggugccaguuauggcua

SEQ ID NO: 2703331 - RNA, 16 nt, Human
cagucaccucauggaa

SEQ ID NO: 2703332 - RNA, 15 nt, Human
cagucacauuccaag

SEQ ID NO: 2703333 - RNA, 19 nt, Human
cagucaccucauggaauug

SEQ ID NO: 2703334 - RNA, 20 nt, Human
cagucugacuguuuccauca

SEQ ID NO: 2703335 - RNA, 13 nt, Human
cagcaguucagag

SEQ ID NO: 2703336 - RNA, 17 nt, Human
cagagguugcagugagc

SEQ ID NO: 2703337 - RNA, 16 nt, Human
cagagguugcagugag

SEQ ID NO: 2703338 - RNA, 12 nt, Human
cagauccuggaa

SEQ ID NO: 2703339 - RNA, 21 nt, Human
cagcuccccucggagaagagc

SEQ ID NO: 2703340 - RNA, 22 nt, Human
cagcuccccucggagaagagcu

SEQ ID NO: 2703341 - RNA, 20 nt, Human
cagcuccccucggagaagag

SEQ ID NO: 2703342 - RNA, 14 nt, Human
caugauguuuagaa

SEQ ID NO: 2703343 - RNA, 23 nt, Human
ccacagcaguugaaaagacucca

SEQ ID NO: 2703344 - RNA, 17 nt, Human
ccacagcaguugaaaag

SEQ ID NO: 2703345 - RNA, 18 nt, Human
ccacagcaguugaaaaga

SEQ ID NO: 2703346 - RNA, 12 nt, Human
ccacagcaguug

SEQ ID NO: 2703347 - RNA, 17 nt, Human
cauuuguauaaaauaau

SEQ ID NO: 2703348 - RNA, 20 nt, Human
cauuuguauaaaauaauuuu

SEQ ID NO: 2703349 - RNA, 19 nt, Human
cauuuguauaaaauaauuu

SEQ ID NO: 2703350 - RNA, 17 nt, Human
ccaaauguucaucaaug

SEQ ID NO: 2703351 - RNA, 18 nt, Human
ccccugcacuccagccug

SEQ ID NO: 2703352 - RNA, 14 nt, Human
ccauacauuugugu

SEQ ID NO: 2703353 - RNA, 13 nt, Human
ccauacauuugug

SEQ ID NO: 2703354 - RNA, 22 nt, Human
ccauuuaaagcuuauuaaaacu

SEQ ID NO: 2703355 - RNA, 19 nt, Human
cccugucuccucucucugu

SEQ ID NO: 2703356 - RNA, 21 nt, Human
ccucauuuuuauaaugucccu

SEQ ID NO: 2703357 - RNA, 23 nt, Human
ccucauggaauuggagcucgugg

SEQ ID NO: 2703358 - RNA, 15 nt, Human
ccuguaaucacagcu

SEQ ID NO: 2703359 - RNA, 21 nt, Human
ccugucggagcccugucuccu

SEQ ID NO: 2703360 - RNA, 17 nt, Human
ccugucggagcccuguc

SEQ ID NO: 2703361 - RNA, 16 nt, Human
ccugucggagcccugu

SEQ ID NO: 2703362 - RNA, 22 nt, Human
ccugucggagcccugucuccuc

SEQ ID NO: 2703363 - RNA, 12 nt, Human
cuagaacucccu

SEQ ID NO: 2703364 - RNA, 13 nt, Human
cuagaacucccuu

SEQ ID NO: 2703365 - RNA, 22 nt, Human
cuaaguaaaaccacagcaguug

SEQ ID NO: 2703366 - RNA, 23 nt, Human
cuaaguaaaaccacagcaguuga

SEQ ID NO: 2703367 - RNA, 20 nt, Human
cgugugugugcguccugucg

SEQ ID NO: 2703368 - RNA, 20 nt, Human
cuaaguaaaaccacagcagu

SEQ ID NO: 2703369 - RNA, 20 nt, Human
cuacaugagguacugagagu

SEQ ID NO: 2703370 - RNA, 18 nt, Human
cuacaugagguacugaga

SEQ ID NO: 2703371 - RNA, 18 nt, Human
cuacauacuauggaauuu

SEQ ID NO: 2703372 - RNA, 16 nt, Human
cuacaaaaacacagca

SEQ ID NO: 2703373 - RNA, 17 nt, Human
cuacaaaaacacagcaa

SEQ ID NO: 2703374 - RNA, 18 nt, Human
cuacaaaaacacagcaag

SEQ ID NO: 2703375 - RNA, 15 nt, Human
cuacaaaaacacagc

SEQ ID NO: 2703376 - RNA, 23 nt, Human
cucaaaauaccaugccauuuaaa

SEQ ID NO: 2703377 - RNA, 17 nt, Human
cucaaaacugcacuguc

SEQ ID NO: 2703378 - RNA, 18 nt, Human
cgcaggcccccaggugcc

SEQ ID NO: 2703379 - RNA, 22 nt, Human
cguggugauuuagcaggaagcu

SEQ ID NO: 2703380 - RNA, 16 nt, Human
cuccacuuggucugug

SEQ ID NO: 2703381 - RNA, 17 nt, Human
cuccacuuggucuguga

SEQ ID NO: 2703382 - RNA, 21 nt, Human
cuccacuuggucugugagaug

SEQ ID NO: 2703383 - RNA, 22 nt, Human
cuccacuuggucugugagaugc

SEQ ID NO: 2703384 - RNA, 13 nt, Human
cuccacuuggucu

SEQ ID NO: 2703385 - RNA, 15 nt, Human
cuccacuuggucugu

SEQ ID NO: 2703386 - RNA, 18 nt, Human
cucaguagucagacugga

SEQ ID NO: 2703387 - RNA, 19 nt, Human
cuccccaugauguuuagaa

SEQ ID NO: 2703388 - RNA, 23 nt, Human
cuccacuuggucugugagaugcu

SEQ ID NO: 2703389 - RNA, 14 nt, Human
cuccucugcuugcc

SEQ ID NO: 2703390 - RNA, 12 nt, Human
cuccucugcuug

SEQ ID NO: 2703391 - RNA, 12 nt, Human
cuccugggcagc

SEQ ID NO: 2703392 - RNA, 17 nt, Human
cuccugggcagcugccu

SEQ ID NO: 2703393 - RNA, 16 nt, Human
cuccugggcagcugcc

SEQ ID NO: 2703394 - RNA, 15 nt, Human
cuccugggcagcugc

SEQ ID NO: 2703395 - RNA, 14 nt, Human
cuccugggcagcug

SEQ ID NO: 2703396 - RNA, 19 nt, Human
cuccugggcagcugccucc

SEQ ID NO: 2703397 - RNA, 18 nt, Human
cuccugggcagcugccuc

SEQ ID NO: 2703398 - RNA, 22 nt, Human
cuccugggcagcugccuccccu

SEQ ID NO: 2703399 - RNA, 20 nt, Human
cuccucugcuugccaucccu

SEQ ID NO: 2703400 - RNA, 17 nt, Human
cuccucugcuugccauc

SEQ ID NO: 2703401 - RNA, 16 nt, Human
cuccucugcuugccau

SEQ ID NO: 2703402 - RNA, 15 nt, Human
cuccucugcuugcca

SEQ ID NO: 2703403 - RNA, 22 nt, Human
cuccucugcuugccaucccucc

SEQ ID NO: 2703404 - RNA, 21 nt, Human
cuccucugcuugccaucccuc

SEQ ID NO: 2703405 - RNA, 14 nt, Human
cucguuaauuugua

SEQ ID NO: 2703406 - RNA, 15 nt, Human
cugaaacaacaaaua

SEQ ID NO: 2703407 - RNA, 16 nt, Human
cucuccccuucucugu

SEQ ID NO: 2703408 - RNA, 21 nt, Human
cucuuagaugcaguucugaag

SEQ ID NO: 2703409 - RNA, 22 nt, Human
cucuuagaugcaguucugaaga

SEQ ID NO: 2703410 - RNA, 23 nt, Human
auuaaguaaugauaacuggaaac

SEQ ID NO: 2703411 - RNA, 21 nt, Human
auuaaguaaugauaacuggaa

SEQ ID NO: 2703412 - RNA, 19 nt, Human
uuuuugugaaaagcuccau

SEQ ID NO: 2703413 - RNA, 17 nt, Human
auuacauuuguauaaaa

SEQ ID NO: 2703414 - RNA, 18 nt, Human
auuacauuuguauaaaau

SEQ ID NO: 2703415 - RNA, 12 nt, Human
auuaccagggac

SEQ ID NO: 2703416 - RNA, 16 nt, Human
auuacauuuguauaaa

SEQ ID NO: 2703417 - RNA, 17 nt, Human
uuuuuauauuugaaaua

SEQ ID NO: 2703418 - RNA, 19 nt, Human
uuuuuauauuugaaauauu

SEQ ID NO: 2703419 - RNA, 14 nt, Human
uuuuaauaauguuu

SEQ ID NO: 2703420 - RNA, 13 nt, Human
uuuuaauaauguu

SEQ ID NO: 2703421 - RNA, 12 nt, Human
uuuuaauaaugu

SEQ ID NO: 2703422 - RNA, 16 nt, Human
uuuuaauaauguuuca

SEQ ID NO: 2703423 - RNA, 19 nt, Human
augugcuaguaauuggaaa

SEQ ID NO: 2703424 - RNA, 18 nt, Human
auguucaucaaugaauga

SEQ ID NO: 2703425 - RNA, 15 nt, Human
auuaaaagaauauuu

SEQ ID NO: 2703426 - RNA, 15 nt, Human
auguuuucaggcuag

SEQ ID NO: 2703427 - RNA, 21 nt, Human
auguuuucaggcuagauguau

SEQ ID NO: 2703428 - RNA, 17 nt, Human
auguuuucaggcuagau

SEQ ID NO: 2703429 - RNA, 15 nt, Human
uuuucugagaaagac

SEQ ID NO: 2703430 - RNA, 18 nt, Human
uuuucugagaaagacuau

SEQ ID NO: 2703431 - RNA, 14 nt, Human
uuuucucuaggaaa

SEQ ID NO: 2703432 - RNA, 22 nt, Human
auuuucaguuauuauauuuaca

SEQ ID NO: 2703433 - RNA, 22 nt, Human
auuuuaaaagaaugauuaugaa

SEQ ID NO: 2703434 - RNA, 18 nt, Human
auuuuaaaagaaugauua

SEQ ID NO: 2703435 - RNA, 18 nt, Human
auuuguauaaaauaauuu

SEQ ID NO: 2703436 - RNA, 15 nt, Human
auuuguauaaaauaa

SEQ ID NO: 2703437 - RNA, 19 nt, Human
auuuguauaaaauaauuuu

SEQ ID NO: 2703438 - RNA, 17 nt, Human
auuuuaaaagaaugauu

SEQ ID NO: 2703439 - RNA, 15 nt, Human
auuguauuacaaauc

SEQ ID NO: 2703440 - RNA, 18 nt, Human
auugacccacaagaaaug

SEQ ID NO: 2703441 - RNA, 14 nt, Human
auuugaaauauuga

SEQ ID NO: 2703442 - RNA, 20 nt, Human
auuuauuuuaauaauguuuc

SEQ ID NO: 2703443 - RNA, 19 nt, Human
auuuauuuuaauaauguuu

SEQ ID NO: 2703444 - RNA, 12 nt, Human
auuucauuucuu

SEQ ID NO: 2703445 - RNA, 17 nt, Human
auuuauuuuaauaaugu

SEQ ID NO: 2703446 - RNA, 13 nt, Human
auuuagauguaua

SEQ ID NO: 2703447 - RNA, 20 nt, Human
augaaauauuauguuaaaac

SEQ ID NO: 2703448 - RNA, 21 nt, Human
augaaauauuauguuaaaacu

SEQ ID NO: 2703449 - RNA, 11 nt, Human
uugcucaugga

SEQ ID NO: 2703450 - RNA, 12 nt, Human
uugcucauggaa

SEQ ID NO: 2703451 - RNA, 23 nt, Human
augaauuaguuuuauaugcuucu

SEQ ID NO: 2703452 - RNA, 21 nt, Human
augaauuaguuuuauaugcuu

SEQ ID NO: 2703453 - RNA, 22 nt, Human
augaauuacauuuguauaaaau

SEQ ID NO: 2703454 - RNA, 23 nt, Human
uuguaguguuggagaagaacuga

SEQ ID NO: 2703455 - RNA, 13 nt, Human
uuguauaaaauaa

SEQ ID NO: 2703456 - RNA, 19 nt, Human
uuguauaaaauaauuuuua

SEQ ID NO: 2703457 - RNA, 17 nt, Human
augaauuacauuuguau

SEQ ID NO: 2703458 - RNA, 19 nt, Human
augaauuacauuuguauaa

SEQ ID NO: 2703459 - RNA, 18 nt, Human
augaauuacauuuguaua

SEQ ID NO: 2703460 - RNA, 20 nt, Human
uuuaaaaaagaaacauuugg

SEQ ID NO: 2703461 - RNA, 18 nt, Human
uugugaagcaaaauuuuu

SEQ ID NO: 2703462 - RNA, 14 nt, Human
augauaacuggaaa

SEQ ID NO: 2703463 - RNA, 16 nt, Human
auggaacauaaaauac

SEQ ID NO: 2703464 - RNA, 16 nt, Human
uuuauuuuaauaaugu

SEQ ID NO: 2703465 - RNA, 19 nt, Human
uuuauuacuguaagaaaau

SEQ ID NO: 2703466 - RNA, 23 nt, Human
augcugucuacacuaagagagaa

SEQ ID NO: 2703467 - RNA, 14 nt, Human
augcuguauuuuaa

SEQ ID NO: 2703468 - RNA, 23 nt, Human
auggaauuggagcucgugggaca

SEQ ID NO: 2703469 - RNA, 17 nt, Human
uuuauaugcuucuguuu

SEQ ID NO: 2703470 - RNA, 16 nt, Human
uuuauuacuguaagaa

SEQ ID NO: 2703471 - RNA, 24 nt, Human
uuuaaagcuuauuaaaacucauuu

SEQ ID NO: 2703472 - RNA, 13 nt, Human
augcuaagugaaa

SEQ ID NO: 2703473 - RNA, 13 nt, Human
uuucuaugaaaua

SEQ ID NO: 2703474 - RNA, 20 nt, Human
uuucuaugaaauauuauguu

SEQ ID NO: 2703475 - RNA, 14 nt, Human
uuucuaugaaauau

SEQ ID NO: 2703476 - RNA, 14 nt, Human
uuucugcaucagcu

SEQ ID NO: 2703477 - RNA, 14 nt, Human
uuugaaauauugac

SEQ ID NO: 2703478 - RNA, 17 nt, Human
auggaauuucucccagu

SEQ ID NO: 2703479 - RNA, 16 nt, Human
auggcuauaggugcua

SEQ ID NO: 2703480 - RNA, 19 nt, Human
auggcuauaggugcuacaa

SEQ ID NO: 2703481 - RNA, 21 nt, Human
auggcuauaggugcuacaaaa

SEQ ID NO: 2703482 - RNA, 23 nt, Human
auggcuauaggugcuacaaaaac

SEQ ID NO: 2703483 - RNA, 21 nt, Human
augggacauuugcucauggaa

SEQ ID NO: 2703484 - RNA, 22 nt, Human
augggacauuugcucauggaau

SEQ ID NO: 2703485 - RNA, 14 nt, Human
uucauuaucucaaa

SEQ ID NO: 2703486 - RNA, 13 nt, Human
auaugcaaagcac

SEQ ID NO: 2703487 - RNA, 14 nt, Human
auaugcaaagcacu

SEQ ID NO: 2703488 - RNA, 23 nt, Human
auauguaccuaacgaaguauccu

SEQ ID NO: 2703489 - RNA, 13 nt, Human
auauaugcuaagu

SEQ ID NO: 2703490 - RNA, 15 nt, Human
uucaucaaugaauga

SEQ ID NO: 2703491 - RNA, 17 nt, Human
uucagcgguuuauauaa

SEQ ID NO: 2703492 - RNA, 14 nt, Human
auauuguuugcuaa

SEQ ID NO: 2703493 - RNA, 13 nt, Human
auauuuacaaaug

SEQ ID NO: 2703494 - RNA, 15 nt, Human
aucaaauaugcaaag

SEQ ID NO: 2703495 - RNA, 16 nt, Human
aucaaggguacacugc

SEQ ID NO: 2703496 - RNA, 16 nt, Human
aucaaauaugcaaagc

SEQ ID NO: 2703497 - RNA, 17 nt, Human
aucaaauaugcaaagca

SEQ ID NO: 2703498 - RNA, 18 nt, Human
aucaaauaugcaaagcac

SEQ ID NO: 2703499 - RNA, 21 nt, Human
aucaaggguacacugccuucu

SEQ ID NO: 2703500 - RNA, 13 nt, Human
aucaauuuaaaaa

SEQ ID NO: 2703501 - RNA, 14 nt, Human
aucaauuuuucuua

SEQ ID NO: 2703502 - RNA, 23 nt, Human
aucacuugaacccgggaggcaga

SEQ ID NO: 2703503 - RNA, 17 nt, Human
uucuguuuuauaauuuu

SEQ ID NO: 2703504 - RNA, 16 nt, Human
uucuguuuuauaauuu

SEQ ID NO: 2703505 - RNA, 21 nt, Human
aucccucccuccaccucccug

SEQ ID NO: 2703506 - RNA, 20 nt, Human
aucccucccuccaccucccu

SEQ ID NO: 2703507 - RNA, 18 nt, Human
aucccucccuccaccucc

SEQ ID NO: 2703508 - RNA, 17 nt, Human
aucccucccuccaccuc

SEQ ID NO: 2703509 - RNA, 16 nt, Human
aucccucccuccaccu

SEQ ID NO: 2703510 - RNA, 14 nt, Human
aucccucccuccac

SEQ ID NO: 2703511 - RNA, 19 nt, Human
uugacacuuaaaaaugguu

SEQ ID NO: 2703512 - RNA, 17 nt, Human
uugacacuuaaaaaugg

SEQ ID NO: 2703513 - RNA, 16 nt, Human
uugaaggaugcugucu

SEQ ID NO: 2703514 - RNA, 14 nt, Human
uugaaggaugcugu

SEQ ID NO: 2703515 - RNA, 21 nt, Human
uugaaggaugcugucuucgua

SEQ ID NO: 2703516 - RNA, 16 nt, Human
auccugcaauuccacu

SEQ ID NO: 2703517 - RNA, 22 nt, Human
auccugaggcuccacuuggucu

SEQ ID NO: 2703518 - RNA, 13 nt, Human
auccugccccuga

SEQ ID NO: 2703519 - RNA, 11 nt, Human
auccugaggcu

SEQ ID NO: 2703520 - RNA, 13 nt, Human
auccugaggcucc

SEQ ID NO: 2703521 - RNA, 16 nt, Human
auccugaggcuccacu

SEQ ID NO: 2703522 - RNA, 18 nt, Human
auccugaggcuccacuug

SEQ ID NO: 2703523 - RNA, 22 nt, Human
uggcacaguuuucugagaaaga

SEQ ID NO: 2703524 - RNA, 20 nt, Human
uggcacaguuuucugagaaa

SEQ ID NO: 2703525 - RNA, 18 nt, Human
uggacgagaaaacaauaa

SEQ ID NO: 2703526 - RNA, 20 nt, Human
ugggaaagggauuuucagcc

SEQ ID NO: 2703527 - RNA, 21 nt, Human
ugggaaagcauuguaaaugug

SEQ ID NO: 2703528 - RNA, 18 nt, Human
aggaagcugugagagcag

SEQ ID NO: 2703529 - RNA, 23 nt, Human
aggaauugacccacaagaaauga

SEQ ID NO: 2703530 - RNA, 11 nt, Human
aggaauuuaaa

SEQ ID NO: 2703531 - RNA, 23 nt, Human
ugcuguauuuuaaaagaaugauu

SEQ ID NO: 2703532 - RNA, 13 nt, Human
ugcuggagcucug

SEQ ID NO: 2703533 - RNA, 14 nt, Human
ugcuggagcucugc

SEQ ID NO: 2703534 - RNA, 23 nt, Human
aggacagcccuucuuuccacaga

SEQ ID NO: 2703535 - RNA, 14 nt, Human
aggacacugauaug

SEQ ID NO: 2703536 - RNA, 11 nt, Human
aggagaaacug

SEQ ID NO: 2703537 - RNA, 15 nt, Human
ugcuugccaucccuc

SEQ ID NO: 2703538 - RNA, 16 nt, Human
ugcuugccaucccucc

SEQ ID NO: 2703539 - RNA, 22 nt, Human
uggaauuucucccagucauuua

SEQ ID NO: 2703540 - RNA, 18 nt, Human
uggaauuggagcucgugg

SEQ ID NO: 2703541 - RNA, 21 nt, Human
agccagcaguucagagcugcc

SEQ ID NO: 2703542 - RNA, 20 nt, Human
agccagcaguucagagcugc

SEQ ID NO: 2703543 - RNA, 22 nt, Human
agccagcaguucagagcugccc

SEQ ID NO: 2703544 - RNA, 19 nt, Human
agccagcaguucagagcug

SEQ ID NO: 2703545 - RNA, 17 nt, Human
agccagcaguucagagc

SEQ ID NO: 2703546 - RNA, 15 nt, Human
agccagcaguucaga

SEQ ID NO: 2703547 - RNA, 18 nt, Human
ugauuaaguaaugauaac

SEQ ID NO: 2703548 - RNA, 23 nt, Human
ugauuaaguaaugauaacuggaa

SEQ ID NO: 2703549 - RNA, 12 nt, Human
ugaugaagaagu

SEQ ID NO: 2703550 - RNA, 11 nt, Human
ugaugaagaag

SEQ ID NO: 2703551 - RNA, 14 nt, Human
ugaugggaaagcau

SEQ ID NO: 2703552 - RNA, 19 nt, Human
ugaugggaaagcauuguaa

SEQ ID NO: 2703553 - RNA, 20 nt, Human
ugauuuagcaggaagcugug

SEQ ID NO: 2703554 - RNA, 17 nt, Human
ugauuuagcaggaagcu

SEQ ID NO: 2703555 - RNA, 15 nt, Human
ugcagaagacaguau

SEQ ID NO: 2703556 - RNA, 14 nt, Human
ugcagaagacagua

SEQ ID NO: 2703557 - RNA, 18 nt, Human
agcccugucuccucucuc

SEQ ID NO: 2703558 - RNA, 11 nt, Human
agcccugucuc

SEQ ID NO: 2703559 - RNA, 20 nt, Human
ugcagcucuccccuucucug

SEQ ID NO: 2703560 - RNA, 22 nt, Human
ugcagcucuccccuucucugua

SEQ ID NO: 2703561 - RNA, 16 nt, Human
ugccccauucaacauc

SEQ ID NO: 2703562 - RNA, 22 nt, Human
ugccauuuaaagcuuauuaaaa

SEQ ID NO: 2703563 - RNA, 12 nt, Human
ugcccucuccug

SEQ ID NO: 2703564 - RNA, 15 nt, Human
ugcccucuccugggc

SEQ ID NO: 2703565 - RNA, 14 nt, Human
ugcccucuccuggg

SEQ ID NO: 2703566 - RNA, 13 nt, Human
ugcccucuccugg

SEQ ID NO: 2703567 - RNA, 20 nt, Human
ugcccucuccugggcagcug

SEQ ID NO: 2703568 - RNA, 18 nt, Human
ugcccucuccugggcagc

SEQ ID NO: 2703569 - RNA, 17 nt, Human
ugcccucuccugggcag

SEQ ID NO: 2703570 - RNA, 16 nt, Human
ugcccucuccugggca

SEQ ID NO: 2703571 - RNA, 23 nt, Human
ugcccucuccugggcagcugccu

SEQ ID NO: 2703572 - RNA, 22 nt, Human
ugcccucuccugggcagcugcc

SEQ ID NO: 2703573 - RNA, 23 nt, Human
agcucugcccauccugccccuga

SEQ ID NO: 2703574 - RNA, 18 nt, Human
agcugcccucuccugggc

SEQ ID NO: 2703575 - RNA, 17 nt, Human
agcugcccucuccuggg

SEQ ID NO: 2703576 - RNA, 20 nt, Human
agcugcccucuccugggcag

SEQ ID NO: 2703577 - RNA, 19 nt, Human
agcugcccucuccugggca

SEQ ID NO: 2703578 - RNA, 21 nt, Human
agcugcccucuccugggcagc

SEQ ID NO: 2703579 - RNA, 19 nt, Human
ugcccuguuaaaagaugaa

SEQ ID NO: 2703580 - RNA, 15 nt, Human
ugccucaccccuugc

SEQ ID NO: 2703581 - RNA, 11 nt, Human
ugccuccccuc

SEQ ID NO: 2703582 - RNA, 15 nt, Human
ugccuccccuccucu

SEQ ID NO: 2703583 - RNA, 14 nt, Human
ugccuccccuccuc

SEQ ID NO: 2703584 - RNA, 13 nt, Human
ugccuccccuccu

SEQ ID NO: 2703585 - RNA, 12 nt, Human
ugccuccccucc

SEQ ID NO: 2703586 - RNA, 16 nt, Human
ugccuccccuccucug

SEQ ID NO: 2703587 - RNA, 18 nt, Human
ugccucagaaaacaagga

SEQ ID NO: 2703588 - RNA, 19 nt, Human
uguuugcuaagcauuccaa

SEQ ID NO: 2703589 - RNA, 15 nt, Human
uguuugcuaagcauu

SEQ ID NO: 2703590 - RNA, 20 nt, Human
uguuuuauaauuuugugaag

SEQ ID NO: 2703591 - RNA, 13 nt, Human
uguuuuauaauuu

SEQ ID NO: 2703592 - RNA, 14 nt, Human
uguuuuaggagcau

SEQ ID NO: 2703593 - RNA, 21 nt, Human
aguugauaugccuuuucccaa

SEQ ID NO: 2703594 - RNA, 14 nt, Human
aguucugaagaaga

SEQ ID NO: 2703595 - RNA, 13 nt, Human
aguucugaagaag

SEQ ID NO: 2703596 - RNA, 15 nt, Human
aguucugaagaagau

SEQ ID NO: 2703597 - RNA, 16 nt, Human
aguuugguuucuagca

SEQ ID NO: 2703598 - RNA, 20 nt, Human
uuaaaaaugguuuaaauggu

SEQ ID NO: 2703599 - RNA, 22 nt, Human
aguugcauagguuuaauaauuu

SEQ ID NO: 2703600 - RNA, 18 nt, Human
uuaaaaaagaaacauuug

SEQ ID NO: 2703601 - RNA, 15 nt, Human
uuaaaaaagaaacau

SEQ ID NO: 2703602 - RNA, 20 nt, Human
aguuauuauauuuacaaaug

SEQ ID NO: 2703603 - RNA, 19 nt, Human
aguuauggcuauaggugcu

SEQ ID NO: 2703604 - RNA, 19 nt, Human
aguucagagcugcccucuc

SEQ ID NO: 2703605 - RNA, 18 nt, Human
aguucagagcugcccucu

SEQ ID NO: 2703606 - RNA, 17 nt, Human
aguucagagcugcccuc

SEQ ID NO: 2703607 - RNA, 16 nt, Human
aguucagagcugcccu

SEQ ID NO: 2703608 - RNA, 15 nt, Human
aguucagagcugccc

SEQ ID NO: 2703609 - RNA, 14 nt, Human
aguucagagcugcc

SEQ ID NO: 2703610 - RNA, 20 nt, Human
aguucggugagcuacaaaug

SEQ ID NO: 2703611 - RNA, 21 nt, Human
auacaguucggugagcuacaa

SEQ ID NO: 2703612 - RNA, 20 nt, Human
auacaucccuuaccugggaa

SEQ ID NO: 2703613 - RNA, 22 nt, Human
auaccacaggaaccacaagacu

SEQ ID NO: 2703614 - RNA, 22 nt, Human
auaauuuuuauauuugaaauau

SEQ ID NO: 2703615 - RNA, 21 nt, Human
auaauuuuuauauuugaaaua

SEQ ID NO: 2703616 - RNA, 22 nt, Human
auacaaaaaaaaaaaaaaauua

SEQ ID NO: 2703617 - RNA, 20 nt, Human
auaauuuugugaagcaaaau

SEQ ID NO: 2703618 - RNA, 15 nt, Human
auaauuuugugaagc

SEQ ID NO: 2703619 - RNA, 14 nt, Human
auaauuuugugaag

SEQ ID NO: 2703620 - RNA, 13 nt, Human
auaauuuugugaa

SEQ ID NO: 2703621 - RNA, 19 nt, Human
auaauuuuuauauuugaaa

SEQ ID NO: 2703622 - RNA, 16 nt, Human
auaauuuuuauauuug

SEQ ID NO: 2703623 - RNA, 14 nt, Human
auaauuuuuauauu

SEQ ID NO: 2703624 - RNA, 18 nt, Human
uuauauaagcuuguauuc

SEQ ID NO: 2703625 - RNA, 21 nt, Human
uuagccguggugauuuagcag

SEQ ID NO: 2703626 - RNA, 15 nt, Human
auaaacucauuucua

SEQ ID NO: 2703627 - RNA, 12 nt, Human
aguuuucugaga

SEQ ID NO: 2703628 - RNA, 13 nt, Human
aguuuucugagaa

SEQ ID NO: 2703629 - RNA, 14 nt, Human
aguuuucugagaaa

SEQ ID NO: 2703630 - RNA, 17 nt, Human
aguuuucugagaaagac

SEQ ID NO: 2703631 - RNA, 19 nt, Human
auaaaugugccuucauuuu

SEQ ID NO: 2703632 - RNA, 12 nt, Human
auaacuggaaac

SEQ ID NO: 2703633 - RNA, 21 nt, Human
auaaucuuucacaggggacag

SEQ ID NO: 2703634 - RNA, 14 nt, Human
auaaugaauacuuu

SEQ ID NO: 2703635 - RNA, 18 nt, Human
uuagcaggaagcugugag

SEQ ID NO: 2703636 - RNA, 22 nt, Human
uuagaugcaguucugaagaaga

SEQ ID NO: 2703637 - RNA, 23 nt, Human
uuagaugcaguucugaagaagau

SEQ ID NO: 2703638 - RNA, 20 nt, Human
ugucagcuccccucggagaa

SEQ ID NO: 2703639 - RNA, 21 nt, Human
ugucagcuccccucggagaag

SEQ ID NO: 2703640 - RNA, 23 nt, Human
ugucagcuccccucggagaagag

SEQ ID NO: 2703641 - RNA, 16 nt, Human
aguauuguccaggucu

SEQ ID NO: 2703642 - RNA, 15 nt, Human
aguauuguccagguc

SEQ ID NO: 2703643 - RNA, 20 nt, Human
agucacauuccaagccucau

SEQ ID NO: 2703644 - RNA, 21 nt, Human
aguauguuagugcaaauuguc

SEQ ID NO: 2703645 - RNA, 18 nt, Human
aguauguuagugcaaauu

SEQ ID NO: 2703646 - RNA, 21 nt, Human
aguauuagaauaccacaggaa

SEQ ID NO: 2703647 - RNA, 14 nt, Human
ugucuuaauuaaaa

SEQ ID NO: 2703648 - RNA, 15 nt, Human
ugucuccucucucug

SEQ ID NO: 2703649 - RNA, 17 nt, Human
ugucucuacuaaaaaua

SEQ ID NO: 2703650 - RNA, 14 nt, Human
ugucuucacaacag

SEQ ID NO: 2703651 - RNA, 16 nt, Human
agugagccgagauugu

SEQ ID NO: 2703652 - RNA, 21 nt, Human
agugagcagucaggaaagaga

SEQ ID NO: 2703653 - RNA, 20 nt, Human
agugaaacucguuaauuugu

SEQ ID NO: 2703654 - RNA, 22 nt, Human
agugaaagaggcagcuugaaac

SEQ ID NO: 2703655 - RNA, 14 nt, Human
agugagacagcucu

SEQ ID NO: 2703656 - RNA, 16 nt, Human
agugaaagaggcagcu

SEQ ID NO: 2703657 - RNA, 17 nt, Human
agugaaagaaaauaaca

SEQ ID NO: 2703658 - RNA, 14 nt, Human
ugugaagcaaaauu

SEQ ID NO: 2703659 - RNA, 22 nt, Human
ugugagaugcuagaacucccuu

SEQ ID NO: 2703660 - RNA, 15 nt, Human
aggucagugcaaaua

SEQ ID NO: 2703661 - RNA, 20 nt, Human
aggguuuauguuuaggaugu

SEQ ID NO: 2703662 - RNA, 22 nt, Human
uggucugugagaugcuagaacu

SEQ ID NO: 2703663 - RNA, 22 nt, Human
ugguccaugggccauaugaaaa

SEQ ID NO: 2703664 - RNA, 16 nt, Human
aggggaauugaggaca

SEQ ID NO: 2703665 - RNA, 21 nt, Human
agggugaugggaaagcauugu

SEQ ID NO: 2703666 - RNA, 22 nt, Human
agggugaugggaaagcauugua

SEQ ID NO: 2703667 - RNA, 23 nt, Human
uggugugaccacugcagaagaca

SEQ ID NO: 2703668 - RNA, 15 nt, Human
ugguuucuagcauga

SEQ ID NO: 2703669 - RNA, 18 nt, Human
uguaagaaaauaucacuu

SEQ ID NO: 2703670 - RNA, 17 nt, Human
uguaagaaaauaucacu

SEQ ID NO: 2703671 - RNA, 14 nt, Human
ugaaauaagccaga

SEQ ID NO: 2703672 - RNA, 20 nt, Human
agagcugcccucuccugggc

SEQ ID NO: 2703673 - RNA, 19 nt, Human
agagcugcccucuccuggg

SEQ ID NO: 2703674 - RNA, 18 nt, Human
agagcugcccucuccugg

SEQ ID NO: 2703675 - RNA, 17 nt, Human
agagcugcccucuccug

SEQ ID NO: 2703676 - RNA, 16 nt, Human
agagcugcccucuccu

SEQ ID NO: 2703677 - RNA, 13 nt, Human
ugaacaaauuuac

SEQ ID NO: 2703678 - RNA, 22 nt, Human
ugaacccauauuuguacaccaa

SEQ ID NO: 2703679 - RNA, 18 nt, Human
ugaacccgggaggcagag

SEQ ID NO: 2703680 - RNA, 22 nt, Human
ugaagaagcaccaaucaugaau

SEQ ID NO: 2703681 - RNA, 17 nt, Human
ugaaguacucauacaug

SEQ ID NO: 2703682 - RNA, 20 nt, Human
ugaagauuuaccacuugugu

SEQ ID NO: 2703683 - RNA, 17 nt, Human
ugaagauuuaccacuug

SEQ ID NO: 2703684 - RNA, 18 nt, Human
agagcuguucacagccag

SEQ ID NO: 2703685 - RNA, 23 nt, Human
agacuggcacaguuuucugagaa

SEQ ID NO: 2703686 - RNA, 20 nt, Human
agacuggcacaguuuucuga

SEQ ID NO: 2703687 - RNA, 21 nt, Human
agacuggcacaguuuucugag

SEQ ID NO: 2703688 - RNA, 22 nt, Human
agacuccaaagaaauguaaggg

SEQ ID NO: 2703689 - RNA, 14 nt, Human
agagacagaaagca

SEQ ID NO: 2703690 - RNA, 16 nt, Human
agagacacacugaaga

SEQ ID NO: 2703691 - RNA, 17 nt, Human
ugaaagaggaaugaagu

SEQ ID NO: 2703692 - RNA, 18 nt, Human
ugaaagaggaaugaagua

SEQ ID NO: 2703693 - RNA, 17 nt, Human
ugaaaauauuuguauca

SEQ ID NO: 2703694 - RNA, 20 nt, Human
ugaaaaucuuauaauuuaaa

SEQ ID NO: 2703695 - RNA, 21 nt, Human
ugaaaauauuuguaucacaaa

SEQ ID NO: 2703696 - RNA, 22 nt, Human
ugaaaauauuuguaucacaaau

SEQ ID NO: 2703697 - RNA, 13 nt, Human
ugaaagaaaauaa

SEQ ID NO: 2703698 - RNA, 24 nt, Human
ugagaugugaacacaucagcuugc

SEQ ID NO: 2703699 - RNA, 18 nt, Human
ugagaugugaacacauca

SEQ ID NO: 2703700 - RNA, 19 nt, Human
ugagaugugaacacaucag

SEQ ID NO: 2703701 - RNA, 13 nt, Human
ugagaugugaaca

SEQ ID NO: 2703702 - RNA, 23 nt, Human
ugagagcaguuugguuucuagca

SEQ ID NO: 2703703 - RNA, 21 nt, Human
ugagagcaguuugguuucuag

SEQ ID NO: 2703704 - RNA, 22 nt, Human
ugagagacacacugaagaagca

SEQ ID NO: 2703705 - RNA, 21 nt, Human
ugagagacacacugaagaagc

SEQ ID NO: 2703706 - RNA, 20 nt, Human
ugagagacacacugaagaag

SEQ ID NO: 2703707 - RNA, 19 nt, Human
ugagagacacacugaagaa

SEQ ID NO: 2703708 - RNA, 17 nt, Human
ugagagacacacugaag

SEQ ID NO: 2703709 - RNA, 16 nt, Human
ugagagacacacugaa

SEQ ID NO: 2703710 - RNA, 12 nt, Human
ugagacagcucu

SEQ ID NO: 2703711 - RNA, 20 nt, Human
ugagacucugucucagucca

SEQ ID NO: 2703712 - RNA, 14 nt, Human
agauuuuccugaaa

SEQ ID NO: 2703713 - RNA, 15 nt, Human
agauuuuccugaaaa

SEQ ID NO: 2703714 - RNA, 16 nt, Human
agauuuuccugaaaac

SEQ ID NO: 2703715 - RNA, 20 nt, Human
agcaagggugaugggaaagc

SEQ ID NO: 2703716 - RNA, 22 nt, Human
agcaagggugaugggaaagcau

SEQ ID NO: 2703717 - RNA, 16 nt, Human
agcaagggugauggga

SEQ ID NO: 2703718 - RNA, 21 nt, Human
agauugugccccugcacucca

SEQ ID NO: 2703719 - RNA, 22 nt, Human
agaugugaacacaucagcuugc

SEQ ID NO: 2703720 - RNA, 17 nt, Human
agaugugaacacaucag

SEQ ID NO: 2703721 - RNA, 22 nt, Human
agauguauguacuucaugcugu

SEQ ID NO: 2703722 - RNA, 15 nt, Human
ugacacuuaaaaaug

SEQ ID NO: 2703723 - RNA, 16 nt, Human
agaugcacaugagcug

SEQ ID NO: 2703724 - RNA, 20 nt, Human
agaugcaguucugaagaaga

SEQ ID NO: 2703725 - RNA, 13 nt, Human
agaugcacaugag

SEQ ID NO: 2703726 - RNA, 19 nt, Human
agaugcuagaacucccuuu

SEQ ID NO: 2703727 - RNA, 21 nt, Human
agaugcaguucugaagaagau

SEQ ID NO: 2703728 - RNA, 21 nt, Human
agaugcuagaacucccuuuca

SEQ ID NO: 2703729 - RNA, 14 nt, Human
agauccuggaaauc

SEQ ID NO: 2703730 - RNA, 13 nt, Human
agauccuggaaau

SEQ ID NO: 2703731 - RNA, 23 nt, Human
ucugcuugccaucccucccucca

SEQ ID NO: 2703732 - RNA, 20 nt, Human
ucugcuugccaucccucccu

SEQ ID NO: 2703733 - RNA, 17 nt, Human
ucugcuugccaucccuc

SEQ ID NO: 2703734 - RNA, 16 nt, Human
ucugcuugccaucccu

SEQ ID NO: 2703735 - RNA, 18 nt, Human
agaagaugguaccaccag

SEQ ID NO: 2703736 - RNA, 14 nt, Human
agaagaacugaaau

SEQ ID NO: 2703737 - RNA, 13 nt, Human
agaagaacugaaa

SEQ ID NO: 2703738 - RNA, 18 nt, Human
ucugcagauaaacaguag

SEQ ID NO: 2703739 - RNA, 15 nt, Human
ucugcagauaaacag

SEQ ID NO: 2703740 - RNA, 15 nt, Human
agacacacaugaagu

SEQ ID NO: 2703741 - RNA, 12 nt, Human
agacacacauga

SEQ ID NO: 2703742 - RNA, 22 nt, Human
agacagagccccacccucagau

SEQ ID NO: 2703743 - RNA, 24 nt, Human
agacagagccccacccucagaugc

SEQ ID NO: 2703744 - RNA, 14 nt, Human
ucugugagaugcua

SEQ ID NO: 2703745 - RNA, 23 nt, Human
ucugugagaugcuagaacucccu

SEQ ID NO: 2703746 - RNA, 17 nt, Human
ucugugagaugcuagaa

SEQ ID NO: 2703747 - RNA, 22 nt, Human
ucugugagaugcuagaacuccc

SEQ ID NO: 2703748 - RNA, 15 nt, Human
agaauuaacacauga

SEQ ID NO: 2703749 - RNA, 23 nt, Human
agaauuaacacaugauccugcaa

SEQ ID NO: 2703750 - RNA, 14 nt, Human
ucuaaguaaaacca

SEQ ID NO: 2703751 - RNA, 15 nt, Human
ucuaaguaaaaccac

SEQ ID NO: 2703752 - RNA, 19 nt, Human
ucuaaguaaaaccacagca

SEQ ID NO: 2703753 - RNA, 20 nt, Human
ucuaaguaaaaccacagcag

SEQ ID NO: 2703754 - RNA, 13 nt, Human
uccugggcagcug

SEQ ID NO: 2703755 - RNA, 12 nt, Human
uccugggcagcu

SEQ ID NO: 2703756 - RNA, 17 nt, Human
ucuaggaaauauuuauu

SEQ ID NO: 2703757 - RNA, 16 nt, Human
ucuaggaaauauuuau

SEQ ID NO: 2703758 - RNA, 15 nt, Human
acuugucaauaaaau

SEQ ID NO: 2703759 - RNA, 15 nt, Human
ucucauuuccaagca

SEQ ID NO: 2703760 - RNA, 14 nt, Human
ucucaggaaaucaa

SEQ ID NO: 2703761 - RNA, 21 nt, Human
ucucaggaaaucaaauaugca

SEQ ID NO: 2703762 - RNA, 23 nt, Human
ucucaggaaaucaaauaugcaaa

SEQ ID NO: 2703763 - RNA, 17 nt, Human
acuauauuguuugcuaa

SEQ ID NO: 2703764 - RNA, 22 nt, Human
acuauauuguuugcuaagcauu

SEQ ID NO: 2703765 - RNA, 15 nt, Human
acuaucucauuucca

SEQ ID NO: 2703766 - RNA, 17 nt, Human
acuaucucauuuccaag

SEQ ID NO: 2703767 - RNA, 16 nt, Human
acuaucucauuuccaa

SEQ ID NO: 2703768 - RNA, 15 nt, Human
acuaauuuuaaaaug

SEQ ID NO: 2703769 - RNA, 11 nt, Human
uccauccugag

SEQ ID NO: 2703770 - RNA, 12 nt, Human
uccauccugagg

SEQ ID NO: 2703771 - RNA, 15 nt, Human
uccauccugaggcuc

SEQ ID NO: 2703772 - RNA, 18 nt, Human
uccagugagacagcucug

SEQ ID NO: 2703773 - RNA, 11 nt, Human
acgcucucugg

SEQ ID NO: 2703774 - RNA, 14 nt, Human
acgcucucuggccu

SEQ ID NO: 2703775 - RNA, 20 nt, Human
accuuuuggucuggagggaa

SEQ ID NO: 2703776 - RNA, 22 nt, Human
uccacugguucuucuuggucuc

SEQ ID NO: 2703777 - RNA, 19 nt, Human
accuugaaaacuuuaugcu

SEQ ID NO: 2703778 - RNA, 12 nt, Human
acugaagaagca

SEQ ID NO: 2703779 - RNA, 16 nt, Human
acugacucuuaagaag

SEQ ID NO: 2703780 - RNA, 15 nt, Human
acugacucuuaagaa

SEQ ID NO: 2703781 - RNA, 14 nt, Human
acugacucuuaaga

SEQ ID NO: 2703782 - RNA, 13 nt, Human
acugacucuuaag

SEQ ID NO: 2703783 - RNA, 20 nt, Human
acugacucuuaagaagacug

SEQ ID NO: 2703784 - RNA, 18 nt, Human
acugacucuuaagaagac

SEQ ID NO: 2703785 - RNA, 17 nt, Human
acugacucuuaagaaga

SEQ ID NO: 2703786 - RNA, 13 nt, Human
acugacuucuaag

SEQ ID NO: 2703787 - RNA, 15 nt, Human
acugacuucuaagua

SEQ ID NO: 2703788 - RNA, 16 nt, Human
acugacuucuaaguaa

SEQ ID NO: 2703789 - RNA, 22 nt, Human
acugacuucuaaguaaaaccac

SEQ ID NO: 2703790 - RNA, 18 nt, Human
acugagagugaacaaauu

SEQ ID NO: 2703791 - RNA, 22 nt, Human
acugagaugugaacacaucagc

SEQ ID NO: 2703792 - RNA, 17 nt, Human
acugagaugugaacaca

SEQ ID NO: 2703793 - RNA, 16 nt, Human
uccuggaaaucagggu

SEQ ID NO: 2703794 - RNA, 21 nt, Human
acucuuaagaagacugcauua

SEQ ID NO: 2703795 - RNA, 19 nt, Human
acuccagugagacagcucu

SEQ ID NO: 2703796 - RNA, 14 nt, Human
ucagcccucagaau

SEQ ID NO: 2703797 - RNA, 15 nt, Human
acccgggaggcagag

SEQ ID NO: 2703798 - RNA, 17 nt, Human
acccgggaggcagaggu

SEQ ID NO: 2703799 - RNA, 16 nt, Human
accuagggugauauua

SEQ ID NO: 2703800 - RNA, 15 nt, Human
ucaguuuuugugaaa

SEQ ID NO: 2703801 - RNA, 17 nt, Human
ucaguuuuugugaaaag

SEQ ID NO: 2703802 - RNA, 14 nt, Human
acaugggacauuug

SEQ ID NO: 2703803 - RNA, 11 nt, Human
acaugggacau

SEQ ID NO: 2703804 - RNA, 20 nt, Human
acaugggacauuugcucaug

SEQ ID NO: 2703805 - RNA, 15 nt, Human
acaugggacauuugc

SEQ ID NO: 2703806 - RNA, 21 nt, Human
acaugggacauuugcucaugg

SEQ ID NO: 2703807 - RNA, 16 nt, Human
acaugagguacugaga

SEQ ID NO: 2703808 - RNA, 20 nt, Human
acaugagguacugagaguga

SEQ ID NO: 2703809 - RNA, 16 nt, Human
acaugaaguccaagca

SEQ ID NO: 2703810 - RNA, 23 nt, Human
acaugagguacugagagugaaca

SEQ ID NO: 2703811 - RNA, 15 nt, Human
ucaaauugugugaaa

SEQ ID NO: 2703812 - RNA, 18 nt, Human
ucaaauugugugaaaggu

SEQ ID NO: 2703813 - RNA, 23 nt, Human
accaaaaaucucaauauuucaga

SEQ ID NO: 2703814 - RNA, 19 nt, Human
ucaauauuucagauaauca

SEQ ID NO: 2703815 - RNA, 15 nt, Human
ucaauauuucagaua

SEQ ID NO: 2703816 - RNA, 23 nt, Human
ucaaugaaugaaugaauggcuaa

SEQ ID NO: 2703817 - RNA, 22 nt, Human
ucaauaucuuuuuuuuaauaaa

SEQ ID NO: 2703818 - RNA, 16 nt, Human
ucaauucuugccaaau

SEQ ID NO: 2703819 - RNA, 21 nt, Human
ucacaacagauuauuaccuua

SEQ ID NO: 2703820 - RNA, 14 nt, Human
ucaccucauggaau

SEQ ID NO: 2703821 - RNA, 13 nt, Human
ucaccucauggaa

SEQ ID NO: 2703822 - RNA, 12 nt, Human
ucaccucaugga

SEQ ID NO: 2703823 - RNA, 23 nt, Human
ucacuugaacccgggaggcagag

SEQ ID NO: 2703824 - RNA, 14 nt, Human
accagucugacugu

SEQ ID NO: 2703825 - RNA, 20 nt, Human
uaacgauaaaagacagugaa

SEQ ID NO: 2703826 - RNA, 18 nt, Human
uaagaagugaaaaucuac

SEQ ID NO: 2703827 - RNA, 16 nt, Human
aauagucaaauugugu

SEQ ID NO: 2703828 - RNA, 22 nt, Human
aauaucacuugucaauaaaauc

SEQ ID NO: 2703829 - RNA, 20 nt, Human
aauaucacuugucaauaaaa

SEQ ID NO: 2703830 - RNA, 21 nt, Human
aaucaggguuaguauugucca

SEQ ID NO: 2703831 - RNA, 16 nt, Human
aaucaggguuaguauu

SEQ ID NO: 2703832 - RNA, 22 nt, Human
aaucaggguuaguauuguccag

SEQ ID NO: 2703833 - RNA, 24 nt, Human
aauaugccccauucaacaucuagu

SEQ ID NO: 2703834 - RNA, 21 nt, Human
aauaugccccauucaacaucu

SEQ ID NO: 2703835 - RNA, 19 nt, Human
aauauuuauuuuaauaaug

SEQ ID NO: 2703836 - RNA, 18 nt, Human
aauauuuauuuuaauaau

SEQ ID NO: 2703837 - RNA, 22 nt, Human
aaugaauggcuaagcaaaaugu

SEQ ID NO: 2703838 - RNA, 13 nt, Human
uaaucuuucacag

SEQ ID NO: 2703839 - RNA, 15 nt, Human
aaucaugaauuaguu

SEQ ID NO: 2703840 - RNA, 12 nt, Human
aaucaugaauua

SEQ ID NO: 2703841 - RNA, 12 nt, Human
uaauaaacucau

SEQ ID NO: 2703842 - RNA, 16 nt, Human
uaagcuuguauuccuu

SEQ ID NO: 2703843 - RNA, 19 nt, Human
uaaguaaugauaacuggaa

SEQ ID NO: 2703844 - RNA, 19 nt, Human
aaucuacacuccagugaga

SEQ ID NO: 2703845 - RNA, 19 nt, Human
aaucuuauaauuuaaaaua

SEQ ID NO: 2703846 - RNA, 23 nt, Human
aaucgcuccaccuugcagcucuc

SEQ ID NO: 2703847 - RNA, 18 nt, Human
uaccaccagucugacugu

SEQ ID NO: 2703848 - RNA, 20 nt, Human
uacaucccuuaccugggaaa

SEQ ID NO: 2703849 - RNA, 18 nt, Human
uacacuaagagagaauga

SEQ ID NO: 2703850 - RNA, 14 nt, Human
uacacuaagagaga

SEQ ID NO: 2703851 - RNA, 16 nt, Human
aaugcuguauuuuaaa

SEQ ID NO: 2703852 - RNA, 18 nt, Human
aauuccaagugauugaaa

SEQ ID NO: 2703853 - RNA, 22 nt, Human
aauuccacuuauaggaauugac

SEQ ID NO: 2703854 - RNA, 14 nt, Human
uacuguaagaaaau

SEQ ID NO: 2703855 - RNA, 21 nt, Human
aauugacccacaagaaaugaa

SEQ ID NO: 2703856 - RNA, 22 nt, Human
aauugacccacaagaaaugaaa

SEQ ID NO: 2703857 - RNA, 16 nt, Human
uauuaaaacucauuuu

SEQ ID NO: 2703858 - RNA, 21 nt, Human
uauguuuucaggcuagaugua

SEQ ID NO: 2703859 - RNA, 22 nt, Human
acaggaaccacaagacugcaca

SEQ ID NO: 2703860 - RNA, 17 nt, Human
acaggaaguagaggagg

SEQ ID NO: 2703861 - RNA, 23 nt, Human
uauucaaacagucucaggaaauc

SEQ ID NO: 2703862 - RNA, 15 nt, Human
uauucaaacagucuc

SEQ ID NO: 2703863 - RNA, 14 nt, Human
uauuacuguaagaa

SEQ ID NO: 2703864 - RNA, 16 nt, Human
acagucaccucaugga

SEQ ID NO: 2703865 - RNA, 18 nt, Human
acagucaccucauggaau

SEQ ID NO: 2703866 - RNA, 17 nt, Human
acagucaccucauggaa

SEQ ID NO: 2703867 - RNA, 20 nt, Human
acagggaggacgcucucugg

SEQ ID NO: 2703868 - RNA, 21 nt, Human
acagggaggacgcucucuggc

SEQ ID NO: 2703869 - RNA, 20 nt, Human
uaugauuaaguaaugauaac

SEQ ID NO: 2703870 - RNA, 16 nt, Human
uaugauuaaguaauga

SEQ ID NO: 2703871 - RNA, 21 nt, Human
uaugauuaaguaaugauaacu

SEQ ID NO: 2703872 - RNA, 15 nt, Human
uaugccccauucaac

SEQ ID NO: 2703873 - RNA, 19 nt, Human
uaugccccauucaacaucu

SEQ ID NO: 2703874 - RNA, 16 nt, Human
acagccucuuagaugc

SEQ ID NO: 2703875 - RNA, 19 nt, Human
uauaauuuugugaagcaaa

SEQ ID NO: 2703876 - RNA, 15 nt, Human
uauauuguuugcuaa

SEQ ID NO: 2703877 - RNA, 17 nt, Human
uaucucaaaacugcacu

SEQ ID NO: 2703878 - RNA, 15 nt, Human
acacaucagcuugcc

SEQ ID NO: 2703879 - RNA, 15 nt, Human
acacaugaaguccaa

SEQ ID NO: 2703880 - RNA, 18 nt, Human
acacaugauccugcaauu

SEQ ID NO: 2703881 - RNA, 13 nt, Human
acacuaagagaga

SEQ ID NO: 2703882 - RNA, 14 nt, Human
acacuaagagagaa

SEQ ID NO: 2703883 - RNA, 19 nt, Human
acacucaaaucaagaaacu

SEQ ID NO: 2703884 - RNA, 22 nt, Human
acaaugcuguauuuuaaaagaa

SEQ ID NO: 2703885 - RNA, 18 nt, Human
acaaugcuguauuuuaaa

SEQ ID NO: 2703886 - RNA, 15 nt, Human
acacacucaaaucaa

SEQ ID NO: 2703887 - RNA, 23 nt, Human
uaguguuggagaagaacugaaau

SEQ ID NO: 2703888 - RNA, 22 nt, Human
uagugaaacucguuaauuugua

SEQ ID NO: 2703889 - RNA, 18 nt, Human
acaaauuuacagagacag

SEQ ID NO: 2703890 - RNA, 19 nt, Human
acaaauuuacagagacaga

SEQ ID NO: 2703891 - RNA, 20 nt, Human
acaagacccaaaaggcagaa

SEQ ID NO: 2703892 - RNA, 15 nt, Human
uagaugcaguucuga

SEQ ID NO: 2703893 - RNA, 22 nt, Human
uagaggagaaacuggaacucuc

SEQ ID NO: 2703894 - RNA, 19 nt, Human
uagaggagaaacuggaacu

SEQ ID NO: 2703895 - RNA, 18 nt, Human
acaaaaggauaaugaaua

SEQ ID NO: 2703896 - RNA, 14 nt, Human
acaagacugcacau

SEQ ID NO: 2703897 - RNA, 13 nt, Human
acaagacugcaca

SEQ ID NO: 2703898 - RNA, 23 nt, Human
acaauacaucccuuaccugggaa

SEQ ID NO: 2703899 - RNA, 12 nt, Human
uaggagcaugag

SEQ ID NO: 2703900 - RNA, 19 nt, Human
uaggaaauauuuauuuuaa

SEQ ID NO: 2703901 - RNA, 18 nt, Human
uaggaaauauuuauuuua

SEQ ID NO: 2703902 - RNA, 14 nt, Human
uagggagagaagau

SEQ ID NO: 2703903 - RNA, 15 nt, Human
uagggagagaagaua

SEQ ID NO: 2703904 - RNA, 24 nt, Human
aacucauuuuuguuuucauuaucu

SEQ ID NO: 2703905 - RNA, 21 nt, Human
aacucauuuuuguuuucauua

SEQ ID NO: 2703906 - RNA, 14 nt, Human
gucuuaauuaaaag

SEQ ID NO: 2703907 - RNA, 19 nt, Human
gucuuauauauuguagaua

SEQ ID NO: 2703908 - RNA, 11 nt, Human
aagaaacauuu

SEQ ID NO: 2703909 - RNA, 14 nt, Human
aagaaagaaaauca

SEQ ID NO: 2703910 - RNA, 13 nt, Human
aagaaagaaaauc

SEQ ID NO: 2703911 - RNA, 16 nt, Human
aagaaagaaaaucagg

SEQ ID NO: 2703912 - RNA, 21 nt, Human
gugcuacaaaaacacagcaag

SEQ ID NO: 2703913 - RNA, 22 nt, Human
gugcuacaaaaacacagcaagg

SEQ ID NO: 2703914 - RNA, 18 nt, Human
gugcacgcacacugucug

SEQ ID NO: 2703915 - RNA, 17 nt, Human
gugauuaccagggacug

SEQ ID NO: 2703916 - RNA, 11 nt, Human
gugauuaccag

SEQ ID NO: 2703917 - RNA, 16 nt, Human
gugauuaccagggacu

SEQ ID NO: 2703918 - RNA, 23 nt, Human
aacuuccuuggacucauuuuaaa

SEQ ID NO: 2703919 - RNA, 22 nt, Human
aacuuccuuggacucauuuuaa

SEQ ID NO: 2703920 - RNA, 18 nt, Human
aacuucagcgguuuauau

SEQ ID NO: 2703921 - RNA, 13 nt, Human
aacuucagacaua

SEQ ID NO: 2703922 - RNA, 22 nt, Human
guccaugaagauguagaggaga

SEQ ID NO: 2703923 - RNA, 23 nt, Human
guccaugaagauguagaggagaa

SEQ ID NO: 2703924 - RNA, 17 nt, Human
aacacaacuauauuguu

SEQ ID NO: 2703925 - RNA, 20 nt, Human
aacacagcaagggugauggg

SEQ ID NO: 2703926 - RNA, 18 nt, Human
aacacagcaagggugaug

SEQ ID NO: 2703927 - RNA, 12 nt, Human
aacauauauaac

SEQ ID NO: 2703928 - RNA, 14 nt, Human
aacagucucaggaa

SEQ ID NO: 2703929 - RNA, 14 nt, Human
aacauaaaauacaa

SEQ ID NO: 2703930 - RNA, 13 nt, Human
aacagucucagga

SEQ ID NO: 2703931 - RNA, 21 nt, Human
gucaauuuuguuauguauauu

SEQ ID NO: 2703932 - RNA, 13 nt, Human
gucacaggaagua

SEQ ID NO: 2703933 - RNA, 15 nt, Human
gucacaggaaguaga

SEQ ID NO: 2703934 - RNA, 20 nt, Human
gucacaggaaguagaggagg

SEQ ID NO: 2703935 - RNA, 13 nt, Human
gucaggaaagaga

SEQ ID NO: 2703936 - RNA, 14 nt, Human
gucaggaaagagaa

SEQ ID NO: 2703937 - RNA, 17 nt, Human
aaauuccaagugauuga

SEQ ID NO: 2703938 - RNA, 17 nt, Human
aaauuguauuacaaauc

SEQ ID NO: 2703939 - RNA, 18 nt, Human
aaaugugccuucauuuuu

SEQ ID NO: 2703940 - RNA, 15 nt, Human
aaaugugcuuuuaaa

SEQ ID NO: 2703941 - RNA, 18 nt, Human
aagcuuauuaaaacucau

SEQ ID NO: 2703942 - RNA, 18 nt, Human
guucccuugaugaagaag

SEQ ID NO: 2703943 - RNA, 21 nt, Human
aagccuuggggcugaugcagu

SEQ ID NO: 2703944 - RNA, 17 nt, Human
guuauuauauuuacaaa

SEQ ID NO: 2703945 - RNA, 19 nt, Human
guuauuauauuuacaaaug

SEQ ID NO: 2703946 - RNA, 15 nt, Human
aagauagcagggcau

SEQ ID NO: 2703947 - RNA, 14 nt, Human
aagauagcagggca

SEQ ID NO: 2703948 - RNA, 22 nt, Human
gugucuuaauuaaaagaauauu

SEQ ID NO: 2703949 - RNA, 17 nt, Human
aagcaacccaaauguuc

SEQ ID NO: 2703950 - RNA, 18 nt, Human
aagcauuguaaaugugcu

SEQ ID NO: 2703951 - RNA, 19 nt, Human
aagcacugacuucuaagua

SEQ ID NO: 2703952 - RNA, 20 nt, Human
aagcacugacuucuaaguaa

SEQ ID NO: 2703953 - RNA, 19 nt, Human
aagcauuguaaaugugcuu

SEQ ID NO: 2703954 - RNA, 16 nt, Human
aagcacugacuucuaa

SEQ ID NO: 2703955 - RNA, 17 nt, Human
aagcacugacuucuaag

SEQ ID NO: 2703956 - RNA, 16 nt, Human
aagcacuaaacaaaga

SEQ ID NO: 2703957 - RNA, 14 nt, Human
uaaaaccacagcag

SEQ ID NO: 2703958 - RNA, 15 nt, Human
uaaaaccacagcagu

SEQ ID NO: 2703959 - RNA, 21 nt, Human
uaaaaaaaaaccugagcccca

SEQ ID NO: 2703960 - RNA, 13 nt, Human
uaaaagaauauuu

SEQ ID NO: 2703961 - RNA, 21 nt, Human
uaaaauacacacucaaaucaa

SEQ ID NO: 2703962 - RNA, 22 nt, Human
uaaaauaauuuuuauauuugaa

SEQ ID NO: 2703963 - RNA, 9 nt, Human
uaaaauggu

SEQ ID NO: 2703964 - RNA, 19 nt, Human
aaguauguuagugcaaauu

SEQ ID NO: 2703965 - RNA, 18 nt, Human
aaguauguuagugcaaau

SEQ ID NO: 2703966 - RNA, 14 nt, Human
guuuaugauuccac

SEQ ID NO: 2703967 - RNA, 15 nt, Human
aagggcuguuauaau

SEQ ID NO: 2703968 - RNA, 17 nt, Human
aaggggaauugaggaca

SEQ ID NO: 2703969 - RNA, 17 nt, Human
aagggcuguuauaaucu

SEQ ID NO: 2703970 - RNA, 17 nt, Human
aaaacaaggaugaauua

SEQ ID NO: 2703971 - RNA, 12 nt, Human
aaaacacagcaa

SEQ ID NO: 2703972 - RNA, 13 nt, Human
aaaacacagcaag

SEQ ID NO: 2703973 - RNA, 18 nt, Human
aaaacacagcaaggguga

SEQ ID NO: 2703974 - RNA, 14 nt, Human
aaaacaaggaugaa

SEQ ID NO: 2703975 - RNA, 12 nt, Human
agcaugaagaca

SEQ ID NO: 2703976 - RNA, 19 nt, Human
agccagauuuuccugaaaa

SEQ ID NO: 2703977 - RNA, 15 nt, Human
agccagauuuuccug

SEQ ID NO: 2703978 - RNA, 19 nt, Human
agcaguucagagcugcccu

SEQ ID NO: 2703979 - RNA, 18 nt, Human
agcaguucagagcugccc

SEQ ID NO: 2703980 - RNA, 17 nt, Human
agcaguucagagcugcc

SEQ ID NO: 2703981 - RNA, 15 nt, Human
agcaguucagagcug

SEQ ID NO: 2703982 - RNA, 16 nt, Human
agcaguucagagcugc

SEQ ID NO: 2703983 - RNA, 23 nt, Human
agcaguugaaaagacuccaaaga

SEQ ID NO: 2703984 - RNA, 21 nt, Human
agcaguugaaaagacuccaaa

SEQ ID NO: 2703985 - RNA, 14 nt, Human
agauguagaggaga

SEQ ID NO: 2703986 - RNA, 21 nt, Human
agaugggagaaucacuugaac

SEQ ID NO: 2703987 - RNA, 19 nt, Human
agccccacccucagaugca

SEQ ID NO: 2703988 - RNA, 21 nt, Human
agccgggcgugguggugagug

SEQ ID NO: 2703989 - RNA, 21 nt, Human
agauaggucagugcaaauacu

SEQ ID NO: 2703990 - RNA, 17 nt, Human
agacugcauuauauuua

SEQ ID NO: 2703991 - RNA, 14 nt, Human
aggauguugaaaaa

SEQ ID NO: 2703992 - RNA, 17 nt, Human
aggauguugaaaaaguu

SEQ ID NO: 2703993 - RNA, 18 nt, Human
agcuucacuguaaaauaa

SEQ ID NO: 2703994 - RNA, 14 nt, Human
agcuguaugauucc

SEQ ID NO: 2703995 - RNA, 21 nt, Human
auguaagggaaacugccagca

SEQ ID NO: 2703996 - RNA, 22 nt, Human
auguaagggaaacugccagcaa

SEQ ID NO: 2703997 - RNA, 20 nt, Human
auguaagggaaacugccagc

SEQ ID NO: 2703998 - RNA, 22 nt, Human
aucuuauaauuuaaaauaugcu

SEQ ID NO: 2703999 - RNA, 17 nt, Human
aucagcugcugaaacaa

SEQ ID NO: 2704000 - RNA, 21 nt, Human
aguccaagcauuuagauguau

SEQ ID NO: 2704001 - RNA, 16 nt, Human
aguccaagcauuuaga

SEQ ID NO: 2704002 - RNA, 17 nt, Human
agucaaauugugugaaa

SEQ ID NO: 2704003 - RNA, 15 nt, Human
agucaaauuguguga

SEQ ID NO: 2704004 - RNA, 13 nt, Human
agucaaauugugu

SEQ ID NO: 2704005 - RNA, 18 nt, Human
agugauuaccagggacug

SEQ ID NO: 2704006 - RNA, 15 nt, Human
agugauuaccaggga

SEQ ID NO: 2704007 - RNA, 18 nt, Human
aguuguaccgcaauguga

SEQ ID NO: 2704008 - RNA, 19 nt, Human
aguuguaccgcaaugugac

SEQ ID NO: 2704009 - RNA, 19 nt, Human
auauuuauuacuguaagaa

SEQ ID NO: 2704010 - RNA, 14 nt, Human
auauuuauuacugu

SEQ ID NO: 2704011 - RNA, 18 nt, Human
auauuuauuuuaauaaug

SEQ ID NO: 2704012 - RNA, 23 nt, Human
auauuucagauaaucacaauaca

SEQ ID NO: 2704013 - RNA, 23 nt, Human
auaugcuucuguuuuauaauuuu

SEQ ID NO: 2704014 - RNA, 15 nt, Human
auaucaauuuaaaaa

SEQ ID NO: 2704015 - RNA, 18 nt, Human
auaucacuugucaauaaa

SEQ ID NO: 2704016 - RNA, 14 nt, Human
auaauuacuauguc

SEQ ID NO: 2704017 - RNA, 16 nt, Human
acuaagagagaaugag

SEQ ID NO: 2704018 - RNA, 15 nt, Human
acuaagagagaauga

SEQ ID NO: 2704019 - RNA, 16 nt, Human
acgugcacgcacacug

SEQ ID NO: 2704020 - RNA, 12 nt, Human
acucccuuucaa

SEQ ID NO: 2704021 - RNA, 13 nt, Human
acucccuuucaac

SEQ ID NO: 2704022 - RNA, 14 nt, Human
acuagcuauggugu

SEQ ID NO: 2704023 - RNA, 14 nt, Human
acucaaaucaagaa

SEQ ID NO: 2704024 - RNA, 12 nt, Human
acuggaacucuc

SEQ ID NO: 2704025 - RNA, 19 nt, Human
acuuguaaaggaauuuaaa

SEQ ID NO: 2704026 - RNA, 20 nt, Human
acuuguaaaggaauuuaaaa

SEQ ID NO: 2704027 - RNA, 14 nt, Human
acuuggucugugag

SEQ ID NO: 2704028 - RNA, 13 nt, Human
acuuggucuguga

SEQ ID NO: 2704029 - RNA, 15 nt, Human
acuuggucugugaga

SEQ ID NO: 2704030 - RNA, 18 nt, Human
acuuguaaaggaauuuaa

SEQ ID NO: 2704031 - RNA, 16 nt, Human
acccaaguccaagcau

SEQ ID NO: 2704032 - RNA, 15 nt, Human
acccacaagaaauga

SEQ ID NO: 2704033 - RNA, 14 nt, Human
acauuuguauaaaa

SEQ ID NO: 2704034 - RNA, 16 nt, Human
acauuugcucauggaa

SEQ ID NO: 2704035 - RNA, 18 nt, Human
acauuugcucauggaauu

SEQ ID NO: 2704036 - RNA, 13 nt, Human
acauguuacaaca

SEQ ID NO: 2704037 - RNA, 15 nt, Human
acagcaguugaaaag

SEQ ID NO: 2704038 - RNA, 18 nt, Human
acagcaguugaaaagacu

SEQ ID NO: 2704039 - RNA, 16 nt, Human
acagccagacuggcac

SEQ ID NO: 2704040 - RNA, 13 nt, Human
acagccagacugg

SEQ ID NO: 2704041 - RNA, 15 nt, Human
acagccagacuggca

SEQ ID NO: 2704042 - RNA, 20 nt, Human
acagcucugcauacucauua

SEQ ID NO: 2704043 - RNA, 13 nt, Human
acaacuauauugu

SEQ ID NO: 2704044 - RNA, 15 nt, Human
aacacgagcaggcua

SEQ ID NO: 2704045 - RNA, 23 nt, Human
aacugacacaugcugaacaucac

SEQ ID NO: 2704046 - RNA, 13 nt, Human
aagaaauguaagg

SEQ ID NO: 2704047 - RNA, 14 nt, Human
aagaaauguaaggg

SEQ ID NO: 2704048 - RNA, 16 nt, Human
aaacugacucuuaaga

SEQ ID NO: 2704049 - RNA, 14 nt, Human
aaacugccagcaac

SEQ ID NO: 2704050 - RNA, 15 nt, Human
aaacugccagcaacg

SEQ ID NO: 2704051 - RNA, 17 nt, Human
aaacugacucuuaagaa

SEQ ID NO: 2704052 - RNA, 19 nt, Human
aaacugccagcaacgcagg

SEQ ID NO: 2704053 - RNA, 17 nt, Human
aaagaugaaaauauuug

SEQ ID NO: 2704054 - RNA, 13 nt, Human
aaagaugaaaaua

SEQ ID NO: 2704055 - RNA, 16 nt, Human
aaagaugaaaauauuu

SEQ ID NO: 2704056 - RNA, 12 nt, Human
aaauaacaauga

SEQ ID NO: 2704057 - RNA, 18 nt, Human
aaauggcuuccuggcaau

SEQ ID NO: 2704058 - RNA, 16 nt, Human
aaaucaaauaugcaaa

SEQ ID NO: 2704059 - RNA, 18 nt, Human
aaaucaaauaugcaaagc

SEQ ID NO: 2704060 - RNA, 19 nt, Human
aaaucaaauaugcaaagca

SEQ ID NO: 2704061 - RNA, 20 nt, Human
aauuaguuuuauaugcuucu

SEQ ID NO: 2704062 - RNA, 17 nt, Human
aauuaguuuuauaugcu

SEQ ID NO: 2704063 - RNA, 14 nt, Human
aauuaguuuuauau

SEQ ID NO: 2704064 - RNA, 16 nt, Human
aauauuauguuaaaac

SEQ ID NO: 2704065 - RNA, 13 nt, Human
aaucacaauacau

SEQ ID NO: 2704066 - RNA, 15 nt, Human
aaucaagaaacuuaa

SEQ ID NO: 2704067 - RNA, 14 nt, Human
aauccauacauuug

SEQ ID NO: 2704068 - RNA, 13 nt, Human
aauccauacauuu

SEQ ID NO: 2704069 - RNA, 17 nt, Human
aaugauaacuggaaacu

SEQ ID NO: 2704070 - RNA, 20 nt, Human
aaugauaacuggaaacuuca

SEQ ID NO: 2704071 - RNA, 19 nt, Human
aauaaaauggguuuuacug

SEQ ID NO: 2704072 - RNA, 14 nt, Human
aauaaaauggguuu

SEQ ID NO: 2704073 - RNA, 21 nt, Human
aauaauccuaaacauaugaau

SEQ ID NO: 2704074 - RNA, 13 nt, Human
aagccagauuuuc

SEQ ID NO: 2704075 - RNA, 16 nt, Human
aagauuuaccacuugu

SEQ ID NO: 2704076 - RNA, 16 nt, Human
cacaguuuucugagaa

SEQ ID NO: 2704077 - RNA, 17 nt, Human
cacaguuuucugagaaa

SEQ ID NO: 2704078 - RNA, 19 nt, Human
cacaguuuucugagaaaga

SEQ ID NO: 2704079 - RNA, 22 nt, Human
caaaauuuuuucucuaggaaau

SEQ ID NO: 2704080 - RNA, 21 nt, Human
caaaauuuuuucucuaggaaa

SEQ ID NO: 2704081 - RNA, 16 nt, Human
caaaauuuuuucucua

SEQ ID NO: 2704082 - RNA, 15 nt, Human
caaauugugugaaag

SEQ ID NO: 2704083 - RNA, 19 nt, Human
caaauaugcaaagcacuga

SEQ ID NO: 2704084 - RNA, 21 nt, Human
caaauaugcaaagcacugacu

SEQ ID NO: 2704085 - RNA, 13 nt, Human
caaaaacacagca

SEQ ID NO: 2704086 - RNA, 14 nt, Human
caaaaacacagcaa

SEQ ID NO: 2704087 - RNA, 15 nt, Human
caaaaacacagcaag

SEQ ID NO: 2704088 - RNA, 17 nt, Human
caaaaacacagcaaggg

SEQ ID NO: 2704089 - RNA, 13 nt, Human
auuuuccugaaaa

SEQ ID NO: 2704090 - RNA, 19 nt, Human
caaaaaucucaauauuuca

SEQ ID NO: 2704091 - RNA, 23 nt, Human
caaaacuucagacauagaauuaa

SEQ ID NO: 2704092 - RNA, 23 nt, Human
caauacaucccuuaccugggaaa

SEQ ID NO: 2704093 - RNA, 22 nt, Human
caaugugacuuaaugccacuaa

SEQ ID NO: 2704094 - RNA, 21 nt, Human
caagccagauuuuccugaaaa

SEQ ID NO: 2704095 - RNA, 17 nt, Human
caaggcugauuaaacca

SEQ ID NO: 2704096 - RNA, 17 nt, Human
uucugucuucacaacag

SEQ ID NO: 2704097 - RNA, 14 nt, Human
uugaugaagaaguu

SEQ ID NO: 2704098 - RNA, 13 nt, Human
uugaugaagaagu

SEQ ID NO: 2704099 - RNA, 23 nt, Human
uugaugaagaaguugauaugccu

SEQ ID NO: 2704100 - RNA, 14 nt, Human
uugacccacaagaa

SEQ ID NO: 2704101 - RNA, 17 nt, Human
uugacccacaagaaaug

SEQ ID NO: 2704102 - RNA, 14 nt, Human
uucuaugaaauauu

SEQ ID NO: 2704103 - RNA, 21 nt, Human
uucuaugaaauauuauguuaa

SEQ ID NO: 2704104 - RNA, 16 nt, Human
uucugagaaagacuau

SEQ ID NO: 2704105 - RNA, 21 nt, Human
uucugagaaagacuauucaaa

SEQ ID NO: 2704106 - RNA, 15 nt, Human
uucuacauacuaugg

SEQ ID NO: 2704107 - RNA, 18 nt, Human
uucggugagcuacaaaug

SEQ ID NO: 2704108 - RNA, 23 nt, Human
uucaguuauuauauuuacaaaug

SEQ ID NO: 2704109 - RNA, 18 nt, Human
uuccagauccuggaaauc

SEQ ID NO: 2704110 - RNA, 19 nt, Human
uuauuuuaauaauguuuca

SEQ ID NO: 2704111 - RNA, 17 nt, Human
uuauuuuaauaauguuu

SEQ ID NO: 2704112 - RNA, 20 nt, Human
uuauuuuaauaauguuucaa

SEQ ID NO: 2704113 - RNA, 20 nt, Human
uucagauaaucacaauacau

SEQ ID NO: 2704114 - RNA, 20 nt, Human
uucagagcugcccucuccug

SEQ ID NO: 2704115 - RNA, 19 nt, Human
uucagagcugcccucuccu

SEQ ID NO: 2704116 - RNA, 18 nt, Human
uucagagcugcccucucc

SEQ ID NO: 2704117 - RNA, 17 nt, Human
uucagagcugcccucuc

SEQ ID NO: 2704118 - RNA, 15 nt, Human
uucagagcugcccuc

SEQ ID NO: 2704119 - RNA, 18 nt, Human
uuauaauuuugugaagca

SEQ ID NO: 2704120 - RNA, 17 nt, Human
uuauaauuuugugaagc

SEQ ID NO: 2704121 - RNA, 16 nt, Human
uuauaauuuugugaag

SEQ ID NO: 2704122 - RNA, 12 nt, Human
uuauaauuuaaa

SEQ ID NO: 2704123 - RNA, 15 nt, Human
uuauaauuuugugaa

SEQ ID NO: 2704124 - RNA, 14 nt, Human
uuauaauuuuguga

SEQ ID NO: 2704125 - RNA, 11 nt, Human
uuauaaucuuu

SEQ ID NO: 2704126 - RNA, 13 nt, Human
uuauauuugaaau

SEQ ID NO: 2704127 - RNA, 12 nt, Human
uuauauuugaaa

SEQ ID NO: 2704128 - RNA, 20 nt, Human
uuauauuuauuacuguaaga

SEQ ID NO: 2704129 - RNA, 16 nt, Human
uuauauuuacaaaugg

SEQ ID NO: 2704130 - RNA, 11 nt, Human
uuaucucaaaa

SEQ ID NO: 2704131 - RNA, 22 nt, Human
uuaugauuaaguaaugauaacu

SEQ ID NO: 2704132 - RNA, 18 nt, Human
uuauggcuauaggugcua

SEQ ID NO: 2704133 - RNA, 16 nt, Human
uuggucugugagaugc

SEQ ID NO: 2704134 - RNA, 15 nt, Human
uugucuagugaaacu

SEQ ID NO: 2704135 - RNA, 12 nt, Human
uugugccccugc

SEQ ID NO: 2704136 - RNA, 18 nt, Human
uuguguuuugcaagccag

SEQ ID NO: 2704137 - RNA, 14 nt, Human
uuguuuaaaaucau

SEQ ID NO: 2704138 - RNA, 22 nt, Human
uuuauuguuuaaaaucauuucu

SEQ ID NO: 2704139 - RNA, 22 nt, Human
uuuauaauuuugugaagcaaaa

SEQ ID NO: 2704140 - RNA, 17 nt, Human
uuuauggcacuaguauu

SEQ ID NO: 2704141 - RNA, 13 nt, Human
uuuaccacuugug

SEQ ID NO: 2704142 - RNA, 13 nt, Human
uuuaauaauguuu

SEQ ID NO: 2704143 - RNA, 19 nt, Human
uuuaacucuauaauguguu

SEQ ID NO: 2704144 - RNA, 19 nt, Human
uuuguauaaaauaauuuuu

SEQ ID NO: 2704145 - RNA, 18 nt, Human
uuuguauaaaauaauuuu

SEQ ID NO: 2704146 - RNA, 17 nt, Human
uuuguauaaaauaauuu

SEQ ID NO: 2704147 - RNA, 15 nt, Human
uuuccacagaagcuc

SEQ ID NO: 2704148 - RNA, 23 nt, Human
uuuuauaauuuugugaagcaaaa

SEQ ID NO: 2704149 - RNA, 21 nt, Human
uuuuauaauuuugugaagcaa

SEQ ID NO: 2704150 - RNA, 21 nt, Human
uuuuaaaguaacccuacaaaa

SEQ ID NO: 2704151 - RNA, 18 nt, Human
uuuuauauuugaaauauu

SEQ ID NO: 2704152 - RNA, 13 nt, Human
uuuuauauuugaa

SEQ ID NO: 2704153 - RNA, 13 nt, Human
uuuucuuauuuca

SEQ ID NO: 2704154 - RNA, 16 nt, Human
ugcacugucaagauga

SEQ ID NO: 2704155 - RNA, 17 nt, Human
ugcacgcacacugucug

SEQ ID NO: 2704156 - RNA, 16 nt, Human
ugcacgcacacugucu

SEQ ID NO: 2704157 - RNA, 17 nt, Human
ugcaugguuuagaaagc

SEQ ID NO: 2704158 - RNA, 19 nt, Human
ugcagauaaacaguaguga

SEQ ID NO: 2704159 - RNA, 21 nt, Human
ugcauuauauuuauuacugua

SEQ ID NO: 2704160 - RNA, 24 nt, Human
ugauaguuguaccgcaaugugacu

SEQ ID NO: 2704161 - RNA, 15 nt, Human
ugagcagucaggaaa

SEQ ID NO: 2704162 - RNA, 17 nt, Human
ugagcagucaggaaaga

SEQ ID NO: 2704163 - RNA, 20 nt, Human
ugagcagucaggaaagagaa

SEQ ID NO: 2704164 - RNA, 14 nt, Human
ugagaugcuagaac

SEQ ID NO: 2704165 - RNA, 16 nt, Human
ugagaugcuagaacuc

SEQ ID NO: 2704166 - RNA, 20 nt, Human
ugagaugcuagaacucccuu

SEQ ID NO: 2704167 - RNA, 14 nt, Human
ugagacagcucugc

SEQ ID NO: 2704168 - RNA, 16 nt, Human
ugagacagcucugcau

SEQ ID NO: 2704169 - RNA, 18 nt, Human
ugagaaagacuauucaaa

SEQ ID NO: 2704170 - RNA, 20 nt, Human
ugagaaagacuauucaaaca

SEQ ID NO: 2704171 - RNA, 16 nt, Human
ugagaaagacuauuca

SEQ ID NO: 2704172 - RNA, 17 nt, Human
ugagaaagacuauucaa

SEQ ID NO: 2704173 - RNA, 12 nt, Human
ugacucuuaaga

SEQ ID NO: 2704174 - RNA, 23 nt, Human
ugggcagcugccuccccuccucu

SEQ ID NO: 2704175 - RNA, 22 nt, Human
ugggcagcugccuccccuccuc

SEQ ID NO: 2704176 - RNA, 20 nt, Human
ugggcagcugccuccccucc

SEQ ID NO: 2704177 - RNA, 14 nt, Human
ugggacagggagga

SEQ ID NO: 2704178 - RNA, 22 nt, Human
uggccuucggccuccauccuga

SEQ ID NO: 2704179 - RNA, 20 nt, Human
uggccuucggccuccauccu

SEQ ID NO: 2704180 - RNA, 23 nt, Human
uggccuucggccuccauccugag

SEQ ID NO: 2704181 - RNA, 22 nt, Human
ugcuucuguuuuauaauuuugu

SEQ ID NO: 2704182 - RNA, 22 nt, Human
uggaaaaguauguuagugcaaa

SEQ ID NO: 2704183 - RNA, 17 nt, Human
ugcuucuguuuuauaau

SEQ ID NO: 2704184 - RNA, 19 nt, Human
uguauuuuaaaagaaugau

SEQ ID NO: 2704185 - RNA, 18 nt, Human
uguauuuuaaaagaauga

SEQ ID NO: 2704186 - RNA, 14 nt, Human
uguauaaaauaauu

SEQ ID NO: 2704187 - RNA, 13 nt, Human
uguauaaaauaau

SEQ ID NO: 2704188 - RNA, 21 nt, Human
uguaguguuggagaagaacug

SEQ ID NO: 2704189 - RNA, 20 nt, Human
uguaguguuggagaagaacu

SEQ ID NO: 2704190 - RNA, 19 nt, Human
uguaguguuggagaagaac

SEQ ID NO: 2704191 - RNA, 12 nt, Human
ugucuuaauuaa

SEQ ID NO: 2704192 - RNA, 17 nt, Human
ugucuacacuaagagag

SEQ ID NO: 2704193 - RNA, 22 nt, Human
ugucuacacuaagagagaauga

SEQ ID NO: 2704194 - RNA, 14 nt, Human
uggguagacacaca

SEQ ID NO: 2704195 - RNA, 20 nt, Human
ugguucccuugaugaagaag

SEQ ID NO: 2704196 - RNA, 17 nt, Human
ugguucccuugaugaag

SEQ ID NO: 2704197 - RNA, 16 nt, Human
ugguucccuugaugaa

SEQ ID NO: 2704198 - RNA, 11 nt, Human
uguaaaauggu

SEQ ID NO: 2704199 - RNA, 12 nt, Human
uguaaaauggug

SEQ ID NO: 2704200 - RNA, 17 nt, Human
ucuggccuucggccucc

SEQ ID NO: 2704201 - RNA, 18 nt, Human
ucuggccuucggccucca

SEQ ID NO: 2704202 - RNA, 12 nt, Human
ucuuaagaagac

SEQ ID NO: 2704203 - RNA, 18 nt, Human
ucuuaagaagacugcauu

SEQ ID NO: 2704204 - RNA, 15 nt, Human
ucugucuucacaaca

SEQ ID NO: 2704205 - RNA, 19 nt, Human
ucugcaucagcugcugaaa

SEQ ID NO: 2704206 - RNA, 21 nt, Human
ucugcaucagcugcugaaaca

SEQ ID NO: 2704207 - RNA, 14 nt, Human
ucugcaucagcugc

SEQ ID NO: 2704208 - RNA, 22 nt, Human
ucucuguaauaaacucauuucu

SEQ ID NO: 2704209 - RNA, 18 nt, Human
ucucuguaauaaacucau

SEQ ID NO: 2704210 - RNA, 16 nt, Human
ucccugcaauaaaaug

SEQ ID NO: 2704211 - RNA, 16 nt, Human
ucccuugaugaagaag

SEQ ID NO: 2704212 - RNA, 15 nt, Human
ucccuugaugaagaa

SEQ ID NO: 2704213 - RNA, 22 nt, Human
uccucugcuugccaucccuccc

SEQ ID NO: 2704214 - RNA, 21 nt, Human
uccucugcuugccaucccucc

SEQ ID NO: 2704215 - RNA, 19 nt, Human
uccucugcuugccaucccu

SEQ ID NO: 2704216 - RNA, 20 nt, Human
uccucugcuugccaucccuc

SEQ ID NO: 2704217 - RNA, 22 nt, Human
ucuagugagcagucaggaaaga

SEQ ID NO: 2704218 - RNA, 19 nt, Human
ucuagugagcagucaggaa

SEQ ID NO: 2704219 - RNA, 15 nt, Human
ucucaacuccaaacu

SEQ ID NO: 2704220 - RNA, 17 nt, Human
ucuaugaaauauuaugu

SEQ ID NO: 2704221 - RNA, 14 nt, Human
ucuaugaaauauua

SEQ ID NO: 2704222 - RNA, 13 nt, Human
ucuaugaaauauu

SEQ ID NO: 2704223 - RNA, 22 nt, Human
ucgugggacagucaccucaugg

SEQ ID NO: 2704224 - RNA, 21 nt, Human
ucguggaacaguuaccucugc

SEQ ID NO: 2704225 - RNA, 18 nt, Human
ucggccuccauccugagg

SEQ ID NO: 2704226 - RNA, 17 nt, Human
ucggccuccauccugag

SEQ ID NO: 2704227 - RNA, 13 nt, Human
ucguuaauuugua

SEQ ID NO: 2704228 - RNA, 17 nt, Human
uccuggcaauagucaaa

SEQ ID NO: 2704229 - RNA, 20 nt, Human
uccugccuaagugcagcccc

SEQ ID NO: 2704230 - RNA, 19 nt, Human
uccugucggagcccugucu

SEQ ID NO: 2704231 - RNA, 22 nt, Human
uccugucggagcccugucuccu

SEQ ID NO: 2704232 - RNA, 16 nt, Human
uccuuggacucauuuu

SEQ ID NO: 2704233 - RNA, 14 nt, Human
ucaccaaggcugau

SEQ ID NO: 2704234 - RNA, 16 nt, Human
ucacagucacauucca

SEQ ID NO: 2704235 - RNA, 17 nt, Human
ucacaagacccaaaagg

SEQ ID NO: 2704236 - RNA, 18 nt, Human
ucacaagacccaaaaggc

SEQ ID NO: 2704237 - RNA, 13 nt, Human
ucacaagacccaa

SEQ ID NO: 2704238 - RNA, 13 nt, Human
ucaaugcagcccc

SEQ ID NO: 2704239 - RNA, 21 nt, Human
ucaauaaaauccauacauuug

SEQ ID NO: 2704240 - RNA, 14 nt, Human
ucaaauaugcaaag

SEQ ID NO: 2704241 - RNA, 20 nt, Human
ucaaaucaagaaacuuaagg

SEQ ID NO: 2704242 - RNA, 14 nt, Human
ucaaauugugugaa

SEQ ID NO: 2704243 - RNA, 16 nt, Human
uauuauucccauucua

SEQ ID NO: 2704244 - RNA, 17 nt, Human
uauguacuucaugcugu

SEQ ID NO: 2704245 - RNA, 13 nt, Human
uauguacuucaug

SEQ ID NO: 2704246 - RNA, 16 nt, Human
ucauuuccaagcaagu

SEQ ID NO: 2704247 - RNA, 13 nt, Human
ucauuuccaagca

SEQ ID NO: 2704248 - RNA, 19 nt, Human
ucauuaucucaaaacugca

SEQ ID NO: 2704249 - RNA, 20 nt, Human
ucauuaucucaaaacugcac

SEQ ID NO: 2704250 - RNA, 13 nt, Human
ucauuaucucaaa

SEQ ID NO: 2704251 - RNA, 18 nt, Human
ucauaccuaucaucuuaa

SEQ ID NO: 2704252 - RNA, 15 nt, Human
uccacuuggucugug

SEQ ID NO: 2704253 - RNA, 16 nt, Human
uccacuuggucuguga

SEQ ID NO: 2704254 - RNA, 14 nt, Human
uccacuuggucugu

SEQ ID NO: 2704255 - RNA, 17 nt, Human
uccaccucccugcaaua

SEQ ID NO: 2704256 - RNA, 16 nt, Human
uccaccucccugcaau

SEQ ID NO: 2704257 - RNA, 15 nt, Human
uccaccucccugcaa

SEQ ID NO: 2704258 - RNA, 14 nt, Human
uccaccucccugca

SEQ ID NO: 2704259 - RNA, 13 nt, Human
uccaccucccugc

SEQ ID NO: 2704260 - RNA, 19 nt, Human
uccacagaagcuccaggua

SEQ ID NO: 2704261 - RNA, 17 nt, Human
ucaggcuagauguaugu

SEQ ID NO: 2704262 - RNA, 13 nt, Human
ucaggcuagaugu

SEQ ID NO: 2704263 - RNA, 18 nt, Human
ucagcuccccucggagaa

SEQ ID NO: 2704264 - RNA, 17 nt, Human
ucagcuccccucggaga

SEQ ID NO: 2704265 - RNA, 23 nt, Human
ucagagcugcccucuccugggca

SEQ ID NO: 2704266 - RNA, 22 nt, Human
ucagagcugcccucuccugggc

SEQ ID NO: 2704267 - RNA, 21 nt, Human
ucagagcugcccucuccuggg

SEQ ID NO: 2704268 - RNA, 20 nt, Human
ucagagcugcccucuccugg

SEQ ID NO: 2704269 - RNA, 19 nt, Human
ucagagcugcccucuccug

SEQ ID NO: 2704270 - RNA, 18 nt, Human
ucagagcugcccucuccu

SEQ ID NO: 2704271 - RNA, 23 nt, Human
ggagcccugucuccucucucugu

SEQ ID NO: 2704272 - RNA, 18 nt, Human
ggagcccugucuccucuc

SEQ ID NO: 2704273 - RNA, 16 nt, Human
ggaggacgcucucugg

SEQ ID NO: 2704274 - RNA, 19 nt, Human
ggaggggagcaugggaagu

SEQ ID NO: 2704275 - RNA, 15 nt, Human
ggacgcucucuggcc

SEQ ID NO: 2704276 - RNA, 16 nt, Human
ggacgcucucuggccu

SEQ ID NO: 2704277 - RNA, 19 nt, Human
ggacgcucucuggccuucg

SEQ ID NO: 2704278 - RNA, 23 nt, Human
ggagaagagcuguucacagccag

SEQ ID NO: 2704279 - RNA, 14 nt, Human
ggagaagaacugaa

SEQ ID NO: 2704280 - RNA, 11 nt, Human
ggagaagaacu

SEQ ID NO: 2704281 - RNA, 15 nt, Human
ggagaagagcuguuc

SEQ ID NO: 2704282 - RNA, 20 nt, Human
ggacauuugcucauggaauu

SEQ ID NO: 2704283 - RNA, 17 nt, Human
ggacauuugcucaugga

SEQ ID NO: 2704284 - RNA, 16 nt, Human
ggacauuugcucaugg

SEQ ID NO: 2704285 - RNA, 16 nt, Human
ggcagcugccuccccu

SEQ ID NO: 2704286 - RNA, 13 nt, Human
ggcagcugccucc

SEQ ID NO: 2704287 - RNA, 12 nt, Human
ggcagcugccuc

SEQ ID NO: 2704288 - RNA, 11 nt, Human
ggcagcugccu

SEQ ID NO: 2704289 - RNA, 17 nt, Human
ggauuagggagagaaga

SEQ ID NO: 2704290 - RNA, 21 nt, Human
ggcagagguugcagugagccg

SEQ ID NO: 2704291 - RNA, 19 nt, Human
ggauugaaggaugcugucu

SEQ ID NO: 2704292 - RNA, 17 nt, Human
gggaggacgcucucugg

SEQ ID NO: 2704293 - RNA, 20 nt, Human
gggaggacgcucucuggccu

SEQ ID NO: 2704294 - RNA, 21 nt, Human
gggacugaggggaggggagca

SEQ ID NO: 2704295 - RNA, 14 nt, Human
gggaauugaggaca

SEQ ID NO: 2704296 - RNA, 20 nt, Human
ggcuaguaucaaaagaaaga

SEQ ID NO: 2704297 - RNA, 23 nt, Human
ggcuauaggugcuacaaaaacac

SEQ ID NO: 2704298 - RNA, 16 nt, Human
ggcuccacuuggucug

SEQ ID NO: 2704299 - RNA, 18 nt, Human
gccuuggggcugaugcag

SEQ ID NO: 2704300 - RNA, 17 nt, Human
gccugagcgacagugag

SEQ ID NO: 2704301 - RNA, 20 nt, Human
gccugagcgacagugagacu

SEQ ID NO: 2704302 - RNA, 16 nt, Human
gcuagauguauguacu

SEQ ID NO: 2704303 - RNA, 14 nt, Human
gcuagauguaugua

SEQ ID NO: 2704304 - RNA, 13 nt, Human
gcuagauguaugu

SEQ ID NO: 2704305 - RNA, 21 nt, Human
gcuauaggugcuacaaaaaca

SEQ ID NO: 2704306 - RNA, 19 nt, Human
gcuauaggugcuacaaaaa

SEQ ID NO: 2704307 - RNA, 20 nt, Human
gcuccauuuuuagugaaaua

SEQ ID NO: 2704308 - RNA, 21 nt, Human
gcuggaaaaguauguuagugc

SEQ ID NO: 2704309 - RNA, 23 nt, Human
gcuggaaaaguauguuagugcaa

SEQ ID NO: 2704310 - RNA, 23 nt, Human
gcugcccucuccugggcagcugc

SEQ ID NO: 2704311 - RNA, 22 nt, Human
gcugcccucuccugggcagcug

SEQ ID NO: 2704312 - RNA, 20 nt, Human
gcugcccucuccugggcagc

SEQ ID NO: 2704313 - RNA, 18 nt, Human
gcugcccucuccugggca

SEQ ID NO: 2704314 - RNA, 17 nt, Human
gcugcccucuccugggc

SEQ ID NO: 2704315 - RNA, 16 nt, Human
gcugcccucuccuggg

SEQ ID NO: 2704316 - RNA, 15 nt, Human
gcugcccucuccugg

SEQ ID NO: 2704317 - RNA, 14 nt, Human
gcugcccucuccug

SEQ ID NO: 2704318 - RNA, 13 nt, Human
gcugcccucuccu

SEQ ID NO: 2704319 - RNA, 21 nt, Human
gcugauuaaaccaaggcuaga

SEQ ID NO: 2704320 - RNA, 12 nt, Human
gcugcccucucc

SEQ ID NO: 2704321 - RNA, 23 nt, Human
gcuggucccagccagcaguucag

SEQ ID NO: 2704322 - RNA, 19 nt, Human
gcuucuguuuuauaauuuu

SEQ ID NO: 2704323 - RNA, 18 nt, Human
gcuugcccuguuaaaaga

SEQ ID NO: 2704324 - RNA, 23 nt, Human
gcaguucagagcugcccucuccu

SEQ ID NO: 2704325 - RNA, 22 nt, Human
gcaguucagagcugcccucucc

SEQ ID NO: 2704326 - RNA, 20 nt, Human
gcaguucagagcugcccucu

SEQ ID NO: 2704327 - RNA, 19 nt, Human
gcaguucagagcugcccuc

SEQ ID NO: 2704328 - RNA, 21 nt, Human
gcaguugaaaagacuccaaag

SEQ ID NO: 2704329 - RNA, 16 nt, Human
gcaguugaaaagacuc

SEQ ID NO: 2704330 - RNA, 19 nt, Human
gcaguugaaaagacuccaa

SEQ ID NO: 2704331 - RNA, 15 nt, Human
gcaguugaaaagacu

SEQ ID NO: 2704332 - RNA, 22 nt, Human
gcaucagcugcugaaacaacaa

SEQ ID NO: 2704333 - RNA, 23 nt, Human
gcaucagcugcugaaacaacaaa

SEQ ID NO: 2704334 - RNA, 16 nt, Human
gcacgcacacugucug

SEQ ID NO: 2704335 - RNA, 15 nt, Human
gcacgcacacugucu

SEQ ID NO: 2704336 - RNA, 19 nt, Human
gcacuguggguagacacac

SEQ ID NO: 2704337 - RNA, 18 nt, Human
gcacagccucuuagaugc

SEQ ID NO: 2704338 - RNA, 15 nt, Human
gcacagccucuuaga

SEQ ID NO: 2704339 - RNA, 18 nt, Human
gcagagguugcagugagc

SEQ ID NO: 2704340 - RNA, 23 nt, Human
gcagagguugcagugagccgaga

SEQ ID NO: 2704341 - RNA, 16 nt, Human
gcaggaagcugugaga

SEQ ID NO: 2704342 - RNA, 19 nt, Human
gccagacuggcacaguuuu

SEQ ID NO: 2704343 - RNA, 15 nt, Human
gccagacuggcacag

SEQ ID NO: 2704344 - RNA, 18 nt, Human
gccagacuggcacaguuu

SEQ ID NO: 2704345 - RNA, 23 nt, Human
gccaugggacagggaggacgcuc

SEQ ID NO: 2704346 - RNA, 22 nt, Human
gccaugggacagggaggacgcu

SEQ ID NO: 2704347 - RNA, 13 nt, Human
gauagcagggcau

SEQ ID NO: 2704348 - RNA, 19 nt, Human
gagugucuuaauuaaaaga

SEQ ID NO: 2704349 - RNA, 19 nt, Human
gagugaacaaauuuacaga

SEQ ID NO: 2704350 - RNA, 22 nt, Human
gagugaacaaauuuacagagac

SEQ ID NO: 2704351 - RNA, 23 nt, Human
gagugaacaaauuuacagagaca

SEQ ID NO: 2704352 - RNA, 21 nt, Human
gaguugaaaaucuuauaauuu

SEQ ID NO: 2704353 - RNA, 13 nt, Human
gauugugccccug

SEQ ID NO: 2704354 - RNA, 19 nt, Human
gauguugaaaaaguucugc

SEQ ID NO: 2704355 - RNA, 18 nt, Human
gaugcaguucugaagaag

SEQ ID NO: 2704356 - RNA, 16 nt, Human
gaugggaaagcauugu

SEQ ID NO: 2704357 - RNA, 14 nt, Human
gaucuuuaaaauac

SEQ ID NO: 2704358 - RNA, 19 nt, Human
gaggcagagguugcaguga

SEQ ID NO: 2704359 - RNA, 21 nt, Human
gagcaggcuacugucagcucc

SEQ ID NO: 2704360 - RNA, 12 nt, Human
gagcuacaaaug

SEQ ID NO: 2704361 - RNA, 13 nt, Human
gagcuacaaaugc

SEQ ID NO: 2704362 - RNA, 14 nt, Human
gagcuacaaaugca

SEQ ID NO: 2704363 - RNA, 16 nt, Human
gagcugcccucuccug

SEQ ID NO: 2704364 - RNA, 15 nt, Human
gagcugcccucuccu

SEQ ID NO: 2704365 - RNA, 17 nt, Human
gagcugcccucuccugg

SEQ ID NO: 2704366 - RNA, 14 nt, Human
gagcugcccucucc

SEQ ID NO: 2704367 - RNA, 19 nt, Human
cucuuaagaagacugcauu

SEQ ID NO: 2704368 - RNA, 22 nt, Human
cucuggccuucggccuccaucc

SEQ ID NO: 2704369 - RNA, 21 nt, Human
cucuggccuucggccuccauc

SEQ ID NO: 2704370 - RNA, 16 nt, Human
cugagcaggauuuuaa

SEQ ID NO: 2704371 - RNA, 16 nt, Human
cugagaugugaacaca

SEQ ID NO: 2704372 - RNA, 20 nt, Human
cugagaugugaacacaucag

SEQ ID NO: 2704373 - RNA, 19 nt, Human
cugagaaagacuauucaaa

SEQ ID NO: 2704374 - RNA, 20 nt, Human
cugagaaagacuauucaaac

SEQ ID NO: 2704375 - RNA, 21 nt, Human
cugagaugugaacacaucagc

SEQ ID NO: 2704376 - RNA, 12 nt, Human
cugagaaagacu

SEQ ID NO: 2704377 - RNA, 13 nt, Human
cugagaaagacua

SEQ ID NO: 2704378 - RNA, 15 nt, Human
cugagaaagacuauu

SEQ ID NO: 2704379 - RNA, 18 nt, Human
cugagaaagacuauucaa

SEQ ID NO: 2704380 - RNA, 23 nt, Human
cugacgacuugagugcucaguag

SEQ ID NO: 2704381 - RNA, 14 nt, Human
cugaagaagauggu

SEQ ID NO: 2704382 - RNA, 20 nt, Human
cugcaucagcugcugaaaca

SEQ ID NO: 2704383 - RNA, 21 nt, Human
cugaggcuccacuuggucugu

SEQ ID NO: 2704384 - RNA, 15 nt, Human
cugaggcuccacuug

SEQ ID NO: 2704385 - RNA, 22 nt, Human
cugcaauaaaauggguuuuacu

SEQ ID NO: 2704386 - RNA, 15 nt, Human
cugcaauaaaauggg

SEQ ID NO: 2704387 - RNA, 16 nt, Human
cuaguaauuggaaagg

SEQ ID NO: 2704388 - RNA, 20 nt, Human
cuagugaaacucguuaauuu

SEQ ID NO: 2704389 - RNA, 18 nt, Human
cuagugaaagaggcagcu

SEQ ID NO: 2704390 - RNA, 19 nt, Human
cuagugaaagaggcagcuu

SEQ ID NO: 2704391 - RNA, 21 nt, Human
cuagugagcagucaggaaaga

SEQ ID NO: 2704392 - RNA, 23 nt, Human
cuauucaaacagucucaggaaau

SEQ ID NO: 2704393 - RNA, 18 nt, Human
cuauucaaacagucucag

SEQ ID NO: 2704394 - RNA, 16 nt, Human
cuauucaaacagucuc

SEQ ID NO: 2704395 - RNA, 21 nt, Human
cuauaggugcuacaaaaacac

SEQ ID NO: 2704396 - RNA, 22 nt, Human
cuauaggugcuacaaaaacaca

SEQ ID NO: 2704397 - RNA, 20 nt, Human
cuauaggugcuacaaaaaca

SEQ ID NO: 2704398 - RNA, 18 nt, Human
cuauauuguuugcuaagc

SEQ ID NO: 2704399 - RNA, 15 nt, Human
cuauaggugcuacaa

SEQ ID NO: 2704400 - RNA, 21 nt, Human
cucauuuccaagcaaguauua

SEQ ID NO: 2704401 - RNA, 14 nt, Human
cucauuucuagcag

SEQ ID NO: 2704402 - RNA, 13 nt, Human
cuccaaagaaaug

SEQ ID NO: 2704403 - RNA, 12 nt, Human
cuccaaagaaau

SEQ ID NO: 2704404 - RNA, 21 nt, Human
cuccaaacugacucuuaagaa

SEQ ID NO: 2704405 - RNA, 23 nt, Human
cuccaccucccugcaauaaaaug

SEQ ID NO: 2704406 - RNA, 17 nt, Human
cuccaccuugcagcucu

SEQ ID NO: 2704407 - RNA, 12 nt, Human
cuccauccugag

SEQ ID NO: 2704408 - RNA, 11 nt, Human
cuccauccuga

SEQ ID NO: 2704409 - RNA, 13 nt, Human
cuccccuccucug

SEQ ID NO: 2704410 - RNA, 11 nt, Human
cuccccuccuc

SEQ ID NO: 2704411 - RNA, 13 nt, Human
cuccauccugagg

SEQ ID NO: 2704412 - RNA, 20 nt, Human
cuccccuccucugcuugcca

SEQ ID NO: 2704413 - RNA, 21 nt, Human
cuugccaucccucccuccacc

SEQ ID NO: 2704414 - RNA, 22 nt, Human
cuugccaucccucccuccaccu

SEQ ID NO: 2704415 - RNA, 19 nt, Human
cuuguaaaggaauuuaaaa

SEQ ID NO: 2704416 - RNA, 13 nt, Human
cuuuccacagaag

SEQ ID NO: 2704417 - RNA, 21 nt, Human
cuuuauuuucuauaauuuaaa

SEQ ID NO: 2704418 - RNA, 18 nt, Human
cuuuaaagggauggcaag

SEQ ID NO: 2704419 - RNA, 22 nt, Human
gaaaacaauaacgauaaaagac

SEQ ID NO: 2704420 - RNA, 12 nt, Human
gaaaauaucacu

SEQ ID NO: 2704421 - RNA, 19 nt, Human
gaaaaucuuauaauuuaaa

SEQ ID NO: 2704422 - RNA, 19 nt, Human
gaaaauaacgauaaaagac

SEQ ID NO: 2704423 - RNA, 20 nt, Human
gaaaaucuuauaauuuaaaa

SEQ ID NO: 2704424 - RNA, 20 nt, Human
gaauaauccuaaacauauga

SEQ ID NO: 2704425 - RNA, 14 nt, Human
gaauacuuuauaaa

SEQ ID NO: 2704426 - RNA, 17 nt, Human
gaagacugcauuauauu

SEQ ID NO: 2704427 - RNA, 21 nt, Human
gaagccuuggggcugaugcag

SEQ ID NO: 2704428 - RNA, 16 nt, Human
gaaauauuauguuaaa

SEQ ID NO: 2704429 - RNA, 13 nt, Human
gaaauauuauguu

SEQ ID NO: 2704430 - RNA, 21 nt, Human
gaagaagcaccaaucaugaau

SEQ ID NO: 2704431 - RNA, 21 nt, Human
gaacuuguaaaggaauuuaaa

SEQ ID NO: 2704432 - RNA, 22 nt, Human
gaacuuccagauccuggaaauc

SEQ ID NO: 2704433 - RNA, 14 nt, Human
gaacucccuuucaa

SEQ ID NO: 2704434 - RNA, 22 nt, Human
gaacuagaguuuagcuggaaaa

SEQ ID NO: 2704435 - RNA, 21 nt, Human
gaacuagaguuuagcuggaaa

SEQ ID NO: 2704436 - RNA, 18 nt, Human
cugucuucacaacagauu

SEQ ID NO: 2704437 - RNA, 19 nt, Human
cuguuaaaagaugaaaaua

SEQ ID NO: 2704438 - RNA, 15 nt, Human
cuguuaaaagaugaa

SEQ ID NO: 2704439 - RNA, 16 nt, Human
cuguuaaaagaugaaa

SEQ ID NO: 2704440 - RNA, 23 nt, Human
cuuaagaagacugcauuauauuu

SEQ ID NO: 2704441 - RNA, 21 nt, Human
cuuaagaagacugcauuauau

SEQ ID NO: 2704442 - RNA, 19 nt, Human
cuuaauuaaaagaauauuu

SEQ ID NO: 2704443 - RNA, 20 nt, Human
cuuaauuaaaagaauauuuu

SEQ ID NO: 2704444 - RNA, 16 nt, Human
cuuaauuaaaagaaua

SEQ ID NO: 2704445 - RNA, 17 nt, Human
cuuaauuaaaagaauau

SEQ ID NO: 2704446 - RNA, 14 nt, Human
cuguuuuauaauuu

SEQ ID NO: 2704447 - RNA, 15 nt, Human
cuguuuuauaauuuu

SEQ ID NO: 2704448 - RNA, 12 nt, Human
cuucacaacaga

SEQ ID NO: 2704449 - RNA, 14 nt, Human
cuucacaacagauu

SEQ ID NO: 2704450 - RNA, 17 nt, Human
cuucaaauccuugaaga

SEQ ID NO: 2704451 - RNA, 16 nt, Human
cuucagcgguuuauau

SEQ ID NO: 2704452 - RNA, 15 nt, Human
cuucagccugaaaga

SEQ ID NO: 2704453 - RNA, 20 nt, Human
cuuccuuggacucauuuuaa

SEQ ID NO: 2704454 - RNA, 20 nt, Human
cuucggccuccauccugagg

SEQ ID NO: 2704455 - RNA, 17 nt, Human
ccucccuccaccucccu

SEQ ID NO: 2704456 - RNA, 20 nt, Human
ccucccuccaccucccugca

SEQ ID NO: 2704457 - RNA, 18 nt, Human
ccuccucugcuugccauc

SEQ ID NO: 2704458 - RNA, 13 nt, Human
ccuccucugcuug

SEQ ID NO: 2704459 - RNA, 16 nt, Human
ccuccucugcuugcca

SEQ ID NO: 2704460 - RNA, 14 nt, Human
ccuccauccugagg

SEQ ID NO: 2704461 - RNA, 22 nt, Human
ccuccaccucccugcaauaaaa

SEQ ID NO: 2704462 - RNA, 17 nt, Human
ccuccaccucccugcaa

SEQ ID NO: 2704463 - RNA, 15 nt, Human
ccuccaccucccugc

SEQ ID NO: 2704464 - RNA, 14 nt, Human
ccuccaccucccug

SEQ ID NO: 2704465 - RNA, 13 nt, Human
ccuccaccucccu

SEQ ID NO: 2704466 - RNA, 16 nt, Human
ccgggcguggugguga

SEQ ID NO: 2704467 - RNA, 13 nt, Human
cccacaagaaaug

SEQ ID NO: 2704468 - RNA, 20 nt, Human
cccacaagaaaugaaagcag

SEQ ID NO: 2704469 - RNA, 12 nt, Human
cccuccaccucc

SEQ ID NO: 2704470 - RNA, 14 nt, Human
cccuccaccucccu

SEQ ID NO: 2704471 - RNA, 17 nt, Human
cccuccaccucccugca

SEQ ID NO: 2704472 - RNA, 15 nt, Human
cccuccaccucccug

SEQ ID NO: 2704473 - RNA, 19 nt, Human
cccuccaccucccugcaau

SEQ ID NO: 2704474 - RNA, 15 nt, Human
cccucuccugggcag

SEQ ID NO: 2704475 - RNA, 14 nt, Human
cccucuccugggca

SEQ ID NO: 2704476 - RNA, 13 nt, Human
cccucuccugggc

SEQ ID NO: 2704477 - RNA, 12 nt, Human
cccucuccuggg

SEQ ID NO: 2704478 - RNA, 11 nt, Human
cccucuccugg

SEQ ID NO: 2704479 - RNA, 15 nt, Human
cccgugggguuccuc

SEQ ID NO: 2704480 - RNA, 22 nt, Human
ccugggcagcugccuccccucc

SEQ ID NO: 2704481 - RNA, 23 nt, Human
ccuggaaaucaggguuaguauug

SEQ ID NO: 2704482 - RNA, 11 nt, Human
ccugagcccca

SEQ ID NO: 2704483 - RNA, 16 nt, Human
ccugcaauaaaauggg

SEQ ID NO: 2704484 - RNA, 18 nt, Human
cgagcaggcuacugucag

SEQ ID NO: 2704485 - RNA, 20 nt, Human
ccuguuaaaagaugaaaaua

SEQ ID NO: 2704486 - RNA, 21 nt, Human
ccuguuaaaagaugaaaauau

SEQ ID NO: 2704487 - RNA, 14 nt, Human
ccuucggccuccau

SEQ ID NO: 2704488 - RNA, 19 nt, Human
ccuucggccuccauccuga

SEQ ID NO: 2704489 - RNA, 20 nt, Human
ccuucggccuccauccugag

SEQ ID NO: 2704490 - RNA, 20 nt, Human
ccuugaaaacuuuaugcuaa

SEQ ID NO: 2704491 - RNA, 14 nt, Human
ccuugaugaagaag

SEQ ID NO: 2704492 - RNA, 19 nt, Human
ccuuggggcugaugcaguu

SEQ ID NO: 2704493 - RNA, 19 nt, Human
ccaguguuuuaggagcaug

SEQ ID NO: 2704494 - RNA, 14 nt, Human
ccaguuauggcuau

SEQ ID NO: 2704495 - RNA, 21 nt, Human
ccaguuauggcuauaggugcu

SEQ ID NO: 2704496 - RNA, 16 nt, Human
ccaugggacagggagg

SEQ ID NO: 2704497 - RNA, 19 nt, Human
ccaugggacagggaggacg

SEQ ID NO: 2704498 - RNA, 22 nt, Human
ccagccagcaguucagagcugc

SEQ ID NO: 2704499 - RNA, 23 nt, Human
ccagcaguucagagcugcccucu

SEQ ID NO: 2704500 - RNA, 22 nt, Human
ccagcaguucagagcugcccuc

SEQ ID NO: 2704501 - RNA, 21 nt, Human
ccagcaguucagagcugcccu

SEQ ID NO: 2704502 - RNA, 20 nt, Human
ccagcaguucagagcugccc

SEQ ID NO: 2704503 - RNA, 19 nt, Human
ccagcaguucagagcugcc

SEQ ID NO: 2704504 - RNA, 18 nt, Human
ccagcaguucagagcugc

SEQ ID NO: 2704505 - RNA, 13 nt, Human
ccagcaguucaga

SEQ ID NO: 2704506 - RNA, 14 nt, Human
ccaccucccugcaa

SEQ ID NO: 2704507 - RNA, 19 nt, Human
caugagguacugagaguga

SEQ ID NO: 2704508 - RNA, 16 nt, Human
caugagguacugagag

SEQ ID NO: 2704509 - RNA, 19 nt, Human
caugaagauguagaggaga

SEQ ID NO: 2704510 - RNA, 18 nt, Human
caugaagauguagaggag

SEQ ID NO: 2704511 - RNA, 15 nt, Human
cauauauaacaaugc

SEQ ID NO: 2704512 - RNA, 13 nt, Human
cauauauaacaau

SEQ ID NO: 2704513 - RNA, 23 nt, Human
caucccucccuccaccucccugc

SEQ ID NO: 2704514 - RNA, 22 nt, Human
caucccucccuccaccucccug

SEQ ID NO: 2704515 - RNA, 18 nt, Human
caucccuuaccugggaaa

SEQ ID NO: 2704516 - RNA, 20 nt, Human
caucccucccuccaccuccc

SEQ ID NO: 2704517 - RNA, 23 nt, Human
caugggacagggaggacgcucuc

SEQ ID NO: 2704518 - RNA, 20 nt, Human
cauggaauuggagcucgugg

SEQ ID NO: 2704519 - RNA, 20 nt, Human
caugugcuaguaauuggaaa

SEQ ID NO: 2704520 - RNA, 21 nt, Human
cauuguaaaugugcuuuuaaa

SEQ ID NO: 2704521 - RNA, 13 nt, Human
cauucuggaauaa

SEQ ID NO: 2704522 - RNA, 22 nt, Human
cauuccaacuaucucauuucca

SEQ ID NO: 2704523 - RNA, 13 nt, Human
caguccaugaaga

SEQ ID NO: 2704524 - RNA, 18 nt, Human
cagucaggaaagagaacu

SEQ ID NO: 2704525 - RNA, 15 nt, Human
cagucaggaaagaga

SEQ ID NO: 2704526 - RNA, 22 nt, Human
cagucaggaaagagaacuucca

SEQ ID NO: 2704527 - RNA, 12 nt, Human
caguagugauag

SEQ ID NO: 2704528 - RNA, 12 nt, Human
caguauggcagc

SEQ ID NO: 2704529 - RNA, 15 nt, Human
cagugagacagcucu

SEQ ID NO: 2704530 - RNA, 16 nt, Human
cagugaaagaaaauaa

SEQ ID NO: 2704531 - RNA, 20 nt, Human
cagugaaagaaaauaacaau

SEQ ID NO: 2704532 - RNA, 18 nt, Human
cagugauuaccagggacu

SEQ ID NO: 2704533 - RNA, 17 nt, Human
cagugauuaccagggac

SEQ ID NO: 2704534 - RNA, 23 nt, Human
caggaugguucccuugaugaaga

SEQ ID NO: 2704535 - RNA, 21 nt, Human
caggaugguucccuugaugaa

SEQ ID NO: 2704536 - RNA, 16 nt, Human
caggauuuuaaucuuu

SEQ ID NO: 2704537 - RNA, 20 nt, Human
caggcccccaggugccaguu

SEQ ID NO: 2704538 - RNA, 14 nt, Human
caggcccccaggug

SEQ ID NO: 2704539 - RNA, 19 nt, Human
caggcccccaggugccagu

SEQ ID NO: 2704540 - RNA, 18 nt, Human
cagggacaggauaagagg

SEQ ID NO: 2704541 - RNA, 17 nt, Human
cagggcauggcugggaa

SEQ ID NO: 2704542 - RNA, 16 nt, Human
caggggacaggauggu

SEQ ID NO: 2704543 - RNA, 11 nt, Human
caggggacagg

SEQ ID NO: 2704544 - RNA, 14 nt, Human
caggcuacugucag

SEQ ID NO: 2704545 - RNA, 19 nt, Human
caggcuagauguauguacu

SEQ ID NO: 2704546 - RNA, 13 nt, Human
caggcuagaugua

SEQ ID NO: 2704547 - RNA, 19 nt, Human
cagcaagggugaugggaaa

SEQ ID NO: 2704548 - RNA, 22 nt, Human
cagcaagggugaugggaaagca

SEQ ID NO: 2704549 - RNA, 23 nt, Human
cagcaagggugaugggaaagcau

SEQ ID NO: 2704550 - RNA, 15 nt, Human
cagauuuuccugaaa

SEQ ID NO: 2704551 - RNA, 14 nt, Human
cagauuuuccugaa

SEQ ID NO: 2704552 - RNA, 23 nt, Human
cagcaacgcaggcccccaggugc

SEQ ID NO: 2704553 - RNA, 19 nt, Human
cagcuacuugggaggcuga

SEQ ID NO: 2704554 - RNA, 16 nt, Human
cagccuaguugaucag

SEQ ID NO: 2704555 - RNA, 13 nt, Human
cagcccucagaau

SEQ ID NO: 2704556 - RNA, 16 nt, Human
cagcucuccccuucuc

SEQ ID NO: 2704557 - RNA, 20 nt, Human
cagcucugcauacucauuag

SEQ ID NO: 2704558 - RNA, 20 nt, Human
cagcugcugaaacaacaaau

SEQ ID NO: 2704559 - RNA, 21 nt, Human
cagcugcugaaacaacaaaua

SEQ ID NO: 2704560 - RNA, 18 nt, Human
cagcuguaugauucccag

SEQ ID NO: 2704561 - RNA, 18 nt, Human
caggaaccacaagacugc

SEQ ID NO: 2704562 - RNA, 23 nt, Human
cagcuuuccucaaaacuucagac

SEQ ID NO: 2704563 - RNA, 18 nt, Human
cagcuugaaacugagaug

SEQ ID NO: 2704564 - RNA, 14 nt, Human
caggaagcugugag

SEQ ID NO: 2704565 - RNA, 13 nt, Human
caggaagcuguga

SEQ ID NO: 2704566 - RNA, 22 nt, Human
caggaagcugugagagcaguuu

SEQ ID NO: 2704567 - RNA, 16 nt, Human
caggaaguagaggagg

SEQ ID NO: 2704568 - RNA, 15 nt, Human
caggaaguagaggag

SEQ ID NO: 2704569 - RNA, 17 nt, Human
cagaugcacaugagcug

SEQ ID NO: 2704570 - RNA, 13 nt, Human
cagauccuggaaa

SEQ ID NO: 2704571 - RNA, 14 nt, Human
cagauccuggaaau

SEQ ID NO: 2704572 - RNA, 14 nt, Human
cagauaaacaguag

SEQ ID NO: 2704573 - RNA, 23 nt, Human
cagauaaauaguuuaugauucca

SEQ ID NO: 2704574 - RNA, 14 nt, Human
cagauaaucacaau

SEQ ID NO: 2704575 - RNA, 20 nt, Human
cagagccccacccucagaug

SEQ ID NO: 2704576 - RNA, 18 nt, Human
cagaaagcagaacaguga

SEQ ID NO: 2704577 - RNA, 23 nt, Human
cagaacagugauuaccagggacu

SEQ ID NO: 2704578 - RNA, 19 nt, Human
cagaaagcagaacagugau

SEQ ID NO: 2704579 - RNA, 23 nt, Human
cagaaucgcuccaccuugcagcu

SEQ ID NO: 2704580 - RNA, 21 nt, Human
cagaaucgcuccaccuugcag

SEQ ID NO: 2704581 - RNA, 19 nt, Human
cagaagcaacccaaauguu

SEQ ID NO: 2704582 - RNA, 20 nt, Human
cagaagcaacccaaauguuc

SEQ ID NO: 2704583 - RNA, 17 nt, Human
cagacauagaauuaaca

SEQ ID NO: 2704584 - RNA, 19 nt, Human
cagacauagaauuaacaca

SEQ ID NO: 2704585 - RNA, 20 nt, Human
cacccucagaugcacaugag

SEQ ID NO: 2704586 - RNA, 14 nt, Human
caccucauggaauu

SEQ ID NO: 2704587 - RNA, 12 nt, Human
caccucauggaa

SEQ ID NO: 2704588 - RNA, 11 nt, Human
caccucaugga

SEQ ID NO: 2704589 - RNA, 10 nt, Human
caccucccug

SEQ ID NO: 2704590 - RNA, 14 nt, Human
caccucccugcaau

SEQ ID NO: 2704591 - RNA, 13 nt, Human
caccucccugcaa

SEQ ID NO: 2704592 - RNA, 19 nt, Human
cacuaguauuucuaugaaa

SEQ ID NO: 2704593 - RNA, 14 nt, Human
cacuaguauuucua

SEQ ID NO: 2704594 - RNA, 17 nt, Human
cacuaagagagaaugag

SEQ ID NO: 2704595 - RNA, 21 nt, Human
cacuaaauugacacuuaaaaa

SEQ ID NO: 2704596 - RNA, 16 nt, Human
cacucaaaucaagaaa

SEQ ID NO: 2704597 - RNA, 15 nt, Human
cacgcacacugucug

SEQ ID NO: 2704598 - RNA, 22 nt, Human
cacgagcaggcuacugucagcu

SEQ ID NO: 2704599 - RNA, 17 nt, Human
cacgagcaggcuacugu

SEQ ID NO: 2704600 - RNA, 19 nt, Human
cacgagcaggcuacuguca

SEQ ID NO: 2704601 - RNA, 20 nt, Human
cacgagcaggcuacugucag

SEQ ID NO: 2704602 - RNA, 13 nt, Human
cacuaaacaaaga

SEQ ID NO: 2704603 - RNA, 22 nt, Human
cacguucuuacuaguuucccuu

SEQ ID NO: 2704604 - RNA, 20 nt, Human
cacugccuucucaacuccaa

SEQ ID NO: 2704605 - RNA, 21 nt, Human
cacugacuucuaaguaaaacc

SEQ ID NO: 2704606 - RNA, 14 nt, Human
cacugacuucuaag

SEQ ID NO: 2704607 - RNA, 15 nt, Human
cacugacuucuaagu

SEQ ID NO: 2704608 - RNA, 16 nt, Human
cacugacuucuaagua

SEQ ID NO: 2704609 - RNA, 20 nt, Human
cacugacuucuaaguaaaac

SEQ ID NO: 2704610 - RNA, 14 nt, Human
cacugucaagauga

SEQ ID NO: 2704611 - RNA, 24 nt, Human
cacuguggguagacacacaugaag

SEQ ID NO: 2704612 - RNA, 22 nt, Human
cacuguggguagacacacauga

SEQ ID NO: 2704613 - RNA, 19 nt, Human
cacuguggguagacacaca

SEQ ID NO: 2704614 - RNA, 15 nt, Human
cacuuggucugugag

SEQ ID NO: 2704615 - RNA, 20 nt, Human
cacuugaacccgggaggcag

SEQ ID NO: 2704616 - RNA, 21 nt, Human
cacuugaacccgggaggcaga

SEQ ID NO: 2704617 - RNA, 23 nt, Human
cacuugaacccgggaggcagagg

SEQ ID NO: 2704618 - RNA, 22 nt, Human
acuugggaggcugagaugggag

SEQ ID NO: 2704619 - RNA, 12 nt, Human
acuuuaugcuaa

SEQ ID NO: 2704620 - RNA, 17 nt, Human
acuuuaugcuaagugaa

SEQ ID NO: 2704621 - RNA, 19 nt, Human
acuucagcgguuuauauaa

SEQ ID NO: 2704622 - RNA, 18 nt, Human
acuucagcgguuuauaua

SEQ ID NO: 2704623 - RNA, 17 nt, Human
acuucagcgguuuauau

SEQ ID NO: 2704624 - RNA, 20 nt, Human
acuucaaauccuugaagauu

SEQ ID NO: 2704625 - RNA, 19 nt, Human
acuucaaauccuugaagau

SEQ ID NO: 2704626 - RNA, 13 nt, Human
acuuaaaaauggu

SEQ ID NO: 2704627 - RNA, 14 nt, Human
acuuaaaaaugguu

SEQ ID NO: 2704628 - RNA, 15 nt, Human
acucugucucagucc

SEQ ID NO: 2704629 - RNA, 17 nt, Human
acucugucucaguccau

SEQ ID NO: 2704630 - RNA, 20 nt, Human
acucuuaagaagacugcauu

SEQ ID NO: 2704631 - RNA, 15 nt, Human
acucuuaagaagacu

SEQ ID NO: 2704632 - RNA, 14 nt, Human
acucuuaagaagac

SEQ ID NO: 2704633 - RNA, 18 nt, Human
accucugccucagaaaac

SEQ ID NO: 2704634 - RNA, 17 nt, Human
accucugccucagaaaa

SEQ ID NO: 2704635 - RNA, 18 nt, Human
acuaguauuucuaugaaa

SEQ ID NO: 2704636 - RNA, 19 nt, Human
acuaguauuucuaugaaau

SEQ ID NO: 2704637 - RNA, 19 nt, Human
acggacgaaccuugaaaac

SEQ ID NO: 2704638 - RNA, 19 nt, Human
accaaggcugauuaaacca

SEQ ID NO: 2704639 - RNA, 20 nt, Human
accaaggcugauuaaaccaa

SEQ ID NO: 2704640 - RNA, 20 nt, Human
acaucccuuaccugggaaag

SEQ ID NO: 2704641 - RNA, 21 nt, Human
acagugauuaccagggacuga

SEQ ID NO: 2704642 - RNA, 20 nt, Human
acagugauuaccagggacug

SEQ ID NO: 2704643 - RNA, 18 nt, Human
aauuuugugaagcaaaau

SEQ ID NO: 2704644 - RNA, 17 nt, Human
aauuuugugaagcaaaa

SEQ ID NO: 2704645 - RNA, 13 nt, Human
aauuuugugaagc

SEQ ID NO: 2704646 - RNA, 13 nt, Human
acaagaaaugaaa

SEQ ID NO: 2704647 - RNA, 15 nt, Human
acaagaaaugaaagc

SEQ ID NO: 2704648 - RNA, 16 nt, Human
acaagaaaugaaagca

SEQ ID NO: 2704649 - RNA, 21 nt, Human
acaaggaugaauuaaguuuuu

SEQ ID NO: 2704650 - RNA, 16 nt, Human
acagaagcuccaggua

SEQ ID NO: 2704651 - RNA, 19 nt, Human
aaaggcagaagcaacccaa

SEQ ID NO: 2704652 - RNA, 19 nt, Human
aaagcauuguaaaugugcu

SEQ ID NO: 2704653 - RNA, 20 nt, Human
aaagcauuguaaaugugcuu

SEQ ID NO: 2704654 - RNA, 21 nt, Human
aaacccugucucuacuaaaaa

SEQ ID NO: 2704655 - RNA, 19 nt, Human
aaacccuugccaugugcua

SEQ ID NO: 2704656 - RNA, 13 nt, Human
aaagaaacauuug

SEQ ID NO: 2704657 - RNA, 19 nt, Human
aaaauccauacauuugugu

SEQ ID NO: 2704658 - RNA, 12 nt, Human
aacacaucagcu

SEQ ID NO: 2704659 - RNA, 22 nt, Human
aaauugacacuuaaaaaugguu

SEQ ID NO: 2704660 - RNA, 20 nt, Human
aaauguucaucaaugaauga

SEQ ID NO: 2704661 - RNA, 14 nt, Human
aaaucuuaacuuga

SEQ ID NO: 2704662 - RNA, 23 nt, Human
aacugagaugugaacacaucagc

SEQ ID NO: 2704663 - RNA, 15 nt, Human
aauccaaugaaauga

SEQ ID NO: 2704664 - RNA, 16 nt, Human
aauccauacauuugug

SEQ ID NO: 2704665 - RNA, 17 nt, Human
aauccauacauuugugu

SEQ ID NO: 2704666 - RNA, 16 nt, Human
aaugauaacuggaaac

SEQ ID NO: 2704667 - RNA, 15 nt, Human
aaugauaacuggaaa

SEQ ID NO: 2704668 - RNA, 14 nt, Human
aaugauaacuggaa

SEQ ID NO: 2704669 - RNA, 22 nt, Human
aaucauuucugcaucagcugcu

SEQ ID NO: 2704670 - RNA, 15 nt, Human
aaucaaauaugcaaa

SEQ ID NO: 2704671 - RNA, 16 nt, Human
aaucaaauaugcaaag

SEQ ID NO: 2704672 - RNA, 22 nt, Human
aaucaaauaugcaaagcacuga

SEQ ID NO: 2704673 - RNA, 12 nt, Human
aauaauguuuca

SEQ ID NO: 2704674 - RNA, 19 nt, Human
aauaauguuucaaacauau

SEQ ID NO: 2704675 - RNA, 14 nt, Human
aauaauguuucaaa

SEQ ID NO: 2704676 - RNA, 10 nt, Human
aauaaaccau

SEQ ID NO: 2704677 - RNA, 22 nt, Human
aaguugauaugccuuuucccaa

SEQ ID NO: 2704678 - RNA, 17 nt, Human
aaguucugcagauaaac

SEQ ID NO: 2704679 - RNA, 15 nt, Human
aagcagggacuugaa

SEQ ID NO: 2704680 - RNA, 15 nt, Human
aagagaacuuccaga

SEQ ID NO: 2704681 - RNA, 23 nt, Human
aagacagugaaagaaaauaacaa

SEQ ID NO: 2704682 - RNA, 19 nt, Human
aagccagauuuuccugaaa

SEQ ID NO: 2704683 - RNA, 12 nt, Human
aaguagaggagg

SEQ ID NO: 2704684 - RNA, 15 nt, Human
aagggauuuucagcc

SEQ ID NO: 2704685 - RNA, 14 nt, Human
aagggauggcaaga

SEQ ID NO: 2704686 - RNA, 17 nt, Human
aagggauggcaagaugu

SEQ ID NO: 2704687 - RNA, 23 nt, Human
aagggauuuucagcccucagaau

SEQ ID NO: 2704688 - RNA, 21 nt, Human
aagggauuuucagcccucaga

SEQ ID NO: 2704689 - RNA, 24 nt, Human
agcaaaauuuuuucucuaggaaau

SEQ ID NO: 2704690 - RNA, 16 nt, Human
agauguagaggagaaa

SEQ ID NO: 2704691 - RNA, 19 nt, Human
agauguagaggagaaacug

SEQ ID NO: 2704692 - RNA, 22 nt, Human
agaagagcuguucacagccaga

SEQ ID NO: 2704693 - RNA, 21 nt, Human
agaagagcuguucacagccag

SEQ ID NO: 2704694 - RNA, 18 nt, Human
agaagacugcauuauauu

SEQ ID NO: 2704695 - RNA, 21 nt, Human
agaagugaaaaucuacacucc

SEQ ID NO: 2704696 - RNA, 17 nt, Human
agaaugauuaugaauua

SEQ ID NO: 2704697 - RNA, 22 nt, Human
agaaugagagacacacugaaga

SEQ ID NO: 2704698 - RNA, 17 nt, Human
agaaugagagacacacu

SEQ ID NO: 2704699 - RNA, 17 nt, Human
agacccaaaaggcagaa

SEQ ID NO: 2704700 - RNA, 19 nt, Human
agacccaaaaggcagaagc

SEQ ID NO: 2704701 - RNA, 20 nt, Human
agacuggauaguccgucucu

SEQ ID NO: 2704702 - RNA, 16 nt, Human
agacuggauaguccgu

SEQ ID NO: 2704703 - RNA, 18 nt, Human
agacucugucucagucca

SEQ ID NO: 2704704 - RNA, 13 nt, Human
agaggaaugaagu

SEQ ID NO: 2704705 - RNA, 21 nt, Human
aggccaugggcacugugggua

SEQ ID NO: 2704706 - RNA, 15 nt, Human
agggacugaggggag

SEQ ID NO: 2704707 - RNA, 22 nt, Human
agggauuuucagcccucagaau

SEQ ID NO: 2704708 - RNA, 17 nt, Human
agggauuuucagcccuc

SEQ ID NO: 2704709 - RNA, 15 nt, Human
agggauuagggagag

SEQ ID NO: 2704710 - RNA, 13 nt, Human
aggaaguagagga

SEQ ID NO: 2704711 - RNA, 20 nt, Human
agcuuauuuccucauuuuua

SEQ ID NO: 2704712 - RNA, 20 nt, Human
agcuccccucggagaagagc

SEQ ID NO: 2704713 - RNA, 17 nt, Human
agcuccccucggagaag

SEQ ID NO: 2704714 - RNA, 19 nt, Human
agcuccccucggagaagag

SEQ ID NO: 2704715 - RNA, 17 nt, Human
agcgacagugagacucu

SEQ ID NO: 2704716 - RNA, 18 nt, Human
augaugaucuuuaaaaua

SEQ ID NO: 2704717 - RNA, 21 nt, Human
augaugaucuuuaaaauacac

SEQ ID NO: 2704718 - RNA, 16 nt, Human
augaucuuuaaaauac

SEQ ID NO: 2704719 - RNA, 21 nt, Human
augucaaucagccuaguugau

SEQ ID NO: 2704720 - RNA, 16 nt, Human
augucaaucagccuag

SEQ ID NO: 2704721 - RNA, 15 nt, Human
augugaacacaucag

SEQ ID NO: 2704722 - RNA, 15 nt, Human
auguuccuagugaaa

SEQ ID NO: 2704723 - RNA, 16 nt, Human
auguuccuagugaaag

SEQ ID NO: 2704724 - RNA, 17 nt, Human
auguuccuagugaaaga

SEQ ID NO: 2704725 - RNA, 22 nt, Human
aucagcuugcccuguuaaaaga

SEQ ID NO: 2704726 - RNA, 13 nt, Human
aucagcuuauugu

SEQ ID NO: 2704727 - RNA, 17 nt, Human
aucaugaauuaguuuua

SEQ ID NO: 2704728 - RNA, 14 nt, Human
aucaaauaugcaaa

SEQ ID NO: 2704729 - RNA, 21 nt, Human
aucgcuccaccuugcagcucu

SEQ ID NO: 2704730 - RNA, 17 nt, Human
aucgcuccaccuugcag

SEQ ID NO: 2704731 - RNA, 19 nt, Human
auccucaguuuuugugaaa

SEQ ID NO: 2704732 - RNA, 13 nt, Human
augaaguacucau

SEQ ID NO: 2704733 - RNA, 21 nt, Human
augaaguacucauacauguua

SEQ ID NO: 2704734 - RNA, 23 nt, Human
augaaguccaagcauuuagaugu

SEQ ID NO: 2704735 - RNA, 20 nt, Human
augaaguccaagcauuuaga

SEQ ID NO: 2704736 - RNA, 19 nt, Human
aguugaaaagacuccaaag

SEQ ID NO: 2704737 - RNA, 20 nt, Human
aguugaaaagacuccaaaga

SEQ ID NO: 2704738 - RNA, 14 nt, Human
aguugaaaagacuc

SEQ ID NO: 2704739 - RNA, 18 nt, Human
aguugaaaagacuccaaa

SEQ ID NO: 2704740 - RNA, 20 nt, Human
aguucagagcugcccucucc

SEQ ID NO: 2704741 - RNA, 22 nt, Human
aguucagagcugcccucuccug

SEQ ID NO: 2704742 - RNA, 21 nt, Human
aguucagagcugcccucuccu

SEQ ID NO: 2704743 - RNA, 23 nt, Human
aguucagagcugcccucuccugg

SEQ ID NO: 2704744 - RNA, 19 nt, Human
agugucaaugcagccccca

SEQ ID NO: 2704745 - RNA, 11 nt, Human
aguccaagcau

SEQ ID NO: 2704746 - RNA, 15 nt, Human
auagcagcuuauuca

SEQ ID NO: 2704747 - RNA, 14 nt, Human
auauuauguuaaaa

SEQ ID NO: 2704748 - RNA, 13 nt, Human
auauuauguuaaa

SEQ ID NO: 2704749 - RNA, 21 nt, Human
auaacaaugcuguauuuuaaa

SEQ ID NO: 2704750 - RNA, 20 nt, Human
auaacaaugcuguauuuuaa

SEQ ID NO: 2704751 - RNA, 19 nt, Human
auaacaaugcuguauuuua

SEQ ID NO: 2704752 - RNA, 17 nt, Human
auaacaaugcuguauuu

SEQ ID NO: 2704753 - RNA, 15 nt, Human
auaacaaugcuguau

SEQ ID NO: 2704754 - RNA, 14 nt, Human
auaacaaugaaagu

SEQ ID NO: 2704755 - RNA, 18 nt, Human
auaauguuucaaacauau

SEQ ID NO: 2704756 - RNA, 21 nt, Human
auaagccagacaucaacagau

SEQ ID NO: 2704757 - RNA, 22 nt, Human
auaagccagacaucaacagaua

SEQ ID NO: 2704758 - RNA, 13 nt, Human
auaauguuucaaa

SEQ ID NO: 2704759 - RNA, 20 nt, Human
gcuccacuuggucugugaga

SEQ ID NO: 2704760 - RNA, 15 nt, Human
gcucugcccauccug

SEQ ID NO: 2704761 - RNA, 21 nt, Human
gcucugcccauccugccccug

SEQ ID NO: 2704762 - RNA, 12 nt, Human
gcugaacaucac

SEQ ID NO: 2704763 - RNA, 16 nt, Human
gcugaaacaacaaaua

SEQ ID NO: 2704764 - RNA, 12 nt, Human
gcuguauuuuaa

SEQ ID NO: 2704765 - RNA, 13 nt, Human
gcuguauuuuaaa

SEQ ID NO: 2704766 - RNA, 17 nt, Human
gcuuauuuccucauuuu

SEQ ID NO: 2704767 - RNA, 19 nt, Human
gcuuccuggcaauagucaa

SEQ ID NO: 2704768 - RNA, 15 nt, Human
gccuccauccugagg

SEQ ID NO: 2704769 - RNA, 16 nt, Human
gccuccauccugaggc

SEQ ID NO: 2704770 - RNA, 20 nt, Human
gccuccauccugaggcucca

SEQ ID NO: 2704771 - RNA, 17 nt, Human
gcuacuugggaggcuga

SEQ ID NO: 2704772 - RNA, 15 nt, Human
gcuacugucagcucc

SEQ ID NO: 2704773 - RNA, 18 nt, Human
gcuacaaaaacacagcaa

SEQ ID NO: 2704774 - RNA, 19 nt, Human
gcuacaaaaacacagcaag

SEQ ID NO: 2704775 - RNA, 17 nt, Human
gcuacaaaaacacagca

SEQ ID NO: 2704776 - RNA, 22 nt, Human
gccaugugcuaguaauuggaaa

SEQ ID NO: 2704777 - RNA, 18 nt, Human
gccccacccucagaugca

SEQ ID NO: 2704778 - RNA, 15 nt, Human
gccccacccucagau

SEQ ID NO: 2704779 - RNA, 22 nt, Human
gccaguuauggcuauaggugcu

SEQ ID NO: 2704780 - RNA, 19 nt, Human
gccagcaguucagagcugc

SEQ ID NO: 2704781 - RNA, 14 nt, Human
gccagcaguucaga

SEQ ID NO: 2704782 - RNA, 13 nt, Human
gccagcaguucag

SEQ ID NO: 2704783 - RNA, 21 nt, Human
gccagcaguucagagcugccc

SEQ ID NO: 2704784 - RNA, 20 nt, Human
gccagcaguucagagcugcc

SEQ ID NO: 2704785 - RNA, 22 nt, Human
ggauguugaaaaaguucugcag

SEQ ID NO: 2704786 - RNA, 12 nt, Human
ggauggcaagau

SEQ ID NO: 2704787 - RNA, 22 nt, Human
ggccuucggccuccauccugag

SEQ ID NO: 2704788 - RNA, 23 nt, Human
ggccuucggccuccauccugagg

SEQ ID NO: 2704789 - RNA, 14 nt, Human
aaagacuauucaaa

SEQ ID NO: 2704790 - RNA, 15 nt, Human
aaagacuauucaaac

SEQ ID NO: 2704791 - RNA, 17 nt, Human
aaagcagggacuugaac

SEQ ID NO: 2704792 - RNA, 16 nt, Human
ggugugaccacugcag

SEQ ID NO: 2704793 - RNA, 12 nt, Human
gguuucuagcau

SEQ ID NO: 2704794 - RNA, 16 nt, Human
gguuuagaaagcuugc

SEQ ID NO: 2704795 - RNA, 20 nt, Human
aaauaauuuuuauauuugaa

SEQ ID NO: 2704796 - RNA, 18 nt, Human
aaauaauuuuuauauuug

SEQ ID NO: 2704797 - RNA, 15 nt, Human
aaauaauuuuuauau

SEQ ID NO: 2704798 - RNA, 15 nt, Human
aaaaugugauaugua

SEQ ID NO: 2704799 - RNA, 22 nt, Human
aaaauuuuuucucuaggaaaua

SEQ ID NO: 2704800 - RNA, 20 nt, Human
aaacaagcacuaaacaaaga

SEQ ID NO: 2704801 - RNA, 20 nt, Human
aaacagucucaggaaaucaa

SEQ ID NO: 2704802 - RNA, 15 nt, Human
gggcgugguggugag

SEQ ID NO: 2704803 - RNA, 19 nt, Human
aaaaguauguuagugcaaa

SEQ ID NO: 2704804 - RNA, 16 nt, Human
gggauuguaaaauggu

SEQ ID NO: 2704805 - RNA, 17 nt, Human
gggauuguaaaauggug

SEQ ID NO: 2704806 - RNA, 13 nt, Human
aaaaccacagcag

SEQ ID NO: 2704807 - RNA, 14 nt, Human
aaaaccacagcagu

SEQ ID NO: 2704808 - RNA, 17 nt, Human
aaaagaugaaaauauuu

SEQ ID NO: 2704809 - RNA, 13 nt, Human
aaaacucauuuuu

SEQ ID NO: 2704810 - RNA, 22 nt, Human
aaaaauggaacauaaaauacaa

SEQ ID NO: 2704811 - RNA, 12 nt, Human
aaaaccacagca

SEQ ID NO: 2704812 - RNA, 19 nt, Human
gggacauuugcucauggaa

SEQ ID NO: 2704813 - RNA, 21 nt, Human
gggacauuugcucauggaauu

SEQ ID NO: 2704814 - RNA, 20 nt, Human
gggacauuugcucauggaau

SEQ ID NO: 2704815 - RNA, 20 nt, Human
gaaugagagacacacugaag

SEQ ID NO: 2704816 - RNA, 23 nt, Human
gaaugagagacacacugaagaag

SEQ ID NO: 2704817 - RNA, 22 nt, Human
gaaugagagacacacugaagaa

SEQ ID NO: 2704818 - RNA, 12 nt, Human
gacacacaugaa

SEQ ID NO: 2704819 - RNA, 13 nt, Human
gacacacugaaga

SEQ ID NO: 2704820 - RNA, 11 nt, Human
gaauuaguuuu

SEQ ID NO: 2704821 - RNA, 14 nt, Human
gacagugaaagaaa

SEQ ID NO: 2704822 - RNA, 17 nt, Human
gacagucaccucaugga

SEQ ID NO: 2704823 - RNA, 20 nt, Human
gacaguauggcagcuuuccu

SEQ ID NO: 2704824 - RNA, 16 nt, Human
gacacuuaaaaauggu

SEQ ID NO: 2704825 - RNA, 22 nt, Human
gacuauucaaacagucucagga

SEQ ID NO: 2704826 - RNA, 16 nt, Human
gacucuuaagaagacu

SEQ ID NO: 2704827 - RNA, 15 nt, Human
gacucuuaagaagac

SEQ ID NO: 2704828 - RNA, 17 nt, Human
gacucuuaagaagacug

SEQ ID NO: 2704829 - RNA, 14 nt, Human
gagaaucacuugaa

SEQ ID NO: 2704830 - RNA, 15 nt, Human
gagaaucacuugaac

SEQ ID NO: 2704831 - RNA, 21 nt, Human
gcacaugagcuggcgggauug

SEQ ID NO: 2704832 - RNA, 14 nt, Human
gcacaguuuucuga

SEQ ID NO: 2704833 - RNA, 17 nt, Human
gcacaguuuucugagaa

SEQ ID NO: 2704834 - RNA, 18 nt, Human
gcacaguuuucugagaaa

SEQ ID NO: 2704835 - RNA, 19 nt, Human
gcagggacuugaacccaua

SEQ ID NO: 2704836 - RNA, 22 nt, Human
gcagcugccuccccuccucugc

SEQ ID NO: 2704837 - RNA, 18 nt, Human
gcagcugccuccccuccu

SEQ ID NO: 2704838 - RNA, 17 nt, Human
gcagcugccuccccucc

SEQ ID NO: 2704839 - RNA, 16 nt, Human
gcagcugccuccccuc

SEQ ID NO: 2704840 - RNA, 15 nt, Human
gcagcugccuccccu

SEQ ID NO: 2704841 - RNA, 13 nt, Human
gcagcugccuccc

SEQ ID NO: 2704842 - RNA, 12 nt, Human
gcagcugccucc

SEQ ID NO: 2704843 - RNA, 11 nt, Human
gcagcugccuc

SEQ ID NO: 2704844 - RNA, 17 nt, Human
gauuagggagagaagau

SEQ ID NO: 2704845 - RNA, 14 nt, Human
gaugugaacacauc

SEQ ID NO: 2704846 - RNA, 16 nt, Human
gaugugaacacaucag

SEQ ID NO: 2704847 - RNA, 14 nt, Human
gauuaccagggacu

SEQ ID NO: 2704848 - RNA, 20 nt, Human
gauauguaccuaacgaagua

SEQ ID NO: 2704849 - RNA, 16 nt, Human
gaguuuagcuggaaaa

SEQ ID NO: 2704850 - RNA, 21 nt, Human
gagugcucaguagucagacug

SEQ ID NO: 2704851 - RNA, 19 nt, Human
gaaaucaaauaugcaaagc

SEQ ID NO: 2704852 - RNA, 20 nt, Human
gaaaucaaauaugcaaagca

SEQ ID NO: 2704853 - RNA, 22 nt, Human
gaaauauuuauuuuaauaaugu

SEQ ID NO: 2704854 - RNA, 18 nt, Human
gaaauauuuauuuuaaua

SEQ ID NO: 2704855 - RNA, 18 nt, Human
gaaaucaaauaugcaaag

SEQ ID NO: 2704856 - RNA, 17 nt, Human
gaaaucaaauaugcaaa

SEQ ID NO: 2704857 - RNA, 17 nt, Human
gaaauauuuauuuuaau

SEQ ID NO: 2704858 - RNA, 14 nt, Human
gaaagacuauucaa

SEQ ID NO: 2704859 - RNA, 15 nt, Human
gaaagacuauucaaa

SEQ ID NO: 2704860 - RNA, 17 nt, Human
gaaagacuauucaaaca

SEQ ID NO: 2704861 - RNA, 15 nt, Human
cuucacuguaaaaua

SEQ ID NO: 2704862 - RNA, 22 nt, Human
cuucuaaguaaaaccacagcag

SEQ ID NO: 2704863 - RNA, 23 nt, Human
cuucuaaguaaaaccacagcagu

SEQ ID NO: 2704864 - RNA, 12 nt, Human
cuugaugaagaa

SEQ ID NO: 2704865 - RNA, 13 nt, Human
cuugaugaagaag

SEQ ID NO: 2704866 - RNA, 10 nt, Human
cugggacagg

SEQ ID NO: 2704867 - RNA, 22 nt, Human
cugggcagcugccuccccuccu

SEQ ID NO: 2704868 - RNA, 21 nt, Human
cugggcagcugccuccccucc

SEQ ID NO: 2704869 - RNA, 20 nt, Human
cugggcagcugccuccccuc

SEQ ID NO: 2704870 - RNA, 19 nt, Human
cugggcagcugccuccccu

SEQ ID NO: 2704871 - RNA, 16 nt, Human
cugggcagcugccucc

SEQ ID NO: 2704872 - RNA, 21 nt, Human
cugucagcuccccucggagaa

SEQ ID NO: 2704873 - RNA, 23 nt, Human
cugucagcuccccucggagaaga

SEQ ID NO: 2704874 - RNA, 16 nt, Human
cugugagaugcuagaa

SEQ ID NO: 2704875 - RNA, 21 nt, Human
cuggaaaucaggguuaguauu

SEQ ID NO: 2704876 - RNA, 20 nt, Human
cucuuagaugcaguucugaa

SEQ ID NO: 2704877 - RNA, 15 nt, Human
cucuuagaugcaguu

SEQ ID NO: 2704878 - RNA, 12 nt, Human
cucucuggccuu

SEQ ID NO: 2704879 - RNA, 11 nt, Human
cucucuggccu

SEQ ID NO: 2704880 - RNA, 16 nt, Human
cucccugcaauaaaau

SEQ ID NO: 2704881 - RNA, 14 nt, Human
cucccugcaauaaa

SEQ ID NO: 2704882 - RNA, 21 nt, Human
cuccagugagacagcucugca

SEQ ID NO: 2704883 - RNA, 23 nt, Human
cuaguugaucagcuuauugucua

SEQ ID NO: 2704884 - RNA, 16 nt, Human
cuagcaugaagacaga

SEQ ID NO: 2704885 - RNA, 16 nt, Human
cuagaacucccuuuca

SEQ ID NO: 2704886 - RNA, 17 nt, Human
cuagaacucccuuucaa

SEQ ID NO: 2704887 - RNA, 18 nt, Human
cuagaacucccuuucaac

SEQ ID NO: 2704888 - RNA, 19 nt, Human
cuagaacucccuuucaaca

SEQ ID NO: 2704889 - RNA, 15 nt, Human
cguggugauuuagca

SEQ ID NO: 2704890 - RNA, 15 nt, Human
cuacaugagguacug

SEQ ID NO: 2704891 - RNA, 20 nt, Human
cuaagugaaauaagccagac

SEQ ID NO: 2704892 - RNA, 23 nt, Human
cuaagugaaauaagccagacauc

SEQ ID NO: 2704893 - RNA, 15 nt, Human
cgacagugagacucu

SEQ ID NO: 2704894 - RNA, 16 nt, Human
cgacagugagacucug

SEQ ID NO: 2704895 - RNA, 17 nt, Human
cccuucuuuccacagaa

SEQ ID NO: 2704896 - RNA, 13 nt, Human
cccuucucuguau

SEQ ID NO: 2704897 - RNA, 24 nt, Human
ccguagacgugcacgcacacuguc

SEQ ID NO: 2704898 - RNA, 16 nt, Human
ccguagguuauuuuca

SEQ ID NO: 2704899 - RNA, 20 nt, Human
ccucauguccacugguucuu

SEQ ID NO: 2704900 - RNA, 15 nt, Human
ccucauguccacugg

SEQ ID NO: 2704901 - RNA, 13 nt, Human
ccucugcuugcca

SEQ ID NO: 2704902 - RNA, 15 nt, Human
ccagauccuggaaau

SEQ ID NO: 2704903 - RNA, 23 nt, Human
cccgggaggcagagguugcagug

SEQ ID NO: 2704904 - RNA, 22 nt, Human
cccauuguggucacaggaagua

SEQ ID NO: 2704905 - RNA, 23 nt, Human
cccauuguggucacaggaaguag

SEQ ID NO: 2704906 - RNA, 20 nt, Human
cccagccagcaguucagagc

SEQ ID NO: 2704907 - RNA, 17 nt, Human
cccagccagcaguucag

SEQ ID NO: 2704908 - RNA, 16 nt, Human
cccagccagcaguuca

SEQ ID NO: 2704909 - RNA, 20 nt, Human
cccauauuuguacaccaaua

SEQ ID NO: 2704910 - RNA, 20 nt, Human
cagccagacuggcacaguuu

SEQ ID NO: 2704911 - RNA, 22 nt, Human
cagcaguucagagcugcccucu

SEQ ID NO: 2704912 - RNA, 21 nt, Human
cagcaguucagagcugcccuc

SEQ ID NO: 2704913 - RNA, 20 nt, Human
cagcaguucagagcugcccu

SEQ ID NO: 2704914 - RNA, 19 nt, Human
cagcaguucagagcugccc

SEQ ID NO: 2704915 - RNA, 18 nt, Human
cagcaguucagagcugcc

SEQ ID NO: 2704916 - RNA, 19 nt, Human
cagccccgugggguuccuc

SEQ ID NO: 2704917 - RNA, 23 nt, Human
cagccugagcgacagugagacuc

SEQ ID NO: 2704918 - RNA, 22 nt, Human
cagggaggacgcucucuggccu

SEQ ID NO: 2704919 - RNA, 19 nt, Human
cagggaggacgcucucugg

SEQ ID NO: 2704920 - RNA, 16 nt, Human
cagcuuauucacaaga

SEQ ID NO: 2704921 - RNA, 19 nt, Human
caggaaaucaaauaugcaa

SEQ ID NO: 2704922 - RNA, 21 nt, Human
caggaaaucaaauaugcaaag

SEQ ID NO: 2704923 - RNA, 24 nt, Human
caggacagcccuucuuuccacaga

SEQ ID NO: 2704924 - RNA, 23 nt, Human
caggacagcccuucuuuccacag

SEQ ID NO: 2704925 - RNA, 18 nt, Human
ccaaauguucaucaauga

SEQ ID NO: 2704926 - RNA, 15 nt, Human
cauuaggauggcuag

SEQ ID NO: 2704927 - RNA, 17 nt, Human
cauagauucccugagca

SEQ ID NO: 2704928 - RNA, 18 nt, Human
cauagauucccugagcag

SEQ ID NO: 2704929 - RNA, 20 nt, Human
cauagcagcuuauucacaag

SEQ ID NO: 2704930 - RNA, 17 nt, Human
caucagcugcugaaaca

SEQ ID NO: 2704931 - RNA, 18 nt, Human
caucagcugcugaaacaa

SEQ ID NO: 2704932 - RNA, 15 nt, Human
caucagcugcugaaa

SEQ ID NO: 2704933 - RNA, 13 nt, Human
caucagcugcuga

SEQ ID NO: 2704934 - RNA, 20 nt, Human
caucagcuugcccuguuaaa

SEQ ID NO: 2704935 - RNA, 16 nt, Human
caugaauuaguuuuau

SEQ ID NO: 2704936 - RNA, 22 nt, Human
cacugguucuucuuggucucag

SEQ ID NO: 2704937 - RNA, 16 nt, Human
cacuugucaauaaaau

SEQ ID NO: 2704938 - RNA, 19 nt, Human
cacuuguguuuugcaagcc

SEQ ID NO: 2704939 - RNA, 22 nt, Human
cacuuguguuuugcaagccaga

SEQ ID NO: 2704940 - RNA, 21 nt, Human
cacugcagaagacaguauggc

SEQ ID NO: 2704941 - RNA, 20 nt, Human
cacuagggcagggacaggau

SEQ ID NO: 2704942 - RNA, 21 nt, Human
cacuagggcagggacaggaua

SEQ ID NO: 2704943 - RNA, 14 nt, Human
caaguccaagcaua

SEQ ID NO: 2704944 - RNA, 15 nt, Human
caauucuugccaaau

SEQ ID NO: 2704945 - RNA, 17 nt, Human
caaugcuguauuuuaaa

SEQ ID NO: 2704946 - RNA, 16 nt, Human
caaugcuguauuuuaa

SEQ ID NO: 2704947 - RNA, 15 nt, Human
caaugcuguauuuua

SEQ ID NO: 2704948 - RNA, 18 nt, Human
cacaagacugcacaucaa

SEQ ID NO: 2704949 - RNA, 22 nt, Human
cacacaugaaguccaagcauuu

SEQ ID NO: 2704950 - RNA, 17 nt, Human
cacacaugaaguccaag

SEQ ID NO: 2704951 - RNA, 21 nt, Human
cacagccucuuagaugcaguu

SEQ ID NO: 2704952 - RNA, 17 nt, Human
cacagccucuuagaugc

SEQ ID NO: 2704953 - RNA, 14 nt, Human
auuguaaaauggug

SEQ ID NO: 2704954 - RNA, 13 nt, Human
auuguaaaauggu

SEQ ID NO: 2704955 - RNA, 23 nt, Human
auuguaauaggcguaacuaauuu

SEQ ID NO: 2704956 - RNA, 19 nt, Human
auucauagcagcuuauuca

SEQ ID NO: 2704957 - RNA, 22 nt, Human
auucauagcagcuuauucacaa

SEQ ID NO: 2704958 - RNA, 18 nt, Human
auuaugaauuacauuugu

SEQ ID NO: 2704959 - RNA, 19 nt, Human
auucacaagacccaaaagg

SEQ ID NO: 2704960 - RNA, 16 nt, Human
auuagggagagaagau

SEQ ID NO: 2704961 - RNA, 17 nt, Human
auuaugaauuacauuug

SEQ ID NO: 2704962 - RNA, 14 nt, Human
auuaugaauuacau

SEQ ID NO: 2704963 - RNA, 17 nt, Human
auuuuauagcuacuaau

SEQ ID NO: 2704964 - RNA, 19 nt, Human
auuuuauagcuacuaauuu

SEQ ID NO: 2704965 - RNA, 17 nt, Human
auuugcucauggaauug

SEQ ID NO: 2704966 - RNA, 14 nt, Human
auuugcucauggaa

SEQ ID NO: 2704967 - RNA, 13 nt, Human
caaacccaguguu

SEQ ID NO: 2704968 - RNA, 15 nt, Human
caaaaggcagaagca

SEQ ID NO: 2704969 - RNA, 20 nt, Human
caaaaaaaaaaaaaaauuag

SEQ ID NO: 2704970 - RNA, 20 nt, Human
caaagcacugacuucuaagu

SEQ ID NO: 2704971 - RNA, 22 nt, Human
caaagcacugacuucuaaguaa

SEQ ID NO: 2704972 - RNA, 23 nt, Human
caacacgagcaggcuacugucag

SEQ ID NO: 2704973 - RNA, 19 nt, Human
augagagacacacugaaga

SEQ ID NO: 2704974 - RNA, 17 nt, Human
augagagacacacugaa

SEQ ID NO: 2704975 - RNA, 14 nt, Human
augagagacacacu

SEQ ID NO: 2704976 - RNA, 13 nt, Human
augagagacacac

SEQ ID NO: 2704977 - RNA, 17 nt, Human
uuguauaaaauaauuuu

SEQ ID NO: 2704978 - RNA, 16 nt, Human
uuguaucacaaaucuu

SEQ ID NO: 2704979 - RNA, 15 nt, Human
uuguauaaaauaauu

SEQ ID NO: 2704980 - RNA, 16 nt, Human
uuguauaaaauaauuu

SEQ ID NO: 2704981 - RNA, 18 nt, Human
augaagauguagaggaga

SEQ ID NO: 2704982 - RNA, 13 nt, Human
augaaugaauggc

SEQ ID NO: 2704983 - RNA, 17 nt, Human
augaaauauuauguuaa

SEQ ID NO: 2704984 - RNA, 13 nt, Human
augaaauauuaug

SEQ ID NO: 2704985 - RNA, 18 nt, Human
augaaauauuauguuaaa

SEQ ID NO: 2704986 - RNA, 15 nt, Human
augaaagcagggacu

SEQ ID NO: 2704987 - RNA, 13 nt, Human
aucuuuuucuaac

SEQ ID NO: 2704988 - RNA, 18 nt, Human
uugauggugguauguuuu

SEQ ID NO: 2704989 - RNA, 19 nt, Human
uugauggugguauguuuuc

SEQ ID NO: 2704990 - RNA, 23 nt, Human
aucucauuuccaagcaaguauua

SEQ ID NO: 2704991 - RNA, 21 nt, Human
aucucauuuccaagcaaguau

SEQ ID NO: 2704992 - RNA, 13 nt, Human
aucucaauauuuc

SEQ ID NO: 2704993 - RNA, 13 nt, Human
uugcccuguuaaa

SEQ ID NO: 2704994 - RNA, 22 nt, Human
uuuagcuggaaaaguauguuag

SEQ ID NO: 2704995 - RNA, 20 nt, Human
uuuagcuggaaaaguauguu

SEQ ID NO: 2704996 - RNA, 13 nt, Human
uuuauauaagcuu

SEQ ID NO: 2704997 - RNA, 15 nt, Human
augcuagaacucccu

SEQ ID NO: 2704998 - RNA, 16 nt, Human
augcuagaacucccuu

SEQ ID NO: 2704999 - RNA, 19 nt, Human
augcuagaacucccuuuca

SEQ ID NO: 2705000 - RNA, 22 nt, Human
augcugucuacacuaagagaga

SEQ ID NO: 2705001 - RNA, 20 nt, Human
auggcuaguaucaaaagaaa

SEQ ID NO: 2705002 - RNA, 17 nt, Human
augcaguucugaagaag

SEQ ID NO: 2705003 - RNA, 15 nt, Human
augcaguucugaaga

SEQ ID NO: 2705004 - RNA, 19 nt, Human
augcaguucugaagaagau

SEQ ID NO: 2705005 - RNA, 18 nt, Human
augcaguucugaagaaga

SEQ ID NO: 2705006 - RNA, 15 nt, Human
augccacuaaauuga

SEQ ID NO: 2705007 - RNA, 17 nt, Human
augccacuaaauugaca

SEQ ID NO: 2705008 - RNA, 14 nt, Human
uuguuuucauuauc

SEQ ID NO: 2705009 - RNA, 15 nt, Human
augcaaagcacugac

SEQ ID NO: 2705010 - RNA, 12 nt, Human
augauucccagc

SEQ ID NO: 2705011 - RNA, 22 nt, Human
augauuaugaauuacauuugua

SEQ ID NO: 2705012 - RNA, 21 nt, Human
augagagacacacugaagaag

SEQ ID NO: 2705013 - RNA, 20 nt, Human
augagagacacacugaagaa

SEQ ID NO: 2705014 - RNA, 23 nt, Human
augagagacacacugaagaagca

SEQ ID NO: 2705015 - RNA, 23 nt, Human
uugugugaaagguacuucaaauc

SEQ ID NO: 2705016 - RNA, 19 nt, Human
uugaaauauugacuuuuua

SEQ ID NO: 2705017 - RNA, 14 nt, Human
auccauacauuugu

SEQ ID NO: 2705018 - RNA, 20 nt, Human
aucauuucugcaucagcugc

SEQ ID NO: 2705019 - RNA, 13 nt, Human
uucuauaauuuaa

SEQ ID NO: 2705020 - RNA, 14 nt, Human
uucuauaauuuaaa

SEQ ID NO: 2705021 - RNA, 21 nt, Human
uucuaaguaaaaccacagcag

SEQ ID NO: 2705022 - RNA, 19 nt, Human
uucuaaguaaaaccacagc

SEQ ID NO: 2705023 - RNA, 20 nt, Human
uucuaaguaaaaccacagca

SEQ ID NO: 2705024 - RNA, 17 nt, Human
uucuaaguaaaaccaca

SEQ ID NO: 2705025 - RNA, 20 nt, Human
aucaaauaugcaaagcacug

SEQ ID NO: 2705026 - RNA, 12 nt, Human
uucccaaauuuc

SEQ ID NO: 2705027 - RNA, 18 nt, Human
uucccaacuccagaaagu

SEQ ID NO: 2705028 - RNA, 18 nt, Human
uucaaacagucucaggaa

SEQ ID NO: 2705029 - RNA, 14 nt, Human
uucaaacauauaua

SEQ ID NO: 2705030 - RNA, 22 nt, Human
auaggaauugacccacaagaaa

SEQ ID NO: 2705031 - RNA, 17 nt, Human
auaggcguaacuaauuu

SEQ ID NO: 2705032 - RNA, 22 nt, Human
uucacaagacccaaaaggcaga

SEQ ID NO: 2705033 - RNA, 23 nt, Human
uucacaagacccaaaaggcagaa

SEQ ID NO: 2705034 - RNA, 20 nt, Human
auaguuguaccgcaauguga

SEQ ID NO: 2705035 - RNA, 17 nt, Human
auauaacaaugcuguau

SEQ ID NO: 2705036 - RNA, 14 nt, Human
auauauaacaaugc

SEQ ID NO: 2705037 - RNA, 18 nt, Human
auuuguaguguuggagaa

SEQ ID NO: 2705038 - RNA, 23 nt, Human
auuugguaaggggaauugaggac

SEQ ID NO: 2705039 - RNA, 22 nt, Human
auuuauuacuguaagaaaauau

SEQ ID NO: 2705040 - RNA, 15 nt, Human
auuuguaucacaaau

SEQ ID NO: 2705041 - RNA, 21 nt, Human
auuuguauaaaauaauuuuua

SEQ ID NO: 2705042 - RNA, 16 nt, Human
auuuuaauaauguuuc

SEQ ID NO: 2705043 - RNA, 15 nt, Human
auuuuaauaauguuu

SEQ ID NO: 2705044 - RNA, 14 nt, Human
auuuuaauaauguu

SEQ ID NO: 2705045 - RNA, 21 nt, Human
auugacccacaagaaaugaaa

SEQ ID NO: 2705046 - RNA, 20 nt, Human
auugacacuuaaaaaugguu

SEQ ID NO: 2705047 - RNA, 13 nt, Human
auugugccccugc

SEQ ID NO: 2705048 - RNA, 14 nt, Human
auuguauuacaaau

SEQ ID NO: 2705049 - RNA, 19 nt, Human
auuuaaagcuuauuaaaac

SEQ ID NO: 2705050 - RNA, 16 nt, Human
auuuacaaaugggaaa

SEQ ID NO: 2705051 - RNA, 20 nt, Human
auuccacuuauaggaauuga

SEQ ID NO: 2705052 - RNA, 14 nt, Human
auucaaacagucuc

SEQ ID NO: 2705053 - RNA, 15 nt, Human
auucaaacagucuca

SEQ ID NO: 2705054 - RNA, 13 nt, Human
auuacauuuguau

SEQ ID NO: 2705055 - RNA, 20 nt, Human
auuacauuuguauaaaauaa

SEQ ID NO: 2705056 - RNA, 15 nt, Human
auuacauuuguauaa

SEQ ID NO: 2705057 - RNA, 23 nt, Human
uuuuuuaaaaaagaaacauuugg

SEQ ID NO: 2705058 - RNA, 15 nt, Human
auuaaguaaugauaa

SEQ ID NO: 2705059 - RNA, 13 nt, Human
auuaaguaaugau

SEQ ID NO: 2705060 - RNA, 16 nt, Human
auuauauuuacaaaug

SEQ ID NO: 2705061 - RNA, 20 nt, Human
auuauuaccuuacagaaguu

SEQ ID NO: 2705062 - RNA, 18 nt, Human
auuaucucaaaacugcac

SEQ ID NO: 2705063 - RNA, 23 nt, Human
auuaucucaaaacugcacuguca

SEQ ID NO: 2705064 - RNA, 17 nt, Human
auuauauuuacaaaugg

SEQ ID NO: 2705065 - RNA, 14 nt, Human
uuuuauaauuuugu

SEQ ID NO: 2705066 - RNA, 23 nt, Human
uuuuauggaggcuuugcauagau

SEQ ID NO: 2705067 - RNA, 19 nt, Human
uuuuauggcacuaguauuu

SEQ ID NO: 2705068 - RNA, 19 nt, Human
auguucaucaaugaaugaa

SEQ ID NO: 2705069 - RNA, 15 nt, Human
auguugacaugggac

SEQ ID NO: 2705070 - RNA, 16 nt, Human
auuaaaagaauauuuu

SEQ ID NO: 2705071 - RNA, 18 nt, Human
auguuucaaacauauaua

SEQ ID NO: 2705072 - RNA, 21 nt, Human
auguuucaaacauauauaaca

SEQ ID NO: 2705073 - RNA, 13 nt, Human
uuuuaaaaaagaa

SEQ ID NO: 2705074 - RNA, 15 nt, Human
uuuuaaaagaaugau

SEQ ID NO: 2705075 - RNA, 14 nt, Human
uuuuaaaagaauga

SEQ ID NO: 2705076 - RNA, 12 nt, Human
uuugcucaugga

SEQ ID NO: 2705077 - RNA, 11 nt, Human
uuugcucaugg

SEQ ID NO: 2705078 - RNA, 15 nt, Human
auggcuauaggugcu

SEQ ID NO: 2705079 - RNA, 13 nt, Human
uuugcucauggaa

SEQ ID NO: 2705080 - RNA, 15 nt, Human
auaaauaguuuauga

SEQ ID NO: 2705081 - RNA, 14 nt, Human
auaaauaaaaauaa

SEQ ID NO: 2705082 - RNA, 13 nt, Human
auaaauaaaaaua

SEQ ID NO: 2705083 - RNA, 22 nt, Human
auaacgauaaaagacagugaaa

SEQ ID NO: 2705084 - RNA, 18 nt, Human
auaauccuaaacauauga

SEQ ID NO: 2705085 - RNA, 14 nt, Human
aguuuaaauuguaa

SEQ ID NO: 2705086 - RNA, 13 nt, Human
uguuucaaacaua

SEQ ID NO: 2705087 - RNA, 12 nt, Human
auaaaauaauuu

SEQ ID NO: 2705088 - RNA, 22 nt, Human
auaaaauaauuuuuauauuuga

SEQ ID NO: 2705089 - RNA, 19 nt, Human
aguuuucugagaaagacua

SEQ ID NO: 2705090 - RNA, 18 nt, Human
aguuuucugagaaagacu

SEQ ID NO: 2705091 - RNA, 23 nt, Human
aguuuucugagaaagacuauuca

SEQ ID NO: 2705092 - RNA, 19 nt, Human
aguucggugagcuacaaau

SEQ ID NO: 2705093 - RNA, 16 nt, Human
aguguuggagaagaac

SEQ ID NO: 2705094 - RNA, 14 nt, Human
aguguuggagaaga

SEQ ID NO: 2705095 - RNA, 18 nt, Human
aguguuggagaagaacug

SEQ ID NO: 2705096 - RNA, 17 nt, Human
aguguuggagaagaacu

SEQ ID NO: 2705097 - RNA, 21 nt, Human
agugcaaauugucacaggaca

SEQ ID NO: 2705098 - RNA, 18 nt, Human
agugcaaauugucacagg

SEQ ID NO: 2705099 - RNA, 22 nt, Human
agugcaaauugucacaggacag

SEQ ID NO: 2705100 - RNA, 21 nt, Human
agugccuguaaucacagcuac

SEQ ID NO: 2705101 - RNA, 23 nt, Human
agguacuucaaauccuugaagau

SEQ ID NO: 2705102 - RNA, 17 nt, Human
aggguuaugauuaagua

SEQ ID NO: 2705103 - RNA, 20 nt, Human
ugguaaggggaauugaggac

SEQ ID NO: 2705104 - RNA, 17 nt, Human
agggcagggacaggaua

SEQ ID NO: 2705105 - RNA, 23 nt, Human
agucagacuggauaguccgucuc

SEQ ID NO: 2705106 - RNA, 15 nt, Human
agucaggaaagagaa

SEQ ID NO: 2705107 - RNA, 16 nt, Human
agucaggaaagagaac

SEQ ID NO: 2705108 - RNA, 23 nt, Human
ugucauuugcuggagcucugccc

SEQ ID NO: 2705109 - RNA, 15 nt, Human
aguauuucuaugaaa

SEQ ID NO: 2705110 - RNA, 13 nt, Human
aguauuucuauga

SEQ ID NO: 2705111 - RNA, 22 nt, Human
aguauuucuaugaaauauuaug

SEQ ID NO: 2705112 - RNA, 20 nt, Human
ugucaaucagccuaguugau

SEQ ID NO: 2705113 - RNA, 21 nt, Human
ugucaauaaaauccauacauu

SEQ ID NO: 2705114 - RNA, 18 nt, Human
uguagaggagaaacugga

SEQ ID NO: 2705115 - RNA, 16 nt, Human
uguagaggagaaacug

SEQ ID NO: 2705116 - RNA, 15 nt, Human
aguaaaaccacagca

SEQ ID NO: 2705117 - RNA, 19 nt, Human
aguagauaggccaugggca

SEQ ID NO: 2705118 - RNA, 11 nt, Human
ugcucauggaa

SEQ ID NO: 2705119 - RNA, 14 nt, Human
ugcucauggaauug

SEQ ID NO: 2705120 - RNA, 12 nt, Human
aggaaauauuua

SEQ ID NO: 2705121 - RNA, 23 nt, Human
aggaaaucaaauaugcaaagcac

SEQ ID NO: 2705122 - RNA, 13 nt, Human
aggaaauauuuau

SEQ ID NO: 2705123 - RNA, 17 nt, Human
aggacacugauaugggu

SEQ ID NO: 2705124 - RNA, 22 nt, Human
ugcuguauuuuaaaagaaugau

SEQ ID NO: 2705125 - RNA, 21 nt, Human
ugcuguauuuuaaaagaauga

SEQ ID NO: 2705126 - RNA, 13 nt, Human
ugcuguauuuuaa

SEQ ID NO: 2705127 - RNA, 17 nt, Human
agcuugaaacugagaug

SEQ ID NO: 2705128 - RNA, 20 nt, Human
ugcuacaaaaacacagcaag

SEQ ID NO: 2705129 - RNA, 15 nt, Human
ugcuacaaaaacaca

SEQ ID NO: 2705130 - RNA, 16 nt, Human
ugcuacaaaaacacag

SEQ ID NO: 2705131 - RNA, 17 nt, Human
ugcuacaaaaacacagc

SEQ ID NO: 2705132 - RNA, 18 nt, Human
ugcuacaaaaacacagca

SEQ ID NO: 2705133 - RNA, 19 nt, Human
ugcuacaaaaacacagcaa

SEQ ID NO: 2705134 - RNA, 16 nt, Human
agcugccuccccuccu

SEQ ID NO: 2705135 - RNA, 15 nt, Human
agcugccuccccucc

SEQ ID NO: 2705136 - RNA, 22 nt, Human
agcugcccucuccugggcagcu

SEQ ID NO: 2705137 - RNA, 16 nt, Human
agcuguucacagccag

SEQ ID NO: 2705138 - RNA, 19 nt, Human
agcuguucacagccagacu

SEQ ID NO: 2705139 - RNA, 18 nt, Human
uggcacaguuuucugaga

SEQ ID NO: 2705140 - RNA, 19 nt, Human
uggcacaguuuucugagaa

SEQ ID NO: 2705141 - RNA, 13 nt, Human
uggaaaggcagcu

SEQ ID NO: 2705142 - RNA, 14 nt, Human
uggagaagaacuga

SEQ ID NO: 2705143 - RNA, 13 nt, Human
uggagaagaacug

SEQ ID NO: 2705144 - RNA, 14 nt, Human
uggagcucguggaa

SEQ ID NO: 2705145 - RNA, 20 nt, Human
agccuuggggcugaugcagu

SEQ ID NO: 2705146 - RNA, 17 nt, Human
agcuacuugggaggcug

SEQ ID NO: 2705147 - RNA, 18 nt, Human
agcuacuugggaggcuga

SEQ ID NO: 2705148 - RNA, 18 nt, Human
agccccgugggguuccuc

SEQ ID NO: 2705149 - RNA, 18 nt, Human
agcccauggcacucuaug

SEQ ID NO: 2705150 - RNA, 20 nt, Human
agccucauguccacugguuc

SEQ ID NO: 2705151 - RNA, 15 nt, Human
agccucauguccacu

SEQ ID NO: 2705152 - RNA, 22 nt, Human
agccugaaagaggaaugaagua

SEQ ID NO: 2705153 - RNA, 19 nt, Human
agccagacuggcacaguuu

SEQ ID NO: 2705154 - RNA, 14 nt, Human
agccagacuggcac

SEQ ID NO: 2705155 - RNA, 14 nt, Human
ugaugaucuuuaaa

SEQ ID NO: 2705156 - RNA, 17 nt, Human
ugaugaucuuuaaaaua

SEQ ID NO: 2705157 - RNA, 12 nt, Human
ugauuaaaccaa

SEQ ID NO: 2705158 - RNA, 14 nt, Human
ugauuaccagggac

SEQ ID NO: 2705159 - RNA, 17 nt, Human
ugaugaagaaguugaua

SEQ ID NO: 2705160 - RNA, 18 nt, Human
ugagugucuuaauuaaaa

SEQ ID NO: 2705161 - RNA, 23 nt, Human
agcauaaauguugacaugggaca

SEQ ID NO: 2705162 - RNA, 22 nt, Human
ugaguaacugauuuguaacaag

SEQ ID NO: 2705163 - RNA, 17 nt, Human
agcauuguaaaugugcu

SEQ ID NO: 2705164 - RNA, 18 nt, Human
agcauuguaaaugugcuu

SEQ ID NO: 2705165 - RNA, 17 nt, Human
agcaugucgucaaagcu

SEQ ID NO: 2705166 - RNA, 20 nt, Human
agcaugucgucaaagcugaa

SEQ ID NO: 2705167 - RNA, 12 nt, Human
ugauaugggucu

SEQ ID NO: 2705168 - RNA, 19 nt, Human
ugaaacucguuaauuugua

SEQ ID NO: 2705169 - RNA, 22 nt, Human
ugaaacugagaugugaacacau

SEQ ID NO: 2705170 - RNA, 22 nt, Human
ugaaaaaguucugcagauaaac

SEQ ID NO: 2705171 - RNA, 20 nt, Human
ugaaaagcuccauuuuuagu

SEQ ID NO: 2705172 - RNA, 23 nt, Human
agagcaguuugguuucuagcaug

SEQ ID NO: 2705173 - RNA, 21 nt, Human
agagcaguuugguuucuagca

SEQ ID NO: 2705174 - RNA, 17 nt, Human
agacaucaacagauaaa

SEQ ID NO: 2705175 - RNA, 18 nt, Human
agacaucaacagauaaau

SEQ ID NO: 2705176 - RNA, 14 nt, Human
agacauagaauuaa

SEQ ID NO: 2705177 - RNA, 21 nt, Human
agacauagaauuaacacauga

SEQ ID NO: 2705178 - RNA, 14 nt, Human
agaaucacuugaac

SEQ ID NO: 2705179 - RNA, 15 nt, Human
ucuucacaacagauu

SEQ ID NO: 2705180 - RNA, 15 nt, Human
agacuauucaaacag

SEQ ID NO: 2705181 - RNA, 12 nt, Human
agacuauucaaa

SEQ ID NO: 2705182 - RNA, 14 nt, Human
agacuauucaaaca

SEQ ID NO: 2705183 - RNA, 17 nt, Human
ugacacuuaaaaauggu

SEQ ID NO: 2705184 - RNA, 16 nt, Human
ugacacuuaaaaaugg

SEQ ID NO: 2705185 - RNA, 16 nt, Human
agaugcaguucugaag

SEQ ID NO: 2705186 - RNA, 24 nt, Human
ugacuucuaaguaaaaccacagca

SEQ ID NO: 2705187 - RNA, 22 nt, Human
ugacuucuaaguaaaaccacag

SEQ ID NO: 2705188 - RNA, 23 nt, Human
ugacuucuaaguaaaaccacagc

SEQ ID NO: 2705189 - RNA, 15 nt, Human
ugacuucuaaguaaa

SEQ ID NO: 2705190 - RNA, 15 nt, Human
agauucccugagcag

SEQ ID NO: 2705191 - RNA, 23 nt, Human
agcaacgcaggcccccaggugcc

SEQ ID NO: 2705192 - RNA, 15 nt, Human
ugaauacuuuauaaa

SEQ ID NO: 2705193 - RNA, 10 nt, Human
ucuggccuuc

SEQ ID NO: 2705194 - RNA, 14 nt, Human
agaagcuccaggua

SEQ ID NO: 2705195 - RNA, 13 nt, Human
agaaguugauaug

SEQ ID NO: 2705196 - RNA, 17 nt, Human
agaacucccuuucaaca

SEQ ID NO: 2705197 - RNA, 15 nt, Human
agaacucccuuucaa

SEQ ID NO: 2705198 - RNA, 16 nt, Human
agaacucccuuucaac

SEQ ID NO: 2705199 - RNA, 20 nt, Human
ucugcccauccugccccuga

SEQ ID NO: 2705200 - RNA, 19 nt, Human
agaagcaccaaucaugaau

SEQ ID NO: 2705201 - RNA, 19 nt, Human
agaagcaacccaaauguuc

SEQ ID NO: 2705202 - RNA, 23 nt, Human
agaaacuuaagguuaccuuuguu

SEQ ID NO: 2705203 - RNA, 16 nt, Human
agaaaacaaggaugaa

SEQ ID NO: 2705204 - RNA, 16 nt, Human
agaaacacaacuauau

SEQ ID NO: 2705205 - RNA, 16 nt, Human
agaaagacuauucaaa

SEQ ID NO: 2705206 - RNA, 20 nt, Human
agaaagcagaacagugauua

SEQ ID NO: 2705207 - RNA, 17 nt, Human
agaaagcagaacaguga

SEQ ID NO: 2705208 - RNA, 18 nt, Human
agaaagcagaacagugau

SEQ ID NO: 2705209 - RNA, 20 nt, Human
acuuccagauccuggaaauc

SEQ ID NO: 2705210 - RNA, 13 nt, Human
ucuauaauuuaaa

SEQ ID NO: 2705211 - RNA, 12 nt, Human
ucuagcaugaag

SEQ ID NO: 2705212 - RNA, 18 nt, Human
acuucuaaguaaaaccac

SEQ ID NO: 2705213 - RNA, 19 nt, Human
acuucuaaguaaaaccaca

SEQ ID NO: 2705214 - RNA, 13 nt, Human
acuucuaaguaaa

SEQ ID NO: 2705215 - RNA, 21 nt, Human
acuucuaaguaaaaccacagc

SEQ ID NO: 2705216 - RNA, 17 nt, Human
ucucaaaacugcacugu

SEQ ID NO: 2705217 - RNA, 23 nt, Human
acuugaacccgggaggcagaggu

SEQ ID NO: 2705218 - RNA, 21 nt, Human
acuugaacccgggaggcagag

SEQ ID NO: 2705219 - RNA, 22 nt, Human
acugaagaagcaccaaucauga

SEQ ID NO: 2705220 - RNA, 22 nt, Human
acugucagcuccccucggagaa

SEQ ID NO: 2705221 - RNA, 23 nt, Human
acugucagcuccccucggagaag

SEQ ID NO: 2705222 - RNA, 17 nt, Human
ucuaccaaaaaucucaa

SEQ ID NO: 2705223 - RNA, 13 nt, Human
acuguggguagac

SEQ ID NO: 2705224 - RNA, 16 nt, Human
acccaaauguucauca

SEQ ID NO: 2705225 - RNA, 20 nt, Human
acccaaauguucaucaauga

SEQ ID NO: 2705226 - RNA, 12 nt, Human
ucagcccucaga

SEQ ID NO: 2705227 - RNA, 13 nt, Human
ucagcccucagaa

SEQ ID NO: 2705228 - RNA, 14 nt, Human
ucagagcugcccuc

SEQ ID NO: 2705229 - RNA, 13 nt, Human
ucagagcugcccu

SEQ ID NO: 2705230 - RNA, 16 nt, Human
ucagagcugcccucuc

SEQ ID NO: 2705231 - RNA, 15 nt, Human
ucagagcugcccucu

SEQ ID NO: 2705232 - RNA, 17 nt, Human
ucagagcugcccucucc

SEQ ID NO: 2705233 - RNA, 13 nt, Human
ucaguagucagac

SEQ ID NO: 2705234 - RNA, 13 nt, Human
ucaaacagucuca

SEQ ID NO: 2705235 - RNA, 20 nt, Human
ucaaacagucucaggaaauc

SEQ ID NO: 2705236 - RNA, 21 nt, Human
ucaaacagucucaggaaauca

SEQ ID NO: 2705237 - RNA, 22 nt, Human
uauuuuaauaauguuucaaaca

SEQ ID NO: 2705238 - RNA, 19 nt, Human
uauuuuaauaauguuucaa

SEQ ID NO: 2705239 - RNA, 14 nt, Human
uauuuuaaaagaau

SEQ ID NO: 2705240 - RNA, 18 nt, Human
uauuuuaaaagaaugauu

SEQ ID NO: 2705241 - RNA, 14 nt, Human
accaacacgagcag

SEQ ID NO: 2705242 - RNA, 19 nt, Human
accaacacgagcaggcuac

SEQ ID NO: 2705243 - RNA, 16 nt, Human
accacaagacugcaca

SEQ ID NO: 2705244 - RNA, 22 nt, Human
ucacagcuuauuuccucauuuu

SEQ ID NO: 2705245 - RNA, 17 nt, Human
ucacagccagacuggca

SEQ ID NO: 2705246 - RNA, 23 nt, Human
ucacagccagacuggcacaguuu

SEQ ID NO: 2705247 - RNA, 16 nt, Human
ucacagaccuuugaac

SEQ ID NO: 2705248 - RNA, 12 nt, Human
ucaauuuaaaaa

SEQ ID NO: 2705249 - RNA, 13 nt, Human
ucaauuuaaaaaa

SEQ ID NO: 2705250 - RNA, 23 nt, Human
ucaauauuucagauaaucacaau

SEQ ID NO: 2705251 - RNA, 22 nt, Human
uccaugaagauguagaggagaa

SEQ ID NO: 2705252 - RNA, 14 nt, Human
uccagugagacagc

SEQ ID NO: 2705253 - RNA, 15 nt, Human
acgcucucuggccuu

SEQ ID NO: 2705254 - RNA, 16 nt, Human
acgcucucuggccuuc

SEQ ID NO: 2705255 - RNA, 17 nt, Human
acgcucucuggccuucg

SEQ ID NO: 2705256 - RNA, 12 nt, Human
accugagcccca

SEQ ID NO: 2705257 - RNA, 17 nt, Human
accugagccccaaaagg

SEQ ID NO: 2705258 - RNA, 16 nt, Human
ucauaauaaguugcau

SEQ ID NO: 2705259 - RNA, 17 nt, Human
uccucuccccaugaugu

SEQ ID NO: 2705260 - RNA, 22 nt, Human
uccugaaaacccuugccaugug

SEQ ID NO: 2705261 - RNA, 21 nt, Human
uccugaaaacccuugccaugu

SEQ ID NO: 2705262 - RNA, 18 nt, Human
acuccagaaagugacaag

SEQ ID NO: 2705263 - RNA, 14 nt, Human
acuccagaaaguga

SEQ ID NO: 2705264 - RNA, 14 nt, Human
ucccuccaccuccc

SEQ ID NO: 2705265 - RNA, 17 nt, Human
ucccuccaccucccugc

SEQ ID NO: 2705266 - RNA, 15 nt, Human
ucccuccaccucccu

SEQ ID NO: 2705267 - RNA, 19 nt, Human
ucccuccaccucccugcaa

SEQ ID NO: 2705268 - RNA, 21 nt, Human
acuccaaacugacucuuaaga

SEQ ID NO: 2705269 - RNA, 20 nt, Human
acuagaguuuagcuggaaaa

SEQ ID NO: 2705270 - RNA, 24 nt, Human
uccccuccucugcuugccaucccu

SEQ ID NO: 2705271 - RNA, 18 nt, Human
uccccuccucugcuugcc

SEQ ID NO: 2705272 - RNA, 15 nt, Human
uccccuccucugcuu

SEQ ID NO: 2705273 - RNA, 14 nt, Human
uccccuccucugcu

SEQ ID NO: 2705274 - RNA, 13 nt, Human
acuauucaaacag

SEQ ID NO: 2705275 - RNA, 14 nt, Human
acuauucaaacagu

SEQ ID NO: 2705276 - RNA, 16 nt, Human
acuauucaaacagucu

SEQ ID NO: 2705277 - RNA, 18 nt, Human
acuauucaaacagucuca

SEQ ID NO: 2705278 - RNA, 13 nt, Human
acacaacuauauu

SEQ ID NO: 2705279 - RNA, 13 nt, Human
uaggauguugaaa

SEQ ID NO: 2705280 - RNA, 14 nt, Human
uagaggguguguaa

SEQ ID NO: 2705281 - RNA, 14 nt, Human
acaaaaacacagca

SEQ ID NO: 2705282 - RNA, 15 nt, Human
acaaaaacacagcaa

SEQ ID NO: 2705283 - RNA, 13 nt, Human
acaaaaacacagc

SEQ ID NO: 2705284 - RNA, 13 nt, Human
uagacacacauga

SEQ ID NO: 2705285 - RNA, 17 nt, Human
uagaacucccuuucaac

SEQ ID NO: 2705286 - RNA, 16 nt, Human
uagaacucccuuucaa

SEQ ID NO: 2705287 - RNA, 15 nt, Human
uagaaacacaacuau

SEQ ID NO: 2705288 - RNA, 18 nt, Human
acagcaagggugauggga

SEQ ID NO: 2705289 - RNA, 19 nt, Human
acagcccuucuuuccacag

SEQ ID NO: 2705290 - RNA, 23 nt, Human
acagcuguaugauucccagccag

SEQ ID NO: 2705291 - RNA, 20 nt, Human
acagcuguaugauucccagc

SEQ ID NO: 2705292 - RNA, 19 nt, Human
acagcuguaugauucccag

SEQ ID NO: 2705293 - RNA, 14 nt, Human
acagcuguaugauu

SEQ ID NO: 2705294 - RNA, 14 nt, Human
uaucacaaaucuua

SEQ ID NO: 2705295 - RNA, 16 nt, Human
uaucacaaaucuuaac

SEQ ID NO: 2705296 - RNA, 20 nt, Human
uaucacaaaucuuaacuuga

SEQ ID NO: 2705297 - RNA, 14 nt, Human
acagaccuuugaac

SEQ ID NO: 2705298 - RNA, 19 nt, Human
acagaaagcagaacaguga

SEQ ID NO: 2705299 - RNA, 12 nt, Human
uauaggaauuga

SEQ ID NO: 2705300 - RNA, 16 nt, Human
uauaggugcuacaaaa

SEQ ID NO: 2705301 - RNA, 13 nt, Human
acacucaaaucaa

SEQ ID NO: 2705302 - RNA, 18 nt, Human
acacucaaaucaagaaac

SEQ ID NO: 2705303 - RNA, 17 nt, Human
acacucaaaucaagaaa

SEQ ID NO: 2705304 - RNA, 13 nt, Human
aauuacauuugua

SEQ ID NO: 2705305 - RNA, 14 nt, Human
aauuacauuuguau

SEQ ID NO: 2705306 - RNA, 19 nt, Human
uaccagggacugaggggag

SEQ ID NO: 2705307 - RNA, 16 nt, Human
uaccaugccauuuaaa

SEQ ID NO: 2705308 - RNA, 13 nt, Human
aauguucaucaau

SEQ ID NO: 2705309 - RNA, 16 nt, Human
aauguucaucaaugaa

SEQ ID NO: 2705310 - RNA, 20 nt, Human
aauguucaucaaugaaugaa

SEQ ID NO: 2705311 - RNA, 23 nt, Human
aaugauuaugaauuacauuugua

SEQ ID NO: 2705312 - RNA, 22 nt, Human
aaugagagacacacugaagaag

SEQ ID NO: 2705313 - RNA, 16 nt, Human
aaugauuucauucaau

SEQ ID NO: 2705314 - RNA, 21 nt, Human
uaauuuuuauauuugaaauau

SEQ ID NO: 2705315 - RNA, 19 nt, Human
uaauuuuuauauuugaaau

SEQ ID NO: 2705316 - RNA, 18 nt, Human
uaauuuuuauauuugaaa

SEQ ID NO: 2705317 - RNA, 22 nt, Human
uaauuccguagguuauuuucag

SEQ ID NO: 2705318 - RNA, 17 nt, Human
uacagagacagaaagca

SEQ ID NO: 2705319 - RNA, 20 nt, Human
aauguaagggaaacugccag

SEQ ID NO: 2705320 - RNA, 21 nt, Human
aaugcuguauuuuaaaagaau

SEQ ID NO: 2705321 - RNA, 20 nt, Human
aaugcuguauuuuaaaagaa

SEQ ID NO: 2705322 - RNA, 22 nt, Human
aaugcuguauuuuaaaagaaug

SEQ ID NO: 2705323 - RNA, 21 nt, Human
uacaaaaaaaaaaaaaaauua

SEQ ID NO: 2705324 - RNA, 15 nt, Human
aauauuuauuuuaau

SEQ ID NO: 2705325 - RNA, 16 nt, Human
aaucagccuaguugau

SEQ ID NO: 2705326 - RNA, 15 nt, Human
uaagcaaaaugugau

SEQ ID NO: 2705327 - RNA, 21 nt, Human
uaagcaaaaugugauauguac

SEQ ID NO: 2705328 - RNA, 14 nt, Human
uaagcaaaauguga

SEQ ID NO: 2705329 - RNA, 18 nt, Human
uaagguuaccuuuguucc

SEQ ID NO: 2705330 - RNA, 13 nt, Human
uaaguaaaaccac

SEQ ID NO: 2705331 - RNA, 15 nt, Human
uaaguaaaaccacag

SEQ ID NO: 2705332 - RNA, 16 nt, Human
uaaguaaaaccacagc

SEQ ID NO: 2705333 - RNA, 17 nt, Human
uaaguaaaaccacagca

SEQ ID NO: 2705334 - RNA, 18 nt, Human
uaaguaaaaccacagcag

SEQ ID NO: 2705335 - RNA, 19 nt, Human
uaaguaaaaccacagcagu

SEQ ID NO: 2705336 - RNA, 20 nt, Human
uaaguaaugauaacuggaaa

SEQ ID NO: 2705337 - RNA, 20 nt, Human
aauccucaguuuuugugaaa

SEQ ID NO: 2705338 - RNA, 13 nt, Human
uaagaagugaaaa

SEQ ID NO: 2705339 - RNA, 21 nt, Human
uaacuuccuuggacucauuuu

SEQ ID NO: 2705340 - RNA, 19 nt, Human
aauagucaaauugugugaa

SEQ ID NO: 2705341 - RNA, 18 nt, Human
aauaccaugccauuuaaa

SEQ ID NO: 2705342 - RNA, 23 nt, Human
aauaccacaggaaccacaagacu

SEQ ID NO: 2705343 - RNA, 23 nt, Human
aauacaucccuuaccugggaaag

SEQ ID NO: 2705344 - RNA, 16 nt, Human
uaaaugugcuuuuaaa

SEQ ID NO: 2705345 - RNA, 13 nt, Human
aagcauuguaaau

SEQ ID NO: 2705346 - RNA, 16 nt, Human
aagcauuuagauguau

SEQ ID NO: 2705347 - RNA, 20 nt, Human
aagcucacagaccuuugaac

SEQ ID NO: 2705348 - RNA, 14 nt, Human
aagcuccagguaga

SEQ ID NO: 2705349 - RNA, 13 nt, Human
aagcuccagguag

SEQ ID NO: 2705350 - RNA, 20 nt, Human
guuauuauauuuacaaaugg

SEQ ID NO: 2705351 - RNA, 23 nt, Human
aagaggaaugaaguacucauaca

SEQ ID NO: 2705352 - RNA, 17 nt, Human
aagacugcauuauauuu

SEQ ID NO: 2705353 - RNA, 16 nt, Human
aagacugcacaucaaa

SEQ ID NO: 2705354 - RNA, 13 nt, Human
aagaugaaaauau

SEQ ID NO: 2705355 - RNA, 14 nt, Human
aagaugaaaauauu

SEQ ID NO: 2705356 - RNA, 13 nt, Human
aagauguagagga

SEQ ID NO: 2705357 - RNA, 20 nt, Human
uaaaauaauuuuuauauuug

SEQ ID NO: 2705358 - RNA, 20 nt, Human
uaaaagacagugaaagaaaa

SEQ ID NO: 2705359 - RNA, 16 nt, Human
uaaaagaauauuuuaa

SEQ ID NO: 2705360 - RNA, 23 nt, Human
uaaaagaauauuuuaacuuccuu

SEQ ID NO: 2705361 - RNA, 12 nt, Human
uaaaagaaugau

SEQ ID NO: 2705362 - RNA, 19 nt, Human
aaguaaugauaacuggaaa

SEQ ID NO: 2705363 - RNA, 14 nt, Human
aaguaaugauaacu

SEQ ID NO: 2705364 - RNA, 13 nt, Human
aaguauuagaaua

SEQ ID NO: 2705365 - RNA, 16 nt, Human
aagucuuucacauuua

SEQ ID NO: 2705366 - RNA, 22 nt, Human
aagucuuauauauuguagauaa

SEQ ID NO: 2705367 - RNA, 14 nt, Human
aagguacuucaaau

SEQ ID NO: 2705368 - RNA, 19 nt, Human
aagggugaugggaaagcau

SEQ ID NO: 2705369 - RNA, 13 nt, Human
aagguacuucaaa

SEQ ID NO: 2705370 - RNA, 21 nt, Human
guauaaaauaauuuuuauauu

SEQ ID NO: 2705371 - RNA, 15 nt, Human
guauaaaauaauuuu

SEQ ID NO: 2705372 - RNA, 16 nt, Human
guauauuuuauaucaa

SEQ ID NO: 2705373 - RNA, 16 nt, Human
aaauguaagggaaacu

SEQ ID NO: 2705374 - RNA, 17 nt, Human
guaguguuggagaagaa

SEQ ID NO: 2705375 - RNA, 20 nt, Human
guaguguuggagaagaacug

SEQ ID NO: 2705376 - RNA, 15 nt, Human
aaauggguuuuacug

SEQ ID NO: 2705377 - RNA, 14 nt, Human
aaauggguuuuacu

SEQ ID NO: 2705378 - RNA, 16 nt, Human
gucaaauugugugaaa

SEQ ID NO: 2705379 - RNA, 18 nt, Human
guauguacuucaugcugu

SEQ ID NO: 2705380 - RNA, 16 nt, Human
aacagauaaauaguuu

SEQ ID NO: 2705381 - RNA, 15 nt, Human
aacagugauuaccag

SEQ ID NO: 2705382 - RNA, 22 nt, Human
aacagugauuaccagggacuga

SEQ ID NO: 2705383 - RNA, 15 nt, Human
aacacagcaagggug

SEQ ID NO: 2705384 - RNA, 22 nt, Human
aacaaugcuguauuuuaaaaga

SEQ ID NO: 2705385 - RNA, 17 nt, Human
aacaaugcuguauuuua

SEQ ID NO: 2705386 - RNA, 16 nt, Human
aacacaacuauauugu

SEQ ID NO: 2705387 - RNA, 15 nt, Human
aacacaacuauauug

SEQ ID NO: 2705388 - RNA, 15 nt, Human
aacaaugcuguauuu

SEQ ID NO: 2705389 - RNA, 14 nt, Human
aacaaugcuguauu

SEQ ID NO: 2705390 - RNA, 12 nt, Human
aacaauaaaaga

SEQ ID NO: 2705391 - RNA, 20 nt, Human
aaauuuuuucucuaggaaau

SEQ ID NO: 2705392 - RNA, 21 nt, Human
gugagaugcuagaacucccuu

SEQ ID NO: 2705393 - RNA, 12 nt, Human
aacugaaaucau

SEQ ID NO: 2705394 - RNA, 19 nt, Human
aacugcacugucaagauga

SEQ ID NO: 2705395 - RNA, 19 nt, Human
aacuggacugguucaaaug

SEQ ID NO: 2705396 - RNA, 17 nt, Human
aacugggacaggggaga

SEQ ID NO: 2705397 - RNA, 17 nt, Human
gugaugggaaagcauug

SEQ ID NO: 2705398 - RNA, 18 nt, Human
aacuuccagauccuggaa

SEQ ID NO: 2705399 - RNA, 21 nt, Human
aacuucagcgguuuauauaag

SEQ ID NO: 2705400 - RNA, 18 nt, Human
aacccaaguccaagcaua

SEQ ID NO: 2705401 - RNA, 23 nt, Human
aacccaaauguucaucaaugaau

SEQ ID NO: 2705402 - RNA, 16 nt, Human
aacccgggaggcagag

SEQ ID NO: 2705403 - RNA, 18 nt, Human
aaccugagccccaaaagg

SEQ ID NO: 2705404 - RNA, 20 nt, Human
aaccugagccccaaaaggua

SEQ ID NO: 2705405 - RNA, 16 nt, Human
gucuuucacauuuaaa

SEQ ID NO: 2705406 - RNA, 18 nt, Human
aaccuugaaaacuuuaug

SEQ ID NO: 2705407 - RNA, 23 nt, Human
aacuaucucauuuccaagcaagu

SEQ ID NO: 2705408 - RNA, 21 nt, Human
aacuagaguuuagcuggaaaa

SEQ ID NO: 2705409 - RNA, 12 nt, Human
aacucauuucua

SEQ ID NO: 2705410 - RNA, 14 nt, Human
caaaacugcacugu

SEQ ID NO: 2705411 - RNA, 17 nt, Human
caaaacugcacugucaa

SEQ ID NO: 2705412 - RNA, 18 nt, Human
caaaacugcacugucaag

SEQ ID NO: 2705413 - RNA, 16 nt, Human
caaacugacucuuaag

SEQ ID NO: 2705414 - RNA, 21 nt, Human
caaacugacucuuaagaagac

SEQ ID NO: 2705415 - RNA, 17 nt, Human
caaacugacucuuaaga

SEQ ID NO: 2705416 - RNA, 15 nt, Human
caagaaaugaaagca

SEQ ID NO: 2705417 - RNA, 17 nt, Human
caagaaaugaaagcagg

SEQ ID NO: 2705418 - RNA, 19 nt, Human
caagaaaugaaagcaggga

SEQ ID NO: 2705419 - RNA, 14 nt, Human
caaauguucaucaa

SEQ ID NO: 2705420 - RNA, 18 nt, Human
caaauguucaucaaugaa

SEQ ID NO: 2705421 - RNA, 12 nt, Human
caaauaugcaaa

SEQ ID NO: 2705422 - RNA, 13 nt, Human
caaauaugcaaag

SEQ ID NO: 2705423 - RNA, 20 nt, Human
caaggaaaaaauaacaauga

SEQ ID NO: 2705424 - RNA, 18 nt, Human
caaggaaaaaauaacaau

SEQ ID NO: 2705425 - RNA, 19 nt, Human
caauagucaaauuguguga

SEQ ID NO: 2705426 - RNA, 17 nt, Human
caauagucaaauugugu

SEQ ID NO: 2705427 - RNA, 21 nt, Human
caagggugaugggaaagcauu

SEQ ID NO: 2705428 - RNA, 23 nt, Human
caagggugaugggaaagcauugu

SEQ ID NO: 2705429 - RNA, 13 nt, Human
cacacugaagaag

SEQ ID NO: 2705430 - RNA, 21 nt, Human
cacagcaguugaaaagacucc

SEQ ID NO: 2705431 - RNA, 19 nt, Human
cacagcaguugaaaagacu

SEQ ID NO: 2705432 - RNA, 17 nt, Human
cacagccagacuggcac

SEQ ID NO: 2705433 - RNA, 18 nt, Human
cacagccagacuggcaca

SEQ ID NO: 2705434 - RNA, 18 nt, Human
cacaagaaaugaaagcag

SEQ ID NO: 2705435 - RNA, 20 nt, Human
cacaagaaaugaaagcaggg

SEQ ID NO: 2705436 - RNA, 21 nt, Human
cacaagaaaugaaagcaggga

SEQ ID NO: 2705437 - RNA, 21 nt, Human
caauaucuuuuuuuuaauaaa

SEQ ID NO: 2705438 - RNA, 22 nt, Human
caauuuuucuuauuucauuucu

SEQ ID NO: 2705439 - RNA, 21 nt, Human
uguuaaaagaugaaaauauuu

SEQ ID NO: 2705440 - RNA, 22 nt, Human
ugugugaaagguacuucaaauc

SEQ ID NO: 2705441 - RNA, 21 nt, Human
ugugugaaagguacuucaaau

SEQ ID NO: 2705442 - RNA, 20 nt, Human
ugugugaaagguacuucaaa

SEQ ID NO: 2705443 - RNA, 19 nt, Human
uguguuuugcaagccagau

SEQ ID NO: 2705444 - RNA, 13 nt, Human
uguguuuugcaag

SEQ ID NO: 2705445 - RNA, 17 nt, Human
uguuuaaaaucauuucu

SEQ ID NO: 2705446 - RNA, 18 nt, Human
uguuuaaaaucauuucug

SEQ ID NO: 2705447 - RNA, 14 nt, Human
uguuuaaaaucauu

SEQ ID NO: 2705448 - RNA, 20 nt, Human
uguuggagaagaacugaaau

SEQ ID NO: 2705449 - RNA, 19 nt, Human
uguuggagaagaacugaaa

SEQ ID NO: 2705450 - RNA, 14 nt, Human
uguuggagaagaac

SEQ ID NO: 2705451 - RNA, 17 nt, Human
uguuggagaagaacuga

SEQ ID NO: 2705452 - RNA, 16 nt, Human
uguuggagaagaacug

SEQ ID NO: 2705453 - RNA, 20 nt, Human
uguugacaugggacauuugc

SEQ ID NO: 2705454 - RNA, 20 nt, Human
uuacauuuguauaaaauaau

SEQ ID NO: 2705455 - RNA, 22 nt, Human
uuaaaaaaaaaccugagcccca

SEQ ID NO: 2705456 - RNA, 18 nt, Human
uuaaaauacacacucaaa

SEQ ID NO: 2705457 - RNA, 20 nt, Human
uguaauaaacucauuucuag

SEQ ID NO: 2705458 - RNA, 16 nt, Human
uguaccgcaaugugac

SEQ ID NO: 2705459 - RNA, 15 nt, Human
uguaccgcaauguga

SEQ ID NO: 2705460 - RNA, 22 nt, Human
uguaguguuggagaagaacuga

SEQ ID NO: 2705461 - RNA, 15 nt, Human
uguaugauucccagc

SEQ ID NO: 2705462 - RNA, 19 nt, Human
ugugcuaguaauuggaaag

SEQ ID NO: 2705463 - RNA, 22 nt, Human
uggaauaauccuaaacauauga

SEQ ID NO: 2705464 - RNA, 23 nt, Human
uggaaacuucagcgguuuauaua

SEQ ID NO: 2705465 - RNA, 20 nt, Human
uggaacauaaaauacaaugu

SEQ ID NO: 2705466 - RNA, 21 nt, Human
uggaacauaaaauacaauguu

SEQ ID NO: 2705467 - RNA, 11 nt, Human
uggagggaagc

SEQ ID NO: 2705468 - RNA, 21 nt, Human
ugguauguuuucaggcuagau

SEQ ID NO: 2705469 - RNA, 16 nt, Human
uggcuuccuggcaaua

SEQ ID NO: 2705470 - RNA, 21 nt, Human
uggcuugaguuuaaauuguaa

SEQ ID NO: 2705471 - RNA, 14 nt, Human
ugggaguacaaaag

SEQ ID NO: 2705472 - RNA, 19 nt, Human
ugccaaauauaaauaaaaa

SEQ ID NO: 2705473 - RNA, 22 nt, Human
ugccaaauauaaauaaaaauaa

SEQ ID NO: 2705474 - RNA, 17 nt, Human
ugccaaauauaaauaaa

SEQ ID NO: 2705475 - RNA, 18 nt, Human
ugccaaauauaaauaaaa

SEQ ID NO: 2705476 - RNA, 20 nt, Human
ugccacuaaauugacacuua

SEQ ID NO: 2705477 - RNA, 12 nt, Human
ugccaucccucc

SEQ ID NO: 2705478 - RNA, 11 nt, Human
ugccaucccuc

SEQ ID NO: 2705479 - RNA, 14 nt, Human
ugccaucccucccu

SEQ ID NO: 2705480 - RNA, 22 nt, Human
ugcaguucugaagaagauggua

SEQ ID NO: 2705481 - RNA, 19 nt, Human
ugcaguucugaagaagaug

SEQ ID NO: 2705482 - RNA, 14 nt, Human
ugcaguucugaaga

SEQ ID NO: 2705483 - RNA, 18 nt, Human
ugcaguucugaagaagau

SEQ ID NO: 2705484 - RNA, 17 nt, Human
ugcaguucugaagaaga

SEQ ID NO: 2705485 - RNA, 16 nt, Human
ugcaguucugaagaag

SEQ ID NO: 2705486 - RNA, 15 nt, Human
ugcaguucugaagaa

SEQ ID NO: 2705487 - RNA, 19 nt, Human
ugcagugagccgagauugu

SEQ ID NO: 2705488 - RNA, 19 nt, Human
ugcacgcacacugucugcc

SEQ ID NO: 2705489 - RNA, 17 nt, Human
ugcugaaacaacaaaua

SEQ ID NO: 2705490 - RNA, 19 nt, Human
ugcuaagcauuccaacuau

SEQ ID NO: 2705491 - RNA, 15 nt, Human
ugcuaagcauuccaa

SEQ ID NO: 2705492 - RNA, 16 nt, Human
ugcucaguagucagac

SEQ ID NO: 2705493 - RNA, 15 nt, Human
ugccuucucaacucc

SEQ ID NO: 2705494 - RNA, 18 nt, Human
ugccuguaaucacagcua

SEQ ID NO: 2705495 - RNA, 17 nt, Human
uccucugcuugccaucc

SEQ ID NO: 2705496 - RNA, 16 nt, Human
uccucugcuugccauc

SEQ ID NO: 2705497 - RNA, 15 nt, Human
uccucugcuugccau

SEQ ID NO: 2705498 - RNA, 14 nt, Human
uccucugcuugcca

SEQ ID NO: 2705499 - RNA, 16 nt, Human
uccugaggcuccacuu

SEQ ID NO: 2705500 - RNA, 17 nt, Human
uccugaggcuccacuug

SEQ ID NO: 2705501 - RNA, 21 nt, Human
uccugaggcuccacuuggucu

SEQ ID NO: 2705502 - RNA, 15 nt, Human
uccugaggcuccacu

SEQ ID NO: 2705503 - RNA, 17 nt, Human
uccuugcaucaauuuuu

SEQ ID NO: 2705504 - RNA, 15 nt, Human
ucggccuccauccug

SEQ ID NO: 2705505 - RNA, 16 nt, Human
ucggccuccauccuga

SEQ ID NO: 2705506 - RNA, 15 nt, Human
ucggagcccugucuc

SEQ ID NO: 2705507 - RNA, 14 nt, Human
ucggagcccugucu

SEQ ID NO: 2705508 - RNA, 12 nt, Human
ucuacuaaaaau

SEQ ID NO: 2705509 - RNA, 19 nt, Human
ucuacuaaaaauacaaaaa

SEQ ID NO: 2705510 - RNA, 15 nt, Human
ucuacuaaaaauaca

SEQ ID NO: 2705511 - RNA, 12 nt, Human
uccauacauuug

SEQ ID NO: 2705512 - RNA, 19 nt, Human
ucauggaauuggagcucgu

SEQ ID NO: 2705513 - RNA, 21 nt, Human
ucauggaauuggagcucgugg

SEQ ID NO: 2705514 - RNA, 18 nt, Human
ucaguccaugaagaugua

SEQ ID NO: 2705515 - RNA, 22 nt, Human
ucagcuccccucggagaagagc

SEQ ID NO: 2705516 - RNA, 21 nt, Human
ucagcuccccucggagaagag

SEQ ID NO: 2705517 - RNA, 16 nt, Human
ucagcugcugaaacaa

SEQ ID NO: 2705518 - RNA, 16 nt, Human
ucuucuuggucucagu

SEQ ID NO: 2705519 - RNA, 19 nt, Human
ucuugccaaauauaaauaa

SEQ ID NO: 2705520 - RNA, 22 nt, Human
ucuuaggguuaugauuaaguaa

SEQ ID NO: 2705521 - RNA, 13 nt, Human
ucuuauaauuuaa

SEQ ID NO: 2705522 - RNA, 14 nt, Human
ucuuauaauuuaaa

SEQ ID NO: 2705523 - RNA, 17 nt, Human
ucuuuccacagaagcuc

SEQ ID NO: 2705524 - RNA, 14 nt, Human
ucugucucagucca

SEQ ID NO: 2705525 - RNA, 15 nt, Human
ugagcaggauuuuaa

SEQ ID NO: 2705526 - RNA, 20 nt, Human
ugagcaggauuuuaaucuuu

SEQ ID NO: 2705527 - RNA, 15 nt, Human
ugagaaagacuauuc

SEQ ID NO: 2705528 - RNA, 13 nt, Human
ugacucuuaagaa

SEQ ID NO: 2705529 - RNA, 16 nt, Human
ugacucuuaagaagac

SEQ ID NO: 2705530 - RNA, 15 nt, Human
ugacucuuaagaaga

SEQ ID NO: 2705531 - RNA, 14 nt, Human
ugacucuuaagaag

SEQ ID NO: 2705532 - RNA, 15 nt, Human
ugaaugaauggcuaa

SEQ ID NO: 2705533 - RNA, 16 nt, Human
ugaccacugcagaaga

SEQ ID NO: 2705534 - RNA, 17 nt, Human
ugaccacugcagaagac

SEQ ID NO: 2705535 - RNA, 18 nt, Human
ugaccacugcagaagaca

SEQ ID NO: 2705536 - RNA, 14 nt, Human
ugaauuaaguuuuu

SEQ ID NO: 2705537 - RNA, 13 nt, Human
ugaauuacauuug

SEQ ID NO: 2705538 - RNA, 14 nt, Human
ugaauuacauuugu

SEQ ID NO: 2705539 - RNA, 16 nt, Human
uaccuaucaucuuaag

SEQ ID NO: 2705540 - RNA, 22 nt, Human
uaccaaaaaucucaauauuuca

SEQ ID NO: 2705541 - RNA, 22 nt, Human
uaccuaacgaaguauccuucag

SEQ ID NO: 2705542 - RNA, 23 nt, Human
uaccuuuguucccaaauuucaua

SEQ ID NO: 2705543 - RNA, 23 nt, Human
uacugucagcuccccucggagaa

SEQ ID NO: 2705544 - RNA, 23 nt, Human
uacaguucggugagcuacaaaug

SEQ ID NO: 2705545 - RNA, 14 nt, Human
uacacuccagugag

SEQ ID NO: 2705546 - RNA, 17 nt, Human
uacacacucaaaucaag

SEQ ID NO: 2705547 - RNA, 16 nt, Human
uacacacucaaaucaa

SEQ ID NO: 2705548 - RNA, 12 nt, Human
uaauuuuuauau

SEQ ID NO: 2705549 - RNA, 18 nt, Human
uaauuuugugaagcaaaa

SEQ ID NO: 2705550 - RNA, 17 nt, Human
uaauuuuuauauuugaa

SEQ ID NO: 2705551 - RNA, 16 nt, Human
uaauuuuuauauuuga

SEQ ID NO: 2705552 - RNA, 13 nt, Human
uaauuuugugaag

SEQ ID NO: 2705553 - RNA, 23 nt, Human
uagaauaccacaggaaccacaag

SEQ ID NO: 2705554 - RNA, 15 nt, Human
uagaauuaacacaug

SEQ ID NO: 2705555 - RNA, 16 nt, Human
uagaauuaacacauga

SEQ ID NO: 2705556 - RNA, 18 nt, Human
uagaauuaacacaugauc

SEQ ID NO: 2705557 - RNA, 16 nt, Human
uagcaugaagacagag

SEQ ID NO: 2705558 - RNA, 14 nt, Human
uagauaggccaugg

SEQ ID NO: 2705559 - RNA, 20 nt, Human
uaggugcuacaaaaacacag

SEQ ID NO: 2705560 - RNA, 22 nt, Human
uaggugcuacaaaaacacagca

SEQ ID NO: 2705561 - RNA, 23 nt, Human
uaggugcuacaaaaacacagcaa

SEQ ID NO: 2705562 - RNA, 18 nt, Human
uaggugcuacaaaaacac

SEQ ID NO: 2705563 - RNA, 17 nt, Human
uaguauuguccaggucu

SEQ ID NO: 2705564 - RNA, 19 nt, Human
uauauaacaaugcuguauu

SEQ ID NO: 2705565 - RNA, 17 nt, Human
uauauaacaaugcugua

SEQ ID NO: 2705566 - RNA, 14 nt, Human
uaucaaaagaaaga

SEQ ID NO: 2705567 - RNA, 21 nt, Human
uauauuuuuuguuaaaugauu

SEQ ID NO: 2705568 - RNA, 20 nt, Human
uauauuugaaauauugacuu

SEQ ID NO: 2705569 - RNA, 16 nt, Human
uauaugcuucuguuuu

SEQ ID NO: 2705570 - RNA, 14 nt, Human
uauaugcuucuguu

SEQ ID NO: 2705571 - RNA, 17 nt, Human
uaaccaggggccaugaa

SEQ ID NO: 2705572 - RNA, 21 nt, Human
uaagaaaauaucacuugucaa

SEQ ID NO: 2705573 - RNA, 23 nt, Human
uaagagagaaugagagacacacu

SEQ ID NO: 2705574 - RNA, 14 nt, Human
uaagagagaaugag

SEQ ID NO: 2705575 - RNA, 13 nt, Human
uaagagagaauga

SEQ ID NO: 2705576 - RNA, 15 nt, Human
uaacuggaaacuuca

SEQ ID NO: 2705577 - RNA, 20 nt, Human
uaaauggcuuccuggcaaua

SEQ ID NO: 2705578 - RNA, 20 nt, Human
uaaauugacacuuaaaaaug

SEQ ID NO: 2705579 - RNA, 16 nt, Human
uaaaugugccuucauu

SEQ ID NO: 2705580 - RNA, 13 nt, Human
uaagugaaauaag

SEQ ID NO: 2705581 - RNA, 14 nt, Human
uaauaauguuucaa

SEQ ID NO: 2705582 - RNA, 22 nt, Human
uaauguuucaaacauauauaac

SEQ ID NO: 2705583 - RNA, 22 nt, Human
uaaugauaacuggaaacuucag

SEQ ID NO: 2705584 - RNA, 17 nt, Human
uaaugauaacuggaaac

SEQ ID NO: 2705585 - RNA, 23 nt, Human
uaaugauaacuggaaacuucagc

SEQ ID NO: 2705586 - RNA, 14 nt, Human
uaaaguguuugaaa

SEQ ID NO: 2705587 - RNA, 19 nt, Human
uaaaaaugguuuaaauggu

SEQ ID NO: 2705588 - RNA, 15 nt, Human
uaaaaaugguuuaaa

SEQ ID NO: 2705589 - RNA, 18 nt, Human
uaaaaaugguuuaaaugg

SEQ ID NO: 2705590 - RNA, 22 nt, Human
uaaaacaagcacuaaacaaaga

SEQ ID NO: 2705591 - RNA, 18 nt, Human
uaaaaucauuucugcauc

SEQ ID NO: 2705592 - RNA, 22 nt, Human
uaaaaucauuucugcaucagcu

SEQ ID NO: 2705593 - RNA, 17 nt, Human
uaaaauccauacauuug

SEQ ID NO: 2705594 - RNA, 15 nt, Human
uaaaauccauacauu

SEQ ID NO: 2705595 - RNA, 10 nt, Human
uaaaaucauu

SEQ ID NO: 2705596 - RNA, 13 nt, Human
uaaaaucauuucu

SEQ ID NO: 2705597 - RNA, 13 nt, Human
uaaaaccacagca

SEQ ID NO: 2705598 - RNA, 20 nt, Human
guuuauauaagcuuguauuc

SEQ ID NO: 2705599 - RNA, 21 nt, Human
guuuagcuggaaaaguauguu

SEQ ID NO: 2705600 - RNA, 20 nt, Human
guuuagcuggaaaaguaugu

SEQ ID NO: 2705601 - RNA, 15 nt, Human
gugcuacaaaaacac

SEQ ID NO: 2705602 - RNA, 20 nt, Human
gugcuacaaaaacacagcaa

SEQ ID NO: 2705603 - RNA, 21 nt, Human
guguaaguagauaggccaugg

SEQ ID NO: 2705604 - RNA, 14 nt, Human
gugugcguccuguc

SEQ ID NO: 2705605 - RNA, 16 nt, Human
gugugcguccugucgg

SEQ ID NO: 2705606 - RNA, 20 nt, Human
guuaaaagaugaaaauauuu

SEQ ID NO: 2705607 - RNA, 14 nt, Human
guuaaaagaugaaa

SEQ ID NO: 2705608 - RNA, 16 nt, Human
guuaaaagaugaaaau

SEQ ID NO: 2705609 - RNA, 16 nt, Human
guucaucaaugaauga

SEQ ID NO: 2705610 - RNA, 19 nt, Human
guucagagcugcccucucc

SEQ ID NO: 2705611 - RNA, 17 nt, Human
guucagagcugcccucu

SEQ ID NO: 2705612 - RNA, 16 nt, Human
guucagagcugcccuc

SEQ ID NO: 2705613 - RNA, 15 nt, Human
guucagagcugcccu

SEQ ID NO: 2705614 - RNA, 22 nt, Human
guucagagcugcccucuccugg

SEQ ID NO: 2705615 - RNA, 20 nt, Human
guucagagcugcccucuccu

SEQ ID NO: 2705616 - RNA, 23 nt, Human
guucagagcugcccucuccuggg

SEQ ID NO: 2705617 - RNA, 14 nt, Human
guucagagcugccc

SEQ ID NO: 2705618 - RNA, 13 nt, Human
guucagagcugcc

SEQ ID NO: 2705619 - RNA, 23 nt, Human
guuaccucugccucagaaaacaa

SEQ ID NO: 2705620 - RNA, 20 nt, Human
guugauggugguauguuuuc

SEQ ID NO: 2705621 - RNA, 21 nt, Human
guugauggugguauguuuuca

SEQ ID NO: 2705622 - RNA, 17 nt, Human
guugaaaagacuccaaa

SEQ ID NO: 2705623 - RNA, 22 nt, Human
guugaaaagacuccaaagaaau

SEQ ID NO: 2705624 - RNA, 23 nt, Human
guugaaaagacuccaaagaaaug

SEQ ID NO: 2705625 - RNA, 13 nt, Human
guucugaagaaga

SEQ ID NO: 2705626 - RNA, 12 nt, Human
guucugaagaag

SEQ ID NO: 2705627 - RNA, 15 nt, Human
guucugaagaagaug

SEQ ID NO: 2705628 - RNA, 14 nt, Human
guucugaagaagau

SEQ ID NO: 2705629 - RNA, 16 nt, Human
gugacaagcucacaga

SEQ ID NO: 2705630 - RNA, 13 nt, Human
gugaacacaucag

SEQ ID NO: 2705631 - RNA, 21 nt, Human
gugaacaaauuuacagagaca

SEQ ID NO: 2705632 - RNA, 13 nt, Human
gugcguccugucg

SEQ ID NO: 2705633 - RNA, 13 nt, Human
gucugacuguuuc

SEQ ID NO: 2705634 - RNA, 23 nt, Human
gucggguuuuauuguuuaaaauc

SEQ ID NO: 2705635 - RNA, 12 nt, Human
gucggagcccug

SEQ ID NO: 2705636 - RNA, 16 nt, Human
gucggagcccugucuc

SEQ ID NO: 2705637 - RNA, 18 nt, Human
gucgucaaagcugaaaug

SEQ ID NO: 2705638 - RNA, 15 nt, Human
gucugugagaugcua

SEQ ID NO: 2705639 - RNA, 16 nt, Human
gucugugagaugcuag

SEQ ID NO: 2705640 - RNA, 17 nt, Human
gucugugagaugcuaga

SEQ ID NO: 2705641 - RNA, 21 nt, Human
gucugugagaugcuagaacuc

SEQ ID NO: 2705642 - RNA, 22 nt, Human
gucugugagaugcuagaacucc

SEQ ID NO: 2705643 - RNA, 23 nt, Human
gucugugagaugcuagaacuccc

SEQ ID NO: 2705644 - RNA, 17 nt, Human
guauguuagugcaaauu

SEQ ID NO: 2705645 - RNA, 18 nt, Human
gcuauaggugcuacaaaa

SEQ ID NO: 2705646 - RNA, 15 nt, Human
guaguguuggagaag

SEQ ID NO: 2705647 - RNA, 14 nt, Human
guaguguuggagaa

SEQ ID NO: 2705648 - RNA, 19 nt, Human
gucagcuccccucggagaa

SEQ ID NO: 2705649 - RNA, 20 nt, Human
guauuuuaaaagaaugauua

SEQ ID NO: 2705650 - RNA, 13 nt, Human
guauuuuaaucac

SEQ ID NO: 2705651 - RNA, 18 nt, Human
guauuuuaaaagaaugau

SEQ ID NO: 2705652 - RNA, 15 nt, Human
gucaaugcagccccc

SEQ ID NO: 2705653 - RNA, 22 nt, Human
gucaauaaaauccauacauuug

SEQ ID NO: 2705654 - RNA, 23 nt, Human
gucaauaaaauccauacauuugu

SEQ ID NO: 2705655 - RNA, 23 nt, Human
gucagcuccccucggagaagagc

SEQ ID NO: 2705656 - RNA, 21 nt, Human
gucagcuccccucggagaaga

SEQ ID NO: 2705657 - RNA, 22 nt, Human
gucagcuccccucggagaagag

SEQ ID NO: 2705658 - RNA, 18 nt, Human
uuuuuaaaaaagaaacau

SEQ ID NO: 2705659 - RNA, 18 nt, Human
uuuuggucuggagggaag

SEQ ID NO: 2705660 - RNA, 14 nt, Human
uuuuccugaaaacc

SEQ ID NO: 2705661 - RNA, 19 nt, Human
uuuuucucuaggaaauauu

SEQ ID NO: 2705662 - RNA, 17 nt, Human
uuucuuauuucauuucu

SEQ ID NO: 2705663 - RNA, 18 nt, Human
uuugaaucaucaagucuu

SEQ ID NO: 2705664 - RNA, 22 nt, Human
uuuccucaaaacuucagacaua

SEQ ID NO: 2705665 - RNA, 18 nt, Human
uuuccucauuuuuauaau

SEQ ID NO: 2705666 - RNA, 13 nt, Human
uuucugagaaaga

SEQ ID NO: 2705667 - RNA, 13 nt, Human
uuugguuucuagc

SEQ ID NO: 2705668 - RNA, 16 nt, Human
uuuguauaaaauaauu

SEQ ID NO: 2705669 - RNA, 14 nt, Human
uuuguauaaaauaa

SEQ ID NO: 2705670 - RNA, 13 nt, Human
uuuguauaaaaua

SEQ ID NO: 2705671 - RNA, 21 nt, Human
uuuuaaaagaaugauuaugaa

SEQ ID NO: 2705672 - RNA, 20 nt, Human
uuuuaauaauguuucaaaca

SEQ ID NO: 2705673 - RNA, 23 nt, Human
gccaucccucccuccaccucccu

SEQ ID NO: 2705674 - RNA, 18 nt, Human
gccaucccucccuccacc

SEQ ID NO: 2705675 - RNA, 19 nt, Human
gccaugggcacugugggua

SEQ ID NO: 2705676 - RNA, 22 nt, Human
gccuccccuccucugcuugcca

SEQ ID NO: 2705677 - RNA, 20 nt, Human
gccuccccuccucugcuugc

SEQ ID NO: 2705678 - RNA, 23 nt, Human
gccuccccuccucugcuugccau

SEQ ID NO: 2705679 - RNA, 19 nt, Human
gccuccccuccucugcuug

SEQ ID NO: 2705680 - RNA, 17 nt, Human
gccuccccuccucugcu

SEQ ID NO: 2705681 - RNA, 20 nt, Human
gccgggcgugguggugagug

SEQ ID NO: 2705682 - RNA, 22 nt, Human
gccgugugugugcguccugucg

SEQ ID NO: 2705683 - RNA, 23 nt, Human
gccguggugauuuagcaggaagc

SEQ ID NO: 2705684 - RNA, 13 nt, Human
gcuauaggugcua

SEQ ID NO: 2705685 - RNA, 19 nt, Human
gcuagaacucccuuucaac

SEQ ID NO: 2705686 - RNA, 12 nt, Human
gcgacagugaga

SEQ ID NO: 2705687 - RNA, 18 nt, Human
gcagauaaacaguaguga

SEQ ID NO: 2705688 - RNA, 20 nt, Human
gcagccccgugggguuccuc

SEQ ID NO: 2705689 - RNA, 12 nt, Human
gcaucagcugcu

SEQ ID NO: 2705690 - RNA, 13 nt, Human
gcauuauauuuau

SEQ ID NO: 2705691 - RNA, 17 nt, Human
gcauagguuuaauaauu

SEQ ID NO: 2705692 - RNA, 13 nt, Human
gcauagaaguaaa

SEQ ID NO: 2705693 - RNA, 17 nt, Human
gcaguucugaagaagau

SEQ ID NO: 2705694 - RNA, 14 nt, Human
gcaguucugaagaa

SEQ ID NO: 2705695 - RNA, 18 nt, Human
gcaguucagagcugcccu

SEQ ID NO: 2705696 - RNA, 17 nt, Human
gcaguucagagcugccc

SEQ ID NO: 2705697 - RNA, 15 nt, Human
gcaguucugaagaag

SEQ ID NO: 2705698 - RNA, 16 nt, Human
gcaguucagagcugcc

SEQ ID NO: 2705699 - RNA, 15 nt, Human
gauuuuccugaaaac

SEQ ID NO: 2705700 - RNA, 19 nt, Human
gauuuucagcccucagaau

SEQ ID NO: 2705701 - RNA, 15 nt, Human
gauuuucagcccuca

SEQ ID NO: 2705702 - RNA, 11 nt, Human
gauuuucagcc

SEQ ID NO: 2705703 - RNA, 23 nt, Human
gcaaagcacugacuucuaaguaa

SEQ ID NO: 2705704 - RNA, 10 nt, Human
gcaagccaga

SEQ ID NO: 2705705 - RNA, 14 nt, Human
gcaagggugauggg

SEQ ID NO: 2705706 - RNA, 22 nt, Human
gauaaauaguuuaugauuccac

SEQ ID NO: 2705707 - RNA, 23 nt, Human
gauagauaggucagugcaaauac

SEQ ID NO: 2705708 - RNA, 21 nt, Human
gauggcuaguaucaaaagaaa

SEQ ID NO: 2705709 - RNA, 14 nt, Human
gaugaaaauauuug

SEQ ID NO: 2705710 - RNA, 13 nt, Human
gauccuggaaauc

SEQ ID NO: 2705711 - RNA, 13 nt, Human
gagaaagacuauu

SEQ ID NO: 2705712 - RNA, 15 nt, Human
gagaaagacuauuca

SEQ ID NO: 2705713 - RNA, 17 nt, Human
gagaaagacuauucaaa

SEQ ID NO: 2705714 - RNA, 18 nt, Human
gagaaagacuauucaaac

SEQ ID NO: 2705715 - RNA, 16 nt, Human
gagaagaacugaaauc

SEQ ID NO: 2705716 - RNA, 14 nt, Human
gagaagaacugaaa

SEQ ID NO: 2705717 - RNA, 13 nt, Human
gagaagaacugaa

SEQ ID NO: 2705718 - RNA, 15 nt, Human
gagaagagcuguuca

SEQ ID NO: 2705719 - RNA, 22 nt, Human
gagaagagcuguucacagccag

SEQ ID NO: 2705720 - RNA, 13 nt, Human
gagaagagcuguu

SEQ ID NO: 2705721 - RNA, 18 nt, Human
gagacacacugaagaagc

SEQ ID NO: 2705722 - RNA, 15 nt, Human
gagacagcucugcau

SEQ ID NO: 2705723 - RNA, 18 nt, Human
gagacagcucugcauacu

SEQ ID NO: 2705724 - RNA, 13 nt, Human
gagacagcucugc

SEQ ID NO: 2705725 - RNA, 15 nt, Human
gagagugaacaaauu

SEQ ID NO: 2705726 - RNA, 19 nt, Human
gagagugaacaaauuuaca

SEQ ID NO: 2705727 - RNA, 17 nt, Human
gagauacagaauuuuau

SEQ ID NO: 2705728 - RNA, 19 nt, Human
gagagacacacugaagaag

SEQ ID NO: 2705729 - RNA, 16 nt, Human
gagcucgugggacagu

SEQ ID NO: 2705730 - RNA, 23 nt, Human
gagcugcccucuccugggcagcu

SEQ ID NO: 2705731 - RNA, 21 nt, Human
gagcugcccucuccugggcag

SEQ ID NO: 2705732 - RNA, 19 nt, Human
gagcugcccucuccugggc

SEQ ID NO: 2705733 - RNA, 18 nt, Human
gagcugcccucuccuggg

SEQ ID NO: 2705734 - RNA, 22 nt, Human
gacaugggacauuugcucaugg

SEQ ID NO: 2705735 - RNA, 17 nt, Human
gacaugggacauuugcu

SEQ ID NO: 2705736 - RNA, 23 nt, Human
gaccugauuucugagcauuuaau

SEQ ID NO: 2705737 - RNA, 13 nt, Human
cuucuuuccacag

SEQ ID NO: 2705738 - RNA, 19 nt, Human
cuucuuuccacagaagcuc

SEQ ID NO: 2705739 - RNA, 14 nt, Human
cuugaacccgggag

SEQ ID NO: 2705740 - RNA, 19 nt, Human
cuugaacccgggaggcaga

SEQ ID NO: 2705741 - RNA, 20 nt, Human
cuugaacccgggaggcagag

SEQ ID NO: 2705742 - RNA, 16 nt, Human
cuugagugcucaguag

SEQ ID NO: 2705743 - RNA, 23 nt, Human
cuugcaucaauuuuucuuauuuc

SEQ ID NO: 2705744 - RNA, 21 nt, Human
cuugcaugguuuagaaagcuu

SEQ ID NO: 2705745 - RNA, 18 nt, Human
cuuguaaaggaauuuaaa

SEQ ID NO: 2705746 - RNA, 17 nt, Human
cuugccaaauauaaaua

SEQ ID NO: 2705747 - RNA, 21 nt, Human
gaaagcuugcccuggugccuc

SEQ ID NO: 2705748 - RNA, 16 nt, Human
gaaacugacacaugcu

SEQ ID NO: 2705749 - RNA, 13 nt, Human
gaaacugccagca

SEQ ID NO: 2705750 - RNA, 15 nt, Human
gaaacugccagcaac

SEQ ID NO: 2705751 - RNA, 13 nt, Human
gaaagcagaacag

SEQ ID NO: 2705752 - RNA, 14 nt, Human
gaaagcagaacagu

SEQ ID NO: 2705753 - RNA, 22 nt, Human
gaaagacuauucaaacagucuc

SEQ ID NO: 2705754 - RNA, 23 nt, Human
gaaagacuauucaaacagucuca

SEQ ID NO: 2705755 - RNA, 19 nt, Human
gaaagacuauucaaacagu

SEQ ID NO: 2705756 - RNA, 24 nt, Human
gaacaguuaccucugccucagaaa

SEQ ID NO: 2705757 - RNA, 22 nt, Human
gaaauguaagggaaacugccag

SEQ ID NO: 2705758 - RNA, 13 nt, Human
gaaauauuuauuu

SEQ ID NO: 2705759 - RNA, 16 nt, Human
gaaauauuuauuuuaa

SEQ ID NO: 2705760 - RNA, 15 nt, Human
gaaauauuuauuuua

SEQ ID NO: 2705761 - RNA, 14 nt, Human
gaaggaugcugucu

SEQ ID NO: 2705762 - RNA, 23 nt, Human
gaaguccaagcauuuagauguau

SEQ ID NO: 2705763 - RNA, 23 nt, Human
gaagagcuguucacagccagacu

SEQ ID NO: 2705764 - RNA, 13 nt, Human
gaagagcuguuca

SEQ ID NO: 2705765 - RNA, 15 nt, Human
gaagagcuguucaca

SEQ ID NO: 2705766 - RNA, 20 nt, Human
gaagagcuguucacagccag

SEQ ID NO: 2705767 - RNA, 22 nt, Human
gaacuuguaaaggaauuuaaaa

SEQ ID NO: 2705768 - RNA, 15 nt, Human
gaaccacaagacugc

SEQ ID NO: 2705769 - RNA, 14 nt, Human
gaaccacaagacug

SEQ ID NO: 2705770 - RNA, 16 nt, Human
gaacucccuuucaaca

SEQ ID NO: 2705771 - RNA, 15 nt, Human
gaacucccuuucaac

SEQ ID NO: 2705772 - RNA, 15 nt, Human
cuguaugauucccag

SEQ ID NO: 2705773 - RNA, 16 nt, Human
cuguauuuuaaaagaa

SEQ ID NO: 2705774 - RNA, 13 nt, Human
cuguauuuuaaaa

SEQ ID NO: 2705775 - RNA, 18 nt, Human
cugucucuacuaaaaaua

SEQ ID NO: 2705776 - RNA, 17 nt, Human
cugucuccucucucugu

SEQ ID NO: 2705777 - RNA, 20 nt, Human
cugucuccucucucuguaau

SEQ ID NO: 2705778 - RNA, 22 nt, Human
cuguaauaaacucauuucuagc

SEQ ID NO: 2705779 - RNA, 16 nt, Human
cuggccuucggccucc

SEQ ID NO: 2705780 - RNA, 17 nt, Human
cuggccuucggccucca

SEQ ID NO: 2705781 - RNA, 18 nt, Human
cuggccuucggccuccau

SEQ ID NO: 2705782 - RNA, 21 nt, Human
cuggccuucggccuccauccu

SEQ ID NO: 2705783 - RNA, 15 nt, Human
cuggccuucggccuc

SEQ ID NO: 2705784 - RNA, 20 nt, Human
cugggaaagggauuuucagc

SEQ ID NO: 2705785 - RNA, 15 nt, Human
cugccagcaacgcag

SEQ ID NO: 2705786 - RNA, 12 nt, Human
cugcacugucaa

SEQ ID NO: 2705787 - RNA, 15 nt, Human
cugcuugccaucccu

SEQ ID NO: 2705788 - RNA, 16 nt, Human
cugcuugccaucccuc

SEQ ID NO: 2705789 - RNA, 22 nt, Human
cugcuugccaucccucccucca

SEQ ID NO: 2705790 - RNA, 20 nt, Human
cugcuugccaucccucccuc

SEQ ID NO: 2705791 - RNA, 19 nt, Human
cugcuugccaucccucccu

SEQ ID NO: 2705792 - RNA, 18 nt, Human
cugcuugccaucccuccc

SEQ ID NO: 2705793 - RNA, 15 nt, Human
cugcccucuccuggg

SEQ ID NO: 2705794 - RNA, 14 nt, Human
cugcccucuccugg

SEQ ID NO: 2705795 - RNA, 13 nt, Human
cugcccucuccug

SEQ ID NO: 2705796 - RNA, 12 nt, Human
cugcccucuccu

SEQ ID NO: 2705797 - RNA, 23 nt, Human
cugaagaagcaccaaucaugaau

SEQ ID NO: 2705798 - RNA, 17 nt, Human
cugaacaucacagcuua

SEQ ID NO: 2705799 - RNA, 22 nt, Human
cucuucuuuaaagggauggcaa

SEQ ID NO: 2705800 - RNA, 20 nt, Human
cucugcuugccaucccuccc

SEQ ID NO: 2705801 - RNA, 17 nt, Human
cucugcuugccaucccu

SEQ ID NO: 2705802 - RNA, 14 nt, Human
cucugcuugccauc

SEQ ID NO: 2705803 - RNA, 12 nt, Human
cucugcuugcca

SEQ ID NO: 2705804 - RNA, 12 nt, Human
cucuggccuucg

SEQ ID NO: 2705805 - RNA, 19 nt, Human
cucuggccuucggccucca

SEQ ID NO: 2705806 - RNA, 17 nt, Human
cugacucuuaagaagac

SEQ ID NO: 2705807 - RNA, 16 nt, Human
cugacuucuaaguaaa

SEQ ID NO: 2705808 - RNA, 13 nt, Human
cugacuucuaagu

SEQ ID NO: 2705809 - RNA, 15 nt, Human
cugacuucuaaguaa

SEQ ID NO: 2705810 - RNA, 22 nt, Human
cugagaaagacuauucaaacag

SEQ ID NO: 2705811 - RNA, 23 nt, Human
cugagaaagacuauucaaacagu

SEQ ID NO: 2705812 - RNA, 16 nt, Human
cugagcgacagugaga

SEQ ID NO: 2705813 - RNA, 20 nt, Human
cugagcgacagugagacucu

SEQ ID NO: 2705814 - RNA, 14 nt, Human
cuccauccugaggc

SEQ ID NO: 2705815 - RNA, 16 nt, Human
cuccauccugaggcuc

SEQ ID NO: 2705816 - RNA, 18 nt, Human
cuccauccugaggcucca

SEQ ID NO: 2705817 - RNA, 17 nt, Human
cucccuccaccucccug

SEQ ID NO: 2705818 - RNA, 15 nt, Human
cucccuccaccuccc

SEQ ID NO: 2705819 - RNA, 17 nt, Human
cucuaggaaauauuuau

SEQ ID NO: 2705820 - RNA, 15 nt, Human
cucuaggaaauauuu

SEQ ID NO: 2705821 - RNA, 12 nt, Human
cucuccugggca

SEQ ID NO: 2705822 - RNA, 19 nt, Human
cucuccugggcagcugccu

SEQ ID NO: 2705823 - RNA, 18 nt, Human
cucuccugggcagcugcc

SEQ ID NO: 2705824 - RNA, 16 nt, Human
cucuccugggcagcug

SEQ ID NO: 2705825 - RNA, 15 nt, Human
cucuccugggcagcu

SEQ ID NO: 2705826 - RNA, 20 nt, Human
cucuccugggcagcugccuc

SEQ ID NO: 2705827 - RNA, 17 nt, Human
cggugagcuacaaaugc

SEQ ID NO: 2705828 - RNA, 22 nt, Human
cggucggguuuuauuguuuaaa

SEQ ID NO: 2705829 - RNA, 21 nt, Human
cggguuuuauuguuuaaaauc

SEQ ID NO: 2705830 - RNA, 12 nt, Human
cggccuccaucc

SEQ ID NO: 2705831 - RNA, 14 nt, Human
cgcucucuggccuu

SEQ ID NO: 2705832 - RNA, 15 nt, Human
cgcucucuggccuuc

SEQ ID NO: 2705833 - RNA, 18 nt, Human
cgcucucuggccuucggc

SEQ ID NO: 2705834 - RNA, 18 nt, Human
cgugcacgcacacugucu

SEQ ID NO: 2705835 - RNA, 23 nt, Human
cuaaauugacacuuaaaaauggu

SEQ ID NO: 2705836 - RNA, 17 nt, Human
cuacacuccagugagac

SEQ ID NO: 2705837 - RNA, 16 nt, Human
cuacacuccagugaga

SEQ ID NO: 2705838 - RNA, 15 nt, Human
cuaagcaaaauguga

SEQ ID NO: 2705839 - RNA, 18 nt, Human
cuaagcaaaaugugauau

SEQ ID NO: 2705840 - RNA, 14 nt, Human
cuaagcaaaaugug

SEQ ID NO: 2705841 - RNA, 19 nt, Human
cuacuugggaggcugagau

SEQ ID NO: 2705842 - RNA, 15 nt, Human
cuacuugggaggcug

SEQ ID NO: 2705843 - RNA, 18 nt, Human
cuacuugggaggcugaga

SEQ ID NO: 2705844 - RNA, 17 nt, Human
cucaccccuugccauaa

SEQ ID NO: 2705845 - RNA, 13 nt, Human
cucacauuuauau

SEQ ID NO: 2705846 - RNA, 22 nt, Human
cuauauuuuuuguuaaaugauu

SEQ ID NO: 2705847 - RNA, 18 nt, Human
cuaugaaauauuauguua

SEQ ID NO: 2705848 - RNA, 13 nt, Human
cuaugaaauauua

SEQ ID NO: 2705849 - RNA, 20 nt, Human
cuauauuuuuuguuaaauga

SEQ ID NO: 2705850 - RNA, 19 nt, Human
cuauauuguuugcuaagca

SEQ ID NO: 2705851 - RNA, 22 nt, Human
cuaggaaauauuuauuuuaaua

SEQ ID NO: 2705852 - RNA, 20 nt, Human
cuaguauuucuaugaaauau

SEQ ID NO: 2705853 - RNA, 19 nt, Human
cuaguauuucuaugaaaua

SEQ ID NO: 2705854 - RNA, 22 nt, Human
cuaguauuucuaugaaauauua

SEQ ID NO: 2705855 - RNA, 15 nt, Human
cuaguaucaaaagaa

SEQ ID NO: 2705856 - RNA, 17 nt, Human
cuaguaucaaaagaaag

SEQ ID NO: 2705857 - RNA, 23 nt, Human
cuaguaucaaaagaaagaaaauc

SEQ ID NO: 2705858 - RNA, 15 nt, Human
cccugcaauaaaaug

SEQ ID NO: 2705859 - RNA, 14 nt, Human
cccugcaauaaaau

SEQ ID NO: 2705860 - RNA, 14 nt, Human
ccccaggugccagu

SEQ ID NO: 2705861 - RNA, 12 nt, Human
cccucccuccac

SEQ ID NO: 2705862 - RNA, 13 nt, Human
cccucccuccacc

SEQ ID NO: 2705863 - RNA, 20 nt, Human
cccucccuccaccucccugc

SEQ ID NO: 2705864 - RNA, 12 nt, Human
ccuccauccuga

SEQ ID NO: 2705865 - RNA, 13 nt, Human
ccuccauccugag

SEQ ID NO: 2705866 - RNA, 13 nt, Human
ccuccccuccucu

SEQ ID NO: 2705867 - RNA, 12 nt, Human
ccuccccuccuc

SEQ ID NO: 2705868 - RNA, 20 nt, Human
ccucagaugcacaugagcug

SEQ ID NO: 2705869 - RNA, 13 nt, Human
ccuaaacauauga

SEQ ID NO: 2705870 - RNA, 16 nt, Human
ccauccugaggcucca

SEQ ID NO: 2705871 - RNA, 15 nt, Human
ccauccugaggcucc

SEQ ID NO: 2705872 - RNA, 23 nt, Human
ccauggcacucuauguucuaaga

SEQ ID NO: 2705873 - RNA, 17 nt, Human
cccaguguuuuaggagc

SEQ ID NO: 2705874 - RNA, 16 nt, Human
cccaguguuuuaggag

SEQ ID NO: 2705875 - RNA, 14 nt, Human
cauuugcucaugga

SEQ ID NO: 2705876 - RNA, 15 nt, Human
cauuugcucauggaa

SEQ ID NO: 2705877 - RNA, 16 nt, Human
cauuugcucauggaau

SEQ ID NO: 2705878 - RNA, 17 nt, Human
ccaaagaaauguaaggg

SEQ ID NO: 2705879 - RNA, 23 nt, Human
cauuucugcaucagcugcugaaa

SEQ ID NO: 2705880 - RNA, 12 nt, Human
cauuuccaagca

SEQ ID NO: 2705881 - RNA, 19 nt, Human
cauuuaaagcuuauuaaaa

SEQ ID NO: 2705882 - RNA, 18 nt, Human
ccaaggcuagaaccaccu

SEQ ID NO: 2705883 - RNA, 19 nt, Human
ccaaggcugauuaaaccaa

SEQ ID NO: 2705884 - RNA, 20 nt, Human
ccaauauucauagcagcuua

SEQ ID NO: 2705885 - RNA, 16 nt, Human
ccacaagaaaugaaag

SEQ ID NO: 2705886 - RNA, 22 nt, Human
ccacaagaaaugaaagcaggga

SEQ ID NO: 2705887 - RNA, 14 nt, Human
ccaacacgagcagg

SEQ ID NO: 2705888 - RNA, 21 nt, Human
ccaacacgagcaggcuacugu

SEQ ID NO: 2705889 - RNA, 17 nt, Human
caugggacagggaggac

SEQ ID NO: 2705890 - RNA, 23 nt, Human
caugcugucuacacuaagagaga

SEQ ID NO: 2705891 - RNA, 20 nt, Human
cauauauaacaaugcuguau

SEQ ID NO: 2705892 - RNA, 22 nt, Human
caucaagucuuucacauuuaaa

SEQ ID NO: 2705893 - RNA, 18 nt, Human
caucaaugaaugaaugaa

SEQ ID NO: 2705894 - RNA, 13 nt, Human
caucccucccucc

SEQ ID NO: 2705895 - RNA, 12 nt, Human
caucccucccuc

SEQ ID NO: 2705896 - RNA, 14 nt, Human
caucccucccucca

SEQ ID NO: 2705897 - RNA, 14 nt, Human
caucuagugagcag

SEQ ID NO: 2705898 - RNA, 22 nt, Human
caucuagugagcagucaggaaa

SEQ ID NO: 2705899 - RNA, 14 nt, Human
caguuuucugagaa

SEQ ID NO: 2705900 - RNA, 15 nt, Human
caguuuucugagaaa

SEQ ID NO: 2705901 - RNA, 19 nt, Human
caguuuucugagaaagacu

SEQ ID NO: 2705902 - RNA, 20 nt, Human
caguuuucugagaaagacua

SEQ ID NO: 2705903 - RNA, 21 nt, Human
caguugaaaagacuccaaaga

SEQ ID NO: 2705904 - RNA, 22 nt, Human
caguugaaaagacuccaaagaa

SEQ ID NO: 2705905 - RNA, 23 nt, Human
caguugaaaagacuccaaagaaa

SEQ ID NO: 2705906 - RNA, 14 nt, Human
caguugaaaagacu

SEQ ID NO: 2705907 - RNA, 18 nt, Human
caguugaaaagacuccaa

SEQ ID NO: 2705908 - RNA, 17 nt, Human
cauaccaacacgagcag

SEQ ID NO: 2705909 - RNA, 22 nt, Human
caguucggugagcuacaaaugc

SEQ ID NO: 2705910 - RNA, 16 nt, Human
caguucugaagaagau

SEQ ID NO: 2705911 - RNA, 15 nt, Human
caguucugaagaaga

SEQ ID NO: 2705912 - RNA, 22 nt, Human
caguucugaagaagaugguacc

SEQ ID NO: 2705913 - RNA, 14 nt, Human
caguucugaagaag

SEQ ID NO: 2705914 - RNA, 13 nt, Human
caguucugaagaa

SEQ ID NO: 2705915 - RNA, 12 nt, Human
caguucugaaga

SEQ ID NO: 2705916 - RNA, 21 nt, Human
caguuaccucugccucagaaa

SEQ ID NO: 2705917 - RNA, 20 nt, Human
caguguuuuaggagcaugag

SEQ ID NO: 2705918 - RNA, 16 nt, Human
caguguuuuaggagca

SEQ ID NO: 2705919 - RNA, 14 nt, Human
cagugucaaugcag

SEQ ID NO: 2705920 - RNA, 15 nt, Human
aaacugcacugucaa

SEQ ID NO: 2705921 - RNA, 21 nt, Human
aaaaucauuucugcaucagcu

SEQ ID NO: 2705922 - RNA, 15 nt, Human
aaagcauuguaaaug

SEQ ID NO: 2705923 - RNA, 17 nt, Human
aaagcauuguaaaugug

SEQ ID NO: 2705924 - RNA, 11 nt, Human
aaaaucauuuc

SEQ ID NO: 2705925 - RNA, 12 nt, Human
aaaaucauuucu

SEQ ID NO: 2705926 - RNA, 10 nt, Human
aaaaucauuu

SEQ ID NO: 2705927 - RNA, 13 nt, Human
aaaagacuccaaa

SEQ ID NO: 2705928 - RNA, 11 nt, Human
aaaagaaugau

SEQ ID NO: 2705929 - RNA, 13 nt, Human
aaaagaauauuuu

SEQ ID NO: 2705930 - RNA, 20 nt, Human
aaaagacaaggaaaaaauaa

SEQ ID NO: 2705931 - RNA, 12 nt, Human
aaaagaauauuu

SEQ ID NO: 2705932 - RNA, 17 nt, Human
aaaagaaagaaaaucag

SEQ ID NO: 2705933 - RNA, 23 nt, Human
aaauguugacaugggacauuugc

SEQ ID NO: 2705934 - RNA, 22 nt, Human
aaauguugacaugggacauuug

SEQ ID NO: 2705935 - RNA, 17 nt, Human
aaauguucaucaaugaa

SEQ ID NO: 2705936 - RNA, 13 nt, Human
aaauguucaucaa

SEQ ID NO: 2705937 - RNA, 18 nt, Human
aaaucucaauauuucaga

SEQ ID NO: 2705938 - RNA, 21 nt, Human
aaauauuuauuuuaauaaugu

SEQ ID NO: 2705939 - RNA, 22 nt, Human
aagacagagccccacccucaga

SEQ ID NO: 2705940 - RNA, 15 nt, Human
aagaacugaaaucau

SEQ ID NO: 2705941 - RNA, 11 nt, Human
aagaacugaaa

SEQ ID NO: 2705942 - RNA, 13 nt, Human
aagaacugaaauc

SEQ ID NO: 2705943 - RNA, 12 nt, Human
aagaacugaaau

SEQ ID NO: 2705944 - RNA, 20 nt, Human
aacgcaggcccccaggugcc

SEQ ID NO: 2705945 - RNA, 15 nt, Human
aagaagacugcauua

SEQ ID NO: 2705946 - RNA, 20 nt, Human
aagaagacugcauuauauuu

SEQ ID NO: 2705947 - RNA, 21 nt, Human
aagacaaggaaaaaauaacaa

SEQ ID NO: 2705948 - RNA, 16 nt, Human
aaucucaauauuucag

SEQ ID NO: 2705949 - RNA, 20 nt, Human
aaugaauacuuuauaaagga

SEQ ID NO: 2705950 - RNA, 19 nt, Human
acugauaugggucuugaua

SEQ ID NO: 2705951 - RNA, 13 nt, Human
acugacacaugcu

SEQ ID NO: 2705952 - RNA, 19 nt, Human
acucguuaauuuguagugu

SEQ ID NO: 2705953 - RNA, 14 nt, Human
acucguuaauuugu

SEQ ID NO: 2705954 - RNA, 14 nt, Human
acucccuuucaaca

SEQ ID NO: 2705955 - RNA, 21 nt, Human
acuucagacauagaauuaaca

SEQ ID NO: 2705956 - RNA, 21 nt, Human
acuuaaaaaugguuuaaaugg

SEQ ID NO: 2705957 - RNA, 22 nt, Human
acuuaaaaaugguuuaaauggu

SEQ ID NO: 2705958 - RNA, 17 nt, Human
acuucaaauccuugaag

SEQ ID NO: 2705959 - RNA, 18 nt, Human
acuucaaauccuugaaga

SEQ ID NO: 2705960 - RNA, 17 nt, Human
acuguaaaauaauaacu

SEQ ID NO: 2705961 - RNA, 21 nt, Human
acccugucucuacuaaaaaua

SEQ ID NO: 2705962 - RNA, 20 nt, Human
acccucagaugcacaugagc

SEQ ID NO: 2705963 - RNA, 20 nt, Human
accucugccucagaaaacaa

SEQ ID NO: 2705964 - RNA, 14 nt, Human
acgcacacugucug

SEQ ID NO: 2705965 - RNA, 21 nt, Human
acauuuguauaaaauaauuuu

SEQ ID NO: 2705966 - RNA, 19 nt, Human
acauuuguauaaaauaauu

SEQ ID NO: 2705967 - RNA, 16 nt, Human
acauuuguauaaaaua

SEQ ID NO: 2705968 - RNA, 15 nt, Human
acauuugcucaugga

SEQ ID NO: 2705969 - RNA, 19 nt, Human
acagugauuaccagggacu

SEQ ID NO: 2705970 - RNA, 22 nt, Human
acaggaugguucccuugaugaa

SEQ ID NO: 2705971 - RNA, 24 nt, Human
acaggaugguucccuugaugaaga

SEQ ID NO: 2705972 - RNA, 15 nt, Human
acaccaauauucaua

SEQ ID NO: 2705973 - RNA, 22 nt, Human
aauuucauaccuaucaucuuaa

SEQ ID NO: 2705974 - RNA, 11 nt, Human
aauuguaauag

SEQ ID NO: 2705975 - RNA, 15 nt, Human
aauuggagcucgugg

SEQ ID NO: 2705976 - RNA, 14 nt, Human
agccagcaguucag

SEQ ID NO: 2705977 - RNA, 17 nt, Human
agcacugacuucuaagu

SEQ ID NO: 2705978 - RNA, 19 nt, Human
agcacugacuucuaaguaa

SEQ ID NO: 2705979 - RNA, 20 nt, Human
agauagauaggucagugcaa

SEQ ID NO: 2705980 - RNA, 23 nt, Human
agcaaaauuuuuucucuaggaaa

SEQ ID NO: 2705981 - RNA, 21 nt, Human
agaagacugcauuauauuuau

SEQ ID NO: 2705982 - RNA, 20 nt, Human
agaagagcuguucacagcca

SEQ ID NO: 2705983 - RNA, 13 nt, Human
agaagauagcagg

SEQ ID NO: 2705984 - RNA, 13 nt, Human
agaagagcuguuc

SEQ ID NO: 2705985 - RNA, 22 nt, Human
agaacagugauuaccagggacu

SEQ ID NO: 2705986 - RNA, 19 nt, Human
agacaaggaaaaaauaaca

SEQ ID NO: 2705987 - RNA, 18 nt, Human
aggaaaaaauaacaauga

SEQ ID NO: 2705988 - RNA, 18 nt, Human
agcuguaugauucccagc

SEQ ID NO: 2705989 - RNA, 17 nt, Human
agcuguaugauucccag

SEQ ID NO: 2705990 - RNA, 14 nt, Human
agcugcugaaacaa

SEQ ID NO: 2705991 - RNA, 15 nt, Human
agcugcugaaacaac

SEQ ID NO: 2705992 - RNA, 16 nt, Human
agcugcugaaacaaca

SEQ ID NO: 2705993 - RNA, 20 nt, Human
agcugcugaaacaacaaaua

SEQ ID NO: 2705994 - RNA, 13 nt, Human
agcgacagugaga

SEQ ID NO: 2705995 - RNA, 15 nt, Human
agcgacagugagacu

SEQ ID NO: 2705996 - RNA, 12 nt, Human
agcuacaaaugc

SEQ ID NO: 2705997 - RNA, 13 nt, Human
agcuacaaaugca

SEQ ID NO: 2705998 - RNA, 20 nt, Human
aggcagagguugcagugagc

SEQ ID NO: 2705999 - RNA, 23 nt, Human
aggccaugggcacuguggguaga

SEQ ID NO: 2706000 - RNA, 17 nt, Human
agggacaggauaagagg

SEQ ID NO: 2706001 - RNA, 20 nt, Human
agggauuagggagagaagau

SEQ ID NO: 2706002 - RNA, 20 nt, Human
augggacauuugcucaugga

SEQ ID NO: 2706003 - RNA, 15 nt, Human
augggacagggagga

SEQ ID NO: 2706004 - RNA, 14 nt, Human
augggaaagcauug

SEQ ID NO: 2706005 - RNA, 20 nt, Human
augggaaagcauuguaaaug

SEQ ID NO: 2706006 - RNA, 23 nt, Human
auggcuuccuggcaauagucaaa

SEQ ID NO: 2706007 - RNA, 14 nt, Human
aucaaaagaaagaa

SEQ ID NO: 2706008 - RNA, 12 nt, Human
auccuugaagau

SEQ ID NO: 2706009 - RNA, 21 nt, Human
aucaugaauuaguuuuauaug

SEQ ID NO: 2706010 - RNA, 13 nt, Human
agucauuuaauaa

SEQ ID NO: 2706011 - RNA, 13 nt, Human
agugauuaccagg

SEQ ID NO: 2706012 - RNA, 19 nt, Human
agugaugucacuagggcag

SEQ ID NO: 2706013 - RNA, 13 nt, Human
aguacucauacau

SEQ ID NO: 2706014 - RNA, 16 nt, Human
auaaaagacagugaaa

SEQ ID NO: 2706015 - RNA, 15 nt, Human
auaaaagacagugaa

SEQ ID NO: 2706016 - RNA, 14 nt, Human
gcccuguuaaaaga

SEQ ID NO: 2706017 - RNA, 17 nt, Human
gcccuguuaaaagauga

SEQ ID NO: 2706018 - RNA, 13 nt, Human
gcccuguuaaaag

SEQ ID NO: 2706019 - RNA, 16 nt, Human
gcccccaggugccagu

SEQ ID NO: 2706020 - RNA, 16 nt, Human
gccauaugaaaaggcu

SEQ ID NO: 2706021 - RNA, 23 nt, Human
gccagcaguucagagcugcccuc

SEQ ID NO: 2706022 - RNA, 22 nt, Human
gccagcaguucagagcugcccu

SEQ ID NO: 2706023 - RNA, 22 nt, Human
gccagacaucaacagauaaaua

SEQ ID NO: 2706024 - RNA, 19 nt, Human
gccagauuuuccugaaaac

SEQ ID NO: 2706025 - RNA, 15 nt, Human
gcuccccucggagaa

SEQ ID NO: 2706026 - RNA, 18 nt, Human
gcuccccucggagaagag

SEQ ID NO: 2706027 - RNA, 21 nt, Human
gcuaguaauuggaaaggcagc

SEQ ID NO: 2706028 - RNA, 16 nt, Human
gcuaguaucaaaagaa

SEQ ID NO: 2706029 - RNA, 17 nt, Human
gcuggagcucugcccau

SEQ ID NO: 2706030 - RNA, 14 nt, Human
gcuggagcucugcc

SEQ ID NO: 2706031 - RNA, 20 nt, Human
gcugccuccccuccucugcu

SEQ ID NO: 2706032 - RNA, 17 nt, Human
gcugccuccccuccucu

SEQ ID NO: 2706033 - RNA, 16 nt, Human
gcugccuccccuccuc

SEQ ID NO: 2706034 - RNA, 22 nt, Human
gcugccuccccuccucugcuug

SEQ ID NO: 2706035 - RNA, 21 nt, Human
gcugccuccccuccucugcuu

SEQ ID NO: 2706036 - RNA, 15 nt, Human
ggaggcugagauggg

SEQ ID NO: 2706037 - RNA, 19 nt, Human
ggaggcugagaugggagaa

SEQ ID NO: 2706038 - RNA, 12 nt, Human
ggauuuucagcc

SEQ ID NO: 2706039 - RNA, 23 nt, Human
ggaugguucccuugaugaagaag

SEQ ID NO: 2706040 - RNA, 22 nt, Human
ggaugguucccuugaugaagaa

SEQ ID NO: 2706041 - RNA, 16 nt, Human
ggccuccauccugagg

SEQ ID NO: 2706042 - RNA, 23 nt, Human
aaaauaauuuuuauauuugaaau

SEQ ID NO: 2706043 - RNA, 21 nt, Human
aaaauaauuuuuauauuugaa

SEQ ID NO: 2706044 - RNA, 20 nt, Human
aaaauaauuuuuauauuuga

SEQ ID NO: 2706045 - RNA, 21 nt, Human
gggauuuucagcccucagaau

SEQ ID NO: 2706046 - RNA, 17 nt, Human
gggauugaaggaugcug

SEQ ID NO: 2706047 - RNA, 23 nt, Human
gggcagcugccuccccuccucug

SEQ ID NO: 2706048 - RNA, 20 nt, Human
gggcagcugccuccccuccu

SEQ ID NO: 2706049 - RNA, 19 nt, Human
gggcagcugccuccccucc

SEQ ID NO: 2706050 - RNA, 14 nt, Human
gggcagcugccucc

SEQ ID NO: 2706051 - RNA, 13 nt, Human
gggcagcugccuc

SEQ ID NO: 2706052 - RNA, 12 nt, Human
gggcagcugccu

SEQ ID NO: 2706053 - RNA, 11 nt, Human
gggaggcagag

SEQ ID NO: 2706054 - RNA, 20 nt, Human
gggaggcagagguugcagug

SEQ ID NO: 2706055 - RNA, 22 nt, Human
aaaagcuccauuuuuagugaaa

SEQ ID NO: 2706056 - RNA, 21 nt, Human
aaaacuuuaugcuaagugaaa

SEQ ID NO: 2706057 - RNA, 20 nt, Human
aaagaggcagcuugaaacug

SEQ ID NO: 2706058 - RNA, 18 nt, Human
aaagagaacuuccagauc

SEQ ID NO: 2706059 - RNA, 22 nt, Human
aaagacuauucaaacagucuca

SEQ ID NO: 2706060 - RNA, 13 nt, Human
aaagacuccaaag

SEQ ID NO: 2706061 - RNA, 23 nt, Human
aaagacuauucaaacagucucag

SEQ ID NO: 2706062 - RNA, 16 nt, Human
aaagaaugauuaugaa

SEQ ID NO: 2706063 - RNA, 13 nt, Human
aaaggaauuuaaa

SEQ ID NO: 2706064 - RNA, 15 nt, Human
ggugccaguuauggc

SEQ ID NO: 2706065 - RNA, 20 nt, Human
ggugauuuagcaggaagcug

SEQ ID NO: 2706066 - RNA, 14 nt, Human
ggucugugagaugc

SEQ ID NO: 2706067 - RNA, 24 nt, Human
ggucugugagaugcuagaacuccc

SEQ ID NO: 2706068 - RNA, 16 nt, Human
aaaccacagcaguuga

SEQ ID NO: 2706069 - RNA, 15 nt, Human
aaaccacagcaguug

SEQ ID NO: 2706070 - RNA, 16 nt, Human
aaacucauuucuagca

SEQ ID NO: 2706071 - RNA, 19 nt, Human
aaaauuuuuucucuaggaa

SEQ ID NO: 2706072 - RNA, 17 nt, Human
aaacaaggaugaauuaa

SEQ ID NO: 2706073 - RNA, 14 nt, Human
aaacacaacuauau

SEQ ID NO: 2706074 - RNA, 13 nt, Human
aaacauauauaac

SEQ ID NO: 2706075 - RNA, 19 nt, Human
aaacauauauaacaaugcu

SEQ ID NO: 2706076 - RNA, 16 nt, Human
aaacauauauaacaau

SEQ ID NO: 2706077 - RNA, 21 nt, Human
aaacauauauaacaaugcugu

SEQ ID NO: 2706078 - RNA, 21 nt, Human
gacagaaagcagaacagugau

SEQ ID NO: 2706079 - RNA, 14 nt, Human
gacacacugaagaa

SEQ ID NO: 2706080 - RNA, 16 nt, Human
gacacacugaagaagc

SEQ ID NO: 2706081 - RNA, 15 nt, Human
gacacacugaagaag

SEQ ID NO: 2706082 - RNA, 21 nt, Human
gacagugagacucugucucag

SEQ ID NO: 2706083 - RNA, 17 nt, Human
gacauuugcucauggaa

SEQ ID NO: 2706084 - RNA, 16 nt, Human
gacauuugcucaugga

SEQ ID NO: 2706085 - RNA, 21 nt, Human
gacucuuaagaagacugcauu

SEQ ID NO: 2706086 - RNA, 18 nt, Human
gacucuuaagaagacugc

SEQ ID NO: 2706087 - RNA, 14 nt, Human
gacucuuaagaaga

SEQ ID NO: 2706088 - RNA, 16 nt, Human
gacgcucucuggccuu

SEQ ID NO: 2706089 - RNA, 17 nt, Human
gacgcucucuggccuuc

SEQ ID NO: 2706090 - RNA, 15 nt, Human
gacgcucucuggccu

SEQ ID NO: 2706091 - RNA, 23 nt, Human
gaagcaacccaaauguucaucaa

SEQ ID NO: 2706092 - RNA, 14 nt, Human
gaagcaaaauuuuu

SEQ ID NO: 2706093 - RNA, 13 nt, Human
gaacugaaaucau

SEQ ID NO: 2706094 - RNA, 14 nt, Human
gaacugaaaucaua

SEQ ID NO: 2706095 - RNA, 19 nt, Human
gaacccgggaggcagaggu

SEQ ID NO: 2706096 - RNA, 23 nt, Human
gcacaguuuucugagaaagacua

SEQ ID NO: 2706097 - RNA, 20 nt, Human
gcacaguuuucugagaaaga

SEQ ID NO: 2706098 - RNA, 22 nt, Human
gcacaguuuucugagaaagacu

SEQ ID NO: 2706099 - RNA, 22 nt, Human
gcaauagucaaauugugugaaa

SEQ ID NO: 2706100 - RNA, 20 nt, Human
gcaaguauuagaauaccaca

SEQ ID NO: 2706101 - RNA, 22 nt, Human
gaugguucccuugaugaagaag

SEQ ID NO: 2706102 - RNA, 17 nt, Human
gauguagaggagaaacu

SEQ ID NO: 2706103 - RNA, 18 nt, Human
gauguagaggagaaacug

SEQ ID NO: 2706104 - RNA, 16 nt, Human
gaugaucuuuaaaaua

SEQ ID NO: 2706105 - RNA, 16 nt, Human
gauuuaccacuugugu

SEQ ID NO: 2706106 - RNA, 15 nt, Human
gauuuaccacuugug

SEQ ID NO: 2706107 - RNA, 15 nt, Human
gaggacgcucucugg

SEQ ID NO: 2706108 - RNA, 23 nt, Human
gaggcuccacuuggucugugaga

SEQ ID NO: 2706109 - RNA, 19 nt, Human
gaggcuccacuuggucugu

SEQ ID NO: 2706110 - RNA, 18 nt, Human
gaggcuccacuuggucug

SEQ ID NO: 2706111 - RNA, 16 nt, Human
gaguuuaaauuguaau

SEQ ID NO: 2706112 - RNA, 11 nt, Human
cuucagacaua

SEQ ID NO: 2706113 - RNA, 23 nt, Human
cuucaugcugucuacacuaagag

SEQ ID NO: 2706114 - RNA, 20 nt, Human
cuucuguuuuauaauuuugu

SEQ ID NO: 2706115 - RNA, 15 nt, Human
cuucuguuuuauaau

SEQ ID NO: 2706116 - RNA, 20 nt, Human
cuuuaaagggauggcaagau

SEQ ID NO: 2706117 - RNA, 21 nt, Human
cuuugagugucuuaauuaaaa

SEQ ID NO: 2706118 - RNA, 20 nt, Human
cugcuuauccguuagccgug

SEQ ID NO: 2706119 - RNA, 21 nt, Human
cuggugccucaccccuugcca

SEQ ID NO: 2706120 - RNA, 12 nt, Human
cuggugccucac

SEQ ID NO: 2706121 - RNA, 15 nt, Human
cugggcagcugccuc

SEQ ID NO: 2706122 - RNA, 14 nt, Human
cugggcagcugccu

SEQ ID NO: 2706123 - RNA, 13 nt, Human
cugggcagcugcc

SEQ ID NO: 2706124 - RNA, 16 nt, Human
cugcacuccagccuga

SEQ ID NO: 2706125 - RNA, 17 nt, Human
cugcacuccagccugag

SEQ ID NO: 2706126 - RNA, 20 nt, Human
cugcacuccagccugagcga

SEQ ID NO: 2706127 - RNA, 15 nt, Human
ccaggggccaugaau

SEQ ID NO: 2706128 - RNA, 20 nt, Human
ccacuuggucugugagaugc

SEQ ID NO: 2706129 - RNA, 22 nt, Human
ccacuuggucugugagaugcua

SEQ ID NO: 2706130 - RNA, 15 nt, Human
ccacuuggucuguga

SEQ ID NO: 2706131 - RNA, 16 nt, Human
ccacuuggucugugag

SEQ ID NO: 2706132 - RNA, 17 nt, Human
ccacuuggucugugaga

SEQ ID NO: 2706133 - RNA, 19 nt, Human
ccacuuggucugugagaug

SEQ ID NO: 2706134 - RNA, 12 nt, Human
ccacuuggucug

SEQ ID NO: 2706135 - RNA, 13 nt, Human
ccauuuaaagcuu

SEQ ID NO: 2706136 - RNA, 22 nt, Human
ccauuguggucacaggaaguag

SEQ ID NO: 2706137 - RNA, 18 nt, Human
ccaugggcacugugggua

SEQ ID NO: 2706138 - RNA, 15 nt, Human
ccccauuguggucac

SEQ ID NO: 2706139 - RNA, 22 nt, Human
ccucuccugggcagcugccucc

SEQ ID NO: 2706140 - RNA, 21 nt, Human
ccucuccugggcagcugccuc

SEQ ID NO: 2706141 - RNA, 16 nt, Human
ccucuccugggcagcu

SEQ ID NO: 2706142 - RNA, 15 nt, Human
ccucuccugggcagc

SEQ ID NO: 2706143 - RNA, 14 nt, Human
ccucuccugggcag

SEQ ID NO: 2706144 - RNA, 20 nt, Human
ccucuccugggcagcugccu

SEQ ID NO: 2706145 - RNA, 19 nt, Human
ccucuccugggcagcugcc

SEQ ID NO: 2706146 - RNA, 18 nt, Human
ccucuccugggcagcugc

SEQ ID NO: 2706147 - RNA, 17 nt, Human
ccucuccugggcagcug

SEQ ID NO: 2706148 - RNA, 13 nt, Human
cccucggagaaga

SEQ ID NO: 2706149 - RNA, 14 nt, Human
cccugagcaggauu

SEQ ID NO: 2706150 - RNA, 20 nt, Human
ccuaacgaaguauccuucag

SEQ ID NO: 2706151 - RNA, 19 nt, Human
cucuauguucuaagaagug

SEQ ID NO: 2706152 - RNA, 15 nt, Human
cucuccccaugaugu

SEQ ID NO: 2706153 - RNA, 16 nt, Human
cucuccccaugauguu

SEQ ID NO: 2706154 - RNA, 14 nt, Human
cucucuggccuucg

SEQ ID NO: 2706155 - RNA, 16 nt, Human
cucucuggccuucggc

SEQ ID NO: 2706156 - RNA, 13 nt, Human
cucucuggccuuc

SEQ ID NO: 2706157 - RNA, 21 nt, Human
cucucuguaauaaacucauuu

SEQ ID NO: 2706158 - RNA, 16 nt, Human
cucucuguaauaaacu

SEQ ID NO: 2706159 - RNA, 22 nt, Human
cucccuccaccucccugcaaua

SEQ ID NO: 2706160 - RNA, 21 nt, Human
cucccuccaccucccugcaau

SEQ ID NO: 2706161 - RNA, 20 nt, Human
cucccuccaccucccugcaa

SEQ ID NO: 2706162 - RNA, 19 nt, Human
cucccuccaccucccugca

SEQ ID NO: 2706163 - RNA, 16 nt, Human
cucaguccaugaagau

SEQ ID NO: 2706164 - RNA, 23 nt, Human
cuaugucauuugcuggagcucug

SEQ ID NO: 2706165 - RNA, 18 nt, Human
cuaucucauuuccaagca

SEQ ID NO: 2706166 - RNA, 18 nt, Human
cuauguucuaagaaguga

SEQ ID NO: 2706167 - RNA, 17 nt, Human
ccuucucuucacaguca

SEQ ID NO: 2706168 - RNA, 20 nt, Human
cuaacgaaguauccuucagc

SEQ ID NO: 2706169 - RNA, 20 nt, Human
cuacaaaaacacagcaaggg

SEQ ID NO: 2706170 - RNA, 12 nt, Human
ccuuuucccaac

SEQ ID NO: 2706171 - RNA, 22 nt, Human
auugaggacacugauauggguc

SEQ ID NO: 2706172 - RNA, 16 nt, Human
auuucagcagcugcag

SEQ ID NO: 2706173 - RNA, 16 nt, Human
auuuuuauauuugaaa

SEQ ID NO: 2706174 - RNA, 19 nt, Human
auuuuuauauuugaaauau

SEQ ID NO: 2706175 - RNA, 17 nt, Human
caaacauauauaacaau

SEQ ID NO: 2706176 - RNA, 21 nt, Human
caaaagguauuuuaaucacca

SEQ ID NO: 2706177 - RNA, 19 nt, Human
auuuucuauaauuuaaaua

SEQ ID NO: 2706178 - RNA, 17 nt, Human
auuuucuauaauuuaaa

SEQ ID NO: 2706179 - RNA, 18 nt, Human
auuuucuauaauuuaaau

SEQ ID NO: 2706180 - RNA, 13 nt, Human
cacaucagcuugc

SEQ ID NO: 2706181 - RNA, 23 nt, Human
cacaucagcuugcccuguuaaaa

SEQ ID NO: 2706182 - RNA, 23 nt, Human
cacugaagaagcaccaaucauga

SEQ ID NO: 2706183 - RNA, 11 nt, Human
cacugaagaag

SEQ ID NO: 2706184 - RNA, 16 nt, Human
cacuccagugagacag

SEQ ID NO: 2706185 - RNA, 21 nt, Human
cacuccagugagacagcucug

SEQ ID NO: 2706186 - RNA, 14 nt, Human
caagcaaguauuag

SEQ ID NO: 2706187 - RNA, 12 nt, Human
caacuccagaaa

SEQ ID NO: 2706188 - RNA, 19 nt, Human
caacuaucucauuuccaag

SEQ ID NO: 2706189 - RNA, 19 nt, Human
caacuauauuguuugcuaa

SEQ ID NO: 2706190 - RNA, 17 nt, Human
caaucagccuaguugau

SEQ ID NO: 2706191 - RNA, 19 nt, Human
cagcuguaugauucccagc

SEQ ID NO: 2706192 - RNA, 20 nt, Human
cagcugccuccccuccucug

SEQ ID NO: 2706193 - RNA, 19 nt, Human
cagcugccuccccuccucu

SEQ ID NO: 2706194 - RNA, 18 nt, Human
cagcugccuccccuccuc

SEQ ID NO: 2706195 - RNA, 17 nt, Human
cagcugccuccccuccu

SEQ ID NO: 2706196 - RNA, 16 nt, Human
cagcugccuccccucc

SEQ ID NO: 2706197 - RNA, 15 nt, Human
cagcugccuccccuc

SEQ ID NO: 2706198 - RNA, 14 nt, Human
cagcugccuccccu

SEQ ID NO: 2706199 - RNA, 9 nt, Human
cagcugccu

SEQ ID NO: 2706200 - RNA, 10 nt, Human
cagcugccuc

SEQ ID NO: 2706201 - RNA, 11 nt, Human
cagcugccucc

SEQ ID NO: 2706202 - RNA, 17 nt, Human
cagcuuauucacaagac

SEQ ID NO: 2706203 - RNA, 20 nt, Human
cagcuuauugucuagugaaa

SEQ ID NO: 2706204 - RNA, 20 nt, Human
cagcuguaugauucccagcc

SEQ ID NO: 2706205 - RNA, 14 nt, Human
cagcuuauugucua

SEQ ID NO: 2706206 - RNA, 20 nt, Human
caggaaagagaacuuccaga

SEQ ID NO: 2706207 - RNA, 16 nt, Human
caggaaagagaacuuc

SEQ ID NO: 2706208 - RNA, 11 nt, Human
caggcuacugu

SEQ ID NO: 2706209 - RNA, 23 nt, Human
cagagcugcccucuccugggcag

SEQ ID NO: 2706210 - RNA, 21 nt, Human
cagagcugcccucuccugggc

SEQ ID NO: 2706211 - RNA, 20 nt, Human
cagagcugcccucuccuggg

SEQ ID NO: 2706212 - RNA, 19 nt, Human
cagagcugcccucuccugg

SEQ ID NO: 2706213 - RNA, 18 nt, Human
cagagcugcccucuccug

SEQ ID NO: 2706214 - RNA, 14 nt, Human
cagccagacuggca

SEQ ID NO: 2706215 - RNA, 15 nt, Human
cagccagacuggcac

SEQ ID NO: 2706216 - RNA, 18 nt, Human
cagccagacuggcacagu

SEQ ID NO: 2706217 - RNA, 23 nt, Human
cagccagcaguucagagcugccc

SEQ ID NO: 2706218 - RNA, 19 nt, Human
cagacuggauaguccgucu

SEQ ID NO: 2706219 - RNA, 22 nt, Human
cagacuggcacaguuuucugag

SEQ ID NO: 2706220 - RNA, 23 nt, Human
cagacuggcacaguuuucugaga

SEQ ID NO: 2706221 - RNA, 17 nt, Human
cagacuggcacaguuuu

SEQ ID NO: 2706222 - RNA, 18 nt, Human
cagacuggcacaguuuuc

SEQ ID NO: 2706223 - RNA, 22 nt, Human
caguucagagcugcccucuccu

SEQ ID NO: 2706224 - RNA, 21 nt, Human
caguucagagcugcccucucc

SEQ ID NO: 2706225 - RNA, 19 nt, Human
caguucagagcugcccucu

SEQ ID NO: 2706226 - RNA, 18 nt, Human
caguucagagcugcccuc

SEQ ID NO: 2706227 - RNA, 24 nt, Human
caguucagagcugcccucuccugg

SEQ ID NO: 2706228 - RNA, 23 nt, Human
caguucagagcugcccucuccug

SEQ ID NO: 2706229 - RNA, 22 nt, Human
caguuauuauauuuacaaaugg

SEQ ID NO: 2706230 - RNA, 17 nt, Human
caguucagagcugcccu

SEQ ID NO: 2706231 - RNA, 16 nt, Human
caguucagagcugccc

SEQ ID NO: 2706232 - RNA, 15 nt, Human
caguucagagcugcc

SEQ ID NO: 2706233 - RNA, 22 nt, Human
cagugauuaccagggacugagg

SEQ ID NO: 2706234 - RNA, 13 nt, Human
caguuauggcuau

SEQ ID NO: 2706235 - RNA, 19 nt, Human
caguuauggcuauaggugc

SEQ ID NO: 2706236 - RNA, 20 nt, Human
caguuauggcuauaggugcu

SEQ ID NO: 2706237 - RNA, 17 nt, Human
caguuauuauauuuaca

SEQ ID NO: 2706238 - RNA, 21 nt, Human
caguuauuauauuuacaaaug

SEQ ID NO: 2706239 - RNA, 16 nt, Human
cauagguuuaauaauu

SEQ ID NO: 2706240 - RNA, 19 nt, Human
cauagcagcuuauucacaa

SEQ ID NO: 2706241 - RNA, 18 nt, Human
cauccugaggcuccacuu

SEQ ID NO: 2706242 - RNA, 19 nt, Human
cauccugaggcuccacuug

SEQ ID NO: 2706243 - RNA, 19 nt, Human
cauuauauuuauuacugua

SEQ ID NO: 2706244 - RNA, 21 nt, Human
ccaacuccagaaagugacaag

SEQ ID NO: 2706245 - RNA, 14 nt, Human
ccaaaaggcagaag

SEQ ID NO: 2706246 - RNA, 16 nt, Human
cauuuguauaaaauaa

SEQ ID NO: 2706247 - RNA, 14 nt, Human
cauuuguauaaaau

SEQ ID NO: 2706248 - RNA, 22 nt, Human
auuuaccacuuguguuuugcaa

SEQ ID NO: 2706249 - RNA, 15 nt, Human
auuuaccacuugugu

SEQ ID NO: 2706250 - RNA, 16 nt, Human
auuguaguccuguaau

SEQ ID NO: 2706251 - RNA, 17 nt, Human
auuuaaaaaaaaaccug

SEQ ID NO: 2706252 - RNA, 20 nt, Human
auuuauuacuguaagaaaau

SEQ ID NO: 2706253 - RNA, 19 nt, Human
auuuauuacuguaagaaaa

SEQ ID NO: 2706254 - RNA, 21 nt, Human
auuuauuuuaauaauguuuca

SEQ ID NO: 2706255 - RNA, 20 nt, Human
auuucuugagguaaaagcau

SEQ ID NO: 2706256 - RNA, 17 nt, Human
auuggagcucgugggac

SEQ ID NO: 2706257 - RNA, 16 nt, Human
auuggagcucguggaa

SEQ ID NO: 2706258 - RNA, 17 nt, Human
auugaaggaugcugucu

SEQ ID NO: 2706259 - RNA, 24 nt, Human
auuccuagaaacugacacaugcug

SEQ ID NO: 2706260 - RNA, 16 nt, Human
uuuucucuaggaaaua

SEQ ID NO: 2706261 - RNA, 16 nt, Human
uuuucuauaauuuaaa

SEQ ID NO: 2706262 - RNA, 20 nt, Human
uuuucaggcuagauguaugu

SEQ ID NO: 2706263 - RNA, 22 nt, Human
uuuuauggcacuaguauuucua

SEQ ID NO: 2706264 - RNA, 20 nt, Human
augugcuaguaauuggaaag

SEQ ID NO: 2706265 - RNA, 21 nt, Human
augugcuaguaauuggaaagg

SEQ ID NO: 2706266 - RNA, 19 nt, Human
auguauauuuuauaucaau

SEQ ID NO: 2706267 - RNA, 23 nt, Human
augucgucaaagcugaaauggac

SEQ ID NO: 2706268 - RNA, 17 nt, Human
uuuguaguguuggagaa

SEQ ID NO: 2706269 - RNA, 19 nt, Human
uuugcuaagcauuccaacu

SEQ ID NO: 2706270 - RNA, 20 nt, Human
uuugcuggagcucugcccau

SEQ ID NO: 2706271 - RNA, 22 nt, Human
auucaaacagucucaggaaauc

SEQ ID NO: 2706272 - RNA, 20 nt, Human
auuauauggcuugaguuuaa

SEQ ID NO: 2706273 - RNA, 17 nt, Human
auuccaagugauugaaa

SEQ ID NO: 2706274 - RNA, 15 nt, Human
uuuuugaagcuguau

SEQ ID NO: 2706275 - RNA, 15 nt, Human
uuuuguuuucauuau

SEQ ID NO: 2706276 - RNA, 14 nt, Human
uuuugugaagcaaa

SEQ ID NO: 2706277 - RNA, 16 nt, Human
auuacuguaagaaaau

SEQ ID NO: 2706278 - RNA, 15 nt, Human
auuacuguaagaaaa

SEQ ID NO: 2706279 - RNA, 20 nt, Human
uugucaauaaaauccauaca

SEQ ID NO: 2706280 - RNA, 17 nt, Human
augagguacugagagug

SEQ ID NO: 2706281 - RNA, 18 nt, Human
augagguacugagaguga

SEQ ID NO: 2706282 - RNA, 15 nt, Human
augagguacugagag

SEQ ID NO: 2706283 - RNA, 13 nt, Human
augauuucauuca

SEQ ID NO: 2706284 - RNA, 18 nt, Human
uuuaaaaaaauuccaagu

SEQ ID NO: 2706285 - RNA, 12 nt, Human
augcaaagcacu

SEQ ID NO: 2706286 - RNA, 13 nt, Human
augcaaagcacug

SEQ ID NO: 2706287 - RNA, 14 nt, Human
augcaaagcacuga

SEQ ID NO: 2706288 - RNA, 21 nt, Human
uuuaaauauaugcuaagucuu

SEQ ID NO: 2706289 - RNA, 17 nt, Human
uuucaaacauauauaac

SEQ ID NO: 2706290 - RNA, 19 nt, Human
uuucaaacauauauaacaa

SEQ ID NO: 2706291 - RNA, 21 nt, Human
augcuucuguuuuauaauuuu

SEQ ID NO: 2706292 - RNA, 22 nt, Human
augcuguauuuuaaaagaauga

SEQ ID NO: 2706293 - RNA, 19 nt, Human
augcuguauuuuaaaagaa

SEQ ID NO: 2706294 - RNA, 23 nt, Human
augcuguauuuuaaaagaaugau

SEQ ID NO: 2706295 - RNA, 18 nt, Human
augcuacaggauuugaaa

SEQ ID NO: 2706296 - RNA, 22 nt, Human
augccuuuucccaacuccagaa

SEQ ID NO: 2706297 - RNA, 20 nt, Human
augccuuuucccaacuccag

SEQ ID NO: 2706298 - RNA, 14 nt, Human
augccuuuucccaa

SEQ ID NO: 2706299 - RNA, 19 nt, Human
uuuauaugcuucuguuuua

SEQ ID NO: 2706300 - RNA, 21 nt, Human
uuuauaugcuucuguuuuaua

SEQ ID NO: 2706301 - RNA, 12 nt, Human
uugacuuuuuau

SEQ ID NO: 2706302 - RNA, 13 nt, Human
uugacaugggaca

SEQ ID NO: 2706303 - RNA, 19 nt, Human
aucucaaaacugcacuguc

SEQ ID NO: 2706304 - RNA, 20 nt, Human
aucucaaaacugcacuguca

SEQ ID NO: 2706305 - RNA, 15 nt, Human
aucucaaaacugcac

SEQ ID NO: 2706306 - RNA, 15 nt, Human
uuggagaagaacuga

SEQ ID NO: 2706307 - RNA, 22 nt, Human
uuggagaagaacugaaaucaua

SEQ ID NO: 2706308 - RNA, 17 nt, Human
uuggagaagaacugaaa

SEQ ID NO: 2706309 - RNA, 12 nt, Human
aucuuuaaaaua

SEQ ID NO: 2706310 - RNA, 15 nt, Human
aucuuuaaaauacac

SEQ ID NO: 2706311 - RNA, 16 nt, Human
aucuuauaauuuaaaa

SEQ ID NO: 2706312 - RNA, 15 nt, Human
aucuuauaauuuaaa

SEQ ID NO: 2706313 - RNA, 18 nt, Human
augaacuuguaaaggaau

SEQ ID NO: 2706314 - RNA, 23 nt, Human
auaugcaaagcacugacuucuaa

SEQ ID NO: 2706315 - RNA, 16 nt, Human
auaugcaaagcacuga

SEQ ID NO: 2706316 - RNA, 15 nt, Human
auaugcaaagcacug

SEQ ID NO: 2706317 - RNA, 15 nt, Human
uucagcccucagaau

SEQ ID NO: 2706318 - RNA, 15 nt, Human
auauaacaaugcugu

SEQ ID NO: 2706319 - RNA, 12 nt, Human
auauaacaaugc

SEQ ID NO: 2706320 - RNA, 19 nt, Human
auauaagcuuguauuccuu

SEQ ID NO: 2706321 - RNA, 18 nt, Human
auauauaacaaugcugua

SEQ ID NO: 2706322 - RNA, 17 nt, Human
auauauaacaaugcugu

SEQ ID NO: 2706323 - RNA, 19 nt, Human
auauauaacaaugcuguau

SEQ ID NO: 2706324 - RNA, 18 nt, Human
auagucaaauugugugaa

SEQ ID NO: 2706325 - RNA, 17 nt, Human
auagucaaauuguguga

SEQ ID NO: 2706326 - RNA, 15 nt, Human
uucaaacauauauaa

SEQ ID NO: 2706327 - RNA, 21 nt, Human
auaggaauugacccacaagaa

SEQ ID NO: 2706328 - RNA, 14 nt, Human
auagcuacuaauuu

SEQ ID NO: 2706329 - RNA, 17 nt, Human
auagcuacuaauuuuaa

SEQ ID NO: 2706330 - RNA, 18 nt, Human
auagcuacuaauuuuaaa

SEQ ID NO: 2706331 - RNA, 17 nt, Human
uuauuguuuaaaaucau

SEQ ID NO: 2706332 - RNA, 18 nt, Human
uucucaacuccaaacuga

SEQ ID NO: 2706333 - RNA, 14 nt, Human
uucucaacuccaaa

SEQ ID NO: 2706334 - RNA, 23 nt, Human
aucccucccuccaccucccugca

SEQ ID NO: 2706335 - RNA, 13 nt, Human
aucccucccucca

SEQ ID NO: 2706336 - RNA, 11 nt, Human
aucccucccuc

SEQ ID NO: 2706337 - RNA, 16 nt, Human
uucugcaucagcugcu

SEQ ID NO: 2706338 - RNA, 23 nt, Human
uucugcaucagcugcugaaacaa

SEQ ID NO: 2706339 - RNA, 14 nt, Human
uucugaagaagaug

SEQ ID NO: 2706340 - RNA, 13 nt, Human
uucugaagaagau

SEQ ID NO: 2706341 - RNA, 12 nt, Human
uucugaagaaga

SEQ ID NO: 2706342 - RNA, 19 nt, Human
auauuugaaauauugacuu

SEQ ID NO: 2706343 - RNA, 14 nt, Human
auauuugaaauauu

SEQ ID NO: 2706344 - RNA, 23 nt, Human
auauuugaaauauugacuuuuua

SEQ ID NO: 2706345 - RNA, 12 nt, Human
auauuuuaacuu

SEQ ID NO: 2706346 - RNA, 22 nt, Human
auauuuguaucacaaaucuuaa

SEQ ID NO: 2706347 - RNA, 13 nt, Human
auauuugaaauau

SEQ ID NO: 2706348 - RNA, 19 nt, Human
aucaauuuuucuuauuuca

SEQ ID NO: 2706349 - RNA, 14 nt, Human
uguuccuagugaaa

SEQ ID NO: 2706350 - RNA, 18 nt, Human
uguuccuagugaaagagg

SEQ ID NO: 2706351 - RNA, 15 nt, Human
uguuauaaucuuuca

SEQ ID NO: 2706352 - RNA, 13 nt, Human
uguguaaguagau

SEQ ID NO: 2706353 - RNA, 20 nt, Human
uguggucacaggaaguagag

SEQ ID NO: 2706354 - RNA, 15 nt, Human
agugaaagaaaauaa

SEQ ID NO: 2706355 - RNA, 16 nt, Human
agugaacaaauuuaca

SEQ ID NO: 2706356 - RNA, 20 nt, Human
agugaacaaauuuacagaga

SEQ ID NO: 2706357 - RNA, 22 nt, Human
agucucaggaaaucaaauaugc

SEQ ID NO: 2706358 - RNA, 15 nt, Human
ugugagaugcuagaa

SEQ ID NO: 2706359 - RNA, 19 nt, Human
ugugagaugcuagaacucc

SEQ ID NO: 2706360 - RNA, 18 nt, Human
agucuuucacauuuaaau

SEQ ID NO: 2706361 - RNA, 19 nt, Human
auaaaauccauacauuugu

SEQ ID NO: 2706362 - RNA, 18 nt, Human
auaaaauccauacauuug

SEQ ID NO: 2706363 - RNA, 21 nt, Human
auaaaauaauuuuuauauuug

SEQ ID NO: 2706364 - RNA, 16 nt, Human
auaaaauaauuuuuau

SEQ ID NO: 2706365 - RNA, 15 nt, Human
auaaaauaauuuuua

SEQ ID NO: 2706366 - RNA, 18 nt, Human
uuaaguaaugauaacugg

SEQ ID NO: 2706367 - RNA, 22 nt, Human
uuaagaagacugcauuauauuu

SEQ ID NO: 2706368 - RNA, 20 nt, Human
uuaagaagacugcauuauau

SEQ ID NO: 2706369 - RNA, 15 nt, Human
uuacuguaagaaaau

SEQ ID NO: 2706370 - RNA, 12 nt, Human
uuaccugggaaa

SEQ ID NO: 2706371 - RNA, 14 nt, Human
uuaccuuacagaag

SEQ ID NO: 2706372 - RNA, 16 nt, Human
aguuuagcuggaaaag

SEQ ID NO: 2706373 - RNA, 19 nt, Human
uguuuucauuaucucaaaa

SEQ ID NO: 2706374 - RNA, 14 nt, Human
uguuuugcaagcca

SEQ ID NO: 2706375 - RNA, 16 nt, Human
aguucugaagaagaug

SEQ ID NO: 2706376 - RNA, 16 nt, Human
aguucugcagauaaac

SEQ ID NO: 2706377 - RNA, 21 nt, Human
aguucugcagauaaacaguag

SEQ ID NO: 2706378 - RNA, 18 nt, Human
aggggagcaugggaagug

SEQ ID NO: 2706379 - RNA, 21 nt, Human
agggaggacgcucucuggccu

SEQ ID NO: 2706380 - RNA, 22 nt, Human
agggaggacgcucucuggccuu

SEQ ID NO: 2706381 - RNA, 23 nt, Human
agggaggacgcucucuggccuuc

SEQ ID NO: 2706382 - RNA, 13 nt, Human
agggaaauuucag

SEQ ID NO: 2706383 - RNA, 13 nt, Human
aguaaaauccaca

SEQ ID NO: 2706384 - RNA, 20 nt, Human
aguaaugauaacuggaaacu

SEQ ID NO: 2706385 - RNA, 18 nt, Human
aguaaugauaacuggaaa

SEQ ID NO: 2706386 - RNA, 17 nt, Human
aguaaugauaacuggaa

SEQ ID NO: 2706387 - RNA, 13 nt, Human
aguaaugauaacu

SEQ ID NO: 2706388 - RNA, 16 nt, Human
aguauuucuaugaaau

SEQ ID NO: 2706389 - RNA, 17 nt, Human
aguauuucuaugaaaua

SEQ ID NO: 2706390 - RNA, 18 nt, Human
aguauuucuaugaaauau

SEQ ID NO: 2706391 - RNA, 17 nt, Human
agucaccucauggaauu

SEQ ID NO: 2706392 - RNA, 15 nt, Human
agucaccucauggaa

SEQ ID NO: 2706393 - RNA, 14 nt, Human
agucaccucaugga

SEQ ID NO: 2706394 - RNA, 18 nt, Human
aguauuagaauaccacag

SEQ ID NO: 2706395 - RNA, 13 nt, Human
aguagucagacug

SEQ ID NO: 2706396 - RNA, 13 nt, Human
uguauuacaaauc

SEQ ID NO: 2706397 - RNA, 22 nt, Human
uguauuacaaauccaaugaaau

SEQ ID NO: 2706398 - RNA, 15 nt, Human
uguaucacaaaucuu

SEQ ID NO: 2706399 - RNA, 18 nt, Human
uguaucacaaaucuuaac

SEQ ID NO: 2706400 - RNA, 15 nt, Human
uguaguguuggagaa

SEQ ID NO: 2706401 - RNA, 14 nt, Human
uguaguguuggaga

SEQ ID NO: 2706402 - RNA, 16 nt, Human
uguaaaggaauuuaaa

SEQ ID NO: 2706403 - RNA, 14 nt, Human
agcuguucacagcc

SEQ ID NO: 2706404 - RNA, 16 nt, Human
agcugcccucuccugg

SEQ ID NO: 2706405 - RNA, 15 nt, Human
agcugcccucuccug

SEQ ID NO: 2706406 - RNA, 14 nt, Human
agcugcccucuccu

SEQ ID NO: 2706407 - RNA, 13 nt, Human
agcugcccucucc

SEQ ID NO: 2706408 - RNA, 20 nt, Human
ugcccuguuaaaagaugaaa

SEQ ID NO: 2706409 - RNA, 20 nt, Human
agcuugcccuggugccucac

SEQ ID NO: 2706410 - RNA, 16 nt, Human
agcuugcccuguuaaa

SEQ ID NO: 2706411 - RNA, 18 nt, Human
agcuugcccuguuaaaag

SEQ ID NO: 2706412 - RNA, 19 nt, Human
agcuugcccuguuaaaaga

SEQ ID NO: 2706413 - RNA, 14 nt, Human
ugcuacaaaaacac

SEQ ID NO: 2706414 - RNA, 19 nt, Human
ugccuuuucccaacuccag

SEQ ID NO: 2706415 - RNA, 17 nt, Human
ugccuuuucccaacucc

SEQ ID NO: 2706416 - RNA, 20 nt, Human
aggaaaucaaauaugcaaag

SEQ ID NO: 2706417 - RNA, 21 nt, Human
aggaaaucaaauaugcaaagc

SEQ ID NO: 2706418 - RNA, 22 nt, Human
aggaaaucaaauaugcaaagca

SEQ ID NO: 2706419 - RNA, 15 nt, Human
aggcccccaggugcc

SEQ ID NO: 2706420 - RNA, 14 nt, Human
uggaguugaaaauc

SEQ ID NO: 2706421 - RNA, 15 nt, Human
aggcagcuugaaacu

SEQ ID NO: 2706422 - RNA, 20 nt, Human
aggcauuuaggccaugggac

SEQ ID NO: 2706423 - RNA, 21 nt, Human
uggagcucguggaacaguuac

SEQ ID NO: 2706424 - RNA, 17 nt, Human
uggagcucguggaacag

SEQ ID NO: 2706425 - RNA, 21 nt, Human
uggagcucgugggacagucac

SEQ ID NO: 2706426 - RNA, 17 nt, Human
ugcuuuuaaaaaaaaau

SEQ ID NO: 2706427 - RNA, 18 nt, Human
aggagaaacuggaacucu

SEQ ID NO: 2706428 - RNA, 19 nt, Human
aggagaaacuggaacucuc

SEQ ID NO: 2706429 - RNA, 17 nt, Human
aggagaaacuggaacuc

SEQ ID NO: 2706430 - RNA, 13 nt, Human
aggacgcucucug

SEQ ID NO: 2706431 - RNA, 14 nt, Human
aggacgcucucugg

SEQ ID NO: 2706432 - RNA, 16 nt, Human
aggacgcucucuggcc

SEQ ID NO: 2706433 - RNA, 17 nt, Human
aggacgcucucuggccu

SEQ ID NO: 2706434 - RNA, 19 nt, Human
aggacgcucucuggccuuc

SEQ ID NO: 2706435 - RNA, 20 nt, Human
aggacgcucucuggccuucg

SEQ ID NO: 2706436 - RNA, 15 nt, Human
ugcacuccagccuga

SEQ ID NO: 2706437 - RNA, 17 nt, Human
ugcacuccagccugagc

SEQ ID NO: 2706438 - RNA, 22 nt, Human
ugcagaagacaguauggcagcu

SEQ ID NO: 2706439 - RNA, 13 nt, Human
ugauuucauucaa

SEQ ID NO: 2706440 - RNA, 20 nt, Human
ugcaaagcacugacuucuaa

SEQ ID NO: 2706441 - RNA, 22 nt, Human
ugcaaagcacugacuucuaagu

SEQ ID NO: 2706442 - RNA, 18 nt, Human
ugcaaagcacugacuucu

SEQ ID NO: 2706443 - RNA, 21 nt, Human
ugcaagccagauuuuccugaa

SEQ ID NO: 2706444 - RNA, 15 nt, Human
ugcaagccagauuuu

SEQ ID NO: 2706445 - RNA, 21 nt, Human
ugcaauaaaauggguuuuacu

SEQ ID NO: 2706446 - RNA, 17 nt, Human
ugcaauaaaauggguuu

SEQ ID NO: 2706447 - RNA, 20 nt, Human
ugcauagauucccugagcag

SEQ ID NO: 2706448 - RNA, 13 nt, Human
ugcauacucauua

SEQ ID NO: 2706449 - RNA, 19 nt, Human
ugcauacucauuaggaugg

SEQ ID NO: 2706450 - RNA, 19 nt, Human
agccugagcgacagugaga

SEQ ID NO: 2706451 - RNA, 17 nt, Human
ugccaguuauggcuaua

SEQ ID NO: 2706452 - RNA, 13 nt, Human
ugccauaauuacu

SEQ ID NO: 2706453 - RNA, 18 nt, Human
agcagucaggaaagagaa

SEQ ID NO: 2706454 - RNA, 17 nt, Human
agcagucaggaaagaga

SEQ ID NO: 2706455 - RNA, 23 nt, Human
agcaguuugguuucuagcaugaa

SEQ ID NO: 2706456 - RNA, 22 nt, Human
agcaguuugguuucuagcauga

SEQ ID NO: 2706457 - RNA, 20 nt, Human
agcaguuugguuucuagcau

SEQ ID NO: 2706458 - RNA, 19 nt, Human
agcagucaggaaagagaac

SEQ ID NO: 2706459 - RNA, 13 nt, Human
agcauaccaacac

SEQ ID NO: 2706460 - RNA, 19 nt, Human
agcauaccaacacgagcag

SEQ ID NO: 2706461 - RNA, 22 nt, Human
agcauaccaacacgagcaggcu

SEQ ID NO: 2706462 - RNA, 19 nt, Human
agcagggcauggcugggaa

SEQ ID NO: 2706463 - RNA, 20 nt, Human
agcaggaagcugugagagca

SEQ ID NO: 2706464 - RNA, 16 nt, Human
agcaggcuacugucag

SEQ ID NO: 2706465 - RNA, 17 nt, Human
agcaggcuacugucagc

SEQ ID NO: 2706466 - RNA, 19 nt, Human
agcaggcuacugucagcuc

SEQ ID NO: 2706467 - RNA, 20 nt, Human
agcaggcuacugucagcucc

SEQ ID NO: 2706468 - RNA, 14 nt, Human
agcaggcuacuguc

SEQ ID NO: 2706469 - RNA, 15 nt, Human
ugauuaaguaaugau

SEQ ID NO: 2706470 - RNA, 16 nt, Human
ugauuaaguaaugaua

SEQ ID NO: 2706471 - RNA, 22 nt, Human
agcauuuagauguauagguuga

SEQ ID NO: 2706472 - RNA, 20 nt, Human
agcaucacaugaacuuguaa

SEQ ID NO: 2706473 - RNA, 17 nt, Human
ugaaauaagccagacau

SEQ ID NO: 2706474 - RNA, 18 nt, Human
ugaaauaagccagacauc

SEQ ID NO: 2706475 - RNA, 20 nt, Human
ugaaauaagccagacaucaa

SEQ ID NO: 2706476 - RNA, 23 nt, Human
ugaaauaagccagacaucaacag

SEQ ID NO: 2706477 - RNA, 14 nt, Human
agagcugcccucuc

SEQ ID NO: 2706478 - RNA, 13 nt, Human
agagcugcccucu

SEQ ID NO: 2706479 - RNA, 15 nt, Human
agagcugcccucucc

SEQ ID NO: 2706480 - RNA, 15 nt, Human
ugaaauuguauuaca

SEQ ID NO: 2706481 - RNA, 18 nt, Human
ugaaauauuauguuaaaa

SEQ ID NO: 2706482 - RNA, 19 nt, Human
ugaacaaauuuacagagac

SEQ ID NO: 2706483 - RNA, 20 nt, Human
ugaacaaauuuacagagaca

SEQ ID NO: 2706484 - RNA, 18 nt, Human
ugaacaaauuuacagaga

SEQ ID NO: 2706485 - RNA, 23 nt, Human
ugaacuagaguuuagcuggaaaa

SEQ ID NO: 2706486 - RNA, 22 nt, Human
agagcugcccucuccugggcag

SEQ ID NO: 2706487 - RNA, 19 nt, Human
agagcuguucacagccaga

SEQ ID NO: 2706488 - RNA, 21 nt, Human
agagcuguucacagccagacu

SEQ ID NO: 2706489 - RNA, 15 nt, Human
agagguugcagugag

SEQ ID NO: 2706490 - RNA, 17 nt, Human
ugacccacaagaaauga

SEQ ID NO: 2706491 - RNA, 17 nt, Human
agaugcaguucugaaga

SEQ ID NO: 2706492 - RNA, 19 nt, Human
agaugcaguucugaagaag

SEQ ID NO: 2706493 - RNA, 18 nt, Human
agaugcaguucugaagaa

SEQ ID NO: 2706494 - RNA, 14 nt, Human
agaugcuagaacuc

SEQ ID NO: 2706495 - RNA, 15 nt, Human
agaugcuagaacucc

SEQ ID NO: 2706496 - RNA, 17 nt, Human
agaguuuagcuggaaaa

SEQ ID NO: 2706497 - RNA, 16 nt, Human
agaguuuagcuggaaa

SEQ ID NO: 2706498 - RNA, 23 nt, Human
agacuauucaaacagucucagga

SEQ ID NO: 2706499 - RNA, 16 nt, Human
ucuuauuucauuucuu

SEQ ID NO: 2706500 - RNA, 15 nt, Human
ucuuauuucauuucu

SEQ ID NO: 2706501 - RNA, 24 nt, Human
agagacagaaagcagaacagugau

SEQ ID NO: 2706502 - RNA, 15 nt, Human
agagacagaaagcag

SEQ ID NO: 2706503 - RNA, 22 nt, Human
ucuuagaugcaguucugaagaa

SEQ ID NO: 2706504 - RNA, 23 nt, Human
ucuuagaugcaguucugaagaag

SEQ ID NO: 2706505 - RNA, 17 nt, Human
agacacacugaagaagc

SEQ ID NO: 2706506 - RNA, 16 nt, Human
agacacacugaagaag

SEQ ID NO: 2706507 - RNA, 16 nt, Human
acuuguguuuugcaag

SEQ ID NO: 2706508 - RNA, 12 nt, Human
ucucaggaaauc

SEQ ID NO: 2706509 - RNA, 23 nt, Human
acuucuaaguaaaaccacagcag

SEQ ID NO: 2706510 - RNA, 16 nt, Human
acuugucaauaaaauc

SEQ ID NO: 2706511 - RNA, 21 nt, Human
acuugaacccauauuuguaca

SEQ ID NO: 2706512 - RNA, 19 nt, Human
acuugaacccgggaggcag

SEQ ID NO: 2706513 - RNA, 20 nt, Human
acuugaacccgggaggcaga

SEQ ID NO: 2706514 - RNA, 12 nt, Human
ucucuggccuuc

SEQ ID NO: 2706515 - RNA, 23 nt, Human
ucucuggccuucggccuccaucc

SEQ ID NO: 2706516 - RNA, 21 nt, Human
ucucuggccuucggccuccau

SEQ ID NO: 2706517 - RNA, 22 nt, Human
ucucuggccuucggccuccauc

SEQ ID NO: 2706518 - RNA, 12 nt, Human
ucugaagaagau

SEQ ID NO: 2706519 - RNA, 14 nt, Human
agaaaugaaagcag

SEQ ID NO: 2706520 - RNA, 22 nt, Human
ucggguuuuauuguuuaaaauc

SEQ ID NO: 2706521 - RNA, 18 nt, Human
acuguggguagacacaca

SEQ ID NO: 2706522 - RNA, 21 nt, Human
acugucagcuccccucggaga

SEQ ID NO: 2706523 - RNA, 18 nt, Human
acugggacaggggagaac

SEQ ID NO: 2706524 - RNA, 23 nt, Human
ucuaaguaaaaccacagcaguug

SEQ ID NO: 2706525 - RNA, 16 nt, Human
ucuacauacuauggaa

SEQ ID NO: 2706526 - RNA, 21 nt, Human
ucuaaguaaaaccacagcagu

SEQ ID NO: 2706527 - RNA, 22 nt, Human
ucuaaguaaaaccacagcaguu

SEQ ID NO: 2706528 - RNA, 20 nt, Human
ucuaaagccauuguaguccu

SEQ ID NO: 2706529 - RNA, 13 nt, Human
acuggcacaguuu

SEQ ID NO: 2706530 - RNA, 19 nt, Human
acuggcacaguuuucugag

SEQ ID NO: 2706531 - RNA, 20 nt, Human
acuggcacaguuuucugaga

SEQ ID NO: 2706532 - RNA, 19 nt, Human
acugccuucucaacuccaa

SEQ ID NO: 2706533 - RNA, 13 nt, Human
acugccuucucaa

SEQ ID NO: 2706534 - RNA, 15 nt, Human
acugcauuauauuua

SEQ ID NO: 2706535 - RNA, 14 nt, Human
acugcauuauauuu

SEQ ID NO: 2706536 - RNA, 18 nt, Human
ucgcuccaccuugcagcu

SEQ ID NO: 2706537 - RNA, 21 nt, Human
uccaacuaucucauuuccaag

SEQ ID NO: 2706538 - RNA, 19 nt, Human
acgagcaggcuacugucag

SEQ ID NO: 2706539 - RNA, 20 nt, Human
acgagcaggcuacugucagc

SEQ ID NO: 2706540 - RNA, 14 nt, Human
acgagaaaacaaua

SEQ ID NO: 2706541 - RNA, 13 nt, Human
accucccugcaau

SEQ ID NO: 2706542 - RNA, 12 nt, Human
accucccugcaa

SEQ ID NO: 2706543 - RNA, 16 nt, Human
ucaugaauuaguuuua

SEQ ID NO: 2706544 - RNA, 22 nt, Human
ucaggaaaucaaauaugcaaag

SEQ ID NO: 2706545 - RNA, 23 nt, Human
ucaggaaaucaaauaugcaaagc

SEQ ID NO: 2706546 - RNA, 21 nt, Human
accuagggugauauuaaccag

SEQ ID NO: 2706547 - RNA, 21 nt, Human
ucaugaauuaguuuuauaugc

SEQ ID NO: 2706548 - RNA, 21 nt, Human
acuccaaagaaauguaaggga

SEQ ID NO: 2706549 - RNA, 15 nt, Human
acuccaaagaaaugu

SEQ ID NO: 2706550 - RNA, 18 nt, Human
acuccaaagaaauguaag

SEQ ID NO: 2706551 - RNA, 14 nt, Human
acuccaaagaaaug

SEQ ID NO: 2706552 - RNA, 11 nt, Human
ucccugagcag

SEQ ID NO: 2706553 - RNA, 16 nt, Human
ucccucccuccaccuc

SEQ ID NO: 2706554 - RNA, 15 nt, Human
ucccucccuccaccu

SEQ ID NO: 2706555 - RNA, 23 nt, Human
ucccuccaccucccugcaauaaa

SEQ ID NO: 2706556 - RNA, 21 nt, Human
ucccuccaccucccugcaaua

SEQ ID NO: 2706557 - RNA, 14 nt, Human
ucccucccuccacc

SEQ ID NO: 2706558 - RNA, 13 nt, Human
ucccucccuccac

SEQ ID NO: 2706559 - RNA, 17 nt, Human
uccccucggagaagagc

SEQ ID NO: 2706560 - RNA, 16 nt, Human
uccccucggagaagag

SEQ ID NO: 2706561 - RNA, 18 nt, Human
ucccagccagcaguucag

SEQ ID NO: 2706562 - RNA, 17 nt, Human
ucccagccagcaguuca

SEQ ID NO: 2706563 - RNA, 14 nt, Human
ucccagucauuuaa

SEQ ID NO: 2706564 - RNA, 22 nt, Human
ucccagucauuuaauaaaugug

SEQ ID NO: 2706565 - RNA, 21 nt, Human
uccaugaagauguagaggaga

SEQ ID NO: 2706566 - RNA, 13 nt, Human
uccaugaagaugu

SEQ ID NO: 2706567 - RNA, 20 nt, Human
uccauccugaggcuccacuu

SEQ ID NO: 2706568 - RNA, 21 nt, Human
uccauccugaggcuccacuug

SEQ ID NO: 2706569 - RNA, 19 nt, Human
uccauccugaggcuccacu

SEQ ID NO: 2706570 - RNA, 20 nt, Human
ucaggaaaucaaauaugcaa

SEQ ID NO: 2706571 - RNA, 21 nt, Human
ucaggaaaucaaauaugcaaa

SEQ ID NO: 2706572 - RNA, 19 nt, Human
ucaggaaagagaacuucca

SEQ ID NO: 2706573 - RNA, 13 nt, Human
ucaggaaagagaa

SEQ ID NO: 2706574 - RNA, 12 nt, Human
ucagagcugccc

SEQ ID NO: 2706575 - RNA, 23 nt, Human
accauuucuugagguaaaagcau

SEQ ID NO: 2706576 - RNA, 15 nt, Human
accaaucaugaauua

SEQ ID NO: 2706577 - RNA, 13 nt, Human
accaaucaugaau

SEQ ID NO: 2706578 - RNA, 20 nt, Human
ucaauuuuucuuauuucauu

SEQ ID NO: 2706579 - RNA, 23 nt, Human
ucaauuuuucuuauuucauuucu

SEQ ID NO: 2706580 - RNA, 15 nt, Human
ucaauucuugccaaa

SEQ ID NO: 2706581 - RNA, 18 nt, Human
accacuuguguuuugcaa

SEQ ID NO: 2706582 - RNA, 14 nt, Human
accagggacugagg

SEQ ID NO: 2706583 - RNA, 14 nt, Human
acauagaauuaaca

SEQ ID NO: 2706584 - RNA, 18 nt, Human
acauagaauuaacacaug

SEQ ID NO: 2706585 - RNA, 19 nt, Human
acauauauaacaaugcugu

SEQ ID NO: 2706586 - RNA, 13 nt, Human
acaucaacagaua

SEQ ID NO: 2706587 - RNA, 13 nt, Human
uauuucauuucuu

SEQ ID NO: 2706588 - RNA, 21 nt, Human
uaugaaauauuauguuaaaac

SEQ ID NO: 2706589 - RNA, 18 nt, Human
acaguuuucugagaaaga

SEQ ID NO: 2706590 - RNA, 19 nt, Human
acaguuuucugagaaagac

SEQ ID NO: 2706591 - RNA, 20 nt, Human
acaguuuucugagaaagacu

SEQ ID NO: 2706592 - RNA, 21 nt, Human
acaguuuucugagaaagacua

SEQ ID NO: 2706593 - RNA, 16 nt, Human
acaguuuucugagaaa

SEQ ID NO: 2706594 - RNA, 17 nt, Human
acaguuuucugagaaag

SEQ ID NO: 2706595 - RNA, 15 nt, Human
acaguuuucugagaa

SEQ ID NO: 2706596 - RNA, 22 nt, Human
ucaagaugaugaugaucuuuaa

SEQ ID NO: 2706597 - RNA, 21 nt, Human
acaugcugaacaucacagcuu

SEQ ID NO: 2706598 - RNA, 14 nt, Human
acaugcugaacauc

SEQ ID NO: 2706599 - RNA, 21 nt, Human
ucaaaauaugccccauucaac

SEQ ID NO: 2706600 - RNA, 23 nt, Human
ucaaaauaccaugccauuuaaag

SEQ ID NO: 2706601 - RNA, 21 nt, Human
ucaaaauaccaugccauuuaa

SEQ ID NO: 2706602 - RNA, 18 nt, Human
ucaaaagaaagaaaauca

SEQ ID NO: 2706603 - RNA, 14 nt, Human
ucaaagcugaaaug

SEQ ID NO: 2706604 - RNA, 19 nt, Human
acaugauccugcaauucca

SEQ ID NO: 2706605 - RNA, 15 nt, Human
uauauuuauuacugu

SEQ ID NO: 2706606 - RNA, 19 nt, Human
uauauuuauuacuguaaga

SEQ ID NO: 2706607 - RNA, 21 nt, Human
acagcccuucuuuccacagaa

SEQ ID NO: 2706608 - RNA, 20 nt, Human
acagcccuucuuuccacaga

SEQ ID NO: 2706609 - RNA, 13 nt, Human
acacuuaaaaaug

SEQ ID NO: 2706610 - RNA, 15 nt, Human
acacuuaaaaauggu

SEQ ID NO: 2706611 - RNA, 12 nt, Human
uauauuuacaaa

SEQ ID NO: 2706612 - RNA, 14 nt, Human
acacugaagaagca

SEQ ID NO: 2706613 - RNA, 12 nt, Human
acacugaagaag

SEQ ID NO: 2706614 - RNA, 14 nt, Human
acacuccagugaga

SEQ ID NO: 2706615 - RNA, 23 nt, Human
uauaaaauaauuuuuauauuuga

SEQ ID NO: 2706616 - RNA, 18 nt, Human
acacaugcugaacaucac

SEQ ID NO: 2706617 - RNA, 19 nt, Human
acacuaagagagaaugaga

SEQ ID NO: 2706618 - RNA, 18 nt, Human
acacuaagagagaaugag

SEQ ID NO: 2706619 - RNA, 17 nt, Human
acacuaagagagaauga

SEQ ID NO: 2706620 - RNA, 12 nt, Human
uaguguuggaga

SEQ ID NO: 2706621 - RNA, 17 nt, Human
uaguguuggagaagaac

SEQ ID NO: 2706622 - RNA, 16 nt, Human
uaguguuggagaagaa

SEQ ID NO: 2706623 - RNA, 14 nt, Human
acacacugaagaag

SEQ ID NO: 2706624 - RNA, 17 nt, Human
acaaugcuguauuuuaa

SEQ ID NO: 2706625 - RNA, 14 nt, Human
acaaugcuguauuu

SEQ ID NO: 2706626 - RNA, 17 nt, Human
acacaacuauauuguuu

SEQ ID NO: 2706627 - RNA, 14 nt, Human
acacaacuauauug

SEQ ID NO: 2706628 - RNA, 20 nt, Human
acacacucaaaucaagaaac

SEQ ID NO: 2706629 - RNA, 13 nt, Human
acacacugaagaa

SEQ ID NO: 2706630 - RNA, 18 nt, Human
uacuaaaaauacaaaaaa

SEQ ID NO: 2706631 - RNA, 14 nt, Human
uacuaaaaauacaa

SEQ ID NO: 2706632 - RNA, 23 nt, Human
uacugggaaagggauuuucagcc

SEQ ID NO: 2706633 - RNA, 17 nt, Human
uacugagagugaacaaa

SEQ ID NO: 2706634 - RNA, 18 nt, Human
aauugaggacacugauau

SEQ ID NO: 2706635 - RNA, 19 nt, Human
aauuucucccagucauuua

SEQ ID NO: 2706636 - RNA, 17 nt, Human
aauuuacagagacagaa

SEQ ID NO: 2706637 - RNA, 18 nt, Human
aauuuacagagacagaaa

SEQ ID NO: 2706638 - RNA, 19 nt, Human
uacuucuuaggguuaugau

SEQ ID NO: 2706639 - RNA, 16 nt, Human
uacuucaugcugucua

SEQ ID NO: 2706640 - RNA, 17 nt, Human
uagauaggccaugggca

SEQ ID NO: 2706641 - RNA, 22 nt, Human
uagauaggucagugcaaauacu

SEQ ID NO: 2706642 - RNA, 20 nt, Human
uagaugcaguucugaagaag

SEQ ID NO: 2706643 - RNA, 21 nt, Human
uagaugcaguucugaagaaga

SEQ ID NO: 2706644 - RNA, 21 nt, Human
aauuuuucuuauuucauuucu

SEQ ID NO: 2706645 - RNA, 22 nt, Human
aauuuuuucucuaggaaauauu

SEQ ID NO: 2706646 - RNA, 22 nt, Human
acaagcucacagaccuuugaac

SEQ ID NO: 2706647 - RNA, 17 nt, Human
acaaauuuacagagaca

SEQ ID NO: 2706648 - RNA, 16 nt, Human
uagcuacuaauuuuaa

SEQ ID NO: 2706649 - RNA, 18 nt, Human
aauaggcguaacuaauuu

SEQ ID NO: 2706650 - RNA, 12 nt, Human
aauaucacuugu

SEQ ID NO: 2706651 - RNA, 15 nt, Human
aauaucacuugucaa

SEQ ID NO: 2706652 - RNA, 15 nt, Human
aauaugcaaagcacu

SEQ ID NO: 2706653 - RNA, 17 nt, Human
aauaugcaaagcacuga

SEQ ID NO: 2706654 - RNA, 24 nt, Human
aauaugcaaagcacugacuucuaa

SEQ ID NO: 2706655 - RNA, 14 nt, Human
aauauuucagauaa

SEQ ID NO: 2706656 - RNA, 15 nt, Human
aauauuucagauaau

SEQ ID NO: 2706657 - RNA, 19 nt, Human
aauaucuuuuuuuuaauaa

SEQ ID NO: 2706658 - RNA, 21 nt, Human
aauaacaaugaaaguugauaa

SEQ ID NO: 2706659 - RNA, 16 nt, Human
aauaauuuuuauauuu

SEQ ID NO: 2706660 - RNA, 19 nt, Human
aauaauuuuuauauuugaa

SEQ ID NO: 2706661 - RNA, 17 nt, Human
aauaauuuuuauauuug

SEQ ID NO: 2706662 - RNA, 20 nt, Human
aauaauuuuuauauuugaaa

SEQ ID NO: 2706663 - RNA, 11 nt, Human
aaugugauaug

SEQ ID NO: 2706664 - RNA, 19 nt, Human
aauggacuuuuguacauag

SEQ ID NO: 2706665 - RNA, 19 nt, Human
uacacuaagagagaaugag

SEQ ID NO: 2706666 - RNA, 13 nt, Human
uacaaaaacacag

SEQ ID NO: 2706667 - RNA, 14 nt, Human
uacaaaaacacagc

SEQ ID NO: 2706668 - RNA, 16 nt, Human
uacaaaaacacagcaa

SEQ ID NO: 2706669 - RNA, 15 nt, Human
uacaaaaacacagca

SEQ ID NO: 2706670 - RNA, 14 nt, Human
aaucuuauaauuua

SEQ ID NO: 2706671 - RNA, 16 nt, Human
aaucuuauaauuuaaa

SEQ ID NO: 2706672 - RNA, 13 nt, Human
aauccuugaagau

SEQ ID NO: 2706673 - RNA, 15 nt, Human
aaucaucaagucuuu

SEQ ID NO: 2706674 - RNA, 17 nt, Human
aaucaugaauuaguuuu

SEQ ID NO: 2706675 - RNA, 19 nt, Human
aaucaugaauuaguuuuau

SEQ ID NO: 2706676 - RNA, 23 nt, Human
aaucaugaauuaguuuuauaugc

SEQ ID NO: 2706677 - RNA, 18 nt, Human
uaaguuuuuuuuuaaaaa

SEQ ID NO: 2706678 - RNA, 16 nt, Human
uaaugauaacuggaaa

SEQ ID NO: 2706679 - RNA, 21 nt, Human
aaugagagacacacugaagaa

SEQ ID NO: 2706680 - RNA, 18 nt, Human
aagaaugauuaugaauua

SEQ ID NO: 2706681 - RNA, 16 nt, Human
aagaaugauuaugaau

SEQ ID NO: 2706682 - RNA, 16 nt, Human
aagaagugaaaaucua

SEQ ID NO: 2706683 - RNA, 22 nt, Human
aagaagugaaaaucuacacucc

SEQ ID NO: 2706684 - RNA, 18 nt, Human
gugcuaguaauuggaaag

SEQ ID NO: 2706685 - RNA, 21 nt, Human
gugggacagucaccucaugga

SEQ ID NO: 2706686 - RNA, 19 nt, Human
aagagcuguucacagccag

SEQ ID NO: 2706687 - RNA, 21 nt, Human
gugugaccacugcagaagaca

SEQ ID NO: 2706688 - RNA, 13 nt, Human
guugacaugggac

SEQ ID NO: 2706689 - RNA, 18 nt, Human
guugacaugggacauuug

SEQ ID NO: 2706690 - RNA, 14 nt, Human
guugacaugggaca

SEQ ID NO: 2706691 - RNA, 23 nt, Human
aagcuuguauuccuuuuucucuc

SEQ ID NO: 2706692 - RNA, 23 nt, Human
guuuucugagaaagacuauucaa

SEQ ID NO: 2706693 - RNA, 21 nt, Human
guuucaaacauauauaacaau

SEQ ID NO: 2706694 - RNA, 10 nt, Human
guuuaaaauc

SEQ ID NO: 2706695 - RNA, 16 nt, Human
guuuaaaaucauuucu

SEQ ID NO: 2706696 - RNA, 18 nt, Human
guuguaccgcaaugugac

SEQ ID NO: 2706697 - RNA, 20 nt, Human
aacccauauuuguacaccaa

SEQ ID NO: 2706698 - RNA, 13 nt, Human
aacccaaauguuc

SEQ ID NO: 2706699 - RNA, 18 nt, Human
aacccaaauguucaucaa

SEQ ID NO: 2706700 - RNA, 20 nt, Human
aaccuagggugauauuaacc

SEQ ID NO: 2706701 - RNA, 12 nt, Human
aaccacagcagu

SEQ ID NO: 2706702 - RNA, 22 nt, Human
gucuuaauuaaaagaauauuuu

SEQ ID NO: 2706703 - RNA, 19 nt, Human
gucuuaauuaaaagaauau

SEQ ID NO: 2706704 - RNA, 21 nt, Human
gucuuaauuaaaagaauauuu

SEQ ID NO: 2706705 - RNA, 15 nt, Human
gugaacacaucagcu

SEQ ID NO: 2706706 - RNA, 18 nt, Human
aacucguuaauuuguagu

SEQ ID NO: 2706707 - RNA, 13 nt, Human
aacucccuuucaa

SEQ ID NO: 2706708 - RNA, 14 nt, Human
aacucccuuucaac

SEQ ID NO: 2706709 - RNA, 21 nt, Human
aacuccagaaagugacaagcu

SEQ ID NO: 2706710 - RNA, 14 nt, Human
aacuccagaaagug

SEQ ID NO: 2706711 - RNA, 24 nt, Human
guccaagcauaccaacacgagcag

SEQ ID NO: 2706712 - RNA, 21 nt, Human
guccaagcauuuagauguaua

SEQ ID NO: 2706713 - RNA, 15 nt, Human
aacaaggaugaauua

SEQ ID NO: 2706714 - RNA, 21 nt, Human
aacaagccuccuuuuaaagua

SEQ ID NO: 2706715 - RNA, 22 nt, Human
aacaguagugauaguuguaccg

SEQ ID NO: 2706716 - RNA, 18 nt, Human
aacauuugguaaggggaa

SEQ ID NO: 2706717 - RNA, 19 nt, Human
aaauggcuuccuggcaaua

SEQ ID NO: 2706718 - RNA, 14 nt, Human
aaaugcauuucuaa

SEQ ID NO: 2706719 - RNA, 21 nt, Human
aaaugaaagcagggacuugaa

SEQ ID NO: 2706720 - RNA, 22 nt, Human
aaaugaaagcagggacuugaac

SEQ ID NO: 2706721 - RNA, 14 nt, Human
aaauccuugaagau

SEQ ID NO: 2706722 - RNA, 19 nt, Human
aaaucuacacuccagugag

SEQ ID NO: 2706723 - RNA, 14 nt, Human
guaugauucccagc

SEQ ID NO: 2706724 - RNA, 22 nt, Human
aaauguaagggaaacugccagc

SEQ ID NO: 2706725 - RNA, 17 nt, Human
aaauuucagcagcugca

SEQ ID NO: 2706726 - RNA, 18 nt, Human
aaauuucagcagcugcag

SEQ ID NO: 2706727 - RNA, 21 nt, Human
cacaguuuucugagaaagacu

SEQ ID NO: 2706728 - RNA, 22 nt, Human
cacaguuuucugagaaagacua

SEQ ID NO: 2706729 - RNA, 20 nt, Human
cacaguuuucugagaaagac

SEQ ID NO: 2706730 - RNA, 16 nt, Human
cacaugaaguccaagc

SEQ ID NO: 2706731 - RNA, 20 nt, Human
cacaugaaguccaagcauuu

SEQ ID NO: 2706732 - RNA, 17 nt, Human
cacaugaaguccaagca

SEQ ID NO: 2706733 - RNA, 13 nt, Human
cacaagaaaugaa

SEQ ID NO: 2706734 - RNA, 15 nt, Human
cacaagaaaugaaag

SEQ ID NO: 2706735 - RNA, 23 nt, Human
cacaagaaaugaaagcagggacu

SEQ ID NO: 2706736 - RNA, 23 nt, Human
cacaagacccaaaaggcagaagc

SEQ ID NO: 2706737 - RNA, 16 nt, Human
caaauuuacagagaca

SEQ ID NO: 2706738 - RNA, 17 nt, Human
caaauuuacagagacag

SEQ ID NO: 2706739 - RNA, 23 nt, Human
caaauuuacagagacagaaagca

SEQ ID NO: 2706740 - RNA, 19 nt, Human
caagcauuuagauguauag

SEQ ID NO: 2706741 - RNA, 16 nt, Human
caagcauuuagaugua

SEQ ID NO: 2706742 - RNA, 21 nt, Human
caagcauaccaacacgagcag

SEQ ID NO: 2706743 - RNA, 16 nt, Human
caagcauaccaacacg

SEQ ID NO: 2706744 - RNA, 13 nt, Human
caagaaaugaaag

SEQ ID NO: 2706745 - RNA, 19 nt, Human
caagacugcacaucaaaau

SEQ ID NO: 2706746 - RNA, 14 nt, Human
caaagaaauguaag

SEQ ID NO: 2706747 - RNA, 19 nt, Human
auuuuaauaauguuucaaa

SEQ ID NO: 2706748 - RNA, 18 nt, Human
auuuuaauaauguuucaa

SEQ ID NO: 2706749 - RNA, 13 nt, Human
uuuuccugaaaac

SEQ ID NO: 2706750 - RNA, 20 nt, Human
uuuuauaugcuucuguuuua

SEQ ID NO: 2706751 - RNA, 15 nt, Human
uuuuauaugcuucug

SEQ ID NO: 2706752 - RNA, 20 nt, Human
uuuuauaucaauuuaaaaaa

SEQ ID NO: 2706753 - RNA, 10 nt, Human
uuuuauauuu

SEQ ID NO: 2706754 - RNA, 21 nt, Human
uuugcauagauucccugagca

SEQ ID NO: 2706755 - RNA, 21 nt, Human
uuuguauaaaauaauuuuuau

SEQ ID NO: 2706756 - RNA, 20 nt, Human
uuuagaaacacaacuauauu

SEQ ID NO: 2706757 - RNA, 12 nt, Human
uuuagaaacaca

SEQ ID NO: 2706758 - RNA, 22 nt, Human
uuucugagaaagacuauucaaa

SEQ ID NO: 2706759 - RNA, 15 nt, Human
uuucugagaaagacu

SEQ ID NO: 2706760 - RNA, 15 nt, Human
uuucagauaaucaca

SEQ ID NO: 2706761 - RNA, 15 nt, Human
uuucagcagcugcag

SEQ ID NO: 2706762 - RNA, 21 nt, Human
uuucagauaaucacaauacau

SEQ ID NO: 2706763 - RNA, 23 nt, Human
uucucuccucuccccaugauguu

SEQ ID NO: 2706764 - RNA, 18 nt, Human
uucccuugaugaagaagu

SEQ ID NO: 2706765 - RNA, 12 nt, Human
uuccuagugaaa

SEQ ID NO: 2706766 - RNA, 22 nt, Human
uucggccuccauccugaggcuc

SEQ ID NO: 2706767 - RNA, 18 nt, Human
uucggccuccauccugag

SEQ ID NO: 2706768 - RNA, 19 nt, Human
uucggccuccauccugagg

SEQ ID NO: 2706769 - RNA, 19 nt, Human
uuccacuuauaggaauuga

SEQ ID NO: 2706770 - RNA, 23 nt, Human
uucagagcugcccucuccugggc

SEQ ID NO: 2706771 - RNA, 22 nt, Human
uucagagcugcccucuccuggg

SEQ ID NO: 2706772 - RNA, 21 nt, Human
uucagagcugcccucuccugg

SEQ ID NO: 2706773 - RNA, 12 nt, Human
uugaugaagaag

SEQ ID NO: 2706774 - RNA, 18 nt, Human
uugcauagauucccugag

SEQ ID NO: 2706775 - RNA, 14 nt, Human
uugaggacacugau

SEQ ID NO: 2706776 - RNA, 15 nt, Human
uugaggacacugaua

SEQ ID NO: 2706777 - RNA, 23 nt, Human
uugaaacugagaugugaacacau

SEQ ID NO: 2706778 - RNA, 16 nt, Human
uugaaaagacuccaaa

SEQ ID NO: 2706779 - RNA, 18 nt, Human
uugaaaagacuccaaaga

SEQ ID NO: 2706780 - RNA, 22 nt, Human
uugaaaagacuccaaagaaaug

SEQ ID NO: 2706781 - RNA, 23 nt, Human
uugaaaagacuccaaagaaaugu

SEQ ID NO: 2706782 - RNA, 15 nt, Human
uucuuauuucauuuc

SEQ ID NO: 2706783 - RNA, 15 nt, Human
uucugagaaagacua

SEQ ID NO: 2706784 - RNA, 14 nt, Human
uucugagcauuuaa

SEQ ID NO: 2706785 - RNA, 16 nt, Human
uuguaaaggaauuuaa

SEQ ID NO: 2706786 - RNA, 11 nt, Human
uuguaaaugug

SEQ ID NO: 2706787 - RNA, 14 nt, Human
uuguaaaugugcuu

SEQ ID NO: 2706788 - RNA, 18 nt, Human
uuguaaaugugcuuuuaa

SEQ ID NO: 2706789 - RNA, 19 nt, Human
uuguaucacaaaucuuaac

SEQ ID NO: 2706790 - RNA, 14 nt, Human
uuguauuacaaauc

SEQ ID NO: 2706791 - RNA, 12 nt, Human
uugggaggcuga

SEQ ID NO: 2706792 - RNA, 22 nt, Human
ugugaccacugcagaagacagu

SEQ ID NO: 2706793 - RNA, 21 nt, Human
ugucucaguccaugaagaugu

SEQ ID NO: 2706794 - RNA, 22 nt, Human
ugucucaguccaugaagaugua

SEQ ID NO: 2706795 - RNA, 14 nt, Human
ugugcguccugucg

SEQ ID NO: 2706796 - RNA, 17 nt, Human
uguagauaauacaguuc

SEQ ID NO: 2706797 - RNA, 15 nt, Human
uguaaucacagcuac

SEQ ID NO: 2706798 - RNA, 14 nt, Human
uguaaucacagcua

SEQ ID NO: 2706799 - RNA, 16 nt, Human
uguaugauucccagcc

SEQ ID NO: 2706800 - RNA, 21 nt, Human
uguuggagaagaacugaaauc

SEQ ID NO: 2706801 - RNA, 13 nt, Human
uguuuaaaaucau

SEQ ID NO: 2706802 - RNA, 12 nt, Human
uguuauaaucuu

SEQ ID NO: 2706803 - RNA, 14 nt, Human
uguuagugcaaauu

SEQ ID NO: 2706804 - RNA, 16 nt, Human
uguucacagccagacu

SEQ ID NO: 2706805 - RNA, 19 nt, Human
ugugugcguccugucggag

SEQ ID NO: 2706806 - RNA, 21 nt, Human
uuaccacuuguguuuugcaag

SEQ ID NO: 2706807 - RNA, 20 nt, Human
uuacagagacagaaagcaga

SEQ ID NO: 2706808 - RNA, 15 nt, Human
uuacauuuguauaaa

SEQ ID NO: 2706809 - RNA, 14 nt, Human
uuacauuuguauaa

SEQ ID NO: 2706810 - RNA, 22 nt, Human
uuaaugucaauucuugccaaau

SEQ ID NO: 2706811 - RNA, 16 nt, Human
uuaauaauguuucaaa

SEQ ID NO: 2706812 - RNA, 18 nt, Human
uuaauaauguuucaaaca

SEQ ID NO: 2706813 - RNA, 20 nt, Human
uuaaagcuuauuaaaacuca

SEQ ID NO: 2706814 - RNA, 13 nt, Human
uuaaaagaaugau

SEQ ID NO: 2706815 - RNA, 19 nt, Human
uuaaaagaaugauuaugaa

SEQ ID NO: 2706816 - RNA, 14 nt, Human
uggccuucggccuc

SEQ ID NO: 2706817 - RNA, 17 nt, Human
uggccuucggccuccau

SEQ ID NO: 2706818 - RNA, 18 nt, Human
uggccuucggccuccauc

SEQ ID NO: 2706819 - RNA, 20 nt, Human
ugggacauuugcucauggaa

SEQ ID NO: 2706820 - RNA, 19 nt, Human
ugggacauuugcucaugga

SEQ ID NO: 2706821 - RNA, 21 nt, Human
ugggacagucaccucauggaa

SEQ ID NO: 2706822 - RNA, 20 nt, Human
ugggacagucaccucaugga

SEQ ID NO: 2706823 - RNA, 18 nt, Human
ugggacagucaccucaug

SEQ ID NO: 2706824 - RNA, 16 nt, Human
uggguagacacacaug

SEQ ID NO: 2706825 - RNA, 17 nt, Human
uggguagacacacauga

SEQ ID NO: 2706826 - RNA, 14 nt, Human
ugcuucuguuuuau

SEQ ID NO: 2706827 - RNA, 14 nt, Human
uggaacucucgagc

SEQ ID NO: 2706828 - RNA, 15 nt, Human
ugcauuauauuuauu

SEQ ID NO: 2706829 - RNA, 20 nt, Human
ugcauuauauuuauuacugu

SEQ ID NO: 2706830 - RNA, 14 nt, Human
ugcauuauauuuau

SEQ ID NO: 2706831 - RNA, 19 nt, Human
ugcaucagcugcugaaaca

SEQ ID NO: 2706832 - RNA, 22 nt, Human
ugcaucagcugcugaaacaaca

SEQ ID NO: 2706833 - RNA, 20 nt, Human
ugccaucccucccuccaccu

SEQ ID NO: 2706834 - RNA, 19 nt, Human
ugccaucccucccuccacc

SEQ ID NO: 2706835 - RNA, 15 nt, Human
ugccaucccucccuc

SEQ ID NO: 2706836 - RNA, 22 nt, Human
ugccaucccucccuccaccucc

SEQ ID NO: 2706837 - RNA, 21 nt, Human
ugccaucccucccuccaccuc

SEQ ID NO: 2706838 - RNA, 15 nt, Human
ugcacaucaaaauau

SEQ ID NO: 2706839 - RNA, 17 nt, Human
ugcagauaaacaguagu

SEQ ID NO: 2706840 - RNA, 16 nt, Human
ugcagauaaacaguag

SEQ ID NO: 2706841 - RNA, 20 nt, Human
ugcuagaacucccuuucaac

SEQ ID NO: 2706842 - RNA, 21 nt, Human
ugcuagaacucccuuucaaca

SEQ ID NO: 2706843 - RNA, 19 nt, Human
ugcuagaacucccuuucaa

SEQ ID NO: 2706844 - RNA, 18 nt, Human
ugcuagaacucccuuuca

SEQ ID NO: 2706845 - RNA, 17 nt, Human
ugccuucucaacuccaa

SEQ ID NO: 2706846 - RNA, 22 nt, Human
ugccuucucaacuccaaacuga

SEQ ID NO: 2706847 - RNA, 23 nt, Human
ugccuccccuccucugcuugcca

SEQ ID NO: 2706848 - RNA, 22 nt, Human
ugccuccccuccucugcuugcc

SEQ ID NO: 2706849 - RNA, 19 nt, Human
ugccuccccuccucugcuu

SEQ ID NO: 2706850 - RNA, 18 nt, Human
ugccuccccuccucugcu

SEQ ID NO: 2706851 - RNA, 24 nt, Human
ucuguaauaaacucauuucuagca

SEQ ID NO: 2706852 - RNA, 23 nt, Human
ucuguaauaaacucauuucuagc

SEQ ID NO: 2706853 - RNA, 19 nt, Human
ucuguaauaaacucauuuc

SEQ ID NO: 2706854 - RNA, 23 nt, Human
ucuggccuucggccuccauccug

SEQ ID NO: 2706855 - RNA, 22 nt, Human
ucuguuuuauaauuuugugaag

SEQ ID NO: 2706856 - RNA, 20 nt, Human
ucuguuuuauaauuuuguga

SEQ ID NO: 2706857 - RNA, 19 nt, Human
ugaaaacuuuaugcuaagu

SEQ ID NO: 2706858 - RNA, 15 nt, Human
ugaaaagacuccaaa

SEQ ID NO: 2706859 - RNA, 16 nt, Human
ugaaaagacuccaaag

SEQ ID NO: 2706860 - RNA, 17 nt, Human
ugaaaagacuccaaaga

SEQ ID NO: 2706861 - RNA, 19 nt, Human
ugaaaagacuccaaagaaa

SEQ ID NO: 2706862 - RNA, 22 nt, Human
ugaaaagacuccaaagaaaugu

SEQ ID NO: 2706863 - RNA, 18 nt, Human
ugaaacccugucucuacu

SEQ ID NO: 2706864 - RNA, 18 nt, Human
ugaaagcagggacuugaa

SEQ ID NO: 2706865 - RNA, 19 nt, Human
ugaaagcagggacuugaac

SEQ ID NO: 2706866 - RNA, 23 nt, Human
ugaaagcagggacuugaacccau

SEQ ID NO: 2706867 - RNA, 22 nt, Human
ugaaguccaagcauuuagaugu

SEQ ID NO: 2706868 - RNA, 21 nt, Human
ugaaguccaagcauuuagaug

SEQ ID NO: 2706869 - RNA, 22 nt, Human
ugaacuuguaaaggaauuuaaa

SEQ ID NO: 2706870 - RNA, 14 nt, Human
ugaacacaucagcu

SEQ ID NO: 2706871 - RNA, 17 nt, Human
ucuacacuccagugaga

SEQ ID NO: 2706872 - RNA, 21 nt, Human
ucuacacuaagagagaaugag

SEQ ID NO: 2706873 - RNA, 15 nt, Human
uccuugcaucaauuu

SEQ ID NO: 2706874 - RNA, 18 nt, Human
ucuccugggcagcugccu

SEQ ID NO: 2706875 - RNA, 17 nt, Human
ucuccugggcagcugcc

SEQ ID NO: 2706876 - RNA, 16 nt, Human
ucuccugggcagcugc

SEQ ID NO: 2706877 - RNA, 15 nt, Human
ucuccugggcagcug

SEQ ID NO: 2706878 - RNA, 13 nt, Human
ucuccugggcagc

SEQ ID NO: 2706879 - RNA, 14 nt, Human
ucuccugggcagcu

SEQ ID NO: 2706880 - RNA, 21 nt, Human
ucucagugucaaugcagcccc

SEQ ID NO: 2706881 - RNA, 20 nt, Human
ucuccugggcagcugccucc

SEQ ID NO: 2706882 - RNA, 19 nt, Human
ucuccugggcagcugccuc

SEQ ID NO: 2706883 - RNA, 21 nt, Human
ucuccugggcagcugccuccc

SEQ ID NO: 2706884 - RNA, 19 nt, Human
ucucuaggaaauauuuauu

SEQ ID NO: 2706885 - RNA, 13 nt, Human
ucucuaggaaaua

SEQ ID NO: 2706886 - RNA, 18 nt, Human
ucucuucacagucacauu

SEQ ID NO: 2706887 - RNA, 12 nt, Human
uccacuuggucu

SEQ ID NO: 2706888 - RNA, 13 nt, Human
uccacuuggucug

SEQ ID NO: 2706889 - RNA, 17 nt, Human
uccagauccuggaaauc

SEQ ID NO: 2706890 - RNA, 16 nt, Human
uccagauccuggaaau

SEQ ID NO: 2706891 - RNA, 14 nt, Human
uccagauccuggaa

SEQ ID NO: 2706892 - RNA, 20 nt, Human
uccaagcauuuagauguaua

SEQ ID NO: 2706893 - RNA, 14 nt, Human
uccaccuacaugag

SEQ ID NO: 2706894 - RNA, 12 nt, Human
uccaccucccug

SEQ ID NO: 2706895 - RNA, 23 nt, Human
uccaccucccugcaauaaaaugg

SEQ ID NO: 2706896 - RNA, 23 nt, Human
uccaaacugacucuuaagaagac

SEQ ID NO: 2706897 - RNA, 12 nt, Human
uccaaagaaaug

SEQ ID NO: 2706898 - RNA, 16 nt, Human
ucauuucugcaucagc

SEQ ID NO: 2706899 - RNA, 22 nt, Human
ucauuucugcaucagcugcuga

SEQ ID NO: 2706900 - RNA, 14 nt, Human
ucauuucuuugagu

SEQ ID NO: 2706901 - RNA, 23 nt, Human
uccaagcauaccaacacgagcag

SEQ ID NO: 2706902 - RNA, 17 nt, Human
uccaagcauuuagaugu

SEQ ID NO: 2706903 - RNA, 17 nt, Human
ucccucccuccaccucc

SEQ ID NO: 2706904 - RNA, 16 nt, Human
ucccaaauuucauacc

SEQ ID NO: 2706905 - RNA, 17 nt, Human
ucacuugucaauaaaau

SEQ ID NO: 2706906 - RNA, 22 nt, Human
ucagacauagaauuaacacaug

SEQ ID NO: 2706907 - RNA, 19 nt, Human
ucagacauagaauuaacac

SEQ ID NO: 2706908 - RNA, 14 nt, Human
ucacaggaaguaga

SEQ ID NO: 2706909 - RNA, 19 nt, Human
ucacaggaaguagaggagg

SEQ ID NO: 2706910 - RNA, 23 nt, Human
ucacaggacagcccuucuuucca

SEQ ID NO: 2706911 - RNA, 19 nt, Human
ucaacuccaaacugacucu

SEQ ID NO: 2706912 - RNA, 13 nt, Human
ucaaaacugcacu

SEQ ID NO: 2706913 - RNA, 22 nt, Human
uauuucuaugaaauauuauguu

SEQ ID NO: 2706914 - RNA, 21 nt, Human
uauuucuaugaaauauuaugu

SEQ ID NO: 2706915 - RNA, 18 nt, Human
uaaauauaugcuaagucu

SEQ ID NO: 2706916 - RNA, 17 nt, Human
uaaauaaaaauaauccu

SEQ ID NO: 2706917 - RNA, 14 nt, Human
uaaaggaauuuaaa

SEQ ID NO: 2706918 - RNA, 17 nt, Human
uaaaauggguuuuacug

SEQ ID NO: 2706919 - RNA, 18 nt, Human
uaaaauccauacauuugu

SEQ ID NO: 2706920 - RNA, 19 nt, Human
uaaaauccauacauuugug

SEQ ID NO: 2706921 - RNA, 14 nt, Human
uaaaagaugaaaau

SEQ ID NO: 2706922 - RNA, 16 nt, Human
guuuucauuaucucaa

SEQ ID NO: 2706923 - RNA, 18 nt, Human
guuuucaggcuagaugua

SEQ ID NO: 2706924 - RNA, 16 nt, Human
uaaaaaagaaacauuu

SEQ ID NO: 2706925 - RNA, 13 nt, Human
guuuagaaagcuu

SEQ ID NO: 2706926 - RNA, 17 nt, Human
guuuagaaagcuugccc

SEQ ID NO: 2706927 - RNA, 20 nt, Human
guuuaggauguugaaaaagu

SEQ ID NO: 2706928 - RNA, 20 nt, Human
uaagccagacaucaacagau

SEQ ID NO: 2706929 - RNA, 21 nt, Human
uaagccagacaucaacagaua

SEQ ID NO: 2706930 - RNA, 13 nt, Human
uaagccagacauc

SEQ ID NO: 2706931 - RNA, 18 nt, Human
uaagcauuccaacuaucu

SEQ ID NO: 2706932 - RNA, 16 nt, Human
uaagcauuccaacuau

SEQ ID NO: 2706933 - RNA, 20 nt, Human
uaagcauuccaacuaucuca

SEQ ID NO: 2706934 - RNA, 23 nt, Human
uaagagggauuagggagagaaga

SEQ ID NO: 2706935 - RNA, 23 nt, Human
uaaauugacacuuaaaaaugguu

SEQ ID NO: 2706936 - RNA, 19 nt, Human
uaacaaugcuguauuuuaa

SEQ ID NO: 2706937 - RNA, 14 nt, Human
uaauguuucaaaca

SEQ ID NO: 2706938 - RNA, 15 nt, Human
uaauguuucaaacau

SEQ ID NO: 2706939 - RNA, 20 nt, Human
uaauuaaaagaauauuuuaa

SEQ ID NO: 2706940 - RNA, 22 nt, Human
uaauuggaaaggcagcucuaaa

SEQ ID NO: 2706941 - RNA, 23 nt, Human
uaauuuguaguguuggagaagaa

SEQ ID NO: 2706942 - RNA, 20 nt, Human
uaauuuguaguguuggagaa

SEQ ID NO: 2706943 - RNA, 15 nt, Human
uaauaauguuucaaa

SEQ ID NO: 2706944 - RNA, 19 nt, Human
uaaugccacuaaauugaca

SEQ ID NO: 2706945 - RNA, 14 nt, Human
uacaggauuugaaa

SEQ ID NO: 2706946 - RNA, 13 nt, Human
uacagaauuuuau

SEQ ID NO: 2706947 - RNA, 16 nt, Human
uaccaacacgagcagg

SEQ ID NO: 2706948 - RNA, 16 nt, Human
uacauuuguauaaaau

SEQ ID NO: 2706949 - RNA, 11 nt, Human
uacauuugugu

SEQ ID NO: 2706950 - RNA, 17 nt, Human
uacauuuguauaaaaua

SEQ ID NO: 2706951 - RNA, 21 nt, Human
uacaugagguacugagaguga

SEQ ID NO: 2706952 - RNA, 22 nt, Human
uacaugagguacugagagugaa

SEQ ID NO: 2706953 - RNA, 23 nt, Human
uaccacaggaaccacaagacugc

SEQ ID NO: 2706954 - RNA, 23 nt, Human
uacugauguuccuagugaaagag

SEQ ID NO: 2706955 - RNA, 19 nt, Human
uacugagagugaacaaauu

SEQ ID NO: 2706956 - RNA, 20 nt, Human
uagcagggcauggcugggaa

SEQ ID NO: 2706957 - RNA, 16 nt, Human
uagauguauguacuuc

SEQ ID NO: 2706958 - RNA, 20 nt, Human
uagauguauguacuucaugc

SEQ ID NO: 2706959 - RNA, 18 nt, Human
uagaguuuagcuggaaaa

SEQ ID NO: 2706960 - RNA, 17 nt, Human
uagaguuuagcuggaaa

SEQ ID NO: 2706961 - RNA, 13 nt, Human
uaggccaugggac

SEQ ID NO: 2706962 - RNA, 23 nt, Human
uaggaauugacccacaagaaaug

SEQ ID NO: 2706963 - RNA, 20 nt, Human
uaggaauugacccacaagaa

SEQ ID NO: 2706964 - RNA, 21 nt, Human
uaguuguaccgcaaugugacu

SEQ ID NO: 2706965 - RNA, 18 nt, Human
uagucaaauugugugaaa

SEQ ID NO: 2706966 - RNA, 13 nt, Human
uauauuugaaaua

SEQ ID NO: 2706967 - RNA, 14 nt, Human
uauauuugaaauau

SEQ ID NO: 2706968 - RNA, 23 nt, Human
uauauuuauuacuguaagaaaau

SEQ ID NO: 2706969 - RNA, 20 nt, Human
uauauuuauuacuguaagaa

SEQ ID NO: 2706970 - RNA, 19 nt, Human
uauauuuuuuguuaaauga

SEQ ID NO: 2706971 - RNA, 21 nt, Human
ggugcuacaaaaacacagcaa

SEQ ID NO: 2706972 - RNA, 23 nt, Human
ggugcuacaaaaacacagcaagg

SEQ ID NO: 2706973 - RNA, 22 nt, Human
ggcuugaguuuaaauuguaaua

SEQ ID NO: 2706974 - RNA, 20 nt, Human
ggaaaaaauaacaaugaaag

SEQ ID NO: 2706975 - RNA, 17 nt, Human
gcuuuuaaaaaaaaaua

SEQ ID NO: 2706976 - RNA, 16 nt, Human
gcuugccaucccuccc

SEQ ID NO: 2706977 - RNA, 17 nt, Human
gcuugcccuggugccuc

SEQ ID NO: 2706978 - RNA, 19 nt, Human
gcuugcccuggugccucac

SEQ ID NO: 2706979 - RNA, 21 nt, Human
gcuugccaucccucccuccac

SEQ ID NO: 2706980 - RNA, 18 nt, Human
gcuugccaucccucccuc

SEQ ID NO: 2706981 - RNA, 15 nt, Human
gcuguucacagccag

SEQ ID NO: 2706982 - RNA, 16 nt, Human
gcuguucacagccaga

SEQ ID NO: 2706983 - RNA, 23 nt, Human
gcuguucacagccagacuggcac

SEQ ID NO: 2706984 - RNA, 18 nt, Human
ggaaauauuuauuuuaau

SEQ ID NO: 2706985 - RNA, 17 nt, Human
ggaaauauuuauuuuaa

SEQ ID NO: 2706986 - RNA, 12 nt, Human
ggaaauauuuau

SEQ ID NO: 2706987 - RNA, 15 nt, Human
ggaaauauuuauuuu

SEQ ID NO: 2706988 - RNA, 13 nt, Human
ggaaauauuuauu

SEQ ID NO: 2706989 - RNA, 16 nt, Human
ggaaaucaaauaugca

SEQ ID NO: 2706990 - RNA, 18 nt, Human
gcuagauguauguacuuc

SEQ ID NO: 2706991 - RNA, 22 nt, Human
gcuguauuuuaaaagaaugauu

SEQ ID NO: 2706992 - RNA, 19 nt, Human
ggaggacgcucucuggccu

SEQ ID NO: 2706993 - RNA, 20 nt, Human
ggaggacgcucucuggccuu

SEQ ID NO: 2706994 - RNA, 21 nt, Human
ggaggacgcucucuggccuuc

SEQ ID NO: 2706995 - RNA, 22 nt, Human
ggccaugggacagggaggacgc

SEQ ID NO: 2706996 - RNA, 21 nt, Human
ggcagcugccuccccuccucu

SEQ ID NO: 2706997 - RNA, 18 nt, Human
ggcagcugccuccccucc

SEQ ID NO: 2706998 - RNA, 22 nt, Human
ggcagcugccuccccuccucug

SEQ ID NO: 2706999 - RNA, 19 nt, Human
gcccuucuuuccacagaag

SEQ ID NO: 2707000 - RNA, 16 nt, Human
gccuccccuccucugc

SEQ ID NO: 2707001 - RNA, 14 nt, Human
gccuccccuccucu

SEQ ID NO: 2707002 - RNA, 13 nt, Human
gccuccccuccuc

SEQ ID NO: 2707003 - RNA, 12 nt, Human
gccuccccuccu

SEQ ID NO: 2707004 - RNA, 11 nt, Human
gccuccccucc

SEQ ID NO: 2707005 - RNA, 19 nt, Human
gcguccugucggagcccug

SEQ ID NO: 2707006 - RNA, 22 nt, Human
gcguccugucggagcccugucu

SEQ ID NO: 2707007 - RNA, 18 nt, Human
gccuguaaucacagcuac

SEQ ID NO: 2707008 - RNA, 19 nt, Human
gccuucggccuccauccug

SEQ ID NO: 2707009 - RNA, 18 nt, Human
gccuucggccuccauccu

SEQ ID NO: 2707010 - RNA, 22 nt, Human
gcgacagugagacucugucuca

SEQ ID NO: 2707011 - RNA, 22 nt, Human
gccacguucuuacuaguuuccc

SEQ ID NO: 2707012 - RNA, 14 nt, Human
gccaucccucccuc

SEQ ID NO: 2707013 - RNA, 13 nt, Human
gccaucccucccu

SEQ ID NO: 2707014 - RNA, 11 nt, Human
gccaucccucc

SEQ ID NO: 2707015 - RNA, 14 nt, Human
gccaugggacaggg

SEQ ID NO: 2707016 - RNA, 19 nt, Human
gccaugggacagggaggac

SEQ ID NO: 2707017 - RNA, 16 nt, Human
gccaucccucccucca

SEQ ID NO: 2707018 - RNA, 15 nt, Human
gccaucccucccucc

SEQ ID NO: 2707019 - RNA, 22 nt, Human
gccauuuaaagcuuauuaaaac

SEQ ID NO: 2707020 - RNA, 16 nt, Human
gcccacagcuguauga

SEQ ID NO: 2707021 - RNA, 17 nt, Human
gccccgugggguuccuc

SEQ ID NO: 2707022 - RNA, 19 nt, Human
gccccugcacuccagccug

SEQ ID NO: 2707023 - RNA, 16 nt, Human
gcccucuccugggcag

SEQ ID NO: 2707024 - RNA, 15 nt, Human
gcccucuccugggca

SEQ ID NO: 2707025 - RNA, 21 nt, Human
gcccucuccugggcagcugcc

SEQ ID NO: 2707026 - RNA, 19 nt, Human
gcccucuccugggcagcug

SEQ ID NO: 2707027 - RNA, 18 nt, Human
gcccucuccugggcagcu

SEQ ID NO: 2707028 - RNA, 18 nt, Human
gcauagauucccugagca

SEQ ID NO: 2707029 - RNA, 13 nt, Human
gcaguucugaaga

SEQ ID NO: 2707030 - RNA, 15 nt, Human
gcaggcuacugucag

SEQ ID NO: 2707031 - RNA, 20 nt, Human
gcacagccucuuagaugcag

SEQ ID NO: 2707032 - RNA, 15 nt, Human
gcacugucaagauga

SEQ ID NO: 2707033 - RNA, 14 nt, Human
gcagaagacaguau

SEQ ID NO: 2707034 - RNA, 14 nt, Human
gauuaaguaaugau

SEQ ID NO: 2707035 - RNA, 22 nt, Human
gauuaaguaaugauaacuggaa

SEQ ID NO: 2707036 - RNA, 16 nt, Human
gaugcuagaacucccu

SEQ ID NO: 2707037 - RNA, 12 nt, Human
gcaagauguggg

SEQ ID NO: 2707038 - RNA, 16 nt, Human
gcaagaugugggcagu

SEQ ID NO: 2707039 - RNA, 17 nt, Human
gauaggucagugcaaau

SEQ ID NO: 2707040 - RNA, 23 nt, Human
gaucagcuuauugucuagugaaa

SEQ ID NO: 2707041 - RNA, 13 nt, Human
gauaaacaguagu

SEQ ID NO: 2707042 - RNA, 14 nt, Human
gauccuggaaauca

SEQ ID NO: 2707043 - RNA, 13 nt, Human
gaucuuuaaaaua

SEQ ID NO: 2707044 - RNA, 15 nt, Human
gaacauaaaauacaa

SEQ ID NO: 2707045 - RNA, 14 nt, Human
gaacaucacagcuu

SEQ ID NO: 2707046 - RNA, 16 nt, Human
gaacagugauuaccag

SEQ ID NO: 2707047 - RNA, 20 nt, Human
gaacagugauuaccagggac

SEQ ID NO: 2707048 - RNA, 16 nt, Human
gaaauuguauuacaaa

SEQ ID NO: 2707049 - RNA, 18 nt, Human
gaaauuguauuacaaauc

SEQ ID NO: 2707050 - RNA, 19 nt, Human
gaagacugcauuauauuua

SEQ ID NO: 2707051 - RNA, 12 nt, Human
gaagaacugaaa

SEQ ID NO: 2707052 - RNA, 17 nt, Human
gaagauguagaggagaa

SEQ ID NO: 2707053 - RNA, 18 nt, Human
gaagauguagaggagaaa

SEQ ID NO: 2707054 - RNA, 16 nt, Human
gaauauuuuaacuucc

SEQ ID NO: 2707055 - RNA, 22 nt, Human
gaaguccaagcauuuagaugua

SEQ ID NO: 2707056 - RNA, 12 nt, Human
gaaguccaagca

SEQ ID NO: 2707057 - RNA, 16 nt, Human
gaaguauccuucagcc

SEQ ID NO: 2707058 - RNA, 14 nt, Human
gaaguauccuucag

SEQ ID NO: 2707059 - RNA, 21 nt, Human
gacagagccccacccucagau

SEQ ID NO: 2707060 - RNA, 14 nt, Human
gacaucaacagaua

SEQ ID NO: 2707061 - RNA, 23 nt, Human
gacaggaugguucccuugaugaa

SEQ ID NO: 2707062 - RNA, 18 nt, Human
gacccaaaaggcagaagc

SEQ ID NO: 2707063 - RNA, 19 nt, Human
gacccaaaaggcagaagca

SEQ ID NO: 2707064 - RNA, 20 nt, Human
gacccaaaaggcagaagcaa

SEQ ID NO: 2707065 - RNA, 16 nt, Human
gaccacugcagaagac

SEQ ID NO: 2707066 - RNA, 18 nt, Human
gaccacugcagaagacag

SEQ ID NO: 2707067 - RNA, 22 nt, Human
gacuggauaguccgucucugcu

SEQ ID NO: 2707068 - RNA, 18 nt, Human
gacuggcacaguuuucug

SEQ ID NO: 2707069 - RNA, 22 nt, Human
gacuggcacaguuuucugagaa

SEQ ID NO: 2707070 - RNA, 17 nt, Human
gacuggauaguccgucu

SEQ ID NO: 2707071 - RNA, 14 nt, Human
gacuggcacaguuu

SEQ ID NO: 2707072 - RNA, 16 nt, Human
gacugaggggagggga

SEQ ID NO: 2707073 - RNA, 24 nt, Human
gacugcauuauauuuauuacugua

SEQ ID NO: 2707074 - RNA, 22 nt, Human
cuugcagcucuccccuucucug

SEQ ID NO: 2707075 - RNA, 14 nt, Human
cuugcccuguuaaa

SEQ ID NO: 2707076 - RNA, 18 nt, Human
cuugcccuggugccucac

SEQ ID NO: 2707077 - RNA, 19 nt, Human
cuugccaucccucccucca

SEQ ID NO: 2707078 - RNA, 16 nt, Human
cuugccaucccucccu

SEQ ID NO: 2707079 - RNA, 15 nt, Human
cuugccaucccuccc

SEQ ID NO: 2707080 - RNA, 17 nt, Human
cuugccaucccucccuc

SEQ ID NO: 2707081 - RNA, 14 nt, Human
cuugccaucccucc

SEQ ID NO: 2707082 - RNA, 20 nt, Human
cuugcuugauuguauggugg

SEQ ID NO: 2707083 - RNA, 22 nt, Human
cuugcccuguuaaaagaugaaa

SEQ ID NO: 2707084 - RNA, 16 nt, Human
cuuggacucauuuuaa

SEQ ID NO: 2707085 - RNA, 16 nt, Human
cuuggggcugaugcag

SEQ ID NO: 2707086 - RNA, 18 nt, Human
cuuggggcugaugcaguu

SEQ ID NO: 2707087 - RNA, 17 nt, Human
cuuguacuuuauuuucu

SEQ ID NO: 2707088 - RNA, 19 nt, Human
cuuuccucaaaacuucaga

SEQ ID NO: 2707089 - RNA, 14 nt, Human
gaaaacaaggauga

SEQ ID NO: 2707090 - RNA, 14 nt, Human
gaaaaguauguuag

SEQ ID NO: 2707091 - RNA, 20 nt, Human
gaaaaguauguuagugcaaa

SEQ ID NO: 2707092 - RNA, 19 nt, Human
gaaaauaacaauaaaagac

SEQ ID NO: 2707093 - RNA, 18 nt, Human
cuuaaugccacuaaauug

SEQ ID NO: 2707094 - RNA, 19 nt, Human
cuguuuuauaauuuuguga

SEQ ID NO: 2707095 - RNA, 19 nt, Human
cuuacuaguuucccuugca

SEQ ID NO: 2707096 - RNA, 19 nt, Human
cuuagaugcaguucugaag

SEQ ID NO: 2707097 - RNA, 19 nt, Human
cuuauaggaauugacccac

SEQ ID NO: 2707098 - RNA, 14 nt, Human
cuuauaauuuaaaa

SEQ ID NO: 2707099 - RNA, 21 nt, Human
cuuaggguuaugauuaaguaa

SEQ ID NO: 2707100 - RNA, 13 nt, Human
cuuauaauuuaaa

SEQ ID NO: 2707101 - RNA, 19 nt, Human
cuuccagauccuggaaauc

SEQ ID NO: 2707102 - RNA, 18 nt, Human
cuucagcgguuuauauaa

SEQ ID NO: 2707103 - RNA, 19 nt, Human
cuuccuuggacucauuuua

SEQ ID NO: 2707104 - RNA, 18 nt, Human
cuucggccuccauccuga

SEQ ID NO: 2707105 - RNA, 19 nt, Human
cuucggccuccauccugag

SEQ ID NO: 2707106 - RNA, 17 nt, Human
cuucggccuccauccug

SEQ ID NO: 2707107 - RNA, 16 nt, Human
cucccuucucuucaca

SEQ ID NO: 2707108 - RNA, 13 nt, Human
cucccuuucaaca

SEQ ID NO: 2707109 - RNA, 12 nt, Human
cucccuuucaac

SEQ ID NO: 2707110 - RNA, 13 nt, Human
cucggagaagagc

SEQ ID NO: 2707111 - RNA, 20 nt, Human
cucggagaagagcuguucac

SEQ ID NO: 2707112 - RNA, 12 nt, Human
cucggagaagag

SEQ ID NO: 2707113 - RNA, 17 nt, Human
cucauuaggauggcuag

SEQ ID NO: 2707114 - RNA, 18 nt, Human
cucauuaggauggcuagu

SEQ ID NO: 2707115 - RNA, 21 nt, Human
cuccauccugaggcuccacuu

SEQ ID NO: 2707116 - RNA, 20 nt, Human
cuccauccugaggcuccacu

SEQ ID NO: 2707117 - RNA, 23 nt, Human
cuccauccugaggcuccacuugg

SEQ ID NO: 2707118 - RNA, 17 nt, Human
cucccagucauuuaaua

SEQ ID NO: 2707119 - RNA, 17 nt, Human
cuccaccucccugcaau

SEQ ID NO: 2707120 - RNA, 16 nt, Human
cuccaccucccugcaa

SEQ ID NO: 2707121 - RNA, 15 nt, Human
cuccaccucccugca

SEQ ID NO: 2707122 - RNA, 14 nt, Human
cuccaccucccugc

SEQ ID NO: 2707123 - RNA, 23 nt, Human
cucugcauacucauuaggauggc

SEQ ID NO: 2707124 - RNA, 21 nt, Human
cucuccugggcagcugccucc

SEQ ID NO: 2707125 - RNA, 13 nt, Human
cucuuaagaagac

SEQ ID NO: 2707126 - RNA, 13 nt, Human
cugauguuccuag

SEQ ID NO: 2707127 - RNA, 18 nt, Human
cugauguuccuagugaaa

SEQ ID NO: 2707128 - RNA, 20 nt, Human
cugauguuccuagugaaaga

SEQ ID NO: 2707129 - RNA, 21 nt, Human
cugauguuccuagugaaagag

SEQ ID NO: 2707130 - RNA, 23 nt, Human
cugcagaagacaguauggcagcu

SEQ ID NO: 2707131 - RNA, 13 nt, Human
cugcagaagacag

SEQ ID NO: 2707132 - RNA, 15 nt, Human
cugccuaagugcagc

SEQ ID NO: 2707133 - RNA, 13 nt, Human
cugcugaaacaac

SEQ ID NO: 2707134 - RNA, 23 nt, Human
cuggaauaauccuaaacauauga

SEQ ID NO: 2707135 - RNA, 16 nt, Human
cuggccaacgggguga

SEQ ID NO: 2707136 - RNA, 18 nt, Human
cuggcacaguuuucugag

SEQ ID NO: 2707137 - RNA, 19 nt, Human
cuggcacaguuuucugaga

SEQ ID NO: 2707138 - RNA, 22 nt, Human
cugggaacccaaguccaagcau

SEQ ID NO: 2707139 - RNA, 21 nt, Human
cuggucccagccagcaguuca

SEQ ID NO: 2707140 - RNA, 22 nt, Human
ccgggaggcagagguugcagug

SEQ ID NO: 2707141 - RNA, 16 nt, Human
cccuugaugaagaagu

SEQ ID NO: 2707142 - RNA, 15 nt, Human
cccuugaugaagaag

SEQ ID NO: 2707143 - RNA, 23 nt, Human
ccucuuagaugcaguucugaaga

SEQ ID NO: 2707144 - RNA, 23 nt, Human
ccugaaagaggaaugaaguacuc

SEQ ID NO: 2707145 - RNA, 18 nt, Human
ccugaaagaggaaugaag

SEQ ID NO: 2707146 - RNA, 13 nt, Human
ccugaaagaggaa

SEQ ID NO: 2707147 - RNA, 18 nt, Human
ccugaggcuccacuuggu

SEQ ID NO: 2707148 - RNA, 20 nt, Human
ccugaggcuccacuuggucu

SEQ ID NO: 2707149 - RNA, 17 nt, Human
ccugaggcuccacuugg

SEQ ID NO: 2707150 - RNA, 13 nt, Human
ccucuccugggca

SEQ ID NO: 2707151 - RNA, 12 nt, Human
ccucuccugggc

SEQ ID NO: 2707152 - RNA, 11 nt, Human
ccucuccuggg

SEQ ID NO: 2707153 - RNA, 21 nt, Human
ccucugcuugccaucccuccc

SEQ ID NO: 2707154 - RNA, 20 nt, Human
ccucugcuugccaucccucc

SEQ ID NO: 2707155 - RNA, 17 nt, Human
ccucugcuugccauccc

SEQ ID NO: 2707156 - RNA, 20 nt, Human
ccucagaaaacaaggaugaa

SEQ ID NO: 2707157 - RNA, 14 nt, Human
ccuccccuccucug

SEQ ID NO: 2707158 - RNA, 15 nt, Human
ccuccccuccucugc

SEQ ID NO: 2707159 - RNA, 11 nt, Human
ccuccucugcu

SEQ ID NO: 2707160 - RNA, 16 nt, Human
ccucccugcaauaaaa

SEQ ID NO: 2707161 - RNA, 12 nt, Human
ccucccugcaau

SEQ ID NO: 2707162 - RNA, 18 nt, Human
ccuccccuccucugcuug

SEQ ID NO: 2707163 - RNA, 17 nt, Human
ccuccccuccucugcuu

SEQ ID NO: 2707164 - RNA, 12 nt, Human
ccuucagccuga

SEQ ID NO: 2707165 - RNA, 18 nt, Human
ccugggcagcugccuccc

SEQ ID NO: 2707166 - RNA, 17 nt, Human
ccugggcagcugccucc

SEQ ID NO: 2707167 - RNA, 16 nt, Human
ccugggcagcugccuc

SEQ ID NO: 2707168 - RNA, 15 nt, Human
ccugggcagcugccu

SEQ ID NO: 2707169 - RNA, 20 nt, Human
ccugggcagcugccuccccu

SEQ ID NO: 2707170 - RNA, 11 nt, Human
cgcaaugugac

SEQ ID NO: 2707171 - RNA, 14 nt, Human
cggccuccauccug

SEQ ID NO: 2707172 - RNA, 16 nt, Human
cggccuccauccugag

SEQ ID NO: 2707173 - RNA, 17 nt, Human
cggccuccauccugagg

SEQ ID NO: 2707174 - RNA, 18 nt, Human
cauuugcucauggaauug

SEQ ID NO: 2707175 - RNA, 13 nt, Human
cauuugcucaugg

SEQ ID NO: 2707176 - RNA, 17 nt, Human
cauuuaggccaugggac

SEQ ID NO: 2707177 - RNA, 22 nt, Human
ccaagcauaccaacacgagcag

SEQ ID NO: 2707178 - RNA, 17 nt, Human
ccaagcauuuagaugua

SEQ ID NO: 2707179 - RNA, 14 nt, Human
ccaagcaaguauua

SEQ ID NO: 2707180 - RNA, 23 nt, Human
ccaaauuucauaccuaucaucuu

SEQ ID NO: 2707181 - RNA, 22 nt, Human
ccaaacugacucuuaagaagac

SEQ ID NO: 2707182 - RNA, 20 nt, Human
ccacaggaaccacaagacug

SEQ ID NO: 2707183 - RNA, 16 nt, Human
ccaauauucauagcag

SEQ ID NO: 2707184 - RNA, 13 nt, Human
ccacugcagaaga

SEQ ID NO: 2707185 - RNA, 18 nt, Human
ccacugcagaagacagua

SEQ ID NO: 2707186 - RNA, 17 nt, Human
ccaggugccaguuaugg

SEQ ID NO: 2707187 - RNA, 13 nt, Human
cccaaaaggcaga

SEQ ID NO: 2707188 - RNA, 18 nt, Human
cccaaaaggcagaagcaa

SEQ ID NO: 2707189 - RNA, 14 nt, Human
ccaugaagauguag

SEQ ID NO: 2707190 - RNA, 16 nt, Human
ccaugauguuuagaaa

SEQ ID NO: 2707191 - RNA, 18 nt, Human
ccaucaaggguacacugc

SEQ ID NO: 2707192 - RNA, 13 nt, Human
cccaggugccagu

SEQ ID NO: 2707193 - RNA, 22 nt, Human
ucuauaauuuaaauauaugcua

SEQ ID NO: 2707194 - RNA, 23 nt, Human
aucuuauaauuuaaaauaugcuc

SEQ ID NO: 2707195 - RNA, 15 nt, Human parainfluenza virus 3
auagcagauaguaaa

SEQ ID NO: 2707196 - RNA, 14 nt, Human parainfluenza virus 3
auguccagaauuau

SEQ ID NO: 2707197 - RNA, 16 nt, Human parainfluenza virus 3
acaaauaacauaucua

SEQ ID NO: 2707198 - RNA, 23 nt, Human parainfluenza virus 3
uuaacugagaaagugaaugacuu

SEQ ID NO: 2707199 - RNA, 18 nt, Human parainfluenza virus 3
agcccaaggauagacaaa

SEQ ID NO: 2707200 - RNA, 18 nt, Human parainfluenza virus 3
uagacaaaaaguaagaaa

SEQ ID NO: 2707201 - RNA, 14 nt, Human parainfluenza virus 3
aaugaaucuacaau

SEQ ID NO: 2707202 - RNA, 13 nt, Human parainfluenza virus 3
uaaagauauaucu

SEQ ID NO: 2707203 - RNA, 15 nt, Human parainfluenza virus 3
uugaauucauacuua

SEQ ID NO: 2707204 - RNA, 18 nt, Human parainfluenza virus 3
aaccaacagaaacaagug

SEQ ID NO: 2707205 - RNA, 15 nt, Human parainfluenza virus 3
ccaaaacaacaaaac

SEQ ID NO: 2707206 - RNA, 17 nt, Human parainfluenza virus 3
caaggauagacaaaaag

SEQ ID NO: 2707207 - RNA, 17 nt, Human parainfluenza virus 3
agcuggccaucagaaac

SEQ ID NO: 2707208 - RNA, 17 nt, Human parainfluenza virus 3
caagacuaauacccaaa

SEQ ID NO: 2707209 - RNA, 15 nt, Human parainfluenza virus 3
aaccauugcucuggg

SEQ ID NO: 2707210 - RNA, 12 nt, Human parainfluenza virus 3
gaucuuaaugaa

SEQ ID NO: 2707211 - RNA, 14 nt, Human parainfluenza virus 3
gucaaaugacugau

SEQ ID NO: 2707212 - RNA, 22 nt, Human parainfluenza virus 3
cucaauaaauuagauaaaagac

SEQ ID NO: 2707213 - RNA, 13 nt, Human parainfluenza virus 3
aagacaaauggaa

SEQ ID NO: 2707214 - RNA, 18 nt, Human parainfluenza virus 3
aaagggggaaaagggaaa

SEQ ID NO: 2707215 - RNA, 22 nt, Human parainfluenza virus 3
uugauauuacugauuacaguga

SEQ ID NO: 2707216 - RNA, 14 nt, Human parainfluenza virus 3
uugcaaaaaugaca

SEQ ID NO: 2707217 - RNA, 15 nt, Human parainfluenza virus 3
uuccaauuaugggag

SEQ ID NO: 2707218 - RNA, 18 nt, Human parainfluenza virus 3
ccuuuaucuuugagccca

SEQ ID NO: 2707219 - RNA, 16 nt, Human parainfluenza virus 3
aaauuccuaagucaau

SEQ ID NO: 2707220 - RNA, 22 nt, Human parainfluenza virus 3
aacauaggaucauuacaagaaa

SEQ ID NO: 2707221 - RNA, 22 nt, Human parainfluenza virus 3
ucaaaaucuaucaacacacaca

SEQ ID NO: 2707222 - RNA, 19 nt, Human parainfluenza virus 3
ggaugaaucacauagaaga

SEQ ID NO: 2707223 - RNA, 14 nt, Human parainfluenza virus 3
agaaacucaaagaa

SEQ ID NO: 2707224 - RNA, 12 nt, Human parainfluenza virus 3
auucuaaaaaug

SEQ ID NO: 2707225 - RNA, 20 nt, Human parainfluenza virus 3
aagauugauagaaaaucaaa

SEQ ID NO: 2707226 - RNA, 16 nt, Human parainfluenza virus 3
ucuuaaccuuuaucuu

SEQ ID NO: 2707227 - RNA, 23 nt, Human parainfluenza virus 3
auggcaucuuucugccaaauaga

SEQ ID NO: 2707228 - RNA, 20 nt, Human parainfluenza virus 3
agcaccgacccccaagaaga

SEQ ID NO: 2707229 - RNA, 18 nt, Human parainfluenza virus 3
gcuaaaccucaaagcaga

SEQ ID NO: 2707230 - RNA, 16 nt, Human parainfluenza virus 3
auugacaagaauauac

SEQ ID NO: 2707231 - RNA, 15 nt, Human parainfluenza virus 3
agaaacucaaagaag

SEQ ID NO: 2707232 - RNA, 14 nt, Human parainfluenza virus 3
uauauuauggacaa

SEQ ID NO: 2707233 - RNA, 23 nt, Human parainfluenza virus 3
aucaacaguugauaaauaugaua

SEQ ID NO: 2707234 - RNA, 14 nt, Human parainfluenza virus 3
cuacaauagaugaa

SEQ ID NO: 2707235 - RNA, 19 nt, Human parainfluenza virus 3
agguggagcagaugucaaa

SEQ ID NO: 2707236 - RNA, 17 nt, Human parainfluenza virus 3
gcaaaaaugaugaagaa

SEQ ID NO: 2707237 - RNA, 17 nt, Human parainfluenza virus 3
aacccaagacacaaaag

SEQ ID NO: 2707238 - RNA, 19 nt, Human parainfluenza virus 3
auuaccagagcuucauagg

SEQ ID NO: 2707239 - RNA, 16 nt, Human parainfluenza virus 3
guagaaauaaaucaga

SEQ ID NO: 2707240 - RNA, 14 nt, Human parainfluenza virus 3
cccccaacaacaac

SEQ ID NO: 2707241 - RNA, 18 nt, Human parainfluenza virus 3
aaacuucgaaacaagaua

SEQ ID NO: 2707242 - RNA, 14 nt, Human parainfluenza virus 3
auaacaacaagcuc

SEQ ID NO: 2707243 - RNA, 22 nt, Human parainfluenza virus 3
ugaguuuauggagauuacagaa

SEQ ID NO: 2707244 - RNA, 17 nt, Human parainfluenza virus 3
acauauagucaaaugac

SEQ ID NO: 2707245 - RNA, 14 nt, Human parainfluenza virus 3
acaauaaagauaua

SEQ ID NO: 2707246 - RNA, 14 nt, Human parainfluenza virus 3
auuacucagaauua

SEQ ID NO: 2707247 - RNA, 23 nt, Human parainfluenza virus 3
uccaaaauuaaagguauggacaa

SEQ ID NO: 2707248 - RNA, 19 nt, Human parainfluenza virus 3
cagcaaucucucacaaagc

SEQ ID NO: 2707249 - RNA, 14 nt, Human parainfluenza virus 3
gauacagaagagag

SEQ ID NO: 2707250 - RNA, 15 nt, Human parainfluenza virus 3
ucaaagagaacaacu

SEQ ID NO: 2707251 - RNA, 15 nt, Human parainfluenza virus 3
agcagaguucuucuc

SEQ ID NO: 2707252 - RNA, 17 nt, Human parainfluenza virus 3
aaacuuaggacaaaaga

SEQ ID NO: 2707253 - RNA, 14 nt, Human parainfluenza virus 3
augccaacaaaguu

SEQ ID NO: 2707254 - RNA, 15 nt, Human parainfluenza virus 3
aagaaucaauccgaa

SEQ ID NO: 2707255 - RNA, 13 nt, Human parainfluenza virus 3
aaaaaaagcaaaa

SEQ ID NO: 2707256 - RNA, 17 nt, Human parainfluenza virus 3
gcuaucaagaccaggaa

SEQ ID NO: 2707257 - RNA, 24 nt, Human parainfluenza virus 3
aacgcagcauuacucagaauuaac

SEQ ID NO: 2707258 - RNA, 20 nt, Human parainfluenza virus 3
ugcuaaaaacuaucaaauca

SEQ ID NO: 2707259 - RNA, 18 nt, Human parainfluenza virus 3
auucauuagugaaauuac

SEQ ID NO: 2707260 - RNA, 13 nt, Human parainfluenza virus 3
uauauaccaagca

SEQ ID NO: 2707261 - RNA, 11 nt, Human parainfluenza virus 3
ggagauuacag

SEQ ID NO: 2707262 - RNA, 19 nt, Human parainfluenza virus 3
aucaacuuauacaaaagaa

SEQ ID NO: 2707263 - RNA, 20 nt, Human parainfluenza virus 3
gaaggauacagaagagagca

SEQ ID NO: 2707264 - RNA, 22 nt, Human parainfluenza virus 3
aagcaaauaagggauaaucaaa

SEQ ID NO: 2707265 - RNA, 13 nt, Human parainfluenza virus 3
uugggaaaaucaa

SEQ ID NO: 2707266 - RNA, 15 nt, Human parainfluenza virus 3
agauacaaaaugaaa

SEQ ID NO: 2707267 - RNA, 19 nt, Human parainfluenza virus 3
caacacagcaaacacuaaa

SEQ ID NO: 2707268 - RNA, 17 nt, Human parainfluenza virus 3
gaaaaguucaaacacau

SEQ ID NO: 2707269 - RNA, 21 nt, Human parainfluenza virus 3
aaaaugaauccaaugagagag

SEQ ID NO: 2707270 - RNA, 15 nt, Human parainfluenza virus 3
auaaaucagaaaagu

SEQ ID NO: 2707271 - RNA, 18 nt, Human parainfluenza virus 3
acagaaaaucgagaaaau

SEQ ID NO: 2707272 - RNA, 16 nt, Human parainfluenza virus 3
aauaaagauauaucuu

SEQ ID NO: 2707273 - RNA, 15 nt, Human parainfluenza virus 3
cuauauauauacaag

SEQ ID NO: 2707274 - RNA, 21 nt, Human parainfluenza virus 3
acaaaaucaagcagaaugaaa

SEQ ID NO: 2707275 - RNA, 22 nt, Human parainfluenza virus 3
gaaugcuguucaauacaaacaa

SEQ ID NO: 2707276 - RNA, 23 nt, Human parainfluenza virus 3
ccuuuaucuuugagcccaaggau

SEQ ID NO: 2707277 - RNA, 16 nt, Human parainfluenza virus 3
gagcccaaggauagac

SEQ ID NO: 2707278 - RNA, 15 nt, Human parainfluenza virus 3
aucaaaccaacagaa

SEQ ID NO: 2707279 - RNA, 17 nt, Human parainfluenza virus 3
cgcaggaacaagaaaga

SEQ ID NO: 2707280 - RNA, 23 nt, Human parainfluenza virus 3
aucauguguuauccgaaauggaa

SEQ ID NO: 2707281 - RNA, 14 nt, Human parainfluenza virus 3
acaacaacaagcug

SEQ ID NO: 2707282 - RNA, 14 nt, Human parainfluenza virus 3
gaaagaaagaccaa

SEQ ID NO: 2707283 - RNA, 22 nt, Human parainfluenza virus 3
cugcagguacauaucaaaacag

SEQ ID NO: 2707284 - RNA, 15 nt, Human parainfluenza virus 3
ggaauccaaugaaaa

SEQ ID NO: 2707285 - RNA, 23 nt, Human parainfluenza virus 3
acucaaagucaaugaacagagaa

SEQ ID NO: 2707286 - RNA, 19 nt, Human parainfluenza virus 3
caggaaacuguacagagag

SEQ ID NO: 2707287 - RNA, 21 nt, Human parainfluenza virus 3
agaaacaauuaaaauuugaca

SEQ ID NO: 2707288 - RNA, 23 nt, Human parainfluenza virus 3
cuuccacuagauaggagcauaaa

SEQ ID NO: 2707289 - RNA, 23 nt, Human parainfluenza virus 3
gaucaucagauauuaagauuaua

SEQ ID NO: 2707290 - RNA, 23 nt, Human parainfluenza virus 3
aaacaaaaaguacagaacaccaa

SEQ ID NO: 2707291 - RNA, 11 nt, Human parainfluenza virus 3
cacauagaaga

SEQ ID NO: 2707292 - RNA, 13 nt, Human parainfluenza virus 3
aagcacaaaacaa

SEQ ID NO: 2707293 - RNA, 16 nt, Human parainfluenza virus 3
uccaugaucaaaacaa

SEQ ID NO: 2707294 - RNA, 15 nt, Human parainfluenza virus 3
agaaugaaacaauag

SEQ ID NO: 2707295 - RNA, 16 nt, Human parainfluenza virus 3
aaaauaaaaaucccaa

SEQ ID NO: 2707296 - RNA, 14 nt, Human parainfluenza virus 3
aagauauaucuuaa

SEQ ID NO: 2707297 - RNA, 19 nt, Human parainfluenza virus 3
gcaaucagacaauggacaa

SEQ ID NO: 2707298 - RNA, 13 nt, Human parainfluenza virus 3
ggccaaaucagau

SEQ ID NO: 2707299 - RNA, 16 nt, Human parainfluenza virus 3
cuagguugugaagcag

SEQ ID NO: 2707300 - RNA, 12 nt, Human parainfluenza virus 3
auuaacaguaaa

SEQ ID NO: 2707301 - RNA, 14 nt, Human parainfluenza virus 3
ugauuacagugaua

SEQ ID NO: 2707302 - RNA, 18 nt, Human parainfluenza virus 3
uauuagcagucauacucg

SEQ ID NO: 2707303 - RNA, 20 nt, Human parainfluenza virus 3
gagaagaacagucaaagcga

SEQ ID NO: 2707304 - RNA, 22 nt, Human parainfluenza virus 3
acucaaacauugcaaaaaugau

SEQ ID NO: 2707305 - RNA, 17 nt, Human parainfluenza virus 3
aauauauauauaccaag

SEQ ID NO: 2707306 - RNA, 17 nt, Human parainfluenza virus 3
acgaauguacaacagaa

SEQ ID NO: 2707307 - RNA, 20 nt, Human parainfluenza virus 3
uauuccucuucccagccaua

SEQ ID NO: 2707308 - RNA, 17 nt, Human parainfluenza virus 3
uugcaguuauaagcaac

SEQ ID NO: 2707309 - RNA, 16 nt, Human parainfluenza virus 3
caccgaacaaacagac

SEQ ID NO: 2707310 - RNA, 13 nt, Human parainfluenza virus 3
gcaaguuaaauca

SEQ ID NO: 2707311 - RNA, 19 nt, Human parainfluenza virus 3
acuaaacacaaugccaacu

SEQ ID NO: 2707312 - RNA, 21 nt, Human parainfluenza virus 3
aaguucauacaaugaaucaaa

SEQ ID NO: 2707313 - RNA, 21 nt, Human parainfluenza virus 3
uugagaaacucaaagaagcaa

SEQ ID NO: 2707314 - RNA, 11 nt, Human parainfluenza virus 3
caaaacaaaaa

SEQ ID NO: 2707315 - RNA, 12 nt, Human parainfluenza virus 3
cagccuuaugau

SEQ ID NO: 2707316 - RNA, 18 nt, Human parainfluenza virus 3
aguaagaaaaacauguaa

SEQ ID NO: 2707317 - RNA, 21 nt, Human parainfluenza virus 3
auuaacacagauacaaaauga

SEQ ID NO: 2707318 - RNA, 20 nt, Human parainfluenza virus 3
agaaacaagugagaaagaua

SEQ ID NO: 2707319 - RNA, 13 nt, Human parainfluenza virus 3
ugagcccaaggau

SEQ ID NO: 2707320 - RNA, 14 nt, Human parainfluenza virus 3
acacuaaacacaau

SEQ ID NO: 2707321 - RNA, 14 nt, Human parainfluenza virus 3
agcucgaaaugaga

SEQ ID NO: 2707322 - RNA, 22 nt, Human parainfluenza virus 3
aaaacauguaauauauauauac

SEQ ID NO: 2707323 - RNA, 21 nt, Human parainfluenza virus 3
aagaagaugacaaaagaauua

SEQ ID NO: 2707324 - RNA, 21 nt, Human parainfluenza virus 3
uacccaacacaauaucaauca

SEQ ID NO: 2707325 - RNA, 21 nt, Human parainfluenza virus 3
agaaaaagagauuaaacaaga

SEQ ID NO: 2707326 - RNA, 13 nt, Human parainfluenza virus 3
aaagguuagaaaa

SEQ ID NO: 2707327 - RNA, 13 nt, Human parainfluenza virus 3
agauagaacauau

SEQ ID NO: 2707328 - RNA, 15 nt, Human parainfluenza virus 3
aaugaaguguacaau

SEQ ID NO: 2707329 - RNA, 21 nt, Human parainfluenza virus 3
gaaacgacaccgaacaaacag

SEQ ID NO: 2707330 - RNA, 21 nt, Human parainfluenza virus 3
augagaagggcgaaaaaucac

SEQ ID NO: 2707331 - RNA, 12 nt, Human parainfluenza virus 3
caauacaccaag

SEQ ID NO: 2707332 - RNA, 20 nt, Human parainfluenza virus 3
aguucuucaauacaccaaga

SEQ ID NO: 2707333 - RNA, 12 nt, Human parainfluenza virus 3
ucaacacaagaa

SEQ ID NO: 2707334 - RNA, 19 nt, Human parainfluenza virus 3
cuuaggauuaaagaauaaa

SEQ ID NO: 2707335 - RNA, 19 nt, Human parainfluenza virus 3
ucagcugguauucaaaagg

SEQ ID NO: 2707336 - RNA, 15 nt, Human parainfluenza virus 3
aauagauaucacaaa

SEQ ID NO: 2707337 - RNA, 19 nt, Human parainfluenza virus 3
auuaugucaacaaagaaau

SEQ ID NO: 2707338 - RNA, 18 nt, Human parainfluenza virus 3
agaaaauggaugaaucac

SEQ ID NO: 2707339 - RNA, 14 nt, Human parainfluenza virus 3
augaagauaucaca

SEQ ID NO: 2707340 - RNA, 14 nt, Human parainfluenza virus 3
aacaguagaucaaa

SEQ ID NO: 2707341 - RNA, 14 nt, Human parainfluenza virus 3
aggauauaggaaaa

SEQ ID NO: 2707342 - RNA, 14 nt, Human parainfluenza virus 3
gaaauaaaucagaa

SEQ ID NO: 2707343 - RNA, 14 nt, Human parainfluenza virus 3
uagcaaucaaauca

SEQ ID NO: 2707344 - RNA, 21 nt, Human parainfluenza virus 3
auagugaaaagguccauaauu

SEQ ID NO: 2707345 - RNA, 14 nt, Human parainfluenza virus 3
gaaaaucaaagaga

SEQ ID NO: 2707346 - RNA, 14 nt, Human parainfluenza virus 3
uacagacagaauca

SEQ ID NO: 2707347 - RNA, 12 nt, Human parainfluenza virus 3
cuuaaaucccag

SEQ ID NO: 2707348 - RNA, 14 nt, Human parainfluenza virus 3
cuuauaaaucagau

SEQ ID NO: 2707349 - RNA, 15 nt, Human parainfluenza virus 3
auaccaagcagaguu

SEQ ID NO: 2707350 - RNA, 19 nt, Human parainfluenza virus 3
aaucaggaauccaaugaaa

SEQ ID NO: 2707351 - RNA, 19 nt, Human parainfluenza virus 3
uagacaaaaaguaagaaaa

SEQ ID NO: 2707352 - RNA, 13 nt, Human parainfluenza virus 3
agauacaaaauga

SEQ ID NO: 2707353 - RNA, 14 nt, Human parainfluenza virus 3
caaaaggaaaauau

SEQ ID NO: 2707354 - RNA, 17 nt, Human parainfluenza virus 3
auauuaacugagaaagu

SEQ ID NO: 2707355 - RNA, 12 nt, Human parainfluenza virus 3
gcaaaaaugaug

SEQ ID NO: 2707356 - RNA, 22 nt, Human parainfluenza virus 3
aaacagagauuccaaaaagcug

SEQ ID NO: 2707357 - RNA, 20 nt, Human parainfluenza virus 3
uggaggaaucuccagaagca

SEQ ID NO: 2707358 - RNA, 16 nt, Human parainfluenza virus 3
agaaauacuaaugaaa

SEQ ID NO: 2707359 - RNA, 15 nt, Human parainfluenza virus 3
agaaaagaucaagaa

SEQ ID NO: 2707360 - RNA, 19 nt, Human parainfluenza virus 3
aucauucuuugaaaauggu

SEQ ID NO: 2707361 - RNA, 17 nt, Human parainfluenza virus 3
auaaagauauaucuuaa

SEQ ID NO: 2707362 - RNA, 21 nt, Human parainfluenza virus 3
auaaucaaaaacuuaggacaa

SEQ ID NO: 2707363 - RNA, 16 nt, Human parainfluenza virus 3
agacuaagaaaaggaa

SEQ ID NO: 2707364 - RNA, 19 nt, Human parainfluenza virus 3
uugaaugauuacucaauca

SEQ ID NO: 2707365 - RNA, 21 nt, Human parainfluenza virus 3
gaucaggaaacuguacagaga

SEQ ID NO: 2707366 - RNA, 15 nt, Human parainfluenza virus 3
gagaaacucaaagaa

SEQ ID NO: 2707367 - RNA, 14 nt, Human parainfluenza virus 3
gcagaguucuucuc

SEQ ID NO: 2707368 - RNA, 17 nt, Human parainfluenza virus 3
uauguacuaacaaacaa

SEQ ID NO: 2707369 - RNA, 16 nt, Human parainfluenza virus 3
agucaaugaacagaga

SEQ ID NO: 2707370 - RNA, 17 nt, Human parainfluenza virus 3
aaauguacuaaacaaug

SEQ ID NO: 2707371 - RNA, 22 nt, Human parainfluenza virus 3
cagagaggaccugggagaagaa

SEQ ID NO: 2707372 - RNA, 12 nt, Human parainfluenza virus 3
aagauuacagaa

SEQ ID NO: 2707373 - RNA, 15 nt, Human parainfluenza virus 3
gaaauuaauaauaua

SEQ ID NO: 2707374 - RNA, 16 nt, Human parainfluenza virus 3
agccucaaaaaaugau

SEQ ID NO: 2707375 - RNA, 13 nt, Human parainfluenza virus 3
aagaaaaacaugu

SEQ ID NO: 2707376 - RNA, 18 nt, Human parainfluenza virus 3
uggaacgaaucaaagaca

SEQ ID NO: 2707377 - RNA, 19 nt, Human parainfluenza virus 3
aucuuucugccaaauagau

SEQ ID NO: 2707378 - RNA, 14 nt, Human parainfluenza virus 3
accaugaaauggag

SEQ ID NO: 2707379 - RNA, 22 nt, Human parainfluenza virus 3
aacaauggcacuguaucugaca

SEQ ID NO: 2707380 - RNA, 16 nt, Human parainfluenza virus 3
auacaaugaaucaaau

SEQ ID NO: 2707381 - RNA, 16 nt, Human parainfluenza virus 3
uuguucaaaacagaga

SEQ ID NO: 2707382 - RNA, 18 nt, Human parainfluenza virus 3
agauugauagaaaaucaa

SEQ ID NO: 2707383 - RNA, 23 nt, Human parainfluenza virus 3
cccaaaguugaugaaagaucaga

SEQ ID NO: 2707384 - RNA, 21 nt, Human parainfluenza virus 3
auggacaacgacacaaaauua

SEQ ID NO: 2707385 - RNA, 14 nt, Human parainfluenza virus 3
ucaacacacacaaa

SEQ ID NO: 2707386 - RNA, 19 nt, Human parainfluenza virus 3
auaccugguauuaacagua

SEQ ID NO: 2707387 - RNA, 17 nt, Human parainfluenza virus 3
aaguuuguggcucugga

SEQ ID NO: 2707388 - RNA, 14 nt, Human parainfluenza virus 3
uacccaacacaaua

SEQ ID NO: 2707389 - RNA, 17 nt, Human parainfluenza virus 3
uauauaccaagcagagu

SEQ ID NO: 2707390 - RNA, 22 nt, Human parainfluenza virus 3
agccucauaccaaaaauagaag

SEQ ID NO: 2707391 - RNA, 17 nt, Human parainfluenza virus 3
agaaauaaauaaugagu

SEQ ID NO: 2707392 - RNA, 13 nt, Human parainfluenza virus 3
auaaaucagauaa

SEQ ID NO: 2707393 - RNA, 14 nt, Human parainfluenza virus 3
gaacaccaaaacaa

SEQ ID NO: 2707394 - RNA, 20 nt, Human parainfluenza virus 3
aaguuggcauagcaaauuac

SEQ ID NO: 2707395 - RNA, 21 nt, Human parainfluenza virus 3
gauagacaaaaaguaagaaaa

SEQ ID NO: 2707396 - RNA, 21 nt, Human parainfluenza virus 3
cacagaucgaaccgaacagac

SEQ ID NO: 2707397 - RNA, 19 nt, Human parainfluenza virus 3
gcauccaacgaaucacgaa

SEQ ID NO: 2707398 - RNA, 18 nt, Human parainfluenza virus 3
ucaaaccaacagaaacaa

SEQ ID NO: 2707399 - RNA, 17 nt, Human parainfluenza virus 3
ucagaauuaacaaacau

SEQ ID NO: 2707400 - RNA, 17 nt, Human parainfluenza virus 3
uacuaaacaauguagau

SEQ ID NO: 2707401 - RNA, 16 nt, Human parainfluenza virus 3
gauacugcaucaaaga

SEQ ID NO: 2707402 - RNA, 14 nt, Human parainfluenza virus 3
acaauaaaauaagu

SEQ ID NO: 2707403 - RNA, 18 nt, Human parainfluenza virus 3
cgacaugcaggaaauaca

SEQ ID NO: 2707404 - RNA, 19 nt, Human parainfluenza virus 3
gaucaacuuauacaaaaga

SEQ ID NO: 2707405 - RNA, 19 nt, Human parainfluenza virus 3
ugcuaucuucuguacaaua

SEQ ID NO: 2707406 - RNA, 12 nt, Human parainfluenza virus 3
gaucaaaacaaa

SEQ ID NO: 2707407 - RNA, 23 nt, Human parainfluenza virus 3
agcaaucucucacaaagcacaaa

SEQ ID NO: 2707408 - RNA, 19 nt, Human parainfluenza virus 3
agaucuaaagaaaauggau

SEQ ID NO: 2707409 - RNA, 18 nt, Human parainfluenza virus 3
aaaaauaggcagaaugua

SEQ ID NO: 2707410 - RNA, 23 nt, Human parainfluenza virus 3
gaggaaucagucuucaugucaau

SEQ ID NO: 2707411 - RNA, 15 nt, Human parainfluenza virus 3
acuagacucacagaa

SEQ ID NO: 2707412 - RNA, 13 nt, Human parainfluenza virus 3
accauugcucugg

SEQ ID NO: 2707413 - RNA, 19 nt, Human parainfluenza virus 3
agacuaauacccaaaaaag

SEQ ID NO: 2707414 - RNA, 21 nt, Human parainfluenza virus 3
auacucgcaggaacaagaaag

SEQ ID NO: 2707415 - RNA, 16 nt, Human parainfluenza virus 3
aguacaccugauacaa

SEQ ID NO: 2707416 - RNA, 15 nt, Human parainfluenza virus 3
ucgauuuacagagag

SEQ ID NO: 2707417 - RNA, 19 nt, Human parainfluenza virus 3
gaaaaucgagaaaaugaga

SEQ ID NO: 2707418 - RNA, 12 nt, Human parainfluenza virus 3
agaguucuucuc

SEQ ID NO: 2707419 - RNA, 22 nt, Human parainfluenza virus 3
caagucaacggauaucuacaau

SEQ ID NO: 2707420 - RNA, 15 nt, Human parainfluenza virus 3
cacaaauaucacaga

SEQ ID NO: 2707421 - RNA, 21 nt, Human parainfluenza virus 3
aaaaccuuuaaauccagauga

SEQ ID NO: 2707422 - RNA, 16 nt, Human parainfluenza virus 3
gcagaguucuucucuu

SEQ ID NO: 2707423 - RNA, 21 nt, Human parainfluenza virus 3
gcaacaccagaugaugaagaa

SEQ ID NO: 2707424 - RNA, 21 nt, Human parainfluenza virus 3
guacuaaacaauguagauacu

SEQ ID NO: 2707425 - RNA, 20 nt, Human parainfluenza virus 3
aauaagggauaaucaaaaac

SEQ ID NO: 2707426 - RNA, 13 nt, Human parainfluenza virus 3
aaaacauguaaua

SEQ ID NO: 2707427 - RNA, 18 nt, Human parainfluenza virus 3
aaacaugguuuacuauca

SEQ ID NO: 2707428 - RNA, 18 nt, Human parainfluenza virus 3
aaggauagacaaaaagua

SEQ ID NO: 2707429 - RNA, 12 nt, Human parainfluenza virus 3
aaugaguuuaug

SEQ ID NO: 2707430 - RNA, 14 nt, Human parainfluenza virus 3
auaaaugagaaugu

SEQ ID NO: 2707431 - RNA, 13 nt, Human parainfluenza virus 3
cagauauuaagau

SEQ ID NO: 2707432 - RNA, 16 nt, Human parainfluenza virus 3
agauaauauauauauu

SEQ ID NO: 2707433 - RNA, 22 nt, Human parainfluenza virus 3
uuaaacucaauuccaaaauuaa

SEQ ID NO: 2707434 - RNA, 16 nt, Human parainfluenza virus 3
acagaaucaucaggaa

SEQ ID NO: 2707435 - RNA, 16 nt, Human parainfluenza virus 3
aacauuuugauccaaa

SEQ ID NO: 2707436 - RNA, 17 nt, Human parainfluenza virus 3
aaaacacuaaucccaga

SEQ ID NO: 2707437 - RNA, 13 nt, Human parainfluenza virus 3
caagaaacaacag

SEQ ID NO: 2707438 - RNA, 14 nt, Human parainfluenza virus 3
caaagaagcaauca

SEQ ID NO: 2707439 - RNA, 22 nt, Human parainfluenza virus 3
agaagggacaaaaaaagcaaaa

SEQ ID NO: 2707440 - RNA, 15 nt, Human parainfluenza virus 3
ugaucaagagaaaaa

SEQ ID NO: 2707441 - RNA, 18 nt, Human parainfluenza virus 3
auuaacgaccauaucaau

SEQ ID NO: 2707442 - RNA, 17 nt, Human parainfluenza virus 3
gacugauuccaaaggga

SEQ ID NO: 2707443 - RNA, 14 nt, Human parainfluenza virus 3
aggaucauuacaag

SEQ ID NO: 2707444 - RNA, 20 nt, Human parainfluenza virus 3
ugaaguauuuauagcagaua

SEQ ID NO: 2707445 - RNA, 13 nt, Human parainfluenza virus 3
aaaauuauaacac

SEQ ID NO: 2707446 - RNA, 15 nt, Human parainfluenza virus 3
caaacccaagacaca

SEQ ID NO: 2707447 - RNA, 13 nt, Human parainfluenza virus 3
gacacaguuuauc

SEQ ID NO: 2707448 - RNA, 16 nt, Human parainfluenza virus 3
acacagauacaaaaug

SEQ ID NO: 2707449 - RNA, 17 nt, Human parainfluenza virus 3
gcuucuucgaaauggaa

SEQ ID NO: 2707450 - RNA, 22 nt, Human parainfluenza virus 3
aaucuaucaacacacacaaaau

SEQ ID NO: 2707451 - RNA, 12 nt, Human parainfluenza virus 3
auaucaagacaa

SEQ ID NO: 2707452 - RNA, 13 nt, Human parainfluenza virus 3
auauaggaaaauc

SEQ ID NO: 2707453 - RNA, 20 nt, Human parainfluenza virus 3
ucaauccacaucaaaacuag

SEQ ID NO: 2707454 - RNA, 23 nt, Human parainfluenza virus 3
agauuuguuauccuuuaauggau

SEQ ID NO: 2707455 - RNA, 13 nt, Human parainfluenza virus 3
ucagaucuacaaa

SEQ ID NO: 2707456 - RNA, 14 nt, Human parainfluenza virus 3
gauccaacaaagaa

SEQ ID NO: 2707457 - RNA, 18 nt, Human parainfluenza virus 3
gugagaagaacagucaaa

SEQ ID NO: 2707458 - RNA, 20 nt, Human parainfluenza virus 3
ucucacaaagcacaaaacaa

SEQ ID NO: 2707459 - RNA, 14 nt, Human parainfluenza virus 3
caggaguauauacu

SEQ ID NO: 2707460 - RNA, 17 nt, Human parainfluenza virus 3
aagcuagauccaaaauu

SEQ ID NO: 2707461 - RNA, 15 nt, Human parainfluenza virus 3
uaaagauauaucuua

SEQ ID NO: 2707462 - RNA, 17 nt, Human parainfluenza virus 3
aucuauuauuuacagaa

SEQ ID NO: 2707463 - RNA, 17 nt, Human parainfluenza virus 3
ugcuaaaccucaaagca

SEQ ID NO: 2707464 - RNA, 22 nt, Human parainfluenza virus 3
aaaauuagccucaaaaaaugau

SEQ ID NO: 2707465 - RNA, 14 nt, Human parainfluenza virus 3
auucacaacaucaa

SEQ ID NO: 2707466 - RNA, 21 nt, Human parainfluenza virus 3
gacauaaauacaauaaagaua

SEQ ID NO: 2707467 - RNA, 18 nt, Human parainfluenza virus 3
cauaccaaaaauagaaga

SEQ ID NO: 2707468 - RNA, 14 nt, Human parainfluenza virus 3
caacacagcaaaca

SEQ ID NO: 2707469 - RNA, 16 nt, Human parainfluenza virus 3
uaacacagauacaaaa

SEQ ID NO: 2707470 - RNA, 16 nt, Human parainfluenza virus 3
uagaaaaucaaagaga

SEQ ID NO: 2707471 - RNA, 13 nt, Human parainfluenza virus 3
ucaaaaacaacaa

SEQ ID NO: 2707472 - RNA, 18 nt, Human parainfluenza virus 3
gauaauaccaaugaucua

SEQ ID NO: 2707473 - RNA, 16 nt, Human parainfluenza virus 3
agcagaucuaaagaaa

SEQ ID NO: 2707474 - RNA, 21 nt, Human parainfluenza virus 3
gaacaaacagacaagaaacaa

SEQ ID NO: 2707475 - RNA, 14 nt, Human parainfluenza virus 3
ugguauuaacagua

SEQ ID NO: 2707476 - RNA, 16 nt, Human parainfluenza virus 3
auucaauccacaucaa

SEQ ID NO: 2707477 - RNA, 14 nt, Human parainfluenza virus 3
aagcagaguucuuc

SEQ ID NO: 2707478 - RNA, 20 nt, Human parainfluenza virus 3
acaauagauaucaaucaaua

SEQ ID NO: 2707479 - RNA, 20 nt, Human parainfluenza virus 3
aaaacaaaaaguacagaaca

SEQ ID NO: 2707480 - RNA, 18 nt, Human parainfluenza virus 3
ugcucggaaaauggacac

SEQ ID NO: 2707481 - RNA, 12 nt, Human parainfluenza virus 3
gccauacagaug

SEQ ID NO: 2707482 - RNA, 13 nt, Human parainfluenza virus 3
gaagugagaagaa

SEQ ID NO: 2707483 - RNA, 13 nt, Human parainfluenza virus 3
agacaaauccaaa

SEQ ID NO: 2707484 - RNA, 13 nt, Human parainfluenza virus 3
gcucgaaaugaga

SEQ ID NO: 2707485 - RNA, 22 nt, Human parainfluenza virus 3
aacaacaguagaucaaaaucua

SEQ ID NO: 2707486 - RNA, 12 nt, Human parainfluenza virus 3
agacaaauggaa

SEQ ID NO: 2707487 - RNA, 13 nt, Human parainfluenza virus 3
uaagaaaaacaug

SEQ ID NO: 2707488 - RNA, 23 nt, Human parainfluenza virus 3
uccauggcuacucauaacaacaa

SEQ ID NO: 2707489 - RNA, 16 nt, Human parainfluenza virus 3
auauaccaagcagagu

SEQ ID NO: 2707490 - RNA, 15 nt, Human parainfluenza virus 3
aucagauaaauggua

SEQ ID NO: 2707491 - RNA, 22 nt, Human parainfluenza virus 3
acagacaagaaacaacaguaga

SEQ ID NO: 2707492 - RNA, 23 nt, Human parainfluenza virus 3
ccgaacaaacagacaagaaacaa

SEQ ID NO: 2707493 - RNA, 23 nt, Human parainfluenza virus 3
gugcaaguuaaaucagagauauu

SEQ ID NO: 2707494 - RNA, 19 nt, Human parainfluenza virus 3
auuaauaauauaucaaaag

SEQ ID NO: 2707495 - RNA, 22 nt, Human parainfluenza virus 3
agaagauauuguacuugauauu

SEQ ID NO: 2707496 - RNA, 12 nt, Human parainfluenza virus 3
aguuacaaaguu

SEQ ID NO: 2707497 - RNA, 21 nt, Human parainfluenza virus 3
agcccaaggauagacaaaaag

SEQ ID NO: 2707498 - RNA, 13 nt, Human parainfluenza virus 3
cucaaaaaaugau

SEQ ID NO: 2707499 - RNA, 14 nt, Human parainfluenza virus 3
auacaagaucuaca

SEQ ID NO: 2707500 - RNA, 21 nt, Human parainfluenza virus 3
cuacagauccacaucaaaagg

SEQ ID NO: 2707501 - RNA, 16 nt, Human parainfluenza virus 3
uaaagauauaucuuaa

SEQ ID NO: 2707502 - RNA, 16 nt, Human parainfluenza virus 3
acacauuuaucagaua

SEQ ID NO: 2707503 - RNA, 18 nt, Human parainfluenza virus 3
aaucugcagauguuccaa

SEQ ID NO: 2707504 - RNA, 23 nt, Human parainfluenza virus 3
ucaaaauuagccucaaaaaauga

SEQ ID NO: 2707505 - RNA, 19 nt, Human parainfluenza virus 3
aggauauaggaaaaucaua

SEQ ID NO: 2707506 - RNA, 18 nt, Human parainfluenza virus 3
ucggauugaucaagagaa

SEQ ID NO: 2707507 - RNA, 22 nt, Human parainfluenza virus 3
gacacuacuugcaaauaauaua

SEQ ID NO: 2707508 - RNA, 14 nt, Human parainfluenza virus 3
aauauaggaaaauu

SEQ ID NO: 2707509 - RNA, 15 nt, Human parainfluenza virus 3
aauaauauaggaaaa

SEQ ID NO: 2707510 - RNA, 23 nt, Human parainfluenza virus 3
cagauaguagagcugagacugug

SEQ ID NO: 2707511 - RNA, 15 nt, Human parainfluenza virus 3
agaaagucaaaucaa

SEQ ID NO: 2707512 - RNA, 21 nt, Human parainfluenza virus 3
acuggauccauaucaaaaaca

SEQ ID NO: 2707513 - RNA, 22 nt, Human parainfluenza virus 3
ucaauggacaacgacacaaaau

SEQ ID NO: 2707514 - RNA, 17 nt, Human parainfluenza virus 3
gaaucaaagacaaauac

SEQ ID NO: 2707515 - RNA, 20 nt, Human parainfluenza virus 3
acaacaagcugcauuacaca

SEQ ID NO: 2707516 - RNA, 21 nt, Human parainfluenza virus 3
gacaaaagaggucaacaccaa

SEQ ID NO: 2707517 - RNA, 20 nt, Human parainfluenza virus 3
acagcaaacacuaaacacaa

SEQ ID NO: 2707518 - RNA, 17 nt, Human parainfluenza virus 3
uagaaaaucaaagagaa

SEQ ID NO: 2707519 - RNA, 22 nt, Human parainfluenza virus 3
cauaaauacaauaaagauauau

SEQ ID NO: 2707520 - RNA, 23 nt, Human parainfluenza virus 3
caaacgaguuguauguguagcaa

SEQ ID NO: 2707521 - RNA, 12 nt, Human parainfluenza virus 3
aagauaucacaa

SEQ ID NO: 2707522 - RNA, 18 nt, Human parainfluenza virus 3
ucuuaaccuuuaucuuug

SEQ ID NO: 2707523 - RNA, 23 nt, Human parainfluenza virus 3
aaacagaaaaucgagaaaaugag

SEQ ID NO: 2707524 - RNA, 12 nt, Human parainfluenza virus 3
cucuuugcaaaa

SEQ ID NO: 2707525 - RNA, 15 nt, Human parainfluenza virus 3
guaggacaaagaaaa

SEQ ID NO: 2707526 - RNA, 22 nt, Human parainfluenza virus 3
uagaacauauagucaaaugacu

SEQ ID NO: 2707527 - RNA, 22 nt, Human parainfluenza virus 3
agaguauccaugaucaaaacaa

SEQ ID NO: 2707528 - RNA, 17 nt, Human parainfluenza virus 3
agacaauggacaaaagg

SEQ ID NO: 2707529 - RNA, 13 nt, Human parainfluenza virus 3
uaccucagccuua

SEQ ID NO: 2707530 - RNA, 18 nt, Human parainfluenza virus 3
aaccaaucaggaauccaa

SEQ ID NO: 2707531 - RNA, 15 nt, Human parainfluenza virus 3
gacacuguuaauaaa

SEQ ID NO: 2707532 - RNA, 22 nt, Human parainfluenza virus 3
caaucagggacacaaacaaagc

SEQ ID NO: 2707533 - RNA, 15 nt, Human parainfluenza virus 3
gaaauaaauaaugag

SEQ ID NO: 2707534 - RNA, 14 nt, Human parainfluenza virus 3
auaagauaauauau

SEQ ID NO: 2707535 - RNA, 21 nt, Human parainfluenza virus 3
cagaacuccguccuuaauuau

SEQ ID NO: 2707536 - RNA, 16 nt, Human parainfluenza virus 3
ccauugauaacaacac

SEQ ID NO: 2707537 - RNA, 20 nt, Human parainfluenza virus 3
auauaucuuaaccuuuaucu

SEQ ID NO: 2707538 - RNA, 13 nt, Human parainfluenza virus 3
caacgacacaaaa

SEQ ID NO: 2707539 - RNA, 22 nt, Human parainfluenza virus 3
gaugaggauuugacaauuuaua

SEQ ID NO: 2707540 - RNA, 21 nt, Human parainfluenza virus 3
caaacacuaaacacaaugcca

SEQ ID NO: 2707541 - RNA, 18 nt, Human parainfluenza virus 3
aauuuauaugaaagauaa

SEQ ID NO: 2707542 - RNA, 22 nt, Human parainfluenza virus 3
gacagaaucaucaggaacacaa

SEQ ID NO: 2707543 - RNA, 20 nt, Human parainfluenza virus 3
cuauugaucaggaaacugua

SEQ ID NO: 2707544 - RNA, 20 nt, Human parainfluenza virus 3
uuacaacagaacaaaguaga

SEQ ID NO: 2707545 - RNA, 13 nt, Human parainfluenza virus 3
cuucuuacaauuc

SEQ ID NO: 2707546 - RNA, 18 nt, Human parainfluenza virus 3
acucuuugcaaaaaugac

SEQ ID NO: 2707547 - RNA, 14 nt, Human parainfluenza virus 3
agggcagaagaaaa

SEQ ID NO: 2707548 - RNA, 16 nt, Human parainfluenza virus 3
aaaaucaagcagaaug

SEQ ID NO: 2707549 - RNA, 15 nt, Human parainfluenza virus 3
aacaacaaaaccaaa

SEQ ID NO: 2707550 - RNA, 20 nt, Human parainfluenza virus 3
uaaagaaaauggaugaauca

SEQ ID NO: 2707551 - RNA, 15 nt, Human parainfluenza virus 3
auauuacaaaggcaa

SEQ ID NO: 2707552 - RNA, 20 nt, Human parainfluenza virus 3
uucaaaucuuaaaauuauga

SEQ ID NO: 2707553 - RNA, 20 nt, Human parainfluenza virus 3
aaagugagcaguacaaugag

SEQ ID NO: 2707554 - RNA, 15 nt, Human parainfluenza virus 3
auagucaaaugacug

SEQ ID NO: 2707555 - RNA, 15 nt, Human parainfluenza virus 3
uguacuaacaaacaa

SEQ ID NO: 2707556 - RNA, 22 nt, Human parainfluenza virus 3
cacucucagcuggauauacaac

SEQ ID NO: 2707557 - RNA, 20 nt, Human parainfluenza virus 3
cuacaaugauggauaugaga

SEQ ID NO: 2707558 - RNA, 17 nt, Human parainfluenza virus 3
ggaucauuacaagaaaa

SEQ ID NO: 2707559 - RNA, 15 nt, Human parainfluenza virus 3
aacaacagaucucaa

SEQ ID NO: 2707560 - RNA, 21 nt, Human parainfluenza virus 3
agaaaagguuagaaaauauau

SEQ ID NO: 2707561 - RNA, 21 nt, Human parainfluenza virus 3
caacucccaaaguugaugaaa

SEQ ID NO: 2707562 - RNA, 21 nt, Human parainfluenza virus 3
ucaaaagauacugacaaccag

SEQ ID NO: 2707563 - RNA, 12 nt, Human parainfluenza virus 3
uuaagaaaucaa

SEQ ID NO: 2707564 - RNA, 22 nt, Human parainfluenza virus 3
aauuacucuauugcagaaucuu

SEQ ID NO: 2707565 - RNA, 16 nt, Human parainfluenza virus 3
gaaauacuaaugaaaa

SEQ ID NO: 2707566 - RNA, 16 nt, Human parainfluenza virus 3
acaagaaaaaggaaua

SEQ ID NO: 2707567 - RNA, 13 nt, Human parainfluenza virus 3
auagauaucacaa

SEQ ID NO: 2707568 - RNA, 12 nt, Human parainfluenza virus 3
cuacuugcaaau

SEQ ID NO: 2707569 - RNA, 19 nt, Human parainfluenza virus 3
ccaaugauccaacaaagaa

SEQ ID NO: 2707570 - RNA, 13 nt, Human parainfluenza virus 3
auuaaagaauaaa

SEQ ID NO: 2707571 - RNA, 18 nt, Human parainfluenza virus 3
ccugaucuauaucgacau

SEQ ID NO: 2707572 - RNA, 20 nt, Human parainfluenza virus 3
acaauggaacuaauaaucuc

SEQ ID NO: 2707573 - RNA, 23 nt, Human parainfluenza virus 3
gagaaaagacauuugaugugaua

SEQ ID NO: 2707574 - RNA, 21 nt, Human parainfluenza virus 3
auauggaugacgacucaauac

SEQ ID NO: 2707575 - RNA, 14 nt, Human parainfluenza virus 3
ggaucuuaggaaau

SEQ ID NO: 2707576 - RNA, 13 nt, Human parainfluenza virus 3
aaggauacagaag

SEQ ID NO: 2707577 - RNA, 16 nt, Human parainfluenza virus 3
auguacaacagaagca

SEQ ID NO: 2707578 - RNA, 14 nt, Human parainfluenza virus 3
caauuagaaaugau

SEQ ID NO: 2707579 - RNA, 17 nt, Human parainfluenza virus 3
acuaauaagauaauaua

SEQ ID NO: 2707580 - RNA, 15 nt, Human parainfluenza virus 3
aucaggaacacaauc

SEQ ID NO: 2707581 - RNA, 20 nt, Human parainfluenza virus 3
accagaugaugaagaagaaa

SEQ ID NO: 2707582 - RNA, 13 nt, Human parainfluenza virus 3
aagcagaaugaaa

SEQ ID NO: 2707583 - RNA, 18 nt, Human parainfluenza virus 3
ucacuagacagaaaauaa

SEQ ID NO: 2707584 - RNA, 18 nt, Human parainfluenza virus 3
auaguaggacaaagaaaa

SEQ ID NO: 2707585 - RNA, 16 nt, Human parainfluenza virus 3
ucaaagcgaaagagau

SEQ ID NO: 2707586 - RNA, 19 nt, Human parainfluenza virus 3
acacaaaaucaagcagaau

SEQ ID NO: 2707587 - RNA, 19 nt, Human parainfluenza virus 3
gcaaauaagggauaaucaa

SEQ ID NO: 2707588 - RNA, 16 nt, Human parainfluenza virus 3
caaaauauaaaaccag

SEQ ID NO: 2707589 - RNA, 19 nt, Human parainfluenza virus 3
ugaagaaguaucugaauua

SEQ ID NO: 2707590 - RNA, 16 nt, Human parainfluenza virus 3
uauaucuuaaccuuua

SEQ ID NO: 2707591 - RNA, 14 nt, Human parainfluenza virus 3
agagauugaauuac

SEQ ID NO: 2707592 - RNA, 19 nt, Human parainfluenza virus 3
ccaaauggauguauaacag

SEQ ID NO: 2707593 - RNA, 23 nt, Human parainfluenza virus 3
aucacauagaagauugauagaaa

SEQ ID NO: 2707594 - RNA, 22 nt, Human parainfluenza virus 3
auuguuuucauauaguagaaau

SEQ ID NO: 2707595 - RNA, 17 nt, Human parainfluenza virus 3
aagccgaagcaaauaag

SEQ ID NO: 2707596 - RNA, 14 nt, Human parainfluenza virus 3
gacaaaaaaagcaa

SEQ ID NO: 2707597 - RNA, 21 nt, Human parainfluenza virus 3
cagaacaccaaaacaacaaaa

SEQ ID NO: 2707598 - RNA, 17 nt, Human parainfluenza virus 3
aaucacccuccaaguca

SEQ ID NO: 2707599 - RNA, 22 nt, Human parainfluenza virus 3
gaaaauacacauuuaucagaua

SEQ ID NO: 2707600 - RNA, 19 nt, Human parainfluenza virus 3
uaggaucauuacaagaaaa

SEQ ID NO: 2707601 - RNA, 17 nt, Human parainfluenza virus 3
auaaggauaaaauggac

SEQ ID NO: 2707602 - RNA, 16 nt, Human parainfluenza virus 3
aagaacccaauagaca

SEQ ID NO: 2707603 - RNA, 16 nt, Human parainfluenza virus 3
agaaaaucaaagagaa

SEQ ID NO: 2707604 - RNA, 15 nt, Human parainfluenza virus 3
accaagcagaguucu

SEQ ID NO: 2707605 - RNA, 21 nt, Human parainfluenza virus 3
acgacaccgaacaaacagaca

SEQ ID NO: 2707606 - RNA, 14 nt, Human parainfluenza virus 3
cuuuaucuuugagc

SEQ ID NO: 2707607 - RNA, 16 nt, Human parainfluenza virus 3
cauagaagauauugua

SEQ ID NO: 2707608 - RNA, 16 nt, Human parainfluenza virus 3
ucaaaucaaaaacuag

SEQ ID NO: 2707609 - RNA, 18 nt, Human parainfluenza virus 3
aaagauauaucuuaaccu

SEQ ID NO: 2707610 - RNA, 18 nt, Human parainfluenza virus 3
uagaagugagaagaacag

SEQ ID NO: 2707611 - RNA, 19 nt, Human parainfluenza virus 3
aaaguaagaaaaacaugua

SEQ ID NO: 2707612 - RNA, 14 nt, Human parainfluenza virus 3
aaguguacaauaau

SEQ ID NO: 2707613 - RNA, 11 nt, Human parainfluenza virus 3
acaaacacaac

SEQ ID NO: 2707614 - RNA, 21 nt, Human parainfluenza virus 3
caagaaagaagggacaaaaaa

SEQ ID NO: 2707615 - RNA, 20 nt, Human parainfluenza virus 3
aauaggagaaaucaaaacaa

SEQ ID NO: 2707616 - RNA, 15 nt, Human parainfluenza virus 3
aucuuaaccuuuauc

SEQ ID NO: 2707617 - RNA, 16 nt, Human parainfluenza virus 3
uaaccuuuaucuuuga

SEQ ID NO: 2707618 - RNA, 17 nt, Human parainfluenza virus 3
auuaauaauauaucaaa

SEQ ID NO: 2707619 - RNA, 15 nt, Human parainfluenza virus 3
gacaaaaaguaagaa

SEQ ID NO: 2707620 - RNA, 20 nt, Human parainfluenza virus 3
caagaaagaagggacaaaaa

SEQ ID NO: 2707621 - RNA, 20 nt, Human parainfluenza virus 3
ucaauauacaaauaagaaaa

SEQ ID NO: 2707622 - RNA, 17 nt, Human parainfluenza virus 3
auuaacaguaaagugac

SEQ ID NO: 2707623 - RNA, 21 nt, Human parainfluenza virus 3
caccagaugaugaagaagaaa

SEQ ID NO: 2707624 - RNA, 22 nt, Human parainfluenza virus 3
aaagcgugcucggaaaauggac

SEQ ID NO: 2707625 - RNA, 23 nt, Human parainfluenza virus 3
aaaauuaacacagauacaaaaug

SEQ ID NO: 2707626 - RNA, 18 nt, Human parainfluenza virus 3
acaagacuaauacccaaa

SEQ ID NO: 2707627 - RNA, 15 nt, Human parainfluenza virus 3
cacaaaacuacagca

SEQ ID NO: 2707628 - RNA, 17 nt, Human parainfluenza virus 3
aagaggucaacaccaac

SEQ ID NO: 2707629 - RNA, 15 nt, Human parainfluenza virus 3
caccaaaacaacaaa

SEQ ID NO: 2707630 - RNA, 22 nt, Human parainfluenza virus 3
aagcaaaauaggagaaaucaaa

SEQ ID NO: 2707631 - RNA, 18 nt, Human parainfluenza virus 3
uuagaagauuaaaauuaa

SEQ ID NO: 2707632 - RNA, 18 nt, Human parainfluenza virus 3
cuuuaucuuugagcccaa

SEQ ID NO: 2707633 - RNA, 12 nt, Human parainfluenza virus 3
gcaaaauaauau

SEQ ID NO: 2707634 - RNA, 15 nt, Human parainfluenza virus 3
ccaaggauagacaaa

SEQ ID NO: 2707635 - RNA, 22 nt, Human parainfluenza virus 3
uacugacaaccagauaccaaca

SEQ ID NO: 2707636 - RNA, 18 nt, Human parainfluenza virus 3
agauaaacaaaacuauaa

SEQ ID NO: 2707637 - RNA, 12 nt, Human parainfluenza virus 3
aucaaagagaac

SEQ ID NO: 2707638 - RNA, 15 nt, Human parainfluenza virus 3
agaagggacaaaaaa

SEQ ID NO: 2707639 - RNA, 23 nt, Human parainfluenza virus 3
ugauauaaggauaaaauggacau

SEQ ID NO: 2707640 - RNA, 14 nt, Human parainfluenza virus 3
ucauacuuucaaca

SEQ ID NO: 2707641 - RNA, 14 nt, Human parainfluenza virus 3
aggaauaauugaua

SEQ ID NO: 2707642 - RNA, 20 nt, Human parainfluenza virus 3
gccucauaccaaaaauagaa

SEQ ID NO: 2707643 - RNA, 16 nt, Human parainfluenza virus 3
aaucucucacaaagca

SEQ ID NO: 2707644 - RNA, 13 nt, Human parainfluenza virus 3
acaauaauaauua

SEQ ID NO: 2707645 - RNA, 11 nt, Human parainfluenza virus 3
auccaaaauua

SEQ ID NO: 2707646 - RNA, 19 nt, Human parainfluenza virus 3
agaaaaacauguaauauau

SEQ ID NO: 2707647 - RNA, 14 nt, Human parainfluenza virus 3
agacaaaaaguaag

SEQ ID NO: 2707648 - RNA, 18 nt, Human parainfluenza virus 3
aggaaauacacuagagaa

SEQ ID NO: 2707649 - RNA, 17 nt, Human parainfluenza virus 3
ucuaucaacacacacaa

SEQ ID NO: 2707650 - RNA, 14 nt, Human parainfluenza virus 3
uauaucuuaaccuu

SEQ ID NO: 2707651 - RNA, 19 nt, Human parainfluenza virus 3
auuaacaguaaagugacug

SEQ ID NO: 2707652 - RNA, 15 nt, Human parainfluenza virus 3
cagccuuaugauaug

SEQ ID NO: 2707653 - RNA, 20 nt, Human parainfluenza virus 3
acuuauaaaucagauaaaug

SEQ ID NO: 2707654 - RNA, 18 nt, Human parainfluenza virus 3
gauaaaugguauaaucca

SEQ ID NO: 2707655 - RNA, 20 nt, Human parainfluenza virus 3
agaggucaacaccaacaacu

SEQ ID NO: 2707656 - RNA, 14 nt, Human parainfluenza virus 3
uauaccaagcagag

SEQ ID NO: 2707657 - RNA, 22 nt, Human parainfluenza virus 3
auacuuucaacauaaaugacaa

SEQ ID NO: 2707658 - RNA, 16 nt, Human parainfluenza virus 3
gcaaucucucacaaag

SEQ ID NO: 2707659 - RNA, 15 nt, Human parainfluenza virus 3
agcaacugaaagagu

SEQ ID NO: 2707660 - RNA, 13 nt, Human parainfluenza virus 3
accaaaaauagaa

SEQ ID NO: 2707661 - RNA, 17 nt, Human parainfluenza virus 3
gauagacaaaaaguaag

SEQ ID NO: 2707662 - RNA, 16 nt, Human parainfluenza virus 3
agggauugacaagaau

SEQ ID NO: 2707663 - RNA, 23 nt, Human parainfluenza virus 3
gagaauguaaucugcaacacaac

SEQ ID NO: 2707664 - RNA, 15 nt, Human parainfluenza virus 3
aauuacaauuagaaa

SEQ ID NO: 2707665 - RNA, 20 nt, Human parainfluenza virus 3
auuacaagguauagcaucau

SEQ ID NO: 2707666 - RNA, 16 nt, Human parainfluenza virus 3
auaacuuguuagaaga

SEQ ID NO: 2707667 - RNA, 18 nt, Human parainfluenza virus 3
auauuauggacaauaauc

SEQ ID NO: 2707668 - RNA, 14 nt, Human parainfluenza virus 3
gaggaaagaaagac

SEQ ID NO: 2707669 - RNA, 23 nt, Human parainfluenza virus 3
aucucaaaaacaacaaccaucaa

SEQ ID NO: 2707670 - RNA, 19 nt, Human parainfluenza virus 3
caagaucuauauauauaca

SEQ ID NO: 2707671 - RNA, 20 nt, Human parainfluenza virus 3
cugauacaagaucaauaagu

SEQ ID NO: 2707672 - RNA, 21 nt, Human parainfluenza virus 3
ucgaaccgaacagacaaacac

SEQ ID NO: 2707673 - RNA, 19 nt, Human parainfluenza virus 3
gcaaaauaggagaaaucaa

SEQ ID NO: 2707674 - RNA, 22 nt, Human parainfluenza virus 3
auuaacacagauacaaaaugaa

SEQ ID NO: 2707675 - RNA, 19 nt, Human parainfluenza virus 3
ugagaagaacagucaaagc

SEQ ID NO: 2707676 - RNA, 19 nt, Human parainfluenza virus 3
gacaaaaaguaagaaaaac

SEQ ID NO: 2707677 - RNA, 19 nt, Human parainfluenza virus 3
acaacuuauaaaucagaua

SEQ ID NO: 2707678 - RNA, 18 nt, Human parainfluenza virus 3
agaaaaucgagaaaauga

SEQ ID NO: 2707679 - RNA, 16 nt, Human parainfluenza virus 3
uuaaagaauaaauuaa

SEQ ID NO: 2707680 - RNA, 17 nt, Human parainfluenza virus 3
gaaucaauccgaacaaa

SEQ ID NO: 2707681 - RNA, 16 nt, Human parainfluenza virus 3
aaagggcagaagaaaa

SEQ ID NO: 2707682 - RNA, 14 nt, Human parainfluenza virus 3
aaauaucacagaaa

SEQ ID NO: 2707683 - RNA, 19 nt, Human parainfluenza virus 3
gaccaacagaucaagcaau

SEQ ID NO: 2707684 - RNA, 15 nt, Human parainfluenza virus 3
aaugacuuaggaaaa

SEQ ID NO: 2707685 - RNA, 16 nt, Human parainfluenza virus 3
uuaauaauaaauaaga

SEQ ID NO: 2707686 - RNA, 19 nt, Human parainfluenza virus 3
aucuaauaguagcaaucaa

SEQ ID NO: 2707687 - RNA, 18 nt, Human parainfluenza virus 3
augauaugagaagauuac

SEQ ID NO: 2707688 - RNA, 16 nt, Human parainfluenza virus 3
agaucaagaaaacuag

SEQ ID NO: 2707689 - RNA, 14 nt, Human parainfluenza virus 3
aaugacuuaggaaa

SEQ ID NO: 2707690 - RNA, 16 nt, Human parainfluenza virus 3
acugcugcaacaccag

SEQ ID NO: 2707691 - RNA, 19 nt, Human parainfluenza virus 3
acagagaggaccugggaga

SEQ ID NO: 2707692 - RNA, 14 nt, Human parainfluenza virus 3
uacaaaagaaucaa

SEQ ID NO: 2707693 - RNA, 22 nt, Human parainfluenza virus 3
agggauugacaagaauauaccu

SEQ ID NO: 2707694 - RNA, 22 nt, Human parainfluenza virus 3
acuaacucugcaauauacacau

SEQ ID NO: 2707695 - RNA, 23 nt, Human parainfluenza virus 3
gcauccauuaagccgaagcaaau

SEQ ID NO: 2707696 - RNA, 23 nt, Human parainfluenza virus 3
aaucccagguucucucauacuuu

SEQ ID NO: 2707697 - RNA, 21 nt, Human parainfluenza virus 3
gacacaaaggggcaaacagaa

SEQ ID NO: 2707698 - RNA, 15 nt, Human parainfluenza virus 3
agaaauaaauaauga

SEQ ID NO: 2707699 - RNA, 19 nt, Human parainfluenza virus 3
augaguuuauggagauuac

SEQ ID NO: 2707700 - RNA, 16 nt, Human parainfluenza virus 3
ucaaaaacaacaacca

SEQ ID NO: 2707701 - RNA, 22 nt, Human parainfluenza virus 3
aaccuuuaucuuugagcccaag

SEQ ID NO: 2707702 - RNA, 19 nt, Human parainfluenza virus 3
ggauuaguuggaggaauca

SEQ ID NO: 2707703 - RNA, 16 nt, Human parainfluenza virus 3
ccaagacacaaaagac

SEQ ID NO: 2707704 - RNA, 20 nt, Human parainfluenza virus 3
ugaaugacuuaggaaaauac

SEQ ID NO: 2707705 - RNA, 16 nt, Human parainfluenza virus 3
aaauacagacagaauc

SEQ ID NO: 2707706 - RNA, 21 nt, Human parainfluenza virus 3
aggaaaauucuuucaagagaa

SEQ ID NO: 2707707 - RNA, 13 nt, Human parainfluenza virus 3
acagacaagaaac

SEQ ID NO: 2707708 - RNA, 16 nt, Human parainfluenza virus 3
agaucacuuuuaaugu

SEQ ID NO: 2707709 - RNA, 19 nt, Human parainfluenza virus 3
ggacauguucaaugaagau

SEQ ID NO: 2707710 - RNA, 17 nt, Human parainfluenza virus 3
agaugaugaagaagaaa

SEQ ID NO: 2707711 - RNA, 17 nt, Human parainfluenza virus 3
gauugauagaaaaucaa

SEQ ID NO: 2707712 - RNA, 16 nt, Human parainfluenza virus 3
ucagggacacaaacaa

SEQ ID NO: 2707713 - RNA, 20 nt, Human parainfluenza virus 3
cugcagguacauaucaaaac

SEQ ID NO: 2707714 - RNA, 15 nt, Human parainfluenza virus 3
cugccaaauagauau

SEQ ID NO: 2707715 - RNA, 14 nt, Human parainfluenza virus 3
accacucaaaguca

SEQ ID NO: 2707716 - RNA, 17 nt, Human parainfluenza virus 3
aggaaacuguacagaga

SEQ ID NO: 2707717 - RNA, 17 nt, Human parainfluenza virus 3
uuaucuuugagcccaag

SEQ ID NO: 2707718 - RNA, 19 nt, Human parainfluenza virus 3
ucaggaaacuguacagaga

SEQ ID NO: 2707719 - RNA, 13 nt, Human parainfluenza virus 3
acuuaggaaaaua

SEQ ID NO: 2707720 - RNA, 23 nt, Human parainfluenza virus 3
auggaaagcgaugcuaaaaacua

SEQ ID NO: 2707721 - RNA, 21 nt, Human parainfluenza virus 3
gacagugacccgaguuacaaa

SEQ ID NO: 2707722 - RNA, 11 nt, Human parainfluenza virus 3
agcccaaggau

SEQ ID NO: 2707723 - RNA, 13 nt, Human parainfluenza virus 3
uaggagaaaucaa

SEQ ID NO: 2707724 - RNA, 14 nt, Human parainfluenza virus 3
auaccaacaucaga

SEQ ID NO: 2707725 - RNA, 17 nt, Human parainfluenza virus 3
gauacuauccuaauauu

SEQ ID NO: 2707726 - RNA, 18 nt, Human parainfluenza virus 3
acuuucaacauaaaugac

SEQ ID NO: 2707727 - RNA, 12 nt, Human parainfluenza virus 3
aucuaaagaaaa

SEQ ID NO: 2707728 - RNA, 17 nt, Human parainfluenza virus 3
aaacaaaaaguacagaa

SEQ ID NO: 2707729 - RNA, 18 nt, Human parainfluenza virus 3
gcagaguucuucucuugu

SEQ ID NO: 2707730 - RNA, 18 nt, Human parainfluenza virus 3
aagaucuauauauauaca

SEQ ID NO: 2707731 - RNA, 18 nt, Human parainfluenza virus 3
cgaaauggaauugauauu

SEQ ID NO: 2707732 - RNA, 17 nt, Human parainfluenza virus 3
auccaugaucaaaacaa

SEQ ID NO: 2707733 - RNA, 19 nt, Human parainfluenza virus 3
aaugagagaguauccauga

SEQ ID NO: 2707734 - RNA, 23 nt, Human parainfluenza virus 3
guucacacaacuuauaaaucaga

SEQ ID NO: 2707735 - RNA, 21 nt, Human parainfluenza virus 3
ugagcuguuuccuaacaacag

SEQ ID NO: 2707736 - RNA, 19 nt, Human parainfluenza virus 3
cauguaauauauauauacc

SEQ ID NO: 2707737 - RNA, 22 nt, Human parainfluenza virus 3
auggagacacaagggauugaca

SEQ ID NO: 2707738 - RNA, 22 nt, Human parainfluenza virus 3
agcuguuuccuaacaacagauc

SEQ ID NO: 2707739 - RNA, 13 nt, Human parainfluenza virus 3
cauacaaugaauc

SEQ ID NO: 2707740 - RNA, 16 nt, Human parainfluenza virus 3
acgugcuaucaaaauu

SEQ ID NO: 2707741 - RNA, 21 nt, Human parainfluenza virus 3
ugagaagaacagucaaagcga

SEQ ID NO: 2707742 - RNA, 19 nt, Human parainfluenza virus 3
gacaccgaacaaacagaca

SEQ ID NO: 2707743 - RNA, 15 nt, Human parainfluenza virus 3
aacuuauacaaaaga

SEQ ID NO: 2707744 - RNA, 15 nt, Human parainfluenza virus 3
acaaaauugaaagaa

SEQ ID NO: 2707745 - RNA, 15 nt, Human parainfluenza virus 3
caaaacuauaauggu

SEQ ID NO: 2707746 - RNA, 16 nt, Human parainfluenza virus 3
gaacagacaaacacaa

SEQ ID NO: 2707747 - RNA, 13 nt, Human parainfluenza virus 3
aacaaaguagaaa

SEQ ID NO: 2707748 - RNA, 16 nt, Human parainfluenza virus 3
gacauacaaaaugaga

SEQ ID NO: 2707749 - RNA, 20 nt, Human parainfluenza virus 3
uggagaaucgauuagggaau

SEQ ID NO: 2707750 - RNA, 21 nt, Human parainfluenza virus 3
aaaacuuaggauuaaagaaua

SEQ ID NO: 2707751 - RNA, 19 nt, Human parainfluenza virus 3
aaagcgugcucggaaaaug

SEQ ID NO: 2707752 - RNA, 15 nt, Human parainfluenza virus 3
acauaucaaaacagg

SEQ ID NO: 2707753 - RNA, 16 nt, Human parainfluenza virus 3
caaaagggcagaagaa

SEQ ID NO: 2707754 - RNA, 22 nt, Human parainfluenza virus 3
aaacgaguuguauguguagcaa

SEQ ID NO: 2707755 - RNA, 18 nt, Human parainfluenza virus 3
caaugagagaguauccau

SEQ ID NO: 2707756 - RNA, 18 nt, Human parainfluenza virus 3
aaacuuaggauuaaagaa

SEQ ID NO: 2707757 - RNA, 17 nt, Human parainfluenza virus 3
augaucaaaacaaaauu

SEQ ID NO: 2707758 - RNA, 14 nt, Human parainfluenza virus 3
caauaucaaucaau

SEQ ID NO: 2707759 - RNA, 16 nt, Human parainfluenza virus 3
uucaacauaaaugaca

SEQ ID NO: 2707760 - RNA, 21 nt, Human parainfluenza virus 3
accauuaccacucaaagucaa

SEQ ID NO: 2707761 - RNA, 14 nt, Human parainfluenza virus 3
auauauauauacca

SEQ ID NO: 2707762 - RNA, 18 nt, Human parainfluenza virus 3
gcuucaucaguagagauu

SEQ ID NO: 2707763 - RNA, 23 nt, Human parainfluenza virus 3
acagaaaauaaaacucaauaaau

SEQ ID NO: 2707764 - RNA, 13 nt, Human parainfluenza virus 3
caaauuacaauua

SEQ ID NO: 2707765 - RNA, 20 nt, Human parainfluenza virus 3
aagagacuggcaacacagca

SEQ ID NO: 2707766 - RNA, 17 nt, Human parainfluenza virus 3
ucaggaauccaaugaaa

SEQ ID NO: 2707767 - RNA, 13 nt, Human parainfluenza virus 3
gaaaugauaauca

SEQ ID NO: 2707768 - RNA, 14 nt, Human parainfluenza virus 3
auuuacagaaucaa

SEQ ID NO: 2707769 - RNA, 16 nt, Human parainfluenza virus 3
aaagggauaguucaaa

SEQ ID NO: 2707770 - RNA, 16 nt, Human parainfluenza virus 3
aagauuacagaaagau

SEQ ID NO: 2707771 - RNA, 13 nt, Human parainfluenza virus 3
cgaugccaacaaa

SEQ ID NO: 2707772 - RNA, 23 nt, Human parainfluenza virus 3
uauuaaaaauaaaaaucccaaaa

SEQ ID NO: 2707773 - RNA, 18 nt, Human parainfluenza virus 3
gaaacucaaagaagcaau

SEQ ID NO: 2707774 - RNA, 19 nt, Human parainfluenza virus 3
agauacugcaucaaagaua

SEQ ID NO: 2707775 - RNA, 21 nt, Human parainfluenza virus 3
aucacacgaauguacaacaga

SEQ ID NO: 2707776 - RNA, 12 nt, Human parainfluenza virus 3
auuauaccagaa

SEQ ID NO: 2707777 - RNA, 19 nt, Human parainfluenza virus 3
caaaaucuaucaacacaca

SEQ ID NO: 2707778 - RNA, 20 nt, Human parainfluenza virus 3
uaucgacaugcaggaaauac

SEQ ID NO: 2707779 - RNA, 22 nt, Human parainfluenza virus 3
agccauauguacuaacaaacaa

SEQ ID NO: 2707780 - RNA, 16 nt, Human parainfluenza virus 3
guauaauccauucaaa

SEQ ID NO: 2707781 - RNA, 18 nt, Human parainfluenza virus 3
cauuagugaaauuacaau

SEQ ID NO: 2707782 - RNA, 16 nt, Human parainfluenza virus 3
auacuguaaacagaaa

SEQ ID NO: 2707783 - RNA, 22 nt, Human parainfluenza virus 3
uaucuuaaccuuuaucuuugag

SEQ ID NO: 2707784 - RNA, 12 nt, Human parainfluenza virus 3
gagcccaaggau

SEQ ID NO: 2707785 - RNA, 14 nt, Human parainfluenza virus 3
caaaaaaagcaaaa

SEQ ID NO: 2707786 - RNA, 23 nt, Human parainfluenza virus 3
aauaucauugacacaacagaugu

SEQ ID NO: 2707787 - RNA, 17 nt, Human parainfluenza virus 3
ucaaaaacaacaaccau

SEQ ID NO: 2707788 - RNA, 15 nt, Human parainfluenza virus 3
uaauaguagcaauca

SEQ ID NO: 2707789 - RNA, 23 nt, Human parainfluenza virus 3
uaauaacuguaaacucagacuug

SEQ ID NO: 2707790 - RNA, 19 nt, Human parainfluenza virus 3
auacaccaagaagaugaca

SEQ ID NO: 2707791 - RNA, 23 nt, Human parainfluenza virus 3
ucuaucaacacacacaaaaucaa

SEQ ID NO: 2707792 - RNA, 14 nt, Human parainfluenza virus 3
ugcaaguuaaauca

SEQ ID NO: 2707793 - RNA, 18 nt, Human parainfluenza virus 3
uacagaacaccaaaacaa

SEQ ID NO: 2707794 - RNA, 16 nt, Human parainfluenza virus 3
agaaagaccaaaauga

SEQ ID NO: 2707795 - RNA, 21 nt, Human parainfluenza virus 3
caaaaugacaagccauaugua

SEQ ID NO: 2707796 - RNA, 19 nt, Human parainfluenza virus 3
aaaauuaugacugagagag

SEQ ID NO: 2707797 - RNA, 13 nt, Human parainfluenza virus 3
cagacaagaaaca

SEQ ID NO: 2707798 - RNA, 15 nt, Human parainfluenza virus 3
aaauggaaaggaaag

SEQ ID NO: 2707799 - RNA, 19 nt, Human parainfluenza virus 3
cugaucuauuaaaaauaaa

SEQ ID NO: 2707800 - RNA, 23 nt, Human parainfluenza virus 3
uaccaagcagaguucuucucuug

SEQ ID NO: 2707801 - RNA, 20 nt, Human parainfluenza virus 3
gaaagacugguuuaagaaau

SEQ ID NO: 2707802 - RNA, 19 nt, Human parainfluenza virus 3
acaccgaacaaacagacaa

SEQ ID NO: 2707803 - RNA, 18 nt, Human parainfluenza virus 3
acaaguuuuaucagagac

SEQ ID NO: 2707804 - RNA, 19 nt, Human parainfluenza virus 3
auggaacgaaucaaagaca

SEQ ID NO: 2707805 - RNA, 18 nt, Human parainfluenza virus 3
ucgaaauggaacgaauca

SEQ ID NO: 2707806 - RNA, 16 nt, Human parainfluenza virus 3
auccacaucaaaacua

SEQ ID NO: 2707807 - RNA, 17 nt, Human parainfluenza virus 3
agaucaagcaauacaag

SEQ ID NO: 2707808 - RNA, 12 nt, Human parainfluenza virus 3
gaugacaaaaga

SEQ ID NO: 2707809 - RNA, 17 nt, Human parainfluenza virus 3
agaaaaugagauugaua

SEQ ID NO: 2707810 - RNA, 20 nt, Human parainfluenza virus 3
gaucaacuuauacaaaagaa

SEQ ID NO: 2707811 - RNA, 14 nt, Human parainfluenza virus 3
auaucacaaaacua

SEQ ID NO: 2707812 - RNA, 17 nt, Human parainfluenza virus 3
agcagaugucaaagaau

SEQ ID NO: 2707813 - RNA, 21 nt, Human parainfluenza virus 3
uagcaaccucagcacaaauca

SEQ ID NO: 2707814 - RNA, 15 nt, Human parainfluenza virus 3
uaauaaauucauaga

SEQ ID NO: 2707815 - RNA, 21 nt, Human parainfluenza virus 3
ggauagacaaaaaguaagaaa

SEQ ID NO: 2707816 - RNA, 19 nt, Human parainfluenza virus 3
acacaaaggggcaaacaga

SEQ ID NO: 2707817 - RNA, 12 nt, Human parainfluenza virus 3
ugauaacaacac

SEQ ID NO: 2707818 - RNA, 19 nt, Human parainfluenza virus 3
aucagggacacaaacaaag

SEQ ID NO: 2707819 - RNA, 15 nt, Human parainfluenza virus 3
ugacaaaagaauuaa

SEQ ID NO: 2707820 - RNA, 18 nt, Human parainfluenza virus 3
acacaaaaucaagcagaa

SEQ ID NO: 2707821 - RNA, 14 nt, Human parainfluenza virus 3
gaauuaacaaacau

SEQ ID NO: 2707822 - RNA, 16 nt, Human parainfluenza virus 3
uuaccacucaaaguca

SEQ ID NO: 2707823 - RNA, 21 nt, Human parainfluenza virus 3
accaagaagaugacaaaagaa

SEQ ID NO: 2707824 - RNA, 14 nt, Human parainfluenza virus 3
aucaaaacaaaaag

SEQ ID NO: 2707825 - RNA, 18 nt, Human parainfluenza virus 3
auggcacuguaucugaca

SEQ ID NO: 2707826 - RNA, 17 nt, Human parainfluenza virus 3
gcaaucagggacacaaa

SEQ ID NO: 2707827 - RNA, 15 nt, Human parainfluenza virus 3
gcuaucaaaauuagc

SEQ ID NO: 2707828 - RNA, 15 nt, Human parainfluenza virus 3
cagaauuaacaaaca

SEQ ID NO: 2707829 - RNA, 21 nt, Human parainfluenza virus 3
cauguguuauccgaaauggaa

SEQ ID NO: 2707830 - RNA, 23 nt, Human parainfluenza virus 3
caaggauagacaaaaaguaagaa

SEQ ID NO: 2707831 - RNA, 23 nt, Human parainfluenza virus 3
aucaaaccaacagaaacaaguga

SEQ ID NO: 2707832 - RNA, 21 nt, Human parainfluenza virus 3
uacagaacaccaaaacaacaa

SEQ ID NO: 2707833 - RNA, 14 nt, Human parainfluenza virus 3
uccacaucaaaagg

SEQ ID NO: 2707834 - RNA, 18 nt, Human parainfluenza virus 3
uaggagaaaucaaaacaa

SEQ ID NO: 2707835 - RNA, 13 nt, Human parainfluenza virus 3
aaccuuuaucuuu

SEQ ID NO: 2707836 - RNA, 19 nt, Human parainfluenza virus 3
agaucgaaccgaacagaca

SEQ ID NO: 2707837 - RNA, 19 nt, Human parainfluenza virus 3
aaugacauacaaaaugaga

SEQ ID NO: 2707838 - RNA, 14 nt, Human parainfluenza virus 3
acuguaaacagaaa

SEQ ID NO: 2707839 - RNA, 22 nt, Human parainfluenza virus 3
aucacagcggcgguugcucugg

SEQ ID NO: 2707840 - RNA, 14 nt, Human parainfluenza virus 3
gaacaagaaagaag

SEQ ID NO: 2707841 - RNA, 19 nt, Human parainfluenza virus 3
caauggacaacgacacaaa

SEQ ID NO: 2707842 - RNA, 13 nt, Human parainfluenza virus 3
agaaucaauaaag

SEQ ID NO: 2707843 - RNA, 22 nt, Human parainfluenza virus 3
aucugauuuaugcuuauaccuc

SEQ ID NO: 2707844 - RNA, 16 nt, Human parainfluenza virus 3
acaauuagaaaugaua

SEQ ID NO: 2707845 - RNA, 12 nt, Human parainfluenza virus 3
uguauaacagga

SEQ ID NO: 2707846 - RNA, 13 nt, Human parainfluenza virus 3
gacacaacagaug

SEQ ID NO: 2707847 - RNA, 20 nt, Human parainfluenza virus 3
agcgugcucggaaaauggac

SEQ ID NO: 2707848 - RNA, 14 nt, Human parainfluenza virus 3
aauuaggaauaauu

SEQ ID NO: 2707849 - RNA, 13 nt, Human parainfluenza virus 3
guuaagauuacag

SEQ ID NO: 2707850 - RNA, 17 nt, Human parainfluenza virus 3
gauaaauaugauaucua

SEQ ID NO: 2707851 - RNA, 22 nt, Human parainfluenza virus 3
gcagucauacucgcaggaacaa

SEQ ID NO: 2707852 - RNA, 23 nt, Human parainfluenza virus 3
aagaaacgacaccgaacaaacag

SEQ ID NO: 2707853 - RNA, 23 nt, Human parainfluenza virus 3
aaauugaaagaagaaaagaucaa

SEQ ID NO: 2707854 - RNA, 13 nt, Human parainfluenza virus 3
cuuccaaucagaa

SEQ ID NO: 2707855 - RNA, 22 nt, Human parainfluenza virus 3
agaccuaucggaaaacgacaca

SEQ ID NO: 2707856 - RNA, 15 nt, Human parainfluenza virus 3
cagaaauacagacag

SEQ ID NO: 2707857 - RNA, 23 nt, Human parainfluenza virus 3
agauauuaaguucauacaaugaa

SEQ ID NO: 2707858 - RNA, 12 nt, Human parainfluenza virus 3
cucaaaaacaac

SEQ ID NO: 2707859 - RNA, 16 nt, Human parainfluenza virus 3
agacaaaaaguaagaa

SEQ ID NO: 2707860 - RNA, 14 nt, Human parainfluenza virus 3
auauccagaaaugu

SEQ ID NO: 2707861 - RNA, 12 nt, Human parainfluenza virus 3
cagcaaucagac

SEQ ID NO: 2707862 - RNA, 15 nt, Human parainfluenza virus 3
caaacacuaaacaca

SEQ ID NO: 2707863 - RNA, 14 nt, Human parainfluenza virus 3
auuacugauuacag

SEQ ID NO: 2707864 - RNA, 17 nt, Human parainfluenza virus 3
ggccaucagaaacagaa

SEQ ID NO: 2707865 - RNA, 19 nt, Human parainfluenza virus 3
acacagauacaaaaugaaa

SEQ ID NO: 2707866 - RNA, 12 nt, Human parainfluenza virus 3
gagauaaaucaa

SEQ ID NO: 2707867 - RNA, 21 nt, Human parainfluenza virus 3
uuaaguucauacaaugaauca

SEQ ID NO: 2707868 - RNA, 22 nt, Human parainfluenza virus 3
ggauagacaaaaaguaagaaaa

SEQ ID NO: 2707869 - RNA, 14 nt, Human parainfluenza virus 3
cccaaggauagaca

SEQ ID NO: 2707870 - RNA, 14 nt, Human parainfluenza virus 3
uagauaucaaucaa

SEQ ID NO: 2707871 - RNA, 16 nt, Human parainfluenza virus 3
aagacacaaaagacaa

SEQ ID NO: 2707872 - RNA, 18 nt, Human parainfluenza virus 3
uauccacuaaaucccaca

SEQ ID NO: 2707873 - RNA, 20 nt, Human parainfluenza virus 3
uugaacauccaauaaaugag

SEQ ID NO: 2707874 - RNA, 12 nt, Human parainfluenza virus 3
auuccaaaauua

SEQ ID NO: 2707875 - RNA, 14 nt, Human parainfluenza virus 3
aucaaaaucuauca

SEQ ID NO: 2707876 - RNA, 23 nt, Human parainfluenza virus 3
ucaagaagugccgcaacaaagaa

SEQ ID NO: 2707877 - RNA, 22 nt, Human parainfluenza virus 3
uuacaaaaagcucgaaaugaga

SEQ ID NO: 2707878 - RNA, 14 nt, Human parainfluenza virus 3
ucaacuuauacaaa

SEQ ID NO: 2707879 - RNA, 20 nt, Human parainfluenza virus 3
ggaucaacuuauacaaaaga

SEQ ID NO: 2707880 - RNA, 23 nt, Human parainfluenza virus 3
gaaaagcaguaccccacauuaga

SEQ ID NO: 2707881 - RNA, 16 nt, Human parainfluenza virus 3
gacacaaaagacaaau

SEQ ID NO: 2707882 - RNA, 19 nt, Human parainfluenza virus 3
aaaguugaugaaagaucag

SEQ ID NO: 2707883 - RNA, 18 nt, Human parainfluenza virus 3
gcaaauaagggauaauca

SEQ ID NO: 2707884 - RNA, 22 nt, Human parainfluenza virus 3
uaagggauaaucaaaaacuuag

SEQ ID NO: 2707885 - RNA, 14 nt, Human parainfluenza virus 3
aucagauaaauggu

SEQ ID NO: 2707886 - RNA, 21 nt, Human parainfluenza virus 3
agcacuccuaaauacagaugu

SEQ ID NO: 2707887 - RNA, 14 nt, Human parainfluenza virus 3
cacaaaucacagcg

SEQ ID NO: 2707888 - RNA, 21 nt, Human parainfluenza virus 3
auagauaucaaucaauauaca

SEQ ID NO: 2707889 - RNA, 23 nt, Human parainfluenza virus 3
uacucauacaauugagaaagaac

SEQ ID NO: 2707890 - RNA, 20 nt, Human parainfluenza virus 3
agaaucuugguguaauucaa

SEQ ID NO: 2707891 - RNA, 15 nt, Human parainfluenza virus 3
acgaaucaaagacaa

SEQ ID NO: 2707892 - RNA, 17 nt, Human parainfluenza virus 3
gugaaauuacaauuaga

SEQ ID NO: 2707893 - RNA, 15 nt, Human parainfluenza virus 3
acuaaugaaaaauag

SEQ ID NO: 2707894 - RNA, 15 nt, Human parainfluenza virus 3
uagcaaucaaaucag

SEQ ID NO: 2707895 - RNA, 19 nt, Human parainfluenza virus 3
acacacaaaaucaagcaga

SEQ ID NO: 2707896 - RNA, 17 nt, Human parainfluenza virus 3
accaucuaucaaccaaa

SEQ ID NO: 2707897 - RNA, 17 nt, Human parainfluenza virus 3
cauacuuucaacauaaa

SEQ ID NO: 2707898 - RNA, 13 nt, Human parainfluenza virus 3
acucaaagucaau

SEQ ID NO: 2707899 - RNA, 22 nt, Human parainfluenza virus 3
caacagcaacugaaagaguaaa

SEQ ID NO: 2707900 - RNA, 19 nt, Human parainfluenza virus 3
cuggauccauaucaaaaac

SEQ ID NO: 2707901 - RNA, 12 nt, Human parainfluenza virus 3
auaccaagcaga

SEQ ID NO: 2707902 - RNA, 13 nt, Human parainfluenza virus 3
ucaagacaaacga

SEQ ID NO: 2707903 - RNA, 20 nt, Human parainfluenza virus 3
caaucagggacacaaacaaa

SEQ ID NO: 2707904 - RNA, 16 nt, Human parainfluenza virus 3
acagauacaaaaugaa

SEQ ID NO: 2707905 - RNA, 17 nt, Human parainfluenza virus 3
auacaaauaagaaaaac

SEQ ID NO: 2707906 - RNA, 16 nt, Human parainfluenza virus 3
aucaacuuauacaaaa

SEQ ID NO: 2707907 - RNA, 13 nt, Human parainfluenza virus 3
ugacaagaauaua

SEQ ID NO: 2707908 - RNA, 15 nt, Human parainfluenza virus 3
aauaaaacucaauaa

SEQ ID NO: 2707909 - RNA, 14 nt, Human parainfluenza virus 3
gucaaucauaauua

SEQ ID NO: 2707910 - RNA, 12 nt, Human parainfluenza virus 3
aagucaaaucaa

SEQ ID NO: 2707911 - RNA, 21 nt, Human parainfluenza virus 3
aucaacugacaaaaauagaca

SEQ ID NO: 2707912 - RNA, 18 nt, Human parainfluenza virus 3
agcagaucuaaagaaaau

SEQ ID NO: 2707913 - RNA, 18 nt, Human parainfluenza virus 3
cagaacaaaguagaaaca

SEQ ID NO: 2707914 - RNA, 16 nt, Human parainfluenza virus 3
aucugcaacacaacug

SEQ ID NO: 2707915 - RNA, 18 nt, Human parainfluenza virus 3
agcaaucagggacacaaa

SEQ ID NO: 2707916 - RNA, 15 nt, Human parainfluenza virus 3
gcagaguucuucucu

SEQ ID NO: 2707917 - RNA, 14 nt, Human parainfluenza virus 3
aucgagaaaaugag

SEQ ID NO: 2707918 - RNA, 14 nt, Human parainfluenza virus 3
caaaggauauuguu

SEQ ID NO: 2707919 - RNA, 13 nt, Human parainfluenza virus 3
ugacuuaggaaaa

SEQ ID NO: 2707920 - RNA, 14 nt, Human parainfluenza virus 3
cuggacauagaagu

SEQ ID NO: 2707921 - RNA, 16 nt, Human parainfluenza virus 3
aaucaaagagaacaac

SEQ ID NO: 2707922 - RNA, 13 nt, Human parainfluenza virus 3
uacagaacaccaa

SEQ ID NO: 2707923 - RNA, 17 nt, Human parainfluenza virus 3
caaucagggacacaaac

SEQ ID NO: 2707924 - RNA, 19 nt, Human parainfluenza virus 3
agauacugacaaccagaua

SEQ ID NO: 2707925 - RNA, 17 nt, Human parainfluenza virus 3
agccucaaaaaaugaug

SEQ ID NO: 2707926 - RNA, 19 nt, Human parainfluenza virus 3
ucagcaaucagacaaugga

SEQ ID NO: 2707927 - RNA, 13 nt, Human parainfluenza virus 3
gacaccgaacaaa

SEQ ID NO: 2707928 - RNA, 18 nt, Human parainfluenza virus 3
auccaaaaugaguauaac

SEQ ID NO: 2707929 - RNA, 15 nt, Human parainfluenza virus 3
acaaauaucacagaa

SEQ ID NO: 2707930 - RNA, 17 nt, Human parainfluenza virus 3
uaagaaaucaaaagaua

SEQ ID NO: 2707931 - RNA, 14 nt, Human parainfluenza virus 3
ugacaauaggaagu

SEQ ID NO: 2707932 - RNA, 12 nt, Human parainfluenza virus 3
cugcaacaccag

SEQ ID NO: 2707933 - RNA, 13 nt, Human parainfluenza virus 3
uaggacaaaagag

SEQ ID NO: 2707934 - RNA, 15 nt, Human parainfluenza virus 3
gaaucacauagaaga

SEQ ID NO: 2707935 - RNA, 19 nt, Human parainfluenza virus 3
agaaagaccaaaaugaauc

SEQ ID NO: 2707936 - RNA, 16 nt, Human parainfluenza virus 3
ccaaugauccaacaaa

SEQ ID NO: 2707937 - RNA, 14 nt, Human parainfluenza virus 3
uuacaaccauaauu

SEQ ID NO: 2707938 - RNA, 16 nt, Human parainfluenza virus 3
cuaauaguagcaauca

SEQ ID NO: 2707939 - RNA, 17 nt, Human parainfluenza virus 3
ucagggacacaaacaaa

SEQ ID NO: 2707940 - RNA, 15 nt, Human parainfluenza virus 3
gauaagaaagucaaa

SEQ ID NO: 2707941 - RNA, 13 nt, Human parainfluenza virus 3
cacuagacagaaa

SEQ ID NO: 2707942 - RNA, 15 nt, Human parainfluenza virus 3
acaauuagaaaugau

SEQ ID NO: 2707943 - RNA, 13 nt, Human parainfluenza virus 3
ccaugaucaaaac

SEQ ID NO: 2707944 - RNA, 22 nt, Human parainfluenza virus 3
gaaaacacuaaucccagaacaa

SEQ ID NO: 2707945 - RNA, 19 nt, Human parainfluenza virus 3
gaaguauuuauagcagaua

SEQ ID NO: 2707946 - RNA, 17 nt, Human parainfluenza virus 3
agacaaauggaaaggaa

SEQ ID NO: 2707947 - RNA, 20 nt, Human parainfluenza virus 3
aaauguacuaaacaauguag

SEQ ID NO: 2707948 - RNA, 21 nt, Human parainfluenza virus 3
gaagggacaaaaaaagcaaaa

SEQ ID NO: 2707949 - RNA, 16 nt, Human parainfluenza virus 3
auaaagauauaucuua

SEQ ID NO: 2707950 - RNA, 17 nt, Human parainfluenza virus 3
caacaucagacuacaga

SEQ ID NO: 2707951 - RNA, 23 nt, Human parainfluenza virus 3
gcuuaucaggaaacauaucccaa

SEQ ID NO: 2707952 - RNA, 21 nt, Human parainfluenza virus 3
ggauaucuacaaugauggaua

SEQ ID NO: 2707953 - RNA, 18 nt, Human parainfluenza virus 3
guauccacuaaaucccac

SEQ ID NO: 2707954 - RNA, 16 nt, Human parainfluenza virus 3
aaaugaauccaaugag

SEQ ID NO: 2707955 - RNA, 15 nt, Human parainfluenza virus 3
acacacacaaaauca

SEQ ID NO: 2707956 - RNA, 13 nt, Human parainfluenza virus 3
acuaaacacaaug

SEQ ID NO: 2707957 - RNA, 13 nt, Human parainfluenza virus 3
aaugcaacuggau

SEQ ID NO: 2707958 - RNA, 15 nt, Human parainfluenza virus 3
auacagacagaauca

SEQ ID NO: 2707959 - RNA, 23 nt, Human parainfluenza virus 3
uccaagauuaugucaacaaagaa

SEQ ID NO: 2707960 - RNA, 11 nt, Human parainfluenza virus 3
auagacugauc

SEQ ID NO: 2707961 - RNA, 16 nt, Human parainfluenza virus 3
agauauuuuuaaugaa

SEQ ID NO: 2707962 - RNA, 20 nt, Human parainfluenza virus 3
caaccaaaaaucaaaccaac

SEQ ID NO: 2707963 - RNA, 12 nt, Human parainfluenza virus 3
cacaauaucaau

SEQ ID NO: 2707964 - RNA, 20 nt, Human parainfluenza virus 3
aagaagcuuggaaucuauca

SEQ ID NO: 2707965 - RNA, 21 nt, Human parainfluenza virus 3
aaacaacaaccaucaacaccg

SEQ ID NO: 2707966 - RNA, 12 nt, Human parainfluenza virus 3
uugagcccaagg

SEQ ID NO: 2707967 - RNA, 18 nt, Human parainfluenza virus 3
guccaugguuuucagaua

SEQ ID NO: 2707968 - RNA, 14 nt, Human parainfluenza virus 3
accgaacaaacaga

SEQ ID NO: 2707969 - RNA, 21 nt, Human parainfluenza virus 3
accaaaaaaucugaucuauua

SEQ ID NO: 2707970 - RNA, 15 nt, Human parainfluenza virus 3
caacagaucaagcaa

SEQ ID NO: 2707971 - RNA, 15 nt, Human parainfluenza virus 3
ucaaaccaacagaaa

SEQ ID NO: 2707972 - RNA, 19 nt, Human parainfluenza virus 3
cagaauugguuuugauauu

SEQ ID NO: 2707973 - RNA, 14 nt, Human parainfluenza virus 3
gauccagaguuuaa

SEQ ID NO: 2707974 - RNA, 14 nt, Human parainfluenza virus 3
ucaaugaaauuaga

SEQ ID NO: 2707975 - RNA, 14 nt, Human parainfluenza virus 3
caauagauaucaau

SEQ ID NO: 2707976 - RNA, 18 nt, Human parainfluenza virus 3
gaugaagauaucacaaaa

SEQ ID NO: 2707977 - RNA, 17 nt, Human parainfluenza virus 3
aaagaguaaacgagcug

SEQ ID NO: 2707978 - RNA, 17 nt, Human parainfluenza virus 3
ucacaaagcacaaaaca

SEQ ID NO: 2707979 - RNA, 20 nt, Human parainfluenza virus 3
uugagcccaaggauagacaa

SEQ ID NO: 2707980 - RNA, 16 nt, Human parainfluenza virus 3
acagaagcaaaagaua

SEQ ID NO: 2707981 - RNA, 20 nt, Human parainfluenza virus 3
aaccuuuaucuuugagccca

SEQ ID NO: 2707982 - RNA, 18 nt, Human parainfluenza virus 3
caauuaggaauaauugau

SEQ ID NO: 2707983 - RNA, 21 nt, Human parainfluenza virus 3
uaaaucagaaaaguucaaaca

SEQ ID NO: 2707984 - RNA, 15 nt, Human parainfluenza virus 3
agcaggcaagaucag

SEQ ID NO: 2707985 - RNA, 21 nt, Human parainfluenza virus 3
auguauauugagaaacaauua

SEQ ID NO: 2707986 - RNA, 13 nt, Human parainfluenza virus 3
cuguacaauaaua

SEQ ID NO: 2707987 - RNA, 23 nt, Human parainfluenza virus 3
caauccaacucuacucauacaau

SEQ ID NO: 2707988 - RNA, 16 nt, Human parainfluenza virus 3
aauacccaaaaaagug

SEQ ID NO: 2707989 - RNA, 21 nt, Human parainfluenza virus 3
aacacucagaucuacaaagua

SEQ ID NO: 2707990 - RNA, 15 nt, Human parainfluenza virus 3
ggcaaacagaaauac

SEQ ID NO: 2707991 - RNA, 14 nt, Human parainfluenza virus 3
aaaauuacaaucua

SEQ ID NO: 2707992 - RNA, 17 nt, Human parainfluenza virus 3
aucaucaggaacacaau

SEQ ID NO: 2707993 - RNA, 13 nt, Human parainfluenza virus 3
aaaucaaacaaug

SEQ ID NO: 2707994 - RNA, 23 nt, Human parainfluenza virus 3
caacauuuugauccaaauuaaua

SEQ ID NO: 2707995 - RNA, 12 nt, Human parainfluenza virus 3
auuauauauacc

SEQ ID NO: 2707996 - RNA, 21 nt, Human parainfluenza virus 3
guacaccugauacaagaucaa

SEQ ID NO: 2707997 - RNA, 14 nt, Human parainfluenza virus 3
gaagaaaagaucaa

SEQ ID NO: 2707998 - RNA, 19 nt, Human parainfluenza virus 3
aaaaucaaaccaacagaaa

SEQ ID NO: 2707999 - RNA, 14 nt, Human parainfluenza virus 3
auucaucauaaaug

SEQ ID NO: 2708000 - RNA, 14 nt, Human parainfluenza virus 3
ugaugaagaagaaa

SEQ ID NO: 2708001 - RNA, 19 nt, Human parainfluenza virus 3
gaguuuauggagauuacag

SEQ ID NO: 2708002 - RNA, 14 nt, Human parainfluenza virus 3
aaauacuaaugaaa

SEQ ID NO: 2708003 - RNA, 16 nt, Human parainfluenza virus 3
ugauaacauaggauca

SEQ ID NO: 2708004 - RNA, 23 nt, Human parainfluenza virus 3
gcuugcaacucaaucaauagaga

SEQ ID NO: 2708005 - RNA, 17 nt, Human parainfluenza virus 3
caacuuauaaaucagau

SEQ ID NO: 2708006 - RNA, 18 nt, Human parainfluenza virus 3
augaucaaaacaaaauug

SEQ ID NO: 2708007 - RNA, 16 nt, Human parainfluenza virus 3
caaucacggaaaggau

SEQ ID NO: 2708008 - RNA, 12 nt, Human parainfluenza virus 3
cagacaaacaca

SEQ ID NO: 2708009 - RNA, 14 nt, Human parainfluenza virus 3
cacaaaaucaagca

SEQ ID NO: 2708010 - RNA, 19 nt, Human parainfluenza virus 3
caaaguagauuccauauca

SEQ ID NO: 2708011 - RNA, 20 nt, Human parainfluenza virus 3
acucaaacauugcaaaaaug

SEQ ID NO: 2708012 - RNA, 16 nt, Human parainfluenza virus 3
aguaagaaaaacaugu

SEQ ID NO: 2708013 - RNA, 13 nt, Human parainfluenza virus 3
auuauaaaugauc

SEQ ID NO: 2708014 - RNA, 18 nt, Human parainfluenza virus 3
gcuuaaacucaauuccaa

SEQ ID NO: 2708015 - RNA, 21 nt, Human parainfluenza virus 3
auugaaagaagaaaagaucaa

SEQ ID NO: 2708016 - RNA, 19 nt, Human parainfluenza virus 3
ucaacauaaaugacaauag

SEQ ID NO: 2708017 - RNA, 22 nt, Human parainfluenza virus 3
uagacucuuugcaaaaaugaca

SEQ ID NO: 2708018 - RNA, 20 nt, Human parainfluenza virus 3
acacaaaggggcaaacagaa

SEQ ID NO: 2708019 - RNA, 11 nt, Human parainfluenza virus 3
gagcccaagga

SEQ ID NO: 2708020 - RNA, 24 nt, Human parainfluenza virus 3
cagaucgaaccgaacagacaaaca

SEQ ID NO: 2708021 - RNA, 15 nt, Human parainfluenza virus 3
gucuuccaaucagaa

SEQ ID NO: 2708022 - RNA, 15 nt, Human parainfluenza virus 3
auagucucaaagaaa

SEQ ID NO: 2708023 - RNA, 22 nt, Human parainfluenza virus 3
acagaaacaagugagaaagaua

SEQ ID NO: 2708024 - RNA, 15 nt, Human parainfluenza virus 3
auccaacaaagaaac

SEQ ID NO: 2708025 - RNA, 19 nt, Human parainfluenza virus 3
accgaacagacaaacacaa

SEQ ID NO: 2708026 - RNA, 21 nt, Human parainfluenza virus 3
agcucaacaaggccaaaucag

SEQ ID NO: 2708027 - RNA, 21 nt, Human parainfluenza virus 3
gaaaacacagagagacugcaa

SEQ ID NO: 2708028 - RNA, 22 nt, Human parainfluenza virus 3
auuaacuaggcugcugaacacu

SEQ ID NO: 2708029 - RNA, 23 nt, Human parainfluenza virus 3
ugagaaacucaaagaagcaauca

SEQ ID NO: 2708030 - RNA, 16 nt, Human parainfluenza virus 3
gaacgaaucaaagaca

SEQ ID NO: 2708031 - RNA, 18 nt, Human parainfluenza virus 3
acacaaaauuaacacaga

SEQ ID NO: 2708032 - RNA, 21 nt, Human parainfluenza virus 3
aucaagaccaggaaacgauga

SEQ ID NO: 2708033 - RNA, 22 nt, Human parainfluenza virus 3
uucuaaaaauggaacccagaac

SEQ ID NO: 2708034 - RNA, 23 nt, Human parainfluenza virus 3
gaaucuaauaguagcaaucaaau

SEQ ID NO: 2708035 - RNA, 18 nt, Human parainfluenza virus 3
ggcaucuuucugccaaau

SEQ ID NO: 2708036 - RNA, 21 nt, Human parainfluenza virus 3
gauguauaacaggaguauaua

SEQ ID NO: 2708037 - RNA, 20 nt, Human parainfluenza virus 3
caaucaggaauccaaugaaa

SEQ ID NO: 2708038 - RNA, 22 nt, Human parainfluenza virus 3
uguaauauauauauaccaagca

SEQ ID NO: 2708039 - RNA, 22 nt, Human parainfluenza virus 3
aucucggauugaucaagagaaa

SEQ ID NO: 2708040 - RNA, 18 nt, Human parainfluenza virus 3
agaagauugauagaaaau

SEQ ID NO: 2708041 - RNA, 17 nt, Human parainfluenza virus 3
auuacaagaaaaaggaa

SEQ ID NO: 2708042 - RNA, 21 nt, Human parainfluenza virus 3
caacaagacuaauacccaaaa

SEQ ID NO: 2708043 - RNA, 13 nt, Human parainfluenza virus 3
aauauacaaauaa

SEQ ID NO: 2708044 - RNA, 16 nt, Human parainfluenza virus 3
gaaccauugcucuggg

SEQ ID NO: 2708045 - RNA, 18 nt, Human parainfluenza virus 3
uaaaaccuuuaaauccag

SEQ ID NO: 2708046 - RNA, 19 nt, Human parainfluenza virus 3
uauccugagugucaccuua

SEQ ID NO: 2708047 - RNA, 18 nt, Human parainfluenza virus 3
uauuaaguucauacaaug

SEQ ID NO: 2708048 - RNA, 22 nt, Human parainfluenza virus 3
caccauugauaacaacacagau

SEQ ID NO: 2708049 - RNA, 11 nt, Human parainfluenza virus 3
acaagcugcau

SEQ ID NO: 2708050 - RNA, 23 nt, Human parainfluenza virus 3
auggacacugaaucuaacaaugg

SEQ ID NO: 2708051 - RNA, 21 nt, Human parainfluenza virus 3
aaaaguaagaaaaacauguaa

SEQ ID NO: 2708052 - RNA, 18 nt, Human parainfluenza virus 3
cagaagcaaaagauagaa

SEQ ID NO: 2708053 - RNA, 17 nt, Human parainfluenza virus 3
caaaacaacaaaaccaa

SEQ ID NO: 2708054 - RNA, 13 nt, Human parainfluenza virus 3
aggcaaaauaaua

SEQ ID NO: 2708055 - RNA, 11 nt, Human parainfluenza virus 3
gggaugaagau

SEQ ID NO: 2708056 - RNA, 22 nt, Human parainfluenza virus 3
aguacaaaauauaaaaccagaa

SEQ ID NO: 2708057 - RNA, 17 nt, Human parainfluenza virus 3
gaauucagauacuaucc

SEQ ID NO: 2708058 - RNA, 23 nt, Human parainfluenza virus 3
gaacagucaaagcgaaagagaug

SEQ ID NO: 2708059 - RNA, 14 nt, Human parainfluenza virus 3
caacagaagcaaaa

SEQ ID NO: 2708060 - RNA, 23 nt, Human parainfluenza virus 3
ccaaauagauaucacaaaacuac

SEQ ID NO: 2708061 - RNA, 19 nt, Human parainfluenza virus 3
ccaagauuaugucaacaaa

SEQ ID NO: 2708062 - RNA, 14 nt, Human parainfluenza virus 3
aaguacagaacacc

SEQ ID NO: 2708063 - RNA, 23 nt, Human parainfluenza virus 3
aucacagcggcgguugcucuggu

SEQ ID NO: 2708064 - RNA, 23 nt, Human parainfluenza virus 3
auuaaaaaagggggaaaagggaa

SEQ ID NO: 2708065 - RNA, 15 nt, Human parainfluenza virus 3
caaaugcaacaagac

SEQ ID NO: 2708066 - RNA, 15 nt, Human parainfluenza virus 3
ucaagagaaaaauag

SEQ ID NO: 2708067 - RNA, 21 nt, Human parainfluenza virus 3
gacacaaaauuaacacagaua

SEQ ID NO: 2708068 - RNA, 16 nt, Human parainfluenza virus 3
caggagugaacacaag

SEQ ID NO: 2708069 - RNA, 20 nt, Human parainfluenza virus 3
gcaauuaugaucuuaaugaa

SEQ ID NO: 2708070 - RNA, 14 nt, Human parainfluenza virus 3
aagcugcaaccaaa

SEQ ID NO: 2708071 - RNA, 18 nt, Human parainfluenza virus 3
gcaaacacuaaacacaau

SEQ ID NO: 2708072 - RNA, 14 nt, Human parainfluenza virus 3
aucucaaaaacaac

SEQ ID NO: 2708073 - RNA, 15 nt, Human parainfluenza virus 3
agaaaucaaauggau

SEQ ID NO: 2708074 - RNA, 18 nt, Human parainfluenza virus 3
aggauacagaagagagca

SEQ ID NO: 2708075 - RNA, 14 nt, Human parainfluenza virus 3
agaucuacaaagua

SEQ ID NO: 2708076 - RNA, 17 nt, Human parainfluenza virus 3
gagcagaugucaaagaa

SEQ ID NO: 2708077 - RNA, 19 nt, Human parainfluenza virus 3
cauacuagacucacagaaa

SEQ ID NO: 2708078 - RNA, 15 nt, Human parainfluenza virus 3
aggaaucaagagaua

SEQ ID NO: 2708079 - RNA, 13 nt, Human parainfluenza virus 3
augucaacaaaga

SEQ ID NO: 2708080 - RNA, 16 nt, Human parainfluenza virus 3
aaagccauacagauga

SEQ ID NO: 2708081 - RNA, 17 nt, Human parainfluenza virus 3
uggaucaacugacaaaa

SEQ ID NO: 2708082 - RNA, 22 nt, Human parainfluenza virus 3
gaccaaaaugaauccaaugaga

SEQ ID NO: 2708083 - RNA, 15 nt, Human parainfluenza virus 3
agaagugagaagaac

SEQ ID NO: 2708084 - RNA, 14 nt, Human parainfluenza virus 3
uugcaacucaauca

SEQ ID NO: 2708085 - RNA, 19 nt, Human parainfluenza virus 3
ccgaacaaacagacaagaa

SEQ ID NO: 2708086 - RNA, 23 nt, Human parainfluenza virus 3
ugauaguaaccaaucaggaaucc

SEQ ID NO: 2708087 - RNA, 20 nt, Human parainfluenza virus 3
gccaaauagauaucacaaaa

SEQ ID NO: 2708088 - RNA, 19 nt, Human parainfluenza virus 3
ccgggaaaacacagagaga

SEQ ID NO: 2708089 - RNA, 15 nt, Human parainfluenza virus 3
uggcauaaugugcua

SEQ ID NO: 2708090 - RNA, 21 nt, Human parainfluenza virus 3
auaaugugcuaucaagaccag

SEQ ID NO: 2708091 - RNA, 12 nt, Human parainfluenza virus 3
ugaaagaagaaa

SEQ ID NO: 2708092 - RNA, 22 nt, Human parainfluenza virus 3
gcagaaucuugguguaauucaa

SEQ ID NO: 2708093 - RNA, 21 nt, Human parainfluenza virus 3
aucagagauauuaaguucaua

SEQ ID NO: 2708094 - RNA, 14 nt, Human parainfluenza virus 3
gaaauuaauaauau

SEQ ID NO: 2708095 - RNA, 12 nt, Human parainfluenza virus 3
auuaacacagau

SEQ ID NO: 2708096 - RNA, 23 nt, Human parainfluenza virus 3
guuacaaaguuuguggcucugga

SEQ ID NO: 2708097 - RNA, 15 nt, Human parainfluenza virus 3
auuauuuacagaauc

SEQ ID NO: 2708098 - RNA, 19 nt, Human parainfluenza virus 3
uuaaaaauaaaaaucccaa

SEQ ID NO: 2708099 - RNA, 15 nt, Human parainfluenza virus 3
auuccaaaaagcugc

SEQ ID NO: 2708100 - RNA, 14 nt, Human parainfluenza virus 3
aagauuacagaaag

SEQ ID NO: 2708101 - RNA, 21 nt, Human parainfluenza virus 3
acugagagaggaggaaagaaa

SEQ ID NO: 2708102 - RNA, 19 nt, Human parainfluenza virus 3
acuaauacccaaaaaagug

SEQ ID NO: 2708103 - RNA, 15 nt, Human parainfluenza virus 3
aauacaauaaagaua

SEQ ID NO: 2708104 - RNA, 18 nt, Human parainfluenza virus 3
aacuucgaaacaagauau

SEQ ID NO: 2708105 - RNA, 16 nt, Human parainfluenza virus 3
acacaaucaacacaag

SEQ ID NO: 2708106 - RNA, 18 nt, Human parainfluenza virus 3
acaccaagaagaugacaa

SEQ ID NO: 2708107 - RNA, 14 nt, Human parainfluenza virus 3
aauuauauaccaau

SEQ ID NO: 2708108 - RNA, 19 nt, Human parainfluenza virus 3
acaucaaaagggcagaaga

SEQ ID NO: 2708109 - RNA, 22 nt, Human parainfluenza virus 3
agagucauguccagaauuauau

SEQ ID NO: 2708110 - RNA, 17 nt, Human parainfluenza virus 3
gcaaauguacuaaacaa

SEQ ID NO: 2708111 - RNA, 22 nt, Human parainfluenza virus 3
uggaauauaagugcaugugcua

SEQ ID NO: 2708112 - RNA, 15 nt, Human parainfluenza virus 3
cagaugauauaacau

SEQ ID NO: 2708113 - RNA, 22 nt, Human parainfluenza virus 3
aaucagggacacaaacaaagca

SEQ ID NO: 2708114 - RNA, 19 nt, Human parainfluenza virus 3
auaaccuuguucaaaauuc

SEQ ID NO: 2708115 - RNA, 15 nt, Human parainfluenza virus 3
aucuuugagcccaag

SEQ ID NO: 2708116 - RNA, 18 nt, Human parainfluenza virus 3
caaacccaagacacaaaa

SEQ ID NO: 2708117 - RNA, 12 nt, Human parainfluenza virus 3
caaaauuacaau

SEQ ID NO: 2708118 - RNA, 18 nt, Human parainfluenza virus 3
ugcuguucgaugccaaca

SEQ ID NO: 2708119 - RNA, 20 nt, Human parainfluenza virus 3
ucuauuauuuacagaaucaa

SEQ ID NO: 2708120 - RNA, 15 nt, Human parainfluenza virus 3
uagauccaaaauuac

SEQ ID NO: 2708121 - RNA, 16 nt, Human parainfluenza virus 3
auacaaguauaugaua

SEQ ID NO: 2708122 - RNA, 15 nt, Human parainfluenza virus 3
caugaucaaaacaaa

SEQ ID NO: 2708123 - RNA, 19 nt, Human parainfluenza virus 3
cuuaaaauuaugacugaga

SEQ ID NO: 2708124 - RNA, 22 nt, Human parainfluenza virus 3
aaagggaugaagauaucacaaa

SEQ ID NO: 2708125 - RNA, 18 nt, Human parainfluenza virus 3
cacaacucccccaacaac

SEQ ID NO: 2708126 - RNA, 15 nt, Human parainfluenza virus 3
caaagaauaacacau

SEQ ID NO: 2708127 - RNA, 11 nt, Human parainfluenza virus 3
accaucuauca

SEQ ID NO: 2708128 - RNA, 17 nt, Human parainfluenza virus 3
auuaaccauaauaugca

SEQ ID NO: 2708129 - RNA, 19 nt, Human parainfluenza virus 3
auuucaaaucuuaaaauua

SEQ ID NO: 2708130 - RNA, 23 nt, Human parainfluenza virus 3
ccugguauuaacaguaaagugac

SEQ ID NO: 2708131 - RNA, 16 nt, Human parainfluenza virus 3
acagucccaaagggau

SEQ ID NO: 2708132 - RNA, 20 nt, Human parainfluenza virus 3
agauagaacauauagucaaa

SEQ ID NO: 2708133 - RNA, 19 nt, Human parainfluenza virus 3
gaucuauuaaaaauaaaaa

SEQ ID NO: 2708134 - RNA, 12 nt, Human parainfluenza virus 3
cauuauauuguu

SEQ ID NO: 2708135 - RNA, 13 nt, Human parainfluenza virus 3
aacaauguagaua

SEQ ID NO: 2708136 - RNA, 20 nt, Human parainfluenza virus 3
cuguucgaugccaacaaagu

SEQ ID NO: 2708137 - RNA, 21 nt, Human parainfluenza virus 3
gaacuaauaaucucuacuuca

SEQ ID NO: 2708138 - RNA, 12 nt, Human parainfluenza virus 3
ucgcaaaaggag

SEQ ID NO: 2708139 - RNA, 20 nt, Human parainfluenza virus 3
ucggaaaacgacacaaucaa

SEQ ID NO: 2708140 - RNA, 15 nt, Human parainfluenza virus 3
ggaacgaaucaaaga

SEQ ID NO: 2708141 - RNA, 14 nt, Human parainfluenza virus 3
uuaauuucaaaucu

SEQ ID NO: 2708142 - RNA, 14 nt, Human parainfluenza virus 3
cacaaauaucacag

SEQ ID NO: 2708143 - RNA, 16 nt, Human parainfluenza virus 3
ccucaguuagaugagg

SEQ ID NO: 2708144 - RNA, 22 nt, Human parainfluenza virus 3
auaccaagcagaguucuucucu

SEQ ID NO: 2708145 - RNA, 15 nt, Human parainfluenza virus 3
uuccaucaauaguga

SEQ ID NO: 2708146 - RNA, 22 nt, Human parainfluenza virus 3
auccaugaucaaaacaaaauug

SEQ ID NO: 2708147 - RNA, 17 nt, Human parainfluenza virus 3
uuaggauuaaagaauaa

SEQ ID NO: 2708148 - RNA, 12 nt, Human parainfluenza virus 3
caugaaauggag

SEQ ID NO: 2708149 - RNA, 20 nt, Human parainfluenza virus 3
acauucauguccaaauggau

SEQ ID NO: 2708150 - RNA, 15 nt, Human parainfluenza virus 3
agaagaacagucaaa

SEQ ID NO: 2708151 - RNA, 19 nt, Human parainfluenza virus 3
gaacaccaaaacaacaaaa

SEQ ID NO: 2708152 - RNA, 18 nt, Human parainfluenza virus 3
ccauauguacuaacaaac

SEQ ID NO: 2708153 - RNA, 15 nt, Human parainfluenza virus 3
gaaucaaagacaaau

SEQ ID NO: 2708154 - RNA, 15 nt, Human parainfluenza virus 3
ucaaugaacagagaa

SEQ ID NO: 2708155 - RNA, 20 nt, Human parainfluenza virus 3
acaacagaacaaaguagaaa

SEQ ID NO: 2708156 - RNA, 13 nt, Human parainfluenza virus 3
caaguaugauaug

SEQ ID NO: 2708157 - RNA, 14 nt, Human parainfluenza virus 3
aaaacuacagcaug

SEQ ID NO: 2708158 - RNA, 23 nt, Human parainfluenza virus 3
guuacugcugcaacaccagauga

SEQ ID NO: 2708159 - RNA, 16 nt, Human parainfluenza virus 3
aauacuguaaacagaa

SEQ ID NO: 2708160 - RNA, 20 nt, Human parainfluenza virus 3
aucacgucauuaauuucaaa

SEQ ID NO: 2708161 - RNA, 14 nt, Human parainfluenza virus 3
aauuagaaaugaua

SEQ ID NO: 2708162 - RNA, 20 nt, Human parainfluenza virus 3
ccaaauagauaucacaaaac

SEQ ID NO: 2708163 - RNA, 14 nt, Human parainfluenza virus 3
ucuuaaccuuuauc

SEQ ID NO: 2708164 - RNA, 17 nt, Human parainfluenza virus 3
acacaaaauuaacacag

SEQ ID NO: 2708165 - RNA, 18 nt, Human parainfluenza virus 3
aacauccaauaaaugaga

SEQ ID NO: 2708166 - RNA, 15 nt, Human parainfluenza virus 3
cuagauuuauaucaa

SEQ ID NO: 2708167 - RNA, 17 nt, Human parainfluenza virus 3
aaauguucaaauuauau

SEQ ID NO: 2708168 - RNA, 12 nt, Human parainfluenza virus 3
auccaacaaaga

SEQ ID NO: 2708169 - RNA, 13 nt, Human parainfluenza virus 3
gaugaugaagaag

SEQ ID NO: 2708170 - RNA, 15 nt, Human parainfluenza virus 3
uguacaacagaagca

SEQ ID NO: 2708171 - RNA, 14 nt, Human parainfluenza virus 3
ugaaguguacaaua

SEQ ID NO: 2708172 - RNA, 15 nt, Human parainfluenza virus 3
uauaccaagcagagu

SEQ ID NO: 2708173 - RNA, 21 nt, Human parainfluenza virus 3
aaucugaucuauuaaaaauaa

SEQ ID NO: 2708174 - RNA, 22 nt, Human parainfluenza virus 3
acuaggcuucuucgaaauggaa

SEQ ID NO: 2708175 - RNA, 19 nt, Human parainfluenza virus 3
aagaccaaaaugaauccaa

SEQ ID NO: 2708176 - RNA, 15 nt, Human parainfluenza virus 3
ucaauauacaaauaa

SEQ ID NO: 2708177 - RNA, 19 nt, Human parainfluenza virus 3
cacgaauguacaacagaag

SEQ ID NO: 2708178 - RNA, 12 nt, Human parainfluenza virus 3
ccagccauauca

SEQ ID NO: 2708179 - RNA, 19 nt, Human parainfluenza virus 3
uauaucaaaaguucacaca

SEQ ID NO: 2708180 - RNA, 22 nt, Human parainfluenza virus 3
aauugguuuugauauuagauaa

SEQ ID NO: 2708181 - RNA, 16 nt, Human parainfluenza virus 3
gaagaggaaucaagag

SEQ ID NO: 2708182 - RNA, 23 nt, Human parainfluenza virus 3
cuugcaacucaaucaauagagag

SEQ ID NO: 2708183 - RNA, 13 nt, Human parainfluenza virus 3
uuaauuauaaaug

SEQ ID NO: 2708184 - RNA, 15 nt, Human parainfluenza virus 3
cauagaagauugaua

SEQ ID NO: 2708185 - RNA, 17 nt, Human parainfluenza virus 3
aaguuacgcaauccaac

SEQ ID NO: 2708186 - RNA, 17 nt, Human parainfluenza virus 3
gaacagacaaacacaac

SEQ ID NO: 2708187 - RNA, 21 nt, Human parainfluenza virus 3
ccauuaagccgaagcaaauaa

SEQ ID NO: 2708188 - RNA, 12 nt, Human parainfluenza virus 3
ccagaacaaaac

SEQ ID NO: 2708189 - RNA, 21 nt, Human parainfluenza virus 3
ugucccgggaaaacacagaga

SEQ ID NO: 2708190 - RNA, 12 nt, Human parainfluenza virus 3
gaucaagagaaa

SEQ ID NO: 2708191 - RNA, 14 nt, Human parainfluenza virus 3
acugagaaagugaa

SEQ ID NO: 2708192 - RNA, 14 nt, Human parainfluenza virus 3
agaaugaaacaaua

SEQ ID NO: 2708193 - RNA, 14 nt, Human parainfluenza virus 3
aggauaaaauggac

SEQ ID NO: 2708194 - RNA, 22 nt, Human parainfluenza virus 3
gacaaauggaaaggaaaggaag

SEQ ID NO: 2708195 - RNA, 14 nt, Human parainfluenza virus 3
aaugucaaaagaaa

SEQ ID NO: 2708196 - RNA, 14 nt, Human parainfluenza virus 3
ugaaacaauagaua

SEQ ID NO: 2708197 - RNA, 21 nt, Human parainfluenza virus 3
ucauauauaaacgaacucaaa

SEQ ID NO: 2708198 - RNA, 15 nt, Human parainfluenza virus 3
ggcgguugcucuggu

SEQ ID NO: 2708199 - RNA, 22 nt, Human parainfluenza virus 3
auuaauggacauguucaaugaa

SEQ ID NO: 2708200 - RNA, 22 nt, Human parainfluenza virus 3
aagaaaucaaaagauacugaca

SEQ ID NO: 2708201 - RNA, 22 nt, Human parainfluenza virus 3
aagacugguuuaagaaaucaaa

SEQ ID NO: 2708202 - RNA, 19 nt, Human parainfluenza virus 3
uuaauaauaaauaagaaaa

SEQ ID NO: 2708203 - RNA, 16 nt, Human parainfluenza virus 3
gaaaagaucaagaaaa

SEQ ID NO: 2708204 - RNA, 17 nt, Human parainfluenza virus 3
auaaagcauuaucucca

SEQ ID NO: 2708205 - RNA, 14 nt, Human parainfluenza virus 3
agaugacaaaagaa

SEQ ID NO: 2708206 - RNA, 16 nt, Human parainfluenza virus 3
gacaauuuauaugaaa

SEQ ID NO: 2708207 - RNA, 13 nt, Human parainfluenza virus 3
ugguuuaagaaau

SEQ ID NO: 2708208 - RNA, 17 nt, Human parainfluenza virus 3
ggaaugaccaggaauua

SEQ ID NO: 2708209 - RNA, 16 nt, Human parainfluenza virus 3
gagaaacucaaagaag

SEQ ID NO: 2708210 - RNA, 19 nt, Human parainfluenza virus 3
acaaaacuucgaaacaaga

SEQ ID NO: 2708211 - RNA, 14 nt, Human parainfluenza virus 3
auacaauaaagaua

SEQ ID NO: 2708212 - RNA, 17 nt, Human parainfluenza virus 3
uggauauacaacaacaa

SEQ ID NO: 2708213 - RNA, 16 nt, Human parainfluenza virus 3
aucaaaugcaacaaga

SEQ ID NO: 2708214 - RNA, 18 nt, Human parainfluenza virus 3
auacugcaucaaagauag

SEQ ID NO: 2708215 - RNA, 15 nt, Human parainfluenza virus 3
ucaaaacaaaauuga

SEQ ID NO: 2708216 - RNA, 13 nt, Human parainfluenza virus 3
acuguaaacagaa

SEQ ID NO: 2708217 - RNA, 15 nt, Human parainfluenza virus 3
auacaguacaaaaua

SEQ ID NO: 2708218 - RNA, 23 nt, Human parainfluenza virus 3
gcuucaucaguagagauuacaag

SEQ ID NO: 2708219 - RNA, 17 nt, Human parainfluenza virus 3
aaagaggucaacaccaa

SEQ ID NO: 2708220 - RNA, 21 nt, Human parainfluenza virus 3
acaccaagaagaugacaaaag

SEQ ID NO: 2708221 - RNA, 16 nt, Human parainfluenza virus 3
cacugaaucuaacaau

SEQ ID NO: 2708222 - RNA, 12 nt, Human parainfluenza virus 3
auaaaucagaaa

SEQ ID NO: 2708223 - RNA, 17 nt, Human parainfluenza virus 3
aacgaacucaaacauug

SEQ ID NO: 2708224 - RNA, 16 nt, Human parainfluenza virus 3
cuaucaacacacacaa

SEQ ID NO: 2708225 - RNA, 19 nt, Human parainfluenza virus 3
agauauccagaaaugucaa

SEQ ID NO: 2708226 - RNA, 16 nt, Human parainfluenza virus 3
aacaucaacaguugau

SEQ ID NO: 2708227 - RNA, 18 nt, Human parainfluenza virus 3
caaugaaauuagaaagau

SEQ ID NO: 2708228 - RNA, 12 nt, Human parainfluenza virus 3
gaccaacagauc

SEQ ID NO: 2708229 - RNA, 20 nt, Human parainfluenza virus 3
caucaaaagggcagaagaaa

SEQ ID NO: 2708230 - RNA, 15 nt, Human parainfluenza virus 3
cgaacagacaaacac

SEQ ID NO: 2708231 - RNA, 15 nt, Human parainfluenza virus 3
caguuauaagcaaca

SEQ ID NO: 2708232 - RNA, 17 nt, Human parainfluenza virus 3
auaaaaucuuagauauu

SEQ ID NO: 2708233 - RNA, 14 nt, Human parainfluenza virus 3
aauauacaaauaag

SEQ ID NO: 2708234 - RNA, 20 nt, Human parainfluenza virus 3
uagauacugcaucaaagaua

SEQ ID NO: 2708235 - RNA, 17 nt, Human parainfluenza virus 3
gauauuacugauuacag

SEQ ID NO: 2708236 - RNA, 13 nt, Human parainfluenza virus 3
aaucaaagagaac

SEQ ID NO: 2708237 - RNA, 12 nt, Human parainfluenza virus 3
uaggacaaagaa

SEQ ID NO: 2708238 - RNA, 19 nt, Human parainfluenza virus 3
gcacuccuaaauacagaug

SEQ ID NO: 2708239 - RNA, 17 nt, Human parainfluenza virus 3
caacuggauccauauca

SEQ ID NO: 2708240 - RNA, 23 nt, Human parainfluenza virus 3
ggcacuguaucugacauacucua

SEQ ID NO: 2708241 - RNA, 22 nt, Human parainfluenza virus 3
gcagaaugaaacaauagauauc

SEQ ID NO: 2708242 - RNA, 21 nt, Human parainfluenza virus 3
aucugcagguacauaucaaaa

SEQ ID NO: 2708243 - RNA, 22 nt, Human parainfluenza virus 3
acacaagggauugacaagaaua

SEQ ID NO: 2708244 - RNA, 21 nt, Human parainfluenza virus 3
ucagauauugagaaacucaaa

SEQ ID NO: 2708245 - RNA, 16 nt, Human parainfluenza virus 3
uugggaaaaucaaaca

SEQ ID NO: 2708246 - RNA, 22 nt, Human parainfluenza virus 3
ggccaucagaaacagaacacuc

SEQ ID NO: 2708247 - RNA, 23 nt, Human parainfluenza virus 3
cauauaguagaaauaaaucagaa

SEQ ID NO: 2708248 - RNA, 15 nt, Human parainfluenza virus 3
augaagaagaaauac

SEQ ID NO: 2708249 - RNA, 20 nt, Human parainfluenza virus 3
aguuuauggagauuacagaa

SEQ ID NO: 2708250 - RNA, 17 nt, Human parainfluenza virus 3
uuaaccuaucuauaaua

SEQ ID NO: 2708251 - RNA, 13 nt, Human parainfluenza virus 3
agauuaugucaac

SEQ ID NO: 2708252 - RNA, 21 nt, Human parainfluenza virus 3
agaaacagugaucauggaaga

SEQ ID NO: 2708253 - RNA, 19 nt, Human parainfluenza virus 3
uaaaacucaauaaauuaga

SEQ ID NO: 2708254 - RNA, 15 nt, Human parainfluenza virus 3
cugguauucaaaagg

SEQ ID NO: 2708255 - RNA, 15 nt, Human parainfluenza virus 3
cauugcuacaagaaa

SEQ ID NO: 2708256 - RNA, 17 nt, Human parainfluenza virus 3
gaagaaaagaucaagaa

SEQ ID NO: 2708257 - RNA, 14 nt, Human parainfluenza virus 3
aacaaacaaauaac

SEQ ID NO: 2708258 - RNA, 19 nt, Human parainfluenza virus 3
agauuuauaucaagacaaa

SEQ ID NO: 2708259 - RNA, 15 nt, Human parainfluenza virus 3
gaaagaaagaccaaa

SEQ ID NO: 2708260 - RNA, 17 nt, Human parainfluenza virus 3
gaaaacacuaaucccag

SEQ ID NO: 2708261 - RNA, 17 nt, Human parainfluenza virus 3
auuauccuuaauucaaa

SEQ ID NO: 2708262 - RNA, 21 nt, Human parainfluenza virus 3
agcaaucagggacacaaacaa

SEQ ID NO: 2708263 - RNA, 23 nt, Human parainfluenza virus 3
caaaauuagccucaaaaaaugau

SEQ ID NO: 2708264 - RNA, 19 nt, Human parainfluenza virus 3
caggaaauacacuagagaa

SEQ ID NO: 2708265 - RNA, 21 nt, Human parainfluenza virus 3
gagagcaaucgauuuacagag

SEQ ID NO: 2708266 - RNA, 21 nt, Human parainfluenza virus 3
agaacauauagucaaaugacu

SEQ ID NO: 2708267 - RNA, 14 nt, Human parainfluenza virus 3
auacuagacucaca

SEQ ID NO: 2708268 - RNA, 13 nt, Human parainfluenza virus 3
agggcagaagaaa

SEQ ID NO: 2708269 - RNA, 16 nt, Human parainfluenza virus 3
acauugcaaaaaugau

SEQ ID NO: 2708270 - RNA, 23 nt, Human parainfluenza virus 3
agagacacuacuugcaaauaaua

SEQ ID NO: 2708271 - RNA, 16 nt, Human parainfluenza virus 3
caccauugauaacaac

SEQ ID NO: 2708272 - RNA, 13 nt, Human parainfluenza virus 3
ucaagaaaacuag

SEQ ID NO: 2708273 - RNA, 17 nt, Human parainfluenza virus 3
uacaaaauauaaaacca

SEQ ID NO: 2708274 - RNA, 20 nt, Human parainfluenza virus 3
ugaccuuaaaaccuacaaua

SEQ ID NO: 2708275 - RNA, 23 nt, Human parainfluenza virus 3
cagaaaaucgagaaaaugagauu

SEQ ID NO: 2708276 - RNA, 18 nt, Human parainfluenza virus 3
accuuuaucuuugagccc

SEQ ID NO: 2708277 - RNA, 17 nt, Human parainfluenza virus 3
cuucgaaacaagauauu

SEQ ID NO: 2708278 - RNA, 17 nt, Human parainfluenza virus 3
uuuaagaaaucaaaaga

SEQ ID NO: 2708279 - RNA, 17 nt, Human parainfluenza virus 3
acaagaucuacaaguug

SEQ ID NO: 2708280 - RNA, 18 nt, Human parainfluenza virus 3
gauagaaaaucaaagaga

SEQ ID NO: 2708281 - RNA, 22 nt, Human parainfluenza virus 3
aucuaucaacacacacaaaauc

SEQ ID NO: 2708282 - RNA, 11 nt, Human parainfluenza virus 3
uaccaagcaga

SEQ ID NO: 2708283 - RNA, 16 nt, Human parainfluenza virus 3
cucacaaagcacaaaa

SEQ ID NO: 2708284 - RNA, 21 nt, Human parainfluenza virus 3
agagauauuaaguucauacaa

SEQ ID NO: 2708285 - RNA, 12 nt, Human parainfluenza virus 3
guagcaaucaaa

SEQ ID NO: 2708286 - RNA, 12 nt, Human parainfluenza virus 3
aaacagaacacu

SEQ ID NO: 2708287 - RNA, 19 nt, Human parainfluenza virus 3
aucagaaaucuaagaaauu

SEQ ID NO: 2708288 - RNA, 19 nt, Human parainfluenza virus 3
caaaguuuguggcucugga

SEQ ID NO: 2708289 - RNA, 22 nt, Human parainfluenza virus 3
aagaaacgacaccgaacaaaca

SEQ ID NO: 2708290 - RNA, 17 nt, Human parainfluenza virus 3
aagucaaugaacagaga

SEQ ID NO: 2708291 - RNA, 16 nt, Human parainfluenza virus 3
cauccaauaaaugaga

SEQ ID NO: 2708292 - RNA, 14 nt, Human parainfluenza virus 3
gaggaaucaagaga

SEQ ID NO: 2708293 - RNA, 18 nt, Human parainfluenza virus 3
ccaagcagaguucuucuc

SEQ ID NO: 2708294 - RNA, 13 nt, Human parainfluenza virus 3
aacaagugagaaa

SEQ ID NO: 2708295 - RNA, 22 nt, Human parainfluenza virus 3
agcaaucagggacacaaacaaa

SEQ ID NO: 2708296 - RNA, 13 nt, Human parainfluenza virus 3
gaagaagaaauac

SEQ ID NO: 2708297 - RNA, 20 nt, Human parainfluenza virus 3
uaucggaaaacgacacaauc

SEQ ID NO: 2708298 - RNA, 14 nt, Human parainfluenza virus 3
acaaucaacacaag

SEQ ID NO: 2708299 - RNA, 20 nt, Human parainfluenza virus 3
gacaauuuauaugaaagaua

SEQ ID NO: 2708300 - RNA, 15 nt, Human parainfluenza virus 3
uaucuuugagcccaa

SEQ ID NO: 2708301 - RNA, 16 nt, Human parainfluenza virus 3
aaugacaauaggaagu

SEQ ID NO: 2708302 - RNA, 12 nt, Human parainfluenza virus 3
aaucaaauggau

SEQ ID NO: 2708303 - RNA, 24 nt, Human parainfluenza virus 3
ucuggauccaaacccaagacacaa

SEQ ID NO: 2708304 - RNA, 15 nt, Human parainfluenza virus 3
caauacaaacaaaga

SEQ ID NO: 2708305 - RNA, 23 nt, Human parainfluenza virus 3
guacagaacaccaaaacaacaaa

SEQ ID NO: 2708306 - RNA, 19 nt, Human parainfluenza virus 3
agauauugagaaacucaaa

SEQ ID NO: 2708307 - RNA, 10 nt, Human parainfluenza virus 3
gagcccaagg

SEQ ID NO: 2708308 - RNA, 13 nt, Human parainfluenza virus 3
ucccaaaagagac

SEQ ID NO: 2708309 - RNA, 13 nt, Human parainfluenza virus 3
ggauauaggaaaa

SEQ ID NO: 2708310 - RNA, 13 nt, Human parainfluenza virus 3
auaagaaaaacuu

SEQ ID NO: 2708311 - RNA, 19 nt, Human parainfluenza virus 3
uucgaaauggaacgaauca

SEQ ID NO: 2708312 - RNA, 12 nt, Human parainfluenza virus 3
cagaugaugaag

SEQ ID NO: 2708313 - RNA, 23 nt, Human parainfluenza virus 3
gacacaagggauugacaagaaua

SEQ ID NO: 2708314 - RNA, 16 nt, Human parainfluenza virus 3
ucaagagauaaaucaa

SEQ ID NO: 2708315 - RNA, 20 nt, Human parainfluenza virus 3
gaaaaaggaauaaaauuaca

SEQ ID NO: 2708316 - RNA, 14 nt, Human parainfluenza virus 3
aauuauaaaugauc

SEQ ID NO: 2708317 - RNA, 18 nt, Human parainfluenza virus 3
aucucuacccaacacaau

SEQ ID NO: 2708318 - RNA, 12 nt, Human parainfluenza virus 3
augaugaagaag

SEQ ID NO: 2708319 - RNA, 12 nt, Human parainfluenza virus 3
cucaaaaaauac

SEQ ID NO: 2708320 - RNA, 16 nt, Human parainfluenza virus 3
gaaaaucaaacaaugg

SEQ ID NO: 2708321 - RNA, 12 nt, Human parainfluenza virus 3
cagaacaccaaa

SEQ ID NO: 2708322 - RNA, 18 nt, Human parainfluenza virus 3
gaaauuaauaauauauca

SEQ ID NO: 2708323 - RNA, 15 nt, Human parainfluenza virus 3
agucuucaugucaau

SEQ ID NO: 2708324 - RNA, 22 nt, Human parainfluenza virus 3
acuguacagagaggaccuggga

SEQ ID NO: 2708325 - RNA, 14 nt, Human parainfluenza virus 3
uagauacugcauca

SEQ ID NO: 2708326 - RNA, 20 nt, Human parainfluenza virus 3
gcaacaccagaugaugaaga

SEQ ID NO: 2708327 - RNA, 17 nt, Human parainfluenza virus 3
aaaaguaagaaaaacau

SEQ ID NO: 2708328 - RNA, 17 nt, Human parainfluenza virus 3
aauuaaguauuacagaa

SEQ ID NO: 2708329 - RNA, 12 nt, Human parainfluenza virus 3
aaaaggaaaaua

SEQ ID NO: 2708330 - RNA, 21 nt, Human parainfluenza virus 3
aaaaagugagcaguacaauga

SEQ ID NO: 2708331 - RNA, 14 nt, Human parainfluenza virus 3
aaacauaucccaau

SEQ ID NO: 2708332 - RNA, 16 nt, Human parainfluenza virus 3
uauaccaagcagaguu

SEQ ID NO: 2708333 - RNA, 14 nt, Human parainfluenza virus 3
cgaaucaaagacaa

SEQ ID NO: 2708334 - RNA, 15 nt, Human parainfluenza virus 3
agggcgaaaaaucac

SEQ ID NO: 2708335 - RNA, 13 nt, Human parainfluenza virus 3
caacaccaacaac

SEQ ID NO: 2708336 - RNA, 14 nt, Human parainfluenza virus 3
ugauagaaaaucaa

SEQ ID NO: 2708337 - RNA, 14 nt, Human parainfluenza virus 3
ccauuuuuaaugag

SEQ ID NO: 2708338 - RNA, 15 nt, Human parainfluenza virus 3
acagaaaaucgagaa

SEQ ID NO: 2708339 - RNA, 13 nt, Human parainfluenza virus 3
cuuaauuauaaau

SEQ ID NO: 2708340 - RNA, 20 nt, Human parainfluenza virus 3
ucuucaauacaccaagaaga

SEQ ID NO: 2708341 - RNA, 15 nt, Human parainfluenza virus 3
aguaagaaaaacaug

SEQ ID NO: 2708342 - RNA, 14 nt, Human parainfluenza virus 3
caacaagacuaaua

SEQ ID NO: 2708343 - RNA, 17 nt, Human parainfluenza virus 3
gaaggauacagaagaga

SEQ ID NO: 2708344 - RNA, 20 nt, Human parainfluenza virus 3
uauuaccagagcuucauagg

SEQ ID NO: 2708345 - RNA, 20 nt, Human parainfluenza virus 3
aacaaucauauauaaacgaa

SEQ ID NO: 2708346 - RNA, 23 nt, Human parainfluenza virus 3
aguauuuauagcagauaguaaau

SEQ ID NO: 2708347 - RNA, 13 nt, Human parainfluenza virus 3
gggcagaagaaaa

SEQ ID NO: 2708348 - RNA, 12 nt, Human parainfluenza virus 3
ggaacaagaaag

SEQ ID NO: 2708349 - RNA, 13 nt, Human parainfluenza virus 3
aaaccucaaagca

SEQ ID NO: 2708350 - RNA, 16 nt, Human parainfluenza virus 3
ucggcaauagaaucaa

SEQ ID NO: 2708351 - RNA, 18 nt, Human parainfluenza virus 3
agucaacggauaucuaca

SEQ ID NO: 2708352 - RNA, 14 nt, Human parainfluenza virus 3
uauacaguacaaaa

SEQ ID NO: 2708353 - RNA, 14 nt, Human parainfluenza virus 3
agcaaucaaaucag

SEQ ID NO: 2708354 - RNA, 13 nt, Human parainfluenza virus 3
ucaauacaaacaa

SEQ ID NO: 2708355 - RNA, 20 nt, Human parainfluenza virus 3
aagaaagucaaaucaaaaac

SEQ ID NO: 2708356 - RNA, 22 nt, Human parainfluenza virus 3
uuaauauuaacugagaaaguga

SEQ ID NO: 2708357 - RNA, 15 nt, Human parainfluenza virus 3
auugaucucaaugaa

SEQ ID NO: 2708358 - RNA, 18 nt, Human parainfluenza virus 3
gugaaaagguccauaauu

SEQ ID NO: 2708359 - RNA, 12 nt, Human parainfluenza virus 3
ccgcaacaaaga

SEQ ID NO: 2708360 - RNA, 23 nt, Human parainfluenza virus 3
caaucucucacaaagcacaaaac

SEQ ID NO: 2708361 - RNA, 19 nt, Human parainfluenza virus 3
agguaauaaccuaugggaa

SEQ ID NO: 2708362 - RNA, 20 nt, Human parainfluenza virus 3
acaauaaagauauaucuuaa

SEQ ID NO: 2708363 - RNA, 19 nt, Human parainfluenza virus 3
augucggaucuuaggaaau

SEQ ID NO: 2708364 - RNA, 23 nt, Human parainfluenza virus 3
cagcagaaaagguuagaaaauau

SEQ ID NO: 2708365 - RNA, 18 nt, Human parainfluenza virus 3
auuuaauaaauucauaga

SEQ ID NO: 2708366 - RNA, 21 nt, Human parainfluenza virus 3
acgaugugcaaguuaaaucag

SEQ ID NO: 2708367 - RNA, 18 nt, Human parainfluenza virus 3
agaaaauauauguauauu

SEQ ID NO: 2708368 - RNA, 17 nt, Human parainfluenza virus 3
aaauccaccaaaacaug

SEQ ID NO: 2708369 - RNA, 17 nt, Human parainfluenza virus 3
cucuacucauacaauug

SEQ ID NO: 2708370 - RNA, 14 nt, Human parainfluenza virus 3
gcgguugcucuggu

SEQ ID NO: 2708371 - RNA, 23 nt, Human parainfluenza virus 3
ucaaaagaaauguucaaauuaua

SEQ ID NO: 2708372 - RNA, 18 nt, Human parainfluenza virus 3
auuacacacuaugacaaa

SEQ ID NO: 2708373 - RNA, 18 nt, Human parainfluenza virus 3
caaagaaacgacaccgaa

SEQ ID NO: 2708374 - RNA, 20 nt, Human parainfluenza virus 3
aauacgggaguguaaaugau

SEQ ID NO: 2708375 - RNA, 17 nt, Human parainfluenza virus 3
aaauuacaauuagaaau

SEQ ID NO: 2708376 - RNA, 20 nt, Human parainfluenza virus 3
caacagaaacaagugagaaa

SEQ ID NO: 2708377 - RNA, 15 nt, Human parainfluenza virus 3
ggacaacgacacaaa

SEQ ID NO: 2708378 - RNA, 22 nt, Human parainfluenza virus 3
ccaagauuaugucaacaaagaa

SEQ ID NO: 2708379 - RNA, 20 nt, Human parainfluenza virus 3
gaguuccacgguauaaugaa

SEQ ID NO: 2708380 - RNA, 20 nt, Human parainfluenza virus 3
cuuaaaauuaugacugagag

SEQ ID NO: 2708381 - RNA, 14 nt, Human parainfluenza virus 3
ccaaauagauauca

SEQ ID NO: 2708382 - RNA, 14 nt, Human parainfluenza virus 3
acuuaggaaaauac

SEQ ID NO: 2708383 - RNA, 16 nt, Human parainfluenza virus 3
augacauacaaaauga

SEQ ID NO: 2708384 - RNA, 23 nt, Human parainfluenza virus 3
gucaaucauaauuaaccauaaua

SEQ ID NO: 2708385 - RNA, 22 nt, Human parainfluenza virus 3
aauuugucuuccaaucagaaau

SEQ ID NO: 2708386 - RNA, 17 nt, Human parainfluenza virus 3
agggcaauuacucuauu

SEQ ID NO: 2708387 - RNA, 15 nt, Human parainfluenza virus 3
gaagugagaagaaca

SEQ ID NO: 2708388 - RNA, 15 nt, Human parainfluenza virus 3
agaaaucaaaagaua

SEQ ID NO: 2708389 - RNA, 15 nt, Human parainfluenza virus 3
uccuaaauacagaug

SEQ ID NO: 2708390 - RNA, 22 nt, Human parainfluenza virus 3
uagacaaaaaguaagaaaaaca

SEQ ID NO: 2708391 - RNA, 15 nt, Human parainfluenza virus 3
uaucuuaaccuuuau

SEQ ID NO: 2708392 - RNA, 22 nt, Human parainfluenza virus 3
auaggaggauggucaacuccau

SEQ ID NO: 2708393 - RNA, 23 nt, Human parainfluenza virus 3
auuaucuccaaaaaaaucaaauu

SEQ ID NO: 2708394 - RNA, 20 nt, Human parainfluenza virus 3
gaucaggaaacuguacagag

SEQ ID NO: 2708395 - RNA, 16 nt, Human parainfluenza virus 3
aaguaagaaaaacaug

SEQ ID NO: 2708396 - RNA, 20 nt, Human parainfluenza virus 3
ccaaagggaugaagauauca

SEQ ID NO: 2708397 - RNA, 22 nt, Human parainfluenza virus 3
aaugagagcuacacaaguuuua

SEQ ID NO: 2708398 - RNA, 22 nt, Human parainfluenza virus 3
auaacuaacucugcaauauaca

SEQ ID NO: 2708399 - RNA, 12 nt, Human parainfluenza virus 3
gccgaagcaaau

SEQ ID NO: 2708400 - RNA, 19 nt, Human parainfluenza virus 3
caacagaacaaaguagaaa

SEQ ID NO: 2708401 - RNA, 16 nt, Human parainfluenza virus 3
agacaagaaacaacag

SEQ ID NO: 2708402 - RNA, 15 nt, Human parainfluenza virus 3
acaaacaaagcagug

SEQ ID NO: 2708403 - RNA, 17 nt, Human parainfluenza virus 3
aagucaaaucaaaaacu

SEQ ID NO: 2708404 - RNA, 17 nt, Human parainfluenza virus 3
accugauacaagaucaa

SEQ ID NO: 2708405 - RNA, 17 nt, Human parainfluenza virus 3
agaagugagaagaacag

SEQ ID NO: 2708406 - RNA, 14 nt, Human parainfluenza virus 3
gauugaucaagaga

SEQ ID NO: 2708407 - RNA, 22 nt, Human parainfluenza virus 3
acuagauuuauaucaagacaaa

SEQ ID NO: 2708408 - RNA, 13 nt, Human parainfluenza virus 3
agcacaaaacaau

SEQ ID NO: 2708409 - RNA, 12 nt, Human parainfluenza virus 3
agcacaaaucac

SEQ ID NO: 2708410 - RNA, 19 nt, Human parainfluenza virus 3
ugaauccaaugagagagua

SEQ ID NO: 2708411 - RNA, 15 nt, Human parainfluenza virus 3
auaaaaccagaacua

SEQ ID NO: 2708412 - RNA, 16 nt, Human parainfluenza virus 3
auuacaaccauaauua

SEQ ID NO: 2708413 - RNA, 13 nt, Human parainfluenza virus 3
aaggccaaaucag

SEQ ID NO: 2708414 - RNA, 15 nt, Human parainfluenza virus 3
aacacagcaaacacu

SEQ ID NO: 2708415 - RNA, 14 nt, Human parainfluenza virus 3
cuaaugaaaaauag

SEQ ID NO: 2708416 - RNA, 20 nt, Human parainfluenza virus 3
agauaucaaucaauauacaa

SEQ ID NO: 2708417 - RNA, 12 nt, Human parainfluenza virus 3
ucuaacaauggc

SEQ ID NO: 2708418 - RNA, 17 nt, Human parainfluenza virus 3
agaaagaccaaaaugaa

SEQ ID NO: 2708419 - RNA, 18 nt, Human parainfluenza virus 3
aucucucacaaagcacaa

SEQ ID NO: 2708420 - RNA, 22 nt, Human parainfluenza virus 3
auuaauccuuauccaaaaugag

SEQ ID NO: 2708421 - RNA, 19 nt, Human parainfluenza virus 3
auuaugggagaaaagacau

SEQ ID NO: 2708422 - RNA, 15 nt, Human parainfluenza virus 3
agaacaccaaaacaa

SEQ ID NO: 2708423 - RNA, 22 nt, Human parainfluenza virus 3
acagaacaaaguagaaacagug

SEQ ID NO: 2708424 - RNA, 16 nt, Human parainfluenza virus 3
aaacacuagcaaguca

SEQ ID NO: 2708425 - RNA, 15 nt, Human parainfluenza virus 3
uagcacaauuacaca

SEQ ID NO: 2708426 - RNA, 22 nt, Human parainfluenza virus 3
cagcaaucucucacaaagcaca

SEQ ID NO: 2708427 - RNA, 22 nt, Human parainfluenza virus 3
aaucggaaauccaccaaaacau

SEQ ID NO: 2708428 - RNA, 14 nt, Human parainfluenza virus 3
cagcaacugaaaga

SEQ ID NO: 2708429 - RNA, 14 nt, Human parainfluenza virus 3
aaacagacaagaaa

SEQ ID NO: 2708430 - RNA, 20 nt, Human parainfluenza virus 3
ucgcaggaacaagaaagaag

SEQ ID NO: 2708431 - RNA, 21 nt, Human parainfluenza virus 3
auaaauacaauaaagauauau

SEQ ID NO: 2708432 - RNA, 19 nt, Human parainfluenza virus 3
cacaaaggggcaaacagaa

SEQ ID NO: 2708433 - RNA, 14 nt, Human parainfluenza virus 3
augaagaugucaau

SEQ ID NO: 2708434 - RNA, 20 nt, Human parainfluenza virus 3
agaggaccugggagaagaag

SEQ ID NO: 2708435 - RNA, 12 nt, Human parainfluenza virus 3
aaucaaaacaaa

SEQ ID NO: 2708436 - RNA, 16 nt, Human parainfluenza virus 3
ucaacaccgacacaaa

SEQ ID NO: 2708437 - RNA, 14 nt, Human parainfluenza virus 3
caaaaaugaugaag

SEQ ID NO: 2708438 - RNA, 20 nt, Human parainfluenza virus 3
aaacucaauaaauuagauaa

SEQ ID NO: 2708439 - RNA, 23 nt, Human parainfluenza virus 3
gucucuggaggaaucuccagaag

SEQ ID NO: 2708440 - RNA, 16 nt, Human parainfluenza virus 3
gauauuuuuaaugaau

SEQ ID NO: 2708441 - RNA, 16 nt, Human parainfluenza virus 3
cucuacccaacacaau

SEQ ID NO: 2708442 - RNA, 16 nt, Human parainfluenza virus 3
aaaucaaaacaaaaag

SEQ ID NO: 2708443 - RNA, 15 nt, Human parainfluenza virus 3
cuaauaagauaauau

SEQ ID NO: 2708444 - RNA, 16 nt, Human parainfluenza virus 3
ccacgguauaaugaag

SEQ ID NO: 2708445 - RNA, 16 nt, Human parainfluenza virus 3
gagcaguacaaugaga

SEQ ID NO: 2708446 - RNA, 19 nt, Human parainfluenza virus 3
cuuuaucuuugagcccaag

SEQ ID NO: 2708447 - RNA, 14 nt, Human parainfluenza virus 3
aggaggaaagaaag

SEQ ID NO: 2708448 - RNA, 22 nt, Human parainfluenza virus 3
auauaccugaucuauaucgaca

SEQ ID NO: 2708449 - RNA, 21 nt, Human parainfluenza virus 3
agagauuccaaaaagcugcag

SEQ ID NO: 2708450 - RNA, 23 nt, Human parainfluenza virus 3
aucaagaagugccgcaacaaaga

SEQ ID NO: 2708451 - RNA, 22 nt, Human parainfluenza virus 3
acaauaucuaugagacaaaauu

SEQ ID NO: 2708452 - RNA, 14 nt, Human parainfluenza virus 3
augauaaucaagaa

SEQ ID NO: 2708453 - RNA, 14 nt, Human parainfluenza virus 3
augagacaaaauua

SEQ ID NO: 2708454 - RNA, 22 nt, Human parainfluenza virus 3
aucauauauaaacgaacucaaa

SEQ ID NO: 2708455 - RNA, 23 nt, Human parainfluenza virus 3
caaaacagggguucagacugauu

SEQ ID NO: 2708456 - RNA, 21 nt, Human parainfluenza virus 3
agagagacugcaaucaggcau

SEQ ID NO: 2708457 - RNA, 12 nt, Human parainfluenza virus 3
ucaauauacaaa

SEQ ID NO: 2708458 - RNA, 18 nt, Human parainfluenza virus 3
aagggauaaucaaaaacu

SEQ ID NO: 2708459 - RNA, 22 nt, Human parainfluenza virus 3
cagaugaugaagaagaaauacu

SEQ ID NO: 2708460 - RNA, 23 nt, Human parainfluenza virus 3
cuucaauacaccaagaagaugac

SEQ ID NO: 2708461 - RNA, 19 nt, Human parainfluenza virus 3
ugcaaauaauauaggaaaa

SEQ ID NO: 2708462 - RNA, 17 nt, Human parainfluenza virus 3
aaguuggcauagcaaau

SEQ ID NO: 2708463 - RNA, 13 nt, Human parainfluenza virus 3
gaaaaucaaagag

SEQ ID NO: 2708464 - RNA, 15 nt, Human parainfluenza virus 3
gauccucaucagaua

SEQ ID NO: 2708465 - RNA, 15 nt, Human parainfluenza virus 3
aaaaauggaacccag

SEQ ID NO: 2708466 - RNA, 15 nt, Human parainfluenza virus 3
aaauuaauaauauau

SEQ ID NO: 2708467 - RNA, 15 nt, Human parainfluenza virus 3
uaagaaaucaaaaga

SEQ ID NO: 2708468 - RNA, 23 nt, Human parainfluenza virus 3
gcaucauuauaccgcacaaauau

SEQ ID NO: 2708469 - RNA, 17 nt, Human parainfluenza virus 3
ucgaaccgaacagacaa

SEQ ID NO: 2708470 - RNA, 13 nt, Human parainfluenza virus 3
gaaucaaagacaa

SEQ ID NO: 2708471 - RNA, 14 nt, Human parainfluenza virus 3
uaggacaaagaaaa

SEQ ID NO: 2708472 - RNA, 22 nt, Human parainfluenza virus 3
gagagcaaucgauuuacagaga

SEQ ID NO: 2708473 - RNA, 15 nt, Human parainfluenza virus 3
uagauaucaaucaau

SEQ ID NO: 2708474 - RNA, 20 nt, Human parainfluenza virus 3
ccaaucagaaaucuaagaaa

SEQ ID NO: 2708475 - RNA, 22 nt, Human parainfluenza virus 3
cuugaacauccaauaaaugaga

SEQ ID NO: 2708476 - RNA, 14 nt, Human parainfluenza virus 3
caaacagaaauaca

SEQ ID NO: 2708477 - RNA, 15 nt, Human parainfluenza virus 3
uagauuacauugaua

SEQ ID NO: 2708478 - RNA, 15 nt, Human parainfluenza virus 3
auugaucaagagaaa

SEQ ID NO: 2708479 - RNA, 13 nt, Human parainfluenza virus 3
uaucauugacaca

SEQ ID NO: 2708480 - RNA, 13 nt, Human parainfluenza virus 3
aaagaaaauggau

SEQ ID NO: 2708481 - RNA, 17 nt, Human parainfluenza virus 3
guaaucagcaaucagac

SEQ ID NO: 2708482 - RNA, 23 nt, Human parainfluenza virus 3
gacugguuuaagaaaucaaaaga

SEQ ID NO: 2708483 - RNA, 16 nt, Human parainfluenza virus 3
cagacugauuccaaag

SEQ ID NO: 2708484 - RNA, 14 nt, Human parainfluenza virus 3
ucagcacaaaucac

SEQ ID NO: 2708485 - RNA, 21 nt, Human parainfluenza virus 3
uaagaaaaacauguaauauau

SEQ ID NO: 2708486 - RNA, 15 nt, Human parainfluenza virus 3
gaucuacaaaguaga

SEQ ID NO: 2708487 - RNA, 22 nt, Human parainfluenza virus 3
ugauagaaaaucaaagagaaca

SEQ ID NO: 2708488 - RNA, 15 nt, Human parainfluenza virus 3
agguuagaaaauaua

SEQ ID NO: 2708489 - RNA, 23 nt, Human parainfluenza virus 3
guaauuggaaccauugcucuggg

SEQ ID NO: 2708490 - RNA, 14 nt, Human parainfluenza virus 3
gauuccaaagggau

SEQ ID NO: 2708491 - RNA, 16 nt, Human parainfluenza virus 3
caguaaagugacugaa

SEQ ID NO: 2708492 - RNA, 20 nt, Human parainfluenza virus 3
ccaagaagaugacaaaagaa

SEQ ID NO: 2708493 - RNA, 14 nt, Human parainfluenza virus 3
aaaagauagaacua

SEQ ID NO: 2708494 - RNA, 16 nt, Human parainfluenza virus 3
caagaagaugacaaaa

SEQ ID NO: 2708495 - RNA, 15 nt, Human parainfluenza virus 3
caaacuguauaacaa

SEQ ID NO: 2708496 - RNA, 15 nt, Human parainfluenza virus 3
cagggauauauuaca

SEQ ID NO: 2708497 - RNA, 13 nt, Human parainfluenza virus 3
acaccaaaacaac

SEQ ID NO: 2708498 - RNA, 20 nt, Human parainfluenza virus 3
ucaauggacaacgacacaaa

SEQ ID NO: 2708499 - RNA, 20 nt, Human parainfluenza virus 3
agcaaucgauuuacagagag

SEQ ID NO: 2708500 - RNA, 23 nt, Human parainfluenza virus 3
uauaccaagcagaguucuucucu

SEQ ID NO: 2708501 - RNA, 17 nt, Human parainfluenza virus 3
auuacaauuagaaauga

SEQ ID NO: 2708502 - RNA, 20 nt, Human parainfluenza virus 3
gcagguacauaucaaaacag

SEQ ID NO: 2708503 - RNA, 16 nt, Human parainfluenza virus 3
caaaaaugaugaagaa

SEQ ID NO: 2708504 - RNA, 23 nt, Human parainfluenza virus 3
gacagaaucaucaggaacacaau

SEQ ID NO: 2708505 - RNA, 16 nt, Human parainfluenza virus 3
gacugguuuaagaaau

SEQ ID NO: 2708506 - RNA, 14 nt, Human parainfluenza virus 3
aguuaaaucagaga

SEQ ID NO: 2708507 - RNA, 18 nt, Human parainfluenza virus 3
agucagcugguauucaaa

SEQ ID NO: 2708508 - RNA, 13 nt, Human parainfluenza virus 3
acuucgaaacaag

SEQ ID NO: 2708509 - RNA, 14 nt, Human parainfluenza virus 3
aaauuccuaaguca

SEQ ID NO: 2708510 - RNA, 19 nt, Human parainfluenza virus 3
auaguagcaaucaaaucag

SEQ ID NO: 2708511 - RNA, 15 nt, Human parainfluenza virus 3
auaauacaaguauau

SEQ ID NO: 2708512 - RNA, 20 nt, Human parainfluenza virus 3
auauaccaauaucauugaca

SEQ ID NO: 2708513 - RNA, 21 nt, Human parainfluenza virus 3
aggaaaggaaggauacagaag

SEQ ID NO: 2708514 - RNA, 20 nt, Human parainfluenza virus 3
aguagaaauaaaucagaaaa

SEQ ID NO: 2708515 - RNA, 18 nt, Human parainfluenza virus 3
aagcagaucuaaagaaaa

SEQ ID NO: 2708516 - RNA, 12 nt, Human parainfluenza virus 3
ucaaaacaaaaa

SEQ ID NO: 2708517 - RNA, 19 nt, Human parainfluenza virus 3
aaccaaucaggaauccaau

SEQ ID NO: 2708518 - RNA, 22 nt, Human parainfluenza virus 3
uaauauauauauaccaagcaga

SEQ ID NO: 2708519 - RNA, 15 nt, Human parainfluenza virus 3
aaaauaggcagaaug

SEQ ID NO: 2708520 - RNA, 20 nt, Human parainfluenza virus 3
auggacaacgacacaaaauu

SEQ ID NO: 2708521 - RNA, 14 nt, Human parainfluenza virus 3
cagaauuauauacc

SEQ ID NO: 2708522 - RNA, 21 nt, Human parainfluenza virus 3
auuaacgugcuaucaaaauua

SEQ ID NO: 2708523 - RNA, 16 nt, Human parainfluenza virus 3
cagaucaagcaauaca

SEQ ID NO: 2708524 - RNA, 21 nt, Human parainfluenza virus 3
aucuauuauuuacagaaucaa

SEQ ID NO: 2708525 - RNA, 14 nt, Human parainfluenza virus 3
acagauacaaaaug

SEQ ID NO: 2708526 - RNA, 17 nt, Human parainfluenza virus 3
aaucaauauacaaauaa

SEQ ID NO: 2708527 - RNA, 21 nt, Human parainfluenza virus 3
auuuucucuuuuuuuagaaca

SEQ ID NO: 2708528 - RNA, 13 nt, Human parainfluenza virus 3
agcaaucaaauca

SEQ ID NO: 2708529 - RNA, 21 nt, Human parainfluenza virus 3
gacauagaagugagaagaaca

SEQ ID NO: 2708530 - RNA, 18 nt, Human parainfluenza virus 3
caccagaugauauaacau

SEQ ID NO: 2708531 - RNA, 13 nt, Human parainfluenza virus 3
auaacaacacaga

SEQ ID NO: 2708532 - RNA, 14 nt, Human parainfluenza virus 3
auguauaucaacug

SEQ ID NO: 2708533 - RNA, 17 nt, Human parainfluenza virus 3
agaaacccaaaaauaag

SEQ ID NO: 2708534 - RNA, 12 nt, Human parainfluenza virus 3
caggaacaagaa

SEQ ID NO: 2708535 - RNA, 17 nt, Human parainfluenza virus 3
aaacacuaaacacaaug

SEQ ID NO: 2708536 - RNA, 22 nt, Human parainfluenza virus 3
uccaagaaccacgaucacauca

SEQ ID NO: 2708537 - RNA, 15 nt, Human parainfluenza virus 3
cgauaauuacaauug

SEQ ID NO: 2708538 - RNA, 15 nt, Human parainfluenza virus 3
uauauaccaagcaga

SEQ ID NO: 2708539 - RNA, 21 nt, Human parainfluenza virus 3
aauuagccucaaaaaaugaug

SEQ ID NO: 2708540 - RNA, 19 nt, Human parainfluenza virus 3
acaaaggcuuaaacucaau

SEQ ID NO: 2708541 - RNA, 23 nt, Human parainfluenza virus 3
aaucauaccaagucuuacaggua

SEQ ID NO: 2708542 - RNA, 17 nt, Human parainfluenza virus 3
guagauacugcaucaaa

SEQ ID NO: 2708543 - RNA, 17 nt, Human parainfluenza virus 3
aauuagauaaaagacaa

SEQ ID NO: 2708544 - RNA, 14 nt, Human parainfluenza virus 3
uccagaagcaucac

SEQ ID NO: 2708545 - RNA, 21 nt, Human parainfluenza virus 3
agcaaauguacuaaacaaugu

SEQ ID NO: 2708546 - RNA, 16 nt, Human parainfluenza virus 3
aauucuaaaaauggaa

SEQ ID NO: 2708547 - RNA, 14 nt, Human parainfluenza virus 3
ucuagaagaaucaa

SEQ ID NO: 2708548 - RNA, 14 nt, Human parainfluenza virus 3
ugaaauuacaauua

SEQ ID NO: 2708549 - RNA, 22 nt, Human parainfluenza virus 3
caacaagacuaauacccaaaaa

SEQ ID NO: 2708550 - RNA, 20 nt, Human parainfluenza virus 3
aucucuacccaacacaauau

SEQ ID NO: 2708551 - RNA, 14 nt, Human parainfluenza virus 3
caacagaucaagca

SEQ ID NO: 2708552 - RNA, 21 nt, Human parainfluenza virus 3
agaacaaaguagaaacaguga

SEQ ID NO: 2708553 - RNA, 18 nt, Human parainfluenza virus 3
caacucccccaacaacaa

SEQ ID NO: 2708554 - RNA, 18 nt, Human parainfluenza virus 3
ccaugaucaaaacaaaau

SEQ ID NO: 2708555 - RNA, 14 nt, Human parainfluenza virus 3
caagugagaaagau

SEQ ID NO: 2708556 - RNA, 20 nt, Human parainfluenza virus 3
gcaacacagcaaacacuaaa

SEQ ID NO: 2708557 - RNA, 18 nt, Human parainfluenza virus 3
caaagaauguauagaagc

SEQ ID NO: 2708558 - RNA, 19 nt, Human parainfluenza virus 3
aagauuaugucaacaaaga

SEQ ID NO: 2708559 - RNA, 18 nt, Human parainfluenza virus 3
aauggaugaaucacauag

SEQ ID NO: 2708560 - RNA, 18 nt, Human parainfluenza virus 3
agcaaauguacuaaacaa

SEQ ID NO: 2708561 - RNA, 11 nt, Human parainfluenza virus 3
accaaaaugaa

SEQ ID NO: 2708562 - RNA, 19 nt, Human parainfluenza virus 3
acaaaauugaaagaagaaa

SEQ ID NO: 2708563 - RNA, 17 nt, Human parainfluenza virus 3
ucaacaccgacacaaag

SEQ ID NO: 2708564 - RNA, 15 nt, Human parainfluenza virus 3
aaucgauuagggaau

SEQ ID NO: 2708565 - RNA, 21 nt, Human parainfluenza virus 3
aacacaagaacccagcaacuc

SEQ ID NO: 2708566 - RNA, 16 nt, Human parainfluenza virus 3
ucaaucucaacaacaa

SEQ ID NO: 2708567 - RNA, 14 nt, Human parainfluenza virus 3
caacacacacaaaa

SEQ ID NO: 2708568 - RNA, 15 nt, Human parainfluenza virus 3
accgaacaaacagac

SEQ ID NO: 2708569 - RNA, 17 nt, Human parainfluenza virus 3
aagaagcuuggaaucua

SEQ ID NO: 2708570 - RNA, 21 nt, Human parainfluenza virus 3
cagcugguauucaaaagggag

SEQ ID NO: 2708571 - RNA, 20 nt, Human parainfluenza virus 3
ucaaaagauacugacaacca

SEQ ID NO: 2708572 - RNA, 16 nt, Human parainfluenza virus 3
acacaaaagacaaaug

SEQ ID NO: 2708573 - RNA, 13 nt, Human parainfluenza virus 3
gaguucuucucuu

SEQ ID NO: 2708574 - RNA, 19 nt, Human parainfluenza virus 3
uaaucccagaacaaaacga

SEQ ID NO: 2708575 - RNA, 19 nt, Human parainfluenza virus 3
uaauccuuauccaaaauga

SEQ ID NO: 2708576 - RNA, 19 nt, Human parainfluenza virus 3
uaacacagauacaaaauga

SEQ ID NO: 2708577 - RNA, 18 nt, Human parainfluenza virus 3
acaauaaagauauaucuu

SEQ ID NO: 2708578 - RNA, 18 nt, Human parainfluenza virus 3
aacccaagacacaaaaga

SEQ ID NO: 2708579 - RNA, 17 nt, Human parainfluenza virus 3
aauccacaucaaaacua

SEQ ID NO: 2708580 - RNA, 14 nt, Human parainfluenza virus 3
aauccaccaaaaca

SEQ ID NO: 2708581 - RNA, 12 nt, Human parainfluenza virus 3
aaucccaaaaga

SEQ ID NO: 2708582 - RNA, 17 nt, Human parainfluenza virus 3
uauccaugaucaaaaca

SEQ ID NO: 2708583 - RNA, 13 nt, Human
cugaggugggagg

SEQ ID NO: 2708584 - RNA, 12 nt, Human
cugaggugggag

SEQ ID NO: 2708585 - RNA, 22 nt, Human
cugaggugggaggaucucuuga

SEQ ID NO: 2708586 - RNA, 14 nt, Human
cugaggggccucuu

SEQ ID NO: 2708587 - RNA, 23 nt, Human
cugaggaauccagacccggcugc

SEQ ID NO: 2708588 - RNA, 16 nt, Human
cugaggaauucuguau

SEQ ID NO: 2708589 - RNA, 15 nt, Human
cugaggaauucugua

SEQ ID NO: 2708590 - RNA, 19 nt, Human
cugaggaauucuguauaga

SEQ ID NO: 2708591 - RNA, 18 nt, Human
cugaggaauucuguauag

SEQ ID NO: 2708592 - RNA, 12 nt, Human
cugagcugggau

SEQ ID NO: 2708593 - RNA, 22 nt, Human
cugagcugggaugauuggaggg

SEQ ID NO: 2708594 - RNA, 19 nt, Human
cugacccugcuucaaauau

SEQ ID NO: 2708595 - RNA, 14 nt, Human
cugaucucucguga

SEQ ID NO: 2708596 - RNA, 17 nt, Human
cugaucucucgugauug

SEQ ID NO: 2708597 - RNA, 18 nt, Human
cugaucucucgugauuga

SEQ ID NO: 2708598 - RNA, 24 nt, Human
cucuugauucauaaugacuuaagc

SEQ ID NO: 2708599 - RNA, 23 nt, Human
cucuugagccuugaacuuugacc

SEQ ID NO: 2708600 - RNA, 15 nt, Human
cucuugagccuggga

SEQ ID NO: 2708601 - RNA, 16 nt, Human
cucuugagccugggag

SEQ ID NO: 2708602 - RNA, 22 nt, Human
cucuugauucauaaugacuuaa

SEQ ID NO: 2708603 - RNA, 13 nt, Human
cucuugagccugg

SEQ ID NO: 2708604 - RNA, 14 nt, Human
cucuugagccuggg

SEQ ID NO: 2708605 - RNA, 17 nt, Human
cucugcacaagcugcac

SEQ ID NO: 2708606 - RNA, 18 nt, Human
cucugcacaagcugcacc

SEQ ID NO: 2708607 - RNA, 14 nt, Human
cugaaaauguaugu

SEQ ID NO: 2708608 - RNA, 13 nt, Human
cugacacacagcu

SEQ ID NO: 2708609 - RNA, 15 nt, Human
cugacacacagcucu

SEQ ID NO: 2708610 - RNA, 16 nt, Human
cugacacacagcucug

SEQ ID NO: 2708611 - RNA, 17 nt, Human
cugacacacagcucugu

SEQ ID NO: 2708612 - RNA, 18 nt, Human
cugacacacagcucuguc

SEQ ID NO: 2708613 - RNA, 19 nt, Human
cugacacacagcucugucc

SEQ ID NO: 2708614 - RNA, 20 nt, Human
cugacacacagcucuguccu

SEQ ID NO: 2708615 - RNA, 21 nt, Human
cugacacacagcucuguccug

SEQ ID NO: 2708616 - RNA, 22 nt, Human
cugacacacagcucuguccugg

SEQ ID NO: 2708617 - RNA, 23 nt, Human
cugacacacagcucuguccuggg

SEQ ID NO: 2708618 - RNA, 24 nt, Human
cuccuuuucacaguucucuccuuc

SEQ ID NO: 2708619 - RNA, 23 nt, Human
cuccuuugugaggaagccgcugg

SEQ ID NO: 2708620 - RNA, 22 nt, Human
cuccuagccugugccucuggga

SEQ ID NO: 2708621 - RNA, 16 nt, Human
cuccuuuagcgcccag

SEQ ID NO: 2708622 - RNA, 17 nt, Human
cuccuuuagcgcccagu

SEQ ID NO: 2708623 - RNA, 13 nt, Human
cuccuuucucuuu

SEQ ID NO: 2708624 - RNA, 22 nt, Human
cuccuuuagcgcccaguugggu

SEQ ID NO: 2708625 - RNA, 11 nt, Human
cucggugccuu

SEQ ID NO: 2708626 - RNA, 23 nt, Human
cucgguguggagaagcggcuggc

SEQ ID NO: 2708627 - RNA, 10 nt, Human
cucuccucug

SEQ ID NO: 2708628 - RNA, 16 nt, Human
cucuccgaccagacac

SEQ ID NO: 2708629 - RNA, 13 nt, Human
cucuccuccuuuu

SEQ ID NO: 2708630 - RNA, 20 nt, Human
cucuccuccuuuucacaguu

SEQ ID NO: 2708631 - RNA, 13 nt, Human
cucucccuuggau

SEQ ID NO: 2708632 - RNA, 16 nt, Human
cucugcacaagcugca

SEQ ID NO: 2708633 - RNA, 22 nt, Human
cuccgcuuucuacccagcgagc

SEQ ID NO: 2708634 - RNA, 14 nt, Human
cuccgucaacucau

SEQ ID NO: 2708635 - RNA, 21 nt, Human
cuccgcuuucuacccagcgag

SEQ ID NO: 2708636 - RNA, 20 nt, Human
cuccgcuuucuacccagcga

SEQ ID NO: 2708637 - RNA, 15 nt, Human
cucccucuuucccuc

SEQ ID NO: 2708638 - RNA, 16 nt, Human
cucccucccucuuucc

SEQ ID NO: 2708639 - RNA, 19 nt, Human
cucccucuuucccucccuu

SEQ ID NO: 2708640 - RNA, 21 nt, Human
cuccagaauuucccaaagcag

SEQ ID NO: 2708641 - RNA, 17 nt, Human
cucagaaucucaaauaa

SEQ ID NO: 2708642 - RNA, 16 nt, Human
cucagaaucucaaaua

SEQ ID NO: 2708643 - RNA, 16 nt, Human
cuccagacacaugucc

SEQ ID NO: 2708644 - RNA, 22 nt, Human
cuccagaauuucccaaagcagu

SEQ ID NO: 2708645 - RNA, 11 nt, Human
cuccagacaca

SEQ ID NO: 2708646 - RNA, 23 nt, Human
cuccaggcuguaucccaugagcc

SEQ ID NO: 2708647 - RNA, 22 nt, Human
cuccaggcuguaucccaugagc

SEQ ID NO: 2708648 - RNA, 18 nt, Human
cuccaggugcacaagcuc

SEQ ID NO: 2708649 - RNA, 19 nt, Human
cuccaggugcacaagcucc

SEQ ID NO: 2708650 - RNA, 20 nt, Human
cuccaggugcacaagcucca

SEQ ID NO: 2708651 - RNA, 22 nt, Human
cuccaggugcacaagcuccaag

SEQ ID NO: 2708652 - RNA, 13 nt, Human
cucccaccucagc

SEQ ID NO: 2708653 - RNA, 14 nt, Human
cucccaccucagcc

SEQ ID NO: 2708654 - RNA, 16 nt, Human
cucccaccucagccuc

SEQ ID NO: 2708655 - RNA, 17 nt, Human
cucccaccucagccucc

SEQ ID NO: 2708656 - RNA, 24 nt, Human
cggagaagagcuguucacagccag

SEQ ID NO: 2708657 - RNA, 23 nt, Human
cggagaagagcuguucacagcca

SEQ ID NO: 2708658 - RNA, 15 nt, Human
cggagacggaguccc

SEQ ID NO: 2708659 - RNA, 15 nt, Human
cgguuuauauaagcu

SEQ ID NO: 2708660 - RNA, 16 nt, Human
cguacacauuuuauuu

SEQ ID NO: 2708661 - RNA, 13 nt, Human
cguacacauuuua

SEQ ID NO: 2708662 - RNA, 14 nt, Human
cuaacuggacuggu

SEQ ID NO: 2708663 - RNA, 14 nt, Human
cuaaagcugccagc

SEQ ID NO: 2708664 - RNA, 15 nt, Human
cuaaagcugccagcc

SEQ ID NO: 2708665 - RNA, 16 nt, Human
cuaaaggcuaccuuug

SEQ ID NO: 2708666 - RNA, 15 nt, Human
cuaaaggcuaccuuu

SEQ ID NO: 2708667 - RNA, 22 nt, Human
cuaaaguguauuuuuuuacuaa

SEQ ID NO: 2708668 - RNA, 19 nt, Human
cuaaaggcuaccuuuguau

SEQ ID NO: 2708669 - RNA, 17 nt, Human
cuaaaggcuaccuuugu

SEQ ID NO: 2708670 - RNA, 19 nt, Human
cuaaaguguauuuuuuuac

SEQ ID NO: 2708671 - RNA, 13 nt, Human
cguuaaaauacca

SEQ ID NO: 2708672 - RNA, 16 nt, Human
cuaaacuuuucugaua

SEQ ID NO: 2708673 - RNA, 15 nt, Human
cuaaacuuuucugau

SEQ ID NO: 2708674 - RNA, 16 nt, Human
cgccuuaaggauguuc

SEQ ID NO: 2708675 - RNA, 18 nt, Human
cgcugccccuggcagccc

SEQ ID NO: 2708676 - RNA, 19 nt, Human
cgcuggaccuugaacuggg

SEQ ID NO: 2708677 - RNA, 23 nt, Human
cgcuggaccuugaacuggguacu

SEQ ID NO: 2708678 - RNA, 13 nt, Human
cgcugccccuggc

SEQ ID NO: 2708679 - RNA, 16 nt, Human
cgcugccccuggcagc

SEQ ID NO: 2708680 - RNA, 17 nt, Human
cgcugccccuggcagcc

SEQ ID NO: 2708681 - RNA, 17 nt, Human
cgcuggggccaguuggu

SEQ ID NO: 2708682 - RNA, 20 nt, Human
cgcuggggccaguugguccc

SEQ ID NO: 2708683 - RNA, 19 nt, Human
cucagaaaacaaggaugaa

SEQ ID NO: 2708684 - RNA, 23 nt, Human
cucagaaaacaaggaugaauuaa

SEQ ID NO: 2708685 - RNA, 12 nt, Human
cucagaauauug

SEQ ID NO: 2708686 - RNA, 18 nt, Human
cucacuuguuuuauuuaa

SEQ ID NO: 2708687 - RNA, 13 nt, Human
cucaccucucccu

SEQ ID NO: 2708688 - RNA, 14 nt, Human
cucaccucucccuu

SEQ ID NO: 2708689 - RNA, 15 nt, Human
cucaccucucccuug

SEQ ID NO: 2708690 - RNA, 16 nt, Human
cucaccucucccuugg

SEQ ID NO: 2708691 - RNA, 17 nt, Human
cucaccucucccuugga

SEQ ID NO: 2708692 - RNA, 13 nt, Human
cucaccugccccu

SEQ ID NO: 2708693 - RNA, 18 nt, Human
cucaccugccccucaacu

SEQ ID NO: 2708694 - RNA, 14 nt, Human
cucaccugccccuc

SEQ ID NO: 2708695 - RNA, 16 nt, Human
cucaccugccccucaa

SEQ ID NO: 2708696 - RNA, 13 nt, Human
cucaaaacugcac

SEQ ID NO: 2708697 - RNA, 18 nt, Human
cucaaaaaaagaaaaaga

SEQ ID NO: 2708698 - RNA, 17 nt, Human
cucaaaaaaagaaaaag

SEQ ID NO: 2708699 - RNA, 16 nt, Human
cuauguugcccaggca

SEQ ID NO: 2708700 - RNA, 17 nt, Human
cuauguugcccaggcag

SEQ ID NO: 2708701 - RNA, 17 nt, Human
cuaugugagcacaaagg

SEQ ID NO: 2708702 - RNA, 16 nt, Human
cuauguaucaaugagu

SEQ ID NO: 2708703 - RNA, 22 nt, Human
cuauguguagggcgggaggaug

SEQ ID NO: 2708704 - RNA, 15 nt, Human
cuauguugcccaggc

SEQ ID NO: 2708705 - RNA, 14 nt, Human
cuauguugcccagg

SEQ ID NO: 2708706 - RNA, 19 nt, Human
cuauguaucaaugaguaac

SEQ ID NO: 2708707 - RNA, 20 nt, Human
cuaucucccccagccccauc

SEQ ID NO: 2708708 - RNA, 14 nt, Human
cucacacaugagca

SEQ ID NO: 2708709 - RNA, 21 nt, Human
cucacacaugagcaucaggcc

SEQ ID NO: 2708710 - RNA, 12 nt, Human
cucaaauaacua

SEQ ID NO: 2708711 - RNA, 14 nt, Human
cucacaaaggaugc

SEQ ID NO: 2708712 - RNA, 15 nt, Human
cuaccugaggggccu

SEQ ID NO: 2708713 - RNA, 16 nt, Human
cuaccugaggggccuc

SEQ ID NO: 2708714 - RNA, 19 nt, Human
cuaccugaggggccucuua

SEQ ID NO: 2708715 - RNA, 23 nt, Human
cuaccugaggggccucuuauggg

SEQ ID NO: 2708716 - RNA, 20 nt, Human
cuaguuugauuaaauucuug

SEQ ID NO: 2708717 - RNA, 15 nt, Human
cuaguuugauuaaau

SEQ ID NO: 2708718 - RNA, 19 nt, Human
cuaguuugauuaaauucuu

SEQ ID NO: 2708719 - RNA, 17 nt, Human
cuaguuugauuaaauuc

SEQ ID NO: 2708720 - RNA, 14 nt, Human
cuagggaagauaau

SEQ ID NO: 2708721 - RNA, 19 nt, Human
cuagccagaggagagagga

SEQ ID NO: 2708722 - RNA, 17 nt, Human
cuagccagaggagagag

SEQ ID NO: 2708723 - RNA, 13 nt, Human
cuaggccuggcca

SEQ ID NO: 2708724 - RNA, 12 nt, Human
cuaggccugggg

SEQ ID NO: 2708725 - RNA, 13 nt, Human
cuaggccugggga

SEQ ID NO: 2708726 - RNA, 14 nt, Human
cuaggccuggccag

SEQ ID NO: 2708727 - RNA, 15 nt, Human
cuaggccuggccaga

SEQ ID NO: 2708728 - RNA, 18 nt, Human
cuaggccuggccagaugc

SEQ ID NO: 2708729 - RNA, 19 nt, Human
cuaggccuggccagaugca

SEQ ID NO: 2708730 - RNA, 20 nt, Human
cuagcauacguacacauuuu

SEQ ID NO: 2708731 - RNA, 19 nt, Human
cuagcauacguacacauuu

SEQ ID NO: 2708732 - RNA, 18 nt, Human
cuagcauacguacacauu

SEQ ID NO: 2708733 - RNA, 16 nt, Human
cuagcauacguacaca

SEQ ID NO: 2708734 - RNA, 14 nt, Human
ccucggagaagagc

SEQ ID NO: 2708735 - RNA, 12 nt, Human
ccucggagaaga

SEQ ID NO: 2708736 - RNA, 23 nt, Human
ccuccuuugugaggaagccgcug

SEQ ID NO: 2708737 - RNA, 18 nt, Human
ccuccuuuucacaguucu

SEQ ID NO: 2708738 - RNA, 13 nt, Human
ccuccgccucuug

SEQ ID NO: 2708739 - RNA, 14 nt, Human
ccuccgccucuugg

SEQ ID NO: 2708740 - RNA, 20 nt, Human
ccuccaagaccuucuccuuc

SEQ ID NO: 2708741 - RNA, 12 nt, Human
ccucccaucacc

SEQ ID NO: 2708742 - RNA, 16 nt, Human
ccuccaagaccuucuc

SEQ ID NO: 2708743 - RNA, 17 nt, Human
ccuccaagaccuucucc

SEQ ID NO: 2708744 - RNA, 19 nt, Human
ccuccaagaccuucuccuu

SEQ ID NO: 2708745 - RNA, 17 nt, Human
ccucccaucacccgcua

SEQ ID NO: 2708746 - RNA, 23 nt, Human
ccucaagugauucuccugccuca

SEQ ID NO: 2708747 - RNA, 20 nt, Human
ccucaagugauucuccugcc

SEQ ID NO: 2708748 - RNA, 12 nt, Human
ccucaggcaggu

SEQ ID NO: 2708749 - RNA, 18 nt, Human
ccucaggcaggugggaug

SEQ ID NO: 2708750 - RNA, 10 nt, Human
ccucaggccu

SEQ ID NO: 2708751 - RNA, 16 nt, Human
ccucaacaccucugca

SEQ ID NO: 2708752 - RNA, 15 nt, Human
ccucaaccuccuggg

SEQ ID NO: 2708753 - RNA, 19 nt, Human
ccucaacucuccuccagag

SEQ ID NO: 2708754 - RNA, 21 nt, Human
ccucaacucuccuccagaguc

SEQ ID NO: 2708755 - RNA, 23 nt, Human
ccucaacucuccuccagagucag

SEQ ID NO: 2708756 - RNA, 17 nt, Human
ccggccaccugcggugc

SEQ ID NO: 2708757 - RNA, 18 nt, Human
ccggccaccugcggugcu

SEQ ID NO: 2708758 - RNA, 21 nt, Human
ccuagcauacguacacauuuu

SEQ ID NO: 2708759 - RNA, 22 nt, Human
ccuagccuuagaagucacacag

SEQ ID NO: 2708760 - RNA, 23 nt, Human
ccuagccugugccucugggacug

SEQ ID NO: 2708761 - RNA, 19 nt, Human
ccuagccuuagaagucaca

SEQ ID NO: 2708762 - RNA, 14 nt, Human
ccgcagcccugcag

SEQ ID NO: 2708763 - RNA, 18 nt, Human
ccgcagcccugcagaggg

SEQ ID NO: 2708764 - RNA, 23 nt, Human
ccgcagcccugcagagggcacag

SEQ ID NO: 2708765 - RNA, 14 nt, Human
cccuccuuucacca

SEQ ID NO: 2708766 - RNA, 21 nt, Human
cccugugaguacuacaguccu

SEQ ID NO: 2708767 - RNA, 23 nt, Human
cccugugaguacuacaguccucc

SEQ ID NO: 2708768 - RNA, 15 nt, Human
cccugugauggggcc

SEQ ID NO: 2708769 - RNA, 23 nt, Human
cccuuuuuuggcugcugaaggcu

SEQ ID NO: 2708770 - RNA, 21 nt, Human
cccuuuuuuggcugcugaagg

SEQ ID NO: 2708771 - RNA, 22 nt, Human
cccuuuuuuggcugcugaaggc

SEQ ID NO: 2708772 - RNA, 14 nt, Human
cccuucucuccagc

SEQ ID NO: 2708773 - RNA, 19 nt, Human
cccuucucuccagccccug

SEQ ID NO: 2708774 - RNA, 15 nt, Human
ccuggggagaaagua

SEQ ID NO: 2708775 - RNA, 13 nt, Human
ccugguguggaag

SEQ ID NO: 2708776 - RNA, 20 nt, Human
ccugguggcagugggagcug

SEQ ID NO: 2708777 - RNA, 15 nt, Human
ccugguggcaguggg

SEQ ID NO: 2708778 - RNA, 18 nt, Human
ccugguggcagugggagc

SEQ ID NO: 2708779 - RNA, 19 nt, Human
ccugguggcagugggagcu

SEQ ID NO: 2708780 - RNA, 22 nt, Human
ccuggccucaagugauucuccu

SEQ ID NO: 2708781 - RNA, 20 nt, Human
ccuggccccucagggucccu

SEQ ID NO: 2708782 - RNA, 21 nt, Human
ccuggccccucagggucccug

SEQ ID NO: 2708783 - RNA, 16 nt, Human
ccuggccccucagggu

SEQ ID NO: 2708784 - RNA, 18 nt, Human
ccuggccccucagggucc

SEQ ID NO: 2708785 - RNA, 17 nt, Human
ccuggauggggcugcac

SEQ ID NO: 2708786 - RNA, 18 nt, Human
ccuggauggggcugcacc

SEQ ID NO: 2708787 - RNA, 15 nt, Human
ccuggauggggcugc

SEQ ID NO: 2708788 - RNA, 16 nt, Human
ccugccucagccuccc

SEQ ID NO: 2708789 - RNA, 15 nt, Human
ccugccucagccucc

SEQ ID NO: 2708790 - RNA, 21 nt, Human
ccugcccaggccccugccacc

SEQ ID NO: 2708791 - RNA, 22 nt, Human
ccugcccaggccccugccaccc

SEQ ID NO: 2708792 - RNA, 18 nt, Human
ccugcccaggccccugcc

SEQ ID NO: 2708793 - RNA, 19 nt, Human
ccugcccaggccccugcca

SEQ ID NO: 2708794 - RNA, 18 nt, Human
ccugcccaccuggccucu

SEQ ID NO: 2708795 - RNA, 19 nt, Human
ccugcccaccuggccucug

SEQ ID NO: 2708796 - RNA, 15 nt, Human
ccugcccaccuggcc

SEQ ID NO: 2708797 - RNA, 17 nt, Human
ccugcccaccuggccuc

SEQ ID NO: 2708798 - RNA, 16 nt, Human
ccucuuucccucccuu

SEQ ID NO: 2708799 - RNA, 19 nt, Human
ccucuuucccucccuuccu

SEQ ID NO: 2708800 - RNA, 15 nt, Human
ccucuuugagugaag

SEQ ID NO: 2708801 - RNA, 14 nt, Human
ccugcaggcagcca

SEQ ID NO: 2708802 - RNA, 12 nt, Human
ccugcaggcagc

SEQ ID NO: 2708803 - RNA, 13 nt, Human
ccugcaggcagcc

SEQ ID NO: 2708804 - RNA, 13 nt, Human
cccaacuccagaa

SEQ ID NO: 2708805 - RNA, 17 nt, Human
cccaacucaccccagcc

SEQ ID NO: 2708806 - RNA, 20 nt, Human
cccaacucaccccagcccca

SEQ ID NO: 2708807 - RNA, 13 nt, Human
cccaagcucugcu

SEQ ID NO: 2708808 - RNA, 14 nt, Human
cccaagcucugcuc

SEQ ID NO: 2708809 - RNA, 12 nt, Human
cccaagcucugc

SEQ ID NO: 2708810 - RNA, 15 nt, Human
cccaagcucugcucc

SEQ ID NO: 2708811 - RNA, 12 nt, Human
cccacucccugc

SEQ ID NO: 2708812 - RNA, 13 nt, Human
cccacucccugca

SEQ ID NO: 2708813 - RNA, 23 nt, Human
cccacugcuuuuggucuguguga

SEQ ID NO: 2708814 - RNA, 22 nt, Human
cccacugcuuuuggucugugug

SEQ ID NO: 2708815 - RNA, 15 nt, Human
cccaacucaccccag

SEQ ID NO: 2708816 - RNA, 16 nt, Human
cccaacucaccccagc

SEQ ID NO: 2708817 - RNA, 13 nt, Human
ccaucccucccuc

SEQ ID NO: 2708818 - RNA, 22 nt, Human
ccauccccuguagagugggagc

SEQ ID NO: 2708819 - RNA, 21 nt, Human
ccaucccauaugccugggcag

SEQ ID NO: 2708820 - RNA, 20 nt, Human
ccaucccaaacccuucagug

SEQ ID NO: 2708821 - RNA, 19 nt, Human
ccaucccauaugccugggc

SEQ ID NO: 2708822 - RNA, 20 nt, Human
ccaucccauaugccugggca

SEQ ID NO: 2708823 - RNA, 18 nt, Human
ccaguuggucccccuucc

SEQ ID NO: 2708824 - RNA, 20 nt, Human
ccaguuggucccccuuccau

SEQ ID NO: 2708825 - RNA, 18 nt, Human
ccauccagguucagcuug

SEQ ID NO: 2708826 - RNA, 19 nt, Human
ccauccagguucagcuugu

SEQ ID NO: 2708827 - RNA, 23 nt, Human
ccaguuggguggaugccuggugg

SEQ ID NO: 2708828 - RNA, 13 nt, Human
ccaguuggucccc

SEQ ID NO: 2708829 - RNA, 14 nt, Human
ccaucccucccucc

SEQ ID NO: 2708830 - RNA, 15 nt, Human
ccaucccucccucca

SEQ ID NO: 2708831 - RNA, 20 nt, Human
ccaugaggaacaaggcaagg

SEQ ID NO: 2708832 - RNA, 23 nt, Human
ccaugaggaacaaggcaaggcug

SEQ ID NO: 2708833 - RNA, 18 nt, Human
ccaugaguccccuguuug

SEQ ID NO: 2708834 - RNA, 21 nt, Human
ccaggggaaaaucagccugcu

SEQ ID NO: 2708835 - RNA, 12 nt, Human
ccaggcuggcgu

SEQ ID NO: 2708836 - RNA, 23 nt, Human
ccaggcaggucuugaacuccugg

SEQ ID NO: 2708837 - RNA, 12 nt, Human
ccaggcaggucu

SEQ ID NO: 2708838 - RNA, 14 nt, Human
ccaggcaggucuug

SEQ ID NO: 2708839 - RNA, 15 nt, Human
ccagccccauccucu

SEQ ID NO: 2708840 - RNA, 17 nt, Human
ccagccccauccucugu

SEQ ID NO: 2708841 - RNA, 17 nt, Human
ccagccccagugcccac

SEQ ID NO: 2708842 - RNA, 14 nt, Human
ccagcagagcaccu

SEQ ID NO: 2708843 - RNA, 12 nt, Human
ccagcagagcac

SEQ ID NO: 2708844 - RNA, 13 nt, Human
ccagcagagcacc

SEQ ID NO: 2708845 - RNA, 23 nt, Human
ccagccccuucugacccaugcug

SEQ ID NO: 2708846 - RNA, 24 nt, Human
ccagccccuucugacccaugcugc

SEQ ID NO: 2708847 - RNA, 13 nt, Human
cccuccucugcuu

SEQ ID NO: 2708848 - RNA, 22 nt, Human
cccuccucugcuugccaucccu

SEQ ID NO: 2708849 - RNA, 17 nt, Human
ccccugaauuuaaauag

SEQ ID NO: 2708850 - RNA, 15 nt, Human
ccccugacaacacuc

SEQ ID NO: 2708851 - RNA, 13 nt, Human
ccccugaauuuaa

SEQ ID NO: 2708852 - RNA, 14 nt, Human
ccccugccacccug

SEQ ID NO: 2708853 - RNA, 16 nt, Human
ccccugccacccuggg

SEQ ID NO: 2708854 - RNA, 16 nt, Human
cccggccccugcuggu

SEQ ID NO: 2708855 - RNA, 15 nt, Human
cccggccccugcugg

SEQ ID NO: 2708856 - RNA, 15 nt, Human
cccgggaagggggcu

SEQ ID NO: 2708857 - RNA, 13 nt, Human
ccccuucugaccc

SEQ ID NO: 2708858 - RNA, 14 nt, Human
ccccuucugaccca

SEQ ID NO: 2708859 - RNA, 16 nt, Human
cccgaauagcugggac

SEQ ID NO: 2708860 - RNA, 17 nt, Human
cccgaauagcugggacu

SEQ ID NO: 2708861 - RNA, 18 nt, Human
cccgaauagcugggacua

SEQ ID NO: 2708862 - RNA, 16 nt, Human
cccucaacucuccucc

SEQ ID NO: 2708863 - RNA, 16 nt, Human
cccucaacaccucugc

SEQ ID NO: 2708864 - RNA, 18 nt, Human
cccgggaagggggcuggg

SEQ ID NO: 2708865 - RNA, 21 nt, Human
cccgggaagggggcugggaca

SEQ ID NO: 2708866 - RNA, 24 nt, Human
cccagccagcaguucagagcugcc

SEQ ID NO: 2708867 - RNA, 15 nt, Human
cccaggaaaggcucc

SEQ ID NO: 2708868 - RNA, 16 nt, Human
cccaggaaaggcucca

SEQ ID NO: 2708869 - RNA, 22 nt, Human
cccaggcuuagucacugagaca

SEQ ID NO: 2708870 - RNA, 17 nt, Human
cccaggaaaggcuccag

SEQ ID NO: 2708871 - RNA, 18 nt, Human
cccaggaaaggcuccagg

SEQ ID NO: 2708872 - RNA, 21 nt, Human
cccauccucuguacagagccc

SEQ ID NO: 2708873 - RNA, 22 nt, Human
cccauccucuguacagagccca

SEQ ID NO: 2708874 - RNA, 14 nt, Human
ccccgcacugggcu

SEQ ID NO: 2708875 - RNA, 15 nt, Human
cccauuugcuccuuu

SEQ ID NO: 2708876 - RNA, 19 nt, Human
cccauucugccugcccagg

SEQ ID NO: 2708877 - RNA, 14 nt, Human
cccauucugccugc

SEQ ID NO: 2708878 - RNA, 15 nt, Human
cccauucugccugcc

SEQ ID NO: 2708879 - RNA, 15 nt, Human
ccccagauugcaaca

SEQ ID NO: 2708880 - RNA, 20 nt, Human
ccccagauugcaacaggcug

SEQ ID NO: 2708881 - RNA, 23 nt, Human
caggaaaucaaauaugcaaagca

SEQ ID NO: 2708882 - RNA, 22 nt, Human
caggaaaucaaauaugcaaagc

SEQ ID NO: 2708883 - RNA, 14 nt, Human
caggaaaggcucca

SEQ ID NO: 2708884 - RNA, 15 nt, Human
caggaaaggcuccag

SEQ ID NO: 2708885 - RNA, 18 nt, Human
cagcugugcucuggacag

SEQ ID NO: 2708886 - RNA, 15 nt, Human
cagcuucauuuccug

SEQ ID NO: 2708887 - RNA, 18 nt, Human
cagcuucauuuccugugu

SEQ ID NO: 2708888 - RNA, 16 nt, Human
cagcuccccucggaga

SEQ ID NO: 2708889 - RNA, 18 nt, Human
cagcuccccucggagaag

SEQ ID NO: 2708890 - RNA, 17 nt, Human
cagcuccccucggagaa

SEQ ID NO: 2708891 - RNA, 23 nt, Human
cagcugccuccccuccucugcuu

SEQ ID NO: 2708892 - RNA, 24 nt, Human
cagcugccuccccuccucugcuug

SEQ ID NO: 2708893 - RNA, 21 nt, Human
cagcugccuccccuccucugc

SEQ ID NO: 2708894 - RNA, 22 nt, Human
cagcugccuccccuccucugcu

SEQ ID NO: 2708895 - RNA, 22 nt, Human
cagcuccagcucaccagcccca

SEQ ID NO: 2708896 - RNA, 16 nt, Human
cagcuccagcucacca

SEQ ID NO: 2708897 - RNA, 17 nt, Human
cagcuccagcucaccag

SEQ ID NO: 2708898 - RNA, 18 nt, Human
cagcuccagcucaccagc

SEQ ID NO: 2708899 - RNA, 20 nt, Human
cagcuccagcucaccagccc

SEQ ID NO: 2708900 - RNA, 13 nt, Human
cagcuccagcuca

SEQ ID NO: 2708901 - RNA, 19 nt, Human
cagcuccaagaauuucuag

SEQ ID NO: 2708902 - RNA, 14 nt, Human
cagcuccagcucac

SEQ ID NO: 2708903 - RNA, 15 nt, Human
cagcuccagcucacc

SEQ ID NO: 2708904 - RNA, 16 nt, Human
cagcuccaagaauuuc

SEQ ID NO: 2708905 - RNA, 15 nt, Human
cagcccuucuuucca

SEQ ID NO: 2708906 - RNA, 19 nt, Human
cagcccuucuuuccacaga

SEQ ID NO: 2708907 - RNA, 20 nt, Human
cagcccuucuuuccacagaa

SEQ ID NO: 2708908 - RNA, 20 nt, Human
cagccgagauagccaaggcc

SEQ ID NO: 2708909 - RNA, 21 nt, Human
cagccgagauagccaaggcca

SEQ ID NO: 2708910 - RNA, 15 nt, Human
cagcccuuagcaggg

SEQ ID NO: 2708911 - RNA, 16 nt, Human
cagcccuuagcaggga

SEQ ID NO: 2708912 - RNA, 21 nt, Human
cagcccuuagcagggaaacag

SEQ ID NO: 2708913 - RNA, 17 nt, Human
cagccccuggaugcagc

SEQ ID NO: 2708914 - RNA, 18 nt, Human
cagccccuggaugcagcc

SEQ ID NO: 2708915 - RNA, 19 nt, Human
cagccccuggaugcagccu

SEQ ID NO: 2708916 - RNA, 21 nt, Human
cagccccuggaugcagccuca

SEQ ID NO: 2708917 - RNA, 12 nt, Human
cagccccuggau

SEQ ID NO: 2708918 - RNA, 13 nt, Human
cagccccuggaug

SEQ ID NO: 2708919 - RNA, 14 nt, Human
cagccccuggaugc

SEQ ID NO: 2708920 - RNA, 15 nt, Human
cagcggggacagcuc

SEQ ID NO: 2708921 - RNA, 14 nt, Human
cagcggggacagcu

SEQ ID NO: 2708922 - RNA, 16 nt, Human
cagcggggacagcucc

SEQ ID NO: 2708923 - RNA, 17 nt, Human
cagcggggacagcuccu

SEQ ID NO: 2708924 - RNA, 22 nt, Human
cagcaguugaaaagacuccaaa

SEQ ID NO: 2708925 - RNA, 23 nt, Human
cagcauauucaggaagcucaggg

SEQ ID NO: 2708926 - RNA, 19 nt, Human
cagcauauucaggaagcuc

SEQ ID NO: 2708927 - RNA, 22 nt, Human
cagcauauucaggaagcucagg

SEQ ID NO: 2708928 - RNA, 17 nt, Human
cagcaguugaaaagacu

SEQ ID NO: 2708929 - RNA, 21 nt, Human
cagcaguugaaaagacuccaa

SEQ ID NO: 2708930 - RNA, 20 nt, Human
cagcaguugaaaagacucca

SEQ ID NO: 2708931 - RNA, 22 nt, Human
cagccagcaguucagagcugcc

SEQ ID NO: 2708932 - RNA, 15 nt, Human
cagccagcaguucag

SEQ ID NO: 2708933 - RNA, 21 nt, Human
cagccagcaguucagagcugc

SEQ ID NO: 2708934 - RNA, 14 nt, Human
cagccagcaguuca

SEQ ID NO: 2708935 - RNA, 22 nt, Human
cagccaggccacaagacccuug

SEQ ID NO: 2708936 - RNA, 12 nt, Human
cagccaggccac

SEQ ID NO: 2708937 - RNA, 13 nt, Human
cagccaggccaca

SEQ ID NO: 2708938 - RNA, 22 nt, Human
cagcacagccucuuagaugcag

SEQ ID NO: 2708939 - RNA, 17 nt, Human
cagagcugcccucuccu

SEQ ID NO: 2708940 - RNA, 13 nt, Human
cagagcugcccuc

SEQ ID NO: 2708941 - RNA, 15 nt, Human
cagagcugcccucuc

SEQ ID NO: 2708942 - RNA, 16 nt, Human
cagagcugccaccugc

SEQ ID NO: 2708943 - RNA, 18 nt, Human
cagagcugccaccugccu

SEQ ID NO: 2708944 - RNA, 20 nt, Human
cagaaguuugagaucagccu

SEQ ID NO: 2708945 - RNA, 23 nt, Human
cagaaguuucugccgcagcccug

SEQ ID NO: 2708946 - RNA, 19 nt, Human
cagaaguuucugccgcagc

SEQ ID NO: 2708947 - RNA, 22 nt, Human
cagaaguuugagaucagccugg

SEQ ID NO: 2708948 - RNA, 23 nt, Human
cagaaguuugagaucagccuggg

SEQ ID NO: 2708949 - RNA, 22 nt, Human
cagagggccugcaagggaguga

SEQ ID NO: 2708950 - RNA, 20 nt, Human
cagagucagaaguuucugcc

SEQ ID NO: 2708951 - RNA, 18 nt, Human
cagaggggguggccuccc

SEQ ID NO: 2708952 - RNA, 17 nt, Human
cagaggggguggccucc

SEQ ID NO: 2708953 - RNA, 19 nt, Human
cagaggggguggccuccca

SEQ ID NO: 2708954 - RNA, 20 nt, Human
cagaggggguggccucccaa

SEQ ID NO: 2708955 - RNA, 19 nt, Human
cagauaugauucaaauguc

SEQ ID NO: 2708956 - RNA, 17 nt, Human
cagauaugauucaaaug

SEQ ID NO: 2708957 - RNA, 16 nt, Human
cagauaugauucaaau

SEQ ID NO: 2708958 - RNA, 15 nt, Human
cagauaugauucaaa

SEQ ID NO: 2708959 - RNA, 22 nt, Human
cagucaccccggccaccugcgg

SEQ ID NO: 2708960 - RNA, 20 nt, Human
cagucaccccggccaccugc

SEQ ID NO: 2708961 - RNA, 19 nt, Human
cagucaccccggccaccug

SEQ ID NO: 2708962 - RNA, 21 nt, Human
caguauuguacaaaguauuaa

SEQ ID NO: 2708963 - RNA, 16 nt, Human
cagguuuaagcuguua

SEQ ID NO: 2708964 - RNA, 18 nt, Human
cagguuuaagcuguuacu

SEQ ID NO: 2708965 - RNA, 13 nt, Human
caguauuguacaa

SEQ ID NO: 2708966 - RNA, 12 nt, Human
caguauuguaca

SEQ ID NO: 2708967 - RNA, 19 nt, Human
caguauuguacaaaguauu

SEQ ID NO: 2708968 - RNA, 18 nt, Human
caguauuguacaaaguau

SEQ ID NO: 2708969 - RNA, 17 nt, Human
caguauuguacaaagua

SEQ ID NO: 2708970 - RNA, 16 nt, Human
caguauuguacaaagu

SEQ ID NO: 2708971 - RNA, 22 nt, Human
cagggucucacucugucgccca

SEQ ID NO: 2708972 - RNA, 21 nt, Human
cagggucucacucugucgccc

SEQ ID NO: 2708973 - RNA, 17 nt, Human
cagggucucacucuguc

SEQ ID NO: 2708974 - RNA, 18 nt, Human
cagggucucacucugucg

SEQ ID NO: 2708975 - RNA, 12 nt, Human
caggguuggccc

SEQ ID NO: 2708976 - RNA, 16 nt, Human
caggugauccacccac

SEQ ID NO: 2708977 - RNA, 17 nt, Human
caggugauccacccacc

SEQ ID NO: 2708978 - RNA, 14 nt, Human
caggugcgaaagga

SEQ ID NO: 2708979 - RNA, 18 nt, Human
caggugcuaggaacacuc

SEQ ID NO: 2708980 - RNA, 20 nt, Human
caggugcuaggaacacuccu

SEQ ID NO: 2708981 - RNA, 14 nt, Human
cagguugguggggg

SEQ ID NO: 2708982 - RNA, 15 nt, Human
cagucucaggaaauc

SEQ ID NO: 2708983 - RNA, 15 nt, Human
cagugccaaaaacaa

SEQ ID NO: 2708984 - RNA, 11 nt, Human
cagugggagcu

SEQ ID NO: 2708985 - RNA, 12 nt, Human
cagugcccacag

SEQ ID NO: 2708986 - RNA, 22 nt, Human
cagugcacuaauguguaagaca

SEQ ID NO: 2708987 - RNA, 19 nt, Human
cagucugauucccaagcuc

SEQ ID NO: 2708988 - RNA, 20 nt, Human
cagucugauucccaagcucu

SEQ ID NO: 2708989 - RNA, 19 nt, Human
cagugcaugcugucccuua

SEQ ID NO: 2708990 - RNA, 22 nt, Human
cagugcaugcugucccuuacgu

SEQ ID NO: 2708991 - RNA, 23 nt, Human
cagugcaugcugucccuuacgug

SEQ ID NO: 2708992 - RNA, 17 nt, Human
caggcugggcuucagug

SEQ ID NO: 2708993 - RNA, 19 nt, Human
caggcugggcuucaguggc

SEQ ID NO: 2708994 - RNA, 15 nt, Human
caggcuggcgugcag

SEQ ID NO: 2708995 - RNA, 16 nt, Human
caggcugggcuucagu

SEQ ID NO: 2708996 - RNA, 15 nt, Human
caggcugggcuucag

SEQ ID NO: 2708997 - RNA, 22 nt, Human
cagggaguccgaaagggacuug

SEQ ID NO: 2708998 - RNA, 18 nt, Human
cagggaggugaccccagg

SEQ ID NO: 2708999 - RNA, 17 nt, Human
caggaggccagccuuga

SEQ ID NO: 2709000 - RNA, 18 nt, Human
caggcacccaccaucaug

SEQ ID NO: 2709001 - RNA, 22 nt, Human
caggcacccaccaucaugucug

SEQ ID NO: 2709002 - RNA, 23 nt, Human
caggcacccaccaucaugucugg

SEQ ID NO: 2709003 - RNA, 14 nt, Human
caggaggccagccu

SEQ ID NO: 2709004 - RNA, 15 nt, Human
caggaggccagccuu

SEQ ID NO: 2709005 - RNA, 16 nt, Human
caggaggccagccuug

SEQ ID NO: 2709006 - RNA, 23 nt, Human
caggccagagggagugacagagg

SEQ ID NO: 2709007 - RNA, 16 nt, Human
caggccagagggagug

SEQ ID NO: 2709008 - RNA, 19 nt, Human
caggccagagggagugaca

SEQ ID NO: 2709009 - RNA, 21 nt, Human
caggccagagggagugacaga

SEQ ID NO: 2709010 - RNA, 12 nt, Human
cauuaucucaaa

SEQ ID NO: 2709011 - RNA, 23 nt, Human
cauuaucuagauacuguaucaug

SEQ ID NO: 2709012 - RNA, 13 nt, Human
cauuaucucaaaa

SEQ ID NO: 2709013 - RNA, 22 nt, Human
cauuaggugugacugaauuucu

SEQ ID NO: 2709014 - RNA, 12 nt, Human
cauguuggccag

SEQ ID NO: 2709015 - RNA, 13 nt, Human
cauguuggccagg

SEQ ID NO: 2709016 - RNA, 18 nt, Human
cauguccaagaagcccag

SEQ ID NO: 2709017 - RNA, 19 nt, Human
cauguccaagaagcccagg

SEQ ID NO: 2709018 - RNA, 20 nt, Human
cauguccaagaagcccagga

SEQ ID NO: 2709019 - RNA, 12 nt, Human
cauuccuguucc

SEQ ID NO: 2709020 - RNA, 14 nt, Human
caugcugcccugug

SEQ ID NO: 2709021 - RNA, 15 nt, Human
caugcugcccuguga

SEQ ID NO: 2709022 - RNA, 23 nt, Human
caugacacgaauauugcugaugg

SEQ ID NO: 2709023 - RNA, 21 nt, Human
caugacacgaauauugcugau

SEQ ID NO: 2709024 - RNA, 23 nt, Human
caugaaguaauaugcacacauuu

SEQ ID NO: 2709025 - RNA, 22 nt, Human
caugaaguaauaugcacacauu

SEQ ID NO: 2709026 - RNA, 19 nt, Human
caugaaguaauaugcacac

SEQ ID NO: 2709027 - RNA, 15 nt, Human
caugaaguaauaugc

SEQ ID NO: 2709028 - RNA, 16 nt, Human
caugcacgugugugca

SEQ ID NO: 2709029 - RNA, 13 nt, Human
caugcuccuggcc

SEQ ID NO: 2709030 - RNA, 12 nt, Human
caugcugcccug

SEQ ID NO: 2709031 - RNA, 13 nt, Human
caugcugcccugu

SEQ ID NO: 2709032 - RNA, 24 nt, Human
caugauuaaccacuucagcugacu

SEQ ID NO: 2709033 - RNA, 22 nt, Human
caugauuaaccacuucagcuga

SEQ ID NO: 2709034 - RNA, 23 nt, Human
caugauuaaccacuucagcugac

SEQ ID NO: 2709035 - RNA, 13 nt, Human
cauaauuuauaca

SEQ ID NO: 2709036 - RNA, 20 nt, Human
cauaauuuauacaggucaua

SEQ ID NO: 2709037 - RNA, 19 nt, Human
cauagcagagaaugaaagg

SEQ ID NO: 2709038 - RNA, 22 nt, Human
cauagcagagaaugaaagggcc

SEQ ID NO: 2709039 - RNA, 22 nt, Human
cauaugccugggcagaaggaag

SEQ ID NO: 2709040 - RNA, 15 nt, Human
cauaugccugggcag

SEQ ID NO: 2709041 - RNA, 20 nt, Human
cauaugccugggcagaagga

SEQ ID NO: 2709042 - RNA, 22 nt, Human
cauauucaggaagcucagggcc

SEQ ID NO: 2709043 - RNA, 20 nt, Human
cauauucaggaagcucaggg

SEQ ID NO: 2709044 - RNA, 14 nt, Human
cauauucaggaagc

SEQ ID NO: 2709045 - RNA, 15 nt, Human
cauauucaggaagcu

SEQ ID NO: 2709046 - RNA, 14 nt, Human
cauccccuguagag

SEQ ID NO: 2709047 - RNA, 19 nt, Human
caucccauaugccugggca

SEQ ID NO: 2709048 - RNA, 17 nt, Human
caucccagccccaauga

SEQ ID NO: 2709049 - RNA, 14 nt, Human
caucaggccaggcc

SEQ ID NO: 2709050 - RNA, 16 nt, Human
caucaggccaggcccu

SEQ ID NO: 2709051 - RNA, 19 nt, Human
caucaggccaggcccucug

SEQ ID NO: 2709052 - RNA, 15 nt, Human
caucaggccaggccc

SEQ ID NO: 2709053 - RNA, 16 nt, Human
ccacagaagcuccagg

SEQ ID NO: 2709054 - RNA, 18 nt, Human
ccaccagucugacuguuu

SEQ ID NO: 2709055 - RNA, 18 nt, Human
ccacagaagcuccaggua

SEQ ID NO: 2709056 - RNA, 22 nt, Human
ccacagagaaaguacuucucca

SEQ ID NO: 2709057 - RNA, 18 nt, Human
ccacgcuggaccuugaac

SEQ ID NO: 2709058 - RNA, 18 nt, Human
ccaccuuggcugcaggga

SEQ ID NO: 2709059 - RNA, 19 nt, Human
ccaccuuggcugcagggag

SEQ ID NO: 2709060 - RNA, 12 nt, Human
ccaccuuggcug

SEQ ID NO: 2709061 - RNA, 14 nt, Human
ccaccuuggcugca

SEQ ID NO: 2709062 - RNA, 15 nt, Human
ccaccuuggcugcag

SEQ ID NO: 2709063 - RNA, 16 nt, Human
ccaccuuggcugcagg

SEQ ID NO: 2709064 - RNA, 18 nt, Human
ccaccaucaccagacagg

SEQ ID NO: 2709065 - RNA, 19 nt, Human
ccaccaucaugucuggcua

SEQ ID NO: 2709066 - RNA, 18 nt, Human
ccaccaucaugucuggcu

SEQ ID NO: 2709067 - RNA, 14 nt, Human
ccaagaagcccagg

SEQ ID NO: 2709068 - RNA, 12 nt, Human
ccaagcuggucc

SEQ ID NO: 2709069 - RNA, 19 nt, Human
ccaagcuggucccacucag

SEQ ID NO: 2709070 - RNA, 15 nt, Human
ccaaggccaaaggaa

SEQ ID NO: 2709071 - RNA, 22 nt, Human
ccaaauggaaaugggcagagca

SEQ ID NO: 2709072 - RNA, 13 nt, Human
ccaacgucugugc

SEQ ID NO: 2709073 - RNA, 15 nt, Human
ccaacgucugugcca

SEQ ID NO: 2709074 - RNA, 13 nt, Human
ccaagaagcccag

SEQ ID NO: 2709075 - RNA, 16 nt, Human
ccaaggccaaaggaag

SEQ ID NO: 2709076 - RNA, 19 nt, Human
cauuuuuuaaaugcaccug

SEQ ID NO: 2709077 - RNA, 16 nt, Human
cauuuuuuaaaugcac

SEQ ID NO: 2709078 - RNA, 15 nt, Human
cauuuuuuaaaugca

SEQ ID NO: 2709079 - RNA, 14 nt, Human
cauuuauucugcuc

SEQ ID NO: 2709080 - RNA, 15 nt, Human
cauuuauucugcuca

SEQ ID NO: 2709081 - RNA, 22 nt, Human
cauuuggaaaucuuuaaaaaaa

SEQ ID NO: 2709082 - RNA, 21 nt, Human
cauuuggagacacaacuauuu

SEQ ID NO: 2709083 - RNA, 15 nt, Human
cauuuggauuggaug

SEQ ID NO: 2709084 - RNA, 17 nt, Human
cauuugucacacacuuu

SEQ ID NO: 2709085 - RNA, 19 nt, Human
cauuguaaauaguauuuga

SEQ ID NO: 2709086 - RNA, 16 nt, Human
auuuaauaaaugugcc

SEQ ID NO: 2709087 - RNA, 21 nt, Human
auuuaaugaaagacuguacaa

SEQ ID NO: 2709088 - RNA, 20 nt, Human
auuuaaugaaagacuguaca

SEQ ID NO: 2709089 - RNA, 15 nt, Human
auuuaaugaaagacu

SEQ ID NO: 2709090 - RNA, 16 nt, Human
auuuaaugaaagacug

SEQ ID NO: 2709091 - RNA, 14 nt, Human
auuucuaugaaaua

SEQ ID NO: 2709092 - RNA, 18 nt, Human
auuucuauauuuucauuc

SEQ ID NO: 2709093 - RNA, 17 nt, Human
auuucuauauuuucauu

SEQ ID NO: 2709094 - RNA, 16 nt, Human
auuucauaugcuguau

SEQ ID NO: 2709095 - RNA, 16 nt, Human
auuucuauauuuucau

SEQ ID NO: 2709096 - RNA, 15 nt, Human
auuucuauauuuuca

SEQ ID NO: 2709097 - RNA, 20 nt, Human
auuucauaccuaucaucuua

SEQ ID NO: 2709098 - RNA, 22 nt, Human
auuucuaugcugaguuugugcu

SEQ ID NO: 2709099 - RNA, 21 nt, Human
auuucuaugcugaguuugugc

SEQ ID NO: 2709100 - RNA, 19 nt, Human
auuucuaugcugaguuugu

SEQ ID NO: 2709101 - RNA, 19 nt, Human
auuucuauauuuucauucu

SEQ ID NO: 2709102 - RNA, 15 nt, Human
auuguuuaaaaucau

SEQ ID NO: 2709103 - RNA, 16 nt, Human
auuguugucugcaacu

SEQ ID NO: 2709104 - RNA, 17 nt, Human
auuguguugugaauguu

SEQ ID NO: 2709105 - RNA, 14 nt, Human
auuguguugugaau

SEQ ID NO: 2709106 - RNA, 19 nt, Human
auuguacaaaguauuaagc

SEQ ID NO: 2709107 - RNA, 17 nt, Human
auuguacaaaguauuaa

SEQ ID NO: 2709108 - RNA, 16 nt, Human
auuguacaaaguauua

SEQ ID NO: 2709109 - RNA, 21 nt, Human
auuguaauuauaucugaggaa

SEQ ID NO: 2709110 - RNA, 15 nt, Human
auuguaauuauaucu

SEQ ID NO: 2709111 - RNA, 17 nt, Human
auuguaauuauaucuga

SEQ ID NO: 2709112 - RNA, 16 nt, Human
auuguaauuauaucug

SEQ ID NO: 2709113 - RNA, 19 nt, Human
auuaugaauuacauuugua

SEQ ID NO: 2709114 - RNA, 20 nt, Human
auuaugaauuacauuuguau

SEQ ID NO: 2709115 - RNA, 22 nt, Human
auuaugaauuacauuuguauaa

SEQ ID NO: 2709116 - RNA, 17 nt, Human
auuaaaugcccagcccc

SEQ ID NO: 2709117 - RNA, 19 nt, Human
auuaaaugcccagccccuu

SEQ ID NO: 2709118 - RNA, 18 nt, Human
auucaaauguauuacagu

SEQ ID NO: 2709119 - RNA, 18 nt, Human
auucaacagguuuuccug

SEQ ID NO: 2709120 - RNA, 16 nt, Human
auucaaaugucuauaa

SEQ ID NO: 2709121 - RNA, 17 nt, Human
auucuccuuguguuacu

SEQ ID NO: 2709122 - RNA, 19 nt, Human
auucuccuuguguuacuaa

SEQ ID NO: 2709123 - RNA, 18 nt, Human
auucuccuuguguuacua

SEQ ID NO: 2709124 - RNA, 18 nt, Human
auucucuaguuugauuaa

SEQ ID NO: 2709125 - RNA, 17 nt, Human
auucucuaguuugauua

SEQ ID NO: 2709126 - RNA, 22 nt, Human
auucuccuuguguuacuaaguu

SEQ ID NO: 2709127 - RNA, 21 nt, Human
auucuccuuguguuacuaagu

SEQ ID NO: 2709128 - RNA, 19 nt, Human
auucuucugcuucagccuc

SEQ ID NO: 2709129 - RNA, 20 nt, Human
auucuucugcuucagccucc

SEQ ID NO: 2709130 - RNA, 22 nt, Human
auucuucuguacgucugacagg

SEQ ID NO: 2709131 - RNA, 14 nt, Human
auucuugcaaagua

SEQ ID NO: 2709132 - RNA, 16 nt, Human
auucuugcaaaguauc

SEQ ID NO: 2709133 - RNA, 15 nt, Human
auucuugcaaaguau

SEQ ID NO: 2709134 - RNA, 21 nt, Human
caaaucuuaacuugaaggagu

SEQ ID NO: 2709135 - RNA, 21 nt, Human
caaaguaucccuacuguaauu

SEQ ID NO: 2709136 - RNA, 19 nt, Human
caaaguaucccuacuguaa

SEQ ID NO: 2709137 - RNA, 22 nt, Human
caaaguagaagucuuagaugua

SEQ ID NO: 2709138 - RNA, 18 nt, Human
caaagggugaaaauuauu

SEQ ID NO: 2709139 - RNA, 22 nt, Human
caaagcagugcaugcugucccu

SEQ ID NO: 2709140 - RNA, 16 nt, Human
caaagauauuuugcuu

SEQ ID NO: 2709141 - RNA, 14 nt, Human
caaagauauuuugc

SEQ ID NO: 2709142 - RNA, 18 nt, Human
caaagcagugcaugcugu

SEQ ID NO: 2709143 - RNA, 21 nt, Human
caaagcagugcaugcuguccc

SEQ ID NO: 2709144 - RNA, 18 nt, Human
caagaccacguuucuaaa

SEQ ID NO: 2709145 - RNA, 17 nt, Human
caagaccacguuucuaa

SEQ ID NO: 2709146 - RNA, 13 nt, Human
caagaugguucua

SEQ ID NO: 2709147 - RNA, 16 nt, Human
caagaugguucuagca

SEQ ID NO: 2709148 - RNA, 22 nt, Human
caagaauugaagcaggacuaaa

SEQ ID NO: 2709149 - RNA, 14 nt, Human
caacucuccuccag

SEQ ID NO: 2709150 - RNA, 17 nt, Human
caacucauauuuucaug

SEQ ID NO: 2709151 - RNA, 17 nt, Human
caacucaccccagcccc

SEQ ID NO: 2709152 - RNA, 18 nt, Human
caacucaccccagcccca

SEQ ID NO: 2709153 - RNA, 12 nt, Human
auuuuauaucuu

SEQ ID NO: 2709154 - RNA, 19 nt, Human
auuuuagggguagcauuug

SEQ ID NO: 2709155 - RNA, 14 nt, Human
auuuuauaucuugu

SEQ ID NO: 2709156 - RNA, 16 nt, Human
auuuuauaucuuguag

SEQ ID NO: 2709157 - RNA, 14 nt, Human
auuuuuagacagag

SEQ ID NO: 2709158 - RNA, 19 nt, Human
auuuuuaagugcugcauuu

SEQ ID NO: 2709159 - RNA, 18 nt, Human
auuuuuaagugcugcauu

SEQ ID NO: 2709160 - RNA, 16 nt, Human
auuuuuaagugcugca

SEQ ID NO: 2709161 - RNA, 15 nt, Human
auuuuuauauuugaa

SEQ ID NO: 2709162 - RNA, 16 nt, Human
auuuuuauauuuacua

SEQ ID NO: 2709163 - RNA, 15 nt, Human
auuuuuauauuuacu

SEQ ID NO: 2709164 - RNA, 13 nt, Human
auuuuuuuguugu

SEQ ID NO: 2709165 - RNA, 18 nt, Human
auuuuuuuuuccuucagu

SEQ ID NO: 2709166 - RNA, 16 nt, Human
auuuuuuugagacaga

SEQ ID NO: 2709167 - RNA, 20 nt, Human
auuuuuuuuuccuucagugc

SEQ ID NO: 2709168 - RNA, 22 nt, Human
auuuuuuuuuccuucagugccu

SEQ ID NO: 2709169 - RNA, 19 nt, Human
caaaagcugggcagguugg

SEQ ID NO: 2709170 - RNA, 15 nt, Human
caaaccaaauaaaaa

SEQ ID NO: 2709171 - RNA, 14 nt, Human
caaaccaaauaaaa

SEQ ID NO: 2709172 - RNA, 21 nt, Human
caaaaggauaaugaauacuuu

SEQ ID NO: 2709173 - RNA, 15 nt, Human
caaacagucucagga

SEQ ID NO: 2709174 - RNA, 17 nt, Human
caaacagucucaggaaa

SEQ ID NO: 2709175 - RNA, 16 nt, Human
caaacagucucaggaa

SEQ ID NO: 2709176 - RNA, 15 nt, Human
caauaaaauggguuu

SEQ ID NO: 2709177 - RNA, 20 nt, Human
caauaaaauccauacauuug

SEQ ID NO: 2709178 - RNA, 23 nt, Human
caauaaaauccauacauuugugu

SEQ ID NO: 2709179 - RNA, 21 nt, Human
caagucagucauucagauaug

SEQ ID NO: 2709180 - RNA, 21 nt, Human
caaggccaaaggaagcacaug

SEQ ID NO: 2709181 - RNA, 19 nt, Human
caaggccaaaggaagcaca

SEQ ID NO: 2709182 - RNA, 20 nt, Human
caaggccaaaggaagcacau

SEQ ID NO: 2709183 - RNA, 16 nt, Human
caaggcaaggcuguca

SEQ ID NO: 2709184 - RNA, 17 nt, Human
caaggcaaggcugucaa

SEQ ID NO: 2709185 - RNA, 18 nt, Human
caaggcaaggcugucaau

SEQ ID NO: 2709186 - RNA, 17 nt, Human
cacaagagcccaggccu

SEQ ID NO: 2709187 - RNA, 20 nt, Human
cacaagagcccaggccuccu

SEQ ID NO: 2709188 - RNA, 18 nt, Human
cacaagcuccaagcuccc

SEQ ID NO: 2709189 - RNA, 19 nt, Human
cacaagcuccaagcuccca

SEQ ID NO: 2709190 - RNA, 18 nt, Human
cacaagagcccaggccuc

SEQ ID NO: 2709191 - RNA, 19 nt, Human
cacaagagcccaggccucc

SEQ ID NO: 2709192 - RNA, 15 nt, Human
caaugggagcucaug

SEQ ID NO: 2709193 - RNA, 16 nt, Human
caauggcagccuuggc

SEQ ID NO: 2709194 - RNA, 12 nt, Human
caaugcuggcug

SEQ ID NO: 2709195 - RNA, 20 nt, Human
caaugcuggcuguuggcugg

SEQ ID NO: 2709196 - RNA, 21 nt, Human
caaugcuggcuguuggcuggg

SEQ ID NO: 2709197 - RNA, 13 nt, Human
caaugcuggcugu

SEQ ID NO: 2709198 - RNA, 20 nt, Human
cacaagcuccaagcucccag

SEQ ID NO: 2709199 - RNA, 21 nt, Human
cacaagcuccaagcucccagg

SEQ ID NO: 2709200 - RNA, 11 nt, Human
cacacauuuuu

SEQ ID NO: 2709201 - RNA, 10 nt, Human
cacacauuuu

SEQ ID NO: 2709202 - RNA, 20 nt, Human
cacacauuuuuuaaaugcac

SEQ ID NO: 2709203 - RNA, 19 nt, Human
cacacauuuuuuaaaugca

SEQ ID NO: 2709204 - RNA, 16 nt, Human
cacacauuuuuuaaau

SEQ ID NO: 2709205 - RNA, 12 nt, Human
cacacauuuuuu

SEQ ID NO: 2709206 - RNA, 17 nt, Human
cacagcucuucuccagg

SEQ ID NO: 2709207 - RNA, 14 nt, Human
cacagcucuucucc

SEQ ID NO: 2709208 - RNA, 15 nt, Human
cacagcucuucucca

SEQ ID NO: 2709209 - RNA, 15 nt, Human
cacagcucuguccug

SEQ ID NO: 2709210 - RNA, 16 nt, Human
cacagcucuguccugg

SEQ ID NO: 2709211 - RNA, 18 nt, Human
cacagcucuguccuggga

SEQ ID NO: 2709212 - RNA, 11 nt, Human
cacagcucugu

SEQ ID NO: 2709213 - RNA, 14 nt, Human
cacagcucuguccu

SEQ ID NO: 2709214 - RNA, 18 nt, Human
cacagacccugcccugug

SEQ ID NO: 2709215 - RNA, 14 nt, Human
cacagacccugccc

SEQ ID NO: 2709216 - RNA, 16 nt, Human
cacagacccugcccug

SEQ ID NO: 2709217 - RNA, 17 nt, Human
cacagacccugcccugu

SEQ ID NO: 2709218 - RNA, 17 nt, Human
cacauuuuauuuuauua

SEQ ID NO: 2709219 - RNA, 21 nt, Human
cacauuuuauuuuauuaugca

SEQ ID NO: 2709220 - RNA, 20 nt, Human
cacauuuuauuuuauuaugc

SEQ ID NO: 2709221 - RNA, 19 nt, Human
cacauuuuauuuuauuaug

SEQ ID NO: 2709222 - RNA, 14 nt, Human
caccaacgucugug

SEQ ID NO: 2709223 - RNA, 16 nt, Human
caccaacgucugugcc

SEQ ID NO: 2709224 - RNA, 16 nt, Human
cacccaggagccccga

SEQ ID NO: 2709225 - RNA, 18 nt, Human
cacccaccucagccuccc

SEQ ID NO: 2709226 - RNA, 16 nt, Human
caccagccccagugcc

SEQ ID NO: 2709227 - RNA, 13 nt, Human
caccagccccagu

SEQ ID NO: 2709228 - RNA, 17 nt, Human
cacccaccucagccucc

SEQ ID NO: 2709229 - RNA, 22 nt, Human
cacuguuuugaaucucauaauu

SEQ ID NO: 2709230 - RNA, 23 nt, Human
cacuguugcccaggcuggcgugc

SEQ ID NO: 2709231 - RNA, 18 nt, Human
cacuguugcccaggcugg

SEQ ID NO: 2709232 - RNA, 19 nt, Human
cacuguugcccaggcuggc

SEQ ID NO: 2709233 - RNA, 17 nt, Human
cacugccaugccagcuu

SEQ ID NO: 2709234 - RNA, 20 nt, Human
cacugcagccucaaccuccu

SEQ ID NO: 2709235 - RNA, 21 nt, Human
cacugcagccucaaccuccug

SEQ ID NO: 2709236 - RNA, 22 nt, Human
cacugcagccucaaccuccugg

SEQ ID NO: 2709237 - RNA, 23 nt, Human
cacugcagccucaaccuccuggg

SEQ ID NO: 2709238 - RNA, 19 nt, Human
cacugcagccucaaccucc

SEQ ID NO: 2709239 - RNA, 14 nt, Human
cacugcagccucaa

SEQ ID NO: 2709240 - RNA, 17 nt, Human
cacuuguguuuugcaag

SEQ ID NO: 2709241 - RNA, 18 nt, Human
cacuuguguuaugaagca

SEQ ID NO: 2709242 - RNA, 13 nt, Human
cacuuucuagcca

SEQ ID NO: 2709243 - RNA, 16 nt, Human
cacuuucuagccagag

SEQ ID NO: 2709244 - RNA, 17 nt, Human
cacuuucuagccagagg

SEQ ID NO: 2709245 - RNA, 14 nt, Human
cagaaguuucugcc

SEQ ID NO: 2709246 - RNA, 16 nt, Human
cagaaguuucugccgc

SEQ ID NO: 2709247 - RNA, 16 nt, Human
cagaaauguacagcaa

SEQ ID NO: 2709248 - RNA, 16 nt, Human
cagaaaguuauugaua

SEQ ID NO: 2709249 - RNA, 11 nt, Human
cagaaaguuau

SEQ ID NO: 2709250 - RNA, 21 nt, Human
cacuacauucuguuaaucauu

SEQ ID NO: 2709251 - RNA, 17 nt, Human
cacuacauucuguuaau

SEQ ID NO: 2709252 - RNA, 16 nt, Human
cacuacauucuguuaa

SEQ ID NO: 2709253 - RNA, 13 nt, Human
cacuccagccugg

SEQ ID NO: 2709254 - RNA, 14 nt, Human
cacuccagccuggg

SEQ ID NO: 2709255 - RNA, 20 nt, Human
cacucugucgcccagucugg

SEQ ID NO: 2709256 - RNA, 15 nt, Human
cacggcucacugcag

SEQ ID NO: 2709257 - RNA, 14 nt, Human
cacggcucacugca

SEQ ID NO: 2709258 - RNA, 17 nt, Human
cacggccaggccagagg

SEQ ID NO: 2709259 - RNA, 12 nt, Human
cacggccaggcc

SEQ ID NO: 2709260 - RNA, 13 nt, Human
cacggccaggcca

SEQ ID NO: 2709261 - RNA, 20 nt, Human
cacucuuauugcccacgcug

SEQ ID NO: 2709262 - RNA, 21 nt, Human
cacucuuauugcccacgcugg

SEQ ID NO: 2709263 - RNA, 22 nt, Human
cacucuuauugcccacgcugga

SEQ ID NO: 2709264 - RNA, 12 nt, Human
caccucagccuc

SEQ ID NO: 2709265 - RNA, 14 nt, Human
caccuuucccaucu

SEQ ID NO: 2709266 - RNA, 18 nt, Human
caccuuggcugcagggag

SEQ ID NO: 2709267 - RNA, 15 nt, Human
caccuuggcugcagg

SEQ ID NO: 2709268 - RNA, 16 nt, Human
caccuuggcugcaggg

SEQ ID NO: 2709269 - RNA, 12 nt, Human
gcccccacuggu

SEQ ID NO: 2709270 - RNA, 17 nt, Human
gccccugccacccuggg

SEQ ID NO: 2709271 - RNA, 16 nt, Human
gccccugccacccugg

SEQ ID NO: 2709272 - RNA, 23 nt, Human
gcccgggcucugccucccaucac

SEQ ID NO: 2709273 - RNA, 20 nt, Human
gccuaggugacagagugaga

SEQ ID NO: 2709274 - RNA, 20 nt, Human
gccuagcauacguacacauu

SEQ ID NO: 2709275 - RNA, 22 nt, Human
gccuagcauacguacacauuuu

SEQ ID NO: 2709276 - RNA, 21 nt, Human
gccuagcauacguacacauuu

SEQ ID NO: 2709277 - RNA, 23 nt, Human
gccuagcauacguacacauuuua

SEQ ID NO: 2709278 - RNA, 13 nt, Human
gccuaggugacag

SEQ ID NO: 2709279 - RNA, 14 nt, Human
gccuaggugacaga

SEQ ID NO: 2709280 - RNA, 15 nt, Human
gccuaggugacagag

SEQ ID NO: 2709281 - RNA, 19 nt, Human
gccgcagcccugcagaggg

SEQ ID NO: 2709282 - RNA, 20 nt, Human
gccgcagcccugcagagggc

SEQ ID NO: 2709283 - RNA, 22 nt, Human
gcccuuagcagggaaacagcua

SEQ ID NO: 2709284 - RNA, 12 nt, Human
gcccugccuccu

SEQ ID NO: 2709285 - RNA, 13 nt, Human
gcccugccuccuu

SEQ ID NO: 2709286 - RNA, 19 nt, Human
gcccuuagcagggaaacag

SEQ ID NO: 2709287 - RNA, 20 nt, Human
gcccuuagcagggaaacagc

SEQ ID NO: 2709288 - RNA, 16 nt, Human
gcccugcagagggcac

SEQ ID NO: 2709289 - RNA, 18 nt, Human
gcccugcagagggcacag

SEQ ID NO: 2709290 - RNA, 11 nt, Human
gcccugccucc

SEQ ID NO: 2709291 - RNA, 17 nt, Human
gcccugcccaccuggcc

SEQ ID NO: 2709292 - RNA, 20 nt, Human
gcccugcccaccuggccucu

SEQ ID NO: 2709293 - RNA, 21 nt, Human
gcccugcccaccuggccucug

SEQ ID NO: 2709294 - RNA, 22 nt, Human
gcccugcccaccuggccucugc

SEQ ID NO: 2709295 - RNA, 22 nt, Human
gccugcccaggccccugccacc

SEQ ID NO: 2709296 - RNA, 15 nt, Human
gccugcccaggcccc

SEQ ID NO: 2709297 - RNA, 20 nt, Human
gccugcccaggccccugcca

SEQ ID NO: 2709298 - RNA, 15 nt, Human
gccucuuagaugcag

SEQ ID NO: 2709299 - RNA, 16 nt, Human
gccucuuaugggcugg

SEQ ID NO: 2709300 - RNA, 17 nt, Human
gccucuuaugggcuggg

SEQ ID NO: 2709301 - RNA, 18 nt, Human
gccucuuaugggcugggu

SEQ ID NO: 2709302 - RNA, 20 nt, Human
gccucgaacuggcugcaaag

SEQ ID NO: 2709303 - RNA, 22 nt, Human
gccucgaacuggcugcaaaggg

SEQ ID NO: 2709304 - RNA, 13 nt, Human
gccugcccaggcc

SEQ ID NO: 2709305 - RNA, 14 nt, Human
gccugcccaggccc

SEQ ID NO: 2709306 - RNA, 14 nt, Human
gccucuuggguuca

SEQ ID NO: 2709307 - RNA, 21 nt, Human
gccucuuaugggcuggguucu

SEQ ID NO: 2709308 - RNA, 17 nt, Human
gccucgaacuggcugca

SEQ ID NO: 2709309 - RNA, 19 nt, Human
gccuccugugugugcgccu

SEQ ID NO: 2709310 - RNA, 23 nt, Human
gccuccugugugugcgccuacag

SEQ ID NO: 2709311 - RNA, 16 nt, Human
gccucccaaagugcug

SEQ ID NO: 2709312 - RNA, 17 nt, Human
gccucccaaagugcugg

SEQ ID NO: 2709313 - RNA, 22 nt, Human
gcgaucuggguucacugcaacc

SEQ ID NO: 2709314 - RNA, 20 nt, Human
gccuugaccauucuccaccu

SEQ ID NO: 2709315 - RNA, 17 nt, Human
gccuugaccauucucca

SEQ ID NO: 2709316 - RNA, 19 nt, Human
gccuugaccauucuccacc

SEQ ID NO: 2709317 - RNA, 17 nt, Human
gcgagcccugguggcag

SEQ ID NO: 2709318 - RNA, 15 nt, Human
gcgagcccugguggc

SEQ ID NO: 2709319 - RNA, 20 nt, Human
gccuggccugagcugggaug

SEQ ID NO: 2709320 - RNA, 13 nt, Human
gccuggccugagc

SEQ ID NO: 2709321 - RNA, 14 nt, Human
gccuggccugagcu

SEQ ID NO: 2709322 - RNA, 18 nt, Human
gccuggccugagcuggga

SEQ ID NO: 2709323 - RNA, 18 nt, Human
gccugugccucugggacu

SEQ ID NO: 2709324 - RNA, 17 nt, Human
gccugugccucugggac

SEQ ID NO: 2709325 - RNA, 16 nt, Human
gccugugccucuggga

SEQ ID NO: 2709326 - RNA, 13 nt, Human
gccuggcucaggu

SEQ ID NO: 2709327 - RNA, 14 nt, Human
gccuguugggccag

SEQ ID NO: 2709328 - RNA, 15 nt, Human
gccuguugggccagg

SEQ ID NO: 2709329 - RNA, 16 nt, Human
gccuguugggccagga

SEQ ID NO: 2709330 - RNA, 18 nt, Human
gccuguugggccaggagc

SEQ ID NO: 2709331 - RNA, 20 nt, Human
gccuguugggccaggagccu

SEQ ID NO: 2709332 - RNA, 23 nt, Human
gcucugcaagaauugaagcagga

SEQ ID NO: 2709333 - RNA, 23 nt, Human
gcucugaucauccacugugccau

SEQ ID NO: 2709334 - RNA, 17 nt, Human
gcucugaucauccacug

SEQ ID NO: 2709335 - RNA, 11 nt, Human
gcucugcccuu

SEQ ID NO: 2709336 - RNA, 21 nt, Human
gcuccccucggagaagagcug

SEQ ID NO: 2709337 - RNA, 14 nt, Human
gcuccuggcccacu

SEQ ID NO: 2709338 - RNA, 15 nt, Human
gcuccuggcccacug

SEQ ID NO: 2709339 - RNA, 20 nt, Human
gcuccuggcccacugcaucg

SEQ ID NO: 2709340 - RNA, 18 nt, Human
gcuccuggcccacugcau

SEQ ID NO: 2709341 - RNA, 19 nt, Human
gcuccuggcccacugcauc

SEQ ID NO: 2709342 - RNA, 18 nt, Human
gcuccagcucaccagccc

SEQ ID NO: 2709343 - RNA, 20 nt, Human
gcuccagcucaccagcccca

SEQ ID NO: 2709344 - RNA, 21 nt, Human
gcuccagcucaccagccccag

SEQ ID NO: 2709345 - RNA, 17 nt, Human
gcucccaggcauucccc

SEQ ID NO: 2709346 - RNA, 16 nt, Human
gcuaggccuggccaga

SEQ ID NO: 2709347 - RNA, 17 nt, Human
gcuaggccuggccagau

SEQ ID NO: 2709348 - RNA, 23 nt, Human
gcuaggccuggccagaugcacca

SEQ ID NO: 2709349 - RNA, 19 nt, Human
gcuauucaguaauaacucu

SEQ ID NO: 2709350 - RNA, 13 nt, Human
gcuaugcauuuga

SEQ ID NO: 2709351 - RNA, 12 nt, Human
gcuaugcauuug

SEQ ID NO: 2709352 - RNA, 21 nt, Human
gcuagugugguguuuccuggc

SEQ ID NO: 2709353 - RNA, 22 nt, Human
gcuagugugguguuuccuggca

SEQ ID NO: 2709354 - RNA, 22 nt, Human
gcuauuucuauauuuucauucu

SEQ ID NO: 2709355 - RNA, 20 nt, Human
gcuauucaguaauaacucua

SEQ ID NO: 2709356 - RNA, 18 nt, Human
gcuauucaguaauaacuc

SEQ ID NO: 2709357 - RNA, 17 nt, Human
gcucacugcagccucaa

SEQ ID NO: 2709358 - RNA, 15 nt, Human
gcucacugcagccuc

SEQ ID NO: 2709359 - RNA, 16 nt, Human
gcucacugcagccuca

SEQ ID NO: 2709360 - RNA, 11 nt, Human
gcucacugcag

SEQ ID NO: 2709361 - RNA, 12 nt, Human
gcucacugcagc

SEQ ID NO: 2709362 - RNA, 13 nt, Human
gcucacugcagcc

SEQ ID NO: 2709363 - RNA, 14 nt, Human
gcucacugcagccu

SEQ ID NO: 2709364 - RNA, 13 nt, Human
gcucagagagggu

SEQ ID NO: 2709365 - RNA, 14 nt, Human
gcucagagagggug

SEQ ID NO: 2709366 - RNA, 16 nt, Human
gcucaggugucccugc

SEQ ID NO: 2709367 - RNA, 14 nt, Human
gcucaggugucccu

SEQ ID NO: 2709368 - RNA, 23 nt, Human
gcucagguggggucacucuggca

SEQ ID NO: 2709369 - RNA, 20 nt, Human
gcgggaggauguucugggac

SEQ ID NO: 2709370 - RNA, 20 nt, Human
gcgugcacacaccagagccc

SEQ ID NO: 2709371 - RNA, 21 nt, Human
gcgggaggauguucugggaca

SEQ ID NO: 2709372 - RNA, 22 nt, Human
gcgggaggauguucugggacac

SEQ ID NO: 2709373 - RNA, 19 nt, Human
gcgugcacacaccagagcc

SEQ ID NO: 2709374 - RNA, 23 nt, Human
gcgugcacacaccagagcccacc

SEQ ID NO: 2709375 - RNA, 18 nt, Human
gcguuucuaugacacaug

SEQ ID NO: 2709376 - RNA, 15 nt, Human
gcuaaugggacacua

SEQ ID NO: 2709377 - RNA, 13 nt, Human
gcuaaugggacac

SEQ ID NO: 2709378 - RNA, 23 nt, Human
gcuaagugauccucccaccucag

SEQ ID NO: 2709379 - RNA, 22 nt, Human
gcuuccucauaguaugguggcu

SEQ ID NO: 2709380 - RNA, 14 nt, Human
gcuugagcucagga

SEQ ID NO: 2709381 - RNA, 20 nt, Human
gcuuguaaauagcucaggug

SEQ ID NO: 2709382 - RNA, 12 nt, Human
gcuuguacauaa

SEQ ID NO: 2709383 - RNA, 19 nt, Human
gcuucacggaagagccuug

SEQ ID NO: 2709384 - RNA, 18 nt, Human
gcuucacggaagagccuu

SEQ ID NO: 2709385 - RNA, 12 nt, Human
gcuucagccucc

SEQ ID NO: 2709386 - RNA, 18 nt, Human
gcuucaaggauccugagc

SEQ ID NO: 2709387 - RNA, 19 nt, Human
gcuucaaggauccugagcc

SEQ ID NO: 2709388 - RNA, 17 nt, Human
gcuucacggaagagccu

SEQ ID NO: 2709389 - RNA, 15 nt, Human
gcuucacggaagagc

SEQ ID NO: 2709390 - RNA, 20 nt, Human
gcuucaaggauccugagcca

SEQ ID NO: 2709391 - RNA, 21 nt, Human
gcuucaaggauccugagccag

SEQ ID NO: 2709392 - RNA, 20 nt, Human
gcuggcgugcaguggugcga

SEQ ID NO: 2709393 - RNA, 18 nt, Human
gcuggagugcagugagcc

SEQ ID NO: 2709394 - RNA, 17 nt, Human
gcuggagugcagugagc

SEQ ID NO: 2709395 - RNA, 22 nt, Human
gcuggagugcagugagccgaga

SEQ ID NO: 2709396 - RNA, 20 nt, Human
gcuggccuggccccucaggg

SEQ ID NO: 2709397 - RNA, 13 nt, Human
gcucugcccuugg

SEQ ID NO: 2709398 - RNA, 15 nt, Human
gcucugguccauaga

SEQ ID NO: 2709399 - RNA, 16 nt, Human
gcucugguccauagag

SEQ ID NO: 2709400 - RNA, 13 nt, Human
gcugcugaaggcu

SEQ ID NO: 2709401 - RNA, 14 nt, Human
gcugcugaaggcuc

SEQ ID NO: 2709402 - RNA, 15 nt, Human
gcugcugaaggcucg

SEQ ID NO: 2709403 - RNA, 13 nt, Human
gcugcuggcuggu

SEQ ID NO: 2709404 - RNA, 21 nt, Human
gcuggguggcaccagcagccu

SEQ ID NO: 2709405 - RNA, 22 nt, Human
gcuggguggcaccagcagccug

SEQ ID NO: 2709406 - RNA, 23 nt, Human
gcuggguggcaccagcagccugg

SEQ ID NO: 2709407 - RNA, 14 nt, Human
gcugggguuaucug

SEQ ID NO: 2709408 - RNA, 23 nt, Human
gcugggguuaucugaagucagau

SEQ ID NO: 2709409 - RNA, 22 nt, Human
gcugggguuaucugaagucaga

SEQ ID NO: 2709410 - RNA, 15 nt, Human
gcuggcuguuggcug

SEQ ID NO: 2709411 - RNA, 16 nt, Human
gcuggcuguuggcugg

SEQ ID NO: 2709412 - RNA, 15 nt, Human
ggaagccgcuggggc

SEQ ID NO: 2709413 - RNA, 19 nt, Human
ggaaggaaacccagcucug

SEQ ID NO: 2709414 - RNA, 20 nt, Human
ggaaggaaacccagcucugg

SEQ ID NO: 2709415 - RNA, 11 nt, Human
ggaagcuccgc

SEQ ID NO: 2709416 - RNA, 15 nt, Human
ggaagcucagggccu

SEQ ID NO: 2709417 - RNA, 23 nt, Human
ggaagcucagggccuggcucagg

SEQ ID NO: 2709418 - RNA, 16 nt, Human
ggaaggaaacccagcu

SEQ ID NO: 2709419 - RNA, 17 nt, Human
ggacacuaaccacgcug

SEQ ID NO: 2709420 - RNA, 22 nt, Human
ggacacuaaccacgcuggaccu

SEQ ID NO: 2709421 - RNA, 19 nt, Human
ggacagcuccuucuguccu

SEQ ID NO: 2709422 - RNA, 20 nt, Human
ggacagcuccuucuguccua

SEQ ID NO: 2709423 - RNA, 14 nt, Human
ggacacagcucuuc

SEQ ID NO: 2709424 - RNA, 21 nt, Human
ggacacagcucuucuccaggc

SEQ ID NO: 2709425 - RNA, 15 nt, Human
ggacacagcucuucu

SEQ ID NO: 2709426 - RNA, 18 nt, Human
ggacacagcucuucucca

SEQ ID NO: 2709427 - RNA, 19 nt, Human
ggaaugaagauacugaaau

SEQ ID NO: 2709428 - RNA, 13 nt, Human
ggacaagagcagg

SEQ ID NO: 2709429 - RNA, 22 nt, Human
ggacaaggaugaucuaggaaga

SEQ ID NO: 2709430 - RNA, 23 nt, Human
ggacaaggaugaucuaggaagac

SEQ ID NO: 2709431 - RNA, 16 nt, Human
ggaauccagacccggc

SEQ ID NO: 2709432 - RNA, 18 nt, Human
ggaauaacauguaauuaa

SEQ ID NO: 2709433 - RNA, 15 nt, Human
ggaagagaaaaaaua

SEQ ID NO: 2709434 - RNA, 13 nt, Human
ggaagagaaaaaa

SEQ ID NO: 2709435 - RNA, 18 nt, Human
ggaagacuuuggaaagag

SEQ ID NO: 2709436 - RNA, 22 nt, Human
ggaagacaaugugaaaagaaaa

SEQ ID NO: 2709437 - RNA, 13 nt, Human
ggaagacagcucu

SEQ ID NO: 2709438 - RNA, 14 nt, Human
ggaagacagcucuu

SEQ ID NO: 2709439 - RNA, 12 nt, Human
ggaagacuuugg

SEQ ID NO: 2709440 - RNA, 13 nt, Human
ggaagacuuugga

SEQ ID NO: 2709441 - RNA, 17 nt, Human
ggaagacuuuggaaaga

SEQ ID NO: 2709442 - RNA, 15 nt, Human
ggaacacucugagac

SEQ ID NO: 2709443 - RNA, 16 nt, Human
ggaacacucugagacu

SEQ ID NO: 2709444 - RNA, 12 nt, Human
ggaacacucuga

SEQ ID NO: 2709445 - RNA, 14 nt, Human
ggaacacucugaga

SEQ ID NO: 2709446 - RNA, 12 nt, Human
ggacccccugaa

SEQ ID NO: 2709447 - RNA, 11 nt, Human
ggacccugagg

SEQ ID NO: 2709448 - RNA, 12 nt, Human
ggacccugaggc

SEQ ID NO: 2709449 - RNA, 13 nt, Human
ggacccugaggcc

SEQ ID NO: 2709450 - RNA, 13 nt, Human
ggaccucaggccu

SEQ ID NO: 2709451 - RNA, 20 nt, Human
ggacguguuaugacuccaga

SEQ ID NO: 2709452 - RNA, 14 nt, Human
ggaccucaggccug

SEQ ID NO: 2709453 - RNA, 15 nt, Human
ggaccucaggccugg

SEQ ID NO: 2709454 - RNA, 22 nt, Human
ggacucauuuuaaaaaauggaa

SEQ ID NO: 2709455 - RNA, 16 nt, Human
ggacucaaugcacuga

SEQ ID NO: 2709456 - RNA, 18 nt, Human
ggacucaaugcacugaca

SEQ ID NO: 2709457 - RNA, 20 nt, Human
ggacuaacuugucuuuggac

SEQ ID NO: 2709458 - RNA, 15 nt, Human
ggacucaaugcacug

SEQ ID NO: 2709459 - RNA, 14 nt, Human
ggacuacaggugug

SEQ ID NO: 2709460 - RNA, 24 nt, Human
ggacuaacuugucuuuggacccug

SEQ ID NO: 2709461 - RNA, 16 nt, Human
ggagaaaggaagggcu

SEQ ID NO: 2709462 - RNA, 22 nt, Human
ggacuucuuuaauuuuggaauu

SEQ ID NO: 2709463 - RNA, 18 nt, Human
ggacuucuuuaauuuugg

SEQ ID NO: 2709464 - RNA, 21 nt, Human
ggacuucuuuaauuuuggaau

SEQ ID NO: 2709465 - RNA, 15 nt, Human
ggacuuguuagaucu

SEQ ID NO: 2709466 - RNA, 14 nt, Human
ggacuuggaagcuc

SEQ ID NO: 2709467 - RNA, 12 nt, Human
ggacuuguuaga

SEQ ID NO: 2709468 - RNA, 21 nt, Human
ggcaguggugguuuucuguuc

SEQ ID NO: 2709469 - RNA, 20 nt, Human
ggcaguggugguuuucuguu

SEQ ID NO: 2709470 - RNA, 22 nt, Human
ggcagccccuguucuggcagag

SEQ ID NO: 2709471 - RNA, 16 nt, Human
ggagagaagagaaugc

SEQ ID NO: 2709472 - RNA, 21 nt, Human
ggcacaguuuucugagaaaga

SEQ ID NO: 2709473 - RNA, 23 nt, Human
ggcacagaaaauggaagacagcu

SEQ ID NO: 2709474 - RNA, 23 nt, Human
ggcacucagaagacacugauggg

SEQ ID NO: 2709475 - RNA, 20 nt, Human
ggcacucagaagacacugau

SEQ ID NO: 2709476 - RNA, 13 nt, Human
ggcacaucagcac

SEQ ID NO: 2709477 - RNA, 19 nt, Human
ggcacagaaaauggaagac

SEQ ID NO: 2709478 - RNA, 20 nt, Human
ggcacagaaaauggaagaca

SEQ ID NO: 2709479 - RNA, 21 nt, Human
ggcacagaaaauggaagacag

SEQ ID NO: 2709480 - RNA, 23 nt, Human
ggcagccccauucugccugccca

SEQ ID NO: 2709481 - RNA, 11 nt, Human
ggcagccccug

SEQ ID NO: 2709482 - RNA, 14 nt, Human
ggccaguugguccc

SEQ ID NO: 2709483 - RNA, 17 nt, Human
ggccaguuggucccccu

SEQ ID NO: 2709484 - RNA, 20 nt, Human
ggccagugugacaaggauug

SEQ ID NO: 2709485 - RNA, 17 nt, Human
ggcauaacauaaaucug

SEQ ID NO: 2709486 - RNA, 16 nt, Human
ggcauaacauaaaucu

SEQ ID NO: 2709487 - RNA, 22 nt, Human
ggcccuucucuccagccccugg

SEQ ID NO: 2709488 - RNA, 23 nt, Human
ggcccuucucuccagccccugga

SEQ ID NO: 2709489 - RNA, 23 nt, Human
ggccucaagugauucuccugccu

SEQ ID NO: 2709490 - RNA, 13 nt, Human
ggccccugcuggu

SEQ ID NO: 2709491 - RNA, 14 nt, Human
ggccccugcugguu

SEQ ID NO: 2709492 - RNA, 13 nt, Human
ggcccggcuccag

SEQ ID NO: 2709493 - RNA, 23 nt, Human
ggccccugcugguucaggguugg

SEQ ID NO: 2709494 - RNA, 15 nt, Human
ggcccggcuccaggc

SEQ ID NO: 2709495 - RNA, 19 nt, Human
ggcccuucucuccagcccc

SEQ ID NO: 2709496 - RNA, 20 nt, Human
ggcccuucucuccagccccu

SEQ ID NO: 2709497 - RNA, 21 nt, Human
ggcccuucucuccagccccug

SEQ ID NO: 2709498 - RNA, 11 nt, Human
ggcucucaggc

SEQ ID NO: 2709499 - RNA, 13 nt, Human
ggcucucaggcca

SEQ ID NO: 2709500 - RNA, 12 nt, Human
ggcucuuccagg

SEQ ID NO: 2709501 - RNA, 22 nt, Human
ggcugcggaaugaaccacaucu

SEQ ID NO: 2709502 - RNA, 21 nt, Human
ggcugccaaugggagcucaug

SEQ ID NO: 2709503 - RNA, 19 nt, Human
ggcugccaaugggagcuca

SEQ ID NO: 2709504 - RNA, 20 nt, Human
ggcugccaaugggagcucau

SEQ ID NO: 2709505 - RNA, 22 nt, Human
ggcugcaugcgggcuuccuccu

SEQ ID NO: 2709506 - RNA, 13 nt, Human
ggcugggagagcc

SEQ ID NO: 2709507 - RNA, 13 nt, Human
ggcugcugaaggc

SEQ ID NO: 2709508 - RNA, 14 nt, Human
ggcugggagagccu

SEQ ID NO: 2709509 - RNA, 15 nt, Human
ggcugggagagccuu

SEQ ID NO: 2709510 - RNA, 16 nt, Human
ggcugggagagccuuc

SEQ ID NO: 2709511 - RNA, 18 nt, Human
ggcucagcggggacagcu

SEQ ID NO: 2709512 - RNA, 19 nt, Human
ggcucagcggggacagcuc

SEQ ID NO: 2709513 - RNA, 20 nt, Human
ggcucagcggggacagcucc

SEQ ID NO: 2709514 - RNA, 19 nt, Human
ggcucagguggggucacuc

SEQ ID NO: 2709515 - RNA, 20 nt, Human
ggcucagguggggucacucu

SEQ ID NO: 2709516 - RNA, 20 nt, Human
gggacagucaccucauggaa

SEQ ID NO: 2709517 - RNA, 21 nt, Human
gggacagucaccucauggaau

SEQ ID NO: 2709518 - RNA, 22 nt, Human
gggacagucaccucauggaauu

SEQ ID NO: 2709519 - RNA, 15 nt, Human
gggacagcuccuucu

SEQ ID NO: 2709520 - RNA, 12 nt, Human
gggacagcuccu

SEQ ID NO: 2709521 - RNA, 13 nt, Human
gggacagcuccuu

SEQ ID NO: 2709522 - RNA, 13 nt, Human
gggaagagacuug

SEQ ID NO: 2709523 - RNA, 20 nt, Human
gggaacccaaguccaagcau

SEQ ID NO: 2709524 - RNA, 18 nt, Human
gggaagaagcucucuccu

SEQ ID NO: 2709525 - RNA, 21 nt, Human
ggcuuccuccugguguggaag

SEQ ID NO: 2709526 - RNA, 14 nt, Human
aaaaauaacaauga

SEQ ID NO: 2709527 - RNA, 15 nt, Human
ggcugggggccucag

SEQ ID NO: 2709528 - RNA, 16 nt, Human
ggcugggggccucagu

SEQ ID NO: 2709529 - RNA, 17 nt, Human
ggcugggggccucagug

SEQ ID NO: 2709530 - RNA, 19 nt, Human
ggcugggggccucagugcc

SEQ ID NO: 2709531 - RNA, 19 nt, Human
ggcuggguggcaccagcag

SEQ ID NO: 2709532 - RNA, 19 nt, Human
ggcuggguucuacccaggu

SEQ ID NO: 2709533 - RNA, 21 nt, Human
ggcuggguucuacccaggugc

SEQ ID NO: 2709534 - RNA, 22 nt, Human
ggcuucauccuccucagaucuu

SEQ ID NO: 2709535 - RNA, 18 nt, Human
ggcuucauccuccucaga

SEQ ID NO: 2709536 - RNA, 16 nt, Human
ggcuuccucauaguau

SEQ ID NO: 2709537 - RNA, 18 nt, Human
ggcuucaguggcagcugc

SEQ ID NO: 2709538 - RNA, 17 nt, Human
ggcuucaguggcagcug

SEQ ID NO: 2709539 - RNA, 19 nt, Human
ggcuucaguggcagcugcu

SEQ ID NO: 2709540 - RNA, 20 nt, Human
ggcuucaguggcagcugcuu

SEQ ID NO: 2709541 - RNA, 18 nt, Human
ggcuguaucccaugagcc

SEQ ID NO: 2709542 - RNA, 15 nt, Human
ggcuguacccaggaa

SEQ ID NO: 2709543 - RNA, 21 nt, Human
aaaagauuuucagaaaauauu

SEQ ID NO: 2709544 - RNA, 18 nt, Human
aaaacucuccucugcugc

SEQ ID NO: 2709545 - RNA, 14 nt, Human
gggaccagagcugc

SEQ ID NO: 2709546 - RNA, 20 nt, Human
gggaccagagcugccaccug

SEQ ID NO: 2709547 - RNA, 14 nt, Human
aaaacaugcuacac

SEQ ID NO: 2709548 - RNA, 13 nt, Human
aaaacaugcuaca

SEQ ID NO: 2709549 - RNA, 12 nt, Human
aaaacccaagug

SEQ ID NO: 2709550 - RNA, 17 nt, Human
aaaaccaguauuguaca

SEQ ID NO: 2709551 - RNA, 21 nt, Human
gggagaaccaaaaagaggcua

SEQ ID NO: 2709552 - RNA, 15 nt, Human
gggacuuggaagcuc

SEQ ID NO: 2709553 - RNA, 17 nt, Human
gggacuuggaagcuccg

SEQ ID NO: 2709554 - RNA, 18 nt, Human
gggacuuggaagcuccgc

SEQ ID NO: 2709555 - RNA, 23 nt, Human
gggacuuggaagcuccgcuuucu

SEQ ID NO: 2709556 - RNA, 23 nt, Human
gggagcaggcucgggcuccccag

SEQ ID NO: 2709557 - RNA, 15 nt, Human
gggagagccuuccag

SEQ ID NO: 2709558 - RNA, 19 nt, Human
gggagagccuuccaggggu

SEQ ID NO: 2709559 - RNA, 16 nt, Human
gggagggagggcucca

SEQ ID NO: 2709560 - RNA, 15 nt, Human
gggagggagggcucc

SEQ ID NO: 2709561 - RNA, 18 nt, Human
gggaggucaaggcugcag

SEQ ID NO: 2709562 - RNA, 11 nt, Human
guagagacagg

SEQ ID NO: 2709563 - RNA, 12 nt, Human
guagagacaggg

SEQ ID NO: 2709564 - RNA, 15 nt, Human
guagagccagggucu

SEQ ID NO: 2709565 - RNA, 18 nt, Human
guagagccagggucucac

SEQ ID NO: 2709566 - RNA, 13 nt, Human
guagagacagggu

SEQ ID NO: 2709567 - RNA, 10 nt, Human
guagagccag

SEQ ID NO: 2709568 - RNA, 11 nt, Human
guagagccagg

SEQ ID NO: 2709569 - RNA, 18 nt, Human
guagaagcccuucuaccu

SEQ ID NO: 2709570 - RNA, 21 nt, Human
guagaagucuuagauguauau

SEQ ID NO: 2709571 - RNA, 23 nt, Human
guagaaauaucugaaaauguaug

SEQ ID NO: 2709572 - RNA, 21 nt, Human
guagaaauaucugaaaaugua

SEQ ID NO: 2709573 - RNA, 20 nt, Human
guagaaauaucugaaaaugu

SEQ ID NO: 2709574 - RNA, 15 nt, Human
guacuucaugcuguc

SEQ ID NO: 2709575 - RNA, 21 nt, Human
guacuucaaauccuugaagau

SEQ ID NO: 2709576 - RNA, 22 nt, Human
guacuucaaauccuugaagauu

SEQ ID NO: 2709577 - RNA, 14 nt, Human
guacuuaacuauuc

SEQ ID NO: 2709578 - RNA, 16 nt, Human
guacuggagaaaaugg

SEQ ID NO: 2709579 - RNA, 17 nt, Human
guacuauguaucaauga

SEQ ID NO: 2709580 - RNA, 15 nt, Human
guacuauguaucaau

SEQ ID NO: 2709581 - RNA, 17 nt, Human
guacuacaguccuccca

SEQ ID NO: 2709582 - RNA, 13 nt, Human
guacuauguauca

SEQ ID NO: 2709583 - RNA, 13 nt, Human
guacccacugcuc

SEQ ID NO: 2709584 - RNA, 14 nt, Human
guacccacugcucu

SEQ ID NO: 2709585 - RNA, 18 nt, Human
guacuacaguccucccau

SEQ ID NO: 2709586 - RNA, 19 nt, Human
guacuacaguccucccauc

SEQ ID NO: 2709587 - RNA, 23 nt, Human
aaaucauuucugcaucagcugcu

SEQ ID NO: 2709588 - RNA, 22 nt, Human
aaaucauuucugcaucagcugc

SEQ ID NO: 2709589 - RNA, 21 nt, Human
aaaucauuucugcaucagcug

SEQ ID NO: 2709590 - RNA, 19 nt, Human
aaaucauuucugcaucagc

SEQ ID NO: 2709591 - RNA, 11 nt, Human
aaaucauuucu

SEQ ID NO: 2709592 - RNA, 12 nt, Human
aaaucauuucug

SEQ ID NO: 2709593 - RNA, 19 nt, Human
aaaucagccguguaaccau

SEQ ID NO: 2709594 - RNA, 12 nt, Human
aaaucagccugc

SEQ ID NO: 2709595 - RNA, 18 nt, Human
aaaucagccugcuccagc

SEQ ID NO: 2709596 - RNA, 16 nt, Human
aaaucagcugcuacua

SEQ ID NO: 2709597 - RNA, 17 nt, Human
aaauauuauguuaaaac

SEQ ID NO: 2709598 - RNA, 14 nt, Human
aaauauuauguguu

SEQ ID NO: 2709599 - RNA, 19 nt, Human
aaauauuaagaaagacuau

SEQ ID NO: 2709600 - RNA, 15 nt, Human
aaauauuauguguuu

SEQ ID NO: 2709601 - RNA, 15 nt, Human
aaauccauacauuug

SEQ ID NO: 2709602 - RNA, 18 nt, Human
aaauccauacauuugugu

SEQ ID NO: 2709603 - RNA, 14 nt, Human
guacaugaaaacac

SEQ ID NO: 2709604 - RNA, 16 nt, Human
guacaugaaaacacau

SEQ ID NO: 2709605 - RNA, 15 nt, Human
guacaugaaaacaca

SEQ ID NO: 2709606 - RNA, 19 nt, Human
guacauggaauaacaugua

SEQ ID NO: 2709607 - RNA, 20 nt, Human
guacaugaaaacacauuuuu

SEQ ID NO: 2709608 - RNA, 19 nt, Human
guacaugaaaacacauuuu

SEQ ID NO: 2709609 - RNA, 18 nt, Human
guacaugaaaacacauuu

SEQ ID NO: 2709610 - RNA, 17 nt, Human
guacaugaaaacacauu

SEQ ID NO: 2709611 - RNA, 12 nt, Human
guacccacugcu

SEQ ID NO: 2709612 - RNA, 15 nt, Human
guacauuuggagaca

SEQ ID NO: 2709613 - RNA, 20 nt, Human
guaauaggcguaacuaauuu

SEQ ID NO: 2709614 - RNA, 15 nt, Human
guaauaacugugaag

SEQ ID NO: 2709615 - RNA, 16 nt, Human
guaauaacugugaagu

SEQ ID NO: 2709616 - RNA, 22 nt, Human
guaauaacugugaaguuuacau

SEQ ID NO: 2709617 - RNA, 18 nt, Human
guaauaugcacacauuuu

SEQ ID NO: 2709618 - RNA, 17 nt, Human
guaauaugcacacauuu

SEQ ID NO: 2709619 - RNA, 16 nt, Human
guaauaugcacacauu

SEQ ID NO: 2709620 - RNA, 14 nt, Human
guaauaugcacaca

SEQ ID NO: 2709621 - RNA, 22 nt, Human
guaauuugugauacaaugcugu

SEQ ID NO: 2709622 - RNA, 23 nt, Human
guacacugccuucucaacuccaa

SEQ ID NO: 2709623 - RNA, 21 nt, Human
aaauaauuuuuauauuugaaa

SEQ ID NO: 2709624 - RNA, 15 nt, Human
aaauacacacucaaa

SEQ ID NO: 2709625 - RNA, 22 nt, Human
aaauacaauuuuguuucuguac

SEQ ID NO: 2709626 - RNA, 21 nt, Human
aaauacaauuuuguuucugua

SEQ ID NO: 2709627 - RNA, 20 nt, Human
aaauacaauuuuguuucugu

SEQ ID NO: 2709628 - RNA, 18 nt, Human
aaauacaauuuuguuucu

SEQ ID NO: 2709629 - RNA, 17 nt, Human
aaauacaauuuuguuuc

SEQ ID NO: 2709630 - RNA, 14 nt, Human
aaauacaauuuugu

SEQ ID NO: 2709631 - RNA, 22 nt, Human
aaauaauuuuuauauuugaaau

SEQ ID NO: 2709632 - RNA, 23 nt, Human
aaauaauuuuuauauuugaaaua

SEQ ID NO: 2709633 - RNA, 13 nt, Human
aaauacaauuuug

SEQ ID NO: 2709634 - RNA, 19 nt, Human
aaauacacacucaaaucaa

SEQ ID NO: 2709635 - RNA, 17 nt, Human
aaauacagauagauaua

SEQ ID NO: 2709636 - RNA, 18 nt, Human
aaauaccagccaguaaau

SEQ ID NO: 2709637 - RNA, 22 nt, Human
aaauacgugggcauucaaaugu

SEQ ID NO: 2709638 - RNA, 14 nt, Human
aaauauaauugaca

SEQ ID NO: 2709639 - RNA, 18 nt, Human
aaaguauguuagugcaaa

SEQ ID NO: 2709640 - RNA, 18 nt, Human
aaaguaucccuacuguaa

SEQ ID NO: 2709641 - RNA, 23 nt, Human
aaaguacuucuccacccugcucu

SEQ ID NO: 2709642 - RNA, 20 nt, Human
aaaguacuucuccacccugc

SEQ ID NO: 2709643 - RNA, 21 nt, Human
aaaguacuucuccacccugcu

SEQ ID NO: 2709644 - RNA, 20 nt, Human
aaaguacacuguuucaaacu

SEQ ID NO: 2709645 - RNA, 19 nt, Human
aaaguacuucuccacccug

SEQ ID NO: 2709646 - RNA, 14 nt, Human
aaaguugccuaaau

SEQ ID NO: 2709647 - RNA, 13 nt, Human
aaaguugccuaaa

SEQ ID NO: 2709648 - RNA, 20 nt, Human
aaaguuauugauaaguucau

SEQ ID NO: 2709649 - RNA, 20 nt, Human
aaaguauuaagcauauauuu

SEQ ID NO: 2709650 - RNA, 19 nt, Human
aaaguauuaagcauauauu

SEQ ID NO: 2709651 - RNA, 17 nt, Human
aaaguauguuagugcaa

SEQ ID NO: 2709652 - RNA, 18 nt, Human
aaaguauuaagcauauau

SEQ ID NO: 2709653 - RNA, 13 nt, Human
aaaguauuaagca

SEQ ID NO: 2709654 - RNA, 14 nt, Human
aaaguuuaauauua

SEQ ID NO: 2709655 - RNA, 12 nt, Human
aaaguuuaauau

SEQ ID NO: 2709656 - RNA, 23 nt, Human
aaaguugccuaaauccauuugga

SEQ ID NO: 2709657 - RNA, 17 nt, Human
aaaguugccuaaaucca

SEQ ID NO: 2709658 - RNA, 16 nt, Human
aaaguugccuaaaucc

SEQ ID NO: 2709659 - RNA, 14 nt, Human
aaauaaaaauauug

SEQ ID NO: 2709660 - RNA, 15 nt, Human
aaagaggcagcuuga

SEQ ID NO: 2709661 - RNA, 19 nt, Human
aaagaugcuucucacugcc

SEQ ID NO: 2709662 - RNA, 17 nt, Human
aaagaugcuucucacug

SEQ ID NO: 2709663 - RNA, 14 nt, Human
aaagaugcuucuca

SEQ ID NO: 2709664 - RNA, 23 nt, Human
aaagacugaguacguugugcauu

SEQ ID NO: 2709665 - RNA, 13 nt, Human
aaagacuguacaa

SEQ ID NO: 2709666 - RNA, 14 nt, Human
aaagacuguacaaa

SEQ ID NO: 2709667 - RNA, 12 nt, Human
gguccugcugca

SEQ ID NO: 2709668 - RNA, 11 nt, Human
gguccugcugc

SEQ ID NO: 2709669 - RNA, 14 nt, Human
aaagacuccaaaga

SEQ ID NO: 2709670 - RNA, 21 nt, Human
aaagacuccaaagaaauguaa

SEQ ID NO: 2709671 - RNA, 15 nt, Human
aaagacuccaaagaa

SEQ ID NO: 2709672 - RNA, 21 nt, Human
aaagacuauucaaacagucuc

SEQ ID NO: 2709673 - RNA, 17 nt, Human
aaagacuauucaaacag

SEQ ID NO: 2709674 - RNA, 22 nt, Human
aaagaccuuuggagcaaagcug

SEQ ID NO: 2709675 - RNA, 19 nt, Human
aaagacuauucaaacaguc

SEQ ID NO: 2709676 - RNA, 18 nt, Human
aaagacuauucaaacagu

SEQ ID NO: 2709677 - RNA, 13 nt, Human
aaagacagugaaa

SEQ ID NO: 2709678 - RNA, 11 nt, Human
aaacuuuucug

SEQ ID NO: 2709679 - RNA, 23 nt, Human
aaacuucagcgguuuauauaagc

SEQ ID NO: 2709680 - RNA, 14 nt, Human
ggguggccucccaa

SEQ ID NO: 2709681 - RNA, 20 nt, Human
aaagggauggcaagaugugg

SEQ ID NO: 2709682 - RNA, 22 nt, Human
aaagggacuuggaagcuccgcu

SEQ ID NO: 2709683 - RNA, 14 nt, Human
aaagguacuucaaa

SEQ ID NO: 2709684 - RNA, 17 nt, Human
aaagggugaaaauuauu

SEQ ID NO: 2709685 - RNA, 21 nt, Human
aaaggagagcuagcagcaggg

SEQ ID NO: 2709686 - RNA, 17 nt, Human
aaaggagagcuagcagc

SEQ ID NO: 2709687 - RNA, 17 nt, Human
aaaggagauuggaagga

SEQ ID NO: 2709688 - RNA, 22 nt, Human
aaaggaaagagggagguaagga

SEQ ID NO: 2709689 - RNA, 21 nt, Human
aaagcacugacuucuaaguaa

SEQ ID NO: 2709690 - RNA, 17 nt, Human
aaagcacugacuucuaa

SEQ ID NO: 2709691 - RNA, 13 nt, Human
aaagcugcugaca

SEQ ID NO: 2709692 - RNA, 15 nt, Human
aaagcuuguuaagau

SEQ ID NO: 2709693 - RNA, 13 nt, Human
ggucgaggcagga

SEQ ID NO: 2709694 - RNA, 13 nt, Human
ggugaacagaaca

SEQ ID NO: 2709695 - RNA, 13 nt, Human
ggugaaaauuauu

SEQ ID NO: 2709696 - RNA, 14 nt, Human
ggugaaaauuauuu

SEQ ID NO: 2709697 - RNA, 22 nt, Human
ggugaaaauuauuuuguucaua

SEQ ID NO: 2709698 - RNA, 12 nt, Human
ggugcaaugacc

SEQ ID NO: 2709699 - RNA, 13 nt, Human
ggugcaaugaccu

SEQ ID NO: 2709700 - RNA, 16 nt, Human
ggugcaaugaccuuuc

SEQ ID NO: 2709701 - RNA, 18 nt, Human
ggugauccacccaccuca

SEQ ID NO: 2709702 - RNA, 23 nt, Human
ggugauccacccaccucagccuc

SEQ ID NO: 2709703 - RNA, 24 nt, Human
ggugauccacccaccucagccucc

SEQ ID NO: 2709704 - RNA, 13 nt, Human
gguggaugccugg

SEQ ID NO: 2709705 - RNA, 15 nt, Human
aaacucguuaauuug

SEQ ID NO: 2709706 - RNA, 13 nt, Human
aaacgucuuaaau

SEQ ID NO: 2709707 - RNA, 14 nt, Human
aaacgucuuaaaua

SEQ ID NO: 2709708 - RNA, 19 nt, Human
ggguggcaccagcagccug

SEQ ID NO: 2709709 - RNA, 14 nt, Human
aaacuuaaucuaaa

SEQ ID NO: 2709710 - RNA, 16 nt, Human
aaacuuaaucuaaaug

SEQ ID NO: 2709711 - RNA, 18 nt, Human
aaacuuaaucuaaaugga

SEQ ID NO: 2709712 - RNA, 17 nt, Human
aaacuuaaucuaaaugg

SEQ ID NO: 2709713 - RNA, 13 nt, Human
aaacucuccucug

SEQ ID NO: 2709714 - RNA, 12 nt, Human
aaaccacagcag

SEQ ID NO: 2709715 - RNA, 23 nt, Human
aaaccaagucaagugaaaaagga

SEQ ID NO: 2709716 - RNA, 15 nt, Human
aaacgggcucagcaa

SEQ ID NO: 2709717 - RNA, 15 nt, Human
aaacagucucaggaa

SEQ ID NO: 2709718 - RNA, 19 nt, Human
ggggaauugaggacacuga

SEQ ID NO: 2709719 - RNA, 15 nt, Human
ggggaccagagcugc

SEQ ID NO: 2709720 - RNA, 16 nt, Human
ggggaccagagcugcc

SEQ ID NO: 2709721 - RNA, 18 nt, Human
ggggaauguuugccucug

SEQ ID NO: 2709722 - RNA, 22 nt, Human
ggggaauguuugccucugccuc

SEQ ID NO: 2709723 - RNA, 15 nt, Human
ggggccucagugcca

SEQ ID NO: 2709724 - RNA, 12 nt, Human
gggggccucagu

SEQ ID NO: 2709725 - RNA, 15 nt, Human
gggggccucagugcc

SEQ ID NO: 2709726 - RNA, 17 nt, Human
gggggccucagugccac

SEQ ID NO: 2709727 - RNA, 18 nt, Human
gggggccucagugccacu

SEQ ID NO: 2709728 - RNA, 11 nt, Human
ggggagaaagu

SEQ ID NO: 2709729 - RNA, 14 nt, Human
aaacacagcaaggg

SEQ ID NO: 2709730 - RNA, 12 nt, Human
aaacacagcaag

SEQ ID NO: 2709731 - RNA, 11 nt, Human
aaacacauuuu

SEQ ID NO: 2709732 - RNA, 11 nt, Human
aaacacagcaa

SEQ ID NO: 2709733 - RNA, 19 nt, Human
aaacacaaacgggcucagc

SEQ ID NO: 2709734 - RNA, 13 nt, Human
gggaugagaaagg

SEQ ID NO: 2709735 - RNA, 19 nt, Human
aaaauuuagaaauauaauu

SEQ ID NO: 2709736 - RNA, 20 nt, Human
aaaauuuugauguuuuaagg

SEQ ID NO: 2709737 - RNA, 14 nt, Human
gaccaucccugaag

SEQ ID NO: 2709738 - RNA, 15 nt, Human
gaccaucccugaagg

SEQ ID NO: 2709739 - RNA, 16 nt, Human
gaccaucccugaaggc

SEQ ID NO: 2709740 - RNA, 17 nt, Human
gaccaucccugaaggcc

SEQ ID NO: 2709741 - RNA, 16 nt, Human
gaccauucuccaccug

SEQ ID NO: 2709742 - RNA, 12 nt, Human
gacccggcugcg

SEQ ID NO: 2709743 - RNA, 13 nt, Human
gacccggcugcgu

SEQ ID NO: 2709744 - RNA, 16 nt, Human
gacccuauugcugcuu

SEQ ID NO: 2709745 - RNA, 21 nt, Human
gacagcccuucuuuccacaga

SEQ ID NO: 2709746 - RNA, 13 nt, Human
gacagcuccuucu

SEQ ID NO: 2709747 - RNA, 14 nt, Human
gacagcuccuucug

SEQ ID NO: 2709748 - RNA, 15 nt, Human
gacagcuccuucugu

SEQ ID NO: 2709749 - RNA, 23 nt, Human
gacuuuucuguccgagcuuugaa

SEQ ID NO: 2709750 - RNA, 21 nt, Human
gacuuuucuguccgagcuuug

SEQ ID NO: 2709751 - RNA, 22 nt, Human
gacuuuguuaguuucuccaagc

SEQ ID NO: 2709752 - RNA, 19 nt, Human
gacuuuggauaauaaggaa

SEQ ID NO: 2709753 - RNA, 14 nt, Human
gacuuuggaaagac

SEQ ID NO: 2709754 - RNA, 14 nt, Human
gacuuuggaaagag

SEQ ID NO: 2709755 - RNA, 16 nt, Human
gacuguuuucucuuga

SEQ ID NO: 2709756 - RNA, 18 nt, Human
gacuguuuucucuugaga

SEQ ID NO: 2709757 - RNA, 17 nt, Human
gacuguggugacuuugg

SEQ ID NO: 2709758 - RNA, 22 nt, Human
gacuguacaaaguagaagucuu

SEQ ID NO: 2709759 - RNA, 17 nt, Human
gacucaaugcacugaca

SEQ ID NO: 2709760 - RNA, 14 nt, Human
gacucaaugcacug

SEQ ID NO: 2709761 - RNA, 17 nt, Human
gagaagcggcuggcagc

SEQ ID NO: 2709762 - RNA, 13 nt, Human
gacgcugugcugc

SEQ ID NO: 2709763 - RNA, 12 nt, Human
gacgcugugcug

SEQ ID NO: 2709764 - RNA, 16 nt, Human
gacuauucaaacaguc

SEQ ID NO: 2709765 - RNA, 15 nt, Human
gacuauucaaacagu

SEQ ID NO: 2709766 - RNA, 19 nt, Human
gaguugauacuacaguuug

SEQ ID NO: 2709767 - RNA, 22 nt, Human
gaguugauacuacaguuuguua

SEQ ID NO: 2709768 - RNA, 21 nt, Human
gaguugauagcacagacccug

SEQ ID NO: 2709769 - RNA, 13 nt, Human
gagugcagugagc

SEQ ID NO: 2709770 - RNA, 18 nt, Human
gagugcagugagccgaga

SEQ ID NO: 2709771 - RNA, 14 nt, Human
gagugagacucugu

SEQ ID NO: 2709772 - RNA, 18 nt, Human
gagugagacucugucuca

SEQ ID NO: 2709773 - RNA, 18 nt, Human
gagucagaaguuucugcc

SEQ ID NO: 2709774 - RNA, 13 nt, Human
gaggugggauccu

SEQ ID NO: 2709775 - RNA, 15 nt, Human
gaggugggauccucc

SEQ ID NO: 2709776 - RNA, 16 nt, Human
gaggugggauccucca

SEQ ID NO: 2709777 - RNA, 17 nt, Human
gaggugggauccuccag

SEQ ID NO: 2709778 - RNA, 14 nt, Human
gagucacuggaaca

SEQ ID NO: 2709779 - RNA, 21 nt, Human
gagucacuggaacacuaauga

SEQ ID NO: 2709780 - RNA, 20 nt, Human
gaggccagagacacaagccu

SEQ ID NO: 2709781 - RNA, 12 nt, Human
gaggcucugccc

SEQ ID NO: 2709782 - RNA, 13 nt, Human
gaggcucugcccu

SEQ ID NO: 2709783 - RNA, 14 nt, Human
gaggcucugcccuu

SEQ ID NO: 2709784 - RNA, 15 nt, Human
gaggcucugcccuug

SEQ ID NO: 2709785 - RNA, 17 nt, Human
gaggcucugcccuuggu

SEQ ID NO: 2709786 - RNA, 12 nt, Human
gaggggaacaga

SEQ ID NO: 2709787 - RNA, 12 nt, Human
gagggcuccaga

SEQ ID NO: 2709788 - RNA, 13 nt, Human
gagggcuccagac

SEQ ID NO: 2709789 - RNA, 14 nt, Human
gagggcuccagaca

SEQ ID NO: 2709790 - RNA, 15 nt, Human
gagggcuccagacac

SEQ ID NO: 2709791 - RNA, 20 nt, Human
gagcaucaggccaggcccuc

SEQ ID NO: 2709792 - RNA, 22 nt, Human
gagcaucaggccaggcccucug

SEQ ID NO: 2709793 - RNA, 17 nt, Human
gagcggagaaaggaagg

SEQ ID NO: 2709794 - RNA, 15 nt, Human
gagcugccuguucag

SEQ ID NO: 2709795 - RNA, 16 nt, Human
gagcugccuguucagc

SEQ ID NO: 2709796 - RNA, 19 nt, Human
gagcugccuguucagcucc

SEQ ID NO: 2709797 - RNA, 12 nt, Human
gagccuuccagg

SEQ ID NO: 2709798 - RNA, 13 nt, Human
gagccuuccaggg

SEQ ID NO: 2709799 - RNA, 17 nt, Human
gagcaucaggccaggcc

SEQ ID NO: 2709800 - RNA, 16 nt, Human
gcauaccacuuuuguu

SEQ ID NO: 2709801 - RNA, 15 nt, Human
gcauaccacuuuugu

SEQ ID NO: 2709802 - RNA, 22 nt, Human
gcaguugaaaagacuccaaaga

SEQ ID NO: 2709803 - RNA, 15 nt, Human
gcauaaaaauuagcc

SEQ ID NO: 2709804 - RNA, 14 nt, Human
gcaguugccaguca

SEQ ID NO: 2709805 - RNA, 23 nt, Human
gcaguugccagucaccccggcca

SEQ ID NO: 2709806 - RNA, 13 nt, Human
gcauaacauaaau

SEQ ID NO: 2709807 - RNA, 16 nt, Human
gcacuuuguucuggcu

SEQ ID NO: 2709808 - RNA, 22 nt, Human
gcagcugcgguccacccaggag

SEQ ID NO: 2709809 - RNA, 23 nt, Human
gcagcugcgguccacccaggagc

SEQ ID NO: 2709810 - RNA, 13 nt, Human
gcagcugcuuuug

SEQ ID NO: 2709811 - RNA, 20 nt, Human
gcagcugcuuuugucuaugg

SEQ ID NO: 2709812 - RNA, 16 nt, Human
gcagcuugaggguugg

SEQ ID NO: 2709813 - RNA, 22 nt, Human
gcagggaaacagcuaaugggac

SEQ ID NO: 2709814 - RNA, 17 nt, Human
gcaggcucucaggccag

SEQ ID NO: 2709815 - RNA, 19 nt, Human
gcagcuugaggguugggcu

SEQ ID NO: 2709816 - RNA, 21 nt, Human
gcagcuugaggguugggcugg

SEQ ID NO: 2709817 - RNA, 22 nt, Human
gcaggcucgggcuccccagccc

SEQ ID NO: 2709818 - RNA, 12 nt, Human
gcaggcucucag

SEQ ID NO: 2709819 - RNA, 13 nt, Human
gcaggcucucagg

SEQ ID NO: 2709820 - RNA, 14 nt, Human
gcaggcucucaggc

SEQ ID NO: 2709821 - RNA, 15 nt, Human
gcaggcucucaggcc

SEQ ID NO: 2709822 - RNA, 16 nt, Human
gcaggcucucaggcca

SEQ ID NO: 2709823 - RNA, 11 nt, Human
gccaaggccaa

SEQ ID NO: 2709824 - RNA, 17 nt, Human
gccaaggccaaaggaag

SEQ ID NO: 2709825 - RNA, 17 nt, Human
gcauccuggcacccggc

SEQ ID NO: 2709826 - RNA, 21 nt, Human
gcauccuggcacccggccccu

SEQ ID NO: 2709827 - RNA, 18 nt, Human
gcauggcauauuuuucac

SEQ ID NO: 2709828 - RNA, 14 nt, Human
gcauccuggcaccc

SEQ ID NO: 2709829 - RNA, 22 nt, Human
gcauccuggcacccggccccug

SEQ ID NO: 2709830 - RNA, 23 nt, Human
gcauccuggcacccggccccugc

SEQ ID NO: 2709831 - RNA, 16 nt, Human
gcauuguaaaugugcu

SEQ ID NO: 2709832 - RNA, 17 nt, Human
gcaugugaugagaggaa

SEQ ID NO: 2709833 - RNA, 19 nt, Human
gcaugggaaugaaugucag

SEQ ID NO: 2709834 - RNA, 13 nt, Human
gcaugggaaugaa

SEQ ID NO: 2709835 - RNA, 16 nt, Human
gcaugggaaugaaugu

SEQ ID NO: 2709836 - RNA, 14 nt, Human
gccaagaauucuua

SEQ ID NO: 2709837 - RNA, 18 nt, Human
gccaagaauucuuaaaua

SEQ ID NO: 2709838 - RNA, 15 nt, Human
gcauuuaaaagauac

SEQ ID NO: 2709839 - RNA, 12 nt, Human
gcauuuaaaaga

SEQ ID NO: 2709840 - RNA, 16 nt, Human
gcauuugaaaauuuug

SEQ ID NO: 2709841 - RNA, 14 nt, Human
gcauuugaaaauuu

SEQ ID NO: 2709842 - RNA, 12 nt, Human
gcaccuccugcc

SEQ ID NO: 2709843 - RNA, 17 nt, Human
gcaccggcuggccuggc

SEQ ID NO: 2709844 - RNA, 15 nt, Human
gcaccggcuggccug

SEQ ID NO: 2709845 - RNA, 16 nt, Human
gcaccggcuggccugg

SEQ ID NO: 2709846 - RNA, 20 nt, Human
gcacacaccagagcccaccu

SEQ ID NO: 2709847 - RNA, 11 nt, Human
gcacacauuuu

SEQ ID NO: 2709848 - RNA, 12 nt, Human
gcacacauuuuu

SEQ ID NO: 2709849 - RNA, 22 nt, Human
gcacuauagccuaggugacaga

SEQ ID NO: 2709850 - RNA, 15 nt, Human
gcacuccagccuggg

SEQ ID NO: 2709851 - RNA, 17 nt, Human
gcacuccagccugggug

SEQ ID NO: 2709852 - RNA, 18 nt, Human
gcaauagucaaauugugu

SEQ ID NO: 2709853 - RNA, 23 nt, Human
gcaauaaggggagaguaacccug

SEQ ID NO: 2709854 - RNA, 16 nt, Human
gcaauaaaauggguuu

SEQ ID NO: 2709855 - RNA, 11 nt, Human
gcaauaaagca

SEQ ID NO: 2709856 - RNA, 12 nt, Human
gcacacaccaga

SEQ ID NO: 2709857 - RNA, 14 nt, Human
gcacacaccagagc

SEQ ID NO: 2709858 - RNA, 15 nt, Human
gcacacaccagagcc

SEQ ID NO: 2709859 - RNA, 16 nt, Human
gcacacaccagagccc

SEQ ID NO: 2709860 - RNA, 17 nt, Human
gcacacaccagagccca

SEQ ID NO: 2709861 - RNA, 18 nt, Human
gcacacaccagagcccac

SEQ ID NO: 2709862 - RNA, 19 nt, Human
gcacacaccagagcccacc

SEQ ID NO: 2709863 - RNA, 18 nt, Human
gcaaccuccgccucuugg

SEQ ID NO: 2709864 - RNA, 22 nt, Human
gcaacccuggugaccagcacca

SEQ ID NO: 2709865 - RNA, 16 nt, Human
gcaaaagaugcuucuc

SEQ ID NO: 2709866 - RNA, 17 nt, Human
gcaacccccagccugcu

SEQ ID NO: 2709867 - RNA, 18 nt, Human
gcaacccccagccugcua

SEQ ID NO: 2709868 - RNA, 15 nt, Human
gcaaaagaugcuucu

SEQ ID NO: 2709869 - RNA, 15 nt, Human
gauucuuaaaguuga

SEQ ID NO: 2709870 - RNA, 20 nt, Human
gauucuccugccucagccuc

SEQ ID NO: 2709871 - RNA, 21 nt, Human
gauucuccugccucagccucc

SEQ ID NO: 2709872 - RNA, 19 nt, Human
gauucuccugccucagccu

SEQ ID NO: 2709873 - RNA, 21 nt, Human
gauucuuaaaguugaauuuau

SEQ ID NO: 2709874 - RNA, 21 nt, Human
gauucuucugcuucagccucc

SEQ ID NO: 2709875 - RNA, 23 nt, Human
gauucuuauggacaaugacccag

SEQ ID NO: 2709876 - RNA, 17 nt, Human
gauucuuaaaguugaau

SEQ ID NO: 2709877 - RNA, 16 nt, Human
gauucuuaaaguugaa

SEQ ID NO: 2709878 - RNA, 23 nt, Human
gauuuaacagaaauguacagcaa

SEQ ID NO: 2709879 - RNA, 20 nt, Human
gauuuaacagaaauguacag

SEQ ID NO: 2709880 - RNA, 13 nt, Human
gauuucacucucc

SEQ ID NO: 2709881 - RNA, 16 nt, Human
gauuucacucuccuug

SEQ ID NO: 2709882 - RNA, 17 nt, Human
gauuucacucuccuugg

SEQ ID NO: 2709883 - RNA, 18 nt, Human
gauuucacucuccuuggu

SEQ ID NO: 2709884 - RNA, 16 nt, Human
gcaaaaauauuuuaug

SEQ ID NO: 2709885 - RNA, 23 nt, Human
gcaaaaauauuuuaugauccagc

SEQ ID NO: 2709886 - RNA, 22 nt, Human
gcaaaaauauuuuaugauccag

SEQ ID NO: 2709887 - RNA, 17 nt, Human
gcaaaaauauuuuauga

SEQ ID NO: 2709888 - RNA, 22 nt, Human
gauuuuuuuuuccuucagugcc

SEQ ID NO: 2709889 - RNA, 23 nt, Human
gauuuuuuuuuccuucagugccu

SEQ ID NO: 2709890 - RNA, 20 nt, Human
gaucuggguucacugcaacc

SEQ ID NO: 2709891 - RNA, 18 nt, Human
gaucuggguucacugcaa

SEQ ID NO: 2709892 - RNA, 21 nt, Human
gaugaugaaaugaggucagag

SEQ ID NO: 2709893 - RNA, 16 nt, Human
gaugcuuguacauaau

SEQ ID NO: 2709894 - RNA, 14 nt, Human
gaugcuuguacaua

SEQ ID NO: 2709895 - RNA, 13 nt, Human
gaaagggcccaga

SEQ ID NO: 2709896 - RNA, 12 nt, Human
gaaaggcuccag

SEQ ID NO: 2709897 - RNA, 13 nt, Human
gaaaggcuccagg

SEQ ID NO: 2709898 - RNA, 14 nt, Human
gaaaggcuccagga

SEQ ID NO: 2709899 - RNA, 15 nt, Human
gaaaggcuccaggag

SEQ ID NO: 2709900 - RNA, 17 nt, Human
gaaacuggauuaaacuu

SEQ ID NO: 2709901 - RNA, 13 nt, Human
gaaacuggauuaa

SEQ ID NO: 2709902 - RNA, 15 nt, Human
gaaaucuuuaaaaaa

SEQ ID NO: 2709903 - RNA, 12 nt, Human
gaaaucuuuaaa

SEQ ID NO: 2709904 - RNA, 15 nt, Human
gaaagggcccagaga

SEQ ID NO: 2709905 - RNA, 16 nt, Human
gaaagggcccagagag

SEQ ID NO: 2709906 - RNA, 23 nt, Human
gaaaagaaaaaugagccuggcaa

SEQ ID NO: 2709907 - RNA, 14 nt, Human
gaaaagacuccaaa

SEQ ID NO: 2709908 - RNA, 17 nt, Human
gaaaagacuccaaagaa

SEQ ID NO: 2709909 - RNA, 16 nt, Human
gaaaagacuccaaaga

SEQ ID NO: 2709910 - RNA, 20 nt, Human
gaaaauuauuuuguucauac

SEQ ID NO: 2709911 - RNA, 21 nt, Human
gaaaauuauuuuguucauaca

SEQ ID NO: 2709912 - RNA, 22 nt, Human
gaaaauuauuuuguucauacau

SEQ ID NO: 2709913 - RNA, 23 nt, Human
gaaaauuauuuuguucauacaua

SEQ ID NO: 2709914 - RNA, 18 nt, Human
gaaccaccacacccagcc

SEQ ID NO: 2709915 - RNA, 20 nt, Human
gaaccaccacacccagccca

SEQ ID NO: 2709916 - RNA, 21 nt, Human
gaaccaccacacccagcccac

SEQ ID NO: 2709917 - RNA, 22 nt, Human
gaaccaccacacccagcccacu

SEQ ID NO: 2709918 - RNA, 13 nt, Human
gaacuccuggccu

SEQ ID NO: 2709919 - RNA, 14 nt, Human
gaacuccuggccuc

SEQ ID NO: 2709920 - RNA, 17 nt, Human
gaacugauguaaguaaa

SEQ ID NO: 2709921 - RNA, 17 nt, Human
gaacccaaguccaagca

SEQ ID NO: 2709922 - RNA, 16 nt, Human
gaacccaaguccaagc

SEQ ID NO: 2709923 - RNA, 23 nt, Human
gaaccaccacacccagcccacuu

SEQ ID NO: 2709924 - RNA, 22 nt, Human
gaaccauggucggaaaacaugc

SEQ ID NO: 2709925 - RNA, 21 nt, Human
gaagcacaugccucucucagg

SEQ ID NO: 2709926 - RNA, 16 nt, Human
gaagcaccauaacuuu

SEQ ID NO: 2709927 - RNA, 13 nt, Human
gaagcacagcuuc

SEQ ID NO: 2709928 - RNA, 14 nt, Human
gaagcacagcuuca

SEQ ID NO: 2709929 - RNA, 14 nt, Human
gaagcacaugccuc

SEQ ID NO: 2709930 - RNA, 17 nt, Human
gaagcacagugaucaag

SEQ ID NO: 2709931 - RNA, 22 nt, Human
gaagcacaugccucucucaggc

SEQ ID NO: 2709932 - RNA, 17 nt, Human
gaagacucauucuucug

SEQ ID NO: 2709933 - RNA, 18 nt, Human
gaagacucauucuucugu

SEQ ID NO: 2709934 - RNA, 16 nt, Human
gaagacucauucuucu

SEQ ID NO: 2709935 - RNA, 14 nt, Human
gaagacagcucuua

SEQ ID NO: 2709936 - RNA, 15 nt, Human
gaagacagcucuuau

SEQ ID NO: 2709937 - RNA, 21 nt, Human
gaagacacugaugggcaaccc

SEQ ID NO: 2709938 - RNA, 16 nt, Human
gaagacacugaugggc

SEQ ID NO: 2709939 - RNA, 13 nt, Human
gaagacagagcua

SEQ ID NO: 2709940 - RNA, 15 nt, Human
gaagacagagcuaca

SEQ ID NO: 2709941 - RNA, 12 nt, Human
gaagacagcucu

SEQ ID NO: 2709942 - RNA, 13 nt, Human
gaagacagcucuu

SEQ ID NO: 2709943 - RNA, 19 nt, Human
cuuuuauaaacuuuaccuu

SEQ ID NO: 2709944 - RNA, 22 nt, Human
cuuuguauucucuccuguaccu

SEQ ID NO: 2709945 - RNA, 21 nt, Human
cuuuuauaaacuuuaccuuuu

SEQ ID NO: 2709946 - RNA, 20 nt, Human
cuuuuauaaacuuuaccuuu

SEQ ID NO: 2709947 - RNA, 17 nt, Human
cuuuguauucucuccug

SEQ ID NO: 2709948 - RNA, 15 nt, Human
cuuucuacccagcga

SEQ ID NO: 2709949 - RNA, 16 nt, Human
cuuucuacccagcgag

SEQ ID NO: 2709950 - RNA, 16 nt, Human
cuuugacgccauccca

SEQ ID NO: 2709951 - RNA, 17 nt, Human
cuuugacgccaucccag

SEQ ID NO: 2709952 - RNA, 22 nt, Human
cuuucagauacuggauuguacu

SEQ ID NO: 2709953 - RNA, 17 nt, Human
cuuucagauacuggauu

SEQ ID NO: 2709954 - RNA, 15 nt, Human
cuuucagauacugga

SEQ ID NO: 2709955 - RNA, 14 nt, Human
cuuucagauacugg

SEQ ID NO: 2709956 - RNA, 20 nt, Human
cuuucacccuuuucuguuug

SEQ ID NO: 2709957 - RNA, 14 nt, Human
cuuucacccuuuuc

SEQ ID NO: 2709958 - RNA, 15 nt, Human
cuuucacccuuuucu

SEQ ID NO: 2709959 - RNA, 23 nt, Human
cuuuaaugucacaggcaggucca

SEQ ID NO: 2709960 - RNA, 14 nt, Human
cuugguccugcugc

SEQ ID NO: 2709961 - RNA, 22 nt, Human
cuugguagaagcccuucuaccu

SEQ ID NO: 2709962 - RNA, 13 nt, Human
cuugucuuuggac

SEQ ID NO: 2709963 - RNA, 15 nt, Human
cuugucuuuggaccc

SEQ ID NO: 2709964 - RNA, 18 nt, Human
cuugucuuuggacccuga

SEQ ID NO: 2709965 - RNA, 19 nt, Human
cuugucuuuggacccugag

SEQ ID NO: 2709966 - RNA, 18 nt, Human
cuugucucagauuuuauu

SEQ ID NO: 2709967 - RNA, 20 nt, Human
cuuggugucgggcaugacac

SEQ ID NO: 2709968 - RNA, 19 nt, Human
cuuggugucgggcaugaca

SEQ ID NO: 2709969 - RNA, 13 nt, Human
cuugucucagauu

SEQ ID NO: 2709970 - RNA, 17 nt, Human
cuugucucagauuuuau

SEQ ID NO: 2709971 - RNA, 14 nt, Human
cuugucucagauuu

SEQ ID NO: 2709972 - RNA, 22 nt, Human
cuuggauuguccccgacccuug

SEQ ID NO: 2709973 - RNA, 23 nt, Human
cuuggauuguccccgacccuugc

SEQ ID NO: 2709974 - RNA, 24 nt, Human
cuuggauuguccccgacccuugcc

SEQ ID NO: 2709975 - RNA, 12 nt, Human
cuugcaaaguau

SEQ ID NO: 2709976 - RNA, 12 nt, Human
cuugauucauaa

SEQ ID NO: 2709977 - RNA, 18 nt, Human
cuugauguguuaucucuu

SEQ ID NO: 2709978 - RNA, 22 nt, Human
cuugauauccucuuugagugaa

SEQ ID NO: 2709979 - RNA, 17 nt, Human
cuugauauccucuuuga

SEQ ID NO: 2709980 - RNA, 16 nt, Human
cuugacaucaacugca

SEQ ID NO: 2709981 - RNA, 20 nt, Human
cuugacagggcacaccgggc

SEQ ID NO: 2709982 - RNA, 13 nt, Human
cuucuucagagac

SEQ ID NO: 2709983 - RNA, 14 nt, Human
cuucuucagagacu

SEQ ID NO: 2709984 - RNA, 23 nt, Human
cuucugaacuuggcgcugccccu

SEQ ID NO: 2709985 - RNA, 17 nt, Human
cuucuaaguaaaaccac

SEQ ID NO: 2709986 - RNA, 13 nt, Human
cuucuaaguaaaa

SEQ ID NO: 2709987 - RNA, 21 nt, Human
cuucuaaguaaaaccacagca

SEQ ID NO: 2709988 - RNA, 20 nt, Human
cuucucacauuuauauuuuu

SEQ ID NO: 2709989 - RNA, 13 nt, Human
cuucucacauuua

SEQ ID NO: 2709990 - RNA, 13 nt, Human
cuuccuccuggug

SEQ ID NO: 2709991 - RNA, 22 nt, Human
cuuccucuuuccaucuacccuc

SEQ ID NO: 2709992 - RNA, 21 nt, Human
cuuccucuuuccaucuacccu

SEQ ID NO: 2709993 - RNA, 15 nt, Human
cugggcagaaggaag

SEQ ID NO: 2709994 - RNA, 12 nt, Human
cugggcagaagg

SEQ ID NO: 2709995 - RNA, 14 nt, Human
cuggggagaaagua

SEQ ID NO: 2709996 - RNA, 18 nt, Human
cuggguucacugcaaccu

SEQ ID NO: 2709997 - RNA, 20 nt, Human
cuggguucacugcaaccucc

SEQ ID NO: 2709998 - RNA, 15 nt, Human
cuggguucacugcaa

SEQ ID NO: 2709999 - RNA, 17 nt, Human
cuggcagaguugaagac

SEQ ID NO: 2710000 - RNA, 18 nt, Human
cuggcagaguugaagaca

SEQ ID NO: 2710001 - RNA, 11 nt, Human
cuggcagccca

SEQ ID NO: 2710002 - RNA, 12 nt, Human
cuggcagccccu

SEQ ID NO: 2710003 - RNA, 19 nt, Human
cuggcagaguugaagacag

SEQ ID NO: 2710004 - RNA, 13 nt, Human
cuggcagccccug

SEQ ID NO: 2710005 - RNA, 14 nt, Human
cuggccuagcauac

SEQ ID NO: 2710006 - RNA, 22 nt, Human
cuggccccucagggucccuggu

SEQ ID NO: 2710007 - RNA, 11 nt, Human
cugggacacag

SEQ ID NO: 2710008 - RNA, 18 nt, Human
cugcugacuguuuucucu

SEQ ID NO: 2710009 - RNA, 21 nt, Human
cugcugacuguuuucucuuga

SEQ ID NO: 2710010 - RNA, 23 nt, Human
cugccuguugggccaggagccuc

SEQ ID NO: 2710011 - RNA, 21 nt, Human
cugccuguugggccaggagcc

SEQ ID NO: 2710012 - RNA, 22 nt, Human
cugccuguugggccaggagccu

SEQ ID NO: 2710013 - RNA, 17 nt, Human
cugccuguucagcucca

SEQ ID NO: 2710014 - RNA, 18 nt, Human
cugccuguucagcuccag

SEQ ID NO: 2710015 - RNA, 19 nt, Human
cugccuguucagcuccagc

SEQ ID NO: 2710016 - RNA, 20 nt, Human
cugccuguugggccaggagc

SEQ ID NO: 2710017 - RNA, 23 nt, Human
cugccucucccaucacuucccua

SEQ ID NO: 2710018 - RNA, 22 nt, Human
cugccucucccaucacuucccu

SEQ ID NO: 2710019 - RNA, 15 nt, Human
cugccucucccauca

SEQ ID NO: 2710020 - RNA, 14 nt, Human
cugcuucaaauauu

SEQ ID NO: 2710021 - RNA, 20 nt, Human
cugcuuuugucuaugggacu

SEQ ID NO: 2710022 - RNA, 22 nt, Human
cugcuucaaggauccugagcca

SEQ ID NO: 2710023 - RNA, 23 nt, Human
cugcuucaaggauccugagccag

SEQ ID NO: 2710024 - RNA, 19 nt, Human
cugcuucaaauauuucccu

SEQ ID NO: 2710025 - RNA, 12 nt, Human
cugcuucaagga

SEQ ID NO: 2710026 - RNA, 13 nt, Human
cugcuucaaggau

SEQ ID NO: 2710027 - RNA, 21 nt, Human
cugcuucaaggauccugagcc

SEQ ID NO: 2710028 - RNA, 19 nt, Human
cugcuuuugucuaugggac

SEQ ID NO: 2710029 - RNA, 19 nt, Human
cugcuuuuuaaagaaugcu

SEQ ID NO: 2710030 - RNA, 21 nt, Human
cugcuuuugucuaugggacuc

SEQ ID NO: 2710031 - RNA, 14 nt, Human
cuggagaaaaugga

SEQ ID NO: 2710032 - RNA, 15 nt, Human
cugucgcccagucug

SEQ ID NO: 2710033 - RNA, 16 nt, Human
cugucgcccagucugg

SEQ ID NO: 2710034 - RNA, 23 nt, Human
cugucaauuacaggaaguacugg

SEQ ID NO: 2710035 - RNA, 19 nt, Human
cugucaauuacaggaagua

SEQ ID NO: 2710036 - RNA, 20 nt, Human
cugucaauuacaggaaguac

SEQ ID NO: 2710037 - RNA, 21 nt, Human
cuguccugggagugagcuggu

SEQ ID NO: 2710038 - RNA, 13 nt, Human
cuguagaguggga

SEQ ID NO: 2710039 - RNA, 12 nt, Human
cugugcugcccu

SEQ ID NO: 2710040 - RNA, 13 nt, Human
cugugcugcccug

SEQ ID NO: 2710041 - RNA, 14 nt, Human
cugugcugcccugc

SEQ ID NO: 2710042 - RNA, 18 nt, Human
cugugccucugggacugg

SEQ ID NO: 2710043 - RNA, 13 nt, Human
cuguuauaaucuu

SEQ ID NO: 2710044 - RNA, 19 nt, Human
cuguuauaaucuuucacag

SEQ ID NO: 2710045 - RNA, 17 nt, Human
cugugucagcauagaag

SEQ ID NO: 2710046 - RNA, 19 nt, Human
cugugucagcauagaagua

SEQ ID NO: 2710047 - RNA, 15 nt, Human
cugugcugcccugcc

SEQ ID NO: 2710048 - RNA, 17 nt, Human
cugugcugcccugccca

SEQ ID NO: 2710049 - RNA, 18 nt, Human
cugugcugcccugcccac

SEQ ID NO: 2710050 - RNA, 19 nt, Human
cugugcugcccugcccacc

SEQ ID NO: 2710051 - RNA, 14 nt, Human
cuguuggcuggggg

SEQ ID NO: 2710052 - RNA, 19 nt, Human
cuguuggcugggggccuca

SEQ ID NO: 2710053 - RNA, 22 nt, Human
cuguuggcugggggccucagug

SEQ ID NO: 2710054 - RNA, 22 nt, Human
cuuaaaguugaauuuauuggcu

SEQ ID NO: 2710055 - RNA, 14 nt, Human
cuuaaaguugaauu

SEQ ID NO: 2710056 - RNA, 18 nt, Human
cuuaaaguugaauuuauu

SEQ ID NO: 2710057 - RNA, 15 nt, Human
cuuaaaguugaauuu

SEQ ID NO: 2710058 - RNA, 14 nt, Human
cuuaaaacaacacu

SEQ ID NO: 2710059 - RNA, 15 nt, Human
cuuaccagcagagca

SEQ ID NO: 2710060 - RNA, 21 nt, Human
cuuagggaaggauacaaaagc

SEQ ID NO: 2710061 - RNA, 19 nt, Human
cuuagggaaggauacaaaa

SEQ ID NO: 2710062 - RNA, 16 nt, Human
cuuaccagcagagcac

SEQ ID NO: 2710063 - RNA, 22 nt, Human
cuuagcucauucuccuuguguu

SEQ ID NO: 2710064 - RNA, 23 nt, Human
cuuagcucauucuccuuguguua

SEQ ID NO: 2710065 - RNA, 14 nt, Human
aauacacacucaaa

SEQ ID NO: 2710066 - RNA, 23 nt, Human
aauacaauuuuguuucuguacuu

SEQ ID NO: 2710067 - RNA, 22 nt, Human
aauacaauuuuguuucuguacu

SEQ ID NO: 2710068 - RNA, 15 nt, Human
aauacaccacuacau

SEQ ID NO: 2710069 - RNA, 13 nt, Human
aauacaauuuugu

SEQ ID NO: 2710070 - RNA, 12 nt, Human
aauacaauuuug

SEQ ID NO: 2710071 - RNA, 20 nt, Human
aauacaauuuuguuucugua

SEQ ID NO: 2710072 - RNA, 18 nt, Human
aauacaauuuuguuucug

SEQ ID NO: 2710073 - RNA, 17 nt, Human
aauacaauuuuguuucu

SEQ ID NO: 2710074 - RNA, 15 nt, Human
aauacaauuuuguuu

SEQ ID NO: 2710075 - RNA, 20 nt, Human
aauacaccacuacauucugu

SEQ ID NO: 2710076 - RNA, 18 nt, Human
aauacaccacuacauucu

SEQ ID NO: 2710077 - RNA, 16 nt, Human
aauacaccacuacauu

SEQ ID NO: 2710078 - RNA, 13 nt, Human
uaaauacaauuuu

SEQ ID NO: 2710079 - RNA, 22 nt, Human
uaaauacaauuuuguuucugua

SEQ ID NO: 2710080 - RNA, 15 nt, Human
uaaauacaauuuugu

SEQ ID NO: 2710081 - RNA, 19 nt, Human
uaaauagcuagacugguga

SEQ ID NO: 2710082 - RNA, 23 nt, Human
uaaauacaauuuuguuucuguac

SEQ ID NO: 2710083 - RNA, 23 nt, Human
uaaauagcuagacuggugacuga

SEQ ID NO: 2710084 - RNA, 12 nt, Human
uaaauagcuuuu

SEQ ID NO: 2710085 - RNA, 19 nt, Human
uaaaucuccaaaauaaaac

SEQ ID NO: 2710086 - RNA, 18 nt, Human
uaaauaguauuugagagu

SEQ ID NO: 2710087 - RNA, 23 nt, Human
uaaaucccauuauucaaaguugc

SEQ ID NO: 2710088 - RNA, 15 nt, Human
uaacaaugcuguauu

SEQ ID NO: 2710089 - RNA, 17 nt, Human
uaacaaugcuguauuuu

SEQ ID NO: 2710090 - RNA, 13 nt, Human
uaacaaugcugua

SEQ ID NO: 2710091 - RNA, 13 nt, Human
uaacaagccaccc

SEQ ID NO: 2710092 - RNA, 14 nt, Human
uaaauuuuauaucu

SEQ ID NO: 2710093 - RNA, 16 nt, Human
uaaauuuugaguucua

SEQ ID NO: 2710094 - RNA, 20 nt, Human
uaacaaaaaaauauauuuaa

SEQ ID NO: 2710095 - RNA, 23 nt, Human
uaacaaaaaaauauauuuaauga

SEQ ID NO: 2710096 - RNA, 16 nt, Human
uaacaacagcuggugc

SEQ ID NO: 2710097 - RNA, 15 nt, Human
uaaauguugacaugg

SEQ ID NO: 2710098 - RNA, 21 nt, Human
uaaaucuccaaaauaaaacuu

SEQ ID NO: 2710099 - RNA, 20 nt, Human
uaaaucuccaaaauaaaacu

SEQ ID NO: 2710100 - RNA, 22 nt, Human
uaaauuaacuuuuauaaacuuu

SEQ ID NO: 2710101 - RNA, 12 nt, Human
aauaaaaauaau

SEQ ID NO: 2710102 - RNA, 22 nt, Human
aauaaaaauauuguguugugaa

SEQ ID NO: 2710103 - RNA, 22 nt, Human
aauaaaauccauacauuugugu

SEQ ID NO: 2710104 - RNA, 14 nt, Human
aauaaaguaauuau

SEQ ID NO: 2710105 - RNA, 13 nt, Human
uaaagucaggggu

SEQ ID NO: 2710106 - RNA, 14 nt, Human
aauaaaaaauuaug

SEQ ID NO: 2710107 - RNA, 16 nt, Human
aauaaaaaauuaugac

SEQ ID NO: 2710108 - RNA, 15 nt, Human
aauaaaaaauuauga

SEQ ID NO: 2710109 - RNA, 14 nt, Human
uaaaguguauuuuu

SEQ ID NO: 2710110 - RNA, 19 nt, Human
uaaaguguauuuuuuuacu

SEQ ID NO: 2710111 - RNA, 15 nt, Human
uaaaguguauuuuuu

SEQ ID NO: 2710112 - RNA, 15 nt, Human
aauaacgauaaaaga

SEQ ID NO: 2710113 - RNA, 19 nt, Human
aauaacauguaauuaagua

SEQ ID NO: 2710114 - RNA, 12 nt, Human
aauaacauguaa

SEQ ID NO: 2710115 - RNA, 15 nt, Human
aauaacaauaaaaga

SEQ ID NO: 2710116 - RNA, 21 nt, Human
aauaaaugugccuucauuuuu

SEQ ID NO: 2710117 - RNA, 12 nt, Human
aauaaaugugcc

SEQ ID NO: 2710118 - RNA, 12 nt, Human
aauaaauuauuu

SEQ ID NO: 2710119 - RNA, 21 nt, Human
aauaaauagcuagacugguga

SEQ ID NO: 2710120 - RNA, 15 nt, Human
aauaaggaaaaguuu

SEQ ID NO: 2710121 - RNA, 13 nt, Human
aauaaggaaaagu

SEQ ID NO: 2710122 - RNA, 15 nt, Human
aauaacuaaaaggua

SEQ ID NO: 2710123 - RNA, 22 nt, Human
aauaaggaaaaguuuaauauua

SEQ ID NO: 2710124 - RNA, 19 nt, Human
aauaaggaaaaguuuaaua

SEQ ID NO: 2710125 - RNA, 16 nt, Human
aauaaggaaaaguuua

SEQ ID NO: 2710126 - RNA, 15 nt, Human
aauaauuauaugcua

SEQ ID NO: 2710127 - RNA, 14 nt, Human
aauaauuauaugcu

SEQ ID NO: 2710128 - RNA, 23 nt, Human
aauaauuauaugcuauuucuaua

SEQ ID NO: 2710129 - RNA, 22 nt, Human
aauaauuauaugcuauuucuau

SEQ ID NO: 2710130 - RNA, 21 nt, Human
aauaauuauaugcuauuucua

SEQ ID NO: 2710131 - RNA, 20 nt, Human
aauaauuauaugcuauuucu

SEQ ID NO: 2710132 - RNA, 18 nt, Human
aaguuuacauuguaaaua

SEQ ID NO: 2710133 - RNA, 19 nt, Human
aaguuuacauuguaaauag

SEQ ID NO: 2710134 - RNA, 18 nt, Human
aaguuuaauauuaaagcc

SEQ ID NO: 2710135 - RNA, 21 nt, Human
aaguuuaauauuaaagccaug

SEQ ID NO: 2710136 - RNA, 20 nt, Human
aaguuuaauauuaaagccau

SEQ ID NO: 2710137 - RNA, 19 nt, Human
aaguuuaauauuaaagcca

SEQ ID NO: 2710138 - RNA, 22 nt, Human
aaguuauugauaaguucauaca

SEQ ID NO: 2710139 - RNA, 23 nt, Human
aaguuauugauaaguucauacau

SEQ ID NO: 2710140 - RNA, 15 nt, Human
aaguucauacauugu

SEQ ID NO: 2710141 - RNA, 12 nt, Human
aaguucauacau

SEQ ID NO: 2710142 - RNA, 13 nt, Human
aaguucauacauu

SEQ ID NO: 2710143 - RNA, 14 nt, Human
aaguuaaauaaauc

SEQ ID NO: 2710144 - RNA, 12 nt, Human
aaguuaaauaaa

SEQ ID NO: 2710145 - RNA, 19 nt, Human
aaguuauugauaaguucau

SEQ ID NO: 2710146 - RNA, 20 nt, Human
aaguuauugauaaguucaua

SEQ ID NO: 2710147 - RNA, 18 nt, Human
uaaaccucaaaaugucua

SEQ ID NO: 2710148 - RNA, 19 nt, Human
uaaaccucaaaaugucuaa

SEQ ID NO: 2710149 - RNA, 16 nt, Human
uaaaccgccaaggcug

SEQ ID NO: 2710150 - RNA, 18 nt, Human
uaaaccgccaaggcuggg

SEQ ID NO: 2710151 - RNA, 22 nt, Human
uaaaccaugggauaaaugccau

SEQ ID NO: 2710152 - RNA, 21 nt, Human
uaaaccaugggauaaaugcca

SEQ ID NO: 2710153 - RNA, 20 nt, Human
uaaaccaugggauaaaugcc

SEQ ID NO: 2710154 - RNA, 18 nt, Human
uaaaccaugggauaaaug

SEQ ID NO: 2710155 - RNA, 17 nt, Human
uaaacgucuuaaauauu

SEQ ID NO: 2710156 - RNA, 13 nt, Human
uaaacgucuuaaa

SEQ ID NO: 2710157 - RNA, 21 nt, Human
uaaaggcuaccuuuguauucu

SEQ ID NO: 2710158 - RNA, 19 nt, Human
uaaaggcuaccuuuguauu

SEQ ID NO: 2710159 - RNA, 19 nt, Human
aaggaaaaaauaacaauga

SEQ ID NO: 2710160 - RNA, 16 nt, Human
aaggaaaaaauaacaa

SEQ ID NO: 2710161 - RNA, 18 nt, Human
aagcuguuacugucuuca

SEQ ID NO: 2710162 - RNA, 13 nt, Human
aagcucugcuccu

SEQ ID NO: 2710163 - RNA, 13 nt, Human
guguuuauuuaua

SEQ ID NO: 2710164 - RNA, 13 nt, Human
guguuuauuguca

SEQ ID NO: 2710165 - RNA, 11 nt, Human
aagcucccagg

SEQ ID NO: 2710166 - RNA, 23 nt, Human
aagcucccaggcauuccccagga

SEQ ID NO: 2710167 - RNA, 12 nt, Human
aagcucccaggc

SEQ ID NO: 2710168 - RNA, 22 nt, Human
aagcucccaggcauuccccagg

SEQ ID NO: 2710169 - RNA, 12 nt, Human
guucucugcccu

SEQ ID NO: 2710170 - RNA, 16 nt, Human
guucucugaggacacu

SEQ ID NO: 2710171 - RNA, 11 nt, Human
guucucugccc

SEQ ID NO: 2710172 - RNA, 22 nt, Human
guugauagcacagacccugccc

SEQ ID NO: 2710173 - RNA, 23 nt, Human
guugauagcacagacccugcccu

SEQ ID NO: 2710174 - RNA, 13 nt, Human
guugaauuuuaca

SEQ ID NO: 2710175 - RNA, 13 nt, Human
aaggauaaugaau

SEQ ID NO: 2710176 - RNA, 20 nt, Human
aaggaggaagagaaaaaaua

SEQ ID NO: 2710177 - RNA, 11 nt, Human
aaggauccuga

SEQ ID NO: 2710178 - RNA, 12 nt, Human
aaggauccugag

SEQ ID NO: 2710179 - RNA, 14 nt, Human
aaggaucuucaucu

SEQ ID NO: 2710180 - RNA, 20 nt, Human
aaggauccugagccagauuu

SEQ ID NO: 2710181 - RNA, 22 nt, Human
aaggauccugagccagauuuca

SEQ ID NO: 2710182 - RNA, 14 nt, Human
aaggaaaaugauac

SEQ ID NO: 2710183 - RNA, 12 nt, Human
aaggaaaaugau

SEQ ID NO: 2710184 - RNA, 15 nt, Human
aaggaaacccagcuc

SEQ ID NO: 2710185 - RNA, 18 nt, Human
aaggagauuuacaacugg

SEQ ID NO: 2710186 - RNA, 17 nt, Human
aaggagauuuacaacug

SEQ ID NO: 2710187 - RNA, 13 nt, Human
aaggcuaccuuug

SEQ ID NO: 2710188 - RNA, 14 nt, Human
guugcccaggcugg

SEQ ID NO: 2710189 - RNA, 15 nt, Human
aaggcuaccuuugua

SEQ ID NO: 2710190 - RNA, 19 nt, Human
aaggccccgcccaggcuua

SEQ ID NO: 2710191 - RNA, 14 nt, Human
aaggccccgcccag

SEQ ID NO: 2710192 - RNA, 16 nt, Human
aaggccccgcccaggc

SEQ ID NO: 2710193 - RNA, 19 nt, Human
aaggaugcccaaagaugca

SEQ ID NO: 2710194 - RNA, 14 nt, Human
aaggaugcccaaag

SEQ ID NO: 2710195 - RNA, 22 nt, Human
aaggaugcacagaguuguuaca

SEQ ID NO: 2710196 - RNA, 24 nt, Human
aaggaugcacagaguuguuacauu

SEQ ID NO: 2710197 - RNA, 23 nt, Human
guuggcugggggccucagugcca

SEQ ID NO: 2710198 - RNA, 15 nt, Human
guugcccaggcuggc

SEQ ID NO: 2710199 - RNA, 16 nt, Human
guugcccaggcuggcg

SEQ ID NO: 2710200 - RNA, 17 nt, Human
guugggcuggugucacc

SEQ ID NO: 2710201 - RNA, 23 nt, Human
guuuuuuuuuaaaaaagaaacau

SEQ ID NO: 2710202 - RNA, 16 nt, Human
guuuuugucuuaaaaa

SEQ ID NO: 2710203 - RNA, 18 nt, Human
guuuuucuaggccugggg

SEQ ID NO: 2710204 - RNA, 19 nt, Human
aagucuuagauguauauau

SEQ ID NO: 2710205 - RNA, 18 nt, Human
aagucuuagauguauaua

SEQ ID NO: 2710206 - RNA, 17 nt, Human
aagucuuagauguauau

SEQ ID NO: 2710207 - RNA, 23 nt, Human
aaguauguuagugcaaauuguca

SEQ ID NO: 2710208 - RNA, 21 nt, Human
aaguauguuagugcaaauugu

SEQ ID NO: 2710209 - RNA, 22 nt, Human
aaguacuucuccacccugcucu

SEQ ID NO: 2710210 - RNA, 23 nt, Human
aaguacuucuccacccugcucuc

SEQ ID NO: 2710211 - RNA, 13 nt, Human
aaguauuaagcau

SEQ ID NO: 2710212 - RNA, 15 nt, Human
aaguauucuaaauuu

SEQ ID NO: 2710213 - RNA, 13 nt, Human
aaguauucuaaau

SEQ ID NO: 2710214 - RNA, 22 nt, Human
guuuucugagaaagacuauuca

SEQ ID NO: 2710215 - RNA, 15 nt, Human
aaguacuauguauca

SEQ ID NO: 2710216 - RNA, 17 nt, Human
guuuucugagaaagacu

SEQ ID NO: 2710217 - RNA, 16 nt, Human
guuuucugagaaagac

SEQ ID NO: 2710218 - RNA, 16 nt, Human
aaguacuauguaucaa

SEQ ID NO: 2710219 - RNA, 21 nt, Human
aaguacuucuccacccugcuc

SEQ ID NO: 2710220 - RNA, 15 nt, Human
aaguacuggagaaaa

SEQ ID NO: 2710221 - RNA, 24 nt, Human
aagucacacaguauuacuucugcu

SEQ ID NO: 2710222 - RNA, 21 nt, Human
aagucaagugaaaaaggagga

SEQ ID NO: 2710223 - RNA, 19 nt, Human
aaguauucuuauuuaauga

SEQ ID NO: 2710224 - RNA, 18 nt, Human
aaguauucuuauuuaaug

SEQ ID NO: 2710225 - RNA, 20 nt, Human
aagucacauuccugaacagg

SEQ ID NO: 2710226 - RNA, 13 nt, Human
aagucacacagug

SEQ ID NO: 2710227 - RNA, 21 nt, Human
aagggugaugggaaagcauug

SEQ ID NO: 2710228 - RNA, 16 nt, Human
aaguaaaaccacagca

SEQ ID NO: 2710229 - RNA, 15 nt, Human
aaguaaaaccacagc

SEQ ID NO: 2710230 - RNA, 14 nt, Human
aaguaaaaccacag

SEQ ID NO: 2710231 - RNA, 18 nt, Human
aaguaaaaccacagcagu

SEQ ID NO: 2710232 - RNA, 17 nt, Human
aaguaaaaccacagcag

SEQ ID NO: 2710233 - RNA, 15 nt, Human
aagggcccagagagg

SEQ ID NO: 2710234 - RNA, 13 nt, Human
aagggcccagaga

SEQ ID NO: 2710235 - RNA, 17 nt, Human
aaggguaucaggugcug

SEQ ID NO: 2710236 - RNA, 14 nt, Human
aaggggcaguggug

SEQ ID NO: 2710237 - RNA, 19 nt, Human
aaggguaucaggugcugcc

SEQ ID NO: 2710238 - RNA, 16 nt, Human
aaggguaucuggugac

SEQ ID NO: 2710239 - RNA, 15 nt, Human
guuuuauaauuuugu

SEQ ID NO: 2710240 - RNA, 22 nt, Human
guuuuauaauuuugugaagcaa

SEQ ID NO: 2710241 - RNA, 15 nt, Human
guuuucugagaaaga

SEQ ID NO: 2710242 - RNA, 15 nt, Human
guuuuacugcagcuu

SEQ ID NO: 2710243 - RNA, 16 nt, Human
guuuuacugcagcuuu

SEQ ID NO: 2710244 - RNA, 18 nt, Human
guuuuacugcagcuuugu

SEQ ID NO: 2710245 - RNA, 14 nt, Human
guuuuaagaggcag

SEQ ID NO: 2710246 - RNA, 18 nt, Human
guuuuaaggaugcuugua

SEQ ID NO: 2710247 - RNA, 16 nt, Human
guuuuaagaggcaggg

SEQ ID NO: 2710248 - RNA, 22 nt, Human
guuucugccgcagcccugcaga

SEQ ID NO: 2710249 - RNA, 10 nt, Human
guuucuguac

SEQ ID NO: 2710250 - RNA, 18 nt, Human
guuucugccgcagcccug

SEQ ID NO: 2710251 - RNA, 15 nt, Human
guuucuguacuuuuu

SEQ ID NO: 2710252 - RNA, 17 nt, Human
guuugccucugccucug

SEQ ID NO: 2710253 - RNA, 13 nt, Human
guuugcuaaguga

SEQ ID NO: 2710254 - RNA, 13 nt, Human
aagaauauuuuaa

SEQ ID NO: 2710255 - RNA, 17 nt, Human
guggcagcugcggucca

SEQ ID NO: 2710256 - RNA, 24 nt, Human
aagaauuucuaggacugaauuaug

SEQ ID NO: 2710257 - RNA, 21 nt, Human
guggauuuaacagaaauguac

SEQ ID NO: 2710258 - RNA, 20 nt, Human
guggauuuaacagaaaugua

SEQ ID NO: 2710259 - RNA, 23 nt, Human
guggauuuaacagaaauguacag

SEQ ID NO: 2710260 - RNA, 14 nt, Human
guggcagcugcggu

SEQ ID NO: 2710261 - RNA, 22 nt, Human
guggcagcucaccucucccuug

SEQ ID NO: 2710262 - RNA, 13 nt, Human
guggcaccagcag

SEQ ID NO: 2710263 - RNA, 14 nt, Human
guggcaccagcagc

SEQ ID NO: 2710264 - RNA, 14 nt, Human
guggacacagcucu

SEQ ID NO: 2710265 - RNA, 15 nt, Human
guggacacagcucuu

SEQ ID NO: 2710266 - RNA, 17 nt, Human
guggacacagcucuucu

SEQ ID NO: 2710267 - RNA, 24 nt, Human
guggacacagcucuucuccaggcu

SEQ ID NO: 2710268 - RNA, 22 nt, Human
gugcugggguuaucugaaguca

SEQ ID NO: 2710269 - RNA, 19 nt, Human
gugcugguguaugugugaa

SEQ ID NO: 2710270 - RNA, 21 nt, Human
gugcugcccugcccaccuggc

SEQ ID NO: 2710271 - RNA, 19 nt, Human
gugcugcccugcccaccug

SEQ ID NO: 2710272 - RNA, 20 nt, Human
gugcugcccugcccaccugg

SEQ ID NO: 2710273 - RNA, 18 nt, Human
gugcugcccugcccaccu

SEQ ID NO: 2710274 - RNA, 13 nt, Human
aagaaaauaucac

SEQ ID NO: 2710275 - RNA, 22 nt, Human
aagaagcaccaaucaugaauua

SEQ ID NO: 2710276 - RNA, 16 nt, Human
aagaagcccaggaaag

SEQ ID NO: 2710277 - RNA, 17 nt, Human
aagaagcccaggaaagg

SEQ ID NO: 2710278 - RNA, 14 nt, Human
aagaagcucucucc

SEQ ID NO: 2710279 - RNA, 15 nt, Human
aagaagcucucuccu

SEQ ID NO: 2710280 - RNA, 14 nt, Human
aacuuguguaaaua

SEQ ID NO: 2710281 - RNA, 20 nt, Human
aacuuguguaaauacaauuu

SEQ ID NO: 2710282 - RNA, 15 nt, Human
aacuuguguaaauac

SEQ ID NO: 2710283 - RNA, 20 nt, Human
aagaaaaaggaugcacagag

SEQ ID NO: 2710284 - RNA, 19 nt, Human
aagaaaaaggaugcacaga

SEQ ID NO: 2710285 - RNA, 22 nt, Human
aagaaaaaggaugcacagaguu

SEQ ID NO: 2710286 - RNA, 12 nt, Human
gugcacacacca

SEQ ID NO: 2710287 - RNA, 14 nt, Human
gugcacacaccaga

SEQ ID NO: 2710288 - RNA, 18 nt, Human
gugcacguacacacacau

SEQ ID NO: 2710289 - RNA, 17 nt, Human
gugcacacaccagagcc

SEQ ID NO: 2710290 - RNA, 14 nt, Human
gugccaagcagagg

SEQ ID NO: 2710291 - RNA, 15 nt, Human
gugcauuuggugguu

SEQ ID NO: 2710292 - RNA, 20 nt, Human
gugcacuaauguguaagaca

SEQ ID NO: 2710293 - RNA, 20 nt, Human
gugcauuugaggucuguucu

SEQ ID NO: 2710294 - RNA, 22 nt, Human
gugcauuugaggucuguucuuu

SEQ ID NO: 2710295 - RNA, 21 nt, Human
gugcauuugaggucuguucuu

SEQ ID NO: 2710296 - RNA, 15 nt, Human
gugccucugggacug

SEQ ID NO: 2710297 - RNA, 14 nt, Human
gugccucugggacu

SEQ ID NO: 2710298 - RNA, 14 nt, Human
aacuuggcgcugcc

SEQ ID NO: 2710299 - RNA, 23 nt, Human
aacuugguucccauuugcuccuu

SEQ ID NO: 2710300 - RNA, 19 nt, Human
aagcaaaauuuuuucucua

SEQ ID NO: 2710301 - RNA, 22 nt, Human
aagauauuuugcuuugugauuu

SEQ ID NO: 2710302 - RNA, 20 nt, Human
aagauauuuugcuuugugau

SEQ ID NO: 2710303 - RNA, 17 nt, Human
aagauauuuugcuuugu

SEQ ID NO: 2710304 - RNA, 18 nt, Human
gugguuauggagagggug

SEQ ID NO: 2710305 - RNA, 19 nt, Human
gugguguuuccuggcacug

SEQ ID NO: 2710306 - RNA, 16 nt, Human
aagaguaggaagacuu

SEQ ID NO: 2710307 - RNA, 18 nt, Human
aagaguaggaagacuuug

SEQ ID NO: 2710308 - RNA, 19 nt, Human
aagaguaggaagacuuugg

SEQ ID NO: 2710309 - RNA, 15 nt, Human
aagauauuuugcuuu

SEQ ID NO: 2710310 - RNA, 16 nt, Human
aagcaaguauuagaau

SEQ ID NO: 2710311 - RNA, 19 nt, Human
gugucuugcaauggcagcc

SEQ ID NO: 2710312 - RNA, 20 nt, Human
gugucccaaaaagaaaggag

SEQ ID NO: 2710313 - RNA, 21 nt, Human
gugucuugcaauggcagccuu

SEQ ID NO: 2710314 - RNA, 13 nt, Human
gugugagucacca

SEQ ID NO: 2710315 - RNA, 18 nt, Human
gugugagucaccaagccc

SEQ ID NO: 2710316 - RNA, 15 nt, Human
gugugguguuuccug

SEQ ID NO: 2710317 - RNA, 19 nt, Human
gugugguguuuccuggcac

SEQ ID NO: 2710318 - RNA, 23 nt, Human
guguugaaacggaugauuucuau

SEQ ID NO: 2710319 - RNA, 21 nt, Human
guguugaaacggaugauuucu

SEQ ID NO: 2710320 - RNA, 13 nt, Human
aagacuauucaaa

SEQ ID NO: 2710321 - RNA, 20 nt, Human
aagacgcugugcugcccugc

SEQ ID NO: 2710322 - RNA, 23 nt, Human
aagacgcugugcugcccugccca

SEQ ID NO: 2710323 - RNA, 14 nt, Human
aagacuauucaaac

SEQ ID NO: 2710324 - RNA, 21 nt, Human
aagacgcugugcugcccugcc

SEQ ID NO: 2710325 - RNA, 22 nt, Human
aagacgcugugcugcccugccc

SEQ ID NO: 2710326 - RNA, 14 nt, Human
aagacuccaaagaa

SEQ ID NO: 2710327 - RNA, 17 nt, Human
aagacucauucuucugu

SEQ ID NO: 2710328 - RNA, 17 nt, Human
aagacuccaaagaaaug

SEQ ID NO: 2710329 - RNA, 16 nt, Human
aagacuccaaagaaau

SEQ ID NO: 2710330 - RNA, 18 nt, Human
aagagcuguucacagcca

SEQ ID NO: 2710331 - RNA, 16 nt, Human
aagacuguacaaagua

SEQ ID NO: 2710332 - RNA, 16 nt, Human
aagagauugugguuuc

SEQ ID NO: 2710333 - RNA, 19 nt, Human
aagagauugugguuucauu

SEQ ID NO: 2710334 - RNA, 16 nt, Human
aagagcccaggccucc

SEQ ID NO: 2710335 - RNA, 12 nt, Human
aagagcccaggc

SEQ ID NO: 2710336 - RNA, 14 nt, Human
aagagcccaggccu

SEQ ID NO: 2710337 - RNA, 14 nt, Human
guggguagacacac

SEQ ID NO: 2710338 - RNA, 15 nt, Human
gugguguuuccuggc

SEQ ID NO: 2710339 - RNA, 16 nt, Human
gugguguuuccuggca

SEQ ID NO: 2710340 - RNA, 12 nt, Human
gugggagcugag

SEQ ID NO: 2710341 - RNA, 15 nt, Human
gugggauccuccagg

SEQ ID NO: 2710342 - RNA, 18 nt, Human
gugggauccuccaggugc

SEQ ID NO: 2710343 - RNA, 13 nt, Human
guggccucccaac

SEQ ID NO: 2710344 - RNA, 14 nt, Human
guggccucccaacu

SEQ ID NO: 2710345 - RNA, 15 nt, Human
guggccucccaacuc

SEQ ID NO: 2710346 - RNA, 19 nt, Human
aacagucucaggaaaucaa

SEQ ID NO: 2710347 - RNA, 17 nt, Human
aacagucucaggaaauc

SEQ ID NO: 2710348 - RNA, 19 nt, Human
aacagauuauuaccuuaca

SEQ ID NO: 2710349 - RNA, 13 nt, Human
guccuacccaccc

SEQ ID NO: 2710350 - RNA, 20 nt, Human
aacagacuggaagcacagcu

SEQ ID NO: 2710351 - RNA, 16 nt, Human
aacauauauaacaaug

SEQ ID NO: 2710352 - RNA, 14 nt, Human
aacaucaacaucuu

SEQ ID NO: 2710353 - RNA, 23 nt, Human
aacauguuaaaccaugggauaaa

SEQ ID NO: 2710354 - RNA, 22 nt, Human
aacauguuuuucuucucccuca

SEQ ID NO: 2710355 - RNA, 14 nt, Human
aacauaaaucugug

SEQ ID NO: 2710356 - RNA, 12 nt, Human
aacauaaaucug

SEQ ID NO: 2710357 - RNA, 15 nt, Human
aacauaaaucuguga

SEQ ID NO: 2710358 - RNA, 18 nt, Human
aacauacucccaucugug

SEQ ID NO: 2710359 - RNA, 16 nt, Human
aacauacucccaucug

SEQ ID NO: 2710360 - RNA, 12 nt, Human
aacauaauuaaa

SEQ ID NO: 2710361 - RNA, 20 nt, Human
aacauacucccaucugugaa

SEQ ID NO: 2710362 - RNA, 19 nt, Human
gucccaccuuggcugcagg

SEQ ID NO: 2710363 - RNA, 17 nt, Human
gucccaccuuggcugca

SEQ ID NO: 2710364 - RNA, 18 nt, Human
gucccaccuuggcugcag

SEQ ID NO: 2710365 - RNA, 22 nt, Human
guagcucuaggagggcuggcaa

SEQ ID NO: 2710366 - RNA, 23 nt, Human
guccccuguuuguuucugaaagg

SEQ ID NO: 2710367 - RNA, 13 nt, Human
gucccccugacaa

SEQ ID NO: 2710368 - RNA, 15 nt, Human
guccccgcacugggc

SEQ ID NO: 2710369 - RNA, 16 nt, Human
guccccgcacugggcu

SEQ ID NO: 2710370 - RNA, 22 nt, Human
guccgaaagggacuuggaagcu

SEQ ID NO: 2710371 - RNA, 21 nt, Human
guccgaaagggacuuggaagc

SEQ ID NO: 2710372 - RNA, 13 nt, Human
gucccuuuuccuu

SEQ ID NO: 2710373 - RNA, 19 nt, Human
gucucaaaaaaagaaaaag

SEQ ID NO: 2710374 - RNA, 22 nt, Human
gucucaaacucuugaccucagg

SEQ ID NO: 2710375 - RNA, 14 nt, Human
gucuaugggacuca

SEQ ID NO: 2710376 - RNA, 15 nt, Human
gucuaugggacucaa

SEQ ID NO: 2710377 - RNA, 13 nt, Human
aaccacaucuugc

SEQ ID NO: 2710378 - RNA, 13 nt, Human
gucuccauguuug

SEQ ID NO: 2710379 - RNA, 14 nt, Human
gucgaggacaggga

SEQ ID NO: 2710380 - RNA, 13 nt, Human
gucgcccagucug

SEQ ID NO: 2710381 - RNA, 14 nt, Human
gucgcccagucugg

SEQ ID NO: 2710382 - RNA, 20 nt, Human
gucuaccugaggggccucuu

SEQ ID NO: 2710383 - RNA, 23 nt, Human
gucgcccagucuggaaugcagug

SEQ ID NO: 2710384 - RNA, 13 nt, Human
guccugcugcagu

SEQ ID NO: 2710385 - RNA, 16 nt, Human
guccugcugcaguugc

SEQ ID NO: 2710386 - RNA, 13 nt, Human
gucuucacaacag

SEQ ID NO: 2710387 - RNA, 21 nt, Human
gucugacaggcaaugcuggcu

SEQ ID NO: 2710388 - RNA, 22 nt, Human
gucugacaggcaaugcuggcug

SEQ ID NO: 2710389 - RNA, 23 nt, Human
gucugacaggcaaugcuggcugu

SEQ ID NO: 2710390 - RNA, 18 nt, Human
gucucuuuaaugucacag

SEQ ID NO: 2710391 - RNA, 19 nt, Human
gucucuuuaaugucacagg

SEQ ID NO: 2710392 - RNA, 20 nt, Human
gucucuuuaaugucacaggc

SEQ ID NO: 2710393 - RNA, 14 nt, Human
gucugaaggcuggg

SEQ ID NO: 2710394 - RNA, 19 nt, Human
gucugaaggcuggguucug

SEQ ID NO: 2710395 - RNA, 22 nt, Human
gucucuuuaaugucacaggcag

SEQ ID NO: 2710396 - RNA, 23 nt, Human
gucucuuuaaugucacaggcagg

SEQ ID NO: 2710397 - RNA, 17 nt, Human
gucucuugguccugcug

SEQ ID NO: 2710398 - RNA, 13 nt, Human
gucucuugguccu

SEQ ID NO: 2710399 - RNA, 20 nt, Human
gucucuugguccugcugcag

SEQ ID NO: 2710400 - RNA, 18 nt, Human
gucucuugguccugcugc

SEQ ID NO: 2710401 - RNA, 19 nt, Human
gucucuugguccugcugca

SEQ ID NO: 2710402 - RNA, 23 nt, Human
aacguggcugcuucaaggauccu

SEQ ID NO: 2710403 - RNA, 16 nt, Human
gucuucaguaagccgu

SEQ ID NO: 2710404 - RNA, 16 nt, Human
gucuuuguacagacaa

SEQ ID NO: 2710405 - RNA, 15 nt, Human
gucuuuguacagaca

SEQ ID NO: 2710406 - RNA, 18 nt, Human
aaccugauugugucucuu

SEQ ID NO: 2710407 - RNA, 19 nt, Human
aaccugauugugucucuug

SEQ ID NO: 2710408 - RNA, 13 nt, Human
aacugaaaucaua

SEQ ID NO: 2710409 - RNA, 20 nt, Human
aacugaaaucauacuucuua

SEQ ID NO: 2710410 - RNA, 20 nt, Human
gugaguccuggcaugggaau

SEQ ID NO: 2710411 - RNA, 17 nt, Human
gugaguccuggcauggg

SEQ ID NO: 2710412 - RNA, 19 nt, Human
gugaguacuacaguccucc

SEQ ID NO: 2710413 - RNA, 12 nt, Human
gugagagcuggg

SEQ ID NO: 2710414 - RNA, 12 nt, Human
gugaccccaggu

SEQ ID NO: 2710415 - RNA, 17 nt, Human
gugaguacuacaguccu

SEQ ID NO: 2710416 - RNA, 21 nt, Human
gugagcacuaaggugugcucu

SEQ ID NO: 2710417 - RNA, 15 nt, Human
gugagcaauccugca

SEQ ID NO: 2710418 - RNA, 13 nt, Human
gugagagcugggu

SEQ ID NO: 2710419 - RNA, 16 nt, Human
gugagaggggaacaga

SEQ ID NO: 2710420 - RNA, 13 nt, Human
aacuauauuguuu

SEQ ID NO: 2710421 - RNA, 20 nt, Human
aacuaucucauuuccaagca

SEQ ID NO: 2710422 - RNA, 23 nt, Human
gugaagacaaugacuuacuguac

SEQ ID NO: 2710423 - RNA, 16 nt, Human
gugaagugaaugaaac

SEQ ID NO: 2710424 - RNA, 14 nt, Human
gugaagugaagaca

SEQ ID NO: 2710425 - RNA, 18 nt, Human
gugaccauguuuuguuua

SEQ ID NO: 2710426 - RNA, 18 nt, Human
gugaccagcaccaucucu

SEQ ID NO: 2710427 - RNA, 21 nt, Human
gugaccagcaccaucucuccu

SEQ ID NO: 2710428 - RNA, 17 nt, Human
gugaccaaugaugguca

SEQ ID NO: 2710429 - RNA, 14 nt, Human
gugacaugucuuuu

SEQ ID NO: 2710430 - RNA, 16 nt, Human
gugacagaggcagccc

SEQ ID NO: 2710431 - RNA, 18 nt, Human
gugacagaggcagcccca

SEQ ID NO: 2710432 - RNA, 19 nt, Human
gugacagaggcagccccau

SEQ ID NO: 2710433 - RNA, 14 nt, Human
aaugaaugaaacau

SEQ ID NO: 2710434 - RNA, 15 nt, Human
aaugaaugucagugu

SEQ ID NO: 2710435 - RNA, 14 nt, Human
aaugaaugucagug

SEQ ID NO: 2710436 - RNA, 23 nt, Human
aaucuucugaacuuggcgcugcc

SEQ ID NO: 2710437 - RNA, 17 nt, Human
uaauguaagcucuacug

SEQ ID NO: 2710438 - RNA, 16 nt, Human
uaauguaagcucuacu

SEQ ID NO: 2710439 - RNA, 16 nt, Human
uaaugucacaggcagg

SEQ ID NO: 2710440 - RNA, 17 nt, Human
uaaugucacaggcaggu

SEQ ID NO: 2710441 - RNA, 15 nt, Human
uaaugucacaggcag

SEQ ID NO: 2710442 - RNA, 17 nt, Human
uaauguaauaacuguga

SEQ ID NO: 2710443 - RNA, 23 nt, Human
uaaugugaaacuggauuaaacuu

SEQ ID NO: 2710444 - RNA, 22 nt, Human
uaaugugaaacuggauuaaacu

SEQ ID NO: 2710445 - RNA, 20 nt, Human
uaaugugaaacuggauuaaa

SEQ ID NO: 2710446 - RNA, 12 nt, Human
uaaugugaaacu

SEQ ID NO: 2710447 - RNA, 20 nt, Human
aauacaguaucucagggccu

SEQ ID NO: 2710448 - RNA, 23 nt, Human
uaauacaccacuacauucuguua

SEQ ID NO: 2710449 - RNA, 21 nt, Human
uaauacaccacuacauucugu

SEQ ID NO: 2710450 - RNA, 22 nt, Human
uaauacaccacuacauucuguu

SEQ ID NO: 2710451 - RNA, 17 nt, Human
uaaucagugugucuaaa

SEQ ID NO: 2710452 - RNA, 18 nt, Human
uaaucagugugucuaaau

SEQ ID NO: 2710453 - RNA, 21 nt, Human
uaauauugauaugcuuauaca

SEQ ID NO: 2710454 - RNA, 18 nt, Human
uacaaaaacacagcaagg

SEQ ID NO: 2710455 - RNA, 17 nt, Human
uacaaaaacacagcaag

SEQ ID NO: 2710456 - RNA, 16 nt, Human
uacaaaaacacagcaa

SEQ ID NO: 2710457 - RNA, 21 nt, Human
uacaagcgugagccacugcac

SEQ ID NO: 2710458 - RNA, 16 nt, Human
uacaagcgugagccac

SEQ ID NO: 2710459 - RNA, 18 nt, Human
uacaagcgugagccacug

SEQ ID NO: 2710460 - RNA, 19 nt, Human
uacaagcgugagccacugc

SEQ ID NO: 2710461 - RNA, 20 nt, Human
uacaagcgugagccacugca

SEQ ID NO: 2710462 - RNA, 17 nt, Human
uaauuuaccugaagucu

SEQ ID NO: 2710463 - RNA, 18 nt, Human
uaauuuaccugaagucuu

SEQ ID NO: 2710464 - RNA, 23 nt, Human
uaauuaguuccucauuagcauuu

SEQ ID NO: 2710465 - RNA, 19 nt, Human
aaugcacuuuguucuggcu

SEQ ID NO: 2710466 - RNA, 20 nt, Human
aaugcacuuuguucuggcuc

SEQ ID NO: 2710467 - RNA, 19 nt, Human
aaugcacaaacagaggccg

SEQ ID NO: 2710468 - RNA, 20 nt, Human
aaugcacaaacagaggccgc

SEQ ID NO: 2710469 - RNA, 13 nt, Human
aaugcacuuuguu

SEQ ID NO: 2710470 - RNA, 16 nt, Human
aaugcacuuuguucug

SEQ ID NO: 2710471 - RNA, 17 nt, Human
uaauuauaucugaggaa

SEQ ID NO: 2710472 - RNA, 13 nt, Human
uaauuauaucuga

SEQ ID NO: 2710473 - RNA, 20 nt, Human
uaauuauaugcuauuucuau

SEQ ID NO: 2710474 - RNA, 21 nt, Human
uaauuauaugcuauuucuaua

SEQ ID NO: 2710475 - RNA, 22 nt, Human
aaugcaaaccaucauugaaauc

SEQ ID NO: 2710476 - RNA, 23 nt, Human
aaugcaaaccaucauugaaaucu

SEQ ID NO: 2710477 - RNA, 18 nt, Human
aaugcacaaacagaggcc

SEQ ID NO: 2710478 - RNA, 20 nt, Human
aaugaaugucagugugacug

SEQ ID NO: 2710479 - RNA, 21 nt, Human
aaugaaugucagugugacuga

SEQ ID NO: 2710480 - RNA, 13 nt, Human
aaugaccuuucaa

SEQ ID NO: 2710481 - RNA, 14 nt, Human
aaugaccuuucaau

SEQ ID NO: 2710482 - RNA, 14 nt, Human
aaugcaaaccauca

SEQ ID NO: 2710483 - RNA, 16 nt, Human
aaugcaaaccaucauu

SEQ ID NO: 2710484 - RNA, 22 nt, Human
aaugguuuucuuguguguuuau

SEQ ID NO: 2710485 - RNA, 17 nt, Human
aaugguuuucuugugug

SEQ ID NO: 2710486 - RNA, 18 nt, Human
aaugguuuucuugugugu

SEQ ID NO: 2710487 - RNA, 15 nt, Human
aauguaagcucuacu

SEQ ID NO: 2710488 - RNA, 13 nt, Human
aauguaagcucua

SEQ ID NO: 2710489 - RNA, 23 nt, Human
aauguacagcaaggagauuuaca

SEQ ID NO: 2710490 - RNA, 21 nt, Human
aauguacagcaaggagauuua

SEQ ID NO: 2710491 - RNA, 22 nt, Human
uacagcaaggagauuuacaacu

SEQ ID NO: 2710492 - RNA, 15 nt, Human
uacauaaugcgugca

SEQ ID NO: 2710493 - RNA, 19 nt, Human
uacauaaguaauucaagaa

SEQ ID NO: 2710494 - RNA, 15 nt, Human
uacauaaguaauuca

SEQ ID NO: 2710495 - RNA, 20 nt, Human
uacaguggggaaugaagaua

SEQ ID NO: 2710496 - RNA, 16 nt, Human
uacauaaguaauucaa

SEQ ID NO: 2710497 - RNA, 17 nt, Human
uacauaaguaauucaag

SEQ ID NO: 2710498 - RNA, 18 nt, Human
uacaguaucucagggccu

SEQ ID NO: 2710499 - RNA, 12 nt, Human
uacaguccuccc

SEQ ID NO: 2710500 - RNA, 15 nt, Human
uacaguccucccauc

SEQ ID NO: 2710501 - RNA, 17 nt, Human
uacaguccucccaucuc

SEQ ID NO: 2710502 - RNA, 18 nt, Human
uacaguccucccaucuca

SEQ ID NO: 2710503 - RNA, 13 nt, Human
aaugucacaggca

SEQ ID NO: 2710504 - RNA, 14 nt, Human
aaugucacaggcag

SEQ ID NO: 2710505 - RNA, 22 nt, Human
aaugugaaacuggauuaaacuu

SEQ ID NO: 2710506 - RNA, 18 nt, Human
aauguugacaugggacau

SEQ ID NO: 2710507 - RNA, 14 nt, Human
aauuaacauguuaa

SEQ ID NO: 2710508 - RNA, 13 nt, Human
aauuaacauguua

SEQ ID NO: 2710509 - RNA, 22 nt, Human
aauuaacuuuuauaaacuuuac

SEQ ID NO: 2710510 - RNA, 15 nt, Human
aauuaagagagucua

SEQ ID NO: 2710511 - RNA, 20 nt, Human
aauuaacuuuuauaaacuuu

SEQ ID NO: 2710512 - RNA, 18 nt, Human
aauuaacuuuuauaaacu

SEQ ID NO: 2710513 - RNA, 13 nt, Human
aauuaaguacuau

SEQ ID NO: 2710514 - RNA, 18 nt, Human
aauuaacauguuaaacca

SEQ ID NO: 2710515 - RNA, 23 nt, Human
uacauggcuggagcuagaauuug

SEQ ID NO: 2710516 - RNA, 23 nt, Human
uacauuguacgaagaguauuuuu

SEQ ID NO: 2710517 - RNA, 20 nt, Human
uacauuguacgaagaguauu

SEQ ID NO: 2710518 - RNA, 22 nt, Human
uacauuguacgaagaguauuuu

SEQ ID NO: 2710519 - RNA, 17 nt, Human
uaccauccccuguagag

SEQ ID NO: 2710520 - RNA, 17 nt, Human
uaccacuuuuguucuug

SEQ ID NO: 2710521 - RNA, 20 nt, Human
uacccgggaagggggcuggg

SEQ ID NO: 2710522 - RNA, 15 nt, Human
uacccucauguucuu

SEQ ID NO: 2710523 - RNA, 16 nt, Human
uacccucauguucuua

SEQ ID NO: 2710524 - RNA, 22 nt, Human
uacccuggcacuauaauguaag

SEQ ID NO: 2710525 - RNA, 20 nt, Human
uacccuggcacuauaaugua

SEQ ID NO: 2710526 - RNA, 14 nt, Human
uacguacacauuuu

SEQ ID NO: 2710527 - RNA, 15 nt, Human
uacguacacauuuua

SEQ ID NO: 2710528 - RNA, 14 nt, Human
aauucuuucauuuu

SEQ ID NO: 2710529 - RNA, 21 nt, Human
aauucuugccaaauauaaaua

SEQ ID NO: 2710530 - RNA, 20 nt, Human
aauucuugcaaaguaucccu

SEQ ID NO: 2710531 - RNA, 14 nt, Human
aauucuugcaaagu

SEQ ID NO: 2710532 - RNA, 22 nt, Human
aauucuucuccacuuucuagcc

SEQ ID NO: 2710533 - RNA, 15 nt, Human
aauucuugaaggaaa

SEQ ID NO: 2710534 - RNA, 16 nt, Human
aauucuugaaggaaaa

SEQ ID NO: 2710535 - RNA, 21 nt, Human
aauucuugaaggaaaaugaua

SEQ ID NO: 2710536 - RNA, 13 nt, Human
aauucuuaaauau

SEQ ID NO: 2710537 - RNA, 16 nt, Human
uacuauaauuuaccug

SEQ ID NO: 2710538 - RNA, 16 nt, Human
uacuauguaucaauga

SEQ ID NO: 2710539 - RNA, 14 nt, Human
uacguugugcauuu

SEQ ID NO: 2710540 - RNA, 13 nt, Human
uacguugugcauu

SEQ ID NO: 2710541 - RNA, 14 nt, Human
uacgucugacaggc

SEQ ID NO: 2710542 - RNA, 22 nt, Human
uacucuuauaucuauauuuuac

SEQ ID NO: 2710543 - RNA, 20 nt, Human
uacucuuauaucuauauuuu

SEQ ID NO: 2710544 - RNA, 21 nt, Human
uacucugugucagguggggca

SEQ ID NO: 2710545 - RNA, 12 nt, Human
uacucaauuuua

SEQ ID NO: 2710546 - RNA, 14 nt, Human
uacucaauuuuaac

SEQ ID NO: 2710547 - RNA, 13 nt, Human
uacucaauuuuaa

SEQ ID NO: 2710548 - RNA, 13 nt, Human
uacuguaagaaaa

SEQ ID NO: 2710549 - RNA, 23 nt, Human
aauugugugaaagguacuucaaa

SEQ ID NO: 2710550 - RNA, 22 nt, Human
aauuguuuggggaugagaaagg

SEQ ID NO: 2710551 - RNA, 16 nt, Human
aauuuaaauagcuuuu

SEQ ID NO: 2710552 - RNA, 15 nt, Human
aauuuaaauagcuuu

SEQ ID NO: 2710553 - RNA, 19 nt, Human
aauuuacauacucugcuua

SEQ ID NO: 2710554 - RNA, 13 nt, Human
aauuuaaaagucu

SEQ ID NO: 2710555 - RNA, 20 nt, Human
aauuucucccagucauuuaa

SEQ ID NO: 2710556 - RNA, 21 nt, Human
aauuucuaaaucuccaaaaua

SEQ ID NO: 2710557 - RNA, 13 nt, Human
aauuucuaaaucu

SEQ ID NO: 2710558 - RNA, 17 nt, Human
aauuuagaaauauaauu

SEQ ID NO: 2710559 - RNA, 14 nt, Human
uacuucaaauccuu

SEQ ID NO: 2710560 - RNA, 19 nt, Human
uacuucaaauccuugaaga

SEQ ID NO: 2710561 - RNA, 19 nt, Human
aauuugauaugugaacagu

SEQ ID NO: 2710562 - RNA, 15 nt, Human
aauuugauaugugaa

SEQ ID NO: 2710563 - RNA, 18 nt, Human
aauuugauaugugaacag

SEQ ID NO: 2710564 - RNA, 16 nt, Human
aauuugauaugugaac

SEQ ID NO: 2710565 - RNA, 18 nt, Human
aauuugaauuuuguguua

SEQ ID NO: 2710566 - RNA, 16 nt, Human
aauuugaauuuugugu

SEQ ID NO: 2710567 - RNA, 13 nt, Human
aauuugaauuuug

SEQ ID NO: 2710568 - RNA, 19 nt, Human
aauuuuuucucuaggaaau

SEQ ID NO: 2710569 - RNA, 16 nt, Human
acaaaaacacagcaag

SEQ ID NO: 2710570 - RNA, 20 nt, Human
acaaaaaaauauauuuaaug

SEQ ID NO: 2710571 - RNA, 13 nt, Human
acaaaaaaauaua

SEQ ID NO: 2710572 - RNA, 17 nt, Human
acaaaaaaauauauuua

SEQ ID NO: 2710573 - RNA, 17 nt, Human
aauuuuuuugagacaga

SEQ ID NO: 2710574 - RNA, 19 nt, Human
aauuuuuauauuugaaaua

SEQ ID NO: 2710575 - RNA, 18 nt, Human
aauuuuuauuaaauuaug

SEQ ID NO: 2710576 - RNA, 17 nt, Human
aauuuuuauuaaauuau

SEQ ID NO: 2710577 - RNA, 12 nt, Human
uagacagucccu

SEQ ID NO: 2710578 - RNA, 14 nt, Human
uagacagucccugc

SEQ ID NO: 2710579 - RNA, 15 nt, Human
uagaagucacacagu

SEQ ID NO: 2710580 - RNA, 21 nt, Human
uacuucaaauccuugaagauu

SEQ ID NO: 2710581 - RNA, 14 nt, Human
uagaaccucuuugu

SEQ ID NO: 2710582 - RNA, 21 nt, Human
uagacagagucucacuguugc

SEQ ID NO: 2710583 - RNA, 16 nt, Human
uagacaauuuauuaug

SEQ ID NO: 2710584 - RNA, 23 nt, Human
uagaagucacauuccugaacagg

SEQ ID NO: 2710585 - RNA, 16 nt, Human
uagaagucacacagua

SEQ ID NO: 2710586 - RNA, 17 nt, Human
uagaagucuuagaugua

SEQ ID NO: 2710587 - RNA, 16 nt, Human
uagaagucuuagaugu

SEQ ID NO: 2710588 - RNA, 19 nt, Human
uagaagucuuagauguaua

SEQ ID NO: 2710589 - RNA, 18 nt, Human
uagaagucuuagauguau

SEQ ID NO: 2710590 - RNA, 12 nt, Human
acaacacucaca

SEQ ID NO: 2710591 - RNA, 15 nt, Human
acaacaacaaaauga

SEQ ID NO: 2710592 - RNA, 19 nt, Human
uagcauuuguguugaagag

SEQ ID NO: 2710593 - RNA, 18 nt, Human
acaagcacuaaacaaaga

SEQ ID NO: 2710594 - RNA, 18 nt, Human
acaagagcccaggccucc

SEQ ID NO: 2710595 - RNA, 17 nt, Human
acaagagcccaggccuc

SEQ ID NO: 2710596 - RNA, 13 nt, Human
acaagcugcaccc

SEQ ID NO: 2710597 - RNA, 18 nt, Human
acaagcgugagccacugc

SEQ ID NO: 2710598 - RNA, 20 nt, Human
acaagcgugagccacugcac

SEQ ID NO: 2710599 - RNA, 21 nt, Human
acaagcgugagccacugcacc

SEQ ID NO: 2710600 - RNA, 12 nt, Human
acaagccacccc

SEQ ID NO: 2710601 - RNA, 18 nt, Human
uagcaugucgucaaagcu

SEQ ID NO: 2710602 - RNA, 21 nt, Human
uagcaugucgucaaagcugaa

SEQ ID NO: 2710603 - RNA, 22 nt, Human
uagauuuuagacccuauugcug

SEQ ID NO: 2710604 - RNA, 16 nt, Human
uagcacagacccugcc

SEQ ID NO: 2710605 - RNA, 17 nt, Human
uagcacagacccugccc

SEQ ID NO: 2710606 - RNA, 18 nt, Human
uagcacagacccugcccu

SEQ ID NO: 2710607 - RNA, 19 nt, Human
uagcacagacccugcccug

SEQ ID NO: 2710608 - RNA, 17 nt, Human
uagaugcaguucugaag

SEQ ID NO: 2710609 - RNA, 19 nt, Human
uagaugcaguucugaagaa

SEQ ID NO: 2710610 - RNA, 16 nt, Human
uagaugcaguucugaa

SEQ ID NO: 2710611 - RNA, 21 nt, Human
uagaggaagccugauuaaaga

SEQ ID NO: 2710612 - RNA, 16 nt, Human
acaaaaagcauaaaaa

SEQ ID NO: 2710613 - RNA, 14 nt, Human
uauuuauuuuaaua

SEQ ID NO: 2710614 - RNA, 16 nt, Human
uauuuauuuuaauaau

SEQ ID NO: 2710615 - RNA, 18 nt, Human
uauuuauuuuaauaaugu

SEQ ID NO: 2710616 - RNA, 14 nt, Human
uauuuauuuaaauu

SEQ ID NO: 2710617 - RNA, 13 nt, Human
uauuuauuuaaau

SEQ ID NO: 2710618 - RNA, 18 nt, Human
uauuuacuucuuauacau

SEQ ID NO: 2710619 - RNA, 18 nt, Human
uauuuacuaaaauggacu

SEQ ID NO: 2710620 - RNA, 19 nt, Human
uauuuaaugauaaguaaau

SEQ ID NO: 2710621 - RNA, 23 nt, Human
uauuuaauuuuuuugagacagag

SEQ ID NO: 2710622 - RNA, 17 nt, Human
uauugucuagugaaacu

SEQ ID NO: 2710623 - RNA, 18 nt, Human
uauuuaaccucuaaauuc

SEQ ID NO: 2710624 - RNA, 17 nt, Human
uauuuaaccucuaaauu

SEQ ID NO: 2710625 - RNA, 14 nt, Human
uauuuaauagguuu

SEQ ID NO: 2710626 - RNA, 21 nt, Human
uauuuaaugaaagacuguaca

SEQ ID NO: 2710627 - RNA, 15 nt, Human
uauuuaaugaaagac

SEQ ID NO: 2710628 - RNA, 13 nt, Human
uauugucaaagug

SEQ ID NO: 2710629 - RNA, 17 nt, Human
uauugucaaagugguga

SEQ ID NO: 2710630 - RNA, 21 nt, Human
uauuguagcauccuggaauau

SEQ ID NO: 2710631 - RNA, 20 nt, Human
uauuguagcauccuggaaua

SEQ ID NO: 2710632 - RNA, 18 nt, Human
uauuguagcauccuggaa

SEQ ID NO: 2710633 - RNA, 17 nt, Human
uauuguagcauccugga

SEQ ID NO: 2710634 - RNA, 23 nt, Human
uauuguacaaaguauuaagcaua

SEQ ID NO: 2710635 - RNA, 22 nt, Human
uauuguacaaaguauuaagcau

SEQ ID NO: 2710636 - RNA, 21 nt, Human
uauuguacaaaguauuaagca

SEQ ID NO: 2710637 - RNA, 16 nt, Human
uauuguacaaaguauu

SEQ ID NO: 2710638 - RNA, 15 nt, Human
uauuguacaaaguau

SEQ ID NO: 2710639 - RNA, 23 nt, Human
acaguucggugagcuacaaaugc

SEQ ID NO: 2710640 - RNA, 16 nt, Human
acaguucucuccuucu

SEQ ID NO: 2710641 - RNA, 22 nt, Human
acaguucggugagcuacaaaug

SEQ ID NO: 2710642 - RNA, 19 nt, Human
acaguucggugagcuacaa

SEQ ID NO: 2710643 - RNA, 20 nt, Human
acaguuacucagaauucucu

SEQ ID NO: 2710644 - RNA, 13 nt, Human
acaguuacucaga

SEQ ID NO: 2710645 - RNA, 20 nt, Human
acaguucaauucucauuugu

SEQ ID NO: 2710646 - RNA, 15 nt, Human
uauucuuauuuaaug

SEQ ID NO: 2710647 - RNA, 16 nt, Human
uauucuguuggccagu

SEQ ID NO: 2710648 - RNA, 17 nt, Human
acaguucucuccuucuu

SEQ ID NO: 2710649 - RNA, 24 nt, Human
uauucucuccuguaccucuugagc

SEQ ID NO: 2710650 - RNA, 20 nt, Human
uauucucuccuguaccucuu

SEQ ID NO: 2710651 - RNA, 18 nt, Human
uauucucuccuguaccuc

SEQ ID NO: 2710652 - RNA, 22 nt, Human
uauuggcuuuucugauccaguu

SEQ ID NO: 2710653 - RNA, 21 nt, Human
uauuggcuuuucugauccagu

SEQ ID NO: 2710654 - RNA, 14 nt, Human
uauuggcuuuucug

SEQ ID NO: 2710655 - RNA, 18 nt, Human
uauuggcuuuucugaucc

SEQ ID NO: 2710656 - RNA, 17 nt, Human
uauuggcuuuucugauc

SEQ ID NO: 2710657 - RNA, 16 nt, Human
uauuggcuuuucugau

SEQ ID NO: 2710658 - RNA, 15 nt, Human
uauuggcuuuucuga

SEQ ID NO: 2710659 - RNA, 16 nt, Human
uauucaggagaguaga

SEQ ID NO: 2710660 - RNA, 18 nt, Human
uauucaggaagcucaggg

SEQ ID NO: 2710661 - RNA, 22 nt, Human
uauucaggaagcucagggccug

SEQ ID NO: 2710662 - RNA, 16 nt, Human
uauucaggaagcucag

SEQ ID NO: 2710663 - RNA, 13 nt, Human
uauucacugauuu

SEQ ID NO: 2710664 - RNA, 22 nt, Human
uauucacugauuugacauaguc

SEQ ID NO: 2710665 - RNA, 19 nt, Human
uauucacugauuugacaua

SEQ ID NO: 2710666 - RNA, 23 nt, Human
uauucaaaguugccuaaauccau

SEQ ID NO: 2710667 - RNA, 18 nt, Human
uauucaaaguugccuaaa

SEQ ID NO: 2710668 - RNA, 22 nt, Human
uauucaaaguugccuaaaucca

SEQ ID NO: 2710669 - RNA, 21 nt, Human
uauucaaaguugccuaaaucc

SEQ ID NO: 2710670 - RNA, 15 nt, Human
uauuagaauaccaca

SEQ ID NO: 2710671 - RNA, 16 nt, Human
uauuaccacagacaua

SEQ ID NO: 2710672 - RNA, 12 nt, Human
uauuagagaaga

SEQ ID NO: 2710673 - RNA, 12 nt, Human
uauuaaaacuca

SEQ ID NO: 2710674 - RNA, 23 nt, Human
uauuaaaaaucucaaauuucuaa

SEQ ID NO: 2710675 - RNA, 12 nt, Human
uauuaaagccau

SEQ ID NO: 2710676 - RNA, 14 nt, Human
uauuaaagccaugu

SEQ ID NO: 2710677 - RNA, 13 nt, Human
uauuaaagccaug

SEQ ID NO: 2710678 - RNA, 20 nt, Human
uauuaaagccauguuuauua

SEQ ID NO: 2710679 - RNA, 18 nt, Human
uauuaaagccauguuuau

SEQ ID NO: 2710680 - RNA, 17 nt, Human
uauuaaagccauguuua

SEQ ID NO: 2710681 - RNA, 23 nt, Human
uauuacaguggggaaugaagaua

SEQ ID NO: 2710682 - RNA, 14 nt, Human
uauuacaguauaau

SEQ ID NO: 2710683 - RNA, 21 nt, Human
uauuacaguauaauuaacaug

SEQ ID NO: 2710684 - RNA, 20 nt, Human
uauuacaguauaauuaacau

SEQ ID NO: 2710685 - RNA, 18 nt, Human
uauuacaguauaauuaac

SEQ ID NO: 2710686 - RNA, 16 nt, Human
uauuacaguauaauua

SEQ ID NO: 2710687 - RNA, 20 nt, Human
acagcuggugcccugcuuuc

SEQ ID NO: 2710688 - RNA, 17 nt, Human
acagcuggugcccugcu

SEQ ID NO: 2710689 - RNA, 17 nt, Human
uauguuuuaagaggcag

SEQ ID NO: 2710690 - RNA, 19 nt, Human
uauguuuuaagaggcaggg

SEQ ID NO: 2710691 - RNA, 22 nt, Human
uauuaaaaaucucaaauuucua

SEQ ID NO: 2710692 - RNA, 20 nt, Human
uauuaaaaaucucaaauuuc

SEQ ID NO: 2710693 - RNA, 18 nt, Human
uauuaaaaaucucaaauu

SEQ ID NO: 2710694 - RNA, 16 nt, Human
uauuaaaaaucucaaa

SEQ ID NO: 2710695 - RNA, 16 nt, Human
acagucucaggaaauc

SEQ ID NO: 2710696 - RNA, 15 nt, Human
acagucucaggaaau

SEQ ID NO: 2710697 - RNA, 14 nt, Human
acagucucaggaaa

SEQ ID NO: 2710698 - RNA, 13 nt, Human
acagucucaggaa

SEQ ID NO: 2710699 - RNA, 21 nt, Human
acaguccuuaccagcagagca

SEQ ID NO: 2710700 - RNA, 22 nt, Human
acaguccuuaccagcagagcac

SEQ ID NO: 2710701 - RNA, 20 nt, Human
acagugaaagaaaauaacaa

SEQ ID NO: 2710702 - RNA, 17 nt, Human
acagucucaggaaauca

SEQ ID NO: 2710703 - RNA, 21 nt, Human
acaguuaccucugccucagaa

SEQ ID NO: 2710704 - RNA, 15 nt, Human
acaguuaagagaaau

SEQ ID NO: 2710705 - RNA, 23 nt, Human
acaguauaauuaacauguuaaac

SEQ ID NO: 2710706 - RNA, 21 nt, Human
acaguauaauuaacauguuaa

SEQ ID NO: 2710707 - RNA, 22 nt, Human
acagguuuuccugaagaauuga

SEQ ID NO: 2710708 - RNA, 22 nt, Human
acagggcacaccgggcacucag

SEQ ID NO: 2710709 - RNA, 21 nt, Human
acaggcugggcuucaguggca

SEQ ID NO: 2710710 - RNA, 14 nt, Human
acaggcugggcuuc

SEQ ID NO: 2710711 - RNA, 17 nt, Human
acaggcugggcuucagu

SEQ ID NO: 2710712 - RNA, 12 nt, Human
acagucccugcc

SEQ ID NO: 2710713 - RNA, 13 nt, Human
acagucccugcca

SEQ ID NO: 2710714 - RNA, 15 nt, Human
acaguauuacuucug

SEQ ID NO: 2710715 - RNA, 16 nt, Human
acaguauuacuucugc

SEQ ID NO: 2710716 - RNA, 17 nt, Human
acaguauuacuucugcu

SEQ ID NO: 2710717 - RNA, 19 nt, Human
acaguauuacuucugcuac

SEQ ID NO: 2710718 - RNA, 17 nt, Human
acaguccucccaucuca

SEQ ID NO: 2710719 - RNA, 18 nt, Human
acaguccuuaccagcaga

SEQ ID NO: 2710720 - RNA, 20 nt, Human
acaguccuuaccagcagagc

SEQ ID NO: 2710721 - RNA, 15 nt, Human
acagucccugccaau

SEQ ID NO: 2710722 - RNA, 13 nt, Human
acaguccucccau

SEQ ID NO: 2710723 - RNA, 14 nt, Human
acaguccucccauc

SEQ ID NO: 2710724 - RNA, 15 nt, Human
acaguccucccaucu

SEQ ID NO: 2710725 - RNA, 15 nt, Human
uauauuuacaaaugg

SEQ ID NO: 2710726 - RNA, 18 nt, Human
uaucaaguauuauaccuu

SEQ ID NO: 2710727 - RNA, 21 nt, Human
uaucaaguauuauaccuuuuu

SEQ ID NO: 2710728 - RNA, 14 nt, Human
uauauuuacaaaug

SEQ ID NO: 2710729 - RNA, 18 nt, Human
uaucacccagaagaaaau

SEQ ID NO: 2710730 - RNA, 20 nt, Human
uaucaccugucuugccuuuu

SEQ ID NO: 2710731 - RNA, 17 nt, Human
acagacccugcccugug

SEQ ID NO: 2710732 - RNA, 16 nt, Human
acagacccugcccugu

SEQ ID NO: 2710733 - RNA, 23 nt, Human
acagacacaggcccggcuccagg

SEQ ID NO: 2710734 - RNA, 11 nt, Human
acacuccuuca

SEQ ID NO: 2710735 - RNA, 14 nt, Human
acagacuggaagca

SEQ ID NO: 2710736 - RNA, 18 nt, Human
acagacccugcccugugg

SEQ ID NO: 2710737 - RNA, 20 nt, Human
acagacccugcccugugggc

SEQ ID NO: 2710738 - RNA, 19 nt, Human
uaucuagauacuguaucau

SEQ ID NO: 2710739 - RNA, 14 nt, Human
uaucuaguaugaaa

SEQ ID NO: 2710740 - RNA, 16 nt, Human
uaucuaguaugaaauu

SEQ ID NO: 2710741 - RNA, 17 nt, Human
uaucuaguaugaaauua

SEQ ID NO: 2710742 - RNA, 16 nt, Human
uaucucccccagcccc

SEQ ID NO: 2710743 - RNA, 18 nt, Human
uaucucccccagccccau

SEQ ID NO: 2710744 - RNA, 17 nt, Human
uaucucccccagcccca

SEQ ID NO: 2710745 - RNA, 10 nt, Human
uaucagaauu

SEQ ID NO: 2710746 - RNA, 16 nt, Human
uaucuagauacuguau

SEQ ID NO: 2710747 - RNA, 15 nt, Human
uaucuagauacugua

SEQ ID NO: 2710748 - RNA, 22 nt, Human
acagacuggaagcacagcuuca

SEQ ID NO: 2710749 - RNA, 18 nt, Human
acagagcuacacagggga

SEQ ID NO: 2710750 - RNA, 21 nt, Human
acagagugagacucugucuca

SEQ ID NO: 2710751 - RNA, 20 nt, Human
acagagcccacgcccccacu

SEQ ID NO: 2710752 - RNA, 16 nt, Human
acagagcuacacaggg

SEQ ID NO: 2710753 - RNA, 17 nt, Human
uauggcuauaggugcua

SEQ ID NO: 2710754 - RNA, 10 nt, Human
uaugggagag

SEQ ID NO: 2710755 - RNA, 16 nt, Human
uauggcuuuugugcau

SEQ ID NO: 2710756 - RNA, 15 nt, Human
acagcuccaagaauu

SEQ ID NO: 2710757 - RNA, 17 nt, Human
acagcuaacauggaagu

SEQ ID NO: 2710758 - RNA, 14 nt, Human
acagcuaacaugga

SEQ ID NO: 2710759 - RNA, 15 nt, Human
acagcuaacauggaa

SEQ ID NO: 2710760 - RNA, 16 nt, Human
uauggcuauaggugcu

SEQ ID NO: 2710761 - RNA, 19 nt, Human
uaugcucugcauguuacau

SEQ ID NO: 2710762 - RNA, 22 nt, Human
uauggcccuggccuagcauacg

SEQ ID NO: 2710763 - RNA, 22 nt, Human
uaugauccagcagauuauucac

SEQ ID NO: 2710764 - RNA, 21 nt, Human
uaugauccagcagauuauuca

SEQ ID NO: 2710765 - RNA, 20 nt, Human
uaugauccagcagauuauuc

SEQ ID NO: 2710766 - RNA, 14 nt, Human
uaugcucugcaugu

SEQ ID NO: 2710767 - RNA, 18 nt, Human
uaugcucugcauguuaca

SEQ ID NO: 2710768 - RNA, 14 nt, Human
uaugaucacggcuc

SEQ ID NO: 2710769 - RNA, 21 nt, Human
uaugaucacggcucacugcag

SEQ ID NO: 2710770 - RNA, 23 nt, Human
uaugaucacggcucacugcagcc

SEQ ID NO: 2710771 - RNA, 10 nt, Human
uaugauccag

SEQ ID NO: 2710772 - RNA, 19 nt, Human
uaugauccagcagauuauu

SEQ ID NO: 2710773 - RNA, 11 nt, Human
uaugauccagc

SEQ ID NO: 2710774 - RNA, 21 nt, Human
uaugagcuuccuucugugaaa

SEQ ID NO: 2710775 - RNA, 23 nt, Human
uaugaggcauuuguuugaacuga

SEQ ID NO: 2710776 - RNA, 13 nt, Human
uaugaggcauuug

SEQ ID NO: 2710777 - RNA, 18 nt, Human
uaugagcuuccuucugug

SEQ ID NO: 2710778 - RNA, 15 nt, Human
uaucuugaagacuuu

SEQ ID NO: 2710779 - RNA, 20 nt, Human
acagaguuuucacucuuauu

SEQ ID NO: 2710780 - RNA, 18 nt, Human
acagaguuuucacucuua

SEQ ID NO: 2710781 - RNA, 14 nt, Human
uaucuugaagacuu

SEQ ID NO: 2710782 - RNA, 20 nt, Human
uauagccuaggugacagagu

SEQ ID NO: 2710783 - RNA, 23 nt, Human
uauaggugcuacaaaaacacagc

SEQ ID NO: 2710784 - RNA, 20 nt, Human
uauaggugcuacaaaaacac

SEQ ID NO: 2710785 - RNA, 21 nt, Human
uauaggugcuacaaaaacaca

SEQ ID NO: 2710786 - RNA, 23 nt, Human
uauauauuuuuuucugaaauuuc

SEQ ID NO: 2710787 - RNA, 20 nt, Human
uauauauuuuuuucugaaau

SEQ ID NO: 2710788 - RNA, 22 nt, Human
uauauauuuuuuucugaaauuu

SEQ ID NO: 2710789 - RNA, 21 nt, Human
uauauauuuuuuucugaaauu

SEQ ID NO: 2710790 - RNA, 19 nt, Human
acacucauugaccugaggc

SEQ ID NO: 2710791 - RNA, 16 nt, Human
uauauccuuucuaaca

SEQ ID NO: 2710792 - RNA, 21 nt, Human
acacucauugaccugaggccc

SEQ ID NO: 2710793 - RNA, 23 nt, Human
acacucauugaccugaggcccuu

SEQ ID NO: 2710794 - RNA, 18 nt, Human
uauaacaaugcuguauuu

SEQ ID NO: 2710795 - RNA, 14 nt, Human
uauaauuuugugaa

SEQ ID NO: 2710796 - RNA, 21 nt, Human
uauaauuuaccugaagucuuu

SEQ ID NO: 2710797 - RNA, 20 nt, Human
uauaaccaguguuguggauu

SEQ ID NO: 2710798 - RNA, 14 nt, Human
uauacauaaacaag

SEQ ID NO: 2710799 - RNA, 13 nt, Human
uauacauaaacaa

SEQ ID NO: 2710800 - RNA, 14 nt, Human
uauacauuugauaa

SEQ ID NO: 2710801 - RNA, 19 nt, Human
uauagauuagaauucugua

SEQ ID NO: 2710802 - RNA, 20 nt, Human
uauagauuagaauucuguau

SEQ ID NO: 2710803 - RNA, 22 nt, Human
uauagauuagagaguguugaaa

SEQ ID NO: 2710804 - RNA, 19 nt, Human
uauagauuagagaguguug

SEQ ID NO: 2710805 - RNA, 15 nt, Human
uaguuuuauaugcuu

SEQ ID NO: 2710806 - RNA, 16 nt, Human
uaguuuuauaugcuuc

SEQ ID NO: 2710807 - RNA, 20 nt, Human
uaguuccucauuagcauuuu

SEQ ID NO: 2710808 - RNA, 22 nt, Human
uagugagcagucaggaaagaga

SEQ ID NO: 2710809 - RNA, 21 nt, Human
uagucaggugccucaagagaa

SEQ ID NO: 2710810 - RNA, 19 nt, Human
acaagcugcacccucaggc

SEQ ID NO: 2710811 - RNA, 21 nt, Human
acaagcugcacccucaggcag

SEQ ID NO: 2710812 - RNA, 22 nt, Human
acaagcugcacccucaggcagg

SEQ ID NO: 2710813 - RNA, 23 nt, Human
acaagcugcacccucaggcaggu

SEQ ID NO: 2710814 - RNA, 22 nt, Human
acacaucagcuugcccuguuaa

SEQ ID NO: 2710815 - RNA, 18 nt, Human
acacaugcaaggucauuu

SEQ ID NO: 2710816 - RNA, 20 nt, Human
acacaugcaaggucauuuuu

SEQ ID NO: 2710817 - RNA, 19 nt, Human
acacaugcaaggucauuuu

SEQ ID NO: 2710818 - RNA, 21 nt, Human
uauaaaauaauuuuuauauuu

SEQ ID NO: 2710819 - RNA, 22 nt, Human
uauaaaauaauuuuuauauuug

SEQ ID NO: 2710820 - RNA, 11 nt, Human
acacccuguga

SEQ ID NO: 2710821 - RNA, 12 nt, Human
acacccugugau

SEQ ID NO: 2710822 - RNA, 18 nt, Human
acacccugugauggggcc

SEQ ID NO: 2710823 - RNA, 19 nt, Human
acacccagcccacuucugc

SEQ ID NO: 2710824 - RNA, 20 nt, Human
acacccagcccacuucugcc

SEQ ID NO: 2710825 - RNA, 21 nt, Human
acacccagcccacuucugcca

SEQ ID NO: 2710826 - RNA, 21 nt, Human
acacaugcaaggucauuuuuu

SEQ ID NO: 2710827 - RNA, 20 nt, Human
acucauuuuaaaaaauggaa

SEQ ID NO: 2710828 - RNA, 21 nt, Human
ucccucagucuggcccuuccu

SEQ ID NO: 2710829 - RNA, 22 nt, Human
ucccucauccucauacccaccc

SEQ ID NO: 2710830 - RNA, 20 nt, Human
uccuagcacuuugggaggcc

SEQ ID NO: 2710831 - RNA, 14 nt, Human
uccuaggcauuugc

SEQ ID NO: 2710832 - RNA, 15 nt, Human
uccgugcuaaggacu

SEQ ID NO: 2710833 - RNA, 14 nt, Human
uccgugcuaaggac

SEQ ID NO: 2710834 - RNA, 21 nt, Human
ucccuuugacgccaucccagc

SEQ ID NO: 2710835 - RNA, 22 nt, Human
ucccuuugacgccaucccagcc

SEQ ID NO: 2710836 - RNA, 23 nt, Human
ucccuuugacgccaucccagccc

SEQ ID NO: 2710837 - RNA, 22 nt, Human
ucccuuuccaaaugcccagcuu

SEQ ID NO: 2710838 - RNA, 18 nt, Human
ucccuuacgugaguccug

SEQ ID NO: 2710839 - RNA, 22 nt, Human
ucccuuacgugaguccuggcau

SEQ ID NO: 2710840 - RNA, 23 nt, Human
ucccugguggcagcucaccucuc

SEQ ID NO: 2710841 - RNA, 16 nt, Human
acucuuauugcccacg

SEQ ID NO: 2710842 - RNA, 19 nt, Human
acucuuauugcccacgcug

SEQ ID NO: 2710843 - RNA, 20 nt, Human
uccucagaucuucugugggu

SEQ ID NO: 2710844 - RNA, 22 nt, Human
uccucauacccacccccaccca

SEQ ID NO: 2710845 - RNA, 14 nt, Human
uccucauacccacc

SEQ ID NO: 2710846 - RNA, 18 nt, Human
uccucauacccaccccca

SEQ ID NO: 2710847 - RNA, 12 nt, Human
uccucuccccag

SEQ ID NO: 2710848 - RNA, 15 nt, Human
uccucccucccucuu

SEQ ID NO: 2710849 - RNA, 17 nt, Human
uccucccucccucuuuc

SEQ ID NO: 2710850 - RNA, 19 nt, Human
uccucccucccucuuuccc

SEQ ID NO: 2710851 - RNA, 23 nt, Human
acucuuauaucuauauuuuacau

SEQ ID NO: 2710852 - RNA, 22 nt, Human
acucuuauaucuauauuuuaca

SEQ ID NO: 2710853 - RNA, 18 nt, Human
acucuccucugcugcugg

SEQ ID NO: 2710854 - RNA, 19 nt, Human
acucuccucugcugcuggc

SEQ ID NO: 2710855 - RNA, 22 nt, Human
acucuccauuuaauaauuauau

SEQ ID NO: 2710856 - RNA, 17 nt, Human
acucuccucugcugcug

SEQ ID NO: 2710857 - RNA, 17 nt, Human
acucgcgacaaugcaaa

SEQ ID NO: 2710858 - RNA, 20 nt, Human
acucgcgacaaugcaaacca

SEQ ID NO: 2710859 - RNA, 23 nt, Human
acucgcgacaaugcaaaccauca

SEQ ID NO: 2710860 - RNA, 19 nt, Human
uccuaggcauuugcugaau

SEQ ID NO: 2710861 - RNA, 18 nt, Human
acucgcgacaaugcaaac

SEQ ID NO: 2710862 - RNA, 12 nt, Human
uccccuccucug

SEQ ID NO: 2710863 - RNA, 15 nt, Human
ucccgaauagcuggg

SEQ ID NO: 2710864 - RNA, 16 nt, Human
ucccgaauagcuggga

SEQ ID NO: 2710865 - RNA, 18 nt, Human
ucccuauuagagaagaga

SEQ ID NO: 2710866 - RNA, 20 nt, Human
ucccgaguagcugggacuac

SEQ ID NO: 2710867 - RNA, 18 nt, Human
ucccgaauagcugggacu

SEQ ID NO: 2710868 - RNA, 17 nt, Human
acuauguugcccaggca

SEQ ID NO: 2710869 - RNA, 18 nt, Human
acuauguugcccaggcag

SEQ ID NO: 2710870 - RNA, 19 nt, Human
acuauguugcccaggcagg

SEQ ID NO: 2710871 - RNA, 20 nt, Human
acuauguugcccaggcaggu

SEQ ID NO: 2710872 - RNA, 23 nt, Human
acuauguugcccaggcaggucuu

SEQ ID NO: 2710873 - RNA, 17 nt, Human
acuauagccuaggugac

SEQ ID NO: 2710874 - RNA, 23 nt, Human
acuauaauuuaccugaagucuuu

SEQ ID NO: 2710875 - RNA, 21 nt, Human
acuauaauguaagcucuacug

SEQ ID NO: 2710876 - RNA, 24 nt, Human
uccccaccgcagacaggaccaggg

SEQ ID NO: 2710877 - RNA, 23 nt, Human
uccccaggaggccagccuugacc

SEQ ID NO: 2710878 - RNA, 14 nt, Human
acguuucuaaaggc

SEQ ID NO: 2710879 - RNA, 13 nt, Human
uccagccugggug

SEQ ID NO: 2710880 - RNA, 24 nt, Human
uccagccugggugacagagcaagu

SEQ ID NO: 2710881 - RNA, 14 nt, Human
uccagcucaccagc

SEQ ID NO: 2710882 - RNA, 12 nt, Human
acguuucuaaag

SEQ ID NO: 2710883 - RNA, 15 nt, Human
acuacaguccuccca

SEQ ID NO: 2710884 - RNA, 23 nt, Human
acuacaggugugagucaccaagc

SEQ ID NO: 2710885 - RNA, 17 nt, Human
acuaaccagcagaaaug

SEQ ID NO: 2710886 - RNA, 13 nt, Human
acuaaccacgcug

SEQ ID NO: 2710887 - RNA, 16 nt, Human
acuaaccagcagaaau

SEQ ID NO: 2710888 - RNA, 15 nt, Human
ucccauaugccuggg

SEQ ID NO: 2710889 - RNA, 13 nt, Human
ucccaucucacac

SEQ ID NO: 2710890 - RNA, 14 nt, Human
ucccaucucacaca

SEQ ID NO: 2710891 - RNA, 19 nt, Human
ucccaucucacacaugagc

SEQ ID NO: 2710892 - RNA, 16 nt, Human
acuacaguccucccau

SEQ ID NO: 2710893 - RNA, 19 nt, Human
ucccagugccgagaaggaa

SEQ ID NO: 2710894 - RNA, 22 nt, Human
ucccagugccgagaaggaagcc

SEQ ID NO: 2710895 - RNA, 15 nt, Human
ucccagugaauucuu

SEQ ID NO: 2710896 - RNA, 11 nt, Human
uccuucagugc

SEQ ID NO: 2710897 - RNA, 12 nt, Human
uccuucagugcc

SEQ ID NO: 2710898 - RNA, 22 nt, Human
uccuucagugccuuauggaaca

SEQ ID NO: 2710899 - RNA, 13 nt, Human
uccuucagugccu

SEQ ID NO: 2710900 - RNA, 20 nt, Human
uccuucagugccuuauggaa

SEQ ID NO: 2710901 - RNA, 22 nt, Human
acuggcacaguuuucugagaaa

SEQ ID NO: 2710902 - RNA, 21 nt, Human
acuggcacaguuuucugagaa

SEQ ID NO: 2710903 - RNA, 22 nt, Human
acuggcugcaaaggguaucagg

SEQ ID NO: 2710904 - RNA, 20 nt, Human
acugccuucucaacuccaaa

SEQ ID NO: 2710905 - RNA, 22 nt, Human
acugccuucucaacuccaaacu

SEQ ID NO: 2710906 - RNA, 16 nt, Human
acuggauuguacuuug

SEQ ID NO: 2710907 - RNA, 22 nt, Human
acuggauuaaacuuaaucuaaa

SEQ ID NO: 2710908 - RNA, 13 nt, Human
acuggauuguacu

SEQ ID NO: 2710909 - RNA, 18 nt, Human
acugcuuccagugaggcu

SEQ ID NO: 2710910 - RNA, 21 nt, Human
acugcuuccagugaggcucug

SEQ ID NO: 2710911 - RNA, 22 nt, Human
acugcuuccagugaggcucugc

SEQ ID NO: 2710912 - RNA, 23 nt, Human
acugcuuccagugaggcucugcc

SEQ ID NO: 2710913 - RNA, 14 nt, Human
ucgcgacaaugcaa

SEQ ID NO: 2710914 - RNA, 13 nt, Human
ucgcgacaaugca

SEQ ID NO: 2710915 - RNA, 14 nt, Human
ucgaggacagggag

SEQ ID NO: 2710916 - RNA, 17 nt, Human
ucgaggacagggaggug

SEQ ID NO: 2710917 - RNA, 13 nt, Human
ucgaggacaggga

SEQ ID NO: 2710918 - RNA, 14 nt, Human
ucgagcaugccugg

SEQ ID NO: 2710919 - RNA, 15 nt, Human
uccuuucaccacaug

SEQ ID NO: 2710920 - RNA, 22 nt, Human
uccuuucuaacaaaaaaauaua

SEQ ID NO: 2710921 - RNA, 15 nt, Human
ucgaacuggcugcaa

SEQ ID NO: 2710922 - RNA, 14 nt, Human
ucgaacuggcugca

SEQ ID NO: 2710923 - RNA, 13 nt, Human
ucgaacuggcugc

SEQ ID NO: 2710924 - RNA, 20 nt, Human
acuggguacuuguggacaca

SEQ ID NO: 2710925 - RNA, 23 nt, Human
acuggguacuuguggacacagcu

SEQ ID NO: 2710926 - RNA, 19 nt, Human
acuggguacuuguggacac

SEQ ID NO: 2710927 - RNA, 12 nt, Human
ucgcuccugugu

SEQ ID NO: 2710928 - RNA, 13 nt, Human
ucgcuccuguguc

SEQ ID NO: 2710929 - RNA, 22 nt, Human
acugggcuuggggaccagagcu

SEQ ID NO: 2710930 - RNA, 14 nt, Human
acuguacaugaaaa

SEQ ID NO: 2710931 - RNA, 13 nt, Human
acuguacaugaaa

SEQ ID NO: 2710932 - RNA, 23 nt, Human
acuguacaugaaaacacauuuuu

SEQ ID NO: 2710933 - RNA, 13 nt, Human
acuguacaaagua

SEQ ID NO: 2710934 - RNA, 19 nt, Human
acuguaauuugugauacaa

SEQ ID NO: 2710935 - RNA, 15 nt, Human
acuguacaaaguaga

SEQ ID NO: 2710936 - RNA, 14 nt, Human
acuguacaaaguag

SEQ ID NO: 2710937 - RNA, 18 nt, Human
uccugggcagcugccucc

SEQ ID NO: 2710938 - RNA, 19 nt, Human
uccugggcagcugccuccc

SEQ ID NO: 2710939 - RNA, 22 nt, Human
uccugggcagcugccuccccuc

SEQ ID NO: 2710940 - RNA, 23 nt, Human
uccugggcagcugccuccccucc

SEQ ID NO: 2710941 - RNA, 14 nt, Human
uccugggcagcugc

SEQ ID NO: 2710942 - RNA, 15 nt, Human
uccugggcagcugcc

SEQ ID NO: 2710943 - RNA, 16 nt, Human
uccugggcagcugccu

SEQ ID NO: 2710944 - RNA, 17 nt, Human
uccugggcagcugccuc

SEQ ID NO: 2710945 - RNA, 13 nt, Human
uccugcugcaguu

SEQ ID NO: 2710946 - RNA, 19 nt, Human
acugcagccucaaccuccu

SEQ ID NO: 2710947 - RNA, 21 nt, Human
acugcagccucaaccuccugg

SEQ ID NO: 2710948 - RNA, 22 nt, Human
acugcagccucaaccuccuggg

SEQ ID NO: 2710949 - RNA, 13 nt, Human
acugcacuguuuu

SEQ ID NO: 2710950 - RNA, 23 nt, Human
acugcagccucaaccuccugggc

SEQ ID NO: 2710951 - RNA, 19 nt, Human
uccuguucccaugagauga

SEQ ID NO: 2710952 - RNA, 23 nt, Human
uccugugucuugcaauggcagcc

SEQ ID NO: 2710953 - RNA, 24 nt, Human
uccugugucuugcaauggcagccu

SEQ ID NO: 2710954 - RNA, 18 nt, Human
uccugugugugcgccuac

SEQ ID NO: 2710955 - RNA, 13 nt, Human
uccugugugugcg

SEQ ID NO: 2710956 - RNA, 14 nt, Human
uccugugugugcgc

SEQ ID NO: 2710957 - RNA, 15 nt, Human
uccucuccccagcaa

SEQ ID NO: 2710958 - RNA, 23 nt, Human
acugaguacguugugcauuuggu

SEQ ID NO: 2710959 - RNA, 22 nt, Human
acugaguacguugugcauuugg

SEQ ID NO: 2710960 - RNA, 18 nt, Human
acugaguacguugugcau

SEQ ID NO: 2710961 - RNA, 21 nt, Human
acugaguacguugugcauuug

SEQ ID NO: 2710962 - RNA, 19 nt, Human
acugaguacguugugcauu

SEQ ID NO: 2710963 - RNA, 13 nt, Human
acugcaaccuccg

SEQ ID NO: 2710964 - RNA, 14 nt, Human
acugcaaccuccgc

SEQ ID NO: 2710965 - RNA, 16 nt, Human
acugcaaccuccgccu

SEQ ID NO: 2710966 - RNA, 22 nt, Human
acugcaaccuccgccucuuggg

SEQ ID NO: 2710967 - RNA, 20 nt, Human
uccugccucgaacuggcugc

SEQ ID NO: 2710968 - RNA, 22 nt, Human
uccugcaggcagccaggccaca

SEQ ID NO: 2710969 - RNA, 19 nt, Human
uccugccucagccucccaa

SEQ ID NO: 2710970 - RNA, 16 nt, Human
uccugcaggcagccag

SEQ ID NO: 2710971 - RNA, 17 nt, Human
uccugcaggcagccagg

SEQ ID NO: 2710972 - RNA, 19 nt, Human
uccugcaggcagccaggcc

SEQ ID NO: 2710973 - RNA, 20 nt, Human
uccugcaggcagccaggcca

SEQ ID NO: 2710974 - RNA, 15 nt, Human
uccugcaggcagcca

SEQ ID NO: 2710975 - RNA, 22 nt, Human
uccagccccuggaugcagccuc

SEQ ID NO: 2710976 - RNA, 11 nt, Human
uccagccuggg

SEQ ID NO: 2710977 - RNA, 15 nt, Human
uccagccccuggaug

SEQ ID NO: 2710978 - RNA, 14 nt, Human
uccagccccuggau

SEQ ID NO: 2710979 - RNA, 16 nt, Human
uccagccccuggaugc

SEQ ID NO: 2710980 - RNA, 17 nt, Human
uccagccccuggaugca

SEQ ID NO: 2710981 - RNA, 19 nt, Human
uccagccccuggaugcagc

SEQ ID NO: 2710982 - RNA, 21 nt, Human
uccagccccuggaugcagccu

SEQ ID NO: 2710983 - RNA, 22 nt, Human
uccagaaguuugagaucagccu

SEQ ID NO: 2710984 - RNA, 23 nt, Human
accuuuguauucucuccuguacc

SEQ ID NO: 2710985 - RNA, 19 nt, Human
accuuuguauucucuccug

SEQ ID NO: 2710986 - RNA, 15 nt, Human
accuuuguauucucu

SEQ ID NO: 2710987 - RNA, 15 nt, Human
uccaccaucaagcca

SEQ ID NO: 2710988 - RNA, 17 nt, Human
accuuagacagucccug

SEQ ID NO: 2710989 - RNA, 12 nt, Human
accuucuccuuc

SEQ ID NO: 2710990 - RNA, 15 nt, Human
accuugacagggcac

SEQ ID NO: 2710991 - RNA, 14 nt, Human
accuugacagggca

SEQ ID NO: 2710992 - RNA, 15 nt, Human
accuugaaugaugcc

SEQ ID NO: 2710993 - RNA, 13 nt, Human
accuucuccuuca

SEQ ID NO: 2710994 - RNA, 12 nt, Human
uccaagcuccca

SEQ ID NO: 2710995 - RNA, 13 nt, Human
uccaagcucccag

SEQ ID NO: 2710996 - RNA, 16 nt, Human
uccaagcucccaggca

SEQ ID NO: 2710997 - RNA, 14 nt, Human
uccaagcucccagg

SEQ ID NO: 2710998 - RNA, 15 nt, Human
uccaagcucccaggc

SEQ ID NO: 2710999 - RNA, 11 nt, Human
uccaagcuggu

SEQ ID NO: 2711000 - RNA, 19 nt, Human
ucauuugagcagggcucag

SEQ ID NO: 2711001 - RNA, 17 nt, Human
accuggaauauauaacc

SEQ ID NO: 2711002 - RNA, 14 nt, Human
accuggaauauaua

SEQ ID NO: 2711003 - RNA, 18 nt, Human
accugcggugcuaucucc

SEQ ID NO: 2711004 - RNA, 15 nt, Human
accugaagucuuugu

SEQ ID NO: 2711005 - RNA, 22 nt, Human
accugaagucuuuguacagaca

SEQ ID NO: 2711006 - RNA, 23 nt, Human
accugcggugcuaucucccccag

SEQ ID NO: 2711007 - RNA, 19 nt, Human
accugcggugcuaucuccc

SEQ ID NO: 2711008 - RNA, 22 nt, Human
accugcggugcuaucuccccca

SEQ ID NO: 2711009 - RNA, 20 nt, Human
ucauuuuagggguagcauuu

SEQ ID NO: 2711010 - RNA, 21 nt, Human
ucauuugagcagggcucagcg

SEQ ID NO: 2711011 - RNA, 13 nt, Human
ucauuuuuuuuaa

SEQ ID NO: 2711012 - RNA, 22 nt, Human
ucaugaauuaguuuuauaugcu

SEQ ID NO: 2711013 - RNA, 23 nt, Human
ucauccacugugccaugugccag

SEQ ID NO: 2711014 - RNA, 19 nt, Human
ucauccacugugccaugug

SEQ ID NO: 2711015 - RNA, 21 nt, Human
ucauccacugugccaugugcc

SEQ ID NO: 2711016 - RNA, 19 nt, Human
ucaugacaaagacugagua

SEQ ID NO: 2711017 - RNA, 21 nt, Human
ucaugaauuaguuuuauaugc

SEQ ID NO: 2711018 - RNA, 13 nt, Human
ucaugucuggcua

SEQ ID NO: 2711019 - RNA, 17 nt, Human
ucauguucuuaauucuu

SEQ ID NO: 2711020 - RNA, 11 nt, Human
ucauguucuua

SEQ ID NO: 2711021 - RNA, 12 nt, Human
accucugcacaa

SEQ ID NO: 2711022 - RNA, 19 nt, Human
accucucucacuccuugaa

SEQ ID NO: 2711023 - RNA, 23 nt, Human
accucucccuuggauuguccccg

SEQ ID NO: 2711024 - RNA, 14 nt, Human
accucucucacucc

SEQ ID NO: 2711025 - RNA, 13 nt, Human
accucucccuugg

SEQ ID NO: 2711026 - RNA, 14 nt, Human
accucucccuugga

SEQ ID NO: 2711027 - RNA, 15 nt, Human
accucucccuuggau

SEQ ID NO: 2711028 - RNA, 21 nt, Human
accucuaaauucuuucauuuu

SEQ ID NO: 2711029 - RNA, 22 nt, Human
ucauugaccugaggcccuucuc

SEQ ID NO: 2711030 - RNA, 19 nt, Human
ucauugaccugaggcccuu

SEQ ID NO: 2711031 - RNA, 21 nt, Human
ucauucuccuuguguuacuaa

SEQ ID NO: 2711032 - RNA, 17 nt, Human
accucggugccuuccuc

SEQ ID NO: 2711033 - RNA, 18 nt, Human
accucuaaauucuuucau

SEQ ID NO: 2711034 - RNA, 20 nt, Human
accuccgccucuuggguuca

SEQ ID NO: 2711035 - RNA, 13 nt, Human
accuagccuuaga

SEQ ID NO: 2711036 - RNA, 10 nt, Human
acccuuuucu

SEQ ID NO: 2711037 - RNA, 19 nt, Human
ucauauuaauauauuucca

SEQ ID NO: 2711038 - RNA, 16 nt, Human
ucauauuuacuucuua

SEQ ID NO: 2711039 - RNA, 22 nt, Human
ucauauuuacuucuuauacauu

SEQ ID NO: 2711040 - RNA, 21 nt, Human
ucauauuuacuucuuauacau

SEQ ID NO: 2711041 - RNA, 20 nt, Human
ucauauuuacuucuuauaca

SEQ ID NO: 2711042 - RNA, 17 nt, Human
accgccaaggcuggggg

SEQ ID NO: 2711043 - RNA, 20 nt, Human
accgcagacaggaccaggga

SEQ ID NO: 2711044 - RNA, 13 nt, Human
ucagauuuuauua

SEQ ID NO: 2711045 - RNA, 15 nt, Human
ucagauuuuauuaug

SEQ ID NO: 2711046 - RNA, 14 nt, Human
ucagauuuuauuau

SEQ ID NO: 2711047 - RNA, 13 nt, Human
ucagaucuucugu

SEQ ID NO: 2711048 - RNA, 13 nt, Human
ucagaagacacug

SEQ ID NO: 2711049 - RNA, 21 nt, Human
ucagaucugccuaaggacuuc

SEQ ID NO: 2711050 - RNA, 13 nt, Human
acccagcucuggu

SEQ ID NO: 2711051 - RNA, 15 nt, Human
acccagcucuggucc

SEQ ID NO: 2711052 - RNA, 20 nt, Human
ucagauuuuauuauguaaau

SEQ ID NO: 2711053 - RNA, 19 nt, Human
ucagauuuuauuauguaaa

SEQ ID NO: 2711054 - RNA, 16 nt, Human
ucagauuuuauuaugu

SEQ ID NO: 2711055 - RNA, 10 nt, Human
ucagccuggg

SEQ ID NO: 2711056 - RNA, 12 nt, Human
ucagccugggca

SEQ ID NO: 2711057 - RNA, 15 nt, Human
acccccagccugcua

SEQ ID NO: 2711058 - RNA, 14 nt, Human
acccccagccugcu

SEQ ID NO: 2711059 - RNA, 14 nt, Human
acccucuuagaaaa

SEQ ID NO: 2711060 - RNA, 14 nt, Human
acccugcccugugg

SEQ ID NO: 2711061 - RNA, 13 nt, Human
acccugcccugug

SEQ ID NO: 2711062 - RNA, 11 nt, Human
acccugcccug

SEQ ID NO: 2711063 - RNA, 12 nt, Human
acccugcccugu

SEQ ID NO: 2711064 - RNA, 15 nt, Human
acccuugugguccca

SEQ ID NO: 2711065 - RNA, 19 nt, Human
acccuuguggucccacccc

SEQ ID NO: 2711066 - RNA, 16 nt, Human
acccuuguggucccac

SEQ ID NO: 2711067 - RNA, 17 nt, Human
acccuuguggucccacc

SEQ ID NO: 2711068 - RNA, 23 nt, Human
ucaggguuggccccugcccggcu

SEQ ID NO: 2711069 - RNA, 20 nt, Human
accccuucgcuccugugucu

SEQ ID NO: 2711070 - RNA, 13 nt, Human
ucagggucccugg

SEQ ID NO: 2711071 - RNA, 14 nt, Human
ucagggucccuggu

SEQ ID NO: 2711072 - RNA, 18 nt, Human
ucagggucccugguggca

SEQ ID NO: 2711073 - RNA, 13 nt, Human
ucagguaacaggc

SEQ ID NO: 2711074 - RNA, 15 nt, Human
ucagguaacaggcag

SEQ ID NO: 2711075 - RNA, 16 nt, Human
ucagguaacaggcaga

SEQ ID NO: 2711076 - RNA, 19 nt, Human
accccuucgcuccuguguc

SEQ ID NO: 2711077 - RNA, 15 nt, Human
ucaggccagcugcuu

SEQ ID NO: 2711078 - RNA, 20 nt, Human
ucaggccagcugcuugggcu

SEQ ID NO: 2711079 - RNA, 11 nt, Human
ucaggccaggc

SEQ ID NO: 2711080 - RNA, 14 nt, Human
ucaggccagcugcu

SEQ ID NO: 2711081 - RNA, 20 nt, Human
ucaggccaaacucaccugcc

SEQ ID NO: 2711082 - RNA, 23 nt, Human
ucaggccaaacucaccugccccu

SEQ ID NO: 2711083 - RNA, 16 nt, Human
ucaggaagcucagggc

SEQ ID NO: 2711084 - RNA, 17 nt, Human
ucaggaagcucagggcc

SEQ ID NO: 2711085 - RNA, 19 nt, Human
ucaggaagcucagggccug

SEQ ID NO: 2711086 - RNA, 20 nt, Human
ucaggaagcucagggccugg

SEQ ID NO: 2711087 - RNA, 15 nt, Human
ucagcggggacagcu

SEQ ID NO: 2711088 - RNA, 16 nt, Human
ucagcggggacagcuc

SEQ ID NO: 2711089 - RNA, 17 nt, Human
ucagcggggacagcucc

SEQ ID NO: 2711090 - RNA, 23 nt, Human
accauuuugggguacccacugcu

SEQ ID NO: 2711091 - RNA, 22 nt, Human
accauuuugggguacccacugc

SEQ ID NO: 2711092 - RNA, 23 nt, Human
accaugauuaaccacuucagcug

SEQ ID NO: 2711093 - RNA, 22 nt, Human
accaugauuaaccacuucagcu

SEQ ID NO: 2711094 - RNA, 18 nt, Human
accauucuccaccugcca

SEQ ID NO: 2711095 - RNA, 13 nt, Human
accauucuccacc

SEQ ID NO: 2711096 - RNA, 16 nt, Human
accauucuccaccugc

SEQ ID NO: 2711097 - RNA, 16 nt, Human
acccagaagaaaauag

SEQ ID NO: 2711098 - RNA, 16 nt, Human
acccagcccacuucug

SEQ ID NO: 2711099 - RNA, 17 nt, Human
acccagcccacuucugc

SEQ ID NO: 2711100 - RNA, 18 nt, Human
acccagcccacuucugcc

SEQ ID NO: 2711101 - RNA, 16 nt, Human
ucaccugccccucaac

SEQ ID NO: 2711102 - RNA, 13 nt, Human
ucacugagacagc

SEQ ID NO: 2711103 - RNA, 14 nt, Human
ucacugagacagcc

SEQ ID NO: 2711104 - RNA, 15 nt, Human
ucacugagacagccc

SEQ ID NO: 2711105 - RNA, 16 nt, Human
ucacuguugcccaggc

SEQ ID NO: 2711106 - RNA, 12 nt, Human
ucacugcagccu

SEQ ID NO: 2711107 - RNA, 17 nt, Human
ucacuguugcccaggcu

SEQ ID NO: 2711108 - RNA, 18 nt, Human
ucacuguugcccaggcug

SEQ ID NO: 2711109 - RNA, 21 nt, Human
accaguguuguggauuuaaca

SEQ ID NO: 2711110 - RNA, 12 nt, Human
uauuucauuucu

SEQ ID NO: 2711111 - RNA, 11 nt, Human
accacagcagu

SEQ ID NO: 2711112 - RNA, 14 nt, Human
accacaucuugcuc

SEQ ID NO: 2711113 - RNA, 22 nt, Human
accacagacauacuaaccagca

SEQ ID NO: 2711114 - RNA, 21 nt, Human
accacagacauacuaaccagc

SEQ ID NO: 2711115 - RNA, 15 nt, Human
accacuucagcugac

SEQ ID NO: 2711116 - RNA, 13 nt, Human
accacuucagcug

SEQ ID NO: 2711117 - RNA, 14 nt, Human
accacuucagcuga

SEQ ID NO: 2711118 - RNA, 20 nt, Human
accacucuaucaaguauuau

SEQ ID NO: 2711119 - RNA, 20 nt, Human
accacaucuugcucugcuga

SEQ ID NO: 2711120 - RNA, 21 nt, Human
accacaucuugcucugcugac

SEQ ID NO: 2711121 - RNA, 24 nt, Human
accacaucuugcucugcugacaga

SEQ ID NO: 2711122 - RNA, 19 nt, Human
accacuuguguuuugcaag

SEQ ID NO: 2711123 - RNA, 23 nt, Human
accacuuguguuuugcaagccag

SEQ ID NO: 2711124 - RNA, 17 nt, Human
accagacaccuugacag

SEQ ID NO: 2711125 - RNA, 12 nt, Human
accacuuuuguu

SEQ ID NO: 2711126 - RNA, 22 nt, Human
accagacaccuugacagggcac

SEQ ID NO: 2711127 - RNA, 23 nt, Human
accagacaccuugacagggcaca

SEQ ID NO: 2711128 - RNA, 17 nt, Human
accagagcccaccuugg

SEQ ID NO: 2711129 - RNA, 19 nt, Human
accagagcccaccuuggcu

SEQ ID NO: 2711130 - RNA, 22 nt, Human
accagagcccaccuuggcucaa

SEQ ID NO: 2711131 - RNA, 19 nt, Human
ucaccugaagacucauucu

SEQ ID NO: 2711132 - RNA, 23 nt, Human
ucaccugaagacucauucuucug

SEQ ID NO: 2711133 - RNA, 16 nt, Human
agcaccaaucaugaau

SEQ ID NO: 2711134 - RNA, 22 nt, Human
agcaccaaaagcuuaccaaggg

SEQ ID NO: 2711135 - RNA, 14 nt, Human
agcacaugccucuc

SEQ ID NO: 2711136 - RNA, 13 nt, Human
agcacaugccucu

SEQ ID NO: 2711137 - RNA, 22 nt, Human
agcacagccucuuagaugcagu

SEQ ID NO: 2711138 - RNA, 16 nt, Human
agcacagcuucauuuc

SEQ ID NO: 2711139 - RNA, 15 nt, Human
agcacagugaucaag

SEQ ID NO: 2711140 - RNA, 22 nt, Human
agcaagugagagcuggguguca

SEQ ID NO: 2711141 - RNA, 18 nt, Human
agcaagugagagcugggu

SEQ ID NO: 2711142 - RNA, 14 nt, Human
agcaagugagagcu

SEQ ID NO: 2711143 - RNA, 20 nt, Human
agcaagugagacccugucuc

SEQ ID NO: 2711144 - RNA, 13 nt, Human
agcaagugagagc

SEQ ID NO: 2711145 - RNA, 17 nt, Human
ugagccagauuucacuc

SEQ ID NO: 2711146 - RNA, 22 nt, Human
ugagccagauuucacucuccuu

SEQ ID NO: 2711147 - RNA, 14 nt, Human
agcaacgcaggccc

SEQ ID NO: 2711148 - RNA, 15 nt, Human
ugagcaauccugcaa

SEQ ID NO: 2711149 - RNA, 20 nt, Human
ugagcacuaaggugugcucu

SEQ ID NO: 2711150 - RNA, 21 nt, Human
ugagcacuaaggugugcucug

SEQ ID NO: 2711151 - RNA, 22 nt, Human
ugagcacuaaggugugcucuga

SEQ ID NO: 2711152 - RNA, 23 nt, Human
ugagcacuaaggugugcucugau

SEQ ID NO: 2711153 - RNA, 21 nt, Human
ugagcaucaggccaggcccuc

SEQ ID NO: 2711154 - RNA, 22 nt, Human
ugagcaucaggccaggcccucu

SEQ ID NO: 2711155 - RNA, 24 nt, Human
ugagcaucaggccaggcccucugc

SEQ ID NO: 2711156 - RNA, 21 nt, Human
ugagccacugcaccgggccac

SEQ ID NO: 2711157 - RNA, 18 nt, Human
ugagccacugcaccgggc

SEQ ID NO: 2711158 - RNA, 23 nt, Human
ugagccacugcaccgggccacag

SEQ ID NO: 2711159 - RNA, 13 nt, Human
ugagccagauuuc

SEQ ID NO: 2711160 - RNA, 14 nt, Human
ugagccagauuuca

SEQ ID NO: 2711161 - RNA, 16 nt, Human
ugagccagauuucacu

SEQ ID NO: 2711162 - RNA, 19 nt, Human
agcagaaaugccuuacccu

SEQ ID NO: 2711163 - RNA, 13 nt, Human
agcagaaaugccu

SEQ ID NO: 2711164 - RNA, 12 nt, Human
agcagaaaugcc

SEQ ID NO: 2711165 - RNA, 22 nt, Human
agcacuuugggaggccaaggug

SEQ ID NO: 2711166 - RNA, 23 nt, Human
agcacuuugggaggccaaggugg

SEQ ID NO: 2711167 - RNA, 13 nt, Human
agcacgauuucug

SEQ ID NO: 2711168 - RNA, 23 nt, Human
agcaccuuagacagucccugcca

SEQ ID NO: 2711169 - RNA, 16 nt, Human
agcacgauuucuguuu

SEQ ID NO: 2711170 - RNA, 15 nt, Human
agcacgauuucuguu

SEQ ID NO: 2711171 - RNA, 14 nt, Human
agcacgauuucugu

SEQ ID NO: 2711172 - RNA, 19 nt, Human
agcaccuuagacagucccu

SEQ ID NO: 2711173 - RNA, 20 nt, Human
agcaccuuagacagucccug

SEQ ID NO: 2711174 - RNA, 21 nt, Human
agcaccuuagacagucccugc

SEQ ID NO: 2711175 - RNA, 22 nt, Human
agcaccuuagacagucccugcc

SEQ ID NO: 2711176 - RNA, 19 nt, Human
ugagccuugaacuuugacc

SEQ ID NO: 2711177 - RNA, 18 nt, Human
ugagccuugaacuuugac

SEQ ID NO: 2711178 - RNA, 17 nt, Human
ugagccuugaacuuuga

SEQ ID NO: 2711179 - RNA, 15 nt, Human
ugagccuugaacuuu

SEQ ID NO: 2711180 - RNA, 14 nt, Human
ugagccugggaggu

SEQ ID NO: 2711181 - RNA, 11 nt, Human
ugagccuggca

SEQ ID NO: 2711182 - RNA, 16 nt, Human
ugagccuggcaagaau

SEQ ID NO: 2711183 - RNA, 19 nt, Human
ugagccugggaggucaagg

SEQ ID NO: 2711184 - RNA, 22 nt, Human
ugagccugggaggucaaggcug

SEQ ID NO: 2711185 - RNA, 14 nt, Human
ugagccuugaacuu

SEQ ID NO: 2711186 - RNA, 10 nt, Human
ugagccuggc

SEQ ID NO: 2711187 - RNA, 15 nt, Human
agcagagaccauccc

SEQ ID NO: 2711188 - RNA, 16 nt, Human
agcagagaccaucccu

SEQ ID NO: 2711189 - RNA, 21 nt, Human
agcagagaauucucuuaucca

SEQ ID NO: 2711190 - RNA, 14 nt, Human
agcagagaauucuc

SEQ ID NO: 2711191 - RNA, 22 nt, Human
agcagagaaugaaagggcccag

SEQ ID NO: 2711192 - RNA, 23 nt, Human
agcagagaaugaaagggcccaga

SEQ ID NO: 2711193 - RNA, 21 nt, Human
agcagagaaugaaagggccca

SEQ ID NO: 2711194 - RNA, 13 nt, Human
ugaggucagagcc

SEQ ID NO: 2711195 - RNA, 14 nt, Human
ugaggucagagccu

SEQ ID NO: 2711196 - RNA, 16 nt, Human
ugaggucagagccugc

SEQ ID NO: 2711197 - RNA, 20 nt, Human
ugaggguugggcugguguca

SEQ ID NO: 2711198 - RNA, 20 nt, Human
agcagagaccaucccugaag

SEQ ID NO: 2711199 - RNA, 20 nt, Human
agcagagcaccuuagacagu

SEQ ID NO: 2711200 - RNA, 17 nt, Human
ugaggucagagccugca

SEQ ID NO: 2711201 - RNA, 17 nt, Human
agcagagaccaucccug

SEQ ID NO: 2711202 - RNA, 18 nt, Human
agcagagaccaucccuga

SEQ ID NO: 2711203 - RNA, 19 nt, Human
agcagagaccaucccugaa

SEQ ID NO: 2711204 - RNA, 17 nt, Human
agcagaggaaggagagg

SEQ ID NO: 2711205 - RNA, 20 nt, Human
agcagauuauucacugauuu

SEQ ID NO: 2711206 - RNA, 19 nt, Human
agcagauuauucacugauu

SEQ ID NO: 2711207 - RNA, 19 nt, Human
agcagauggagaccccuug

SEQ ID NO: 2711208 - RNA, 21 nt, Human
agcagauggaaugcuguguua

SEQ ID NO: 2711209 - RNA, 14 nt, Human
agcagauuauucac

SEQ ID NO: 2711210 - RNA, 16 nt, Human
agcagauuauucacug

SEQ ID NO: 2711211 - RNA, 15 nt, Human
agcagauuauucacu

SEQ ID NO: 2711212 - RNA, 19 nt, Human
ugagggauacccaucccau

SEQ ID NO: 2711213 - RNA, 16 nt, Human
ugaggcccuucucucc

SEQ ID NO: 2711214 - RNA, 18 nt, Human
ugaggcccuucucuccag

SEQ ID NO: 2711215 - RNA, 19 nt, Human
ugaggcccuucucuccagc

SEQ ID NO: 2711216 - RNA, 20 nt, Human
ugaggcccuucucuccagcc

SEQ ID NO: 2711217 - RNA, 22 nt, Human
ugaggcccuucucuccagcccc

SEQ ID NO: 2711218 - RNA, 23 nt, Human
ugaggcccuucucuccagccccu

SEQ ID NO: 2711219 - RNA, 24 nt, Human
ugaggcccuucucuccagccccug

SEQ ID NO: 2711220 - RNA, 12 nt, Human
ugaggggccucu

SEQ ID NO: 2711221 - RNA, 13 nt, Human
ugaggggccucuu

SEQ ID NO: 2711222 - RNA, 15 nt, Human
ugaggacacugauau

SEQ ID NO: 2711223 - RNA, 21 nt, Human
ugaggacacuaaccacgcugg

SEQ ID NO: 2711224 - RNA, 23 nt, Human
ugaggcauuuguuugaacugaua

SEQ ID NO: 2711225 - RNA, 12 nt, Human
ugaggccagaga

SEQ ID NO: 2711226 - RNA, 21 nt, Human
ugaggaauccagacccggcug

SEQ ID NO: 2711227 - RNA, 22 nt, Human
ugaggaauccagacccggcugc

SEQ ID NO: 2711228 - RNA, 14 nt, Human
ugaggaauucugua

SEQ ID NO: 2711229 - RNA, 16 nt, Human
ugaggaauucuguaua

SEQ ID NO: 2711230 - RNA, 15 nt, Human
ugaggaauucuguau

SEQ ID NO: 2711231 - RNA, 19 nt, Human
ugaggaauucuguauagau

SEQ ID NO: 2711232 - RNA, 18 nt, Human
ugaggaauucuguauaga

SEQ ID NO: 2711233 - RNA, 23 nt, Human
ugaggcccagagggccugcaagg

SEQ ID NO: 2711234 - RNA, 21 nt, Human
ugaggcccagagggccugcaa

SEQ ID NO: 2711235 - RNA, 22 nt, Human
ugaggcccagagggccugcaag

SEQ ID NO: 2711236 - RNA, 15 nt, Human
ugaggcccagagggc

SEQ ID NO: 2711237 - RNA, 17 nt, Human
ugaggcccagagggccu

SEQ ID NO: 2711238 - RNA, 18 nt, Human
ugaggcccagagggccug

SEQ ID NO: 2711239 - RNA, 20 nt, Human
ugaggcccagagggccugca

SEQ ID NO: 2711240 - RNA, 12 nt, Human
ugaggcccagag

SEQ ID NO: 2711241 - RNA, 13 nt, Human
ugaggcccagagg

SEQ ID NO: 2711242 - RNA, 20 nt, Human
ugaggccagagacacaagcc

SEQ ID NO: 2711243 - RNA, 14 nt, Human
ugaggccagagaca

SEQ ID NO: 2711244 - RNA, 16 nt, Human
ugaggccagagacaca

SEQ ID NO: 2711245 - RNA, 14 nt, Human
ugagcuacaaaugc

SEQ ID NO: 2711246 - RNA, 13 nt, Human
ugagcuacaaaug

SEQ ID NO: 2711247 - RNA, 16 nt, Human
ugagcuacaaaugcau

SEQ ID NO: 2711248 - RNA, 19 nt, Human
ugaggaagccgcuggggcc

SEQ ID NO: 2711249 - RNA, 21 nt, Human
ugaggaagccgcuggggccag

SEQ ID NO: 2711250 - RNA, 22 nt, Human
ugaggaagcaaaagcaucuaug

SEQ ID NO: 2711251 - RNA, 14 nt, Human
ugaggaagccgcug

SEQ ID NO: 2711252 - RNA, 17 nt, Human
ugaggaagccgcugggg

SEQ ID NO: 2711253 - RNA, 18 nt, Human
ugaggaagccgcuggggc

SEQ ID NO: 2711254 - RNA, 15 nt, Human
ugaggaagcaaaagc

SEQ ID NO: 2711255 - RNA, 18 nt, Human
agagucuauuuacggaac

SEQ ID NO: 2711256 - RNA, 15 nt, Human
agagugagacucugu

SEQ ID NO: 2711257 - RNA, 16 nt, Human
agagugagacucuguc

SEQ ID NO: 2711258 - RNA, 22 nt, Human
agagucucacuguugcccaggc

SEQ ID NO: 2711259 - RNA, 20 nt, Human
agagucucacuguugcccag

SEQ ID NO: 2711260 - RNA, 14 nt, Human
ugaaugucagugug

SEQ ID NO: 2711261 - RNA, 15 nt, Human
ugaaugucaguguga

SEQ ID NO: 2711262 - RNA, 18 nt, Human
ugaaugucagugugacug

SEQ ID NO: 2711263 - RNA, 19 nt, Human
agauaaucagugugucuaa

SEQ ID NO: 2711264 - RNA, 19 nt, Human
agagugagacucugucuca

SEQ ID NO: 2711265 - RNA, 17 nt, Human
agauaaggguaucuggu

SEQ ID NO: 2711266 - RNA, 19 nt, Human
agauaaggguaucugguga

SEQ ID NO: 2711267 - RNA, 22 nt, Human
agauauuuugcuuugugauuuu

SEQ ID NO: 2711268 - RNA, 19 nt, Human
agauacaggaaaagcugcu

SEQ ID NO: 2711269 - RNA, 14 nt, Human
agaucaaccccuuc

SEQ ID NO: 2711270 - RNA, 19 nt, Human
agaucaaccccuucgcucc

SEQ ID NO: 2711271 - RNA, 21 nt, Human
agaucaaccccuucgcuccug

SEQ ID NO: 2711272 - RNA, 22 nt, Human
agagggagggagggcuccagac

SEQ ID NO: 2711273 - RNA, 21 nt, Human
agagggagggagggcuccaga

SEQ ID NO: 2711274 - RNA, 20 nt, Human
agagggagggagggcuccag

SEQ ID NO: 2711275 - RNA, 14 nt, Human
ugaagaagauggua

SEQ ID NO: 2711276 - RNA, 20 nt, Human
ugaagaagcaccaaucauga

SEQ ID NO: 2711277 - RNA, 16 nt, Human
ugaacuuugaccucug

SEQ ID NO: 2711278 - RNA, 11 nt, Human
ugaagacaaug

SEQ ID NO: 2711279 - RNA, 17 nt, Human
ugaagacaaugacuuac

SEQ ID NO: 2711280 - RNA, 13 nt, Human
ugaagacaaugac

SEQ ID NO: 2711281 - RNA, 14 nt, Human
ucuuuggucuacac

SEQ ID NO: 2711282 - RNA, 21 nt, Human
ucuuuggucuacacugugcug

SEQ ID NO: 2711283 - RNA, 11 nt, Human
ugaacuuugac

SEQ ID NO: 2711284 - RNA, 19 nt, Human
agagcugggugucaagagg

SEQ ID NO: 2711285 - RNA, 18 nt, Human
agaggcaacugcauuggc

SEQ ID NO: 2711286 - RNA, 21 nt, Human
agaggaaaucaccgaaaacgu

SEQ ID NO: 2711287 - RNA, 11 nt, Human
agaggaaauca

SEQ ID NO: 2711288 - RNA, 12 nt, Human
agaggaaaucac

SEQ ID NO: 2711289 - RNA, 12 nt, Human
agaggaaagcaa

SEQ ID NO: 2711290 - RNA, 16 nt, Human
agaggaaagcaaagga

SEQ ID NO: 2711291 - RNA, 18 nt, Human
agaggaaagcaaaggaga

SEQ ID NO: 2711292 - RNA, 19 nt, Human
agaggaaagcaaaggagau

SEQ ID NO: 2711293 - RNA, 18 nt, Human
agaugcuucucacugcca

SEQ ID NO: 2711294 - RNA, 16 nt, Human
agaugcuucucacugc

SEQ ID NO: 2711295 - RNA, 14 nt, Human
ugaccucugccuga

SEQ ID NO: 2711296 - RNA, 12 nt, Human
ugaccugaggcc

SEQ ID NO: 2711297 - RNA, 13 nt, Human
ugaccucugccug

SEQ ID NO: 2711298 - RNA, 19 nt, Human
agaugaugaugaucuuuaa

SEQ ID NO: 2711299 - RNA, 14 nt, Human
agauccuggaaauc

SEQ ID NO: 2711300 - RNA, 12 nt, Human
ugaauuuauugg

SEQ ID NO: 2711301 - RNA, 16 nt, Human
ugaauuuauuggcuuu

SEQ ID NO: 2711302 - RNA, 15 nt, Human
ugaauuuauuggcuu

SEQ ID NO: 2711303 - RNA, 15 nt, Human
ugacuguuuccauca

SEQ ID NO: 2711304 - RNA, 20 nt, Human
ugacuccagaauuucccaaa

SEQ ID NO: 2711305 - RNA, 23 nt, Human
ugacuccagaauuucccaaagca

SEQ ID NO: 2711306 - RNA, 17 nt, Human
ugaccugaggcccuucu

SEQ ID NO: 2711307 - RNA, 14 nt, Human
ugaccugaggcccu

SEQ ID NO: 2711308 - RNA, 15 nt, Human
ugaccugaggcccuu

SEQ ID NO: 2711309 - RNA, 17 nt, Human
ugacuccagaauuuccc

SEQ ID NO: 2711310 - RNA, 19 nt, Human
ugacuccagaauuucccaa

SEQ ID NO: 2711311 - RNA, 23 nt, Human
agauuauauauauuuuuuucuga

SEQ ID NO: 2711312 - RNA, 16 nt, Human
agauuauucacugauu

SEQ ID NO: 2711313 - RNA, 22 nt, Human
agauucaaugccccugaauuua

SEQ ID NO: 2711314 - RNA, 21 nt, Human
agauucaaugccccugaauuu

SEQ ID NO: 2711315 - RNA, 16 nt, Human
agauuuaccacuugug

SEQ ID NO: 2711316 - RNA, 13 nt, Human
agauuucacucuc

SEQ ID NO: 2711317 - RNA, 14 nt, Human
agauuucacucucc

SEQ ID NO: 2711318 - RNA, 23 nt, Human
agcaaaaauauuuuaugauccag

SEQ ID NO: 2711319 - RNA, 19 nt, Human
agcaaaaauauuuuaugau

SEQ ID NO: 2711320 - RNA, 18 nt, Human
agcaaaaauauuuuauga

SEQ ID NO: 2711321 - RNA, 17 nt, Human
agcaaaaauauuuuaug

SEQ ID NO: 2711322 - RNA, 15 nt, Human
agcaaaaauauuuua

SEQ ID NO: 2711323 - RNA, 12 nt, Human
agauuuucagaa

SEQ ID NO: 2711324 - RNA, 22 nt, Human
agauuuuauuauguaaauccca

SEQ ID NO: 2711325 - RNA, 20 nt, Human
agauuuuauuauguaaaucc

SEQ ID NO: 2711326 - RNA, 21 nt, Human
agauuuuauuauguaaauccc

SEQ ID NO: 2711327 - RNA, 17 nt, Human
agauuuucagaaaauau

SEQ ID NO: 2711328 - RNA, 12 nt, Human
ucucuucuuuaa

SEQ ID NO: 2711329 - RNA, 13 nt, Human
ucucuucuuuaaa

SEQ ID NO: 2711330 - RNA, 14 nt, Human
ucucuugagagggu

SEQ ID NO: 2711331 - RNA, 15 nt, Human
ucucuccagccccug

SEQ ID NO: 2711332 - RNA, 22 nt, Human
ucucuccuguaccucuugagcc

SEQ ID NO: 2711333 - RNA, 20 nt, Human
ucucuccuguaccucuugag

SEQ ID NO: 2711334 - RNA, 13 nt, Human
ucucuccagcccc

SEQ ID NO: 2711335 - RNA, 14 nt, Human
ucucuccagccccu

SEQ ID NO: 2711336 - RNA, 20 nt, Human
ucuccuucaccuuugucccc

SEQ ID NO: 2711337 - RNA, 18 nt, Human
ucuccuucaccuuugucc

SEQ ID NO: 2711338 - RNA, 15 nt, Human
agaaacauuugguaa

SEQ ID NO: 2711339 - RNA, 19 nt, Human
agaaaacaaggaugaauua

SEQ ID NO: 2711340 - RNA, 16 nt, Human
agaaaacaaggaugaa

SEQ ID NO: 2711341 - RNA, 17 nt, Human
agaaaaaugagccuggc

SEQ ID NO: 2711342 - RNA, 18 nt, Human
agaaaaaggaugcacaga

SEQ ID NO: 2711343 - RNA, 13 nt, Human
ucucuugagccug

SEQ ID NO: 2711344 - RNA, 14 nt, Human
ucucuugagccugg

SEQ ID NO: 2711345 - RNA, 15 nt, Human
ucucuugagccuggg

SEQ ID NO: 2711346 - RNA, 22 nt, Human
ucucuuuaaugucacaggcagg

SEQ ID NO: 2711347 - RNA, 22 nt, Human
acuuuuuauggcacuaguauuu

SEQ ID NO: 2711348 - RNA, 14 nt, Human
acuuuuggaaggua

SEQ ID NO: 2711349 - RNA, 18 nt, Human
acuuuaccuuuuuuauac

SEQ ID NO: 2711350 - RNA, 22 nt, Human
acuuuaccuuuuuuauacauaa

SEQ ID NO: 2711351 - RNA, 19 nt, Human
acuuuaccuuuuuuauaca

SEQ ID NO: 2711352 - RNA, 23 nt, Human
acuuugaccucugcagcaauaaa

SEQ ID NO: 2711353 - RNA, 19 nt, Human
acuuugaccucugcagcaa

SEQ ID NO: 2711354 - RNA, 12 nt, Human
acuuuggaaaga

SEQ ID NO: 2711355 - RNA, 13 nt, Human
acuuuggaaagac

SEQ ID NO: 2711356 - RNA, 14 nt, Human
acuuuggaaagacu

SEQ ID NO: 2711357 - RNA, 17 nt, Human
acuuuggaaagacuuuu

SEQ ID NO: 2711358 - RNA, 12 nt, Human
ucuccucugcug

SEQ ID NO: 2711359 - RNA, 19 nt, Human
ucucccuuggauugucccc

SEQ ID NO: 2711360 - RNA, 21 nt, Human
ucucccuuggauuguccccga

SEQ ID NO: 2711361 - RNA, 13 nt, Human
ucuccucugcugc

SEQ ID NO: 2711362 - RNA, 14 nt, Human
ucuccucugcugcu

SEQ ID NO: 2711363 - RNA, 23 nt, Human
acuuguguaaauacaauuuuguu

SEQ ID NO: 2711364 - RNA, 22 nt, Human
acuuguguaaauacaauuuugu

SEQ ID NO: 2711365 - RNA, 21 nt, Human
acuuguguaaauacaauuuug

SEQ ID NO: 2711366 - RNA, 15 nt, Human
ucucccagucauuua

SEQ ID NO: 2711367 - RNA, 11 nt, Human
ucucccuugga

SEQ ID NO: 2711368 - RNA, 18 nt, Human
ucucccuuggauuguccc

SEQ ID NO: 2711369 - RNA, 19 nt, Human
ucuccauuuaauaauuaua

SEQ ID NO: 2711370 - RNA, 16 nt, Human
ucuccauuuaauaauu

SEQ ID NO: 2711371 - RNA, 12 nt, Human
ucuccauuuaau

SEQ ID NO: 2711372 - RNA, 12 nt, Human
ucugcuugccau

SEQ ID NO: 2711373 - RNA, 23 nt, Human
ucugcuuuuuaaagaaugcucuu

SEQ ID NO: 2711374 - RNA, 18 nt, Human
ucuggagguacgaaaaga

SEQ ID NO: 2711375 - RNA, 14 nt, Human
ucuggcagcucaga

SEQ ID NO: 2711376 - RNA, 15 nt, Human
ucuggcagcucagag

SEQ ID NO: 2711377 - RNA, 15 nt, Human
agaagcggcuggcag

SEQ ID NO: 2711378 - RNA, 16 nt, Human
agaagcggcuggcagc

SEQ ID NO: 2711379 - RNA, 11 nt, Human
ucugcuugcca

SEQ ID NO: 2711380 - RNA, 16 nt, Human
ucugcucacauaucug

SEQ ID NO: 2711381 - RNA, 21 nt, Human
agaagaacugaaaucauacuu

SEQ ID NO: 2711382 - RNA, 13 nt, Human
ucugccuaaggac

SEQ ID NO: 2711383 - RNA, 14 nt, Human
ucugcccuccaaga

SEQ ID NO: 2711384 - RNA, 23 nt, Human
ucugccgcagcccugcagagggc

SEQ ID NO: 2711385 - RNA, 16 nt, Human
ucugccuaaggacuuc

SEQ ID NO: 2711386 - RNA, 15 nt, Human
ucugccuaaggacuu

SEQ ID NO: 2711387 - RNA, 14 nt, Human
ucugccuaaggacu

SEQ ID NO: 2711388 - RNA, 22 nt, Human
agaaccucuuugucuacaccau

SEQ ID NO: 2711389 - RNA, 11 nt, Human
agaaauguguu

SEQ ID NO: 2711390 - RNA, 16 nt, Human
agaaauguacagcaag

SEQ ID NO: 2711391 - RNA, 17 nt, Human
agaaauguacagcaagg

SEQ ID NO: 2711392 - RNA, 22 nt, Human
ucugagaaagacuauucaaaca

SEQ ID NO: 2711393 - RNA, 21 nt, Human
ucugagaaagacuauucaaac

SEQ ID NO: 2711394 - RNA, 23 nt, Human
ucugagaaagacuauucaaacag

SEQ ID NO: 2711395 - RNA, 17 nt, Human
ucugauacagaaaaguu

SEQ ID NO: 2711396 - RNA, 16 nt, Human
ucugauacagaaaagu

SEQ ID NO: 2711397 - RNA, 19 nt, Human
ucugauucccaagcucugc

SEQ ID NO: 2711398 - RNA, 20 nt, Human
ucugauucccaagcucugcu

SEQ ID NO: 2711399 - RNA, 21 nt, Human
ucugauucccaagcucugcuc

SEQ ID NO: 2711400 - RNA, 22 nt, Human
ucugcacuccccugcugggugu

SEQ ID NO: 2711401 - RNA, 20 nt, Human
ucugagaaagacuauucaaa

SEQ ID NO: 2711402 - RNA, 19 nt, Human
ucugagaaagacuauucaa

SEQ ID NO: 2711403 - RNA, 15 nt, Human
ucugagaaagacuau

SEQ ID NO: 2711404 - RNA, 14 nt, Human
ucugagaaagacua

SEQ ID NO: 2711405 - RNA, 21 nt, Human
ucugacuguuuccaucaaggg

SEQ ID NO: 2711406 - RNA, 23 nt, Human
agaaagacuauucaaacagucuc

SEQ ID NO: 2711407 - RNA, 20 nt, Human
agaaagacuauucaaacagu

SEQ ID NO: 2711408 - RNA, 18 nt, Human
agaaagacuauucaaaca

SEQ ID NO: 2711409 - RNA, 19 nt, Human
agaaagacuauucaaacag

SEQ ID NO: 2711410 - RNA, 19 nt, Human
ucugacccugcuucaaaua

SEQ ID NO: 2711411 - RNA, 21 nt, Human
agacuauucaaacagucucag

SEQ ID NO: 2711412 - RNA, 17 nt, Human
agacucauucuucugua

SEQ ID NO: 2711413 - RNA, 20 nt, Human
agacuauucaaacagucuca

SEQ ID NO: 2711414 - RNA, 18 nt, Human
agacuauucaaacagucu

SEQ ID NO: 2711415 - RNA, 12 nt, Human
agacuccaaaga

SEQ ID NO: 2711416 - RNA, 18 nt, Human
agacucauucuucuguac

SEQ ID NO: 2711417 - RNA, 14 nt, Human
agacuccaaagaaa

SEQ ID NO: 2711418 - RNA, 13 nt, Human
agacuccaaagaa

SEQ ID NO: 2711419 - RNA, 16 nt, Human
agacuauucaaacagu

SEQ ID NO: 2711420 - RNA, 19 nt, Human
agacuaucuaaauguugaa

SEQ ID NO: 2711421 - RNA, 18 nt, Human
agacuaucuaaauguuga

SEQ ID NO: 2711422 - RNA, 17 nt, Human
agacuaucuaaauguug

SEQ ID NO: 2711423 - RNA, 15 nt, Human
agacuaucuaaaugu

SEQ ID NO: 2711424 - RNA, 19 nt, Human
agacuccaaagaaauguaa

SEQ ID NO: 2711425 - RNA, 16 nt, Human
agacuccaaagaaaug

SEQ ID NO: 2711426 - RNA, 17 nt, Human
ucuugcaauggcagccu

SEQ ID NO: 2711427 - RNA, 13 nt, Human
ucuugcaauggca

SEQ ID NO: 2711428 - RNA, 16 nt, Human
ucuugcaauggcagcc

SEQ ID NO: 2711429 - RNA, 12 nt, Human
agacccugcccu

SEQ ID NO: 2711430 - RNA, 13 nt, Human
agacccugcccug

SEQ ID NO: 2711431 - RNA, 14 nt, Human
agacccugcccugu

SEQ ID NO: 2711432 - RNA, 13 nt, Human
agacccuuguggu

SEQ ID NO: 2711433 - RNA, 15 nt, Human
agacccuuguggucc

SEQ ID NO: 2711434 - RNA, 16 nt, Human
agacccugcccugugg

SEQ ID NO: 2711435 - RNA, 19 nt, Human
agacccugcccugugggcc

SEQ ID NO: 2711436 - RNA, 21 nt, Human
agacccugcccugugggcccc

SEQ ID NO: 2711437 - RNA, 23 nt, Human
agacccugcccugugggccccca

SEQ ID NO: 2711438 - RNA, 19 nt, Human
agacccuuguggucccacc

SEQ ID NO: 2711439 - RNA, 20 nt, Human
agacccuuguggucccaccc

SEQ ID NO: 2711440 - RNA, 22 nt, Human
agacccuuguggucccacccca

SEQ ID NO: 2711441 - RNA, 23 nt, Human
agacccuuguggucccaccccac

SEQ ID NO: 2711442 - RNA, 21 nt, Human
ucuuuaaagggauggcaagau

SEQ ID NO: 2711443 - RNA, 13 nt, Human
ucuuuaauuuugg

SEQ ID NO: 2711444 - RNA, 17 nt, Human
ucuuuaaaauacacacu

SEQ ID NO: 2711445 - RNA, 15 nt, Human
ucuuuacuucaugga

SEQ ID NO: 2711446 - RNA, 18 nt, Human
ucuuuaauuuuggaauuu

SEQ ID NO: 2711447 - RNA, 17 nt, Human
ucuuuaauuuuggaauu

SEQ ID NO: 2711448 - RNA, 16 nt, Human
ucuuuaauuuuggaau

SEQ ID NO: 2711449 - RNA, 15 nt, Human
ucuuuaauuuuggaa

SEQ ID NO: 2711450 - RNA, 14 nt, Human
ucuuuaauuuugga

SEQ ID NO: 2711451 - RNA, 19 nt, Human
agacucuacagaggccaug

SEQ ID NO: 2711452 - RNA, 17 nt, Human
agacucuacagaggcca

SEQ ID NO: 2711453 - RNA, 21 nt, Human
agacucgcgacaaugcaaacc

SEQ ID NO: 2711454 - RNA, 18 nt, Human
agacuccugcaggcagcc

SEQ ID NO: 2711455 - RNA, 19 nt, Human
agacuccugcaggcagcca

SEQ ID NO: 2711456 - RNA, 20 nt, Human
agacuccugcaggcagccag

SEQ ID NO: 2711457 - RNA, 23 nt, Human
agacuccugcaggcagccaggcc

SEQ ID NO: 2711458 - RNA, 13 nt, Human
ucuuuccugaggc

SEQ ID NO: 2711459 - RNA, 14 nt, Human
ucuuuccugaggcu

SEQ ID NO: 2711460 - RNA, 15 nt, Human
ucuuuccugaggcug

SEQ ID NO: 2711461 - RNA, 16 nt, Human
ucuuuccugaggcugg

SEQ ID NO: 2711462 - RNA, 14 nt, Human
agacuccugcaggc

SEQ ID NO: 2711463 - RNA, 15 nt, Human
agacuccugcaggca

SEQ ID NO: 2711464 - RNA, 16 nt, Human
agacuccugcaggcag

SEQ ID NO: 2711465 - RNA, 17 nt, Human
agacuccugcaggcagc

SEQ ID NO: 2711466 - RNA, 18 nt, Human
agagacacacugaagaag

SEQ ID NO: 2711467 - RNA, 20 nt, Human
agagacacacugaagaagca

SEQ ID NO: 2711468 - RNA, 13 nt, Human
agagaccaucccu

SEQ ID NO: 2711469 - RNA, 14 nt, Human
agagaccaucccug

SEQ ID NO: 2711470 - RNA, 15 nt, Human
agagaccaucccuga

SEQ ID NO: 2711471 - RNA, 15 nt, Human
agagaaugagagaca

SEQ ID NO: 2711472 - RNA, 17 nt, Human
agagacacacugaagaa

SEQ ID NO: 2711473 - RNA, 12 nt, Human
agacuuuggaaa

SEQ ID NO: 2711474 - RNA, 18 nt, Human
agagaaugaaagggccca

SEQ ID NO: 2711475 - RNA, 14 nt, Human
agacuuuggaaaga

SEQ ID NO: 2711476 - RNA, 15 nt, Human
agacuggcacaguuu

SEQ ID NO: 2711477 - RNA, 14 nt, Human
agacuggcacaguu

SEQ ID NO: 2711478 - RNA, 18 nt, Human
agacuggcacaguuuucu

SEQ ID NO: 2711479 - RNA, 14 nt, Human
agacuucaucccuc

SEQ ID NO: 2711480 - RNA, 17 nt, Human
agacuucaucccucugg

SEQ ID NO: 2711481 - RNA, 14 nt, Human
ucuuaauuaaaaga

SEQ ID NO: 2711482 - RNA, 21 nt, Human
ucuuaauuaaaagaauauuuu

SEQ ID NO: 2711483 - RNA, 18 nt, Human
ucuuaauuaaaagaauau

SEQ ID NO: 2711484 - RNA, 18 nt, Human
ucuuaugggcuggguucu

SEQ ID NO: 2711485 - RNA, 14 nt, Human
ucuuauugcccacg

SEQ ID NO: 2711486 - RNA, 18 nt, Human
ucuuauugcccacgcugg

SEQ ID NO: 2711487 - RNA, 22 nt, Human
ucuuauugcccacgcuggagug

SEQ ID NO: 2711488 - RNA, 15 nt, Human
ucuuaugggcugggu

SEQ ID NO: 2711489 - RNA, 16 nt, Human
ucuuaugggcuggguu

SEQ ID NO: 2711490 - RNA, 14 nt, Human
ucuuaugggcuggg

SEQ ID NO: 2711491 - RNA, 22 nt, Human
ucuuccaggcugggagagccuu

SEQ ID NO: 2711492 - RNA, 15 nt, Human
agacagucccugcca

SEQ ID NO: 2711493 - RNA, 16 nt, Human
agacagucccugccaa

SEQ ID NO: 2711494 - RNA, 17 nt, Human
agacagucccugccaau

SEQ ID NO: 2711495 - RNA, 23 nt, Human
agacaggcaagcaccuccugccu

SEQ ID NO: 2711496 - RNA, 15 nt, Human
agacaggaccaggga

SEQ ID NO: 2711497 - RNA, 21 nt, Human
agacaggguuuugccauguug

SEQ ID NO: 2711498 - RNA, 17 nt, Human
agaauuugauaugugaa

SEQ ID NO: 2711499 - RNA, 19 nt, Human
agaauuugauaugugaaca

SEQ ID NO: 2711500 - RNA, 18 nt, Human
agaauuugauaugugaac

SEQ ID NO: 2711501 - RNA, 20 nt, Human
agaauuugauaugugaacag

SEQ ID NO: 2711502 - RNA, 18 nt, Human
ucuguuuuauaauuuugu

SEQ ID NO: 2711503 - RNA, 17 nt, Human
agaauuucccaaagcag

SEQ ID NO: 2711504 - RNA, 18 nt, Human
agaauuucccaaagcagu

SEQ ID NO: 2711505 - RNA, 21 nt, Human
agaauuucuaggacugaauua

SEQ ID NO: 2711506 - RNA, 13 nt, Human
agaauuucuagga

SEQ ID NO: 2711507 - RNA, 23 nt, Human
agaauuucccaaagcagugcaug

SEQ ID NO: 2711508 - RNA, 18 nt, Human
ucuguuggccagugugac

SEQ ID NO: 2711509 - RNA, 19 nt, Human
ucuguuggccagugugaca

SEQ ID NO: 2711510 - RNA, 20 nt, Human
ucuguuggccagugugacaa

SEQ ID NO: 2711511 - RNA, 15 nt, Human
ucugugaaaggaaag

SEQ ID NO: 2711512 - RNA, 21 nt, Human
ucugugaaaggaaagagggag

SEQ ID NO: 2711513 - RNA, 17 nt, Human
ucuguauagauuagaau

SEQ ID NO: 2711514 - RNA, 20 nt, Human
ucugucauuugagcagggcu

SEQ ID NO: 2711515 - RNA, 23 nt, Human
ucugucauuugagcagggcucag

SEQ ID NO: 2711516 - RNA, 15 nt, Human
ucugucauuugagca

SEQ ID NO: 2711517 - RNA, 16 nt, Human
ucuguauagauuagag

SEQ ID NO: 2711518 - RNA, 11 nt, Human
ucuggggcugu

SEQ ID NO: 2711519 - RNA, 14 nt, Human
ucuggguucacugc

SEQ ID NO: 2711520 - RNA, 16 nt, Human
ucuggguucacugcaa

SEQ ID NO: 2711521 - RNA, 18 nt, Human
ucugguccauagagagca

SEQ ID NO: 2711522 - RNA, 19 nt, Human
agcuauggugucauaggcu

SEQ ID NO: 2711523 - RNA, 21 nt, Human
ugccauguuggccaggcuggu

SEQ ID NO: 2711524 - RNA, 20 nt, Human
ugccauguuggccaggcugg

SEQ ID NO: 2711525 - RNA, 15 nt, Human
agcucagggccuggc

SEQ ID NO: 2711526 - RNA, 16 nt, Human
agcucagggccuggcu

SEQ ID NO: 2711527 - RNA, 17 nt, Human
ugccauguuggccaggc

SEQ ID NO: 2711528 - RNA, 17 nt, Human
agcucagggccuggcuc

SEQ ID NO: 2711529 - RNA, 18 nt, Human
ugccauguuggccaggcu

SEQ ID NO: 2711530 - RNA, 19 nt, Human
ugccauguuggccaggcug

SEQ ID NO: 2711531 - RNA, 12 nt, Human
ugcccaggcccc

SEQ ID NO: 2711532 - RNA, 20 nt, Human
ugcccaggccccugccaccc

SEQ ID NO: 2711533 - RNA, 22 nt, Human
ugcccaggccccugccacccug

SEQ ID NO: 2711534 - RNA, 14 nt, Human
ugcccacaggauca

SEQ ID NO: 2711535 - RNA, 15 nt, Human
ugcccaggcaggucu

SEQ ID NO: 2711536 - RNA, 16 nt, Human
ugcccaggcaggucuu

SEQ ID NO: 2711537 - RNA, 17 nt, Human
ugcccaggcaggucuug

SEQ ID NO: 2711538 - RNA, 20 nt, Human
ugcccaggcaggucuugaac

SEQ ID NO: 2711539 - RNA, 11 nt, Human
ugcccaggccc

SEQ ID NO: 2711540 - RNA, 19 nt, Human
agcuacuaauuuuaaaaug

SEQ ID NO: 2711541 - RNA, 23 nt, Human
agcgugguggacaugcacagcua

SEQ ID NO: 2711542 - RNA, 16 nt, Human
agcgugagccacugca

SEQ ID NO: 2711543 - RNA, 17 nt, Human
agcgugagccacugcac

SEQ ID NO: 2711544 - RNA, 20 nt, Human
agcgugguggacaugcacag

SEQ ID NO: 2711545 - RNA, 13 nt, Human
agcgugagccacu

SEQ ID NO: 2711546 - RNA, 15 nt, Human
agcgugagccacugc

SEQ ID NO: 2711547 - RNA, 16 nt, Human
agcggggacagcuccu

SEQ ID NO: 2711548 - RNA, 17 nt, Human
agcggggacagcuccuu

SEQ ID NO: 2711549 - RNA, 15 nt, Human
agcggggacagcucc

SEQ ID NO: 2711550 - RNA, 20 nt, Human
ugccauauucuguuggccag

SEQ ID NO: 2711551 - RNA, 21 nt, Human
ugccauauucuguuggccagu

SEQ ID NO: 2711552 - RNA, 15 nt, Human
ugccagucaccccgg

SEQ ID NO: 2711553 - RNA, 16 nt, Human
ugccagucaccccggc

SEQ ID NO: 2711554 - RNA, 18 nt, Human
ugccagucaccccggcca

SEQ ID NO: 2711555 - RNA, 20 nt, Human
ugccagucaccccggccacc

SEQ ID NO: 2711556 - RNA, 22 nt, Human
ugccagucaccccggccaccug

SEQ ID NO: 2711557 - RNA, 23 nt, Human
ugccagucaccccggccaccugc

SEQ ID NO: 2711558 - RNA, 16 nt, Human
ugccauauucuguugg

SEQ ID NO: 2711559 - RNA, 17 nt, Human
ugccauauucuguuggc

SEQ ID NO: 2711560 - RNA, 15 nt, Human
ugccauauucuguug

SEQ ID NO: 2711561 - RNA, 23 nt, Human
ugcauuugaaaauuuugauguuu

SEQ ID NO: 2711562 - RNA, 19 nt, Human
ugcauuugaaaauuuugau

SEQ ID NO: 2711563 - RNA, 14 nt, Human
agcgcccaguuggg

SEQ ID NO: 2711564 - RNA, 22 nt, Human
agcgcccaguuggguggaugcc

SEQ ID NO: 2711565 - RNA, 18 nt, Human
agcccuucuuuccacaga

SEQ ID NO: 2711566 - RNA, 19 nt, Human
agcccuucuuuccacagaa

SEQ ID NO: 2711567 - RNA, 15 nt, Human
agccucaaccuccug

SEQ ID NO: 2711568 - RNA, 15 nt, Human
agccuaggugacaga

SEQ ID NO: 2711569 - RNA, 17 nt, Human
agccuaggugacagagu

SEQ ID NO: 2711570 - RNA, 17 nt, Human
agcccuucuuuccacag

SEQ ID NO: 2711571 - RNA, 22 nt, Human
ugcagacucuacagaggccaug

SEQ ID NO: 2711572 - RNA, 15 nt, Human
ugcacuccccugcug

SEQ ID NO: 2711573 - RNA, 19 nt, Human
ugcagacucuacagaggcc

SEQ ID NO: 2711574 - RNA, 20 nt, Human
ugcagacucuacagaggcca

SEQ ID NO: 2711575 - RNA, 18 nt, Human
ugcagacucuacagaggc

SEQ ID NO: 2711576 - RNA, 14 nt, Human
ugcacaagcugcac

SEQ ID NO: 2711577 - RNA, 15 nt, Human
ugcacacaccagagc

SEQ ID NO: 2711578 - RNA, 15 nt, Human
ugcacaagcuccaag

SEQ ID NO: 2711579 - RNA, 16 nt, Human
ugcacaagcuccaagc

SEQ ID NO: 2711580 - RNA, 18 nt, Human
ugcacaagcuccaagcuc

SEQ ID NO: 2711581 - RNA, 20 nt, Human
ugcacaagcuccaagcuccc

SEQ ID NO: 2711582 - RNA, 22 nt, Human
ugcacaagcuccaagcucccag

SEQ ID NO: 2711583 - RNA, 23 nt, Human
ugcacaagcuccaagcucccagg

SEQ ID NO: 2711584 - RNA, 14 nt, Human
ugcaccacugcacu

SEQ ID NO: 2711585 - RNA, 19 nt, Human
ugcacguacacacacauac

SEQ ID NO: 2711586 - RNA, 22 nt, Human
ugcacuauagccuaggugacag

SEQ ID NO: 2711587 - RNA, 12 nt, Human
ugcacuccccug

SEQ ID NO: 2711588 - RNA, 13 nt, Human
ugcacuccccugc

SEQ ID NO: 2711589 - RNA, 15 nt, Human
agccucagcauccug

SEQ ID NO: 2711590 - RNA, 17 nt, Human
agccucaaccuccuggg

SEQ ID NO: 2711591 - RNA, 18 nt, Human
agccucaaccuccugggc

SEQ ID NO: 2711592 - RNA, 13 nt, Human
agccucagcaucc

SEQ ID NO: 2711593 - RNA, 14 nt, Human
agccucagcauccu

SEQ ID NO: 2711594 - RNA, 18 nt, Human
ugcagccucaaccuccug

SEQ ID NO: 2711595 - RNA, 19 nt, Human
ugcagccucaaccuccugg

SEQ ID NO: 2711596 - RNA, 14 nt, Human
ugcagugagccgag

SEQ ID NO: 2711597 - RNA, 16 nt, Human
ugcaugcugucccuua

SEQ ID NO: 2711598 - RNA, 19 nt, Human
agccugcaauuucauaugc

SEQ ID NO: 2711599 - RNA, 14 nt, Human
agccugauuaaaga

SEQ ID NO: 2711600 - RNA, 18 nt, Human
agccugcacggugaaugg

SEQ ID NO: 2711601 - RNA, 21 nt, Human
agccugcaauuucauaugcug

SEQ ID NO: 2711602 - RNA, 16 nt, Human
agccugcacggugaau

SEQ ID NO: 2711603 - RNA, 23 nt, Human
agccugcaguuauuaacacuaac

SEQ ID NO: 2711604 - RNA, 16 nt, Human
agccugccucuucucu

SEQ ID NO: 2711605 - RNA, 19 nt, Human
agccugccucuucucuacu

SEQ ID NO: 2711606 - RNA, 21 nt, Human
ugcauaccacuuuuguucuug

SEQ ID NO: 2711607 - RNA, 22 nt, Human
ugcauaccacuuuuguucuugg

SEQ ID NO: 2711608 - RNA, 13 nt, Human
ugcaugcuguccc

SEQ ID NO: 2711609 - RNA, 14 nt, Human
ugcaugcugucccu

SEQ ID NO: 2711610 - RNA, 15 nt, Human
ugcaugcugucccuu

SEQ ID NO: 2711611 - RNA, 20 nt, Human
ugcaugaaguaauaugcaca

SEQ ID NO: 2711612 - RNA, 22 nt, Human
ugcaugaaguaauaugcacaca

SEQ ID NO: 2711613 - RNA, 21 nt, Human
ugcaugaggcuaguguggugu

SEQ ID NO: 2711614 - RNA, 13 nt, Human
agcuggaaaagua

SEQ ID NO: 2711615 - RNA, 21 nt, Human
agcugccugggaucccucauc

SEQ ID NO: 2711616 - RNA, 13 nt, Human
agcugccugggau

SEQ ID NO: 2711617 - RNA, 19 nt, Human
agcugccugggaucccuca

SEQ ID NO: 2711618 - RNA, 17 nt, Human
agcugccuccccuccuc

SEQ ID NO: 2711619 - RNA, 18 nt, Human
agcugccuccccuccucu

SEQ ID NO: 2711620 - RNA, 19 nt, Human
agcugccuccccuccucug

SEQ ID NO: 2711621 - RNA, 20 nt, Human
agcugccuccccuccucugc

SEQ ID NO: 2711622 - RNA, 22 nt, Human
ugccucugacacacagcucugu

SEQ ID NO: 2711623 - RNA, 21 nt, Human
agcugccuccccuccucugcu

SEQ ID NO: 2711624 - RNA, 22 nt, Human
agcugccuccccuccucugcuu

SEQ ID NO: 2711625 - RNA, 23 nt, Human
agcugccuccccuccucugcuug

SEQ ID NO: 2711626 - RNA, 14 nt, Human
agcugggcagguug

SEQ ID NO: 2711627 - RNA, 23 nt, Human
agcugggaugauuggagggggga

SEQ ID NO: 2711628 - RNA, 17 nt, Human
agcugggacuacaggug

SEQ ID NO: 2711629 - RNA, 19 nt, Human
agcugggacuacaggugug

SEQ ID NO: 2711630 - RNA, 15 nt, Human
ugccuguucagcucc

SEQ ID NO: 2711631 - RNA, 16 nt, Human
ugccuguucagcucca

SEQ ID NO: 2711632 - RNA, 13 nt, Human
ugcgaaaggauga

SEQ ID NO: 2711633 - RNA, 21 nt, Human
ugccuuuuucauuauuuuauu

SEQ ID NO: 2711634 - RNA, 17 nt, Human
ugccuuuuucauuauuu

SEQ ID NO: 2711635 - RNA, 16 nt, Human
ugccuuuuucauuauu

SEQ ID NO: 2711636 - RNA, 15 nt, Human
ugccuuuuucauuau

SEQ ID NO: 2711637 - RNA, 14 nt, Human
ugccuuuuucauua

SEQ ID NO: 2711638 - RNA, 13 nt, Human
ugccuuuuucauu

SEQ ID NO: 2711639 - RNA, 18 nt, Human
ugcggacagccacggcca

SEQ ID NO: 2711640 - RNA, 17 nt, Human
ugcggacagccacggcc

SEQ ID NO: 2711641 - RNA, 19 nt, Human
ugcgaaaggaugaaaguga

SEQ ID NO: 2711642 - RNA, 13 nt, Human
ugccucccaucac

SEQ ID NO: 2711643 - RNA, 14 nt, Human
ugccucccaucacc

SEQ ID NO: 2711644 - RNA, 19 nt, Human
ugccucccaucacccgcua

SEQ ID NO: 2711645 - RNA, 13 nt, Human
ugccucucucagg

SEQ ID NO: 2711646 - RNA, 14 nt, Human
ugccucucucaggc

SEQ ID NO: 2711647 - RNA, 15 nt, Human
ugccucucucaggcc

SEQ ID NO: 2711648 - RNA, 20 nt, Human
ugccucugacacacagcucu

SEQ ID NO: 2711649 - RNA, 21 nt, Human
ugccucugacacacagcucug

SEQ ID NO: 2711650 - RNA, 13 nt, Human
agcugccaccugc

SEQ ID NO: 2711651 - RNA, 18 nt, Human
agcugcacccucaggcag

SEQ ID NO: 2711652 - RNA, 19 nt, Human
agcugcacccucaggcagg

SEQ ID NO: 2711653 - RNA, 20 nt, Human
agcugcacccucaggcaggu

SEQ ID NO: 2711654 - RNA, 22 nt, Human
agcugcacccucaggcaggugg

SEQ ID NO: 2711655 - RNA, 13 nt, Human
agcugcacccuca

SEQ ID NO: 2711656 - RNA, 17 nt, Human
agcugcacccucaggca

SEQ ID NO: 2711657 - RNA, 18 nt, Human
agcucuucuccaggcugu

SEQ ID NO: 2711658 - RNA, 17 nt, Human
agcucuucuccaggcug

SEQ ID NO: 2711659 - RNA, 12 nt, Human
agcucuguccug

SEQ ID NO: 2711660 - RNA, 12 nt, Human
agcucugcuccu

SEQ ID NO: 2711661 - RNA, 22 nt, Human
agcucugcuccucuccccagca

SEQ ID NO: 2711662 - RNA, 20 nt, Human
agcucugguccauagagagc

SEQ ID NO: 2711663 - RNA, 16 nt, Human
agcucucuccucccuu

SEQ ID NO: 2711664 - RNA, 22 nt, Human
ugcccuccaagaccuucuccuu

SEQ ID NO: 2711665 - RNA, 19 nt, Human
ugcccuccaagaccuucuc

SEQ ID NO: 2711666 - RNA, 20 nt, Human
ugcccuccaagaccuucucc

SEQ ID NO: 2711667 - RNA, 16 nt, Human
ugcuaguaauuggaaa

SEQ ID NO: 2711668 - RNA, 14 nt, Human
ugcuaguaauugga

SEQ ID NO: 2711669 - RNA, 19 nt, Human
aggaaagcaaaggagauug

SEQ ID NO: 2711670 - RNA, 16 nt, Human
aggaaagaggcucugg

SEQ ID NO: 2711671 - RNA, 17 nt, Human
aggaaagcaaaggagau

SEQ ID NO: 2711672 - RNA, 13 nt, Human
aggaaagagaacu

SEQ ID NO: 2711673 - RNA, 19 nt, Human
aggaaagagaacuuccaga

SEQ ID NO: 2711674 - RNA, 12 nt, Human
aggaaagaggcu

SEQ ID NO: 2711675 - RNA, 13 nt, Human
aggaaagaggcuc

SEQ ID NO: 2711676 - RNA, 12 nt, Human
agcuuugaaaau

SEQ ID NO: 2711677 - RNA, 16 nt, Human
agcuuugaaaauucag

SEQ ID NO: 2711678 - RNA, 18 nt, Human
agcuuugaaaauucagug

SEQ ID NO: 2711679 - RNA, 19 nt, Human
agcuuugaaaauucagugg

SEQ ID NO: 2711680 - RNA, 21 nt, Human
aggaaaaguuuaauauuaaag

SEQ ID NO: 2711681 - RNA, 24 nt, Human
aggaaaaguuuaauauuaaagcca

SEQ ID NO: 2711682 - RNA, 23 nt, Human
aggaaaaguuuaauauuaaagcc

SEQ ID NO: 2711683 - RNA, 21 nt, Human
aggaaacccagcucuggucca

SEQ ID NO: 2711684 - RNA, 18 nt, Human
aggaaacccagcucuggu

SEQ ID NO: 2711685 - RNA, 20 nt, Human
aggaaacccagcucuggucc

SEQ ID NO: 2711686 - RNA, 15 nt, Human
aggaaacccagcucu

SEQ ID NO: 2711687 - RNA, 16 nt, Human
aggaaacccagcucug

SEQ ID NO: 2711688 - RNA, 17 nt, Human
aggaaacccagcucugg

SEQ ID NO: 2711689 - RNA, 15 nt, Human
agcuuauuaaaacuc

SEQ ID NO: 2711690 - RNA, 20 nt, Human
agcuuauuaaaacucauuuu

SEQ ID NO: 2711691 - RNA, 21 nt, Human
agcuuauugucuagugaaacu

SEQ ID NO: 2711692 - RNA, 18 nt, Human
agcuuguaaauagcucag

SEQ ID NO: 2711693 - RNA, 19 nt, Human
agcuuguaaauagcucagg

SEQ ID NO: 2711694 - RNA, 20 nt, Human
agcuuguaaauagcucaggu

SEQ ID NO: 2711695 - RNA, 21 nt, Human
agcuuguaaauagcucaggug

SEQ ID NO: 2711696 - RNA, 20 nt, Human
ugcggacagccacggccagg

SEQ ID NO: 2711697 - RNA, 21 nt, Human
ugcggacagccacggccaggc

SEQ ID NO: 2711698 - RNA, 12 nt, Human
agcuuaucucag

SEQ ID NO: 2711699 - RNA, 14 nt, Human
agcuuaucucaggg

SEQ ID NO: 2711700 - RNA, 15 nt, Human
agcuuaucucagggg

SEQ ID NO: 2711701 - RNA, 23 nt, Human
aggaauucuguauagauuagaau

SEQ ID NO: 2711702 - RNA, 16 nt, Human
aggaauucuguauaga

SEQ ID NO: 2711703 - RNA, 22 nt, Human
aggaauucuguauagauuagaa

SEQ ID NO: 2711704 - RNA, 17 nt, Human
aggaauucuguauagau

SEQ ID NO: 2711705 - RNA, 23 nt, Human
aggaauccagacccggcugcgug

SEQ ID NO: 2711706 - RNA, 15 nt, Human
aggaagacuuuggaa

SEQ ID NO: 2711707 - RNA, 14 nt, Human
aggaagagaaaaaa

SEQ ID NO: 2711708 - RNA, 17 nt, Human
aggaagcucagggccug

SEQ ID NO: 2711709 - RNA, 18 nt, Human
aggaagcucagggccugg

SEQ ID NO: 2711710 - RNA, 22 nt, Human
aggaagcucagggccuggcuca

SEQ ID NO: 2711711 - RNA, 21 nt, Human
ugcugccauccagguucagcu

SEQ ID NO: 2711712 - RNA, 22 nt, Human
ugcugccauccagguucagcuu

SEQ ID NO: 2711713 - RNA, 12 nt, Human
ugcugccaucca

SEQ ID NO: 2711714 - RNA, 13 nt, Human
ugcugccauccag

SEQ ID NO: 2711715 - RNA, 14 nt, Human
ugcugccauccagg

SEQ ID NO: 2711716 - RNA, 15 nt, Human
ugcugccauccaggu

SEQ ID NO: 2711717 - RNA, 15 nt, Human
aggaauucuguauag

SEQ ID NO: 2711718 - RNA, 11 nt, Human
ugcugccaucc

SEQ ID NO: 2711719 - RNA, 14 nt, Human
aggaaauauuuauu

SEQ ID NO: 2711720 - RNA, 18 nt, Human
aggaaauauuuauuuuaa

SEQ ID NO: 2711721 - RNA, 22 nt, Human
aggaaaggcuccaggagcagcc

SEQ ID NO: 2711722 - RNA, 13 nt, Human
aggaaauauuuau

SEQ ID NO: 2711723 - RNA, 18 nt, Human
aggaaaggcuccaggagc

SEQ ID NO: 2711724 - RNA, 20 nt, Human
aggaaaggcuccaggagcag

SEQ ID NO: 2711725 - RNA, 21 nt, Human
ugcugacuguuuucucuugag

SEQ ID NO: 2711726 - RNA, 24 nt, Human
ugcugacuguuuucucuugagagg

SEQ ID NO: 2711727 - RNA, 16 nt, Human
ugcugacuguuuucuc

SEQ ID NO: 2711728 - RNA, 19 nt, Human
ugcucugaucauccacugu

SEQ ID NO: 2711729 - RNA, 22 nt, Human
ugcucugaucauccacugugcc

SEQ ID NO: 2711730 - RNA, 17 nt, Human
ugcugacuguuuucucu

SEQ ID NO: 2711731 - RNA, 17 nt, Human
ugcucuggacaggcaug

SEQ ID NO: 2711732 - RNA, 18 nt, Human
ugcucugcauguuacaua

SEQ ID NO: 2711733 - RNA, 15 nt, Human
ugcucugcauguuac

SEQ ID NO: 2711734 - RNA, 20 nt, Human
aggcagcucuaaaugucaau

SEQ ID NO: 2711735 - RNA, 22 nt, Human
aggcagccccauucugccugcc

SEQ ID NO: 2711736 - RNA, 19 nt, Human
aggcagccccauucugccu

SEQ ID NO: 2711737 - RNA, 20 nt, Human
aggcagccccauucugccug

SEQ ID NO: 2711738 - RNA, 21 nt, Human
aggcagccccauucugccugc

SEQ ID NO: 2711739 - RNA, 12 nt, Human
aggcaggauggc

SEQ ID NO: 2711740 - RNA, 21 nt, Human
aggcaggucuugaacuccugg

SEQ ID NO: 2711741 - RNA, 22 nt, Human
aggcagggucucacucugucgc

SEQ ID NO: 2711742 - RNA, 14 nt, Human
aggcagguccaggg

SEQ ID NO: 2711743 - RNA, 19 nt, Human
aggcagggucucacucugu

SEQ ID NO: 2711744 - RNA, 18 nt, Human
aggcagggucucacucug

SEQ ID NO: 2711745 - RNA, 20 nt, Human
aggcagggucucacucuguc

SEQ ID NO: 2711746 - RNA, 21 nt, Human
aggcagggucucacucugucg

SEQ ID NO: 2711747 - RNA, 16 nt, Human
uggagaagaacugaaa

SEQ ID NO: 2711748 - RNA, 24 nt, Human
uggacuuuguuaguuucuccaagc

SEQ ID NO: 2711749 - RNA, 22 nt, Human
uggacuuuguuaguuucuccaa

SEQ ID NO: 2711750 - RNA, 11 nt, Human
uggacuuuguu

SEQ ID NO: 2711751 - RNA, 15 nt, Human
aggcaaugcuggcug

SEQ ID NO: 2711752 - RNA, 16 nt, Human
aggcaaugcuggcugu

SEQ ID NO: 2711753 - RNA, 23 nt, Human
uggagccugcacggugaauggcu

SEQ ID NO: 2711754 - RNA, 21 nt, Human
uggagcucgugggacagucac

SEQ ID NO: 2711755 - RNA, 22 nt, Human
aggauugcuacuguccuaccca

SEQ ID NO: 2711756 - RNA, 18 nt, Human
aggaugcuuguacauaau

SEQ ID NO: 2711757 - RNA, 12 nt, Human
aggaucagucug

SEQ ID NO: 2711758 - RNA, 21 nt, Human
aggauccugagccagauuuca

SEQ ID NO: 2711759 - RNA, 16 nt, Human
aggaugcuuguacaua

SEQ ID NO: 2711760 - RNA, 15 nt, Human
aggaugcuuguacau

SEQ ID NO: 2711761 - RNA, 14 nt, Human
uggacaaaauggaa

SEQ ID NO: 2711762 - RNA, 17 nt, Human
uggacaaaauggaauac

SEQ ID NO: 2711763 - RNA, 14 nt, Human
aggcaagcaccucc

SEQ ID NO: 2711764 - RNA, 19 nt, Human
aggcaacugcauuggcuuu

SEQ ID NO: 2711765 - RNA, 21 nt, Human
uggaauuuuccuccuuucucu

SEQ ID NO: 2711766 - RNA, 17 nt, Human
uggaauuuuccuccuuu

SEQ ID NO: 2711767 - RNA, 21 nt, Human
aggaguuugagaccaaccugg

SEQ ID NO: 2711768 - RNA, 15 nt, Human
aggaggccagccuug

SEQ ID NO: 2711769 - RNA, 10 nt, Human
ugcugcccug

SEQ ID NO: 2711770 - RNA, 12 nt, Human
ugcugcccugcc

SEQ ID NO: 2711771 - RNA, 21 nt, Human
uggaacaagaugguucuagca

SEQ ID NO: 2711772 - RNA, 18 nt, Human
uggaaguacuauaauuua

SEQ ID NO: 2711773 - RNA, 20 nt, Human
uggaaguacuauaauuuacc

SEQ ID NO: 2711774 - RNA, 13 nt, Human
uggaagcuccgcu

SEQ ID NO: 2711775 - RNA, 14 nt, Human
uggaacacucugag

SEQ ID NO: 2711776 - RNA, 12 nt, Human
uggaacacucug

SEQ ID NO: 2711777 - RNA, 13 nt, Human
aggcuccaggagc

SEQ ID NO: 2711778 - RNA, 14 nt, Human
aggcuccaggagca

SEQ ID NO: 2711779 - RNA, 16 nt, Human
aggcuccaggagcagc

SEQ ID NO: 2711780 - RNA, 17 nt, Human
aggccuucucugaagga

SEQ ID NO: 2711781 - RNA, 18 nt, Human
aggccuucucugaaggac

SEQ ID NO: 2711782 - RNA, 22 nt, Human
uggcaugggaaugaaugucagu

SEQ ID NO: 2711783 - RNA, 19 nt, Human
uggcccacgcacuucggga

SEQ ID NO: 2711784 - RNA, 13 nt, Human
uggcccacugcau

SEQ ID NO: 2711785 - RNA, 14 nt, Human
uggcccacugcauc

SEQ ID NO: 2711786 - RNA, 18 nt, Human
uggccugagcugggauga

SEQ ID NO: 2711787 - RNA, 20 nt, Human
uggccucugcacuccccugc

SEQ ID NO: 2711788 - RNA, 18 nt, Human
uggccucugcacuccccu

SEQ ID NO: 2711789 - RNA, 19 nt, Human
uggccucugcacuccccug

SEQ ID NO: 2711790 - RNA, 15 nt, Human
aggcccagagggccu

SEQ ID NO: 2711791 - RNA, 16 nt, Human
aggcccagagggccug

SEQ ID NO: 2711792 - RNA, 18 nt, Human
aggccaugggccuccugu

SEQ ID NO: 2711793 - RNA, 23 nt, Human
aggccagagacacaagccuucgg

SEQ ID NO: 2711794 - RNA, 14 nt, Human
uggcagcucagaga

SEQ ID NO: 2711795 - RNA, 15 nt, Human
uggcagcucagagag

SEQ ID NO: 2711796 - RNA, 16 nt, Human
uggcagcucagagagg

SEQ ID NO: 2711797 - RNA, 18 nt, Human
uggcagcucagagagggu

SEQ ID NO: 2711798 - RNA, 13 nt, Human
aggccagagacac

SEQ ID NO: 2711799 - RNA, 18 nt, Human
aggccagagacacaagcc

SEQ ID NO: 2711800 - RNA, 16 nt, Human
uggcaccagcagccug

SEQ ID NO: 2711801 - RNA, 17 nt, Human
uggcaccagcagccugg

SEQ ID NO: 2711802 - RNA, 13 nt, Human
aggccuggccaga

SEQ ID NO: 2711803 - RNA, 12 nt, Human
aggccuggccag

SEQ ID NO: 2711804 - RNA, 14 nt, Human
aggcccggcuccag

SEQ ID NO: 2711805 - RNA, 15 nt, Human
aggcccggcuccagg

SEQ ID NO: 2711806 - RNA, 16 nt, Human
aggcccggcuccaggc

SEQ ID NO: 2711807 - RNA, 13 nt, Human
aggccccugccac

SEQ ID NO: 2711808 - RNA, 15 nt, Human
aggccccugccaccc

SEQ ID NO: 2711809 - RNA, 19 nt, Human
aggcccagagggccugcaa

SEQ ID NO: 2711810 - RNA, 20 nt, Human
aggcccagagggccugcaag

SEQ ID NO: 2711811 - RNA, 17 nt, Human
aggccccugccacccug

SEQ ID NO: 2711812 - RNA, 18 nt, Human
aggccccugccacccugg

SEQ ID NO: 2711813 - RNA, 21 nt, Human
aggccccugccacccugggga

SEQ ID NO: 2711814 - RNA, 19 nt, Human
uggcuauaggugcuacaaa

SEQ ID NO: 2711815 - RNA, 15 nt, Human
uggcuauaggugcua

SEQ ID NO: 2711816 - RNA, 19 nt, Human
uggcuaauguacugcauau

SEQ ID NO: 2711817 - RNA, 17 nt, Human
uggcuaauguacugcau

SEQ ID NO: 2711818 - RNA, 14 nt, Human
uggcuaaauucaug

SEQ ID NO: 2711819 - RNA, 17 nt, Human
aggcuccaggagcagcc

SEQ ID NO: 2711820 - RNA, 18 nt, Human
aggcuccaggagcagcca

SEQ ID NO: 2711821 - RNA, 19 nt, Human
aggcuccaggagcagccac

SEQ ID NO: 2711822 - RNA, 23 nt, Human
aggcuccaggagcagccacauuc

SEQ ID NO: 2711823 - RNA, 23 nt, Human
uggcuauaggugcuacaaaaaca

SEQ ID NO: 2711824 - RNA, 13 nt, Human
uggcucacgccug

SEQ ID NO: 2711825 - RNA, 18 nt, Human
ugggaaacaaaaggauaa

SEQ ID NO: 2711826 - RNA, 21 nt, Human
uggcuuuugugcauuaucuag

SEQ ID NO: 2711827 - RNA, 17 nt, Human
uggcuucacggaagagc

SEQ ID NO: 2711828 - RNA, 20 nt, Human
uggcuucacggaagagccuu

SEQ ID NO: 2711829 - RNA, 16 nt, Human
uggcuuuugugcauua

SEQ ID NO: 2711830 - RNA, 15 nt, Human
uggcuuuugugcauu

SEQ ID NO: 2711831 - RNA, 18 nt, Human
ugggaaagcauuguaaau

SEQ ID NO: 2711832 - RNA, 17 nt, Human
ugggaaagcauuguaaa

SEQ ID NO: 2711833 - RNA, 16 nt, Human
ugggaaagcauuguaa

SEQ ID NO: 2711834 - RNA, 14 nt, Human
ugggaaagcauugu

SEQ ID NO: 2711835 - RNA, 14 nt, Human
uggcuucacggaag

SEQ ID NO: 2711836 - RNA, 23 nt, Human
uggcuguuggcugggggccucag

SEQ ID NO: 2711837 - RNA, 16 nt, Human
uggcuguuggcugggg

SEQ ID NO: 2711838 - RNA, 18 nt, Human
uggcuguuggcugggggc

SEQ ID NO: 2711839 - RNA, 23 nt, Human
uggcugcaaaggguaucaggugc

SEQ ID NO: 2711840 - RNA, 15 nt, Human
agggaaacugccagc

SEQ ID NO: 2711841 - RNA, 14 nt, Human
agggaaacugccag

SEQ ID NO: 2711842 - RNA, 23 nt, Human
agggaaacugccagcaacgcagg

SEQ ID NO: 2711843 - RNA, 21 nt, Human
agggaaacugccagcaacgca

SEQ ID NO: 2711844 - RNA, 19 nt, Human
agggaaacugccagcaacg

SEQ ID NO: 2711845 - RNA, 16 nt, Human
agggaaacugccagca

SEQ ID NO: 2711846 - RNA, 23 nt, Human
aggcuuagucacugagacagccc

SEQ ID NO: 2711847 - RNA, 21 nt, Human
aggcuuagucacugagacagc

SEQ ID NO: 2711848 - RNA, 22 nt, Human
aggcuuagucacugagacagcc

SEQ ID NO: 2711849 - RNA, 20 nt, Human
ugggaacccaaguccaagca

SEQ ID NO: 2711850 - RNA, 19 nt, Human
aggcugggagagccuucca

SEQ ID NO: 2711851 - RNA, 16 nt, Human
aggcugggagagccuu

SEQ ID NO: 2711852 - RNA, 22 nt, Human
aggcugggagagccuuccaggg

SEQ ID NO: 2711853 - RNA, 20 nt, Human
aggcugggagagccuuccag

SEQ ID NO: 2711854 - RNA, 21 nt, Human
aggcugggagagccuuccagg

SEQ ID NO: 2711855 - RNA, 13 nt, Human
aggcugggcuccc

SEQ ID NO: 2711856 - RNA, 14 nt, Human
aggcugggcucccu

SEQ ID NO: 2711857 - RNA, 18 nt, Human
aggcugggcucccuuccc

SEQ ID NO: 2711858 - RNA, 14 nt, Human
aggcugggcuucag

SEQ ID NO: 2711859 - RNA, 21 nt, Human
aggcugggcucccuucccacc

SEQ ID NO: 2711860 - RNA, 23 nt, Human
aggcugggcucccuucccaccuc

SEQ ID NO: 2711861 - RNA, 17 nt, Human
aggcugggggaagaagc

SEQ ID NO: 2711862 - RNA, 22 nt, Human
aggcugggcuucaguggcagcu

SEQ ID NO: 2711863 - RNA, 23 nt, Human
aggcugggcuucaguggcagcug

SEQ ID NO: 2711864 - RNA, 18 nt, Human
aggcugggcuucaguggc

SEQ ID NO: 2711865 - RNA, 19 nt, Human
aggcugggcuucaguggca

SEQ ID NO: 2711866 - RNA, 20 nt, Human
aggcugggcuucaguggcag

SEQ ID NO: 2711867 - RNA, 21 nt, Human
aggcugggcuucaguggcagc

SEQ ID NO: 2711868 - RNA, 22 nt, Human
aggcugggggaagaagcucucu

SEQ ID NO: 2711869 - RNA, 14 nt, Human
aggcuggguucuga

SEQ ID NO: 2711870 - RNA, 17 nt, Human
aggcuggguucugaucc

SEQ ID NO: 2711871 - RNA, 22 nt, Human
agggcuguuauaaucuuucaca

SEQ ID NO: 2711872 - RNA, 21 nt, Human
ugggcucccuucccaccucuc

SEQ ID NO: 2711873 - RNA, 15 nt, Human
ugggcucccuuccca

SEQ ID NO: 2711874 - RNA, 14 nt, Human
ugggcucccuuccc

SEQ ID NO: 2711875 - RNA, 20 nt, Human
agggcuccagacacaugucc

SEQ ID NO: 2711876 - RNA, 14 nt, Human
agggcccagagagg

SEQ ID NO: 2711877 - RNA, 23 nt, Human
agggaguccgaaagggacuugga

SEQ ID NO: 2711878 - RNA, 20 nt, Human
agggagugacagaggcagcc

SEQ ID NO: 2711879 - RNA, 20 nt, Human
agggagugaguugauagcac

SEQ ID NO: 2711880 - RNA, 20 nt, Human
agggaguccgaaagggacuu

SEQ ID NO: 2711881 - RNA, 22 nt, Human
agggagggcuccagacacaugu

SEQ ID NO: 2711882 - RNA, 17 nt, Human
agggagggagggcucca

SEQ ID NO: 2711883 - RNA, 12 nt, Human
agggagggcucc

SEQ ID NO: 2711884 - RNA, 17 nt, Human
agggagggcuccagaca

SEQ ID NO: 2711885 - RNA, 19 nt, Human
agggagggcuccagacaca

SEQ ID NO: 2711886 - RNA, 12 nt, Human
agggcccagaga

SEQ ID NO: 2711887 - RNA, 13 nt, Human
agggcccagagag

SEQ ID NO: 2711888 - RNA, 23 nt, Human
agggacuucugucuucacaacag

SEQ ID NO: 2711889 - RNA, 15 nt, Human
agggacuuggaagcu

SEQ ID NO: 2711890 - RNA, 18 nt, Human
agggacuuggaagcuccg

SEQ ID NO: 2711891 - RNA, 19 nt, Human
agggacuuggaagcuccgc

SEQ ID NO: 2711892 - RNA, 14 nt, Human
agggagagaagaua

SEQ ID NO: 2711893 - RNA, 13 nt, Human
agggagagaagau

SEQ ID NO: 2711894 - RNA, 20 nt, Human
agggacuuggaagcuccgcu

SEQ ID NO: 2711895 - RNA, 18 nt, Human
ugggacuacaggcaccca

SEQ ID NO: 2711896 - RNA, 16 nt, Human
ugggacuacaggugug

SEQ ID NO: 2711897 - RNA, 18 nt, Human
ugggacucaaugcacuga

SEQ ID NO: 2711898 - RNA, 22 nt, Human
ugggaggauugcuugagcucag

SEQ ID NO: 2711899 - RNA, 18 nt, Human
ugggaggauugcuugagc

SEQ ID NO: 2711900 - RNA, 21 nt, Human
ugggaggauugcuugagcuca

SEQ ID NO: 2711901 - RNA, 21 nt, Human
ugggagaaccaaaaagaggcu

SEQ ID NO: 2711902 - RNA, 21 nt, Human
ugggcaacccccagccugcua

SEQ ID NO: 2711903 - RNA, 13 nt, Human
ugggcagaaggaa

SEQ ID NO: 2711904 - RNA, 23 nt, Human
ugggcagaaggaagacuucaucc

SEQ ID NO: 2711905 - RNA, 13 nt, Human
ugggcauucaaau

SEQ ID NO: 2711906 - RNA, 14 nt, Human
ugggcauucaaaug

SEQ ID NO: 2711907 - RNA, 16 nt, Human
ugggcagaaggaagac

SEQ ID NO: 2711908 - RNA, 20 nt, Human
ugggcagaaggaagacuuca

SEQ ID NO: 2711909 - RNA, 16 nt, Human
uguccaagaagcccag

SEQ ID NO: 2711910 - RNA, 17 nt, Human
uguccaagaagcccagg

SEQ ID NO: 2711911 - RNA, 18 nt, Human
uguccaagaagcccagga

SEQ ID NO: 2711912 - RNA, 22 nt, Human
uguccaagaagcccaggaaagg

SEQ ID NO: 2711913 - RNA, 20 nt, Human
ugucccugcacuugcagacu

SEQ ID NO: 2711914 - RNA, 22 nt, Human
ugucccugcacuugcagacucu

SEQ ID NO: 2711915 - RNA, 23 nt, Human
ugucccugcacuugcagacucua

SEQ ID NO: 2711916 - RNA, 14 nt, Human
uguccaagaagccc

SEQ ID NO: 2711917 - RNA, 15 nt, Human
uguccaagaagccca

SEQ ID NO: 2711918 - RNA, 17 nt, Human
ugucagguggggcagcu

SEQ ID NO: 2711919 - RNA, 18 nt, Human
ugucagguggggcagcuu

SEQ ID NO: 2711920 - RNA, 20 nt, Human
ugucagguggggcagcuuga

SEQ ID NO: 2711921 - RNA, 20 nt, Human
ugucauuugagcagggcuca

SEQ ID NO: 2711922 - RNA, 21 nt, Human
ugucauuugagcagggcucag

SEQ ID NO: 2711923 - RNA, 22 nt, Human
ugucauuugagcagggcucagc

SEQ ID NO: 2711924 - RNA, 23 nt, Human
aguauaauuaacauguuaaacca

SEQ ID NO: 2711925 - RNA, 16 nt, Human
aguauaauuaacaugu

SEQ ID NO: 2711926 - RNA, 14 nt, Human
aguauaauuaacau

SEQ ID NO: 2711927 - RNA, 13 nt, Human
aguauaauuaaca

SEQ ID NO: 2711928 - RNA, 14 nt, Human
aguauuaagcauau

SEQ ID NO: 2711929 - RNA, 12 nt, Human
aguauuaagcau

SEQ ID NO: 2711930 - RNA, 15 nt, Human
agucaccaagcccag

SEQ ID NO: 2711931 - RNA, 17 nt, Human
agucaccccggccaccu

SEQ ID NO: 2711932 - RNA, 19 nt, Human
aguauucuuauuuaaugaa

SEQ ID NO: 2711933 - RNA, 14 nt, Human
agucaggaaagaga

SEQ ID NO: 2711934 - RNA, 19 nt, Human
ugucccuuacgugaguccu

SEQ ID NO: 2711935 - RNA, 23 nt, Human
ugucccuuacgugaguccuggca

SEQ ID NO: 2711936 - RNA, 18 nt, Human
agucccaccuuggcugca

SEQ ID NO: 2711937 - RNA, 19 nt, Human
agucccaccuuggcugcag

SEQ ID NO: 2711938 - RNA, 15 nt, Human
agucccaccuuggcu

SEQ ID NO: 2711939 - RNA, 16 nt, Human
agucccaccuuggcug

SEQ ID NO: 2711940 - RNA, 13 nt, Human
agucucaggaaau

SEQ ID NO: 2711941 - RNA, 23 nt, Human
agucucacuguugcccaggcugg

SEQ ID NO: 2711942 - RNA, 20 nt, Human
agucuauuuacggaacucaa

SEQ ID NO: 2711943 - RNA, 15 nt, Human
agucuauuuacggaa

SEQ ID NO: 2711944 - RNA, 14 nt, Human
aguccucccaucuc

SEQ ID NO: 2711945 - RNA, 16 nt, Human
aguccucccaucucac

SEQ ID NO: 2711946 - RNA, 16 nt, Human
aggugcuacaaaaaca

SEQ ID NO: 2711947 - RNA, 12 nt, Human
aggugggaggau

SEQ ID NO: 2711948 - RNA, 14 nt, Human
agguugaagcacca

SEQ ID NO: 2711949 - RNA, 12 nt, Human
aggugugcucug

SEQ ID NO: 2711950 - RNA, 16 nt, Human
aggugucccugcacuu

SEQ ID NO: 2711951 - RNA, 20 nt, Human
aggugucccugcacuugcag

SEQ ID NO: 2711952 - RNA, 21 nt, Human
aggugugagucaccaagccca

SEQ ID NO: 2711953 - RNA, 22 nt, Human
aggugugagucaccaagcccag

SEQ ID NO: 2711954 - RNA, 19 nt, Human
uguaagggaaacugccagc

SEQ ID NO: 2711955 - RNA, 18 nt, Human
uguaauuaaguacuaugu

SEQ ID NO: 2711956 - RNA, 21 nt, Human
uguaauuaaguacuauguauc

SEQ ID NO: 2711957 - RNA, 19 nt, Human
uguaauuaaguacuaugua

SEQ ID NO: 2711958 - RNA, 18 nt, Human
uguaagggaaacugccag

SEQ ID NO: 2711959 - RNA, 13 nt, Human
uguaagggaaacu

SEQ ID NO: 2711960 - RNA, 20 nt, Human
agguuggcaaaaaggcagga

SEQ ID NO: 2711961 - RNA, 16 nt, Human
uguacaugaaaacaca

SEQ ID NO: 2711962 - RNA, 14 nt, Human
uguacaugaaaaca

SEQ ID NO: 2711963 - RNA, 20 nt, Human
uguaauuuuuuuaucgucac

SEQ ID NO: 2711964 - RNA, 20 nt, Human
uguacauaaugcgugcauac

SEQ ID NO: 2711965 - RNA, 19 nt, Human
uguacauaaugcgugcaua

SEQ ID NO: 2711966 - RNA, 17 nt, Human
uguaguguuggagaaga

SEQ ID NO: 2711967 - RNA, 18 nt, Human
uguaguguuggagaagaa

SEQ ID NO: 2711968 - RNA, 18 nt, Human
uguauauccuuucuaaca

SEQ ID NO: 2711969 - RNA, 22 nt, Human
uguauauauuuccuauauuguu

SEQ ID NO: 2711970 - RNA, 18 nt, Human
uguauauauuuccuauau

SEQ ID NO: 2711971 - RNA, 16 nt, Human
uguaguguuggagaag

SEQ ID NO: 2711972 - RNA, 16 nt, Human
uguaggguuauaauaa

SEQ ID NO: 2711973 - RNA, 17 nt, Human
uguaggguuauaauaau

SEQ ID NO: 2711974 - RNA, 20 nt, Human
aguaaaaccacagcaguuga

SEQ ID NO: 2711975 - RNA, 19 nt, Human
aguaaaaccacagcaguug

SEQ ID NO: 2711976 - RNA, 17 nt, Human
aguaaaaccacagcagu

SEQ ID NO: 2711977 - RNA, 16 nt, Human
aguaaaaccacagcag

SEQ ID NO: 2711978 - RNA, 13 nt, Human
aguaauagagcaa

SEQ ID NO: 2711979 - RNA, 21 nt, Human
uguacauggaauaacauguaa

SEQ ID NO: 2711980 - RNA, 12 nt, Human
aguaauuggaaa

SEQ ID NO: 2711981 - RNA, 13 nt, Human
aguaauuggaaag

SEQ ID NO: 2711982 - RNA, 19 nt, Human
aguaauucaagaaaacaac

SEQ ID NO: 2711983 - RNA, 21 nt, Human
aguacacuguuucaaacuuua

SEQ ID NO: 2711984 - RNA, 19 nt, Human
aguacauuuggagacacaa

SEQ ID NO: 2711985 - RNA, 23 nt, Human
aguacacuguuucaaacuuuacu

SEQ ID NO: 2711986 - RNA, 23 nt, Human
aguguuggagaagaacugaaauc

SEQ ID NO: 2711987 - RNA, 16 nt, Human
aguguuguggauuuaa

SEQ ID NO: 2711988 - RNA, 13 nt, Human
aguuacucagaau

SEQ ID NO: 2711989 - RNA, 20 nt, Human
aguguuguggauuuaacaga

SEQ ID NO: 2711990 - RNA, 19 nt, Human
aguguuguggauuuaacag

SEQ ID NO: 2711991 - RNA, 22 nt, Human
uguugcccacagcuguaugauu

SEQ ID NO: 2711992 - RNA, 23 nt, Human
uguugcccaggcuggcgugcagu

SEQ ID NO: 2711993 - RNA, 20 nt, Human
uguugcccaggcuggcgugc

SEQ ID NO: 2711994 - RNA, 20 nt, Human
agugugccugaagucccaga

SEQ ID NO: 2711995 - RNA, 20 nt, Human
agugugacugaucucucgug

SEQ ID NO: 2711996 - RNA, 21 nt, Human
agugugccugaagucccagau

SEQ ID NO: 2711997 - RNA, 20 nt, Human
agugugguguuuccuggcac

SEQ ID NO: 2711998 - RNA, 22 nt, Human
agugugguguuuccuggcacug

SEQ ID NO: 2711999 - RNA, 17 nt, Human
uguuaugacuccagaau

SEQ ID NO: 2712000 - RNA, 13 nt, Human
uguuaugacucca

SEQ ID NO: 2712001 - RNA, 19 nt, Human
uguuccacaaguuaaauaa

SEQ ID NO: 2712002 - RNA, 19 nt, Human
uguuacauaagauaaaugu

SEQ ID NO: 2712003 - RNA, 22 nt, Human
uguguuaaguauguguaaaaug

SEQ ID NO: 2712004 - RNA, 22 nt, Human
uguguuaucacccagaagaaaa

SEQ ID NO: 2712005 - RNA, 16 nt, Human
uguguuagagauuuuu

SEQ ID NO: 2712006 - RNA, 23 nt, Human
uguuaagcagauggaaugcugug

SEQ ID NO: 2712007 - RNA, 22 nt, Human
agugggcccaaugcacuuuguu

SEQ ID NO: 2712008 - RNA, 16 nt, Human
aguggggaaugaagau

SEQ ID NO: 2712009 - RNA, 20 nt, Human
ugugucagguggggcagcuu

SEQ ID NO: 2712010 - RNA, 14 nt, Human
uguguaaaauguga

SEQ ID NO: 2712011 - RNA, 11 nt, Human
uguguguuuau

SEQ ID NO: 2712012 - RNA, 22 nt, Human
ugugucucuugguccugcugca

SEQ ID NO: 2712013 - RNA, 19 nt, Human
ugugucuaaauuugaaugu

SEQ ID NO: 2712014 - RNA, 22 nt, Human
ugugucuaaauuugaauguuaa

SEQ ID NO: 2712015 - RNA, 16 nt, Human
agucuuucacauuuaa

SEQ ID NO: 2712016 - RNA, 21 nt, Human
agucuugucucagauuuuauu

SEQ ID NO: 2712017 - RNA, 20 nt, Human
agucuugucucagauuuuau

SEQ ID NO: 2712018 - RNA, 16 nt, Human
agugaacuugggccac

SEQ ID NO: 2712019 - RNA, 21 nt, Human
agugacugauggcuaauguac

SEQ ID NO: 2712020 - RNA, 18 nt, Human
ugugaugagaggaaauca

SEQ ID NO: 2712021 - RNA, 19 nt, Human
ugugaugagaggaaaucac

SEQ ID NO: 2712022 - RNA, 22 nt, Human
ugugaugaugaaaugaggucag

SEQ ID NO: 2712023 - RNA, 12 nt, Human
agugagcugguu

SEQ ID NO: 2712024 - RNA, 14 nt, Human
agugagcacuaagg

SEQ ID NO: 2712025 - RNA, 22 nt, Human
agugagcacuaaggugugcucu

SEQ ID NO: 2712026 - RNA, 13 nt, Human
agucuuagaugua

SEQ ID NO: 2712027 - RNA, 23 nt, Human
agucuuagauguauauauuuccu

SEQ ID NO: 2712028 - RNA, 16 nt, Human
agucuugucucagauu

SEQ ID NO: 2712029 - RNA, 19 nt, Human
agucuugucucagauuuua

SEQ ID NO: 2712030 - RNA, 17 nt, Human
agucuugucucagauuu

SEQ ID NO: 2712031 - RNA, 16 nt, Human
agucuuagauguauau

SEQ ID NO: 2712032 - RNA, 14 nt, Human
agucuuagauguau

SEQ ID NO: 2712033 - RNA, 16 nt, Human
agucucuugauucaua

SEQ ID NO: 2712034 - RNA, 17 nt, Human
agucucuugauucauaa

SEQ ID NO: 2712035 - RNA, 11 nt, Human
ugugaggaagc

SEQ ID NO: 2712036 - RNA, 16 nt, Human
ugugacugaucucucg

SEQ ID NO: 2712037 - RNA, 14 nt, Human
agugcaaauuguca

SEQ ID NO: 2712038 - RNA, 16 nt, Human
agugaggaugaaaaaa

SEQ ID NO: 2712039 - RNA, 21 nt, Human
agugaguuggguguauugugc

SEQ ID NO: 2712040 - RNA, 13 nt, Human
agugaggcucugc

SEQ ID NO: 2712041 - RNA, 12 nt, Human
agugaggcucug

SEQ ID NO: 2712042 - RNA, 16 nt, Human
agugcaugcugucccu

SEQ ID NO: 2712043 - RNA, 14 nt, Human
agugcaugcugucc

SEQ ID NO: 2712044 - RNA, 14 nt, Human
agugccaaaaacaa

SEQ ID NO: 2712045 - RNA, 17 nt, Human
agugcagugagccgaga

SEQ ID NO: 2712046 - RNA, 14 nt, Human
agugcacuaaugug

SEQ ID NO: 2712047 - RNA, 21 nt, Human
agugcacuaauguguaagaca

SEQ ID NO: 2712048 - RNA, 17 nt, Human
agugcacuaauguguaa

SEQ ID NO: 2712049 - RNA, 19 nt, Human
ugugcugagucugaaggcu

SEQ ID NO: 2712050 - RNA, 18 nt, Human
ugugcugagucugaaggc

SEQ ID NO: 2712051 - RNA, 14 nt, Human
uguggaugauaaaa

SEQ ID NO: 2712052 - RNA, 23 nt, Human
agugagcugguuuuuagcggaga

SEQ ID NO: 2712053 - RNA, 22 nt, Human
uguggauuuaacagaaauguac

SEQ ID NO: 2712054 - RNA, 20 nt, Human
uguggauuuaacagaaaugu

SEQ ID NO: 2712055 - RNA, 19 nt, Human
uguggauuuaacagaaaug

SEQ ID NO: 2712056 - RNA, 20 nt, Human
ugugcugguguaugugugaa

SEQ ID NO: 2712057 - RNA, 19 nt, Human
ugugcugggguuaucugaa

SEQ ID NO: 2712058 - RNA, 18 nt, Human
ugugcugcccugcccacc

SEQ ID NO: 2712059 - RNA, 19 nt, Human
ugugcugcccugcccaccu

SEQ ID NO: 2712060 - RNA, 20 nt, Human
ugugcugcccugcccaccug

SEQ ID NO: 2712061 - RNA, 21 nt, Human
ugugcugcccugcccaccugg

SEQ ID NO: 2712062 - RNA, 17 nt, Human
auacuauggaauuucuc

SEQ ID NO: 2712063 - RNA, 20 nt, Human
auacuaaccagcagaaaugc

SEQ ID NO: 2712064 - RNA, 19 nt, Human
auacuaaccagcagaaaug

SEQ ID NO: 2712065 - RNA, 13 nt, Human
auacuaaccagca

SEQ ID NO: 2712066 - RNA, 15 nt, Human
uuauauuugaaauau

SEQ ID NO: 2712067 - RNA, 19 nt, Human
uuauauuugaaauauugac

SEQ ID NO: 2712068 - RNA, 18 nt, Human
auaccacuuuuguucuug

SEQ ID NO: 2712069 - RNA, 17 nt, Human
auaccacuuuuguucuu

SEQ ID NO: 2712070 - RNA, 14 nt, Human
auaccuuuuuuaga

SEQ ID NO: 2712071 - RNA, 23 nt, Human
auacgcaacauaauuaaauuuug

SEQ ID NO: 2712072 - RNA, 13 nt, Human
auacguacacauu

SEQ ID NO: 2712073 - RNA, 16 nt, Human
auacguacacauuuua

SEQ ID NO: 2712074 - RNA, 19 nt, Human
auacgugggcauucaaaug

SEQ ID NO: 2712075 - RNA, 18 nt, Human
auacgugggcauucaaau

SEQ ID NO: 2712076 - RNA, 15 nt, Human
auacguacacauuuu

SEQ ID NO: 2712077 - RNA, 14 nt, Human
auacguacacauuu

SEQ ID NO: 2712078 - RNA, 18 nt, Human
uuauaaacuuuaccuuuu

SEQ ID NO: 2712079 - RNA, 17 nt, Human
uuauaaacuuuaccuuu

SEQ ID NO: 2712080 - RNA, 16 nt, Human
auacagaggcaacugc

SEQ ID NO: 2712081 - RNA, 17 nt, Human
auacagaggcaacugca

SEQ ID NO: 2712082 - RNA, 18 nt, Human
auacaguuacucagaauu

SEQ ID NO: 2712083 - RNA, 23 nt, Human
auacagauagauauaugcucugc

SEQ ID NO: 2712084 - RNA, 22 nt, Human
auacaggaaaagcugcugacag

SEQ ID NO: 2712085 - RNA, 23 nt, Human
auacaggaaaagcugcugacagu

SEQ ID NO: 2712086 - RNA, 20 nt, Human
auacauaaacaagaccacgu

SEQ ID NO: 2712087 - RNA, 20 nt, Human
auacaguuacucagaauucu

SEQ ID NO: 2712088 - RNA, 14 nt, Human
uuaugaauuacauu

SEQ ID NO: 2712089 - RNA, 16 nt, Human
uuaugaauuacauuug

SEQ ID NO: 2712090 - RNA, 17 nt, Human
uuaugaauuacauuugu

SEQ ID NO: 2712091 - RNA, 21 nt, Human
uuaugaauuacauuuguauaa

SEQ ID NO: 2712092 - RNA, 11 nt, Human
uuaugacucca

SEQ ID NO: 2712093 - RNA, 18 nt, Human
uuaugauccagcagauua

SEQ ID NO: 2712094 - RNA, 13 nt, Human
uuaugauccagca

SEQ ID NO: 2712095 - RNA, 21 nt, Human
uuaucacccagaagaaaauag

SEQ ID NO: 2712096 - RNA, 19 nt, Human
uuaucacccagaagaaaau

SEQ ID NO: 2712097 - RNA, 18 nt, Human
uuaucacccagaagaaaa

SEQ ID NO: 2712098 - RNA, 17 nt, Human
uuaucacccagaagaaa

SEQ ID NO: 2712099 - RNA, 19 nt, Human
uuaugaaacuuuuggaagg

SEQ ID NO: 2712100 - RNA, 14 nt, Human
uuaugaaacuuuug

SEQ ID NO: 2712101 - RNA, 19 nt, Human
uuaugaaacuuguguaaau

SEQ ID NO: 2712102 - RNA, 18 nt, Human
uuaugaaacuuuuggaag

SEQ ID NO: 2712103 - RNA, 17 nt, Human
uuaugaaacuuuuggaa

SEQ ID NO: 2712104 - RNA, 13 nt, Human
uuaugaaacuugu

SEQ ID NO: 2712105 - RNA, 18 nt, Human
uuaugaaacuuguguaaa

SEQ ID NO: 2712106 - RNA, 16 nt, Human
uuaugaaacuugugua

SEQ ID NO: 2712107 - RNA, 19 nt, Human
uuaugauuaaguaaugaua

SEQ ID NO: 2712108 - RNA, 23 nt, Human
uuaugauccagcagauuauucac

SEQ ID NO: 2712109 - RNA, 22 nt, Human
uuaugauccagcagauuauuca

SEQ ID NO: 2712110 - RNA, 13 nt, Human
uuaugggcugggu

SEQ ID NO: 2712111 - RNA, 19 nt, Human
uuauggcuuuugugcauua

SEQ ID NO: 2712112 - RNA, 11 nt, Human
uuauguaaauc

SEQ ID NO: 2712113 - RNA, 13 nt, Human
uuauguaaauccc

SEQ ID NO: 2712114 - RNA, 12 nt, Human
uuauguaaaucc

SEQ ID NO: 2712115 - RNA, 23 nt, Human
uuauguaaaucccauuauucaaa

SEQ ID NO: 2712116 - RNA, 22 nt, Human
uuauguaaaucccauuauucaa

SEQ ID NO: 2712117 - RNA, 21 nt, Human
uuauguaaaucccauuauuca

SEQ ID NO: 2712118 - RNA, 19 nt, Human
uuauguaaaucccauuauu

SEQ ID NO: 2712119 - RNA, 22 nt, Human
uuaugggcuggguucuacccag

SEQ ID NO: 2712120 - RNA, 16 nt, Human
uuaugugcgcugauaa

SEQ ID NO: 2712121 - RNA, 13 nt, Human
auagaaguaaaaa

SEQ ID NO: 2712122 - RNA, 14 nt, Human
auagaaccucuuug

SEQ ID NO: 2712123 - RNA, 20 nt, Human
auagaaccucuuugucuaca

SEQ ID NO: 2712124 - RNA, 23 nt, Human
auagacaauuuauuauggcacau

SEQ ID NO: 2712125 - RNA, 22 nt, Human
auagacaauuuauuauggcaca

SEQ ID NO: 2712126 - RNA, 16 nt, Human
auagacaauuuauuau

SEQ ID NO: 2712127 - RNA, 18 nt, Human
auagauaggucagugcaa

SEQ ID NO: 2712128 - RNA, 21 nt, Human
auagaguguacuuaacuauuc

SEQ ID NO: 2712129 - RNA, 14 nt, Human
auagaguguacuua

SEQ ID NO: 2712130 - RNA, 19 nt, Human
auagaguguacuuaacuau

SEQ ID NO: 2712131 - RNA, 22 nt, Human
auagaggaagccugauuaaaga

SEQ ID NO: 2712132 - RNA, 21 nt, Human
auagaggaagccugauuaaag

SEQ ID NO: 2712133 - RNA, 14 nt, Human
auagagagagacca

SEQ ID NO: 2712134 - RNA, 15 nt, Human
auagagcaaaauuga

SEQ ID NO: 2712135 - RNA, 17 nt, Human
auagagcaaaauugaug

SEQ ID NO: 2712136 - RNA, 21 nt, Human
auagagcaaaauugauguguu

SEQ ID NO: 2712137 - RNA, 22 nt, Human
auagagcaaaauugauguguuu

SEQ ID NO: 2712138 - RNA, 21 nt, Human
auagauuagagaguguugaaa

SEQ ID NO: 2712139 - RNA, 16 nt, Human
auagauuagaauucug

SEQ ID NO: 2712140 - RNA, 15 nt, Human
auagauuagaauucu

SEQ ID NO: 2712141 - RNA, 13 nt, Human
auagauuagaauu

SEQ ID NO: 2712142 - RNA, 22 nt, Human
auagauuagagaguguugaaac

SEQ ID NO: 2712143 - RNA, 11 nt, Human
auacucccauc

SEQ ID NO: 2712144 - RNA, 14 nt, Human
auacucccaucugu

SEQ ID NO: 2712145 - RNA, 16 nt, Human
auacucugcuuagaau

SEQ ID NO: 2712146 - RNA, 18 nt, Human
auacucuuauaucuauau

SEQ ID NO: 2712147 - RNA, 14 nt, Human
auacucuuauaucu

SEQ ID NO: 2712148 - RNA, 15 nt, Human
auacuggauuguacu

SEQ ID NO: 2712149 - RNA, 19 nt, Human
uuauguuaaaacugggaca

SEQ ID NO: 2712150 - RNA, 14 nt, Human
uuauuauauuuaca

SEQ ID NO: 2712151 - RNA, 15 nt, Human
uuauuauauuuacaa

SEQ ID NO: 2712152 - RNA, 11 nt, Human
uuauuaugaaa

SEQ ID NO: 2712153 - RNA, 23 nt, Human
uuauuaugaaacuuguguaaaua

SEQ ID NO: 2712154 - RNA, 12 nt, Human
uuauuaugcaug

SEQ ID NO: 2712155 - RNA, 22 nt, Human
uuauuaugaaacuuguguaaau

SEQ ID NO: 2712156 - RNA, 21 nt, Human
uuauuaugaaacuuguguaaa

SEQ ID NO: 2712157 - RNA, 20 nt, Human
uuauuaugaaacuuguguaa

SEQ ID NO: 2712158 - RNA, 17 nt, Human
uuauuaugaaacuugug

SEQ ID NO: 2712159 - RNA, 19 nt, Human
uuauucaaaguugccuaaa

SEQ ID NO: 2712160 - RNA, 15 nt, Human
uuauucaaaguugcc

SEQ ID NO: 2712161 - RNA, 13 nt, Human
uuauucaaaguug

SEQ ID NO: 2712162 - RNA, 13 nt, Human
uuauuaugcauga

SEQ ID NO: 2712163 - RNA, 14 nt, Human
uuauuauguaaauc

SEQ ID NO: 2712164 - RNA, 13 nt, Human
uuauuauguaaau

SEQ ID NO: 2712165 - RNA, 22 nt, Human
uuauuauguaaaucccauuauu

SEQ ID NO: 2712166 - RNA, 16 nt, Human
uuauuauguaaauccc

SEQ ID NO: 2712167 - RNA, 14 nt, Human
uuauucacugauuu

SEQ ID NO: 2712168 - RNA, 16 nt, Human
aguuuuauaugcuucu

SEQ ID NO: 2712169 - RNA, 12 nt, Human
aguuuuguuugg

SEQ ID NO: 2712170 - RNA, 16 nt, Human
aguuuuguuuggacca

SEQ ID NO: 2712171 - RNA, 14 nt, Human
aguuuuguuuggac

SEQ ID NO: 2712172 - RNA, 18 nt, Human
aguuuuguuuggaccaaa

SEQ ID NO: 2712173 - RNA, 23 nt, Human
uuaacuuuuauaaacuuuaccuu

SEQ ID NO: 2712174 - RNA, 22 nt, Human
uuaacuuuuauaaacuuuaccu

SEQ ID NO: 2712175 - RNA, 15 nt, Human
uuaauuuuggaauuu

SEQ ID NO: 2712176 - RNA, 14 nt, Human
uuaauuuuggaauu

SEQ ID NO: 2712177 - RNA, 16 nt, Human
uuaauuugguuuucac

SEQ ID NO: 2712178 - RNA, 13 nt, Human
uuaauuuuggaau

SEQ ID NO: 2712179 - RNA, 22 nt, Human
uuaagagagucuauuuacggaa

SEQ ID NO: 2712180 - RNA, 15 nt, Human
uuaaucuaaauggaa

SEQ ID NO: 2712181 - RNA, 20 nt, Human
aguuuaaauuguaauaggcg

SEQ ID NO: 2712182 - RNA, 17 nt, Human
aguuuaaauuguaauag

SEQ ID NO: 2712183 - RNA, 15 nt, Human
aguuuacauuguaaa

SEQ ID NO: 2712184 - RNA, 17 nt, Human
aguuuacauuguaaaua

SEQ ID NO: 2712185 - RNA, 13 nt, Human
aguuuacauugua

SEQ ID NO: 2712186 - RNA, 15 nt, Human
aguuuagcuggaaaa

SEQ ID NO: 2712187 - RNA, 19 nt, Human
uuaaaaaagaaacauuugg

SEQ ID NO: 2712188 - RNA, 16 nt, Human
uuaaaaaauggaacau

SEQ ID NO: 2712189 - RNA, 19 nt, Human
uuaaaaaucucaaauuucu

SEQ ID NO: 2712190 - RNA, 17 nt, Human
uuaaaaaucucaaauuu

SEQ ID NO: 2712191 - RNA, 20 nt, Human
uuaaaaaucucaaauuucua

SEQ ID NO: 2712192 - RNA, 14 nt, Human
uuaaaaucauuucu

SEQ ID NO: 2712193 - RNA, 22 nt, Human
uuaaaaucauuucugcaucagc

SEQ ID NO: 2712194 - RNA, 17 nt, Human
uuaaaccaugggauaaa

SEQ ID NO: 2712195 - RNA, 12 nt, Human
uuaacagaaaug

SEQ ID NO: 2712196 - RNA, 14 nt, Human
uuaacagaaaugua

SEQ ID NO: 2712197 - RNA, 13 nt, Human
uuaacagaaaugu

SEQ ID NO: 2712198 - RNA, 23 nt, Human
uuaaaccaugggauaaaugccau

SEQ ID NO: 2712199 - RNA, 22 nt, Human
uuaaaccaugggauaaaugcca

SEQ ID NO: 2712200 - RNA, 21 nt, Human
uuaaaccaugggauaaaugcc

SEQ ID NO: 2712201 - RNA, 22 nt, Human
uuaaaguugaauuuauuggcuu

SEQ ID NO: 2712202 - RNA, 17 nt, Human
uuaaaguugaauuuauu

SEQ ID NO: 2712203 - RNA, 16 nt, Human
uuaaaguugaauuuau

SEQ ID NO: 2712204 - RNA, 13 nt, Human
uuaaaguugaauu

SEQ ID NO: 2712205 - RNA, 15 nt, Human
uuaaauuuugaguuc

SEQ ID NO: 2712206 - RNA, 20 nt, Human
uuaaauuuugaguucuacau

SEQ ID NO: 2712207 - RNA, 22 nt, Human
aguuuguuaguaugaggcauuu

SEQ ID NO: 2712208 - RNA, 19 nt, Human
aguuucugccgcagcccug

SEQ ID NO: 2712209 - RNA, 19 nt, Human
aguuugugcugguguaugu

SEQ ID NO: 2712210 - RNA, 14 nt, Human
aguuucucuuuuca

SEQ ID NO: 2712211 - RNA, 15 nt, Human
aguuucugccgcagc

SEQ ID NO: 2712212 - RNA, 14 nt, Human
uuaggguuaugauu

SEQ ID NO: 2712213 - RNA, 16 nt, Human
uuaggguuaugauuaa

SEQ ID NO: 2712214 - RNA, 14 nt, Human
uuagggagagaaga

SEQ ID NO: 2712215 - RNA, 15 nt, Human
uuagggagagaagau

SEQ ID NO: 2712216 - RNA, 19 nt, Human
uuaggugugggggaagcac

SEQ ID NO: 2712217 - RNA, 13 nt, Human
uuaguagagacag

SEQ ID NO: 2712218 - RNA, 14 nt, Human
uuaguagagacagg

SEQ ID NO: 2712219 - RNA, 13 nt, Human
uuauaaacuuuac

SEQ ID NO: 2712220 - RNA, 14 nt, Human
auaaucuuucacag

SEQ ID NO: 2712221 - RNA, 21 nt, Human
auaauuuauacaggucauauu

SEQ ID NO: 2712222 - RNA, 19 nt, Human
auaauuuauacaggucaua

SEQ ID NO: 2712223 - RNA, 18 nt, Human
auaauuuaccugaagucu

SEQ ID NO: 2712224 - RNA, 17 nt, Human
auaauucagaaggaucu

SEQ ID NO: 2712225 - RNA, 22 nt, Human
auaagccaaaaaaugcuugcuu

SEQ ID NO: 2712226 - RNA, 21 nt, Human
auaagauucauauuuacuucu

SEQ ID NO: 2712227 - RNA, 14 nt, Human
uuacaggugugaac

SEQ ID NO: 2712228 - RNA, 17 nt, Human
uuacaguggggaaugaa

SEQ ID NO: 2712229 - RNA, 19 nt, Human
uuaccagcagagcaccuua

SEQ ID NO: 2712230 - RNA, 18 nt, Human
auaaaugccaucaauaaa

SEQ ID NO: 2712231 - RNA, 17 nt, Human
auaaaugccaucaauaa

SEQ ID NO: 2712232 - RNA, 19 nt, Human
auaaaucugugaacuugaa

SEQ ID NO: 2712233 - RNA, 16 nt, Human
auaaaucugugaacuu

SEQ ID NO: 2712234 - RNA, 15 nt, Human
auaaaucugugaacu

SEQ ID NO: 2712235 - RNA, 14 nt, Human
auaagauucauauu

SEQ ID NO: 2712236 - RNA, 17 nt, Human
uuagaauucuguauaga

SEQ ID NO: 2712237 - RNA, 15 nt, Human
uuagaauucuguaua

SEQ ID NO: 2712238 - RNA, 14 nt, Human
uuagaauucuguau

SEQ ID NO: 2712239 - RNA, 16 nt, Human
uuagaagucacacagu

SEQ ID NO: 2712240 - RNA, 15 nt, Human
uuacugcagcuuugu

SEQ ID NO: 2712241 - RNA, 12 nt, Human
uuacuguacaug

SEQ ID NO: 2712242 - RNA, 23 nt, Human
uuacuguacaugaaaacacauuu

SEQ ID NO: 2712243 - RNA, 22 nt, Human
uuacuguacaugaaaacacauu

SEQ ID NO: 2712244 - RNA, 14 nt, Human
uuacuguacaugaa

SEQ ID NO: 2712245 - RNA, 13 nt, Human
uuacuguacauga

SEQ ID NO: 2712246 - RNA, 15 nt, Human
augaauuaaguuuuu

SEQ ID NO: 2712247 - RNA, 15 nt, Human
augaauuacauuugu

SEQ ID NO: 2712248 - RNA, 16 nt, Human
augaauuacauuugua

SEQ ID NO: 2712249 - RNA, 18 nt, Human
uuggggaccagagcugcc

SEQ ID NO: 2712250 - RNA, 19 nt, Human
augaaagggcccagagagg

SEQ ID NO: 2712251 - RNA, 19 nt, Human
augaaauuauauaaguauu

SEQ ID NO: 2712252 - RNA, 21 nt, Human
augaaauuauauaaguauucu

SEQ ID NO: 2712253 - RNA, 15 nt, Human
augaaagggcccaga

SEQ ID NO: 2712254 - RNA, 18 nt, Human
augaaagggcccagagag

SEQ ID NO: 2712255 - RNA, 17 nt, Human
aucuuugcagacaggca

SEQ ID NO: 2712256 - RNA, 22 nt, Human
aucuuuucauuuaggugaggaa

SEQ ID NO: 2712257 - RNA, 23 nt, Human
uuggcuauuagagaucaaccccu

SEQ ID NO: 2712258 - RNA, 18 nt, Human
uuggccccugcccggcug

SEQ ID NO: 2712259 - RNA, 16 nt, Human
uuggagggugucccaa

SEQ ID NO: 2712260 - RNA, 20 nt, Human
uuggagacacaacuauuuuu

SEQ ID NO: 2712261 - RNA, 14 nt, Human
aucuuauaauuuaa

SEQ ID NO: 2712262 - RNA, 20 nt, Human
aucuuggucagauuugaacu

SEQ ID NO: 2712263 - RNA, 13 nt, Human
aucuugcucugcu

SEQ ID NO: 2712264 - RNA, 18 nt, Human
aucuuguagcuuuaucaa

SEQ ID NO: 2712265 - RNA, 18 nt, Human
aucugugaaaggaaagag

SEQ ID NO: 2712266 - RNA, 19 nt, Human
aucuuguagcuuuaucaaa

SEQ ID NO: 2712267 - RNA, 20 nt, Human
aucuuguagcuuuaucaaag

SEQ ID NO: 2712268 - RNA, 17 nt, Human
aucugugaaaggaaaga

SEQ ID NO: 2712269 - RNA, 10 nt, Human
aucuggugac

SEQ ID NO: 2712270 - RNA, 16 nt, Human
aucuggugacuuuccu

SEQ ID NO: 2712271 - RNA, 17 nt, Human
aucuggugacuuuccuc

SEQ ID NO: 2712272 - RNA, 23 nt, Human
aucugccuaaggacuucuuuaau

SEQ ID NO: 2712273 - RNA, 22 nt, Human
aucugccuaaggacuucuuuaa

SEQ ID NO: 2712274 - RNA, 21 nt, Human
aucugccuaaggacuucuuua

SEQ ID NO: 2712275 - RNA, 11 nt, Human
aucugccuaag

SEQ ID NO: 2712276 - RNA, 18 nt, Human
aucuaauauguaacaagc

SEQ ID NO: 2712277 - RNA, 20 nt, Human
uugaguugauucagcucugc

SEQ ID NO: 2712278 - RNA, 20 nt, Human
uugagugaagcugggagaac

SEQ ID NO: 2712279 - RNA, 15 nt, Human
uugagaucagccugg

SEQ ID NO: 2712280 - RNA, 16 nt, Human
uugagaucagccuggg

SEQ ID NO: 2712281 - RNA, 12 nt, Human
uugagacagagu

SEQ ID NO: 2712282 - RNA, 20 nt, Human
uugacagaauauguuucaaa

SEQ ID NO: 2712283 - RNA, 17 nt, Human
uugaagggaaauuucag

SEQ ID NO: 2712284 - RNA, 17 nt, Human
uugacagaauauguuuc

SEQ ID NO: 2712285 - RNA, 16 nt, Human
auccucuguacagagc

SEQ ID NO: 2712286 - RNA, 17 nt, Human
auccucuguacagagcc

SEQ ID NO: 2712287 - RNA, 18 nt, Human
aucuaaauggaaccacuc

SEQ ID NO: 2712288 - RNA, 17 nt, Human
aucuaaauggaaccacu

SEQ ID NO: 2712289 - RNA, 13 nt, Human
aucuaaauggaac

SEQ ID NO: 2712290 - RNA, 14 nt, Human
aucucauuuccaag

SEQ ID NO: 2712291 - RNA, 14 nt, Human
aucuccaaaauaaa

SEQ ID NO: 2712292 - RNA, 13 nt, Human
aucuccaaaauaa

SEQ ID NO: 2712293 - RNA, 21 nt, Human
aucuccaaaauaaaacuuuuu

SEQ ID NO: 2712294 - RNA, 20 nt, Human
aucuccaaaauaaaacuuuu

SEQ ID NO: 2712295 - RNA, 17 nt, Human
aucuccaaaauaaaacu

SEQ ID NO: 2712296 - RNA, 16 nt, Human
aucucagggccugguc

SEQ ID NO: 2712297 - RNA, 14 nt, Human
aucucagggccugg

SEQ ID NO: 2712298 - RNA, 18 nt, Human
aucucuugagccugggag

SEQ ID NO: 2712299 - RNA, 14 nt, Human
aucugaaaauguau

SEQ ID NO: 2712300 - RNA, 15 nt, Human
aucucuugagccugg

SEQ ID NO: 2712301 - RNA, 22 nt, Human
aucugaaaauguauguguaagu

SEQ ID NO: 2712302 - RNA, 20 nt, Human
aucugaaaauguauguguaa

SEQ ID NO: 2712303 - RNA, 19 nt, Human
aucugaaaauguaugugua

SEQ ID NO: 2712304 - RNA, 16 nt, Human
aucugaaaauguaugu

SEQ ID NO: 2712305 - RNA, 15 nt, Human
aucucccccagcccc

SEQ ID NO: 2712306 - RNA, 14 nt, Human
aucucccccagccc

SEQ ID NO: 2712307 - RNA, 16 nt, Human
aucucccccagcccca

SEQ ID NO: 2712308 - RNA, 17 nt, Human
aucucccccagccccau

SEQ ID NO: 2712309 - RNA, 22 nt, Human
uugcaagccagauuuuccugaa

SEQ ID NO: 2712310 - RNA, 14 nt, Human
uugauuaaauucuu

SEQ ID NO: 2712311 - RNA, 12 nt, Human
aucugaaaaugu

SEQ ID NO: 2712312 - RNA, 23 nt, Human
aucugaaaauguauguguaagua

SEQ ID NO: 2712313 - RNA, 13 nt, Human
uugauuaaauucu

SEQ ID NO: 2712314 - RNA, 23 nt, Human
uugauguuuuaaggaugcuugua

SEQ ID NO: 2712315 - RNA, 13 nt, Human
uugcaucaauuuu

SEQ ID NO: 2712316 - RNA, 14 nt, Human
uugcaccacugcac

SEQ ID NO: 2712317 - RNA, 15 nt, Human
uugcaccacugcacu

SEQ ID NO: 2712318 - RNA, 16 nt, Human
uugcaccacugcacuc

SEQ ID NO: 2712319 - RNA, 18 nt, Human
uugcaccacugcacucca

SEQ ID NO: 2712320 - RNA, 16 nt, Human
uugcaauggcagccuu

SEQ ID NO: 2712321 - RNA, 17 nt, Human
uugcaauggcagccuug

SEQ ID NO: 2712322 - RNA, 19 nt, Human
uugcaauggcagccuuggc

SEQ ID NO: 2712323 - RNA, 17 nt, Human
uugaaauuguaauuaua

SEQ ID NO: 2712324 - RNA, 15 nt, Human
uugaaauuguaauua

SEQ ID NO: 2712325 - RNA, 17 nt, Human
uugaaauuguauuacaa

SEQ ID NO: 2712326 - RNA, 14 nt, Human
uugaaauuguaauu

SEQ ID NO: 2712327 - RNA, 13 nt, Human
uugaaauuguaau

SEQ ID NO: 2712328 - RNA, 16 nt, Human
auccuccucagaucuu

SEQ ID NO: 2712329 - RNA, 16 nt, Human
auccuaggcauuugcu

SEQ ID NO: 2712330 - RNA, 12 nt, Human
auccuaagcuau

SEQ ID NO: 2712331 - RNA, 20 nt, Human
uucuucugcuucagccuccc

SEQ ID NO: 2712332 - RNA, 13 nt, Human
aucccucauccuc

SEQ ID NO: 2712333 - RNA, 21 nt, Human
aucccucauccucauacccac

SEQ ID NO: 2712334 - RNA, 23 nt, Human
aucccucauccucauacccaccc

SEQ ID NO: 2712335 - RNA, 24 nt, Human
aucccauaugccugggcagaagga

SEQ ID NO: 2712336 - RNA, 14 nt, Human
aucccucauccuca

SEQ ID NO: 2712337 - RNA, 14 nt, Human
uucuucucccucag

SEQ ID NO: 2712338 - RNA, 13 nt, Human
uucuucugcuuca

SEQ ID NO: 2712339 - RNA, 15 nt, Human
uucuucugcuucagc

SEQ ID NO: 2712340 - RNA, 13 nt, Human
uucuucucccuca

SEQ ID NO: 2712341 - RNA, 11 nt, Human
uucuucucccu

SEQ ID NO: 2712342 - RNA, 12 nt, Human
uucucuaggaaa

SEQ ID NO: 2712343 - RNA, 17 nt, Human
uucucuaguuugauuaa

SEQ ID NO: 2712344 - RNA, 15 nt, Human
uucucuaguuugauu

SEQ ID NO: 2712345 - RNA, 20 nt, Human
uucucuaguuugauuaaauu

SEQ ID NO: 2712346 - RNA, 21 nt, Human
uucuccuuguguuacuaaguu

SEQ ID NO: 2712347 - RNA, 16 nt, Human
uucuggcucuuccagg

SEQ ID NO: 2712348 - RNA, 17 nt, Human
uucuggcucuuccaggc

SEQ ID NO: 2712349 - RNA, 15 nt, Human
uucuggcucuuccag

SEQ ID NO: 2712350 - RNA, 21 nt, Human
uucugccugcccaggccccug

SEQ ID NO: 2712351 - RNA, 17 nt, Human
uucugccugcccaggcc

SEQ ID NO: 2712352 - RNA, 18 nt, Human
uucugccugcccaggccc

SEQ ID NO: 2712353 - RNA, 15 nt, Human
uucugccauauucug

SEQ ID NO: 2712354 - RNA, 23 nt, Human
uucugaacuuggcgcugccccug

SEQ ID NO: 2712355 - RNA, 19 nt, Human
uucugaacuuggcgcugcc

SEQ ID NO: 2712356 - RNA, 22 nt, Human
uucugaacuuggcgcugccccu

SEQ ID NO: 2712357 - RNA, 21 nt, Human
auccaguaucuugaagacuuu

SEQ ID NO: 2712358 - RNA, 21 nt, Human
auccauuuggaaaucuuuaaa

SEQ ID NO: 2712359 - RNA, 20 nt, Human
auccauuuggaaaucuuuaa

SEQ ID NO: 2712360 - RNA, 18 nt, Human
aucccauaugccugggca

SEQ ID NO: 2712361 - RNA, 12 nt, Human
aucccagcccca

SEQ ID NO: 2712362 - RNA, 19 nt, Human
aucccaaacccuucagugc

SEQ ID NO: 2712363 - RNA, 20 nt, Human
aucccaaacccuucagugcc

SEQ ID NO: 2712364 - RNA, 18 nt, Human
auccaagcuggucccacu

SEQ ID NO: 2712365 - RNA, 21 nt, Human
auccaagcuggucccacucag

SEQ ID NO: 2712366 - RNA, 13 nt, Human
auccacccaccuc

SEQ ID NO: 2712367 - RNA, 15 nt, Human
auccacccaccucag

SEQ ID NO: 2712368 - RNA, 16 nt, Human
auccaguaucuugaag

SEQ ID NO: 2712369 - RNA, 19 nt, Human
uuccguagguuauuuucag

SEQ ID NO: 2712370 - RNA, 16 nt, Human
uuccguuaaaauacca

SEQ ID NO: 2712371 - RNA, 14 nt, Human
uuccguuaaaauac

SEQ ID NO: 2712372 - RNA, 20 nt, Human
uucccucaccuuucccaucu

SEQ ID NO: 2712373 - RNA, 15 nt, Human
uucccuauuagagaa

SEQ ID NO: 2712374 - RNA, 17 nt, Human
uuccuaauccucuagga

SEQ ID NO: 2712375 - RNA, 13 nt, Human
uuccucuuuccau

SEQ ID NO: 2712376 - RNA, 22 nt, Human
uuccucuuuccaucuacccucc

SEQ ID NO: 2712377 - RNA, 17 nt, Human
uuccucuuuccaucuac

SEQ ID NO: 2712378 - RNA, 14 nt, Human
uuccugaaccgaug

SEQ ID NO: 2712379 - RNA, 14 nt, Human
uuccugaacaggau

SEQ ID NO: 2712380 - RNA, 18 nt, Human
uuccugaagaauugaaaa

SEQ ID NO: 2712381 - RNA, 15 nt, Human
uuccugaacaggaua

SEQ ID NO: 2712382 - RNA, 21 nt, Human
aucaagaugugacauguuuua

SEQ ID NO: 2712383 - RNA, 12 nt, Human
auauuuuucaca

SEQ ID NO: 2712384 - RNA, 13 nt, Human
auauuuuucacau

SEQ ID NO: 2712385 - RNA, 14 nt, Human
auauuuuucacaua

SEQ ID NO: 2712386 - RNA, 15 nt, Human
auauuuuucacauau

SEQ ID NO: 2712387 - RNA, 17 nt, Human
auauuuuucacauaucu

SEQ ID NO: 2712388 - RNA, 11 nt, Human
uuccugugucu

SEQ ID NO: 2712389 - RNA, 14 nt, Human
aucaaugaguaaca

SEQ ID NO: 2712390 - RNA, 22 nt, Human
aucaccugucuugccuuuuuca

SEQ ID NO: 2712391 - RNA, 23 nt, Human
aucaccugucuugccuuuuucau

SEQ ID NO: 2712392 - RNA, 18 nt, Human
aucacggcucacugcagc

SEQ ID NO: 2712393 - RNA, 19 nt, Human
aucacggcucacugcagcc

SEQ ID NO: 2712394 - RNA, 13 nt, Human
aucacgccacugc

SEQ ID NO: 2712395 - RNA, 15 nt, Human
aucacggcucacugc

SEQ ID NO: 2712396 - RNA, 22 nt, Human
aucacuugucaauaaaauccau

SEQ ID NO: 2712397 - RNA, 11 nt, Human
aucagaauucu

SEQ ID NO: 2712398 - RNA, 16 nt, Human
uucuaggacugaauua

SEQ ID NO: 2712399 - RNA, 20 nt, Human
uucucacagcuccaagaauu

SEQ ID NO: 2712400 - RNA, 14 nt, Human
uucuaggacugaau

SEQ ID NO: 2712401 - RNA, 13 nt, Human
uucuaggacugaa

SEQ ID NO: 2712402 - RNA, 17 nt, Human
aucaggguuaguauugu

SEQ ID NO: 2712403 - RNA, 14 nt, Human
aucaggccaggccc

SEQ ID NO: 2712404 - RNA, 12 nt, Human
aucagaauucuc

SEQ ID NO: 2712405 - RNA, 13 nt, Human
aucagcacgauuu

SEQ ID NO: 2712406 - RNA, 15 nt, Human
aucaggccaggcccu

SEQ ID NO: 2712407 - RNA, 16 nt, Human
aucaggccaggcccuc

SEQ ID NO: 2712408 - RNA, 18 nt, Human
aucaggccaggcccucug

SEQ ID NO: 2712409 - RNA, 14 nt, Human
uucuagcauggcau

SEQ ID NO: 2712410 - RNA, 15 nt, Human
uucuagcauggcaua

SEQ ID NO: 2712411 - RNA, 18 nt, Human
uucuagcauggcauauuu

SEQ ID NO: 2712412 - RNA, 20 nt, Human
uucuagcauggcauauuuuu

SEQ ID NO: 2712413 - RNA, 21 nt, Human
uucuagcauggcauauuuuuc

SEQ ID NO: 2712414 - RNA, 17 nt, Human
uucuagcuaauguaaua

SEQ ID NO: 2712415 - RNA, 16 nt, Human
uucuagcauggcugcc

SEQ ID NO: 2712416 - RNA, 22 nt, Human
uucuagcauggcauauuuuuca

SEQ ID NO: 2712417 - RNA, 16 nt, Human
uucuaaguaaaaccac

SEQ ID NO: 2712418 - RNA, 15 nt, Human
uucuaaguaaaacca

SEQ ID NO: 2712419 - RNA, 14 nt, Human
uucuaaauuuuaua

SEQ ID NO: 2712420 - RNA, 19 nt, Human
uucuaaaggcuaccuuugu

SEQ ID NO: 2712421 - RNA, 21 nt, Human
uucuaaaggcuaccuuuguau

SEQ ID NO: 2712422 - RNA, 20 nt, Human
uucuaaaggcuaccuuugua

SEQ ID NO: 2712423 - RNA, 21 nt, Human
uucuaaaucuccaaaauaaaa

SEQ ID NO: 2712424 - RNA, 15 nt, Human
uucgcuccugugucu

SEQ ID NO: 2712425 - RNA, 19 nt, Human
uucgcuccugugucuugca

SEQ ID NO: 2712426 - RNA, 19 nt, Human
uuuguaguguuggagaaga

SEQ ID NO: 2712427 - RNA, 21 nt, Human
uuuguaguguuggagaagaac

SEQ ID NO: 2712428 - RNA, 17 nt, Human
uuugugaagcaaaauuu

SEQ ID NO: 2712429 - RNA, 19 nt, Human
uuugugcugguguaugugu

SEQ ID NO: 2712430 - RNA, 23 nt, Human
augucucuuuaaugucacaggca

SEQ ID NO: 2712431 - RNA, 16 nt, Human
augugaugagaggaaa

SEQ ID NO: 2712432 - RNA, 15 nt, Human
augugaugagaggaa

SEQ ID NO: 2712433 - RNA, 17 nt, Human
augugaugagaggaaau

SEQ ID NO: 2712434 - RNA, 19 nt, Human
augugaugagaggaaauca

SEQ ID NO: 2712435 - RNA, 23 nt, Human
augugcacaugcacgugugugca

SEQ ID NO: 2712436 - RNA, 12 nt, Human
augucaguguga

SEQ ID NO: 2712437 - RNA, 13 nt, Human
augucagugugac

SEQ ID NO: 2712438 - RNA, 22 nt, Human
auguauuacaguggggaaugaa

SEQ ID NO: 2712439 - RNA, 16 nt, Human
auguauguguaaguau

SEQ ID NO: 2712440 - RNA, 15 nt, Human
auguauguguaagua

SEQ ID NO: 2712441 - RNA, 20 nt, Human
uuuggcauaacauaaaucug

SEQ ID NO: 2712442 - RNA, 21 nt, Human
uuuggcauaacauaaaucugu

SEQ ID NO: 2712443 - RNA, 16 nt, Human
auguacuucaugcugu

SEQ ID NO: 2712444 - RNA, 22 nt, Human
uuugacagaauauguuucaaac

SEQ ID NO: 2712445 - RNA, 12 nt, Human
uuugaccucugc

SEQ ID NO: 2712446 - RNA, 14 nt, Human
uuugcaagccagau

SEQ ID NO: 2712447 - RNA, 15 nt, Human
uuugccguuauuaaa

SEQ ID NO: 2712448 - RNA, 22 nt, Human
uuugauucagacagcugccugg

SEQ ID NO: 2712449 - RNA, 13 nt, Human
uuugccucugccu

SEQ ID NO: 2712450 - RNA, 13 nt, Human
uuugauuaaauuc

SEQ ID NO: 2712451 - RNA, 22 nt, Human
uuugauguucuuucacccuuuu

SEQ ID NO: 2712452 - RNA, 23 nt, Human
uuugauuaaauucuugcaaagua

SEQ ID NO: 2712453 - RNA, 21 nt, Human
uuugauucagacagcugccug

SEQ ID NO: 2712454 - RNA, 21 nt, Human
uuugauuaaauucuugcaaag

SEQ ID NO: 2712455 - RNA, 18 nt, Human
uuugauuaaauucuugca

SEQ ID NO: 2712456 - RNA, 20 nt, Human
uuugacgccaucccagcccc

SEQ ID NO: 2712457 - RNA, 13 nt, Human
uuugacgccaucc

SEQ ID NO: 2712458 - RNA, 14 nt, Human
uuugacgccauccc

SEQ ID NO: 2712459 - RNA, 16 nt, Human
uuugacgccaucccag

SEQ ID NO: 2712460 - RNA, 19 nt, Human
uuugacgccaucccagccc

SEQ ID NO: 2712461 - RNA, 21 nt, Human
augguucccuugaugaagaag

SEQ ID NO: 2712462 - RNA, 16 nt, Human
augguuuucaaaauaa

SEQ ID NO: 2712463 - RNA, 14 nt, Human
augguuuucuugug

SEQ ID NO: 2712464 - RNA, 15 nt, Human
augguuuucaaaaua

SEQ ID NO: 2712465 - RNA, 14 nt, Human
augguuuucaaaau

SEQ ID NO: 2712466 - RNA, 23 nt, Human
auguaaaucccauuauucaaagu

SEQ ID NO: 2712467 - RNA, 22 nt, Human
auguaaaucccauuauucaaag

SEQ ID NO: 2712468 - RNA, 20 nt, Human
auguaaaucccauuauucaa

SEQ ID NO: 2712469 - RNA, 14 nt, Human
auguaaaucccauu

SEQ ID NO: 2712470 - RNA, 12 nt, Human
auggugcaauga

SEQ ID NO: 2712471 - RNA, 13 nt, Human
auggugcaaugac

SEQ ID NO: 2712472 - RNA, 15 nt, Human
auggugcaaugaccu

SEQ ID NO: 2712473 - RNA, 15 nt, Human
augggugcuuggagg

SEQ ID NO: 2712474 - RNA, 20 nt, Human
auggugagggauacccaucc

SEQ ID NO: 2712475 - RNA, 19 nt, Human
auggugcaaugaccuuuca

SEQ ID NO: 2712476 - RNA, 16 nt, Human
auggugcaaugaccuu

SEQ ID NO: 2712477 - RNA, 17 nt, Human
auggugcaaugaccuuu

SEQ ID NO: 2712478 - RNA, 12 nt, Human
augguggcuggg

SEQ ID NO: 2712479 - RNA, 13 nt, Human
augguggcugggu

SEQ ID NO: 2712480 - RNA, 15 nt, Human
augguggcuggguug

SEQ ID NO: 2712481 - RNA, 17 nt, Human
augguggcuggguugga

SEQ ID NO: 2712482 - RNA, 17 nt, Human
uuucucccagucauuua

SEQ ID NO: 2712483 - RNA, 18 nt, Human
uuucucccagucauuuaa

SEQ ID NO: 2712484 - RNA, 20 nt, Human
augggauaaaugccaucaau

SEQ ID NO: 2712485 - RNA, 16 nt, Human
augggauaaaugccau

SEQ ID NO: 2712486 - RNA, 15 nt, Human
augggauaaaugcca

SEQ ID NO: 2712487 - RNA, 15 nt, Human
augggauccuggagu

SEQ ID NO: 2712488 - RNA, 19 nt, Human
uuucugcagccacuauugu

SEQ ID NO: 2712489 - RNA, 19 nt, Human
uuucuggcuaugcauuuga

SEQ ID NO: 2712490 - RNA, 18 nt, Human
uuucuggcuaugcauuug

SEQ ID NO: 2712491 - RNA, 16 nt, Human
uuucuggcuaugcauu

SEQ ID NO: 2712492 - RNA, 15 nt, Human
uuucuggcuaugcau

SEQ ID NO: 2712493 - RNA, 21 nt, Human
uuucugcagccacuauuguua

SEQ ID NO: 2712494 - RNA, 19 nt, Human
uuucuguacuuuuuggcau

SEQ ID NO: 2712495 - RNA, 20 nt, Human
uuucuguacuuuuuggcaua

SEQ ID NO: 2712496 - RNA, 15 nt, Human
uuugaaauauugacu

SEQ ID NO: 2712497 - RNA, 20 nt, Human
augggcuggguucuacccag

SEQ ID NO: 2712498 - RNA, 18 nt, Human
augggccuccugugugug

SEQ ID NO: 2712499 - RNA, 15 nt, Human
augggggugcauuug

SEQ ID NO: 2712500 - RNA, 14 nt, Human
augggggugcauuu

SEQ ID NO: 2712501 - RNA, 24 nt, Human
auggggcugcaccggcuggccugg

SEQ ID NO: 2712502 - RNA, 12 nt, Human
auggggcugcac

SEQ ID NO: 2712503 - RNA, 18 nt, Human
uuuaaauauaugcuaagu

SEQ ID NO: 2712504 - RNA, 21 nt, Human
uuuaaauaaauaaauagcuag

SEQ ID NO: 2712505 - RNA, 19 nt, Human
uuuaauuuuuuugagacag

SEQ ID NO: 2712506 - RNA, 18 nt, Human
augcagccucacaguccu

SEQ ID NO: 2712507 - RNA, 13 nt, Human
augcaguucugaa

SEQ ID NO: 2712508 - RNA, 13 nt, Human
augcagugcuucc

SEQ ID NO: 2712509 - RNA, 23 nt, Human
augcagugguaugaucacggcuc

SEQ ID NO: 2712510 - RNA, 21 nt, Human
augccauuuaaagcuuauuaa

SEQ ID NO: 2712511 - RNA, 17 nt, Human
augccauuuaaagcuua

SEQ ID NO: 2712512 - RNA, 11 nt, Human
augcccagccc

SEQ ID NO: 2712513 - RNA, 14 nt, Human
augcccagccccuu

SEQ ID NO: 2712514 - RNA, 12 nt, Human
augcccagcccc

SEQ ID NO: 2712515 - RNA, 13 nt, Human
augcccagccccu

SEQ ID NO: 2712516 - RNA, 18 nt, Human
augauuaaguaaugauaa

SEQ ID NO: 2712517 - RNA, 14 nt, Human
augauuaaguaaug

SEQ ID NO: 2712518 - RNA, 22 nt, Human
augauccagcagauuauucacu

SEQ ID NO: 2712519 - RNA, 15 nt, Human
augaucuaggaagac

SEQ ID NO: 2712520 - RNA, 17 nt, Human
augaucuaggaagacuu

SEQ ID NO: 2712521 - RNA, 20 nt, Human
augaucuaggaagacuuugg

SEQ ID NO: 2712522 - RNA, 10 nt, Human
augauccagc

SEQ ID NO: 2712523 - RNA, 20 nt, Human
augauccagcagauuauuca

SEQ ID NO: 2712524 - RNA, 19 nt, Human
augauccagcagauuauuc

SEQ ID NO: 2712525 - RNA, 15 nt, Human
augauaacuggaaac

SEQ ID NO: 2712526 - RNA, 17 nt, Human
augauaaguaaaugcua

SEQ ID NO: 2712527 - RNA, 20 nt, Human
uuguucuugguuuguaaauu

SEQ ID NO: 2712528 - RNA, 21 nt, Human
uuguuccacaaguuaaauaaa

SEQ ID NO: 2712529 - RNA, 13 nt, Human
uuguguuacuaag

SEQ ID NO: 2712530 - RNA, 20 nt, Human
uuguguuacuaaguuuuuau

SEQ ID NO: 2712531 - RNA, 15 nt, Human
uuguguuacuaaguu

SEQ ID NO: 2712532 - RNA, 13 nt, Human
augcaccuggaau

SEQ ID NO: 2712533 - RNA, 22 nt, Human
augcaccagcccuuagcaggga

SEQ ID NO: 2712534 - RNA, 16 nt, Human
augcacuuuguucugg

SEQ ID NO: 2712535 - RNA, 17 nt, Human
augcacuuuguucuggc

SEQ ID NO: 2712536 - RNA, 19 nt, Human
augcacuuuguucuggcuc

SEQ ID NO: 2712537 - RNA, 20 nt, Human
augcacuuuguucuggcucu

SEQ ID NO: 2712538 - RNA, 13 nt, Human
uuuaaagaaugcu

SEQ ID NO: 2712539 - RNA, 23 nt, Human
uuuaaaaauacagauagauauau

SEQ ID NO: 2712540 - RNA, 14 nt, Human
auggcacuaguauu

SEQ ID NO: 2712541 - RNA, 16 nt, Human
auggcacuaguauuuc

SEQ ID NO: 2712542 - RNA, 18 nt, Human
auggcauauuuuucacau

SEQ ID NO: 2712543 - RNA, 20 nt, Human
auggcauauuuuucacauau

SEQ ID NO: 2712544 - RNA, 21 nt, Human
auggcauauuuuucacauauc

SEQ ID NO: 2712545 - RNA, 22 nt, Human
auggcauauuuuucacauaucu

SEQ ID NO: 2712546 - RNA, 23 nt, Human
auggcauauuuuucacauaucua

SEQ ID NO: 2712547 - RNA, 23 nt, Human
auggcuauaggugcuacaaaaac

SEQ ID NO: 2712548 - RNA, 18 nt, Human
auggcuaauguacugcau

SEQ ID NO: 2712549 - RNA, 14 nt, Human
augggauaaaugcc

SEQ ID NO: 2712550 - RNA, 19 nt, Human
augggagagaagagaaugc

SEQ ID NO: 2712551 - RNA, 15 nt, Human
augggagagaagaga

SEQ ID NO: 2712552 - RNA, 19 nt, Human
auggacuaacuugucuuug

SEQ ID NO: 2712553 - RNA, 11 nt, Human
auggacuuugu

SEQ ID NO: 2712554 - RNA, 12 nt, Human
auggacuuuguu

SEQ ID NO: 2712555 - RNA, 16 nt, Human
auggacuguggugacu

SEQ ID NO: 2712556 - RNA, 22 nt, Human
auggacuguggugacuuuggau

SEQ ID NO: 2712557 - RNA, 17 nt, Human
auggacuguggugacuu

SEQ ID NO: 2712558 - RNA, 14 nt, Human
uuucaaacuuugga

SEQ ID NO: 2712559 - RNA, 15 nt, Human
uuucauuauuuuauu

SEQ ID NO: 2712560 - RNA, 13 nt, Human
uuucauuauuuua

SEQ ID NO: 2712561 - RNA, 20 nt, Human
uuucauuauuuuauuaugaa

SEQ ID NO: 2712562 - RNA, 19 nt, Human
uuucauuauuuuauuauga

SEQ ID NO: 2712563 - RNA, 17 nt, Human
uuuccaugaguccccug

SEQ ID NO: 2712564 - RNA, 18 nt, Human
uuuccaugaguccccugu

SEQ ID NO: 2712565 - RNA, 16 nt, Human
uuucaaacauauauaa

SEQ ID NO: 2712566 - RNA, 16 nt, Human
uuucaaacuuuacuau

SEQ ID NO: 2712567 - RNA, 15 nt, Human
uuucaaacuuuacua

SEQ ID NO: 2712568 - RNA, 22 nt, Human
uuucaaacuuuacuauggcccu

SEQ ID NO: 2712569 - RNA, 19 nt, Human
auggaacgcguugaaauug

SEQ ID NO: 2712570 - RNA, 18 nt, Human
auggaacgcguugaaauu

SEQ ID NO: 2712571 - RNA, 17 nt, Human
augcuguucaugaaaga

SEQ ID NO: 2712572 - RNA, 22 nt, Human
augcugugcccuaaaguguauu

SEQ ID NO: 2712573 - RNA, 13 nt, Human
augcuucucacug

SEQ ID NO: 2712574 - RNA, 15 nt, Human
auggaacgcguugaa

SEQ ID NO: 2712575 - RNA, 17 nt, Human
auggaacgcguugaaau

SEQ ID NO: 2712576 - RNA, 16 nt, Human
auggaacgcguugaaa

SEQ ID NO: 2712577 - RNA, 19 nt, Human
augcuguucaugaaagauu

SEQ ID NO: 2712578 - RNA, 18 nt, Human
uuuauuacaguauaauua

SEQ ID NO: 2712579 - RNA, 14 nt, Human
uuuauuacaguaua

SEQ ID NO: 2712580 - RNA, 23 nt, Human
augcuauuucuauauuuucauuc

SEQ ID NO: 2712581 - RNA, 22 nt, Human
augcuauuucuauauuuucauu

SEQ ID NO: 2712582 - RNA, 21 nt, Human
augcuauuucuauauuuucau

SEQ ID NO: 2712583 - RNA, 18 nt, Human
augcuagguuaauuccaa

SEQ ID NO: 2712584 - RNA, 11 nt, Human
augcuauuucu

SEQ ID NO: 2712585 - RNA, 20 nt, Human
augcuauuucuauauuuuca

SEQ ID NO: 2712586 - RNA, 15 nt, Human
augcuauuucuauau

SEQ ID NO: 2712587 - RNA, 14 nt, Human
augcuauuucuaua

SEQ ID NO: 2712588 - RNA, 13 nt, Human
augcuauuucuau

SEQ ID NO: 2712589 - RNA, 16 nt, Human
uuuauauuuacuaaaa

SEQ ID NO: 2712590 - RNA, 13 nt, Human
uuuauauuuacua

SEQ ID NO: 2712591 - RNA, 21 nt, Human
uuuaucaaagggugaaaauua

SEQ ID NO: 2712592 - RNA, 19 nt, Human
auuggacaguaaaauccac

SEQ ID NO: 2712593 - RNA, 19 nt, Human
auuggagcucgugggacag

SEQ ID NO: 2712594 - RNA, 13 nt, Human
auugacuuuuuau

SEQ ID NO: 2712595 - RNA, 18 nt, Human
auugcuuuggucauauga

SEQ ID NO: 2712596 - RNA, 21 nt, Human
auugauuuccguuaaaauacc

SEQ ID NO: 2712597 - RNA, 14 nt, Human
auugcuuuggucau

SEQ ID NO: 2712598 - RNA, 15 nt, Human
auuggcuuuucugau

SEQ ID NO: 2712599 - RNA, 13 nt, Human
auuggcuuuucug

SEQ ID NO: 2712600 - RNA, 20 nt, Human
auuggcuuuucugauccagu

SEQ ID NO: 2712601 - RNA, 19 nt, Human
auuggcuuuucugauccag

SEQ ID NO: 2712602 - RNA, 16 nt, Human
auuggcuuuucugauc

SEQ ID NO: 2712603 - RNA, 13 nt, Human
auugucuagugaa

SEQ ID NO: 2712604 - RNA, 13 nt, Human
auugugggaaggg

SEQ ID NO: 2712605 - RNA, 14 nt, Human
auugugggaagggg

SEQ ID NO: 2712606 - RNA, 16 nt, Human
auuguacgaagaguau

SEQ ID NO: 2712607 - RNA, 23 nt, Human
auugucaaaguggugagaggcau

SEQ ID NO: 2712608 - RNA, 16 nt, Human
auugucaaagugguga

SEQ ID NO: 2712609 - RNA, 17 nt, Human
auuuaaaagauacaguu

SEQ ID NO: 2712610 - RNA, 16 nt, Human
auuuaaaagauacagu

SEQ ID NO: 2712611 - RNA, 14 nt, Human
auuuaaaagauaca

SEQ ID NO: 2712612 - RNA, 13 nt, Human
auuuaaaagauac

SEQ ID NO: 2712613 - RNA, 21 nt, Human
auuguuuggggaugagaaagg

SEQ ID NO: 2712614 - RNA, 14 nt, Human
auuuauuuuaauaa

SEQ ID NO: 2712615 - RNA, 14 nt, Human
auuuauuuaaauuu

SEQ ID NO: 2712616 - RNA, 12 nt, Human
auuuauuuaaau

SEQ ID NO: 2712617 - RNA, 19 nt, Human
auuucccaaagcagugcau

SEQ ID NO: 2712618 - RNA, 15 nt, Human
auuugaauuuugugu

SEQ ID NO: 2712619 - RNA, 21 nt, Human
auuugacauagucuggcugua

SEQ ID NO: 2712620 - RNA, 17 nt, Human
auuugacauagucuggc

SEQ ID NO: 2712621 - RNA, 16 nt, Human
auuugacauagucugg

SEQ ID NO: 2712622 - RNA, 15 nt, Human
auuugaaaauuuuga

SEQ ID NO: 2712623 - RNA, 16 nt, Human
auuugaaaauuuugau

SEQ ID NO: 2712624 - RNA, 20 nt, Human
auuucuuccacaagagccca

SEQ ID NO: 2712625 - RNA, 23 nt, Human
auuucuuccacaagagcccaggc

SEQ ID NO: 2712626 - RNA, 23 nt, Human
auuucuaggacugaauuaugaaa

SEQ ID NO: 2712627 - RNA, 20 nt, Human
auuucuaggacugaauuaug

SEQ ID NO: 2712628 - RNA, 18 nt, Human
auuucuaggacugaauua

SEQ ID NO: 2712629 - RNA, 17 nt, Human
auuucuaggacugaauu

SEQ ID NO: 2712630 - RNA, 19 nt, Human
auuuguaguguuggagaag

SEQ ID NO: 2712631 - RNA, 22 nt, Human
auuuguaguguuggagaagaac

SEQ ID NO: 2712632 - RNA, 14 nt, Human
auuuguauaaaaua

SEQ ID NO: 2712633 - RNA, 23 nt, Human
auuuuaaaagaaugauuaugaau

SEQ ID NO: 2712634 - RNA, 16 nt, Human
auuuuaaaagaaugau

SEQ ID NO: 2712635 - RNA, 22 nt, Human
auuuuaaaaauacagauagaua

SEQ ID NO: 2712636 - RNA, 12 nt, Human
auuuuaauaaug

SEQ ID NO: 2712637 - RNA, 15 nt, Human
auuuucuauaauuua

SEQ ID NO: 2712638 - RNA, 14 nt, Human
auuuucuauaauuu

SEQ ID NO: 2712639 - RNA, 14 nt, Human
auuuuccugaaaac

SEQ ID NO: 2712640 - RNA, 19 nt, Human
auuuucccuauuagagaag

SEQ ID NO: 2712641 - RNA, 16 nt, Human
auuuuccugccaggca

SEQ ID NO: 2712642 - RNA, 20 nt, Human
auuuugcuaaaugugaauga

SEQ ID NO: 2712643 - RNA, 21 nt, Human
auuuugcugucccuuuuccuu

SEQ ID NO: 2712644 - RNA, 19 nt, Human
auuuugauccaagcugguc

SEQ ID NO: 2712645 - RNA, 15 nt, Human
auuuugauguuuuaa

SEQ ID NO: 2712646 - RNA, 17 nt, Human
auuuugauguuuuaagg

SEQ ID NO: 2712647 - RNA, 12 nt, Human
auuuugcuuugu

SEQ ID NO: 2712648 - RNA, 20 nt, Human
auuuugcuuugugauuuuug

SEQ ID NO: 2712649 - RNA, 18 nt, Human
auuuugcuuugugauuuu

SEQ ID NO: 2712650 - RNA, 20 nt, Human
auuuuggaaaauaaauuauu

SEQ ID NO: 2712651 - RNA, 12 nt, Human
auuuuggaauuu

SEQ ID NO: 2712652 - RNA, 19 nt, Human
auuuuggaaaauaaauuau

SEQ ID NO: 2712653 - RNA, 14 nt, Human
auuuuggaaaauaa

SEQ ID NO: 2712654 - RNA, 19 nt, Human
auuuugugcccccauguaa

SEQ ID NO: 2712655 - RNA, 23 nt, Human
auuuugucauauaagauucauau

SEQ ID NO: 2712656 - RNA, 16 nt, Human
auuuuguuucagugca

SEQ ID NO: 2712657 - RNA, 11 nt, Human
auuuuguuucu

SEQ ID NO: 2712658 - RNA, 12 nt, Human
auuuuguucaua

SEQ ID NO: 2712659 - RNA, 14 nt, Human
auuuuguucauaca

SEQ ID NO: 2712660 - RNA, 15 nt, Human
auuuuguucauacau

SEQ ID NO: 2712661 - RNA, 16 nt, Human
auuuuguucauacaua

SEQ ID NO: 2712662 - RNA, 18 nt, Human
auuuuguucauacauauu

SEQ ID NO: 2712663 - RNA, 15 nt, Human
auuuuucuuauuuca

SEQ ID NO: 2712664 - RNA, 22 nt, Human
auuuuucuuagggaaggauaca

SEQ ID NO: 2712665 - RNA, 20 nt, Human
auuuuucuuauuucauuucu

SEQ ID NO: 2712666 - RNA, 19 nt, Human
auuuuucuuauuucauuuc

SEQ ID NO: 2712667 - RNA, 12 nt, Human
auuuuugacaga

SEQ ID NO: 2712668 - RNA, 13 nt, Human
auuuuugacagaa

SEQ ID NO: 2712669 - RNA, 14 nt, Human
auuuuugacagaau

SEQ ID NO: 2712670 - RNA, 15 nt, Human
auuuuugacagaaua

SEQ ID NO: 2712671 - RNA, 22 nt, Human
auuuuugacagaauauguuuca

SEQ ID NO: 2712672 - RNA, 15 nt, Human
auuuuucacauaucu

SEQ ID NO: 2712673 - RNA, 18 nt, Human
auuuuucacauaucuagu

SEQ ID NO: 2712674 - RNA, 21 nt, Human
auuuuucacauaucuaguaug

SEQ ID NO: 2712675 - RNA, 21 nt, Human
auuuuguuuuugucuuaaaaa

SEQ ID NO: 2712676 - RNA, 15 nt, Human
auuuuguuucuguac

SEQ ID NO: 2712677 - RNA, 14 nt, Human
auuuuguuucugua

SEQ ID NO: 2712678 - RNA, 21 nt, Human
auuuuucuuagggaaggauac

SEQ ID NO: 2712679 - RNA, 15 nt, Human
auuuuuccaaaauaa

SEQ ID NO: 2712680 - RNA, 22 nt, Human
auuuuugugauuuugugauuga

SEQ ID NO: 2712681 - RNA, 19 nt, Human
auuuuuguagagccagggu

SEQ ID NO: 2712682 - RNA, 12 nt, Human
auuuuuguaauu

SEQ ID NO: 2712683 - RNA, 21 nt, Human
auuuuuguagcacugacagau

SEQ ID NO: 2712684 - RNA, 20 nt, Human
auuuuuguagcacugacaga

SEQ ID NO: 2712685 - RNA, 21 nt, Human
auuuuuguuuucauuaucuca

SEQ ID NO: 2712686 - RNA, 14 nt, Human
auuuuuuaaaugca

SEQ ID NO: 2712687 - RNA, 13 nt, Human
auuuuuuaaaugc

SEQ ID NO: 2712688 - RNA, 20 nt, Human
auuuuuucucuaggaaauau

SEQ ID NO: 2712689 - RNA, 23 nt, Human
auuuuuucucuaggaaauauuua

SEQ ID NO: 2712690 - RNA, 17 nt, Human
auugaccugaggcccuu

SEQ ID NO: 2712691 - RNA, 15 nt, Human
auugaaaaaccauuu

SEQ ID NO: 2712692 - RNA, 12 nt, Human
auugaaaucuuu

SEQ ID NO: 2712693 - RNA, 20 nt, Human
auugaaaucuuuuugcuuug

SEQ ID NO: 2712694 - RNA, 17 nt, Human
auugaaaucuuuuugcu

SEQ ID NO: 2712695 - RNA, 18 nt, Human
auugaaaucuuuuugcuu

SEQ ID NO: 2712696 - RNA, 21 nt, Human
auucuuaaaguugaauuuauu

SEQ ID NO: 2712697 - RNA, 14 nt, Human
auucuuaaauaugu

SEQ ID NO: 2712698 - RNA, 20 nt, Human
auucuuaaaguugaauuuau

SEQ ID NO: 2712699 - RNA, 19 nt, Human
auucuuaaaguugaauuua

SEQ ID NO: 2712700 - RNA, 12 nt, Human
auucuguauaga

SEQ ID NO: 2712701 - RNA, 11 nt, Human
auucuguauag

SEQ ID NO: 2712702 - RNA, 19 nt, Human
auucuguuggccaguguga

SEQ ID NO: 2712703 - RNA, 21 nt, Human
auucuguuggccagugugaca

SEQ ID NO: 2712704 - RNA, 14 nt, Human
auucuguuggccag

SEQ ID NO: 2712705 - RNA, 13 nt, Human
auucuguauagau

SEQ ID NO: 2712706 - RNA, 18 nt, Human
auucugcucacauaucug

SEQ ID NO: 2712707 - RNA, 20 nt, Human
auucugccugcccaggcccc

SEQ ID NO: 2712708 - RNA, 21 nt, Human
auucugccugcccaggccccu

SEQ ID NO: 2712709 - RNA, 19 nt, Human
auucugcucacauaucugu

SEQ ID NO: 2712710 - RNA, 20 nt, Human
auucugcucacauaucuguc

SEQ ID NO: 2712711 - RNA, 21 nt, Human
auucugcucacauaucuguca

SEQ ID NO: 2712712 - RNA, 22 nt, Human
auucugcucacauaucugucau

SEQ ID NO: 2712713 - RNA, 15 nt, Human
auucuagcuaaugua

SEQ ID NO: 2712714 - RNA, 18 nt, Human
auucuagcuaauguaaua

SEQ ID NO: 2712715 - RNA, 17 nt, Human
auucucauuugucacac

SEQ ID NO: 2712716 - RNA, 11 nt, Human
auucugccugc

SEQ ID NO: 2712717 - RNA, 13 nt, Human
auucugccugccc

SEQ ID NO: 2712718 - RNA, 14 nt, Human
auucugccugccca

SEQ ID NO: 2712719 - RNA, 15 nt, Human
auucugccugcccag

SEQ ID NO: 2712720 - RNA, 16 nt, Human
auucugccugcccagg

SEQ ID NO: 2712721 - RNA, 17 nt, Human
auucugccugcccaggc

SEQ ID NO: 2712722 - RNA, 18 nt, Human
auucugccugcccaggcc

SEQ ID NO: 2712723 - RNA, 19 nt, Human
auucugccugcccaggccc

SEQ ID NO: 2712724 - RNA, 15 nt, Human
auuauauuuacaaau

SEQ ID NO: 2712725 - RNA, 19 nt, Human
auucagacagcugccuggg

SEQ ID NO: 2712726 - RNA, 20 nt, Human
auucaaacagucucaggaaa

SEQ ID NO: 2712727 - RNA, 19 nt, Human
auucaaacagucucaggaa

SEQ ID NO: 2712728 - RNA, 18 nt, Human
auucaaacagucucagga

SEQ ID NO: 2712729 - RNA, 16 nt, Human
auucaaacagucucag

SEQ ID NO: 2712730 - RNA, 21 nt, Human
auuauuuuguucauacauauu

SEQ ID NO: 2712731 - RNA, 19 nt, Human
auuauuuuguucauacaua

SEQ ID NO: 2712732 - RNA, 17 nt, Human
auuauuuuguucauaca

SEQ ID NO: 2712733 - RNA, 18 nt, Human
auuauuuuguucauacau

SEQ ID NO: 2712734 - RNA, 15 nt, Human
auuauuuuguucaua

SEQ ID NO: 2712735 - RNA, 16 nt, Human
auuauuuuguucauac

SEQ ID NO: 2712736 - RNA, 17 nt, Human
auuauucaaaguugccu

SEQ ID NO: 2712737 - RNA, 13 nt, Human
auuauucaaaguu

SEQ ID NO: 2712738 - RNA, 15 nt, Human
auuauucaaaguugc

SEQ ID NO: 2712739 - RNA, 14 nt, Human
auuauucaaaguug

SEQ ID NO: 2712740 - RNA, 21 nt, Human
auuauguuaaaacugggacag

SEQ ID NO: 2712741 - RNA, 18 nt, Human
auuaucuagauacuguau

SEQ ID NO: 2712742 - RNA, 14 nt, Human
auuaucuagauacu

SEQ ID NO: 2712743 - RNA, 15 nt, Human
auuauauuuauuacu

SEQ ID NO: 2712744 - RNA, 18 nt, Human
auuauauuuauuacugua

SEQ ID NO: 2712745 - RNA, 18 nt, Human
auucagaaggaucuucau

SEQ ID NO: 2712746 - RNA, 11 nt, Human
auucagacagc

SEQ ID NO: 2712747 - RNA, 24 nt, Human
auucagaaggaucuucaucugacu

SEQ ID NO: 2712748 - RNA, 12 nt, Human
auucagacagcu

SEQ ID NO: 2712749 - RNA, 13 nt, Human
auucagacagcug

SEQ ID NO: 2712750 - RNA, 12 nt, Human
auucaggaagcu

SEQ ID NO: 2712751 - RNA, 18 nt, Human
auucagacagcugccugg

SEQ ID NO: 2712752 - RNA, 14 nt, Human
auucagacagcugc

SEQ ID NO: 2712753 - RNA, 15 nt, Human
auucagacagcugcc

SEQ ID NO: 2712754 - RNA, 16 nt, Human
auucagacagcugccu

SEQ ID NO: 2712755 - RNA, 17 nt, Human
auucagacagcugccug

SEQ ID NO: 2712756 - RNA, 13 nt, Human
auucaggaagcuc

SEQ ID NO: 2712757 - RNA, 14 nt, Human
auucuaaauuuuau

SEQ ID NO: 2712758 - RNA, 15 nt, Human
aaaaaauauuuuccu

SEQ ID NO: 2712759 - RNA, 13 nt, Human
aaaaacacagcaa

SEQ ID NO: 2712760 - RNA, 18 nt, Human
aaaaaauuggggauucuu

SEQ ID NO: 2712761 - RNA, 18 nt, Human
aaaaacacagcaagggug

SEQ ID NO: 2712762 - RNA, 12 nt, Human
aaaaacacagca

SEQ ID NO: 2712763 - RNA, 20 nt, Human
aaaaaccaguauuguacaaa

SEQ ID NO: 2712764 - RNA, 21 nt, Human
acucuaucaaguauuauaccu

SEQ ID NO: 2712765 - RNA, 23 nt, Human
acucuaucaaguauuauaccuuu

SEQ ID NO: 2712766 - RNA, 19 nt, Human
acucugucgcccagucugg

SEQ ID NO: 2712767 - RNA, 15 nt, Human
acucuagggaaaaac

SEQ ID NO: 2712768 - RNA, 17 nt, Human
acucuagggaaaaacca

SEQ ID NO: 2712769 - RNA, 15 nt, Human
acucauauuuucaug

SEQ ID NO: 2712770 - RNA, 20 nt, Human
acuaguauuucuaugaaaua

SEQ ID NO: 2712771 - RNA, 21 nt, Human
acuauucaaacagucucagga

SEQ ID NO: 2712772 - RNA, 22 nt, Human
acuauucaggagaguagaacag

SEQ ID NO: 2712773 - RNA, 13 nt, Human
acucaaaagcugg

SEQ ID NO: 2712774 - RNA, 14 nt, Human
acucaaaucaagaa

SEQ ID NO: 2712775 - RNA, 19 nt, Human
acucaguccauagcagaga

SEQ ID NO: 2712776 - RNA, 22 nt, Human
acgcaggcccccaggugccagu

SEQ ID NO: 2712777 - RNA, 19 nt, Human
acgcaggcccccaggugcc

SEQ ID NO: 2712778 - RNA, 11 nt, Human
acgcugugcug

SEQ ID NO: 2712779 - RNA, 12 nt, Human
acgcugugcugc

SEQ ID NO: 2712780 - RNA, 14 nt, Human
acgcugugcugccc

SEQ ID NO: 2712781 - RNA, 14 nt, Human
acggaacucaaaua

SEQ ID NO: 2712782 - RNA, 13 nt, Human
acgucugacaggc

SEQ ID NO: 2712783 - RNA, 14 nt, Human
acgucugacaggca

SEQ ID NO: 2712784 - RNA, 13 nt, Human
acuaagagagaau

SEQ ID NO: 2712785 - RNA, 11 nt, Human
acgugaguccu

SEQ ID NO: 2712786 - RNA, 18 nt, Human
accuuggcugcagggagu

SEQ ID NO: 2712787 - RNA, 17 nt, Human
accuuggcugcagggag

SEQ ID NO: 2712788 - RNA, 18 nt, Human
accuuucccaucuuccaa

SEQ ID NO: 2712789 - RNA, 13 nt, Human
accuuucccaucu

SEQ ID NO: 2712790 - RNA, 15 nt, Human
accuuuaagagaaau

SEQ ID NO: 2712791 - RNA, 16 nt, Human
accugucccccugaca

SEQ ID NO: 2712792 - RNA, 12 nt, Human
accugucccccu

SEQ ID NO: 2712793 - RNA, 15 nt, Human
accugucccccugac

SEQ ID NO: 2712794 - RNA, 15 nt, Human
accucugcagcaaua

SEQ ID NO: 2712795 - RNA, 20 nt, Human
accucugcagcaauaaagca

SEQ ID NO: 2712796 - RNA, 18 nt, Human
accucugcagcaauaaag

SEQ ID NO: 2712797 - RNA, 21 nt, Human
accucugcagcaauaaagcag

SEQ ID NO: 2712798 - RNA, 14 nt, Human
agaaaauaacaaua

SEQ ID NO: 2712799 - RNA, 14 nt, Human
acuuuucuuugugg

SEQ ID NO: 2712800 - RNA, 19 nt, Human
agaaaauaguggugugauu

SEQ ID NO: 2712801 - RNA, 20 nt, Human
acuuuucauaaccuagccuu

SEQ ID NO: 2712802 - RNA, 16 nt, Human
acuuuucuuucagcca

SEQ ID NO: 2712803 - RNA, 22 nt, Human
acuuuauuuucuauaauuuaaa

SEQ ID NO: 2712804 - RNA, 16 nt, Human
acuuuguucuggcucu

SEQ ID NO: 2712805 - RNA, 17 nt, Human
acuuuguucuggcucuu

SEQ ID NO: 2712806 - RNA, 13 nt, Human
acuuuuauaaacu

SEQ ID NO: 2712807 - RNA, 20 nt, Human
acuuuguucuggcucuucca

SEQ ID NO: 2712808 - RNA, 19 nt, Human
acuuuguucuggcucuucc

SEQ ID NO: 2712809 - RNA, 20 nt, Human
acuuuauacccagaaaguua

SEQ ID NO: 2712810 - RNA, 22 nt, Human
acuuuauacccagaaaguuauu

SEQ ID NO: 2712811 - RNA, 23 nt, Human
agaaaguuauugauaaguucaua

SEQ ID NO: 2712812 - RNA, 11 nt, Human
agaaaguuauu

SEQ ID NO: 2712813 - RNA, 22 nt, Human
agaaaguacuucuccacccugc

SEQ ID NO: 2712814 - RNA, 23 nt, Human
agaaaguacuucuccacccugcu

SEQ ID NO: 2712815 - RNA, 22 nt, Human
acuguaagaaaauaucacuugu

SEQ ID NO: 2712816 - RNA, 19 nt, Human
acuguaagaaaauaucacu

SEQ ID NO: 2712817 - RNA, 13 nt, Human
acuguaagaaaau

SEQ ID NO: 2712818 - RNA, 18 nt, Human
acugguuccauggccucu

SEQ ID NO: 2712819 - RNA, 14 nt, Human
acuggugacugauu

SEQ ID NO: 2712820 - RNA, 22 nt, Human
acugugaaguuuacauuguaaa

SEQ ID NO: 2712821 - RNA, 19 nt, Human
acuggaagcacagcuucau

SEQ ID NO: 2712822 - RNA, 17 nt, Human
acuggaagcacagcuuc

SEQ ID NO: 2712823 - RNA, 15 nt, Human
acuggagaaaaugga

SEQ ID NO: 2712824 - RNA, 13 nt, Human
acugccagcaacg

SEQ ID NO: 2712825 - RNA, 21 nt, Human
acuucugucuucacaacagau

SEQ ID NO: 2712826 - RNA, 23 nt, Human
acuucacauauugauuuccguua

SEQ ID NO: 2712827 - RNA, 22 nt, Human
acuucugucuucacaacagauu

SEQ ID NO: 2712828 - RNA, 15 nt, Human
acuugggccacugug

SEQ ID NO: 2712829 - RNA, 14 nt, Human
acuugggccacugu

SEQ ID NO: 2712830 - RNA, 16 nt, Human
acuugguuuuuaaaaa

SEQ ID NO: 2712831 - RNA, 22 nt, Human
acugugcugagucugaaggcug

SEQ ID NO: 2712832 - RNA, 20 nt, Human
acugugcugagucugaaggc

SEQ ID NO: 2712833 - RNA, 16 nt, Human
acccaccucagccucc

SEQ ID NO: 2712834 - RNA, 11 nt, Human
acccccugaau

SEQ ID NO: 2712835 - RNA, 23 nt, Human
acccaagggccuggccugagcug

SEQ ID NO: 2712836 - RNA, 13 nt, Human
acccaccucagcc

SEQ ID NO: 2712837 - RNA, 14 nt, Human
acccaccucagccu

SEQ ID NO: 2712838 - RNA, 15 nt, Human
acccaccucagccuc

SEQ ID NO: 2712839 - RNA, 20 nt, Human
accauauuaccacagacaua

SEQ ID NO: 2712840 - RNA, 18 nt, Human
acccaagggccuggccug

SEQ ID NO: 2712841 - RNA, 19 nt, Human
acccaagggccuggccuga

SEQ ID NO: 2712842 - RNA, 22 nt, Human
acccaagggccuggccugagcu

SEQ ID NO: 2712843 - RNA, 16 nt, Human
accauauuaccacaga

SEQ ID NO: 2712844 - RNA, 14 nt, Human
accauauuaccaca

SEQ ID NO: 2712845 - RNA, 16 nt, Human
accccuccaugugggc

SEQ ID NO: 2712846 - RNA, 19 nt, Human
accccuccaugugggcuag

SEQ ID NO: 2712847 - RNA, 16 nt, Human
acaugugcacaugcac

SEQ ID NO: 2712848 - RNA, 18 nt, Human
acaugugcacaugcacgu

SEQ ID NO: 2712849 - RNA, 19 nt, Human
acaugaucuucuuuauaau

SEQ ID NO: 2712850 - RNA, 18 nt, Human
acaucagcacgauuucug

SEQ ID NO: 2712851 - RNA, 17 nt, Human
acaucagcacgauuucu

SEQ ID NO: 2712852 - RNA, 15 nt, Human
acaucagcacgauuu

SEQ ID NO: 2712853 - RNA, 19 nt, Human
acaggguuuugccauguug

SEQ ID NO: 2712854 - RNA, 19 nt, Human
acaggcaaugcuggcuguu

SEQ ID NO: 2712855 - RNA, 23 nt, Human
acaggcaaugcuggcuguuggcu

SEQ ID NO: 2712856 - RNA, 21 nt, Human
acauaaugcgugcauaccacu

SEQ ID NO: 2712857 - RNA, 22 nt, Human
acauaaugcgugcauaccacuu

SEQ ID NO: 2712858 - RNA, 23 nt, Human
acauaaugcgugcauaccacuuu

SEQ ID NO: 2712859 - RNA, 15 nt, Human
acauuuauucugcuc

SEQ ID NO: 2712860 - RNA, 12 nt, Human
accaagcccagu

SEQ ID NO: 2712861 - RNA, 13 nt, Human
accagcagaaaug

SEQ ID NO: 2712862 - RNA, 17 nt, Human
accagccaguaaauggg

SEQ ID NO: 2712863 - RNA, 19 nt, Human
accagagcugccaccugcc

SEQ ID NO: 2712864 - RNA, 14 nt, Human
acauuuauucugcu

SEQ ID NO: 2712865 - RNA, 21 nt, Human
acagcaguugaaaagacucca

SEQ ID NO: 2712866 - RNA, 19 nt, Human
acagagugagacucugucu

SEQ ID NO: 2712867 - RNA, 23 nt, Human
acagcaguugaaaagacuccaaa

SEQ ID NO: 2712868 - RNA, 22 nt, Human
acagcaguugaaaagacuccaa

SEQ ID NO: 2712869 - RNA, 23 nt, Human
acagagucucacuguugcccagg

SEQ ID NO: 2712870 - RNA, 14 nt, Human
acagaggggguggc

SEQ ID NO: 2712871 - RNA, 15 nt, Human
acagagugagacucu

SEQ ID NO: 2712872 - RNA, 13 nt, Human
acagacaaagcgu

SEQ ID NO: 2712873 - RNA, 11 nt, Human
acagacacagg

SEQ ID NO: 2712874 - RNA, 15 nt, Human
acacuguacugcaau

SEQ ID NO: 2712875 - RNA, 19 nt, Human
acagaggcagccccauucu

SEQ ID NO: 2712876 - RNA, 13 nt, Human
acagacacaggcc

SEQ ID NO: 2712877 - RNA, 14 nt, Human
acagacacaggccc

SEQ ID NO: 2712878 - RNA, 14 nt, Human
acagaggcagcccc

SEQ ID NO: 2712879 - RNA, 15 nt, Human
acagaggcagcccca

SEQ ID NO: 2712880 - RNA, 15 nt, Human
acacugcauguuugu

SEQ ID NO: 2712881 - RNA, 14 nt, Human
acacugcauguuug

SEQ ID NO: 2712882 - RNA, 14 nt, Human
acaggauuauugga

SEQ ID NO: 2712883 - RNA, 18 nt, Human
acaggcaaugcuggcugu

SEQ ID NO: 2712884 - RNA, 12 nt, Human
acaggcaagcac

SEQ ID NO: 2712885 - RNA, 16 nt, Human
acagcucuucuccagg

SEQ ID NO: 2712886 - RNA, 17 nt, Human
acagcucuucuccaggc

SEQ ID NO: 2712887 - RNA, 15 nt, Human
acaggaucagucuga

SEQ ID NO: 2712888 - RNA, 18 nt, Human
acagccacggccaggcca

SEQ ID NO: 2712889 - RNA, 15 nt, Human
acagccacggccagg

SEQ ID NO: 2712890 - RNA, 16 nt, Human
acagccacggccaggc

SEQ ID NO: 2712891 - RNA, 17 nt, Human
acagccacggccaggcc

SEQ ID NO: 2712892 - RNA, 21 nt, Human
acacgagcaggcuacugucag

SEQ ID NO: 2712893 - RNA, 15 nt, Human
acacgcgugcacaca

SEQ ID NO: 2712894 - RNA, 17 nt, Human
acacgcgugcacacacc

SEQ ID NO: 2712895 - RNA, 19 nt, Human
acacgagcaggcuacuguc

SEQ ID NO: 2712896 - RNA, 14 nt, Human
acacgagcaggcua

SEQ ID NO: 2712897 - RNA, 21 nt, Human
acacauuuuauuuuauuaugc

SEQ ID NO: 2712898 - RNA, 22 nt, Human
acacauuuuauuuuauuaugca

SEQ ID NO: 2712899 - RNA, 11 nt, Human
acacagcucuu

SEQ ID NO: 2712900 - RNA, 13 nt, Human
acacagcucuucu

SEQ ID NO: 2712901 - RNA, 12 nt, Human
acacauuuuucu

SEQ ID NO: 2712902 - RNA, 22 nt, Human
acacauuuuuuaaaugcaccug

SEQ ID NO: 2712903 - RNA, 20 nt, Human
acacauuuuuuaaaugcacc

SEQ ID NO: 2712904 - RNA, 20 nt, Human
acacagcucuguccugggag

SEQ ID NO: 2712905 - RNA, 14 nt, Human
acacagcucugucc

SEQ ID NO: 2712906 - RNA, 19 nt, Human
acacagaggcugccucucc

SEQ ID NO: 2712907 - RNA, 13 nt, Human
aauuuuguuucug

SEQ ID NO: 2712908 - RNA, 20 nt, Human
acaaggcaaggcugucaauu

SEQ ID NO: 2712909 - RNA, 22 nt, Human
acaaaauguaggguuauaauaa

SEQ ID NO: 2712910 - RNA, 14 nt, Human
aauuuuguuucugu

SEQ ID NO: 2712911 - RNA, 17 nt, Human
acaaggauugcuacugu

SEQ ID NO: 2712912 - RNA, 12 nt, Human
acaaggcaaggc

SEQ ID NO: 2712913 - RNA, 14 nt, Human
acaaggcaaggcug

SEQ ID NO: 2712914 - RNA, 15 nt, Human
aaaggcuccaggagc

SEQ ID NO: 2712915 - RNA, 16 nt, Human
aaaggcuccaggagca

SEQ ID NO: 2712916 - RNA, 16 nt, Human
aaagccuccuccagcc

SEQ ID NO: 2712917 - RNA, 19 nt, Human
aaaggcuccaggagcagcc

SEQ ID NO: 2712918 - RNA, 20 nt, Human
aaaggcuccaggagcagcca

SEQ ID NO: 2712919 - RNA, 13 nt, Human
aaaguggaaaaau

SEQ ID NO: 2712920 - RNA, 10 nt, Human
aaauaaauaa

SEQ ID NO: 2712921 - RNA, 19 nt, Human
aaauaaaacuuuuuaaaau

SEQ ID NO: 2712922 - RNA, 16 nt, Human
aaauaaaacuuuuuaa

SEQ ID NO: 2712923 - RNA, 13 nt, Human
aaauaaaacuuuu

SEQ ID NO: 2712924 - RNA, 15 nt, Human
aaauauuuauuuuaa

SEQ ID NO: 2712925 - RNA, 13 nt, Human
aaauauuuauuuu

SEQ ID NO: 2712926 - RNA, 20 nt, Human
aaauauuuauuuuaauaaug

SEQ ID NO: 2712927 - RNA, 14 nt, Human
aaaucaaauaugca

SEQ ID NO: 2712928 - RNA, 12 nt, Human
aaaucaaauaug

SEQ ID NO: 2712929 - RNA, 15 nt, Human
aaaucaaauaugcaa

SEQ ID NO: 2712930 - RNA, 18 nt, Human
aaaucugugaacuugaaa

SEQ ID NO: 2712931 - RNA, 16 nt, Human
aaaucugugaacuuga

SEQ ID NO: 2712932 - RNA, 15 nt, Human
aaaucugugaacuug

SEQ ID NO: 2712933 - RNA, 19 nt, Human
aaauaguggugugauuugg

SEQ ID NO: 2712934 - RNA, 20 nt, Human
aaauagcuuuuuucucugau

SEQ ID NO: 2712935 - RNA, 17 nt, Human
aaauagcuuuuuucucu

SEQ ID NO: 2712936 - RNA, 24 nt, Human
aaauagcucaggugucccugcacu

SEQ ID NO: 2712937 - RNA, 18 nt, Human
aaauagcuagacugguga

SEQ ID NO: 2712938 - RNA, 15 nt, Human
aaagaaauguaaggg

SEQ ID NO: 2712939 - RNA, 14 nt, Human
aaagaguaggaaga

SEQ ID NO: 2712940 - RNA, 23 nt, Human
aaacugagaugugaacacaucag

SEQ ID NO: 2712941 - RNA, 21 nt, Human
aaacugagaugugaacacauc

SEQ ID NO: 2712942 - RNA, 16 nt, Human
aaagauauuuugcuuu

SEQ ID NO: 2712943 - RNA, 12 nt, Human
aaagauauuuug

SEQ ID NO: 2712944 - RNA, 17 nt, Human
aaagauauuuugcuuug

SEQ ID NO: 2712945 - RNA, 18 nt, Human
aaacucuccucugcugcu

SEQ ID NO: 2712946 - RNA, 20 nt, Human
aaaccaugggauaaaugcca

SEQ ID NO: 2712947 - RNA, 18 nt, Human
aaaccaucauugaaaucu

SEQ ID NO: 2712948 - RNA, 15 nt, Human
aaaccaugggauaaa

SEQ ID NO: 2712949 - RNA, 16 nt, Human
aaaaucucaauauuuc

SEQ ID NO: 2712950 - RNA, 22 nt, Human
aaaaucucaaauuucuaaaucu

SEQ ID NO: 2712951 - RNA, 19 nt, Human
aaaaucucaaauuucuaaa

SEQ ID NO: 2712952 - RNA, 21 nt, Human
aaaauugauguguuuauuuau

SEQ ID NO: 2712953 - RNA, 12 nt, Human
aaaauugaugug

SEQ ID NO: 2712954 - RNA, 14 nt, Human
aaaauugauguguu

SEQ ID NO: 2712955 - RNA, 16 nt, Human
aaacacuguucucugc

SEQ ID NO: 2712956 - RNA, 24 nt, Human
aaacacucaguuguucaauaauaa

SEQ ID NO: 2712957 - RNA, 22 nt, Human
aaaaucccuuaccucggugccu

SEQ ID NO: 2712958 - RNA, 17 nt, Human
aaaaucaguuguacagu

SEQ ID NO: 2712959 - RNA, 17 nt, Human
aaaauaaaacuuuuuaa

SEQ ID NO: 2712960 - RNA, 13 nt, Human
aaaaguugaauuu

SEQ ID NO: 2712961 - RNA, 16 nt, Human
aaaaagaaacauuugg

SEQ ID NO: 2712962 - RNA, 15 nt, Human
aaaaagaaaggaggg

SEQ ID NO: 2712963 - RNA, 22 nt, Human
aacuuuauacccagaaaguuau

SEQ ID NO: 2712964 - RNA, 23 nt, Human
aacuuuauacccagaaaguuauu

SEQ ID NO: 2712965 - RNA, 20 nt, Human
aacugagaugugaacacauc

SEQ ID NO: 2712966 - RNA, 19 nt, Human
aacugacucuuaagaagac

SEQ ID NO: 2712967 - RNA, 20 nt, Human
aacugacucuuaagaagacu

SEQ ID NO: 2712968 - RNA, 15 nt, Human
aacugacucuuaaga

SEQ ID NO: 2712969 - RNA, 18 nt, Human
aacugacucuuaagaaga

SEQ ID NO: 2712970 - RNA, 19 nt, Human
aacuuaaauaaugugaaac

SEQ ID NO: 2712971 - RNA, 14 nt, Human
aacugauaaagaug

SEQ ID NO: 2712972 - RNA, 18 nt, Human
aacuuaaucuaaauggaa

SEQ ID NO: 2712973 - RNA, 16 nt, Human
aacuuaaucuaaaugg

SEQ ID NO: 2712974 - RNA, 15 nt, Human
aacuuaaucuaaaug

SEQ ID NO: 2712975 - RNA, 17 nt, Human
aacggaugauuucuaug

SEQ ID NO: 2712976 - RNA, 16 nt, Human
aacggaugauuucuau

SEQ ID NO: 2712977 - RNA, 15 nt, Human
aacggaugauuucua

SEQ ID NO: 2712978 - RNA, 14 nt, Human
aacggaugauuucu

SEQ ID NO: 2712979 - RNA, 17 nt, Human
aaccuagggugauauua

SEQ ID NO: 2712980 - RNA, 21 nt, Human
aaccgaacugauguaaguaaa

SEQ ID NO: 2712981 - RNA, 22 nt, Human
aaccacuggaaaguuuaugguu

SEQ ID NO: 2712982 - RNA, 15 nt, Human
aaccacuucagcuga

SEQ ID NO: 2712983 - RNA, 13 nt, Human
aaccacgcuggac

SEQ ID NO: 2712984 - RNA, 21 nt, Human
aacagcuggugcccugcuuuc

SEQ ID NO: 2712985 - RNA, 20 nt, Human
aacagcuggugcccugcuuu

SEQ ID NO: 2712986 - RNA, 19 nt, Human
aacagcuggugcccugcuu

SEQ ID NO: 2712987 - RNA, 16 nt, Human
aacacaucagcuugcc

SEQ ID NO: 2712988 - RNA, 22 nt, Human
aaauguuguucucuucuuuaaa

SEQ ID NO: 2712989 - RNA, 17 nt, Human
aaaucuuauaauuuaaa

SEQ ID NO: 2712990 - RNA, 23 nt, Human
aaaugccuuacccucauguucuu

SEQ ID NO: 2712991 - RNA, 13 nt, Human
aaauucuuucauu

SEQ ID NO: 2712992 - RNA, 21 nt, Human
aaauucuugcaaaguaucccu

SEQ ID NO: 2712993 - RNA, 18 nt, Human
aaauucuugcaaaguauc

SEQ ID NO: 2712994 - RNA, 17 nt, Human
aagggaaacugccagca

SEQ ID NO: 2712995 - RNA, 16 nt, Human
aagggaaacugccagc

SEQ ID NO: 2712996 - RNA, 23 nt, Human
aagggaaacugccagcaacgcag

SEQ ID NO: 2712997 - RNA, 19 nt, Human
aaggucauuuuuuuuaaga

SEQ ID NO: 2712998 - RNA, 18 nt, Human
aaggucauuuuuuuuaag

SEQ ID NO: 2712999 - RNA, 21 nt, Human
aaguagggacuucugucuuca

SEQ ID NO: 2713000 - RNA, 21 nt, Human
aaguagaagucuuagauguau

SEQ ID NO: 2713001 - RNA, 17 nt, Human
aaguaucccuacuguaa

SEQ ID NO: 2713002 - RNA, 23 nt, Human
aaguaucccuacuguaauuugug

SEQ ID NO: 2713003 - RNA, 18 nt, Human
aaguaucccuacuguaau

SEQ ID NO: 2713004 - RNA, 20 nt, Human
aaguagaagucuuagaugua

SEQ ID NO: 2713005 - RNA, 19 nt, Human
aaguagaagucuuagaugu

SEQ ID NO: 2713006 - RNA, 17 nt, Human
aaguccaagcauaccaa

SEQ ID NO: 2713007 - RNA, 18 nt, Human
aaguccaagcauuuagau

SEQ ID NO: 2713008 - RNA, 18 nt, Human
aaguccucuuuucugaga

SEQ ID NO: 2713009 - RNA, 22 nt, Human
aaguccucuuuucugagaggac

SEQ ID NO: 2713010 - RNA, 19 nt, Human
aaguggaaaaauagccugc

SEQ ID NO: 2713011 - RNA, 21 nt, Human
aaguggaaaaauagccugccu

SEQ ID NO: 2713012 - RNA, 12 nt, Human
aaguugccuaaa

SEQ ID NO: 2713013 - RNA, 12 nt, Human
aaguugaauuuu

SEQ ID NO: 2713014 - RNA, 20 nt, Human
aaggcagcucuaaaugucaa

SEQ ID NO: 2713015 - RNA, 15 nt, Human
aaggauguucuagca

SEQ ID NO: 2713016 - RNA, 15 nt, Human
aaggauugcuacugu

SEQ ID NO: 2713017 - RNA, 15 nt, Human
aagcugggcagguug

SEQ ID NO: 2713018 - RNA, 18 nt, Human
aagcuggucccacucagu

SEQ ID NO: 2713019 - RNA, 21 nt, Human
aagcuggucccacucagucca

SEQ ID NO: 2713020 - RNA, 21 nt, Human
aaggacuucuuuaauuuugga

SEQ ID NO: 2713021 - RNA, 20 nt, Human
aaggacuucuuuaauuuugg

SEQ ID NO: 2713022 - RNA, 15 nt, Human
aaggacuucuuuaau

SEQ ID NO: 2713023 - RNA, 14 nt, Human
aaggacuucuuuaa

SEQ ID NO: 2713024 - RNA, 13 nt, Human
aaggacacuagaa

SEQ ID NO: 2713025 - RNA, 21 nt, Human
aagcgauucuucugcuucagc

SEQ ID NO: 2713026 - RNA, 17 nt, Human
aagcgauucuucugcuu

SEQ ID NO: 2713027 - RNA, 20 nt, Human
aagccagcaggcucucaggc

SEQ ID NO: 2713028 - RNA, 23 nt, Human
aagccagcaggcucucaggccag

SEQ ID NO: 2713029 - RNA, 14 nt, Human
aagcagcguuucua

SEQ ID NO: 2713030 - RNA, 20 nt, Human
aagcagcguuucuaugacac

SEQ ID NO: 2713031 - RNA, 17 nt, Human
aagcagcguuucuauga

SEQ ID NO: 2713032 - RNA, 20 nt, Human
aagcagauggaaugcugugu

SEQ ID NO: 2713033 - RNA, 17 nt, Human
aagcagauggaaugcug

SEQ ID NO: 2713034 - RNA, 19 nt, Human
aagcagauggaaugcugug

SEQ ID NO: 2713035 - RNA, 22 nt, Human
aagcagcguuucuaugacacau

SEQ ID NO: 2713036 - RNA, 21 nt, Human
aagcagcguuucuaugacaca

SEQ ID NO: 2713037 - RNA, 19 nt, Human
aagccagcaggcucucagg

SEQ ID NO: 2713038 - RNA, 13 nt, Human
aagauacugaaau

SEQ ID NO: 2713039 - RNA, 13 nt, Human
aagauaaaugugc

SEQ ID NO: 2713040 - RNA, 23 nt, Human
aagauacaguuacucagaauucu

SEQ ID NO: 2713041 - RNA, 12 nt, Human
aagauaaaugug

SEQ ID NO: 2713042 - RNA, 15 nt, Human
aaugauuaugaauua

SEQ ID NO: 2713043 - RNA, 21 nt, Human
aaugauuaugaauuacauuug

SEQ ID NO: 2713044 - RNA, 16 nt, Human
aaugauuaauuaaaac

SEQ ID NO: 2713045 - RNA, 19 nt, Human
aauccagacccggcugcgu

SEQ ID NO: 2713046 - RNA, 17 nt, Human
aauccagacccggcugc

SEQ ID NO: 2713047 - RNA, 15 nt, Human
aaucucaaauuucua

SEQ ID NO: 2713048 - RNA, 16 nt, Human
aaucucaaauuucuaa

SEQ ID NO: 2713049 - RNA, 18 nt, Human
aaucucaaauuucuaaau

SEQ ID NO: 2713050 - RNA, 17 nt, Human
aaucucaaauuucuaaa

SEQ ID NO: 2713051 - RNA, 20 nt, Human
aauacucuacccucuuagaa

SEQ ID NO: 2713052 - RNA, 22 nt, Human
aauacucuacccucuuagaaaa

SEQ ID NO: 2713053 - RNA, 13 nt, Human
aauacucuuauau

SEQ ID NO: 2713054 - RNA, 19 nt, Human
aaguugccuaaauccauuu

SEQ ID NO: 2713055 - RNA, 18 nt, Human
aaguugccuaaauccauu

SEQ ID NO: 2713056 - RNA, 17 nt, Human
aaguugccuaaauccau

SEQ ID NO: 2713057 - RNA, 16 nt, Human
aaguugccuaaaucca

SEQ ID NO: 2713058 - RNA, 15 nt, Human
aaguugccuaaaucc

SEQ ID NO: 2713059 - RNA, 15 nt, Human
aaucaccaaaggcuc

SEQ ID NO: 2713060 - RNA, 14 nt, Human
aaucaccgaaaacg

SEQ ID NO: 2713061 - RNA, 15 nt, Human
aaucaccgaaaacgu

SEQ ID NO: 2713062 - RNA, 13 nt, Human
aauagacaauuua

SEQ ID NO: 2713063 - RNA, 16 nt, Human
aauauguuucaaacuu

SEQ ID NO: 2713064 - RNA, 17 nt, Human
aauauguuucaaacuuu

SEQ ID NO: 2713065 - RNA, 13 nt, Human
aauauguuucaaa

SEQ ID NO: 2713066 - RNA, 15 nt, Human
aauauguuucaaacu

SEQ ID NO: 2713067 - RNA, 23 nt, Human
aauguuucaaacauauauaacaa

SEQ ID NO: 2713068 - RNA, 15 nt, Human
aauguuugccucugc

SEQ ID NO: 2713069 - RNA, 16 nt, Human
aauguuugccucugcc

SEQ ID NO: 2713070 - RNA, 15 nt, Human
aaugugaaaagaaaa

SEQ ID NO: 2713071 - RNA, 21 nt, Human
aaugcuagguuaauuccaauu

SEQ ID NO: 2713072 - RNA, 18 nt, Human
aaugcgugcauaccacuu

SEQ ID NO: 2713073 - RNA, 19 nt, Human
aaugcgugcauaccacuuu

SEQ ID NO: 2713074 - RNA, 18 nt, Human
aaugcuagguuaauucca

SEQ ID NO: 2713075 - RNA, 19 nt, Human
aaugcuagguuaauuccaa

SEQ ID NO: 2713076 - RNA, 23 nt, Human
aaugccuuacccucauguucuua

SEQ ID NO: 2713077 - RNA, 16 nt, Human
agcaguugaaaagacu

SEQ ID NO: 2713078 - RNA, 13 nt, Human
agcaguugaaaag

SEQ ID NO: 2713079 - RNA, 23 nt, Human
agcaguucagagcugcccucucc

SEQ ID NO: 2713080 - RNA, 20 nt, Human
agcaguucagagcugcccuc

SEQ ID NO: 2713081 - RNA, 18 nt, Human
agcauccuggcacccggc

SEQ ID NO: 2713082 - RNA, 22 nt, Human
agcauccuggcacccggccccu

SEQ ID NO: 2713083 - RNA, 23 nt, Human
agcauccuggcacccggccccug

SEQ ID NO: 2713084 - RNA, 20 nt, Human
agcaugccuggauggggcug

SEQ ID NO: 2713085 - RNA, 23 nt, Human
agcaugccuggauggggcugcac

SEQ ID NO: 2713086 - RNA, 23 nt, Human
agccaagugugguagagugugcc

SEQ ID NO: 2713087 - RNA, 16 nt, Human
agcacugacuucuaag

SEQ ID NO: 2713088 - RNA, 18 nt, Human
agcacugacagauuucca

SEQ ID NO: 2713089 - RNA, 13 nt, Human
agcacugacagau

SEQ ID NO: 2713090 - RNA, 14 nt, Human
agcacugacagauu

SEQ ID NO: 2713091 - RNA, 20 nt, Human
agcacagacccugcccugug

SEQ ID NO: 2713092 - RNA, 18 nt, Human
agcacagacccugcccug

SEQ ID NO: 2713093 - RNA, 19 nt, Human
agcacagacccugcccugu

SEQ ID NO: 2713094 - RNA, 23 nt, Human
agcacacuugacaucaacugcau

SEQ ID NO: 2713095 - RNA, 17 nt, Human
agcacagacccugcccu

SEQ ID NO: 2713096 - RNA, 13 nt, Human
agcagcguuucua

SEQ ID NO: 2713097 - RNA, 18 nt, Human
agcagugcaugcuguccc

SEQ ID NO: 2713098 - RNA, 19 nt, Human
agcagugcaugcugucccu

SEQ ID NO: 2713099 - RNA, 20 nt, Human
agcagugcaugcugucccuu

SEQ ID NO: 2713100 - RNA, 13 nt, Human
agccgcuggggcc

SEQ ID NO: 2713101 - RNA, 21 nt, Human
agccgccaugcuccuggccca

SEQ ID NO: 2713102 - RNA, 22 nt, Human
agccucccacgacugcccggca

SEQ ID NO: 2713103 - RNA, 21 nt, Human
agccucccaaagugcugggau

SEQ ID NO: 2713104 - RNA, 14 nt, Human
agccuccuccagcc

SEQ ID NO: 2713105 - RNA, 20 nt, Human
agccucccgaguagcuggga

SEQ ID NO: 2713106 - RNA, 18 nt, Human
agccucccgaguagcugg

SEQ ID NO: 2713107 - RNA, 19 nt, Human
agccucccgaguagcuggg

SEQ ID NO: 2713108 - RNA, 13 nt, Human
agccccagugccc

SEQ ID NO: 2713109 - RNA, 14 nt, Human
agccccagugccca

SEQ ID NO: 2713110 - RNA, 15 nt, Human
agccccagugcccac

SEQ ID NO: 2713111 - RNA, 13 nt, Human
agccccauucugc

SEQ ID NO: 2713112 - RNA, 16 nt, Human
agccccauucugccug

SEQ ID NO: 2713113 - RNA, 18 nt, Human
agccagcaggcucucagg

SEQ ID NO: 2713114 - RNA, 19 nt, Human
agccagcaggcucucaggc

SEQ ID NO: 2713115 - RNA, 17 nt, Human
agccagcaggcucucag

SEQ ID NO: 2713116 - RNA, 20 nt, Human
agccagcaggcucucaggcc

SEQ ID NO: 2713117 - RNA, 18 nt, Human
agacggagucccaccuug

SEQ ID NO: 2713118 - RNA, 22 nt, Human
agacgcugugcugcccugccca

SEQ ID NO: 2713119 - RNA, 12 nt, Human
agacagcugccu

SEQ ID NO: 2713120 - RNA, 11 nt, Human
agacagcucuu

SEQ ID NO: 2713121 - RNA, 12 nt, Human
agacagcucuua

SEQ ID NO: 2713122 - RNA, 21 nt, Human
agacgcugugcugcccugccc

SEQ ID NO: 2713123 - RNA, 14 nt, Human
agacagcccgggcu

SEQ ID NO: 2713124 - RNA, 15 nt, Human
agacagcccgggcuc

SEQ ID NO: 2713125 - RNA, 23 nt, Human
agacagagucucacuguugccca

SEQ ID NO: 2713126 - RNA, 21 nt, Human
agacugcauuauauuuauuac

SEQ ID NO: 2713127 - RNA, 19 nt, Human
agacuggaagcacagcuuc

SEQ ID NO: 2713128 - RNA, 17 nt, Human
agacuggaagcacagcu

SEQ ID NO: 2713129 - RNA, 16 nt, Human
agacuggaagcacagc

SEQ ID NO: 2713130 - RNA, 17 nt, Human
agagaacuuccagaucc

SEQ ID NO: 2713131 - RNA, 19 nt, Human
agagcccaccuuggcucaa

SEQ ID NO: 2713132 - RNA, 13 nt, Human
agagcccacgccc

SEQ ID NO: 2713133 - RNA, 16 nt, Human
agagcccacgccccca

SEQ ID NO: 2713134 - RNA, 22 nt, Human
agagaggguggugaccucugcc

SEQ ID NO: 2713135 - RNA, 20 nt, Human
agagaggguggugaccucug

SEQ ID NO: 2713136 - RNA, 21 nt, Human
agagaggguggugaccucugc

SEQ ID NO: 2713137 - RNA, 19 nt, Human
agauauaugcucugcaugu

SEQ ID NO: 2713138 - RNA, 14 nt, Human
agaucuucuguggg

SEQ ID NO: 2713139 - RNA, 11 nt, Human
agagugggagc

SEQ ID NO: 2713140 - RNA, 19 nt, Human
agaguggggauaugauuua

SEQ ID NO: 2713141 - RNA, 14 nt, Human
agagugugccugaa

SEQ ID NO: 2713142 - RNA, 13 nt, Human
agaguguugaaac

SEQ ID NO: 2713143 - RNA, 19 nt, Human
agaggguggugaccucugc

SEQ ID NO: 2713144 - RNA, 20 nt, Human
agaggguggugaccucugcc

SEQ ID NO: 2713145 - RNA, 22 nt, Human
agaggguggugaccucugccug

SEQ ID NO: 2713146 - RNA, 12 nt, Human
agagggcacaga

SEQ ID NO: 2713147 - RNA, 16 nt, Human
agaggaaggagaggag

SEQ ID NO: 2713148 - RNA, 15 nt, Human
agaggagagaggacc

SEQ ID NO: 2713149 - RNA, 16 nt, Human
agaggagagaggaccc

SEQ ID NO: 2713150 - RNA, 15 nt, Human
agagcccaggccucc

SEQ ID NO: 2713151 - RNA, 13 nt, Human
agagcccaggccu

SEQ ID NO: 2713152 - RNA, 14 nt, Human
agagcccaggccuc

SEQ ID NO: 2713153 - RNA, 23 nt, Human
aggaugguucccuugaugaagaa

SEQ ID NO: 2713154 - RNA, 15 nt, Human
aggauguucugggac

SEQ ID NO: 2713155 - RNA, 16 nt, Human
aggauguucugggaca

SEQ ID NO: 2713156 - RNA, 22 nt, Human
aggauguucuagcauggcugcc

SEQ ID NO: 2713157 - RNA, 18 nt, Human
aggauguucugggacaca

SEQ ID NO: 2713158 - RNA, 14 nt, Human
aggauuauuggaaa

SEQ ID NO: 2713159 - RNA, 13 nt, Human
aggaccucaggug

SEQ ID NO: 2713160 - RNA, 23 nt, Human
aggaugcuuguacauaaugcgug

SEQ ID NO: 2713161 - RNA, 21 nt, Human
aggaugcuuguacauaaugcg

SEQ ID NO: 2713162 - RNA, 20 nt, Human
aggaauccagacccggcugc

SEQ ID NO: 2713163 - RNA, 17 nt, Human
aggaauccagacccggc

SEQ ID NO: 2713164 - RNA, 21 nt, Human
aggaaucaugugccaagcaga

SEQ ID NO: 2713165 - RNA, 22 nt, Human
agcuccccucggagaagagcug

SEQ ID NO: 2713166 - RNA, 23 nt, Human
agcuccgcuuucuacccagcgag

SEQ ID NO: 2713167 - RNA, 20 nt, Human
agcuccgcuuucuacccagc

SEQ ID NO: 2713168 - RNA, 21 nt, Human
agcuccgcuuucuacccagcg

SEQ ID NO: 2713169 - RNA, 12 nt, Human
agcuccuucugu

SEQ ID NO: 2713170 - RNA, 13 nt, Human
agcuccuucuguc

SEQ ID NO: 2713171 - RNA, 21 nt, Human
agcugcgguccacccaggagc

SEQ ID NO: 2713172 - RNA, 23 nt, Human
agcugcgguccacccaggagccc

SEQ ID NO: 2713173 - RNA, 18 nt, Human
aggugcuacaaaaacaca

SEQ ID NO: 2713174 - RNA, 23 nt, Human
aggucuguucuuuccaaaguaca

SEQ ID NO: 2713175 - RNA, 22 nt, Human
aggucuguucuuuccaaaguac

SEQ ID NO: 2713176 - RNA, 22 nt, Human
aggugcuacaaaaacacagcaa

SEQ ID NO: 2713177 - RNA, 21 nt, Human
aggugcuacaaaaacacagca

SEQ ID NO: 2713178 - RNA, 20 nt, Human
aggugcuacaaaaacacagc

SEQ ID NO: 2713179 - RNA, 19 nt, Human
aggugcuacaaaaacacag

SEQ ID NO: 2713180 - RNA, 18 nt, Human
aggucuguucuuuccaaa

SEQ ID NO: 2713181 - RNA, 20 nt, Human
agguaaaagcaucacaugaa

SEQ ID NO: 2713182 - RNA, 24 nt, Human
aggugcuacaaaaacacagcaagg

SEQ ID NO: 2713183 - RNA, 23 nt, Human
aggugcuacaaaaacacagcaag

SEQ ID NO: 2713184 - RNA, 19 nt, Human
aggugcuaggaacacuccu

SEQ ID NO: 2713185 - RNA, 22 nt, Human
aggugcuaggaacacuccuuca

SEQ ID NO: 2713186 - RNA, 23 nt, Human
aggugcuaggaacacuccuucac

SEQ ID NO: 2713187 - RNA, 14 nt, Human
agguucaaagauau

SEQ ID NO: 2713188 - RNA, 22 nt, Human
agguucccuuugacgccauccc

SEQ ID NO: 2713189 - RNA, 13 nt, Human
agguucccuuuga

SEQ ID NO: 2713190 - RNA, 23 nt, Human
agguucccuuugacgccauccca

SEQ ID NO: 2713191 - RNA, 11 nt, Human
agggucccugg

SEQ ID NO: 2713192 - RNA, 19 nt, Human
aggguaucaggugcugcca

SEQ ID NO: 2713193 - RNA, 18 nt, Human
aggguaucaggugcugcc

SEQ ID NO: 2713194 - RNA, 21 nt, Human
aggguaucaggugcugccauc

SEQ ID NO: 2713195 - RNA, 15 nt, Human
aggguaucuggugac

SEQ ID NO: 2713196 - RNA, 19 nt, Human
aggggccucuuaugggcug

SEQ ID NO: 2713197 - RNA, 20 nt, Human
aggggccucuuaugggcugg

SEQ ID NO: 2713198 - RNA, 21 nt, Human
aggggccucuuaugggcuggg

SEQ ID NO: 2713199 - RNA, 17 nt, Human
aggcuacugucagcucc

SEQ ID NO: 2713200 - RNA, 22 nt, Human
aggcccuucucuccagccccug

SEQ ID NO: 2713201 - RNA, 23 nt, Human
aggcccuucucuccagccccugg

SEQ ID NO: 2713202 - RNA, 20 nt, Human
aggcccuucucuccagcccc

SEQ ID NO: 2713203 - RNA, 21 nt, Human
aggcccuucucuccagccccu

SEQ ID NO: 2713204 - RNA, 17 nt, Human
aggcuagauguauguac

SEQ ID NO: 2713205 - RNA, 15 nt, Human
aggcuagauguaugu

SEQ ID NO: 2713206 - RNA, 16 nt, Human
aggcuagauguaugua

SEQ ID NO: 2713207 - RNA, 13 nt, Human
aggcuguauccca

SEQ ID NO: 2713208 - RNA, 18 nt, Human
aggcuguaucccaugagc

SEQ ID NO: 2713209 - RNA, 20 nt, Human
aggcugucaauuacaggaag

SEQ ID NO: 2713210 - RNA, 19 nt, Human
aggcugucaauuacaggaa

SEQ ID NO: 2713211 - RNA, 23 nt, Human
agggacagaggggguggccuccc

SEQ ID NO: 2713212 - RNA, 22 nt, Human
agggacagaggggguggccucc

SEQ ID NO: 2713213 - RNA, 21 nt, Human
aggcugucaauuacaggaagu

SEQ ID NO: 2713214 - RNA, 14 nt, Human
auagucaaauugug

SEQ ID NO: 2713215 - RNA, 23 nt, Human
auaguauuugagaguucuaaauu

SEQ ID NO: 2713216 - RNA, 15 nt, Human
auagguuuaauaauu

SEQ ID NO: 2713217 - RNA, 14 nt, Human
auagguuuggacaa

SEQ ID NO: 2713218 - RNA, 17 nt, Human
auaguaugguggcuggg

SEQ ID NO: 2713219 - RNA, 18 nt, Human
auaguaugguggcugggu

SEQ ID NO: 2713220 - RNA, 20 nt, Human
auaguauuugagaguucuaa

SEQ ID NO: 2713221 - RNA, 21 nt, Human
auaguauuugagaguucuaaa

SEQ ID NO: 2713222 - RNA, 14 nt, Human
auaggugcuacaaa

SEQ ID NO: 2713223 - RNA, 23 nt, Human
auaggugcuacaaaaacacagca

SEQ ID NO: 2713224 - RNA, 21 nt, Human
auaggugcuacaaaaacacag

SEQ ID NO: 2713225 - RNA, 15 nt, Human
auaggugcuacaaaa

SEQ ID NO: 2713226 - RNA, 15 nt, Human
auagccaaggccaaa

SEQ ID NO: 2713227 - RNA, 21 nt, Human
auagccaaggccaaaggaagc

SEQ ID NO: 2713228 - RNA, 20 nt, Human
auaugcuucuguuuuauaau

SEQ ID NO: 2713229 - RNA, 22 nt, Human
auaugcuucuguuuuauaauuu

SEQ ID NO: 2713230 - RNA, 21 nt, Human
auaugcuuauacacuuacacu

SEQ ID NO: 2713231 - RNA, 23 nt, Human
auaugcuauuucuauauuuucau

SEQ ID NO: 2713232 - RNA, 22 nt, Human
auaugcuauuucuauauuuuca

SEQ ID NO: 2713233 - RNA, 22 nt, Human
auauuaccacagacauacuaac

SEQ ID NO: 2713234 - RNA, 19 nt, Human
auauuaccacagacauacu

SEQ ID NO: 2713235 - RNA, 15 nt, Human
auaugcuauuucuau

SEQ ID NO: 2713236 - RNA, 21 nt, Human
auaugcuauuucuauauuuuc

SEQ ID NO: 2713237 - RNA, 19 nt, Human
auaugcuauuucuauauuu

SEQ ID NO: 2713238 - RNA, 18 nt, Human
auaugcuauuucuauauu

SEQ ID NO: 2713239 - RNA, 16 nt, Human
auaugcuauuucuaua

SEQ ID NO: 2713240 - RNA, 16 nt, Human
auauuauguuaaaacu

SEQ ID NO: 2713241 - RNA, 13 nt, Human
auauuauguguuu

SEQ ID NO: 2713242 - RNA, 22 nt, Human
auauuuauuacuguaagaaaau

SEQ ID NO: 2713243 - RNA, 19 nt, Human
auauuuacuucuuauacau

SEQ ID NO: 2713244 - RNA, 13 nt, Human
auauuuauuuuaa

SEQ ID NO: 2713245 - RNA, 20 nt, Human
auauuuacuaaaauggacug

SEQ ID NO: 2713246 - RNA, 18 nt, Human
auauuuacuaaaauggac

SEQ ID NO: 2713247 - RNA, 19 nt, Human
auauauuuuuuucugaaau

SEQ ID NO: 2713248 - RNA, 18 nt, Human
auaaaggauuaaugucaa

SEQ ID NO: 2713249 - RNA, 15 nt, Human
auaacauaaaucugu

SEQ ID NO: 2713250 - RNA, 14 nt, Human
auaacauaaaucug

SEQ ID NO: 2713251 - RNA, 19 nt, Human
auaacauaaaucugugaac

SEQ ID NO: 2713252 - RNA, 18 nt, Human
auaacauaaaucugugaa

SEQ ID NO: 2713253 - RNA, 17 nt, Human
auaacauaaaucuguga

SEQ ID NO: 2713254 - RNA, 22 nt, Human
auaaaaauauuguguugugaau

SEQ ID NO: 2713255 - RNA, 17 nt, Human
auaaaacuuuuuaaaau

SEQ ID NO: 2713256 - RNA, 16 nt, Human
auaaacuuuaccuuuu

SEQ ID NO: 2713257 - RNA, 21 nt, Human
auaaacuuuaccuuuuuuaua

SEQ ID NO: 2713258 - RNA, 24 nt, Human
auaaacuuuaccuuuuuuauacau

SEQ ID NO: 2713259 - RNA, 14 nt, Human
auaaaaauauugug

SEQ ID NO: 2713260 - RNA, 11 nt, Human
auaaaacuuuu

SEQ ID NO: 2713261 - RNA, 15 nt, Human
auaaaacuuuuuaaa

SEQ ID NO: 2713262 - RNA, 13 nt, Human
auaaagcagcguu

SEQ ID NO: 2713263 - RNA, 20 nt, Human
auaaagcagcguuucuauga

SEQ ID NO: 2713264 - RNA, 19 nt, Human
auaaagcagcguuucuaug

SEQ ID NO: 2713265 - RNA, 18 nt, Human
auaaagcagcguuucuau

SEQ ID NO: 2713266 - RNA, 14 nt, Human
auaaagcagcguuu

SEQ ID NO: 2713267 - RNA, 18 nt, Human
auacaccacuacauucug

SEQ ID NO: 2713268 - RNA, 18 nt, Human
auacacacucaaaucaag

SEQ ID NO: 2713269 - RNA, 17 nt, Human
auacacacucaaaucaa

SEQ ID NO: 2713270 - RNA, 21 nt, Human
auacaccacuacauucuguua

SEQ ID NO: 2713271 - RNA, 20 nt, Human
auacaccacuacauucuguu

SEQ ID NO: 2713272 - RNA, 19 nt, Human
auacaccacuacauucugu

SEQ ID NO: 2713273 - RNA, 23 nt, Human
auaauguuucaaacauauauaac

SEQ ID NO: 2713274 - RNA, 15 nt, Human
auaauguaagcucua

SEQ ID NO: 2713275 - RNA, 20 nt, Human
auaauuaaauuuugaguucu

SEQ ID NO: 2713276 - RNA, 15 nt, Human
auaauuaacauguua

SEQ ID NO: 2713277 - RNA, 20 nt, Human
auaaugcgugcauaccacuu

SEQ ID NO: 2713278 - RNA, 21 nt, Human
auaaugcgugcauaccacuuu

SEQ ID NO: 2713279 - RNA, 14 nt, Human
auaauguaagcucu

SEQ ID NO: 2713280 - RNA, 15 nt, Human
auaaggaaaaguuua

SEQ ID NO: 2713281 - RNA, 16 nt, Human
auaaggaaaaguuuaa

SEQ ID NO: 2713282 - RNA, 17 nt, Human
auaccugucccccugac

SEQ ID NO: 2713283 - RNA, 18 nt, Human
auaccugucccccugaca

SEQ ID NO: 2713284 - RNA, 11 nt, Human
auacccacccc

SEQ ID NO: 2713285 - RNA, 12 nt, Human
auacccaccccc

SEQ ID NO: 2713286 - RNA, 15 nt, Human
agugucuuaauuaaa

SEQ ID NO: 2713287 - RNA, 18 nt, Human
aguguauuuuuuuacuaa

SEQ ID NO: 2713288 - RNA, 17 nt, Human
aguguauuuuuuuacua

SEQ ID NO: 2713289 - RNA, 16 nt, Human
agugggagcugccugu

SEQ ID NO: 2713290 - RNA, 15 nt, Human
agugggagcugccug

SEQ ID NO: 2713291 - RNA, 14 nt, Human
agugggagcugccu

SEQ ID NO: 2713292 - RNA, 23 nt, Human
aguggcuuaaaacaacacucaca

SEQ ID NO: 2713293 - RNA, 18 nt, Human
agugucuuaauuaaaaga

SEQ ID NO: 2713294 - RNA, 17 nt, Human
agugucuuaauuaaaag

SEQ ID NO: 2713295 - RNA, 23 nt, Human
aguugaaaaucuuauaauuuaaa

SEQ ID NO: 2713296 - RNA, 22 nt, Human
aguugaaaagacuccaaagaaa

SEQ ID NO: 2713297 - RNA, 16 nt, Human
aguuguguuugaagca

SEQ ID NO: 2713298 - RNA, 14 nt, Human
aguugaagacagag

SEQ ID NO: 2713299 - RNA, 20 nt, Human
aguuguuugauucagacagc

SEQ ID NO: 2713300 - RNA, 21 nt, Human
aguugaaaagacuccaaagaa

SEQ ID NO: 2713301 - RNA, 22 nt, Human
aguugaaaaucuuauaauuuaa

SEQ ID NO: 2713302 - RNA, 15 nt, Human
aguucauacauugua

SEQ ID NO: 2713303 - RNA, 22 nt, Human
aguucaucuugaauuguaagga

SEQ ID NO: 2713304 - RNA, 10 nt, Human
aguucauaca

SEQ ID NO: 2713305 - RNA, 11 nt, Human
aguucauacau

SEQ ID NO: 2713306 - RNA, 20 nt, Human
aguucagguaacaggcagau

SEQ ID NO: 2713307 - RNA, 19 nt, Human
aguucagguaacaggcaga

SEQ ID NO: 2713308 - RNA, 17 nt, Human
aguuacagacaaagcgu

SEQ ID NO: 2713309 - RNA, 12 nt, Human
aguuaaauaaau

SEQ ID NO: 2713310 - RNA, 18 nt, Human
aguuacacuaaaagguga

SEQ ID NO: 2713311 - RNA, 14 nt, Human
aguuacagacaaag

SEQ ID NO: 2713312 - RNA, 16 nt, Human
aguuacagacaaagcg

SEQ ID NO: 2713313 - RNA, 23 nt, Human
agucaaauugugugaaagguacu

SEQ ID NO: 2713314 - RNA, 19 nt, Human
agucaaauugugugaaagg

SEQ ID NO: 2713315 - RNA, 16 nt, Human
aguaugaaauuauaua

SEQ ID NO: 2713316 - RNA, 14 nt, Human
aguaugaaauuaua

SEQ ID NO: 2713317 - RNA, 16 nt, Human
aguaugaggcauuugu

SEQ ID NO: 2713318 - RNA, 15 nt, Human
aguaugaggcauuug

SEQ ID NO: 2713319 - RNA, 15 nt, Human
aguaucucagggccu

SEQ ID NO: 2713320 - RNA, 11 nt, Human
aguaucuugaa

SEQ ID NO: 2713321 - RNA, 12 nt, Human
aguaucuugaag

SEQ ID NO: 2713322 - RNA, 15 nt, Human
aguaucuugaagacu

SEQ ID NO: 2713323 - RNA, 12 nt, Human
aguccuguaaug

SEQ ID NO: 2713324 - RNA, 12 nt, Human
agucugaaggcu

SEQ ID NO: 2713325 - RNA, 16 nt, Human
agucugaaggcugggu

SEQ ID NO: 2713326 - RNA, 13 nt, Human
agucugaaggcug

SEQ ID NO: 2713327 - RNA, 15 nt, Human
agucugaaggcuggg

SEQ ID NO: 2713328 - RNA, 22 nt, Human
aguccuggcaugggaaugaaug

SEQ ID NO: 2713329 - RNA, 20 nt, Human
aguccuggcaugggaaugaa

SEQ ID NO: 2713330 - RNA, 21 nt, Human
aguccuggcaugggaaugaau

SEQ ID NO: 2713331 - RNA, 20 nt, Human
agugaacuugggccacugug

SEQ ID NO: 2713332 - RNA, 17 nt, Human
agucuggaaugcagugg

SEQ ID NO: 2713333 - RNA, 16 nt, Human
agucugauucccaagc

SEQ ID NO: 2713334 - RNA, 18 nt, Human
agucugauucccaagcuc

SEQ ID NO: 2713335 - RNA, 16 nt, Human
agugaagacaaugacu

SEQ ID NO: 2713336 - RNA, 14 nt, Human
agugaagacaauga

SEQ ID NO: 2713337 - RNA, 19 nt, Human
auguaagggaaacugccag

SEQ ID NO: 2713338 - RNA, 17 nt, Human
auguaauuaaguacuau

SEQ ID NO: 2713339 - RNA, 15 nt, Human
auguaauuaaguacu

SEQ ID NO: 2713340 - RNA, 16 nt, Human
auguaagggaaacugc

SEQ ID NO: 2713341 - RNA, 14 nt, Human
auguaagggaaacu

SEQ ID NO: 2713342 - RNA, 19 nt, Human
auguauucuagcuaaugua

SEQ ID NO: 2713343 - RNA, 20 nt, Human
auguauucuagcuaauguaa

SEQ ID NO: 2713344 - RNA, 19 nt, Human
auggucaccaaaucagcug

SEQ ID NO: 2713345 - RNA, 19 nt, Human
augguccgugcuaaggacu

SEQ ID NO: 2713346 - RNA, 21 nt, Human
augguccgugcuaaggacuug

SEQ ID NO: 2713347 - RNA, 20 nt, Human
augguccgugcuaaggacuu

SEQ ID NO: 2713348 - RNA, 14 nt, Human
augucuuuucuugc

SEQ ID NO: 2713349 - RNA, 23 nt, Human
augugaacaguuguguuugaagc

SEQ ID NO: 2713350 - RNA, 21 nt, Human
augugaacaguuguguuugaa

SEQ ID NO: 2713351 - RNA, 11 nt, Human
augugaacagu

SEQ ID NO: 2713352 - RNA, 22 nt, Human
augugaaacuggauuaaacuua

SEQ ID NO: 2713353 - RNA, 18 nt, Human
augugggcagugauguca

SEQ ID NO: 2713354 - RNA, 13 nt, Human
augugugaaguga

SEQ ID NO: 2713355 - RNA, 11 nt, Human
auguucuggga

SEQ ID NO: 2713356 - RNA, 12 nt, Human
auguucugggac

SEQ ID NO: 2713357 - RNA, 19 nt, Human
auguuugccucugccucug

SEQ ID NO: 2713358 - RNA, 22 nt, Human
auguuugccucugccucugaca

SEQ ID NO: 2713359 - RNA, 18 nt, Human
auguuugccucugccucu

SEQ ID NO: 2713360 - RNA, 13 nt, Human
auguucugggaca

SEQ ID NO: 2713361 - RNA, 12 nt, Human
auguuucaaacu

SEQ ID NO: 2713362 - RNA, 13 nt, Human
auguuucaaacuu

SEQ ID NO: 2713363 - RNA, 14 nt, Human
auguuucaaacuuu

SEQ ID NO: 2713364 - RNA, 17 nt, Human
auguuucaaacuuugga

SEQ ID NO: 2713365 - RNA, 19 nt, Human
augccucucucaggccaaa

SEQ ID NO: 2713366 - RNA, 17 nt, Human
augccucucucaggcca

SEQ ID NO: 2713367 - RNA, 16 nt, Human
augcaugaaguaauau

SEQ ID NO: 2713368 - RNA, 21 nt, Human
augcauagguuuagcaguaua

SEQ ID NO: 2713369 - RNA, 17 nt, Human
augcauagguuuagcag

SEQ ID NO: 2713370 - RNA, 18 nt, Human
augcacagaguuguuaca

SEQ ID NO: 2713371 - RNA, 17 nt, Human
augcacagaguuguuac

SEQ ID NO: 2713372 - RNA, 16 nt, Human
augcacagaguuguua

SEQ ID NO: 2713373 - RNA, 16 nt, Human
augcacaaacagaggc

SEQ ID NO: 2713374 - RNA, 17 nt, Human
augcacaaacagaggcc

SEQ ID NO: 2713375 - RNA, 15 nt, Human
augcacaaacagagg

SEQ ID NO: 2713376 - RNA, 24 nt, Human
augauguuuuccaugaguccccug

SEQ ID NO: 2713377 - RNA, 16 nt, Human
augaugccaugaggaa

SEQ ID NO: 2713378 - RNA, 17 nt, Human
augaugccaugaggaac

SEQ ID NO: 2713379 - RNA, 11 nt, Human
augcugcccug

SEQ ID NO: 2713380 - RNA, 16 nt, Human
augcucuuuacuucau

SEQ ID NO: 2713381 - RNA, 12 nt, Human
augcuuguacau

SEQ ID NO: 2713382 - RNA, 14 nt, Human
augcuuguacauaa

SEQ ID NO: 2713383 - RNA, 13 nt, Human
augcuuguacaua

SEQ ID NO: 2713384 - RNA, 15 nt, Human
auggauuuccagcca

SEQ ID NO: 2713385 - RNA, 23 nt, Human
aucagcugcugaaacaacaaaua

SEQ ID NO: 2713386 - RNA, 22 nt, Human
aucagcugcugaaacaacaaau

SEQ ID NO: 2713387 - RNA, 17 nt, Human
auauuuauuuuaauaau

SEQ ID NO: 2713388 - RNA, 14 nt, Human
auauuuauuuuaau

SEQ ID NO: 2713389 - RNA, 15 nt, Human
auauuuauuuuaaua

SEQ ID NO: 2713390 - RNA, 21 nt, Human
aucacagccucugaaaaccaa

SEQ ID NO: 2713391 - RNA, 18 nt, Human
aucaccaacgucugugcc

SEQ ID NO: 2713392 - RNA, 19 nt, Human
aucaccaacgucugugcca

SEQ ID NO: 2713393 - RNA, 23 nt, Human
aucacccgcuaagagggagggag

SEQ ID NO: 2713394 - RNA, 21 nt, Human
aucagcugcugaaacaacaaa

SEQ ID NO: 2713395 - RNA, 19 nt, Human
aucagccugcuccagcugu

SEQ ID NO: 2713396 - RNA, 17 nt, Human
aucagccugcuccagcu

SEQ ID NO: 2713397 - RNA, 18 nt, Human
aucagccugcuccagcug

SEQ ID NO: 2713398 - RNA, 23 nt, Human
aucagcacgauuucuguuuagau

SEQ ID NO: 2713399 - RNA, 20 nt, Human
aucagcacgauuucuguuua

SEQ ID NO: 2713400 - RNA, 19 nt, Human
aucagcacgauuucuguuu

SEQ ID NO: 2713401 - RNA, 14 nt, Human
aucaccgaaaacgu

SEQ ID NO: 2713402 - RNA, 19 nt, Human
aucaccgaaaacguggcug

SEQ ID NO: 2713403 - RNA, 21 nt, Human
aucaccgaaaacguggcugcu

SEQ ID NO: 2713404 - RNA, 20 nt, Human
auccucccaccucagccucc

SEQ ID NO: 2713405 - RNA, 18 nt, Human
auccucccaccucagccu

SEQ ID NO: 2713406 - RNA, 19 nt, Human
auccucccaccucagccuc

SEQ ID NO: 2713407 - RNA, 14 nt, Human
aucccauuuaaaaa

SEQ ID NO: 2713408 - RNA, 15 nt, Human
aucccauuuaaaaaa

SEQ ID NO: 2713409 - RNA, 15 nt, Human
auccagacccggcug

SEQ ID NO: 2713410 - RNA, 23 nt, Human
auccucauacccacccccaccca

SEQ ID NO: 2713411 - RNA, 11 nt, Human
auccuccaggu

SEQ ID NO: 2713412 - RNA, 15 nt, Human
auccucccaccucag

SEQ ID NO: 2713413 - RNA, 23 nt, Human
auccuccaggugcacaagcucca

SEQ ID NO: 2713414 - RNA, 15 nt, Human
auccccuguagagug

SEQ ID NO: 2713415 - RNA, 21 nt, Human
augaccuuucaauaggaaaaa

SEQ ID NO: 2713416 - RNA, 22 nt, Human
augaccuuucaauaggaaaaac

SEQ ID NO: 2713417 - RNA, 23 nt, Human
augaccuuucaauaggaaaaacu

SEQ ID NO: 2713418 - RNA, 19 nt, Human
augaaagacuguacaaagu

SEQ ID NO: 2713419 - RNA, 17 nt, Human
augaaagacuguacaaa

SEQ ID NO: 2713420 - RNA, 16 nt, Human
augaaagacuguacaa

SEQ ID NO: 2713421 - RNA, 13 nt, Human
augaaagacugua

SEQ ID NO: 2713422 - RNA, 17 nt, Human
aucuugaauuguaagga

SEQ ID NO: 2713423 - RNA, 14 nt, Human
aucuucuuuauaau

SEQ ID NO: 2713424 - RNA, 18 nt, Human
aucuugaagacuuuucuu

SEQ ID NO: 2713425 - RNA, 22 nt, Human
aucuucugaacuuggcgcugcc

SEQ ID NO: 2713426 - RNA, 22 nt, Human
aucugcuuuuuaaagaaugcuc

SEQ ID NO: 2713427 - RNA, 21 nt, Human
aucuauauuuuacauaaauuu

SEQ ID NO: 2713428 - RNA, 17 nt, Human
aucuauauuuuacauaa

SEQ ID NO: 2713429 - RNA, 14 nt, Human
aucuauauuuuaca

SEQ ID NO: 2713430 - RNA, 21 nt, Human
aucucccccagccccauccuc

SEQ ID NO: 2713431 - RNA, 17 nt, Human
caaugcaaaccaucauu

SEQ ID NO: 2713432 - RNA, 18 nt, Human
caaugcaaaccaucauug

SEQ ID NO: 2713433 - RNA, 23 nt, Human
caaugcacuuuguucuggcucuu

SEQ ID NO: 2713434 - RNA, 19 nt, Human
caaugcaaaccaucauuga

SEQ ID NO: 2713435 - RNA, 21 nt, Human
caauaggaaaaacugauuuuu

SEQ ID NO: 2713436 - RNA, 20 nt, Human
caauaggaaaaacugauuuu

SEQ ID NO: 2713437 - RNA, 11 nt, Human
cacaacagauu

SEQ ID NO: 2713438 - RNA, 16 nt, Human
cacaaaaguuucucuu

SEQ ID NO: 2713439 - RNA, 18 nt, Human
cacaaaaguuucucuuuu

SEQ ID NO: 2713440 - RNA, 19 nt, Human
cacacucaaaucaagaaac

SEQ ID NO: 2713441 - RNA, 14 nt, Human
cacacugaagaagc

SEQ ID NO: 2713442 - RNA, 21 nt, Human
cacacuugacaucaacugcau

SEQ ID NO: 2713443 - RNA, 22 nt, Human
cacagacccugcccugugggcc

SEQ ID NO: 2713444 - RNA, 17 nt, Human
cacagaguuguuacauu

SEQ ID NO: 2713445 - RNA, 16 nt, Human
cacagaguuguuacau

SEQ ID NO: 2713446 - RNA, 13 nt, Human
cacaacuauauug

SEQ ID NO: 2713447 - RNA, 14 nt, Human
cacaacuauuuuuc

SEQ ID NO: 2713448 - RNA, 19 nt, Human
cacaacuauuuuuccaaaa

SEQ ID NO: 2713449 - RNA, 14 nt, Human
cacacaccagagcc

SEQ ID NO: 2713450 - RNA, 12 nt, Human
cacacagcucug

SEQ ID NO: 2713451 - RNA, 19 nt, Human
cacacagaggcugccucuc

SEQ ID NO: 2713452 - RNA, 15 nt, Human
cacaccagagcccac

SEQ ID NO: 2713453 - RNA, 12 nt, Human
cacaccagagcc

SEQ ID NO: 2713454 - RNA, 13 nt, Human
cacaccagagccc

SEQ ID NO: 2713455 - RNA, 13 nt, Human
cacacccagccca

SEQ ID NO: 2713456 - RNA, 17 nt, Human
cacaccgggcacucaga

SEQ ID NO: 2713457 - RNA, 22 nt, Human
cacagcaguugaaaagacucca

SEQ ID NO: 2713458 - RNA, 20 nt, Human
cacagaguuguuacauuuuu

SEQ ID NO: 2713459 - RNA, 14 nt, Human
cacagaugggugcu

SEQ ID NO: 2713460 - RNA, 18 nt, Human
cacagaugggugcuugga

SEQ ID NO: 2713461 - RNA, 20 nt, Human
cacagaugggugcuuggagg

SEQ ID NO: 2713462 - RNA, 20 nt, Human
cacaggaaccacaagacugc

SEQ ID NO: 2713463 - RNA, 19 nt, Human
cacaggaaccacaagacug

SEQ ID NO: 2713464 - RNA, 12 nt, Human
cacaggaucagu

SEQ ID NO: 2713465 - RNA, 15 nt, Human
cacaggaucagucug

SEQ ID NO: 2713466 - RNA, 16 nt, Human
cacaggaucagucuga

SEQ ID NO: 2713467 - RNA, 10 nt, Human
cacaggcagg

SEQ ID NO: 2713468 - RNA, 16 nt, Human
cacaggcccggcucca

SEQ ID NO: 2713469 - RNA, 17 nt, Human
cacaggcccggcuccag

SEQ ID NO: 2713470 - RNA, 18 nt, Human
cacaggcccggcuccagg

SEQ ID NO: 2713471 - RNA, 19 nt, Human
cacaggcccggcuccaggc

SEQ ID NO: 2713472 - RNA, 14 nt, Human
cacaguuuucugag

SEQ ID NO: 2713473 - RNA, 15 nt, Human
cacaguuuucugaga

SEQ ID NO: 2713474 - RNA, 23 nt, Human
cacauaucuaguaugaaauuaua

SEQ ID NO: 2713475 - RNA, 17 nt, Human
cacauacacacacacgc

SEQ ID NO: 2713476 - RNA, 19 nt, Human
cacagugagucgaggacag

SEQ ID NO: 2713477 - RNA, 20 nt, Human
cacagugagucgaggacagg

SEQ ID NO: 2713478 - RNA, 18 nt, Human
cacagugagucgaggaca

SEQ ID NO: 2713479 - RNA, 20 nt, Human
cacaggcccggcuccaggcu

SEQ ID NO: 2713480 - RNA, 23 nt, Human
cacaggcccggcuccaggcuccu

SEQ ID NO: 2713481 - RNA, 17 nt, Human
cacauuggaaacaaguc

SEQ ID NO: 2713482 - RNA, 20 nt, Human
cacauugguguuguacucaa

SEQ ID NO: 2713483 - RNA, 15 nt, Human
caccaagcccaguua

SEQ ID NO: 2713484 - RNA, 17 nt, Human
caccacacccagcccac

SEQ ID NO: 2713485 - RNA, 13 nt, Human
caccacacccagc

SEQ ID NO: 2713486 - RNA, 15 nt, Human
caccacacccagccc

SEQ ID NO: 2713487 - RNA, 19 nt, Human
caccacaugugcacaugca

SEQ ID NO: 2713488 - RNA, 15 nt, Human
caccacaugugcaca

SEQ ID NO: 2713489 - RNA, 18 nt, Human
caccacaugugcacaugc

SEQ ID NO: 2713490 - RNA, 20 nt, Human
caccacuacauucuguuaau

SEQ ID NO: 2713491 - RNA, 19 nt, Human
caccacuacauucuguuaa

SEQ ID NO: 2713492 - RNA, 18 nt, Human
caccacuacauucuguua

SEQ ID NO: 2713493 - RNA, 17 nt, Human
caccacuacauucuguu

SEQ ID NO: 2713494 - RNA, 16 nt, Human
caccacuacauucugu

SEQ ID NO: 2713495 - RNA, 14 nt, Human
caccaccucuuugg

SEQ ID NO: 2713496 - RNA, 17 nt, Human
cacaugugcacaugcac

SEQ ID NO: 2713497 - RNA, 14 nt, Human
cacaugugcacaug

SEQ ID NO: 2713498 - RNA, 15 nt, Human
cacaugugcacaugc

SEQ ID NO: 2713499 - RNA, 16 nt, Human
cacauuccugaugcuu

SEQ ID NO: 2713500 - RNA, 16 nt, Human
cacauuccugaacagg

SEQ ID NO: 2713501 - RNA, 18 nt, Human
cacaucagcacgauuucu

SEQ ID NO: 2713502 - RNA, 12 nt, Human
cacauaucuguc

SEQ ID NO: 2713503 - RNA, 19 nt, Human
cacaucagcacgauuucug

SEQ ID NO: 2713504 - RNA, 13 nt, Human
cacaugccucucu

SEQ ID NO: 2713505 - RNA, 17 nt, Human
cacaugccucucucagg

SEQ ID NO: 2713506 - RNA, 18 nt, Human
cacaugccucucucaggc

SEQ ID NO: 2713507 - RNA, 23 nt, Human
cacauguccaagaagcccaggaa

SEQ ID NO: 2713508 - RNA, 19 nt, Human
cacaugccucucucaggcc

SEQ ID NO: 2713509 - RNA, 17 nt, Human
caaauaugcaaagcacu

SEQ ID NO: 2713510 - RNA, 16 nt, Human
caaauaugcaaagcac

SEQ ID NO: 2713511 - RNA, 18 nt, Human
caaauaugcaaagcacug

SEQ ID NO: 2713512 - RNA, 16 nt, Human
caaaucagcugcuacu

SEQ ID NO: 2713513 - RNA, 13 nt, Human
caaaucagcugcu

SEQ ID NO: 2713514 - RNA, 22 nt, Human
caaauucugcuugcuugcuuuu

SEQ ID NO: 2713515 - RNA, 14 nt, Human
caaauaugcaaagc

SEQ ID NO: 2713516 - RNA, 19 nt, Human
caaaguugccuaaauccau

SEQ ID NO: 2713517 - RNA, 21 nt, Human
caaaggaugcccaaagaugca

SEQ ID NO: 2713518 - RNA, 18 nt, Human
caaagcuaggccuggcca

SEQ ID NO: 2713519 - RNA, 16 nt, Human
caaagcuaggccuggc

SEQ ID NO: 2713520 - RNA, 17 nt, Human
caaagcuaggccuggcc

SEQ ID NO: 2713521 - RNA, 20 nt, Human
caaagccaaagcuaggccug

SEQ ID NO: 2713522 - RNA, 21 nt, Human
caaagccaaagcuaggccugg

SEQ ID NO: 2713523 - RNA, 15 nt, Human
caaagcuaggccugg

SEQ ID NO: 2713524 - RNA, 16 nt, Human
caaagcuuguuaagau

SEQ ID NO: 2713525 - RNA, 23 nt, Human
caaaaaaauauauuuaaugauaa

SEQ ID NO: 2713526 - RNA, 18 nt, Human
auuuuuuuacuaauagac

SEQ ID NO: 2713527 - RNA, 23 nt, Human
caacaggcugggcuucaguggca

SEQ ID NO: 2713528 - RNA, 24 nt, Human
caacaggcugggcuucaguggcag

SEQ ID NO: 2713529 - RNA, 22 nt, Human
caacaucuuggucagauuugaa

SEQ ID NO: 2713530 - RNA, 19 nt, Human
caacagguuuuccugaaga

SEQ ID NO: 2713531 - RNA, 18 nt, Human
caacaggguuuuuuucca

SEQ ID NO: 2713532 - RNA, 15 nt, Human
caacagguuuuccug

SEQ ID NO: 2713533 - RNA, 21 nt, Human
caaccccuucgcuccuguguc

SEQ ID NO: 2713534 - RNA, 18 nt, Human
caaccccuucgcuccugu

SEQ ID NO: 2713535 - RNA, 19 nt, Human
caaccccuucgcuccugug

SEQ ID NO: 2713536 - RNA, 19 nt, Human
caacucuccuccagaguca

SEQ ID NO: 2713537 - RNA, 16 nt, Human
caaccugauugugucu

SEQ ID NO: 2713538 - RNA, 12 nt, Human
caacccucauca

SEQ ID NO: 2713539 - RNA, 15 nt, Human
caacccucaucacca

SEQ ID NO: 2713540 - RNA, 18 nt, Human
caagaaaacaacuucaau

SEQ ID NO: 2713541 - RNA, 12 nt, Human
caacuuuauacc

SEQ ID NO: 2713542 - RNA, 16 nt, Human
caacugcauuggcuuu

SEQ ID NO: 2713543 - RNA, 20 nt, Human
caacucuccuccagagucag

SEQ ID NO: 2713544 - RNA, 21 nt, Human
caacucugaaggguaauuaua

SEQ ID NO: 2713545 - RNA, 17 nt, Human
caagcacuaaacaaaga

SEQ ID NO: 2713546 - RNA, 18 nt, Human
caagcaccuccugccucg

SEQ ID NO: 2713547 - RNA, 16 nt, Human
caagcgugagccacug

SEQ ID NO: 2713548 - RNA, 21 nt, Human
caagccaccaacauacuccca

SEQ ID NO: 2713549 - RNA, 17 nt, Human
caagcgugagccacugc

SEQ ID NO: 2713550 - RNA, 18 nt, Human
caagcgugagccacugca

SEQ ID NO: 2713551 - RNA, 13 nt, Human
caaggauccugag

SEQ ID NO: 2713552 - RNA, 22 nt, Human
caaggauccugagccagauuuc

SEQ ID NO: 2713553 - RNA, 21 nt, Human
caaggaugaucuaggaagacu

SEQ ID NO: 2713554 - RNA, 15 nt, Human
caaggauugcuacug

SEQ ID NO: 2713555 - RNA, 16 nt, Human
caagggccuggccuga

SEQ ID NO: 2713556 - RNA, 19 nt, Human
caagggccuggccugagcu

SEQ ID NO: 2713557 - RNA, 12 nt, Human
caaggugggagg

SEQ ID NO: 2713558 - RNA, 23 nt, Human
caaggugggaggauugcuugagc

SEQ ID NO: 2713559 - RNA, 22 nt, Human
caagugugguagagugugccug

SEQ ID NO: 2713560 - RNA, 22 nt, Human
caagugauucuccugccucagc

SEQ ID NO: 2713561 - RNA, 21 nt, Human
caagugauucuccugccucag

SEQ ID NO: 2713562 - RNA, 19 nt, Human
caagugaaaaaggaggaag

SEQ ID NO: 2713563 - RNA, 16 nt, Human
caagugauucuccugc

SEQ ID NO: 2713564 - RNA, 17 nt, Human
caagugauucuccugcc

SEQ ID NO: 2713565 - RNA, 12 nt, Human
caccccagcccc

SEQ ID NO: 2713566 - RNA, 13 nt, Human
caccccagcccca

SEQ ID NO: 2713567 - RNA, 15 nt, Human
cacccacccuuuuuu

SEQ ID NO: 2713568 - RNA, 20 nt, Human
cacccaccaucaugucuggc

SEQ ID NO: 2713569 - RNA, 22 nt, Human
cacccaccaucaugucuggcua

SEQ ID NO: 2713570 - RNA, 12 nt, Human
cacccaccucag

SEQ ID NO: 2713571 - RNA, 13 nt, Human
cacccaccucagc

SEQ ID NO: 2713572 - RNA, 14 nt, Human
cacccaccucagcc

SEQ ID NO: 2713573 - RNA, 16 nt, Human
cacccaccucagccuc

SEQ ID NO: 2713574 - RNA, 19 nt, Human
cacccaagggccuggccug

SEQ ID NO: 2713575 - RNA, 20 nt, Human
cacccaagggccuggccuga

SEQ ID NO: 2713576 - RNA, 21 nt, Human
cacccaagggccuggccugag

SEQ ID NO: 2713577 - RNA, 23 nt, Human
cacccaagggccuggccugagcu

SEQ ID NO: 2713578 - RNA, 16 nt, Human
cacccaagggccuggc

SEQ ID NO: 2713579 - RNA, 17 nt, Human
cacccaagggccuggcc

SEQ ID NO: 2713580 - RNA, 18 nt, Human
cacccaagggccuggccu

SEQ ID NO: 2713581 - RNA, 14 nt, Human
caccccggccaccu

SEQ ID NO: 2713582 - RNA, 15 nt, Human
caccccggccaccug

SEQ ID NO: 2713583 - RNA, 16 nt, Human
caccccggccaccugc

SEQ ID NO: 2713584 - RNA, 17 nt, Human
caccccggccaccugcg

SEQ ID NO: 2713585 - RNA, 22 nt, Human
cacccccacccaagggccuggc

SEQ ID NO: 2713586 - RNA, 19 nt, Human
ccaccucccugcaauaaaa

SEQ ID NO: 2713587 - RNA, 21 nt, Human
ccaccucccugcaauaaaaug

SEQ ID NO: 2713588 - RNA, 15 nt, Human
ccaccucccugcaau

SEQ ID NO: 2713589 - RNA, 12 nt, Human
ccacccugcucu

SEQ ID NO: 2713590 - RNA, 11 nt, Human
ccacccugcuc

SEQ ID NO: 2713591 - RNA, 19 nt, Human
ccaccucucucacuccuug

SEQ ID NO: 2713592 - RNA, 20 nt, Human
ccaccucucucacuccuuga

SEQ ID NO: 2713593 - RNA, 14 nt, Human
ccaccucucucacu

SEQ ID NO: 2713594 - RNA, 16 nt, Human
ccaccucucucacucc

SEQ ID NO: 2713595 - RNA, 12 nt, Human
ccaccugccagg

SEQ ID NO: 2713596 - RNA, 15 nt, Human
ccaccugccagggac

SEQ ID NO: 2713597 - RNA, 13 nt, Human
ccaccugccaggg

SEQ ID NO: 2713598 - RNA, 14 nt, Human
ccaccugccaggga

SEQ ID NO: 2713599 - RNA, 13 nt, Human
ccaccuggccucu

SEQ ID NO: 2713600 - RNA, 18 nt, Human
ccaccuggccucugcacu

SEQ ID NO: 2713601 - RNA, 20 nt, Human
ccaccuggccucugcacucc

SEQ ID NO: 2713602 - RNA, 14 nt, Human
ccacccuccuuuca

SEQ ID NO: 2713603 - RNA, 19 nt, Human
ccaccccucaacaccucug

SEQ ID NO: 2713604 - RNA, 19 nt, Human
ccacccccacccaagggcc

SEQ ID NO: 2713605 - RNA, 22 nt, Human
ccagacacauguccaagaagcc

SEQ ID NO: 2713606 - RNA, 17 nt, Human
ccagacacauguccaag

SEQ ID NO: 2713607 - RNA, 20 nt, Human
ccagacacauguccaagaag

SEQ ID NO: 2713608 - RNA, 14 nt, Human
ccagacccggcugc

SEQ ID NO: 2713609 - RNA, 15 nt, Human
ccagacccggcugcg

SEQ ID NO: 2713610 - RNA, 23 nt, Human
ccacuggugacaugucuuuucuu

SEQ ID NO: 2713611 - RNA, 14 nt, Human
ccacugugaagaga

SEQ ID NO: 2713612 - RNA, 15 nt, Human
ccacugugaagagaa

SEQ ID NO: 2713613 - RNA, 22 nt, Human
ccacugcuuuuggucuguguga

SEQ ID NO: 2713614 - RNA, 20 nt, Human
ccacugcuuuuggucugugu

SEQ ID NO: 2713615 - RNA, 11 nt, Human
ccacugcucug

SEQ ID NO: 2713616 - RNA, 12 nt, Human
ccacugcucugg

SEQ ID NO: 2713617 - RNA, 13 nt, Human
ccacugcucuggu

SEQ ID NO: 2713618 - RNA, 15 nt, Human
ccacugcucugguua

SEQ ID NO: 2713619 - RNA, 21 nt, Human
ccacugcaucguuucaucuuc

SEQ ID NO: 2713620 - RNA, 23 nt, Human
ccacugcaucguuucaucuucca

SEQ ID NO: 2713621 - RNA, 19 nt, Human
ccacugugccaugugccag

SEQ ID NO: 2713622 - RNA, 15 nt, Human
ccacugugccaugug

SEQ ID NO: 2713623 - RNA, 16 nt, Human
ccacugugccaugugc

SEQ ID NO: 2713624 - RNA, 22 nt, Human
ccagaagaaaauagugguguga

SEQ ID NO: 2713625 - RNA, 13 nt, Human
ccagccuggguga

SEQ ID NO: 2713626 - RNA, 23 nt, Human
ccagccuugaccauucuccaccu

SEQ ID NO: 2713627 - RNA, 13 nt, Human
ccagcgagcccug

SEQ ID NO: 2713628 - RNA, 16 nt, Human
ccagcccacuucugcc

SEQ ID NO: 2713629 - RNA, 17 nt, Human
ccagcccacuucugcca

SEQ ID NO: 2713630 - RNA, 19 nt, Human
ccagcaggcucucaggcca

SEQ ID NO: 2713631 - RNA, 20 nt, Human
ccagcaggcucucaggccag

SEQ ID NO: 2713632 - RNA, 21 nt, Human
ccagcaggcucucaggccagc

SEQ ID NO: 2713633 - RNA, 23 nt, Human
ccagcaggcucucaggccagcug

SEQ ID NO: 2713634 - RNA, 19 nt, Human
ccagccccaaaacucuccu

SEQ ID NO: 2713635 - RNA, 17 nt, Human
ccagccgagauagccaa

SEQ ID NO: 2713636 - RNA, 20 nt, Human
ccagccgagauagccaaggc

SEQ ID NO: 2713637 - RNA, 22 nt, Human
ccagccgagauagccaaggcca

SEQ ID NO: 2713638 - RNA, 17 nt, Human
ccagcaccaucucuccu

SEQ ID NO: 2713639 - RNA, 18 nt, Human
ccagcaccaucucuccuc

SEQ ID NO: 2713640 - RNA, 16 nt, Human
ccagcaggcucucagg

SEQ ID NO: 2713641 - RNA, 17 nt, Human
ccagcaggcucucaggc

SEQ ID NO: 2713642 - RNA, 18 nt, Human
ccagcaggcucucaggcc

SEQ ID NO: 2713643 - RNA, 17 nt, Human
ccagcaagugagagcug

SEQ ID NO: 2713644 - RNA, 18 nt, Human
ccagcaagugagagcugg

SEQ ID NO: 2713645 - RNA, 19 nt, Human
ccagcaagugagagcuggg

SEQ ID NO: 2713646 - RNA, 14 nt, Human
ccagauugcaacag

SEQ ID NO: 2713647 - RNA, 16 nt, Human
ccagauugcaacaggc

SEQ ID NO: 2713648 - RNA, 14 nt, Human
ccagagcccaccuu

SEQ ID NO: 2713649 - RNA, 23 nt, Human
ccagauugcaacaggcugggcuu

SEQ ID NO: 2713650 - RNA, 18 nt, Human
ccagauugcaacaggcug

SEQ ID NO: 2713651 - RNA, 22 nt, Human
ccagauugcaacaggcugggcu

SEQ ID NO: 2713652 - RNA, 18 nt, Human
ccagauuucacucuccuu

SEQ ID NO: 2713653 - RNA, 19 nt, Human
ccagauuucacucuccuug

SEQ ID NO: 2713654 - RNA, 15 nt, Human
ccagauuucacucuc

SEQ ID NO: 2713655 - RNA, 20 nt, Human
ccagguagaggguguguaag

SEQ ID NO: 2713656 - RNA, 13 nt, Human
ccaggcccucugc

SEQ ID NO: 2713657 - RNA, 14 nt, Human
ccaggcccucugcc

SEQ ID NO: 2713658 - RNA, 12 nt, Human
ccaggccagagg

SEQ ID NO: 2713659 - RNA, 14 nt, Human
ccaggccccugcca

SEQ ID NO: 2713660 - RNA, 15 nt, Human
ccaggccccugccac

SEQ ID NO: 2713661 - RNA, 16 nt, Human
ccaggccccugccacc

SEQ ID NO: 2713662 - RNA, 21 nt, Human
ccaggccacaagacccuugug

SEQ ID NO: 2713663 - RNA, 20 nt, Human
ccaggaggccagccuugacc

SEQ ID NO: 2713664 - RNA, 14 nt, Human
ccaggaggccagcc

SEQ ID NO: 2713665 - RNA, 15 nt, Human
ccaggaggccagccu

SEQ ID NO: 2713666 - RNA, 18 nt, Human
ccaggaggccagccuuga

SEQ ID NO: 2713667 - RNA, 14 nt, Human
ccaggcuggucuca

SEQ ID NO: 2713668 - RNA, 21 nt, Human
ccaggcuuagucacugagaca

SEQ ID NO: 2713669 - RNA, 22 nt, Human
ccaggcuuagucacugagacag

SEQ ID NO: 2713670 - RNA, 23 nt, Human
ccaggcuuagucacugagacagc

SEQ ID NO: 2713671 - RNA, 15 nt, Human
ccaggcccucugccc

SEQ ID NO: 2713672 - RNA, 23 nt, Human
ccaggcugggagagccuuccagg

SEQ ID NO: 2713673 - RNA, 17 nt, Human
ccaucauugaaaucuuu

SEQ ID NO: 2713674 - RNA, 14 nt, Human
ccaucauugaaauc

SEQ ID NO: 2713675 - RNA, 16 nt, Human
ccaucauugaaaucuu

SEQ ID NO: 2713676 - RNA, 15 nt, Human
ccaucucuccuccuu

SEQ ID NO: 2713677 - RNA, 20 nt, Human
ccaucucacacaugagcauc

SEQ ID NO: 2713678 - RNA, 21 nt, Human
ccaucucacacaugagcauca

SEQ ID NO: 2713679 - RNA, 14 nt, Human
ccaucucacacaug

SEQ ID NO: 2713680 - RNA, 15 nt, Human
ccaucucacacauga

SEQ ID NO: 2713681 - RNA, 17 nt, Human
ccaucucacacaugagc

SEQ ID NO: 2713682 - RNA, 18 nt, Human
ccaucucacacaugagca

SEQ ID NO: 2713683 - RNA, 12 nt, Human
ccaucaugucug

SEQ ID NO: 2713684 - RNA, 13 nt, Human
ccaucaugucugg

SEQ ID NO: 2713685 - RNA, 12 nt, Human
ccaucauugaaa

SEQ ID NO: 2713686 - RNA, 16 nt, Human
ccaucaagccaccaac

SEQ ID NO: 2713687 - RNA, 13 nt, Human
ccaucaagccacc

SEQ ID NO: 2713688 - RNA, 14 nt, Human
ccaucaagccacca

SEQ ID NO: 2713689 - RNA, 15 nt, Human
ccauaugccugggca

SEQ ID NO: 2713690 - RNA, 12 nt, Human
ccaucaagccac

SEQ ID NO: 2713691 - RNA, 13 nt, Human
ccauaugccuggg

SEQ ID NO: 2713692 - RNA, 14 nt, Human
ccagugugacaagg

SEQ ID NO: 2713693 - RNA, 23 nt, Human
ccagugugacaaggauugcuacu

SEQ ID NO: 2713694 - RNA, 13 nt, Human
ccaggugccaguu

SEQ ID NO: 2713695 - RNA, 12 nt, Human
ccaggugccagu

SEQ ID NO: 2713696 - RNA, 21 nt, Human
ccaggugcuaggaacacuccu

SEQ ID NO: 2713697 - RNA, 13 nt, Human
ccagguuuaagcu

SEQ ID NO: 2713698 - RNA, 16 nt, Human
ccagguuucuaugugu

SEQ ID NO: 2713699 - RNA, 22 nt, Human
ccaguaaaugggggugcauuug

SEQ ID NO: 2713700 - RNA, 21 nt, Human
ccaguaaaugggggugcauuu

SEQ ID NO: 2713701 - RNA, 20 nt, Human
ccaguaaaugggggugcauu

SEQ ID NO: 2713702 - RNA, 23 nt, Human
ccagugaauucuugaaggaaaau

SEQ ID NO: 2713703 - RNA, 12 nt, Human
cccaccucagcc

SEQ ID NO: 2713704 - RNA, 14 nt, Human
cccaccucagccuc

SEQ ID NO: 2713705 - RNA, 15 nt, Human
cccaccucagccucc

SEQ ID NO: 2713706 - RNA, 19 nt, Human
cccaccucucucacuccuu

SEQ ID NO: 2713707 - RNA, 12 nt, Human
cccaccuuggcu

SEQ ID NO: 2713708 - RNA, 21 nt, Human
cccaccucagccucccaaagu

SEQ ID NO: 2713709 - RNA, 13 nt, Human
cccaccucucuca

SEQ ID NO: 2713710 - RNA, 14 nt, Human
cccaccucucucac

SEQ ID NO: 2713711 - RNA, 17 nt, Human
cccaccucucucacucc

SEQ ID NO: 2713712 - RNA, 17 nt, Human
cccacgcccccacuggu

SEQ ID NO: 2713713 - RNA, 19 nt, Human
cccacgcccccacugguga

SEQ ID NO: 2713714 - RNA, 15 nt, Human
cccaccuuggcucaa

SEQ ID NO: 2713715 - RNA, 22 nt, Human
cccaccuuggcucaaguccucu

SEQ ID NO: 2713716 - RNA, 14 nt, Human
cccaccuuggcugc

SEQ ID NO: 2713717 - RNA, 15 nt, Human
cccaccuuggcugca

SEQ ID NO: 2713718 - RNA, 16 nt, Human
cccaagggccuggccu

SEQ ID NO: 2713719 - RNA, 17 nt, Human
cccacaggaucagucug

SEQ ID NO: 2713720 - RNA, 13 nt, Human
cccacaggaucag

SEQ ID NO: 2713721 - RNA, 12 nt, Human
cccaagggccug

SEQ ID NO: 2713722 - RNA, 14 nt, Human
cccaagggccuggc

SEQ ID NO: 2713723 - RNA, 21 nt, Human
ccauuuuguauuuuacuaaua

SEQ ID NO: 2713724 - RNA, 20 nt, Human
ccauuuugcugucccuuuuc

SEQ ID NO: 2713725 - RNA, 18 nt, Human
ccauguuuuguuuacggu

SEQ ID NO: 2713726 - RNA, 15 nt, Human
ccauucugccugccc

SEQ ID NO: 2713727 - RNA, 13 nt, Human
ccauuuggaaauc

SEQ ID NO: 2713728 - RNA, 13 nt, Human
ccauuugcuccuu

SEQ ID NO: 2713729 - RNA, 11 nt, Human
ccauuauucaa

SEQ ID NO: 2713730 - RNA, 23 nt, Human
cccucuccugggcagcugccucc

SEQ ID NO: 2713731 - RNA, 11 nt, Human
cccucugccca

SEQ ID NO: 2713732 - RNA, 15 nt, Human
cccucugcccacucc

SEQ ID NO: 2713733 - RNA, 18 nt, Human
cccucugcccacucccug

SEQ ID NO: 2713734 - RNA, 19 nt, Human
cccucugcccacucccugc

SEQ ID NO: 2713735 - RNA, 20 nt, Human
cccucuccugggcagcugcc

SEQ ID NO: 2713736 - RNA, 21 nt, Human
cccucuccugggcagcugccu

SEQ ID NO: 2713737 - RNA, 22 nt, Human
cccucuccugggcagcugccuc

SEQ ID NO: 2713738 - RNA, 12 nt, Human
cccucuuucccu

SEQ ID NO: 2713739 - RNA, 20 nt, Human
cccucuuucccucccuuccu

SEQ ID NO: 2713740 - RNA, 17 nt, Human
cccucuuucccucccuu

SEQ ID NO: 2713741 - RNA, 23 nt, Human
cccucccucuuucccucccuucc

SEQ ID NO: 2713742 - RNA, 20 nt, Human
cccugcagagggcacagaaa

SEQ ID NO: 2713743 - RNA, 12 nt, Human
cccugaggccca

SEQ ID NO: 2713744 - RNA, 11 nt, Human
cccugccuccu

SEQ ID NO: 2713745 - RNA, 22 nt, Human
cccugcucuccgaccagacacc

SEQ ID NO: 2713746 - RNA, 21 nt, Human
cccugcucuccgaccagacac

SEQ ID NO: 2713747 - RNA, 21 nt, Human
cccuguagagugggagcugag

SEQ ID NO: 2713748 - RNA, 14 nt, Human
cccugguggcagug

SEQ ID NO: 2713749 - RNA, 13 nt, Human
cccugguggcagu

SEQ ID NO: 2713750 - RNA, 21 nt, Human
cccugguggcagcucaccucu

SEQ ID NO: 2713751 - RNA, 21 nt, Human
cccuggugaccagcaccaucu

SEQ ID NO: 2713752 - RNA, 13 nt, Human
cccuguucuggca

SEQ ID NO: 2713753 - RNA, 14 nt, Human
cccuguucuggcag

SEQ ID NO: 2713754 - RNA, 16 nt, Human
cccuguuuguuucuga

SEQ ID NO: 2713755 - RNA, 19 nt, Human
cccuguuuguuucugaaag

SEQ ID NO: 2713756 - RNA, 17 nt, Human
cccuuaccugccaggaa

SEQ ID NO: 2713757 - RNA, 20 nt, Human
cccuuaccugccaggaagcc

SEQ ID NO: 2713758 - RNA, 23 nt, Human
cccuuaccugccaggaagccagc

SEQ ID NO: 2713759 - RNA, 12 nt, Human
cccuuccaugga

SEQ ID NO: 2713760 - RNA, 23 nt, Human
cccuuagcagggaaacagcuaau

SEQ ID NO: 2713761 - RNA, 14 nt, Human
cccuuagcagggaa

SEQ ID NO: 2713762 - RNA, 15 nt, Human
cccuuacgugagucc

SEQ ID NO: 2713763 - RNA, 17 nt, Human
cccuuacgugaguccug

SEQ ID NO: 2713764 - RNA, 18 nt, Human
ccuacaggagugagcacu

SEQ ID NO: 2713765 - RNA, 21 nt, Human
ccuacaguugaaaaacagcug

SEQ ID NO: 2713766 - RNA, 23 nt, Human
ccuaggcauuugcugaauacaga

SEQ ID NO: 2713767 - RNA, 18 nt, Human
ccuaggugacagagugag

SEQ ID NO: 2713768 - RNA, 11 nt, Human
ccgcuggggcc

SEQ ID NO: 2713769 - RNA, 14 nt, Human
ccgcuggggccagu

SEQ ID NO: 2713770 - RNA, 18 nt, Human
ccgugaggccagagacac

SEQ ID NO: 2713771 - RNA, 18 nt, Human
ccgggcucugccucccau

SEQ ID NO: 2713772 - RNA, 13 nt, Human
ccgggcucugccu

SEQ ID NO: 2713773 - RNA, 14 nt, Human
ccgggcucugccuc

SEQ ID NO: 2713774 - RNA, 15 nt, Human
ccgggcucugccucc

SEQ ID NO: 2713775 - RNA, 16 nt, Human
ccggcuccaggcuccu

SEQ ID NO: 2713776 - RNA, 21 nt, Human
ccggcuccaggcuccuuuagc

SEQ ID NO: 2713777 - RNA, 20 nt, Human
ccgggcacucagaagacacu

SEQ ID NO: 2713778 - RNA, 22 nt, Human
ccgggcacucagaagacacuga

SEQ ID NO: 2713779 - RNA, 13 nt, Human
ccgggccacagag

SEQ ID NO: 2713780 - RNA, 19 nt, Human
ccgagcuuugaaaauucag

SEQ ID NO: 2713781 - RNA, 14 nt, Human
ccgaguagcuggga

SEQ ID NO: 2713782 - RNA, 16 nt, Human
ccgaguagcugggacu

SEQ ID NO: 2713783 - RNA, 23 nt, Human
ccgcacugggcuuggggaccaga

SEQ ID NO: 2713784 - RNA, 21 nt, Human
ccgagauugcaccacugcacu

SEQ ID NO: 2713785 - RNA, 15 nt, Human
ccgagauugcaccac

SEQ ID NO: 2713786 - RNA, 19 nt, Human
ccgagauugcaccacugca

SEQ ID NO: 2713787 - RNA, 15 nt, Human
ccccucggagaagag

SEQ ID NO: 2713788 - RNA, 13 nt, Human
ccccuccucugcu

SEQ ID NO: 2713789 - RNA, 14 nt, Human
ccccuccucugcuu

SEQ ID NO: 2713790 - RNA, 17 nt, Human
ccccuccucugcuugcc

SEQ ID NO: 2713791 - RNA, 12 nt, Human
ccccuccaugug

SEQ ID NO: 2713792 - RNA, 16 nt, Human
ccccucagggucccug

SEQ ID NO: 2713793 - RNA, 17 nt, Human
cccccugacaacacuca

SEQ ID NO: 2713794 - RNA, 19 nt, Human
cccccugacaacacucauu

SEQ ID NO: 2713795 - RNA, 12 nt, Human
cccccagccugc

SEQ ID NO: 2713796 - RNA, 16 nt, Human
ccccucaacaccucug

SEQ ID NO: 2713797 - RNA, 23 nt, Human
ccccucaacucuccuccagaguc

SEQ ID NO: 2713798 - RNA, 15 nt, Human
ccccucaacaccucu

SEQ ID NO: 2713799 - RNA, 14 nt, Human
ccccagugcccaca

SEQ ID NO: 2713800 - RNA, 15 nt, Human
ccccagugcccacag

SEQ ID NO: 2713801 - RNA, 16 nt, Human
ccccagugcccacagg

SEQ ID NO: 2713802 - RNA, 20 nt, Human
ccccagugcccacaggauca

SEQ ID NO: 2713803 - RNA, 24 nt, Human
cccccacccaagggccuggccuga

SEQ ID NO: 2713804 - RNA, 13 nt, Human
cccccacccaagg

SEQ ID NO: 2713805 - RNA, 14 nt, Human
ccccauccucugua

SEQ ID NO: 2713806 - RNA, 15 nt, Human
cccccacuggugaca

SEQ ID NO: 2713807 - RNA, 11 nt, Human
cccccacuggu

SEQ ID NO: 2713808 - RNA, 13 nt, Human
cccccacugguga

SEQ ID NO: 2713809 - RNA, 22 nt, Human
cccgaauagcugggacuacagg

SEQ ID NO: 2713810 - RNA, 13 nt, Human
ccccuuccaugga

SEQ ID NO: 2713811 - RNA, 20 nt, Human
ccccuuccauggacuuuguu

SEQ ID NO: 2713812 - RNA, 20 nt, Human
cccgcccaggcuuagucacu

SEQ ID NO: 2713813 - RNA, 22 nt, Human
cccgcccaggcuuagucacuga

SEQ ID NO: 2713814 - RNA, 23 nt, Human
cccgcuaagagggagggagggcu

SEQ ID NO: 2713815 - RNA, 17 nt, Human
ccccugcccggcugcgg

SEQ ID NO: 2713816 - RNA, 19 nt, Human
ccccugcccggcugcggaa

SEQ ID NO: 2713817 - RNA, 15 nt, Human
ccccuggaugcagcc

SEQ ID NO: 2713818 - RNA, 18 nt, Human
ccccuggaugcagccuca

SEQ ID NO: 2713819 - RNA, 19 nt, Human
ccccuggaugcagccucac

SEQ ID NO: 2713820 - RNA, 14 nt, Human
ccccugcugggugu

SEQ ID NO: 2713821 - RNA, 17 nt, Human
ccccugcuggguguggc

SEQ ID NO: 2713822 - RNA, 11 nt, Human
ccccugcuggu

SEQ ID NO: 2713823 - RNA, 13 nt, Human
ccccugcugguuc

SEQ ID NO: 2713824 - RNA, 15 nt, Human
ccccugcugguucag

SEQ ID NO: 2713825 - RNA, 20 nt, Human
ccccugcugguucaggguug

SEQ ID NO: 2713826 - RNA, 19 nt, Human
ccccaccgcagacaggacc

SEQ ID NO: 2713827 - RNA, 15 nt, Human
ccccaccgcagacag

SEQ ID NO: 2713828 - RNA, 23 nt, Human
cccauuauucaaaguugccuaaa

SEQ ID NO: 2713829 - RNA, 18 nt, Human
cccauuauucaaaguugc

SEQ ID NO: 2713830 - RNA, 16 nt, Human
ccccacccugccucac

SEQ ID NO: 2713831 - RNA, 21 nt, Human
ccccacccaagggccuggccu

SEQ ID NO: 2713832 - RNA, 19 nt, Human
cccaucucuacaaaaagca

SEQ ID NO: 2713833 - RNA, 14 nt, Human
cccaguugggugga

SEQ ID NO: 2713834 - RNA, 12 nt, Human
cccaucugugaa

SEQ ID NO: 2713835 - RNA, 14 nt, Human
cccaugagccucag

SEQ ID NO: 2713836 - RNA, 22 nt, Human
cccaugagccucagcauccugg

SEQ ID NO: 2713837 - RNA, 17 nt, Human
cucauuuccaagcaagu

SEQ ID NO: 2713838 - RNA, 18 nt, Human
cucauuugucacacacuu

SEQ ID NO: 2713839 - RNA, 21 nt, Human
cucauuugucacacacuuugg

SEQ ID NO: 2713840 - RNA, 13 nt, Human
cucauuuccaagc

SEQ ID NO: 2713841 - RNA, 14 nt, Human
cucauuuccaagca

SEQ ID NO: 2713842 - RNA, 12 nt, Human
cucauuuccaag

SEQ ID NO: 2713843 - RNA, 18 nt, Human
cuccaaaauaaaacuuuu

SEQ ID NO: 2713844 - RNA, 17 nt, Human
cuccaagcucccaggca

SEQ ID NO: 2713845 - RNA, 19 nt, Human
cucauugaccugaggcccu

SEQ ID NO: 2713846 - RNA, 21 nt, Human
cucauugaccugaggcccuuc

SEQ ID NO: 2713847 - RNA, 17 nt, Human
cucauugaccugaggcc

SEQ ID NO: 2713848 - RNA, 22 nt, Human
cucauucuccuuguguuacuaa

SEQ ID NO: 2713849 - RNA, 18 nt, Human
cucauucuccuuguguua

SEQ ID NO: 2713850 - RNA, 21 nt, Human
cucauaaaaagccugcaauuu

SEQ ID NO: 2713851 - RNA, 15 nt, Human
cuccagcucaccagc

SEQ ID NO: 2713852 - RNA, 16 nt, Human
cuccagcucaccagcc

SEQ ID NO: 2713853 - RNA, 18 nt, Human
cuccagcucaccagcccc

SEQ ID NO: 2713854 - RNA, 11 nt, Human
cuccagccccu

SEQ ID NO: 2713855 - RNA, 13 nt, Human
cuccagccccugg

SEQ ID NO: 2713856 - RNA, 14 nt, Human
cuccagccccugga

SEQ ID NO: 2713857 - RNA, 16 nt, Human
cuccagagucagaagu

SEQ ID NO: 2713858 - RNA, 14 nt, Human
cuccccucggagaa

SEQ ID NO: 2713859 - RNA, 14 nt, Human
cuccccugcugggu

SEQ ID NO: 2713860 - RNA, 21 nt, Human
cuccccugcuggguguggcgc

SEQ ID NO: 2713861 - RNA, 23 nt, Human
cuccccugcuggguguggcgcag

SEQ ID NO: 2713862 - RNA, 20 nt, Human
cucccgaauagcugggacua

SEQ ID NO: 2713863 - RNA, 23 nt, Human
cucccgaauagcugggacuacag

SEQ ID NO: 2713864 - RNA, 19 nt, Human
cucccgaauagcugggacu

SEQ ID NO: 2713865 - RNA, 15 nt, Human
cucccuucauccuuc

SEQ ID NO: 2713866 - RNA, 16 nt, Human
cucccaucacuucccu

SEQ ID NO: 2713867 - RNA, 14 nt, Human
cucccaucacccgc

SEQ ID NO: 2713868 - RNA, 20 nt, Human
cuccauuuaauaauuauaug

SEQ ID NO: 2713869 - RNA, 16 nt, Human
cucccaaagugcuggg

SEQ ID NO: 2713870 - RNA, 23 nt, Human
cucccaaagugcugggauuacag

SEQ ID NO: 2713871 - RNA, 15 nt, Human
cucccacaaaggaga

SEQ ID NO: 2713872 - RNA, 14 nt, Human
cucccaacucaccc

SEQ ID NO: 2713873 - RNA, 15 nt, Human
cucccaacucacccc

SEQ ID NO: 2713874 - RNA, 13 nt, Human
cuccauuuaauaa

SEQ ID NO: 2713875 - RNA, 22 nt, Human
cucaggaaaucaaauaugcaaa

SEQ ID NO: 2713876 - RNA, 24 nt, Human
cucagggucccugguggcagcuca

SEQ ID NO: 2713877 - RNA, 18 nt, Human
cucagggucccugguggc

SEQ ID NO: 2713878 - RNA, 14 nt, Human
cucagggccugguc

SEQ ID NO: 2713879 - RNA, 20 nt, Human
cucagggucccugguggcag

SEQ ID NO: 2713880 - RNA, 21 nt, Human
cucagggucccugguggcagc

SEQ ID NO: 2713881 - RNA, 22 nt, Human
cucagggucccugguggcagcu

SEQ ID NO: 2713882 - RNA, 21 nt, Human
cucagguggggucacucuggc

SEQ ID NO: 2713883 - RNA, 19 nt, Human
cucagguggggucacucug

SEQ ID NO: 2713884 - RNA, 20 nt, Human
cucagguggggucacucugg

SEQ ID NO: 2713885 - RNA, 22 nt, Human
cucaggugauccacccaccuca

SEQ ID NO: 2713886 - RNA, 23 nt, Human
cucaggugauccacccaccucag

SEQ ID NO: 2713887 - RNA, 18 nt, Human
cucagggccuggcucagg

SEQ ID NO: 2713888 - RNA, 19 nt, Human
cucagggccuggcucaggu

SEQ ID NO: 2713889 - RNA, 20 nt, Human
cucagggccuggcucaggug

SEQ ID NO: 2713890 - RNA, 15 nt, Human
cucaggcagguggga

SEQ ID NO: 2713891 - RNA, 18 nt, Human
cucaggcaggugggaugg

SEQ ID NO: 2713892 - RNA, 16 nt, Human
cucagaucuucugugg

SEQ ID NO: 2713893 - RNA, 22 nt, Human
cucagauuuuauuauguaaauc

SEQ ID NO: 2713894 - RNA, 18 nt, Human
cucagagagggugggagu

SEQ ID NO: 2713895 - RNA, 19 nt, Human
cucagagagggugggagug

SEQ ID NO: 2713896 - RNA, 23 nt, Human
cucagagagggugggagugggcc

SEQ ID NO: 2713897 - RNA, 16 nt, Human
cucacuguugcccagg

SEQ ID NO: 2713898 - RNA, 17 nt, Human
cucacuguugcccaggc

SEQ ID NO: 2713899 - RNA, 18 nt, Human
cucacuguugcccaggcu

SEQ ID NO: 2713900 - RNA, 19 nt, Human
cucacuguugcccaggcug

SEQ ID NO: 2713901 - RNA, 15 nt, Human
cucacugcagccuca

SEQ ID NO: 2713902 - RNA, 16 nt, Human
cucacugcagccucaa

SEQ ID NO: 2713903 - RNA, 14 nt, Human
cucacugcagccuc

SEQ ID NO: 2713904 - RNA, 14 nt, Human
cucacuguugccca

SEQ ID NO: 2713905 - RNA, 15 nt, Human
cucacuguugcccag

SEQ ID NO: 2713906 - RNA, 19 nt, Human
cucagcaaaagaugcuucu

SEQ ID NO: 2713907 - RNA, 20 nt, Human
cucagcaaaagaugcuucuc

SEQ ID NO: 2713908 - RNA, 23 nt, Human
cucagauuuuauuauguaaaucc

SEQ ID NO: 2713909 - RNA, 16 nt, Human
cucagcaggggagggu

SEQ ID NO: 2713910 - RNA, 13 nt, Human
cucagcauccugg

SEQ ID NO: 2713911 - RNA, 21 nt, Human
cucagcauccuggcacccggc

SEQ ID NO: 2713912 - RNA, 22 nt, Human
cucagcauccuggcacccggcc

SEQ ID NO: 2713913 - RNA, 15 nt, Human
cucagcauccuggca

SEQ ID NO: 2713914 - RNA, 13 nt, Human
cucagcggggaca

SEQ ID NO: 2713915 - RNA, 23 nt, Human
cucagcggggacagcuccuucug

SEQ ID NO: 2713916 - RNA, 14 nt, Human
cucagcggggacag

SEQ ID NO: 2713917 - RNA, 15 nt, Human
cucagcggggacagc

SEQ ID NO: 2713918 - RNA, 16 nt, Human
cucagcggggacagcu

SEQ ID NO: 2713919 - RNA, 18 nt, Human
cucagcggggacagcucc

SEQ ID NO: 2713920 - RNA, 19 nt, Human
cucagcggggacagcuccu

SEQ ID NO: 2713921 - RNA, 20 nt, Human
cucagcggggacagcuccuu

SEQ ID NO: 2713922 - RNA, 21 nt, Human
cucagcggggacagcuccuuc

SEQ ID NO: 2713923 - RNA, 13 nt, Human
cuauaauuuaaau

SEQ ID NO: 2713924 - RNA, 12 nt, Human
cuauaauuuaaa

SEQ ID NO: 2713925 - RNA, 20 nt, Human
cuaggaacacuccuucacag

SEQ ID NO: 2713926 - RNA, 15 nt, Human
cuaggaagacuuugg

SEQ ID NO: 2713927 - RNA, 17 nt, Human
cuaggaagacuuuggaa

SEQ ID NO: 2713928 - RNA, 19 nt, Human
cuauagccuaggugacaga

SEQ ID NO: 2713929 - RNA, 18 nt, Human
cuauagccuaggugacag

SEQ ID NO: 2713930 - RNA, 20 nt, Human
cuauagccuaggugacagag

SEQ ID NO: 2713931 - RNA, 21 nt, Human
cuauagccuaggugacagagu

SEQ ID NO: 2713932 - RNA, 19 nt, Human
cuaugaaauauuauguuaa

SEQ ID NO: 2713933 - RNA, 21 nt, Human
cuaugcauuugaaaauuuuga

SEQ ID NO: 2713934 - RNA, 13 nt, Human
cuaugcugaguuu

SEQ ID NO: 2713935 - RNA, 15 nt, Human
cuaugcugaguuugu

SEQ ID NO: 2713936 - RNA, 14 nt, Human
cuaugcugaguuug

SEQ ID NO: 2713937 - RNA, 13 nt, Human
cuauguaucaaug

SEQ ID NO: 2713938 - RNA, 17 nt, Human
cuauucaguaauaacuc

SEQ ID NO: 2713939 - RNA, 21 nt, Human
cuauucaggagaguagaacag

SEQ ID NO: 2713940 - RNA, 23 nt, Human
cuauucaguaauaacucuacccu

SEQ ID NO: 2713941 - RNA, 23 nt, Human
cucacacggacacucaaaagcug

SEQ ID NO: 2713942 - RNA, 16 nt, Human
cucaacucuccuccag

SEQ ID NO: 2713943 - RNA, 18 nt, Human
cucaacucuccuccagag

SEQ ID NO: 2713944 - RNA, 14 nt, Human
cucaaauuucuaaa

SEQ ID NO: 2713945 - RNA, 19 nt, Human
cuauuucuauauuuucauu

SEQ ID NO: 2713946 - RNA, 20 nt, Human
cuauuucuauauuuucauuc

SEQ ID NO: 2713947 - RNA, 13 nt, Human
cucaaauuucuaa

SEQ ID NO: 2713948 - RNA, 12 nt, Human
cucaaauuugga

SEQ ID NO: 2713949 - RNA, 17 nt, Human
cucaaauuucuaaaucu

SEQ ID NO: 2713950 - RNA, 15 nt, Human
cucaaauuucuaaau

SEQ ID NO: 2713951 - RNA, 14 nt, Human
cucaacucuccucc

SEQ ID NO: 2713952 - RNA, 16 nt, Human
cuauugcugcuugagg

SEQ ID NO: 2713953 - RNA, 18 nt, Human
cuauuguuagucucuuga

SEQ ID NO: 2713954 - RNA, 18 nt, Human
cuagaguuuagcuggaaa

SEQ ID NO: 2713955 - RNA, 15 nt, Human
cuagagguucaaaga

SEQ ID NO: 2713956 - RNA, 19 nt, Human
cuagaguuuagcuggaaaa

SEQ ID NO: 2713957 - RNA, 17 nt, Human
cuagagguucaaagaua

SEQ ID NO: 2713958 - RNA, 21 nt, Human
cuagagguucaaagauauuuu

SEQ ID NO: 2713959 - RNA, 18 nt, Human
cuagagguucaaagauau

SEQ ID NO: 2713960 - RNA, 18 nt, Human
cuagacuggugacugauu

SEQ ID NO: 2713961 - RNA, 17 nt, Human
cuagacuggugacugau

SEQ ID NO: 2713962 - RNA, 15 nt, Human
cuagacuggugacug

SEQ ID NO: 2713963 - RNA, 14 nt, Human
cuagacuggugacu

SEQ ID NO: 2713964 - RNA, 23 nt, Human
cuagacuggugacugauucuuca

SEQ ID NO: 2713965 - RNA, 22 nt, Human
cuagacuggugacugauucuuc

SEQ ID NO: 2713966 - RNA, 19 nt, Human
cuagacuggugacugauuc

SEQ ID NO: 2713967 - RNA, 20 nt, Human
cuacuguccuacccacccuc

SEQ ID NO: 2713968 - RNA, 19 nt, Human
cuacuguccuacccacccu

SEQ ID NO: 2713969 - RNA, 21 nt, Human
cuacuguaauuugugauacaa

SEQ ID NO: 2713970 - RNA, 12 nt, Human
cuacucuguguc

SEQ ID NO: 2713971 - RNA, 15 nt, Human
cuacucgaguuacag

SEQ ID NO: 2713972 - RNA, 16 nt, Human
cuacucgaguuacaga

SEQ ID NO: 2713973 - RNA, 19 nt, Human
cuacucgaguuacagacaa

SEQ ID NO: 2713974 - RNA, 14 nt, Human
cuaggaaauauuua

SEQ ID NO: 2713975 - RNA, 15 nt, Human
cuaggaaauauuuau

SEQ ID NO: 2713976 - RNA, 19 nt, Human
cuaggaaauauuuauuuua

SEQ ID NO: 2713977 - RNA, 20 nt, Human
cuaggaaauauuuauuuuaa

SEQ ID NO: 2713978 - RNA, 22 nt, Human
cuagcuaauguaauaacuguga

SEQ ID NO: 2713979 - RNA, 22 nt, Human
cuagccuuagaagucacacagu

SEQ ID NO: 2713980 - RNA, 23 nt, Human
cuagccuuagaagucacacagua

SEQ ID NO: 2713981 - RNA, 24 nt, Human
cuagauacuguaucaugacaaaga

SEQ ID NO: 2713982 - RNA, 16 nt, Human
cuagauacuguaucau

SEQ ID NO: 2713983 - RNA, 13 nt, Human
cuagauacuguau

SEQ ID NO: 2713984 - RNA, 19 nt, Human
cuagccugugccucuggga

SEQ ID NO: 2713985 - RNA, 21 nt, Human
cuagccugugccucugggacu

SEQ ID NO: 2713986 - RNA, 22 nt, Human
cuagccugugccucugggacug

SEQ ID NO: 2713987 - RNA, 21 nt, Human
cuagccuuagaagucacacag

SEQ ID NO: 2713988 - RNA, 19 nt, Human
cuaaguaaaaccacagcag

SEQ ID NO: 2713989 - RNA, 18 nt, Human
cuaaguaaaaccacagca

SEQ ID NO: 2713990 - RNA, 14 nt, Human
cuaaguaaaaccac

SEQ ID NO: 2713991 - RNA, 17 nt, Human
cuaauagacaauuuauu

SEQ ID NO: 2713992 - RNA, 23 nt, Human
cuaauagacaauuuauuauggca

SEQ ID NO: 2713993 - RNA, 19 nt, Human
cuaauagacaauuuauuau

SEQ ID NO: 2713994 - RNA, 21 nt, Human
cuaagcuucacuguaaaauaa

SEQ ID NO: 2713995 - RNA, 22 nt, Human
cuaagcuauucaguaauaacuc

SEQ ID NO: 2713996 - RNA, 16 nt, Human
cuaaggacuucuuuaa

SEQ ID NO: 2713997 - RNA, 15 nt, Human
cuaaggacuucuuua

SEQ ID NO: 2713998 - RNA, 14 nt, Human
cuaaggacuucuuu

SEQ ID NO: 2713999 - RNA, 23 nt, Human
cuacacgagauacagaauuuuau

SEQ ID NO: 2714000 - RNA, 14 nt, Human
cuacacuaagagag

SEQ ID NO: 2714001 - RNA, 21 nt, Human
cuacacacugcauguuuguga

SEQ ID NO: 2714002 - RNA, 21 nt, Human
cuacacaggggaaaagaggag

SEQ ID NO: 2714003 - RNA, 12 nt, Human
cuaaugggacac

SEQ ID NO: 2714004 - RNA, 13 nt, Human
cuaaugggacacu

SEQ ID NO: 2714005 - RNA, 18 nt, Human
cuaauauguaacaagcca

SEQ ID NO: 2714006 - RNA, 23 nt, Human
cgggaggauguucugggacacag

SEQ ID NO: 2714007 - RNA, 21 nt, Human
cgggaggauguucugggacac

SEQ ID NO: 2714008 - RNA, 22 nt, Human
cuaaaugaaaaucgugacaaca

SEQ ID NO: 2714009 - RNA, 21 nt, Human
cuaaaucuccaaaauaaaacu

SEQ ID NO: 2714010 - RNA, 21 nt, Human
cuaaaauggacuguggugacu

SEQ ID NO: 2714011 - RNA, 22 nt, Human
cuaaaauggacuguggugacuu

SEQ ID NO: 2714012 - RNA, 14 nt, Human
cuaagagagaauga

SEQ ID NO: 2714013 - RNA, 15 nt, Human
cuaagagagaaugag

SEQ ID NO: 2714014 - RNA, 16 nt, Human
cuaagauaguaacaau

SEQ ID NO: 2714015 - RNA, 23 nt, Human
cuaagagggagggagggcuccag

SEQ ID NO: 2714016 - RNA, 13 nt, Human
cuaagagggaggg

SEQ ID NO: 2714017 - RNA, 15 nt, Human
cuaagagggagggag

SEQ ID NO: 2714018 - RNA, 22 nt, Human
cuaagagggagggagggcucca

SEQ ID NO: 2714019 - RNA, 19 nt, Human
cuaaauucuuucauuuuag

SEQ ID NO: 2714020 - RNA, 16 nt, Human
cuaaauucaugcugcu

SEQ ID NO: 2714021 - RNA, 20 nt, Human
cuaaauuuuauaucuuguag

SEQ ID NO: 2714022 - RNA, 15 nt, Human
cuaaauuuuauaucu

SEQ ID NO: 2714023 - RNA, 16 nt, Human
cuaaauuuuauaucuu

SEQ ID NO: 2714024 - RNA, 13 nt, Human
cuaaauuuuauau

SEQ ID NO: 2714025 - RNA, 12 nt, Human
cuaaccacgcug

SEQ ID NO: 2714026 - RNA, 14 nt, Human
cuaaccacgcugga

SEQ ID NO: 2714027 - RNA, 16 nt, Human
cuacaggugugaguca

SEQ ID NO: 2714028 - RNA, 14 nt, Human
cuacaggugugagu

SEQ ID NO: 2714029 - RNA, 20 nt, Human
cuacauggaguauaugucaa

SEQ ID NO: 2714030 - RNA, 18 nt, Human
cuacauggaguauauguc

SEQ ID NO: 2714031 - RNA, 13 nt, Human
cuacaguccuccc

SEQ ID NO: 2714032 - RNA, 15 nt, Human
cuacaggcacccacc

SEQ ID NO: 2714033 - RNA, 17 nt, Human
cuacaggcacccaccau

SEQ ID NO: 2714034 - RNA, 14 nt, Human
cuacaggagugagc

SEQ ID NO: 2714035 - RNA, 15 nt, Human
cuacaggagugagca

SEQ ID NO: 2714036 - RNA, 16 nt, Human
cuacaggagugagcac

SEQ ID NO: 2714037 - RNA, 23 nt, Human
cuacagcuugaccgugaggccag

SEQ ID NO: 2714038 - RNA, 19 nt, Human
cuacagcuugaccgugagg

SEQ ID NO: 2714039 - RNA, 22 nt, Human
cuacagcuugaccgugaggcca

SEQ ID NO: 2714040 - RNA, 22 nt, Human
cuacagaggccaugggccuccu

SEQ ID NO: 2714041 - RNA, 18 nt, Human
cuacagaggccaugggcc

SEQ ID NO: 2714042 - RNA, 20 nt, Human
cuacagaggccaugggccuc

SEQ ID NO: 2714043 - RNA, 17 nt, Human
cuacagaggccaugggc

SEQ ID NO: 2714044 - RNA, 17 nt, Human
cuacacugugcugaguc

SEQ ID NO: 2714045 - RNA, 13 nt, Human
cuacacugugcug

SEQ ID NO: 2714046 - RNA, 14 nt, Human
cuacacugugcuga

SEQ ID NO: 2714047 - RNA, 17 nt, Human
cuacccucuuagaaaaa

SEQ ID NO: 2714048 - RNA, 12 nt, Human
cuacccaggugc

SEQ ID NO: 2714049 - RNA, 18 nt, Human
cuacccagcgagcccugg

SEQ ID NO: 2714050 - RNA, 13 nt, Human
cuacccaggugcu

SEQ ID NO: 2714051 - RNA, 15 nt, Human
cuacccagcgagccc

SEQ ID NO: 2714052 - RNA, 17 nt, Human
cuacccagcgagcccug

SEQ ID NO: 2714053 - RNA, 14 nt, Human
cuacauucuguuaa

SEQ ID NO: 2714054 - RNA, 13 nt, Human
cuacauucuguua

SEQ ID NO: 2714055 - RNA, 22 nt, Human
cuacauuauaaaugucucuuua

SEQ ID NO: 2714056 - RNA, 18 nt, Human
cuaccauccccuguagag

SEQ ID NO: 2714057 - RNA, 13 nt, Human
ccuuccaggggug

SEQ ID NO: 2714058 - RNA, 17 nt, Human
ccuuccauggacuuugu

SEQ ID NO: 2714059 - RNA, 12 nt, Human
ccuucucuccag

SEQ ID NO: 2714060 - RNA, 13 nt, Human
ccuucucuccagc

SEQ ID NO: 2714061 - RNA, 15 nt, Human
ccuucucuccagccc

SEQ ID NO: 2714062 - RNA, 16 nt, Human
ccuucucuccagcccc

SEQ ID NO: 2714063 - RNA, 20 nt, Human
ccugugccucugggacugga

SEQ ID NO: 2714064 - RNA, 20 nt, Human
ccugugggcccccaaaugga

SEQ ID NO: 2714065 - RNA, 20 nt, Human
ccuguggaugauaaaacaca

SEQ ID NO: 2714066 - RNA, 15 nt, Human
ccuuggacucauuuu

SEQ ID NO: 2714067 - RNA, 15 nt, Human
ccuuggauugucccc

SEQ ID NO: 2714068 - RNA, 22 nt, Human
ccuuggcucaaguccucuuuuc

SEQ ID NO: 2714069 - RNA, 18 nt, Human
ccuugacagggcacaccg

SEQ ID NO: 2714070 - RNA, 21 nt, Human
ccuugacagggcacaccgggc

SEQ ID NO: 2714071 - RNA, 17 nt, Human
ccuucucuccagccccu

SEQ ID NO: 2714072 - RNA, 18 nt, Human
ccuucucuccagccccug

SEQ ID NO: 2714073 - RNA, 19 nt, Human
ccuuggugucgggcaugac

SEQ ID NO: 2714074 - RNA, 20 nt, Human
ccuuggugucgggcaugaca

SEQ ID NO: 2714075 - RNA, 14 nt, Human
ccuuggcugcaggg

SEQ ID NO: 2714076 - RNA, 16 nt, Human
ccuuggcugcagggag

SEQ ID NO: 2714077 - RNA, 14 nt, Human
ccuuggggagcagg

SEQ ID NO: 2714078 - RNA, 19 nt, Human
ccuucucuccagccccugg

SEQ ID NO: 2714079 - RNA, 15 nt, Human
ccuuuuuuggcugcu

SEQ ID NO: 2714080 - RNA, 19 nt, Human
ccuuuuuuauacauaaaca

SEQ ID NO: 2714081 - RNA, 14 nt, Human
ccuuugugaggaag

SEQ ID NO: 2714082 - RNA, 22 nt, Human
ccuuuguccccaccgcagacag

SEQ ID NO: 2714083 - RNA, 23 nt, Human
ccuuuguccccaccgcagacagg

SEQ ID NO: 2714084 - RNA, 15 nt, Human
ccuuugugaggaagc

SEQ ID NO: 2714085 - RNA, 16 nt, Human
ccuuugugaggaagcc

SEQ ID NO: 2714086 - RNA, 17 nt, Human
ccuuugugaggaagccg

SEQ ID NO: 2714087 - RNA, 23 nt, Human
ccuuugugaggaagccgcugggg

SEQ ID NO: 2714088 - RNA, 24 nt, Human
ccuuuguauucucuccuguaccuc

SEQ ID NO: 2714089 - RNA, 23 nt, Human
ccuuuguauucucuccuguaccu

SEQ ID NO: 2714090 - RNA, 22 nt, Human
ccuuuguauucucuccuguacc

SEQ ID NO: 2714091 - RNA, 14 nt, Human
ccuuuguccccacc

SEQ ID NO: 2714092 - RNA, 16 nt, Human
ccuuuguccccaccgc

SEQ ID NO: 2714093 - RNA, 18 nt, Human
ccuuuguccccaccgcag

SEQ ID NO: 2714094 - RNA, 23 nt, Human
cgaaagggacuuggaagcuccgc

SEQ ID NO: 2714095 - RNA, 17 nt, Human
ccuuuuuuggcugcuga

SEQ ID NO: 2714096 - RNA, 18 nt, Human
ccuuuuuuggcugcugaa

SEQ ID NO: 2714097 - RNA, 20 nt, Human
ccuuuuuuggcugcugaagg

SEQ ID NO: 2714098 - RNA, 22 nt, Human
ccuuuuuuggcugcugaaggcu

SEQ ID NO: 2714099 - RNA, 23 nt, Human
cgaacauguuuuucuucucccuc

SEQ ID NO: 2714100 - RNA, 21 nt, Human
cgaacauguuuuucuucuccc

SEQ ID NO: 2714101 - RNA, 23 nt, Human
cgaagaguauuuuugacagaaua

SEQ ID NO: 2714102 - RNA, 15 nt, Human
cgaauauugcugaug

SEQ ID NO: 2714103 - RNA, 17 nt, Human
cgaauauugcugauggu

SEQ ID NO: 2714104 - RNA, 15 nt, Human
cgaauagcugggacu

SEQ ID NO: 2714105 - RNA, 16 nt, Human
cgaauagcugggacua

SEQ ID NO: 2714106 - RNA, 11 nt, Human
cgaauauugcu

SEQ ID NO: 2714107 - RNA, 12 nt, Human
cgaauauugcug

SEQ ID NO: 2714108 - RNA, 14 nt, Human
cgaauauugcugau

SEQ ID NO: 2714109 - RNA, 19 nt, Human
cgcugugcugcccugccca

SEQ ID NO: 2714110 - RNA, 21 nt, Human
cgcugugcugcccugcccacc

SEQ ID NO: 2714111 - RNA, 23 nt, Human
cgcugugcugcccugcccaccug

SEQ ID NO: 2714112 - RNA, 11 nt, Human
cgcugugcugc

SEQ ID NO: 2714113 - RNA, 13 nt, Human
cgcugugcugccc

SEQ ID NO: 2714114 - RNA, 14 nt, Human
cgcugugcugcccu

SEQ ID NO: 2714115 - RNA, 14 nt, Human
cgcuuucuacccag

SEQ ID NO: 2714116 - RNA, 16 nt, Human
cgcuuucuacccagcg

SEQ ID NO: 2714117 - RNA, 20 nt, Human
cggacagccacggccaggcc

SEQ ID NO: 2714118 - RNA, 14 nt, Human
cggaauaguuggcu

SEQ ID NO: 2714119 - RNA, 16 nt, Human
cggaauaguuggcuag

SEQ ID NO: 2714120 - RNA, 17 nt, Human
cggaauaguuggcuagg

SEQ ID NO: 2714121 - RNA, 17 nt, Human
cggagaaaggaagggcu

SEQ ID NO: 2714122 - RNA, 15 nt, Human
cggagaaaggaaggg

SEQ ID NO: 2714123 - RNA, 21 nt, Human
cggacagccacggccaggcca

SEQ ID NO: 2714124 - RNA, 22 nt, Human
cggacagccacggccaggccag

SEQ ID NO: 2714125 - RNA, 18 nt, Human
cgcagcccugcagagggc

SEQ ID NO: 2714126 - RNA, 19 nt, Human
cgcagcccugcagagggca

SEQ ID NO: 2714127 - RNA, 13 nt, Human
cgcccagucugga

SEQ ID NO: 2714128 - RNA, 19 nt, Human
cgcccagucuggaaugcag

SEQ ID NO: 2714129 - RNA, 21 nt, Human
cgcccagucuggaaugcagug

SEQ ID NO: 2714130 - RNA, 12 nt, Human
cgcccagucugg

SEQ ID NO: 2714131 - RNA, 14 nt, Human
cgcgacaaugcaaa

SEQ ID NO: 2714132 - RNA, 19 nt, Human
cgcgguggcucacgccugu

SEQ ID NO: 2714133 - RNA, 17 nt, Human
cgcuacccgggaagggg

SEQ ID NO: 2714134 - RNA, 18 nt, Human
cgcuacccgggaaggggg

SEQ ID NO: 2714135 - RNA, 21 nt, Human
cgcuacccgggaagggggcug

SEQ ID NO: 2714136 - RNA, 24 nt, Human
cgcuacccgggaagggggcuggga

SEQ ID NO: 2714137 - RNA, 19 nt, Human
cgcuaaacuuuucugauag

SEQ ID NO: 2714138 - RNA, 18 nt, Human
cgcuaaacuuuucugaua

SEQ ID NO: 2714139 - RNA, 17 nt, Human
cgcuaaacuuuucugau

SEQ ID NO: 2714140 - RNA, 22 nt, Human
cgcguugaaauuguaauuauau

SEQ ID NO: 2714141 - RNA, 24 nt, Human
cgcguugaaauuguaauuauaucu

SEQ ID NO: 2714142 - RNA, 23 nt, Human
cggcuggcagcccaccccucaac

SEQ ID NO: 2714143 - RNA, 13 nt, Human
cggcuggccuggc

SEQ ID NO: 2714144 - RNA, 16 nt, Human
cgggaagggggcuggg

SEQ ID NO: 2714145 - RNA, 19 nt, Human
cgggaagggggcugggaca

SEQ ID NO: 2714146 - RNA, 20 nt, Human
cgggaagggggcugggacau

SEQ ID NO: 2714147 - RNA, 12 nt, Human
cggccaggccag

SEQ ID NO: 2714148 - RNA, 20 nt, Human
cggccaggccagagggagug

SEQ ID NO: 2714149 - RNA, 11 nt, Human
cggccaggcca

SEQ ID NO: 2714150 - RNA, 14 nt, Human
cggcuggcagccca

SEQ ID NO: 2714151 - RNA, 13 nt, Human
cgcacugggcuug

SEQ ID NO: 2714152 - RNA, 17 nt, Human
cgcacugggcuugggga

SEQ ID NO: 2714153 - RNA, 19 nt, Human
cgcagcauauucaggaagc

SEQ ID NO: 2714154 - RNA, 20 nt, Human
cgcagcauauucaggaagcu

SEQ ID NO: 2714155 - RNA, 15 nt, Human
cgcagcccugcagag

SEQ ID NO: 2714156 - RNA, 17 nt, Human
cgcagcccugcagaggg

SEQ ID NO: 2714157 - RNA, 16 nt, Human
cgaggacagggaggug

SEQ ID NO: 2714158 - RNA, 18 nt, Human
cgagcccugguggcagug

SEQ ID NO: 2714159 - RNA, 14 nt, Human
cgaggacagggagg

SEQ ID NO: 2714160 - RNA, 19 nt, Human
cgagcccugguggcagugg

SEQ ID NO: 2714161 - RNA, 13 nt, Human
ccugggcagcugc

SEQ ID NO: 2714162 - RNA, 14 nt, Human
ccugggcagcugcc

SEQ ID NO: 2714163 - RNA, 19 nt, Human
ccugggggcugggcagagg

SEQ ID NO: 2714164 - RNA, 20 nt, Human
ccugggggcugggcagagga

SEQ ID NO: 2714165 - RNA, 21 nt, Human
ccugggggcugggcagaggaa

SEQ ID NO: 2714166 - RNA, 18 nt, Human
ccugggggcugggcagag

SEQ ID NO: 2714167 - RNA, 22 nt, Human
ccugggaggucaaggcugcagu

SEQ ID NO: 2714168 - RNA, 16 nt, Human
ccugggagugagcugg

SEQ ID NO: 2714169 - RNA, 16 nt, Human
ccugggcagaaggaag

SEQ ID NO: 2714170 - RNA, 18 nt, Human
ccugggagugagcugguu

SEQ ID NO: 2714171 - RNA, 15 nt, Human
ccugggcagaaggaa

SEQ ID NO: 2714172 - RNA, 16 nt, Human
ccuggcccacugcauc

SEQ ID NO: 2714173 - RNA, 13 nt, Human
ccuggcccacugc

SEQ ID NO: 2714174 - RNA, 14 nt, Human
ccuggcccacugca

SEQ ID NO: 2714175 - RNA, 21 nt, Human
ccuggccagaugcaccagccc

SEQ ID NO: 2714176 - RNA, 23 nt, Human
ccuggccagaugcaccagcccuu

SEQ ID NO: 2714177 - RNA, 20 nt, Human
ccuggccagaugcaccagcc

SEQ ID NO: 2714178 - RNA, 13 nt, Human
ccuggcaugggaa

SEQ ID NO: 2714179 - RNA, 23 nt, Human
ccuggcaugggaaugaaugucag

SEQ ID NO: 2714180 - RNA, 13 nt, Human
ccuggcacugcuu

SEQ ID NO: 2714181 - RNA, 16 nt, Human
ccuggcacugcuucca

SEQ ID NO: 2714182 - RNA, 17 nt, Human
ccugcuaauuccccaga

SEQ ID NO: 2714183 - RNA, 21 nt, Human
ccugcuaauuccccagauugc

SEQ ID NO: 2714184 - RNA, 20 nt, Human
ccugccuguugggccaggag

SEQ ID NO: 2714185 - RNA, 18 nt, Human
ccugccuguugggccagg

SEQ ID NO: 2714186 - RNA, 19 nt, Human
ccugccuguugggccagga

SEQ ID NO: 2714187 - RNA, 19 nt, Human
ccuggcacccggccccugc

SEQ ID NO: 2714188 - RNA, 20 nt, Human
ccuggcacccggccccugcu

SEQ ID NO: 2714189 - RNA, 21 nt, Human
ccuggcacccggccccugcug

SEQ ID NO: 2714190 - RNA, 12 nt, Human
ccuggcacugcu

SEQ ID NO: 2714191 - RNA, 18 nt, Human
ccuggcacccggccccug

SEQ ID NO: 2714192 - RNA, 22 nt, Human
ccuggcacuauaauguaagcuc

SEQ ID NO: 2714193 - RNA, 14 nt, Human
ccuggcaugggaau

SEQ ID NO: 2714194 - RNA, 14 nt, Human
ccugguggcagcug

SEQ ID NO: 2714195 - RNA, 22 nt, Human
ccugguggcagcucaccucucc

SEQ ID NO: 2714196 - RNA, 19 nt, Human
ccugguggcagcucaccuc

SEQ ID NO: 2714197 - RNA, 21 nt, Human
ccugguggcagcucaccucuc

SEQ ID NO: 2714198 - RNA, 15 nt, Human
ccugguggcagcugc

SEQ ID NO: 2714199 - RNA, 16 nt, Human
ccugguggcagcugcg

SEQ ID NO: 2714200 - RNA, 17 nt, Human
ccugguggcagcugcgg

SEQ ID NO: 2714201 - RNA, 18 nt, Human
ccugguggcagcugcggu

SEQ ID NO: 2714202 - RNA, 15 nt, Human
ccuguagagugggag

SEQ ID NO: 2714203 - RNA, 16 nt, Human
ccuguagagugggagc

SEQ ID NO: 2714204 - RNA, 13 nt, Human
ccuguagcccuaa

SEQ ID NO: 2714205 - RNA, 13 nt, Human
ccugguggcagug

SEQ ID NO: 2714206 - RNA, 14 nt, Human
ccugguggcagugg

SEQ ID NO: 2714207 - RNA, 10 nt, Human
ccuguaccuc

SEQ ID NO: 2714208 - RNA, 12 nt, Human
ccugucccccug

SEQ ID NO: 2714209 - RNA, 13 nt, Human
ccugucccccuga

SEQ ID NO: 2714210 - RNA, 14 nt, Human
ccugucccccugac

SEQ ID NO: 2714211 - RNA, 15 nt, Human
ccugucccccugaca

SEQ ID NO: 2714212 - RNA, 14 nt, Human
ccugcccggcugcg

SEQ ID NO: 2714213 - RNA, 16 nt, Human
ccugcccggcugcgga

SEQ ID NO: 2714214 - RNA, 12 nt, Human
ccugccaggcau

SEQ ID NO: 2714215 - RNA, 22 nt, Human
ccugccagggacagagggggug

SEQ ID NO: 2714216 - RNA, 11 nt, Human
ccugcccugug

SEQ ID NO: 2714217 - RNA, 12 nt, Human
ccugcccugugg

SEQ ID NO: 2714218 - RNA, 14 nt, Human
ccugcccugugggc

SEQ ID NO: 2714219 - RNA, 15 nt, Human
ccugcccugugggcc

SEQ ID NO: 2714220 - RNA, 19 nt, Human
ccugcccuuaccugccagg

SEQ ID NO: 2714221 - RNA, 21 nt, Human
ccugcccuuaccugccaggaa

SEQ ID NO: 2714222 - RNA, 22 nt, Human
ccugcccuuaccugccaggaag

SEQ ID NO: 2714223 - RNA, 13 nt, Human
ccugccucagccu

SEQ ID NO: 2714224 - RNA, 14 nt, Human
ccugccucagccuc

SEQ ID NO: 2714225 - RNA, 12 nt, Human
ccugccucagcc

SEQ ID NO: 2714226 - RNA, 14 nt, Human
ccugccuguugggc

SEQ ID NO: 2714227 - RNA, 22 nt, Human
ccugccuguugggccaggagcc

SEQ ID NO: 2714228 - RNA, 15 nt, Human
ccugaggcugggcuc

SEQ ID NO: 2714229 - RNA, 13 nt, Human
ccugaggcugggc

SEQ ID NO: 2714230 - RNA, 14 nt, Human
ccugaggcugggcu

SEQ ID NO: 2714231 - RNA, 12 nt, Human
ccugagcuggga

SEQ ID NO: 2714232 - RNA, 15 nt, Human
ccugaggcccagagg

SEQ ID NO: 2714233 - RNA, 16 nt, Human
ccugaggcccagaggg

SEQ ID NO: 2714234 - RNA, 17 nt, Human
ccugaggcccagagggc

SEQ ID NO: 2714235 - RNA, 18 nt, Human
ccugaggcccagagggcc

SEQ ID NO: 2714236 - RNA, 22 nt, Human
ccugaagucuuuguacagacaa

SEQ ID NO: 2714237 - RNA, 20 nt, Human
ccugaagucacacagugagu

SEQ ID NO: 2714238 - RNA, 19 nt, Human
ccugaagucacacagugag

SEQ ID NO: 2714239 - RNA, 15 nt, Human
ccugagccagauuuc

SEQ ID NO: 2714240 - RNA, 12 nt, Human
ccugagccagau

SEQ ID NO: 2714241 - RNA, 16 nt, Human
ccugagccagauuuca

SEQ ID NO: 2714242 - RNA, 18 nt, Human
ccugagccagauuucacu

SEQ ID NO: 2714243 - RNA, 19 nt, Human
ccugccaauggacuaacuu

SEQ ID NO: 2714244 - RNA, 16 nt, Human
ccugccacccugggga

SEQ ID NO: 2714245 - RNA, 22 nt, Human
ccugccacccuggggagaaagu

SEQ ID NO: 2714246 - RNA, 14 nt, Human
ccugccacccuggg

SEQ ID NO: 2714247 - RNA, 12 nt, Human
ccugccacccug

SEQ ID NO: 2714248 - RNA, 13 nt, Human
ccugccacccugg

SEQ ID NO: 2714249 - RNA, 13 nt, Human
ccugaaagcccug

SEQ ID NO: 2714250 - RNA, 14 nt, Human
ccugaaagcccuga

SEQ ID NO: 2714251 - RNA, 18 nt, Human
ccugaaagcccugagcuu

SEQ ID NO: 2714252 - RNA, 14 nt, Human
ccugaaggccccgc

SEQ ID NO: 2714253 - RNA, 18 nt, Human
ccugaaggccccgcccag

SEQ ID NO: 2714254 - RNA, 19 nt, Human
ccugaaggccccgcccagg

SEQ ID NO: 2714255 - RNA, 22 nt, Human
ccugaaggccccgcccaggcuu

SEQ ID NO: 2714256 - RNA, 20 nt, Human
ccugaaggccccgcccaggc

SEQ ID NO: 2714257 - RNA, 21 nt, Human
ccugaaggccccgcccaggcu

SEQ ID NO: 2714258 - RNA, 15 nt, Human
ccugagcugggauga

SEQ ID NO: 2714259 - RNA, 16 nt, Human
gaaacacaacuauauu

SEQ ID NO: 2714260 - RNA, 11 nt, Human
gaaacauuugg

SEQ ID NO: 2714261 - RNA, 21 nt, Human
gaaacaagucagucauucaga

SEQ ID NO: 2714262 - RNA, 20 nt, Human
gaaaaugauacgcaacauaa

SEQ ID NO: 2714263 - RNA, 13 nt, Human
gaaacccagcucu

SEQ ID NO: 2714264 - RNA, 14 nt, Human
gaaacccagcucug

SEQ ID NO: 2714265 - RNA, 15 nt, Human
gaaacccagcucugg

SEQ ID NO: 2714266 - RNA, 16 nt, Human
gaaacccagcucuggu

SEQ ID NO: 2714267 - RNA, 18 nt, Human
gaaacccagcucuggucc

SEQ ID NO: 2714268 - RNA, 19 nt, Human
gaaacccagcucuggucca

SEQ ID NO: 2714269 - RNA, 23 nt, Human
gaaacucguuaauuuguaguguu

SEQ ID NO: 2714270 - RNA, 18 nt, Human
gaaacggaugauuucuau

SEQ ID NO: 2714271 - RNA, 17 nt, Human
gaaacggaugauuucua

SEQ ID NO: 2714272 - RNA, 23 nt, Human
gaaacccagcucugguccauaga

SEQ ID NO: 2714273 - RNA, 17 nt, Human
gaaagagaacuuccaga

SEQ ID NO: 2714274 - RNA, 19 nt, Human
gaaagacuuuuccaacccu

SEQ ID NO: 2714275 - RNA, 17 nt, Human
gaaagacuguacaaagu

SEQ ID NO: 2714276 - RNA, 20 nt, Human
gaaagaggcagcuugaaacu

SEQ ID NO: 2714277 - RNA, 15 nt, Human
gaaagaguaggaaga

SEQ ID NO: 2714278 - RNA, 16 nt, Human
gaaagaguaggaagac

SEQ ID NO: 2714279 - RNA, 21 nt, Human
gaaagcccugagcuuucugcu

SEQ ID NO: 2714280 - RNA, 22 nt, Human
gaaagcccugagcuuucugcua

SEQ ID NO: 2714281 - RNA, 17 nt, Human
gaaagcccugagcuuuc

SEQ ID NO: 2714282 - RNA, 18 nt, Human
gaaaaucuuauaauuuaa

SEQ ID NO: 2714283 - RNA, 20 nt, Human
gaaaaucagccugcuccagc

SEQ ID NO: 2714284 - RNA, 22 nt, Human
gaaaaucagccugcuccagcug

SEQ ID NO: 2714285 - RNA, 18 nt, Human
gaaaauauuuguaucaca

SEQ ID NO: 2714286 - RNA, 21 nt, Human
gaaaauauuauguguuuccau

SEQ ID NO: 2714287 - RNA, 23 nt, Human
gaaaaguuuaauauuaaagccau

SEQ ID NO: 2714288 - RNA, 22 nt, Human
gaaaacacuguucucugcccuc

SEQ ID NO: 2714289 - RNA, 24 nt, Human
gaaaacacuguucucugcccucca

SEQ ID NO: 2714290 - RNA, 19 nt, Human
gaaaagcugcugacagugu

SEQ ID NO: 2714291 - RNA, 19 nt, Human
gaaaacguggcugcuucaa

SEQ ID NO: 2714292 - RNA, 20 nt, Human
gaaaacguggcugcuucaag

SEQ ID NO: 2714293 - RNA, 22 nt, Human
gaaaacguggcugcuucaagga

SEQ ID NO: 2714294 - RNA, 14 nt, Human
gaaaaguugaauuu

SEQ ID NO: 2714295 - RNA, 15 nt, Human
gaaaaguugaauuuu

SEQ ID NO: 2714296 - RNA, 15 nt, Human
gaaaaguuuaauauu

SEQ ID NO: 2714297 - RNA, 22 nt, Human
gaaaaguuuaauauuaaagcca

SEQ ID NO: 2714298 - RNA, 21 nt, Human
gaaaaguuuaauauuaaagcc

SEQ ID NO: 2714299 - RNA, 20 nt, Human
gaaaaguuuaauauuaaagc

SEQ ID NO: 2714300 - RNA, 19 nt, Human
gaaaaguuuaauauuaaag

SEQ ID NO: 2714301 - RNA, 18 nt, Human
cuuuguuaguuucuccaa

SEQ ID NO: 2714302 - RNA, 12 nt, Human
cuuuuguucuug

SEQ ID NO: 2714303 - RNA, 11 nt, Human
cuuuuguucuu

SEQ ID NO: 2714304 - RNA, 16 nt, Human
cuuuuuuggcugcuga

SEQ ID NO: 2714305 - RNA, 12 nt, Human
gaaaaaggagga

SEQ ID NO: 2714306 - RNA, 15 nt, Human
gaaaaaggaggaaga

SEQ ID NO: 2714307 - RNA, 14 nt, Human
gaaaacacauuuuu

SEQ ID NO: 2714308 - RNA, 18 nt, Human
gaaaacacauuuuucuua

SEQ ID NO: 2714309 - RNA, 19 nt, Human
gaaaacacauuuuucuuag

SEQ ID NO: 2714310 - RNA, 20 nt, Human
cuuuuuggcauaacauaaau

SEQ ID NO: 2714311 - RNA, 16 nt, Human
cuuuuuggcauaacau

SEQ ID NO: 2714312 - RNA, 22 nt, Human
cuuuuuggcauaacauaaaucu

SEQ ID NO: 2714313 - RNA, 17 nt, Human
cuuuuuuggcugcugaa

SEQ ID NO: 2714314 - RNA, 20 nt, Human
cuuuuuuggcugcugaaggc

SEQ ID NO: 2714315 - RNA, 22 nt, Human
cuuuuuuggcugcugaaggcuc

SEQ ID NO: 2714316 - RNA, 19 nt, Human
cuugaguuuaaauuguaau

SEQ ID NO: 2714317 - RNA, 23 nt, Human
cuuggggggcugaggugggagga

SEQ ID NO: 2714318 - RNA, 22 nt, Human
cuuggggggcugaggugggagg

SEQ ID NO: 2714319 - RNA, 16 nt, Human
cuuguaaauagcucag

SEQ ID NO: 2714320 - RNA, 17 nt, Human
cuuguaaauagcucagg

SEQ ID NO: 2714321 - RNA, 18 nt, Human
cuuguaaauagcucaggu

SEQ ID NO: 2714322 - RNA, 12 nt, Human
cuuguacauaau

SEQ ID NO: 2714323 - RNA, 15 nt, Human
cuuguacauaaugcg

SEQ ID NO: 2714324 - RNA, 22 nt, Human
cuuguacauaaugcgugcauac

SEQ ID NO: 2714325 - RNA, 21 nt, Human
cuuguacauaaugcgugcaua

SEQ ID NO: 2714326 - RNA, 19 nt, Human
cuuguacauaaugcgugca

SEQ ID NO: 2714327 - RNA, 23 nt, Human
cuugucaauaaaauccauacauu

SEQ ID NO: 2714328 - RNA, 12 nt, Human
cuuguguaaaua

SEQ ID NO: 2714329 - RNA, 21 nt, Human
cuuguguaaauacaauuuugu

SEQ ID NO: 2714330 - RNA, 16 nt, Human
cuuguguaaauacaau

SEQ ID NO: 2714331 - RNA, 14 nt, Human
cuuguguaaauaca

SEQ ID NO: 2714332 - RNA, 22 nt, Human
cuuguuagaucuaguucacucu

SEQ ID NO: 2714333 - RNA, 13 nt, Human
cuuuacuauggcc

SEQ ID NO: 2714334 - RNA, 22 nt, Human
cuuuaccuuuuuuauacauaaa

SEQ ID NO: 2714335 - RNA, 21 nt, Human
cuuuaucaaagggugaaaauu

SEQ ID NO: 2714336 - RNA, 22 nt, Human
cuuuaucaaagggugaaaauua

SEQ ID NO: 2714337 - RNA, 19 nt, Human
cuuuauaauucuacuuuga

SEQ ID NO: 2714338 - RNA, 13 nt, Human
cuuuauaauucua

SEQ ID NO: 2714339 - RNA, 14 nt, Human
cuuuagcgcccagu

SEQ ID NO: 2714340 - RNA, 15 nt, Human
cuuuagcgcccaguu

SEQ ID NO: 2714341 - RNA, 15 nt, Human
cuuuaugcacaaaau

SEQ ID NO: 2714342 - RNA, 14 nt, Human
cuuuguccccaccg

SEQ ID NO: 2714343 - RNA, 19 nt, Human
cuuuggcuauuagagauca

SEQ ID NO: 2714344 - RNA, 20 nt, Human
cuuugucuacaccauuaugu

SEQ ID NO: 2714345 - RNA, 15 nt, Human
cuuuguccccaccgc

SEQ ID NO: 2714346 - RNA, 23 nt, Human
cuuugucuacaccauuaugugcg

SEQ ID NO: 2714347 - RNA, 22 nt, Human
cuuugugcugggguuaucugaa

SEQ ID NO: 2714348 - RNA, 20 nt, Human
cuuugugcugggguuaucug

SEQ ID NO: 2714349 - RNA, 15 nt, Human
cuuugugcugggguu

SEQ ID NO: 2714350 - RNA, 15 nt, Human
cuuugugaggaagcc

SEQ ID NO: 2714351 - RNA, 15 nt, Human
cuuugaccucugcag

SEQ ID NO: 2714352 - RNA, 14 nt, Human
cuuugaccucugca

SEQ ID NO: 2714353 - RNA, 24 nt, Human
cuuugaccucugcagcaauaaagc

SEQ ID NO: 2714354 - RNA, 20 nt, Human
cuuugaccucugcagcaaua

SEQ ID NO: 2714355 - RNA, 18 nt, Human
cuuugaccucugcagcaa

SEQ ID NO: 2714356 - RNA, 17 nt, Human
cuuugaccucugcagca

SEQ ID NO: 2714357 - RNA, 16 nt, Human
cuuugcagacaggcaa

SEQ ID NO: 2714358 - RNA, 13 nt, Human
cuuugaccucugc

SEQ ID NO: 2714359 - RNA, 20 nt, Human
cuuugcagacaggcaagcac

SEQ ID NO: 2714360 - RNA, 15 nt, Human
cuuuccaggaaggcu

SEQ ID NO: 2714361 - RNA, 15 nt, Human
cuuuccaucuacccu

SEQ ID NO: 2714362 - RNA, 12 nt, Human
cuuuccugaggc

SEQ ID NO: 2714363 - RNA, 16 nt, Human
cuuucccucccuuccu

SEQ ID NO: 2714364 - RNA, 14 nt, Human
cuuucccucccuuc

SEQ ID NO: 2714365 - RNA, 13 nt, Human
cuuucccucccuu

SEQ ID NO: 2714366 - RNA, 11 nt, Human
cuuucccuccc

SEQ ID NO: 2714367 - RNA, 16 nt, Human
cuuucugcuuguguua

SEQ ID NO: 2714368 - RNA, 16 nt, Human
cuuucucuuucguuac

SEQ ID NO: 2714369 - RNA, 13 nt, Human
cuuuccugaggcu

SEQ ID NO: 2714370 - RNA, 15 nt, Human
cuuuccugaggcugg

SEQ ID NO: 2714371 - RNA, 20 nt, Human
cuuucuggcuaugcauuuga

SEQ ID NO: 2714372 - RNA, 19 nt, Human
cuuucuggcuaugcauuug

SEQ ID NO: 2714373 - RNA, 18 nt, Human
cuuucuggcuaugcauuu

SEQ ID NO: 2714374 - RNA, 17 nt, Human
cuuucuggcuaugcauu

SEQ ID NO: 2714375 - RNA, 14 nt, Human
cuuauuucauuucu

SEQ ID NO: 2714376 - RNA, 18 nt, Human
cuuauuuaaugaaagacu

SEQ ID NO: 2714377 - RNA, 17 nt, Human
cuuauuuaaugaaagac

SEQ ID NO: 2714378 - RNA, 15 nt, Human
cuuauuucauuucuu

SEQ ID NO: 2714379 - RNA, 23 nt, Human
cuucacagaugggugcuuggagg

SEQ ID NO: 2714380 - RNA, 10 nt, Human
cuucaaggau

SEQ ID NO: 2714381 - RNA, 16 nt, Human
cuucaaggauccugag

SEQ ID NO: 2714382 - RNA, 13 nt, Human
cuucaaggauccu

SEQ ID NO: 2714383 - RNA, 15 nt, Human
cuucaaggauccuga

SEQ ID NO: 2714384 - RNA, 20 nt, Human
cuuagaugcaguucugaaga

SEQ ID NO: 2714385 - RNA, 16 nt, Human
cuguucuggcagaguu

SEQ ID NO: 2714386 - RNA, 22 nt, Human
cuuagaugcaguucugaagaag

SEQ ID NO: 2714387 - RNA, 13 nt, Human
cuuagauguauau

SEQ ID NO: 2714388 - RNA, 16 nt, Human
cuuagucacugagaca

SEQ ID NO: 2714389 - RNA, 18 nt, Human
cuuagucacugagacagc

SEQ ID NO: 2714390 - RNA, 19 nt, Human
cuuagucacugagacagcc

SEQ ID NO: 2714391 - RNA, 14 nt, Human
cuuagucacugaga

SEQ ID NO: 2714392 - RNA, 15 nt, Human
cuuauacauuugaua

SEQ ID NO: 2714393 - RNA, 19 nt, Human
cuuauaucuauauuuuaca

SEQ ID NO: 2714394 - RNA, 13 nt, Human
cuucccuuucugc

SEQ ID NO: 2714395 - RNA, 17 nt, Human
cuucccuacaguugaaa

SEQ ID NO: 2714396 - RNA, 21 nt, Human
cuuccaggggugggacacccu

SEQ ID NO: 2714397 - RNA, 17 nt, Human
cuuccaggggugggaca

SEQ ID NO: 2714398 - RNA, 14 nt, Human
cuuccagggguggg

SEQ ID NO: 2714399 - RNA, 15 nt, Human
cuuccagggguggga

SEQ ID NO: 2714400 - RNA, 19 nt, Human
cuuccaggcugggagagcc

SEQ ID NO: 2714401 - RNA, 15 nt, Human
cuuccaggcugggag

SEQ ID NO: 2714402 - RNA, 16 nt, Human
cuuccaggcugggaga

SEQ ID NO: 2714403 - RNA, 12 nt, Human
cuuccaggcugg

SEQ ID NO: 2714404 - RNA, 14 nt, Human
cuuccaggcuggga

SEQ ID NO: 2714405 - RNA, 16 nt, Human
cuuccacaagagccca

SEQ ID NO: 2714406 - RNA, 17 nt, Human
cuuccacaagagcccag

SEQ ID NO: 2714407 - RNA, 19 nt, Human
cuuccacaagagcccaggc

SEQ ID NO: 2714408 - RNA, 21 nt, Human
cuuccacaagagcccaggccu

SEQ ID NO: 2714409 - RNA, 20 nt, Human
cuucauucaacccaccugcg

SEQ ID NO: 2714410 - RNA, 17 nt, Human
cuucaguggcagcugcu

SEQ ID NO: 2714411 - RNA, 15 nt, Human
cuucaguaagccgug

SEQ ID NO: 2714412 - RNA, 18 nt, Human
cuucagugccuuauggaa

SEQ ID NO: 2714413 - RNA, 22 nt, Human
cuucagugccuuauggaacacu

SEQ ID NO: 2714414 - RNA, 13 nt, Human
cuucaguggcagc

SEQ ID NO: 2714415 - RNA, 14 nt, Human
cuucaguggcagcu

SEQ ID NO: 2714416 - RNA, 15 nt, Human
cuucaguggcagcug

SEQ ID NO: 2714417 - RNA, 16 nt, Human
cuucaguggcagcugc

SEQ ID NO: 2714418 - RNA, 16 nt, Human
cuucaguaagccguga

SEQ ID NO: 2714419 - RNA, 23 nt, Human
cuucaguaagccgugauuuucau

SEQ ID NO: 2714420 - RNA, 18 nt, Human
cuucugucuucacaacag

SEQ ID NO: 2714421 - RNA, 21 nt, Human
cuucuguccuacucuguguca

SEQ ID NO: 2714422 - RNA, 22 nt, Human
cuucugucuucacaacagauua

SEQ ID NO: 2714423 - RNA, 21 nt, Human
cuucugucuucacaacagauu

SEQ ID NO: 2714424 - RNA, 16 nt, Human
cuucuguccuacucug

SEQ ID NO: 2714425 - RNA, 17 nt, Human
cuucuguccuacucugu

SEQ ID NO: 2714426 - RNA, 18 nt, Human
cuucuguccuacucugug

SEQ ID NO: 2714427 - RNA, 19 nt, Human
cuucuguccuacucugugu

SEQ ID NO: 2714428 - RNA, 21 nt, Human
cuucuguacgucugacaggca

SEQ ID NO: 2714429 - RNA, 14 nt, Human
cuucuguacgucug

SEQ ID NO: 2714430 - RNA, 15 nt, Human
cuucuguacgucuga

SEQ ID NO: 2714431 - RNA, 18 nt, Human
cuucuguacgucugacag

SEQ ID NO: 2714432 - RNA, 20 nt, Human
cuucuguacgucugacaggc

SEQ ID NO: 2714433 - RNA, 13 nt, Human
cuucugcuucagc

SEQ ID NO: 2714434 - RNA, 12 nt, Human
cuucuccaggcu

SEQ ID NO: 2714435 - RNA, 13 nt, Human
cuucuccaggcug

SEQ ID NO: 2714436 - RNA, 11 nt, Human
cuucuccacuu

SEQ ID NO: 2714437 - RNA, 20 nt, Human
cuucuccacuuucuagccag

SEQ ID NO: 2714438 - RNA, 19 nt, Human
cuucuccuucaccuuuguc

SEQ ID NO: 2714439 - RNA, 12 nt, Human
cuucucuccagc

SEQ ID NO: 2714440 - RNA, 13 nt, Human
cuucucuccagcc

SEQ ID NO: 2714441 - RNA, 15 nt, Human
cuucucuccagcccc

SEQ ID NO: 2714442 - RNA, 17 nt, Human
cuucucuccagccccug

SEQ ID NO: 2714443 - RNA, 19 nt, Human
cuucucuccagccccugga

SEQ ID NO: 2714444 - RNA, 20 nt, Human
cuucugccauuucugagauc

SEQ ID NO: 2714445 - RNA, 13 nt, Human
cuucucugaagga

SEQ ID NO: 2714446 - RNA, 21 nt, Human
cuugaacuuugaccucugcag

SEQ ID NO: 2714447 - RNA, 17 nt, Human
cuugaacuuugaccucu

SEQ ID NO: 2714448 - RNA, 13 nt, Human
cuugaacuccugg

SEQ ID NO: 2714449 - RNA, 13 nt, Human
cuugaccucaggu

SEQ ID NO: 2714450 - RNA, 21 nt, Human
cuugaccgugaggccagagac

SEQ ID NO: 2714451 - RNA, 18 nt, Human
cuugaccgugaggccaga

SEQ ID NO: 2714452 - RNA, 20 nt, Human
cuugaccgugaggccagaga

SEQ ID NO: 2714453 - RNA, 17 nt, Human
cuugaccgugaggccag

SEQ ID NO: 2714454 - RNA, 22 nt, Human
cuugaccauucuccaccugcca

SEQ ID NO: 2714455 - RNA, 23 nt, Human
cuugaccauucuccaccugccag

SEQ ID NO: 2714456 - RNA, 16 nt, Human
cuugagccugggaggu

SEQ ID NO: 2714457 - RNA, 15 nt, Human
cuugagccuugaacu

SEQ ID NO: 2714458 - RNA, 18 nt, Human
cuugagccuugaacuuug

SEQ ID NO: 2714459 - RNA, 17 nt, Human
cuugagccuugaacuuu

SEQ ID NO: 2714460 - RNA, 13 nt, Human
cuugagcucagga

SEQ ID NO: 2714461 - RNA, 21 nt, Human
cuugaguugauucagcucugc

SEQ ID NO: 2714462 - RNA, 21 nt, Human
cuugaggguugggcugguguc

SEQ ID NO: 2714463 - RNA, 19 nt, Human
cuugaggguugggcuggug

SEQ ID NO: 2714464 - RNA, 20 nt, Human
cuugaggguugggcuggugu

SEQ ID NO: 2714465 - RNA, 18 nt, Human
cuucuuuaauuuuggaau

SEQ ID NO: 2714466 - RNA, 17 nt, Human
cuucuuuaauuuuggaa

SEQ ID NO: 2714467 - RNA, 16 nt, Human
cuucuuuaauuuugga

SEQ ID NO: 2714468 - RNA, 15 nt, Human
cuucuuuaauuuugg

SEQ ID NO: 2714469 - RNA, 14 nt, Human
cuucugugaaagua

SEQ ID NO: 2714470 - RNA, 13 nt, Human
cuucuguggguuu

SEQ ID NO: 2714471 - RNA, 14 nt, Human
cuucuguggguuuc

SEQ ID NO: 2714472 - RNA, 21 nt, Human
cuucuguggguuucuaaagcu

SEQ ID NO: 2714473 - RNA, 19 nt, Human
cuucuuuaauuuuggaauu

SEQ ID NO: 2714474 - RNA, 23 nt, Human
cuugaaaacacuguucucugccc

SEQ ID NO: 2714475 - RNA, 14 nt, Human
cuugaaaacacugu

SEQ ID NO: 2714476 - RNA, 20 nt, Human
cugcccucuccugggcagcu

SEQ ID NO: 2714477 - RNA, 21 nt, Human
cugcccucuccugggcagcug

SEQ ID NO: 2714478 - RNA, 16 nt, Human
cugcccucuccugggc

SEQ ID NO: 2714479 - RNA, 18 nt, Human
cugcccucuccugggcag

SEQ ID NO: 2714480 - RNA, 19 nt, Human
cugcccucuccugggcagc

SEQ ID NO: 2714481 - RNA, 12 nt, Human
cugcccuccaag

SEQ ID NO: 2714482 - RNA, 14 nt, Human
cucccuucccaccu

SEQ ID NO: 2714483 - RNA, 15 nt, Human
cucccuucccaccuc

SEQ ID NO: 2714484 - RNA, 16 nt, Human
cucccuucccaccucu

SEQ ID NO: 2714485 - RNA, 17 nt, Human
cucccuucccaccucuc

SEQ ID NO: 2714486 - RNA, 14 nt, Human
cugccgcagcccug

SEQ ID NO: 2714487 - RNA, 15 nt, Human
cugccgcagcccugc

SEQ ID NO: 2714488 - RNA, 17 nt, Human
cugccgcagcccugcag

SEQ ID NO: 2714489 - RNA, 18 nt, Human
cugccgcagcccugcaga

SEQ ID NO: 2714490 - RNA, 13 nt, Human
cugccuccccucc

SEQ ID NO: 2714491 - RNA, 15 nt, Human
cugccucugacacac

SEQ ID NO: 2714492 - RNA, 22 nt, Human
cugccucugacacacagcucug

SEQ ID NO: 2714493 - RNA, 23 nt, Human
cugccucugacacacagcucugu

SEQ ID NO: 2714494 - RNA, 12 nt, Human
cugccuaaggac

SEQ ID NO: 2714495 - RNA, 14 nt, Human
cugccuaaggacuu

SEQ ID NO: 2714496 - RNA, 13 nt, Human
cugccuaaggacu

SEQ ID NO: 2714497 - RNA, 15 nt, Human
cugccuaaggacuuc

SEQ ID NO: 2714498 - RNA, 11 nt, Human
cugccucccau

SEQ ID NO: 2714499 - RNA, 12 nt, Human
cugccucccauc

SEQ ID NO: 2714500 - RNA, 14 nt, Human
cugccucccaucac

SEQ ID NO: 2714501 - RNA, 16 nt, Human
cugccucccaucaccc

SEQ ID NO: 2714502 - RNA, 19 nt, Human
cugccucccaucacccgcu

SEQ ID NO: 2714503 - RNA, 20 nt, Human
cugccugcccaggccccugc

SEQ ID NO: 2714504 - RNA, 21 nt, Human
cugccugggaucccucauccu

SEQ ID NO: 2714505 - RNA, 15 nt, Human
cugccugaagucaca

SEQ ID NO: 2714506 - RNA, 16 nt, Human
cugccugcccaggccc

SEQ ID NO: 2714507 - RNA, 17 nt, Human
cugccugcccaggcccc

SEQ ID NO: 2714508 - RNA, 15 nt, Human
cugccucuucucuac

SEQ ID NO: 2714509 - RNA, 14 nt, Human
cugccucuucucua

SEQ ID NO: 2714510 - RNA, 18 nt, Human
cugcugaaacaacaaaua

SEQ ID NO: 2714511 - RNA, 11 nt, Human
cugcugaaggc

SEQ ID NO: 2714512 - RNA, 19 nt, Human
cugcgaccacaagaaggau

SEQ ID NO: 2714513 - RNA, 20 nt, Human
cugcuccagcuguucagcug

SEQ ID NO: 2714514 - RNA, 19 nt, Human
cugcuccagcuguucagcu

SEQ ID NO: 2714515 - RNA, 19 nt, Human
cugcucuccgaccagacac

SEQ ID NO: 2714516 - RNA, 15 nt, Human
cugcugcuggcuggu

SEQ ID NO: 2714517 - RNA, 14 nt, Human
cugcugcuggcugg

SEQ ID NO: 2714518 - RNA, 15 nt, Human
cugcuuccagugagg

SEQ ID NO: 2714519 - RNA, 16 nt, Human
cugcuuccagugaggc

SEQ ID NO: 2714520 - RNA, 18 nt, Human
cugcuuccagugaggcuc

SEQ ID NO: 2714521 - RNA, 19 nt, Human
cugcuuccagugaggcucu

SEQ ID NO: 2714522 - RNA, 20 nt, Human
cugcuuccagugaggcucug

SEQ ID NO: 2714523 - RNA, 21 nt, Human
cugcuuccagugaggcucugc

SEQ ID NO: 2714524 - RNA, 23 nt, Human
cugcuuccagugaggcucugccc

SEQ ID NO: 2714525 - RNA, 13 nt, Human
cugcugguucagg

SEQ ID NO: 2714526 - RNA, 15 nt, Human
cugcugguucagggu

SEQ ID NO: 2714527 - RNA, 23 nt, Human
cugcugguucaggguuggccccu

SEQ ID NO: 2714528 - RNA, 20 nt, Human
cuggcacaguuuucugagaa

SEQ ID NO: 2714529 - RNA, 20 nt, Human
cuggagugcagugagccgag

SEQ ID NO: 2714530 - RNA, 22 nt, Human
cuggcacaguuuucugagaaag

SEQ ID NO: 2714531 - RNA, 21 nt, Human
cuggcacaguuuucugagaaa

SEQ ID NO: 2714532 - RNA, 20 nt, Human
cuggcacccggccccugcug

SEQ ID NO: 2714533 - RNA, 21 nt, Human
cuggcacccggccccugcugg

SEQ ID NO: 2714534 - RNA, 19 nt, Human
cuggcacccggccccugcu

SEQ ID NO: 2714535 - RNA, 18 nt, Human
cuggcacugcuuccagug

SEQ ID NO: 2714536 - RNA, 19 nt, Human
cuggcacugcuuccaguga

SEQ ID NO: 2714537 - RNA, 20 nt, Human
cuggcacugcuuccagugag

SEQ ID NO: 2714538 - RNA, 23 nt, Human
cuggcacugcuuccagugaggcu

SEQ ID NO: 2714539 - RNA, 14 nt, Human
cuggccagaugcac

SEQ ID NO: 2714540 - RNA, 15 nt, Human
cuggcccacugcauc

SEQ ID NO: 2714541 - RNA, 24 nt, Human
cuggccuggccccucagggucccu

SEQ ID NO: 2714542 - RNA, 19 nt, Human
cuggccuggccccucaggg

SEQ ID NO: 2714543 - RNA, 16 nt, Human
cuggccucugcacucc

SEQ ID NO: 2714544 - RNA, 21 nt, Human
cuggccucugcacuccccugc

SEQ ID NO: 2714545 - RNA, 18 nt, Human
cuggccucugcacucccc

SEQ ID NO: 2714546 - RNA, 20 nt, Human
cuggccucugcacuccccug

SEQ ID NO: 2714547 - RNA, 14 nt, Human
cuggccugugucua

SEQ ID NO: 2714548 - RNA, 14 nt, Human
cuggcgugcagugg

SEQ ID NO: 2714549 - RNA, 15 nt, Human
cuggcgugcaguggu

SEQ ID NO: 2714550 - RNA, 24 nt, Human
cuggcucuuccaggcugggagagc

SEQ ID NO: 2714551 - RNA, 21 nt, Human
cuggcucuuccaggcugggag

SEQ ID NO: 2714552 - RNA, 22 nt, Human
cuggcucuuccaggcugggaga

SEQ ID NO: 2714553 - RNA, 22 nt, Human
cuggagguacgaaaagagggga

SEQ ID NO: 2714554 - RNA, 17 nt, Human
cuggagguacgaaaaga

SEQ ID NO: 2714555 - RNA, 14 nt, Human
cuggagugcaguga

SEQ ID NO: 2714556 - RNA, 15 nt, Human
cuggagugcagugag

SEQ ID NO: 2714557 - RNA, 16 nt, Human
cuggagugcagugagc

SEQ ID NO: 2714558 - RNA, 17 nt, Human
cuggagugcagugagcc

SEQ ID NO: 2714559 - RNA, 15 nt, Human
cuggacccuguggau

SEQ ID NO: 2714560 - RNA, 16 nt, Human
cuggaccuugaacugg

SEQ ID NO: 2714561 - RNA, 21 nt, Human
cuggaccuugaacuggguacu

SEQ ID NO: 2714562 - RNA, 17 nt, Human
cuggaccuugaacuggg

SEQ ID NO: 2714563 - RNA, 20 nt, Human
cuggaccuugaacuggguac

SEQ ID NO: 2714564 - RNA, 23 nt, Human
cuggacaggcauguucucugagg

SEQ ID NO: 2714565 - RNA, 14 nt, Human
cuggacaggcaugu

SEQ ID NO: 2714566 - RNA, 17 nt, Human
cuggacaggcauguucu

SEQ ID NO: 2714567 - RNA, 20 nt, Human
cuguauuuuaaaagaaugau

SEQ ID NO: 2714568 - RNA, 19 nt, Human
cuguauuuuaaaagaauga

SEQ ID NO: 2714569 - RNA, 22 nt, Human
cuguauuuuaaaagaaugauua

SEQ ID NO: 2714570 - RNA, 23 nt, Human
cuguaucccaugagccucagcau

SEQ ID NO: 2714571 - RNA, 13 nt, Human
cuguacagagccc

SEQ ID NO: 2714572 - RNA, 16 nt, Human
cuguauagauuagaau

SEQ ID NO: 2714573 - RNA, 20 nt, Human
cugucuacacuaagagagaa

SEQ ID NO: 2714574 - RNA, 22 nt, Human
cugucccuuacgugaguccugg

SEQ ID NO: 2714575 - RNA, 15 nt, Human
cuguccgagcuuuga

SEQ ID NO: 2714576 - RNA, 14 nt, Human
cuguccuacccacc

SEQ ID NO: 2714577 - RNA, 16 nt, Human
cugucucaaaaaaaga

SEQ ID NO: 2714578 - RNA, 23 nt, Human
cugucucaaaaaaacacaaaagu

SEQ ID NO: 2714579 - RNA, 18 nt, Human
cugucucaaaaaaagaaa

SEQ ID NO: 2714580 - RNA, 14 nt, Human
cuguccgagcuuug

SEQ ID NO: 2714581 - RNA, 20 nt, Human
cugucccuuacgugaguccu

SEQ ID NO: 2714582 - RNA, 22 nt, Human
cuguccccgcacugggcuuggg

SEQ ID NO: 2714583 - RNA, 18 nt, Human
cuguccccgcacugggcu

SEQ ID NO: 2714584 - RNA, 19 nt, Human
cuguccccgcacugggcuu

SEQ ID NO: 2714585 - RNA, 17 nt, Human
cuguccccgcacugggc

SEQ ID NO: 2714586 - RNA, 16 nt, Human
cugguuccauggccuc

SEQ ID NO: 2714587 - RNA, 20 nt, Human
cuguaauccuagcacuuugg

SEQ ID NO: 2714588 - RNA, 15 nt, Human
cuguacaaaguagaa

SEQ ID NO: 2714589 - RNA, 13 nt, Human
cuguacaaaguag

SEQ ID NO: 2714590 - RNA, 21 nt, Human
cugguggcagcucaccucucc

SEQ ID NO: 2714591 - RNA, 23 nt, Human
cugguggcagcucaccucucccu

SEQ ID NO: 2714592 - RNA, 13 nt, Human
cugguggcagcug

SEQ ID NO: 2714593 - RNA, 14 nt, Human
cugguggcagcugc

SEQ ID NO: 2714594 - RNA, 19 nt, Human
cugggggcugggcagagga

SEQ ID NO: 2714595 - RNA, 15 nt, Human
cugggggaagaagcu

SEQ ID NO: 2714596 - RNA, 13 nt, Human
cugggggaagaag

SEQ ID NO: 2714597 - RNA, 24 nt, Human
cugggcuucaguggcagcugcuuu

SEQ ID NO: 2714598 - RNA, 22 nt, Human
cuggguaacuagggaagauaau

SEQ ID NO: 2714599 - RNA, 20 nt, Human
cuggguaacuagggaagaua

SEQ ID NO: 2714600 - RNA, 14 nt, Human
cuggguucuaccca

SEQ ID NO: 2714601 - RNA, 15 nt, Human
cuggguucuacccag

SEQ ID NO: 2714602 - RNA, 16 nt, Human
cuggguucuacccagg

SEQ ID NO: 2714603 - RNA, 17 nt, Human
cuggguucuacccaggu

SEQ ID NO: 2714604 - RNA, 20 nt, Human
cuguuaaaagaugaaaauau

SEQ ID NO: 2714605 - RNA, 23 nt, Human
cuguuaaaagaugaaaauauuug

SEQ ID NO: 2714606 - RNA, 21 nt, Human
cuguuaaaagaugaaaauauu

SEQ ID NO: 2714607 - RNA, 18 nt, Human
cugugugugcgccuacag

SEQ ID NO: 2714608 - RNA, 20 nt, Human
cugugugugcgccuacagga

SEQ ID NO: 2714609 - RNA, 21 nt, Human
cugugucuugcaauggcagcc

SEQ ID NO: 2714610 - RNA, 20 nt, Human
cugugucuugcaauggcagc

SEQ ID NO: 2714611 - RNA, 22 nt, Human
cugugucuugcaauggcagccu

SEQ ID NO: 2714612 - RNA, 23 nt, Human
cugugucuugcaauggcagccuu

SEQ ID NO: 2714613 - RNA, 13 nt, Human
cuguucucugccc

SEQ ID NO: 2714614 - RNA, 20 nt, Human
cuguucucugcccuccaaga

SEQ ID NO: 2714615 - RNA, 18 nt, Human
cuguucucugcccuccaa

SEQ ID NO: 2714616 - RNA, 19 nt, Human
cuguucucugcccuccaag

SEQ ID NO: 2714617 - RNA, 14 nt, Human
cuguucucugcccu

SEQ ID NO: 2714618 - RNA, 15 nt, Human
cuguucucugcccuc

SEQ ID NO: 2714619 - RNA, 16 nt, Human
cuguucucugcccucc

SEQ ID NO: 2714620 - RNA, 17 nt, Human
cuguucucugcccucca

SEQ ID NO: 2714621 - RNA, 18 nt, Human
cuguucagcugguugagg

SEQ ID NO: 2714622 - RNA, 19 nt, Human
cuguucagcugguugaggu

SEQ ID NO: 2714623 - RNA, 21 nt, Human
cuguucagcugguugagguuu

SEQ ID NO: 2714624 - RNA, 17 nt, Human
cuguucaugaaagauuc

SEQ ID NO: 2714625 - RNA, 23 nt, Human
cuguucaugaaagauucaaugcc

SEQ ID NO: 2714626 - RNA, 18 nt, Human
cuguucaugaaagauuca

SEQ ID NO: 2714627 - RNA, 14 nt, Human
cugugggcccccaa

SEQ ID NO: 2714628 - RNA, 17 nt, Human
cuguggaugauaaaaca

SEQ ID NO: 2714629 - RNA, 21 nt, Human
cugugcugcccugcccaccug

SEQ ID NO: 2714630 - RNA, 17 nt, Human
cugugccucugggacug

SEQ ID NO: 2714631 - RNA, 22 nt, Human
cugugcugcccugcccaccugg

SEQ ID NO: 2714632 - RNA, 16 nt, Human
cugugccucugggacu

SEQ ID NO: 2714633 - RNA, 14 nt, Human
cugugccucuggga

SEQ ID NO: 2714634 - RNA, 18 nt, Human
cugugauggggcccugcc

SEQ ID NO: 2714635 - RNA, 17 nt, Human
cugugauggggcccugc

SEQ ID NO: 2714636 - RNA, 23 nt, Human
cugugaguacuacaguccuccca

SEQ ID NO: 2714637 - RNA, 20 nt, Human
cugugaguacuacaguccuc

SEQ ID NO: 2714638 - RNA, 21 nt, Human
cugugaguacuacaguccucc

SEQ ID NO: 2714639 - RNA, 18 nt, Human
cugucuccauguuugaug

SEQ ID NO: 2714640 - RNA, 19 nt, Human
cugugauggggcccugccu

SEQ ID NO: 2714641 - RNA, 20 nt, Human
cugugauggggcccugccuc

SEQ ID NO: 2714642 - RNA, 14 nt, Human
cugugccauuuugu

SEQ ID NO: 2714643 - RNA, 16 nt, Human
cugugccaugugccag

SEQ ID NO: 2714644 - RNA, 18 nt, Human
cugugccaugugccaggu

SEQ ID NO: 2714645 - RNA, 14 nt, Human
gaauugaagcagga

SEQ ID NO: 2714646 - RNA, 18 nt, Human
gaauucuugaaggaaaau

SEQ ID NO: 2714647 - RNA, 16 nt, Human
gaauuggagcucgugg

SEQ ID NO: 2714648 - RNA, 15 nt, Human
gaauguuaagcagau

SEQ ID NO: 2714649 - RNA, 13 nt, Human
gaauucuguauag

SEQ ID NO: 2714650 - RNA, 22 nt, Human
gaauucuguauagauuagaauu

SEQ ID NO: 2714651 - RNA, 21 nt, Human
gaauucuguauagauuagaau

SEQ ID NO: 2714652 - RNA, 14 nt, Human
gaauucuguauaga

SEQ ID NO: 2714653 - RNA, 16 nt, Human
gaauggcuuuguauag

SEQ ID NO: 2714654 - RNA, 14 nt, Human
gaauggcuuuguau

SEQ ID NO: 2714655 - RNA, 17 nt, Human
gaauggcuuuguauaga

SEQ ID NO: 2714656 - RNA, 14 nt, Human
gaauguuaagcaga

SEQ ID NO: 2714657 - RNA, 13 nt, Human
gaaugucagugug

SEQ ID NO: 2714658 - RNA, 20 nt, Human
gaaugcacaaacagaggccg

SEQ ID NO: 2714659 - RNA, 19 nt, Human
gaaucucauaauuuauaca

SEQ ID NO: 2714660 - RNA, 21 nt, Human
gaaugaaagggcccagagagg

SEQ ID NO: 2714661 - RNA, 13 nt, Human
gaaugcuguguua

SEQ ID NO: 2714662 - RNA, 21 nt, Human
gaaugcacaaacagaggccgc

SEQ ID NO: 2714663 - RNA, 14 nt, Human
gaaugcuguguuaa

SEQ ID NO: 2714664 - RNA, 18 nt, Human
gaauccagacccggcugc

SEQ ID NO: 2714665 - RNA, 20 nt, Human
gaauccagacccggcugcgu

SEQ ID NO: 2714666 - RNA, 18 nt, Human
gaaucucauaauuuauac

SEQ ID NO: 2714667 - RNA, 15 nt, Human
gacaagcucacagac

SEQ ID NO: 2714668 - RNA, 22 nt, Human
gacaacacucauugaccugagg

SEQ ID NO: 2714669 - RNA, 23 nt, Human
gacaacacucauugaccugaggc

SEQ ID NO: 2714670 - RNA, 20 nt, Human
gaauuugauaugugaacagu

SEQ ID NO: 2714671 - RNA, 22 nt, Human
gaauuucuuuugccguuauuaa

SEQ ID NO: 2714672 - RNA, 20 nt, Human
gaauuucuaggacugaauua

SEQ ID NO: 2714673 - RNA, 19 nt, Human
gaauuucuaggacugaauu

SEQ ID NO: 2714674 - RNA, 15 nt, Human
gaauuguaaggaaug

SEQ ID NO: 2714675 - RNA, 16 nt, Human
gacaaggaaaaaauaa

SEQ ID NO: 2714676 - RNA, 18 nt, Human
gacaaggauugcuacugu

SEQ ID NO: 2714677 - RNA, 21 nt, Human
gacaaggaugaucuaggaaga

SEQ ID NO: 2714678 - RNA, 19 nt, Human
gacaaggauugcuacuguc

SEQ ID NO: 2714679 - RNA, 21 nt, Human
gacaaggauugcuacuguccu

SEQ ID NO: 2714680 - RNA, 12 nt, Human
gacaaugugaaa

SEQ ID NO: 2714681 - RNA, 18 nt, Human
gacaaugugaaaagaaaa

SEQ ID NO: 2714682 - RNA, 22 nt, Human
gacaaugcaaaccaucauugaa

SEQ ID NO: 2714683 - RNA, 19 nt, Human
gacaaugugaaaagaaaaa

SEQ ID NO: 2714684 - RNA, 20 nt, Human
gacaaugugaaaagaaaaau

SEQ ID NO: 2714685 - RNA, 19 nt, Human
gacacaugcaaggucauuu

SEQ ID NO: 2714686 - RNA, 15 nt, Human
gacacauguccaaga

SEQ ID NO: 2714687 - RNA, 20 nt, Human
gacacauguccaagaagccc

SEQ ID NO: 2714688 - RNA, 23 nt, Human
gacacauguccaagaagcccagg

SEQ ID NO: 2714689 - RNA, 14 nt, Human
gacacaugcaaggu

SEQ ID NO: 2714690 - RNA, 20 nt, Human
gacacaggcccggcuccagg

SEQ ID NO: 2714691 - RNA, 21 nt, Human
gacacaggcccggcuccaggc

SEQ ID NO: 2714692 - RNA, 19 nt, Human
gacacaggcccggcuccag

SEQ ID NO: 2714693 - RNA, 13 nt, Human
gacacaacuauuu

SEQ ID NO: 2714694 - RNA, 16 nt, Human
gacacaagccuucggc

SEQ ID NO: 2714695 - RNA, 23 nt, Human
gacccugaggcccagagggccug

SEQ ID NO: 2714696 - RNA, 14 nt, Human
gaccccuccaugug

SEQ ID NO: 2714697 - RNA, 18 nt, Human
gaccccuccaugugggcu

SEQ ID NO: 2714698 - RNA, 21 nt, Human
gaccccuccaugugggcuagu

SEQ ID NO: 2714699 - RNA, 22 nt, Human
gacccugaggcccagagggccu

SEQ ID NO: 2714700 - RNA, 12 nt, Human
gacccugucuca

SEQ ID NO: 2714701 - RNA, 15 nt, Human
gacccuugugguccc

SEQ ID NO: 2714702 - RNA, 21 nt, Human
gacccuuguggucccacccca

SEQ ID NO: 2714703 - RNA, 19 nt, Human
gacccuuguggucccaccc

SEQ ID NO: 2714704 - RNA, 20 nt, Human
gacccuuguggucccacccc

SEQ ID NO: 2714705 - RNA, 18 nt, Human
gaccgugaggccagagac

SEQ ID NO: 2714706 - RNA, 16 nt, Human
gaccgugaggccagag

SEQ ID NO: 2714707 - RNA, 17 nt, Human
gaccgugaggccagaga

SEQ ID NO: 2714708 - RNA, 14 nt, Human
gaccacguuucuaa

SEQ ID NO: 2714709 - RNA, 24 nt, Human
gaccagacaccuugacagggcaca

SEQ ID NO: 2714710 - RNA, 11 nt, Human
gaccagagcug

SEQ ID NO: 2714711 - RNA, 16 nt, Human
gacaugggacauuugc

SEQ ID NO: 2714712 - RNA, 18 nt, Human
gacaugggaaaggggaag

SEQ ID NO: 2714713 - RNA, 19 nt, Human
gaccauucuccaccugcca

SEQ ID NO: 2714714 - RNA, 20 nt, Human
gaccauucuccaccugccag

SEQ ID NO: 2714715 - RNA, 17 nt, Human
gaccauucuccaccugc

SEQ ID NO: 2714716 - RNA, 21 nt, Human
gaccauucuccaccugccagg

SEQ ID NO: 2714717 - RNA, 22 nt, Human
gaccauucuccaccugccaggg

SEQ ID NO: 2714718 - RNA, 18 nt, Human
gaccagagcugccaccug

SEQ ID NO: 2714719 - RNA, 19 nt, Human
gaccagagcugccaccugc

SEQ ID NO: 2714720 - RNA, 13 nt, Human
gaccagagcugcc

SEQ ID NO: 2714721 - RNA, 14 nt, Human
gaccagagcugcca

SEQ ID NO: 2714722 - RNA, 15 nt, Human
gaccagagcugccac

SEQ ID NO: 2714723 - RNA, 17 nt, Human
gaccagagcugccaccu

SEQ ID NO: 2714724 - RNA, 16 nt, Human
gacagggaggugaccc

SEQ ID NO: 2714725 - RNA, 23 nt, Human
gacagggcacaccgggcacucag

SEQ ID NO: 2714726 - RNA, 14 nt, Human
gacaguuaagagaa

SEQ ID NO: 2714727 - RNA, 24 nt, Human
gacagggcacaccgggcacucaga

SEQ ID NO: 2714728 - RNA, 14 nt, Human
gacaggaccaggga

SEQ ID NO: 2714729 - RNA, 15 nt, Human
gacaggaccagggau

SEQ ID NO: 2714730 - RNA, 23 nt, Human
gacaggaccagggauuuccauga

SEQ ID NO: 2714731 - RNA, 22 nt, Human
gacaguuaagagaaaugagcuu

SEQ ID NO: 2714732 - RNA, 14 nt, Human
gacaugggaaaggg

SEQ ID NO: 2714733 - RNA, 14 nt, Human
gacaugaucuucuu

SEQ ID NO: 2714734 - RNA, 14 nt, Human
gacagaggcagccc

SEQ ID NO: 2714735 - RNA, 16 nt, Human
gacagaggcagcccca

SEQ ID NO: 2714736 - RNA, 21 nt, Human
gacagagcaagugagacccug

SEQ ID NO: 2714737 - RNA, 17 nt, Human
gacagaggcagccccau

SEQ ID NO: 2714738 - RNA, 15 nt, Human
gacagaggggguggc

SEQ ID NO: 2714739 - RNA, 18 nt, Human
gacagaggggguggccuc

SEQ ID NO: 2714740 - RNA, 19 nt, Human
gacagaggggguggccucc

SEQ ID NO: 2714741 - RNA, 14 nt, Human
gacagagucucacu

SEQ ID NO: 2714742 - RNA, 23 nt, Human
gacagaggggguggccucccaac

SEQ ID NO: 2714743 - RNA, 21 nt, Human
gacagaggggguggccuccca

SEQ ID NO: 2714744 - RNA, 22 nt, Human
gacagaggggguggccucccaa

SEQ ID NO: 2714745 - RNA, 13 nt, Human
gacagagggggug

SEQ ID NO: 2714746 - RNA, 20 nt, Human
gacagagugagacucugucu

SEQ ID NO: 2714747 - RNA, 22 nt, Human
gacagagugagacucugucuca

SEQ ID NO: 2714748 - RNA, 14 nt, Human
gacagccacggcca

SEQ ID NO: 2714749 - RNA, 17 nt, Human
gacagccacggccaggc

SEQ ID NO: 2714750 - RNA, 18 nt, Human
gacagccacggccaggcc

SEQ ID NO: 2714751 - RNA, 19 nt, Human
gacagccacggccaggcca

SEQ ID NO: 2714752 - RNA, 18 nt, Human
gacagcugccugggaucc

SEQ ID NO: 2714753 - RNA, 21 nt, Human
gacagcugccugggaucccuc

SEQ ID NO: 2714754 - RNA, 20 nt, Human
gacagccacggccaggccag

SEQ ID NO: 2714755 - RNA, 21 nt, Human
gacagccacggccaggccaga

SEQ ID NO: 2714756 - RNA, 16 nt, Human
gacagcugccugggau

SEQ ID NO: 2714757 - RNA, 17 nt, Human
gacagcugccugggauc

SEQ ID NO: 2714758 - RNA, 18 nt, Human
gacuggaagcacagcuuc

SEQ ID NO: 2714759 - RNA, 14 nt, Human
gacuggaagcacag

SEQ ID NO: 2714760 - RNA, 15 nt, Human
gacuggaagcacagc

SEQ ID NO: 2714761 - RNA, 16 nt, Human
gacuggaagcacagcu

SEQ ID NO: 2714762 - RNA, 14 nt, Human
gacugcauuauauu

SEQ ID NO: 2714763 - RNA, 16 nt, Human
gacugcauuauauuua

SEQ ID NO: 2714764 - RNA, 23 nt, Human
gacugaguacguugugcauuugg

SEQ ID NO: 2714765 - RNA, 13 nt, Human
gacugcccggcag

SEQ ID NO: 2714766 - RNA, 15 nt, Human
gacugcccggcaggg

SEQ ID NO: 2714767 - RNA, 17 nt, Human
gacucgcgacaaugcaa

SEQ ID NO: 2714768 - RNA, 22 nt, Human
gacugaguacguugugcauuug

SEQ ID NO: 2714769 - RNA, 21 nt, Human
gacugaguacguugugcauuu

SEQ ID NO: 2714770 - RNA, 15 nt, Human
gacuccaaagaaaug

SEQ ID NO: 2714771 - RNA, 12 nt, Human
gacuccaaagaa

SEQ ID NO: 2714772 - RNA, 11 nt, Human
gacuccaaaga

SEQ ID NO: 2714773 - RNA, 21 nt, Human
gacucauuuuaaaaaauggaa

SEQ ID NO: 2714774 - RNA, 16 nt, Human
gacuccaaagaaaugu

SEQ ID NO: 2714775 - RNA, 13 nt, Human
gacucgcgacaau

SEQ ID NO: 2714776 - RNA, 13 nt, Human
gacuccugcaggc

SEQ ID NO: 2714777 - RNA, 12 nt, Human
gacuccugcagg

SEQ ID NO: 2714778 - RNA, 14 nt, Human
gacucauucuucug

SEQ ID NO: 2714779 - RNA, 15 nt, Human
gacucauucuucugu

SEQ ID NO: 2714780 - RNA, 13 nt, Human
gacuacaggugug

SEQ ID NO: 2714781 - RNA, 18 nt, Human
gacuacaggugugaguca

SEQ ID NO: 2714782 - RNA, 21 nt, Human
gacuacaggugugagucacca

SEQ ID NO: 2714783 - RNA, 24 nt, Human
gacuucuaaguaaaaccacagcag

SEQ ID NO: 2714784 - RNA, 23 nt, Human
gacuucuaaguaaaaccacagca

SEQ ID NO: 2714785 - RNA, 19 nt, Human
gacuucuaaguaaaaccac

SEQ ID NO: 2714786 - RNA, 23 nt, Human
gacuucugucuucacaacagauu

SEQ ID NO: 2714787 - RNA, 20 nt, Human
gacuucugucuucacaacag

SEQ ID NO: 2714788 - RNA, 18 nt, Human
gacuucuaaguaaaacca

SEQ ID NO: 2714789 - RNA, 17 nt, Human
gacuucuaaguaaaacc

SEQ ID NO: 2714790 - RNA, 16 nt, Human
gacuucuaaguaaaac

SEQ ID NO: 2714791 - RNA, 19 nt, Human
gacuuaagcacacuugaca

SEQ ID NO: 2714792 - RNA, 21 nt, Human
gacuucuuuaauuuuggaauu

SEQ ID NO: 2714793 - RNA, 20 nt, Human
gacuucuuuaauuuuggaau

SEQ ID NO: 2714794 - RNA, 19 nt, Human
gacuucuuuaauuuuggaa

SEQ ID NO: 2714795 - RNA, 16 nt, Human
gacuucuuuaauuuug

SEQ ID NO: 2714796 - RNA, 18 nt, Human
gacuucuuuaauuuugga

SEQ ID NO: 2714797 - RNA, 17 nt, Human
gacuucuuuaauuuugg

SEQ ID NO: 2714798 - RNA, 17 nt, Human
gagaaugagagacacac

SEQ ID NO: 2714799 - RNA, 16 nt, Human
gagaagcagaggaagg

SEQ ID NO: 2714800 - RNA, 16 nt, Human
gagaagagaaugcaca

SEQ ID NO: 2714801 - RNA, 22 nt, Human
gagaacuuccagauccuggaaa

SEQ ID NO: 2714802 - RNA, 23 nt, Human
gagaacuuccagauccuggaaau

SEQ ID NO: 2714803 - RNA, 14 nt, Human
gagaagagaaugca

SEQ ID NO: 2714804 - RNA, 21 nt, Human
gagaaccuagggugauauuaa

SEQ ID NO: 2714805 - RNA, 22 nt, Human
gagaaccuagggugauauuaac

SEQ ID NO: 2714806 - RNA, 14 nt, Human
gagaaaugagcuug

SEQ ID NO: 2714807 - RNA, 16 nt, Human
gagaaagguugaagca

SEQ ID NO: 2714808 - RNA, 20 nt, Human
gagaaugagagacacacuga

SEQ ID NO: 2714809 - RNA, 21 nt, Human
gagaaugagagacacacugaa

SEQ ID NO: 2714810 - RNA, 23 nt, Human
gagaaugcacaaacagaggccgc

SEQ ID NO: 2714811 - RNA, 22 nt, Human
gagacaggguuuugccauguug

SEQ ID NO: 2714812 - RNA, 14 nt, Human
gagaccaucccuga

SEQ ID NO: 2714813 - RNA, 12 nt, Human
gagaccaucccu

SEQ ID NO: 2714814 - RNA, 18 nt, Human
gagaccaucccugaaggc

SEQ ID NO: 2714815 - RNA, 21 nt, Human
gagaccaucccugaaggcccc

SEQ ID NO: 2714816 - RNA, 18 nt, Human
gagacuccugcaggcagc

SEQ ID NO: 2714817 - RNA, 19 nt, Human
gagacuccugcaggcagcc

SEQ ID NO: 2714818 - RNA, 20 nt, Human
gagacuccugcaggcagcca

SEQ ID NO: 2714819 - RNA, 21 nt, Human
gagacuccugcaggcagccag

SEQ ID NO: 2714820 - RNA, 13 nt, Human
gagacucugucuc

SEQ ID NO: 2714821 - RNA, 20 nt, Human
gagacucgcgacaaugcaaa

SEQ ID NO: 2714822 - RNA, 21 nt, Human
gagacucgcgacaaugcaaac

SEQ ID NO: 2714823 - RNA, 15 nt, Human
gagaguagaacagau

SEQ ID NO: 2714824 - RNA, 13 nt, Human
gagaguguugaaa

SEQ ID NO: 2714825 - RNA, 13 nt, Human
gagaggggcacag

SEQ ID NO: 2714826 - RNA, 19 nt, Human
gagaggggaacagacugga

SEQ ID NO: 2714827 - RNA, 14 nt, Human
gagagggugggagu

SEQ ID NO: 2714828 - RNA, 20 nt, Human
gagagggugggagugggccc

SEQ ID NO: 2714829 - RNA, 16 nt, Human
gagagggugggagugg

SEQ ID NO: 2714830 - RNA, 16 nt, Human
gagcagagaauucucu

SEQ ID NO: 2714831 - RNA, 12 nt, Human
gagcagagacca

SEQ ID NO: 2714832 - RNA, 20 nt, Human
gagccagauuucacucuccu

SEQ ID NO: 2714833 - RNA, 19 nt, Human
gagccaauuuaaagaaaac

SEQ ID NO: 2714834 - RNA, 18 nt, Human
gagcccugguggcagugg

SEQ ID NO: 2714835 - RNA, 19 nt, Human
gagccagggucucacuaug

SEQ ID NO: 2714836 - RNA, 14 nt, Human
gagccagggucuca

SEQ ID NO: 2714837 - RNA, 23 nt, Human
gagccagauuucacucuccuugg

SEQ ID NO: 2714838 - RNA, 19 nt, Human
gagaucacgccacugcacu

SEQ ID NO: 2714839 - RNA, 18 nt, Human
gagaucacgccacugcac

SEQ ID NO: 2714840 - RNA, 14 nt, Human
gagauagccaaggc

SEQ ID NO: 2714841 - RNA, 23 nt, Human
gagaucaaccccuucgcuccugu

SEQ ID NO: 2714842 - RNA, 16 nt, Human
gagauagccaaggcca

SEQ ID NO: 2714843 - RNA, 20 nt, Human
gagcaccuuagacagucccu

SEQ ID NO: 2714844 - RNA, 21 nt, Human
gagcacuaaggugugcucuga

SEQ ID NO: 2714845 - RNA, 15 nt, Human
gagcacuaaggugug

SEQ ID NO: 2714846 - RNA, 21 nt, Human
gagcaccuuagacagucccug

SEQ ID NO: 2714847 - RNA, 22 nt, Human
gagcaccuuagacagucccugc

SEQ ID NO: 2714848 - RNA, 13 nt, Human
gaggaucucuuga

SEQ ID NO: 2714849 - RNA, 22 nt, Human
gaggaucucuugagccugggag

SEQ ID NO: 2714850 - RNA, 16 nt, Human
gaggaucucuugagcc

SEQ ID NO: 2714851 - RNA, 19 nt, Human
gaggaucucuugagccugg

SEQ ID NO: 2714852 - RNA, 20 nt, Human
gaggauugcuugagcucagg

SEQ ID NO: 2714853 - RNA, 21 nt, Human
gaggcagccccauucugccug

SEQ ID NO: 2714854 - RNA, 20 nt, Human
gaggcagccccauucugccu

SEQ ID NO: 2714855 - RNA, 9 nt, Human
gaggcaggg

SEQ ID NO: 2714856 - RNA, 19 nt, Human
gaggcagccccauucugcc

SEQ ID NO: 2714857 - RNA, 18 nt, Human
gaggcagccccauucugc

SEQ ID NO: 2714858 - RNA, 14 nt, Human
gaggccaugggccu

SEQ ID NO: 2714859 - RNA, 17 nt, Human
gaggccaugggccuccu

SEQ ID NO: 2714860 - RNA, 18 nt, Human
gaggccaugggccuccug

SEQ ID NO: 2714861 - RNA, 20 nt, Human
gaggccaugggccuccugug

SEQ ID NO: 2714862 - RNA, 21 nt, Human
gaggccaugggccuccugugu

SEQ ID NO: 2714863 - RNA, 23 nt, Human
gaggccaugggccuccugugugu

SEQ ID NO: 2714864 - RNA, 11 nt, Human
gaggcccagag

SEQ ID NO: 2714865 - RNA, 13 nt, Human
gaggcccagaggg

SEQ ID NO: 2714866 - RNA, 14 nt, Human
gaggcccagagggc

SEQ ID NO: 2714867 - RNA, 19 nt, Human
gaggcccagagggccugca

SEQ ID NO: 2714868 - RNA, 15 nt, Human
gaggcccagagggcc

SEQ ID NO: 2714869 - RNA, 16 nt, Human
gaggcccagagggccu

SEQ ID NO: 2714870 - RNA, 21 nt, Human
gaggcccuucucuccagcccc

SEQ ID NO: 2714871 - RNA, 15 nt, Human
gaggcccuucucucc

SEQ ID NO: 2714872 - RNA, 20 nt, Human
gaggcccuucucuccagccc

SEQ ID NO: 2714873 - RNA, 16 nt, Human
gaggcugggcucccuu

SEQ ID NO: 2714874 - RNA, 14 nt, Human
gaggcugccucucc

SEQ ID NO: 2714875 - RNA, 16 nt, Human
gaggccuucucugaag

SEQ ID NO: 2714876 - RNA, 18 nt, Human
gaggccuucucugaagga

SEQ ID NO: 2714877 - RNA, 19 nt, Human
gaggccuucucugaaggac

SEQ ID NO: 2714878 - RNA, 17 nt, Human
gaggggguggccuccca

SEQ ID NO: 2714879 - RNA, 13 nt, Human
gaggguaaggcug

SEQ ID NO: 2714880 - RNA, 21 nt, Human
gagggagugacagaggcagcc

SEQ ID NO: 2714881 - RNA, 22 nt, Human
gagggagugacagaggcagccc

SEQ ID NO: 2714882 - RNA, 18 nt, Human
gagggagugacagaggca

SEQ ID NO: 2714883 - RNA, 16 nt, Human
gagggagugacagagg

SEQ ID NO: 2714884 - RNA, 16 nt, Human
gagggagggcuccaga

SEQ ID NO: 2714885 - RNA, 20 nt, Human
gagggagggcuccagacaca

SEQ ID NO: 2714886 - RNA, 20 nt, Human
gaggcugggcucccuuccca

SEQ ID NO: 2714887 - RNA, 19 nt, Human
gagggagggcuccagacac

SEQ ID NO: 2714888 - RNA, 13 nt, Human
gagggucugagga

SEQ ID NO: 2714889 - RNA, 14 nt, Human
gagggucugaggaa

SEQ ID NO: 2714890 - RNA, 12 nt, Human
gaggguggaaua

SEQ ID NO: 2714891 - RNA, 21 nt, Human
gagggugaagugaagacaaug

SEQ ID NO: 2714892 - RNA, 14 nt, Human
gaggguggugaccu

SEQ ID NO: 2714893 - RNA, 15 nt, Human
gagggugggaguggg

SEQ ID NO: 2714894 - RNA, 21 nt, Human
gaggguggugaccucugccug

SEQ ID NO: 2714895 - RNA, 22 nt, Human
gagggugucccaaaaagaaagg

SEQ ID NO: 2714896 - RNA, 12 nt, Human
gaggucagagcc

SEQ ID NO: 2714897 - RNA, 13 nt, Human
gaggucagagccu

SEQ ID NO: 2714898 - RNA, 17 nt, Human
gaggucaaggcugcagu

SEQ ID NO: 2714899 - RNA, 14 nt, Human
gaggguugggcugg

SEQ ID NO: 2714900 - RNA, 15 nt, Human
gaggguugggcuggu

SEQ ID NO: 2714901 - RNA, 24 nt, Human
gagguaaggaauaccugucccccu

SEQ ID NO: 2714902 - RNA, 21 nt, Human
gagguaaggaauaccuguccc

SEQ ID NO: 2714903 - RNA, 22 nt, Human
gauaaauggcuuccuggcaaua

SEQ ID NO: 2714904 - RNA, 20 nt, Human
gauaaaugccaucaauaaaa

SEQ ID NO: 2714905 - RNA, 15 nt, Human
gauaaaugccaucaa

SEQ ID NO: 2714906 - RNA, 11 nt, Human
gauaaaugcca

SEQ ID NO: 2714907 - RNA, 21 nt, Human
gaguugaagacagagcuacac

SEQ ID NO: 2714908 - RNA, 15 nt, Human
gaguugaagacagag

SEQ ID NO: 2714909 - RNA, 17 nt, Human
gaguugaagacagagcu

SEQ ID NO: 2714910 - RNA, 13 nt, Human
gaguuacagacaa

SEQ ID NO: 2714911 - RNA, 15 nt, Human
gaguuacagacaaag

SEQ ID NO: 2714912 - RNA, 20 nt, Human
gaguucauacccuguuacca

SEQ ID NO: 2714913 - RNA, 14 nt, Human
gaguucaucuugaa

SEQ ID NO: 2714914 - RNA, 19 nt, Human
gaguucaucuugaauugua

SEQ ID NO: 2714915 - RNA, 20 nt, Human
gaguucaucuugaauuguaa

SEQ ID NO: 2714916 - RNA, 13 nt, Human
gagugggugaaua

SEQ ID NO: 2714917 - RNA, 17 nt, Human
gagugacagaggcagcc

SEQ ID NO: 2714918 - RNA, 18 nt, Human
gaguguacuuaacuauuc

SEQ ID NO: 2714919 - RNA, 20 nt, Human
gagugugccugaagucccag

SEQ ID NO: 2714920 - RNA, 12 nt, Human
gaguguugaaac

SEQ ID NO: 2714921 - RNA, 16 nt, Human
gaguguugaaacggau

SEQ ID NO: 2714922 - RNA, 12 nt, Human
gaguuacagaca

SEQ ID NO: 2714923 - RNA, 20 nt, Human
gauacaggaaaagcugcuga

SEQ ID NO: 2714924 - RNA, 22 nt, Human
gauaagaaccuuuugagugccu

SEQ ID NO: 2714925 - RNA, 19 nt, Human
gauacaggaaaagcugcug

SEQ ID NO: 2714926 - RNA, 21 nt, Human
gauacaggaaaagcugcugac

SEQ ID NO: 2714927 - RNA, 23 nt, Human
gauacaggaaaagcugcugacag

SEQ ID NO: 2714928 - RNA, 16 nt, Human
gauagcacagacccug

SEQ ID NO: 2714929 - RNA, 15 nt, Human
gauagcacagacccu

SEQ ID NO: 2714930 - RNA, 14 nt, Human
gauagccaaggcca

SEQ ID NO: 2714931 - RNA, 22 nt, Human
gauagccaaggccaaaggaagc

SEQ ID NO: 2714932 - RNA, 18 nt, Human
gaucacggcucacugcag

SEQ ID NO: 2714933 - RNA, 15 nt, Human
gaucacggcucacug

SEQ ID NO: 2714934 - RNA, 16 nt, Human
gaucacggcucacugc

SEQ ID NO: 2714935 - RNA, 24 nt, Human
gauaugauucaaaugucuauaaac

SEQ ID NO: 2714936 - RNA, 22 nt, Human
gauaugauucaaaugucuauaa

SEQ ID NO: 2714937 - RNA, 14 nt, Human
gauaugauucaaau

SEQ ID NO: 2714938 - RNA, 17 nt, Human
gaggucagagccugcag

SEQ ID NO: 2714939 - RNA, 20 nt, Human
gaggucagagccugcaguua

SEQ ID NO: 2714940 - RNA, 15 nt, Human
gagguugggaggcca

SEQ ID NO: 2714941 - RNA, 17 nt, Human
gagguugggaggccauu

SEQ ID NO: 2714942 - RNA, 16 nt, Human
gagguuucaaaccucc

SEQ ID NO: 2714943 - RNA, 20 nt, Human
gaguacuacaguccucccau

SEQ ID NO: 2714944 - RNA, 21 nt, Human
gaguacuacaguccucccauc

SEQ ID NO: 2714945 - RNA, 23 nt, Human
gaguacuacaguccucccaucuc

SEQ ID NO: 2714946 - RNA, 19 nt, Human
gaguagcugggacuacagg

SEQ ID NO: 2714947 - RNA, 22 nt, Human
gaguagcugggacuacaggcac

SEQ ID NO: 2714948 - RNA, 12 nt, Human
gaguaggaagac

SEQ ID NO: 2714949 - RNA, 13 nt, Human
gaguaggaagacu

SEQ ID NO: 2714950 - RNA, 17 nt, Human
gaguaggaagacuuugg

SEQ ID NO: 2714951 - RNA, 17 nt, Human
gagugaagcugggagaa

SEQ ID NO: 2714952 - RNA, 14 nt, Human
gagugacagaggca

SEQ ID NO: 2714953 - RNA, 15 nt, Human
gagugacagaggcag

SEQ ID NO: 2714954 - RNA, 16 nt, Human
gagugacagaggcagc

SEQ ID NO: 2714955 - RNA, 15 nt, Human
gagucugaaggcugg

SEQ ID NO: 2714956 - RNA, 14 nt, Human
gagucugaaggcug

SEQ ID NO: 2714957 - RNA, 12 nt, Human
gagucugaaggc

SEQ ID NO: 2714958 - RNA, 13 nt, Human
gagucugaaggcu

SEQ ID NO: 2714959 - RNA, 21 nt, Human
gagucuauuuacggaacucaa

SEQ ID NO: 2714960 - RNA, 18 nt, Human
gaguaggaagacuuugga

SEQ ID NO: 2714961 - RNA, 19 nt, Human
gaguaggaagacuuuggaa

SEQ ID NO: 2714962 - RNA, 11 nt, Human
gaguauauguc

SEQ ID NO: 2714963 - RNA, 15 nt, Human
gagucgaggacaggg

SEQ ID NO: 2714964 - RNA, 16 nt, Human
gagucgaggacaggga

SEQ ID NO: 2714965 - RNA, 19 nt, Human
gaguccgaaagggacuugg

SEQ ID NO: 2714966 - RNA, 14 nt, Human
gagucgaggacagg

SEQ ID NO: 2714967 - RNA, 15 nt, Human
gcacugacuucuaag

SEQ ID NO: 2714968 - RNA, 16 nt, Human
gcacgauuucuguuua

SEQ ID NO: 2714969 - RNA, 18 nt, Human
gcacugacuucuaaguaa

SEQ ID NO: 2714970 - RNA, 23 nt, Human
gcacugcuuccagugaggcucug

SEQ ID NO: 2714971 - RNA, 18 nt, Human
gcagacaggaccagggau

SEQ ID NO: 2714972 - RNA, 12 nt, Human
gcagacaggcaa

SEQ ID NO: 2714973 - RNA, 13 nt, Human
gcagacaggcaag

SEQ ID NO: 2714974 - RNA, 14 nt, Human
gcagacaggcaagc

SEQ ID NO: 2714975 - RNA, 18 nt, Human
gcagaaggaagacuucau

SEQ ID NO: 2714976 - RNA, 22 nt, Human
gcacagaguuguuacauuuuua

SEQ ID NO: 2714977 - RNA, 21 nt, Human
gcacagaguuguuacauuuuu

SEQ ID NO: 2714978 - RNA, 19 nt, Human
gcacagaguuguuacauuu

SEQ ID NO: 2714979 - RNA, 18 nt, Human
gcacagaguuguuacauu

SEQ ID NO: 2714980 - RNA, 16 nt, Human
gcacagaguuguuaca

SEQ ID NO: 2714981 - RNA, 12 nt, Human
gcaccauaacuu

SEQ ID NO: 2714982 - RNA, 19 nt, Human
gcaccuuagacagucccug

SEQ ID NO: 2714983 - RNA, 15 nt, Human
gcacgauuucuguuu

SEQ ID NO: 2714984 - RNA, 13 nt, Human
gcacgauuucugu

SEQ ID NO: 2714985 - RNA, 20 nt, Human
gcaccuuagacagucccugc

SEQ ID NO: 2714986 - RNA, 21 nt, Human
gcaccuuagacagucccugcc

SEQ ID NO: 2714987 - RNA, 20 nt, Human
gcacagaaaauggaagacag

SEQ ID NO: 2714988 - RNA, 20 nt, Human
gcacaccgggcacucagaag

SEQ ID NO: 2714989 - RNA, 18 nt, Human
gcacaagcuccaagcucc

SEQ ID NO: 2714990 - RNA, 15 nt, Human
gcacaagcuccaagc

SEQ ID NO: 2714991 - RNA, 17 nt, Human
gcacaagcuccaagcuc

SEQ ID NO: 2714992 - RNA, 23 nt, Human
gcacagaaaauggaagacagcuc

SEQ ID NO: 2714993 - RNA, 21 nt, Human
gcacagaaaauggaagacagc

SEQ ID NO: 2714994 - RNA, 22 nt, Human
gcacagaaaauggaagacagcu

SEQ ID NO: 2714995 - RNA, 14 nt, Human
gcacagacccugcc

SEQ ID NO: 2714996 - RNA, 15 nt, Human
gcacagacccugccc

SEQ ID NO: 2714997 - RNA, 16 nt, Human
gcacagacccugcccu

SEQ ID NO: 2714998 - RNA, 17 nt, Human
gcacagacccugcccug

SEQ ID NO: 2714999 - RNA, 15 nt, Human
gcacagaguuguuac

SEQ ID NO: 2715000 - RNA, 22 nt, Human
gcacagacccugcccugugggc

SEQ ID NO: 2715001 - RNA, 18 nt, Human
gcacagacccugcccugu

SEQ ID NO: 2715002 - RNA, 19 nt, Human
gcacagacccugcccugug

SEQ ID NO: 2715003 - RNA, 20 nt, Human
gcacagacccugcccugugg

SEQ ID NO: 2715004 - RNA, 21 nt, Human
gcacagacccugcccuguggg

SEQ ID NO: 2715005 - RNA, 15 nt, Human
gcaauggcagccuug

SEQ ID NO: 2715006 - RNA, 13 nt, Human
gcaacucugaagg

SEQ ID NO: 2715007 - RNA, 14 nt, Human
gcaacucaucuuag

SEQ ID NO: 2715008 - RNA, 14 nt, Human
gcaaugugauaaaa

SEQ ID NO: 2715009 - RNA, 14 nt, Human
gcaauuucauaugc

SEQ ID NO: 2715010 - RNA, 15 nt, Human
gcacaaacagaggcc

SEQ ID NO: 2715011 - RNA, 16 nt, Human
gcacaaacagaggccg

SEQ ID NO: 2715012 - RNA, 14 nt, Human
gcacaaacagaggc

SEQ ID NO: 2715013 - RNA, 19 nt, Human
gaugcccaaagaugcagcc

SEQ ID NO: 2715014 - RNA, 20 nt, Human
gaugcccaaagaugcagccg

SEQ ID NO: 2715015 - RNA, 22 nt, Human
gauggccgggcgcgguggcuca

SEQ ID NO: 2715016 - RNA, 20 nt, Human
gaugggcaacccccagccug

SEQ ID NO: 2715017 - RNA, 21 nt, Human
gaugggcaacccccagccugc

SEQ ID NO: 2715018 - RNA, 24 nt, Human
gauggggcccugccuccuuuguga

SEQ ID NO: 2715019 - RNA, 19 nt, Human
gaugggugcuuggaggaag

SEQ ID NO: 2715020 - RNA, 19 nt, Human
gauggggcugcaccggcug

SEQ ID NO: 2715021 - RNA, 15 nt, Human
gauggggcugcaccg

SEQ ID NO: 2715022 - RNA, 13 nt, Human
gauggggcugcac

SEQ ID NO: 2715023 - RNA, 22 nt, Human
gauuacaagcgugagccacugc

SEQ ID NO: 2715024 - RNA, 15 nt, Human
gauuaaacuuaaucu

SEQ ID NO: 2715025 - RNA, 23 nt, Human
gauuacaagcgugagccacugca

SEQ ID NO: 2715026 - RNA, 17 nt, Human
gauggugcaaugaccuu

SEQ ID NO: 2715027 - RNA, 15 nt, Human
gauggugcaaugacc

SEQ ID NO: 2715028 - RNA, 16 nt, Human
gauggugcaaugaccu

SEQ ID NO: 2715029 - RNA, 12 nt, Human
gauggugcaaug

SEQ ID NO: 2715030 - RNA, 14 nt, Human
gauggugcaaugac

SEQ ID NO: 2715031 - RNA, 16 nt, Human
gcaaauugucacagga

SEQ ID NO: 2715032 - RNA, 21 nt, Human
gcaaagcugaugacaacuucc

SEQ ID NO: 2715033 - RNA, 15 nt, Human
gcaaaccaucauuga

SEQ ID NO: 2715034 - RNA, 21 nt, Human
gauuuugaaauuuuuauuaaa

SEQ ID NO: 2715035 - RNA, 19 nt, Human
gauuuugauccaagcuggu

SEQ ID NO: 2715036 - RNA, 12 nt, Human
gcaaaccaucau

SEQ ID NO: 2715037 - RNA, 14 nt, Human
gauucuccugccuc

SEQ ID NO: 2715038 - RNA, 21 nt, Human
gauucaaugccccugaauuua

SEQ ID NO: 2715039 - RNA, 20 nt, Human
gauucaaugccccugaauuu

SEQ ID NO: 2715040 - RNA, 19 nt, Human
gauucaaugccccugaauu

SEQ ID NO: 2715041 - RNA, 22 nt, Human
gauuuccguuaaaauaccagcc

SEQ ID NO: 2715042 - RNA, 15 nt, Human
gauuuaacagaaaug

SEQ ID NO: 2715043 - RNA, 12 nt, Human
gauuuaaaucag

SEQ ID NO: 2715044 - RNA, 14 nt, Human
gauuuaacagaaau

SEQ ID NO: 2715045 - RNA, 13 nt, Human
gauuuaacagaaa

SEQ ID NO: 2715046 - RNA, 16 nt, Human
ggcaacccccagccug

SEQ ID NO: 2715047 - RNA, 17 nt, Human
ggcaacccccagccugc

SEQ ID NO: 2715048 - RNA, 17 nt, Human
ggauugcuacuguccua

SEQ ID NO: 2715049 - RNA, 16 nt, Human
ggauucuuaaaguuga

SEQ ID NO: 2715050 - RNA, 19 nt, Human
ggauucuuaaaguugaauu

SEQ ID NO: 2715051 - RNA, 18 nt, Human
ggauucuuaaaguugaau

SEQ ID NO: 2715052 - RNA, 23 nt, Human
ggauuacaagcgugagccacugc

SEQ ID NO: 2715053 - RNA, 16 nt, Human
ggauucuuauggacaa

SEQ ID NO: 2715054 - RNA, 20 nt, Human
ggauucuuaaaguugaauuu

SEQ ID NO: 2715055 - RNA, 14 nt, Human
ggcaaugcuggcug

SEQ ID NO: 2715056 - RNA, 15 nt, Human
ggcaaugcuggcugu

SEQ ID NO: 2715057 - RNA, 23 nt, Human
ggcaaugcuggcuguuggcuggg

SEQ ID NO: 2715058 - RNA, 18 nt, Human
ggcaacccccagccugcu

SEQ ID NO: 2715059 - RNA, 23 nt, Human
ggcacccaccaucaugucuggcu

SEQ ID NO: 2715060 - RNA, 22 nt, Human
ggcacccggccccugcugguuc

SEQ ID NO: 2715061 - RNA, 22 nt, Human
ggaucccucauccucauaccca

SEQ ID NO: 2715062 - RNA, 13 nt, Human
ggaucccucaucc

SEQ ID NO: 2715063 - RNA, 17 nt, Human
ggaucccucauccucau

SEQ ID NO: 2715064 - RNA, 14 nt, Human
ggagugcagugagc

SEQ ID NO: 2715065 - RNA, 12 nt, Human
ggagugcaguga

SEQ ID NO: 2715066 - RNA, 23 nt, Human
ggagugaguugauagcacagacc

SEQ ID NO: 2715067 - RNA, 18 nt, Human
ggauacaaaagcauguga

SEQ ID NO: 2715068 - RNA, 12 nt, Human
ggauccuccagg

SEQ ID NO: 2715069 - RNA, 13 nt, Human
ggauccuccaggu

SEQ ID NO: 2715070 - RNA, 23 nt, Human
ggaugcacagaguuguuacauuu

SEQ ID NO: 2715071 - RNA, 21 nt, Human
ggaugauuggaggggggaggu

SEQ ID NO: 2715072 - RNA, 16 nt, Human
ggaugcagccucacag

SEQ ID NO: 2715073 - RNA, 17 nt, Human
ggaugcagccucacagu

SEQ ID NO: 2715074 - RNA, 19 nt, Human
ggaugcagccucacagucc

SEQ ID NO: 2715075 - RNA, 15 nt, Human
ggaugcuuguacaua

SEQ ID NO: 2715076 - RNA, 19 nt, Human
ggauuacaagcgugagcca

SEQ ID NO: 2715077 - RNA, 14 nt, Human
ggcauggcugggaa

SEQ ID NO: 2715078 - RNA, 18 nt, Human
ggcaugggaaugaauguc

SEQ ID NO: 2715079 - RNA, 22 nt, Human
ggcaugggaaugaaugucagug

SEQ ID NO: 2715080 - RNA, 17 nt, Human
ggcauuccccaggaggc

SEQ ID NO: 2715081 - RNA, 16 nt, Human
ggcauuccccaggagg

SEQ ID NO: 2715082 - RNA, 18 nt, Human
ggcauuccccaggaggcc

SEQ ID NO: 2715083 - RNA, 19 nt, Human
ggcauuccccaggaggcca

SEQ ID NO: 2715084 - RNA, 23 nt, Human
ggccagcugcuugggcuucaucc

SEQ ID NO: 2715085 - RNA, 18 nt, Human
ggccaggcccucugccca

SEQ ID NO: 2715086 - RNA, 20 nt, Human
ggccagccuugaccauucuc

SEQ ID NO: 2715087 - RNA, 22 nt, Human
ggccagccuugaccauucucca

SEQ ID NO: 2715088 - RNA, 17 nt, Human
ggccagcugcuugggcu

SEQ ID NO: 2715089 - RNA, 16 nt, Human
ggccaugggccuccug

SEQ ID NO: 2715090 - RNA, 18 nt, Human
ggcaugacacgaauauug

SEQ ID NO: 2715091 - RNA, 19 nt, Human
ggcagggucucacucuguc

SEQ ID NO: 2715092 - RNA, 20 nt, Human
ggcagggucucacucugucg

SEQ ID NO: 2715093 - RNA, 13 nt, Human
ggcagugggagcu

SEQ ID NO: 2715094 - RNA, 14 nt, Human
ggcagugggagcug

SEQ ID NO: 2715095 - RNA, 16 nt, Human
ggcagugggagcugcc

SEQ ID NO: 2715096 - RNA, 13 nt, Human
ggcagcucagaga

SEQ ID NO: 2715097 - RNA, 21 nt, Human
ggcagcucagagaggguggga

SEQ ID NO: 2715098 - RNA, 22 nt, Human
ggcagcugcuuuugucuauggg

SEQ ID NO: 2715099 - RNA, 17 nt, Human
ggcagcuugaggguugg

SEQ ID NO: 2715100 - RNA, 12 nt, Human
ggcagcucaccu

SEQ ID NO: 2715101 - RNA, 14 nt, Human
ggcagcucaccucu

SEQ ID NO: 2715102 - RNA, 18 nt, Human
ggcgcugccccuggcagc

SEQ ID NO: 2715103 - RNA, 19 nt, Human
ggcgcugccccuggcagcc

SEQ ID NO: 2715104 - RNA, 21 nt, Human
ggcgcugccccuggcagcccc

SEQ ID NO: 2715105 - RNA, 23 nt, Human
ggcgcugccccuggcagccccug

SEQ ID NO: 2715106 - RNA, 19 nt, Human
ggccuggccugagcuggga

SEQ ID NO: 2715107 - RNA, 14 nt, Human
ggccugggggcugg

SEQ ID NO: 2715108 - RNA, 20 nt, Human
ggccugggggcugggcagag

SEQ ID NO: 2715109 - RNA, 22 nt, Human
ggccugggggcugggcagagga

SEQ ID NO: 2715110 - RNA, 16 nt, Human
ggcuaguugggcuucc

SEQ ID NO: 2715111 - RNA, 15 nt, Human
ggcuaguugggcuuc

SEQ ID NO: 2715112 - RNA, 23 nt, Human
ggcuagugugguguuuccuggca

SEQ ID NO: 2715113 - RNA, 15 nt, Human
ggcuaugcauuugaa

SEQ ID NO: 2715114 - RNA, 22 nt, Human
ggcuaggaccccuccauguggg

SEQ ID NO: 2715115 - RNA, 16 nt, Human
ggcuaggaccccucca

SEQ ID NO: 2715116 - RNA, 22 nt, Human
ggcuagagguucaaagauauuu

SEQ ID NO: 2715117 - RNA, 17 nt, Human
ggcuagagguucaaaga

SEQ ID NO: 2715118 - RNA, 15 nt, Human
ggcucaaguccucuu

SEQ ID NO: 2715119 - RNA, 21 nt, Human
ggcucaaguccucuuuucuga

SEQ ID NO: 2715120 - RNA, 12 nt, Human
ggcuccaggagc

SEQ ID NO: 2715121 - RNA, 13 nt, Human
ggcuccaggagca

SEQ ID NO: 2715122 - RNA, 19 nt, Human
ggcuccaggagcagccaca

SEQ ID NO: 2715123 - RNA, 15 nt, Human
ggcuccaggcuccuu

SEQ ID NO: 2715124 - RNA, 11 nt, Human
ggcuccaggcu

SEQ ID NO: 2715125 - RNA, 16 nt, Human
ggcuccaggcuccuuu

SEQ ID NO: 2715126 - RNA, 23 nt, Human
ggccuagcauacguacacauuuu

SEQ ID NO: 2715127 - RNA, 17 nt, Human
ggccucuuaugggcugg

SEQ ID NO: 2715128 - RNA, 18 nt, Human
ggccucuuaugggcuggg

SEQ ID NO: 2715129 - RNA, 13 nt, Human
ggccucugcacuc

SEQ ID NO: 2715130 - RNA, 14 nt, Human
ggccucugcacucc

SEQ ID NO: 2715131 - RNA, 15 nt, Human
ggccucugcacuccc

SEQ ID NO: 2715132 - RNA, 16 nt, Human
ggccucugcacucccc

SEQ ID NO: 2715133 - RNA, 11 nt, Human
ggcccagagag

SEQ ID NO: 2715134 - RNA, 12 nt, Human
ggcccagagagg

SEQ ID NO: 2715135 - RNA, 21 nt, Human
ggcccucugcccacucccugc

SEQ ID NO: 2715136 - RNA, 19 nt, Human
ggcccucugcccacucccu

SEQ ID NO: 2715137 - RNA, 20 nt, Human
ggcccucugcccacucccug

SEQ ID NO: 2715138 - RNA, 13 nt, Human
ggcccucugccca

SEQ ID NO: 2715139 - RNA, 15 nt, Human
ggcccucugcccacu

SEQ ID NO: 2715140 - RNA, 16 nt, Human
ggcccucugcccacuc

SEQ ID NO: 2715141 - RNA, 17 nt, Human
ggcccucugcccacucc

SEQ ID NO: 2715142 - RNA, 13 nt, Human
ggcccugccuccu

SEQ ID NO: 2715143 - RNA, 14 nt, Human
ggcccugccuccuu

SEQ ID NO: 2715144 - RNA, 15 nt, Human
ggcccugccuccuuu

SEQ ID NO: 2715145 - RNA, 14 nt, Human
ggacuguggugacu

SEQ ID NO: 2715146 - RNA, 17 nt, Human
ggagaagcggcuggcag

SEQ ID NO: 2715147 - RNA, 18 nt, Human
ggagaagcggcuggcagc

SEQ ID NO: 2715148 - RNA, 22 nt, Human
ggacuguggugacuuuggauaa

SEQ ID NO: 2715149 - RNA, 21 nt, Human
ggacuguggugacuuuggaua

SEQ ID NO: 2715150 - RNA, 17 nt, Human
ggacuguggugacuuug

SEQ ID NO: 2715151 - RNA, 15 nt, Human
ggacuguggugacuu

SEQ ID NO: 2715152 - RNA, 17 nt, Human
ggacacucaaaagcugg

SEQ ID NO: 2715153 - RNA, 22 nt, Human
ggacacucaaaagcugggcagg

SEQ ID NO: 2715154 - RNA, 15 nt, Human
ggacagccacggcca

SEQ ID NO: 2715155 - RNA, 19 nt, Human
ggacagccacggccaggcc

SEQ ID NO: 2715156 - RNA, 20 nt, Human
ggacagccacggccaggcca

SEQ ID NO: 2715157 - RNA, 21 nt, Human
ggacagccacggccaggccag

SEQ ID NO: 2715158 - RNA, 14 nt, Human
ggaccaaaaaccag

SEQ ID NO: 2715159 - RNA, 23 nt, Human
ggaccaaaaaccaguauuguaca

SEQ ID NO: 2715160 - RNA, 16 nt, Human
ggaccaaaaaccagua

SEQ ID NO: 2715161 - RNA, 14 nt, Human
ggacauggacaagg

SEQ ID NO: 2715162 - RNA, 20 nt, Human
ggacauugcggacagccacg

SEQ ID NO: 2715163 - RNA, 13 nt, Human
ggaccagagcugc

SEQ ID NO: 2715164 - RNA, 19 nt, Human
ggaccucaggugagaagca

SEQ ID NO: 2715165 - RNA, 20 nt, Human
ggaccucaggccugggggcu

SEQ ID NO: 2715166 - RNA, 23 nt, Human
ggaccucaggugagaagcagagg

SEQ ID NO: 2715167 - RNA, 15 nt, Human
ggaccuugaacuggg

SEQ ID NO: 2715168 - RNA, 17 nt, Human
ggaccuugaacugggua

SEQ ID NO: 2715169 - RNA, 17 nt, Human
ggacgcuacccgggaag

SEQ ID NO: 2715170 - RNA, 19 nt, Human
ggacgcuacccgggaaggg

SEQ ID NO: 2715171 - RNA, 20 nt, Human
ggacgcuacccgggaagggg

SEQ ID NO: 2715172 - RNA, 23 nt, Human
ggaauuucucccagucauuuaau

SEQ ID NO: 2715173 - RNA, 16 nt, Human
ggaauuggagcucgug

SEQ ID NO: 2715174 - RNA, 22 nt, Human
ggaauuggagcucgugggacag

SEQ ID NO: 2715175 - RNA, 17 nt, Human
ggacaaaauggaauacu

SEQ ID NO: 2715176 - RNA, 16 nt, Human
ggacaaaauggaauac

SEQ ID NO: 2715177 - RNA, 19 nt, Human
ggaauguuugccucugccu

SEQ ID NO: 2715178 - RNA, 17 nt, Human
ggaauucuguauagauu

SEQ ID NO: 2715179 - RNA, 15 nt, Human
ggaauucuguauaga

SEQ ID NO: 2715180 - RNA, 12 nt, Human
ggaauucuguau

SEQ ID NO: 2715181 - RNA, 14 nt, Human
ggaaugcuguguua

SEQ ID NO: 2715182 - RNA, 12 nt, Human
ggaaugcagugg

SEQ ID NO: 2715183 - RNA, 24 nt, Human
ggaaugauuaauuaaaacacaaca

SEQ ID NO: 2715184 - RNA, 14 nt, Human
ggaaugauuaauua

SEQ ID NO: 2715185 - RNA, 18 nt, Human
ggaaguacuggagaaaau

SEQ ID NO: 2715186 - RNA, 12 nt, Human
ggaaguacugga

SEQ ID NO: 2715187 - RNA, 16 nt, Human
ggaaguacuggagaaa

SEQ ID NO: 2715188 - RNA, 23 nt, Human
ggaaggggagauaaggguaucug

SEQ ID NO: 2715189 - RNA, 22 nt, Human
ggaaaggcuccaggagcagcca

SEQ ID NO: 2715190 - RNA, 17 nt, Human
ggaaaggcuccaggagc

SEQ ID NO: 2715191 - RNA, 19 nt, Human
ggaaaggcuccaggagcag

SEQ ID NO: 2715192 - RNA, 20 nt, Human
ggaaaggcuccaggagcagc

SEQ ID NO: 2715193 - RNA, 21 nt, Human
ggaaaggcuccaggagcagcc

SEQ ID NO: 2715194 - RNA, 23 nt, Human
ggaaaaucagccugcuccagcug

SEQ ID NO: 2715195 - RNA, 19 nt, Human
ggaaaaucagccugcucca

SEQ ID NO: 2715196 - RNA, 14 nt, Human
ggaaaaguuuaaua

SEQ ID NO: 2715197 - RNA, 12 nt, Human
ggaaaggcucca

SEQ ID NO: 2715198 - RNA, 13 nt, Human
ggaaaggcuccag

SEQ ID NO: 2715199 - RNA, 14 nt, Human
ggaaaggcuccagg

SEQ ID NO: 2715200 - RNA, 17 nt, Human
ggaaaucaaauaugcaa

SEQ ID NO: 2715201 - RNA, 14 nt, Human
ggaaaucaccgaaa

SEQ ID NO: 2715202 - RNA, 21 nt, Human
ggaaaucaccgaaaacguggc

SEQ ID NO: 2715203 - RNA, 16 nt, Human
ggaaaucaaauaugca

SEQ ID NO: 2715204 - RNA, 21 nt, Human
gcuuuguuuguugucagcuga

SEQ ID NO: 2715205 - RNA, 18 nt, Human
ggaaaacaugcuacacac

SEQ ID NO: 2715206 - RNA, 14 nt, Human
ggaaaagcugcuga

SEQ ID NO: 2715207 - RNA, 18 nt, Human
ggaaaagcugcugacagu

SEQ ID NO: 2715208 - RNA, 20 nt, Human
ggaaaagcugcugacagugu

SEQ ID NO: 2715209 - RNA, 15 nt, Human
gcuuugugauuuuug

SEQ ID NO: 2715210 - RNA, 18 nt, Human
gcuuucagauacuggauu

SEQ ID NO: 2715211 - RNA, 14 nt, Human
gcuuucagauacug

SEQ ID NO: 2715212 - RNA, 20 nt, Human
gcuuuguauagaaccucuuu

SEQ ID NO: 2715213 - RNA, 23 nt, Human
gcuuucagauacuggauuguacu

SEQ ID NO: 2715214 - RNA, 18 nt, Human
gcuugaggguugggcugg

SEQ ID NO: 2715215 - RNA, 20 nt, Human
gcuugaggguugggcuggug

SEQ ID NO: 2715216 - RNA, 20 nt, Human
gcugucuacacuaagagaga

SEQ ID NO: 2715217 - RNA, 15 nt, Human
gcugccaaugggagc

SEQ ID NO: 2715218 - RNA, 16 nt, Human
gcugccaaugggagcu

SEQ ID NO: 2715219 - RNA, 19 nt, Human
gcugccaaugggagcucau

SEQ ID NO: 2715220 - RNA, 21 nt, Human
gcuguucaugaaagauucaau

SEQ ID NO: 2715221 - RNA, 14 nt, Human
gcuguucagcuggu

SEQ ID NO: 2715222 - RNA, 13 nt, Human
gcuguucagcugg

SEQ ID NO: 2715223 - RNA, 12 nt, Human
gcuguucaugaa

SEQ ID NO: 2715224 - RNA, 21 nt, Human
gcuuagucacugagacagccc

SEQ ID NO: 2715225 - RNA, 19 nt, Human
gcuuagucacugagacagc

SEQ ID NO: 2715226 - RNA, 20 nt, Human
gcuuagucacugagacagcc

SEQ ID NO: 2715227 - RNA, 15 nt, Human
gcuuagucacugaga

SEQ ID NO: 2715228 - RNA, 17 nt, Human
gcuuagucacugagaca

SEQ ID NO: 2715229 - RNA, 16 nt, Human
gcuucaguggcagcug

SEQ ID NO: 2715230 - RNA, 12 nt, Human
gcuuauacacuu

SEQ ID NO: 2715231 - RNA, 13 nt, Human
gcuuaucucaggg

SEQ ID NO: 2715232 - RNA, 19 nt, Human
gcuuaucucaggggugugc

SEQ ID NO: 2715233 - RNA, 17 nt, Human
gcuucaguggcagcugc

SEQ ID NO: 2715234 - RNA, 18 nt, Human
gcuucaguggcagcugcu

SEQ ID NO: 2715235 - RNA, 13 nt, Human
gcuucauuuccug

SEQ ID NO: 2715236 - RNA, 16 nt, Human
gcuucauuuccugugu

SEQ ID NO: 2715237 - RNA, 12 nt, Human
gcuucauccucc

SEQ ID NO: 2715238 - RNA, 15 nt, Human
gcuucauccuccuca

SEQ ID NO: 2715239 - RNA, 16 nt, Human
gcuugaggguugggcu

SEQ ID NO: 2715240 - RNA, 15 nt, Human
gcuuccagugaggcu

SEQ ID NO: 2715241 - RNA, 17 nt, Human
gcuucauuuccuguguc

SEQ ID NO: 2715242 - RNA, 16 nt, Human
gcuuccagugaggcuc

SEQ ID NO: 2715243 - RNA, 19 nt, Human
gccgagauagccaaggcca

SEQ ID NO: 2715244 - RNA, 14 nt, Human
gccucaaccuccug

SEQ ID NO: 2715245 - RNA, 16 nt, Human
gccucaaccuccuggg

SEQ ID NO: 2715246 - RNA, 19 nt, Human
gccucaagugauucuccug

SEQ ID NO: 2715247 - RNA, 20 nt, Human
gccucaagugauucuccugc

SEQ ID NO: 2715248 - RNA, 21 nt, Human
gccucaagugauucuccugcc

SEQ ID NO: 2715249 - RNA, 12 nt, Human
gccucagugcca

SEQ ID NO: 2715250 - RNA, 14 nt, Human
gccucagugccacu

SEQ ID NO: 2715251 - RNA, 23 nt, Human
gccucagccucccaaagugcugg

SEQ ID NO: 2715252 - RNA, 21 nt, Human
gccucacaguccuuaccagca

SEQ ID NO: 2715253 - RNA, 23 nt, Human
gccucccgaauagcugggacuac

SEQ ID NO: 2715254 - RNA, 15 nt, Human
gccucccgaguagcu

SEQ ID NO: 2715255 - RNA, 14 nt, Human
gccucccacgacug

SEQ ID NO: 2715256 - RNA, 21 nt, Human
gccucccacgacugcccggca

SEQ ID NO: 2715257 - RNA, 21 nt, Human
gccucccgaauagcugggacu

SEQ ID NO: 2715258 - RNA, 22 nt, Human
gccucccaacucaccccagccc

SEQ ID NO: 2715259 - RNA, 23 nt, Human
gccucccaacucaccccagcccc

SEQ ID NO: 2715260 - RNA, 21 nt, Human
gccucccaacucaccccagcc

SEQ ID NO: 2715261 - RNA, 15 nt, Human
gccucagugccacua

SEQ ID NO: 2715262 - RNA, 21 nt, Human
gccugggggcugggcagagga

SEQ ID NO: 2715263 - RNA, 20 nt, Human
gccugggggcugggcagagg

SEQ ID NO: 2715264 - RNA, 18 nt, Human
gccugggcagaaggaaga

SEQ ID NO: 2715265 - RNA, 16 nt, Human
gccugggcagaaggaa

SEQ ID NO: 2715266 - RNA, 17 nt, Human
gccugggcagaaggaag

SEQ ID NO: 2715267 - RNA, 15 nt, Human
gccugggcagaagga

SEQ ID NO: 2715268 - RNA, 14 nt, Human
gccuggccagaugc

SEQ ID NO: 2715269 - RNA, 15 nt, Human
gccuggccagaugca

SEQ ID NO: 2715270 - RNA, 14 nt, Human
gccuggauggggcu

SEQ ID NO: 2715271 - RNA, 15 nt, Human
gccuggauggggcug

SEQ ID NO: 2715272 - RNA, 15 nt, Human
gccugcuccagcugu

SEQ ID NO: 2715273 - RNA, 13 nt, Human
gccugauuaaaga

SEQ ID NO: 2715274 - RNA, 16 nt, Human
gccugauuaaagaaug

SEQ ID NO: 2715275 - RNA, 23 nt, Human
gccugcacggugaauggcuuugu

SEQ ID NO: 2715276 - RNA, 16 nt, Human
gccugcuccagcuguu

SEQ ID NO: 2715277 - RNA, 18 nt, Human
gccugcuccagcuguuca

SEQ ID NO: 2715278 - RNA, 22 nt, Human
gccugaagucacacagugaguc

SEQ ID NO: 2715279 - RNA, 18 nt, Human
gccucugccucugacaca

SEQ ID NO: 2715280 - RNA, 12 nt, Human
gcccucuccugg

SEQ ID NO: 2715281 - RNA, 13 nt, Human
gcccucuccuggg

SEQ ID NO: 2715282 - RNA, 14 nt, Human
gcccucuccugggc

SEQ ID NO: 2715283 - RNA, 22 nt, Human
gcccucuccugggcagcugccu

SEQ ID NO: 2715284 - RNA, 23 nt, Human
gcccucuccugggcagcugccuc

SEQ ID NO: 2715285 - RNA, 12 nt, Human
gcccucugccca

SEQ ID NO: 2715286 - RNA, 16 nt, Human
gcccugagcuuucugc

SEQ ID NO: 2715287 - RNA, 17 nt, Human
gcccggcuccaggcucc

SEQ ID NO: 2715288 - RNA, 18 nt, Human
gcccggcuccaggcuccu

SEQ ID NO: 2715289 - RNA, 16 nt, Human
gcccggcuccaggcuc

SEQ ID NO: 2715290 - RNA, 13 nt, Human
gccccugccaccc

SEQ ID NO: 2715291 - RNA, 14 nt, Human
gccccugccacccu

SEQ ID NO: 2715292 - RNA, 15 nt, Human
gccccugccacccug

SEQ ID NO: 2715293 - RNA, 21 nt, Human
gccccuguucuggcagaguug

SEQ ID NO: 2715294 - RNA, 17 nt, Human
gccccuguucuggcaga

SEQ ID NO: 2715295 - RNA, 15 nt, Human
gcagacucuacagag

SEQ ID NO: 2715296 - RNA, 21 nt, Human
gcccuucucuccagccccugg

SEQ ID NO: 2715297 - RNA, 22 nt, Human
gcccuucucuccagccccugga

SEQ ID NO: 2715298 - RNA, 19 nt, Human
gcccuucucuccagccccu

SEQ ID NO: 2715299 - RNA, 18 nt, Human
gccgagauugcaccacug

SEQ ID NO: 2715300 - RNA, 17 nt, Human
gccgagauugcaccacu

SEQ ID NO: 2715301 - RNA, 18 nt, Human
gccgagaucacgccacug

SEQ ID NO: 2715302 - RNA, 19 nt, Human
gccgagaucacgccacugc

SEQ ID NO: 2715303 - RNA, 16 nt, Human
gccgagaucacgccac

SEQ ID NO: 2715304 - RNA, 14 nt, Human
gcccugguggcagu

SEQ ID NO: 2715305 - RNA, 17 nt, Human
gcccugguggcaguggg

SEQ ID NO: 2715306 - RNA, 18 nt, Human
gcccugguggcaguggga

SEQ ID NO: 2715307 - RNA, 19 nt, Human
gcccugguggcagugggag

SEQ ID NO: 2715308 - RNA, 20 nt, Human
gcccugguggcagugggagc

SEQ ID NO: 2715309 - RNA, 21 nt, Human
gcccugguggcagugggagcu

SEQ ID NO: 2715310 - RNA, 22 nt, Human
gcccugguggcagugggagcug

SEQ ID NO: 2715311 - RNA, 23 nt, Human
gcccugguggcagugggagcugc

SEQ ID NO: 2715312 - RNA, 14 nt, Human
gcuaagcauuccaa

SEQ ID NO: 2715313 - RNA, 23 nt, Human
gcuaagagggagggagggcucca

SEQ ID NO: 2715314 - RNA, 14 nt, Human
gcuacccgggaagg

SEQ ID NO: 2715315 - RNA, 15 nt, Human
gcuacccgggaaggg

SEQ ID NO: 2715316 - RNA, 21 nt, Human
gcuacccgggaagggggcugg

SEQ ID NO: 2715317 - RNA, 18 nt, Human
gcuagagguucaaagaua

SEQ ID NO: 2715318 - RNA, 21 nt, Human
gcuagagguucaaagauauuu

SEQ ID NO: 2715319 - RNA, 19 nt, Human
gcuagagguucaaagauau

SEQ ID NO: 2715320 - RNA, 23 nt, Human
gcuaucucccccagccccauccu

SEQ ID NO: 2715321 - RNA, 19 nt, Human
gcuaucucccccagcccca

SEQ ID NO: 2715322 - RNA, 20 nt, Human
gcuaucucccccagccccau

SEQ ID NO: 2715323 - RNA, 21 nt, Human
gcuaucucccccagccccauc

SEQ ID NO: 2715324 - RNA, 22 nt, Human
gcuaucucccccagccccaucc

SEQ ID NO: 2715325 - RNA, 16 nt, Human
gcuaucucccccagcc

SEQ ID NO: 2715326 - RNA, 17 nt, Human
gcuaucucccccagccc

SEQ ID NO: 2715327 - RNA, 18 nt, Human
gcuaucucccccagcccc

SEQ ID NO: 2715328 - RNA, 22 nt, Human
gcuagcagcagggagggcuucu

SEQ ID NO: 2715329 - RNA, 18 nt, Human
gcgguccacccaggagcc

SEQ ID NO: 2715330 - RNA, 19 nt, Human
gcgguccacccaggagccc

SEQ ID NO: 2715331 - RNA, 12 nt, Human
gcggggacagcu

SEQ ID NO: 2715332 - RNA, 15 nt, Human
gcgggcuuccuccug

SEQ ID NO: 2715333 - RNA, 13 nt, Human
gcggggacagcuc

SEQ ID NO: 2715334 - RNA, 16 nt, Human
gcgguccacccaggag

SEQ ID NO: 2715335 - RNA, 16 nt, Human
gcgugagccacugcac

SEQ ID NO: 2715336 - RNA, 18 nt, Human
gcgugagccacugcaccg

SEQ ID NO: 2715337 - RNA, 23 nt, Human
gcgugagccacugcaccgggcca

SEQ ID NO: 2715338 - RNA, 13 nt, Human
gcuaaaugugaau

SEQ ID NO: 2715339 - RNA, 16 nt, Human
gcuaaaugugaaugau

SEQ ID NO: 2715340 - RNA, 21 nt, Human
gcuaagagggagggagggcuc

SEQ ID NO: 2715341 - RNA, 22 nt, Human
gcuaagagggagggagggcucc

SEQ ID NO: 2715342 - RNA, 19 nt, Human
gcucaggugucccugcacu

SEQ ID NO: 2715343 - RNA, 15 nt, Human
gcucagcggggacag

SEQ ID NO: 2715344 - RNA, 20 nt, Human
gcucagcggggacagcuccu

SEQ ID NO: 2715345 - RNA, 21 nt, Human
gcucagcggggacagcuccuu

SEQ ID NO: 2715346 - RNA, 22 nt, Human
gcucagcggggacagcuccuuc

SEQ ID NO: 2715347 - RNA, 17 nt, Human
gcucaggugucccugca

SEQ ID NO: 2715348 - RNA, 18 nt, Human
gcucaggugucccugcac

SEQ ID NO: 2715349 - RNA, 20 nt, Human
gcucaccagccccagugccc

SEQ ID NO: 2715350 - RNA, 23 nt, Human
gcucaccagccccagugcccaca

SEQ ID NO: 2715351 - RNA, 18 nt, Human
gcucaccagccccagugc

SEQ ID NO: 2715352 - RNA, 19 nt, Human
gcucaccagccccagugcc

SEQ ID NO: 2715353 - RNA, 17 nt, Human
gcucagcaaaagaugcu

SEQ ID NO: 2715354 - RNA, 20 nt, Human
gcucagcaaaagaugcuucu

SEQ ID NO: 2715355 - RNA, 22 nt, Human
gcucagcaaaagaugcuucuca

SEQ ID NO: 2715356 - RNA, 23 nt, Human
gcucagcaaaagaugcuucucac

SEQ ID NO: 2715357 - RNA, 13 nt, Human
gcuccaagcuccc

SEQ ID NO: 2715358 - RNA, 14 nt, Human
gcuccaagcuccca

SEQ ID NO: 2715359 - RNA, 15 nt, Human
gcuccaagcucccag

SEQ ID NO: 2715360 - RNA, 14 nt, Human
gcuccaagaauuuc

SEQ ID NO: 2715361 - RNA, 21 nt, Human
gcuccaagcucccaggcauuc

SEQ ID NO: 2715362 - RNA, 16 nt, Human
gcuccaagcucccagg

SEQ ID NO: 2715363 - RNA, 17 nt, Human
gcuccaagcucccaggc

SEQ ID NO: 2715364 - RNA, 18 nt, Human
gcuccaagcucccaggca

SEQ ID NO: 2715365 - RNA, 19 nt, Human
gcuccaagcucccaggcau

SEQ ID NO: 2715366 - RNA, 11 nt, Human
gcuccagcugu

SEQ ID NO: 2715367 - RNA, 13 nt, Human
gcuccaggcuccu

SEQ ID NO: 2715368 - RNA, 16 nt, Human
gcuccaggcuccuuua

SEQ ID NO: 2715369 - RNA, 23 nt, Human
gcuccaggcuccuuuagcgccca

SEQ ID NO: 2715370 - RNA, 19 nt, Human
gcucuccgaccagacaccu

SEQ ID NO: 2715371 - RNA, 13 nt, Human
gcucuccgaccag

SEQ ID NO: 2715372 - RNA, 17 nt, Human
gcucuccgaccagacac

SEQ ID NO: 2715373 - RNA, 16 nt, Human
gcucgagcaugccugg

SEQ ID NO: 2715374 - RNA, 15 nt, Human
gcucccuucccaccu

SEQ ID NO: 2715375 - RNA, 16 nt, Human
gcucccuucccaccuc

SEQ ID NO: 2715376 - RNA, 18 nt, Human
gcucccuucccaccucuc

SEQ ID NO: 2715377 - RNA, 15 nt, Human
gcuccuucuguccua

SEQ ID NO: 2715378 - RNA, 19 nt, Human
gcucccuucccaccucucu

SEQ ID NO: 2715379 - RNA, 21 nt, Human
gcuccuucuguccuacucugu

SEQ ID NO: 2715380 - RNA, 14 nt, Human
gcucugcccuuggu

SEQ ID NO: 2715381 - RNA, 23 nt, Human
gcucugcccuugguuaggcauug

SEQ ID NO: 2715382 - RNA, 11 nt, Human
gcucugccucc

SEQ ID NO: 2715383 - RNA, 13 nt, Human
gcucugcuccucu

SEQ ID NO: 2715384 - RNA, 14 nt, Human
gcucugcuccucuc

SEQ ID NO: 2715385 - RNA, 13 nt, Human
gcucugccuccca

SEQ ID NO: 2715386 - RNA, 14 nt, Human
gcucugccucccau

SEQ ID NO: 2715387 - RNA, 15 nt, Human
gcucugccucccauc

SEQ ID NO: 2715388 - RNA, 22 nt, Human
gcucugccucccaucacccgcu

SEQ ID NO: 2715389 - RNA, 14 nt, Human
gcucuggacaggca

SEQ ID NO: 2715390 - RNA, 15 nt, Human
gcucuggacaggcau

SEQ ID NO: 2715391 - RNA, 16 nt, Human
gcucuggacaggcaug

SEQ ID NO: 2715392 - RNA, 21 nt, Human
gcucuggacaggcauguucuc

SEQ ID NO: 2715393 - RNA, 22 nt, Human
gcucuggacaggcauguucucu

SEQ ID NO: 2715394 - RNA, 19 nt, Human
gcucugcuccucuccccag

SEQ ID NO: 2715395 - RNA, 21 nt, Human
gcucugcuccucuccccagca

SEQ ID NO: 2715396 - RNA, 13 nt, Human
gcucugcugacag

SEQ ID NO: 2715397 - RNA, 14 nt, Human
gcucugcugacaga

SEQ ID NO: 2715398 - RNA, 18 nt, Human
gcucugcugacagacaca

SEQ ID NO: 2715399 - RNA, 19 nt, Human
gcucugcugacagacacag

SEQ ID NO: 2715400 - RNA, 20 nt, Human
gcucugcugacagacacagg

SEQ ID NO: 2715401 - RNA, 23 nt, Human
gcucugcugacagacacaggccc

SEQ ID NO: 2715402 - RNA, 21 nt, Human
gcugacagacacaggcccggc

SEQ ID NO: 2715403 - RNA, 20 nt, Human
gcugacagacacaggcccgg

SEQ ID NO: 2715404 - RNA, 22 nt, Human
gcucuuccaggcugggagagcc

SEQ ID NO: 2715405 - RNA, 12 nt, Human
gcucuucuccag

SEQ ID NO: 2715406 - RNA, 19 nt, Human
gcucuuccaggcugggaga

SEQ ID NO: 2715407 - RNA, 18 nt, Human
gcucuuccaggcugggag

SEQ ID NO: 2715408 - RNA, 14 nt, Human
gcucuucuccaggc

SEQ ID NO: 2715409 - RNA, 16 nt, Human
gcucuucuccaggcug

SEQ ID NO: 2715410 - RNA, 22 nt, Human
gcugagugggggaucacagccu

SEQ ID NO: 2715411 - RNA, 23 nt, Human
gcugagugggggaucacagccuc

SEQ ID NO: 2715412 - RNA, 15 nt, Human
gcugauggugcaaug

SEQ ID NO: 2715413 - RNA, 16 nt, Human
gcugauggugcaauga

SEQ ID NO: 2715414 - RNA, 19 nt, Human
gcugagucugaaggcuggg

SEQ ID NO: 2715415 - RNA, 16 nt, Human
gcugagucugaaggcu

SEQ ID NO: 2715416 - RNA, 18 nt, Human
gcugagucugaaggcugg

SEQ ID NO: 2715417 - RNA, 15 nt, Human
gcugagucugaaggc

SEQ ID NO: 2715418 - RNA, 18 nt, Human
gcugauggugcaaugacc

SEQ ID NO: 2715419 - RNA, 21 nt, Human
gcugauggugcaaugaccuuu

SEQ ID NO: 2715420 - RNA, 21 nt, Human
gcugcaguugccagucacccc

SEQ ID NO: 2715421 - RNA, 18 nt, Human
gcugcaguugccagucac

SEQ ID NO: 2715422 - RNA, 20 nt, Human
gcugcaguugccagucaccc

SEQ ID NO: 2715423 - RNA, 19 nt, Human
guaaugauaacuggaaacu

SEQ ID NO: 2715424 - RNA, 15 nt, Human
guaauuggaaaggca

SEQ ID NO: 2715425 - RNA, 18 nt, Human
guacacuguuucaaacuu

SEQ ID NO: 2715426 - RNA, 13 nt, Human
guaauucaagaaa

SEQ ID NO: 2715427 - RNA, 14 nt, Human
guaauucaagaaaa

SEQ ID NO: 2715428 - RNA, 20 nt, Human
guaauuaaguacuauguauc

SEQ ID NO: 2715429 - RNA, 17 nt, Human
guaauuaaguacuaugu

SEQ ID NO: 2715430 - RNA, 14 nt, Human
guaauuaaguacua

SEQ ID NO: 2715431 - RNA, 21 nt, Human
guaauuaaguacuauguauca

SEQ ID NO: 2715432 - RNA, 13 nt, Human
guaauuauaucug

SEQ ID NO: 2715433 - RNA, 15 nt, Human
guacccacugcucug

SEQ ID NO: 2715434 - RNA, 20 nt, Human
guacauaaugcgugcauacc

SEQ ID NO: 2715435 - RNA, 21 nt, Human
guacacuguuucaaacuuuac

SEQ ID NO: 2715436 - RNA, 20 nt, Human
guacacuguuucaaacuuua

SEQ ID NO: 2715437 - RNA, 19 nt, Human
guacacuguuucaaacuuu

SEQ ID NO: 2715438 - RNA, 16 nt, Human
guacagacaacaaacc

SEQ ID NO: 2715439 - RNA, 20 nt, Human
guacagcaaggagauuuaca

SEQ ID NO: 2715440 - RNA, 12 nt, Human
guacagagccca

SEQ ID NO: 2715441 - RNA, 18 nt, Human
guacagagcccacgcccc

SEQ ID NO: 2715442 - RNA, 22 nt, Human
guacagagcccacgcccccacu

SEQ ID NO: 2715443 - RNA, 16 nt, Human
guacccacugcucugg

SEQ ID NO: 2715444 - RNA, 22 nt, Human
guaccucuugagccuugaacuu

SEQ ID NO: 2715445 - RNA, 21 nt, Human
guaccucuugagccuugaacu

SEQ ID NO: 2715446 - RNA, 13 nt, Human
guaccucuugagc

SEQ ID NO: 2715447 - RNA, 14 nt, Human
guacuucuccaccc

SEQ ID NO: 2715448 - RNA, 15 nt, Human
guacuucuccacccu

SEQ ID NO: 2715449 - RNA, 17 nt, Human
guacguugugcauuugg

SEQ ID NO: 2715450 - RNA, 23 nt, Human
guacuaaggaaucuuucugcuuu

SEQ ID NO: 2715451 - RNA, 15 nt, Human
guacuaaggaaucuu

SEQ ID NO: 2715452 - RNA, 15 nt, Human
guacgaagaguauuu

SEQ ID NO: 2715453 - RNA, 14 nt, Human
guacgucugacagg

SEQ ID NO: 2715454 - RNA, 15 nt, Human
guacgucugacaggc

SEQ ID NO: 2715455 - RNA, 17 nt, Human
guacgucugacaggcaa

SEQ ID NO: 2715456 - RNA, 14 nt, Human
guacguugugcauu

SEQ ID NO: 2715457 - RNA, 16 nt, Human
guacguugugcauuug

SEQ ID NO: 2715458 - RNA, 15 nt, Human
guacguugugcauuu

SEQ ID NO: 2715459 - RNA, 16 nt, Human
guagagcggagaaagg

SEQ ID NO: 2715460 - RNA, 21 nt, Human
guacuuuuuggcauaacauaa

SEQ ID NO: 2715461 - RNA, 12 nt, Human
guacuuuuuggc

SEQ ID NO: 2715462 - RNA, 23 nt, Human
guacuuuauuuucuauaauuuaa

SEQ ID NO: 2715463 - RNA, 21 nt, Human
guacuuguggacacagcucuu

SEQ ID NO: 2715464 - RNA, 16 nt, Human
guacuuguggacacag

SEQ ID NO: 2715465 - RNA, 20 nt, Human
guacuuguggacacagcucu

SEQ ID NO: 2715466 - RNA, 20 nt, Human
guacuucuccacccugcucu

SEQ ID NO: 2715467 - RNA, 21 nt, Human
guacuucuccacccugcucuc

SEQ ID NO: 2715468 - RNA, 16 nt, Human
guacuucuccacccug

SEQ ID NO: 2715469 - RNA, 17 nt, Human
guacuucuccacccugc

SEQ ID NO: 2715470 - RNA, 18 nt, Human
guacuucuccacccugcu

SEQ ID NO: 2715471 - RNA, 19 nt, Human
guacuucuccacccugcuc

SEQ ID NO: 2715472 - RNA, 18 nt, Human
guaagggaaacugccagc

SEQ ID NO: 2715473 - RNA, 17 nt, Human
guaagggaaacugccag

SEQ ID NO: 2715474 - RNA, 22 nt, Human
guaaguauucuuauuuaaugaa

SEQ ID NO: 2715475 - RNA, 18 nt, Human
guaaggaauaccuguccc

SEQ ID NO: 2715476 - RNA, 20 nt, Human
guaaggaauaccuguccccc

SEQ ID NO: 2715477 - RNA, 21 nt, Human
guaaggaauaccugucccccu

SEQ ID NO: 2715478 - RNA, 23 nt, Human
guaaggaauaccugucccccuga

SEQ ID NO: 2715479 - RNA, 13 nt, Human
guaaggaaugauu

SEQ ID NO: 2715480 - RNA, 23 nt, Human
guaaauuaacuuuuauaaacuuu

SEQ ID NO: 2715481 - RNA, 15 nt, Human
guaaauuaacuuuua

SEQ ID NO: 2715482 - RNA, 22 nt, Human
guaaauuaacuuuuauaaacuu

SEQ ID NO: 2715483 - RNA, 21 nt, Human
guaaauuaacuuuuauaaacu

SEQ ID NO: 2715484 - RNA, 17 nt, Human
guaaauuaacuuuuaua

SEQ ID NO: 2715485 - RNA, 16 nt, Human
guaaauuaacuuuuau

SEQ ID NO: 2715486 - RNA, 21 nt, Human
guaaaucccauuauucaaagu

SEQ ID NO: 2715487 - RNA, 20 nt, Human
guaaaucccauuauucaaag

SEQ ID NO: 2715488 - RNA, 19 nt, Human
guaaaucccauuauucaaa

SEQ ID NO: 2715489 - RNA, 18 nt, Human
guaaaucccauuauucaa

SEQ ID NO: 2715490 - RNA, 17 nt, Human
guaaaucccauuauuca

SEQ ID NO: 2715491 - RNA, 16 nt, Human
guaaaucccauuauuc

SEQ ID NO: 2715492 - RNA, 20 nt, Human
guaaaugggggugcauuuga

SEQ ID NO: 2715493 - RNA, 19 nt, Human
guaaaugggggugcauuug

SEQ ID NO: 2715494 - RNA, 18 nt, Human
guaaaugggggugcauuu

SEQ ID NO: 2715495 - RNA, 15 nt, Human
guaaaucccauuauu

SEQ ID NO: 2715496 - RNA, 23 nt, Human
guaaauacaauuuuguuucugua

SEQ ID NO: 2715497 - RNA, 22 nt, Human
guaaauacaauuuuguuucugu

SEQ ID NO: 2715498 - RNA, 15 nt, Human
guaaauaguauuuga

SEQ ID NO: 2715499 - RNA, 16 nt, Human
guaaauaguauuugag

SEQ ID NO: 2715500 - RNA, 17 nt, Human
guaaauaguauuugaga

SEQ ID NO: 2715501 - RNA, 21 nt, Human
guaaauacaauuuuguuucug

SEQ ID NO: 2715502 - RNA, 18 nt, Human
guaaaaccacagcaguug

SEQ ID NO: 2715503 - RNA, 16 nt, Human
guaaaaccacagcagu

SEQ ID NO: 2715504 - RNA, 15 nt, Human
guaaaaccacagcag

SEQ ID NO: 2715505 - RNA, 14 nt, Human
guaaaaccacagca

SEQ ID NO: 2715506 - RNA, 23 nt, Human
guaaaaccacagcaguugaaaag

SEQ ID NO: 2715507 - RNA, 23 nt, Human
gguuuugccauguuggccaggcu

SEQ ID NO: 2715508 - RNA, 20 nt, Human
gguuuucacauuggaaacaa

SEQ ID NO: 2715509 - RNA, 15 nt, Human
gguuuucuguucuuu

SEQ ID NO: 2715510 - RNA, 13 nt, Human
gguuuucuguucu

SEQ ID NO: 2715511 - RNA, 12 nt, Human
gguuuucuguuc

SEQ ID NO: 2715512 - RNA, 14 nt, Human
gguugggcuggugu

SEQ ID NO: 2715513 - RNA, 13 nt, Human
gguuggugggggc

SEQ ID NO: 2715514 - RNA, 13 nt, Human
gguuuaagcuguu

SEQ ID NO: 2715515 - RNA, 13 nt, Human
gguggccucccaa

SEQ ID NO: 2715516 - RNA, 21 nt, Human
gguucaagcgauucuucugcu

SEQ ID NO: 2715517 - RNA, 17 nt, Human
gguggccucccaacuca

SEQ ID NO: 2715518 - RNA, 20 nt, Human
gguucacugcaaccuccgcc

SEQ ID NO: 2715519 - RNA, 22 nt, Human
gguucaagcgauucuucugcuu

SEQ ID NO: 2715520 - RNA, 23 nt, Human
gguucaagcgauucuucugcuuc

SEQ ID NO: 2715521 - RNA, 14 nt, Human
gguugaagcaccaa

SEQ ID NO: 2715522 - RNA, 15 nt, Human
gguagacacacauga

SEQ ID NO: 2715523 - RNA, 22 nt, Human
gguagacacacaugaaguccaa

SEQ ID NO: 2715524 - RNA, 12 nt, Human
ggucacucuggc

SEQ ID NO: 2715525 - RNA, 12 nt, Human
ggucagagccug

SEQ ID NO: 2715526 - RNA, 22 nt, Human
ggucacucuggcagcucagaga

SEQ ID NO: 2715527 - RNA, 16 nt, Human
ggucacucuggcagcu

SEQ ID NO: 2715528 - RNA, 20 nt, Human
ggucacucuggcagcucaga

SEQ ID NO: 2715529 - RNA, 13 nt, Human
ggucagagccugc

SEQ ID NO: 2715530 - RNA, 14 nt, Human
ggucagagccugca

SEQ ID NO: 2715531 - RNA, 15 nt, Human
ggucagagccugcag

SEQ ID NO: 2715532 - RNA, 16 nt, Human
ggucagagccugcagu

SEQ ID NO: 2715533 - RNA, 22 nt, Human
ggucccaccccacacacgccag

SEQ ID NO: 2715534 - RNA, 22 nt, Human
ggucccacucaguccauagcag

SEQ ID NO: 2715535 - RNA, 12 nt, Human
ggucccacucag

SEQ ID NO: 2715536 - RNA, 14 nt, Human
ggucccacucaguc

SEQ ID NO: 2715537 - RNA, 13 nt, Human
ggucccccuucca

SEQ ID NO: 2715538 - RNA, 18 nt, Human
ggucccccuuccauggac

SEQ ID NO: 2715539 - RNA, 23 nt, Human
ggucccccuuccauggacuuugu

SEQ ID NO: 2715540 - RNA, 22 nt, Human
gguacuucaaauccuugaagau

SEQ ID NO: 2715541 - RNA, 21 nt, Human
gguacuuguggacacagcucu

SEQ ID NO: 2715542 - RNA, 20 nt, Human
gguacuuguggacacagcuc

SEQ ID NO: 2715543 - RNA, 22 nt, Human
gguacuuguggacacagcucuu

SEQ ID NO: 2715544 - RNA, 17 nt, Human
gguacccacugcucugg

SEQ ID NO: 2715545 - RNA, 16 nt, Human
gguacccacugcucug

SEQ ID NO: 2715546 - RNA, 15 nt, Human
ggguugggcuggugu

SEQ ID NO: 2715547 - RNA, 23 nt, Human
ggguucccuuuuuuggcugcuga

SEQ ID NO: 2715548 - RNA, 17 nt, Human
ggguucuacccaggugc

SEQ ID NO: 2715549 - RNA, 22 nt, Human
ggguucuacccaggugcuagga

SEQ ID NO: 2715550 - RNA, 16 nt, Human
ggguuggccccugccc

SEQ ID NO: 2715551 - RNA, 19 nt, Human
ggguuggccccugcccggc

SEQ ID NO: 2715552 - RNA, 19 nt, Human
ggugcuacaaaaacacagc

SEQ ID NO: 2715553 - RNA, 15 nt, Human
ggugcgaucuggguu

SEQ ID NO: 2715554 - RNA, 22 nt, Human
ggugcuaucucccccagcccca

SEQ ID NO: 2715555 - RNA, 21 nt, Human
ggugcuaucucccccagcccc

SEQ ID NO: 2715556 - RNA, 23 nt, Human
ggugcuaucucccccagccccau

SEQ ID NO: 2715557 - RNA, 15 nt, Human
gguggcagcugcggu

SEQ ID NO: 2715558 - RNA, 23 nt, Human
gguggcagcugcgguccacccag

SEQ ID NO: 2715559 - RNA, 11 nt, Human
gguggcagcug

SEQ ID NO: 2715560 - RNA, 13 nt, Human
gguggcagcucac

SEQ ID NO: 2715561 - RNA, 12 nt, Human
gguggcagcugc

SEQ ID NO: 2715562 - RNA, 13 nt, Human
gguggcagcugcg

SEQ ID NO: 2715563 - RNA, 16 nt, Human
ggugaccucugccuga

SEQ ID NO: 2715564 - RNA, 14 nt, Human
ggugaccucugccu

SEQ ID NO: 2715565 - RNA, 19 nt, Human
ggugcccugcuuucagaua

SEQ ID NO: 2715566 - RNA, 14 nt, Human
ggucccugguggca

SEQ ID NO: 2715567 - RNA, 23 nt, Human
gguccuagaaauuccccacccug

SEQ ID NO: 2715568 - RNA, 22 nt, Human
ggucucacuauguugcccaggc

SEQ ID NO: 2715569 - RNA, 18 nt, Human
gguccgugcuaaggacuu

SEQ ID NO: 2715570 - RNA, 17 nt, Human
gguccgugcuaaggacu

SEQ ID NO: 2715571 - RNA, 22 nt, Human
ggucccugguggcagcucaccu

SEQ ID NO: 2715572 - RNA, 16 nt, Human
gguccgugcuaaggac

SEQ ID NO: 2715573 - RNA, 15 nt, Human
ggucugacccacugc

SEQ ID NO: 2715574 - RNA, 16 nt, Human
ggucugacccacugcu

SEQ ID NO: 2715575 - RNA, 21 nt, Human
ggucucacuauguugcccagg

SEQ ID NO: 2715576 - RNA, 12 nt, Human
ggucucacucug

SEQ ID NO: 2715577 - RNA, 16 nt, Human
ggucucacucugucgc

SEQ ID NO: 2715578 - RNA, 14 nt, Human
ggugaauggcuuug

SEQ ID NO: 2715579 - RNA, 20 nt, Human
ggugaauggcuuuguauaga

SEQ ID NO: 2715580 - RNA, 17 nt, Human
ggugaauggcuuuguau

SEQ ID NO: 2715581 - RNA, 18 nt, Human
ggugaagugaagacaaug

SEQ ID NO: 2715582 - RNA, 19 nt, Human
ggucugaggaauccagacc

SEQ ID NO: 2715583 - RNA, 16 nt, Human
ggugaacuugguuccc

SEQ ID NO: 2715584 - RNA, 18 nt, Human
ggguacccacugcucugg

SEQ ID NO: 2715585 - RNA, 13 nt, Human
ggguacccacugc

SEQ ID NO: 2715586 - RNA, 15 nt, Human
ggguacccacugcuc

SEQ ID NO: 2715587 - RNA, 19 nt, Human
ggguacuuguggacacagc

SEQ ID NO: 2715588 - RNA, 22 nt, Human
ggguacuuguggacacagcucu

SEQ ID NO: 2715589 - RNA, 23 nt, Human
ggguacuuguggacacagcucuu

SEQ ID NO: 2715590 - RNA, 23 nt, Human
ggguagagcggagaaaggaaggg

SEQ ID NO: 2715591 - RNA, 23 nt, Human
gggguucccuuuuuuggcugcug

SEQ ID NO: 2715592 - RNA, 13 nt, Human
ggggcugggacau

SEQ ID NO: 2715593 - RNA, 16 nt, Human
ggggcugggcagagga

SEQ ID NO: 2715594 - RNA, 17 nt, Human
ggggcugggcagaggaa

SEQ ID NO: 2715595 - RNA, 20 nt, Human
gggcuucauccuccucagau

SEQ ID NO: 2715596 - RNA, 20 nt, Human
gggcuuggggaccagagcug

SEQ ID NO: 2715597 - RNA, 19 nt, Human
gggcuucaguggcagcugc

SEQ ID NO: 2715598 - RNA, 20 nt, Human
gggcuucaguggcagcugcu

SEQ ID NO: 2715599 - RNA, 19 nt, Human
gggcuucauccuccucaga

SEQ ID NO: 2715600 - RNA, 15 nt, Human
gggcuucaguggcag

SEQ ID NO: 2715601 - RNA, 16 nt, Human
gggcuucaguggcagc

SEQ ID NO: 2715602 - RNA, 17 nt, Human
gggcuucaguggcagcu

SEQ ID NO: 2715603 - RNA, 18 nt, Human
gggcuucaguggcagcug

SEQ ID NO: 2715604 - RNA, 17 nt, Human
ggggaucacagccucug

SEQ ID NO: 2715605 - RNA, 21 nt, Human
gggcuuggggaccagagcugc

SEQ ID NO: 2715606 - RNA, 13 nt, Human
ggggaguggccac

SEQ ID NO: 2715607 - RNA, 18 nt, Human
gggccuggucguuuucaa

SEQ ID NO: 2715608 - RNA, 14 nt, Human
gggccuggcucagg

SEQ ID NO: 2715609 - RNA, 16 nt, Human
gggccuggcucaggug

SEQ ID NO: 2715610 - RNA, 19 nt, Human
gggccuggccugagcuggg

SEQ ID NO: 2715611 - RNA, 12 nt, Human
gggccuggcuca

SEQ ID NO: 2715612 - RNA, 16 nt, Human
gggcgcgguggcucac

SEQ ID NO: 2715613 - RNA, 13 nt, Human
gggcucccuuccc

SEQ ID NO: 2715614 - RNA, 14 nt, Human
gggcucccuuccca

SEQ ID NO: 2715615 - RNA, 17 nt, Human
gggcucccuucccaccu

SEQ ID NO: 2715616 - RNA, 18 nt, Human
gggcucccuucccaccuc

SEQ ID NO: 2715617 - RNA, 23 nt, Human
gggcucccuucccaccucucuca

SEQ ID NO: 2715618 - RNA, 13 nt, Human
gggcucugccucc

SEQ ID NO: 2715619 - RNA, 15 nt, Human
gggcucugccuccca

SEQ ID NO: 2715620 - RNA, 16 nt, Human
gggcucugccucccau

SEQ ID NO: 2715621 - RNA, 17 nt, Human
gggcucugccucccauc

SEQ ID NO: 2715622 - RNA, 20 nt, Human
gggcucugccucccaucacc

SEQ ID NO: 2715623 - RNA, 14 nt, Human
gggcuucaguggca

SEQ ID NO: 2715624 - RNA, 16 nt, Human
gggcugaggugggagg

SEQ ID NO: 2715625 - RNA, 14 nt, Human
gggcugcaccggcu

SEQ ID NO: 2715626 - RNA, 22 nt, Human
guauuucuaugaaauauuaugu

SEQ ID NO: 2715627 - RNA, 17 nt, Human
guauuucuaugaaauau

SEQ ID NO: 2715628 - RNA, 19 nt, Human
guauuugagaguucuaaau

SEQ ID NO: 2715629 - RNA, 21 nt, Human
guauuugagaguucuaaauuu

SEQ ID NO: 2715630 - RNA, 15 nt, Human
guagagugggagcug

SEQ ID NO: 2715631 - RNA, 20 nt, Human
guauuacaguggggaaugaa

SEQ ID NO: 2715632 - RNA, 13 nt, Human
guagagugggagc

SEQ ID NO: 2715633 - RNA, 22 nt, Human
guauuacaguggggaaugaaga

SEQ ID NO: 2715634 - RNA, 13 nt, Human
guauuacuucugc

SEQ ID NO: 2715635 - RNA, 14 nt, Human
guauuacuucugcu

SEQ ID NO: 2715636 - RNA, 15 nt, Human
guauuacuucugcua

SEQ ID NO: 2715637 - RNA, 14 nt, Human
guauuauaccuuuu

SEQ ID NO: 2715638 - RNA, 16 nt, Human
guauuuuaaaagaaug

SEQ ID NO: 2715639 - RNA, 17 nt, Human
guauuuuaaaagaauga

SEQ ID NO: 2715640 - RNA, 18 nt, Human
gucaagagggucugagga

SEQ ID NO: 2715641 - RNA, 19 nt, Human
gucaagagggucugaggaa

SEQ ID NO: 2715642 - RNA, 19 nt, Human
gucaagugaaaaaggagga

SEQ ID NO: 2715643 - RNA, 16 nt, Human
gucaagugaaaaagga

SEQ ID NO: 2715644 - RNA, 18 nt, Human
gucaagugaaaaaggagg

SEQ ID NO: 2715645 - RNA, 14 nt, Human
gucaccucauggaa

SEQ ID NO: 2715646 - RNA, 20 nt, Human
gucaccugaagacucauucu

SEQ ID NO: 2715647 - RNA, 13 nt, Human
gucaccccggcca

SEQ ID NO: 2715648 - RNA, 15 nt, Human
gucaauaaaauccau

SEQ ID NO: 2715649 - RNA, 21 nt, Human
gucaauaaaauccauacauuu

SEQ ID NO: 2715650 - RNA, 16 nt, Human
gucaauuacaggaagu

SEQ ID NO: 2715651 - RNA, 13 nt, Human
gucaauuacagga

SEQ ID NO: 2715652 - RNA, 15 nt, Human
gucaauuacaggaag

SEQ ID NO: 2715653 - RNA, 20 nt, Human
gucccagccagcaguucaga

SEQ ID NO: 2715654 - RNA, 17 nt, Human
gucccagauacuugggg

SEQ ID NO: 2715655 - RNA, 14 nt, Human
gucccacucagucc

SEQ ID NO: 2715656 - RNA, 15 nt, Human
gucccacucagucca

SEQ ID NO: 2715657 - RNA, 14 nt, Human
guccacccaggagc

SEQ ID NO: 2715658 - RNA, 13 nt, Human
guccacccaggag

SEQ ID NO: 2715659 - RNA, 15 nt, Human
guccacccaggagcc

SEQ ID NO: 2715660 - RNA, 16 nt, Human
guccacccaggagccc

SEQ ID NO: 2715661 - RNA, 21 nt, Human
gucauauaagauucauauuua

SEQ ID NO: 2715662 - RNA, 23 nt, Human
gucuacacuaagagagaaugaga

SEQ ID NO: 2715663 - RNA, 15 nt, Human
gucuacacugugcug

SEQ ID NO: 2715664 - RNA, 17 nt, Human
gucuacacuaagagaga

SEQ ID NO: 2715665 - RNA, 23 nt, Human
gucuaagauaguaacaaugaaga

SEQ ID NO: 2715666 - RNA, 15 nt, Human
guccuuaccagcaga

SEQ ID NO: 2715667 - RNA, 16 nt, Human
guccuuaccagcagag

SEQ ID NO: 2715668 - RNA, 17 nt, Human
guccuuaccagcagagc

SEQ ID NO: 2715669 - RNA, 20 nt, Human
gucucacuauguugcccagg

SEQ ID NO: 2715670 - RNA, 21 nt, Human
gucucacuauguugcccaggc

SEQ ID NO: 2715671 - RNA, 13 nt, Human
gucucacuguugc

SEQ ID NO: 2715672 - RNA, 23 nt, Human
gucucacuauguugcccaggcag

SEQ ID NO: 2715673 - RNA, 16 nt, Human
gucucacuguugccca

SEQ ID NO: 2715674 - RNA, 17 nt, Human
gucucacuguugcccag

SEQ ID NO: 2715675 - RNA, 18 nt, Human
gucucacuguugcccagg

SEQ ID NO: 2715676 - RNA, 19 nt, Human
gucucacuguugcccaggc

SEQ ID NO: 2715677 - RNA, 20 nt, Human
gucucacuguugcccaggcu

SEQ ID NO: 2715678 - RNA, 21 nt, Human
gucucacuguugcccaggcug

SEQ ID NO: 2715679 - RNA, 22 nt, Human
gucucacuguugcccaggcugg

SEQ ID NO: 2715680 - RNA, 23 nt, Human
gucucacuguugcccaggcuggc

SEQ ID NO: 2715681 - RNA, 13 nt, Human
gucucagauuuua

SEQ ID NO: 2715682 - RNA, 13 nt, Human
gucugacccacug

SEQ ID NO: 2715683 - RNA, 14 nt, Human
gucugacccacugc

SEQ ID NO: 2715684 - RNA, 15 nt, Human
gucugacccacugcu

SEQ ID NO: 2715685 - RNA, 18 nt, Human
gucugaggaauccagacc

SEQ ID NO: 2715686 - RNA, 19 nt, Human
gucugaggaauccagaccc

SEQ ID NO: 2715687 - RNA, 20 nt, Human
gucugauucccaagcucugc

SEQ ID NO: 2715688 - RNA, 21 nt, Human
gucugauucccaagcucugcu

SEQ ID NO: 2715689 - RNA, 21 nt, Human
gucugaggaauccagacccgg

SEQ ID NO: 2715690 - RNA, 17 nt, Human
gucugauucccaagcuc

SEQ ID NO: 2715691 - RNA, 18 nt, Human
gucugauucccaagcucu

SEQ ID NO: 2715692 - RNA, 19 nt, Human
gucugauucccaagcucug

SEQ ID NO: 2715693 - RNA, 19 nt, Human
guccugggagugagcuggu

SEQ ID NO: 2715694 - RNA, 17 nt, Human
guccugggagugagcug

SEQ ID NO: 2715695 - RNA, 18 nt, Human
guccugggagugagcugg

SEQ ID NO: 2715696 - RNA, 15 nt, Human
guccugggagugagc

SEQ ID NO: 2715697 - RNA, 16 nt, Human
guccugggagugagcu

SEQ ID NO: 2715698 - RNA, 17 nt, Human
guccuggcaugggaaug

SEQ ID NO: 2715699 - RNA, 12 nt, Human
guccucccaucu

SEQ ID NO: 2715700 - RNA, 13 nt, Human
guccucccaucuc

SEQ ID NO: 2715701 - RNA, 14 nt, Human
guccucccaucuca

SEQ ID NO: 2715702 - RNA, 23 nt, Human
guccucccaucucacacaugagc

SEQ ID NO: 2715703 - RNA, 12 nt, Human
gucccagugccg

SEQ ID NO: 2715704 - RNA, 23 nt, Human
guccuagaaauuccccacccuga

SEQ ID NO: 2715705 - RNA, 15 nt, Human
guccuacucuguguc

SEQ ID NO: 2715706 - RNA, 23 nt, Human
guccuacucugugucaggugggg

SEQ ID NO: 2715707 - RNA, 16 nt, Human
gucccugguggcagcu

SEQ ID NO: 2715708 - RNA, 13 nt, Human
guccuacucugug

SEQ ID NO: 2715709 - RNA, 17 nt, Human
gucccugguggcagcuc

SEQ ID NO: 2715710 - RNA, 18 nt, Human
gugcaaauugucacagga

SEQ ID NO: 2715711 - RNA, 19 nt, Human
gugcauaaguuaacuucca

SEQ ID NO: 2715712 - RNA, 20 nt, Human
gugccagguuuuuggucuga

SEQ ID NO: 2715713 - RNA, 22 nt, Human
gugccagguuuuuggucugacc

SEQ ID NO: 2715714 - RNA, 21 nt, Human
gugcauaccacuuuuguucuu

SEQ ID NO: 2715715 - RNA, 14 nt, Human
gugcauaccacuuu

SEQ ID NO: 2715716 - RNA, 13 nt, Human
gugcauaccacuu

SEQ ID NO: 2715717 - RNA, 20 nt, Human
gugcccacaggaucagucug

SEQ ID NO: 2715718 - RNA, 12 nt, Human
gugauuuucauu

SEQ ID NO: 2715719 - RNA, 23 nt, Human
gugauucuccugccucagccucc

SEQ ID NO: 2715720 - RNA, 14 nt, Human
gugauucuccugcc

SEQ ID NO: 2715721 - RNA, 16 nt, Human
gugauucuccugccuc

SEQ ID NO: 2715722 - RNA, 17 nt, Human
gugauucuccugccuca

SEQ ID NO: 2715723 - RNA, 18 nt, Human
gugauucuccugccucag

SEQ ID NO: 2715724 - RNA, 19 nt, Human
gugauucuccugccucagc

SEQ ID NO: 2715725 - RNA, 20 nt, Human
gugauucuccugccucagcc

SEQ ID NO: 2715726 - RNA, 22 nt, Human
gugauucuccugccucagccuc

SEQ ID NO: 2715727 - RNA, 20 nt, Human
gugauccucccaccucagcc

SEQ ID NO: 2715728 - RNA, 22 nt, Human
gugauccucccaccucagccuc

SEQ ID NO: 2715729 - RNA, 14 nt, Human
gugauccucccacc

SEQ ID NO: 2715730 - RNA, 15 nt, Human
gugauccucccaccu

SEQ ID NO: 2715731 - RNA, 18 nt, Human
gugauccucccaccucag

SEQ ID NO: 2715732 - RNA, 11 nt, Human
gugaggccaga

SEQ ID NO: 2715733 - RNA, 15 nt, Human
gugauccacccaccu

SEQ ID NO: 2715734 - RNA, 13 nt, Human
gugaggccagaga

SEQ ID NO: 2715735 - RNA, 18 nt, Human
gugauccacccaccucag

SEQ ID NO: 2715736 - RNA, 20 nt, Human
gugauccacccaccucagcc

SEQ ID NO: 2715737 - RNA, 20 nt, Human
gugaaacucguuaauuugua

SEQ ID NO: 2715738 - RNA, 12 nt, Human
gugaaacuggau

SEQ ID NO: 2715739 - RNA, 19 nt, Human
gugaaagaaaauaacaaua

SEQ ID NO: 2715740 - RNA, 14 nt, Human
gugaaaagaaaaau

SEQ ID NO: 2715741 - RNA, 23 nt, Human
gugaaaagaaaaaugagccuggc

SEQ ID NO: 2715742 - RNA, 12 nt, Human
gugaaaauuauu

SEQ ID NO: 2715743 - RNA, 15 nt, Human
gugaaaauuauuuug

SEQ ID NO: 2715744 - RNA, 19 nt, Human
gugaauggcuuuguauaga

SEQ ID NO: 2715745 - RNA, 18 nt, Human
gugaauggcuuuguauag

SEQ ID NO: 2715746 - RNA, 17 nt, Human
gugaauggcuuuguaua

SEQ ID NO: 2715747 - RNA, 14 nt, Human
gugaauggcuuugu

SEQ ID NO: 2715748 - RNA, 13 nt, Human
gugaauggcuuug

SEQ ID NO: 2715749 - RNA, 17 nt, Human
gugaaaguacauuugga

SEQ ID NO: 2715750 - RNA, 19 nt, Human
gugaaaggaaagagggagg

SEQ ID NO: 2715751 - RNA, 16 nt, Human
gugagcagucaggaaa

SEQ ID NO: 2715752 - RNA, 17 nt, Human
gugacugaucucucgug

SEQ ID NO: 2715753 - RNA, 13 nt, Human
gugagccacugca

SEQ ID NO: 2715754 - RNA, 14 nt, Human
gugagcuacaaaug

SEQ ID NO: 2715755 - RNA, 11 nt, Human
gugaggaagcc

SEQ ID NO: 2715756 - RNA, 16 nt, Human
gugaggaagccgcugg

SEQ ID NO: 2715757 - RNA, 19 nt, Human
gugaggaagccgcuggggc

SEQ ID NO: 2715758 - RNA, 16 nt, Human
gugacaacacuugugu

SEQ ID NO: 2715759 - RNA, 15 nt, Human
gugacugaauuucuu

SEQ ID NO: 2715760 - RNA, 18 nt, Human
gugacugaauuucuuuug

SEQ ID NO: 2715761 - RNA, 16 nt, Human
gugacugaauuucuuu

SEQ ID NO: 2715762 - RNA, 18 nt, Human
guggaaaaauagccugcc

SEQ ID NO: 2715763 - RNA, 11 nt, Human
gugcugcccug

SEQ ID NO: 2715764 - RNA, 22 nt, Human
gugcugccauccagguucagcu

SEQ ID NO: 2715765 - RNA, 12 nt, Human
gugcuuggagga

SEQ ID NO: 2715766 - RNA, 13 nt, Human
gugcuuggaggaa

SEQ ID NO: 2715767 - RNA, 15 nt, Human
gugcuuggaggaagg

SEQ ID NO: 2715768 - RNA, 23 nt, Human
gugcugaaugguuuucaaaauaa

SEQ ID NO: 2715769 - RNA, 20 nt, Human
gugcugaaugguuuucaaaa

SEQ ID NO: 2715770 - RNA, 19 nt, Human
gugcugaaugguuuucaaa

SEQ ID NO: 2715771 - RNA, 17 nt, Human
gugcucuggacaggcau

SEQ ID NO: 2715772 - RNA, 18 nt, Human
gugcucuggacaggcaug

SEQ ID NO: 2715773 - RNA, 15 nt, Human
gugcucuggacaggc

SEQ ID NO: 2715774 - RNA, 16 nt, Human
gugcucuggacaggca

SEQ ID NO: 2715775 - RNA, 21 nt, Human
gugccuuggggacaagagcag

SEQ ID NO: 2715776 - RNA, 12 nt, Human
gugcugcauuua

SEQ ID NO: 2715777 - RNA, 20 nt, Human
gugcugcauuuaaaagauac

SEQ ID NO: 2715778 - RNA, 19 nt, Human
gugcugcauuuaaaagaua

SEQ ID NO: 2715779 - RNA, 15 nt, Human
gugcugccauccagg

SEQ ID NO: 2715780 - RNA, 18 nt, Human
gugcugccauccagguuc

SEQ ID NO: 2715781 - RNA, 19 nt, Human
gugcugccauccagguuca

SEQ ID NO: 2715782 - RNA, 12 nt, Human
gugcugagucug

SEQ ID NO: 2715783 - RNA, 16 nt, Human
gugcugagucugaagg

SEQ ID NO: 2715784 - RNA, 17 nt, Human
gugcugagucugaaggc

SEQ ID NO: 2715785 - RNA, 18 nt, Human
gugcugagucugaaggcu

SEQ ID NO: 2715786 - RNA, 19 nt, Human
gugcugagucugaaggcug

SEQ ID NO: 2715787 - RNA, 15 nt, Human
guggcagugggagcu

SEQ ID NO: 2715788 - RNA, 16 nt, Human
guggcagugggagcug

SEQ ID NO: 2715789 - RNA, 17 nt, Human
guggcagugggagcugc

SEQ ID NO: 2715790 - RNA, 19 nt, Human
guggcagcugcgguccacc

SEQ ID NO: 2715791 - RNA, 20 nt, Human
guggaugccugguggcagcu

SEQ ID NO: 2715792 - RNA, 21 nt, Human
guggcagcugcgguccaccca

SEQ ID NO: 2715793 - RNA, 22 nt, Human
guggcagcugcgguccacccag

SEQ ID NO: 2715794 - RNA, 23 nt, Human
guggcagcugcgguccacccagg

SEQ ID NO: 2715795 - RNA, 12 nt, Human
guggcagcugcu

SEQ ID NO: 2715796 - RNA, 13 nt, Human
guggcagcugcuu

SEQ ID NO: 2715797 - RNA, 19 nt, Human
guggcagcugcuuuugucu

SEQ ID NO: 2715798 - RNA, 19 nt, Human
guggcagugggagcugccu

SEQ ID NO: 2715799 - RNA, 21 nt, Human
guggcagugggagcugccugu

SEQ ID NO: 2715800 - RNA, 17 nt, Human
guggaguucaucuugaa

SEQ ID NO: 2715801 - RNA, 16 nt, Human
guggaugccugguggc

SEQ ID NO: 2715802 - RNA, 18 nt, Human
guggaugccugguggcag

SEQ ID NO: 2715803 - RNA, 20 nt, Human
guggagaagcggcuggcagc

SEQ ID NO: 2715804 - RNA, 17 nt, Human
ucaaacauauauaacaa

SEQ ID NO: 2715805 - RNA, 22 nt, Human
ucaaacagucucaggaaaucaa

SEQ ID NO: 2715806 - RNA, 16 nt, Human
ucaaauccuugaagau

SEQ ID NO: 2715807 - RNA, 15 nt, Human
ucaaauccuugaaga

SEQ ID NO: 2715808 - RNA, 19 nt, Human
ucaaauaugcaaagcacug

SEQ ID NO: 2715809 - RNA, 18 nt, Human
ucaaauaugcaaagcacu

SEQ ID NO: 2715810 - RNA, 17 nt, Human
ucaaauaugcaaagcac

SEQ ID NO: 2715811 - RNA, 16 nt, Human
ucaaauaugcaaagca

SEQ ID NO: 2715812 - RNA, 12 nt, Human
ucaaagagguuu

SEQ ID NO: 2715813 - RNA, 23 nt, Human
ucaaagagguuuuaaaaaaaucc

SEQ ID NO: 2715814 - RNA, 20 nt, Human
ucaaagagagaaaauaaaga

SEQ ID NO: 2715815 - RNA, 15 nt, Human
ucaaagagagaaaau

SEQ ID NO: 2715816 - RNA, 22 nt, Human
ucaacuccaaacugacucuuaa

SEQ ID NO: 2715817 - RNA, 20 nt, Human
ucaacucuccuccagaguca

SEQ ID NO: 2715818 - RNA, 16 nt, Human
ucaaccuccugggcua

SEQ ID NO: 2715819 - RNA, 20 nt, Human
ucaaccccuucgcuccugug

SEQ ID NO: 2715820 - RNA, 15 nt, Human
ucaaccuccugggcu

SEQ ID NO: 2715821 - RNA, 18 nt, Human
ucaaccccuucgcuccug

SEQ ID NO: 2715822 - RNA, 19 nt, Human
ucaaccccuucgcuccugu

SEQ ID NO: 2715823 - RNA, 17 nt, Human
ucaagcgauucuucugc

SEQ ID NO: 2715824 - RNA, 12 nt, Human
ucaagccaccaa

SEQ ID NO: 2715825 - RNA, 20 nt, Human
ucaagccaccaacauacucc

SEQ ID NO: 2715826 - RNA, 21 nt, Human
ucaagcgauucuucugcuuca

SEQ ID NO: 2715827 - RNA, 18 nt, Human
ucaagcgauucuucugcu

SEQ ID NO: 2715828 - RNA, 19 nt, Human
ucaagcgauucuucugcuu

SEQ ID NO: 2715829 - RNA, 13 nt, Human
ucaaggauccuga

SEQ ID NO: 2715830 - RNA, 14 nt, Human
ucaaggauccugag

SEQ ID NO: 2715831 - RNA, 15 nt, Human
ucaaggauccugagc

SEQ ID NO: 2715832 - RNA, 16 nt, Human
ucaaggauccugagcc

SEQ ID NO: 2715833 - RNA, 17 nt, Human
ucaaggauccugagcca

SEQ ID NO: 2715834 - RNA, 13 nt, Human
ucaauaaaaaauu

SEQ ID NO: 2715835 - RNA, 16 nt, Human
ucaauaaaaaauuaug

SEQ ID NO: 2715836 - RNA, 14 nt, Human
ucaauaaaaaauua

SEQ ID NO: 2715837 - RNA, 12 nt, Human
ucacauuuaaau

SEQ ID NO: 2715838 - RNA, 17 nt, Human
ucacauuggaaacaagu

SEQ ID NO: 2715839 - RNA, 18 nt, Human
ucacauugguguuguacu

SEQ ID NO: 2715840 - RNA, 21 nt, Human
ucaccaaaucagcugcuacua

SEQ ID NO: 2715841 - RNA, 14 nt, Human
ucacauuuauucug

SEQ ID NO: 2715842 - RNA, 17 nt, Human
ucaccaacgucugugcc

SEQ ID NO: 2715843 - RNA, 18 nt, Human
ucaccaacgucugugcca

SEQ ID NO: 2715844 - RNA, 18 nt, Human
ucacccgcuaagagggag

SEQ ID NO: 2715845 - RNA, 16 nt, Human
ucaccacaugugcaca

SEQ ID NO: 2715846 - RNA, 13 nt, Human
ucaccaagcccag

SEQ ID NO: 2715847 - RNA, 22 nt, Human
ucaccgaaaacguggcugcuuc

SEQ ID NO: 2715848 - RNA, 23 nt, Human
ucaccgaaaacguggcugcuuca

SEQ ID NO: 2715849 - RNA, 15 nt, Human
ucaccgaaaacgugg

SEQ ID NO: 2715850 - RNA, 19 nt, Human
ucaccgaaaacguggcugc

SEQ ID NO: 2715851 - RNA, 20 nt, Human
ucaccgaaaacguggcugcu

SEQ ID NO: 2715852 - RNA, 21 nt, Human
ucaccgaaaacguggcugcuu

SEQ ID NO: 2715853 - RNA, 19 nt, Human
ucacccgcuaagagggagg

SEQ ID NO: 2715854 - RNA, 12 nt, Human
ucacccuuuucu

SEQ ID NO: 2715855 - RNA, 14 nt, Human
ucaccgaaaacgug

SEQ ID NO: 2715856 - RNA, 14 nt, Human
ucaauaaaauccau

SEQ ID NO: 2715857 - RNA, 19 nt, Human
ucaauaaaaaauuaugaca

SEQ ID NO: 2715858 - RNA, 14 nt, Human
ucacauuggaaaca

SEQ ID NO: 2715859 - RNA, 20 nt, Human
ucacauuccugaacaggaua

SEQ ID NO: 2715860 - RNA, 15 nt, Human
ucacacacuuuggcu

SEQ ID NO: 2715861 - RNA, 22 nt, Human
ucacacaugagcaucaggccag

SEQ ID NO: 2715862 - RNA, 23 nt, Human
ucacacaugagcaucaggccagg

SEQ ID NO: 2715863 - RNA, 17 nt, Human
uauuguuuaaaaucauu

SEQ ID NO: 2715864 - RNA, 16 nt, Human
uauuguuuaaaaucau

SEQ ID NO: 2715865 - RNA, 15 nt, Human
uauuguuuaaaauca

SEQ ID NO: 2715866 - RNA, 23 nt, Human
uauugugcgcuaaacuuuucuga

SEQ ID NO: 2715867 - RNA, 22 nt, Human
uauugugcgcuaaacuuuucug

SEQ ID NO: 2715868 - RNA, 19 nt, Human
uauugugcgcuaaacuuuu

SEQ ID NO: 2715869 - RNA, 23 nt, Human
uauugcugauggugcaaugaccu

SEQ ID NO: 2715870 - RNA, 22 nt, Human
uauugcugauggugcaaugacc

SEQ ID NO: 2715871 - RNA, 13 nt, Human
uauugcccacgcu

SEQ ID NO: 2715872 - RNA, 14 nt, Human
uauugcccacgcug

SEQ ID NO: 2715873 - RNA, 15 nt, Human
uauugcccacgcugg

SEQ ID NO: 2715874 - RNA, 20 nt, Human
uauugauaugcuuauacacu

SEQ ID NO: 2715875 - RNA, 23 nt, Human
uauugauaaguucauacauugua

SEQ ID NO: 2715876 - RNA, 14 nt, Human
uauugauaaguuca

SEQ ID NO: 2715877 - RNA, 16 nt, Human
uauugauaaguucaua

SEQ ID NO: 2715878 - RNA, 14 nt, Human
uauuuauuacugua

SEQ ID NO: 2715879 - RNA, 22 nt, Human
uauuuauuaaaugcccagcccc

SEQ ID NO: 2715880 - RNA, 13 nt, Human
uauuucuaugaaa

SEQ ID NO: 2715881 - RNA, 13 nt, Human
uauuuauuacugu

SEQ ID NO: 2715882 - RNA, 14 nt, Human
uauuucuaugaaau

SEQ ID NO: 2715883 - RNA, 15 nt, Human
uauuucuaugaaaua

SEQ ID NO: 2715884 - RNA, 20 nt, Human
uauuguuuaaaaucauuucu

SEQ ID NO: 2715885 - RNA, 17 nt, Human
uauuuaugggauccugg

SEQ ID NO: 2715886 - RNA, 16 nt, Human
uauuauguuaaaacug

SEQ ID NO: 2715887 - RNA, 22 nt, Human
uauuauguaaaucccauuauuc

SEQ ID NO: 2715888 - RNA, 15 nt, Human
uauuauguaaauccc

SEQ ID NO: 2715889 - RNA, 12 nt, Human
uauuauguaaau

SEQ ID NO: 2715890 - RNA, 12 nt, Human
uauuauguguuu

SEQ ID NO: 2715891 - RNA, 12 nt, Human
uauuaugaaacu

SEQ ID NO: 2715892 - RNA, 22 nt, Human
uauuaugaaacuuguguaaaua

SEQ ID NO: 2715893 - RNA, 21 nt, Human
uauuaugaaacuuguguaaau

SEQ ID NO: 2715894 - RNA, 20 nt, Human
uauuaugaaacuuguguaaa

SEQ ID NO: 2715895 - RNA, 17 nt, Human
uauuauauuuacaaaug

SEQ ID NO: 2715896 - RNA, 14 nt, Human
uauuauaccuuuuu

SEQ ID NO: 2715897 - RNA, 13 nt, Human
uauuauaccuuuu

SEQ ID NO: 2715898 - RNA, 12 nt, Human
uauuauaccuuu

SEQ ID NO: 2715899 - RNA, 14 nt, Human
uauuaaggaagaca

SEQ ID NO: 2715900 - RNA, 16 nt, Human
uauuaagcauauauuu

SEQ ID NO: 2715901 - RNA, 19 nt, Human
uauguuagugcaaauuguc

SEQ ID NO: 2715902 - RNA, 12 nt, Human
uauguuaaaacu

SEQ ID NO: 2715903 - RNA, 19 nt, Human
uauggaggcuuugcauaga

SEQ ID NO: 2715904 - RNA, 22 nt, Human
uauguucuuaguggauguucug

SEQ ID NO: 2715905 - RNA, 21 nt, Human
uauguugcccaggcaggucuu

SEQ ID NO: 2715906 - RNA, 16 nt, Human
uauuaagaaagacuau

SEQ ID NO: 2715907 - RNA, 15 nt, Human
uauuaaaugcccagc

SEQ ID NO: 2715908 - RNA, 17 nt, Human
uauuaaaugcccagccc

SEQ ID NO: 2715909 - RNA, 19 nt, Human
uauuaaaugcccagccccu

SEQ ID NO: 2715910 - RNA, 17 nt, Human
uauccuuucuaacaaaa

SEQ ID NO: 2715911 - RNA, 16 nt, Human
uaucuaaauguugaaa

SEQ ID NO: 2715912 - RNA, 19 nt, Human
uauauguuuuaagaggcag

SEQ ID NO: 2715913 - RNA, 22 nt, Human
uaucugaggaauucuguauaga

SEQ ID NO: 2715914 - RNA, 21 nt, Human
uaucugaggaauucuguauag

SEQ ID NO: 2715915 - RNA, 19 nt, Human
uaucugaggaauucuguau

SEQ ID NO: 2715916 - RNA, 18 nt, Human
uaucugaggaauucugua

SEQ ID NO: 2715917 - RNA, 16 nt, Human
uaucugaggaauucug

SEQ ID NO: 2715918 - RNA, 17 nt, Human
uaucugaggaauucugu

SEQ ID NO: 2715919 - RNA, 16 nt, Human
uaucgucacugcuuaa

SEQ ID NO: 2715920 - RNA, 21 nt, Human
uaucuaauauguaacaagcca

SEQ ID NO: 2715921 - RNA, 23 nt, Human
uaugaauuacauuuguauaaaau

SEQ ID NO: 2715922 - RNA, 17 nt, Human
uaugaauuacauuugua

SEQ ID NO: 2715923 - RNA, 22 nt, Human
uaugacacaugcaaggucauuu

SEQ ID NO: 2715924 - RNA, 12 nt, Human
uaugacacaugc

SEQ ID NO: 2715925 - RNA, 23 nt, Human
uaugacauaaaaacaacuuuaua

SEQ ID NO: 2715926 - RNA, 19 nt, Human
uaugacauaaaaacaacuu

SEQ ID NO: 2715927 - RNA, 22 nt, Human
uaugacauaaaaacaacuuuau

SEQ ID NO: 2715928 - RNA, 20 nt, Human
uaucugucauuugagcaggg

SEQ ID NO: 2715929 - RNA, 21 nt, Human
uaucugucauuugagcagggc

SEQ ID NO: 2715930 - RNA, 23 nt, Human
uaucugucauuugagcagggcuc

SEQ ID NO: 2715931 - RNA, 12 nt, Human
uaugcaaagcac

SEQ ID NO: 2715932 - RNA, 14 nt, Human
uaugcaaagcacug

SEQ ID NO: 2715933 - RNA, 13 nt, Human
uaugcaaagcacu

SEQ ID NO: 2715934 - RNA, 15 nt, Human
uaugcaaagcacuga

SEQ ID NO: 2715935 - RNA, 18 nt, Human
uaugcaaucaaaucugcu

SEQ ID NO: 2715936 - RNA, 14 nt, Human
uaugcacacauuuu

SEQ ID NO: 2715937 - RNA, 13 nt, Human
uaugcacacauuu

SEQ ID NO: 2715938 - RNA, 16 nt, Human
uaugauucccagccag

SEQ ID NO: 2715939 - RNA, 21 nt, Human
uaugauucaaaugucuauaaa

SEQ ID NO: 2715940 - RNA, 16 nt, Human
uaugauucaaaugucu

SEQ ID NO: 2715941 - RNA, 17 nt, Human
uaugacuccagaauuuc

SEQ ID NO: 2715942 - RNA, 23 nt, Human
uaugacuccagaauuucccaaag

SEQ ID NO: 2715943 - RNA, 16 nt, Human
uaugacuccagaauuu

SEQ ID NO: 2715944 - RNA, 15 nt, Human
uaugcuucuguuuua

SEQ ID NO: 2715945 - RNA, 16 nt, Human
uaugcuucuguuuuau

SEQ ID NO: 2715946 - RNA, 22 nt, Human
uaugcuuauacacuuacacuuu

SEQ ID NO: 2715947 - RNA, 18 nt, Human
uaugcaugaaguaauaug

SEQ ID NO: 2715948 - RNA, 13 nt, Human
uaugcaugaagua

SEQ ID NO: 2715949 - RNA, 17 nt, Human
uauggacaaugacccag

SEQ ID NO: 2715950 - RNA, 19 nt, Human
uauggaacacucugagacu

SEQ ID NO: 2715951 - RNA, 13 nt, Human
uauggaacacucu

SEQ ID NO: 2715952 - RNA, 16 nt, Human
uauggaacacucugag

SEQ ID NO: 2715953 - RNA, 17 nt, Human
uauggaacacucugaga

SEQ ID NO: 2715954 - RNA, 18 nt, Human
uauggaacacucugagac

SEQ ID NO: 2715955 - RNA, 13 nt, Human
uauaugcuucugu

SEQ ID NO: 2715956 - RNA, 21 nt, Human
uauaugcucugcauguuacau

SEQ ID NO: 2715957 - RNA, 20 nt, Human
uauaugcucugcauguuaca

SEQ ID NO: 2715958 - RNA, 13 nt, Human
uauauaacaaugc

SEQ ID NO: 2715959 - RNA, 21 nt, Human
uauaucuauauuuuacauaaa

SEQ ID NO: 2715960 - RNA, 18 nt, Human
uauaucugaggaauucug

SEQ ID NO: 2715961 - RNA, 22 nt, Human
uauaucugaggaauucuguaua

SEQ ID NO: 2715962 - RNA, 21 nt, Human
uauaucugaggaauucuguau

SEQ ID NO: 2715963 - RNA, 20 nt, Human
uauaucugaggaauucugua

SEQ ID NO: 2715964 - RNA, 19 nt, Human
uauaucugaggaauucugu

SEQ ID NO: 2715965 - RNA, 12 nt, Human
uauaauuaacau

SEQ ID NO: 2715966 - RNA, 14 nt, Human
uauaauuaacaugu

SEQ ID NO: 2715967 - RNA, 13 nt, Human
uauaauuaacaug

SEQ ID NO: 2715968 - RNA, 19 nt, Human
uauaauuaacauguuaaac

SEQ ID NO: 2715969 - RNA, 18 nt, Human
uauaauuaacauguuaaa

SEQ ID NO: 2715970 - RNA, 16 nt, Human
uauaauuaacauguua

SEQ ID NO: 2715971 - RNA, 15 nt, Human
uauaauuaacauguu

SEQ ID NO: 2715972 - RNA, 22 nt, Human
uauaauuaacauguuaaaccau

SEQ ID NO: 2715973 - RNA, 18 nt, Human
uauaaacuuuaccuuuuu

SEQ ID NO: 2715974 - RNA, 23 nt, Human
uaggugacagagugagacucugu

SEQ ID NO: 2715975 - RNA, 18 nt, Human
uaguauuucuaugaaaua

SEQ ID NO: 2715976 - RNA, 19 nt, Human
uaguauuucuaugaaauau

SEQ ID NO: 2715977 - RNA, 16 nt, Human
uaguauuucuaugaaa

SEQ ID NO: 2715978 - RNA, 15 nt, Human
uaguaugaaauuaua

SEQ ID NO: 2715979 - RNA, 23 nt, Human
uaguaugaaauuauauaaguauu

SEQ ID NO: 2715980 - RNA, 13 nt, Human
uaguaugaaauua

SEQ ID NO: 2715981 - RNA, 13 nt, Human
uagucaaauugug

SEQ ID NO: 2715982 - RNA, 14 nt, Human
uagucaaauugugu

SEQ ID NO: 2715983 - RNA, 14 nt, Human
uagugcaaauuguc

SEQ ID NO: 2715984 - RNA, 15 nt, Human
uagugcaaauuguca

SEQ ID NO: 2715985 - RNA, 18 nt, Human
uaggccuggccagaugca

SEQ ID NO: 2715986 - RNA, 15 nt, Human
uaggccuggccagau

SEQ ID NO: 2715987 - RNA, 16 nt, Human
uaggucagugcaaaua

SEQ ID NO: 2715988 - RNA, 11 nt, Human
uagggaaaaac

SEQ ID NO: 2715989 - RNA, 19 nt, Human
uagggaaaaaccagcgugu

SEQ ID NO: 2715990 - RNA, 20 nt, Human
uagggaaaaaccagcgugug

SEQ ID NO: 2715991 - RNA, 21 nt, Human
uagggaaaaaccagcguguga

SEQ ID NO: 2715992 - RNA, 17 nt, Human
uccaaagaaauguaagg

SEQ ID NO: 2715993 - RNA, 14 nt, Human
uccaaagaaaugua

SEQ ID NO: 2715994 - RNA, 13 nt, Human
uccaaaguacacu

SEQ ID NO: 2715995 - RNA, 22 nt, Human
uccaaaaagauuuucagaaaau

SEQ ID NO: 2715996 - RNA, 16 nt, Human
uccaaaccaaauaaaa

SEQ ID NO: 2715997 - RNA, 20 nt, Human
ucaguguacauggaauaaca

SEQ ID NO: 2715998 - RNA, 14 nt, Human
ucaucauccuaagc

SEQ ID NO: 2715999 - RNA, 19 nt, Human
ucaucuugaauuguaagga

SEQ ID NO: 2716000 - RNA, 18 nt, Human
ucauccacugugccaugu

SEQ ID NO: 2716001 - RNA, 14 nt, Human
ucauccacugugcc

SEQ ID NO: 2716002 - RNA, 17 nt, Human
ucauccacugugccaug

SEQ ID NO: 2716003 - RNA, 20 nt, Human
ucauggaacgcguugaaauu

SEQ ID NO: 2716004 - RNA, 22 nt, Human
ucauggaacgcguugaaauugu

SEQ ID NO: 2716005 - RNA, 21 nt, Human
ucauggaacgcguugaaauug

SEQ ID NO: 2716006 - RNA, 17 nt, Human
ucaugcuguucaugaaa

SEQ ID NO: 2716007 - RNA, 20 nt, Human
ucagguggggcagcuugagg

SEQ ID NO: 2716008 - RNA, 21 nt, Human
ucagucugauucccaagcucu

SEQ ID NO: 2716009 - RNA, 22 nt, Human
ucagucugauucccaagcucug

SEQ ID NO: 2716010 - RNA, 23 nt, Human
ucagucugauucccaagcucugc

SEQ ID NO: 2716011 - RNA, 23 nt, Human
ucaggugagaagcagaggaagga

SEQ ID NO: 2716012 - RNA, 16 nt, Human
ucaggugauccaccca

SEQ ID NO: 2716013 - RNA, 23 nt, Human
ucaggugauccacccaccucagc

SEQ ID NO: 2716014 - RNA, 18 nt, Human
ucagguggggcagcuuga

SEQ ID NO: 2716015 - RNA, 19 nt, Human
ucagguggggcagcuugag

SEQ ID NO: 2716016 - RNA, 21 nt, Human
ucaggccugggggcugggcag

SEQ ID NO: 2716017 - RNA, 23 nt, Human
ucagcuccagcucaccagcccca

SEQ ID NO: 2716018 - RNA, 24 nt, Human
ucagcuccagcucaccagccccag

SEQ ID NO: 2716019 - RNA, 23 nt, Human
ucagcucugcaagaauugaagca

SEQ ID NO: 2716020 - RNA, 23 nt, Human
ucaggaagcucagggccuggcuc

SEQ ID NO: 2716021 - RNA, 16 nt, Human
uccaaaguacacuguu

SEQ ID NO: 2716022 - RNA, 14 nt, Human
uccaaaguacacug

SEQ ID NO: 2716023 - RNA, 19 nt, Human
uccacuuucuagccagagg

SEQ ID NO: 2716024 - RNA, 20 nt, Human
uccacuuucuagccagagga

SEQ ID NO: 2716025 - RNA, 21 nt, Human
uccacuuucuagccagaggag

SEQ ID NO: 2716026 - RNA, 19 nt, Human
uccaggggugggacacccu

SEQ ID NO: 2716027 - RNA, 20 nt, Human
uccaggggugggacacccug

SEQ ID NO: 2716028 - RNA, 12 nt, Human
uccaggagcagc

SEQ ID NO: 2716029 - RNA, 13 nt, Human
uccaggagcagcc

SEQ ID NO: 2716030 - RNA, 14 nt, Human
uccaggagcagcca

SEQ ID NO: 2716031 - RNA, 15 nt, Human
uccaggagcagccac

SEQ ID NO: 2716032 - RNA, 14 nt, Human
uccagcagauuauu

SEQ ID NO: 2716033 - RNA, 16 nt, Human
uccagcagauuauuca

SEQ ID NO: 2716034 - RNA, 15 nt, Human
uccagcagauuauuc

SEQ ID NO: 2716035 - RNA, 20 nt, Human
uccaugggccauaugaaaag

SEQ ID NO: 2716036 - RNA, 15 nt, Human
uccauacauuugugu

SEQ ID NO: 2716037 - RNA, 14 nt, Human
uccauagagagcaa

SEQ ID NO: 2716038 - RNA, 15 nt, Human
uccauagagagcaag

SEQ ID NO: 2716039 - RNA, 19 nt, Human
uccagguagagggugugua

SEQ ID NO: 2716040 - RNA, 20 nt, Human
uccagguuuaagcuguuacu

SEQ ID NO: 2716041 - RNA, 20 nt, Human
uccaguuuuguuuggaccaa

SEQ ID NO: 2716042 - RNA, 12 nt, Human
uccauacauuug

SEQ ID NO: 2716043 - RNA, 17 nt, Human
uccaguuuuguuuggac

SEQ ID NO: 2716044 - RNA, 15 nt, Human
uccaguuuuguuugg

SEQ ID NO: 2716045 - RNA, 20 nt, Human
ucccaugagccucagcaucc

SEQ ID NO: 2716046 - RNA, 14 nt, Human
ucccauuauucaaa

SEQ ID NO: 2716047 - RNA, 13 nt, Human
ucccauuauucaa

SEQ ID NO: 2716048 - RNA, 13 nt, Human
uccccagauugca

SEQ ID NO: 2716049 - RNA, 18 nt, Human
uccccagauugcaacagg

SEQ ID NO: 2716050 - RNA, 19 nt, Human
ucccauuauucaaaguugc

SEQ ID NO: 2716051 - RNA, 18 nt, Human
ucccauuauucaaaguug

SEQ ID NO: 2716052 - RNA, 16 nt, Human
ucccauuauucaaagu

SEQ ID NO: 2716053 - RNA, 19 nt, Human
uccccagauugcaacaggc

SEQ ID NO: 2716054 - RNA, 20 nt, Human
uccccagauugcaacaggcu

SEQ ID NO: 2716055 - RNA, 22 nt, Human
uccccagauugcaacaggcugg

SEQ ID NO: 2716056 - RNA, 23 nt, Human
uccccagauugcaacaggcuggg

SEQ ID NO: 2716057 - RNA, 20 nt, Human
uccccagcaagugagagcug

SEQ ID NO: 2716058 - RNA, 21 nt, Human
uccccagcaagugagagcugg

SEQ ID NO: 2716059 - RNA, 22 nt, Human
uccccagcaagugagagcuggg

SEQ ID NO: 2716060 - RNA, 14 nt, Human
uccccaggaggcca

SEQ ID NO: 2716061 - RNA, 17 nt, Human
ucccccagccccauccu

SEQ ID NO: 2716062 - RNA, 15 nt, Human
uccccaggaggccag

SEQ ID NO: 2716063 - RNA, 16 nt, Human
uccccaggaggccagc

SEQ ID NO: 2716064 - RNA, 22 nt, Human
ucccccagccccauccucugua

SEQ ID NO: 2716065 - RNA, 20 nt, Human
ucccccagccccauccucug

SEQ ID NO: 2716066 - RNA, 21 nt, Human
ucccccagccccauccucugu

SEQ ID NO: 2716067 - RNA, 23 nt, Human
ucccaggcauuccccaggaggcc

SEQ ID NO: 2716068 - RNA, 24 nt, Human
ucccaggcauuccccaggaggcca

SEQ ID NO: 2716069 - RNA, 23 nt, Human
ucccagcugugcucuggacaggc

SEQ ID NO: 2716070 - RNA, 21 nt, Human
ucccagcugugcucuggacag

SEQ ID NO: 2716071 - RNA, 22 nt, Human
ucccagcugugcucuggacagg

SEQ ID NO: 2716072 - RNA, 15 nt, Human
ucccaucuuccaagg

SEQ ID NO: 2716073 - RNA, 21 nt, Human
ucccaucugugaaaggaaaga

SEQ ID NO: 2716074 - RNA, 18 nt, Human
ucccaugagccucagcau

SEQ ID NO: 2716075 - RNA, 19 nt, Human
ucccaugagccucagcauc

SEQ ID NO: 2716076 - RNA, 13 nt, Human
ucccaccuuggcu

SEQ ID NO: 2716077 - RNA, 16 nt, Human
ucccaccuuggcugca

SEQ ID NO: 2716078 - RNA, 17 nt, Human
ucccaccuuggcugcag

SEQ ID NO: 2716079 - RNA, 20 nt, Human
ucccagcugugcucuggaca

SEQ ID NO: 2716080 - RNA, 18 nt, Human
ucccaccuuggcugcagg

SEQ ID NO: 2716081 - RNA, 22 nt, Human
ucccaccucucucacuccuuga

SEQ ID NO: 2716082 - RNA, 20 nt, Human
uccaugugggcuaguugggc

SEQ ID NO: 2716083 - RNA, 18 nt, Human
uccucauuagcauuuugc

SEQ ID NO: 2716084 - RNA, 10 nt, Human
uccuccaggu

SEQ ID NO: 2716085 - RNA, 12 nt, Human
uccucccaccuc

SEQ ID NO: 2716086 - RNA, 23 nt, Human
uccuagugaaagaggcagcuuga

SEQ ID NO: 2716087 - RNA, 14 nt, Human
uccuagugaaagag

SEQ ID NO: 2716088 - RNA, 23 nt, Human
uccuauauuguuuucaguguaca

SEQ ID NO: 2716089 - RNA, 20 nt, Human
uccuaucaccugucuugccu

SEQ ID NO: 2716090 - RNA, 21 nt, Human
uccuauauuguuuucagugua

SEQ ID NO: 2716091 - RNA, 15 nt, Human
ucccccuuccaugga

SEQ ID NO: 2716092 - RNA, 16 nt, Human
ucccuuccucuuucca

SEQ ID NO: 2716093 - RNA, 15 nt, Human
ucccuuccucuuucc

SEQ ID NO: 2716094 - RNA, 16 nt, Human
uccgcuuucuacccag

SEQ ID NO: 2716095 - RNA, 21 nt, Human
uccuaagcuauucaguaauaa

SEQ ID NO: 2716096 - RNA, 20 nt, Human
uccuaagcuauucaguaaua

SEQ ID NO: 2716097 - RNA, 18 nt, Human
uccgcuuucuacccagcg

SEQ ID NO: 2716098 - RNA, 20 nt, Human
uccgcuuucuacccagcgag

SEQ ID NO: 2716099 - RNA, 14 nt, Human
uccgccucuugggu

SEQ ID NO: 2716100 - RNA, 13 nt, Human
uccugccaggcau

SEQ ID NO: 2716101 - RNA, 14 nt, Human
uccugccaggcaug

SEQ ID NO: 2716102 - RNA, 21 nt, Human
uccugagccagauuucacucu

SEQ ID NO: 2716103 - RNA, 23 nt, Human
uccuggcacccggccccugcugg

SEQ ID NO: 2716104 - RNA, 13 nt, Human
uccuggcacugcu

SEQ ID NO: 2716105 - RNA, 16 nt, Human
uccuggcacugcuucc

SEQ ID NO: 2716106 - RNA, 12 nt, Human
uccuggccucaa

SEQ ID NO: 2716107 - RNA, 22 nt, Human
uccuguaccucuugagccuuga

SEQ ID NO: 2716108 - RNA, 13 nt, Human
uccuguagcccua

SEQ ID NO: 2716109 - RNA, 11 nt, Human
uccuguagccc

SEQ ID NO: 2716110 - RNA, 20 nt, Human
uccugcccuuaccugccagg

SEQ ID NO: 2716111 - RNA, 17 nt, Human
uccugcccuuaccugcc

SEQ ID NO: 2716112 - RNA, 14 nt, Human
uccuggaguucugg

SEQ ID NO: 2716113 - RNA, 18 nt, Human
ucuaugaaauauuauguu

SEQ ID NO: 2716114 - RNA, 14 nt, Human
ucuaugacacaugc

SEQ ID NO: 2716115 - RNA, 17 nt, Human
ucuaugacacaugcaag

SEQ ID NO: 2716116 - RNA, 21 nt, Human
ucuaggaagacuuuggaaaga

SEQ ID NO: 2716117 - RNA, 19 nt, Human
ucuaggaagacuuuggaaa

SEQ ID NO: 2716118 - RNA, 15 nt, Human
ucuaggaagacuuug

SEQ ID NO: 2716119 - RNA, 16 nt, Human
ucuaggaagacuuugg

SEQ ID NO: 2716120 - RNA, 15 nt, Human
ucuacagaggccaug

SEQ ID NO: 2716121 - RNA, 16 nt, Human
ucuacagaggccaugg

SEQ ID NO: 2716122 - RNA, 14 nt, Human
ucuaccuuccugca

SEQ ID NO: 2716123 - RNA, 12 nt, Human
ucggagaagagc

SEQ ID NO: 2716124 - RNA, 16 nt, Human
ucggagaagagcuguu

SEQ ID NO: 2716125 - RNA, 14 nt, Human
ucggagaagagcug

SEQ ID NO: 2716126 - RNA, 13 nt, Human
ucgugacaacacu

SEQ ID NO: 2716127 - RNA, 20 nt, Human
ucuaaaggcuaccuuuguau

SEQ ID NO: 2716128 - RNA, 19 nt, Human
ucuaaaggcuaccuuugua

SEQ ID NO: 2716129 - RNA, 17 nt, Human
ucuaaaggcuaccuuug

SEQ ID NO: 2716130 - RNA, 18 nt, Human
ucuaaaggcuaccuuugu

SEQ ID NO: 2716131 - RNA, 19 nt, Human
ucuaugggacucaaugcac

SEQ ID NO: 2716132 - RNA, 12 nt, Human
ucuaugggacuc

SEQ ID NO: 2716133 - RNA, 13 nt, Human
ucuaugggacuca

SEQ ID NO: 2716134 - RNA, 18 nt, Human
ucucauacucaccucacc

SEQ ID NO: 2716135 - RNA, 16 nt, Human
ucucauacucaccuca

SEQ ID NO: 2716136 - RNA, 13 nt, Human
ucuccacccugcu

SEQ ID NO: 2716137 - RNA, 17 nt, Human
ucuccacccugcucucc

SEQ ID NO: 2716138 - RNA, 14 nt, Human
ucuccacccugcuc

SEQ ID NO: 2716139 - RNA, 16 nt, Human
ucuccacccugcucuc

SEQ ID NO: 2716140 - RNA, 14 nt, Human
ucuccaccugccag

SEQ ID NO: 2716141 - RNA, 15 nt, Human
ucuccaccugccagg

SEQ ID NO: 2716142 - RNA, 16 nt, Human
ucuccaccugccaggg

SEQ ID NO: 2716143 - RNA, 22 nt, Human
ucuccaccugccagggacagag

SEQ ID NO: 2716144 - RNA, 17 nt, Human
ucuccaccugccaggga

SEQ ID NO: 2716145 - RNA, 19 nt, Human
ucuccaccugccagggaca

SEQ ID NO: 2716146 - RNA, 22 nt, Human
ucuccagccccuggaugcagcc

SEQ ID NO: 2716147 - RNA, 16 nt, Human
ucuccagccccuggau

SEQ ID NO: 2716148 - RNA, 18 nt, Human
ucuccagccccuggaugc

SEQ ID NO: 2716149 - RNA, 12 nt, Human
ucuccagccccu

SEQ ID NO: 2716150 - RNA, 13 nt, Human
ucuccagccccug

SEQ ID NO: 2716151 - RNA, 14 nt, Human
ucuccagccccugg

SEQ ID NO: 2716152 - RNA, 15 nt, Human
ucuccagccccugga

SEQ ID NO: 2716153 - RNA, 23 nt, Human
ucucccucagucuggcccuuccu

SEQ ID NO: 2716154 - RNA, 18 nt, Human
ucucccucagucuggccc

SEQ ID NO: 2716155 - RNA, 12 nt, Human
ucucccccagcc

SEQ ID NO: 2716156 - RNA, 12 nt, Human
ugacaagcucac

SEQ ID NO: 2716157 - RNA, 15 nt, Human
ugacaagcucacaga

SEQ ID NO: 2716158 - RNA, 20 nt, Human
ugacaagcucacagaccuuu

SEQ ID NO: 2716159 - RNA, 18 nt, Human
ugacaaggauugcuacug

SEQ ID NO: 2716160 - RNA, 16 nt, Human
ugacagaauauguuuc

SEQ ID NO: 2716161 - RNA, 19 nt, Human
ugacagagugagacucugu

SEQ ID NO: 2716162 - RNA, 18 nt, Human
ugacagaggcagccccau

SEQ ID NO: 2716163 - RNA, 23 nt, Human
ugacagaggcagccccauucugc

SEQ ID NO: 2716164 - RNA, 14 nt, Human
ugacagagugagac

SEQ ID NO: 2716165 - RNA, 17 nt, Human
ugacagagugagacucu

SEQ ID NO: 2716166 - RNA, 13 nt, Human
ugacagaggcagc

SEQ ID NO: 2716167 - RNA, 20 nt, Human
ugacagacacaggcccggcu

SEQ ID NO: 2716168 - RNA, 23 nt, Human
ugacagacacaggcccggcucca

SEQ ID NO: 2716169 - RNA, 14 nt, Human
ugacagaggcagcc

SEQ ID NO: 2716170 - RNA, 15 nt, Human
ugacagaggcagccc

SEQ ID NO: 2716171 - RNA, 16 nt, Human
ugacagaggcagcccc

SEQ ID NO: 2716172 - RNA, 17 nt, Human
ugacagaggcagcccca

SEQ ID NO: 2716173 - RNA, 19 nt, Human
ugaccagcaccaucucucc

SEQ ID NO: 2716174 - RNA, 15 nt, Human
ugacaugucuuuucu

SEQ ID NO: 2716175 - RNA, 16 nt, Human
ugacaugggacauuug

SEQ ID NO: 2716176 - RNA, 17 nt, Human
ugacaugggacauuugc

SEQ ID NO: 2716177 - RNA, 17 nt, Human
ugacauagucuggcugu

SEQ ID NO: 2716178 - RNA, 16 nt, Human
ugacauagucuggcug

SEQ ID NO: 2716179 - RNA, 18 nt, Human
ugacaugggacauuugcu

SEQ ID NO: 2716180 - RNA, 13 nt, Human
ugacaugucuuuu

SEQ ID NO: 2716181 - RNA, 16 nt, Human
ugaccauucuccaccu

SEQ ID NO: 2716182 - RNA, 17 nt, Human
ugaccauucuccaccug

SEQ ID NO: 2716183 - RNA, 18 nt, Human
ugaccauucuccaccugc

SEQ ID NO: 2716184 - RNA, 19 nt, Human
ugaccauucuccaccugcc

SEQ ID NO: 2716185 - RNA, 13 nt, Human
ugaccgugaggcc

SEQ ID NO: 2716186 - RNA, 14 nt, Human
ugaccgugaggcca

SEQ ID NO: 2716187 - RNA, 16 nt, Human
ugaccgugaggccaga

SEQ ID NO: 2716188 - RNA, 20 nt, Human
ugaccgugaggccagagaca

SEQ ID NO: 2716189 - RNA, 11 nt, Human
ugaaguccaag

SEQ ID NO: 2716190 - RNA, 23 nt, Human
ugaagucagaucugccuaaggac

SEQ ID NO: 2716191 - RNA, 20 nt, Human
ugaagucagaucugccuaag

SEQ ID NO: 2716192 - RNA, 17 nt, Human
ugaaggccccgcccagg

SEQ ID NO: 2716193 - RNA, 13 nt, Human
ugaaguccaagca

SEQ ID NO: 2716194 - RNA, 18 nt, Human
ugaagauacugaaauaaa

SEQ ID NO: 2716195 - RNA, 16 nt, Human
ugaagauacugaaaua

SEQ ID NO: 2716196 - RNA, 15 nt, Human
ugaagauacugaaau

SEQ ID NO: 2716197 - RNA, 17 nt, Human
ugaacuccuggccucaa

SEQ ID NO: 2716198 - RNA, 14 nt, Human
ugaagauacugaaa

SEQ ID NO: 2716199 - RNA, 15 nt, Human
ugaaggccccgccca

SEQ ID NO: 2716200 - RNA, 16 nt, Human
ugaaggccccgcccag

SEQ ID NO: 2716201 - RNA, 22 nt, Human
ugaaggacauugcggacagcca

SEQ ID NO: 2716202 - RNA, 19 nt, Human
ugaaggacauugcggacag

SEQ ID NO: 2716203 - RNA, 20 nt, Human
ugaaggacauugcggacagc

SEQ ID NO: 2716204 - RNA, 15 nt, Human
ugaauuacauuugua

SEQ ID NO: 2716205 - RNA, 16 nt, Human
ugaauuacauuuguau

SEQ ID NO: 2716206 - RNA, 18 nt, Human
ugaauuacauuuguauaa

SEQ ID NO: 2716207 - RNA, 13 nt, Human
ugaauuaugaaac

SEQ ID NO: 2716208 - RNA, 17 nt, Human
ugaauuaugaaacuuuu

SEQ ID NO: 2716209 - RNA, 15 nt, Human
ugaauuaugaaacuu

SEQ ID NO: 2716210 - RNA, 15 nt, Human
ugaaagguacuucaa

SEQ ID NO: 2716211 - RNA, 16 nt, Human
ugaaagguacuucaaa

SEQ ID NO: 2716212 - RNA, 13 nt, Human
ugaaagggcccag

SEQ ID NO: 2716213 - RNA, 18 nt, Human
ugaaagaggcagcuugaa

SEQ ID NO: 2716214 - RNA, 18 nt, Human
ugaaagcccugagcuuuc

SEQ ID NO: 2716215 - RNA, 22 nt, Human
ugaaacaacaaauaggaauugu

SEQ ID NO: 2716216 - RNA, 14 nt, Human
ugaaacauuuuguc

SEQ ID NO: 2716217 - RNA, 13 nt, Human
ugaaaauuuugau

SEQ ID NO: 2716218 - RNA, 21 nt, Human
ugaaaauuuugauguuuuaag

SEQ ID NO: 2716219 - RNA, 19 nt, Human
ugaaaauuuugauguuuua

SEQ ID NO: 2716220 - RNA, 19 nt, Human
ugaaauggacuuuuguaca

SEQ ID NO: 2716221 - RNA, 16 nt, Human
ugaaauauugacuuuu

SEQ ID NO: 2716222 - RNA, 19 nt, Human
ugaacaguuguguuugaag

SEQ ID NO: 2716223 - RNA, 19 nt, Human
ugaaccacaucuugcucug

SEQ ID NO: 2716224 - RNA, 22 nt, Human
ugaaccaagaacuuuccaggaa

SEQ ID NO: 2716225 - RNA, 23 nt, Human
ugaaccacaucuugcucugcuga

SEQ ID NO: 2716226 - RNA, 17 nt, Human
ugaaccaccacacccag

SEQ ID NO: 2716227 - RNA, 20 nt, Human
ugaaccaccacacccagccc

SEQ ID NO: 2716228 - RNA, 16 nt, Human
ugaacuccuggccuca

SEQ ID NO: 2716229 - RNA, 17 nt, Human
ucuuucacauuuaaaua

SEQ ID NO: 2716230 - RNA, 23 nt, Human
ucuuucacccuuuucuguuugcu

SEQ ID NO: 2716231 - RNA, 21 nt, Human
ucuuguguguuuauugucaaa

SEQ ID NO: 2716232 - RNA, 16 nt, Human
ucuuguguguuuauug

SEQ ID NO: 2716233 - RNA, 23 nt, Human
ucuugcaauggcagccuuggcaa

SEQ ID NO: 2716234 - RNA, 16 nt, Human
ucucccuucauccuuc

SEQ ID NO: 2716235 - RNA, 20 nt, Human
ucuccucugcugcuggcugg

SEQ ID NO: 2716236 - RNA, 19 nt, Human
ucuugccuuuuucauuauu

SEQ ID NO: 2716237 - RNA, 15 nt, Human
ucuugccuuuuucau

SEQ ID NO: 2716238 - RNA, 17 nt, Human
ucuugccuuuuucauua

SEQ ID NO: 2716239 - RNA, 16 nt, Human
ucuugccuuuuucauu

SEQ ID NO: 2716240 - RNA, 19 nt, Human
ucuuuccacagaagcucca

SEQ ID NO: 2716241 - RNA, 14 nt, Human
ucuuuccaaaguac

SEQ ID NO: 2716242 - RNA, 13 nt, Human
ucuuuccaaagua

SEQ ID NO: 2716243 - RNA, 16 nt, Human
ucuuucagccaagaau

SEQ ID NO: 2716244 - RNA, 19 nt, Human
ucuuucagccaagaauucu

SEQ ID NO: 2716245 - RNA, 20 nt, Human
ucuuucagccaagaauucuu

SEQ ID NO: 2716246 - RNA, 21 nt, Human
ucuuucagccaagaauucuua

SEQ ID NO: 2716247 - RNA, 12 nt, Human
ucuuugccaagu

SEQ ID NO: 2716248 - RNA, 17 nt, Human
ucuuuggacacucacac

SEQ ID NO: 2716249 - RNA, 22 nt, Human
ugauguuuagaaacacaacuau

SEQ ID NO: 2716250 - RNA, 20 nt, Human
ugauguucuuucacccuuuu

SEQ ID NO: 2716251 - RNA, 13 nt, Human
ugauuauauguca

SEQ ID NO: 2716252 - RNA, 17 nt, Human
ugauuaugaauuacauu

SEQ ID NO: 2716253 - RNA, 19 nt, Human
ugauuaugaauuacauuug

SEQ ID NO: 2716254 - RNA, 21 nt, Human
ugauuaugaauuacauuugua

SEQ ID NO: 2716255 - RNA, 22 nt, Human
ugauuaugaauuacauuuguau

SEQ ID NO: 2716256 - RNA, 20 nt, Human
ugauucaacagguuuuccug

SEQ ID NO: 2716257 - RNA, 13 nt, Human
ugauucagacagc

SEQ ID NO: 2716258 - RNA, 14 nt, Human
ugauucagacagcu

SEQ ID NO: 2716259 - RNA, 15 nt, Human
ugauucagacagcug

SEQ ID NO: 2716260 - RNA, 16 nt, Human
ugauucagacagcugc

SEQ ID NO: 2716261 - RNA, 21 nt, Human
ugauucuucagcaaaaauauu

SEQ ID NO: 2716262 - RNA, 21 nt, Human
ugauucuccugccucagccuc

SEQ ID NO: 2716263 - RNA, 23 nt, Human
ugauucagacagcugccugggau

SEQ ID NO: 2716264 - RNA, 18 nt, Human
ugauucagacagcugccu

SEQ ID NO: 2716265 - RNA, 19 nt, Human
ugauucagacagcugccug

SEQ ID NO: 2716266 - RNA, 20 nt, Human
ugauucagacagcugccugg

SEQ ID NO: 2716267 - RNA, 21 nt, Human
ugauucagacagcugccuggg

SEQ ID NO: 2716268 - RNA, 16 nt, Human
ugauugugucucuugg

SEQ ID NO: 2716269 - RNA, 21 nt, Human
ugauuggaggggggagguggg

SEQ ID NO: 2716270 - RNA, 13 nt, Human
ugauuggaggggg

SEQ ID NO: 2716271 - RNA, 15 nt, Human
ugauggugguauguu

SEQ ID NO: 2716272 - RNA, 16 nt, Human
ugaugcuucuucagag

SEQ ID NO: 2716273 - RNA, 17 nt, Human
ugaugcuucuucagaga

SEQ ID NO: 2716274 - RNA, 14 nt, Human
ugauguguuuauuu

SEQ ID NO: 2716275 - RNA, 18 nt, Human
ugauguguuuauuuauag

SEQ ID NO: 2716276 - RNA, 16 nt, Human
ugauguguuaucucuu

SEQ ID NO: 2716277 - RNA, 20 nt, Human
ugaugcuacaggauuugaaa

SEQ ID NO: 2716278 - RNA, 23 nt, Human
ugaugcuacaggauuugaaauug

SEQ ID NO: 2716279 - RNA, 17 nt, Human
ugaucuuuaaaauacac

SEQ ID NO: 2716280 - RNA, 16 nt, Human
ugaucuuugcagacag

SEQ ID NO: 2716281 - RNA, 14 nt, Human
ugaucuuuaaaaua

SEQ ID NO: 2716282 - RNA, 20 nt, Human
ugaucuucuuuauaauucua

SEQ ID NO: 2716283 - RNA, 17 nt, Human
ugaucucucgugauuga

SEQ ID NO: 2716284 - RNA, 17 nt, Human
ugauccacccaccucag

SEQ ID NO: 2716285 - RNA, 18 nt, Human
ugauccacccaccucagc

SEQ ID NO: 2716286 - RNA, 19 nt, Human
ugauccacccaccucagcc

SEQ ID NO: 2716287 - RNA, 24 nt, Human
ugaucagcuuauugucuagugaaa

SEQ ID NO: 2716288 - RNA, 17 nt, Human
ugaucagcuuauugucu

SEQ ID NO: 2716289 - RNA, 13 nt, Human
ugauagcacagac

SEQ ID NO: 2716290 - RNA, 14 nt, Human
ugauagcacagacc

SEQ ID NO: 2716291 - RNA, 15 nt, Human
ugauagaggaagccu

SEQ ID NO: 2716292 - RNA, 13 nt, Human
ugauccaagcugg

SEQ ID NO: 2716293 - RNA, 14 nt, Human
ugauccaagcuggu

SEQ ID NO: 2716294 - RNA, 15 nt, Human
ugauccaagcugguc

SEQ ID NO: 2716295 - RNA, 16 nt, Human
ugauccacccaccuca

SEQ ID NO: 2716296 - RNA, 20 nt, Human
ugagacucgcgacaaugcaa

SEQ ID NO: 2716297 - RNA, 21 nt, Human
ugagacucgcgacaaugcaaa

SEQ ID NO: 2716298 - RNA, 22 nt, Human
ugagacucgcgacaaugcaaac

SEQ ID NO: 2716299 - RNA, 23 nt, Human
ugagacucgcgacaaugcaaacc

SEQ ID NO: 2716300 - RNA, 15 nt, Human
ugagaucaaaacggu

SEQ ID NO: 2716301 - RNA, 14 nt, Human
ugagaucagccugg

SEQ ID NO: 2716302 - RNA, 15 nt, Human
ugagaucagccuggg

SEQ ID NO: 2716303 - RNA, 12 nt, Human
ugagcagggcuc

SEQ ID NO: 2716304 - RNA, 13 nt, Human
ugagcagggcuca

SEQ ID NO: 2716305 - RNA, 14 nt, Human
ugagcagggcucag

SEQ ID NO: 2716306 - RNA, 15 nt, Human
ugagcagggcucagc

SEQ ID NO: 2716307 - RNA, 19 nt, Human
ugagacucgcgacaaugca

SEQ ID NO: 2716308 - RNA, 23 nt, Human
ugagacguuuuuggaagaguagu

SEQ ID NO: 2716309 - RNA, 20 nt, Human
ugaccucaggugauccaccc

SEQ ID NO: 2716310 - RNA, 21 nt, Human
ugaccucaggugauccaccca

SEQ ID NO: 2716311 - RNA, 20 nt, Human
ugagcaucaggccaggcccu

SEQ ID NO: 2716312 - RNA, 18 nt, Human
ugagcaucaggccaggcc

SEQ ID NO: 2716313 - RNA, 19 nt, Human
ugagcaucaggccaggccc

SEQ ID NO: 2716314 - RNA, 19 nt, Human
ugagcagggcucagcgggg

SEQ ID NO: 2716315 - RNA, 16 nt, Human
ugagcagggcucagcg

SEQ ID NO: 2716316 - RNA, 17 nt, Human
ugagcagggcucagcgg

SEQ ID NO: 2716317 - RNA, 16 nt, Human
ugagcaucaggccagg

SEQ ID NO: 2716318 - RNA, 22 nt, Human
ugagccucagcauccuggcacc

SEQ ID NO: 2716319 - RNA, 18 nt, Human
ugagccucagcauccugg

SEQ ID NO: 2716320 - RNA, 21 nt, Human
ugagccucagcauccuggcac

SEQ ID NO: 2716321 - RNA, 19 nt, Human
ugagccgagaucacgccac

SEQ ID NO: 2716322 - RNA, 21 nt, Human
ugagccgagaucacgccacug

SEQ ID NO: 2716323 - RNA, 17 nt, Human
ugagccucagcauccug

SEQ ID NO: 2716324 - RNA, 16 nt, Human
ugauaacuggaaacuu

SEQ ID NO: 2716325 - RNA, 14 nt, Human
ugagugagcaugcc

SEQ ID NO: 2716326 - RNA, 16 nt, Human
ugaguugauagcacag

SEQ ID NO: 2716327 - RNA, 20 nt, Human
ugaguugauagcacagaccc

SEQ ID NO: 2716328 - RNA, 13 nt, Human
ugaguccagaagu

SEQ ID NO: 2716329 - RNA, 19 nt, Human
ugaguccagaaguuugaga

SEQ ID NO: 2716330 - RNA, 19 nt, Human
ugagucgaggacagggagg

SEQ ID NO: 2716331 - RNA, 13 nt, Human
ugagucugaaggc

SEQ ID NO: 2716332 - RNA, 15 nt, Human
ugagucugaaggcug

SEQ ID NO: 2716333 - RNA, 17 nt, Human
ugagucugaaggcuggg

SEQ ID NO: 2716334 - RNA, 18 nt, Human
ugagucugaaggcugggu

SEQ ID NO: 2716335 - RNA, 13 nt, Human
ugaggcucugccc

SEQ ID NO: 2716336 - RNA, 14 nt, Human
ugaggcucugcccu

SEQ ID NO: 2716337 - RNA, 17 nt, Human
ugagggaacagagaggu

SEQ ID NO: 2716338 - RNA, 12 nt, Human
ugaggugggagg

SEQ ID NO: 2716339 - RNA, 13 nt, Human
ugaggugggagga

SEQ ID NO: 2716340 - RNA, 13 nt, Human
ugagcugggauga

SEQ ID NO: 2716341 - RNA, 12 nt, Human
ugaggcauuugu

SEQ ID NO: 2716342 - RNA, 20 nt, Human
ugaggcauuuguuugaacug

SEQ ID NO: 2716343 - RNA, 19 nt, Human
ugaggcauuuguuugaacu

SEQ ID NO: 2716344 - RNA, 23 nt, Human
ugaggcuagugugguguuuccug

SEQ ID NO: 2716345 - RNA, 21 nt, Human
ugaggcauuuguuugaacuga

SEQ ID NO: 2716346 - RNA, 17 nt, Human
ugaggcuaguguggugu

SEQ ID NO: 2716347 - RNA, 22 nt, Human
ugcuaggaacacuccuucacag

SEQ ID NO: 2716348 - RNA, 21 nt, Human
ugcuaggaacacuccuucaca

SEQ ID NO: 2716349 - RNA, 20 nt, Human
ugcuaggaacacuccuucac

SEQ ID NO: 2716350 - RNA, 17 nt, Human
ugcucacauaucuguca

SEQ ID NO: 2716351 - RNA, 23 nt, Human
ugcucuccgaccagacaccuuga

SEQ ID NO: 2716352 - RNA, 21 nt, Human
ugcuacuguccuacccacccu

SEQ ID NO: 2716353 - RNA, 22 nt, Human
ugcuacuguccuacccacccuc

SEQ ID NO: 2716354 - RNA, 21 nt, Human
ugcgcuaaacuuuucugauag

SEQ ID NO: 2716355 - RNA, 20 nt, Human
ugcgcuaaacuuuucugaua

SEQ ID NO: 2716356 - RNA, 19 nt, Human
ugcgcuaaacuuuucugau

SEQ ID NO: 2716357 - RNA, 17 nt, Human
ugcugggcuugucugua

SEQ ID NO: 2716358 - RNA, 22 nt, Human
ugcugguguaugugugaaguga

SEQ ID NO: 2716359 - RNA, 13 nt, Human
ugcugguguaugu

SEQ ID NO: 2716360 - RNA, 20 nt, Human
ugcugggguuaucugaaguc

SEQ ID NO: 2716361 - RNA, 17 nt, Human
ugcugggguuaucugaa

SEQ ID NO: 2716362 - RNA, 13 nt, Human
ugcuggguguggc

SEQ ID NO: 2716363 - RNA, 17 nt, Human
ugcuguucaugaaagau

SEQ ID NO: 2716364 - RNA, 16 nt, Human
ugcuguucaugaaaga

SEQ ID NO: 2716365 - RNA, 11 nt, Human
ugcuguguuaa

SEQ ID NO: 2716366 - RNA, 18 nt, Human
ugcuguguuaaauaaacc

SEQ ID NO: 2716367 - RNA, 12 nt, Human
ugcugcuugagg

SEQ ID NO: 2716368 - RNA, 19 nt, Human
ugcugcuugaggcaacuca

SEQ ID NO: 2716369 - RNA, 20 nt, Human
ugcugggauuacagguguga

SEQ ID NO: 2716370 - RNA, 17 nt, Human
ugcugcauuuaaaagau

SEQ ID NO: 2716371 - RNA, 19 nt, Human
ugcugcauuuaaaagauac

SEQ ID NO: 2716372 - RNA, 18 nt, Human
ugcugcauuuaaaagaua

SEQ ID NO: 2716373 - RNA, 14 nt, Human
ugcugcauuuaaaa

SEQ ID NO: 2716374 - RNA, 23 nt, Human
ugcugcauuuaaaagauacaguu

SEQ ID NO: 2716375 - RNA, 22 nt, Human
ugcaucaauuuuucuuauuuca

SEQ ID NO: 2716376 - RNA, 12 nt, Human
ugcaguucugaa

SEQ ID NO: 2716377 - RNA, 16 nt, Human
ugcaguugccagucac

SEQ ID NO: 2716378 - RNA, 16 nt, Human
ugcauagguuuagcag

SEQ ID NO: 2716379 - RNA, 20 nt, Human
ugcaguggugcgaucugggu

SEQ ID NO: 2716380 - RNA, 21 nt, Human
ugcaguggugcgaucuggguu

SEQ ID NO: 2716381 - RNA, 21 nt, Human
ugcaguuacacuaaaagguga

SEQ ID NO: 2716382 - RNA, 13 nt, Human
ugcagggaguccg

SEQ ID NO: 2716383 - RNA, 13 nt, Human
ugcaucagcugcu

SEQ ID NO: 2716384 - RNA, 21 nt, Human
ugcauuuggugguuucagaaa

SEQ ID NO: 2716385 - RNA, 23 nt, Human
ugcauuuggugguuucagaaaug

SEQ ID NO: 2716386 - RNA, 20 nt, Human
ugccaggaagccagcaggcu

SEQ ID NO: 2716387 - RNA, 22 nt, Human
ugccaggaagccagcaggcucu

SEQ ID NO: 2716388 - RNA, 10 nt, Human
ugccaggcau

SEQ ID NO: 2716389 - RNA, 14 nt, Human
ugccaggcauggug

SEQ ID NO: 2716390 - RNA, 20 nt, Human
ugccacccuggggagaaagu

SEQ ID NO: 2716391 - RNA, 23 nt, Human
ugccuaaauccauuuggaaaucu

SEQ ID NO: 2716392 - RNA, 22 nt, Human
ugccuaaauccauuuggaaauc

SEQ ID NO: 2716393 - RNA, 20 nt, Human
ugccuaaauccauuuggaaa

SEQ ID NO: 2716394 - RNA, 15 nt, Human
ugccucaagagaagg

SEQ ID NO: 2716395 - RNA, 14 nt, Human
ugccucaagagaag

SEQ ID NO: 2716396 - RNA, 20 nt, Human
ugccucacccacccuuuuuu

SEQ ID NO: 2716397 - RNA, 23 nt, Human
ugccucacccacccuuuuuuaaa

SEQ ID NO: 2716398 - RNA, 15 nt, Human
ugcccugcccaccug

SEQ ID NO: 2716399 - RNA, 14 nt, Human
ugcccugcccaccu

SEQ ID NO: 2716400 - RNA, 16 nt, Human
ugcccugcccaccugg

SEQ ID NO: 2716401 - RNA, 20 nt, Human
ugcccugcccaccuggccuc

SEQ ID NO: 2716402 - RNA, 13 nt, Human
ugccuaaauccau

SEQ ID NO: 2716403 - RNA, 19 nt, Human
ugccuaaauccauuuggaa

SEQ ID NO: 2716404 - RNA, 15 nt, Human
ugccuaaauccauuu

SEQ ID NO: 2716405 - RNA, 16 nt, Human
ugccccuggcagcccc

SEQ ID NO: 2716406 - RNA, 12 nt, Human
ugcccggcugcg

SEQ ID NO: 2716407 - RNA, 14 nt, Human
ugcccggcugcgga

SEQ ID NO: 2716408 - RNA, 18 nt, Human
ugcccaggcuggcgugca

SEQ ID NO: 2716409 - RNA, 19 nt, Human
ugcccaggcuggcgugcag

SEQ ID NO: 2716410 - RNA, 20 nt, Human
ugcccaggcuggcgugcagu

SEQ ID NO: 2716411 - RNA, 15 nt, Human
uggcacuaguauuuc

SEQ ID NO: 2716412 - RNA, 20 nt, Human
uggcaauagucaaauugugu

SEQ ID NO: 2716413 - RNA, 16 nt, Human
uggcacuauaauguaa

SEQ ID NO: 2716414 - RNA, 15 nt, Human
uggcacuauaaugua

SEQ ID NO: 2716415 - RNA, 12 nt, Human
uggcaaaaaggc

SEQ ID NO: 2716416 - RNA, 16 nt, Human
uggcaaaaaggcagga

SEQ ID NO: 2716417 - RNA, 20 nt, Human
uggauaauaaggaaaaguuu

SEQ ID NO: 2716418 - RNA, 21 nt, Human
uggaggaaggaaacccagcuc

SEQ ID NO: 2716419 - RNA, 23 nt, Human
uggaggaaggaaacccagcucug

SEQ ID NO: 2716420 - RNA, 22 nt, Human
uggaccaaaaaccaguauugua

SEQ ID NO: 2716421 - RNA, 17 nt, Human
uggaccaaaaaccagua

SEQ ID NO: 2716422 - RNA, 19 nt, Human
uggccagaugcaccagccc

SEQ ID NO: 2716423 - RNA, 17 nt, Human
uggccagaugcaccagc

SEQ ID NO: 2716424 - RNA, 18 nt, Human
uggccagaugcaccagcc

SEQ ID NO: 2716425 - RNA, 17 nt, Human
uggcagaguugaagaca

SEQ ID NO: 2716426 - RNA, 19 nt, Human
uggcagaguugaagacaga

SEQ ID NO: 2716427 - RNA, 21 nt, Human
uggcagaguggauucuugaac

SEQ ID NO: 2716428 - RNA, 15 nt, Human
uggcagaguugaaga

SEQ ID NO: 2716429 - RNA, 20 nt, Human
uggccccugcccggcugcgg

SEQ ID NO: 2716430 - RNA, 14 nt, Human
uggccccugcccgg

SEQ ID NO: 2716431 - RNA, 15 nt, Human
uggccccugcccggc

SEQ ID NO: 2716432 - RNA, 16 nt, Human
uggccccugcccggcu

SEQ ID NO: 2716433 - RNA, 13 nt, Human
uggccaggcuggu

SEQ ID NO: 2716434 - RNA, 11 nt, Human
uggcugcuuca

SEQ ID NO: 2716435 - RNA, 15 nt, Human
uggcugggggccuca

SEQ ID NO: 2716436 - RNA, 15 nt, Human
uggcugcuucaagga

SEQ ID NO: 2716437 - RNA, 23 nt, Human
uggcgcugccccuggcagccccu

SEQ ID NO: 2716438 - RNA, 16 nt, Human
uggcgcugccccuggc

SEQ ID NO: 2716439 - RNA, 22 nt, Human
uggcgcagcauauucaggaagc

SEQ ID NO: 2716440 - RNA, 23 nt, Human
uggcgcagcauauucaggaagcu

SEQ ID NO: 2716441 - RNA, 23 nt, Human
uggccucccaacucaccccagcc

SEQ ID NO: 2716442 - RNA, 13 nt, Human
ugguauguuuuca

SEQ ID NO: 2716443 - RNA, 16 nt, Human
uggucccagccagcag

SEQ ID NO: 2716444 - RNA, 13 nt, Human
uggucccacucag

SEQ ID NO: 2716445 - RNA, 14 nt, Human
uggucccccuucca

SEQ ID NO: 2716446 - RNA, 20 nt, Human
ugguccgugcuaaggacuug

SEQ ID NO: 2716447 - RNA, 19 nt, Human
ugguccgugcuaaggacuu

SEQ ID NO: 2716448 - RNA, 18 nt, Human
ugguccgugcuaaggacu

SEQ ID NO: 2716449 - RNA, 17 nt, Human
ugguccgugcuaaggac

SEQ ID NO: 2716450 - RNA, 15 nt, Human
uggucccccuuccau

SEQ ID NO: 2716451 - RNA, 16 nt, Human
uggucccccuuccaug

SEQ ID NO: 2716452 - RNA, 18 nt, Human
uggucccccuuccaugga

SEQ ID NO: 2716453 - RNA, 23 nt, Human
uggucccccuuccauggacuuug

SEQ ID NO: 2716454 - RNA, 17 nt, Human
ugguccuaaucuucuga

SEQ ID NO: 2716455 - RNA, 19 nt, Human
ugguccuaaucuucugaac

SEQ ID NO: 2716456 - RNA, 13 nt, Human
ugguccugcugca

SEQ ID NO: 2716457 - RNA, 15 nt, Human
ugguccugcugcagu

SEQ ID NO: 2716458 - RNA, 23 nt, Human
ugguccugcugcaguugccaguc

SEQ ID NO: 2716459 - RNA, 21 nt, Human
uggugcaaugaccuuucaaua

SEQ ID NO: 2716460 - RNA, 20 nt, Human
uggugcaaugaccuuucaau

SEQ ID NO: 2716461 - RNA, 19 nt, Human
uggugacugauucuucagc

SEQ ID NO: 2716462 - RNA, 19 nt, Human
uggugacuuuccucuuugg

SEQ ID NO: 2716463 - RNA, 16 nt, Human
uggugacugauucuuc

SEQ ID NO: 2716464 - RNA, 15 nt, Human
uggugacugauucuu

SEQ ID NO: 2716465 - RNA, 15 nt, Human
uggugaccucugccu

SEQ ID NO: 2716466 - RNA, 16 nt, Human
uggugaccucugccug

SEQ ID NO: 2716467 - RNA, 17 nt, Human
uggugaccucugccuga

SEQ ID NO: 2716468 - RNA, 22 nt, Human
uggugaccucugccugaaguca

SEQ ID NO: 2716469 - RNA, 14 nt, Human
uggucggaaaacau

SEQ ID NO: 2716470 - RNA, 17 nt, Human
uggucggaaaacaugcu

SEQ ID NO: 2716471 - RNA, 19 nt, Human
uggucuacacugugcugag

SEQ ID NO: 2716472 - RNA, 13 nt, Human
uggugaccucugc

SEQ ID NO: 2716473 - RNA, 14 nt, Human
uggugaccucugcc

SEQ ID NO: 2716474 - RNA, 15 nt, Human
uggucuacacugugc

SEQ ID NO: 2716475 - RNA, 16 nt, Human
uggucuacacugugcu

SEQ ID NO: 2716476 - RNA, 17 nt, Human
uggucuacacugugcug

SEQ ID NO: 2716477 - RNA, 18 nt, Human
uggucuacacugugcuga

SEQ ID NO: 2716478 - RNA, 17 nt, Human
ugggcagcugccucccc

SEQ ID NO: 2716479 - RNA, 19 nt, Human
ugggcagcugccuccccuc

SEQ ID NO: 2716480 - RNA, 12 nt, Human
ugggcagcugcc

SEQ ID NO: 2716481 - RNA, 13 nt, Human
ugggcagcugccu

SEQ ID NO: 2716482 - RNA, 14 nt, Human
ugggcagcugccuc

SEQ ID NO: 2716483 - RNA, 15 nt, Human
ugggcagcugccucc

SEQ ID NO: 2716484 - RNA, 23 nt, Human
ugggcagagcagagaccaucccu

SEQ ID NO: 2716485 - RNA, 14 nt, Human
ugggccuggcuccc

SEQ ID NO: 2716486 - RNA, 14 nt, Human
ugggagugggccca

SEQ ID NO: 2716487 - RNA, 16 nt, Human
ugggagugggcccaau

SEQ ID NO: 2716488 - RNA, 20 nt, Human
uggcugggggccucagugcc

SEQ ID NO: 2716489 - RNA, 16 nt, Human
uggcugggggccucag

SEQ ID NO: 2716490 - RNA, 17 nt, Human
uggcugggggccucagu

SEQ ID NO: 2716491 - RNA, 14 nt, Human
ugggauccuccagg

SEQ ID NO: 2716492 - RNA, 12 nt, Human
ugggauccucca

SEQ ID NO: 2716493 - RNA, 13 nt, Human
ugggauccuccag

SEQ ID NO: 2716494 - RNA, 22 nt, Human
ugggauuacaagcgugagccac

SEQ ID NO: 2716495 - RNA, 18 nt, Human
ugggcagagcagagacca

SEQ ID NO: 2716496 - RNA, 22 nt, Human
ugggcagagcagagaccauccc

SEQ ID NO: 2716497 - RNA, 17 nt, Human
uggguacuuguggacac

SEQ ID NO: 2716498 - RNA, 18 nt, Human
uggguacuuguggacaca

SEQ ID NO: 2716499 - RNA, 16 nt, Human
ugggggaguggccaca

SEQ ID NO: 2716500 - RNA, 15 nt, Human
uggggaugagaaagg

SEQ ID NO: 2716501 - RNA, 23 nt, Human
uggggaugagaaagguugaagca

SEQ ID NO: 2716502 - RNA, 20 nt, Human
uggggccaguuggucccccu

SEQ ID NO: 2716503 - RNA, 19 nt, Human
uuaaaauacacacucaaau

SEQ ID NO: 2716504 - RNA, 21 nt, Human
uuaaaauaccagccaguaaau

SEQ ID NO: 2716505 - RNA, 18 nt, Human
uuaaaagaugaaaauauu

SEQ ID NO: 2716506 - RNA, 15 nt, Human
uuaaaagaugaaaau

SEQ ID NO: 2716507 - RNA, 22 nt, Human
uuaaaagaauauuuuaacuucc

SEQ ID NO: 2716508 - RNA, 21 nt, Human
uuaaaagaauauuuuaacuuc

SEQ ID NO: 2716509 - RNA, 17 nt, Human
uuaaaagauacaguuac

SEQ ID NO: 2716510 - RNA, 14 nt, Human
uuaaaagauacagu

SEQ ID NO: 2716511 - RNA, 22 nt, Human
uguuuuaagaggcagggucuca

SEQ ID NO: 2716512 - RNA, 18 nt, Human
uguuuuaaggaugcuugu

SEQ ID NO: 2716513 - RNA, 19 nt, Human
uguuucaaacauauauaac

SEQ ID NO: 2716514 - RNA, 16 nt, Human
uguuuagauaauacac

SEQ ID NO: 2716515 - RNA, 21 nt, Human
uguuucaaacauauauaacaa

SEQ ID NO: 2716516 - RNA, 22 nt, Human
uguuucaaacauauauaacaau

SEQ ID NO: 2716517 - RNA, 15 nt, Human
uguuucaaacuuuac

SEQ ID NO: 2716518 - RNA, 23 nt, Human
uguuuccuggcacugcuuccagu

SEQ ID NO: 2716519 - RNA, 13 nt, Human
uguuugugauuga

SEQ ID NO: 2716520 - RNA, 20 nt, Human
uguuuuaagaggcagggucu

SEQ ID NO: 2716521 - RNA, 17 nt, Human
uuaaccacuucagcuga

SEQ ID NO: 2716522 - RNA, 16 nt, Human
uuaacuucacauauug

SEQ ID NO: 2716523 - RNA, 15 nt, Human
uuaacuuuuauaaac

SEQ ID NO: 2716524 - RNA, 17 nt, Human
uuaacuuuuauaaacuu

SEQ ID NO: 2716525 - RNA, 16 nt, Human
uuaacuuuuauaaacu

SEQ ID NO: 2716526 - RNA, 21 nt, Human
uuaagcagauggaaugcugug

SEQ ID NO: 2716527 - RNA, 18 nt, Human
uuaacuuuuauaaacuuu

SEQ ID NO: 2716528 - RNA, 21 nt, Human
uuacaagcgugagccacugca

SEQ ID NO: 2716529 - RNA, 20 nt, Human
uuacaagcgugagccacugc

SEQ ID NO: 2716530 - RNA, 17 nt, Human
uuaagcuguuacugucu

SEQ ID NO: 2716531 - RNA, 19 nt, Human
uuaagcauauauuuuuaua

SEQ ID NO: 2716532 - RNA, 13 nt, Human
uuaagcauauauu

SEQ ID NO: 2716533 - RNA, 18 nt, Human
uuaagcauauauuuuuau

SEQ ID NO: 2716534 - RNA, 15 nt, Human
uuaagcauauauuuu

SEQ ID NO: 2716535 - RNA, 20 nt, Human
uuaauauuaaagccauguuu

SEQ ID NO: 2716536 - RNA, 22 nt, Human
uuaauauuaaagccauguuuau

SEQ ID NO: 2716537 - RNA, 21 nt, Human
uuaauauuaaagccauguuua

SEQ ID NO: 2716538 - RNA, 13 nt, Human
uuaauauauuucc

SEQ ID NO: 2716539 - RNA, 14 nt, Human
uuaauauauuucca

SEQ ID NO: 2716540 - RNA, 17 nt, Human
uuaaugauaaguaaaug

SEQ ID NO: 2716541 - RNA, 21 nt, Human
uuaaugauaaguaaaugcuag

SEQ ID NO: 2716542 - RNA, 22 nt, Human
uuaauauugauaugcuuauaca

SEQ ID NO: 2716543 - RNA, 18 nt, Human
uuaauauugauaugcuua

SEQ ID NO: 2716544 - RNA, 17 nt, Human
uuaguagagacaggguu

SEQ ID NO: 2716545 - RNA, 18 nt, Human
uuaguaugaggcauuugu

SEQ ID NO: 2716546 - RNA, 16 nt, Human
uuaguaugaggcauuu

SEQ ID NO: 2716547 - RNA, 20 nt, Human
uuagaugcaguucugaagaa

SEQ ID NO: 2716548 - RNA, 21 nt, Human
uuagaugcaguucugaagaag

SEQ ID NO: 2716549 - RNA, 14 nt, Human
uuagaucuaguuca

SEQ ID NO: 2716550 - RNA, 13 nt, Human
uuagaucuaguuc

SEQ ID NO: 2716551 - RNA, 22 nt, Human
uuagauaauacaccacuacauu

SEQ ID NO: 2716552 - RNA, 12 nt, Human
uuagagauuuuu

SEQ ID NO: 2716553 - RNA, 18 nt, Human
uuagagaguguugaaacg

SEQ ID NO: 2716554 - RNA, 14 nt, Human
uuagaguugauacu

SEQ ID NO: 2716555 - RNA, 12 nt, Human
uuagcuggaaaa

SEQ ID NO: 2716556 - RNA, 13 nt, Human
uuagcuggaaaag

SEQ ID NO: 2716557 - RNA, 19 nt, Human
uuagaaacacaacuauauu

SEQ ID NO: 2716558 - RNA, 15 nt, Human
uuagacagucccugc

SEQ ID NO: 2716559 - RNA, 14 nt, Human
uuacuuuguguuca

SEQ ID NO: 2716560 - RNA, 17 nt, Human
uuacuuuaaaaggagcc

SEQ ID NO: 2716561 - RNA, 18 nt, Human
uuacuuuaaaaggagcca

SEQ ID NO: 2716562 - RNA, 16 nt, Human
uuagacagucccugcc

SEQ ID NO: 2716563 - RNA, 17 nt, Human
uuagacagucccugcca

SEQ ID NO: 2716564 - RNA, 18 nt, Human
uuagacagucccugccaa

SEQ ID NO: 2716565 - RNA, 14 nt, Human
uuagacagucccug

SEQ ID NO: 2716566 - RNA, 14 nt, Human
uuagagaguguuga

SEQ ID NO: 2716567 - RNA, 17 nt, Human
uuagagaguguugaaac

SEQ ID NO: 2716568 - RNA, 16 nt, Human
uuagagaguguugaaa

SEQ ID NO: 2716569 - RNA, 16 nt, Human
uuacuaauagacaauu

SEQ ID NO: 2716570 - RNA, 14 nt, Human
uuacuaaguuuuua

SEQ ID NO: 2716571 - RNA, 13 nt, Human
uuacuaaguuuuu

SEQ ID NO: 2716572 - RNA, 18 nt, Human
uuacuuagguguggggga

SEQ ID NO: 2716573 - RNA, 11 nt, Human
uuacuucugcu

SEQ ID NO: 2716574 - RNA, 23 nt, Human
uuacuucuuauacauuugauaaa

SEQ ID NO: 2716575 - RNA, 12 nt, Human
uuacuucugcua

SEQ ID NO: 2716576 - RNA, 21 nt, Human
uuacuuaaaccgccaaggcug

SEQ ID NO: 2716577 - RNA, 17 nt, Human
uucccuugaugaagaag

SEQ ID NO: 2716578 - RNA, 13 nt, Human
uuccucauuagca

SEQ ID NO: 2716579 - RNA, 20 nt, Human
uucccuuugacgccauccca

SEQ ID NO: 2716580 - RNA, 21 nt, Human
uucccuuugacgccaucccag

SEQ ID NO: 2716581 - RNA, 22 nt, Human
uucccuuugacgccaucccagc

SEQ ID NO: 2716582 - RNA, 20 nt, Human
uuccuuggacucauuuuaaa

SEQ ID NO: 2716583 - RNA, 17 nt, Human
uuccuuggacucauuuu

SEQ ID NO: 2716584 - RNA, 20 nt, Human
uucgggaggucgaggcagga

SEQ ID NO: 2716585 - RNA, 13 nt, Human
uucuaaagcugcc

SEQ ID NO: 2716586 - RNA, 17 nt, Human
uucuaaagcugccagcc

SEQ ID NO: 2716587 - RNA, 20 nt, Human
uuccuugaguugauucagcu

SEQ ID NO: 2716588 - RNA, 14 nt, Human
uuccuggcacugcu

SEQ ID NO: 2716589 - RNA, 17 nt, Human
uuccugccaggcauggu

SEQ ID NO: 2716590 - RNA, 15 nt, Human
uuccugaugcuucuu

SEQ ID NO: 2716591 - RNA, 18 nt, Human
uuccugaugcuucuucag

SEQ ID NO: 2716592 - RNA, 19 nt, Human
uuccugaugcuucuucaga

SEQ ID NO: 2716593 - RNA, 19 nt, Human
uuccagauccuggaaauca

SEQ ID NO: 2716594 - RNA, 13 nt, Human
uuccaaaauaauu

SEQ ID NO: 2716595 - RNA, 21 nt, Human
uuccaaaauaauuuuaagaaa

SEQ ID NO: 2716596 - RNA, 15 nt, Human
uuccaaauucugcuu

SEQ ID NO: 2716597 - RNA, 12 nt, Human
uuccaaaauaau

SEQ ID NO: 2716598 - RNA, 15 nt, Human
uucauuuccuguguc

SEQ ID NO: 2716599 - RNA, 16 nt, Human
uucauuuccugugucu

SEQ ID NO: 2716600 - RNA, 19 nt, Human
uucaugcauagguuuagca

SEQ ID NO: 2716601 - RNA, 15 nt, Human
uucaugaaagauuca

SEQ ID NO: 2716602 - RNA, 17 nt, Human
uucaugaaagauucaau

SEQ ID NO: 2716603 - RNA, 21 nt, Human
uucaucuugaauuguaaggaa

SEQ ID NO: 2716604 - RNA, 11 nt, Human
uucaggaagcu

SEQ ID NO: 2716605 - RNA, 13 nt, Human
uucaggaagcuca

SEQ ID NO: 2716606 - RNA, 17 nt, Human
uucaucuugaauuguaa

SEQ ID NO: 2716607 - RNA, 16 nt, Human
uucccauuugcuccuu

SEQ ID NO: 2716608 - RNA, 15 nt, Human
uuccccaggaggcca

SEQ ID NO: 2716609 - RNA, 16 nt, Human
uuccccaggaggccag

SEQ ID NO: 2716610 - RNA, 20 nt, Human
uucccucccuuccucuuucc

SEQ ID NO: 2716611 - RNA, 17 nt, Human
uucccucccuuccucuu

SEQ ID NO: 2716612 - RNA, 11 nt, Human
uucccucccuu

SEQ ID NO: 2716613 - RNA, 21 nt, Human
uuccccaggaggccagccuug

SEQ ID NO: 2716614 - RNA, 17 nt, Human
uuccccaggaggccagc

SEQ ID NO: 2716615 - RNA, 18 nt, Human
uuccccaggaggccagcc

SEQ ID NO: 2716616 - RNA, 19 nt, Human
uuccccaggaggccagccu

SEQ ID NO: 2716617 - RNA, 20 nt, Human
uuccccaggaggccagccuu

SEQ ID NO: 2716618 - RNA, 17 nt, Human
uucaaauccuugaagau

SEQ ID NO: 2716619 - RNA, 23 nt, Human
uucaaaguugccuaaauccauuu

SEQ ID NO: 2716620 - RNA, 17 nt, Human
uucaaaguugccuaaau

SEQ ID NO: 2716621 - RNA, 16 nt, Human
uucaaaguugccuaaa

SEQ ID NO: 2716622 - RNA, 15 nt, Human
uucaaaguugccuaa

SEQ ID NO: 2716623 - RNA, 11 nt, Human
uucaaaguugc

SEQ ID NO: 2716624 - RNA, 17 nt, Human
uuauuuuaauucaguug

SEQ ID NO: 2716625 - RNA, 13 nt, Human
uuauuuuauuaug

SEQ ID NO: 2716626 - RNA, 15 nt, Human
uuauugucuagugaa

SEQ ID NO: 2716627 - RNA, 18 nt, Human
uuauugucaaagugguga

SEQ ID NO: 2716628 - RNA, 17 nt, Human
uuauugucaaaguggug

SEQ ID NO: 2716629 - RNA, 15 nt, Human
uuauuuuaauaaugu

SEQ ID NO: 2716630 - RNA, 16 nt, Human
uuauuuuaauaauguu

SEQ ID NO: 2716631 - RNA, 22 nt, Human
uuauuggcuuuucugauccagu

SEQ ID NO: 2716632 - RNA, 18 nt, Human
uuauuggcuuuucugauc

SEQ ID NO: 2716633 - RNA, 16 nt, Human
uuauuggcuuuucuga

SEQ ID NO: 2716634 - RNA, 12 nt, Human
uuauuggcuuuu

SEQ ID NO: 2716635 - RNA, 13 nt, Human
uucagagcugccc

SEQ ID NO: 2716636 - RNA, 14 nt, Human
uucagagcugcccu

SEQ ID NO: 2716637 - RNA, 21 nt, Human
uucacucuccauuuaauaauu

SEQ ID NO: 2716638 - RNA, 19 nt, Human
uucagagacuccugcaggc

SEQ ID NO: 2716639 - RNA, 21 nt, Human
uucagacagcugccugggauc

SEQ ID NO: 2716640 - RNA, 13 nt, Human
uucacucuccuug

SEQ ID NO: 2716641 - RNA, 13 nt, Human
uucaauaggaaaa

SEQ ID NO: 2716642 - RNA, 15 nt, Human
uucaauaggaaaaac

SEQ ID NO: 2716643 - RNA, 18 nt, Human
uucaauaggaaaaacuga

SEQ ID NO: 2716644 - RNA, 20 nt, Human
uucaauaggaaaaacugauu

SEQ ID NO: 2716645 - RNA, 18 nt, Human
uucacggaagagccuugc

SEQ ID NO: 2716646 - RNA, 15 nt, Human
uucacgugguccuaa

SEQ ID NO: 2716647 - RNA, 17 nt, Human
uuauuacuguaagaaaa

SEQ ID NO: 2716648 - RNA, 18 nt, Human
uuauuacuguaagaaaau

SEQ ID NO: 2716649 - RNA, 16 nt, Human
uuauuacuguaagaaa

SEQ ID NO: 2716650 - RNA, 14 nt, Human
uuauuacaguauaa

SEQ ID NO: 2716651 - RNA, 17 nt, Human
uuauggcuauaggugcu

SEQ ID NO: 2716652 - RNA, 20 nt, Human
uuauugauaaguucauacau

SEQ ID NO: 2716653 - RNA, 15 nt, Human
uuauugauaaguuca

SEQ ID NO: 2716654 - RNA, 19 nt, Human
uuauugauaaguucauaca

SEQ ID NO: 2716655 - RNA, 15 nt, Human
uuauugcccacgcug

SEQ ID NO: 2716656 - RNA, 11 nt, Human
uuauucugcuc

SEQ ID NO: 2716657 - RNA, 21 nt, Human
uuauggcacuaguauuucuau

SEQ ID NO: 2716658 - RNA, 16 nt, Human
uuauggaacacucuga

SEQ ID NO: 2716659 - RNA, 16 nt, Human
uuaugcaugaaguaau

SEQ ID NO: 2716660 - RNA, 22 nt, Human
uuaugcaugaaguaauaugcac

SEQ ID NO: 2716661 - RNA, 17 nt, Human
uuaucuagauacuguau

SEQ ID NO: 2716662 - RNA, 17 nt, Human
uuaucugaagucagauc

SEQ ID NO: 2716663 - RNA, 16 nt, Human
uuaguuccucauuagc

SEQ ID NO: 2716664 - RNA, 14 nt, Human
uuaguuccuugagu

SEQ ID NO: 2716665 - RNA, 14 nt, Human
uuaucuagauacug

SEQ ID NO: 2716666 - RNA, 16 nt, Human
uuaucuagauacugua

SEQ ID NO: 2716667 - RNA, 14 nt, Human
uuuaauaauguuuc

SEQ ID NO: 2716668 - RNA, 15 nt, Human
uuuaauaauguuuca

SEQ ID NO: 2716669 - RNA, 19 nt, Human
uuuaauaauguuucaaaca

SEQ ID NO: 2716670 - RNA, 14 nt, Human
uuuaauaauuauau

SEQ ID NO: 2716671 - RNA, 15 nt, Human
uuuaacagaaaugua

SEQ ID NO: 2716672 - RNA, 14 nt, Human
uuuaacagaaaugu

SEQ ID NO: 2716673 - RNA, 14 nt, Human
uuuaaccucuaaau

SEQ ID NO: 2716674 - RNA, 14 nt, Human
uuuaauauuaaagc

SEQ ID NO: 2716675 - RNA, 21 nt, Human
uuuaauauuaaagccauguuu

SEQ ID NO: 2716676 - RNA, 20 nt, Human
uuuaauauuaaagccauguu

SEQ ID NO: 2716677 - RNA, 17 nt, Human
uuuaauauuaaagccau

SEQ ID NO: 2716678 - RNA, 15 nt, Human
uuuaauauuaaagcc

SEQ ID NO: 2716679 - RNA, 16 nt, Human
uuuacauggcuggagc

SEQ ID NO: 2716680 - RNA, 15 nt, Human
uuuauacaggucaua

SEQ ID NO: 2716681 - RNA, 20 nt, Human
uuuauacauaaacaagacca

SEQ ID NO: 2716682 - RNA, 12 nt, Human
uuuauacauaaa

SEQ ID NO: 2716683 - RNA, 18 nt, Human
uuuauaaacuuuaccuuu

SEQ ID NO: 2716684 - RNA, 19 nt, Human
uuuagacccuauugcugcu

SEQ ID NO: 2716685 - RNA, 22 nt, Human
uuuagacccuauugcugcuuga

SEQ ID NO: 2716686 - RNA, 19 nt, Human
uuuaaaauacacacucaaa

SEQ ID NO: 2716687 - RNA, 16 nt, Human
uuuaaaaucauuucug

SEQ ID NO: 2716688 - RNA, 14 nt, Human
uuuaaaagaaugau

SEQ ID NO: 2716689 - RNA, 17 nt, Human
uuuaaaagaaugauuau

SEQ ID NO: 2716690 - RNA, 13 nt, Human
uuuaaaagauaca

SEQ ID NO: 2716691 - RNA, 12 nt, Human
uuuaaaaugucu

SEQ ID NO: 2716692 - RNA, 13 nt, Human
uuuaacagaaaug

SEQ ID NO: 2716693 - RNA, 17 nt, Human
uuguuuaaaaucauuuc

SEQ ID NO: 2716694 - RNA, 18 nt, Human
uuguuuaaaaucauuucu

SEQ ID NO: 2716695 - RNA, 19 nt, Human
uuguucaauaauaaauauu

SEQ ID NO: 2716696 - RNA, 20 nt, Human
uugucuuuggacccugaggc

SEQ ID NO: 2716697 - RNA, 24 nt, Human
uugucuuuggacccugaggcccag

SEQ ID NO: 2716698 - RNA, 15 nt, Human
uugucuuuggacccu

SEQ ID NO: 2716699 - RNA, 12 nt, Human
uuguuucuguac

SEQ ID NO: 2716700 - RNA, 14 nt, Human
uuguuucuguacuu

SEQ ID NO: 2716701 - RNA, 20 nt, Human
uuguuuggggaugagaaagg

SEQ ID NO: 2716702 - RNA, 14 nt, Human
uuguuuguuuaguc

SEQ ID NO: 2716703 - RNA, 13 nt, Human
uuguuuguuuagu

SEQ ID NO: 2716704 - RNA, 21 nt, Human
uuugaaauuguauuacaaauc

SEQ ID NO: 2716705 - RNA, 18 nt, Human
uuugaagcacagugauca

SEQ ID NO: 2716706 - RNA, 19 nt, Human
uuucuuguguguuuauugu

SEQ ID NO: 2716707 - RNA, 13 nt, Human
uuugaguucuaca

SEQ ID NO: 2716708 - RNA, 16 nt, Human
uuugagaucagccugg

SEQ ID NO: 2716709 - RNA, 17 nt, Human
uuugagaucagccuggg

SEQ ID NO: 2716710 - RNA, 14 nt, Human
uuugagaguucuaa

SEQ ID NO: 2716711 - RNA, 16 nt, Human
uuugagaguucuaaau

SEQ ID NO: 2716712 - RNA, 18 nt, Human
uuugguaaggggaauuga

SEQ ID NO: 2716713 - RNA, 17 nt, Human
uuugauaugugaacagu

SEQ ID NO: 2716714 - RNA, 15 nt, Human
uuugauaugugaaca

SEQ ID NO: 2716715 - RNA, 14 nt, Human
uuugauaugugaac

SEQ ID NO: 2716716 - RNA, 15 nt, Human
uuuggacccugaggc

SEQ ID NO: 2716717 - RNA, 19 nt, Human
uuuggacccugaggcccag

SEQ ID NO: 2716718 - RNA, 12 nt, Human
uuucucuaggaa

SEQ ID NO: 2716719 - RNA, 22 nt, Human
uuucuacccagcgagcccuggu

SEQ ID NO: 2716720 - RNA, 15 nt, Human
uuucuacccagcgag

SEQ ID NO: 2716721 - RNA, 18 nt, Human
uuucuacccagcgagccc

SEQ ID NO: 2716722 - RNA, 13 nt, Human
uuucugauccagu

SEQ ID NO: 2716723 - RNA, 12 nt, Human
uuucugaaauuu

SEQ ID NO: 2716724 - RNA, 22 nt, Human
uuucugauccaguuuuguuugg

SEQ ID NO: 2716725 - RNA, 20 nt, Human
uuucugauccaguuuuguuu

SEQ ID NO: 2716726 - RNA, 16 nt, Human
uuucugauccaguuuu

SEQ ID NO: 2716727 - RNA, 15 nt, Human
uuucugauccaguuu

SEQ ID NO: 2716728 - RNA, 23 nt, Human
uuuccuggcacugcuuccaguga

SEQ ID NO: 2716729 - RNA, 19 nt, Human
uuuccuggcacugcuucca

SEQ ID NO: 2716730 - RNA, 21 nt, Human
uuucuaacaaaaaaauauauu

SEQ ID NO: 2716731 - RNA, 19 nt, Human
uuucuaaaucuccaaaaua

SEQ ID NO: 2716732 - RNA, 17 nt, Human
uuucagccaagaauucu

SEQ ID NO: 2716733 - RNA, 15 nt, Human
uuucacauaucuagu

SEQ ID NO: 2716734 - RNA, 21 nt, Human
uuucacauaucuaguaugaaa

SEQ ID NO: 2716735 - RNA, 16 nt, Human
uuucagccaagaauuc

SEQ ID NO: 2716736 - RNA, 21 nt, Human
uugaaaaucuuauaauuuaaa

SEQ ID NO: 2716737 - RNA, 21 nt, Human
uucuuuccugaggcugggcuc

SEQ ID NO: 2716738 - RNA, 18 nt, Human
uucuuuccacagaagcuc

SEQ ID NO: 2716739 - RNA, 12 nt, Human
uucuuuaauuuu

SEQ ID NO: 2716740 - RNA, 18 nt, Human
uucuuuaauuuuggaauu

SEQ ID NO: 2716741 - RNA, 17 nt, Human
uucuuuaauuuuggaau

SEQ ID NO: 2716742 - RNA, 15 nt, Human
uugaacuuugaccuc

SEQ ID NO: 2716743 - RNA, 19 nt, Human
uugaaacggaugauuucua

SEQ ID NO: 2716744 - RNA, 16 nt, Human
uugaaacggaugauuu

SEQ ID NO: 2716745 - RNA, 20 nt, Human
uugaagcacagugaucaagu

SEQ ID NO: 2716746 - RNA, 21 nt, Human
uugaagagguuuuaaagcuuc

SEQ ID NO: 2716747 - RNA, 18 nt, Human
uugaacuuugaccucugc

SEQ ID NO: 2716748 - RNA, 17 nt, Human
uugaacuuugaccucug

SEQ ID NO: 2716749 - RNA, 16 nt, Human
uugaagagguuuuaaa

SEQ ID NO: 2716750 - RNA, 14 nt, Human
uugaauguuaagca

SEQ ID NO: 2716751 - RNA, 17 nt, Human
uugaauguuaagcagau

SEQ ID NO: 2716752 - RNA, 12 nt, Human
uugaaugaugcc

SEQ ID NO: 2716753 - RNA, 16 nt, Human
uugaaugaugccauga

SEQ ID NO: 2716754 - RNA, 19 nt, Human
uucuuaggguuaugauuaa

SEQ ID NO: 2716755 - RNA, 17 nt, Human
uucuuagggaaggauac

SEQ ID NO: 2716756 - RNA, 13 nt, Human
uucuucagagacu

SEQ ID NO: 2716757 - RNA, 24 nt, Human
uucuaaguaaaaccacagcaguug

SEQ ID NO: 2716758 - RNA, 16 nt, Human
uucuggcuaugcauuu

SEQ ID NO: 2716759 - RNA, 20 nt, Human
uucuggcagaguugaagaca

SEQ ID NO: 2716760 - RNA, 14 nt, Human
uucuguauagauua

SEQ ID NO: 2716761 - RNA, 13 nt, Human
uucuguauagauu

SEQ ID NO: 2716762 - RNA, 11 nt, Human
uucuguauaga

SEQ ID NO: 2716763 - RNA, 23 nt, Human
uugcagacaggcaagcaccuccu

SEQ ID NO: 2716764 - RNA, 13 nt, Human
uugauucauaaug

SEQ ID NO: 2716765 - RNA, 17 nt, Human
uugauucauaaugacuu

SEQ ID NO: 2716766 - RNA, 22 nt, Human
uugccaucccucccuccaccuc

SEQ ID NO: 2716767 - RNA, 23 nt, Human
uugccaucccucccuccaccucc

SEQ ID NO: 2716768 - RNA, 14 nt, Human
uugccaucccuccc

SEQ ID NO: 2716769 - RNA, 16 nt, Human
uugccaucccucccuc

SEQ ID NO: 2716770 - RNA, 17 nt, Human
uugccaucccucccucc

SEQ ID NO: 2716771 - RNA, 18 nt, Human
uugccaucccucccucca

SEQ ID NO: 2716772 - RNA, 16 nt, Human
uugccauguuggccag

SEQ ID NO: 2716773 - RNA, 17 nt, Human
uugccauguuggccagg

SEQ ID NO: 2716774 - RNA, 18 nt, Human
uugccauguuggccaggc

SEQ ID NO: 2716775 - RNA, 19 nt, Human
uugccauguuggccaggcu

SEQ ID NO: 2716776 - RNA, 13 nt, Human
uugccaucccucc

SEQ ID NO: 2716777 - RNA, 20 nt, Human
uugauaugccuuuucccaac

SEQ ID NO: 2716778 - RNA, 16 nt, Human
uugauaugugaacagu

SEQ ID NO: 2716779 - RNA, 16 nt, Human
uugauaugcuuauaca

SEQ ID NO: 2716780 - RNA, 16 nt, Human
uugauucagcucugca

SEQ ID NO: 2716781 - RNA, 23 nt, Human
uugauucagacagcugccuggga

SEQ ID NO: 2716782 - RNA, 17 nt, Human
uugauucagacagcugc

SEQ ID NO: 2716783 - RNA, 21 nt, Human
uugauucagacagcugccugg

SEQ ID NO: 2716784 - RNA, 19 nt, Human
uugagccuugaacuuugac

SEQ ID NO: 2716785 - RNA, 14 nt, Human
uugagccugggagg

SEQ ID NO: 2716786 - RNA, 14 nt, Human
uugagccuugaacu

SEQ ID NO: 2716787 - RNA, 16 nt, Human
uugagccuugaacuuu

SEQ ID NO: 2716788 - RNA, 15 nt, Human
uugagccuugaacuu

SEQ ID NO: 2716789 - RNA, 13 nt, Human
uugguccugcugc

SEQ ID NO: 2716790 - RNA, 20 nt, Human
uuggucugacccacugcuuu

SEQ ID NO: 2716791 - RNA, 20 nt, Human
uugguaaggggaauugagga

SEQ ID NO: 2716792 - RNA, 18 nt, Human
uuggcauaacauaaaucu

SEQ ID NO: 2716793 - RNA, 23 nt, Human
uuggcauaacauaaaucugugaa

SEQ ID NO: 2716794 - RNA, 22 nt, Human
uuggcauaacauaaaucuguga

SEQ ID NO: 2716795 - RNA, 20 nt, Human
uuggcauaacauaaaucugu

SEQ ID NO: 2716796 - RNA, 19 nt, Human
uuggcauaacauaaaucug

SEQ ID NO: 2716797 - RNA, 23 nt, Human
uuggcuucacggaagagccuugc

SEQ ID NO: 2716798 - RNA, 16 nt, Human
uuguacgaagaguauu

SEQ ID NO: 2716799 - RNA, 19 nt, Human
uuguacgaagaguauuuuu

SEQ ID NO: 2716800 - RNA, 22 nt, Human
uuguagcacugacagauuucca

SEQ ID NO: 2716801 - RNA, 15 nt, Human
uuguagcauccugga

SEQ ID NO: 2716802 - RNA, 14 nt, Human
uuguagcacugaca

SEQ ID NO: 2716803 - RNA, 16 nt, Human
uuguagcacugacaga

SEQ ID NO: 2716804 - RNA, 17 nt, Human
uuguagcacugacagau

SEQ ID NO: 2716805 - RNA, 18 nt, Human
uuguagcacugacagauu

SEQ ID NO: 2716806 - RNA, 17 nt, Human
uuguagaagucacauuc

SEQ ID NO: 2716807 - RNA, 22 nt, Human
uuguagaagucacauuccugaa

SEQ ID NO: 2716808 - RNA, 20 nt, Human
uuguauuuuacuaauaaaau

SEQ ID NO: 2716809 - RNA, 14 nt, Human
uugucuaugggacu

SEQ ID NO: 2716810 - RNA, 22 nt, Human
uugucaaaguggugagaggcau

SEQ ID NO: 2716811 - RNA, 22 nt, Human
uugucuuaaaaaguggaaaaau

SEQ ID NO: 2716812 - RNA, 20 nt, Human
uugucuaugggacucaaugc

SEQ ID NO: 2716813 - RNA, 18 nt, Human
uugcuaagcauuccaacu

SEQ ID NO: 2716814 - RNA, 16 nt, Human
uugcuaagcauuccaa

SEQ ID NO: 2716815 - RNA, 14 nt, Human
uugcugcuugaggc

SEQ ID NO: 2716816 - RNA, 16 nt, Human
uugcugcuugaggcaa

SEQ ID NO: 2716817 - RNA, 16 nt, Human
uugcugucccuuuucc

SEQ ID NO: 2716818 - RNA, 18 nt, Human
uugcugucccuuuuccuu

SEQ ID NO: 2716819 - RNA, 13 nt, Human
uugccuuuuucau

SEQ ID NO: 2716820 - RNA, 12 nt, Human
uugccuuuuuca

SEQ ID NO: 2716821 - RNA, 17 nt, Human
uugccuuuuucauuauu

SEQ ID NO: 2716822 - RNA, 16 nt, Human
uugccuuuuucauuau

SEQ ID NO: 2716823 - RNA, 15 nt, Human
uugccuuuuucauua

SEQ ID NO: 2716824 - RNA, 14 nt, Human
uugccuuuuucauu

SEQ ID NO: 2716825 - RNA, 20 nt, Human
uugccauguuggccaggcug

SEQ ID NO: 2716826 - RNA, 21 nt, Human
uugccauguuggccaggcugg

SEQ ID NO: 2716827 - RNA, 18 nt, Human
uuggacaaaauggaauac

SEQ ID NO: 2716828 - RNA, 19 nt, Human
uuggaagcuccgcuuucua

SEQ ID NO: 2716829 - RNA, 15 nt, Human
uuggauuguccccga

SEQ ID NO: 2716830 - RNA, 15 nt, Human
uuggacccugaggcc

SEQ ID NO: 2716831 - RNA, 18 nt, Human
uuggacccugaggcccag

SEQ ID NO: 2716832 - RNA, 19 nt, Human
uuggacccugaggcccaga

SEQ ID NO: 2716833 - RNA, 21 nt, Human
uuggacccugaggcccagagg

SEQ ID NO: 2716834 - RNA, 12 nt, Human
cuccucugcuug

SEQ ID NO: 2716835 - RNA, 14 nt, Human
cuccucugcuugcc

SEQ ID NO: 2716836 - RNA, 18 nt, Human
cuccucugcugcuggcug

SEQ ID NO: 2716837 - RNA, 16 nt, Human
cuccucugcugcuggc

SEQ ID NO: 2716838 - RNA, 21 nt, Human
cuccucugcuugccaucccuc

SEQ ID NO: 2716839 - RNA, 15 nt, Human
cuccucugcuugcca

SEQ ID NO: 2716840 - RNA, 16 nt, Human
cuccucugcuugccau

SEQ ID NO: 2716841 - RNA, 17 nt, Human
cuccucugcuugccauc

SEQ ID NO: 2716842 - RNA, 20 nt, Human
cuccucugcuugccaucccu

SEQ ID NO: 2716843 - RNA, 22 nt, Human
cuccugggcagcugccuccccu

SEQ ID NO: 2716844 - RNA, 18 nt, Human
cuccugggcagcugccuc

SEQ ID NO: 2716845 - RNA, 19 nt, Human
cuccugggcagcugccucc

SEQ ID NO: 2716846 - RNA, 14 nt, Human
cuccugggcagcug

SEQ ID NO: 2716847 - RNA, 15 nt, Human
cuccugggcagcugc

SEQ ID NO: 2716848 - RNA, 16 nt, Human
cuccugggcagcugcc

SEQ ID NO: 2716849 - RNA, 17 nt, Human
cuccugggcagcugccu

SEQ ID NO: 2716850 - RNA, 12 nt, Human
cuccugggcagc

SEQ ID NO: 2716851 - RNA, 16 nt, Human
cuccuggcccacugca

SEQ ID NO: 2716852 - RNA, 18 nt, Human
cuccuggcccacugcauc

SEQ ID NO: 2716853 - RNA, 22 nt, Human
cucccccagccccauccucugu

SEQ ID NO: 2716854 - RNA, 15 nt, Human
cucccccagccccau

SEQ ID NO: 2716855 - RNA, 20 nt, Human
cucccccagccccauccucu

SEQ ID NO: 2716856 - RNA, 15 nt, Human
cucgaacuggcugca

SEQ ID NO: 2716857 - RNA, 13 nt, Human
cucgaacuggcug

SEQ ID NO: 2716858 - RNA, 14 nt, Human
cucgaacuggcugc

SEQ ID NO: 2716859 - RNA, 14 nt, Human
cucguuaauuugua

SEQ ID NO: 2716860 - RNA, 16 nt, Human
cuccacuuucuagcca

SEQ ID NO: 2716861 - RNA, 19 nt, Human
cuccacuuucuagccagag

SEQ ID NO: 2716862 - RNA, 19 nt, Human
cuccccaugauguuuagaa

SEQ ID NO: 2716863 - RNA, 13 nt, Human
cuccaagcuccca

SEQ ID NO: 2716864 - RNA, 14 nt, Human
cuccaagcucccag

SEQ ID NO: 2716865 - RNA, 15 nt, Human
cuccaagcucccagg

SEQ ID NO: 2716866 - RNA, 16 nt, Human
cuccaagcucccaggc

SEQ ID NO: 2716867 - RNA, 13 nt, Human
cuccaagaauuuc

SEQ ID NO: 2716868 - RNA, 21 nt, Human
cuccaagaccuucuccuucac

SEQ ID NO: 2716869 - RNA, 15 nt, Human
cuccaagaccuucuc

SEQ ID NO: 2716870 - RNA, 14 nt, Human
cuccaagaauuucu

SEQ ID NO: 2716871 - RNA, 22 nt, Human
cuccaagaccuucuccuucacc

SEQ ID NO: 2716872 - RNA, 13 nt, Human
cuccaagcaggac

SEQ ID NO: 2716873 - RNA, 14 nt, Human
cuccaagcaggaca

SEQ ID NO: 2716874 - RNA, 22 nt, Human
cuccaagcaggacauggacaag

SEQ ID NO: 2716875 - RNA, 24 nt, Human
cuccaagcaggacauggacaagga

SEQ ID NO: 2716876 - RNA, 21 nt, Human
cugagaucaaaacgguuuuac

SEQ ID NO: 2716877 - RNA, 14 nt, Human
cugagcuuucugcu

SEQ ID NO: 2716878 - RNA, 15 nt, Human
cugagcuuucugcua

SEQ ID NO: 2716879 - RNA, 23 nt, Human
cugaggacacuaaccacgcugga

SEQ ID NO: 2716880 - RNA, 21 nt, Human
cugaggaauccagacccggcu

SEQ ID NO: 2716881 - RNA, 20 nt, Human
cugaggacacuaaccacgcu

SEQ ID NO: 2716882 - RNA, 17 nt, Human
cugaggaauccagaccc

SEQ ID NO: 2716883 - RNA, 20 nt, Human
cugaggaauccagacccggc

SEQ ID NO: 2716884 - RNA, 14 nt, Human
cugaggaauccaga

SEQ ID NO: 2716885 - RNA, 21 nt, Human
cugaguacguugugcauuugg

SEQ ID NO: 2716886 - RNA, 20 nt, Human
cugaguacguugugcauuug

SEQ ID NO: 2716887 - RNA, 19 nt, Human
cugaguacguugugcauuu

SEQ ID NO: 2716888 - RNA, 17 nt, Human
cugaguacguugugcau

SEQ ID NO: 2716889 - RNA, 18 nt, Human
cugaguacguugugcauu

SEQ ID NO: 2716890 - RNA, 21 nt, Human
cugagaggacuuuucuuugug

SEQ ID NO: 2716891 - RNA, 22 nt, Human
cugagaggacuuuucuuugugg

SEQ ID NO: 2716892 - RNA, 17 nt, Human
cugagaguagagucacu

SEQ ID NO: 2716893 - RNA, 22 nt, Human
cugagacucgcgacaaugcaaa

SEQ ID NO: 2716894 - RNA, 21 nt, Human
cugacccaugcugcccuguga

SEQ ID NO: 2716895 - RNA, 22 nt, Human
cugacccaugcugcccugugag

SEQ ID NO: 2716896 - RNA, 23 nt, Human
cugagacagcccgggcucugccu

SEQ ID NO: 2716897 - RNA, 21 nt, Human
cugagacucgcgacaaugcaa

SEQ ID NO: 2716898 - RNA, 22 nt, Human
cucuuagaugcaguucugaaga

SEQ ID NO: 2716899 - RNA, 21 nt, Human
cucuuagaugcaguucugaag

SEQ ID NO: 2716900 - RNA, 13 nt, Human
cucuuauugccca

SEQ ID NO: 2716901 - RNA, 14 nt, Human
cucuuauugcccac

SEQ ID NO: 2716902 - RNA, 15 nt, Human
cucuuauugcccacg

SEQ ID NO: 2716903 - RNA, 19 nt, Human
cucuuauugcccacgcugg

SEQ ID NO: 2716904 - RNA, 20 nt, Human
cucuuauugcccacgcugga

SEQ ID NO: 2716905 - RNA, 14 nt, Human
cucuucaaucucuu

SEQ ID NO: 2716906 - RNA, 19 nt, Human
cucuucagaucucuaacuu

SEQ ID NO: 2716907 - RNA, 18 nt, Human
cucuucagaucucuaacu

SEQ ID NO: 2716908 - RNA, 21 nt, Human
cucugcacuccccugcugggu

SEQ ID NO: 2716909 - RNA, 18 nt, Human
cucugcacuccccugcug

SEQ ID NO: 2716910 - RNA, 20 nt, Human
cucugcacuccccugcuggg

SEQ ID NO: 2716911 - RNA, 13 nt, Human
cucugcuccucuc

SEQ ID NO: 2716912 - RNA, 18 nt, Human
cucugcuccucuccccag

SEQ ID NO: 2716913 - RNA, 20 nt, Human
cucugcuccucuccccagca

SEQ ID NO: 2716914 - RNA, 13 nt, Human
cucugcugacaga

SEQ ID NO: 2716915 - RNA, 14 nt, Human
cucugcugacagac

SEQ ID NO: 2716916 - RNA, 16 nt, Human
cucugcugacagacac

SEQ ID NO: 2716917 - RNA, 14 nt, Human
cucugguccauaga

SEQ ID NO: 2716918 - RNA, 15 nt, Human
cugaaacaacaaaua

SEQ ID NO: 2716919 - RNA, 13 nt, Human
cugaaacuucccu

SEQ ID NO: 2716920 - RNA, 22 nt, Human
cugacaacacucauugaccuga

SEQ ID NO: 2716921 - RNA, 23 nt, Human
cugacaacacucauugaccugag

SEQ ID NO: 2716922 - RNA, 18 nt, Human
cugaaggccccgcccagg

SEQ ID NO: 2716923 - RNA, 19 nt, Human
cugaaggccccgcccaggc

SEQ ID NO: 2716924 - RNA, 17 nt, Human
cugaaggcuggguucug

SEQ ID NO: 2716925 - RNA, 21 nt, Human
cugaaggccccgcccaggcuu

SEQ ID NO: 2716926 - RNA, 23 nt, Human
cugaaggacauugcggacagcca

SEQ ID NO: 2716927 - RNA, 17 nt, Human
cucuugagccuugaacu

SEQ ID NO: 2716928 - RNA, 16 nt, Human
cucuugagccuugaac

SEQ ID NO: 2716929 - RNA, 18 nt, Human
cucuugagccuugaacuu

SEQ ID NO: 2716930 - RNA, 20 nt, Human
cguguaaccauggacccaau

SEQ ID NO: 2716931 - RNA, 14 nt, Human
cgugcacacaccag

SEQ ID NO: 2716932 - RNA, 16 nt, Human
cgugaggccagagaca

SEQ ID NO: 2716933 - RNA, 17 nt, Human
cgugaguccuggcaugg

SEQ ID NO: 2716934 - RNA, 17 nt, Human
cgugaggccagagacac

SEQ ID NO: 2716935 - RNA, 16 nt, Human
cgugaguccuggcaug

SEQ ID NO: 2716936 - RNA, 16 nt, Human
cgguuuuacugcagcu

SEQ ID NO: 2716937 - RNA, 16 nt, Human
cggagucccaccuugg

SEQ ID NO: 2716938 - RNA, 12 nt, Human
cgggccacagag

SEQ ID NO: 2716939 - RNA, 14 nt, Human
cgggccacagagaa

SEQ ID NO: 2716940 - RNA, 13 nt, Human
cggcuccaggcuc

SEQ ID NO: 2716941 - RNA, 14 nt, Human
cggcuccaggcucc

SEQ ID NO: 2716942 - RNA, 15 nt, Human
cggcuccaggcuccu

SEQ ID NO: 2716943 - RNA, 16 nt, Human
cggcuccaggcuccuu

SEQ ID NO: 2716944 - RNA, 12 nt, Human
cggcuccaggcu

SEQ ID NO: 2716945 - RNA, 16 nt, Human
cggcucacugcagccu

SEQ ID NO: 2716946 - RNA, 17 nt, Human
cggcucacugcagccuc

SEQ ID NO: 2716947 - RNA, 18 nt, Human
cggagucccaccuuggcu

SEQ ID NO: 2716948 - RNA, 20 nt, Human
cggagucccaccuuggcugc

SEQ ID NO: 2716949 - RNA, 15 nt, Human
cggcucacugcagcc

SEQ ID NO: 2716950 - RNA, 14 nt, Human
cggcucacugcagc

SEQ ID NO: 2716951 - RNA, 13 nt, Human
cgguguggagaag

SEQ ID NO: 2716952 - RNA, 15 nt, Human
cggggacagcuccuu

SEQ ID NO: 2716953 - RNA, 18 nt, Human
cgguguggagaagcggcu

SEQ ID NO: 2716954 - RNA, 14 nt, Human
cggggacagcuccu

SEQ ID NO: 2716955 - RNA, 17 nt, Human
cgggcucugccucccau

SEQ ID NO: 2716956 - RNA, 15 nt, Human
cgggcucagcaaaag

SEQ ID NO: 2716957 - RNA, 13 nt, Human
cgggcucugccuc

SEQ ID NO: 2716958 - RNA, 14 nt, Human
cgggcucugccucc

SEQ ID NO: 2716959 - RNA, 16 nt, Human
cgggcucugccuccca

SEQ ID NO: 2716960 - RNA, 11 nt, Human
cgggcucagca

SEQ ID NO: 2716961 - RNA, 17 nt, Human
cgggccacagagaaagu

SEQ ID NO: 2716962 - RNA, 18 nt, Human
cgcaggcccccaggugcc

SEQ ID NO: 2716963 - RNA, 22 nt, Human
cgcaggauucuuccucccuccc

SEQ ID NO: 2716964 - RNA, 14 nt, Human
cgauagugguggug

SEQ ID NO: 2716965 - RNA, 23 nt, Human
cgccacuguuuugaaucucauaa

SEQ ID NO: 2716966 - RNA, 14 nt, Human
ccuuuaagagaaau

SEQ ID NO: 2716967 - RNA, 16 nt, Human
ccuugccgucuaccug

SEQ ID NO: 2716968 - RNA, 17 nt, Human
ccuuuugagugccuuac

SEQ ID NO: 2716969 - RNA, 15 nt, Human
ccuuuugagugccuu

SEQ ID NO: 2716970 - RNA, 21 nt, Human
ccuuucaauaggaaaaacuga

SEQ ID NO: 2716971 - RNA, 21 nt, Human
ccuuuuuuagaguugauacua

SEQ ID NO: 2716972 - RNA, 16 nt, Human
ccuuuuuuaaauaaau

SEQ ID NO: 2716973 - RNA, 13 nt, Human
cgacaaugcaaac

SEQ ID NO: 2716974 - RNA, 12 nt, Human
cgacaaugcaaa

SEQ ID NO: 2716975 - RNA, 17 nt, Human
cgacugcccggcagggu

SEQ ID NO: 2716976 - RNA, 19 nt, Human
cgacccuugccgucuaccu

SEQ ID NO: 2716977 - RNA, 20 nt, Human
cgacccuugccgucuaccug

SEQ ID NO: 2716978 - RNA, 17 nt, Human
cucaaaacugcacuguc

SEQ ID NO: 2716979 - RNA, 23 nt, Human
cucaaaauaccaugccauuuaaa

SEQ ID NO: 2716980 - RNA, 18 nt, Human
cucaaaagcugggcaggu

SEQ ID NO: 2716981 - RNA, 18 nt, Human
cuaucucccccagcccca

SEQ ID NO: 2716982 - RNA, 16 nt, Human
cuaucucccccagccc

SEQ ID NO: 2716983 - RNA, 17 nt, Human
cuaucucccccagcccc

SEQ ID NO: 2716984 - RNA, 13 nt, Human
cucaaugcacuga

SEQ ID NO: 2716985 - RNA, 15 nt, Human
cucaaugcacugaca

SEQ ID NO: 2716986 - RNA, 20 nt, Human
cucaaacucuugaccucagg

SEQ ID NO: 2716987 - RNA, 12 nt, Human
cuagccagagga

SEQ ID NO: 2716988 - RNA, 13 nt, Human
cuagccagaggag

SEQ ID NO: 2716989 - RNA, 15 nt, Human
cuagccagaggagag

SEQ ID NO: 2716990 - RNA, 13 nt, Human
cuaguuugauuaa

SEQ ID NO: 2716991 - RNA, 22 nt, Human
cuaguuguuugauucagacagc

SEQ ID NO: 2716992 - RNA, 23 nt, Human
cuaguuguuugauucagacagcu

SEQ ID NO: 2716993 - RNA, 21 nt, Human
cuaguuugauuaaauucuugc

SEQ ID NO: 2716994 - RNA, 22 nt, Human
cuaguuugauuaaauucuugca

SEQ ID NO: 2716995 - RNA, 15 nt, Human
cuaucucccccagcc

SEQ ID NO: 2716996 - RNA, 14 nt, Human
cuaucuaaauguug

SEQ ID NO: 2716997 - RNA, 15 nt, Human
cuacaaaaacacagc

SEQ ID NO: 2716998 - RNA, 18 nt, Human
cuacaaaaacacagcaag

SEQ ID NO: 2716999 - RNA, 19 nt, Human
cuacaguccucccaucuca

SEQ ID NO: 2717000 - RNA, 17 nt, Human
cuacaaaaacacagcaa

SEQ ID NO: 2717001 - RNA, 16 nt, Human
cuacaaaaacacagca

SEQ ID NO: 2717002 - RNA, 18 nt, Human
cuacauacuauggaauuu

SEQ ID NO: 2717003 - RNA, 22 nt, Human
cuacaguugaaaaacagcugag

SEQ ID NO: 2717004 - RNA, 20 nt, Human
cuacaguccucccaucucac

SEQ ID NO: 2717005 - RNA, 19 nt, Human
cuacaguugaaaaacagcu

SEQ ID NO: 2717006 - RNA, 21 nt, Human
cuacaguugaaaaacagcuga

SEQ ID NO: 2717007 - RNA, 17 nt, Human
cuaccuuuguauucucu

SEQ ID NO: 2717008 - RNA, 20 nt, Human
cuaaguaaaaccacagcagu

SEQ ID NO: 2717009 - RNA, 23 nt, Human
cuaaguaaaaccacagcaguuga

SEQ ID NO: 2717010 - RNA, 22 nt, Human
cuaaguaaaaccacagcaguug

SEQ ID NO: 2717011 - RNA, 23 nt, Human
cuaagugauccucccaccucagc

SEQ ID NO: 2717012 - RNA, 20 nt, Human
cuaaguuuuuauggcuuuug

SEQ ID NO: 2717013 - RNA, 21 nt, Human
cuaagugguacuaacuuuccu

SEQ ID NO: 2717014 - RNA, 23 nt, Human
cuaaguuuuuauggcuuuugugc

SEQ ID NO: 2717015 - RNA, 22 nt, Human
cuagaagauuuugaaauuuuua

SEQ ID NO: 2717016 - RNA, 23 nt, Human
cuagaauuugauaugugaacagu

SEQ ID NO: 2717017 - RNA, 23 nt, Human
cuagcauacguacacauuuuauu

SEQ ID NO: 2717018 - RNA, 21 nt, Human
cuagcauacguacacauuuua

SEQ ID NO: 2717019 - RNA, 15 nt, Human
ccugucuaaugaaac

SEQ ID NO: 2717020 - RNA, 22 nt, Human
ccugucuaaugaaaccuguguc

SEQ ID NO: 2717021 - RNA, 17 nt, Human
ccugucuugccuuuuuc

SEQ ID NO: 2717022 - RNA, 20 nt, Human
ccugucuugccuuuuucauu

SEQ ID NO: 2717023 - RNA, 19 nt, Human
ccugucuugccuuuuucau

SEQ ID NO: 2717024 - RNA, 21 nt, Human
ccugguggcagugggagcugc

SEQ ID NO: 2717025 - RNA, 22 nt, Human
ccuggccucugcacuccccugc

SEQ ID NO: 2717026 - RNA, 22 nt, Human
ccuggccuagcauacguacaca

SEQ ID NO: 2717027 - RNA, 20 nt, Human
ccuggccucugcacuccccu

SEQ ID NO: 2717028 - RNA, 21 nt, Human
ccuggccucugcacuccccug

SEQ ID NO: 2717029 - RNA, 11 nt, Human
ccucuuucccu

SEQ ID NO: 2717030 - RNA, 13 nt, Human
ccugcccaggccc

SEQ ID NO: 2717031 - RNA, 13 nt, Human
ccugcccaccugg

SEQ ID NO: 2717032 - RNA, 14 nt, Human
ccugcccaccuggc

SEQ ID NO: 2717033 - RNA, 20 nt, Human
ccugcccaccuggccucugc

SEQ ID NO: 2717034 - RNA, 12 nt, Human
ccugcccaccug

SEQ ID NO: 2717035 - RNA, 21 nt, Human
ccugcugcaguugccagucac

SEQ ID NO: 2717036 - RNA, 20 nt, Human
ccugcugcaguugccaguca

SEQ ID NO: 2717037 - RNA, 19 nt, Human
ccugccucgaacuggcugc

SEQ ID NO: 2717038 - RNA, 21 nt, Human
ccugccucgaacuggcugcaa

SEQ ID NO: 2717039 - RNA, 23 nt, Human
ccugccucgaacuggcugcaaag

SEQ ID NO: 2717040 - RNA, 17 nt, Human
ccugcugcaguugccag

SEQ ID NO: 2717041 - RNA, 19 nt, Human
ccugcugcaguugccaguc

SEQ ID NO: 2717042 - RNA, 18 nt, Human
ccugcacuugcagacucu

SEQ ID NO: 2717043 - RNA, 14 nt, Human
ccugcagagggcac

SEQ ID NO: 2717044 - RNA, 16 nt, Human
ccugcacuugcagacu

SEQ ID NO: 2717045 - RNA, 17 nt, Human
ccugcacuugcagacuc

SEQ ID NO: 2717046 - RNA, 13 nt, Human
ccucuuucccucc

SEQ ID NO: 2717047 - RNA, 23 nt, Human
ccucauggaauuggagcucgugg

SEQ ID NO: 2717048 - RNA, 15 nt, Human
ccucccaccucagcc

SEQ ID NO: 2717049 - RNA, 17 nt, Human
ccucccaccucagccuc

SEQ ID NO: 2717050 - RNA, 16 nt, Human
ccucccaucucacaca

SEQ ID NO: 2717051 - RNA, 13 nt, Human
ccucccaucucac

SEQ ID NO: 2717052 - RNA, 14 nt, Human
ccggccccugcugg

SEQ ID NO: 2717053 - RNA, 17 nt, Human
cccugugauggggcccu

SEQ ID NO: 2717054 - RNA, 13 nt, Human
cccuucgcuccug

SEQ ID NO: 2717055 - RNA, 20 nt, Human
cccugugauggggcccugcc

SEQ ID NO: 2717056 - RNA, 18 nt, Human
cccugugauggggcccug

SEQ ID NO: 2717057 - RNA, 19 nt, Human
cccugugauggggcccugc

SEQ ID NO: 2717058 - RNA, 20 nt, Human
cccugucucaaaaaaagaaa

SEQ ID NO: 2717059 - RNA, 23 nt, Human
cccugucucaaaaaaagaaaaag

SEQ ID NO: 2717060 - RNA, 16 nt, Human
cccugucuaaugaaac

SEQ ID NO: 2717061 - RNA, 13 nt, Human
cccugucuaauga

SEQ ID NO: 2717062 - RNA, 13 nt, Human
ccggccccugcug

SEQ ID NO: 2717063 - RNA, 21 nt, Human
cccuucucuccagccccugga

SEQ ID NO: 2717064 - RNA, 14 nt, Human
cccuucgcuccugu

SEQ ID NO: 2717065 - RNA, 15 nt, Human
cccuucgcuccugug

SEQ ID NO: 2717066 - RNA, 22 nt, Human
cccuucucuccagccccuggau

SEQ ID NO: 2717067 - RNA, 22 nt, Human
ccauuuaaagcuuauuaaaacu

SEQ ID NO: 2717068 - RNA, 14 nt, Human
ccaugggccuccug

SEQ ID NO: 2717069 - RNA, 15 nt, Human
ccaugggccuccugu

SEQ ID NO: 2717070 - RNA, 13 nt, Human
ccauacauuugug

SEQ ID NO: 2717071 - RNA, 14 nt, Human
ccauacauuugugu

SEQ ID NO: 2717072 - RNA, 23 nt, Human
ccaucccaaacccuucagugcca

SEQ ID NO: 2717073 - RNA, 12 nt, Human
ccaucccagccc

SEQ ID NO: 2717074 - RNA, 19 nt, Human
ccaguuuuguuuggaccaa

SEQ ID NO: 2717075 - RNA, 16 nt, Human
ccaguuuuguuuggac

SEQ ID NO: 2717076 - RNA, 16 nt, Human
ccauccccuguagagu

SEQ ID NO: 2717077 - RNA, 13 nt, Human
ccaugagccucag

SEQ ID NO: 2717078 - RNA, 14 nt, Human
ccaugagccucagc

SEQ ID NO: 2717079 - RNA, 18 nt, Human
ccaugagccucagcaucc

SEQ ID NO: 2717080 - RNA, 19 nt, Human
ccaugagccucagcauccu

SEQ ID NO: 2717081 - RNA, 13 nt, Human
ccaugaguccccu

SEQ ID NO: 2717082 - RNA, 13 nt, Human
ccaugggccuccu

SEQ ID NO: 2717083 - RNA, 16 nt, Human
ccaugaguccccuguu

SEQ ID NO: 2717084 - RNA, 14 nt, Human
ccaugaguccccug

SEQ ID NO: 2717085 - RNA, 15 nt, Human
ccaugaguccccugu

SEQ ID NO: 2717086 - RNA, 22 nt, Human
ccaguauuguacaaaguauuaa

SEQ ID NO: 2717087 - RNA, 20 nt, Human
ccaguauuguacaaaguauu

SEQ ID NO: 2717088 - RNA, 12 nt, Human
ccagucaccccg

SEQ ID NO: 2717089 - RNA, 13 nt, Human
ccagucaccccgg

SEQ ID NO: 2717090 - RNA, 20 nt, Human
ccagucaccccggccaccug

SEQ ID NO: 2717091 - RNA, 21 nt, Human
ccagucaccccggccaccugc

SEQ ID NO: 2717092 - RNA, 19 nt, Human
ccagucaccccggccaccu

SEQ ID NO: 2717093 - RNA, 22 nt, Human
ccaggcugggagagccuuccag

SEQ ID NO: 2717094 - RNA, 15 nt, Human
ccaggcugggagagc

SEQ ID NO: 2717095 - RNA, 17 nt, Human
ccaggcugggagagccu

SEQ ID NO: 2717096 - RNA, 18 nt, Human
ccaggcugggagagccuu

SEQ ID NO: 2717097 - RNA, 21 nt, Human
ccaggcugggagagccuucca

SEQ ID NO: 2717098 - RNA, 13 nt, Human
ccaggcugggaga

SEQ ID NO: 2717099 - RNA, 14 nt, Human
ccaggcugggagag

SEQ ID NO: 2717100 - RNA, 23 nt, Human
ccagcagagcaccuuagacaguc

SEQ ID NO: 2717101 - RNA, 19 nt, Human
ccagcagagcaccuuagac

SEQ ID NO: 2717102 - RNA, 16 nt, Human
ccagcuuaucucaggg

SEQ ID NO: 2717103 - RNA, 21 nt, Human
ccaggaaaggcuccaggagca

SEQ ID NO: 2717104 - RNA, 22 nt, Human
ccaggaaaggcuccaggagcag

SEQ ID NO: 2717105 - RNA, 23 nt, Human
ccaggaaaggcuccaggagcagc

SEQ ID NO: 2717106 - RNA, 19 nt, Human
ccagcagccuggacccugu

SEQ ID NO: 2717107 - RNA, 20 nt, Human
ccagcagccuggacccugug

SEQ ID NO: 2717108 - RNA, 15 nt, Human
ccagcagccuggacc

SEQ ID NO: 2717109 - RNA, 14 nt, Human
ccagcagccuggac

SEQ ID NO: 2717110 - RNA, 10 nt, Human
ccagccccuu

SEQ ID NO: 2717111 - RNA, 15 nt, Human
ccagcagauuauuca

SEQ ID NO: 2717112 - RNA, 21 nt, Human
ccagccccuggaugcagccuc

SEQ ID NO: 2717113 - RNA, 19 nt, Human
ccccuucgcuccugugucu

SEQ ID NO: 2717114 - RNA, 14 nt, Human
ccccuucgcuccug

SEQ ID NO: 2717115 - RNA, 15 nt, Human
ccccuucgcuccugu

SEQ ID NO: 2717116 - RNA, 17 nt, Human
ccccuucgcuccugugu

SEQ ID NO: 2717117 - RNA, 15 nt, Human
ccccauucugccugc

SEQ ID NO: 2717118 - RNA, 13 nt, Human
ccccauucugccu

SEQ ID NO: 2717119 - RNA, 14 nt, Human
ccccauucugccug

SEQ ID NO: 2717120 - RNA, 16 nt, Human
ccccuucugacccaug

SEQ ID NO: 2717121 - RNA, 17 nt, Human
ccccuucugacccaugc

SEQ ID NO: 2717122 - RNA, 12 nt, Human
cccgggaagggg

SEQ ID NO: 2717123 - RNA, 12 nt, Human
cccggcugcgga

SEQ ID NO: 2717124 - RNA, 20 nt, Human
cccucaacucuccuccagag

SEQ ID NO: 2717125 - RNA, 14 nt, Human
cccagcccacuucu

SEQ ID NO: 2717126 - RNA, 23 nt, Human
cccaggaaaggcuccaggagcag

SEQ ID NO: 2717127 - RNA, 21 nt, Human
cccaggaaaggcuccaggagc

SEQ ID NO: 2717128 - RNA, 22 nt, Human
cccaggaaaggcuccaggagca

SEQ ID NO: 2717129 - RNA, 19 nt, Human
cccaggaaaggcuccagga

SEQ ID NO: 2717130 - RNA, 21 nt, Human
cccagcugugcucuggacagg

SEQ ID NO: 2717131 - RNA, 23 nt, Human
cccagcugugcucuggacaggca

SEQ ID NO: 2717132 - RNA, 21 nt, Human
cccaggcuggcgugcaguggu

SEQ ID NO: 2717133 - RNA, 22 nt, Human
cccaggaauggagccugcacgg

SEQ ID NO: 2717134 - RNA, 20 nt, Human
cccaggaauggagccugcac

SEQ ID NO: 2717135 - RNA, 19 nt, Human
cccaggaauggagccugca

SEQ ID NO: 2717136 - RNA, 18 nt, Human
cccaggaauggagccugc

SEQ ID NO: 2717137 - RNA, 20 nt, Human
cccaggcuuagucacugaga

SEQ ID NO: 2717138 - RNA, 15 nt, Human
cccaggcuuagucac

SEQ ID NO: 2717139 - RNA, 21 nt, Human
ccccagauugcaacaggcugg

SEQ ID NO: 2717140 - RNA, 22 nt, Human
ccccagauugcaacaggcuggg

SEQ ID NO: 2717141 - RNA, 23 nt, Human
ccccagauugcaacaggcugggc

SEQ ID NO: 2717142 - RNA, 17 nt, Human
ccccagcaagugagagc

SEQ ID NO: 2717143 - RNA, 19 nt, Human
ccccagcaagugagagcug

SEQ ID NO: 2717144 - RNA, 20 nt, Human
ccccagcaagugagagcugg

SEQ ID NO: 2717145 - RNA, 17 nt, Human
ccccauccucuguacag

SEQ ID NO: 2717146 - RNA, 22 nt, Human
ccccauccucuguacagagccc

SEQ ID NO: 2717147 - RNA, 19 nt, Human
ccccauccucuguacagag

SEQ ID NO: 2717148 - RNA, 21 nt, Human
ccccauccucuguacagagcc

SEQ ID NO: 2717149 - RNA, 20 nt, Human
cccauucugccugcccaggc

SEQ ID NO: 2717150 - RNA, 21 nt, Human
cccauucugccugcccaggcc

SEQ ID NO: 2717151 - RNA, 22 nt, Human
cccauucugccugcccaggccc

SEQ ID NO: 2717152 - RNA, 14 nt, Human
ccaacucaccccag

SEQ ID NO: 2717153 - RNA, 23 nt, Human
ccaaauggaaaugggcagagcag

SEQ ID NO: 2717154 - RNA, 16 nt, Human
ccaacucaccccagcc

SEQ ID NO: 2717155 - RNA, 17 nt, Human
ccaacucaccccagccc

SEQ ID NO: 2717156 - RNA, 18 nt, Human
ccaacucaccccagcccc

SEQ ID NO: 2717157 - RNA, 17 nt, Human
ccaauauuuaccagacc

SEQ ID NO: 2717158 - RNA, 15 nt, Human
ccaaugauggucacc

SEQ ID NO: 2717159 - RNA, 14 nt, Human
ccaaugcacuuugu

SEQ ID NO: 2717160 - RNA, 18 nt, Human
ccaagcucugcuccucuc

SEQ ID NO: 2717161 - RNA, 12 nt, Human
ccaagcucugcu

SEQ ID NO: 2717162 - RNA, 17 nt, Human
ccaagcucugcuccucu

SEQ ID NO: 2717163 - RNA, 13 nt, Human
ccaagcucugcuc

SEQ ID NO: 2717164 - RNA, 14 nt, Human
ccaaugggagcuca

SEQ ID NO: 2717165 - RNA, 17 nt, Human
ccaaugggagcucaugg

SEQ ID NO: 2717166 - RNA, 19 nt, Human
cauuuguauaaaauaauuu

SEQ ID NO: 2717167 - RNA, 20 nt, Human
cauuuguauaaaauaauuuu

SEQ ID NO: 2717168 - RNA, 17 nt, Human
cauuuguauaaaauaau

SEQ ID NO: 2717169 - RNA, 20 nt, Human
cauuuguguugaagagguuu

SEQ ID NO: 2717170 - RNA, 16 nt, Human
cauuuguguugaagag

SEQ ID NO: 2717171 - RNA, 22 nt, Human
cauuuuuuuuaagaaaaaggau

SEQ ID NO: 2717172 - RNA, 20 nt, Human
ccaaaacucuccucugcugc

SEQ ID NO: 2717173 - RNA, 21 nt, Human
ccaaaacucuccucugcugcu

SEQ ID NO: 2717174 - RNA, 12 nt, Human
ccacagcaguug

SEQ ID NO: 2717175 - RNA, 18 nt, Human
ccacagcaguugaaaaga

SEQ ID NO: 2717176 - RNA, 17 nt, Human
ccacagcaguugaaaag

SEQ ID NO: 2717177 - RNA, 23 nt, Human
ccacagcaguugaaaagacucca

SEQ ID NO: 2717178 - RNA, 15 nt, Human
ccaccaucaagccac

SEQ ID NO: 2717179 - RNA, 17 nt, Human
ccaccacacccagccca

SEQ ID NO: 2717180 - RNA, 13 nt, Human
ccaccaucaagcc

SEQ ID NO: 2717181 - RNA, 14 nt, Human
ccaccaucaagcca

SEQ ID NO: 2717182 - RNA, 13 nt, Human
ccacgcccccacu

SEQ ID NO: 2717183 - RNA, 18 nt, Human
ccacgcccccacugguga

SEQ ID NO: 2717184 - RNA, 19 nt, Human
ccacgcccccacuggugac

SEQ ID NO: 2717185 - RNA, 16 nt, Human
ccacgcccccacuggu

SEQ ID NO: 2717186 - RNA, 17 nt, Human
ccacgcccccacuggug

SEQ ID NO: 2717187 - RNA, 21 nt, Human
ccaccuuugaagaaguaagga

SEQ ID NO: 2717188 - RNA, 13 nt, Human
ccaccgcagacag

SEQ ID NO: 2717189 - RNA, 22 nt, Human
ccaccgcagacaggaccaggga

SEQ ID NO: 2717190 - RNA, 19 nt, Human
ccaccgcagacaggaccag

SEQ ID NO: 2717191 - RNA, 17 nt, Human
ccacucccugcaaccug

SEQ ID NO: 2717192 - RNA, 14 nt, Human
caugauguuuagaa

SEQ ID NO: 2717193 - RNA, 13 nt, Human
caugauguuuucc

SEQ ID NO: 2717194 - RNA, 23 nt, Human
caugcuacacacugcauguuugu

SEQ ID NO: 2717195 - RNA, 20 nt, Human
caugcuacacacugcauguu

SEQ ID NO: 2717196 - RNA, 14 nt, Human
caugcuacacacug

SEQ ID NO: 2717197 - RNA, 14 nt, Human
caugggaaugaaug

SEQ ID NO: 2717198 - RNA, 15 nt, Human
caugggaaugaaugu

SEQ ID NO: 2717199 - RNA, 16 nt, Human
caugggaaugaauguc

SEQ ID NO: 2717200 - RNA, 17 nt, Human
caugggaaugaauguca

SEQ ID NO: 2717201 - RNA, 20 nt, Human
caugcuccuggcccacugca

SEQ ID NO: 2717202 - RNA, 14 nt, Human
cauguuggccaggc

SEQ ID NO: 2717203 - RNA, 15 nt, Human
cauguuggccaggcu

SEQ ID NO: 2717204 - RNA, 16 nt, Human
cauguuggccaggcug

SEQ ID NO: 2717205 - RNA, 13 nt, Human
cauucuccaccug

SEQ ID NO: 2717206 - RNA, 14 nt, Human
cauucuccaccugc

SEQ ID NO: 2717207 - RNA, 16 nt, Human
cauucuccaccugcca

SEQ ID NO: 2717208 - RNA, 22 nt, Human
cauccuggcacccggccccugc

SEQ ID NO: 2717209 - RNA, 12 nt, Human
cauccuggaaua

SEQ ID NO: 2717210 - RNA, 21 nt, Human
cauccccuguagagugggagc

SEQ ID NO: 2717211 - RNA, 14 nt, Human
caucacuucccuac

SEQ ID NO: 2717212 - RNA, 12 nt, Human
caucacuucccu

SEQ ID NO: 2717213 - RNA, 15 nt, Human
cauccuggcacccgg

SEQ ID NO: 2717214 - RNA, 23 nt, Human
cauaugcuguauauccuuucuaa

SEQ ID NO: 2717215 - RNA, 22 nt, Human
caguggugguuuucuguucuuu

SEQ ID NO: 2717216 - RNA, 21 nt, Human
caguggugguuuucuguucuu

SEQ ID NO: 2717217 - RNA, 20 nt, Human
caguggugguuuucuguucu

SEQ ID NO: 2717218 - RNA, 19 nt, Human
caguggugguuuucuguuc

SEQ ID NO: 2717219 - RNA, 19 nt, Human
cauauuaauauauuuccau

SEQ ID NO: 2717220 - RNA, 14 nt, Human
cauauuaauauauu

SEQ ID NO: 2717221 - RNA, 15 nt, Human
cauauuaauauauuu

SEQ ID NO: 2717222 - RNA, 17 nt, Human
cauauucuguuggccag

SEQ ID NO: 2717223 - RNA, 18 nt, Human
cauauucuguuggccagu

SEQ ID NO: 2717224 - RNA, 20 nt, Human
cagcuccccucggagaagag

SEQ ID NO: 2717225 - RNA, 22 nt, Human
cagcuccccucggagaagagcu

SEQ ID NO: 2717226 - RNA, 21 nt, Human
cagcuccccucggagaagagc

SEQ ID NO: 2717227 - RNA, 19 nt, Human
cagcuguucagcugguuga

SEQ ID NO: 2717228 - RNA, 24 nt, Human
cagcugugcucuggacaggcaugu

SEQ ID NO: 2717229 - RNA, 19 nt, Human
cagcugugcucuggacagg

SEQ ID NO: 2717230 - RNA, 20 nt, Human
cagcugugcucuggacaggc

SEQ ID NO: 2717231 - RNA, 19 nt, Human
cagcugagggugagugggu

SEQ ID NO: 2717232 - RNA, 12 nt, Human
cagcugccuggg

SEQ ID NO: 2717233 - RNA, 13 nt, Human
cagcugccuggga

SEQ ID NO: 2717234 - RNA, 14 nt, Human
cagcugccugggau

SEQ ID NO: 2717235 - RNA, 18 nt, Human
caggaaaagcugcugaca

SEQ ID NO: 2717236 - RNA, 15 nt, Human
caggaaaagcugcug

SEQ ID NO: 2717237 - RNA, 16 nt, Human
caggaaaagcugcuga

SEQ ID NO: 2717238 - RNA, 18 nt, Human
cagcggggacagcuccuu

SEQ ID NO: 2717239 - RNA, 19 nt, Human
cagcggggacagcuccuuc

SEQ ID NO: 2717240 - RNA, 21 nt, Human
cagcggggacagcuccuucug

SEQ ID NO: 2717241 - RNA, 12 nt, Human
cagccugcucca

SEQ ID NO: 2717242 - RNA, 19 nt, Human
cagccugcuaauuccccag

SEQ ID NO: 2717243 - RNA, 17 nt, Human
cagccucugaaaaccaa

SEQ ID NO: 2717244 - RNA, 19 nt, Human
cagccgagauagccaaggc

SEQ ID NO: 2717245 - RNA, 12 nt, Human
cagauccuggaa

SEQ ID NO: 2717246 - RNA, 22 nt, Human
cagaggggguggccucccaacu

SEQ ID NO: 2717247 - RNA, 23 nt, Human
cagaggggguggccucccaacuc

SEQ ID NO: 2717248 - RNA, 15 nt, Human
cagauucuuuccuga

SEQ ID NO: 2717249 - RNA, 17 nt, Human
cagauucuuuccugagg

SEQ ID NO: 2717250 - RNA, 18 nt, Human
cagauucuuuccugaggc

SEQ ID NO: 2717251 - RNA, 19 nt, Human
cagauucuuuccugaggcu

SEQ ID NO: 2717252 - RNA, 13 nt, Human
cagcaguucagag

SEQ ID NO: 2717253 - RNA, 17 nt, Human
cagauugcaacaggcug

SEQ ID NO: 2717254 - RNA, 20 nt, Human
cagauucuuuccugaggcug

SEQ ID NO: 2717255 - RNA, 22 nt, Human
cagauucuuuccugaggcuggg

SEQ ID NO: 2717256 - RNA, 20 nt, Human
cagcacgauuucuguuuaga

SEQ ID NO: 2717257 - RNA, 19 nt, Human
cagcacgauuucuguuuag

SEQ ID NO: 2717258 - RNA, 18 nt, Human
cagcacgauuucuguuua

SEQ ID NO: 2717259 - RNA, 16 nt, Human
cagcacgauuucuguu

SEQ ID NO: 2717260 - RNA, 20 nt, Human
cagcaucauggagguuugaa

SEQ ID NO: 2717261 - RNA, 20 nt, Human
cagucugacuguuuccauca

SEQ ID NO: 2717262 - RNA, 13 nt, Human
cagugcaugcugu

SEQ ID NO: 2717263 - RNA, 14 nt, Human
cagugcaugcuguc

SEQ ID NO: 2717264 - RNA, 15 nt, Human
cagucuggaaugcag

SEQ ID NO: 2717265 - RNA, 17 nt, Human
cagucuggaaugcagug

SEQ ID NO: 2717266 - RNA, 20 nt, Human
caguggugcgaucuggguuc

SEQ ID NO: 2717267 - RNA, 21 nt, Human
caguggugcgaucuggguuca

SEQ ID NO: 2717268 - RNA, 18 nt, Human
caguggugguuuucuguu

SEQ ID NO: 2717269 - RNA, 14 nt, Human
caguggggaaugaa

SEQ ID NO: 2717270 - RNA, 13 nt, Human
cagugcccacagg

SEQ ID NO: 2717271 - RNA, 15 nt, Human
cagugcccacaggau

SEQ ID NO: 2717272 - RNA, 16 nt, Human
cagugcaugcuguccc

SEQ ID NO: 2717273 - RNA, 17 nt, Human
cagugcaugcugucccu

SEQ ID NO: 2717274 - RNA, 17 nt, Human
cagugcccacaggauca

SEQ ID NO: 2717275 - RNA, 20 nt, Human
cagugggagcugccuguuca

SEQ ID NO: 2717276 - RNA, 23 nt, Human
cagugggagcugccuguucagcu

SEQ ID NO: 2717277 - RNA, 19 nt, Human
cagucaccucauggaauug

SEQ ID NO: 2717278 - RNA, 15 nt, Human
cagucaccucaugga

SEQ ID NO: 2717279 - RNA, 16 nt, Human
cagucaccucauggaa

SEQ ID NO: 2717280 - RNA, 19 nt, Human
caggugccaguuauggcua

SEQ ID NO: 2717281 - RNA, 21 nt, Human
caggugcacaagcuccaagcu

SEQ ID NO: 2717282 - RNA, 22 nt, Human
caggugcacaagcuccaagcuc

SEQ ID NO: 2717283 - RNA, 21 nt, Human
cagguuggugggggccucggu

SEQ ID NO: 2717284 - RNA, 14 nt, Human
cagguuuaagcugu

SEQ ID NO: 2717285 - RNA, 12 nt, Human
cagguuuuccug

SEQ ID NO: 2717286 - RNA, 16 nt, Human
cagguuuuccugaaga

SEQ ID NO: 2717287 - RNA, 15 nt, Human
caggugcacaagcuc

SEQ ID NO: 2717288 - RNA, 22 nt, Human
caggugauccacccaccucagc

SEQ ID NO: 2717289 - RNA, 23 nt, Human
caggugauccacccaccucagcc

SEQ ID NO: 2717290 - RNA, 17 nt, Human
caggugcacaagcucca

SEQ ID NO: 2717291 - RNA, 18 nt, Human
caggugcacaagcuccaa

SEQ ID NO: 2717292 - RNA, 19 nt, Human
caggugcacaagcuccaag

SEQ ID NO: 2717293 - RNA, 20 nt, Human
caggugcacaagcuccaagc

SEQ ID NO: 2717294 - RNA, 21 nt, Human
caggugauccacccaccucag

SEQ ID NO: 2717295 - RNA, 20 nt, Human
caggugauccacccaccuca

SEQ ID NO: 2717296 - RNA, 21 nt, Human
caggcugggcuucaguggcag

SEQ ID NO: 2717297 - RNA, 22 nt, Human
caggcugggcuucaguggcagc

SEQ ID NO: 2717298 - RNA, 20 nt, Human
caggcugggcuucaguggca

SEQ ID NO: 2717299 - RNA, 15 nt, Human
caggcugggagagcc

SEQ ID NO: 2717300 - RNA, 12 nt, Human
caggcugggaga

SEQ ID NO: 2717301 - RNA, 14 nt, Human
caggcugggagagc

SEQ ID NO: 2717302 - RNA, 20 nt, Human
caggggaaaaucagccugcu

SEQ ID NO: 2717303 - RNA, 19 nt, Human
caggggaaaaucagccugc

SEQ ID NO: 2717304 - RNA, 21 nt, Human
cagggcucagcggggacagcu

SEQ ID NO: 2717305 - RNA, 23 nt, Human
cagggcucagcggggacagcucc

SEQ ID NO: 2717306 - RNA, 20 nt, Human
caggccaggcccucugccca

SEQ ID NO: 2717307 - RNA, 19 nt, Human
caggccaggcccucugccc

SEQ ID NO: 2717308 - RNA, 17 nt, Human
caggccaggcccucugc

SEQ ID NO: 2717309 - RNA, 18 nt, Human
caggccaggcccucugcc

SEQ ID NO: 2717310 - RNA, 17 nt, Human
caggccagcugcuuggg

SEQ ID NO: 2717311 - RNA, 19 nt, Human
caggccagcugcuugggcu

SEQ ID NO: 2717312 - RNA, 21 nt, Human
caggccagcugcuugggcuuc

SEQ ID NO: 2717313 - RNA, 23 nt, Human
caggccagcugcuugggcuucau

SEQ ID NO: 2717314 - RNA, 18 nt, Human
caggcagauacaggaaaa

SEQ ID NO: 2717315 - RNA, 13 nt, Human
caggccagaggga

SEQ ID NO: 2717316 - RNA, 15 nt, Human
caggccagagggagu

SEQ ID NO: 2717317 - RNA, 20 nt, Human
auuucuaugaaauauuaugu

SEQ ID NO: 2717318 - RNA, 15 nt, Human
auuucuaugaaauau

SEQ ID NO: 2717319 - RNA, 18 nt, Human
auuucuaugaaauauuau

SEQ ID NO: 2717320 - RNA, 12 nt, Human
auuucuguuuag

SEQ ID NO: 2717321 - RNA, 16 nt, Human
auuucuguuuagauaa

SEQ ID NO: 2717322 - RNA, 14 nt, Human
auuucuguuuagau

SEQ ID NO: 2717323 - RNA, 19 nt, Human
auuuauacaggucauauua

SEQ ID NO: 2717324 - RNA, 14 nt, Human
auuuaaugaaagac

SEQ ID NO: 2717325 - RNA, 22 nt, Human
auuuaaugauaaguaaaugcua

SEQ ID NO: 2717326 - RNA, 19 nt, Human
auuguuuaaaaucauuucu

SEQ ID NO: 2717327 - RNA, 23 nt, Human
auuguacaaaguauuaagcauau

SEQ ID NO: 2717328 - RNA, 20 nt, Human
auuguacaaaguauuaagca

SEQ ID NO: 2717329 - RNA, 22 nt, Human
auuguacaaaguauuaagcaua

SEQ ID NO: 2717330 - RNA, 19 nt, Human
auuguucuuaguuugcagu

SEQ ID NO: 2717331 - RNA, 17 nt, Human
auuguaaaugugcuuuu

SEQ ID NO: 2717332 - RNA, 15 nt, Human
auuguaaaugugcuu

SEQ ID NO: 2717333 - RNA, 14 nt, Human
auuguaaaugugcu

SEQ ID NO: 2717334 - RNA, 15 nt, Human
auuguaaggaaugau

SEQ ID NO: 2717335 - RNA, 16 nt, Human
auuguaaggaaugauu

SEQ ID NO: 2717336 - RNA, 22 nt, Human
auucaagaaaacaacuucaaua

SEQ ID NO: 2717337 - RNA, 20 nt, Human
auuaaauuuugaguucuaca

SEQ ID NO: 2717338 - RNA, 18 nt, Human
auuaaauucuugcaaagu

SEQ ID NO: 2717339 - RNA, 14 nt, Human
auuaaauucuugca

SEQ ID NO: 2717340 - RNA, 20 nt, Human
auuaaauucuugcaaaguau

SEQ ID NO: 2717341 - RNA, 18 nt, Human
auuaaauuuugaguucua

SEQ ID NO: 2717342 - RNA, 19 nt, Human
auucauauuuacuucuuau

SEQ ID NO: 2717343 - RNA, 18 nt, Human
auucauauuuacuucuua

SEQ ID NO: 2717344 - RNA, 20 nt, Human
auucauauuuacuucuuaua

SEQ ID NO: 2717345 - RNA, 18 nt, Human
auugacuuuuuauggcac

SEQ ID NO: 2717346 - RNA, 17 nt, Human
auucuugccaaauauaa

SEQ ID NO: 2717347 - RNA, 16 nt, Human
auucucuccuguaccu

SEQ ID NO: 2717348 - RNA, 13 nt, Human
auuccugaacagg

SEQ ID NO: 2717349 - RNA, 21 nt, Human
auuccugaugcuucuucagag

SEQ ID NO: 2717350 - RNA, 21 nt, Human
auucucuccuguaccucuuga

SEQ ID NO: 2717351 - RNA, 19 nt, Human
auucucuccuguaccucuu

SEQ ID NO: 2717352 - RNA, 17 nt, Human
auucuuuccugaggcug

SEQ ID NO: 2717353 - RNA, 22 nt, Human
auucuuuccugaggcugggcuc

SEQ ID NO: 2717354 - RNA, 15 nt, Human
caaauccuugaagau

SEQ ID NO: 2717355 - RNA, 17 nt, Human
caaaucagcugcuacua

SEQ ID NO: 2717356 - RNA, 21 nt, Human
caaaguauuaagcauauauuu

SEQ ID NO: 2717357 - RNA, 19 nt, Human
caaaguauuaagcauauau

SEQ ID NO: 2717358 - RNA, 17 nt, Human
caaaguauuaagcauau

SEQ ID NO: 2717359 - RNA, 16 nt, Human
caaaguauuaagcaua

SEQ ID NO: 2717360 - RNA, 13 nt, Human
caaagaugcagcc

SEQ ID NO: 2717361 - RNA, 14 nt, Human
caaagaugcagccg

SEQ ID NO: 2717362 - RNA, 20 nt, Human
caaaguacacuguuucaaac

SEQ ID NO: 2717363 - RNA, 16 nt, Human
caaaguacacuguuuc

SEQ ID NO: 2717364 - RNA, 21 nt, Human
caaaguacacuguuucaaacu

SEQ ID NO: 2717365 - RNA, 15 nt, Human
caaaguauuaagcau

SEQ ID NO: 2717366 - RNA, 14 nt, Human
caaaguauuaagca

SEQ ID NO: 2717367 - RNA, 21 nt, Human
caaaucugcuuuuuaaagaau

SEQ ID NO: 2717368 - RNA, 23 nt, Human
caacaaaccuguuucugcagcca

SEQ ID NO: 2717369 - RNA, 15 nt, Human
caacacgagcaggcu

SEQ ID NO: 2717370 - RNA, 20 nt, Human
caacaccuuguuucccucuc

SEQ ID NO: 2717371 - RNA, 22 nt, Human
caacaccucugcacaagcugca

SEQ ID NO: 2717372 - RNA, 21 nt, Human
caacuaucucauuuccaagca

SEQ ID NO: 2717373 - RNA, 20 nt, Human
caacuauuuuuccaaaauaa

SEQ ID NO: 2717374 - RNA, 15 nt, Human
caacccccagccugc

SEQ ID NO: 2717375 - RNA, 16 nt, Human
caacccccagccugcu

SEQ ID NO: 2717376 - RNA, 17 nt, Human
caacccccagccugcua

SEQ ID NO: 2717377 - RNA, 22 nt, Human
caagacccuuguggucccaccc

SEQ ID NO: 2717378 - RNA, 18 nt, Human
caagacccuugugguccc

SEQ ID NO: 2717379 - RNA, 19 nt, Human
caagacccuugugguccca

SEQ ID NO: 2717380 - RNA, 23 nt, Human
caagaauuucuaggacugaauua

SEQ ID NO: 2717381 - RNA, 16 nt, Human
caacucaccccagccc

SEQ ID NO: 2717382 - RNA, 13 nt, Human
caacucaccccag

SEQ ID NO: 2717383 - RNA, 15 nt, Human
caacucaccccagcc

SEQ ID NO: 2717384 - RNA, 20 nt, Human
caagaauuucuaggacugaa

SEQ ID NO: 2717385 - RNA, 18 nt, Human
caaccacugcgaccacaa

SEQ ID NO: 2717386 - RNA, 18 nt, Human
auuuugauccaagcuggu

SEQ ID NO: 2717387 - RNA, 16 nt, Human
auuuguuugaacugau

SEQ ID NO: 2717388 - RNA, 14 nt, Human
auuuguuugaacug

SEQ ID NO: 2717389 - RNA, 13 nt, Human
auuuguuugaacu

SEQ ID NO: 2717390 - RNA, 15 nt, Human
caaaagcugggcagg

SEQ ID NO: 2717391 - RNA, 13 nt, Human
auuuuuaagugcu

SEQ ID NO: 2717392 - RNA, 12 nt, Human
auuuuuuuuucc

SEQ ID NO: 2717393 - RNA, 13 nt, Human
auuuuuuuuuccu

SEQ ID NO: 2717394 - RNA, 16 nt, Human
auuuuuuuuuccuuca

SEQ ID NO: 2717395 - RNA, 18 nt, Human
caaaaaaauauauuuaau

SEQ ID NO: 2717396 - RNA, 17 nt, Human
auuuuuuuuuccuucag

SEQ ID NO: 2717397 - RNA, 19 nt, Human
cacuguuucaaacuuuacu

SEQ ID NO: 2717398 - RNA, 17 nt, Human
cacuguugcccaggcug

SEQ ID NO: 2717399 - RNA, 17 nt, Human
cacuggugacaugucuu

SEQ ID NO: 2717400 - RNA, 14 nt, Human
cacuguugcccagg

SEQ ID NO: 2717401 - RNA, 15 nt, Human
cacuguugcccaggc

SEQ ID NO: 2717402 - RNA, 16 nt, Human
cacuguugcccaggcu

SEQ ID NO: 2717403 - RNA, 23 nt, Human
cacugggcuuggggaccagagcu

SEQ ID NO: 2717404 - RNA, 22 nt, Human
cacugggcuuggggaccagagc

SEQ ID NO: 2717405 - RNA, 20 nt, Human
cacugggcuuggggaccaga

SEQ ID NO: 2717406 - RNA, 22 nt, Human
cagaaguuucugccgcagcccu

SEQ ID NO: 2717407 - RNA, 20 nt, Human
cagaaguuucugccgcagcc

SEQ ID NO: 2717408 - RNA, 21 nt, Human
cagaaguuucugccgcagccc

SEQ ID NO: 2717409 - RNA, 12 nt, Human
cagaauauguuu

SEQ ID NO: 2717410 - RNA, 13 nt, Human
cagaauauugcuu

SEQ ID NO: 2717411 - RNA, 18 nt, Human
cagaauauguuucaaacu

SEQ ID NO: 2717412 - RNA, 20 nt, Human
cagaauauguuucaaacuuu

SEQ ID NO: 2717413 - RNA, 13 nt, Human
cagaauauguuuc

SEQ ID NO: 2717414 - RNA, 14 nt, Human
cagaauauguuuca

SEQ ID NO: 2717415 - RNA, 15 nt, Human
cagaauauguuucaa

SEQ ID NO: 2717416 - RNA, 17 nt, Human
cagaauauguuucaaac

SEQ ID NO: 2717417 - RNA, 17 nt, Human
cagaaauguguuaucac

SEQ ID NO: 2717418 - RNA, 23 nt, Human
caccucaaaauaccaugccauuu

SEQ ID NO: 2717419 - RNA, 13 nt, Human
caccugccaggga

SEQ ID NO: 2717420 - RNA, 14 nt, Human
caccugccagggac

SEQ ID NO: 2717421 - RNA, 16 nt, Human
caccugccagggacag

SEQ ID NO: 2717422 - RNA, 19 nt, Human
caccuugacagggcacacc

SEQ ID NO: 2717423 - RNA, 17 nt, Human
caccugccagggacaga

SEQ ID NO: 2717424 - RNA, 13 nt, Human
caccuuggcucaa

SEQ ID NO: 2717425 - RNA, 14 nt, Human
caccuuugaagaag

SEQ ID NO: 2717426 - RNA, 17 nt, Human
caccuuuguccccaccg

SEQ ID NO: 2717427 - RNA, 14 nt, Human
caccuuugucccca

SEQ ID NO: 2717428 - RNA, 15 nt, Human
caccuuuguccccac

SEQ ID NO: 2717429 - RNA, 20 nt, Human
cacggagggugacgggggug

SEQ ID NO: 2717430 - RNA, 14 nt, Human
cacggccaggccag

SEQ ID NO: 2717431 - RNA, 15 nt, Human
cacggccaggccaga

SEQ ID NO: 2717432 - RNA, 16 nt, Human
cacggccaggccagag

SEQ ID NO: 2717433 - RNA, 23 nt, Human
cacuacggaauaguuggcuagga

SEQ ID NO: 2717434 - RNA, 17 nt, Human
cacucuuauugcccacg

SEQ ID NO: 2717435 - RNA, 18 nt, Human
cacucuuauugcccacgc

SEQ ID NO: 2717436 - RNA, 19 nt, Human
cacucuuauugcccacgcu

SEQ ID NO: 2717437 - RNA, 14 nt, Human
caaguauuagaaua

SEQ ID NO: 2717438 - RNA, 20 nt, Human
caaguauuagaauaccacag

SEQ ID NO: 2717439 - RNA, 13 nt, Human
caauaaaaaauua

SEQ ID NO: 2717440 - RNA, 17 nt, Human
caauaaaaaauuaugac

SEQ ID NO: 2717441 - RNA, 16 nt, Human
caauaaaaaauuauga

SEQ ID NO: 2717442 - RNA, 12 nt, Human
caauauuucaga

SEQ ID NO: 2717443 - RNA, 20 nt, Human
caauauuucagauaaucaca

SEQ ID NO: 2717444 - RNA, 21 nt, Human
caauauuucagauaaucacaa

SEQ ID NO: 2717445 - RNA, 14 nt, Human
caaugcuguauuuu

SEQ ID NO: 2717446 - RNA, 23 nt, Human
caaugcuguauuuuaaaagaaug

SEQ ID NO: 2717447 - RNA, 22 nt, Human
caaugcuggcuguuggcugggg

SEQ ID NO: 2717448 - RNA, 23 nt, Human
caaugcuggcuguuggcuggggg

SEQ ID NO: 2717449 - RNA, 22 nt, Human
caaugcugugcccuaaagugua

SEQ ID NO: 2717450 - RNA, 14 nt, Human
cacaagacccuugu

SEQ ID NO: 2717451 - RNA, 16 nt, Human
cacaagacccuugugg

SEQ ID NO: 2717452 - RNA, 16 nt, Human
cacaagacugcacauc

SEQ ID NO: 2717453 - RNA, 14 nt, Human
cacaagccuucggc

SEQ ID NO: 2717454 - RNA, 15 nt, Human
caccagcagccugga

SEQ ID NO: 2717455 - RNA, 21 nt, Human
caccagcccuuagcagggaaa

SEQ ID NO: 2717456 - RNA, 23 nt, Human
caccaacauacucccaucuguga

SEQ ID NO: 2717457 - RNA, 14 nt, Human
caccagcagccugg

SEQ ID NO: 2717458 - RNA, 12 nt, Human
caccagcagccu

SEQ ID NO: 2717459 - RNA, 16 nt, Human
cacccagcccacuucu

SEQ ID NO: 2717460 - RNA, 17 nt, Human
cacccagcccacuucug

SEQ ID NO: 2717461 - RNA, 24 nt, Human
cacccaggagccccgaggccuucu

SEQ ID NO: 2717462 - RNA, 19 nt, Human
cacccagcccacuucugcc

SEQ ID NO: 2717463 - RNA, 20 nt, Human
cacccaggagccccgaggcc

SEQ ID NO: 2717464 - RNA, 23 nt, Human
cacccaggagccccgaggccuuc

SEQ ID NO: 2717465 - RNA, 15 nt, Human
cacauuuuauuuuau

SEQ ID NO: 2717466 - RNA, 18 nt, Human
cacaucuugcucugcuga

SEQ ID NO: 2717467 - RNA, 17 nt, Human
caccaacauacucccau

SEQ ID NO: 2717468 - RNA, 20 nt, Human
caccaacauacucccaucug

SEQ ID NO: 2717469 - RNA, 21 nt, Human
caccaacauacucccaucugu

SEQ ID NO: 2717470 - RNA, 21 nt, Human
cacauuuuuuaaaugcaccug

SEQ ID NO: 2717471 - RNA, 17 nt, Human
cacauuuuuuaaaugca

SEQ ID NO: 2717472 - RNA, 14 nt, Human
cacauuuuucuuag

SEQ ID NO: 2717473 - RNA, 13 nt, Human
cacauuuuucuua

SEQ ID NO: 2717474 - RNA, 22 nt, Human
cacaucagcacgauuucuguuu

SEQ ID NO: 2717475 - RNA, 16 nt, Human
cacaucuugcucugcu

SEQ ID NO: 2717476 - RNA, 17 nt, Human
cacaucuugcucugcug

SEQ ID NO: 2717477 - RNA, 21 nt, Human
cacaucagcacgauuucuguu

SEQ ID NO: 2717478 - RNA, 20 nt, Human
cacaucagcacgauuucugu

SEQ ID NO: 2717479 - RNA, 15 nt, Human
cacagcuaacaugga

SEQ ID NO: 2717480 - RNA, 16 nt, Human
cacagcuaacauggaa

SEQ ID NO: 2717481 - RNA, 19 nt, Human
cacagacccugcccugugg

SEQ ID NO: 2717482 - RNA, 20 nt, Human
cacagacccugcccuguggg

SEQ ID NO: 2717483 - RNA, 21 nt, Human
cacagacccugcccugugggc

SEQ ID NO: 2717484 - RNA, 22 nt, Human
cacagcuaacauggaaguacua

SEQ ID NO: 2717485 - RNA, 20 nt, Human
cacagcucuguccugggagu

SEQ ID NO: 2717486 - RNA, 23 nt, Human
cacagcucuguccugggagugag

SEQ ID NO: 2717487 - RNA, 10 nt, Human
cacagcucuu

SEQ ID NO: 2717488 - RNA, 19 nt, Human
cacagcucuguccugggag

SEQ ID NO: 2717489 - RNA, 16 nt, Human
cacaguauuacuucug

SEQ ID NO: 2717490 - RNA, 18 nt, Human
cacaguauuacuucugcu

SEQ ID NO: 2717491 - RNA, 19 nt, Human
cacaguauuacuucugcua

SEQ ID NO: 2717492 - RNA, 14 nt, Human
gaaaauuuuaaaaa

SEQ ID NO: 2717493 - RNA, 18 nt, Human
gaaaauuuugauguuuua

SEQ ID NO: 2717494 - RNA, 18 nt, Human
gaaaagacuccaaagaaa

SEQ ID NO: 2717495 - RNA, 20 nt, Human
gaaaagacuccaaagaaaug

SEQ ID NO: 2717496 - RNA, 21 nt, Human
gaaaagacuccaaagaaaugu

SEQ ID NO: 2717497 - RNA, 18 nt, Human
cuuuugccguuauuaaaa

SEQ ID NO: 2717498 - RNA, 16 nt, Human
cuuuugccguuauuaa

SEQ ID NO: 2717499 - RNA, 15 nt, Human
cuuuuggucugugug

SEQ ID NO: 2717500 - RNA, 16 nt, Human
cuuuuggucuguguga

SEQ ID NO: 2717501 - RNA, 17 nt, Human
cuuuugucuaugggacu

SEQ ID NO: 2717502 - RNA, 19 nt, Human
cuuuuguagaagucacauu

SEQ ID NO: 2717503 - RNA, 19 nt, Human
gaaaaaauauuuuccugcc

SEQ ID NO: 2717504 - RNA, 21 nt, Human
cuuuuuuuuuuuuuuugacaa

SEQ ID NO: 2717505 - RNA, 18 nt, Human
cuuuugugcauuaucuag

SEQ ID NO: 2717506 - RNA, 14 nt, Human
cuuuugugcauuau

SEQ ID NO: 2717507 - RNA, 21 nt, Human
gaacaaggcaaggcugucaau

SEQ ID NO: 2717508 - RNA, 14 nt, Human
gaacaaggcaaggc

SEQ ID NO: 2717509 - RNA, 15 nt, Human
gaacaaggcaaggcu

SEQ ID NO: 2717510 - RNA, 17 nt, Human
gaacaaggcaaggcugu

SEQ ID NO: 2717511 - RNA, 18 nt, Human
gaacaaggcaaggcuguc

SEQ ID NO: 2717512 - RNA, 23 nt, Human
gaaacuucagcgguuuauauaag

SEQ ID NO: 2717513 - RNA, 20 nt, Human
gaaacuuguguaaauacaau

SEQ ID NO: 2717514 - RNA, 16 nt, Human
gaaacuuguguaaaua

SEQ ID NO: 2717515 - RNA, 14 nt, Human
gaaacuuguguaaa

SEQ ID NO: 2717516 - RNA, 16 nt, Human
gaaaucaaauaugcaa

SEQ ID NO: 2717517 - RNA, 19 nt, Human
gaaaucaaagagagaaaau

SEQ ID NO: 2717518 - RNA, 21 nt, Human
gaaaucaaauaugcaaagcac

SEQ ID NO: 2717519 - RNA, 21 nt, Human
gaaaguacuucuccacccugc

SEQ ID NO: 2717520 - RNA, 16 nt, Human
gaaaggcuccaggagc

SEQ ID NO: 2717521 - RNA, 18 nt, Human
gaaagacuaucuaaaugu

SEQ ID NO: 2717522 - RNA, 19 nt, Human
gaaaggcuccaggagcagc

SEQ ID NO: 2717523 - RNA, 17 nt, Human
gaaaggcuccaggagca

SEQ ID NO: 2717524 - RNA, 18 nt, Human
gaaaggcuccaggagcag

SEQ ID NO: 2717525 - RNA, 17 nt, Human
gaaaucaccgaaaacgu

SEQ ID NO: 2717526 - RNA, 23 nt, Human
gaaaucaaauaugcaaagcacug

SEQ ID NO: 2717527 - RNA, 18 nt, Human
gaaauuuuuauuaaauua

SEQ ID NO: 2717528 - RNA, 19 nt, Human
gaaauuuuuauuaaauuau

SEQ ID NO: 2717529 - RNA, 16 nt, Human
gaacaagaugguucua

SEQ ID NO: 2717530 - RNA, 18 nt, Human
cuucugacccaugcugcc

SEQ ID NO: 2717531 - RNA, 16 nt, Human
cuucugacccaugcug

SEQ ID NO: 2717532 - RNA, 17 nt, Human
cuucugacccaugcugc

SEQ ID NO: 2717533 - RNA, 16 nt, Human
cuucuuauacauuuga

SEQ ID NO: 2717534 - RNA, 13 nt, Human
cuucuuauacauu

SEQ ID NO: 2717535 - RNA, 19 nt, Human
cuucugaacuuggcgcugc

SEQ ID NO: 2717536 - RNA, 15 nt, Human
cuucugacccaugcu

SEQ ID NO: 2717537 - RNA, 22 nt, Human
cuucugaacuuggcgcugcccc

SEQ ID NO: 2717538 - RNA, 14 nt, Human
cuuccucccucccu

SEQ ID NO: 2717539 - RNA, 13 nt, Human
cuuccucccuccc

SEQ ID NO: 2717540 - RNA, 12 nt, Human
cuuccucccucc

SEQ ID NO: 2717541 - RNA, 23 nt, Human
cuuggcgcugccccuggcagccc

SEQ ID NO: 2717542 - RNA, 21 nt, Human
cuuggcgcugccccuggcagc

SEQ ID NO: 2717543 - RNA, 22 nt, Human
cuuggcgcugccccuggcagcc

SEQ ID NO: 2717544 - RNA, 15 nt, Human
cuuggauuguccccg

SEQ ID NO: 2717545 - RNA, 18 nt, Human
cuuggauuguccccgacc

SEQ ID NO: 2717546 - RNA, 20 nt, Human
cuuggauuguccccgacccu

SEQ ID NO: 2717547 - RNA, 15 nt, Human
cuugauguguuaucu

SEQ ID NO: 2717548 - RNA, 19 nt, Human
cuugauucauaaugacuua

SEQ ID NO: 2717549 - RNA, 19 nt, Human
cuugccgucuaccugaggg

SEQ ID NO: 2717550 - RNA, 18 nt, Human
cuugccgucuaccugagg

SEQ ID NO: 2717551 - RNA, 17 nt, Human
cuuucaauaggaaaaac

SEQ ID NO: 2717552 - RNA, 21 nt, Human
cuugucuuuggacccugaggc

SEQ ID NO: 2717553 - RNA, 22 nt, Human
cuugucuuuggacccugaggcc

SEQ ID NO: 2717554 - RNA, 22 nt, Human
cuuuaaugucacaggcaggucc

SEQ ID NO: 2717555 - RNA, 14 nt, Human
cuuucaauaggaaa

SEQ ID NO: 2717556 - RNA, 15 nt, Human
cuuucaauaggaaaa

SEQ ID NO: 2717557 - RNA, 17 nt, Human
cuuuaaugucacaggca

SEQ ID NO: 2717558 - RNA, 18 nt, Human
cuuuaaugucacaggcag

SEQ ID NO: 2717559 - RNA, 19 nt, Human
cuuuaaugucacaggcagg

SEQ ID NO: 2717560 - RNA, 20 nt, Human
cuuuaaugucacaggcaggu

SEQ ID NO: 2717561 - RNA, 15 nt, Human
cuugguccugcugca

SEQ ID NO: 2717562 - RNA, 16 nt, Human
cuugguccugcugcag

SEQ ID NO: 2717563 - RNA, 17 nt, Human
cuugguccugcugcagu

SEQ ID NO: 2717564 - RNA, 18 nt, Human
cuugguccugcugcaguu

SEQ ID NO: 2717565 - RNA, 20 nt, Human
cuugguccugcugcaguugc

SEQ ID NO: 2717566 - RNA, 22 nt, Human
cuugguccugcugcaguugcca

SEQ ID NO: 2717567 - RNA, 20 nt, Human
cuugguucccauuugcuccu

SEQ ID NO: 2717568 - RNA, 16 nt, Human
cuugguucccauuugc

SEQ ID NO: 2717569 - RNA, 13 nt, Human
cuugucuguagau

SEQ ID NO: 2717570 - RNA, 20 nt, Human
cuugucuuuggacccugagg

SEQ ID NO: 2717571 - RNA, 21 nt, Human
cuugucucagauuuuauuaug

SEQ ID NO: 2717572 - RNA, 22 nt, Human
cugcccuuaccugccaggaagc

SEQ ID NO: 2717573 - RNA, 23 nt, Human
cugcccuuaccugccaggaagcc

SEQ ID NO: 2717574 - RNA, 11 nt, Human
cugcccugugg

SEQ ID NO: 2717575 - RNA, 12 nt, Human
cugcccuguggg

SEQ ID NO: 2717576 - RNA, 19 nt, Human
cugcccuuaccugccagga

SEQ ID NO: 2717577 - RNA, 24 nt, Human
cugcccugugaguacuacaguccu

SEQ ID NO: 2717578 - RNA, 17 nt, Human
cugcuaucaaagagguu

SEQ ID NO: 2717579 - RNA, 24 nt, Human
cugcugaaggcucgagcaugccug

SEQ ID NO: 2717580 - RNA, 23 nt, Human
cugcugaaggcucgagcaugccu

SEQ ID NO: 2717581 - RNA, 18 nt, Human
cugcugaaggcucgagca

SEQ ID NO: 2717582 - RNA, 20 nt, Human
cugccuguucagcuccagcu

SEQ ID NO: 2717583 - RNA, 23 nt, Human
cugccuguucagcuccagcucac

SEQ ID NO: 2717584 - RNA, 17 nt, Human
cugccuccccuccucug

SEQ ID NO: 2717585 - RNA, 18 nt, Human
cugccuccccuccucugc

SEQ ID NO: 2717586 - RNA, 14 nt, Human
cugccuccccuccu

SEQ ID NO: 2717587 - RNA, 21 nt, Human
cugccuccccuccucugcuug

SEQ ID NO: 2717588 - RNA, 19 nt, Human
cugccuccccuccucugcu

SEQ ID NO: 2717589 - RNA, 20 nt, Human
cugccuccccuccucugcuu

SEQ ID NO: 2717590 - RNA, 14 nt, Human
cugccuccuuugug

SEQ ID NO: 2717591 - RNA, 14 nt, Human
cugccucgaacugg

SEQ ID NO: 2717592 - RNA, 23 nt, Human
cugccuccuuugugaggaagccg

SEQ ID NO: 2717593 - RNA, 17 nt, Human
cugccuccuuugugagg

SEQ ID NO: 2717594 - RNA, 21 nt, Human
cugccuccuuugugaggaagc

SEQ ID NO: 2717595 - RNA, 19 nt, Human
cugccucgaacuggcugca

SEQ ID NO: 2717596 - RNA, 20 nt, Human
cugccucgaacuggcugcaa

SEQ ID NO: 2717597 - RNA, 20 nt, Human
cuggcagaguugaagacaga

SEQ ID NO: 2717598 - RNA, 21 nt, Human
cuggcagaguugaagacagag

SEQ ID NO: 2717599 - RNA, 23 nt, Human
cuggcagccccuguucuggcaga

SEQ ID NO: 2717600 - RNA, 22 nt, Human
cuggcagaguugaagacagagc

SEQ ID NO: 2717601 - RNA, 13 nt, Human
cuggcucuuccag

SEQ ID NO: 2717602 - RNA, 14 nt, Human
cuggcucuuccagg

SEQ ID NO: 2717603 - RNA, 15 nt, Human
cuggcucuuccaggc

SEQ ID NO: 2717604 - RNA, 17 nt, Human
cugggacuacaggcacc

SEQ ID NO: 2717605 - RNA, 21 nt, Human
cugggacuacaggcacccacc

SEQ ID NO: 2717606 - RNA, 17 nt, Human
cugggacuacaggugug

SEQ ID NO: 2717607 - RNA, 16 nt, Human
cuggcagcucagagag

SEQ ID NO: 2717608 - RNA, 17 nt, Human
cuggcagcucagagagg

SEQ ID NO: 2717609 - RNA, 19 nt, Human
cuggcagcucagagagggu

SEQ ID NO: 2717610 - RNA, 18 nt, Human
cuggaugcagccucacag

SEQ ID NO: 2717611 - RNA, 15 nt, Human
cuggaugcagccuca

SEQ ID NO: 2717612 - RNA, 16 nt, Human
cuggaugcagccucac

SEQ ID NO: 2717613 - RNA, 17 nt, Human
cuggaugcagccucaca

SEQ ID NO: 2717614 - RNA, 20 nt, Human
cugcuucaaggauccugagc

SEQ ID NO: 2717615 - RNA, 19 nt, Human
cugcuucaaggauccugag

SEQ ID NO: 2717616 - RNA, 14 nt, Human
cugcuucaaggauc

SEQ ID NO: 2717617 - RNA, 16 nt, Human
cugcuucaaggauccu

SEQ ID NO: 2717618 - RNA, 23 nt, Human
cuggaaaaguauguuagugcaaa

SEQ ID NO: 2717619 - RNA, 23 nt, Human
cugcuucagccucccgaguagcu

SEQ ID NO: 2717620 - RNA, 14 nt, Human
cugcuuccagugag

SEQ ID NO: 2717621 - RNA, 21 nt, Human
cuggagaaaauggacguguua

SEQ ID NO: 2717622 - RNA, 18 nt, Human
cuguugcccaggcuggcg

SEQ ID NO: 2717623 - RNA, 12 nt, Human
cuguuggccagu

SEQ ID NO: 2717624 - RNA, 15 nt, Human
cuguuggccagugug

SEQ ID NO: 2717625 - RNA, 19 nt, Human
cuuaaauaaugugaaacug

SEQ ID NO: 2717626 - RNA, 16 nt, Human
cuuaaauaaugugaaa

SEQ ID NO: 2717627 - RNA, 14 nt, Human
cuuaaauaauguga

SEQ ID NO: 2717628 - RNA, 13 nt, Human
cuuaaauaaugug

SEQ ID NO: 2717629 - RNA, 19 nt, Human
cuguucacagccagacugg

SEQ ID NO: 2717630 - RNA, 12 nt, Human
cuguucacagcc

SEQ ID NO: 2717631 - RNA, 22 nt, Human
cuguucacagccagacuggcac

SEQ ID NO: 2717632 - RNA, 15 nt, Human
cuguucagcuccagc

SEQ ID NO: 2717633 - RNA, 12 nt, Human
cuguucagcugg

SEQ ID NO: 2717634 - RNA, 16 nt, Human
cuguucagcuccagcu

SEQ ID NO: 2717635 - RNA, 18 nt, Human
cuguucagcuccagcuca

SEQ ID NO: 2717636 - RNA, 19 nt, Human
cuguucagcuccagcucac

SEQ ID NO: 2717637 - RNA, 22 nt, Human
cuguucagcuccagcucaccag

SEQ ID NO: 2717638 - RNA, 18 nt, Human
cugugcucuggacaggca

SEQ ID NO: 2717639 - RNA, 19 nt, Human
cugugcucuggacaggcau

SEQ ID NO: 2717640 - RNA, 22 nt, Human
cugugucagguggggcagcuug

SEQ ID NO: 2717641 - RNA, 17 nt, Human
cuguuacugucuucagu

SEQ ID NO: 2717642 - RNA, 13 nt, Human
cuguuacugucuu

SEQ ID NO: 2717643 - RNA, 17 nt, Human
cugugcucuggacaggc

SEQ ID NO: 2717644 - RNA, 15 nt, Human
cugugcucuggacag

SEQ ID NO: 2717645 - RNA, 15 nt, Human
cugugaacuugaaau

SEQ ID NO: 2717646 - RNA, 18 nt, Human
cugugaaguuuacauugu

SEQ ID NO: 2717647 - RNA, 23 nt, Human
cugugaaguuuacauuguaaaua

SEQ ID NO: 2717648 - RNA, 17 nt, Human
cugugaacuugaaauuu

SEQ ID NO: 2717649 - RNA, 16 nt, Human
cugugaacuugaaauu

SEQ ID NO: 2717650 - RNA, 22 nt, Human
cuggugacaugucuuuucuugc

SEQ ID NO: 2717651 - RNA, 17 nt, Human
cuggugacugauucuuc

SEQ ID NO: 2717652 - RNA, 15 nt, Human
cuggugacugauucu

SEQ ID NO: 2717653 - RNA, 14 nt, Human
cuggugacugauuc

SEQ ID NO: 2717654 - RNA, 13 nt, Human
cuggugacugauu

SEQ ID NO: 2717655 - RNA, 23 nt, Human
cuggugcccugcuuucagauacu

SEQ ID NO: 2717656 - RNA, 21 nt, Human
cuggugcccugcuuucagaua

SEQ ID NO: 2717657 - RNA, 19 nt, Human
cuggugcccugcuuucaga

SEQ ID NO: 2717658 - RNA, 16 nt, Human
cuggugcccugcuuuc

SEQ ID NO: 2717659 - RNA, 15 nt, Human
cuggugcccugcuuu

SEQ ID NO: 2717660 - RNA, 18 nt, Human
cuggugacugauucuuca

SEQ ID NO: 2717661 - RNA, 20 nt, Human
cuguaagaaaauaucacuug

SEQ ID NO: 2717662 - RNA, 15 nt, Human
cuguagagugggagc

SEQ ID NO: 2717663 - RNA, 22 nt, Human
cugucuaaugaaaccugugucu

SEQ ID NO: 2717664 - RNA, 20 nt, Human
cuguccugggagugagcugg

SEQ ID NO: 2717665 - RNA, 13 nt, Human
cuguccugggagu

SEQ ID NO: 2717666 - RNA, 14 nt, Human
cuguccugggagug

SEQ ID NO: 2717667 - RNA, 14 nt, Human
cugucauuugagca

SEQ ID NO: 2717668 - RNA, 23 nt, Human
gacgcuacccgggaagggggcug

SEQ ID NO: 2717669 - RNA, 22 nt, Human
gacgcuacccgggaagggggcu

SEQ ID NO: 2717670 - RNA, 15 nt, Human
gacgcugugcugccc

SEQ ID NO: 2717671 - RNA, 18 nt, Human
gacgcugugcugcccugc

SEQ ID NO: 2717672 - RNA, 16 nt, Human
gacgcugugcugcccu

SEQ ID NO: 2717673 - RNA, 17 nt, Human
gacgcugugcugcccug

SEQ ID NO: 2717674 - RNA, 21 nt, Human
gacgccaucccagccccaaug

SEQ ID NO: 2717675 - RNA, 19 nt, Human
gacgccaucccagccccaa

SEQ ID NO: 2717676 - RNA, 13 nt, Human
gaccucugccuga

SEQ ID NO: 2717677 - RNA, 12 nt, Human
gacgccauccca

SEQ ID NO: 2717678 - RNA, 13 nt, Human
gacgccaucccag

SEQ ID NO: 2717679 - RNA, 22 nt, Human
gaccucugcagcaauaaagcag

SEQ ID NO: 2717680 - RNA, 18 nt, Human
gaccucugcagcaauaaa

SEQ ID NO: 2717681 - RNA, 16 nt, Human
gaccucugcagcaaua

SEQ ID NO: 2717682 - RNA, 14 nt, Human
gaccucaggccugg

SEQ ID NO: 2717683 - RNA, 21 nt, Human
gaccucaggugagaagcagag

SEQ ID NO: 2717684 - RNA, 19 nt, Human
gaccucaggugauccaccc

SEQ ID NO: 2717685 - RNA, 20 nt, Human
gaccucaggugauccaccca

SEQ ID NO: 2717686 - RNA, 21 nt, Human
gaccucaggugauccacccac

SEQ ID NO: 2717687 - RNA, 18 nt, Human
gaccucaggugagaagca

SEQ ID NO: 2717688 - RNA, 19 nt, Human
gaccucaggugagaagcag

SEQ ID NO: 2717689 - RNA, 19 nt, Human
gaccucaggccugggggcu

SEQ ID NO: 2717690 - RNA, 19 nt, Human
gacagcuccuucuguccua

SEQ ID NO: 2717691 - RNA, 10 nt, Human
gacagcucuu

SEQ ID NO: 2717692 - RNA, 18 nt, Human
gacagucaccucauggaa

SEQ ID NO: 2717693 - RNA, 11 nt, Human
gacagcucuua

SEQ ID NO: 2717694 - RNA, 12 nt, Human
gacagucccugc

SEQ ID NO: 2717695 - RNA, 14 nt, Human
gacagucccugcca

SEQ ID NO: 2717696 - RNA, 15 nt, Human
gacagucccugccaa

SEQ ID NO: 2717697 - RNA, 16 nt, Human
gacagucccugccaau

SEQ ID NO: 2717698 - RNA, 20 nt, Human
gacagucccugccaauggac

SEQ ID NO: 2717699 - RNA, 16 nt, Human
gacagcuccuucuguc

SEQ ID NO: 2717700 - RNA, 16 nt, Human
gacagcccgggcucug

SEQ ID NO: 2717701 - RNA, 17 nt, Human
gacagcuccuucugucc

SEQ ID NO: 2717702 - RNA, 18 nt, Human
gacagcuccuucuguccu

SEQ ID NO: 2717703 - RNA, 14 nt, Human
gacagcccgggcuc

SEQ ID NO: 2717704 - RNA, 17 nt, Human
gacauugcggacagcca

SEQ ID NO: 2717705 - RNA, 23 nt, Human
gacauugcggacagccacggcca

SEQ ID NO: 2717706 - RNA, 22 nt, Human
gaauauugcugauggugcaaug

SEQ ID NO: 2717707 - RNA, 23 nt, Human
gaauauugcugauggugcaauga

SEQ ID NO: 2717708 - RNA, 22 nt, Human
gaauauugcuuuggucauauga

SEQ ID NO: 2717709 - RNA, 24 nt, Human
gaauauugcugauggugcaaugac

SEQ ID NO: 2717710 - RNA, 15 nt, Human
gaauauauaaccagu

SEQ ID NO: 2717711 - RNA, 11 nt, Human
gaauauugcug

SEQ ID NO: 2717712 - RNA, 12 nt, Human
gaauauugcuga

SEQ ID NO: 2717713 - RNA, 13 nt, Human
gaauauugcugau

SEQ ID NO: 2717714 - RNA, 22 nt, Human
gaauaucuccgucaacucauau

SEQ ID NO: 2717715 - RNA, 21 nt, Human
gacacagcucuucuccaggcu

SEQ ID NO: 2717716 - RNA, 12 nt, Human
gacacagcucuu

SEQ ID NO: 2717717 - RNA, 19 nt, Human
gacacagcucuucuccagg

SEQ ID NO: 2717718 - RNA, 20 nt, Human
gacacagcucuucuccaggc

SEQ ID NO: 2717719 - RNA, 14 nt, Human
gaauuaugaaacuu

SEQ ID NO: 2717720 - RNA, 14 nt, Human
gaaugauuaugaau

SEQ ID NO: 2717721 - RNA, 14 nt, Human
gaaugauuaauuaa

SEQ ID NO: 2717722 - RNA, 20 nt, Human
gaaugaugauccuaggcauu

SEQ ID NO: 2717723 - RNA, 14 nt, Human
gaaugaugccauga

SEQ ID NO: 2717724 - RNA, 22 nt, Human
gaaugauuaugaauuacauuug

SEQ ID NO: 2717725 - RNA, 18 nt, Human
gaaugcacaaacagaggc

SEQ ID NO: 2717726 - RNA, 15 nt, Human
gaauguuugccucug

SEQ ID NO: 2717727 - RNA, 19 nt, Human
gaaugcacaaacagaggcc

SEQ ID NO: 2717728 - RNA, 16 nt, Human
gaauguuugccucugc

SEQ ID NO: 2717729 - RNA, 17 nt, Human
gaauguuugccucugcc

SEQ ID NO: 2717730 - RNA, 18 nt, Human
gaauguuugccucugccu

SEQ ID NO: 2717731 - RNA, 19 nt, Human
gaauguuugccucugccuc

SEQ ID NO: 2717732 - RNA, 13 nt, Human
gaauuacauuugu

SEQ ID NO: 2717733 - RNA, 15 nt, Human
gaauuacauuuguau

SEQ ID NO: 2717734 - RNA, 18 nt, Human
gaauuacauuuguauaaa

SEQ ID NO: 2717735 - RNA, 20 nt, Human
gaauuacauuuguauaaaau

SEQ ID NO: 2717736 - RNA, 22 nt, Human
gacuuuuuauggcacuaguauu

SEQ ID NO: 2717737 - RNA, 19 nt, Human
gacuuuuccaacccucauc

SEQ ID NO: 2717738 - RNA, 14 nt, Human
gacuuuuccaaccc

SEQ ID NO: 2717739 - RNA, 20 nt, Human
gacuuuuccaacccucauca

SEQ ID NO: 2717740 - RNA, 21 nt, Human
gagacccugucucaaaaaaag

SEQ ID NO: 2717741 - RNA, 15 nt, Human
gagaaugaaagggcc

SEQ ID NO: 2717742 - RNA, 23 nt, Human
gagaaugaaagggcccagagagg

SEQ ID NO: 2717743 - RNA, 18 nt, Human
gagacgggggcagagagg

SEQ ID NO: 2717744 - RNA, 16 nt, Human
gagacggagucccacc

SEQ ID NO: 2717745 - RNA, 19 nt, Human
gagacggagucccaccuug

SEQ ID NO: 2717746 - RNA, 14 nt, Human
gagacggaguccca

SEQ ID NO: 2717747 - RNA, 21 nt, Human
gagauugcaccacugcacucc

SEQ ID NO: 2717748 - RNA, 14 nt, Human
gagauuggaaggaa

SEQ ID NO: 2717749 - RNA, 15 nt, Human
gagaggacccccuga

SEQ ID NO: 2717750 - RNA, 12 nt, Human
gagaggaaauca

SEQ ID NO: 2717751 - RNA, 20 nt, Human
gagagcugggugucaagagg

SEQ ID NO: 2717752 - RNA, 13 nt, Human
gagacuccugcag

SEQ ID NO: 2717753 - RNA, 14 nt, Human
gagacuccugcagg

SEQ ID NO: 2717754 - RNA, 15 nt, Human
gagagccuuccaggg

SEQ ID NO: 2717755 - RNA, 16 nt, Human
gagagccuuccagggg

SEQ ID NO: 2717756 - RNA, 15 nt, Human
gagagcuagcagcag

SEQ ID NO: 2717757 - RNA, 21 nt, Human
gagagcuagcagcagggaggg

SEQ ID NO: 2717758 - RNA, 13 nt, Human
gagagcugggugu

SEQ ID NO: 2717759 - RNA, 18 nt, Human
gagagccuuccaggggug

SEQ ID NO: 2717760 - RNA, 20 nt, Human
gagagccuuccagggguggg

SEQ ID NO: 2717761 - RNA, 22 nt, Human
gagcuguucacagccagacugg

SEQ ID NO: 2717762 - RNA, 20 nt, Human
gagcuguucacagccagacu

SEQ ID NO: 2717763 - RNA, 17 nt, Human
gagcuguucacagccag

SEQ ID NO: 2717764 - RNA, 13 nt, Human
gagcccugguggc

SEQ ID NO: 2717765 - RNA, 14 nt, Human
gagcccugguggca

SEQ ID NO: 2717766 - RNA, 13 nt, Human
gagccccgaggcc

SEQ ID NO: 2717767 - RNA, 14 nt, Human
gagccccgaggccu

SEQ ID NO: 2717768 - RNA, 17 nt, Human
gagccccgaggccuucu

SEQ ID NO: 2717769 - RNA, 14 nt, Human
gagcagucaggaaa

SEQ ID NO: 2717770 - RNA, 14 nt, Human
gagcaucaggccag

SEQ ID NO: 2717771 - RNA, 21 nt, Human
gagcagggcucagcggggaca

SEQ ID NO: 2717772 - RNA, 13 nt, Human
gagcaucaggcca

SEQ ID NO: 2717773 - RNA, 15 nt, Human
gagcaucaggccagg

SEQ ID NO: 2717774 - RNA, 16 nt, Human
gagcaucaggccaggc

SEQ ID NO: 2717775 - RNA, 13 nt, Human
gagcaugccugga

SEQ ID NO: 2717776 - RNA, 21 nt, Human
gagcaugccuggauggggcug

SEQ ID NO: 2717777 - RNA, 16 nt, Human
gaggacuuuucuuugu

SEQ ID NO: 2717778 - RNA, 20 nt, Human
gaggacuuuucuuuguggcu

SEQ ID NO: 2717779 - RNA, 23 nt, Human
gaggacuuuucuuuguggcuucc

SEQ ID NO: 2717780 - RNA, 12 nt, Human
gaggagagagga

SEQ ID NO: 2717781 - RNA, 14 nt, Human
gaggagagaggacc

SEQ ID NO: 2717782 - RNA, 15 nt, Human
gaggagagaggaccc

SEQ ID NO: 2717783 - RNA, 19 nt, Human
gaggcagggucucacucug

SEQ ID NO: 2717784 - RNA, 20 nt, Human
gaggcagggucucacucugu

SEQ ID NO: 2717785 - RNA, 18 nt, Human
gaggcagggucucacucu

SEQ ID NO: 2717786 - RNA, 14 nt, Human
gagggccugcaagg

SEQ ID NO: 2717787 - RNA, 17 nt, Human
gagggccugcaagggag

SEQ ID NO: 2717788 - RNA, 21 nt, Human
gagggccugcaagggagugag

SEQ ID NO: 2717789 - RNA, 21 nt, Human
gaggcauuuguuugaacugau

SEQ ID NO: 2717790 - RNA, 19 nt, Human
gaggcauuuguuugaacug

SEQ ID NO: 2717791 - RNA, 22 nt, Human
gaggcaugugaugagaggaaau

SEQ ID NO: 2717792 - RNA, 20 nt, Human
gaggcaugugaugagaggaa

SEQ ID NO: 2717793 - RNA, 21 nt, Human
gaggcaugugaugagaggaaa

SEQ ID NO: 2717794 - RNA, 15 nt, Human
gaucugccuaaggac

SEQ ID NO: 2717795 - RNA, 12 nt, Human
gaucugccuaag

SEQ ID NO: 2717796 - RNA, 16 nt, Human
gaucugccuaaggacu

SEQ ID NO: 2717797 - RNA, 18 nt, Human
gauccagcagauuauuca

SEQ ID NO: 2717798 - RNA, 19 nt, Human
gauccagcagauuauucac

SEQ ID NO: 2717799 - RNA, 15 nt, Human
gaucucuaacuucac

SEQ ID NO: 2717800 - RNA, 18 nt, Human
gaucucuugagccuggga

SEQ ID NO: 2717801 - RNA, 19 nt, Human
gaucucuugagccugggag

SEQ ID NO: 2717802 - RNA, 22 nt, Human
gaugauuggaggggggaggugg

SEQ ID NO: 2717803 - RNA, 13 nt, Human
gaugauccuaggc

SEQ ID NO: 2717804 - RNA, 14 nt, Human
gaugauccuaggca

SEQ ID NO: 2717805 - RNA, 23 nt, Human
gaugcuucucacugccaugccag

SEQ ID NO: 2717806 - RNA, 21 nt, Human
gaugcuucuucagagacuccu

SEQ ID NO: 2717807 - RNA, 17 nt, Human
gaugcuucuucagagac

SEQ ID NO: 2717808 - RNA, 20 nt, Human
gaugcuucuucagagacucc

SEQ ID NO: 2717809 - RNA, 12 nt, Human
gaugauuucuau

SEQ ID NO: 2717810 - RNA, 23 nt, Human
gaugauuucuaugcugaguuugu

SEQ ID NO: 2717811 - RNA, 13 nt, Human
gaugauuucuaug

SEQ ID NO: 2717812 - RNA, 16 nt, Human
gauacaguuacucaga

SEQ ID NO: 2717813 - RNA, 23 nt, Human
gauacaguuacucagaauucucu

SEQ ID NO: 2717814 - RNA, 19 nt, Human
gauacaguuacucagaauu

SEQ ID NO: 2717815 - RNA, 12 nt, Human
gauacugaaaua

SEQ ID NO: 2717816 - RNA, 21 nt, Human
gauacuguaucaugacaaaga

SEQ ID NO: 2717817 - RNA, 17 nt, Human
gauacuguaucaugaca

SEQ ID NO: 2717818 - RNA, 20 nt, Human
gauacuggauuguacuuugu

SEQ ID NO: 2717819 - RNA, 16 nt, Human
gauacuggauuguacu

SEQ ID NO: 2717820 - RNA, 12 nt, Human
gauccaagcugg

SEQ ID NO: 2717821 - RNA, 16 nt, Human
gauccaagcugguccc

SEQ ID NO: 2717822 - RNA, 17 nt, Human
gauccaagcugguccca

SEQ ID NO: 2717823 - RNA, 19 nt, Human
gauccaagcuggucccacu

SEQ ID NO: 2717824 - RNA, 22 nt, Human
gauccacccaccucagccuccc

SEQ ID NO: 2717825 - RNA, 20 nt, Human
gauccacccaccucagccuc

SEQ ID NO: 2717826 - RNA, 21 nt, Human
gauccacccaccucagccucc

SEQ ID NO: 2717827 - RNA, 21 nt, Human
gauccaagcuggucccacuca

SEQ ID NO: 2717828 - RNA, 18 nt, Human
gauccacccaccucagcc

SEQ ID NO: 2717829 - RNA, 19 nt, Human
gauccacccaccucagccu

SEQ ID NO: 2717830 - RNA, 23 nt, Human
gaucaaaagguuaauaaaguaau

SEQ ID NO: 2717831 - RNA, 20 nt, Human
gaucaaaagguuaauaaagu

SEQ ID NO: 2717832 - RNA, 17 nt, Human
gauauuuuuuucuuuuc

SEQ ID NO: 2717833 - RNA, 16 nt, Human
gcaagugagagcuggg

SEQ ID NO: 2717834 - RNA, 15 nt, Human
gcaagugagagcugg

SEQ ID NO: 2717835 - RNA, 20 nt, Human
gcaaccuccgccucuugggu

SEQ ID NO: 2717836 - RNA, 14 nt, Human
gcaacccccagccu

SEQ ID NO: 2717837 - RNA, 15 nt, Human
gcaacccccagccug

SEQ ID NO: 2717838 - RNA, 16 nt, Human
gcaacccccagccugc

SEQ ID NO: 2717839 - RNA, 19 nt, Human
gcaaccuccgccucuuggg

SEQ ID NO: 2717840 - RNA, 14 nt, Human
gcaacaggcugggc

SEQ ID NO: 2717841 - RNA, 15 nt, Human
gcaacaggcugggcu

SEQ ID NO: 2717842 - RNA, 13 nt, Human
gcaacaggcuggg

SEQ ID NO: 2717843 - RNA, 16 nt, Human
gcaacaggcugggcuu

SEQ ID NO: 2717844 - RNA, 19 nt, Human
gcaacaggcugggcuucag

SEQ ID NO: 2717845 - RNA, 13 nt, Human
gcaaccaccacca

SEQ ID NO: 2717846 - RNA, 16 nt, Human
gcaaccaccaccaacc

SEQ ID NO: 2717847 - RNA, 18 nt, Human
gcaaccaccaccaaccac

SEQ ID NO: 2717848 - RNA, 12 nt, Human
gauucuucugcu

SEQ ID NO: 2717849 - RNA, 13 nt, Human
gauucuucugcuu

SEQ ID NO: 2717850 - RNA, 15 nt, Human
gauucuucugcuuca

SEQ ID NO: 2717851 - RNA, 19 nt, Human
gauuuaacagaaauguaca

SEQ ID NO: 2717852 - RNA, 20 nt, Human
gauucuucugcuucagccuc

SEQ ID NO: 2717853 - RNA, 16 nt, Human
gauuuaacagaaaugu

SEQ ID NO: 2717854 - RNA, 18 nt, Human
gauuuaacagaaauguac

SEQ ID NO: 2717855 - RNA, 17 nt, Human
gauuuaacagaaaugua

SEQ ID NO: 2717856 - RNA, 11 nt, Human
gauuucacucu

SEQ ID NO: 2717857 - RNA, 16 nt, Human
gauuuuuuuuuccuuc

SEQ ID NO: 2717858 - RNA, 12 nt, Human
gauuucacucuc

SEQ ID NO: 2717859 - RNA, 17 nt, Human
gauuuuuuuuuccuuca

SEQ ID NO: 2717860 - RNA, 18 nt, Human
gauuuuuuuuuccuucag

SEQ ID NO: 2717861 - RNA, 17 nt, Human
gcaaaagaugcuucuca

SEQ ID NO: 2717862 - RNA, 22 nt, Human
gcaaaagaugcuucucacugcc

SEQ ID NO: 2717863 - RNA, 14 nt, Human
gcaaaaaggcagga

SEQ ID NO: 2717864 - RNA, 21 nt, Human
gauuuuuuuuuccuucagugc

SEQ ID NO: 2717865 - RNA, 18 nt, Human
gcauacguacacauuuua

SEQ ID NO: 2717866 - RNA, 13 nt, Human
gcagugaugucac

SEQ ID NO: 2717867 - RNA, 22 nt, Human
gcaguuguugcccacagcugua

SEQ ID NO: 2717868 - RNA, 15 nt, Human
gcauacguacacauu

SEQ ID NO: 2717869 - RNA, 17 nt, Human
gcauacguacacauuuu

SEQ ID NO: 2717870 - RNA, 16 nt, Human
gcauacguacacauuu

SEQ ID NO: 2717871 - RNA, 13 nt, Human
gcauccuggcacc

SEQ ID NO: 2717872 - RNA, 21 nt, Human
gcauggcugccaaugggagcu

SEQ ID NO: 2717873 - RNA, 18 nt, Human
gcaugugaugagaggaaa

SEQ ID NO: 2717874 - RNA, 19 nt, Human
gcaugugaugagaggaaau

SEQ ID NO: 2717875 - RNA, 21 nt, Human
gcaugugaugagaggaaauca

SEQ ID NO: 2717876 - RNA, 13 nt, Human
gcauugugggaag

SEQ ID NO: 2717877 - RNA, 15 nt, Human
gcauugugggaaggg

SEQ ID NO: 2717878 - RNA, 15 nt, Human
gcauuuacuuugugu

SEQ ID NO: 2717879 - RNA, 22 nt, Human
gcauuuaaaagauacaguuacu

SEQ ID NO: 2717880 - RNA, 18 nt, Human
gcauuuaaaagauacagu

SEQ ID NO: 2717881 - RNA, 17 nt, Human
gcauuuaaaagauacag

SEQ ID NO: 2717882 - RNA, 16 nt, Human
gcauuuaaaagauaca

SEQ ID NO: 2717883 - RNA, 16 nt, Human
gcauugugggaagggg

SEQ ID NO: 2717884 - RNA, 18 nt, Human
gcauugugggaaggggag

SEQ ID NO: 2717885 - RNA, 18 nt, Human
gcauccaguaucuugaag

SEQ ID NO: 2717886 - RNA, 14 nt, Human
gcauccaguaucuu

SEQ ID NO: 2717887 - RNA, 17 nt, Human
gcauccaguaucuugaa

SEQ ID NO: 2717888 - RNA, 20 nt, Human
gcacucagaagacacugaug

SEQ ID NO: 2717889 - RNA, 17 nt, Human
gcacucagaagacacug

SEQ ID NO: 2717890 - RNA, 18 nt, Human
gcaagugagagcugggug

SEQ ID NO: 2717891 - RNA, 19 nt, Human
gcaagugagagcugggugu

SEQ ID NO: 2717892 - RNA, 22 nt, Human
gcacuuuguucuggcucuucca

SEQ ID NO: 2717893 - RNA, 14 nt, Human
gcacuccagccugg

SEQ ID NO: 2717894 - RNA, 13 nt, Human
gcacuccccugcu

SEQ ID NO: 2717895 - RNA, 14 nt, Human
gcacuccccugcug

SEQ ID NO: 2717896 - RNA, 12 nt, Human
gcacuccccugc

SEQ ID NO: 2717897 - RNA, 15 nt, Human
gcacuccccugcugg

SEQ ID NO: 2717898 - RNA, 18 nt, Human
gcacuuuguucuggcucu

SEQ ID NO: 2717899 - RNA, 19 nt, Human
gcacuuuguucuggcucuu

SEQ ID NO: 2717900 - RNA, 21 nt, Human
gcagaggaaagcaaaggagau

SEQ ID NO: 2717901 - RNA, 13 nt, Human
gcagaggaaagca

SEQ ID NO: 2717902 - RNA, 14 nt, Human
gcagaggaaagcaa

SEQ ID NO: 2717903 - RNA, 18 nt, Human
gcagaggaaagcaaagga

SEQ ID NO: 2717904 - RNA, 20 nt, Human
gcagaggaaagcaaaggaga

SEQ ID NO: 2717905 - RNA, 14 nt, Human
gcagagggcacaga

SEQ ID NO: 2717906 - RNA, 17 nt, Human
gcagcauauucaggaag

SEQ ID NO: 2717907 - RNA, 18 nt, Human
gcagcauauucaggaagc

SEQ ID NO: 2717908 - RNA, 19 nt, Human
gcagcauauucaggaagcu

SEQ ID NO: 2717909 - RNA, 23 nt, Human
gcagcauauucaggaagcucagg

SEQ ID NO: 2717910 - RNA, 18 nt, Human
gcagcccaccccucaaca

SEQ ID NO: 2717911 - RNA, 15 nt, Human
gcagccacauuccug

SEQ ID NO: 2717912 - RNA, 20 nt, Human
gcuggguucuacccaggugc

SEQ ID NO: 2717913 - RNA, 21 nt, Human
gcuggguucuacccaggugcu

SEQ ID NO: 2717914 - RNA, 22 nt, Human
gcugggguggggaccucaggcc

SEQ ID NO: 2717915 - RNA, 23 nt, Human
gcugggguggggaccucaggccu

SEQ ID NO: 2717916 - RNA, 18 nt, Human
gcuggguucuacccaggu

SEQ ID NO: 2717917 - RNA, 17 nt, Human
gcuggguucuacccagg

SEQ ID NO: 2717918 - RNA, 14 nt, Human
gcugggcagguugg

SEQ ID NO: 2717919 - RNA, 17 nt, Human
gcuggcuguuggcuggg

SEQ ID NO: 2717920 - RNA, 20 nt, Human
gcuggcuguuggcugggggc

SEQ ID NO: 2717921 - RNA, 23 nt, Human
gcuggcuguuggcugggggccuc

SEQ ID NO: 2717922 - RNA, 17 nt, Human
gcugggguggggaccuc

SEQ ID NO: 2717923 - RNA, 19 nt, Human
gcugggguggggaccucag

SEQ ID NO: 2717924 - RNA, 14 nt, Human
gcuggcgugcagug

SEQ ID NO: 2717925 - RNA, 15 nt, Human
gcuggcgugcagugg

SEQ ID NO: 2717926 - RNA, 18 nt, Human
gcuggcgugcaguggugc

SEQ ID NO: 2717927 - RNA, 18 nt, Human
gcuggcuguuggcugggg

SEQ ID NO: 2717928 - RNA, 19 nt, Human
gcuggcuguuggcuggggg

SEQ ID NO: 2717929 - RNA, 12 nt, Human
gcugcugaaggc

SEQ ID NO: 2717930 - RNA, 13 nt, Human
gcugcugaaacaa

SEQ ID NO: 2717931 - RNA, 17 nt, Human
gcuguaucccaugagcc

SEQ ID NO: 2717932 - RNA, 19 nt, Human
gcuguaucccaugagccuc

SEQ ID NO: 2717933 - RNA, 21 nt, Human
gcuguauuuuaaaagaaugau

SEQ ID NO: 2717934 - RNA, 20 nt, Human
gcuguauuuuaaaagaauga

SEQ ID NO: 2717935 - RNA, 18 nt, Human
gcuguauuuuaaaagaau

SEQ ID NO: 2717936 - RNA, 13 nt, Human
gcugugcucugga

SEQ ID NO: 2717937 - RNA, 18 nt, Human
gcugugcucuggacaggc

SEQ ID NO: 2717938 - RNA, 14 nt, Human
gcugugcugcccug

SEQ ID NO: 2717939 - RNA, 15 nt, Human
gcugugcucuggaca

SEQ ID NO: 2717940 - RNA, 16 nt, Human
gcugugcucuggacag

SEQ ID NO: 2717941 - RNA, 16 nt, Human
gcuguuggcugggggc

SEQ ID NO: 2717942 - RNA, 20 nt, Human
gcuguuggcugggggccuca

SEQ ID NO: 2717943 - RNA, 15 nt, Human
gcuguuggcuggggg

SEQ ID NO: 2717944 - RNA, 17 nt, Human
gcugugcugcccugccc

SEQ ID NO: 2717945 - RNA, 15 nt, Human
gcugugcugcccugc

SEQ ID NO: 2717946 - RNA, 16 nt, Human
gcugugcugcccugcc

SEQ ID NO: 2717947 - RNA, 18 nt, Human
gcugagggugagugggug

SEQ ID NO: 2717948 - RNA, 23 nt, Human
gcugagggugagugggugaauaa

SEQ ID NO: 2717949 - RNA, 14 nt, Human
gcugaggugggagg

SEQ ID NO: 2717950 - RNA, 18 nt, Human
gcugcacccucaggcagg

SEQ ID NO: 2717951 - RNA, 19 nt, Human
gcugcacccucaggcaggu

SEQ ID NO: 2717952 - RNA, 13 nt, Human
gcugcaccggcug

SEQ ID NO: 2717953 - RNA, 14 nt, Human
gcugccuccccucc

SEQ ID NO: 2717954 - RNA, 20 nt, Human
gcugccugggaucccucauc

SEQ ID NO: 2717955 - RNA, 16 nt, Human
gcugccucucccauca

SEQ ID NO: 2717956 - RNA, 21 nt, Human
gcugccugggaucccucaucc

SEQ ID NO: 2717957 - RNA, 17 nt, Human
gcugccuguucagcucc

SEQ ID NO: 2717958 - RNA, 12 nt, Human
gcugccuguuca

SEQ ID NO: 2717959 - RNA, 13 nt, Human
gcugccuguucag

SEQ ID NO: 2717960 - RNA, 17 nt, Human
gcugccccuggcagccc

SEQ ID NO: 2717961 - RNA, 20 nt, Human
gcugccccuggcagccccug

SEQ ID NO: 2717962 - RNA, 18 nt, Human
gcugccccuggcagcccc

SEQ ID NO: 2717963 - RNA, 19 nt, Human
gcugccccuggcagccccu

SEQ ID NO: 2717964 - RNA, 21 nt, Human
ggaagccagcaggcucucagg

SEQ ID NO: 2717965 - RNA, 18 nt, Human
ggaagccgcuggggccag

SEQ ID NO: 2717966 - RNA, 22 nt, Human
ggaagccagcaggcucucaggc

SEQ ID NO: 2717967 - RNA, 23 nt, Human
ggaagccagcaggcucucaggcc

SEQ ID NO: 2717968 - RNA, 19 nt, Human
ggaaaucaggguuaguauu

SEQ ID NO: 2717969 - RNA, 23 nt, Human
ggaaaucaccgaaaacguggcug

SEQ ID NO: 2717970 - RNA, 13 nt, Human
ggacauggacaag

SEQ ID NO: 2717971 - RNA, 17 nt, Human
ggacagucaccucaugg

SEQ ID NO: 2717972 - RNA, 18 nt, Human
ggacagucaccucaugga

SEQ ID NO: 2717973 - RNA, 21 nt, Human
ggacagucaccucauggaauu

SEQ ID NO: 2717974 - RNA, 13 nt, Human
ggacacccuguga

SEQ ID NO: 2717975 - RNA, 23 nt, Human
ggacacccugugauggggcccug

SEQ ID NO: 2717976 - RNA, 23 nt, Human
ggacaggcauguucucugaggac

SEQ ID NO: 2717977 - RNA, 17 nt, Human
ggacagggaggugaccc

SEQ ID NO: 2717978 - RNA, 16 nt, Human
ggaauauauaaccagu

SEQ ID NO: 2717979 - RNA, 19 nt, Human
ggaauacucuuauaucuau

SEQ ID NO: 2717980 - RNA, 16 nt, Human
ggaauaccuguccccc

SEQ ID NO: 2717981 - RNA, 19 nt, Human
ggaauaccugucccccuga

SEQ ID NO: 2717982 - RNA, 15 nt, Human
ggaagccugauuaaa

SEQ ID NO: 2717983 - RNA, 16 nt, Human
ggaagcucagggccug

SEQ ID NO: 2717984 - RNA, 17 nt, Human
ggaagcucagggccugg

SEQ ID NO: 2717985 - RNA, 15 nt, Human
ggaauaccugucccc

SEQ ID NO: 2717986 - RNA, 22 nt, Human
ggaagcucagggccuggcucag

SEQ ID NO: 2717987 - RNA, 21 nt, Human
ggaagcucagggccuggcuca

SEQ ID NO: 2717988 - RNA, 12 nt, Human
ggacacagcucu

SEQ ID NO: 2717989 - RNA, 19 nt, Human
ggaaugaaugucaguguga

SEQ ID NO: 2717990 - RNA, 13 nt, Human
ggacacagcucuu

SEQ ID NO: 2717991 - RNA, 12 nt, Human
ggacacccugug

SEQ ID NO: 2717992 - RNA, 17 nt, Human
gcuuaacuucacauauu

SEQ ID NO: 2717993 - RNA, 16 nt, Human
gcuucuucagagacuc

SEQ ID NO: 2717994 - RNA, 16 nt, Human
gcuuaacuucacauau

SEQ ID NO: 2717995 - RNA, 19 nt, Human
gcuucuucagagacuccug

SEQ ID NO: 2717996 - RNA, 21 nt, Human
gcuucuucagagacuccugca

SEQ ID NO: 2717997 - RNA, 16 nt, Human
gcuugaccgugaggcc

SEQ ID NO: 2717998 - RNA, 23 nt, Human
gcuucuucagagacuccugcagg

SEQ ID NO: 2717999 - RNA, 17 nt, Human
gcuugaccgugaggcca

SEQ ID NO: 2718000 - RNA, 18 nt, Human
gcuugaccgugaggccag

SEQ ID NO: 2718001 - RNA, 19 nt, Human
gcuugaccgugaggccaga

SEQ ID NO: 2718002 - RNA, 23 nt, Human
gcuugggcuucauccuccucaga

SEQ ID NO: 2718003 - RNA, 16 nt, Human
gcuuggggaccagagc

SEQ ID NO: 2718004 - RNA, 22 nt, Human
gcuuggggaccagagcugccac

SEQ ID NO: 2718005 - RNA, 17 nt, Human
gcuuggggaccagagcu

SEQ ID NO: 2718006 - RNA, 18 nt, Human
gcuuggggaccagagcug

SEQ ID NO: 2718007 - RNA, 20 nt, Human
gcuuggggaccagagcugcc

SEQ ID NO: 2718008 - RNA, 21 nt, Human
gcuuggggaccagagcugcca

SEQ ID NO: 2718009 - RNA, 23 nt, Human
gcuuucuacccagcgagcccugg

SEQ ID NO: 2718010 - RNA, 13 nt, Human
gcuuucuacccag

SEQ ID NO: 2718011 - RNA, 19 nt, Human
gcuuucuacccagcgagcc

SEQ ID NO: 2718012 - RNA, 22 nt, Human
gcuuucuacccagcgagcccug

SEQ ID NO: 2718013 - RNA, 16 nt, Human
ggaaaaaauaacaaug

SEQ ID NO: 2718014 - RNA, 15 nt, Human
gcuuuuuaauauuga

SEQ ID NO: 2718015 - RNA, 19 nt, Human
gcuuuugugcauuaucuag

SEQ ID NO: 2718016 - RNA, 13 nt, Human
gcuuuugugcauu

SEQ ID NO: 2718017 - RNA, 13 nt, Human
ggaaacugccagc

SEQ ID NO: 2718018 - RNA, 20 nt, Human
ggaaacagcuaaugggacac

SEQ ID NO: 2718019 - RNA, 15 nt, Human
ggaaacccagcucug

SEQ ID NO: 2718020 - RNA, 19 nt, Human
ggaaagcaaaggagauugg

SEQ ID NO: 2718021 - RNA, 16 nt, Human
ggaaagaguaggaaga

SEQ ID NO: 2718022 - RNA, 17 nt, Human
ggaaagaguaggaagac

SEQ ID NO: 2718023 - RNA, 20 nt, Human
ggaaagacuuuuccaacccu

SEQ ID NO: 2718024 - RNA, 14 nt, Human
ggaaagaggcucug

SEQ ID NO: 2718025 - RNA, 21 nt, Human
gccccaaaacucuccucugcu

SEQ ID NO: 2718026 - RNA, 20 nt, Human
gccccaaaacucuccucugc

SEQ ID NO: 2718027 - RNA, 12 nt, Human
gccccugcuggu

SEQ ID NO: 2718028 - RNA, 15 nt, Human
gccccugcugguuca

SEQ ID NO: 2718029 - RNA, 16 nt, Human
gccccugcugguucag

SEQ ID NO: 2718030 - RNA, 12 nt, Human
gccccuggcagc

SEQ ID NO: 2718031 - RNA, 15 nt, Human
gccccuggcagcccc

SEQ ID NO: 2718032 - RNA, 11 nt, Human
gcccaggcagg

SEQ ID NO: 2718033 - RNA, 11 nt, Human
gcccaggcccc

SEQ ID NO: 2718034 - RNA, 12 nt, Human
gcccaggccccu

SEQ ID NO: 2718035 - RNA, 20 nt, Human
gcccaggccccugccacccu

SEQ ID NO: 2718036 - RNA, 21 nt, Human
gcccaggccccugccacccug

SEQ ID NO: 2718037 - RNA, 18 nt, Human
gcccaggccccugccacc

SEQ ID NO: 2718038 - RNA, 22 nt, Human
gcccaggccccugccacccugg

SEQ ID NO: 2718039 - RNA, 12 nt, Human
gcauuuagaugu

SEQ ID NO: 2718040 - RNA, 18 nt, Human
gcauuuacuuuguguuca

SEQ ID NO: 2718041 - RNA, 13 nt, Human
gcauuuagaugua

SEQ ID NO: 2718042 - RNA, 11 nt, Human
gccauguuuau

SEQ ID NO: 2718043 - RNA, 13 nt, Human
gccauguuuauua

SEQ ID NO: 2718044 - RNA, 22 nt, Human
gccauguuuauuacaguauaau

SEQ ID NO: 2718045 - RNA, 18 nt, Human
gccauguuuauuacagua

SEQ ID NO: 2718046 - RNA, 14 nt, Human
gccauguuuauuac

SEQ ID NO: 2718047 - RNA, 15 nt, Human
gcccacgcccccacu

SEQ ID NO: 2718048 - RNA, 16 nt, Human
gcccacgcccccacug

SEQ ID NO: 2718049 - RNA, 17 nt, Human
gcccacgcccccacugg

SEQ ID NO: 2718050 - RNA, 21 nt, Human
gcccacgcccccacuggugac

SEQ ID NO: 2718051 - RNA, 23 nt, Human
gcccacgcuggagugcagugagc

SEQ ID NO: 2718052 - RNA, 19 nt, Human
gcccacgcuggagugcagu

SEQ ID NO: 2718053 - RNA, 21 nt, Human
gcccacgcuggagugcaguga

SEQ ID NO: 2718054 - RNA, 13 nt, Human
gcccacuucugcc

SEQ ID NO: 2718055 - RNA, 24 nt, Human
gcccaggaaaggcuccaggagcag

SEQ ID NO: 2718056 - RNA, 22 nt, Human
gcccaggaaaggcuccaggagc

SEQ ID NO: 2718057 - RNA, 23 nt, Human
gcccaggaaaggcuccaggagca

SEQ ID NO: 2718058 - RNA, 16 nt, Human
gccccuggcagccccu

SEQ ID NO: 2718059 - RNA, 17 nt, Human
gccccuggcagccccug

SEQ ID NO: 2718060 - RNA, 16 nt, Human
gccuacaggagugagc

SEQ ID NO: 2718061 - RNA, 14 nt, Human
gcccugcccaccug

SEQ ID NO: 2718062 - RNA, 15 nt, Human
gcccugcccaccugg

SEQ ID NO: 2718063 - RNA, 23 nt, Human
gcccuuaccugccaggaagccag

SEQ ID NO: 2718064 - RNA, 16 nt, Human
gcccugugggccccca

SEQ ID NO: 2718065 - RNA, 17 nt, Human
gcccugugggcccccaa

SEQ ID NO: 2718066 - RNA, 21 nt, Human
gcccuuaccugccaggaagcc

SEQ ID NO: 2718067 - RNA, 22 nt, Human
gcccuuaccugccaggaagcca

SEQ ID NO: 2718068 - RNA, 19 nt, Human
gccuagcauacguacacau

SEQ ID NO: 2718069 - RNA, 12 nt, Human
gccuagcauacg

SEQ ID NO: 2718070 - RNA, 17 nt, Human
gccuacaggagugagca

SEQ ID NO: 2718071 - RNA, 14 nt, Human
gccucugggacugg

SEQ ID NO: 2718072 - RNA, 16 nt, Human
gccucgaacuggcugc

SEQ ID NO: 2718073 - RNA, 13 nt, Human
gccucgaacuggc

SEQ ID NO: 2718074 - RNA, 22 nt, Human
gccuccuuugugaggaagccgc

SEQ ID NO: 2718075 - RNA, 20 nt, Human
gcucagggccuggcucaggu

SEQ ID NO: 2718076 - RNA, 13 nt, Human
gcucaggaguuug

SEQ ID NO: 2718077 - RNA, 18 nt, Human
gcucagggccuggcucag

SEQ ID NO: 2718078 - RNA, 19 nt, Human
gcucagggccuggcucagg

SEQ ID NO: 2718079 - RNA, 18 nt, Human
gcuaagugauccucccac

SEQ ID NO: 2718080 - RNA, 22 nt, Human
gcuaagugauccucccaccuca

SEQ ID NO: 2718081 - RNA, 22 nt, Human
gcuaggaccccuccaugugggc

SEQ ID NO: 2718082 - RNA, 20 nt, Human
gcuaggaccccuccaugugg

SEQ ID NO: 2718083 - RNA, 20 nt, Human
gcuauuucuauauuuucauu

SEQ ID NO: 2718084 - RNA, 19 nt, Human
gcuauuucuauauuuucau

SEQ ID NO: 2718085 - RNA, 18 nt, Human
gcuauuucuauauuuuca

SEQ ID NO: 2718086 - RNA, 16 nt, Human
gcuauuucuauauuuu

SEQ ID NO: 2718087 - RNA, 15 nt, Human
gcuauuucuauauuu

SEQ ID NO: 2718088 - RNA, 13 nt, Human
gcuauuucuauau

SEQ ID NO: 2718089 - RNA, 11 nt, Human
gcuauuucuau

SEQ ID NO: 2718090 - RNA, 14 nt, Human
gcuaguugggcuuc

SEQ ID NO: 2718091 - RNA, 16 nt, Human
gcuaguugggcuuccu

SEQ ID NO: 2718092 - RNA, 16 nt, Human
gcggccuuuggcuuca

SEQ ID NO: 2718093 - RNA, 22 nt, Human
gcguucauggaacgcguugaaa

SEQ ID NO: 2718094 - RNA, 23 nt, Human
gcuaaggacuuguuagaucuagu

SEQ ID NO: 2718095 - RNA, 12 nt, Human
gcguugaaauug

SEQ ID NO: 2718096 - RNA, 12 nt, Human
gcuaaggacuug

SEQ ID NO: 2718097 - RNA, 11 nt, Human
gcuaaggacuu

SEQ ID NO: 2718098 - RNA, 15 nt, Human
gcggcuggcagccca

SEQ ID NO: 2718099 - RNA, 23 nt, Human
gccuugaccauucuccaccugcc

SEQ ID NO: 2718100 - RNA, 22 nt, Human
gcgauucuucugcuucagccuc

SEQ ID NO: 2718101 - RNA, 17 nt, Human
gcgauucuucugcuuca

SEQ ID NO: 2718102 - RNA, 23 nt, Human
gccuugaacuuugaccucugcag

SEQ ID NO: 2718103 - RNA, 16 nt, Human
gccuugaccauucucc

SEQ ID NO: 2718104 - RNA, 21 nt, Human
gccuugaccauucuccaccug

SEQ ID NO: 2718105 - RNA, 22 nt, Human
gccuugaccauucuccaccugc

SEQ ID NO: 2718106 - RNA, 21 nt, Human
gcgcagcauauucaggaagcu

SEQ ID NO: 2718107 - RNA, 20 nt, Human
gcgcagcauauucaggaagc

SEQ ID NO: 2718108 - RNA, 23 nt, Human
gcgauucuucugcuucagccucc

SEQ ID NO: 2718109 - RNA, 15 nt, Human
gccuucucugaagga

SEQ ID NO: 2718110 - RNA, 16 nt, Human
gccuucucugaaggac

SEQ ID NO: 2718111 - RNA, 15 nt, Human
gccuguucagcucca

SEQ ID NO: 2718112 - RNA, 14 nt, Human
gccuguucagcucc

SEQ ID NO: 2718113 - RNA, 16 nt, Human
gccuguucagcuccag

SEQ ID NO: 2718114 - RNA, 17 nt, Human
gccuguucagcuccagc

SEQ ID NO: 2718115 - RNA, 14 nt, Human
gccuugaacuuuga

SEQ ID NO: 2718116 - RNA, 19 nt, Human
gccugugccucugggacug

SEQ ID NO: 2718117 - RNA, 11 nt, Human
gccugggcaga

SEQ ID NO: 2718118 - RNA, 23 nt, Human
gccugggaucccucauccucaua

SEQ ID NO: 2718119 - RNA, 15 nt, Human
ggcaaaaaggcagga

SEQ ID NO: 2718120 - RNA, 18 nt, Human
ggcacaccgggcacucag

SEQ ID NO: 2718121 - RNA, 18 nt, Human
ggcacaucagcacgauuu

SEQ ID NO: 2718122 - RNA, 16 nt, Human
ggcacugcuuccagug

SEQ ID NO: 2718123 - RNA, 16 nt, Human
ggcagccccauucugc

SEQ ID NO: 2718124 - RNA, 20 nt, Human
ggcagccccauucugccugc

SEQ ID NO: 2718125 - RNA, 21 nt, Human
ggcagccccauucugccugcc

SEQ ID NO: 2718126 - RNA, 22 nt, Human
ggcagccccauucugccugccc

SEQ ID NO: 2718127 - RNA, 13 nt, Human
ggcagccaggcca

SEQ ID NO: 2718128 - RNA, 20 nt, Human
ggcacugcuuccagugaggc

SEQ ID NO: 2718129 - RNA, 18 nt, Human
ggcaggaggaucacuuga

SEQ ID NO: 2718130 - RNA, 19 nt, Human
ggccaaaggaagcacaugc

SEQ ID NO: 2718131 - RNA, 13 nt, Human
ggccaaaggaagc

SEQ ID NO: 2718132 - RNA, 17 nt, Human
ggcauuuguuugaacug

SEQ ID NO: 2718133 - RNA, 14 nt, Human
ggccaaaggaagca

SEQ ID NO: 2718134 - RNA, 16 nt, Human
ggccaaaggaagcaca

SEQ ID NO: 2718135 - RNA, 18 nt, Human
ggccagagacacaagccu

SEQ ID NO: 2718136 - RNA, 17 nt, Human
ggccagagggagugaca

SEQ ID NO: 2718137 - RNA, 19 nt, Human
ggccagagggagugacaga

SEQ ID NO: 2718138 - RNA, 17 nt, Human
ggccagagacacaagcc

SEQ ID NO: 2718139 - RNA, 14 nt, Human
ggcauuugcugaau

SEQ ID NO: 2718140 - RNA, 15 nt, Human
ggaguggccacagaa

SEQ ID NO: 2718141 - RNA, 22 nt, Human
ggagugggcccaaugcacuuug

SEQ ID NO: 2718142 - RNA, 16 nt, Human
ggaguggccacagaaa

SEQ ID NO: 2718143 - RNA, 12 nt, Human
ggagugggccca

SEQ ID NO: 2718144 - RNA, 18 nt, Human
ggaucucuugagccuggg

SEQ ID NO: 2718145 - RNA, 23 nt, Human
ggaucuucaucugacuaugacau

SEQ ID NO: 2718146 - RNA, 16 nt, Human
ggaguucaucuugaau

SEQ ID NO: 2718147 - RNA, 15 nt, Human
ggauccugagccaga

SEQ ID NO: 2718148 - RNA, 16 nt, Human
ggauccugagccagau

SEQ ID NO: 2718149 - RNA, 18 nt, Human
ggauccugagccagauuu

SEQ ID NO: 2718150 - RNA, 19 nt, Human
ggauccugagccagauuuc

SEQ ID NO: 2718151 - RNA, 20 nt, Human
ggauccugagccagauuuca

SEQ ID NO: 2718152 - RNA, 23 nt, Human
ggauccugagccagauuucacuc

SEQ ID NO: 2718153 - RNA, 22 nt, Human
ggauuuaacagaaauguacagc

SEQ ID NO: 2718154 - RNA, 17 nt, Human
ggauuuaacagaaaugu

SEQ ID NO: 2718155 - RNA, 16 nt, Human
ggauuuaacagaaaug

SEQ ID NO: 2718156 - RNA, 12 nt, Human
ggauuuaacaga

SEQ ID NO: 2718157 - RNA, 16 nt, Human
ggauuguccccgaccc

SEQ ID NO: 2718158 - RNA, 20 nt, Human
ggauuguccccgacccuugc

SEQ ID NO: 2718159 - RNA, 14 nt, Human
ggaugaaaaaauaa

SEQ ID NO: 2718160 - RNA, 13 nt, Human
ggauuguccccga

SEQ ID NO: 2718161 - RNA, 13 nt, Human
ggaggggggaggu

SEQ ID NO: 2718162 - RNA, 14 nt, Human
ggaggggggaggug

SEQ ID NO: 2718163 - RNA, 21 nt, Human
ggagggugacgggggugaacu

SEQ ID NO: 2718164 - RNA, 22 nt, Human
ggagguaaggaauaccuguccc

SEQ ID NO: 2718165 - RNA, 22 nt, Human
ggaggugggauccuccaggugc

SEQ ID NO: 2718166 - RNA, 23 nt, Human
ggaggugggauccuccaggugca

SEQ ID NO: 2718167 - RNA, 13 nt, Human
ggcucacugcagc

SEQ ID NO: 2718168 - RNA, 14 nt, Human
ggcucacugcagcc

SEQ ID NO: 2718169 - RNA, 15 nt, Human
ggcucacugcagccu

SEQ ID NO: 2718170 - RNA, 13 nt, Human
ggcucccuuccca

SEQ ID NO: 2718171 - RNA, 14 nt, Human
ggcucuuccaggcu

SEQ ID NO: 2718172 - RNA, 15 nt, Human
ggcucuuccaggcug

SEQ ID NO: 2718173 - RNA, 17 nt, Human
ggcucuuccaggcuggg

SEQ ID NO: 2718174 - RNA, 18 nt, Human
ggcucuuccaggcuggga

SEQ ID NO: 2718175 - RNA, 13 nt, Human
ggcuggccuggcc

SEQ ID NO: 2718176 - RNA, 14 nt, Human
ggcuggccuggccc

SEQ ID NO: 2718177 - RNA, 15 nt, Human
ggcuggccuggcccc

SEQ ID NO: 2718178 - RNA, 23 nt, Human
aaaaagauuuucagaaaauauua

SEQ ID NO: 2718179 - RNA, 22 nt, Human
aaaaaacugcugacuguuuucu

SEQ ID NO: 2718180 - RNA, 14 nt, Human
ggcuggguuggagg

SEQ ID NO: 2718181 - RNA, 22 nt, Human
ggcuggguucuacccaggugcu

SEQ ID NO: 2718182 - RNA, 12 nt, Human
aaaaaggcagga

SEQ ID NO: 2718183 - RNA, 21 nt, Human
aaaaaggaugcacagaguugu

SEQ ID NO: 2718184 - RNA, 14 nt, Human
aaaaaggaggaaga

SEQ ID NO: 2718185 - RNA, 20 nt, Human
aaaaagccugcaauuucaua

SEQ ID NO: 2718186 - RNA, 15 nt, Human
ggccagaugcaccag

SEQ ID NO: 2718187 - RNA, 16 nt, Human
ggccagaugcaccagc

SEQ ID NO: 2718188 - RNA, 23 nt, Human
ggccucccaacucaccccagccc

SEQ ID NO: 2718189 - RNA, 20 nt, Human
ggccucccaacucaccccag

SEQ ID NO: 2718190 - RNA, 22 nt, Human
ggccucccaacucaccccagcc

SEQ ID NO: 2718191 - RNA, 13 nt, Human
ggccucagugcca

SEQ ID NO: 2718192 - RNA, 17 nt, Human
ggccucccaacucaccc

SEQ ID NO: 2718193 - RNA, 18 nt, Human
ggccucccaacucacccc

SEQ ID NO: 2718194 - RNA, 19 nt, Human
ggccucccaacucacccca

SEQ ID NO: 2718195 - RNA, 16 nt, Human
ggccugcaagggagug

SEQ ID NO: 2718196 - RNA, 16 nt, Human
ggccuggccagaugca

SEQ ID NO: 2718197 - RNA, 12 nt, Human
ggccuggccaga

SEQ ID NO: 2718198 - RNA, 15 nt, Human
ggccuggccagaugc

SEQ ID NO: 2718199 - RNA, 20 nt, Human
ggcuaagcuucacuguaaaa

SEQ ID NO: 2718200 - RNA, 16 nt, Human
ggcuaauguacugcau

SEQ ID NO: 2718201 - RNA, 20 nt, Human
ggcuaagugauccucccacc

SEQ ID NO: 2718202 - RNA, 13 nt, Human
ggcuaccuuugua

SEQ ID NO: 2718203 - RNA, 16 nt, Human
ggcuagagguucaaag

SEQ ID NO: 2718204 - RNA, 14 nt, Human
ggcuaccuuuguau

SEQ ID NO: 2718205 - RNA, 19 nt, Human
gguuuuauuguuuaaaauc

SEQ ID NO: 2718206 - RNA, 17 nt, Human
gguuuucacauuggaaa

SEQ ID NO: 2718207 - RNA, 20 nt, Human
gguuuguaaauuaacuuuua

SEQ ID NO: 2718208 - RNA, 22 nt, Human
gguuucuaaagcugccagccga

SEQ ID NO: 2718209 - RNA, 16 nt, Human
gguuucuaaagcugcc

SEQ ID NO: 2718210 - RNA, 15 nt, Human
gguuucagaaaugug

SEQ ID NO: 2718211 - RNA, 21 nt, Human
aaaguguauuuuuuuacuaau

SEQ ID NO: 2718212 - RNA, 14 nt, Human
aaaguguauuuuuu

SEQ ID NO: 2718213 - RNA, 21 nt, Human
aaaguaucccuacuguaauuu

SEQ ID NO: 2718214 - RNA, 22 nt, Human
aaaguagaagucuuagauguau

SEQ ID NO: 2718215 - RNA, 20 nt, Human
aaaguagaagucuuagaugu

SEQ ID NO: 2718216 - RNA, 19 nt, Human
aaaguacacuguuucaaac

SEQ ID NO: 2718217 - RNA, 18 nt, Human
aaaguacacuguuucaaa

SEQ ID NO: 2718218 - RNA, 17 nt, Human
gguguuuuaaaaaaucu

SEQ ID NO: 2718219 - RNA, 17 nt, Human
gguucccauuugcuccu

SEQ ID NO: 2718220 - RNA, 19 nt, Human
gguguuuccuggcacugcu

SEQ ID NO: 2718221 - RNA, 17 nt, Human
gguguuuccuggcacug

SEQ ID NO: 2718222 - RNA, 20 nt, Human
gguguuguacucaauuuuaa

SEQ ID NO: 2718223 - RNA, 19 nt, Human
gguguuguacucaauuuua

SEQ ID NO: 2718224 - RNA, 20 nt, Human
gguucuagcauggcauauuu

SEQ ID NO: 2718225 - RNA, 23 nt, Human
gguucccuuugacgccaucccag

SEQ ID NO: 2718226 - RNA, 22 nt, Human
gguucccuuuuuuggcugcuga

SEQ ID NO: 2718227 - RNA, 13 nt, Human
ggugggggccucg

SEQ ID NO: 2718228 - RNA, 14 nt, Human
gguguggagaagcg

SEQ ID NO: 2718229 - RNA, 23 nt, Human
gguguggagaagcggcuggcagc

SEQ ID NO: 2718230 - RNA, 12 nt, Human
gguguggagaag

SEQ ID NO: 2718231 - RNA, 11 nt, Human
gguguggggga

SEQ ID NO: 2718232 - RNA, 13 nt, Human
ggugugggggaag

SEQ ID NO: 2718233 - RNA, 20 nt, Human
aaagggcccagagagggugg

SEQ ID NO: 2718234 - RNA, 20 nt, Human
aaagggcuguuauaaucuuu

SEQ ID NO: 2718235 - RNA, 22 nt, Human
aaagggcuguuauaaucuuuca

SEQ ID NO: 2718236 - RNA, 19 nt, Human
gguggggaccucaggccug

SEQ ID NO: 2718237 - RNA, 20 nt, Human
ggugggaggaucucuugagc

SEQ ID NO: 2718238 - RNA, 17 nt, Human
ggugggacacccuguga

SEQ ID NO: 2718239 - RNA, 13 nt, Human
ggugggacacccu

SEQ ID NO: 2718240 - RNA, 16 nt, Human
ggugggacacccugug

SEQ ID NO: 2718241 - RNA, 18 nt, Human
gguggcuggguuggaggg

SEQ ID NO: 2718242 - RNA, 12 nt, Human
gguggcuggguu

SEQ ID NO: 2718243 - RNA, 14 nt, Human
gguggcaccagcag

SEQ ID NO: 2718244 - RNA, 20 nt, Human
gguggcaccagcagccugga

SEQ ID NO: 2718245 - RNA, 13 nt, Human
aaagcagugcaug

SEQ ID NO: 2718246 - RNA, 14 nt, Human
aaagcuaggccugg

SEQ ID NO: 2718247 - RNA, 16 nt, Human
aaagcuaggccuggcc

SEQ ID NO: 2718248 - RNA, 12 nt, Human
aaagcugccagc

SEQ ID NO: 2718249 - RNA, 13 nt, Human
aaagcugccagcc

SEQ ID NO: 2718250 - RNA, 22 nt, Human
aaagcugccagccgagauagcc

SEQ ID NO: 2718251 - RNA, 19 nt, Human
guaauagagcaaaauugau

SEQ ID NO: 2718252 - RNA, 15 nt, Human
guaauagagcaaaau

SEQ ID NO: 2718253 - RNA, 23 nt, Human
guaauccuagcacuuugggaggc

SEQ ID NO: 2718254 - RNA, 20 nt, Human
guaauuugugauacaaugcu

SEQ ID NO: 2718255 - RNA, 17 nt, Human
guaauuugugauacaau

SEQ ID NO: 2718256 - RNA, 15 nt, Human
guaauuugugauaca

SEQ ID NO: 2718257 - RNA, 21 nt, Human
guacaaaguauuaagcauaua

SEQ ID NO: 2718258 - RNA, 20 nt, Human
guacaaaguauuaagcauau

SEQ ID NO: 2718259 - RNA, 21 nt, Human
guaauuuuuuuaucgucacug

SEQ ID NO: 2718260 - RNA, 20 nt, Human
guaacaggaaaauuuuaaaa

SEQ ID NO: 2718261 - RNA, 19 nt, Human
guaacaggaaaauuuuaaa

SEQ ID NO: 2718262 - RNA, 16 nt, Human
guaacaagccacccca

SEQ ID NO: 2718263 - RNA, 14 nt, Human
aaauaaugugaaac

SEQ ID NO: 2718264 - RNA, 22 nt, Human
aaauaaugugaaacuggauuaa

SEQ ID NO: 2718265 - RNA, 22 nt, Human
aaaguguauuuuuuuacuaaua

SEQ ID NO: 2718266 - RNA, 22 nt, Human
aaauaucacuugucaauaaaau

SEQ ID NO: 2718267 - RNA, 15 nt, Human
aaauauauuuaauga

SEQ ID NO: 2718268 - RNA, 18 nt, Human
aaauauaugcuaagucuu

SEQ ID NO: 2718269 - RNA, 14 nt, Human
aaauauauuuaaug

SEQ ID NO: 2718270 - RNA, 21 nt, Human
aaauaccaugccauuuaaagc

SEQ ID NO: 2718271 - RNA, 21 nt, Human
aaauaccagccaguaaauggg

SEQ ID NO: 2718272 - RNA, 20 nt, Human
aaauaccagccaguaaaugg

SEQ ID NO: 2718273 - RNA, 16 nt, Human
guacacacacauacac

SEQ ID NO: 2718274 - RNA, 19 nt, Human
aaauaccagccaguaaaug

SEQ ID NO: 2718275 - RNA, 15 nt, Human
aaauauaggaacuua

SEQ ID NO: 2718276 - RNA, 21 nt, Human
aaauacgugggcauucaaaug

SEQ ID NO: 2718277 - RNA, 20 nt, Human
aaauacgugggcauucaaau

SEQ ID NO: 2718278 - RNA, 17 nt, Human
aaauaugcaaagcacug

SEQ ID NO: 2718279 - RNA, 16 nt, Human
aaauaugcaaagcacu

SEQ ID NO: 2718280 - RNA, 15 nt, Human
aaauaugcaaagcac

SEQ ID NO: 2718281 - RNA, 13 nt, Human
aaauaugcaaagc

SEQ ID NO: 2718282 - RNA, 23 nt, Human
aaauaucugaaaauguaugugua

SEQ ID NO: 2718283 - RNA, 22 nt, Human
aaauaucugaaaauguaugugu

SEQ ID NO: 2718284 - RNA, 21 nt, Human
aaauaucugaaaauguaugug

SEQ ID NO: 2718285 - RNA, 19 nt, Human
aaauaucugaaaauguaug

SEQ ID NO: 2718286 - RNA, 18 nt, Human
aaauaucugaaaauguau

SEQ ID NO: 2718287 - RNA, 17 nt, Human
aaauaucugaaaaugua

SEQ ID NO: 2718288 - RNA, 14 nt, Human
aaauaucugaaaau

SEQ ID NO: 2718289 - RNA, 12 nt, Human
aaauaucugaaa

SEQ ID NO: 2718290 - RNA, 19 nt, Human
aaaucagccugcuccagcu

SEQ ID NO: 2718291 - RNA, 21 nt, Human
aaaucagccugcuccagcugu

SEQ ID NO: 2718292 - RNA, 20 nt, Human
aaauauuguguugugaaugu

SEQ ID NO: 2718293 - RNA, 23 nt, Human
aaaucagccugcuccagcuguuc

SEQ ID NO: 2718294 - RNA, 20 nt, Human
ggguuuuauuguuuaaaauc

SEQ ID NO: 2718295 - RNA, 20 nt, Human
ggguuuugccauguuggcca

SEQ ID NO: 2718296 - RNA, 23 nt, Human
ggguuuugccauguuggccaggc

SEQ ID NO: 2718297 - RNA, 18 nt, Human
gguaacuagggaagauaa

SEQ ID NO: 2718298 - RNA, 15 nt, Human
gggugggacacccug

SEQ ID NO: 2718299 - RNA, 18 nt, Human
gggugggacacccuguga

SEQ ID NO: 2718300 - RNA, 19 nt, Human
aaacuuaaucuaaauggaa

SEQ ID NO: 2718301 - RNA, 20 nt, Human
aaacguggcugcuucaagga

SEQ ID NO: 2718302 - RNA, 21 nt, Human
aaacguggcugcuucaaggau

SEQ ID NO: 2718303 - RNA, 19 nt, Human
aaacuguuaauaguucagg

SEQ ID NO: 2718304 - RNA, 14 nt, Human
ggucagugcaaaua

SEQ ID NO: 2718305 - RNA, 19 nt, Human
gguaucaggugcugccauc

SEQ ID NO: 2718306 - RNA, 21 nt, Human
aaacuucccuuucugcuugug

SEQ ID NO: 2718307 - RNA, 18 nt, Human
aaacuuuacuauggcccu

SEQ ID NO: 2718308 - RNA, 22 nt, Human
aaacuugauguguuaucucuua

SEQ ID NO: 2718309 - RNA, 20 nt, Human
gguaaggaauaccugucccc

SEQ ID NO: 2718310 - RNA, 20 nt, Human
gguaggguaagugagagagg

SEQ ID NO: 2718311 - RNA, 14 nt, Human
gguaucaggugcug

SEQ ID NO: 2718312 - RNA, 17 nt, Human
gggggaucacagccucu

SEQ ID NO: 2718313 - RNA, 11 nt, Human
gggggcuggga

SEQ ID NO: 2718314 - RNA, 13 nt, Human
ggggguggccucc

SEQ ID NO: 2718315 - RNA, 15 nt, Human
gggggcugggcagag

SEQ ID NO: 2718316 - RNA, 21 nt, Human
ggggucacucuggcagcucag

SEQ ID NO: 2718317 - RNA, 12 nt, Human
ggggaccagagc

SEQ ID NO: 2718318 - RNA, 13 nt, Human
ggggaccagagcu

SEQ ID NO: 2718319 - RNA, 18 nt, Human
aaaauguauguguaagua

SEQ ID NO: 2718320 - RNA, 19 nt, Human
ggggccaguuggucccccu

SEQ ID NO: 2718321 - RNA, 14 nt, Human
ggggaccagagcug

SEQ ID NO: 2718322 - RNA, 22 nt, Human
aaaccugugucucugagaguag

SEQ ID NO: 2718323 - RNA, 19 nt, Human
aaacauuuugucauauaag

SEQ ID NO: 2718324 - RNA, 14 nt, Human
gggucacucuggca

SEQ ID NO: 2718325 - RNA, 20 nt, Human
gggucacucuggcagcucag

SEQ ID NO: 2718326 - RNA, 14 nt, Human
aaaauacacacuca

SEQ ID NO: 2718327 - RNA, 16 nt, Human
aaaauaauuuuuauau

SEQ ID NO: 2718328 - RNA, 17 nt, Human
aaaauaauuuuuauauu

SEQ ID NO: 2718329 - RNA, 11 nt, Human
aaaauaauuuu

SEQ ID NO: 2718330 - RNA, 11 nt, Human
aaaaggcagga

SEQ ID NO: 2718331 - RNA, 17 nt, Human
aaaagguuaauaaagua

SEQ ID NO: 2718332 - RNA, 16 nt, Human
aaaagguuaauaaagu

SEQ ID NO: 2718333 - RNA, 22 nt, Human
aaaaggagccaauuuaaagaaa

SEQ ID NO: 2718334 - RNA, 13 nt, Human
aaaaggaugcaca

SEQ ID NO: 2718335 - RNA, 22 nt, Human
aaaaggaugcacagaguuguua

SEQ ID NO: 2718336 - RNA, 19 nt, Human
aaaaggaugcacagaguug

SEQ ID NO: 2718337 - RNA, 15 nt, Human
aaaaggaugcacaga

SEQ ID NO: 2718338 - RNA, 14 nt, Human
aaaaggaugcacag

SEQ ID NO: 2718339 - RNA, 17 nt, Human
aaaaucucaauauuuca

SEQ ID NO: 2718340 - RNA, 16 nt, Human
aaaauauuuuccugcc

SEQ ID NO: 2718341 - RNA, 18 nt, Human
aaaauauuuuaugaucca

SEQ ID NO: 2718342 - RNA, 15 nt, Human
aaaauauuuuaugau

SEQ ID NO: 2718343 - RNA, 16 nt, Human
aaaauauauuuaauga

SEQ ID NO: 2718344 - RNA, 15 nt, Human
aaaauauauuuaaug

SEQ ID NO: 2718345 - RNA, 20 nt, Human
aaaauggaagacagcucuua

SEQ ID NO: 2718346 - RNA, 16 nt, Human
aaaauggguuuuacug

SEQ ID NO: 2718347 - RNA, 17 nt, Human
gggcuggguucuaccca

SEQ ID NO: 2718348 - RNA, 20 nt, Human
gggcugcaccggcuggccug

SEQ ID NO: 2718349 - RNA, 21 nt, Human
gggcugcaccggcuggccugg

SEQ ID NO: 2718350 - RNA, 12 nt, Human
gggcugggcaga

SEQ ID NO: 2718351 - RNA, 15 nt, Human
gggcugggcagagga

SEQ ID NO: 2718352 - RNA, 17 nt, Human
gggcucagcggggacag

SEQ ID NO: 2718353 - RNA, 19 nt, Human
gggcucagcggggacagcu

SEQ ID NO: 2718354 - RNA, 22 nt, Human
gggcucagcaaaagaugcuucu

SEQ ID NO: 2718355 - RNA, 18 nt, Human
gggcuaguugggcuuccu

SEQ ID NO: 2718356 - RNA, 15 nt, Human
gggcuaguugggcuu

SEQ ID NO: 2718357 - RNA, 17 nt, Human
gggcugcaccggcuggc

SEQ ID NO: 2718358 - RNA, 19 nt, Human
gggcugcaccggcuggccu

SEQ ID NO: 2718359 - RNA, 21 nt, Human
gggcucagcggggacagcucc

SEQ ID NO: 2718360 - RNA, 10 nt, Human
gggcuccaga

SEQ ID NO: 2718361 - RNA, 13 nt, Human
gggcuccagacac

SEQ ID NO: 2718362 - RNA, 22 nt, Human
gggccucgguguggagaagcgg

SEQ ID NO: 2718363 - RNA, 18 nt, Human
gggccucuuaugggcugg

SEQ ID NO: 2718364 - RNA, 15 nt, Human
gggccucagugccac

SEQ ID NO: 2718365 - RNA, 13 nt, Human
gggccucagugcc

SEQ ID NO: 2718366 - RNA, 14 nt, Human
gggccucagugcca

SEQ ID NO: 2718367 - RNA, 21 nt, Human
gggcggugagaggggaacaga

SEQ ID NO: 2718368 - RNA, 13 nt, Human
gggccaggagccu

SEQ ID NO: 2718369 - RNA, 14 nt, Human
gggccaggagccuc

SEQ ID NO: 2718370 - RNA, 12 nt, Human
gggccaggagcc

SEQ ID NO: 2718371 - RNA, 17 nt, Human
aagggcuguuauaaucu

SEQ ID NO: 2718372 - RNA, 17 nt, Human
aaggggaauugaggaca

SEQ ID NO: 2718373 - RNA, 15 nt, Human
aagggcuguuauaau

SEQ ID NO: 2718374 - RNA, 16 nt, Human
aaggcugggggaagaa

SEQ ID NO: 2718375 - RNA, 14 nt, Human
aaggcugggggaag

SEQ ID NO: 2718376 - RNA, 13 nt, Human
guuucagaaaugu

SEQ ID NO: 2718377 - RNA, 11 nt, Human
guuucagaaau

SEQ ID NO: 2718378 - RNA, 19 nt, Human
aaggcugggggaagaagcu

SEQ ID NO: 2718379 - RNA, 22 nt, Human
aaggcugggggaagaagcucuc

SEQ ID NO: 2718380 - RNA, 20 nt, Human
aaggcugucaauuacaggaa

SEQ ID NO: 2718381 - RNA, 13 nt, Human
aaggggagaguaa

SEQ ID NO: 2718382 - RNA, 12 nt, Human
aagggggcuggg

SEQ ID NO: 2718383 - RNA, 23 nt, Human
aagggggcugggacaugggaaag

SEQ ID NO: 2718384 - RNA, 12 nt, Human
aaguaaaugcua

SEQ ID NO: 2718385 - RNA, 18 nt, Human
guuuaauauuaaagccau

SEQ ID NO: 2718386 - RNA, 15 nt, Human
guuuaauauuaaagc

SEQ ID NO: 2718387 - RNA, 14 nt, Human
guuuaauauuaaag

SEQ ID NO: 2718388 - RNA, 13 nt, Human
guuuaauauuaaa

SEQ ID NO: 2718389 - RNA, 17 nt, Human
guuuauuacaguauaau

SEQ ID NO: 2718390 - RNA, 13 nt, Human
guuuauuacagua

SEQ ID NO: 2718391 - RNA, 17 nt, Human
guuucaaacuuuacuau

SEQ ID NO: 2718392 - RNA, 12 nt, Human
guuguuuguuua

SEQ ID NO: 2718393 - RNA, 21 nt, Human
guuuaagugacugauggcuaa

SEQ ID NO: 2718394 - RNA, 12 nt, Human
aaggaaaaguuu

SEQ ID NO: 2718395 - RNA, 17 nt, Human
aaggaaacccagcucug

SEQ ID NO: 2718396 - RNA, 22 nt, Human
aaggaaacccagcucuggucca

SEQ ID NO: 2718397 - RNA, 16 nt, Human
aaggaaacccagcucu

SEQ ID NO: 2718398 - RNA, 20 nt, Human
guuguuugauucagacagcu

SEQ ID NO: 2718399 - RNA, 23 nt, Human
guuguuugauucagacagcugcc

SEQ ID NO: 2718400 - RNA, 18 nt, Human
aaguauguuagugcaaau

SEQ ID NO: 2718401 - RNA, 19 nt, Human
aaguauguuagugcaaauu

SEQ ID NO: 2718402 - RNA, 19 nt, Human
aaguauguguaaaauguga

SEQ ID NO: 2718403 - RNA, 15 nt, Human
aaguauuauaccuuu

SEQ ID NO: 2718404 - RNA, 18 nt, Human
aaguacuucuccacccug

SEQ ID NO: 2718405 - RNA, 19 nt, Human
aaguacuucuccacccugc

SEQ ID NO: 2718406 - RNA, 20 nt, Human
aaguacuucuccacccugcu

SEQ ID NO: 2718407 - RNA, 13 nt, Human
aaguacuauguau

SEQ ID NO: 2718408 - RNA, 17 nt, Human
aaguacuauaauuuacc

SEQ ID NO: 2718409 - RNA, 14 nt, Human
aaguacuauaauuu

SEQ ID NO: 2718410 - RNA, 18 nt, Human
aagucagaucugccuaag

SEQ ID NO: 2718411 - RNA, 22 nt, Human
aagucagaucugccuaaggacu

SEQ ID NO: 2718412 - RNA, 21 nt, Human
aagucagaucugccuaaggac

SEQ ID NO: 2718413 - RNA, 23 nt, Human
aaguauucuuauuuaaugaaaga

SEQ ID NO: 2718414 - RNA, 21 nt, Human
aaguauucuuauuuaaugaaa

SEQ ID NO: 2718415 - RNA, 19 nt, Human
aaguauuauaccuuuuuua

SEQ ID NO: 2718416 - RNA, 16 nt, Human
aaguauuauaccuuuu

SEQ ID NO: 2718417 - RNA, 15 nt, Human
guuuuaaagcuucca

SEQ ID NO: 2718418 - RNA, 19 nt, Human
guuuggacaaaauggaaua

SEQ ID NO: 2718419 - RNA, 18 nt, Human
guuuggaccaaaaaccag

SEQ ID NO: 2718420 - RNA, 21 nt, Human
aaguaauaugcacacauuuuu

SEQ ID NO: 2718421 - RNA, 17 nt, Human
aaguaauaugcacacau

SEQ ID NO: 2718422 - RNA, 20 nt, Human
aaguaauaugcacacauuuu

SEQ ID NO: 2718423 - RNA, 18 nt, Human
aaguaauaugcacacauu

SEQ ID NO: 2718424 - RNA, 12 nt, Human
guuuucuguucu

SEQ ID NO: 2718425 - RNA, 14 nt, Human
guuuucuguucuuu

SEQ ID NO: 2718426 - RNA, 16 nt, Human
guuuucuguucuuucu

SEQ ID NO: 2718427 - RNA, 15 nt, Human
guuuucuguucuuuc

SEQ ID NO: 2718428 - RNA, 22 nt, Human
guuuuaaggaugcuuguacaua

SEQ ID NO: 2718429 - RNA, 20 nt, Human
aaguuugagaucagccuggg

SEQ ID NO: 2718430 - RNA, 11 nt, Human
uaaaaugugaa

SEQ ID NO: 2718431 - RNA, 13 nt, Human
uaaaaugugaagu

SEQ ID NO: 2718432 - RNA, 19 nt, Human
aaguuauuuuuaauuuggu

SEQ ID NO: 2718433 - RNA, 19 nt, Human
aaguuucugccgcagcccu

SEQ ID NO: 2718434 - RNA, 21 nt, Human
aaguuucugccgcagcccugc

SEQ ID NO: 2718435 - RNA, 13 nt, Human
aagugugguagag

SEQ ID NO: 2718436 - RNA, 23 nt, Human
aaguguauuuuuuuacuaauaga

SEQ ID NO: 2718437 - RNA, 22 nt, Human
uaaaauaauuuuuauauuugaa

SEQ ID NO: 2718438 - RNA, 21 nt, Human
uaaaauacacacucaaaucaa

SEQ ID NO: 2718439 - RNA, 13 nt, Human
uaaaagaauauuu

SEQ ID NO: 2718440 - RNA, 19 nt, Human
uaaaaggugaccaaugaug

SEQ ID NO: 2718441 - RNA, 13 nt, Human
uaaaagucuugug

SEQ ID NO: 2718442 - RNA, 13 nt, Human
aagugauccuccc

SEQ ID NO: 2718443 - RNA, 19 nt, Human
aagugauccucccaccuca

SEQ ID NO: 2718444 - RNA, 20 nt, Human
aagugauccucccaccucag

SEQ ID NO: 2718445 - RNA, 23 nt, Human
aagugauccucccaccucagccu

SEQ ID NO: 2718446 - RNA, 20 nt, Human
aagugauucuccugccucag

SEQ ID NO: 2718447 - RNA, 18 nt, Human
uaaaaaaaaaauugggga

SEQ ID NO: 2718448 - RNA, 14 nt, Human
uaaaaaaaaaauug

SEQ ID NO: 2718449 - RNA, 19 nt, Human
uaaaaagccugcaauuuca

SEQ ID NO: 2718450 - RNA, 22 nt, Human
uaaaaagccugcaauuucauau

SEQ ID NO: 2718451 - RNA, 23 nt, Human
aagucagaucugccuaaggacuu

SEQ ID NO: 2718452 - RNA, 14 nt, Human
uaaaaauauugugu

SEQ ID NO: 2718453 - RNA, 15 nt, Human
uaaaaccacagcagu

SEQ ID NO: 2718454 - RNA, 13 nt, Human
uaaaaccacagca

SEQ ID NO: 2718455 - RNA, 14 nt, Human
uaaaaccacagcag

SEQ ID NO: 2718456 - RNA, 22 nt, Human
uaaaaaugagguacucuccugg

SEQ ID NO: 2718457 - RNA, 15 nt, Human
uaaaaaugagguacu

SEQ ID NO: 2718458 - RNA, 23 nt, Human
uaaaaaucucaaauuucuaaauc

SEQ ID NO: 2718459 - RNA, 21 nt, Human
uaaaaauauuguguugugaau

SEQ ID NO: 2718460 - RNA, 22 nt, Human
uaaaaauauuguguugugaaug

SEQ ID NO: 2718461 - RNA, 13 nt, Human
uaaaacccaagug

SEQ ID NO: 2718462 - RNA, 15 nt, Human
uaaaacuuuuuaaaa

SEQ ID NO: 2718463 - RNA, 12 nt, Human
uaaaacuuuuua

SEQ ID NO: 2718464 - RNA, 16 nt, Human
aagcacuaaacaaaga

SEQ ID NO: 2718465 - RNA, 17 nt, Human
aagcaccuccugccucg

SEQ ID NO: 2718466 - RNA, 17 nt, Human
aagcacugacuucuaag

SEQ ID NO: 2718467 - RNA, 16 nt, Human
aagcacugacuucuaa

SEQ ID NO: 2718468 - RNA, 21 nt, Human
aagcacaugccucucucaggc

SEQ ID NO: 2718469 - RNA, 13 nt, Human
aagcaccuccugc

SEQ ID NO: 2718470 - RNA, 14 nt, Human
aagcaccuccugcc

SEQ ID NO: 2718471 - RNA, 15 nt, Human
aagcaccuccugccu

SEQ ID NO: 2718472 - RNA, 16 nt, Human
aagcaccuccugccuc

SEQ ID NO: 2718473 - RNA, 14 nt, Human
aagcacaugccucu

SEQ ID NO: 2718474 - RNA, 15 nt, Human
aagcacaugccucuc

SEQ ID NO: 2718475 - RNA, 16 nt, Human
aagcacaugccucucu

SEQ ID NO: 2718476 - RNA, 19 nt, Human
aagcacaugccucucucag

SEQ ID NO: 2718477 - RNA, 20 nt, Human
aagcacaugccucucucagg

SEQ ID NO: 2718478 - RNA, 16 nt, Human
aagcacacuugacauc

SEQ ID NO: 2718479 - RNA, 12 nt, Human
guguuugaagca

SEQ ID NO: 2718480 - RNA, 19 nt, Human
aagcauuguaaaugugcuu

SEQ ID NO: 2718481 - RNA, 20 nt, Human
aagccaaagcuaggccuggc

SEQ ID NO: 2718482 - RNA, 17 nt, Human
aagccaaagcuaggccu

SEQ ID NO: 2718483 - RNA, 18 nt, Human
aagccaaagcuaggccug

SEQ ID NO: 2718484 - RNA, 15 nt, Human
aagccauguuuauua

SEQ ID NO: 2718485 - RNA, 17 nt, Human
aagccauguuuauuaca

SEQ ID NO: 2718486 - RNA, 16 nt, Human
aagccauguuuauuac

SEQ ID NO: 2718487 - RNA, 20 nt, Human
aagcacugacuucuaaguaa

SEQ ID NO: 2718488 - RNA, 19 nt, Human
aagcacugacuucuaagua

SEQ ID NO: 2718489 - RNA, 23 nt, Human
aagcauauauuuuuauauuuacu

SEQ ID NO: 2718490 - RNA, 18 nt, Human
aagcauuguaaaugugcu

SEQ ID NO: 2718491 - RNA, 12 nt, Human
aagcaugugaga

SEQ ID NO: 2718492 - RNA, 23 nt, Human
aagaucaaaagguuaauaaagua

SEQ ID NO: 2718493 - RNA, 20 nt, Human
aagaucaaaagguuaauaaa

SEQ ID NO: 2718494 - RNA, 22 nt, Human
gugucuuaauuaaaagaauauu

SEQ ID NO: 2718495 - RNA, 19 nt, Human
gugucagguggggcagcuu

SEQ ID NO: 2718496 - RNA, 23 nt, Human
gugugaaccaccacacccagccc

SEQ ID NO: 2718497 - RNA, 22 nt, Human
gugucaccugaagacucauucu

SEQ ID NO: 2718498 - RNA, 14 nt, Human
gugucagguggggc

SEQ ID NO: 2718499 - RNA, 18 nt, Human
gugucagguggggcagcu

SEQ ID NO: 2718500 - RNA, 14 nt, Human
gugucaccugaaga

SEQ ID NO: 2718501 - RNA, 14 nt, Human
aagauagcagggca

SEQ ID NO: 2718502 - RNA, 15 nt, Human
aagauagcagggcau

SEQ ID NO: 2718503 - RNA, 22 nt, Human
aagagggucugaggaauccaga

SEQ ID NO: 2718504 - RNA, 14 nt, Human
aagaggcagggucu

SEQ ID NO: 2718505 - RNA, 11 nt, Human
aagaggcaggg

SEQ ID NO: 2718506 - RNA, 21 nt, Human
aagagggagggagggcuccag

SEQ ID NO: 2718507 - RNA, 22 nt, Human
aagagggagggagggcuccaga

SEQ ID NO: 2718508 - RNA, 22 nt, Human
guguaaauacaauuuuguuucu

SEQ ID NO: 2718509 - RNA, 21 nt, Human
guguaaauacaauuuuguuuc

SEQ ID NO: 2718510 - RNA, 18 nt, Human
guguaaauacaauuuugu

SEQ ID NO: 2718511 - RNA, 15 nt, Human
guguaaaaugugaag

SEQ ID NO: 2718512 - RNA, 15 nt, Human
gugguuucagaaaug

SEQ ID NO: 2718513 - RNA, 23 nt, Human
gugcugcccugcccaccuggccu

SEQ ID NO: 2718514 - RNA, 19 nt, Human
guuauuauauuuacaaaug

SEQ ID NO: 2718515 - RNA, 19 nt, Human
guuagagguucccuuugac

SEQ ID NO: 2718516 - RNA, 18 nt, Human
guuagagauuuuuuuguu

SEQ ID NO: 2718517 - RNA, 17 nt, Human
guuauuauauuuacaaa

SEQ ID NO: 2718518 - RNA, 22 nt, Human
guuauugauaaguucauacauu

SEQ ID NO: 2718519 - RNA, 21 nt, Human
guuauugauaaguucauacau

SEQ ID NO: 2718520 - RNA, 19 nt, Human
guuaauuccaauuauauga

SEQ ID NO: 2718521 - RNA, 18 nt, Human
guuaaucauuagguguga

SEQ ID NO: 2718522 - RNA, 23 nt, Human
aagccauguuuauuacaguauaa

SEQ ID NO: 2718523 - RNA, 22 nt, Human
aagccauguuuauuacaguaua

SEQ ID NO: 2718524 - RNA, 21 nt, Human
aagccauguuuauuacaguau

SEQ ID NO: 2718525 - RNA, 20 nt, Human
aagccauguuuauuacagua

SEQ ID NO: 2718526 - RNA, 21 nt, Human
aagccuuggggcugaugcagu

SEQ ID NO: 2718527 - RNA, 16 nt, Human
aagccucccacgacug

SEQ ID NO: 2718528 - RNA, 15 nt, Human
aagccuccuccagcc

SEQ ID NO: 2718529 - RNA, 23 nt, Human
guucagcuuguaaauagcucagg

SEQ ID NO: 2718530 - RNA, 20 nt, Human
guucaggguuggccccugcc

SEQ ID NO: 2718531 - RNA, 21 nt, Human
guucaggguuggccccugccc

SEQ ID NO: 2718532 - RNA, 22 nt, Human
guucaggguuggccccugcccg

SEQ ID NO: 2718533 - RNA, 21 nt, Human
aagccgugauuuucauugcug

SEQ ID NO: 2718534 - RNA, 17 nt, Human
guucagguaacaggcag

SEQ ID NO: 2718535 - RNA, 18 nt, Human
guucagguaacaggcaga

SEQ ID NO: 2718536 - RNA, 18 nt, Human
guucccuugaugaagaag

SEQ ID NO: 2718537 - RNA, 19 nt, Human
guucuagcauggcauauuu

SEQ ID NO: 2718538 - RNA, 22 nt, Human
guucuagcauggcauauuuuuc

SEQ ID NO: 2718539 - RNA, 21 nt, Human
guucccuuuuuuggcugcuga

SEQ ID NO: 2718540 - RNA, 22 nt, Human
guucccuuuuuuggcugcugaa

SEQ ID NO: 2718541 - RNA, 18 nt, Human
aagcuuauuaaaacucau

SEQ ID NO: 2718542 - RNA, 17 nt, Human
aagcucugcuccucucc

SEQ ID NO: 2718543 - RNA, 15 nt, Human
guucucucuucucca

SEQ ID NO: 2718544 - RNA, 12 nt, Human
guucucugagga

SEQ ID NO: 2718545 - RNA, 14 nt, Human
guucucugaggaca

SEQ ID NO: 2718546 - RNA, 13 nt, Human
guucucugcccuc

SEQ ID NO: 2718547 - RNA, 15 nt, Human
guucucugcccucca

SEQ ID NO: 2718548 - RNA, 13 nt, Human
guucucuccuucu

SEQ ID NO: 2718549 - RNA, 19 nt, Human
guucuagcauggcugccaa

SEQ ID NO: 2718550 - RNA, 13 nt, Human
guucuuaauucuu

SEQ ID NO: 2718551 - RNA, 17 nt, Human
guucucugcccuccaag

SEQ ID NO: 2718552 - RNA, 18 nt, Human
guucucugcccuccaaga

SEQ ID NO: 2718553 - RNA, 17 nt, Human
guucuuaauucuuagcu

SEQ ID NO: 2718554 - RNA, 14 nt, Human
guucuuaauucuua

SEQ ID NO: 2718555 - RNA, 14 nt, Human
guugauagcacaga

SEQ ID NO: 2718556 - RNA, 19 nt, Human
guugauagcacagacccug

SEQ ID NO: 2718557 - RNA, 18 nt, Human
guucuugguuuguaaauu

SEQ ID NO: 2718558 - RNA, 15 nt, Human
guucuugguuuguaa

SEQ ID NO: 2718559 - RNA, 14 nt, Human
guucuugguuugua

SEQ ID NO: 2718560 - RNA, 15 nt, Human
aaaugugcuuuuaaa

SEQ ID NO: 2718561 - RNA, 18 nt, Human
aaaugugccuucauuuuu

SEQ ID NO: 2718562 - RNA, 17 nt, Human
aaauuguauuacaaauc

SEQ ID NO: 2718563 - RNA, 17 nt, Human
aaauuccaagugauuga

SEQ ID NO: 2718564 - RNA, 18 nt, Human
guauucucuccuguaccu

SEQ ID NO: 2718565 - RNA, 19 nt, Human
guauucuagcuaauguaau

SEQ ID NO: 2718566 - RNA, 21 nt, Human
guauucuaaauuuuauaucuu

SEQ ID NO: 2718567 - RNA, 24 nt, Human
guauucuaaauuuuauaucuugua

SEQ ID NO: 2718568 - RNA, 23 nt, Human
guauuguacaaaguauuaagcau

SEQ ID NO: 2718569 - RNA, 22 nt, Human
guauuguacaaaguauuaagca

SEQ ID NO: 2718570 - RNA, 21 nt, Human
guauuguacaaaguauuaagc

SEQ ID NO: 2718571 - RNA, 19 nt, Human
guauuguacaaaguauuaa

SEQ ID NO: 2718572 - RNA, 21 nt, Human
aaaugucucuuuaaugucaca

SEQ ID NO: 2718573 - RNA, 14 nt, Human
gucaggaaagagaa

SEQ ID NO: 2718574 - RNA, 13 nt, Human
gucaggaaagaga

SEQ ID NO: 2718575 - RNA, 21 nt, Human
gucagaaguuucugccgcagc

SEQ ID NO: 2718576 - RNA, 21 nt, Human
gucacugcuuaacuucacaua

SEQ ID NO: 2718577 - RNA, 15 nt, Human
gucacugcuuaacuu

SEQ ID NO: 2718578 - RNA, 16 nt, Human
gucagguggggcagcu

SEQ ID NO: 2718579 - RNA, 17 nt, Human
gucagguggggcagcuu

SEQ ID NO: 2718580 - RNA, 18 nt, Human
gucagguggggcagcuug

SEQ ID NO: 2718581 - RNA, 22 nt, Human
gucagguggggcagcuugaggg

SEQ ID NO: 2718582 - RNA, 12 nt, Human
aaauuucuaaau

SEQ ID NO: 2718583 - RNA, 15 nt, Human
aaauuucuaaaucuc

SEQ ID NO: 2718584 - RNA, 13 nt, Human
aaauuucuaaauc

SEQ ID NO: 2718585 - RNA, 12 nt, Human
gucacaggcagg

SEQ ID NO: 2718586 - RNA, 22 nt, Human
gucaccaaaucagcugcuacua

SEQ ID NO: 2718587 - RNA, 18 nt, Human
gucacauuccugaacagg

SEQ ID NO: 2718588 - RNA, 22 nt, Human
gucaauuacaggaaguacugga

SEQ ID NO: 2718589 - RNA, 22 nt, Human
gucacucuggcagcucagagag

SEQ ID NO: 2718590 - RNA, 14 nt, Human
gucacugagacagc

SEQ ID NO: 2718591 - RNA, 15 nt, Human
gucacugagacagcc

SEQ ID NO: 2718592 - RNA, 16 nt, Human
gucacugagacagccc

SEQ ID NO: 2718593 - RNA, 12 nt, Human
gucaccaagccc

SEQ ID NO: 2718594 - RNA, 15 nt, Human
gucaccaagcccagu

SEQ ID NO: 2718595 - RNA, 23 nt, Human
gucacucuggcagcucagagagg

SEQ ID NO: 2718596 - RNA, 10 nt, Human
gucacugcuu

SEQ ID NO: 2718597 - RNA, 17 nt, Human
gucacugagacagcccg

SEQ ID NO: 2718598 - RNA, 18 nt, Human
gucacugagacagcccgg

SEQ ID NO: 2718599 - RNA, 21 nt, Human
gucacugagacagcccgggcu

SEQ ID NO: 2718600 - RNA, 23 nt, Human
gucacugagacagcccgggcucu

SEQ ID NO: 2718601 - RNA, 13 nt, Human
aacagucucagga

SEQ ID NO: 2718602 - RNA, 15 nt, Human
guccgugcuaaggac

SEQ ID NO: 2718603 - RNA, 17 nt, Human
guccgugcuaaggacuu

SEQ ID NO: 2718604 - RNA, 16 nt, Human
guccgugcuaaggacu

SEQ ID NO: 2718605 - RNA, 14 nt, Human
aacauaaaauacaa

SEQ ID NO: 2718606 - RNA, 14 nt, Human
aacagucucaggaa

SEQ ID NO: 2718607 - RNA, 12 nt, Human
aacauauauaac

SEQ ID NO: 2718608 - RNA, 16 nt, Human
aacauguuaaaccaug

SEQ ID NO: 2718609 - RNA, 15 nt, Human
aacauguuaaaccau

SEQ ID NO: 2718610 - RNA, 14 nt, Human
aacauguuaaacca

SEQ ID NO: 2718611 - RNA, 20 nt, Human
gucuauuuacggaacucaaa

SEQ ID NO: 2718612 - RNA, 22 nt, Human
gucuaugggacucaaugcacug

SEQ ID NO: 2718613 - RNA, 14 nt, Human
gucuaccugagggg

SEQ ID NO: 2718614 - RNA, 13 nt, Human
gucuaccugaggg

SEQ ID NO: 2718615 - RNA, 15 nt, Human
gucuaccugaggggc

SEQ ID NO: 2718616 - RNA, 16 nt, Human
gucuaccugaggggcc

SEQ ID NO: 2718617 - RNA, 12 nt, Human
gucgaggcagga

SEQ ID NO: 2718618 - RNA, 16 nt, Human
gucgaggacagggagg

SEQ ID NO: 2718619 - RNA, 14 nt, Human
guccucuuuucuga

SEQ ID NO: 2718620 - RNA, 19 nt, Human
guccugcugcaguugccag

SEQ ID NO: 2718621 - RNA, 17 nt, Human
guccugcugcaguugcc

SEQ ID NO: 2718622 - RNA, 16 nt, Human
guccuggcaugggaau

SEQ ID NO: 2718623 - RNA, 18 nt, Human
aacacagcaagggugaug

SEQ ID NO: 2718624 - RNA, 20 nt, Human
aacacagcaagggugauggg

SEQ ID NO: 2718625 - RNA, 17 nt, Human
aacacaacuauauuguu

SEQ ID NO: 2718626 - RNA, 19 nt, Human
aacacaaacgggcucagca

SEQ ID NO: 2718627 - RNA, 22 nt, Human
aaauuugaauuuuguguuagag

SEQ ID NO: 2718628 - RNA, 15 nt, Human
aaauuugaauuuugu

SEQ ID NO: 2718629 - RNA, 12 nt, Human
aaauuugaauuu

SEQ ID NO: 2718630 - RNA, 19 nt, Human
aaauuucuaaaucuccaaa

SEQ ID NO: 2718631 - RNA, 21 nt, Human
aacacucacauuuauucugcu

SEQ ID NO: 2718632 - RNA, 17 nt, Human
gucauuugagcagggcu

SEQ ID NO: 2718633 - RNA, 19 nt, Human
aacacuguucucugcccuc

SEQ ID NO: 2718634 - RNA, 16 nt, Human
aacacuguucucugcc

SEQ ID NO: 2718635 - RNA, 17 nt, Human
aacacuguucucugccc

SEQ ID NO: 2718636 - RNA, 18 nt, Human
aacacuguucucugcccu

SEQ ID NO: 2718637 - RNA, 19 nt, Human
gucauuugagcagggcuca

SEQ ID NO: 2718638 - RNA, 15 nt, Human
gucccaccccacaca

SEQ ID NO: 2718639 - RNA, 22 nt, Human
guccccaccgcagacaggacca

SEQ ID NO: 2718640 - RNA, 20 nt, Human
gucccaccccacacacgcca

SEQ ID NO: 2718641 - RNA, 18 nt, Human
guccccaccgcagacagg

SEQ ID NO: 2718642 - RNA, 18 nt, Human
guccccuguuuguuucug

SEQ ID NO: 2718643 - RNA, 22 nt, Human
guccccuguuuguuucugaaag

SEQ ID NO: 2718644 - RNA, 18 nt, Human
gucccuuacgugaguccu

SEQ ID NO: 2718645 - RNA, 19 nt, Human
gucccuuacgugaguccug

SEQ ID NO: 2718646 - RNA, 18 nt, Human
gucccugguggcagcuca

SEQ ID NO: 2718647 - RNA, 19 nt, Human
gucccugguggcagcucac

SEQ ID NO: 2718648 - RNA, 18 nt, Human
aacuucagcgguuuauau

SEQ ID NO: 2718649 - RNA, 22 nt, Human
aacuuccuuggacucauuuuaa

SEQ ID NO: 2718650 - RNA, 23 nt, Human
aacuuccuuggacucauuuuaaa

SEQ ID NO: 2718651 - RNA, 12 nt, Human
aacuugaaauuu

SEQ ID NO: 2718652 - RNA, 19 nt, Human
aacuugaaauuugaauuuu

SEQ ID NO: 2718653 - RNA, 18 nt, Human
aacuugaaauuugaauuu

SEQ ID NO: 2718654 - RNA, 13 nt, Human
aacuugaaauuug

SEQ ID NO: 2718655 - RNA, 17 nt, Human
aacugugaaguuuacau

SEQ ID NO: 2718656 - RNA, 19 nt, Human
aacugugaaguuuacauug

SEQ ID NO: 2718657 - RNA, 14 nt, Human
aacuucacauauug

SEQ ID NO: 2718658 - RNA, 22 nt, Human
aacuucaccauauuaccacaga

SEQ ID NO: 2718659 - RNA, 22 nt, Human
aacuucacauauugauuuccgu

SEQ ID NO: 2718660 - RNA, 23 nt, Human
gugauccucccaccucagccucc

SEQ ID NO: 2718661 - RNA, 19 nt, Human
gugcauuugaggucuguuc

SEQ ID NO: 2718662 - RNA, 17 nt, Human
gugcauuugaggucugu

SEQ ID NO: 2718663 - RNA, 23 nt, Human
gugccaaaaacaacaacaaaaug

SEQ ID NO: 2718664 - RNA, 21 nt, Human
gugcauuuggugguuucagaa

SEQ ID NO: 2718665 - RNA, 21 nt, Human
gugcacaugcacgugugugca

SEQ ID NO: 2718666 - RNA, 23 nt, Human
gugcacaagcuccaagcucccag

SEQ ID NO: 2718667 - RNA, 18 nt, Human
gugcaaugaccuuucaau

SEQ ID NO: 2718668 - RNA, 13 nt, Human
gugcacaagcucc

SEQ ID NO: 2718669 - RNA, 16 nt, Human
gugcacaagcuccaag

SEQ ID NO: 2718670 - RNA, 21 nt, Human
gugcacaagcuccaagcuccc

SEQ ID NO: 2718671 - RNA, 22 nt, Human
gugcuacaaaaacacagcaagg

SEQ ID NO: 2718672 - RNA, 21 nt, Human
gugcuacaaaaacacagcaag

SEQ ID NO: 2718673 - RNA, 15 nt, Human
gugcuaucuccccca

SEQ ID NO: 2718674 - RNA, 18 nt, Human
gugcuaucucccccagcc

SEQ ID NO: 2718675 - RNA, 16 nt, Human
gugcucugaucaucca

SEQ ID NO: 2718676 - RNA, 13 nt, Human
gugcucuggacag

SEQ ID NO: 2718677 - RNA, 14 nt, Human
gugcucuggacagg

SEQ ID NO: 2718678 - RNA, 12 nt, Human
gugcugcccugc

SEQ ID NO: 2718679 - RNA, 13 nt, Human
gugcugcccugcc

SEQ ID NO: 2718680 - RNA, 14 nt, Human
gugcugcccugccc

SEQ ID NO: 2718681 - RNA, 15 nt, Human
gugcugcccugccca

SEQ ID NO: 2718682 - RNA, 11 nt, Human
aagaaacauuu

SEQ ID NO: 2718683 - RNA, 22 nt, Human
aagaaaauaguggugugauuug

SEQ ID NO: 2718684 - RNA, 21 nt, Human
aagaaaauaguggugugauuu

SEQ ID NO: 2718685 - RNA, 15 nt, Human
aagaaaauaguggug

SEQ ID NO: 2718686 - RNA, 17 nt, Human
aagaaaaaugagccugg

SEQ ID NO: 2718687 - RNA, 18 nt, Human
aagaaaaaugagccuggc

SEQ ID NO: 2718688 - RNA, 14 nt, Human
aagaaaacaacuuc

SEQ ID NO: 2718689 - RNA, 19 nt, Human
aagaaaaaauauuuucccu

SEQ ID NO: 2718690 - RNA, 13 nt, Human
aagaaaaagaaaa

SEQ ID NO: 2718691 - RNA, 18 nt, Human
aagaaaaagaaaaagaaa

SEQ ID NO: 2718692 - RNA, 23 nt, Human
aacuuuaccuuuuuuauacauaa

SEQ ID NO: 2718693 - RNA, 22 nt, Human
aacuuuaccuuuuuuauacaua

SEQ ID NO: 2718694 - RNA, 21 nt, Human
aacuuuaccuuuuuuauacau

SEQ ID NO: 2718695 - RNA, 19 nt, Human
gucuuauauauuguagaua

SEQ ID NO: 2718696 - RNA, 14 nt, Human
gucuuaauuaaaag

SEQ ID NO: 2718697 - RNA, 18 nt, Human
gucuggaaugcaguggua

SEQ ID NO: 2718698 - RNA, 15 nt, Human
gucuggaaugcagug

SEQ ID NO: 2718699 - RNA, 16 nt, Human
gucuggaaugcagugg

SEQ ID NO: 2718700 - RNA, 23 nt, Human
gucuugucucagauuuuauuaug

SEQ ID NO: 2718701 - RNA, 17 nt, Human
gucucaaaaaaagaaaa

SEQ ID NO: 2718702 - RNA, 14 nt, Human
gucucaaaaaaaca

SEQ ID NO: 2718703 - RNA, 20 nt, Human
gucugacaggcaaugcuggc

SEQ ID NO: 2718704 - RNA, 15 nt, Human
gucugacaggcaaug

SEQ ID NO: 2718705 - RNA, 18 nt, Human
gucugacaggcaaugcug

SEQ ID NO: 2718706 - RNA, 12 nt, Human
gucugacaggca

SEQ ID NO: 2718707 - RNA, 13 nt, Human
gucugacaggcaa

SEQ ID NO: 2718708 - RNA, 14 nt, Human
gucugacaggcaau

SEQ ID NO: 2718709 - RNA, 21 nt, Human
aacucauuuuuguuuucauua

SEQ ID NO: 2718710 - RNA, 24 nt, Human
aacucauuuuuguuuucauuaucu

SEQ ID NO: 2718711 - RNA, 23 nt, Human
aacuauucaggagaguagaacag

SEQ ID NO: 2718712 - RNA, 17 nt, Human
aacuagggaagauaaua

SEQ ID NO: 2718713 - RNA, 12 nt, Human
aacguggcugcu

SEQ ID NO: 2718714 - RNA, 13 nt, Human
aacguggcugcuu

SEQ ID NO: 2718715 - RNA, 13 nt, Human
aacgucugugcca

SEQ ID NO: 2718716 - RNA, 14 nt, Human
aacgucuuaaauau

SEQ ID NO: 2718717 - RNA, 12 nt, Human
aacgucuuaaau

SEQ ID NO: 2718718 - RNA, 15 nt, Human
aacgucuuaaauauu

SEQ ID NO: 2718719 - RNA, 22 nt, Human
aacucuccucugcugcuggcug

SEQ ID NO: 2718720 - RNA, 23 nt, Human
aacucuccucugcugcuggcugg

SEQ ID NO: 2718721 - RNA, 16 nt, Human
aacugcauuggcuuug

SEQ ID NO: 2718722 - RNA, 22 nt, Human
aacugauuuuuuuuuccuucag

SEQ ID NO: 2718723 - RNA, 23 nt, Human
aacugauuuuuuuuuccuucagu

SEQ ID NO: 2718724 - RNA, 20 nt, Human
aacugauuuuuuuuuccuuc

SEQ ID NO: 2718725 - RNA, 21 nt, Human
aacugauuuuuuuuuccuuca

SEQ ID NO: 2718726 - RNA, 18 nt, Human
gugaggcucugcccuugg

SEQ ID NO: 2718727 - RNA, 17 nt, Human
gugagucaccaagccca

SEQ ID NO: 2718728 - RNA, 23 nt, Human
gugaguacuacaguccucccauc

SEQ ID NO: 2718729 - RNA, 19 nt, Human
gugagucaccaagcccagu

SEQ ID NO: 2718730 - RNA, 21 nt, Human
gugaguacuacaguccuccca

SEQ ID NO: 2718731 - RNA, 17 nt, Human
aacucuccucugcugcu

SEQ ID NO: 2718732 - RNA, 19 nt, Human
aacucuccucugcugcugg

SEQ ID NO: 2718733 - RNA, 21 nt, Human
aacucuccucugcugcuggcu

SEQ ID NO: 2718734 - RNA, 18 nt, Human
gugagacucugucucaaa

SEQ ID NO: 2718735 - RNA, 12 nt, Human
gugaggcucugc

SEQ ID NO: 2718736 - RNA, 13 nt, Human
gugaggcucugcc

SEQ ID NO: 2718737 - RNA, 14 nt, Human
gugaggcucugccc

SEQ ID NO: 2718738 - RNA, 15 nt, Human
gugaggcucugcccu

SEQ ID NO: 2718739 - RNA, 16 nt, Human
gugaggcucugcccuu

SEQ ID NO: 2718740 - RNA, 17 nt, Human
gugaggcucugcccuug

SEQ ID NO: 2718741 - RNA, 23 nt, Human
gugaauaauacaguaucucaggg

SEQ ID NO: 2718742 - RNA, 14 nt, Human
gugaaguuuacauu

SEQ ID NO: 2718743 - RNA, 23 nt, Human
gugacagaggcagccccauucug

SEQ ID NO: 2718744 - RNA, 20 nt, Human
gugacagagugagacucugu

SEQ ID NO: 2718745 - RNA, 22 nt, Human
gugacagagugagacucugucu

SEQ ID NO: 2718746 - RNA, 22 nt, Human
gugagacccugucucaaaaaaa

SEQ ID NO: 2718747 - RNA, 14 nt, Human
gugagacucugucu

SEQ ID NO: 2718748 - RNA, 16 nt, Human
gugagacucugucuca

SEQ ID NO: 2718749 - RNA, 12 nt, Human
gugacuuuggau

SEQ ID NO: 2718750 - RNA, 15 nt, Human
gugacuuuggauaau

SEQ ID NO: 2718751 - RNA, 19 nt, Human
gugacaugucuuuucuugc

SEQ ID NO: 2718752 - RNA, 15 nt, Human
uagggagagaagaua

SEQ ID NO: 2718753 - RNA, 14 nt, Human
uagggagagaagau

SEQ ID NO: 2718754 - RNA, 21 nt, Human
uagggaaggauacaaaagcau

SEQ ID NO: 2718755 - RNA, 16 nt, Human
uaggcauuugcugaau

SEQ ID NO: 2718756 - RNA, 20 nt, Human
uaggcauuugcugaauacag

SEQ ID NO: 2718757 - RNA, 14 nt, Human
uaggcauuguggga

SEQ ID NO: 2718758 - RNA, 18 nt, Human
uaggcaaccuuuauuuuu

SEQ ID NO: 2718759 - RNA, 18 nt, Human
uaggaaauauuuauuuua

SEQ ID NO: 2718760 - RNA, 19 nt, Human
uaggaaauauuuauuuuaa

SEQ ID NO: 2718761 - RNA, 23 nt, Human
acaauacaucccuuaccugggaa

SEQ ID NO: 2718762 - RNA, 13 nt, Human
acaagacugcaca

SEQ ID NO: 2718763 - RNA, 14 nt, Human
acaagacugcacau

SEQ ID NO: 2718764 - RNA, 18 nt, Human
acaagaccacguuucuaa

SEQ ID NO: 2718765 - RNA, 12 nt, Human
acaaugacuuac

SEQ ID NO: 2718766 - RNA, 18 nt, Human
acaaugacuuacuguaca

SEQ ID NO: 2718767 - RNA, 17 nt, Human
acaaugacuuacuguac

SEQ ID NO: 2718768 - RNA, 12 nt, Human
uagcuaauguaa

SEQ ID NO: 2718769 - RNA, 19 nt, Human
uagcuaauguaauaacugu

SEQ ID NO: 2718770 - RNA, 22 nt, Human
uagcuagacuggugacugauuc

SEQ ID NO: 2718771 - RNA, 21 nt, Human
uagcuagacuggugacugauu

SEQ ID NO: 2718772 - RNA, 18 nt, Human
acaaaaggauaaugaaua

SEQ ID NO: 2718773 - RNA, 22 nt, Human
acaaaagcaugugagacugguu

SEQ ID NO: 2718774 - RNA, 11 nt, Human
acaaaagcaug

SEQ ID NO: 2718775 - RNA, 22 nt, Human
acaaaggaugcccaaagaugca

SEQ ID NO: 2718776 - RNA, 22 nt, Human
uagagcaaaauugauguguuua

SEQ ID NO: 2718777 - RNA, 23 nt, Human
uagagauuuuuuuguuguuuguu

SEQ ID NO: 2718778 - RNA, 14 nt, Human
uagagcaaaauuga

SEQ ID NO: 2718779 - RNA, 21 nt, Human
uagagcaaaauugauguguuu

SEQ ID NO: 2718780 - RNA, 15 nt, Human
uagauauaugcucug

SEQ ID NO: 2718781 - RNA, 19 nt, Human
uagauauaugcucugcaug

SEQ ID NO: 2718782 - RNA, 15 nt, Human
uagaugcaguucuga

SEQ ID NO: 2718783 - RNA, 22 nt, Human
uagcauggcauauuuuucacau

SEQ ID NO: 2718784 - RNA, 19 nt, Human
uagcauggcugccaauggg

SEQ ID NO: 2718785 - RNA, 21 nt, Human
uagcauggcauauuuuucaca

SEQ ID NO: 2718786 - RNA, 22 nt, Human
uagcauuuugcuaaaugugaau

SEQ ID NO: 2718787 - RNA, 14 nt, Human
uagccaaggccaaa

SEQ ID NO: 2718788 - RNA, 21 nt, Human
uagccaaggccaaaggaagca

SEQ ID NO: 2718789 - RNA, 16 nt, Human
uagcauuuugcuaaau

SEQ ID NO: 2718790 - RNA, 19 nt, Human
acaagacccuugugguccc

SEQ ID NO: 2718791 - RNA, 19 nt, Human
acaagaccacguuucuaaa

SEQ ID NO: 2718792 - RNA, 23 nt, Human
acaacacucauugaccugaggcc

SEQ ID NO: 2718793 - RNA, 21 nt, Human
acaacacucauugaccugagg

SEQ ID NO: 2718794 - RNA, 11 nt, Human
uagccagagga

SEQ ID NO: 2718795 - RNA, 15 nt, Human
uagccagaggagaga

SEQ ID NO: 2718796 - RNA, 22 nt, Human
uagugaaacucguuaauuugua

SEQ ID NO: 2718797 - RNA, 23 nt, Human
uaguguuggagaagaacugaaau

SEQ ID NO: 2718798 - RNA, 13 nt, Human
acacagugagucg

SEQ ID NO: 2718799 - RNA, 19 nt, Human
acacaguauuacuucugcu

SEQ ID NO: 2718800 - RNA, 22 nt, Human
acacaguauuacuucugcuaca

SEQ ID NO: 2718801 - RNA, 18 nt, Human
acacaguauuacuucugc

SEQ ID NO: 2718802 - RNA, 16 nt, Human
acacaguauuacuucu

SEQ ID NO: 2718803 - RNA, 15 nt, Human
acacacucaaaucaa

SEQ ID NO: 2718804 - RNA, 21 nt, Human
acacacugcauguuugugauu

SEQ ID NO: 2718805 - RNA, 14 nt, Human
acacaccagagccc

SEQ ID NO: 2718806 - RNA, 15 nt, Human
acacaccagagccca

SEQ ID NO: 2718807 - RNA, 20 nt, Human
acacaccagagcccaccuug

SEQ ID NO: 2718808 - RNA, 21 nt, Human
acacacgcgugcacacaccag

SEQ ID NO: 2718809 - RNA, 22 nt, Human
acacacacgcgugcacacacca

SEQ ID NO: 2718810 - RNA, 17 nt, Human
acacacagcucuguccu

SEQ ID NO: 2718811 - RNA, 13 nt, Human
acacacagcucug

SEQ ID NO: 2718812 - RNA, 14 nt, Human
acacacagcucugu

SEQ ID NO: 2718813 - RNA, 18 nt, Human
acaaugcuguauuuuaaa

SEQ ID NO: 2718814 - RNA, 22 nt, Human
acaaugcuguauuuuaaaagaa

SEQ ID NO: 2718815 - RNA, 21 nt, Human
acaaugcugugcccuaaagug

SEQ ID NO: 2718816 - RNA, 24 nt, Human
acaaugcugugcccuaaaguguau

SEQ ID NO: 2718817 - RNA, 23 nt, Human
acaaugcugugcccuaaagugua

SEQ ID NO: 2718818 - RNA, 22 nt, Human
acaaugcugugcccuaaagugu

SEQ ID NO: 2718819 - RNA, 17 nt, Human
acaaugugaaaagaaaa

SEQ ID NO: 2718820 - RNA, 19 nt, Human
acaaugugaaaagaaaaau

SEQ ID NO: 2718821 - RNA, 14 nt, Human
acacacacauacac

SEQ ID NO: 2718822 - RNA, 19 nt, Human
acacucaaaucaagaaacu

SEQ ID NO: 2718823 - RNA, 15 nt, Human
acacucaaaagcugg

SEQ ID NO: 2718824 - RNA, 14 nt, Human
acacuaagagagaa

SEQ ID NO: 2718825 - RNA, 13 nt, Human
acacuaagagaga

SEQ ID NO: 2718826 - RNA, 20 nt, Human
acacucacauuuauucugcu

SEQ ID NO: 2718827 - RNA, 22 nt, Human
acacucacauuuauucugcuca

SEQ ID NO: 2718828 - RNA, 19 nt, Human
acaccucugcacaagcugc

SEQ ID NO: 2718829 - RNA, 21 nt, Human
acaccucugcacaagcugcac

SEQ ID NO: 2718830 - RNA, 16 nt, Human
acaccgggcacucaga

SEQ ID NO: 2718831 - RNA, 19 nt, Human
acacccugugauggggccc

SEQ ID NO: 2718832 - RNA, 20 nt, Human
acacuaaccacgcuggaccu

SEQ ID NO: 2718833 - RNA, 21 nt, Human
acacaugagcaucaggccagg

SEQ ID NO: 2718834 - RNA, 15 nt, Human
acacaugaaguccaa

SEQ ID NO: 2718835 - RNA, 15 nt, Human
acacaucagcuugcc

SEQ ID NO: 2718836 - RNA, 20 nt, Human
acacauuuuauuuuauuaug

SEQ ID NO: 2718837 - RNA, 19 nt, Human
acacauuuuauuuuauuau

SEQ ID NO: 2718838 - RNA, 14 nt, Human
acacauuuuauuuu

SEQ ID NO: 2718839 - RNA, 13 nt, Human
acacauuuuauuu

SEQ ID NO: 2718840 - RNA, 17 nt, Human
acaccauuaugugcgcu

SEQ ID NO: 2718841 - RNA, 21 nt, Human
acaccauuaugugcgcugaua

SEQ ID NO: 2718842 - RNA, 20 nt, Human
uaguuccaccaucaagccac

SEQ ID NO: 2718843 - RNA, 17 nt, Human
uaucucaaaacugcacu

SEQ ID NO: 2718844 - RNA, 23 nt, Human
uaucuauauuuuacauaaauuua

SEQ ID NO: 2718845 - RNA, 13 nt, Human
uaucucccccagc

SEQ ID NO: 2718846 - RNA, 14 nt, Human
uaucucccccagcc

SEQ ID NO: 2718847 - RNA, 11 nt, Human
acagagaaagu

SEQ ID NO: 2718848 - RNA, 18 nt, Human
acagagaaaguacuucuc

SEQ ID NO: 2718849 - RNA, 19 nt, Human
uauccaaaccaaauaaaaa

SEQ ID NO: 2718850 - RNA, 15 nt, Human
uaucuauauuuuaca

SEQ ID NO: 2718851 - RNA, 15 nt, Human
uauauuguuugcuaa

SEQ ID NO: 2718852 - RNA, 19 nt, Human
uauauuuacuaaaauggac

SEQ ID NO: 2718853 - RNA, 21 nt, Human
uauauuuacuaaaauggacug

SEQ ID NO: 2718854 - RNA, 20 nt, Human
uauauuuacuaaaauggacu

SEQ ID NO: 2718855 - RNA, 13 nt, Human
acagacccugccc

SEQ ID NO: 2718856 - RNA, 14 nt, Human
acagacccugcccu

SEQ ID NO: 2718857 - RNA, 15 nt, Human
acagacccugcccug

SEQ ID NO: 2718858 - RNA, 19 nt, Human
uauaauuuugugaagcaaa

SEQ ID NO: 2718859 - RNA, 17 nt, Human
acagaaauguacagcaa

SEQ ID NO: 2718860 - RNA, 16 nt, Human
acagaaauguacagca

SEQ ID NO: 2718861 - RNA, 14 nt, Human
acagaaauguacag

SEQ ID NO: 2718862 - RNA, 20 nt, Human
acagaaaauggaagacagcu

SEQ ID NO: 2718863 - RNA, 13 nt, Human
acagaaauguaca

SEQ ID NO: 2718864 - RNA, 17 nt, Human
acagaaaauucuucucc

SEQ ID NO: 2718865 - RNA, 16 nt, Human
acagccucuuagaugc

SEQ ID NO: 2718866 - RNA, 15 nt, Human
uaugcuuauacacuu

SEQ ID NO: 2718867 - RNA, 15 nt, Human
uaugcugaguuugug

SEQ ID NO: 2718868 - RNA, 17 nt, Human
uauggcuuuugugcauu

SEQ ID NO: 2718869 - RNA, 21 nt, Human
uauggcuuuugugcauuaucu

SEQ ID NO: 2718870 - RNA, 18 nt, Human
uauggcuuuugugcauua

SEQ ID NO: 2718871 - RNA, 19 nt, Human
uaugccccauucaacaucu

SEQ ID NO: 2718872 - RNA, 15 nt, Human
uaugccccauucaac

SEQ ID NO: 2718873 - RNA, 17 nt, Human
uaugccugggcagaagg

SEQ ID NO: 2718874 - RNA, 21 nt, Human
uaugauuaaguaaugauaacu

SEQ ID NO: 2718875 - RNA, 11 nt, Human
uaugcauuuga

SEQ ID NO: 2718876 - RNA, 24 nt, Human
uaugcauuugaaaauuuugauguu

SEQ ID NO: 2718877 - RNA, 23 nt, Human
uaugcauuugaaaauuuugaugu

SEQ ID NO: 2718878 - RNA, 16 nt, Human
uaugauuaaguaauga

SEQ ID NO: 2718879 - RNA, 20 nt, Human
uaugauuaaguaaugauaac

SEQ ID NO: 2718880 - RNA, 19 nt, Human
uaugaaauuauauaaguau

SEQ ID NO: 2718881 - RNA, 20 nt, Human
acagcccgggcucugccucc

SEQ ID NO: 2718882 - RNA, 18 nt, Human
acagcccgggcucugccu

SEQ ID NO: 2718883 - RNA, 19 nt, Human
acagcccgggcucugccuc

SEQ ID NO: 2718884 - RNA, 16 nt, Human
acagcaaggagauuua

SEQ ID NO: 2718885 - RNA, 21 nt, Human
acagcaaggagauuuacaacu

SEQ ID NO: 2718886 - RNA, 17 nt, Human
acagcccgggcucugcc

SEQ ID NO: 2718887 - RNA, 20 nt, Human
acagauuuccauccuaguca

SEQ ID NO: 2718888 - RNA, 17 nt, Human
acagcaaggagauuuac

SEQ ID NO: 2718889 - RNA, 14 nt, Human
acagagcccacgcc

SEQ ID NO: 2718890 - RNA, 15 nt, Human
acagagcccacgccc

SEQ ID NO: 2718891 - RNA, 18 nt, Human
acagagcccacgccccca

SEQ ID NO: 2718892 - RNA, 19 nt, Human
acagagcccacgcccccac

SEQ ID NO: 2718893 - RNA, 12 nt, Human
acaggcugggcu

SEQ ID NO: 2718894 - RNA, 22 nt, Human
acaggcugggcuucaguggcag

SEQ ID NO: 2718895 - RNA, 23 nt, Human
acaggcugggcuucaguggcagc

SEQ ID NO: 2718896 - RNA, 17 nt, Human
acagucaccucauggaa

SEQ ID NO: 2718897 - RNA, 18 nt, Human
acagucaccucauggaau

SEQ ID NO: 2718898 - RNA, 16 nt, Human
acagucaccucaugga

SEQ ID NO: 2718899 - RNA, 20 nt, Human
acaguauaauuaacauguua

SEQ ID NO: 2718900 - RNA, 15 nt, Human
acaguauaauuaaca

SEQ ID NO: 2718901 - RNA, 13 nt, Human
acaguauaauuaa

SEQ ID NO: 2718902 - RNA, 12 nt, Human
acagggcacacc

SEQ ID NO: 2718903 - RNA, 20 nt, Human
acagggcacaccgggcacuc

SEQ ID NO: 2718904 - RNA, 14 nt, Human
uauuacuguaagaa

SEQ ID NO: 2718905 - RNA, 13 nt, Human
uauuacuucugcu

SEQ ID NO: 2718906 - RNA, 14 nt, Human
uauuacuucugcua

SEQ ID NO: 2718907 - RNA, 15 nt, Human
uauucaaacagucuc

SEQ ID NO: 2718908 - RNA, 23 nt, Human
uauucaaacagucucaggaaauc

SEQ ID NO: 2718909 - RNA, 16 nt, Human
uauucaaaguugccua

SEQ ID NO: 2718910 - RNA, 13 nt, Human
uauucaaaguugc

SEQ ID NO: 2718911 - RNA, 12 nt, Human
uauucaaaguug

SEQ ID NO: 2718912 - RNA, 20 nt, Human
uauucaguaauaacucuacc

SEQ ID NO: 2718913 - RNA, 14 nt, Human
uauucaggaagcuc

SEQ ID NO: 2718914 - RNA, 13 nt, Human
acaggaaguacug

SEQ ID NO: 2718915 - RNA, 22 nt, Human
acaggaaccacaagacugcaca

SEQ ID NO: 2718916 - RNA, 17 nt, Human
acaggaaaagcugcuga

SEQ ID NO: 2718917 - RNA, 15 nt, Human
acaggaaaagcugcu

SEQ ID NO: 2718918 - RNA, 16 nt, Human
acaggaaaagcugcug

SEQ ID NO: 2718919 - RNA, 13 nt, Human
acagcuaacaugg

SEQ ID NO: 2718920 - RNA, 14 nt, Human
acaggcauguucuc

SEQ ID NO: 2718921 - RNA, 14 nt, Human
acaggcagguccag

SEQ ID NO: 2718922 - RNA, 16 nt, Human
acaggcagguccaggg

SEQ ID NO: 2718923 - RNA, 16 nt, Human
acaggagugagcacua

SEQ ID NO: 2718924 - RNA, 14 nt, Human
acaggaucagucug

SEQ ID NO: 2718925 - RNA, 13 nt, Human
acaggcaggucca

SEQ ID NO: 2718926 - RNA, 23 nt, Human
acaggaccagggauuuccaugau

SEQ ID NO: 2718927 - RNA, 21 nt, Human
uauguuuucaggcuagaugua

SEQ ID NO: 2718928 - RNA, 14 nt, Human
uaugugugaaguga

SEQ ID NO: 2718929 - RNA, 12 nt, Human
uaugugugaagu

SEQ ID NO: 2718930 - RNA, 16 nt, Human
uauuaaaacucauuuu

SEQ ID NO: 2718931 - RNA, 22 nt, Human
acaggcauguucucugaggaca

SEQ ID NO: 2718932 - RNA, 15 nt, Human
acaggcauguucucu

SEQ ID NO: 2718933 - RNA, 18 nt, Human
acaggcauguucucugag

SEQ ID NO: 2718934 - RNA, 19 nt, Human
acaggcauguucucugagg

SEQ ID NO: 2718935 - RNA, 20 nt, Human
acaggcauguucucugagga

SEQ ID NO: 2718936 - RNA, 20 nt, Human
uauguggaguucaucuugaa

SEQ ID NO: 2718937 - RNA, 22 nt, Human
uaugugaacaguuguguuugaa

SEQ ID NO: 2718938 - RNA, 12 nt, Human
uaugugaacagu

SEQ ID NO: 2718939 - RNA, 18 nt, Human
uacuguacaugaaaacac

SEQ ID NO: 2718940 - RNA, 22 nt, Human
uacuguacaugaaaacacauuu

SEQ ID NO: 2718941 - RNA, 23 nt, Human
uacuguaauuugugauacaaugc

SEQ ID NO: 2718942 - RNA, 21 nt, Human
uacuguacaugaaaacacauu

SEQ ID NO: 2718943 - RNA, 13 nt, Human
aauugauguguuu

SEQ ID NO: 2718944 - RNA, 14 nt, Human
aauugauguguuua

SEQ ID NO: 2718945 - RNA, 14 nt, Human
uacuguaagaaaau

SEQ ID NO: 2718946 - RNA, 18 nt, Human
uacuguaauuugugauac

SEQ ID NO: 2718947 - RNA, 20 nt, Human
uacuguaauuugugauacaa

SEQ ID NO: 2718948 - RNA, 19 nt, Human
uacuguaauuugugauaca

SEQ ID NO: 2718949 - RNA, 14 nt, Human
uacuggauuguacu

SEQ ID NO: 2718950 - RNA, 16 nt, Human
uacuggagaaaaugga

SEQ ID NO: 2718951 - RNA, 12 nt, Human
uacucuguguca

SEQ ID NO: 2718952 - RNA, 13 nt, Human
uacuacuccugua

SEQ ID NO: 2718953 - RNA, 17 nt, Human
uacuacuccuguaggaa

SEQ ID NO: 2718954 - RNA, 23 nt, Human
uacuauggcccuggccuagcaua

SEQ ID NO: 2718955 - RNA, 13 nt, Human
uacuauguaucaa

SEQ ID NO: 2718956 - RNA, 12 nt, Human
uacuauguauca

SEQ ID NO: 2718957 - RNA, 23 nt, Human
uacucuccuggaaauauuaagaa

SEQ ID NO: 2718958 - RNA, 22 nt, Human
uacucuccuggaaauauuaaga

SEQ ID NO: 2718959 - RNA, 14 nt, Human
uacuauguaucaau

SEQ ID NO: 2718960 - RNA, 22 nt, Human
uacgccaggggaaaaucagccu

SEQ ID NO: 2718961 - RNA, 18 nt, Human
uacgggaggguaaggcug

SEQ ID NO: 2718962 - RNA, 12 nt, Human
uacguacacauu

SEQ ID NO: 2718963 - RNA, 16 nt, Human
uacguugugcauuugg

SEQ ID NO: 2718964 - RNA, 15 nt, Human
uacguugugcauuug

SEQ ID NO: 2718965 - RNA, 13 nt, Human
uacguacacauuu

SEQ ID NO: 2718966 - RNA, 14 nt, Human
aauuccccacccug

SEQ ID NO: 2718967 - RNA, 12 nt, Human
aauuccccagau

SEQ ID NO: 2718968 - RNA, 18 nt, Human
aauuccaagugauugaaa

SEQ ID NO: 2718969 - RNA, 15 nt, Human
aauucagaaggaucu

SEQ ID NO: 2718970 - RNA, 16 nt, Human
aauuauuuuguucaua

SEQ ID NO: 2718971 - RNA, 18 nt, Human
aauuauuuuguucauaca

SEQ ID NO: 2718972 - RNA, 19 nt, Human
aauuauuuuguucauacau

SEQ ID NO: 2718973 - RNA, 20 nt, Human
aauuauuuuguucauacaua

SEQ ID NO: 2718974 - RNA, 21 nt, Human
aauuauuuuguucauacauau

SEQ ID NO: 2718975 - RNA, 22 nt, Human
aauuauuuuguucauacauauu

SEQ ID NO: 2718976 - RNA, 19 nt, Human
uacauuguacgaagaguau

SEQ ID NO: 2718977 - RNA, 23 nt, Human
uaccugccaggaagccagcaggc

SEQ ID NO: 2718978 - RNA, 18 nt, Human
uaccugccaggaagccag

SEQ ID NO: 2718979 - RNA, 20 nt, Human
uaccugccaggaagccagca

SEQ ID NO: 2718980 - RNA, 10 nt, Human
uaccuguccc

SEQ ID NO: 2718981 - RNA, 13 nt, Human
uaccugucccccu

SEQ ID NO: 2718982 - RNA, 14 nt, Human
uaccugucccccug

SEQ ID NO: 2718983 - RNA, 16 nt, Human
uaccugucccccugac

SEQ ID NO: 2718984 - RNA, 17 nt, Human
uaccugucccccugaca

SEQ ID NO: 2718985 - RNA, 11 nt, Human
aauuacaggaa

SEQ ID NO: 2718986 - RNA, 15 nt, Human
aauuagccaagugug

SEQ ID NO: 2718987 - RNA, 16 nt, Human
aaugcuguauuuuaaa

SEQ ID NO: 2718988 - RNA, 13 nt, Human
aaugcuguguuaa

SEQ ID NO: 2718989 - RNA, 11 nt, Human
aaugcccagcc

SEQ ID NO: 2718990 - RNA, 12 nt, Human
aaugcccagccc

SEQ ID NO: 2718991 - RNA, 21 nt, Human
aauggacguguuaugacucca

SEQ ID NO: 2718992 - RNA, 14 nt, Human
aauggaaccacucu

SEQ ID NO: 2718993 - RNA, 23 nt, Human
aauggacguguuaugacuccaga

SEQ ID NO: 2718994 - RNA, 20 nt, Human
aauggacuaacuugucuuug

SEQ ID NO: 2718995 - RNA, 20 nt, Human
aauggaaaugggcagagcag

SEQ ID NO: 2718996 - RNA, 21 nt, Human
aauggaaaugggcagagcaga

SEQ ID NO: 2718997 - RNA, 21 nt, Human
aaugcacuuuguucuggcucu

SEQ ID NO: 2718998 - RNA, 21 nt, Human
uacaaugcugugcccuaaagu

SEQ ID NO: 2718999 - RNA, 18 nt, Human
aaugaccuuucaauagga

SEQ ID NO: 2719000 - RNA, 16 nt, Human
aaugaccuuucaauag

SEQ ID NO: 2719001 - RNA, 17 nt, Human
aaugaccuuucaauagg

SEQ ID NO: 2719002 - RNA, 22 nt, Human
aaugcacuuuguucuggcucuu

SEQ ID NO: 2719003 - RNA, 23 nt, Human
aaugccaucaauaaaaaauuaug

SEQ ID NO: 2719004 - RNA, 21 nt, Human
aaugccaucaauaaaaaauua

SEQ ID NO: 2719005 - RNA, 16 nt, Human
aaugccaucaauaaaa

SEQ ID NO: 2719006 - RNA, 14 nt, Human
uacacuaagagaga

SEQ ID NO: 2719007 - RNA, 18 nt, Human
uacacuaagagagaauga

SEQ ID NO: 2719008 - RNA, 15 nt, Human
uacacuaaaagguga

SEQ ID NO: 2719009 - RNA, 23 nt, Human
uacacauuuuauuuuauuaugca

SEQ ID NO: 2719010 - RNA, 19 nt, Human
uacacauuuuauuuuauua

SEQ ID NO: 2719011 - RNA, 22 nt, Human
uacacauuuuauuuuauuaugc

SEQ ID NO: 2719012 - RNA, 21 nt, Human
uacacauuuuauuuuauuaug

SEQ ID NO: 2719013 - RNA, 22 nt, Human
uacagacaacaaaccuguuucu

SEQ ID NO: 2719014 - RNA, 19 nt, Human
uacagacaaagcguggugg

SEQ ID NO: 2719015 - RNA, 12 nt, Human
aauggcagccuu

SEQ ID NO: 2719016 - RNA, 16 nt, Human
aauggcagccuuggca

SEQ ID NO: 2719017 - RNA, 16 nt, Human
aauggacuguggugac

SEQ ID NO: 2719018 - RNA, 20 nt, Human
uacaucccuuaccugggaaa

SEQ ID NO: 2719019 - RNA, 16 nt, Human
uacaggugugagucac

SEQ ID NO: 2719020 - RNA, 23 nt, Human
uacaggucauauuaauauauuuc

SEQ ID NO: 2719021 - RNA, 24 nt, Human
uacauaaugcgugcauaccacuuu

SEQ ID NO: 2719022 - RNA, 23 nt, Human
uacauaaugcgugcauaccacuu

SEQ ID NO: 2719023 - RNA, 21 nt, Human
uacauaaugcgugcauaccac

SEQ ID NO: 2719024 - RNA, 19 nt, Human
aauguauguguaaguauuc

SEQ ID NO: 2719025 - RNA, 20 nt, Human
aauguauguguaaguauucu

SEQ ID NO: 2719026 - RNA, 17 nt, Human
aaugugaaaagaaaaau

SEQ ID NO: 2719027 - RNA, 22 nt, Human
aauguauuacaguggggaauga

SEQ ID NO: 2719028 - RNA, 19 nt, Human
aaugugaaaagaaaaauga

SEQ ID NO: 2719029 - RNA, 14 nt, Human
aaugugaaacugga

SEQ ID NO: 2719030 - RNA, 15 nt, Human
aaugugaaacuggau

SEQ ID NO: 2719031 - RNA, 18 nt, Human
uaccaccagucugacugu

SEQ ID NO: 2719032 - RNA, 17 nt, Human
uacauuguaaauaguau

SEQ ID NO: 2719033 - RNA, 13 nt, Human
uacauucuguuaa

SEQ ID NO: 2719034 - RNA, 21 nt, Human
aauguucucucuucuccaccu

SEQ ID NO: 2719035 - RNA, 11 nt, Human
aauuaacuuuu

SEQ ID NO: 2719036 - RNA, 20 nt, Human
aauuaacauguuaaaccaug

SEQ ID NO: 2719037 - RNA, 19 nt, Human
aauuaacauguuaaaccau

SEQ ID NO: 2719038 - RNA, 13 nt, Human
aauguuaagcaga

SEQ ID NO: 2719039 - RNA, 15 nt, Human
aaucauuagguguga

SEQ ID NO: 2719040 - RNA, 23 nt, Human
aaucauuaggugugacugaauuu

SEQ ID NO: 2719041 - RNA, 17 nt, Human
aaucauuaggugugacu

SEQ ID NO: 2719042 - RNA, 19 nt, Human
aaucuuauaauuuaaaaua

SEQ ID NO: 2719043 - RNA, 22 nt, Human
aaucugugaacuugaaauuuga

SEQ ID NO: 2719044 - RNA, 21 nt, Human
aaucugugaacuugaaauuug

SEQ ID NO: 2719045 - RNA, 20 nt, Human
aaucugugaacuugaaauuu

SEQ ID NO: 2719046 - RNA, 19 nt, Human
uaaguaaugauaacuggaa

SEQ ID NO: 2719047 - RNA, 16 nt, Human
uaaggaaaaguuuaau

SEQ ID NO: 2719048 - RNA, 13 nt, Human
uaaguaaaugcua

SEQ ID NO: 2719049 - RNA, 16 nt, Human
uaagcuuguauuccuu

SEQ ID NO: 2719050 - RNA, 19 nt, Human
uaaguauucuuauuuaaug

SEQ ID NO: 2719051 - RNA, 16 nt, Human
uaaguauucuaaauuu

SEQ ID NO: 2719052 - RNA, 20 nt, Human
uaaguauucuuauuuaauga

SEQ ID NO: 2719053 - RNA, 17 nt, Human
uaaguacuauguaucaa

SEQ ID NO: 2719054 - RNA, 16 nt, Human
uaaguacuauguauca

SEQ ID NO: 2719055 - RNA, 13 nt, Human
uaaguacuaugua

SEQ ID NO: 2719056 - RNA, 12 nt, Human
aaucaugaauua

SEQ ID NO: 2719057 - RNA, 15 nt, Human
aaucaugaauuaguu

SEQ ID NO: 2719058 - RNA, 13 nt, Human
uaaucuuucacag

SEQ ID NO: 2719059 - RNA, 17 nt, Human
uaaugaaugaaacauuu

SEQ ID NO: 2719060 - RNA, 12 nt, Human
uaauagagcaaa

SEQ ID NO: 2719061 - RNA, 21 nt, Human
uaauagagcaaaauugaugug

SEQ ID NO: 2719062 - RNA, 22 nt, Human
uaauagacaauuuauuauggca

SEQ ID NO: 2719063 - RNA, 18 nt, Human
uaauagacaauuuauuau

SEQ ID NO: 2719064 - RNA, 14 nt, Human
uaauacaccacuac

SEQ ID NO: 2719065 - RNA, 16 nt, Human
uaauacaccacuacau

SEQ ID NO: 2719066 - RNA, 16 nt, Human
uaauagacaauuuauu

SEQ ID NO: 2719067 - RNA, 14 nt, Human
uaauagacaauuua

SEQ ID NO: 2719068 - RNA, 19 nt, Human
uaauacaccacuacauucu

SEQ ID NO: 2719069 - RNA, 18 nt, Human
uaauacaccacuacauuc

SEQ ID NO: 2719070 - RNA, 13 nt, Human
aaugaaugucagu

SEQ ID NO: 2719071 - RNA, 15 nt, Human
aaugaccuuucaaua

SEQ ID NO: 2719072 - RNA, 22 nt, Human
aaugaaugucagugugacugau

SEQ ID NO: 2719073 - RNA, 17 nt, Human
aaugaaacauuuuguca

SEQ ID NO: 2719074 - RNA, 19 nt, Human
aaugaaacacucaguuguu

SEQ ID NO: 2719075 - RNA, 17 nt, Human
aaugaaagacuguacaa

SEQ ID NO: 2719076 - RNA, 16 nt, Human
aaugaaagacuguaca

SEQ ID NO: 2719077 - RNA, 17 nt, Human
aaugaaaccugugucuc

SEQ ID NO: 2719078 - RNA, 18 nt, Human
uaaugucacaggcagguc

SEQ ID NO: 2719079 - RNA, 13 nt, Human
uaauguacugcau

SEQ ID NO: 2719080 - RNA, 18 nt, Human
uaauguaauaacugugaa

SEQ ID NO: 2719081 - RNA, 18 nt, Human
aauauuuauuuuaauaau

SEQ ID NO: 2719082 - RNA, 19 nt, Human
aauauuuauuuuaauaaug

SEQ ID NO: 2719083 - RNA, 17 nt, Human
aauauuguguugugaau

SEQ ID NO: 2719084 - RNA, 21 nt, Human
aauaugccccauucaacaucu

SEQ ID NO: 2719085 - RNA, 24 nt, Human
aauaugccccauucaacaucuagu

SEQ ID NO: 2719086 - RNA, 22 nt, Human
aauaugcacacauuuuuuaaau

SEQ ID NO: 2719087 - RNA, 17 nt, Human
aauaugcacacauuuuu

SEQ ID NO: 2719088 - RNA, 16 nt, Human
aauaugcacacauuuu

SEQ ID NO: 2719089 - RNA, 15 nt, Human
uaagagaaaugagcu

SEQ ID NO: 2719090 - RNA, 22 nt, Human
aaucaggguuaguauuguccag

SEQ ID NO: 2719091 - RNA, 16 nt, Human
aaucaggguuaguauu

SEQ ID NO: 2719092 - RNA, 21 nt, Human
aaucaggguuaguauugucca

SEQ ID NO: 2719093 - RNA, 22 nt, Human
uaagcuguuacugucuucagua

SEQ ID NO: 2719094 - RNA, 18 nt, Human
uaagcacacuugacauca

SEQ ID NO: 2719095 - RNA, 20 nt, Human
aauaucacuugucaauaaaa

SEQ ID NO: 2719096 - RNA, 22 nt, Human
aauaucacuugucaauaaaauc

SEQ ID NO: 2719097 - RNA, 12 nt, Human
uaacauaaaucu

SEQ ID NO: 2719098 - RNA, 18 nt, Human
uaacauggacaugaucuu

SEQ ID NO: 2719099 - RNA, 23 nt, Human
uaacauggacaugaucuucuuua

SEQ ID NO: 2719100 - RNA, 16 nt, Human
aauagucaaauugugu

SEQ ID NO: 2719101 - RNA, 20 nt, Human
aauaguauuugagaguucua

SEQ ID NO: 2719102 - RNA, 22 nt, Human
aauaguauuugagaguucuaaa

SEQ ID NO: 2719103 - RNA, 22 nt, Human
aauaguggugugauuuggggau

SEQ ID NO: 2719104 - RNA, 16 nt, Human
aauaguggugugauuu

SEQ ID NO: 2719105 - RNA, 23 nt, Human
aauaguauuugagaguucuaaau

SEQ ID NO: 2719106 - RNA, 13 nt, Human
aauaguuggcuag

SEQ ID NO: 2719107 - RNA, 20 nt, Human
uaacgauaaaagacagugaa

SEQ ID NO: 2719108 - RNA, 13 nt, Human
uaacuucacauau

SEQ ID NO: 2719109 - RNA, 21 nt, Human
uaacuucacauauugauuucc

SEQ ID NO: 2719110 - RNA, 17 nt, Human
uaacuuccaauuuacau

SEQ ID NO: 2719111 - RNA, 14 nt, Human
uaacuucaccauau

SEQ ID NO: 2719112 - RNA, 14 nt, Human
accagucugacugu

SEQ ID NO: 2719113 - RNA, 23 nt, Human
accaguauuguacaaaguauuaa

SEQ ID NO: 2719114 - RNA, 17 nt, Human
accaguguuguggauuu

SEQ ID NO: 2719115 - RNA, 15 nt, Human
accaguguuguggau

SEQ ID NO: 2719116 - RNA, 10 nt, Human
ucacuugagu

SEQ ID NO: 2719117 - RNA, 22 nt, Human
accaguauuguacaaaguauua

SEQ ID NO: 2719118 - RNA, 20 nt, Human
accaguauuguacaaaguau

SEQ ID NO: 2719119 - RNA, 15 nt, Human
accaguauuguacaa

SEQ ID NO: 2719120 - RNA, 14 nt, Human
accaguauuguaca

SEQ ID NO: 2719121 - RNA, 23 nt, Human
ucacuguugcccaggcuggcgug

SEQ ID NO: 2719122 - RNA, 19 nt, Human
ucacuguugcccaggcugg

SEQ ID NO: 2719123 - RNA, 15 nt, Human
ucacugcagccucaa

SEQ ID NO: 2719124 - RNA, 13 nt, Human
ucacugcagccuc

SEQ ID NO: 2719125 - RNA, 16 nt, Human
ucacugagacagcccg

SEQ ID NO: 2719126 - RNA, 14 nt, Human
ucacugcagccuca

SEQ ID NO: 2719127 - RNA, 22 nt, Human
ucacugagacagcccgggcucu

SEQ ID NO: 2719128 - RNA, 17 nt, Human
ucacugagacagcccgg

SEQ ID NO: 2719129 - RNA, 21 nt, Human
ucacugagacagcccgggcuc

SEQ ID NO: 2719130 - RNA, 12 nt, Human
ucaccucaugga

SEQ ID NO: 2719131 - RNA, 13 nt, Human
ucaccucauggaa

SEQ ID NO: 2719132 - RNA, 14 nt, Human
ucaccucauggaau

SEQ ID NO: 2719133 - RNA, 20 nt, Human
ucaccugucuugccuuuuuc

SEQ ID NO: 2719134 - RNA, 19 nt, Human
ucaccugucuugccuuuuu

SEQ ID NO: 2719135 - RNA, 22 nt, Human
accagcgugugacuacuccccc

SEQ ID NO: 2719136 - RNA, 17 nt, Human
accacuacauucuguua

SEQ ID NO: 2719137 - RNA, 15 nt, Human
accacuacauucugu

SEQ ID NO: 2719138 - RNA, 16 nt, Human
accacuacauucuguu

SEQ ID NO: 2719139 - RNA, 21 nt, Human
ucacaacagauuauuaccuua

SEQ ID NO: 2719140 - RNA, 17 nt, Human
ucacaaaggaugcccaa

SEQ ID NO: 2719141 - RNA, 16 nt, Human
ucaauucuugccaaau

SEQ ID NO: 2719142 - RNA, 13 nt, Human
ucacagccucuga

SEQ ID NO: 2719143 - RNA, 16 nt, Human
ucacaguucucuccuu

SEQ ID NO: 2719144 - RNA, 20 nt, Human
ucacaguucucuccuucuuc

SEQ ID NO: 2719145 - RNA, 20 nt, Human
ucacagaugggugcuuggag

SEQ ID NO: 2719146 - RNA, 17 nt, Human
accacaucuugcucugc

SEQ ID NO: 2719147 - RNA, 18 nt, Human
accacaucuugcucugcu

SEQ ID NO: 2719148 - RNA, 19 nt, Human
accacaucuugcucugcug

SEQ ID NO: 2719149 - RNA, 18 nt, Human
accacaugugcacaugca

SEQ ID NO: 2719150 - RNA, 16 nt, Human
accacaucuugcucug

SEQ ID NO: 2719151 - RNA, 15 nt, Human
accaccacacccagc

SEQ ID NO: 2719152 - RNA, 20 nt, Human
accaccacacccagcccacu

SEQ ID NO: 2719153 - RNA, 14 nt, Human
ucacauaucuagua

SEQ ID NO: 2719154 - RNA, 18 nt, Human
ucaauauccaaaccaaau

SEQ ID NO: 2719155 - RNA, 22 nt, Human
ucaaguccucuuuucugagagg

SEQ ID NO: 2719156 - RNA, 17 nt, Human
ucaagaaaacaacuuca

SEQ ID NO: 2719157 - RNA, 19 nt, Human
acauucuuccaaaaagauu

SEQ ID NO: 2719158 - RNA, 15 nt, Human
ucaauauuucagaua

SEQ ID NO: 2719159 - RNA, 19 nt, Human
ucaauauuucagauaauca

SEQ ID NO: 2719160 - RNA, 23 nt, Human
accaaaaaucucaauauuucaga

SEQ ID NO: 2719161 - RNA, 21 nt, Human
acauuuuuuaaaugcaccugg

SEQ ID NO: 2719162 - RNA, 17 nt, Human
acauuuuuuaaaugcac

SEQ ID NO: 2719163 - RNA, 16 nt, Human
acauuuuuuaaaugca

SEQ ID NO: 2719164 - RNA, 14 nt, Human
acauuuuuuaaaug

SEQ ID NO: 2719165 - RNA, 19 nt, Human
acauuuuuaagugcugcau

SEQ ID NO: 2719166 - RNA, 23 nt, Human
acauuuuuaagugcugcauuuaa

SEQ ID NO: 2719167 - RNA, 22 nt, Human
acauuuuuaagugcugcauuua

SEQ ID NO: 2719168 - RNA, 21 nt, Human
acauuuuuaagugcugcauuu

SEQ ID NO: 2719169 - RNA, 20 nt, Human
acauuuuauuuuauuaugca

SEQ ID NO: 2719170 - RNA, 19 nt, Human
acauuuuauuuuauuaugc

SEQ ID NO: 2719171 - RNA, 14 nt, Human
acauuuuauuuuau

SEQ ID NO: 2719172 - RNA, 18 nt, Human
acauuuuauuuuauuaug

SEQ ID NO: 2719173 - RNA, 18 nt, Human
ucaaauugugugaaaggu

SEQ ID NO: 2719174 - RNA, 15 nt, Human
ucaaauugugugaaa

SEQ ID NO: 2719175 - RNA, 14 nt, Human
acauuccugaugcu

SEQ ID NO: 2719176 - RNA, 15 nt, Human
acauuccugaacagg

SEQ ID NO: 2719177 - RNA, 14 nt, Human
acauuccugaacag

SEQ ID NO: 2719178 - RNA, 23 nt, Human
acauguaauuaaguacuauguau

SEQ ID NO: 2719179 - RNA, 15 nt, Human
acauguccaagaagc

SEQ ID NO: 2719180 - RNA, 20 nt, Human
ucaacugcaucaagauguga

SEQ ID NO: 2719181 - RNA, 14 nt, Human
ucaaccagcagaug

SEQ ID NO: 2719182 - RNA, 13 nt, Human
ucaaauuucuaaa

SEQ ID NO: 2719183 - RNA, 21 nt, Human
acaugcuacacacugcauguu

SEQ ID NO: 2719184 - RNA, 15 nt, Human
acaugcuacacacug

SEQ ID NO: 2719185 - RNA, 16 nt, Human
acaugaaguccaagca

SEQ ID NO: 2719186 - RNA, 21 nt, Human
acaugggacauuugcucaugg

SEQ ID NO: 2719187 - RNA, 15 nt, Human
acaugggacauuugc

SEQ ID NO: 2719188 - RNA, 20 nt, Human
acaugggacauuugcucaug

SEQ ID NO: 2719189 - RNA, 11 nt, Human
acaugggacau

SEQ ID NO: 2719190 - RNA, 14 nt, Human
acaugggacauuug

SEQ ID NO: 2719191 - RNA, 22 nt, Human
acauggcuggagcuagaauuug

SEQ ID NO: 2719192 - RNA, 15 nt, Human
acauguaauuaagua

SEQ ID NO: 2719193 - RNA, 22 nt, Human
acauguaauuaaguacuaugua

SEQ ID NO: 2719194 - RNA, 21 nt, Human
acauguaauuaaguacuaugu

SEQ ID NO: 2719195 - RNA, 19 nt, Human
acauguaauuaaguacuau

SEQ ID NO: 2719196 - RNA, 17 nt, Human
acauguaauuaaguacu

SEQ ID NO: 2719197 - RNA, 17 nt, Human
ucaguuuuugugaaaag

SEQ ID NO: 2719198 - RNA, 22 nt, Human
ucauaaaaagccugcaauuuca

SEQ ID NO: 2719199 - RNA, 15 nt, Human
ucaguuuuugugaaa

SEQ ID NO: 2719200 - RNA, 12 nt, Human
ucaguggcagcu

SEQ ID NO: 2719201 - RNA, 11 nt, Human
ucaguggcagc

SEQ ID NO: 2719202 - RNA, 18 nt, Human
ucagugccuuauggaaca

SEQ ID NO: 2719203 - RNA, 16 nt, Human
ucagugccuuauggaa

SEQ ID NO: 2719204 - RNA, 9 nt, Human
ucagugccu

SEQ ID NO: 2719205 - RNA, 10 nt, Human
ucagugccuu

SEQ ID NO: 2719206 - RNA, 11 nt, Human
ucagugccuua

SEQ ID NO: 2719207 - RNA, 12 nt, Human
ucagugccuuau

SEQ ID NO: 2719208 - RNA, 14 nt, Human
ucagugccuuaugg

SEQ ID NO: 2719209 - RNA, 15 nt, Human
ucagugccuuaugga

SEQ ID NO: 2719210 - RNA, 17 nt, Human
accgaaaacguggcugc

SEQ ID NO: 2719211 - RNA, 19 nt, Human
accgaaaacguggcugcuu

SEQ ID NO: 2719212 - RNA, 12 nt, Human
ucagugccacua

SEQ ID NO: 2719213 - RNA, 16 nt, Human
ucagugccaaaaacaa

SEQ ID NO: 2719214 - RNA, 15 nt, Human
ucauauuuucaugcu

SEQ ID NO: 2719215 - RNA, 23 nt, Human
ucauauuuacuucuuauacauuu

SEQ ID NO: 2719216 - RNA, 15 nt, Human
ucauauuuacuucuu

SEQ ID NO: 2719217 - RNA, 15 nt, Human
ucauaguaugguggc

SEQ ID NO: 2719218 - RNA, 18 nt, Human
ucauaguaugguggcugg

SEQ ID NO: 2719219 - RNA, 19 nt, Human
ucauaguaugguggcuggg

SEQ ID NO: 2719220 - RNA, 14 nt, Human
ucauaaccuagccu

SEQ ID NO: 2719221 - RNA, 18 nt, Human
ucauauaagauucauauu

SEQ ID NO: 2719222 - RNA, 21 nt, Human
ucauaguaugguggcuggguu

SEQ ID NO: 2719223 - RNA, 16 nt, Human
accuagggugauauua

SEQ ID NO: 2719224 - RNA, 16 nt, Human
accucaaaaugucuaa

SEQ ID NO: 2719225 - RNA, 17 nt, Human
accgcagacaggaccag

SEQ ID NO: 2719226 - RNA, 12 nt, Human
accgcagacagg

SEQ ID NO: 2719227 - RNA, 16 nt, Human
accgcagacaggacca

SEQ ID NO: 2719228 - RNA, 20 nt, Human
accucccacaaaggagagcu

SEQ ID NO: 2719229 - RNA, 17 nt, Human
ucaugaaagauucaaug

SEQ ID NO: 2719230 - RNA, 16 nt, Human
ucaugaaagauucaau

SEQ ID NO: 2719231 - RNA, 12 nt, Human
acccgggaaggg

SEQ ID NO: 2719232 - RNA, 13 nt, Human
acccgggaagggg

SEQ ID NO: 2719233 - RNA, 22 nt, Human
acccggccccugcugguucagg

SEQ ID NO: 2719234 - RNA, 17 nt, Human
acccggccccugcuggu

SEQ ID NO: 2719235 - RNA, 20 nt, Human
acccggccccugcugguuca

SEQ ID NO: 2719236 - RNA, 23 nt, Human
ucagguaacaggcagauacagga

SEQ ID NO: 2719237 - RNA, 21 nt, Human
ucagguaacaggcagauacag

SEQ ID NO: 2719238 - RNA, 22 nt, Human
ucagguaacaggcagauacagg

SEQ ID NO: 2719239 - RNA, 14 nt, Human
acccggccccugcu

SEQ ID NO: 2719240 - RNA, 15 nt, Human
acccggccccugcug

SEQ ID NO: 2719241 - RNA, 16 nt, Human
acccggccccugcugg

SEQ ID NO: 2719242 - RNA, 20 nt, Human
ucaggccaggcccucugccc

SEQ ID NO: 2719243 - RNA, 21 nt, Human
ucaggccaggcccucugccca

SEQ ID NO: 2719244 - RNA, 22 nt, Human
ucaggccaggcccucugcccac

SEQ ID NO: 2719245 - RNA, 14 nt, Human
ucagcuccagcuca

SEQ ID NO: 2719246 - RNA, 21 nt, Human
ucagcuuguaaauagcucagg

SEQ ID NO: 2719247 - RNA, 22 nt, Human
ucagcuuguaaauagcucaggu

SEQ ID NO: 2719248 - RNA, 23 nt, Human
ucaggccaggcccucugcccacu

SEQ ID NO: 2719249 - RNA, 16 nt, Human
ucaggguuggccccug

SEQ ID NO: 2719250 - RNA, 19 nt, Human
ucagggucccugguggcag

SEQ ID NO: 2719251 - RNA, 16 nt, Human
acccugaaagcccuga

SEQ ID NO: 2719252 - RNA, 18 nt, Human
acccugaaagcccugagc

SEQ ID NO: 2719253 - RNA, 14 nt, Human
acccugaggcccag

SEQ ID NO: 2719254 - RNA, 17 nt, Human
acccugcccugugggcc

SEQ ID NO: 2719255 - RNA, 22 nt, Human
acccugcccugugggcccccaa

SEQ ID NO: 2719256 - RNA, 15 nt, Human
acccugaggcccaga

SEQ ID NO: 2719257 - RNA, 16 nt, Human
acccugaggcccagag

SEQ ID NO: 2719258 - RNA, 15 nt, Human
acccugcccuguggg

SEQ ID NO: 2719259 - RNA, 15 nt, Human
accgaaaacguggcu

SEQ ID NO: 2719260 - RNA, 17 nt, Human
acccuugccgucuaccu

SEQ ID NO: 2719261 - RNA, 20 nt, Human
acccuuguggucccacccca

SEQ ID NO: 2719262 - RNA, 23 nt, Human
acccuuguggucccaccccacac

SEQ ID NO: 2719263 - RNA, 19 nt, Human
acccaggagccccgaggcc

SEQ ID NO: 2719264 - RNA, 23 nt, Human
acccaggagccccgaggccuucu

SEQ ID NO: 2719265 - RNA, 17 nt, Human
accccacacacgccaga

SEQ ID NO: 2719266 - RNA, 13 nt, Human
accccagccccaa

SEQ ID NO: 2719267 - RNA, 22 nt, Human
accccagccccaaaacucuccu

SEQ ID NO: 2719268 - RNA, 21 nt, Human
ucagauuugaacucuucaauc

SEQ ID NO: 2719269 - RNA, 12 nt, Human
ucagauuugaac

SEQ ID NO: 2719270 - RNA, 18 nt, Human
accaguguuguggauuua

SEQ ID NO: 2719271 - RNA, 15 nt, Human
ucagcaaaagaugcu

SEQ ID NO: 2719272 - RNA, 20 nt, Human
ucagcaaaaauauuuuauga

SEQ ID NO: 2719273 - RNA, 19 nt, Human
ucagcaaaaauauuuuaug

SEQ ID NO: 2719274 - RNA, 22 nt, Human
ucagauuuuauuauguaaaucc

SEQ ID NO: 2719275 - RNA, 23 nt, Human
ucagauuuuauuauguaaauccc

SEQ ID NO: 2719276 - RNA, 12 nt, Human
ucagcuccagcu

SEQ ID NO: 2719277 - RNA, 19 nt, Human
ucagcggggacagcuccuu

SEQ ID NO: 2719278 - RNA, 20 nt, Human
ucagcggggacagcuccuuc

SEQ ID NO: 2719279 - RNA, 21 nt, Human
ucagcggggacagcuccuucu

SEQ ID NO: 2719280 - RNA, 23 nt, Human
ucagcggggacagcuccuucugu

SEQ ID NO: 2719281 - RNA, 18 nt, Human
ucagcggggacagcuccu

SEQ ID NO: 2719282 - RNA, 14 nt, Human
accccugcuucuga

SEQ ID NO: 2719283 - RNA, 18 nt, Human
accccaucucuacaaaaa

SEQ ID NO: 2719284 - RNA, 13 nt, Human
acucaccccagcc

SEQ ID NO: 2719285 - RNA, 16 nt, Human
acucaccccagcccca

SEQ ID NO: 2719286 - RNA, 14 nt, Human
acucaccccagccc

SEQ ID NO: 2719287 - RNA, 15 nt, Human
acucaccccagcccc

SEQ ID NO: 2719288 - RNA, 12 nt, Human
acuccugcaggc

SEQ ID NO: 2719289 - RNA, 14 nt, Human
acuccugcaggcag

SEQ ID NO: 2719290 - RNA, 22 nt, Human
acuccugcaggcagccaggcca

SEQ ID NO: 2719291 - RNA, 15 nt, Human
acuccugcaggcagc

SEQ ID NO: 2719292 - RNA, 16 nt, Human
acuccugcaggcagcc

SEQ ID NO: 2719293 - RNA, 11 nt, Human
acuccuggccu

SEQ ID NO: 2719294 - RNA, 16 nt, Human
ucccugguggcagcuc

SEQ ID NO: 2719295 - RNA, 17 nt, Human
ucccugguggcagcuca

SEQ ID NO: 2719296 - RNA, 18 nt, Human
ucccugguggcagcucac

SEQ ID NO: 2719297 - RNA, 19 nt, Human
ucccugguggcagcucacc

SEQ ID NO: 2719298 - RNA, 20 nt, Human
ucccugguggcagcucaccu

SEQ ID NO: 2719299 - RNA, 21 nt, Human
ucccugguggcagcucaccuc

SEQ ID NO: 2719300 - RNA, 22 nt, Human
ucccugguggcagcucaccucu

SEQ ID NO: 2719301 - RNA, 19 nt, Human
ucccuuggauuguccccga

SEQ ID NO: 2719302 - RNA, 20 nt, Human
ucccuuggauuguccccgac

SEQ ID NO: 2719303 - RNA, 16 nt, Human
ucccuuugacgccauc

SEQ ID NO: 2719304 - RNA, 18 nt, Human
ucccuuugacgccauccc

SEQ ID NO: 2719305 - RNA, 23 nt, Human
ucccuuuuuuggcugcugaaggc

SEQ ID NO: 2719306 - RNA, 20 nt, Human
ucccuuuuuuggcugcugaa

SEQ ID NO: 2719307 - RNA, 22 nt, Human
ucccuuuuuuggcugcugaagg

SEQ ID NO: 2719308 - RNA, 19 nt, Human
ucccuuugacgccauccca

SEQ ID NO: 2719309 - RNA, 17 nt, Human
ucccuuuuuuggcugcu

SEQ ID NO: 2719310 - RNA, 19 nt, Human
ucccuuuuuuggcugcuga

SEQ ID NO: 2719311 - RNA, 13 nt, Human
uccuaggcauuug

SEQ ID NO: 2719312 - RNA, 12 nt, Human
acuccuggccuc

SEQ ID NO: 2719313 - RNA, 13 nt, Human
acuccuggccuca

SEQ ID NO: 2719314 - RNA, 14 nt, Human
acuccuggccucaa

SEQ ID NO: 2719315 - RNA, 15 nt, Human
uccuacucuguguca

SEQ ID NO: 2719316 - RNA, 13 nt, Human
uccuacucugugu

SEQ ID NO: 2719317 - RNA, 14 nt, Human
uccuacucuguguc

SEQ ID NO: 2719318 - RNA, 21 nt, Human
acucuuaagaagacugcauua

SEQ ID NO: 2719319 - RNA, 16 nt, Human
acucuuauaucuauau

SEQ ID NO: 2719320 - RNA, 18 nt, Human
acucuuauaucuauauuu

SEQ ID NO: 2719321 - RNA, 17 nt, Human
acucuuauaucuauauu

SEQ ID NO: 2719322 - RNA, 14 nt, Human
acucuugaccucag

SEQ ID NO: 2719323 - RNA, 19 nt, Human
acucuuauaucuauauuuu

SEQ ID NO: 2719324 - RNA, 15 nt, Human
acucuugaccucagg

SEQ ID NO: 2719325 - RNA, 16 nt, Human
acucuugaccucaggu

SEQ ID NO: 2719326 - RNA, 23 nt, Human
uccucauacccacccccacccaa

SEQ ID NO: 2719327 - RNA, 22 nt, Human
uccucauaguaugguggcuggg

SEQ ID NO: 2719328 - RNA, 13 nt, Human
acucuggcagcuc

SEQ ID NO: 2719329 - RNA, 15 nt, Human
acucuggcagcucag

SEQ ID NO: 2719330 - RNA, 16 nt, Human
acucuccuuggugucg

SEQ ID NO: 2719331 - RNA, 23 nt, Human
acucuccuuggugucgggcauga

SEQ ID NO: 2719332 - RNA, 11 nt, Human
acucugagacu

SEQ ID NO: 2719333 - RNA, 22 nt, Human
acucugagacucgcgacaaugc

SEQ ID NO: 2719334 - RNA, 18 nt, Human
acucuccuggaaauauua

SEQ ID NO: 2719335 - RNA, 15 nt, Human
acucuccuugguguc

SEQ ID NO: 2719336 - RNA, 16 nt, Human
acucuccucugcugcu

SEQ ID NO: 2719337 - RNA, 21 nt, Human
acucuccucugcugcuggcug

SEQ ID NO: 2719338 - RNA, 12 nt, Human
acucuccucugc

SEQ ID NO: 2719339 - RNA, 13 nt, Human
acucuccucugcu

SEQ ID NO: 2719340 - RNA, 14 nt, Human
acucuccucugcug

SEQ ID NO: 2719341 - RNA, 14 nt, Human
acucuccuccagag

SEQ ID NO: 2719342 - RNA, 17 nt, Human
acucuccuccagaguca

SEQ ID NO: 2719343 - RNA, 23 nt, Human
acuccuugaaaacacuguucucu

SEQ ID NO: 2719344 - RNA, 24 nt, Human
acuccuugaaaacacuguucucug

SEQ ID NO: 2719345 - RNA, 16 nt, Human
uccuggaaaucagggu

SEQ ID NO: 2719346 - RNA, 15 nt, Human
uccuggaaauauuaa

SEQ ID NO: 2719347 - RNA, 22 nt, Human
uccuggaauaucuccgucaacu

SEQ ID NO: 2719348 - RNA, 15 nt, Human
uccugggagcuuuug

SEQ ID NO: 2719349 - RNA, 12 nt, Human
uccugggaguga

SEQ ID NO: 2719350 - RNA, 14 nt, Human
uccugggagugagc

SEQ ID NO: 2719351 - RNA, 17 nt, Human
uccugggagugagcugg

SEQ ID NO: 2719352 - RNA, 12 nt, Human
uccugcaggcag

SEQ ID NO: 2719353 - RNA, 13 nt, Human
uccugcaggcagc

SEQ ID NO: 2719354 - RNA, 21 nt, Human
uccugccucgaacuggcugca

SEQ ID NO: 2719355 - RNA, 14 nt, Human
uccugcaggcagcc

SEQ ID NO: 2719356 - RNA, 21 nt, Human
uccugcugcaguugccaguca

SEQ ID NO: 2719357 - RNA, 19 nt, Human
uccugaugcuucuucagag

SEQ ID NO: 2719358 - RNA, 20 nt, Human
uccugaugcuucuucagaga

SEQ ID NO: 2719359 - RNA, 21 nt, Human
uccugaugcuucuucagagac

SEQ ID NO: 2719360 - RNA, 14 nt, Human
acugcacuccagcc

SEQ ID NO: 2719361 - RNA, 21 nt, Human
acugcacuauagccuagguga

SEQ ID NO: 2719362 - RNA, 17 nt, Human
acugcacuccagccugg

SEQ ID NO: 2719363 - RNA, 18 nt, Human
acugcacuccagccuggg

SEQ ID NO: 2719364 - RNA, 19 nt, Human
acugcacuccagccugggu

SEQ ID NO: 2719365 - RNA, 20 nt, Human
acugcacuccagccugggug

SEQ ID NO: 2719366 - RNA, 14 nt, Human
acugcaccgggcca

SEQ ID NO: 2719367 - RNA, 16 nt, Human
acugcaccgggccaca

SEQ ID NO: 2719368 - RNA, 20 nt, Human
acugcacuauagccuaggug

SEQ ID NO: 2719369 - RNA, 21 nt, Human
acugauaaagaugagugagca

SEQ ID NO: 2719370 - RNA, 13 nt, Human
acugauaaagaug

SEQ ID NO: 2719371 - RNA, 17 nt, Human
acugagaugugaacaca

SEQ ID NO: 2719372 - RNA, 22 nt, Human
acugagaugugaacacaucagc

SEQ ID NO: 2719373 - RNA, 22 nt, Human
acugagacagcccgggcucugc

SEQ ID NO: 2719374 - RNA, 23 nt, Human
acugagacagcccgggcucugcc

SEQ ID NO: 2719375 - RNA, 15 nt, Human
acugagacagcccgg

SEQ ID NO: 2719376 - RNA, 18 nt, Human
acugagacagcccgggcu

SEQ ID NO: 2719377 - RNA, 21 nt, Human
acugagacagcccgggcucug

SEQ ID NO: 2719378 - RNA, 22 nt, Human
acugacuucuaaguaaaaccac

SEQ ID NO: 2719379 - RNA, 16 nt, Human
acugacuucuaaguaa

SEQ ID NO: 2719380 - RNA, 15 nt, Human
acugacuucuaagua

SEQ ID NO: 2719381 - RNA, 13 nt, Human
acugacuucuaag

SEQ ID NO: 2719382 - RNA, 17 nt, Human
acugacucuuaagaaga

SEQ ID NO: 2719383 - RNA, 18 nt, Human
acugacucuuaagaagac

SEQ ID NO: 2719384 - RNA, 20 nt, Human
acugacucuuaagaagacug

SEQ ID NO: 2719385 - RNA, 13 nt, Human
acugacucuuaag

SEQ ID NO: 2719386 - RNA, 14 nt, Human
acugacucuuaaga

SEQ ID NO: 2719387 - RNA, 15 nt, Human
acugacucuuaagaa

SEQ ID NO: 2719388 - RNA, 16 nt, Human
acugacucuuaagaag

SEQ ID NO: 2719389 - RNA, 12 nt, Human
acugaagaagca

SEQ ID NO: 2719390 - RNA, 22 nt, Human
uccucuuuggucuacacugugc

SEQ ID NO: 2719391 - RNA, 12 nt, Human
uccucuuuccau

SEQ ID NO: 2719392 - RNA, 11 nt, Human
uccucuuucca

SEQ ID NO: 2719393 - RNA, 14 nt, Human
uccucccucccucu

SEQ ID NO: 2719394 - RNA, 11 nt, Human
uccucccuccc

SEQ ID NO: 2719395 - RNA, 19 nt, Human
uccucuuuccaucuacccu

SEQ ID NO: 2719396 - RNA, 19 nt, Human
uccucuuuggucuacacug

SEQ ID NO: 2719397 - RNA, 21 nt, Human
uccucuuuggucuacacugug

SEQ ID NO: 2719398 - RNA, 20 nt, Human
accuugaacuggguacuugu

SEQ ID NO: 2719399 - RNA, 18 nt, Human
accuuuggagcaaagcug

SEQ ID NO: 2719400 - RNA, 18 nt, Human
accuuuguccccaccgca

SEQ ID NO: 2719401 - RNA, 17 nt, Human
accuuuguccccaccgc

SEQ ID NO: 2719402 - RNA, 21 nt, Human
uccacugugccaugugccagg

SEQ ID NO: 2719403 - RNA, 20 nt, Human
accuuuuggucuggagggaa

SEQ ID NO: 2719404 - RNA, 13 nt, Human
accuuuuuuauac

SEQ ID NO: 2719405 - RNA, 13 nt, Human
uccagacacaugu

SEQ ID NO: 2719406 - RNA, 14 nt, Human
uccagaauuuccca

SEQ ID NO: 2719407 - RNA, 15 nt, Human
uccagaauuucccaa

SEQ ID NO: 2719408 - RNA, 15 nt, Human
acgaauauugcugau

SEQ ID NO: 2719409 - RNA, 18 nt, Human
acgaauauugcugauggu

SEQ ID NO: 2719410 - RNA, 23 nt, Human
uccaggcugggagagccuuccag

SEQ ID NO: 2719411 - RNA, 10 nt, Human
uccaggcucc

SEQ ID NO: 2719412 - RNA, 12 nt, Human
uccaggcuccuu

SEQ ID NO: 2719413 - RNA, 22 nt, Human
uccaggcuccuuuagcgcccag

SEQ ID NO: 2719414 - RNA, 20 nt, Human
uccaggcugggagagccuuc

SEQ ID NO: 2719415 - RNA, 21 nt, Human
uccaggcugggagagccuucc

SEQ ID NO: 2719416 - RNA, 13 nt, Human
acgcuggaccuug

SEQ ID NO: 2719417 - RNA, 23 nt, Human
acggagucccaccuuggcugcag

SEQ ID NO: 2719418 - RNA, 17 nt, Human
acgcuggagugcaguga

SEQ ID NO: 2719419 - RNA, 20 nt, Human
acgcuggaccuugaacuggg

SEQ ID NO: 2719420 - RNA, 23 nt, Human
acgcuggaccuugaacuggguac

SEQ ID NO: 2719421 - RNA, 15 nt, Human
acgcuggagugcagu

SEQ ID NO: 2719422 - RNA, 16 nt, Human
acgcuggagugcagug

SEQ ID NO: 2719423 - RNA, 21 nt, Human
acgcuacccgggaagggggcu

SEQ ID NO: 2719424 - RNA, 14 nt, Human
acgaauauugcuga

SEQ ID NO: 2719425 - RNA, 21 nt, Human
acgaauauugcugauggugca

SEQ ID NO: 2719426 - RNA, 15 nt, Human
uccagugaggcucug

SEQ ID NO: 2719427 - RNA, 16 nt, Human
uccagugaggcucugc

SEQ ID NO: 2719428 - RNA, 22 nt, Human
uccagugaggcucugcccuugg

SEQ ID NO: 2719429 - RNA, 23 nt, Human
uccagugaggcucugcccuuggu

SEQ ID NO: 2719430 - RNA, 16 nt, Human
uccaguaucuugaaga

SEQ ID NO: 2719431 - RNA, 18 nt, Human
uccaguaucuugaagacu

SEQ ID NO: 2719432 - RNA, 13 nt, Human
acggaugauuucu

SEQ ID NO: 2719433 - RNA, 12 nt, Human
acggccaggcca

SEQ ID NO: 2719434 - RNA, 16 nt, Human
acggcucacugcagcc

SEQ ID NO: 2719435 - RNA, 17 nt, Human
acggcucacugcagccu

SEQ ID NO: 2719436 - RNA, 18 nt, Human
acggcucacugcagccuc

SEQ ID NO: 2719437 - RNA, 14 nt, Human
uccaguaucuugaa

SEQ ID NO: 2719438 - RNA, 15 nt, Human
uccaguaucuugaag

SEQ ID NO: 2719439 - RNA, 18 nt, Human
acggcuuuuacuuaaacc

SEQ ID NO: 2719440 - RNA, 16 nt, Human
acggugaauggcuuug

SEQ ID NO: 2719441 - RNA, 20 nt, Human
acggugaauggcuuuguaua

SEQ ID NO: 2719442 - RNA, 19 nt, Human
acggugaauggcuuuguau

SEQ ID NO: 2719443 - RNA, 13 nt, Human
acguugugcauuu

SEQ ID NO: 2719444 - RNA, 15 nt, Human
acguugugcauuugg

SEQ ID NO: 2719445 - RNA, 14 nt, Human
acguugugcauuug

SEQ ID NO: 2719446 - RNA, 16 nt, Human
acguuucuaaaggcua

SEQ ID NO: 2719447 - RNA, 15 nt, Human
acguuucuaaaggcu

SEQ ID NO: 2719448 - RNA, 17 nt, Human
acguggcugcuucaagg

SEQ ID NO: 2719449 - RNA, 18 nt, Human
acguggcugcuucaagga

SEQ ID NO: 2719450 - RNA, 19 nt, Human
acguggcugcuucaaggau

SEQ ID NO: 2719451 - RNA, 21 nt, Human
acguggcugcuucaaggaucc

SEQ ID NO: 2719452 - RNA, 15 nt, Human
acuaauuuuaaaaug

SEQ ID NO: 2719453 - RNA, 22 nt, Human
acguuucuaaaggcuaccuuug

SEQ ID NO: 2719454 - RNA, 18 nt, Human
ucccagauacuugggggg

SEQ ID NO: 2719455 - RNA, 16 nt, Human
ucccagauacuugggg

SEQ ID NO: 2719456 - RNA, 16 nt, Human
acuaucucauuuccaa

SEQ ID NO: 2719457 - RNA, 17 nt, Human
acuaucucauuuccaag

SEQ ID NO: 2719458 - RNA, 15 nt, Human
acuaucucauuucca

SEQ ID NO: 2719459 - RNA, 21 nt, Human
acuaucuaaauguugaaagau

SEQ ID NO: 2719460 - RNA, 16 nt, Human
acuaucuaaauguuga

SEQ ID NO: 2719461 - RNA, 22 nt, Human
acuauauuguuugcuaagcauu

SEQ ID NO: 2719462 - RNA, 17 nt, Human
acuauauuguuugcuaa

SEQ ID NO: 2719463 - RNA, 18 nt, Human
acuauagccuaggugaca

SEQ ID NO: 2719464 - RNA, 20 nt, Human
acuauagccuaggugacaga

SEQ ID NO: 2719465 - RNA, 22 nt, Human
acuauagccuaggugacagagu

SEQ ID NO: 2719466 - RNA, 14 nt, Human
acuauguugcccag

SEQ ID NO: 2719467 - RNA, 22 nt, Human
acuauggcccuggccuagcaua

SEQ ID NO: 2719468 - RNA, 15 nt, Human
acuauguugcccagg

SEQ ID NO: 2719469 - RNA, 16 nt, Human
acuauguugcccaggc

SEQ ID NO: 2719470 - RNA, 16 nt, Human
acucaaugcacugaca

SEQ ID NO: 2719471 - RNA, 15 nt, Human
acucaauuuuaacaa

SEQ ID NO: 2719472 - RNA, 12 nt, Human
acucaauuuuaa

SEQ ID NO: 2719473 - RNA, 23 nt, Human
uccccacccugaaagcccugagc

SEQ ID NO: 2719474 - RNA, 15 nt, Human
uccccaccgcagaca

SEQ ID NO: 2719475 - RNA, 16 nt, Human
uccccaccgcagacag

SEQ ID NO: 2719476 - RNA, 18 nt, Human
uccccaggaggccagccu

SEQ ID NO: 2719477 - RNA, 12 nt, Human
uccccacccuga

SEQ ID NO: 2719478 - RNA, 11 nt, Human
ucccccagccc

SEQ ID NO: 2719479 - RNA, 17 nt, Human
uccccaggaggccagcc

SEQ ID NO: 2719480 - RNA, 20 nt, Human
uccccaggaggccagccuug

SEQ ID NO: 2719481 - RNA, 21 nt, Human
uccccaggaggccagccuuga

SEQ ID NO: 2719482 - RNA, 16 nt, Human
ucccccagccccaucc

SEQ ID NO: 2719483 - RNA, 13 nt, Human
ucccccagcccca

SEQ ID NO: 2719484 - RNA, 15 nt, Human
ucccccagccccauc

SEQ ID NO: 2719485 - RNA, 23 nt, Human
ucucaggaaaucaaauaugcaaa

SEQ ID NO: 2719486 - RNA, 21 nt, Human
ucucaggaaaucaaauaugca

SEQ ID NO: 2719487 - RNA, 14 nt, Human
ucucaggaaaucaa

SEQ ID NO: 2719488 - RNA, 23 nt, Human
ucucagauuuuauuauguaaauc

SEQ ID NO: 2719489 - RNA, 22 nt, Human
ucucagauuuuauuauguaaau

SEQ ID NO: 2719490 - RNA, 10 nt, Human
ucucaggcca

SEQ ID NO: 2719491 - RNA, 12 nt, Human
ucucaggccaaa

SEQ ID NO: 2719492 - RNA, 12 nt, Human
ucucaggccagc

SEQ ID NO: 2719493 - RNA, 13 nt, Human
ucucaggccagcu

SEQ ID NO: 2719494 - RNA, 15 nt, Human
ucucauuuccaagca

SEQ ID NO: 2719495 - RNA, 14 nt, Human
ucucauuugucaca

SEQ ID NO: 2719496 - RNA, 16 nt, Human
ucucauuugucacaca

SEQ ID NO: 2719497 - RNA, 15 nt, Human
ucuccaagcaggaca

SEQ ID NO: 2719498 - RNA, 16 nt, Human
ucuccaagcaggacau

SEQ ID NO: 2719499 - RNA, 21 nt, Human
ucucaggccagcugcuugggc

SEQ ID NO: 2719500 - RNA, 17 nt, Human
ucucaggccagcugcuu

SEQ ID NO: 2719501 - RNA, 18 nt, Human
ucucaggccagcugcuug

SEQ ID NO: 2719502 - RNA, 15 nt, Human
acuugucaauaaaau

SEQ ID NO: 2719503 - RNA, 21 nt, Human
acuugucuuuggacccugagg

SEQ ID NO: 2719504 - RNA, 20 nt, Human
acuugucuuuggacccugag

SEQ ID NO: 2719505 - RNA, 18 nt, Human
acuugucuuuggacccug

SEQ ID NO: 2719506 - RNA, 13 nt, Human
acuuguguaaaua

SEQ ID NO: 2719507 - RNA, 19 nt, Human
acuuguggacacagcucuu

SEQ ID NO: 2719508 - RNA, 22 nt, Human
acuuguggacacagcucuucuc

SEQ ID NO: 2719509 - RNA, 20 nt, Human
ucucacuauguugcccaggc

SEQ ID NO: 2719510 - RNA, 21 nt, Human
ucucacuauguugcccaggca

SEQ ID NO: 2719511 - RNA, 22 nt, Human
ucucacuauguugcccaggcag

SEQ ID NO: 2719512 - RNA, 23 nt, Human
ucucacuauguugcccaggcagg

SEQ ID NO: 2719513 - RNA, 23 nt, Human
acuugcagacucuacagaggcca

SEQ ID NO: 2719514 - RNA, 19 nt, Human
acuugcagacucuacagag

SEQ ID NO: 2719515 - RNA, 22 nt, Human
acuugcagacucuacagaggcc

SEQ ID NO: 2719516 - RNA, 17 nt, Human
ucuccucugcugcuggc

SEQ ID NO: 2719517 - RNA, 18 nt, Human
ucuccucugcugcuggcu

SEQ ID NO: 2719518 - RNA, 15 nt, Human
ucuccuccagaguca

SEQ ID NO: 2719519 - RNA, 15 nt, Human
ucuccucugcugcug

SEQ ID NO: 2719520 - RNA, 16 nt, Human
ucuccucugcugcugg

SEQ ID NO: 2719521 - RNA, 12 nt, Human
acuuuaccuuuu

SEQ ID NO: 2719522 - RNA, 17 nt, Human
ucuccgaccagacaccu

SEQ ID NO: 2719523 - RNA, 23 nt, Human
ucuccgaccagacaccuugacag

SEQ ID NO: 2719524 - RNA, 18 nt, Human
ucuccaagcaggacaugg

SEQ ID NO: 2719525 - RNA, 19 nt, Human
ucuccaagcaggacaugga

SEQ ID NO: 2719526 - RNA, 12 nt, Human
ucuccacccugc

SEQ ID NO: 2719527 - RNA, 23 nt, Human
ucuccccagcaagugagagcugg

SEQ ID NO: 2719528 - RNA, 17 nt, Human
agaaaaaauauuuuccc

SEQ ID NO: 2719529 - RNA, 14 nt, Human
ucuccuucaccuuu

SEQ ID NO: 2719530 - RNA, 15 nt, Human
ucuccuucaccuuug

SEQ ID NO: 2719531 - RNA, 16 nt, Human
ucuccuucaccuuugu

SEQ ID NO: 2719532 - RNA, 21 nt, Human
ucuccuuguguuacuaaguuu

SEQ ID NO: 2719533 - RNA, 13 nt, Human
ucuccuuguguua

SEQ ID NO: 2719534 - RNA, 23 nt, Human
acuuuuguucuugguuuguaaau

SEQ ID NO: 2719535 - RNA, 15 nt, Human
acuuuuguucuuggu

SEQ ID NO: 2719536 - RNA, 20 nt, Human
acuuuguuaguuucuccaag

SEQ ID NO: 2719537 - RNA, 13 nt, Human
acuuuuguucuug

SEQ ID NO: 2719538 - RNA, 12 nt, Human
acuuuuguucuu

SEQ ID NO: 2719539 - RNA, 21 nt, Human
acuuuguuaguuucuccaagc

SEQ ID NO: 2719540 - RNA, 14 nt, Human
acuuuguucuggcu

SEQ ID NO: 2719541 - RNA, 15 nt, Human
acuuuggaacaagau

SEQ ID NO: 2719542 - RNA, 13 nt, Human
acuuugaccucug

SEQ ID NO: 2719543 - RNA, 12 nt, Human
acuuugaccucu

SEQ ID NO: 2719544 - RNA, 12 nt, Human
acuuuggauaau

SEQ ID NO: 2719545 - RNA, 19 nt, Human
acuuuggauaauaaggaaa

SEQ ID NO: 2719546 - RNA, 17 nt, Human
acuuuggauaauaagga

SEQ ID NO: 2719547 - RNA, 16 nt, Human
ucuaggaaauauuuau

SEQ ID NO: 2719548 - RNA, 13 nt, Human
ucuagccagagga

SEQ ID NO: 2719549 - RNA, 17 nt, Human
ucuaggaaauauuuauu

SEQ ID NO: 2719550 - RNA, 22 nt, Human
ucuaguuguuugauucagacag

SEQ ID NO: 2719551 - RNA, 12 nt, Human
ucuaggaagacu

SEQ ID NO: 2719552 - RNA, 13 nt, Human
ucuauaaaccgaa

SEQ ID NO: 2719553 - RNA, 23 nt, Human
ucuaguuguuugauucagacagc

SEQ ID NO: 2719554 - RNA, 21 nt, Human
ucuaguuugauuaaauucuug

SEQ ID NO: 2719555 - RNA, 13 nt, Human
ucuagauacugua

SEQ ID NO: 2719556 - RNA, 21 nt, Human
ucuagcauggcauauuuuuca

SEQ ID NO: 2719557 - RNA, 18 nt, Human
ucuagcauggcugccaau

SEQ ID NO: 2719558 - RNA, 22 nt, Human
ucuagcauggcauauuuuucac

SEQ ID NO: 2719559 - RNA, 23 nt, Human
ucuagcauggcauauuuuucaca

SEQ ID NO: 2719560 - RNA, 16 nt, Human
acuucaucccucuggg

SEQ ID NO: 2719561 - RNA, 23 nt, Human
ucuaugggacucaaugcacugac

SEQ ID NO: 2719562 - RNA, 17 nt, Human
ucucacuauguugccca

SEQ ID NO: 2719563 - RNA, 19 nt, Human
ucucacuauguugcccagg

SEQ ID NO: 2719564 - RNA, 16 nt, Human
ucucacuauguugccc

SEQ ID NO: 2719565 - RNA, 12 nt, Human
uccugggcagcu

SEQ ID NO: 2719566 - RNA, 13 nt, Human
uccugggcagcug

SEQ ID NO: 2719567 - RNA, 18 nt, Human
uccugggagugagcuggu

SEQ ID NO: 2719568 - RNA, 19 nt, Human
ucuaaguaaaaccacagca

SEQ ID NO: 2719569 - RNA, 15 nt, Human
ucuaaguaaaaccac

SEQ ID NO: 2719570 - RNA, 14 nt, Human
ucuaaguaaaacca

SEQ ID NO: 2719571 - RNA, 21 nt, Human
ucuacagaggccaugggccuc

SEQ ID NO: 2719572 - RNA, 19 nt, Human
ucuacccagcgagcccugg

SEQ ID NO: 2719573 - RNA, 18 nt, Human
acuguucucugcccucca

SEQ ID NO: 2719574 - RNA, 16 nt, Human
acuguucucugcccuc

SEQ ID NO: 2719575 - RNA, 17 nt, Human
acuguucucugcccucc

SEQ ID NO: 2719576 - RNA, 21 nt, Human
ucuacccuggcacuauaaugu

SEQ ID NO: 2719577 - RNA, 14 nt, Human
ucuacccuggcacu

SEQ ID NO: 2719578 - RNA, 19 nt, Human
ucuacccuggcacuauaau

SEQ ID NO: 2719579 - RNA, 20 nt, Human
ucuacccagcgagcccuggu

SEQ ID NO: 2719580 - RNA, 14 nt, Human
ucuacccaggugcu

SEQ ID NO: 2719581 - RNA, 23 nt, Human
acuuaacuauucaggagaguaga

SEQ ID NO: 2719582 - RNA, 20 nt, Human
acuuaaauaaugugaaacug

SEQ ID NO: 2719583 - RNA, 13 nt, Human
acuuaagcacacu

SEQ ID NO: 2719584 - RNA, 19 nt, Human
acuuaaucuaaauggaacc

SEQ ID NO: 2719585 - RNA, 17 nt, Human
acuuaaucuaaauggaa

SEQ ID NO: 2719586 - RNA, 16 nt, Human
acuuacacuuuaugca

SEQ ID NO: 2719587 - RNA, 22 nt, Human
acuuaaucuaaauggaaccacu

SEQ ID NO: 2719588 - RNA, 15 nt, Human
acuuagguguggggg

SEQ ID NO: 2719589 - RNA, 22 nt, Human
acuuacuguacaugaaaacaca

SEQ ID NO: 2719590 - RNA, 17 nt, Human
acuuacacuuuaugcac

SEQ ID NO: 2719591 - RNA, 16 nt, Human
acuuacuguacaugaa

SEQ ID NO: 2719592 - RNA, 21 nt, Human
acuuacuguacaugaaaacac

SEQ ID NO: 2719593 - RNA, 23 nt, Human
agaaugguccgugcuaaggacuu

SEQ ID NO: 2719594 - RNA, 21 nt, Human
agaaugguccgugcuaaggac

SEQ ID NO: 2719595 - RNA, 14 nt, Human
ucugcuuguguuaa

SEQ ID NO: 2719596 - RNA, 21 nt, Human
agaaguuucugccgcagcccu

SEQ ID NO: 2719597 - RNA, 22 nt, Human
agaaguuucugccgcagcccug

SEQ ID NO: 2719598 - RNA, 23 nt, Human
agaaguuucugccgcagcccugc

SEQ ID NO: 2719599 - RNA, 13 nt, Human
agaauauguuuca

SEQ ID NO: 2719600 - RNA, 17 nt, Human
agaauauguuucaaacu

SEQ ID NO: 2719601 - RNA, 18 nt, Human
agaauauguuucaaacuu

SEQ ID NO: 2719602 - RNA, 19 nt, Human
agaauauguuucaaacuuu

SEQ ID NO: 2719603 - RNA, 21 nt, Human
agaauauguuucaaacuuugg

SEQ ID NO: 2719604 - RNA, 18 nt, Human
ucugugaacuugaaauuu

SEQ ID NO: 2719605 - RNA, 17 nt, Human
ucugugaacuugaaauu

SEQ ID NO: 2719606 - RNA, 14 nt, Human
ucugugaacuugaa

SEQ ID NO: 2719607 - RNA, 16 nt, Human
ucugugaaaguacauu

SEQ ID NO: 2719608 - RNA, 22 nt, Human
ucugugaaaggaaagagggagg

SEQ ID NO: 2719609 - RNA, 22 nt, Human
ucuguucuuuccaaaguacacu

SEQ ID NO: 2719610 - RNA, 13 nt, Human
ucuguucuuucca

SEQ ID NO: 2719611 - RNA, 12 nt, Human
ucuguuggccag

SEQ ID NO: 2719612 - RNA, 17 nt, Human
ucuguuggccaguguga

SEQ ID NO: 2719613 - RNA, 14 nt, Human
agaauucuguauag

SEQ ID NO: 2719614 - RNA, 13 nt, Human
ucuguuuagauaa

SEQ ID NO: 2719615 - RNA, 12 nt, Human
agaauucuguau

SEQ ID NO: 2719616 - RNA, 16 nt, Human
agacaggaccagggau

SEQ ID NO: 2719617 - RNA, 17 nt, Human
agacaccuugacagggc

SEQ ID NO: 2719618 - RNA, 18 nt, Human
agacaccuugacagggca

SEQ ID NO: 2719619 - RNA, 16 nt, Human
agacacauguccaaga

SEQ ID NO: 2719620 - RNA, 20 nt, Human
agacacauguccaagaagcc

SEQ ID NO: 2719621 - RNA, 12 nt, Human
agacacacauga

SEQ ID NO: 2719622 - RNA, 15 nt, Human
agacacacaugaagu

SEQ ID NO: 2719623 - RNA, 16 nt, Human
agacacaggcccggcu

SEQ ID NO: 2719624 - RNA, 12 nt, Human
agacacaggccc

SEQ ID NO: 2719625 - RNA, 13 nt, Human
agacacaggcccg

SEQ ID NO: 2719626 - RNA, 22 nt, Human
agaauuugauaugugaacaguu

SEQ ID NO: 2719627 - RNA, 21 nt, Human
agaauuugauaugugaacagu

SEQ ID NO: 2719628 - RNA, 17 nt, Human
ucugcagcaauaaagca

SEQ ID NO: 2719629 - RNA, 17 nt, Human
ucugcacuccccugcug

SEQ ID NO: 2719630 - RNA, 16 nt, Human
ucugcacuccccugcu

SEQ ID NO: 2719631 - RNA, 14 nt, Human
ucugcacuccccug

SEQ ID NO: 2719632 - RNA, 15 nt, Human
ucugcacuccccugc

SEQ ID NO: 2719633 - RNA, 15 nt, Human
agaaauguacagcaa

SEQ ID NO: 2719634 - RNA, 14 nt, Human
agaaauguacagca

SEQ ID NO: 2719635 - RNA, 21 nt, Human
ucugagacucgcgacaaugca

SEQ ID NO: 2719636 - RNA, 11 nt, Human
ucugauccagu

SEQ ID NO: 2719637 - RNA, 21 nt, Human
ucugaucauccacugugccau

SEQ ID NO: 2719638 - RNA, 17 nt, Human
ucugaucauccacugug

SEQ ID NO: 2719639 - RNA, 21 nt, Human
ucugauccaguuuuguuugga

SEQ ID NO: 2719640 - RNA, 14 nt, Human
ucugauccaguuuu

SEQ ID NO: 2719641 - RNA, 15 nt, Human
ucugacacacagcuc

SEQ ID NO: 2719642 - RNA, 12 nt, Human
ucugacacacag

SEQ ID NO: 2719643 - RNA, 13 nt, Human
ucugacacacagc

SEQ ID NO: 2719644 - RNA, 14 nt, Human
ucugacacacagcu

SEQ ID NO: 2719645 - RNA, 21 nt, Human
ucugaaggacauugcggacag

SEQ ID NO: 2719646 - RNA, 13 nt, Human
agaagaacugaaa

SEQ ID NO: 2719647 - RNA, 14 nt, Human
agaagaacugaaau

SEQ ID NO: 2719648 - RNA, 18 nt, Human
agaagaugguaccaccag

SEQ ID NO: 2719649 - RNA, 18 nt, Human
agaagauuuugaaauuuu

SEQ ID NO: 2719650 - RNA, 12 nt, Human
agaagcccagga

SEQ ID NO: 2719651 - RNA, 16 nt, Human
agaagcccaggaaagg

SEQ ID NO: 2719652 - RNA, 18 nt, Human
agaagcccaggaaaggcu

SEQ ID NO: 2719653 - RNA, 20 nt, Human
agaagcccaggaaaggcucc

SEQ ID NO: 2719654 - RNA, 21 nt, Human
agaagcccaggaaaggcucca

SEQ ID NO: 2719655 - RNA, 22 nt, Human
agaagcccaggaaaggcuccag

SEQ ID NO: 2719656 - RNA, 16 nt, Human
ucugcccacucccugc

SEQ ID NO: 2719657 - RNA, 17 nt, Human
ucugcccacucccugca

SEQ ID NO: 2719658 - RNA, 16 nt, Human
ucugcuugccaucccu

SEQ ID NO: 2719659 - RNA, 17 nt, Human
ucugcuugccaucccuc

SEQ ID NO: 2719660 - RNA, 20 nt, Human
ucugcuugccaucccucccu

SEQ ID NO: 2719661 - RNA, 23 nt, Human
ucugcuugccaucccucccucca

SEQ ID NO: 2719662 - RNA, 14 nt, Human
ucugcuugccaucc

SEQ ID NO: 2719663 - RNA, 13 nt, Human
ucugcuucagccu

SEQ ID NO: 2719664 - RNA, 14 nt, Human
ucugcuucagccuc

SEQ ID NO: 2719665 - RNA, 15 nt, Human
ucugcuucagccucc

SEQ ID NO: 2719666 - RNA, 17 nt, Human
ucugcucacauaucugu

SEQ ID NO: 2719667 - RNA, 19 nt, Human
ucugcucacauaucuguca

SEQ ID NO: 2719668 - RNA, 20 nt, Human
ucugcucacauaucugucau

SEQ ID NO: 2719669 - RNA, 14 nt, Human
ucugccgcagcccu

SEQ ID NO: 2719670 - RNA, 15 nt, Human
ucugccgcagcccug

SEQ ID NO: 2719671 - RNA, 18 nt, Human
ucugcccacucccugcaa

SEQ ID NO: 2719672 - RNA, 21 nt, Human
ucugcccacucccugcaaccu

SEQ ID NO: 2719673 - RNA, 18 nt, Human
ucugcccuccaagaccuu

SEQ ID NO: 2719674 - RNA, 19 nt, Human
ucugcccuccaagaccuuc

SEQ ID NO: 2719675 - RNA, 21 nt, Human
ucugccugcccaggccccugc

SEQ ID NO: 2719676 - RNA, 22 nt, Human
ucugccugcccaggccccugcc

SEQ ID NO: 2719677 - RNA, 22 nt, Human
ucugccgcagcccugcagaggg

SEQ ID NO: 2719678 - RNA, 13 nt, Human
agauccuggaaau

SEQ ID NO: 2719679 - RNA, 18 nt, Human
agaucucuaacuucacca

SEQ ID NO: 2719680 - RNA, 21 nt, Human
agaugcaguucugaagaagau

SEQ ID NO: 2719681 - RNA, 20 nt, Human
agaugcaguucugaagaaga

SEQ ID NO: 2719682 - RNA, 22 nt, Human
ugacagagugagacucugucuc

SEQ ID NO: 2719683 - RNA, 19 nt, Human
ugacacgaauauugcugau

SEQ ID NO: 2719684 - RNA, 16 nt, Human
ugacacgaauauugcu

SEQ ID NO: 2719685 - RNA, 21 nt, Human
ugacagggcacaccgggcacu

SEQ ID NO: 2719686 - RNA, 22 nt, Human
ugacagggcacaccgggcacuc

SEQ ID NO: 2719687 - RNA, 17 nt, Human
ugacaggcaaugcuggc

SEQ ID NO: 2719688 - RNA, 19 nt, Human
ugacaggcaaugcuggcug

SEQ ID NO: 2719689 - RNA, 13 nt, Human
ugacauguuuuau

SEQ ID NO: 2719690 - RNA, 22 nt, Human
agauguauguacuucaugcugu

SEQ ID NO: 2719691 - RNA, 17 nt, Human
agaugugaacacaucag

SEQ ID NO: 2719692 - RNA, 22 nt, Human
agaugugaacacaucagcuugc

SEQ ID NO: 2719693 - RNA, 15 nt, Human
ugaccuuuaagagaa

SEQ ID NO: 2719694 - RNA, 21 nt, Human
ugacuguuuucucuugagagg

SEQ ID NO: 2719695 - RNA, 12 nt, Human
ugaccuuucaau

SEQ ID NO: 2719696 - RNA, 13 nt, Human
ugaccuuucaaua

SEQ ID NO: 2719697 - RNA, 14 nt, Human
ugacuaugacauaa

SEQ ID NO: 2719698 - RNA, 17 nt, Human
agauuucacucuccuug

SEQ ID NO: 2719699 - RNA, 19 nt, Human
agauuucacucuccuuggu

SEQ ID NO: 2719700 - RNA, 21 nt, Human
agauuagagaguguugaaacg

SEQ ID NO: 2719701 - RNA, 23 nt, Human
agauuagaauucuguauagauua

SEQ ID NO: 2719702 - RNA, 22 nt, Human
agauuagaauucuguauagauu

SEQ ID NO: 2719703 - RNA, 16 nt, Human
agauucauauuuacuu

SEQ ID NO: 2719704 - RNA, 13 nt, Human
agauucauauuua

SEQ ID NO: 2719705 - RNA, 20 nt, Human
ugacuuacuguacaugaaaa

SEQ ID NO: 2719706 - RNA, 12 nt, Human
ugacuuacugua

SEQ ID NO: 2719707 - RNA, 16 nt, Human
agauuagaauucugua

SEQ ID NO: 2719708 - RNA, 15 nt, Human
agauuagaauucugu

SEQ ID NO: 2719709 - RNA, 16 nt, Human
agcaagggugauggga

SEQ ID NO: 2719710 - RNA, 14 nt, Human
agcaaggagauuua

SEQ ID NO: 2719711 - RNA, 19 nt, Human
agcaaggagauuuacaacu

SEQ ID NO: 2719712 - RNA, 17 nt, Human
agcaaggagauuuacaa

SEQ ID NO: 2719713 - RNA, 22 nt, Human
agcaagggugaugggaaagcau

SEQ ID NO: 2719714 - RNA, 20 nt, Human
agcaagggugaugggaaagc

SEQ ID NO: 2719715 - RNA, 16 nt, Human
agcaagugagacccug

SEQ ID NO: 2719716 - RNA, 15 nt, Human
agcaagugagagcug

SEQ ID NO: 2719717 - RNA, 16 nt, Human
agcaagugagagcugg

SEQ ID NO: 2719718 - RNA, 12 nt, Human
ugagccacugca

SEQ ID NO: 2719719 - RNA, 13 nt, Human
ugagccacugcac

SEQ ID NO: 2719720 - RNA, 20 nt, Human
ugagccagauuucacucucc

SEQ ID NO: 2719721 - RNA, 21 nt, Human
ugagccagauuucacucuccu

SEQ ID NO: 2719722 - RNA, 14 nt, Human
ugagccacugcacc

SEQ ID NO: 2719723 - RNA, 18 nt, Human
ugagccagauuucacucu

SEQ ID NO: 2719724 - RNA, 19 nt, Human
ugagccagauuucacucuc

SEQ ID NO: 2719725 - RNA, 18 nt, Human
agcacaugccucucucag

SEQ ID NO: 2719726 - RNA, 16 nt, Human
agcacaugccucucuc

SEQ ID NO: 2719727 - RNA, 19 nt, Human
agcacaugccucucucagg

SEQ ID NO: 2719728 - RNA, 20 nt, Human
agcacaugccucucucaggc

SEQ ID NO: 2719729 - RNA, 21 nt, Human
agcacaugccucucucaggcc

SEQ ID NO: 2719730 - RNA, 22 nt, Human
agcacaugccucucucaggcca

SEQ ID NO: 2719731 - RNA, 17 nt, Human
agcaagugagagcuggg

SEQ ID NO: 2719732 - RNA, 21 nt, Human
agcacagcuucauuuccugug

SEQ ID NO: 2719733 - RNA, 16 nt, Human
agcaccaucucuccuc

SEQ ID NO: 2719734 - RNA, 23 nt, Human
agcacaugccucucucaggccaa

SEQ ID NO: 2719735 - RNA, 13 nt, Human
agcaccuccugcc

SEQ ID NO: 2719736 - RNA, 14 nt, Human
agcaccuccugccu

SEQ ID NO: 2719737 - RNA, 16 nt, Human
agcaccuccugccucg

SEQ ID NO: 2719738 - RNA, 16 nt, Human
agauuuuccugaaaac

SEQ ID NO: 2719739 - RNA, 20 nt, Human
ugagaagcagaggaaggaga

SEQ ID NO: 2719740 - RNA, 15 nt, Human
agauuuuccugaaaa

SEQ ID NO: 2719741 - RNA, 14 nt, Human
agauuuuccugaaa

SEQ ID NO: 2719742 - RNA, 11 nt, Human
ugagacagagu

SEQ ID NO: 2719743 - RNA, 21 nt, Human
ugagacagaguuuucacucuu

SEQ ID NO: 2719744 - RNA, 13 nt, Human
ugagacagcccgg

SEQ ID NO: 2719745 - RNA, 20 nt, Human
ugagacucugucucaaaaaa

SEQ ID NO: 2719746 - RNA, 22 nt, Human
ugagacagcccgggcucugccu

SEQ ID NO: 2719747 - RNA, 17 nt, Human
ugagacagcccgggcuc

SEQ ID NO: 2719748 - RNA, 18 nt, Human
ugagacagcccgggcucu

SEQ ID NO: 2719749 - RNA, 19 nt, Human
ugagacagcccgggcucug

SEQ ID NO: 2719750 - RNA, 20 nt, Human
ugagacagcccgggcucugc

SEQ ID NO: 2719751 - RNA, 16 nt, Human
ugagagacacacugaa

SEQ ID NO: 2719752 - RNA, 17 nt, Human
ugagagacacacugaag

SEQ ID NO: 2719753 - RNA, 19 nt, Human
ugagagacacacugaagaa

SEQ ID NO: 2719754 - RNA, 20 nt, Human
ugagagacacacugaagaag

SEQ ID NO: 2719755 - RNA, 21 nt, Human
ugagagacacacugaagaagc

SEQ ID NO: 2719756 - RNA, 22 nt, Human
ugagagacacacugaagaagca

SEQ ID NO: 2719757 - RNA, 14 nt, Human
ugagagcugggugu

SEQ ID NO: 2719758 - RNA, 10 nt, Human
ugagaggaaa

SEQ ID NO: 2719759 - RNA, 11 nt, Human
ugagaggaaau

SEQ ID NO: 2719760 - RNA, 12 nt, Human
ugagaggaaauc

SEQ ID NO: 2719761 - RNA, 13 nt, Human
ugagaggaaauca

SEQ ID NO: 2719762 - RNA, 14 nt, Human
ugagaggaaaucac

SEQ ID NO: 2719763 - RNA, 13 nt, Human
ugagaugugaaca

SEQ ID NO: 2719764 - RNA, 23 nt, Human
ugagaggacuuuucuuuguggcu

SEQ ID NO: 2719765 - RNA, 17 nt, Human
ugagaggaaaucaccga

SEQ ID NO: 2719766 - RNA, 19 nt, Human
ugagaugugaacacaucag

SEQ ID NO: 2719767 - RNA, 18 nt, Human
ugagaugugaacacauca

SEQ ID NO: 2719768 - RNA, 24 nt, Human
ugagaugugaacacaucagcuugc

SEQ ID NO: 2719769 - RNA, 13 nt, Human
ugaaagaaaauaa

SEQ ID NO: 2719770 - RNA, 18 nt, Human
ugaaacuggauuaaacuu

SEQ ID NO: 2719771 - RNA, 17 nt, Human
ugaaacuggauuaaacu

SEQ ID NO: 2719772 - RNA, 22 nt, Human
ugaaaauauuuguaucacaaau

SEQ ID NO: 2719773 - RNA, 21 nt, Human
ugaaaauauuuguaucacaaa

SEQ ID NO: 2719774 - RNA, 20 nt, Human
ugaaaaucuuauaauuuaaa

SEQ ID NO: 2719775 - RNA, 17 nt, Human
ugaaaauauuuguauca

SEQ ID NO: 2719776 - RNA, 20 nt, Human
ugaaaacacauuuuucuuag

SEQ ID NO: 2719777 - RNA, 19 nt, Human
ugaaaacacauuuuucuua

SEQ ID NO: 2719778 - RNA, 17 nt, Human
ugaaaacacauuuuucu

SEQ ID NO: 2719779 - RNA, 15 nt, Human
ugaaaacacauuuuu

SEQ ID NO: 2719780 - RNA, 13 nt, Human
ugaaaacacauuu

SEQ ID NO: 2719781 - RNA, 12 nt, Human
ugaaaacacauu

SEQ ID NO: 2719782 - RNA, 14 nt, Human
ugaaaacacauuuu

SEQ ID NO: 2719783 - RNA, 18 nt, Human
agagaccaucccugaagg

SEQ ID NO: 2719784 - RNA, 19 nt, Human
agagaccaucccugaaggc

SEQ ID NO: 2719785 - RNA, 21 nt, Human
agagaccaucccugaaggccc

SEQ ID NO: 2719786 - RNA, 22 nt, Human
agagaccaucccugaaggcccc

SEQ ID NO: 2719787 - RNA, 23 nt, Human
agagaccaucccugaaggccccg

SEQ ID NO: 2719788 - RNA, 22 nt, Human
ugaaagacuguacaaaguagaa

SEQ ID NO: 2719789 - RNA, 19 nt, Human
ugaaagacuguacaaagua

SEQ ID NO: 2719790 - RNA, 18 nt, Human
ugaaagacuguacaaagu

SEQ ID NO: 2719791 - RNA, 16 nt, Human
ugaaagacuguacaaa

SEQ ID NO: 2719792 - RNA, 15 nt, Human
agagaguguugaaac

SEQ ID NO: 2719793 - RNA, 16 nt, Human
agagaguguugaaacg

SEQ ID NO: 2719794 - RNA, 11 nt, Human
agagacuccug

SEQ ID NO: 2719795 - RNA, 12 nt, Human
agagacuccugc

SEQ ID NO: 2719796 - RNA, 13 nt, Human
agagacuccugca

SEQ ID NO: 2719797 - RNA, 14 nt, Human
agagacuccugcag

SEQ ID NO: 2719798 - RNA, 16 nt, Human
agagacacacugaaga

SEQ ID NO: 2719799 - RNA, 14 nt, Human
ucuuuguacagaca

SEQ ID NO: 2719800 - RNA, 15 nt, Human
ucuuuguacagacaa

SEQ ID NO: 2719801 - RNA, 20 nt, Human
ucuuuguacagacaacaaac

SEQ ID NO: 2719802 - RNA, 14 nt, Human
ucuuuguggcuucc

SEQ ID NO: 2719803 - RNA, 17 nt, Human
ucuuugucuacaccauu

SEQ ID NO: 2719804 - RNA, 15 nt, Human
agacuuuggaaagac

SEQ ID NO: 2719805 - RNA, 17 nt, Human
agacuuuggaaagacuu

SEQ ID NO: 2719806 - RNA, 15 nt, Human
agacuuuggaaagag

SEQ ID NO: 2719807 - RNA, 20 nt, Human
agacugguuccauggccucu

SEQ ID NO: 2719808 - RNA, 21 nt, Human
agacuggugacugauucuuca

SEQ ID NO: 2719809 - RNA, 20 nt, Human
agacuggugacugauucuuc

SEQ ID NO: 2719810 - RNA, 19 nt, Human
agacuggugacugauucuu

SEQ ID NO: 2719811 - RNA, 15 nt, Human
agacuuuuccaaccc

SEQ ID NO: 2719812 - RNA, 19 nt, Human
agacuuuggaaagaguagg

SEQ ID NO: 2719813 - RNA, 15 nt, Human
agagacacaagccuu

SEQ ID NO: 2719814 - RNA, 16 nt, Human
agagacacaagccuuc

SEQ ID NO: 2719815 - RNA, 19 nt, Human
agagacacaagccuucggc

SEQ ID NO: 2719816 - RNA, 22 nt, Human
agacuccaaagaaauguaaggg

SEQ ID NO: 2719817 - RNA, 12 nt, Human
ucuuuccugagg

SEQ ID NO: 2719818 - RNA, 18 nt, Human
ucuuuaaugucacaggca

SEQ ID NO: 2719819 - RNA, 19 nt, Human
ucuuuaaugucacaggcag

SEQ ID NO: 2719820 - RNA, 20 nt, Human
agacaggcaagcaccuccug

SEQ ID NO: 2719821 - RNA, 22 nt, Human
agacaggcaagcaccuccugcc

SEQ ID NO: 2719822 - RNA, 15 nt, Human
ucuuuaaugucacag

SEQ ID NO: 2719823 - RNA, 21 nt, Human
agacuggcacaguuuucugag

SEQ ID NO: 2719824 - RNA, 20 nt, Human
agacuggcacaguuuucuga

SEQ ID NO: 2719825 - RNA, 23 nt, Human
agacuggcacaguuuucugagaa

SEQ ID NO: 2719826 - RNA, 13 nt, Human
agacuccugcagg

SEQ ID NO: 2719827 - RNA, 18 nt, Human
agagcuguucacagccag

SEQ ID NO: 2719828 - RNA, 21 nt, Human
agaggcagccccauucugccu

SEQ ID NO: 2719829 - RNA, 22 nt, Human
agaggcagccccauucugccug

SEQ ID NO: 2719830 - RNA, 21 nt, Human
agaggcagggucucacucugu

SEQ ID NO: 2719831 - RNA, 23 nt, Human
agaggcagccccauucugccugc

SEQ ID NO: 2719832 - RNA, 20 nt, Human
agagguucaaagauauuuug

SEQ ID NO: 2719833 - RNA, 19 nt, Human
agagguucaaagauauuuu

SEQ ID NO: 2719834 - RNA, 16 nt, Human
agagguucaaagauau

SEQ ID NO: 2719835 - RNA, 15 nt, Human
agagggagguaagga

SEQ ID NO: 2719836 - RNA, 15 nt, Human
agagggagugacaga

SEQ ID NO: 2719837 - RNA, 20 nt, Human
agagggagugacagaggcag

SEQ ID NO: 2719838 - RNA, 13 nt, Human
agagguucaaaga

SEQ ID NO: 2719839 - RNA, 22 nt, Human
agaggcugccucucccaucacu

SEQ ID NO: 2719840 - RNA, 17 nt, Human
ugaagauuuaccacuug

SEQ ID NO: 2719841 - RNA, 20 nt, Human
ugaagauuuaccacuugugu

SEQ ID NO: 2719842 - RNA, 15 nt, Human
ugaaguaauaugcac

SEQ ID NO: 2719843 - RNA, 22 nt, Human
ugaaguaauaugcacacauuuu

SEQ ID NO: 2719844 - RNA, 21 nt, Human
ugaaguaauaugcacacauuu

SEQ ID NO: 2719845 - RNA, 20 nt, Human
ugaaguaauaugcacacauu

SEQ ID NO: 2719846 - RNA, 16 nt, Human
ugaaguaauaugcaca

SEQ ID NO: 2719847 - RNA, 13 nt, Human
ugaagucacacag

SEQ ID NO: 2719848 - RNA, 12 nt, Human
ugaauaauacag

SEQ ID NO: 2719849 - RNA, 13 nt, Human
ugaauaauacagu

SEQ ID NO: 2719850 - RNA, 22 nt, Human
ugaagaagcaccaaucaugaau

SEQ ID NO: 2719851 - RNA, 11 nt, Human
ugaacuccugg

SEQ ID NO: 2719852 - RNA, 13 nt, Human
ugaagacagagcu

SEQ ID NO: 2719853 - RNA, 23 nt, Human
ugaagacaaugacuuacuguaca

SEQ ID NO: 2719854 - RNA, 22 nt, Human
ugaagacaaugacuuacuguac

SEQ ID NO: 2719855 - RNA, 21 nt, Human
ugaagacaaugacuuacugua

SEQ ID NO: 2719856 - RNA, 21 nt, Human
ugaaccaccacacccagccca

SEQ ID NO: 2719857 - RNA, 22 nt, Human
ugaaccaccacacccagcccac

SEQ ID NO: 2719858 - RNA, 16 nt, Human
agagcugcccucuccu

SEQ ID NO: 2719859 - RNA, 17 nt, Human
agagcugcccucuccug

SEQ ID NO: 2719860 - RNA, 18 nt, Human
agagcugcccucuccugg

SEQ ID NO: 2719861 - RNA, 19 nt, Human
agagcugcccucuccuggg

SEQ ID NO: 2719862 - RNA, 20 nt, Human
agagcugcccucuccugggc

SEQ ID NO: 2719863 - RNA, 16 nt, Human
agagauugugguuuca

SEQ ID NO: 2719864 - RNA, 23 nt, Human
ugaaauaaacgucuuaaauauuc

SEQ ID NO: 2719865 - RNA, 22 nt, Human
ugaaauaaacgucuuaaauauu

SEQ ID NO: 2719866 - RNA, 18 nt, Human
ugaaauaaacgucuuaaa

SEQ ID NO: 2719867 - RNA, 13 nt, Human
ugaaauaaacguc

SEQ ID NO: 2719868 - RNA, 19 nt, Human
ugaaauuguaauuauaucu

SEQ ID NO: 2719869 - RNA, 16 nt, Human
ugaaauuguaauuaua

SEQ ID NO: 2719870 - RNA, 15 nt, Human
ugaaauuguaauuau

SEQ ID NO: 2719871 - RNA, 14 nt, Human
ugaaauuguaauua

SEQ ID NO: 2719872 - RNA, 13 nt, Human
ugaaauuguaauu

SEQ ID NO: 2719873 - RNA, 19 nt, Human
ugaaauuuuuauuaaauua

SEQ ID NO: 2719874 - RNA, 15 nt, Human
ugaaauuuccuggga

SEQ ID NO: 2719875 - RNA, 20 nt, Human
ugaaauuuuuauuaaauuau

SEQ ID NO: 2719876 - RNA, 21 nt, Human
ugaaauuuccugggagcuuuu

SEQ ID NO: 2719877 - RNA, 17 nt, Human
uguaagaaaauaucacu

SEQ ID NO: 2719878 - RNA, 18 nt, Human
uguaagaaaauaucacuu

SEQ ID NO: 2719879 - RNA, 22 nt, Human
uguaagcucuacugaggugcua

SEQ ID NO: 2719880 - RNA, 13 nt, Human
uguaaggaaugau

SEQ ID NO: 2719881 - RNA, 14 nt, Human
uguaaggaaugauu

SEQ ID NO: 2719882 - RNA, 15 nt, Human
uguaaggaaugauua

SEQ ID NO: 2719883 - RNA, 14 nt, Human
agguggggcagcuu

SEQ ID NO: 2719884 - RNA, 23 nt, Human
agguggggucacucuggcagcuc

SEQ ID NO: 2719885 - RNA, 13 nt, Human
agguggggcagcu

SEQ ID NO: 2719886 - RNA, 23 nt, Human
aggugugaaccaccacacccagc

SEQ ID NO: 2719887 - RNA, 18 nt, Human
aggugugacugaauuucu

SEQ ID NO: 2719888 - RNA, 22 nt, Human
aggugugaaccaccacacccag

SEQ ID NO: 2719889 - RNA, 20 nt, Human
aggugugacugaauuucuuu

SEQ ID NO: 2719890 - RNA, 14 nt, Human
aggugugagucacc

SEQ ID NO: 2719891 - RNA, 20 nt, Human
aggugugagucaccaagccc

SEQ ID NO: 2719892 - RNA, 15 nt, Human
uguacuuaacuauuc

SEQ ID NO: 2719893 - RNA, 20 nt, Human
uguacaugaaaacacauuuu

SEQ ID NO: 2719894 - RNA, 19 nt, Human
uguacaugaaaacacauuu

SEQ ID NO: 2719895 - RNA, 18 nt, Human
uguacaugaaaacacauu

SEQ ID NO: 2719896 - RNA, 17 nt, Human
uguacaugaaaacacau

SEQ ID NO: 2719897 - RNA, 21 nt, Human
uguagaagucacauuccugaa

SEQ ID NO: 2719898 - RNA, 13 nt, Human
uguacaaaguauu

SEQ ID NO: 2719899 - RNA, 14 nt, Human
uguacaaaguauua

SEQ ID NO: 2719900 - RNA, 23 nt, Human
uguacaaaguagaagucuuagau

SEQ ID NO: 2719901 - RNA, 19 nt, Human
uguacaaaguagaagucuu

SEQ ID NO: 2719902 - RNA, 21 nt, Human
uguaauuugugauacaaugcu

SEQ ID NO: 2719903 - RNA, 17 nt, Human
uguaauuugugauacaa

SEQ ID NO: 2719904 - RNA, 18 nt, Human
uguaaggaaugauuaauu

SEQ ID NO: 2719905 - RNA, 16 nt, Human
uguaauuugugauaca

SEQ ID NO: 2719906 - RNA, 15 nt, Human
ugguuucagaaaugu

SEQ ID NO: 2719907 - RNA, 14 nt, Human
ugguuucagaaaug

SEQ ID NO: 2719908 - RNA, 12 nt, Human
ugguuuucuguu

SEQ ID NO: 2719909 - RNA, 21 nt, Human
ugguuuguaaauuaacuuuua

SEQ ID NO: 2719910 - RNA, 10 nt, Human
uguaaauccc

SEQ ID NO: 2719911 - RNA, 21 nt, Human
aggugauccacccaccucagc

SEQ ID NO: 2719912 - RNA, 23 nt, Human
aggugauccacccaccucagccu

SEQ ID NO: 2719913 - RNA, 21 nt, Human
uguaaauacaauuuuguuucu

SEQ ID NO: 2719914 - RNA, 15 nt, Human
ugguuuucuguucuu

SEQ ID NO: 2719915 - RNA, 13 nt, Human
ugguuuucuguuc

SEQ ID NO: 2719916 - RNA, 19 nt, Human
uguaaauacaauuuuguuu

SEQ ID NO: 2719917 - RNA, 18 nt, Human
uguaaauacaauuuuguu

SEQ ID NO: 2719918 - RNA, 17 nt, Human
uguaaauacaauuuugu

SEQ ID NO: 2719919 - RNA, 16 nt, Human
uguaaauacaauuuug

SEQ ID NO: 2719920 - RNA, 12 nt, Human
ugguggcagcug

SEQ ID NO: 2719921 - RNA, 15 nt, Human
ugguggcagagugga

SEQ ID NO: 2719922 - RNA, 12 nt, Human
ugguggcagcuc

SEQ ID NO: 2719923 - RNA, 16 nt, Human
ugguggcagcucaccu

SEQ ID NO: 2719924 - RNA, 19 nt, Human
ugguggcagcucaccucuc

SEQ ID NO: 2719925 - RNA, 20 nt, Human
ugguggcagcucaccucucc

SEQ ID NO: 2719926 - RNA, 23 nt, Human
ugguggcagcucaccucucccuu

SEQ ID NO: 2719927 - RNA, 15 nt, Human
ugguguuuccuggca

SEQ ID NO: 2719928 - RNA, 17 nt, Human
ugguguuuccuggcacu

SEQ ID NO: 2719929 - RNA, 23 nt, Human
ugguucaggguuggccccugccc

SEQ ID NO: 2719930 - RNA, 20 nt, Human
ugguucaggguuggccccug

SEQ ID NO: 2719931 - RNA, 22 nt, Human
ugguucaggguuggccccugcc

SEQ ID NO: 2719932 - RNA, 22 nt, Human
agggugaugggaaagcauugua

SEQ ID NO: 2719933 - RNA, 21 nt, Human
agggugaugggaaagcauugu

SEQ ID NO: 2719934 - RNA, 15 nt, Human
agggugaaaauuauu

SEQ ID NO: 2719935 - RNA, 23 nt, Human
uggguggaugccugguggcagcu

SEQ ID NO: 2719936 - RNA, 14 nt, Human
uggguggaugccug

SEQ ID NO: 2719937 - RNA, 23 nt, Human
uggucaccaaaucagcugcuacu

SEQ ID NO: 2719938 - RNA, 21 nt, Human
uggucaccaaaucagcugcua

SEQ ID NO: 2719939 - RNA, 15 nt, Human
ugguccauagagagc

SEQ ID NO: 2719940 - RNA, 16 nt, Human
ugguccauagagagca

SEQ ID NO: 2719941 - RNA, 16 nt, Human
aggggaauugaggaca

SEQ ID NO: 2719942 - RNA, 16 nt, Human
aggggauagagagaga

SEQ ID NO: 2719943 - RNA, 13 nt, Human
agggggcugggac

SEQ ID NO: 2719944 - RNA, 19 nt, Human
aggguacuaaggaaucuuu

SEQ ID NO: 2719945 - RNA, 16 nt, Human
aggguaucaggugcug

SEQ ID NO: 2719946 - RNA, 22 nt, Human
ugguccaugggccauaugaaaa

SEQ ID NO: 2719947 - RNA, 19 nt, Human
ugguccauagagagcaaga

SEQ ID NO: 2719948 - RNA, 13 nt, Human
uggucccacccca

SEQ ID NO: 2719949 - RNA, 12 nt, Human
uggucuguguga

SEQ ID NO: 2719950 - RNA, 18 nt, Human
uggucugacccacugcuu

SEQ ID NO: 2719951 - RNA, 19 nt, Human
uggugaacagaacaaaagg

SEQ ID NO: 2719952 - RNA, 17 nt, Human
aggguggugaccucugc

SEQ ID NO: 2719953 - RNA, 18 nt, Human
aggguggugaccucugcc

SEQ ID NO: 2719954 - RNA, 19 nt, Human
aggguggugaccucugccu

SEQ ID NO: 2719955 - RNA, 17 nt, Human
aggguuaugauuaagua

SEQ ID NO: 2719956 - RNA, 13 nt, Human
aggguuggccccu

SEQ ID NO: 2719957 - RNA, 14 nt, Human
aggguuggccccug

SEQ ID NO: 2719958 - RNA, 13 nt, Human
aggguugggcugg

SEQ ID NO: 2719959 - RNA, 15 nt, Human
aggguugggcuggug

SEQ ID NO: 2719960 - RNA, 17 nt, Human
aggguugggcugguguc

SEQ ID NO: 2719961 - RNA, 17 nt, Human
agguaugcaaucaaauc

SEQ ID NO: 2719962 - RNA, 15 nt, Human
aggucagugcaaaua

SEQ ID NO: 2719963 - RNA, 21 nt, Human
aggucaaggcugcagugagcc

SEQ ID NO: 2719964 - RNA, 23 nt, Human
aggucauuuuuuuuaagaaaaag

SEQ ID NO: 2719965 - RNA, 22 nt, Human
aggucauuuuuuuuaagaaaaa

SEQ ID NO: 2719966 - RNA, 18 nt, Human
aggucuugaacuccuggc

SEQ ID NO: 2719967 - RNA, 22 nt, Human
aggucuugaacuccuggccuca

SEQ ID NO: 2719968 - RNA, 20 nt, Human
aggucuugaacuccuggccu

SEQ ID NO: 2719969 - RNA, 21 nt, Human
aggucuugaacuccuggccuc

SEQ ID NO: 2719970 - RNA, 16 nt, Human
aggucauauuaauaua

SEQ ID NO: 2719971 - RNA, 19 nt, Human
ugugagcacaaagguagcu

SEQ ID NO: 2719972 - RNA, 14 nt, Human
ugugaagcaaaauu

SEQ ID NO: 2719973 - RNA, 14 nt, Human
ugugaagagaacca

SEQ ID NO: 2719974 - RNA, 11 nt, Human
agugaaaaagg

SEQ ID NO: 2719975 - RNA, 17 nt, Human
agugaaaaaggaggaag

SEQ ID NO: 2719976 - RNA, 20 nt, Human
agugaaaaaggaggaagaga

SEQ ID NO: 2719977 - RNA, 23 nt, Human
agugaaaaaggaggaagagaaaa

SEQ ID NO: 2719978 - RNA, 17 nt, Human
agugaaagaaaauaaca

SEQ ID NO: 2719979 - RNA, 16 nt, Human
agugaaagaggcagcu

SEQ ID NO: 2719980 - RNA, 22 nt, Human
agugaaagaggcagcuugaaac

SEQ ID NO: 2719981 - RNA, 21 nt, Human
agugagacccugucucaaaaa

SEQ ID NO: 2719982 - RNA, 13 nt, Human
agugagacucugu

SEQ ID NO: 2719983 - RNA, 17 nt, Human
agugagacccugucuca

SEQ ID NO: 2719984 - RNA, 22 nt, Human
agugagacucugucucaaaaaa

SEQ ID NO: 2719985 - RNA, 16 nt, Human
agugagacucugucuc

SEQ ID NO: 2719986 - RNA, 17 nt, Human
agugagacucugucuca

SEQ ID NO: 2719987 - RNA, 21 nt, Human
agugagcagucaggaaagaga

SEQ ID NO: 2719988 - RNA, 14 nt, Human
agugagagcugggu

SEQ ID NO: 2719989 - RNA, 15 nt, Human
ugugauggggcccug

SEQ ID NO: 2719990 - RNA, 16 nt, Human
ugugauggggcccugc

SEQ ID NO: 2719991 - RNA, 17 nt, Human
ugugauggggcccugcc

SEQ ID NO: 2719992 - RNA, 16 nt, Human
ugugauguauucuagc

SEQ ID NO: 2719993 - RNA, 14 nt, Human
ugucuucacaacag

SEQ ID NO: 2719994 - RNA, 15 nt, Human
ugucuugcaauggca

SEQ ID NO: 2719995 - RNA, 17 nt, Human
ugucuugcaauggcagc

SEQ ID NO: 2719996 - RNA, 18 nt, Human
ugucuugcaauggcagcc

SEQ ID NO: 2719997 - RNA, 20 nt, Human
ugucuugcaauggcagccuu

SEQ ID NO: 2719998 - RNA, 21 nt, Human
ugucuugcaauggcagccuug

SEQ ID NO: 2719999 - RNA, 21 nt, Human
ugucuugccuuuuucauuauu

SEQ ID NO: 2720000 - RNA, 17 nt, Human
ugucuugccuuuuucau

SEQ ID NO: 2720001 - RNA, 16 nt, Human
ugucuugccuuuuuca

SEQ ID NO: 2720002 - RNA, 15 nt, Human
ugucuugccuuuuuc

SEQ ID NO: 2720003 - RNA, 22 nt, Human
ugugaacaguuguguuugaagc

SEQ ID NO: 2720004 - RNA, 15 nt, Human
ugugaaccaccacac

SEQ ID NO: 2720005 - RNA, 16 nt, Human
ugugaaccaccacacc

SEQ ID NO: 2720006 - RNA, 22 nt, Human
ugugaaccaccacacccagccc

SEQ ID NO: 2720007 - RNA, 23 nt, Human
ugugaaccaccacacccagccca

SEQ ID NO: 2720008 - RNA, 13 nt, Human
ugucucugagagu

SEQ ID NO: 2720009 - RNA, 23 nt, Human
aguccccuguuuguuucugaaag

SEQ ID NO: 2720010 - RNA, 13 nt, Human
agucccugccaau

SEQ ID NO: 2720011 - RNA, 14 nt, Human
agucccugccaaug

SEQ ID NO: 2720012 - RNA, 16 nt, Human
agucccugccaaugga

SEQ ID NO: 2720013 - RNA, 14 nt, Human
ugucuuaauuaaaa

SEQ ID NO: 2720014 - RNA, 22 nt, Human
ugucucuuuaaugucacaggca

SEQ ID NO: 2720015 - RNA, 21 nt, Human
ugucucuuuaaugucacaggc

SEQ ID NO: 2720016 - RNA, 22 nt, Human
ugucucuugguccugcugcagu

SEQ ID NO: 2720017 - RNA, 18 nt, Human
ugucucuugguccugcug

SEQ ID NO: 2720018 - RNA, 19 nt, Human
ugucucuugguccugcugc

SEQ ID NO: 2720019 - RNA, 20 nt, Human
ugucucuugguccugcugca

SEQ ID NO: 2720020 - RNA, 21 nt, Human
ugucucuugguccugcugcag

SEQ ID NO: 2720021 - RNA, 21 nt, Human
aguauuagaauaccacaggaa

SEQ ID NO: 2720022 - RNA, 18 nt, Human
aguauguuagugcaaauu

SEQ ID NO: 2720023 - RNA, 21 nt, Human
aguauguuagugcaaauuguc

SEQ ID NO: 2720024 - RNA, 14 nt, Human
aguauguguaaaau

SEQ ID NO: 2720025 - RNA, 22 nt, Human
aguagcugggacuacaggcacc

SEQ ID NO: 2720026 - RNA, 19 nt, Human
aguagcugggacuacaggc

SEQ ID NO: 2720027 - RNA, 21 nt, Human
aguagcugggacuacaggcac

SEQ ID NO: 2720028 - RNA, 15 nt, Human
aguauuauaccuuuu

SEQ ID NO: 2720029 - RNA, 14 nt, Human
aguauuauaccuuu

SEQ ID NO: 2720030 - RNA, 11 nt, Human
aguauuguaca

SEQ ID NO: 2720031 - RNA, 23 nt, Human
aguauuguacaaaguauuaagca

SEQ ID NO: 2720032 - RNA, 22 nt, Human
aguauuguacaaaguauuaagc

SEQ ID NO: 2720033 - RNA, 20 nt, Human
aguauuguacaaaguauuaa

SEQ ID NO: 2720034 - RNA, 15 nt, Human
aguauuguacaaagu

SEQ ID NO: 2720035 - RNA, 15 nt, Human
ugucagcauagaagu

SEQ ID NO: 2720036 - RNA, 17 nt, Human
agucacugagacagccc

SEQ ID NO: 2720037 - RNA, 15 nt, Human
agucacugagacagc

SEQ ID NO: 2720038 - RNA, 16 nt, Human
agucacugagacagcc

SEQ ID NO: 2720039 - RNA, 15 nt, Human
aguauuguccagguc

SEQ ID NO: 2720040 - RNA, 16 nt, Human
aguauuguccaggucu

SEQ ID NO: 2720041 - RNA, 14 nt, Human
ugucaaagugguga

SEQ ID NO: 2720042 - RNA, 15 nt, Human
ugucaaaguggugag

SEQ ID NO: 2720043 - RNA, 16 nt, Human
ugucaaaguggugaga

SEQ ID NO: 2720044 - RNA, 19 nt, Human
ugucaaaguggugagaggc

SEQ ID NO: 2720045 - RNA, 13 nt, Human
aguagcugggacu

SEQ ID NO: 2720046 - RNA, 14 nt, Human
aguagcugggacua

SEQ ID NO: 2720047 - RNA, 23 nt, Human
agguuuggacaaaauggaauacu

SEQ ID NO: 2720048 - RNA, 12 nt, Human
uguagagccagg

SEQ ID NO: 2720049 - RNA, 15 nt, Human
uguagagccaggguc

SEQ ID NO: 2720050 - RNA, 14 nt, Human
uguauguguaagua

SEQ ID NO: 2720051 - RNA, 15 nt, Human
uguaucccaugagcc

SEQ ID NO: 2720052 - RNA, 13 nt, Human
uguaugugugaag

SEQ ID NO: 2720053 - RNA, 12 nt, Human
uguaugugugaa

SEQ ID NO: 2720054 - RNA, 23 nt, Human
ugucagcuccccucggagaagag

SEQ ID NO: 2720055 - RNA, 21 nt, Human
ugucagcuccccucggagaag

SEQ ID NO: 2720056 - RNA, 20 nt, Human
ugucagcuccccucggagaa

SEQ ID NO: 2720057 - RNA, 16 nt, Human
ugucagccauuccugu

SEQ ID NO: 2720058 - RNA, 12 nt, Human
ugucccuuuucc

SEQ ID NO: 2720059 - RNA, 14 nt, Human
ugucccugcacuug

SEQ ID NO: 2720060 - RNA, 15 nt, Human
ugucuaagauaguaa

SEQ ID NO: 2720061 - RNA, 14 nt, Human
ugucuaagauagua

SEQ ID NO: 2720062 - RNA, 17 nt, Human
agucagaucugccuaag

SEQ ID NO: 2720063 - RNA, 20 nt, Human
agucagaucugccuaaggac

SEQ ID NO: 2720064 - RNA, 22 nt, Human
agucagaucugccuaaggacuu

SEQ ID NO: 2720065 - RNA, 21 nt, Human
agucagaucugccuaaggacu

SEQ ID NO: 2720066 - RNA, 18 nt, Human
ugucuaaauuugaauguu

SEQ ID NO: 2720067 - RNA, 19 nt, Human
agucagggguucccuuuuu

SEQ ID NO: 2720068 - RNA, 23 nt, Human
agucagaucugccuaaggacuuc

SEQ ID NO: 2720069 - RNA, 21 nt, Human
agucagucauucagauaugau

SEQ ID NO: 2720070 - RNA, 15 nt, Human
agucagucauucaga

SEQ ID NO: 2720071 - RNA, 14 nt, Human
aguccccuguuugu

SEQ ID NO: 2720072 - RNA, 19 nt, Human
aguccccuguuuguuucug

SEQ ID NO: 2720073 - RNA, 21 nt, Human
agucccaccuuggcugcaggg

SEQ ID NO: 2720074 - RNA, 23 nt, Human
agucccaccuuggcugcagggag

SEQ ID NO: 2720075 - RNA, 20 nt, Human
agucccaccuuggcugcagg

SEQ ID NO: 2720076 - RNA, 23 nt, Human
uuagaugcaguucugaagaagau

SEQ ID NO: 2720077 - RNA, 22 nt, Human
uuagaugcaguucugaagaaga

SEQ ID NO: 2720078 - RNA, 14 nt, Human
auaaugaauacuuu

SEQ ID NO: 2720079 - RNA, 19 nt, Human
auaauuauaugcuauuucu

SEQ ID NO: 2720080 - RNA, 17 nt, Human
auaauuauaugcuauuu

SEQ ID NO: 2720081 - RNA, 23 nt, Human
auaauuauaugcuauuucuauau

SEQ ID NO: 2720082 - RNA, 21 nt, Human
auaauuauaugcuauuucuau

SEQ ID NO: 2720083 - RNA, 14 nt, Human
auaauucuacuuug

SEQ ID NO: 2720084 - RNA, 21 nt, Human
auaaucuuucacaggggacag

SEQ ID NO: 2720085 - RNA, 20 nt, Human
auaaucagugugucuaaauu

SEQ ID NO: 2720086 - RNA, 19 nt, Human
auaauacaguaucucaggg

SEQ ID NO: 2720087 - RNA, 16 nt, Human
auaauaaggaaaaguu

SEQ ID NO: 2720088 - RNA, 21 nt, Human
auaauacaccacuacauucug

SEQ ID NO: 2720089 - RNA, 23 nt, Human
auaauacaccacuacauucuguu

SEQ ID NO: 2720090 - RNA, 22 nt, Human
auaauaaggaaaaguuuaauau

SEQ ID NO: 2720091 - RNA, 19 nt, Human
auaauaaggaaaaguuuaa

SEQ ID NO: 2720092 - RNA, 18 nt, Human
auaauaaggaaaaguuua

SEQ ID NO: 2720093 - RNA, 17 nt, Human
auaauaaggaaaaguuu

SEQ ID NO: 2720094 - RNA, 22 nt, Human
auaaguuaacuuccaauuuaca

SEQ ID NO: 2720095 - RNA, 21 nt, Human
auaaguucauacauuguacga

SEQ ID NO: 2720096 - RNA, 11 nt, Human
auaaguucaua

SEQ ID NO: 2720097 - RNA, 13 nt, Human
auaaguucauaca

SEQ ID NO: 2720098 - RNA, 14 nt, Human
auaaguucauacau

SEQ ID NO: 2720099 - RNA, 15 nt, Human
auaaguucauacauu

SEQ ID NO: 2720100 - RNA, 23 nt, Human
auaagaaccuuuugagugccuua

SEQ ID NO: 2720101 - RNA, 17 nt, Human
auaaguuaacuuccaau

SEQ ID NO: 2720102 - RNA, 22 nt, Human
auaagaaccuuuugagugccuu

SEQ ID NO: 2720103 - RNA, 12 nt, Human
auaacuggaaac

SEQ ID NO: 2720104 - RNA, 20 nt, Human
auaaccaguguuguggauuu

SEQ ID NO: 2720105 - RNA, 19 nt, Human
auaaaugugccuucauuuu

SEQ ID NO: 2720106 - RNA, 12 nt, Human
auaacugugaag

SEQ ID NO: 2720107 - RNA, 15 nt, Human
uuacaggaaguacug

SEQ ID NO: 2720108 - RNA, 16 nt, Human
uuacaggaaguacugg

SEQ ID NO: 2720109 - RNA, 18 nt, Human
uuacaggaaguacuggag

SEQ ID NO: 2720110 - RNA, 22 nt, Human
uuacaggaaguacuggagaaaa

SEQ ID NO: 2720111 - RNA, 23 nt, Human
uuaccauuuugggguacccacug

SEQ ID NO: 2720112 - RNA, 17 nt, Human
aguuuucugagaaagac

SEQ ID NO: 2720113 - RNA, 14 nt, Human
aguuuucugagaaa

SEQ ID NO: 2720114 - RNA, 13 nt, Human
aguuuucugagaa

SEQ ID NO: 2720115 - RNA, 12 nt, Human
aguuuucugaga

SEQ ID NO: 2720116 - RNA, 16 nt, Human
auaaaccgaacugaug

SEQ ID NO: 2720117 - RNA, 16 nt, Human
auaaaccucaaaaugu

SEQ ID NO: 2720118 - RNA, 18 nt, Human
auaaacgucuuaaauauu

SEQ ID NO: 2720119 - RNA, 16 nt, Human
auaaacgucuuaaaua

SEQ ID NO: 2720120 - RNA, 15 nt, Human
auaaacgucuuaaau

SEQ ID NO: 2720121 - RNA, 15 nt, Human
auaaacuuuaccuuu

SEQ ID NO: 2720122 - RNA, 13 nt, Human
auaaacuuuaccu

SEQ ID NO: 2720123 - RNA, 23 nt, Human
uuauacccagaaaguuauugaua

SEQ ID NO: 2720124 - RNA, 18 nt, Human
uuauacccagaaaguuau

SEQ ID NO: 2720125 - RNA, 19 nt, Human
uuauacccagaaaguuauu

SEQ ID NO: 2720126 - RNA, 23 nt, Human
uuauagaguguacuuaacuauuc

SEQ ID NO: 2720127 - RNA, 18 nt, Human
uuauauaagcuuguauuc

SEQ ID NO: 2720128 - RNA, 13 nt, Human
uuauauaaguauu

SEQ ID NO: 2720129 - RNA, 14 nt, Human
uuauauaaguauuc

SEQ ID NO: 2720130 - RNA, 16 nt, Human
uuauauaaguauucua

SEQ ID NO: 2720131 - RNA, 22 nt, Human
uuauauauauuuuuuucugaaa

SEQ ID NO: 2720132 - RNA, 14 nt, Human
auaauuuuaagaaa

SEQ ID NO: 2720133 - RNA, 15 nt, Human
auaauuuuaagaaau

SEQ ID NO: 2720134 - RNA, 21 nt, Human
auaauuuuaagaaaucaaaga

SEQ ID NO: 2720135 - RNA, 14 nt, Human
auaauuuuuauauu

SEQ ID NO: 2720136 - RNA, 16 nt, Human
auaauuuuuauauuug

SEQ ID NO: 2720137 - RNA, 19 nt, Human
auaauuuuuauauuugaaa

SEQ ID NO: 2720138 - RNA, 13 nt, Human
auaauuuugugaa

SEQ ID NO: 2720139 - RNA, 14 nt, Human
auaauuuugugaag

SEQ ID NO: 2720140 - RNA, 15 nt, Human
auaauuuugugaagc

SEQ ID NO: 2720141 - RNA, 20 nt, Human
auaauuuugugaagcaaaau

SEQ ID NO: 2720142 - RNA, 12 nt, Human
auacaaaagcau

SEQ ID NO: 2720143 - RNA, 15 nt, Human
auacaaaagcaugug

SEQ ID NO: 2720144 - RNA, 13 nt, Human
auacaaaagcaug

SEQ ID NO: 2720145 - RNA, 21 nt, Human
auaauuuuuauauuugaaaua

SEQ ID NO: 2720146 - RNA, 22 nt, Human
auaauuuuuauauuugaaauau

SEQ ID NO: 2720147 - RNA, 22 nt, Human
auaccacaggaaccacaagacu

SEQ ID NO: 2720148 - RNA, 19 nt, Human
auaccagccaguaaauggg

SEQ ID NO: 2720149 - RNA, 17 nt, Human
auaccagccaguaaaug

SEQ ID NO: 2720150 - RNA, 21 nt, Human
auacuaaccagcagaaaugcc

SEQ ID NO: 2720151 - RNA, 20 nt, Human
auacuacaguuuguuaguau

SEQ ID NO: 2720152 - RNA, 16 nt, Human
auacuacaguuuguua

SEQ ID NO: 2720153 - RNA, 15 nt, Human
auacuacaguuuguu

SEQ ID NO: 2720154 - RNA, 13 nt, Human
auacuacaguuug

SEQ ID NO: 2720155 - RNA, 22 nt, Human
uuaucaaagggugaaaauuauu

SEQ ID NO: 2720156 - RNA, 20 nt, Human
auacaucccuuaccugggaa

SEQ ID NO: 2720157 - RNA, 19 nt, Human
auacauauuuuuguagcac

SEQ ID NO: 2720158 - RNA, 14 nt, Human
auacauuguacgaa

SEQ ID NO: 2720159 - RNA, 21 nt, Human
auacauuguacgaagaguauu

SEQ ID NO: 2720160 - RNA, 22 nt, Human
auacauuguacgaagaguauuu

SEQ ID NO: 2720161 - RNA, 16 nt, Human
auacauuugauaaagu

SEQ ID NO: 2720162 - RNA, 21 nt, Human
auacaguucggugagcuacaa

SEQ ID NO: 2720163 - RNA, 21 nt, Human
auacaggucauauuaauauau

SEQ ID NO: 2720164 - RNA, 15 nt, Human
auacaggucauauua

SEQ ID NO: 2720165 - RNA, 14 nt, Human
auacaggaaaagcu

SEQ ID NO: 2720166 - RNA, 19 nt, Human
auacaggaaaagcugcuga

SEQ ID NO: 2720167 - RNA, 20 nt, Human
auacaggaaaagcugcugac

SEQ ID NO: 2720168 - RNA, 20 nt, Human
aguucggugagcuacaaaug

SEQ ID NO: 2720169 - RNA, 14 nt, Human
aguucagagcugcc

SEQ ID NO: 2720170 - RNA, 15 nt, Human
aguucagagcugccc

SEQ ID NO: 2720171 - RNA, 16 nt, Human
aguucagagcugcccu

SEQ ID NO: 2720172 - RNA, 17 nt, Human
aguucagagcugcccuc

SEQ ID NO: 2720173 - RNA, 18 nt, Human
aguucagagcugcccucu

SEQ ID NO: 2720174 - RNA, 21 nt, Human
aguuauuuuuauuuauuuaaa

SEQ ID NO: 2720175 - RNA, 15 nt, Human
aguucuaaauuuugu

SEQ ID NO: 2720176 - RNA, 16 nt, Human
uguugggccaggagcc

SEQ ID NO: 2720177 - RNA, 13 nt, Human
uguugggccagga

SEQ ID NO: 2720178 - RNA, 21 nt, Human
uguuguacucaauuuuaacaa

SEQ ID NO: 2720179 - RNA, 13 nt, Human
uguugucagcuga

SEQ ID NO: 2720180 - RNA, 19 nt, Human
aguuauggcuauaggugcu

SEQ ID NO: 2720181 - RNA, 20 nt, Human
aguuauuauauuuacaaaug

SEQ ID NO: 2720182 - RNA, 23 nt, Human
aguuauugauaaguucauacauu

SEQ ID NO: 2720183 - RNA, 17 nt, Human
aguuauugauaaguuca

SEQ ID NO: 2720184 - RNA, 19 nt, Human
aguuauugauaaguucaua

SEQ ID NO: 2720185 - RNA, 21 nt, Human
aguuauugauaaguucauaca

SEQ ID NO: 2720186 - RNA, 22 nt, Human
aguuauugauaaguucauacau

SEQ ID NO: 2720187 - RNA, 18 nt, Human
aguuacccaaauuaagag

SEQ ID NO: 2720188 - RNA, 17 nt, Human
aguuacccaaauuaaga

SEQ ID NO: 2720189 - RNA, 18 nt, Human
uguucuuuccaaaguaca

SEQ ID NO: 2720190 - RNA, 19 nt, Human
uguucuugguuuguaaauu

SEQ ID NO: 2720191 - RNA, 14 nt, Human
uguucuuuccaaag

SEQ ID NO: 2720192 - RNA, 13 nt, Human
uguucuuuccaaa

SEQ ID NO: 2720193 - RNA, 18 nt, Human
uguucuugguuuguaaau

SEQ ID NO: 2720194 - RNA, 17 nt, Human
uguucuugguuuguaaa

SEQ ID NO: 2720195 - RNA, 14 nt, Human
uguucugggacaca

SEQ ID NO: 2720196 - RNA, 15 nt, Human
uguucugggacacag

SEQ ID NO: 2720197 - RNA, 16 nt, Human
uguucuuaauucuuag

SEQ ID NO: 2720198 - RNA, 14 nt, Human
uguucuuaauucuu

SEQ ID NO: 2720199 - RNA, 12 nt, Human
uguucugggaca

SEQ ID NO: 2720200 - RNA, 13 nt, Human
uguucugggacac

SEQ ID NO: 2720201 - RNA, 23 nt, Human
aguguacauggaauaacauguaa

SEQ ID NO: 2720202 - RNA, 16 nt, Human
aguggugcgaucuggg

SEQ ID NO: 2720203 - RNA, 21 nt, Human
agugguuccuaauccucuagg

SEQ ID NO: 2720204 - RNA, 19 nt, Human
agugggugaauaauacagu

SEQ ID NO: 2720205 - RNA, 22 nt, Human
aguguacauggaauaacaugua

SEQ ID NO: 2720206 - RNA, 21 nt, Human
aguguacauggaauaacaugu

SEQ ID NO: 2720207 - RNA, 18 nt, Human
agugggggaucacagccu

SEQ ID NO: 2720208 - RNA, 13 nt, Human
agugggugaauaa

SEQ ID NO: 2720209 - RNA, 18 nt, Human
agugggugaauaauacag

SEQ ID NO: 2720210 - RNA, 19 nt, Human
agugggggaguggccacag

SEQ ID NO: 2720211 - RNA, 20 nt, Human
agugggggaguggccacaga

SEQ ID NO: 2720212 - RNA, 11 nt, Human
aguggcagcug

SEQ ID NO: 2720213 - RNA, 12 nt, Human
aguggcagcugc

SEQ ID NO: 2720214 - RNA, 13 nt, Human
aguggcagcugcu

SEQ ID NO: 2720215 - RNA, 14 nt, Human
aguggcagcugcuu

SEQ ID NO: 2720216 - RNA, 20 nt, Human
aguggcagcugcuuuugucu

SEQ ID NO: 2720217 - RNA, 15 nt, Human
uuaaaaaagaaacau

SEQ ID NO: 2720218 - RNA, 18 nt, Human
uuaaaaaagaaacauuug

SEQ ID NO: 2720219 - RNA, 20 nt, Human
aguugccagucaccccggcc

SEQ ID NO: 2720220 - RNA, 22 nt, Human
aguugcauagguuuaauaauuu

SEQ ID NO: 2720221 - RNA, 17 nt, Human
uuaaaacaacacucaca

SEQ ID NO: 2720222 - RNA, 18 nt, Human
uuaaaaaguggaaaaaua

SEQ ID NO: 2720223 - RNA, 15 nt, Human
uuaaauaaaucauaa

SEQ ID NO: 2720224 - RNA, 13 nt, Human
uuaaauaaaucau

SEQ ID NO: 2720225 - RNA, 19 nt, Human
uuaaauaaugugaaacugg

SEQ ID NO: 2720226 - RNA, 22 nt, Human
uuaaauaaugugaaacuggauu

SEQ ID NO: 2720227 - RNA, 21 nt, Human
uuaaauaaugugaaacuggau

SEQ ID NO: 2720228 - RNA, 20 nt, Human
uuaaauaaugugaaacugga

SEQ ID NO: 2720229 - RNA, 17 nt, Human
uuaaaccgccaaggcug

SEQ ID NO: 2720230 - RNA, 22 nt, Human
aguuuucacucuuauugcccac

SEQ ID NO: 2720231 - RNA, 13 nt, Human
uuaaauucuugca

SEQ ID NO: 2720232 - RNA, 16 nt, Human
uuaaauucuugcaaag

SEQ ID NO: 2720233 - RNA, 21 nt, Human
aguuucuccaagcaggacaug

SEQ ID NO: 2720234 - RNA, 13 nt, Human
aguuucuccaagc

SEQ ID NO: 2720235 - RNA, 15 nt, Human
aguuucuccaagcag

SEQ ID NO: 2720236 - RNA, 15 nt, Human
aguucugaagaagau

SEQ ID NO: 2720237 - RNA, 13 nt, Human
aguucugaagaag

SEQ ID NO: 2720238 - RNA, 14 nt, Human
aguucugaagaaga

SEQ ID NO: 2720239 - RNA, 14 nt, Human
aguugauagcacag

SEQ ID NO: 2720240 - RNA, 15 nt, Human
aguugauagcacaga

SEQ ID NO: 2720241 - RNA, 19 nt, Human
aguugauagcacagacccu

SEQ ID NO: 2720242 - RNA, 20 nt, Human
aguugauagcacagacccug

SEQ ID NO: 2720243 - RNA, 21 nt, Human
aguugauagcacagacccugc

SEQ ID NO: 2720244 - RNA, 21 nt, Human
aguugauaugccuuuucccaa

SEQ ID NO: 2720245 - RNA, 22 nt, Human
aguugauagcacagacccugcc

SEQ ID NO: 2720246 - RNA, 23 nt, Human
aguugauagcacagacccugccc

SEQ ID NO: 2720247 - RNA, 13 nt, Human
aguugauucagcu

SEQ ID NO: 2720248 - RNA, 23 nt, Human
aguugauucagcucugcaagaau

SEQ ID NO: 2720249 - RNA, 14 nt, Human
aguugauucagcuc

SEQ ID NO: 2720250 - RNA, 15 nt, Human
aguugauucagcucu

SEQ ID NO: 2720251 - RNA, 17 nt, Human
aguugauucagcucugc

SEQ ID NO: 2720252 - RNA, 18 nt, Human
aguugauucagcucugca

SEQ ID NO: 2720253 - RNA, 13 nt, Human
uguuuuauaauuu

SEQ ID NO: 2720254 - RNA, 20 nt, Human
uguuuuauaauuuugugaag

SEQ ID NO: 2720255 - RNA, 15 nt, Human
uguuuucaguguaca

SEQ ID NO: 2720256 - RNA, 17 nt, Human
uguuuucaguguacaug

SEQ ID NO: 2720257 - RNA, 15 nt, Human
uguuuucucuugaga

SEQ ID NO: 2720258 - RNA, 16 nt, Human
aguucucuccuucuuc

SEQ ID NO: 2720259 - RNA, 13 nt, Human
aguucucuccuuc

SEQ ID NO: 2720260 - RNA, 12 nt, Human
aguucucuccuu

SEQ ID NO: 2720261 - RNA, 15 nt, Human
uguuugcuaagcauu

SEQ ID NO: 2720262 - RNA, 16 nt, Human
uguuugccucugccuc

SEQ ID NO: 2720263 - RNA, 14 nt, Human
uguuugccucugcc

SEQ ID NO: 2720264 - RNA, 14 nt, Human
uguugucagcugaa

SEQ ID NO: 2720265 - RNA, 19 nt, Human
uguuugcuaagcauuccaa

SEQ ID NO: 2720266 - RNA, 19 nt, Human
uguuuggggaugagaaagg

SEQ ID NO: 2720267 - RNA, 15 nt, Human
uguuuggggaugaga

SEQ ID NO: 2720268 - RNA, 18 nt, Human
ugccucagaaaacaagga

SEQ ID NO: 2720269 - RNA, 22 nt, Human
ugccucccaucacccgcuaaga

SEQ ID NO: 2720270 - RNA, 16 nt, Human
ugccuccccuccucug

SEQ ID NO: 2720271 - RNA, 16 nt, Human
ugccucucucaggcca

SEQ ID NO: 2720272 - RNA, 17 nt, Human
ugccucucucaggccaa

SEQ ID NO: 2720273 - RNA, 12 nt, Human
ugccuccccucc

SEQ ID NO: 2720274 - RNA, 13 nt, Human
ugccuccccuccu

SEQ ID NO: 2720275 - RNA, 14 nt, Human
ugccuccccuccuc

SEQ ID NO: 2720276 - RNA, 15 nt, Human
ugccuccccuccucu

SEQ ID NO: 2720277 - RNA, 11 nt, Human
ugccuccccuc

SEQ ID NO: 2720278 - RNA, 19 nt, Human
ugcccuuaccugccaggaa

SEQ ID NO: 2720279 - RNA, 20 nt, Human
ugccgcagcccugcagaggg

SEQ ID NO: 2720280 - RNA, 22 nt, Human
ugcccuuaccugccaggaagcc

SEQ ID NO: 2720281 - RNA, 15 nt, Human
ugcccugugggcccc

SEQ ID NO: 2720282 - RNA, 18 nt, Human
ugcccugugggcccccaa

SEQ ID NO: 2720283 - RNA, 15 nt, Human
agcucuucuccaggc

SEQ ID NO: 2720284 - RNA, 16 nt, Human
agcucuucuccaggcu

SEQ ID NO: 2720285 - RNA, 23 nt, Human
ugcccugugaguacuacaguccu

SEQ ID NO: 2720286 - RNA, 21 nt, Human
agcugcccucuccugggcagc

SEQ ID NO: 2720287 - RNA, 10 nt, Human
agcugccugu

SEQ ID NO: 2720288 - RNA, 19 nt, Human
agcugcccucuccugggca

SEQ ID NO: 2720289 - RNA, 20 nt, Human
agcugcccucuccugggcag

SEQ ID NO: 2720290 - RNA, 17 nt, Human
agcugcccucuccuggg

SEQ ID NO: 2720291 - RNA, 18 nt, Human
agcugcccucuccugggc

SEQ ID NO: 2720292 - RNA, 13 nt, Human
agcugccuguuca

SEQ ID NO: 2720293 - RNA, 22 nt, Human
agcugcuuuugucuaugggacu

SEQ ID NO: 2720294 - RNA, 15 nt, Human
agcugggacuacagg

SEQ ID NO: 2720295 - RNA, 23 nt, Human
agcugcuuuugucuaugggacuc

SEQ ID NO: 2720296 - RNA, 24 nt, Human
agcugcuuuugucuaugggacuca

SEQ ID NO: 2720297 - RNA, 12 nt, Human
ugccucugccuc

SEQ ID NO: 2720298 - RNA, 17 nt, Human
ugccugcccaggccccu

SEQ ID NO: 2720299 - RNA, 18 nt, Human
ugccugcccaggccccug

SEQ ID NO: 2720300 - RNA, 19 nt, Human
ugccugcccaggccccugc

SEQ ID NO: 2720301 - RNA, 14 nt, Human
ugccucugacacac

SEQ ID NO: 2720302 - RNA, 16 nt, Human
ugccucugacacacag

SEQ ID NO: 2720303 - RNA, 11 nt, Human
ugccucugccu

SEQ ID NO: 2720304 - RNA, 22 nt, Human
agcuccuucuguccuacucugu

SEQ ID NO: 2720305 - RNA, 23 nt, Human
agcuccuucuguccuacucugug

SEQ ID NO: 2720306 - RNA, 21 nt, Human
agcuccagcucaccagcccca

SEQ ID NO: 2720307 - RNA, 18 nt, Human
agcuccagcucaccagcc

SEQ ID NO: 2720308 - RNA, 19 nt, Human
agcuccagcucaccagccc

SEQ ID NO: 2720309 - RNA, 22 nt, Human
ugcccucuccugggcagcugcc

SEQ ID NO: 2720310 - RNA, 23 nt, Human
ugcccucuccugggcagcugccu

SEQ ID NO: 2720311 - RNA, 16 nt, Human
ugcccucuccugggca

SEQ ID NO: 2720312 - RNA, 17 nt, Human
ugcccucuccugggcag

SEQ ID NO: 2720313 - RNA, 18 nt, Human
ugcccucuccugggcagc

SEQ ID NO: 2720314 - RNA, 20 nt, Human
ugcccucuccugggcagcug

SEQ ID NO: 2720315 - RNA, 13 nt, Human
ugcccucuccugg

SEQ ID NO: 2720316 - RNA, 14 nt, Human
ugcccucuccuggg

SEQ ID NO: 2720317 - RNA, 15 nt, Human
ugcccucuccugggc

SEQ ID NO: 2720318 - RNA, 12 nt, Human
ugcccucuccug

SEQ ID NO: 2720319 - RNA, 13 nt, Human
agcuccagcucac

SEQ ID NO: 2720320 - RNA, 17 nt, Human
agcuccagcucaccagc

SEQ ID NO: 2720321 - RNA, 17 nt, Human
agcuccaagcucccagg

SEQ ID NO: 2720322 - RNA, 18 nt, Human
agcuccaagcucccaggc

SEQ ID NO: 2720323 - RNA, 19 nt, Human
agcuccaagcucccaggca

SEQ ID NO: 2720324 - RNA, 22 nt, Human
ugccauuuaaagcuuauuaaaa

SEQ ID NO: 2720325 - RNA, 16 nt, Human
agcuccaagcucccag

SEQ ID NO: 2720326 - RNA, 18 nt, Human
agcuccaagaauuucuag

SEQ ID NO: 2720327 - RNA, 15 nt, Human
agcuccaagcuccca

SEQ ID NO: 2720328 - RNA, 17 nt, Human
agcucaggugucccugc

SEQ ID NO: 2720329 - RNA, 15 nt, Human
agcuccaagaauuuc

SEQ ID NO: 2720330 - RNA, 19 nt, Human
agcuauucaguaauaacuc

SEQ ID NO: 2720331 - RNA, 12 nt, Human
agcucagggccu

SEQ ID NO: 2720332 - RNA, 13 nt, Human
agcucagggccug

SEQ ID NO: 2720333 - RNA, 14 nt, Human
agcucagggccugg

SEQ ID NO: 2720334 - RNA, 19 nt, Human
agcucagggccuggcucag

SEQ ID NO: 2720335 - RNA, 20 nt, Human
agcucagggccuggcucagg

SEQ ID NO: 2720336 - RNA, 18 nt, Human
agcucagggccuggcuca

SEQ ID NO: 2720337 - RNA, 21 nt, Human
agcuaggccuggccagaugca

SEQ ID NO: 2720338 - RNA, 16 nt, Human
ugccccauucaacauc

SEQ ID NO: 2720339 - RNA, 23 nt, Human
ugccccgaacauguuuuucuucu

SEQ ID NO: 2720340 - RNA, 20 nt, Human
ugcccuaaaguguauuuuuu

SEQ ID NO: 2720341 - RNA, 17 nt, Human
ugcccaaagaugcagcc

SEQ ID NO: 2720342 - RNA, 20 nt, Human
ugcccaaagaugcagccggu

SEQ ID NO: 2720343 - RNA, 13 nt, Human
ugcccagccccuu

SEQ ID NO: 2720344 - RNA, 12 nt, Human
ugcccagccccu

SEQ ID NO: 2720345 - RNA, 16 nt, Human
ugcccagccccuucug

SEQ ID NO: 2720346 - RNA, 17 nt, Human
ugcccagccccuucuga

SEQ ID NO: 2720347 - RNA, 14 nt, Human
ugcccaggccccug

SEQ ID NO: 2720348 - RNA, 15 nt, Human
ugcccaggccccugc

SEQ ID NO: 2720349 - RNA, 17 nt, Human
ugcccaggccccugcca

SEQ ID NO: 2720350 - RNA, 18 nt, Human
ugcccaggccccugccac

SEQ ID NO: 2720351 - RNA, 18 nt, Human
agccuuccagggguggga

SEQ ID NO: 2720352 - RNA, 15 nt, Human
agccuugaacuuuga

SEQ ID NO: 2720353 - RNA, 23 nt, Human
agccuugaccauucuccaccugc

SEQ ID NO: 2720354 - RNA, 22 nt, Human
agcgauucuucugcuucagccu

SEQ ID NO: 2720355 - RNA, 22 nt, Human
agccuugaacuuugaccucugc

SEQ ID NO: 2720356 - RNA, 16 nt, Human
agccuugaacuuugac

SEQ ID NO: 2720357 - RNA, 22 nt, Human
agccuugaccauucuccaccug

SEQ ID NO: 2720358 - RNA, 18 nt, Human
ugcauuugaggucuguuc

SEQ ID NO: 2720359 - RNA, 19 nt, Human
ugcauuugaggucuguucu

SEQ ID NO: 2720360 - RNA, 20 nt, Human
ugcauuuaaaagauacaguu

SEQ ID NO: 2720361 - RNA, 21 nt, Human
ugcauuugaggucuguucuuu

SEQ ID NO: 2720362 - RNA, 20 nt, Human
ugcauuugaggucuguucuu

SEQ ID NO: 2720363 - RNA, 13 nt, Human
agcggcuggcagc

SEQ ID NO: 2720364 - RNA, 18 nt, Human
ugccagcuuaucucaggg

SEQ ID NO: 2720365 - RNA, 22 nt, Human
agcggggacagcuccuucuguc

SEQ ID NO: 2720366 - RNA, 23 nt, Human
agcggcuggcagcccaccccuca

SEQ ID NO: 2720367 - RNA, 19 nt, Human
agcggggacagcuccuucu

SEQ ID NO: 2720368 - RNA, 20 nt, Human
agcggggacagcuccuucug

SEQ ID NO: 2720369 - RNA, 16 nt, Human
agcccuuagcagggaa

SEQ ID NO: 2720370 - RNA, 16 nt, Human
ugcagacucuacagag

SEQ ID NO: 2720371 - RNA, 17 nt, Human
ugcagacucuacagagg

SEQ ID NO: 2720372 - RNA, 21 nt, Human
agcccuuagcagggaaacagc

SEQ ID NO: 2720373 - RNA, 17 nt, Human
agccgagaucacgccac

SEQ ID NO: 2720374 - RNA, 21 nt, Human
agccgagauagccaaggccaa

SEQ ID NO: 2720375 - RNA, 20 nt, Human
agccgagauagccaaggcca

SEQ ID NO: 2720376 - RNA, 22 nt, Human
ugcagacaggcaagcaccuccu

SEQ ID NO: 2720377 - RNA, 19 nt, Human
ugcacuccccugcugggug

SEQ ID NO: 2720378 - RNA, 16 nt, Human
ugcacuccccugcugg

SEQ ID NO: 2720379 - RNA, 17 nt, Human
ugcacuccccugcuggg

SEQ ID NO: 2720380 - RNA, 15 nt, Human
ugcacacauuuuuua

SEQ ID NO: 2720381 - RNA, 13 nt, Human
ugcacacauuuuu

SEQ ID NO: 2720382 - RNA, 12 nt, Human
ugcacacauuuu

SEQ ID NO: 2720383 - RNA, 11 nt, Human
ugcacacauuu

SEQ ID NO: 2720384 - RNA, 18 nt, Human
agccucacaguccuuacc

SEQ ID NO: 2720385 - RNA, 17 nt, Human
agccucacaguccuuac

SEQ ID NO: 2720386 - RNA, 20 nt, Human
agccucaaccuccugggcua

SEQ ID NO: 2720387 - RNA, 19 nt, Human
agccucaaccuccugggcu

SEQ ID NO: 2720388 - RNA, 18 nt, Human
agccgagaucacgccacu

SEQ ID NO: 2720389 - RNA, 22 nt, Human
ugcagccucaaccuccugggcu

SEQ ID NO: 2720390 - RNA, 20 nt, Human
ugcagccucaaccuccuggg

SEQ ID NO: 2720391 - RNA, 21 nt, Human
ugcagccucaaccuccugggc

SEQ ID NO: 2720392 - RNA, 23 nt, Human
agccucugaaaaccaauguucuc

SEQ ID NO: 2720393 - RNA, 14 nt, Human
agcccugguggcag

SEQ ID NO: 2720394 - RNA, 15 nt, Human
agcccugguggcagu

SEQ ID NO: 2720395 - RNA, 16 nt, Human
agcccugguggcagug

SEQ ID NO: 2720396 - RNA, 21 nt, Human
ugcacacaccagagcccaccu

SEQ ID NO: 2720397 - RNA, 17 nt, Human
ugcacacaccagagccc

SEQ ID NO: 2720398 - RNA, 18 nt, Human
ugcacacaccagagccca

SEQ ID NO: 2720399 - RNA, 21 nt, Human
agcccaggccuccuacagcuu

SEQ ID NO: 2720400 - RNA, 16 nt, Human
agccccaaaacucucc

SEQ ID NO: 2720401 - RNA, 17 nt, Human
agccccaaaacucuccu

SEQ ID NO: 2720402 - RNA, 20 nt, Human
agccccauucugccugccca

SEQ ID NO: 2720403 - RNA, 18 nt, Human
agccccaaaacucuccuc

SEQ ID NO: 2720404 - RNA, 21 nt, Human
agccccauucugccugcccag

SEQ ID NO: 2720405 - RNA, 22 nt, Human
agccccauucugccugcccagg

SEQ ID NO: 2720406 - RNA, 21 nt, Human
ugcaaaccaucauugaaaucu

SEQ ID NO: 2720407 - RNA, 18 nt, Human
ugauuuccguuaaaauac

SEQ ID NO: 2720408 - RNA, 22 nt, Human
ugauuuccguuaaaauaccagc

SEQ ID NO: 2720409 - RNA, 16 nt, Human
ugauuucuaugcugag

SEQ ID NO: 2720410 - RNA, 15 nt, Human
ugauuucuaugcuga

SEQ ID NO: 2720411 - RNA, 12 nt, Human
ugauuucuaugc

SEQ ID NO: 2720412 - RNA, 17 nt, Human
ugauuuggggauauuuu

SEQ ID NO: 2720413 - RNA, 22 nt, Human
ugauucccaagcucugcuccuc

SEQ ID NO: 2720414 - RNA, 23 nt, Human
ugauucccaagcucugcuccucu

SEQ ID NO: 2720415 - RNA, 13 nt, Human
ugauucuccugcc

SEQ ID NO: 2720416 - RNA, 21 nt, Human
ugauucauaaugacuuaagca

SEQ ID NO: 2720417 - RNA, 15 nt, Human
ugauucauaaugacu

SEQ ID NO: 2720418 - RNA, 16 nt, Human
ugauucauaaugacuu

SEQ ID NO: 2720419 - RNA, 14 nt, Human
agcccaggaaaggc

SEQ ID NO: 2720420 - RNA, 13 nt, Human
agcccacuucugc

SEQ ID NO: 2720421 - RNA, 14 nt, Human
agcccacuucugcc

SEQ ID NO: 2720422 - RNA, 15 nt, Human
agcccacuucugcca

SEQ ID NO: 2720423 - RNA, 13 nt, Human
agccaguaaaugg

SEQ ID NO: 2720424 - RNA, 21 nt, Human
agccaguaaaugggggugcau

SEQ ID NO: 2720425 - RNA, 19 nt, Human
ugaugggaaagcauuguaa

SEQ ID NO: 2720426 - RNA, 14 nt, Human
ugauggggcccugc

SEQ ID NO: 2720427 - RNA, 15 nt, Human
ugauggggcccugcc

SEQ ID NO: 2720428 - RNA, 16 nt, Human
ugauggggcccugccu

SEQ ID NO: 2720429 - RNA, 19 nt, Human
ugauggggcccugccuccu

SEQ ID NO: 2720430 - RNA, 14 nt, Human
ugaugggaaagcau

SEQ ID NO: 2720431 - RNA, 23 nt, Human
ugaugcuucuucagagacuccug

SEQ ID NO: 2720432 - RNA, 13 nt, Human
ugaugagaggaaa

SEQ ID NO: 2720433 - RNA, 14 nt, Human
ugaugagaggaaau

SEQ ID NO: 2720434 - RNA, 15 nt, Human
ugaugagaggaaauc

SEQ ID NO: 2720435 - RNA, 16 nt, Human
ugaugagaggaaauca

SEQ ID NO: 2720436 - RNA, 11 nt, Human
ugaugaagaag

SEQ ID NO: 2720437 - RNA, 12 nt, Human
ugaugaagaagu

SEQ ID NO: 2720438 - RNA, 22 nt, Human
ugauccucccaccucagccucc

SEQ ID NO: 2720439 - RNA, 16 nt, Human
ugauccucccaccuca

SEQ ID NO: 2720440 - RNA, 21 nt, Human
ugauccucccaccucagccuc

SEQ ID NO: 2720441 - RNA, 15 nt, Human
ugauccucccaccuc

SEQ ID NO: 2720442 - RNA, 16 nt, Human
ugauccuaguuccacc

SEQ ID NO: 2720443 - RNA, 23 nt, Human
ugauuaaguaaugauaacuggaa

SEQ ID NO: 2720444 - RNA, 16 nt, Human
agccacugcaccgggc

SEQ ID NO: 2720445 - RNA, 18 nt, Human
ugauuaaguaaugauaac

SEQ ID NO: 2720446 - RNA, 19 nt, Human
ugauuaaccacuucagcug

SEQ ID NO: 2720447 - RNA, 20 nt, Human
ugauuaaauucuugcaaagu

SEQ ID NO: 2720448 - RNA, 13 nt, Human
ugauggugcaaug

SEQ ID NO: 2720449 - RNA, 19 nt, Human
ugauuaaauucuugcaaag

SEQ ID NO: 2720450 - RNA, 15 nt, Human
ugauggugcaaugac

SEQ ID NO: 2720451 - RNA, 15 nt, Human
agccagcaguucaga

SEQ ID NO: 2720452 - RNA, 17 nt, Human
agccagcaguucagagc

SEQ ID NO: 2720453 - RNA, 19 nt, Human
agccagcaguucagagcug

SEQ ID NO: 2720454 - RNA, 10 nt, Human
agccagagga

SEQ ID NO: 2720455 - RNA, 11 nt, Human
agccagaggag

SEQ ID NO: 2720456 - RNA, 18 nt, Human
agccacugcaccgggcca

SEQ ID NO: 2720457 - RNA, 19 nt, Human
agccacugcaccgggccac

SEQ ID NO: 2720458 - RNA, 22 nt, Human
agccagcaguucagagcugccc

SEQ ID NO: 2720459 - RNA, 20 nt, Human
agccagcaguucagagcugc

SEQ ID NO: 2720460 - RNA, 21 nt, Human
agccagcaguucagagcugcc

SEQ ID NO: 2720461 - RNA, 18 nt, Human
uggaauuggagcucgugg

SEQ ID NO: 2720462 - RNA, 22 nt, Human
uggaauuucucccagucauuua

SEQ ID NO: 2720463 - RNA, 17 nt, Human
aggcaacucaucuuagg

SEQ ID NO: 2720464 - RNA, 19 nt, Human
aggauuuugauccaagcug

SEQ ID NO: 2720465 - RNA, 19 nt, Human
aggaugcccaaagaugcag

SEQ ID NO: 2720466 - RNA, 20 nt, Human
aggaugaucuaggaagacuu

SEQ ID NO: 2720467 - RNA, 14 nt, Human
aggaugcccaaaga

SEQ ID NO: 2720468 - RNA, 18 nt, Human
uggacacagcucuucucc

SEQ ID NO: 2720469 - RNA, 15 nt, Human
uggacacagcucuuc

SEQ ID NO: 2720470 - RNA, 16 nt, Human
uggacacagcucuucu

SEQ ID NO: 2720471 - RNA, 14 nt, Human
uggacccugaggcc

SEQ ID NO: 2720472 - RNA, 12 nt, Human
uggacccugagg

SEQ ID NO: 2720473 - RNA, 13 nt, Human
uggacccugaggc

SEQ ID NO: 2720474 - RNA, 21 nt, Human
aggaucucuugagccugggag

SEQ ID NO: 2720475 - RNA, 22 nt, Human
aggaucucuugagccugggagg

SEQ ID NO: 2720476 - RNA, 17 nt, Human
aggauccugagccagau

SEQ ID NO: 2720477 - RNA, 18 nt, Human
aggauccugagccagauu

SEQ ID NO: 2720478 - RNA, 16 nt, Human
aggaugaucuaggaag

SEQ ID NO: 2720479 - RNA, 17 nt, Human
aggaugaucuaggaaga

SEQ ID NO: 2720480 - RNA, 21 nt, Human
aggauacaaaagcaugugaga

SEQ ID NO: 2720481 - RNA, 15 nt, Human
aggauccugagccag

SEQ ID NO: 2720482 - RNA, 16 nt, Human
aggauccugagccaga

SEQ ID NO: 2720483 - RNA, 23 nt, Human
uggaaaugggcagagcagagacc

SEQ ID NO: 2720484 - RNA, 20 nt, Human
uggaaauauuaagaaagacu

SEQ ID NO: 2720485 - RNA, 16 nt, Human
ugcuugccaucccucc

SEQ ID NO: 2720486 - RNA, 15 nt, Human
ugcuugccaucccuc

SEQ ID NO: 2720487 - RNA, 21 nt, Human
ugcuuggaggaaggaaaccca

SEQ ID NO: 2720488 - RNA, 12 nt, Human
ugcuugggcuuc

SEQ ID NO: 2720489 - RNA, 16 nt, Human
ugcuugggcuucaucc

SEQ ID NO: 2720490 - RNA, 15 nt, Human
uggaaauauuaagaa

SEQ ID NO: 2720491 - RNA, 19 nt, Human
ugcuugggcuucauccucc

SEQ ID NO: 2720492 - RNA, 17 nt, Human
aggacuuguuagaucua

SEQ ID NO: 2720493 - RNA, 23 nt, Human
aggacuuuucuuuguggcuuccu

SEQ ID NO: 2720494 - RNA, 17 nt, Human
aggagauuggaaggaac

SEQ ID NO: 2720495 - RNA, 14 nt, Human
aggagcagccacau

SEQ ID NO: 2720496 - RNA, 22 nt, Human
aggagccccgaggccuucucug

SEQ ID NO: 2720497 - RNA, 16 nt, Human
aggacuuguuagaucu

SEQ ID NO: 2720498 - RNA, 14 nt, Human
aggacuuguuagau

SEQ ID NO: 2720499 - RNA, 20 nt, Human
aggacugaauuaugaaacuu

SEQ ID NO: 2720500 - RNA, 19 nt, Human
aggacugaauuaugaaacu

SEQ ID NO: 2720501 - RNA, 19 nt, Human
aggacauugcggacagcca

SEQ ID NO: 2720502 - RNA, 23 nt, Human
aggacauugcggacagccacggc

SEQ ID NO: 2720503 - RNA, 15 nt, Human
aggacauugcggaca

SEQ ID NO: 2720504 - RNA, 17 nt, Human
aggacauugcggacagc

SEQ ID NO: 2720505 - RNA, 18 nt, Human
aggacauugcggacagcc

SEQ ID NO: 2720506 - RNA, 14 nt, Human
aggacacugauaug

SEQ ID NO: 2720507 - RNA, 23 nt, Human
aggacacuaaccacgcuggaccu

SEQ ID NO: 2720508 - RNA, 19 nt, Human
aggacacuaaccacgcugg

SEQ ID NO: 2720509 - RNA, 23 nt, Human
aggacagcccuucuuuccacaga

SEQ ID NO: 2720510 - RNA, 22 nt, Human
aggacagggaggugaccccagg

SEQ ID NO: 2720511 - RNA, 13 nt, Human
ugcuuauacacuu

SEQ ID NO: 2720512 - RNA, 12 nt, Human
ugcuucaaggau

SEQ ID NO: 2720513 - RNA, 13 nt, Human
ugcuucagccucc

SEQ ID NO: 2720514 - RNA, 14 nt, Human
ugcuucagccuccc

SEQ ID NO: 2720515 - RNA, 16 nt, Human
ugcuucaaggauccug

SEQ ID NO: 2720516 - RNA, 18 nt, Human
ugcuucaaggauccugag

SEQ ID NO: 2720517 - RNA, 19 nt, Human
ugcuucaaggauccugagc

SEQ ID NO: 2720518 - RNA, 15 nt, Human
ugcugcccugugagu

SEQ ID NO: 2720519 - RNA, 12 nt, Human
ugcugcccugug

SEQ ID NO: 2720520 - RNA, 13 nt, Human
ugcugcccuguga

SEQ ID NO: 2720521 - RNA, 14 nt, Human
ugcugcccugugag

SEQ ID NO: 2720522 - RNA, 18 nt, Human
ugcuggcuguuggcuggg

SEQ ID NO: 2720523 - RNA, 16 nt, Human
ugcuggcugguuagag

SEQ ID NO: 2720524 - RNA, 23 nt, Human
ugcuguauuuuaaaagaaugauu

SEQ ID NO: 2720525 - RNA, 11 nt, Human
aggaauuuaaa

SEQ ID NO: 2720526 - RNA, 18 nt, Human
aggaaggaaacccagcuc

SEQ ID NO: 2720527 - RNA, 17 nt, Human
aggaagccagcaggcuc

SEQ ID NO: 2720528 - RNA, 13 nt, Human
aggaagccagcag

SEQ ID NO: 2720529 - RNA, 15 nt, Human
aggaaggagaggaga

SEQ ID NO: 2720530 - RNA, 19 nt, Human
aggaaggaaacccagcucu

SEQ ID NO: 2720531 - RNA, 22 nt, Human
aggaagcacaugccucucucag

SEQ ID NO: 2720532 - RNA, 14 nt, Human
aggaagccagcagg

SEQ ID NO: 2720533 - RNA, 15 nt, Human
aggaagccagcaggc

SEQ ID NO: 2720534 - RNA, 13 nt, Human
aggaagacuuugg

SEQ ID NO: 2720535 - RNA, 14 nt, Human
aggaagacuuugga

SEQ ID NO: 2720536 - RNA, 23 nt, Human
aggaagcacaugccucucucagg

SEQ ID NO: 2720537 - RNA, 24 nt, Human
aggaagcacaugccucucucaggc

SEQ ID NO: 2720538 - RNA, 16 nt, Human
ugcugagucugaaggc

SEQ ID NO: 2720539 - RNA, 17 nt, Human
ugcugagucugaaggcu

SEQ ID NO: 2720540 - RNA, 18 nt, Human
ugcugagucugaaggcug

SEQ ID NO: 2720541 - RNA, 21 nt, Human
ugcugagucugaaggcugggu

SEQ ID NO: 2720542 - RNA, 22 nt, Human
ugcugagucugaaggcuggguu

SEQ ID NO: 2720543 - RNA, 23 nt, Human
ugcugagucugaaggcuggguuc

SEQ ID NO: 2720544 - RNA, 13 nt, Human
aggaagacuucau

SEQ ID NO: 2720545 - RNA, 19 nt, Human
aggaagacuucaucccucu

SEQ ID NO: 2720546 - RNA, 13 nt, Human
ugcuauuucuaua

SEQ ID NO: 2720547 - RNA, 12 nt, Human
ugcuauuucuau

SEQ ID NO: 2720548 - RNA, 20 nt, Human
ugcuauuucuauauuuucau

SEQ ID NO: 2720549 - RNA, 14 nt, Human
ugcuauuucuauau

SEQ ID NO: 2720550 - RNA, 19 nt, Human
agcugggacuacaggcacc

SEQ ID NO: 2720551 - RNA, 16 nt, Human
agcugggacuacaggc

SEQ ID NO: 2720552 - RNA, 18 nt, Human
agcugggacuacaggcac

SEQ ID NO: 2720553 - RNA, 16 nt, Human
ugcuccagcuguucag

SEQ ID NO: 2720554 - RNA, 19 nt, Human
ugcuccagcuguucagcug

SEQ ID NO: 2720555 - RNA, 21 nt, Human
ugcucugcugacagacacagg

SEQ ID NO: 2720556 - RNA, 22 nt, Human
ugcucugcugacagacacaggc

SEQ ID NO: 2720557 - RNA, 16 nt, Human
ugcucugcugacagac

SEQ ID NO: 2720558 - RNA, 15 nt, Human
ugcugagucugaagg

SEQ ID NO: 2720559 - RNA, 14 nt, Human
ugcugagucugaag

SEQ ID NO: 2720560 - RNA, 21 nt, Human
ugggaaagcauuguaaaugug

SEQ ID NO: 2720561 - RNA, 16 nt, Human
ugggaaaggggaaguu

SEQ ID NO: 2720562 - RNA, 23 nt, Human
uggcuucacggaagagccuugcg

SEQ ID NO: 2720563 - RNA, 22 nt, Human
uggcuucacggaagagccuugc

SEQ ID NO: 2720564 - RNA, 13 nt, Human
uggcuguuggcug

SEQ ID NO: 2720565 - RNA, 14 nt, Human
uggcugugucuccc

SEQ ID NO: 2720566 - RNA, 15 nt, Human
uggcuguuggcuggg

SEQ ID NO: 2720567 - RNA, 17 nt, Human
uggcuuaaaacaacacu

SEQ ID NO: 2720568 - RNA, 12 nt, Human
uggcugcaaagg

SEQ ID NO: 2720569 - RNA, 18 nt, Human
uggcucaaguccucuuuu

SEQ ID NO: 2720570 - RNA, 19 nt, Human
uggcucuuccaggcuggga

SEQ ID NO: 2720571 - RNA, 20 nt, Human
uggcucuuccaggcugggag

SEQ ID NO: 2720572 - RNA, 21 nt, Human
uggcucuuccaggcugggaga

SEQ ID NO: 2720573 - RNA, 15 nt, Human
uggcugcagggaguc

SEQ ID NO: 2720574 - RNA, 13 nt, Human
uggcugcagggag

SEQ ID NO: 2720575 - RNA, 14 nt, Human
uggcugcagggagu

SEQ ID NO: 2720576 - RNA, 18 nt, Human
uggcugccaaugggagcu

SEQ ID NO: 2720577 - RNA, 20 nt, Human
uggcugccaaugggagcuca

SEQ ID NO: 2720578 - RNA, 14 nt, Human
uggcuaugcauuug

SEQ ID NO: 2720579 - RNA, 17 nt, Human
uggcuaugcauuugaaa

SEQ ID NO: 2720580 - RNA, 15 nt, Human
uggcuaugcauuuga

SEQ ID NO: 2720581 - RNA, 19 nt, Human
uggcuaugcauuugaaaau

SEQ ID NO: 2720582 - RNA, 22 nt, Human
uggcuauuagagaucaaccccu

SEQ ID NO: 2720583 - RNA, 22 nt, Human
uggcuagagguucaaagauauu

SEQ ID NO: 2720584 - RNA, 14 nt, Human
aggcugggagagcc

SEQ ID NO: 2720585 - RNA, 18 nt, Human
aggcuggcgugcaguggu

SEQ ID NO: 2720586 - RNA, 20 nt, Human
aggcuggcgugcaguggugc

SEQ ID NO: 2720587 - RNA, 13 nt, Human
aggcuggcgugca

SEQ ID NO: 2720588 - RNA, 17 nt, Human
aggcuggcgugcagugg

SEQ ID NO: 2720589 - RNA, 16 nt, Human
aggcucugcccuuggu

SEQ ID NO: 2720590 - RNA, 21 nt, Human
aggcucucaggccagcugcuu

SEQ ID NO: 2720591 - RNA, 12 nt, Human
aggcucugcccu

SEQ ID NO: 2720592 - RNA, 11 nt, Human
aggcucugccc

SEQ ID NO: 2720593 - RNA, 13 nt, Human
aggcucugcccuu

SEQ ID NO: 2720594 - RNA, 14 nt, Human
aggcucugcccuug

SEQ ID NO: 2720595 - RNA, 15 nt, Human
aggcucugcccuugg

SEQ ID NO: 2720596 - RNA, 11 nt, Human
aggcucucagg

SEQ ID NO: 2720597 - RNA, 12 nt, Human
aggcucucaggc

SEQ ID NO: 2720598 - RNA, 14 nt, Human
aggcucucaggcca

SEQ ID NO: 2720599 - RNA, 15 nt, Human
aggcucucaggccag

SEQ ID NO: 2720600 - RNA, 16 nt, Human
aggcucucaggccagc

SEQ ID NO: 2720601 - RNA, 18 nt, Human
aggcucucaggccagcug

SEQ ID NO: 2720602 - RNA, 19 nt, Human
aggcucucaggccagcugc

SEQ ID NO: 2720603 - RNA, 20 nt, Human
aggcucucaggccagcugcu

SEQ ID NO: 2720604 - RNA, 21 nt, Human
aggcucgagcaugccuggaug

SEQ ID NO: 2720605 - RNA, 15 nt, Human
aggcucgagcaugcc

SEQ ID NO: 2720606 - RNA, 17 nt, Human
aggcucgagcaugccug

SEQ ID NO: 2720607 - RNA, 18 nt, Human
aggcucgagcaugccugg

SEQ ID NO: 2720608 - RNA, 19 nt, Human
aggcucgagcaugccugga

SEQ ID NO: 2720609 - RNA, 19 nt, Human
aggcuccuuuagcgcccag

SEQ ID NO: 2720610 - RNA, 12 nt, Human
aggcucgagcau

SEQ ID NO: 2720611 - RNA, 18 nt, Human
uggacgagaaaacaauaa

SEQ ID NO: 2720612 - RNA, 18 nt, Human
aggcauuuguuugaacug

SEQ ID NO: 2720613 - RNA, 16 nt, Human
aggccaaacucaccug

SEQ ID NO: 2720614 - RNA, 18 nt, Human
aggccaaggugggaggau

SEQ ID NO: 2720615 - RNA, 20 nt, Human
aggccaaaggaagcacaugc

SEQ ID NO: 2720616 - RNA, 23 nt, Human
aggccaaaggaagcacaugccuc

SEQ ID NO: 2720617 - RNA, 20 nt, Human
aggccaaacucaccugcccc

SEQ ID NO: 2720618 - RNA, 14 nt, Human
aggccaaaggaagc

SEQ ID NO: 2720619 - RNA, 15 nt, Human
aggccacaagacccu

SEQ ID NO: 2720620 - RNA, 15 nt, Human
uggaugccugguggc

SEQ ID NO: 2720621 - RNA, 20 nt, Human
uggaguucaucuugaauugu

SEQ ID NO: 2720622 - RNA, 16 nt, Human
uggaguucaucuugaa

SEQ ID NO: 2720623 - RNA, 17 nt, Human
uggaguucaucuugaau

SEQ ID NO: 2720624 - RNA, 20 nt, Human
uggaugccugguggcagcug

SEQ ID NO: 2720625 - RNA, 18 nt, Human
uggaugccugguggcagc

SEQ ID NO: 2720626 - RNA, 19 nt, Human
uggaugccugguggcagcu

SEQ ID NO: 2720627 - RNA, 20 nt, Human
uggcacaguuuucugagaaa

SEQ ID NO: 2720628 - RNA, 22 nt, Human
uggauuaaacuuaaucuaaaug

SEQ ID NO: 2720629 - RNA, 12 nt, Human
uggauguucuga

SEQ ID NO: 2720630 - RNA, 22 nt, Human
uggcacaguuuucugagaaaga

SEQ ID NO: 2720631 - RNA, 18 nt, Human
uggcaccagcagccugga

SEQ ID NO: 2720632 - RNA, 20 nt, Human
uggcacaucagcacgauuuc

SEQ ID NO: 2720633 - RNA, 22 nt, Human
uggcagaguugaagacagagcu

SEQ ID NO: 2720634 - RNA, 15 nt, Human
uggcacccggccccu

SEQ ID NO: 2720635 - RNA, 16 nt, Human
uggcacccggccccug

SEQ ID NO: 2720636 - RNA, 21 nt, Human
uggcagaguugaagacagagc

SEQ ID NO: 2720637 - RNA, 12 nt, Human
uggcagccccug

SEQ ID NO: 2720638 - RNA, 20 nt, Human
aggccacaagacccuugugg

SEQ ID NO: 2720639 - RNA, 12 nt, Human
aggccagagaca

SEQ ID NO: 2720640 - RNA, 21 nt, Human
uggccccugcccggcugcgga

SEQ ID NO: 2720641 - RNA, 22 nt, Human
aggccuggccagaugcaccagc

SEQ ID NO: 2720642 - RNA, 23 nt, Human
aggccuggccagaugcaccagcc

SEQ ID NO: 2720643 - RNA, 23 nt, Human
aggccugggggcugggcagagga

SEQ ID NO: 2720644 - RNA, 15 nt, Human
aggccuggccagaug

SEQ ID NO: 2720645 - RNA, 16 nt, Human
aggccuggccagaugc

SEQ ID NO: 2720646 - RNA, 17 nt, Human
aggccuggccagaugca

SEQ ID NO: 2720647 - RNA, 21 nt, Human
aggccuggccagaugcaccag

SEQ ID NO: 2720648 - RNA, 14 nt, Human
uggccucugcacuc

SEQ ID NO: 2720649 - RNA, 15 nt, Human
uggccucugcacucc

SEQ ID NO: 2720650 - RNA, 17 nt, Human
uggccucugcacucccc

SEQ ID NO: 2720651 - RNA, 13 nt, Human
uggccucugcacu

SEQ ID NO: 2720652 - RNA, 15 nt, Human
uggccaggcuggucu

SEQ ID NO: 2720653 - RNA, 17 nt, Human
uggccaggcuggucuca

SEQ ID NO: 2720654 - RNA, 12 nt, Human
uggcaugggaau

SEQ ID NO: 2720655 - RNA, 15 nt, Human
uggcaugggaaugaa

SEQ ID NO: 2720656 - RNA, 15 nt, Human
aggcccucugcccac

SEQ ID NO: 2720657 - RNA, 13 nt, Human
aggcccucugccc

SEQ ID NO: 2720658 - RNA, 14 nt, Human
aggcccucugccca

SEQ ID NO: 2720659 - RNA, 14 nt, Human
auccugagccagau

SEQ ID NO: 2720660 - RNA, 15 nt, Human
auccugagccagauu

SEQ ID NO: 2720661 - RNA, 17 nt, Human
auccugagccagauuuc

SEQ ID NO: 2720662 - RNA, 21 nt, Human
auccugagccagauuucacuc

SEQ ID NO: 2720663 - RNA, 11 nt, Human
auccugagcca

SEQ ID NO: 2720664 - RNA, 12 nt, Human
auccugagccag

SEQ ID NO: 2720665 - RNA, 13 nt, Human
auccugagccaga

SEQ ID NO: 2720666 - RNA, 17 nt, Human
auccucuuugagugaag

SEQ ID NO: 2720667 - RNA, 20 nt, Human
uucuuuugccguuauuaaaa

SEQ ID NO: 2720668 - RNA, 18 nt, Human
auccucuguacagagccc

SEQ ID NO: 2720669 - RNA, 20 nt, Human
auccucuguacagagcccac

SEQ ID NO: 2720670 - RNA, 22 nt, Human
auccuggcacccggccccugcu

SEQ ID NO: 2720671 - RNA, 23 nt, Human
auccuggcacccggccccugcug

SEQ ID NO: 2720672 - RNA, 15 nt, Human
auccuggaguucugg

SEQ ID NO: 2720673 - RNA, 17 nt, Human
auccuggcacccggccc

SEQ ID NO: 2720674 - RNA, 19 nt, Human
auccuggcacccggccccu

SEQ ID NO: 2720675 - RNA, 20 nt, Human
auccuggcacccggccccug

SEQ ID NO: 2720676 - RNA, 21 nt, Human
auccuggcacccggccccugc

SEQ ID NO: 2720677 - RNA, 14 nt, Human
aucgugacaacacu

SEQ ID NO: 2720678 - RNA, 15 nt, Human
aucgugacaacacuu

SEQ ID NO: 2720679 - RNA, 18 nt, Human
aucgucacugcuuaacuu

SEQ ID NO: 2720680 - RNA, 14 nt, Human
aucgucacugcuua

SEQ ID NO: 2720681 - RNA, 19 nt, Human
aucuaaauggaaccacucu

SEQ ID NO: 2720682 - RNA, 15 nt, Human
aucuaaauguugaaa

SEQ ID NO: 2720683 - RNA, 17 nt, Human
uugaaggaaaaugauac

SEQ ID NO: 2720684 - RNA, 19 nt, Human
uugacagggcacaccgggc

SEQ ID NO: 2720685 - RNA, 14 nt, Human
uugacauagucugg

SEQ ID NO: 2720686 - RNA, 17 nt, Human
uugacauagucuggcug

SEQ ID NO: 2720687 - RNA, 18 nt, Human
uugaccauucuccaccug

SEQ ID NO: 2720688 - RNA, 19 nt, Human
uugaccauucuccaccugc

SEQ ID NO: 2720689 - RNA, 14 nt, Human
uugagaguucuaaa

SEQ ID NO: 2720690 - RNA, 24 nt, Human
uugaccauucuccaccugccaggg

SEQ ID NO: 2720691 - RNA, 16 nt, Human
uugauaaguucauaca

SEQ ID NO: 2720692 - RNA, 17 nt, Human
uugauaaguucauacau

SEQ ID NO: 2720693 - RNA, 12 nt, Human
uugauaaaguaa

SEQ ID NO: 2720694 - RNA, 16 nt, Human
uugaggucuguucuuu

SEQ ID NO: 2720695 - RNA, 15 nt, Human
uugaggucuguucuu

SEQ ID NO: 2720696 - RNA, 14 nt, Human
aucccucccuccac

SEQ ID NO: 2720697 - RNA, 16 nt, Human
aucccucccuccaccu

SEQ ID NO: 2720698 - RNA, 17 nt, Human
aucccucccuccaccuc

SEQ ID NO: 2720699 - RNA, 18 nt, Human
aucccucccuccaccucc

SEQ ID NO: 2720700 - RNA, 17 nt, Human
aucccaugagccucagc

SEQ ID NO: 2720701 - RNA, 18 nt, Human
aucccaugagccucagca

SEQ ID NO: 2720702 - RNA, 20 nt, Human
aucccucccuccaccucccu

SEQ ID NO: 2720703 - RNA, 21 nt, Human
aucccucccuccaccucccug

SEQ ID NO: 2720704 - RNA, 17 nt, Human
aucccugaaggccccgc

SEQ ID NO: 2720705 - RNA, 22 nt, Human
aucccugaaggccccgcccagg

SEQ ID NO: 2720706 - RNA, 11 nt, Human
aucccagcccc

SEQ ID NO: 2720707 - RNA, 13 nt, Human
aucccaugagccu

SEQ ID NO: 2720708 - RNA, 16 nt, Human
aucccaugagccucag

SEQ ID NO: 2720709 - RNA, 15 nt, Human
uucugccugcccagg

SEQ ID NO: 2720710 - RNA, 16 nt, Human
uucugccugcccaggc

SEQ ID NO: 2720711 - RNA, 17 nt, Human
auccagguucagcuugu

SEQ ID NO: 2720712 - RNA, 15 nt, Human
auccaguaucuugaa

SEQ ID NO: 2720713 - RNA, 14 nt, Human
auccaguaucuuga

SEQ ID NO: 2720714 - RNA, 16 nt, Human
uucuguuuuauaauuu

SEQ ID NO: 2720715 - RNA, 17 nt, Human
uucuguuuuauaauuuu

SEQ ID NO: 2720716 - RNA, 21 nt, Human
uucuguuggccagugugacaa

SEQ ID NO: 2720717 - RNA, 18 nt, Human
uucuguuuagauaauaca

SEQ ID NO: 2720718 - RNA, 13 nt, Human
uucuguuuagaua

SEQ ID NO: 2720719 - RNA, 13 nt, Human
uucuuaaaguuga

SEQ ID NO: 2720720 - RNA, 22 nt, Human
uucuucuccacuuucuagccag

SEQ ID NO: 2720721 - RNA, 12 nt, Human
uucuuucuggcu

SEQ ID NO: 2720722 - RNA, 20 nt, Human
uucuuucuggcuaugcauuu

SEQ ID NO: 2720723 - RNA, 17 nt, Human
uucuuucuggcuaugca

SEQ ID NO: 2720724 - RNA, 15 nt, Human
aucaggugcugccau

SEQ ID NO: 2720725 - RNA, 17 nt, Human
aucaggugcugccaucc

SEQ ID NO: 2720726 - RNA, 19 nt, Human
aucaggugcugccauccag

SEQ ID NO: 2720727 - RNA, 23 nt, Human
aucagugugucuaaauuugaaug

SEQ ID NO: 2720728 - RNA, 14 nt, Human
aucaggugcugcca

SEQ ID NO: 2720729 - RNA, 19 nt, Human
aucagucugauucccaagc

SEQ ID NO: 2720730 - RNA, 23 nt, Human
aucauaguggcuuaaaacaacac

SEQ ID NO: 2720731 - RNA, 15 nt, Human
aucauaaaacuugau

SEQ ID NO: 2720732 - RNA, 16 nt, Human
aucauuaggugugacu

SEQ ID NO: 2720733 - RNA, 21 nt, Human
aucauccacugugccaugugc

SEQ ID NO: 2720734 - RNA, 23 nt, Human
aucauccacugugccaugugcca

SEQ ID NO: 2720735 - RNA, 21 nt, Human
uucucuaguuugauuaaauuc

SEQ ID NO: 2720736 - RNA, 19 nt, Human
uucugcagccacuauuguu

SEQ ID NO: 2720737 - RNA, 13 nt, Human
aucauugaaaucu

SEQ ID NO: 2720738 - RNA, 12 nt, Human
aucauugaaauc

SEQ ID NO: 2720739 - RNA, 14 nt, Human
aucaauuuuucuua

SEQ ID NO: 2720740 - RNA, 15 nt, Human
aucacgccacugcac

SEQ ID NO: 2720741 - RNA, 17 nt, Human
aucacgccacugcacua

SEQ ID NO: 2720742 - RNA, 14 nt, Human
aucacgccacugca

SEQ ID NO: 2720743 - RNA, 21 nt, Human
aucaaggguacacugccuucu

SEQ ID NO: 2720744 - RNA, 18 nt, Human
aucaaauaugcaaagcac

SEQ ID NO: 2720745 - RNA, 17 nt, Human
aucaaauaugcaaagca

SEQ ID NO: 2720746 - RNA, 16 nt, Human
aucaaauaugcaaagc

SEQ ID NO: 2720747 - RNA, 16 nt, Human
aucaaggguacacugc

SEQ ID NO: 2720748 - RNA, 21 nt, Human
aucaacugcaucaagauguga

SEQ ID NO: 2720749 - RNA, 15 nt, Human
aucaaauaugcaaag

SEQ ID NO: 2720750 - RNA, 15 nt, Human
auauuuuuguagcac

SEQ ID NO: 2720751 - RNA, 16 nt, Human
auauuuuuguagcacu

SEQ ID NO: 2720752 - RNA, 23 nt, Human
auauuuuuguagcacugacagau

SEQ ID NO: 2720753 - RNA, 18 nt, Human
auauuuuucacauaucua

SEQ ID NO: 2720754 - RNA, 20 nt, Human
uuccuggcacugcuuccagu

SEQ ID NO: 2720755 - RNA, 22 nt, Human
uuccuggcacugcuuccaguga

SEQ ID NO: 2720756 - RNA, 22 nt, Human
uuccucuuuuuauuuaguuccu

SEQ ID NO: 2720757 - RNA, 12 nt, Human
uuccugaacagg

SEQ ID NO: 2720758 - RNA, 19 nt, Human
uuccuggcacugcuuccag

SEQ ID NO: 2720759 - RNA, 13 nt, Human
auauuuacaaaug

SEQ ID NO: 2720760 - RNA, 12 nt, Human
auauuuaaugau

SEQ ID NO: 2720761 - RNA, 13 nt, Human
auauuuaaugaua

SEQ ID NO: 2720762 - RNA, 23 nt, Human
auauuuaaugauaaguaaaugcu

SEQ ID NO: 2720763 - RNA, 14 nt, Human
auauuguuugcuaa

SEQ ID NO: 2720764 - RNA, 13 nt, Human
auauuguuuucag

SEQ ID NO: 2720765 - RNA, 15 nt, Human
auauugauaugcuua

SEQ ID NO: 2720766 - RNA, 18 nt, Human
auauucucacagcuccaa

SEQ ID NO: 2720767 - RNA, 22 nt, Human
auauugcugauggugcaaugac

SEQ ID NO: 2720768 - RNA, 13 nt, Human
auauguuucaaac

SEQ ID NO: 2720769 - RNA, 14 nt, Human
auauguuucaaacu

SEQ ID NO: 2720770 - RNA, 16 nt, Human
auauguuucaaacuuu

SEQ ID NO: 2720771 - RNA, 17 nt, Human
auauuaccacagacaua

SEQ ID NO: 2720772 - RNA, 12 nt, Human
auauuaaagcca

SEQ ID NO: 2720773 - RNA, 22 nt, Human
auauuaagaaagacuaucuaaa

SEQ ID NO: 2720774 - RNA, 17 nt, Human
auauuaagaaagacuau

SEQ ID NO: 2720775 - RNA, 15 nt, Human
auauuaagaaagacu

SEQ ID NO: 2720776 - RNA, 16 nt, Human
auauuaagaaagacua

SEQ ID NO: 2720777 - RNA, 17 nt, Human
uucccagugaauucuug

SEQ ID NO: 2720778 - RNA, 15 nt, Human
uuccagugaggcucu

SEQ ID NO: 2720779 - RNA, 16 nt, Human
uuccagugaggcucug

SEQ ID NO: 2720780 - RNA, 17 nt, Human
uucagcgguuuauauaa

SEQ ID NO: 2720781 - RNA, 19 nt, Human
uucagcaaaaauauuuuau

SEQ ID NO: 2720782 - RNA, 14 nt, Human
uucaggguuggccc

SEQ ID NO: 2720783 - RNA, 16 nt, Human
uucaggguuggccccu

SEQ ID NO: 2720784 - RNA, 17 nt, Human
uucaggguuggccccug

SEQ ID NO: 2720785 - RNA, 19 nt, Human
uucaggguuggccccugcc

SEQ ID NO: 2720786 - RNA, 22 nt, Human
uucaggguuggccccugcccgg

SEQ ID NO: 2720787 - RNA, 15 nt, Human
uucagguaacaggca

SEQ ID NO: 2720788 - RNA, 16 nt, Human
uucagguaacaggcag

SEQ ID NO: 2720789 - RNA, 16 nt, Human
uucagaaauguguuau

SEQ ID NO: 2720790 - RNA, 16 nt, Human
uucagauaugauucaa

SEQ ID NO: 2720791 - RNA, 18 nt, Human
uucagauaugauucaaau

SEQ ID NO: 2720792 - RNA, 17 nt, Human
uucagauaugauucaaa

SEQ ID NO: 2720793 - RNA, 19 nt, Human
uucagauaugauucaaaug

SEQ ID NO: 2720794 - RNA, 17 nt, Human
uucagcaaaaauauuuu

SEQ ID NO: 2720795 - RNA, 13 nt, Human
auauaugcuaagu

SEQ ID NO: 2720796 - RNA, 16 nt, Human
auauauuuaaugauaa

SEQ ID NO: 2720797 - RNA, 21 nt, Human
auauauguuuuaagaggcagg

SEQ ID NO: 2720798 - RNA, 22 nt, Human
auauauguuuuaagaggcaggg

SEQ ID NO: 2720799 - RNA, 17 nt, Human
uucagguaacaggcaga

SEQ ID NO: 2720800 - RNA, 14 nt, Human
uucaguaagccgug

SEQ ID NO: 2720801 - RNA, 20 nt, Human
auauguggaguucaucuuga

SEQ ID NO: 2720802 - RNA, 21 nt, Human
auauguggaguucaucuugaa

SEQ ID NO: 2720803 - RNA, 22 nt, Human
uucaugcuguucaugaaagauu

SEQ ID NO: 2720804 - RNA, 20 nt, Human
uucaugcuguucaugaaaga

SEQ ID NO: 2720805 - RNA, 20 nt, Human
uucauggaacgcguugaaau

SEQ ID NO: 2720806 - RNA, 19 nt, Human
uucauggaacgcguugaaa

SEQ ID NO: 2720807 - RNA, 22 nt, Human
uucauggaacgcguugaaauug

SEQ ID NO: 2720808 - RNA, 21 nt, Human
uucauggaacgcguugaaauu

SEQ ID NO: 2720809 - RNA, 14 nt, Human
auaugcaaagcacu

SEQ ID NO: 2720810 - RNA, 13 nt, Human
auaugcaaagcac

SEQ ID NO: 2720811 - RNA, 22 nt, Human
auaugagcuuccuucugugaaa

SEQ ID NO: 2720812 - RNA, 21 nt, Human
auaugagcuuccuucugugaa

SEQ ID NO: 2720813 - RNA, 13 nt, Human
auauauuuuuaua

SEQ ID NO: 2720814 - RNA, 14 nt, Human
uucauuaucucaaa

SEQ ID NO: 2720815 - RNA, 22 nt, Human
uucauuauuuuauuaugaaacu

SEQ ID NO: 2720816 - RNA, 22 nt, Human
uuccaauuuacauacucugcuu

SEQ ID NO: 2720817 - RNA, 21 nt, Human
uuccacaagagcccaggccuc

SEQ ID NO: 2720818 - RNA, 17 nt, Human
uuccaggcugggagagc

SEQ ID NO: 2720819 - RNA, 13 nt, Human
uuccaggcuggga

SEQ ID NO: 2720820 - RNA, 15 nt, Human
uuccaggcugggaga

SEQ ID NO: 2720821 - RNA, 18 nt, Human
uuccagguuuaagcuguu

SEQ ID NO: 2720822 - RNA, 17 nt, Human
uuccagguuuaagcugu

SEQ ID NO: 2720823 - RNA, 22 nt, Human
augggacauuugcucauggaau

SEQ ID NO: 2720824 - RNA, 21 nt, Human
augggacauuugcucauggaa

SEQ ID NO: 2720825 - RNA, 21 nt, Human
auggcuauaggugcuacaaaa

SEQ ID NO: 2720826 - RNA, 19 nt, Human
auggcuauaggugcuacaa

SEQ ID NO: 2720827 - RNA, 16 nt, Human
auggcuauaggugcua

SEQ ID NO: 2720828 - RNA, 18 nt, Human
auggccucuucagaucuc

SEQ ID NO: 2720829 - RNA, 17 nt, Human
auggaauuucucccagu

SEQ ID NO: 2720830 - RNA, 19 nt, Human
auggacaugaucuucuuua

SEQ ID NO: 2720831 - RNA, 21 nt, Human
auggacccaauauuuaccaga

SEQ ID NO: 2720832 - RNA, 13 nt, Human
augggagcucaug

SEQ ID NO: 2720833 - RNA, 18 nt, Human
augggcaacccccagccu

SEQ ID NO: 2720834 - RNA, 19 nt, Human
augggcaacccccagccug

SEQ ID NO: 2720835 - RNA, 21 nt, Human
augggcaacccccagccugcu

SEQ ID NO: 2720836 - RNA, 15 nt, Human
augggccuccugugu

SEQ ID NO: 2720837 - RNA, 15 nt, Human
augggcagagcagag

SEQ ID NO: 2720838 - RNA, 13 nt, Human
augggcagagcag

SEQ ID NO: 2720839 - RNA, 14 nt, Human
augggcagagcaga

SEQ ID NO: 2720840 - RNA, 17 nt, Human
augggccuccugugugu

SEQ ID NO: 2720841 - RNA, 12 nt, Human
uuuccugugucu

SEQ ID NO: 2720842 - RNA, 11 nt, Human
uuuccuucagu

SEQ ID NO: 2720843 - RNA, 12 nt, Human
uuuccuucagug

SEQ ID NO: 2720844 - RNA, 15 nt, Human
uuuccuucagugccu

SEQ ID NO: 2720845 - RNA, 23 nt, Human
uuuccuucauucaacccaccugc

SEQ ID NO: 2720846 - RNA, 21 nt, Human
uuuccuucauucaacccaccu

SEQ ID NO: 2720847 - RNA, 22 nt, Human
uuuccuucagugccuuauggaa

SEQ ID NO: 2720848 - RNA, 18 nt, Human
uuuccuucagugccuuau

SEQ ID NO: 2720849 - RNA, 21 nt, Human
uuuccuucagugccuuaugga

SEQ ID NO: 2720850 - RNA, 22 nt, Human
uuucgcaggauucuuccucccu

SEQ ID NO: 2720851 - RNA, 18 nt, Human
uuucgcaggauucuuccu

SEQ ID NO: 2720852 - RNA, 14 nt, Human
uuugaaauauugac

SEQ ID NO: 2720853 - RNA, 23 nt, Human
augggcuggguucuacccaggug

SEQ ID NO: 2720854 - RNA, 14 nt, Human
auggggcccugccu

SEQ ID NO: 2720855 - RNA, 13 nt, Human
auggggcccugcc

SEQ ID NO: 2720856 - RNA, 13 nt, Human
uuucuuuguggcu

SEQ ID NO: 2720857 - RNA, 14 nt, Human
uuucugcaucagcu

SEQ ID NO: 2720858 - RNA, 14 nt, Human
uuucugccgcagcc

SEQ ID NO: 2720859 - RNA, 16 nt, Human
uuucugccgcagcccu

SEQ ID NO: 2720860 - RNA, 14 nt, Human
uuucuaugaaauau

SEQ ID NO: 2720861 - RNA, 20 nt, Human
uuucuaugaaauauuauguu

SEQ ID NO: 2720862 - RNA, 13 nt, Human
uuucuaugaaaua

SEQ ID NO: 2720863 - RNA, 21 nt, Human
uuucuaugcugaguuugugcu

SEQ ID NO: 2720864 - RNA, 21 nt, Human
uuucuaugacacaugcaaggu

SEQ ID NO: 2720865 - RNA, 15 nt, Human
uuucuaugacacaug

SEQ ID NO: 2720866 - RNA, 17 nt, Human
uuucuaggacugaauua

SEQ ID NO: 2720867 - RNA, 21 nt, Human
uuucuaggacugaauuaugaa

SEQ ID NO: 2720868 - RNA, 22 nt, Human
uuucuaggacugaauuaugaaa

SEQ ID NO: 2720869 - RNA, 13 nt, Human
uuucuauauuuuc

SEQ ID NO: 2720870 - RNA, 18 nt, Human
uuucuauauuuucauucu

SEQ ID NO: 2720871 - RNA, 15 nt, Human
uuucuauauuuucau

SEQ ID NO: 2720872 - RNA, 24 nt, Human
uuuaaagcuuauuaaaacucauuu

SEQ ID NO: 2720873 - RNA, 16 nt, Human
uuuaaagcuuccauug

SEQ ID NO: 2720874 - RNA, 17 nt, Human
augcuacacacugcaug

SEQ ID NO: 2720875 - RNA, 18 nt, Human
augcuacacacugcaugu

SEQ ID NO: 2720876 - RNA, 14 nt, Human
uuuaccuuuuuuau

SEQ ID NO: 2720877 - RNA, 20 nt, Human
uuuaccuuuuuuauacauaa

SEQ ID NO: 2720878 - RNA, 19 nt, Human
uuuaccuuuuuuauacaua

SEQ ID NO: 2720879 - RNA, 15 nt, Human
uuuacuaaaauggac

SEQ ID NO: 2720880 - RNA, 17 nt, Human
uuuacuaaaauggacug

SEQ ID NO: 2720881 - RNA, 21 nt, Human
uuuaccuuuuuuauacauaaa

SEQ ID NO: 2720882 - RNA, 18 nt, Human
uuuacuaauagacaauuu

SEQ ID NO: 2720883 - RNA, 17 nt, Human
uuuacuaauagacaauu

SEQ ID NO: 2720884 - RNA, 14 nt, Human
uuuacuaauagaca

SEQ ID NO: 2720885 - RNA, 16 nt, Human
uuuauuacuguaagaa

SEQ ID NO: 2720886 - RNA, 19 nt, Human
uuuauuaaaugcccagccc

SEQ ID NO: 2720887 - RNA, 17 nt, Human
uuuauaugcuucuguuu

SEQ ID NO: 2720888 - RNA, 15 nt, Human
uuuagauaauacacc

SEQ ID NO: 2720889 - RNA, 13 nt, Human
uuuagauaauaca

SEQ ID NO: 2720890 - RNA, 18 nt, Human
uuuagaguugauacuaca

SEQ ID NO: 2720891 - RNA, 23 nt, Human
auggaauuggagcucgugggaca

SEQ ID NO: 2720892 - RNA, 19 nt, Human
uuuccagguuuaagcuguu

SEQ ID NO: 2720893 - RNA, 15 nt, Human
uuucauaugcuguau

SEQ ID NO: 2720894 - RNA, 14 nt, Human
uuucacucuccuug

SEQ ID NO: 2720895 - RNA, 22 nt, Human
uuucagaaaauauuauguguuu

SEQ ID NO: 2720896 - RNA, 24 nt, Human
uuucacucuuauugcccacgcugg

SEQ ID NO: 2720897 - RNA, 15 nt, Human
uuucacucuccuugg

SEQ ID NO: 2720898 - RNA, 14 nt, Human
augcuguauuuuaa

SEQ ID NO: 2720899 - RNA, 23 nt, Human
augcugucuacacuaagagagaa

SEQ ID NO: 2720900 - RNA, 19 nt, Human
augcugugcccuaaagugu

SEQ ID NO: 2720901 - RNA, 19 nt, Human
uuuauuacuguaagaaaau

SEQ ID NO: 2720902 - RNA, 13 nt, Human
uuuauuaugaaac

SEQ ID NO: 2720903 - RNA, 22 nt, Human
augcuggcuguuggcugggggc

SEQ ID NO: 2720904 - RNA, 21 nt, Human
uuuauuaugaaacuuguguaa

SEQ ID NO: 2720905 - RNA, 19 nt, Human
augcuguauauccuuucua

SEQ ID NO: 2720906 - RNA, 16 nt, Human
uuuauuuuaauaaugu

SEQ ID NO: 2720907 - RNA, 15 nt, Human
auggaauaacaugua

SEQ ID NO: 2720908 - RNA, 14 nt, Human
auggaauaacaugu

SEQ ID NO: 2720909 - RNA, 16 nt, Human
auggaacauaaaauac

SEQ ID NO: 2720910 - RNA, 21 nt, Human
auggaaguacuauaauuuacc

SEQ ID NO: 2720911 - RNA, 18 nt, Human
auggaacacucugagacu

SEQ ID NO: 2720912 - RNA, 17 nt, Human
auggaacacucugagac

SEQ ID NO: 2720913 - RNA, 14 nt, Human
augauaacuggaaa

SEQ ID NO: 2720914 - RNA, 18 nt, Human
uugucacacacuuuggcu

SEQ ID NO: 2720915 - RNA, 15 nt, Human
augauaaaacacaaa

SEQ ID NO: 2720916 - RNA, 17 nt, Human
augagccucagcauccu

SEQ ID NO: 2720917 - RNA, 18 nt, Human
augagccucagcauccug

SEQ ID NO: 2720918 - RNA, 15 nt, Human
augagcaucaggcca

SEQ ID NO: 2720919 - RNA, 16 nt, Human
augagcaucaggccag

SEQ ID NO: 2720920 - RNA, 17 nt, Human
augagcaucaggccagg

SEQ ID NO: 2720921 - RNA, 18 nt, Human
augagcaucaggccaggc

SEQ ID NO: 2720922 - RNA, 19 nt, Human
augagcaucaggccaggcc

SEQ ID NO: 2720923 - RNA, 20 nt, Human
augagcaucaggccaggccc

SEQ ID NO: 2720924 - RNA, 21 nt, Human
augagcaucaggccaggcccu

SEQ ID NO: 2720925 - RNA, 22 nt, Human
augagcaucaggccaggcccuc

SEQ ID NO: 2720926 - RNA, 12 nt, Human
augagccucagc

SEQ ID NO: 2720927 - RNA, 15 nt, Human
augagccucagcauc

SEQ ID NO: 2720928 - RNA, 16 nt, Human
augagccucagcaucc

SEQ ID NO: 2720929 - RNA, 16 nt, Human
augagaggaaaucacc

SEQ ID NO: 2720930 - RNA, 14 nt, Human
augagaggaaauca

SEQ ID NO: 2720931 - RNA, 15 nt, Human
augagaggaaaucac

SEQ ID NO: 2720932 - RNA, 12 nt, Human
augagaggaaau

SEQ ID NO: 2720933 - RNA, 13 nt, Human
augagaggaaauc

SEQ ID NO: 2720934 - RNA, 19 nt, Human
augacauaaaaacaacuuu

SEQ ID NO: 2720935 - RNA, 18 nt, Human
uugugaagcaaaauuuuu

SEQ ID NO: 2720936 - RNA, 18 nt, Human
augaucacggcucacugc

SEQ ID NO: 2720937 - RNA, 19 nt, Human
augaucacggcucacugca

SEQ ID NO: 2720938 - RNA, 15 nt, Human
augaucacggcucac

SEQ ID NO: 2720939 - RNA, 23 nt, Human
augaucacggcucacugcagccu

SEQ ID NO: 2720940 - RNA, 16 nt, Human
augauccuaggcauuu

SEQ ID NO: 2720941 - RNA, 14 nt, Human
augaucuucuuuau

SEQ ID NO: 2720942 - RNA, 20 nt, Human
uuuaaaaaagaaacauuugg

SEQ ID NO: 2720943 - RNA, 17 nt, Human
uuuaaaaaaaaaauugg

SEQ ID NO: 2720944 - RNA, 19 nt, Human
augcaccuggaauauauaa

SEQ ID NO: 2720945 - RNA, 18 nt, Human
augaucuucuuuauaauu

SEQ ID NO: 2720946 - RNA, 15 nt, Human
augaucuucuuuaua

SEQ ID NO: 2720947 - RNA, 16 nt, Human
augcaaaccaucauug

SEQ ID NO: 2720948 - RNA, 18 nt, Human
augcaaaccaucauugaa

SEQ ID NO: 2720949 - RNA, 19 nt, Human
augcaaaccaucauugaaa

SEQ ID NO: 2720950 - RNA, 20 nt, Human
augcaaaccaucauugaaau

SEQ ID NO: 2720951 - RNA, 21 nt, Human
augcaaaccaucauugaaauc

SEQ ID NO: 2720952 - RNA, 22 nt, Human
augcaaaccaucauugaaaucu

SEQ ID NO: 2720953 - RNA, 22 nt, Human
augcaaggucauuuuuuuuaag

SEQ ID NO: 2720954 - RNA, 14 nt, Human
augcaccuggaaua

SEQ ID NO: 2720955 - RNA, 16 nt, Human
augcaccuggaauaua

SEQ ID NO: 2720956 - RNA, 16 nt, Human
augcaaggucauuuuu

SEQ ID NO: 2720957 - RNA, 14 nt, Human
augcaaggucauuu

SEQ ID NO: 2720958 - RNA, 18 nt, Human
augaauuacauuuguaua

SEQ ID NO: 2720959 - RNA, 19 nt, Human
augaauuacauuuguauaa

SEQ ID NO: 2720960 - RNA, 17 nt, Human
augaauuacauuuguau

SEQ ID NO: 2720961 - RNA, 20 nt, Human
augaaccacaucuugcucug

SEQ ID NO: 2720962 - RNA, 13 nt, Human
augaaccacaucu

SEQ ID NO: 2720963 - RNA, 17 nt, Human
uugggguacccacugcu

SEQ ID NO: 2720964 - RNA, 19 nt, Human
uuggggaagaacgaagcca

SEQ ID NO: 2720965 - RNA, 22 nt, Human
uugggguacccacugcucuggu

SEQ ID NO: 2720966 - RNA, 19 nt, Human
uugguuaggcauuguggga

SEQ ID NO: 2720967 - RNA, 14 nt, Human
uuguaaggaaugau

SEQ ID NO: 2720968 - RNA, 19 nt, Human
uuguauaaaauaauuuuua

SEQ ID NO: 2720969 - RNA, 13 nt, Human
uuguauaaaauaa

SEQ ID NO: 2720970 - RNA, 23 nt, Human
uuguaguguuggagaagaacuga

SEQ ID NO: 2720971 - RNA, 15 nt, Human
uuguaauuauaucug

SEQ ID NO: 2720972 - RNA, 20 nt, Human
uuguaaggaaugauuaauua

SEQ ID NO: 2720973 - RNA, 22 nt, Human
augaauuacauuuguauaaaau

SEQ ID NO: 2720974 - RNA, 21 nt, Human
augaauuaguuuuauaugcuu

SEQ ID NO: 2720975 - RNA, 23 nt, Human
augaauuaguuuuauaugcuucu

SEQ ID NO: 2720976 - RNA, 20 nt, Human
augacacgaauauugcugau

SEQ ID NO: 2720977 - RNA, 19 nt, Human
augacacgaauauugcuga

SEQ ID NO: 2720978 - RNA, 12 nt, Human
uugcucauggaa

SEQ ID NO: 2720979 - RNA, 11 nt, Human
uugcucaugga

SEQ ID NO: 2720980 - RNA, 19 nt, Human
uugcugaauacagaggcaa

SEQ ID NO: 2720981 - RNA, 20 nt, Human
uugcuaagugaggaugaaaa

SEQ ID NO: 2720982 - RNA, 17 nt, Human
uuggaaagaguaggaag

SEQ ID NO: 2720983 - RNA, 17 nt, Human
uugcugauggugcaaug

SEQ ID NO: 2720984 - RNA, 18 nt, Human
uugcugauggugcaauga

SEQ ID NO: 2720985 - RNA, 21 nt, Human
augaaauauuauguuaaaacu

SEQ ID NO: 2720986 - RNA, 20 nt, Human
augaaauauuauguuaaaac

SEQ ID NO: 2720987 - RNA, 14 nt, Human
augaaaugagguca

SEQ ID NO: 2720988 - RNA, 20 nt, Human
augaaagacuguacaaagua

SEQ ID NO: 2720989 - RNA, 18 nt, Human
uuggaaagaguaggaaga

SEQ ID NO: 2720990 - RNA, 21 nt, Human
uuggcuagagguucaaagaua

SEQ ID NO: 2720991 - RNA, 22 nt, Human
uuggcuaggaccccuccaugug

SEQ ID NO: 2720992 - RNA, 22 nt, Human
uuggcuagagguucaaagauau

SEQ ID NO: 2720993 - RNA, 13 nt, Human
uuggcugcaggga

SEQ ID NO: 2720994 - RNA, 14 nt, Human
uuggcugcagggag

SEQ ID NO: 2720995 - RNA, 11 nt, Human
uuggcugcuga

SEQ ID NO: 2720996 - RNA, 15 nt, Human
uuggcugcugaaggc

SEQ ID NO: 2720997 - RNA, 13 nt, Human
auuuagauguaua

SEQ ID NO: 2720998 - RNA, 18 nt, Human
auuuaguauuuuguuuca

SEQ ID NO: 2720999 - RNA, 22 nt, Human
auuuauuaaaugcccagccccu

SEQ ID NO: 2721000 - RNA, 15 nt, Human
auuuagaaauauaau

SEQ ID NO: 2721001 - RNA, 17 nt, Human
auuuacuucuuauacau

SEQ ID NO: 2721002 - RNA, 16 nt, Human
auuuacuucuuauaca

SEQ ID NO: 2721003 - RNA, 14 nt, Human
auuuacuucuuaua

SEQ ID NO: 2721004 - RNA, 14 nt, Human
auuuaacagaaaug

SEQ ID NO: 2721005 - RNA, 12 nt, Human
auuuaacagaaa

SEQ ID NO: 2721006 - RNA, 14 nt, Human
auuuauucugcuca

SEQ ID NO: 2721007 - RNA, 17 nt, Human
auuuauuuuaauaaugu

SEQ ID NO: 2721008 - RNA, 13 nt, Human
auuuauucugcuc

SEQ ID NO: 2721009 - RNA, 12 nt, Human
auuucauuucuu

SEQ ID NO: 2721010 - RNA, 19 nt, Human
auuuauuuuaauaauguuu

SEQ ID NO: 2721011 - RNA, 20 nt, Human
auuuauuuuaauaauguuuc

SEQ ID NO: 2721012 - RNA, 17 nt, Human
auuuccagccaaagccu

SEQ ID NO: 2721013 - RNA, 14 nt, Human
auuugaaauauuga

SEQ ID NO: 2721014 - RNA, 14 nt, Human
auuugaaaauuuug

SEQ ID NO: 2721015 - RNA, 16 nt, Human
auuuccguuaaaauac

SEQ ID NO: 2721016 - RNA, 15 nt, Human
auuuccguuaaaaua

SEQ ID NO: 2721017 - RNA, 23 nt, Human
auucuucagcaaaaauauuuuau

SEQ ID NO: 2721018 - RNA, 15 nt, Human
auucuucagcaaaaa

SEQ ID NO: 2721019 - RNA, 18 nt, Human
auucuuauuuaaugaaag

SEQ ID NO: 2721020 - RNA, 14 nt, Human
auucuuauuuaaug

SEQ ID NO: 2721021 - RNA, 18 nt, Human
auucuuaaaguugaauuu

SEQ ID NO: 2721022 - RNA, 13 nt, Human
auucuuauuuaau

SEQ ID NO: 2721023 - RNA, 13 nt, Human
auucuucuccacu

SEQ ID NO: 2721024 - RNA, 13 nt, Human
auucuuccucccu

SEQ ID NO: 2721025 - RNA, 22 nt, Human
auucuuccucccucccucuuuc

SEQ ID NO: 2721026 - RNA, 16 nt, Human
auucuuaaaguugaau

SEQ ID NO: 2721027 - RNA, 15 nt, Human
auucuuaaaguugaa

SEQ ID NO: 2721028 - RNA, 14 nt, Human
auucuuaaaguuga

SEQ ID NO: 2721029 - RNA, 13 nt, Human
auucuuaaaguug

SEQ ID NO: 2721030 - RNA, 15 nt, Human
auucuguauagauua

SEQ ID NO: 2721031 - RNA, 21 nt, Human
auucuguauagauuagaauuc

SEQ ID NO: 2721032 - RNA, 15 nt, Human
auuguauuacaaauc

SEQ ID NO: 2721033 - RNA, 23 nt, Human
auugguguuguacucaauuuuaa

SEQ ID NO: 2721034 - RNA, 22 nt, Human
auugguguuguacucaauuuua

SEQ ID NO: 2721035 - RNA, 14 nt, Human
auugguguuguacu

SEQ ID NO: 2721036 - RNA, 17 nt, Human
auuguccccgacccuug

SEQ ID NO: 2721037 - RNA, 19 nt, Human
auuguccccgacccuugcc

SEQ ID NO: 2721038 - RNA, 20 nt, Human
auuguccccgacccuugccg

SEQ ID NO: 2721039 - RNA, 14 nt, Human
auugugucucuugg

SEQ ID NO: 2721040 - RNA, 18 nt, Human
auugugucucuugguccu

SEQ ID NO: 2721041 - RNA, 17 nt, Human
auuuuaaaagaaugauu

SEQ ID NO: 2721042 - RNA, 14 nt, Human
auuugugauacaau

SEQ ID NO: 2721043 - RNA, 19 nt, Human
auuuguauaaaauaauuuu

SEQ ID NO: 2721044 - RNA, 15 nt, Human
auuuguauaaaauaa

SEQ ID NO: 2721045 - RNA, 18 nt, Human
auuuguauaaaauaauuu

SEQ ID NO: 2721046 - RNA, 18 nt, Human
auuuuaaaagaaugauua

SEQ ID NO: 2721047 - RNA, 22 nt, Human
auuuuaaaagaaugauuaugaa

SEQ ID NO: 2721048 - RNA, 13 nt, Human
auuuuacauaaau

SEQ ID NO: 2721049 - RNA, 17 nt, Human
auuuuacauaaauuuag

SEQ ID NO: 2721050 - RNA, 16 nt, Human
auuuuacauaaauuua

SEQ ID NO: 2721051 - RNA, 15 nt, Human
auuuuaauucaguug

SEQ ID NO: 2721052 - RNA, 22 nt, Human
auuuucaguuauuauauuuaca

SEQ ID NO: 2721053 - RNA, 14 nt, Human
auuuucagaaaaua

SEQ ID NO: 2721054 - RNA, 17 nt, Human
auuuucagaaaauauua

SEQ ID NO: 2721055 - RNA, 17 nt, Human
auuuuccuccuuucucu

SEQ ID NO: 2721056 - RNA, 13 nt, Human
auuuuccuccuuu

SEQ ID NO: 2721057 - RNA, 15 nt, Human
auuuuauuauguaaa

SEQ ID NO: 2721058 - RNA, 19 nt, Human
auuuuauuauguaaauccc

SEQ ID NO: 2721059 - RNA, 18 nt, Human
auuuuauuauguaaaucc

SEQ ID NO: 2721060 - RNA, 17 nt, Human
auuuuauuauguaaauc

SEQ ID NO: 2721061 - RNA, 16 nt, Human
auuuuauuauguaaau

SEQ ID NO: 2721062 - RNA, 21 nt, Human
auuuuauuauguaaaucccau

SEQ ID NO: 2721063 - RNA, 20 nt, Human
auuuuauuauguaaauccca

SEQ ID NO: 2721064 - RNA, 14 nt, Human
uuuucucuaggaaa

SEQ ID NO: 2721065 - RNA, 18 nt, Human
uuuucugagaaagacuau

SEQ ID NO: 2721066 - RNA, 15 nt, Human
uuuucugagaaagac

SEQ ID NO: 2721067 - RNA, 15 nt, Human
uuuucugauccaguu

SEQ ID NO: 2721068 - RNA, 20 nt, Human
uuuucauuuaggugaggaag

SEQ ID NO: 2721069 - RNA, 15 nt, Human
uuuuccaaaauaauu

SEQ ID NO: 2721070 - RNA, 11 nt, Human
uuuuauuuuau

SEQ ID NO: 2721071 - RNA, 14 nt, Human
uuuucaguguacau

SEQ ID NO: 2721072 - RNA, 13 nt, Human
uuuuauuaugcau

SEQ ID NO: 2721073 - RNA, 22 nt, Human
uuuuauuaugaaacuuguguaa

SEQ ID NO: 2721074 - RNA, 21 nt, Human
uuuuauuaugaaacuugugua

SEQ ID NO: 2721075 - RNA, 12 nt, Human
uuuuauuaugaa

SEQ ID NO: 2721076 - RNA, 17 nt, Human
auguuuucaggcuagau

SEQ ID NO: 2721077 - RNA, 21 nt, Human
auguuuucaggcuagauguau

SEQ ID NO: 2721078 - RNA, 15 nt, Human
auguuuucaggcuag

SEQ ID NO: 2721079 - RNA, 19 nt, Human
auuaaaaaucucaaauuuc

SEQ ID NO: 2721080 - RNA, 15 nt, Human
auuaaaaaucucaaa

SEQ ID NO: 2721081 - RNA, 23 nt, Human
auuaaaacacaacaucuuuuucu

SEQ ID NO: 2721082 - RNA, 22 nt, Human
auuaaaaaucucaaauuucuaa

SEQ ID NO: 2721083 - RNA, 20 nt, Human
auuaaaaaucucaaauuucu

SEQ ID NO: 2721084 - RNA, 16 nt, Human
auguugcccaggcagg

SEQ ID NO: 2721085 - RNA, 17 nt, Human
auguugcccaggcaggu

SEQ ID NO: 2721086 - RNA, 12 nt, Human
auguugcccagg

SEQ ID NO: 2721087 - RNA, 20 nt, Human
auguugcccaggcaggucuu

SEQ ID NO: 2721088 - RNA, 20 nt, Human
auguuaaaccaugggauaaa

SEQ ID NO: 2721089 - RNA, 13 nt, Human
auguuaaaccaug

SEQ ID NO: 2721090 - RNA, 12 nt, Human
auguuaaaccau

SEQ ID NO: 2721091 - RNA, 19 nt, Human
augugcuaguaauuggaaa

SEQ ID NO: 2721092 - RNA, 16 nt, Human
uuuuaauaauguuuca

SEQ ID NO: 2721093 - RNA, 22 nt, Human
augugccagguuuuuggucuga

SEQ ID NO: 2721094 - RNA, 12 nt, Human
uuuuaauaaugu

SEQ ID NO: 2721095 - RNA, 13 nt, Human
uuuuaauaauguu

SEQ ID NO: 2721096 - RNA, 14 nt, Human
uuuuaauaauguuu

SEQ ID NO: 2721097 - RNA, 20 nt, Human
auggggcccugccuccuuug

SEQ ID NO: 2721098 - RNA, 24 nt, Human
auguggaguucaucuugaauugua

SEQ ID NO: 2721099 - RNA, 20 nt, Human
auguggaguucaucuugaau

SEQ ID NO: 2721100 - RNA, 19 nt, Human
uuuuuauauuugaaauauu

SEQ ID NO: 2721101 - RNA, 17 nt, Human
uuuuuauauuugaaaua

SEQ ID NO: 2721102 - RNA, 12 nt, Human
uuuuuauggcuu

SEQ ID NO: 2721103 - RNA, 20 nt, Human
uuuuuaucgucacugcuuaa

SEQ ID NO: 2721104 - RNA, 23 nt, Human
uuuuguuuggaccaaaaaccagu

SEQ ID NO: 2721105 - RNA, 11 nt, Human
uuuuuacuaau

SEQ ID NO: 2721106 - RNA, 22 nt, Human
uuuuuagacagagucucacugu

SEQ ID NO: 2721107 - RNA, 14 nt, Human
uuuuguucauacau

SEQ ID NO: 2721108 - RNA, 20 nt, Human
uuuugugcauuaucuagaua

SEQ ID NO: 2721109 - RNA, 17 nt, Human
uuuugugcauuaucuag

SEQ ID NO: 2721110 - RNA, 12 nt, Human
uuuuguuucugu

SEQ ID NO: 2721111 - RNA, 13 nt, Human
uuuuguuucugua

SEQ ID NO: 2721112 - RNA, 22 nt, Human
uuuuguuuggaccaaaaaccag

SEQ ID NO: 2721113 - RNA, 12 nt, Human
uuuuguuuggac

SEQ ID NO: 2721114 - RNA, 21 nt, Human
uuuuguuccacaaguuaaaua

SEQ ID NO: 2721115 - RNA, 18 nt, Human
uuuuguuguuuguuuagu

SEQ ID NO: 2721116 - RNA, 15 nt, Human
uuuuguuccacaagu

SEQ ID NO: 2721117 - RNA, 17 nt, Human
uuuuguucauacauauu

SEQ ID NO: 2721118 - RNA, 14 nt, Human
auuaagcauauauu

SEQ ID NO: 2721119 - RNA, 21 nt, Human
auuaagcauauauuuuuauau

SEQ ID NO: 2721120 - RNA, 15 nt, Human
auuaagcauauauuu

SEQ ID NO: 2721121 - RNA, 17 nt, Human
uuuugauccaagcuggu

SEQ ID NO: 2721122 - RNA, 14 nt, Human
uuuugaguucuaca

SEQ ID NO: 2721123 - RNA, 17 nt, Human
uuuugagugccuuacac

SEQ ID NO: 2721124 - RNA, 23 nt, Human
uuuugccauguuggccaggcugg

SEQ ID NO: 2721125 - RNA, 16 nt, Human
auuacauuuguauaaa

SEQ ID NO: 2721126 - RNA, 18 nt, Human
auuacauuuguauaaaau

SEQ ID NO: 2721127 - RNA, 17 nt, Human
auuacauuuguauaaaa

SEQ ID NO: 2721128 - RNA, 21 nt, Human
auuacaguggggaaugaagau

SEQ ID NO: 2721129 - RNA, 14 nt, Human
auuaaguacuaugu

SEQ ID NO: 2721130 - RNA, 19 nt, Human
uuuuugugaaaagcuccau

SEQ ID NO: 2721131 - RNA, 19 nt, Human
uuuuuguagagccaggguc

SEQ ID NO: 2721132 - RNA, 20 nt, Human
uuuuuguagagccagggucu

SEQ ID NO: 2721133 - RNA, 21 nt, Human
auuaaguaaugauaacuggaa

SEQ ID NO: 2721134 - RNA, 23 nt, Human
auuaaguaaugauaacuggaaac

SEQ ID NO: 2721135 - RNA, 22 nt, Human
uuuuuauggcuuuugugcauua

SEQ ID NO: 2721136 - RNA, 21 nt, Human
uuuuuauggcuuuugugcauu

SEQ ID NO: 2721137 - RNA, 20 nt, Human
uuuuuauggcuuuugugcau

SEQ ID NO: 2721138 - RNA, 20 nt, Human
auuauauaaguauucuaaau

SEQ ID NO: 2721139 - RNA, 14 nt, Human
auuauauaaguauu

SEQ ID NO: 2721140 - RNA, 17 nt, Human
auuauauaaguauucua

SEQ ID NO: 2721141 - RNA, 12 nt, Human
auuagaauucug

SEQ ID NO: 2721142 - RNA, 14 nt, Human
auuagaauucugua

SEQ ID NO: 2721143 - RNA, 13 nt, Human
auuagaauucugu

SEQ ID NO: 2721144 - RNA, 18 nt, Human
auuagaauucuguauaga

SEQ ID NO: 2721145 - RNA, 17 nt, Human
auuagaauucuguauag

SEQ ID NO: 2721146 - RNA, 16 nt, Human
auuagaauucuguaua

SEQ ID NO: 2721147 - RNA, 15 nt, Human
auuagaauucuguau

SEQ ID NO: 2721148 - RNA, 19 nt, Human
auucuccaccugccaggga

SEQ ID NO: 2721149 - RNA, 20 nt, Human
auucuccaccugccagggac

SEQ ID NO: 2721150 - RNA, 16 nt, Human
auucuccuuguguuac

SEQ ID NO: 2721151 - RNA, 20 nt, Human
auucuccugccucagccucc

SEQ ID NO: 2721152 - RNA, 19 nt, Human
auucuccugccucagccuc

SEQ ID NO: 2721153 - RNA, 15 nt, Human
auucuccugccucag

SEQ ID NO: 2721154 - RNA, 17 nt, Human
auucuccugccucagcc

SEQ ID NO: 2721155 - RNA, 21 nt, Human
auucuccuaucaccugucuug

SEQ ID NO: 2721156 - RNA, 21 nt, Human
auucuccaccugccagggaca

SEQ ID NO: 2721157 - RNA, 11 nt, Human
auucuccugcc

SEQ ID NO: 2721158 - RNA, 14 nt, Human
auucuccugccuca

SEQ ID NO: 2721159 - RNA, 13 nt, Human
auucuccugccuc

SEQ ID NO: 2721160 - RNA, 14 nt, Human
auucaggaagcuca

SEQ ID NO: 2721161 - RNA, 19 nt, Human
auucaguaauaacucuacc

SEQ ID NO: 2721162 - RNA, 15 nt, Human
auucaguaauaacuc

SEQ ID NO: 2721163 - RNA, 18 nt, Human
auucagauaugauucaaa

SEQ ID NO: 2721164 - RNA, 20 nt, Human
auucaggaagcucagggccu

SEQ ID NO: 2721165 - RNA, 17 nt, Human
auucaggaagcucaggg

SEQ ID NO: 2721166 - RNA, 19 nt, Human
auucaggaagcucagggcc

SEQ ID NO: 2721167 - RNA, 16 nt, Human
auucccaagcucugcu

SEQ ID NO: 2721168 - RNA, 14 nt, Human
auucccaagcucug

SEQ ID NO: 2721169 - RNA, 15 nt, Human
auucccaagcucugc

SEQ ID NO: 2721170 - RNA, 20 nt, Human
auucagauaugauucaaaug

SEQ ID NO: 2721171 - RNA, 12 nt, Human
aaaaacaacuuu

SEQ ID NO: 2721172 - RNA, 14 nt, Human
aaaaacacaaaagu

SEQ ID NO: 2721173 - RNA, 23 nt, Human
aaaaaauuggggauucuuaaagu

SEQ ID NO: 2721174 - RNA, 14 nt, Human
aaaacaaggaugaa

SEQ ID NO: 2721175 - RNA, 12 nt, Human
aaaacaacuuua

SEQ ID NO: 2721176 - RNA, 18 nt, Human
aaaacacagcaaggguga

SEQ ID NO: 2721177 - RNA, 12 nt, Human
aaaacacauuuu

SEQ ID NO: 2721178 - RNA, 13 nt, Human
aaaacacagcaag

SEQ ID NO: 2721179 - RNA, 12 nt, Human
aaaacacagcaa

SEQ ID NO: 2721180 - RNA, 17 nt, Human
aaaacaaggaugaauua

SEQ ID NO: 2721181 - RNA, 13 nt, Human
aaaaacugauuuu

SEQ ID NO: 2721182 - RNA, 18 nt, Human
aaaaaccaguauuguaca

SEQ ID NO: 2721183 - RNA, 16 nt, Human
aaaaaccaguauugua

SEQ ID NO: 2721184 - RNA, 15 nt, Human
aaaaacugauuuuuu

SEQ ID NO: 2721185 - RNA, 12 nt, Human
aaaaagaggcua

SEQ ID NO: 2721186 - RNA, 20 nt, Human
aaaaauuggggauucuuaaa

SEQ ID NO: 2721187 - RNA, 19 nt, Human
aaaaauuggggauucuuaa

SEQ ID NO: 2721188 - RNA, 18 nt, Human
aaaaauuggggauucuua

SEQ ID NO: 2721189 - RNA, 17 nt, Human
aaaaauuggggauucuu

SEQ ID NO: 2721190 - RNA, 16 nt, Human
aagauuuaccacuugu

SEQ ID NO: 2721191 - RNA, 13 nt, Human
aagccagauuuuc

SEQ ID NO: 2721192 - RNA, 14 nt, Human
aagcagaggaagga

SEQ ID NO: 2721193 - RNA, 18 nt, Human
aagccauaauuguucuua

SEQ ID NO: 2721194 - RNA, 13 nt, Human
aagccauguuuau

SEQ ID NO: 2721195 - RNA, 16 nt, Human
aaggcaaggcugucaa

SEQ ID NO: 2721196 - RNA, 17 nt, Human
aaggcaaggcugucaau

SEQ ID NO: 2721197 - RNA, 18 nt, Human
aaggcaaggcugucaauu

SEQ ID NO: 2721198 - RNA, 11 nt, Human
aagcugggcag

SEQ ID NO: 2721199 - RNA, 13 nt, Human
aagcugggcaggu

SEQ ID NO: 2721200 - RNA, 18 nt, Human
aaggacauugcggacagc

SEQ ID NO: 2721201 - RNA, 21 nt, Human
aagcugcacccucaggcaggu

SEQ ID NO: 2721202 - RNA, 20 nt, Human
aagcugcacccucaggcagg

SEQ ID NO: 2721203 - RNA, 22 nt, Human
aagcugcacccucaggcaggug

SEQ ID NO: 2721204 - RNA, 12 nt, Human
aagcguggugga

SEQ ID NO: 2721205 - RNA, 21 nt, Human
aauaauccuaaacauaugaau

SEQ ID NO: 2721206 - RNA, 16 nt, Human
aauaaugugaaacugg

SEQ ID NO: 2721207 - RNA, 14 nt, Human
aauaaaauggguuu

SEQ ID NO: 2721208 - RNA, 22 nt, Human
aaguuguaggcauaaagucagg

SEQ ID NO: 2721209 - RNA, 19 nt, Human
aauaaaauggguuuuacug

SEQ ID NO: 2721210 - RNA, 16 nt, Human
aauaaacgucuuaaau

SEQ ID NO: 2721211 - RNA, 17 nt, Human
aauaaacgucuuaaaua

SEQ ID NO: 2721212 - RNA, 22 nt, Human
aagugcugggauuacaggugug

SEQ ID NO: 2721213 - RNA, 11 nt, Human
aaggugggagg

SEQ ID NO: 2721214 - RNA, 16 nt, Human
aagguuaauaaaguaa

SEQ ID NO: 2721215 - RNA, 15 nt, Human
aagguuaauaaagua

SEQ ID NO: 2721216 - RNA, 20 nt, Human
aagguuaauguucaucaucc

SEQ ID NO: 2721217 - RNA, 11 nt, Human
aaguacuucuu

SEQ ID NO: 2721218 - RNA, 18 nt, Human
aaguauguguaaaaugug

SEQ ID NO: 2721219 - RNA, 16 nt, Human
aaguaucccuacugua

SEQ ID NO: 2721220 - RNA, 16 nt, Human
aagucuuagauguaua

SEQ ID NO: 2721221 - RNA, 20 nt, Human
aaugauaacuggaaacuuca

SEQ ID NO: 2721222 - RNA, 18 nt, Human
aaugauaaguaaaugcua

SEQ ID NO: 2721223 - RNA, 17 nt, Human
aaugaagauacugaaau

SEQ ID NO: 2721224 - RNA, 21 nt, Human
aaugaugauccuaggcauuug

SEQ ID NO: 2721225 - RNA, 21 nt, Human
aaugauaaguaaaugcuaggu

SEQ ID NO: 2721226 - RNA, 17 nt, Human
aaugauaacuggaaacu

SEQ ID NO: 2721227 - RNA, 12 nt, Human
aaugaagauacu

SEQ ID NO: 2721228 - RNA, 22 nt, Human
aaucugcuuuuuaaagaaugcu

SEQ ID NO: 2721229 - RNA, 16 nt, Human
aaugaaccacaucuug

SEQ ID NO: 2721230 - RNA, 17 nt, Human
aaugaaccacaucuugc

SEQ ID NO: 2721231 - RNA, 23 nt, Human
aaugaaccacaucuugcucugcu

SEQ ID NO: 2721232 - RNA, 13 nt, Human
aauccauacauuu

SEQ ID NO: 2721233 - RNA, 14 nt, Human
aauccauacauuug

SEQ ID NO: 2721234 - RNA, 15 nt, Human
aauccauuuggaaau

SEQ ID NO: 2721235 - RNA, 14 nt, Human
aauccauuuggaaa

SEQ ID NO: 2721236 - RNA, 22 nt, Human
aauccauuuggaaaucuuuaaa

SEQ ID NO: 2721237 - RNA, 18 nt, Human
aauccauuuggaaaucuu

SEQ ID NO: 2721238 - RNA, 17 nt, Human
aauccauuuggaaaucu

SEQ ID NO: 2721239 - RNA, 14 nt, Human
aaucuccaaaauaa

SEQ ID NO: 2721240 - RNA, 13 nt, Human
aaucuccaaaaua

SEQ ID NO: 2721241 - RNA, 18 nt, Human
aaucucauaauuuauaca

SEQ ID NO: 2721242 - RNA, 19 nt, Human
aaugaugccaugaggaaca

SEQ ID NO: 2721243 - RNA, 15 nt, Human
aaucaagaaacuuaa

SEQ ID NO: 2721244 - RNA, 13 nt, Human
aaucacaauacau

SEQ ID NO: 2721245 - RNA, 16 nt, Human
aauauuauguuaaaac

SEQ ID NO: 2721246 - RNA, 14 nt, Human
aauauuauguguuu

SEQ ID NO: 2721247 - RNA, 18 nt, Human
aauauaggaacuuaaaua

SEQ ID NO: 2721248 - RNA, 21 nt, Human
aauauaggaacuuaaauaaug

SEQ ID NO: 2721249 - RNA, 20 nt, Human
aauauaggaacuuaaauaau

SEQ ID NO: 2721250 - RNA, 14 nt, Human
aauuaguuuuauau

SEQ ID NO: 2721251 - RNA, 17 nt, Human
aauuaguuuuauaugcu

SEQ ID NO: 2721252 - RNA, 20 nt, Human
aauuaguuuuauaugcuucu

SEQ ID NO: 2721253 - RNA, 20 nt, Human
aaugucucuuuaaugucaca

SEQ ID NO: 2721254 - RNA, 22 nt, Human
aaugucuaguuguaacaccaug

SEQ ID NO: 2721255 - RNA, 17 nt, Human
aaugucagugugacuga

SEQ ID NO: 2721256 - RNA, 21 nt, Human
aaugucagugugacugaucuc

SEQ ID NO: 2721257 - RNA, 22 nt, Human
aaugguccgugcuaaggacuug

SEQ ID NO: 2721258 - RNA, 15 nt, Human
aaugucagugugacu

SEQ ID NO: 2721259 - RNA, 16 nt, Human
aaugucagugugacug

SEQ ID NO: 2721260 - RNA, 13 nt, Human
aaugucaguguga

SEQ ID NO: 2721261 - RNA, 15 nt, Human
aaugggcagagcaga

SEQ ID NO: 2721262 - RNA, 13 nt, Human
aaugggcagagca

SEQ ID NO: 2721263 - RNA, 13 nt, Human
aauggcuuuguau

SEQ ID NO: 2721264 - RNA, 18 nt, Human
aauggcuuuguauagaac

SEQ ID NO: 2721265 - RNA, 16 nt, Human
aauggcuuuguauaga

SEQ ID NO: 2721266 - RNA, 15 nt, Human
aauggcuuuguauag

SEQ ID NO: 2721267 - RNA, 14 nt, Human
aauuaaauuuugag

SEQ ID NO: 2721268 - RNA, 22 nt, Human
aauuaaauuuugaguucuacau

SEQ ID NO: 2721269 - RNA, 18 nt, Human
aauuaaaacacaacaucu

SEQ ID NO: 2721270 - RNA, 19 nt, Human
aauguuugccucugccucu

SEQ ID NO: 2721271 - RNA, 18 nt, Human
aauguuugccucugccuc

SEQ ID NO: 2721272 - RNA, 19 nt, Human
aaaucaaauaugcaaagca

SEQ ID NO: 2721273 - RNA, 18 nt, Human
aaaucaaauaugcaaagc

SEQ ID NO: 2721274 - RNA, 16 nt, Human
aaaucaaauaugcaaa

SEQ ID NO: 2721275 - RNA, 16 nt, Human
aaauggaaaugggcag

SEQ ID NO: 2721276 - RNA, 18 nt, Human
aaauggaagacagcucuu

SEQ ID NO: 2721277 - RNA, 20 nt, Human
aaauggacguguuaugacuc

SEQ ID NO: 2721278 - RNA, 21 nt, Human
aaauggacguguuaugacucc

SEQ ID NO: 2721279 - RNA, 22 nt, Human
aaauggacguguuaugacucca

SEQ ID NO: 2721280 - RNA, 18 nt, Human
aaauggcuuccuggcaau

SEQ ID NO: 2721281 - RNA, 19 nt, Human
aaauggacuguggugacuu

SEQ ID NO: 2721282 - RNA, 14 nt, Human
aaauaguauuugag

SEQ ID NO: 2721283 - RNA, 14 nt, Human
aaauauuuuaugau

SEQ ID NO: 2721284 - RNA, 19 nt, Human
aaauauuuuaugauccagc

SEQ ID NO: 2721285 - RNA, 18 nt, Human
aaauauuuuaugauccag

SEQ ID NO: 2721286 - RNA, 12 nt, Human
aaauaacaauga

SEQ ID NO: 2721287 - RNA, 17 nt, Human
aaauaaacgucuuaaau

SEQ ID NO: 2721288 - RNA, 14 nt, Human
aaagugcugggauu

SEQ ID NO: 2721289 - RNA, 11 nt, Human
aaagugcuggg

SEQ ID NO: 2721290 - RNA, 16 nt, Human
aaagaugaaaauauuu

SEQ ID NO: 2721291 - RNA, 13 nt, Human
aaagaugaaaaua

SEQ ID NO: 2721292 - RNA, 17 nt, Human
aaagaugaaaauauuug

SEQ ID NO: 2721293 - RNA, 19 nt, Human
aaacugccagcaacgcagg

SEQ ID NO: 2721294 - RNA, 17 nt, Human
aaacugacucuuaagaa

SEQ ID NO: 2721295 - RNA, 15 nt, Human
aaacugccagcaacg

SEQ ID NO: 2721296 - RNA, 14 nt, Human
aaacugccagcaac

SEQ ID NO: 2721297 - RNA, 16 nt, Human
aaacugacucuuaaga

SEQ ID NO: 2721298 - RNA, 11 nt, Human
aaagagguuuu

SEQ ID NO: 2721299 - RNA, 19 nt, Human
aaacacuguucucugcccu

SEQ ID NO: 2721300 - RNA, 22 nt, Human
aaacacuguucucugcccucca

SEQ ID NO: 2721301 - RNA, 17 nt, Human
aaaauuggggauucuua

SEQ ID NO: 2721302 - RNA, 19 nt, Human
aaaauuggggauucuuaaa

SEQ ID NO: 2721303 - RNA, 18 nt, Human
aaaauuggggauucuuaa

SEQ ID NO: 2721304 - RNA, 18 nt, Human
aaacacuguucucugccc

SEQ ID NO: 2721305 - RNA, 13 nt, Human
aaaauucagugga

SEQ ID NO: 2721306 - RNA, 21 nt, Human
aaaauuauuuuguucauacau

SEQ ID NO: 2721307 - RNA, 15 nt, Human
aaaacacauuuuucu

SEQ ID NO: 2721308 - RNA, 13 nt, Human
aaaacacauuuuu

SEQ ID NO: 2721309 - RNA, 14 nt, Human
aagaaauguaaggg

SEQ ID NO: 2721310 - RNA, 13 nt, Human
aagaaauguaagg

SEQ ID NO: 2721311 - RNA, 12 nt, Human
aacuuuucugau

SEQ ID NO: 2721312 - RNA, 19 nt, Human
aacuuuuauaaacuuuacc

SEQ ID NO: 2721313 - RNA, 16 nt, Human
aacuuuuauaaacuuu

SEQ ID NO: 2721314 - RNA, 14 nt, Human
aacuuuucugauag

SEQ ID NO: 2721315 - RNA, 13 nt, Human
aacuuuucugaua

SEQ ID NO: 2721316 - RNA, 15 nt, Human
aacuuuuauaaacuu

SEQ ID NO: 2721317 - RNA, 12 nt, Human
aacuuuuauaaa

SEQ ID NO: 2721318 - RNA, 16 nt, Human
aacuuuggaacaagau

SEQ ID NO: 2721319 - RNA, 20 nt, Human
aacuuugaccucugcagcaa

SEQ ID NO: 2721320 - RNA, 19 nt, Human
aacuuugaccucugcagca

SEQ ID NO: 2721321 - RNA, 17 nt, Human
aacuuugaccucugcag

SEQ ID NO: 2721322 - RNA, 14 nt, Human
aacuuugaccucug

SEQ ID NO: 2721323 - RNA, 13 nt, Human
aacuuugaccucu

SEQ ID NO: 2721324 - RNA, 19 nt, Human
aacugauuuuuuuuuccuu

SEQ ID NO: 2721325 - RNA, 17 nt, Human
aacugauuuuuuuuucc

SEQ ID NO: 2721326 - RNA, 17 nt, Human
aacuuaaauaaugugaa

SEQ ID NO: 2721327 - RNA, 15 nt, Human
aacucaccugccccu

SEQ ID NO: 2721328 - RNA, 16 nt, Human
aacucaccugccccuc

SEQ ID NO: 2721329 - RNA, 12 nt, Human
aacucaccccag

SEQ ID NO: 2721330 - RNA, 13 nt, Human
aacuucacauauu

SEQ ID NO: 2721331 - RNA, 15 nt, Human
aacacgagcaggcua

SEQ ID NO: 2721332 - RNA, 19 nt, Human
aacacauuuuucuuaggga

SEQ ID NO: 2721333 - RNA, 21 nt, Human
aaauugauguguuuauuuaua

SEQ ID NO: 2721334 - RNA, 16 nt, Human
aaauuggggauucuua

SEQ ID NO: 2721335 - RNA, 17 nt, Human
aacagcuggugcccugc

SEQ ID NO: 2721336 - RNA, 21 nt, Human
aacauguaauuaaguacuaug

SEQ ID NO: 2721337 - RNA, 14 nt, Human
aacauguaauuaag

SEQ ID NO: 2721338 - RNA, 23 nt, Human
aacauguaauuaaguacuaugua

SEQ ID NO: 2721339 - RNA, 22 nt, Human
aaccacucuaucaaguauuaua

SEQ ID NO: 2721340 - RNA, 15 nt, Human
aaccaguauuguaca

SEQ ID NO: 2721341 - RNA, 20 nt, Human
aaccaguauuguacaaagua

SEQ ID NO: 2721342 - RNA, 22 nt, Human
aaccaguauuguacaaaguauu

SEQ ID NO: 2721343 - RNA, 21 nt, Human
aaccaguauuguacaaaguau

SEQ ID NO: 2721344 - RNA, 14 nt, Human
aacccuggugacca

SEQ ID NO: 2721345 - RNA, 13 nt, Human
acaacuauauugu

SEQ ID NO: 2721346 - RNA, 13 nt, Human
acaaagacugagu

SEQ ID NO: 2721347 - RNA, 15 nt, Human
acaaacgggcucagc

SEQ ID NO: 2721348 - RNA, 21 nt, Human
acaaaccuguuucugcagcca

SEQ ID NO: 2721349 - RNA, 20 nt, Human
acaaaauguaggguuauaau

SEQ ID NO: 2721350 - RNA, 20 nt, Human
acaaaauggaauacucuuau

SEQ ID NO: 2721351 - RNA, 20 nt, Human
aauuuugaguucuacauaag

SEQ ID NO: 2721352 - RNA, 19 nt, Human
acaaaauggaauacucuua

SEQ ID NO: 2721353 - RNA, 15 nt, Human
acaaaauggaauacu

SEQ ID NO: 2721354 - RNA, 15 nt, Human
aauuuuauaucuugu

SEQ ID NO: 2721355 - RNA, 20 nt, Human
acaagucagucauucagaua

SEQ ID NO: 2721356 - RNA, 13 nt, Human
acaacuuuauacc

SEQ ID NO: 2721357 - RNA, 14 nt, Human
acaacuuuauaccc

SEQ ID NO: 2721358 - RNA, 18 nt, Human
acaacuucccagugaauu

SEQ ID NO: 2721359 - RNA, 17 nt, Human
acaacuucaauauccaa

SEQ ID NO: 2721360 - RNA, 16 nt, Human
acaacuauuuuuccaa

SEQ ID NO: 2721361 - RNA, 15 nt, Human
acacggacacucaaa

SEQ ID NO: 2721362 - RNA, 14 nt, Human
acacuaaccacgcu

SEQ ID NO: 2721363 - RNA, 15 nt, Human
acacuaaccacgcug

SEQ ID NO: 2721364 - RNA, 11 nt, Human
acacagcucug

SEQ ID NO: 2721365 - RNA, 12 nt, Human
acacagcucugu

SEQ ID NO: 2721366 - RNA, 21 nt, Human
acaccacuacauucuguuaau

SEQ ID NO: 2721367 - RNA, 12 nt, Human
acaccagagccc

SEQ ID NO: 2721368 - RNA, 14 nt, Human
acaauuuuguuucu

SEQ ID NO: 2721369 - RNA, 17 nt, Human
acaauuuuguuucugua

SEQ ID NO: 2721370 - RNA, 15 nt, Human
acaauuuuguuucug

SEQ ID NO: 2721371 - RNA, 18 nt, Human
acacaaacgggcucagca

SEQ ID NO: 2721372 - RNA, 16 nt, Human
acaauuuauuauggca

SEQ ID NO: 2721373 - RNA, 15 nt, Human
acaauuuauuauggc

SEQ ID NO: 2721374 - RNA, 14 nt, Human
acagcugccuggga

SEQ ID NO: 2721375 - RNA, 13 nt, Human
acagcugccuggg

SEQ ID NO: 2721376 - RNA, 23 nt, Human
acagcugccugggaucccucauc

SEQ ID NO: 2721377 - RNA, 12 nt, Human
acagcuccuucu

SEQ ID NO: 2721378 - RNA, 13 nt, Human
acagcuccuucug

SEQ ID NO: 2721379 - RNA, 14 nt, Human
acagcuccuucugu

SEQ ID NO: 2721380 - RNA, 18 nt, Human
acaggcaagcaccuccug

SEQ ID NO: 2721381 - RNA, 15 nt, Human
acaggcaagcaccuc

SEQ ID NO: 2721382 - RNA, 16 nt, Human
acaggcaagcaccucc

SEQ ID NO: 2721383 - RNA, 19 nt, Human
acaggucauauuaauauau

SEQ ID NO: 2721384 - RNA, 20 nt, Human
acaggugugaaccaccacac

SEQ ID NO: 2721385 - RNA, 23 nt, Human
acaggugugaaccaccacaccca

SEQ ID NO: 2721386 - RNA, 15 nt, Human
acagccagacuggca

SEQ ID NO: 2721387 - RNA, 13 nt, Human
acagccagacugg

SEQ ID NO: 2721388 - RNA, 16 nt, Human
acagccagacuggcac

SEQ ID NO: 2721389 - RNA, 19 nt, Human
acagccacggccaggccag

SEQ ID NO: 2721390 - RNA, 15 nt, Human
acagccaugauucuu

SEQ ID NO: 2721391 - RNA, 18 nt, Human
acagcaguugaaaagacu

SEQ ID NO: 2721392 - RNA, 15 nt, Human
acagcaguugaaaag

SEQ ID NO: 2721393 - RNA, 17 nt, Human
acagagucucacuguug

SEQ ID NO: 2721394 - RNA, 19 nt, Human
acagagucucacuguugcc

SEQ ID NO: 2721395 - RNA, 21 nt, Human
acagaggggguggccucccaa

SEQ ID NO: 2721396 - RNA, 19 nt, Human
acagaauauguuucaaacu

SEQ ID NO: 2721397 - RNA, 21 nt, Human
acagaauauguuucaaacuuu

SEQ ID NO: 2721398 - RNA, 16 nt, Human
acagaauauguuucaa

SEQ ID NO: 2721399 - RNA, 17 nt, Human
acagaauauguuucaaa

SEQ ID NO: 2721400 - RNA, 22 nt, Human
acagaggggguggccucccaac

SEQ ID NO: 2721401 - RNA, 12 nt, Human
acagagucucac

SEQ ID NO: 2721402 - RNA, 14 nt, Human
acagagucucacug

SEQ ID NO: 2721403 - RNA, 21 nt, Human
acauguuuuucuucucccuca

SEQ ID NO: 2721404 - RNA, 19 nt, Human
acaugcaaggucauuuuuu

SEQ ID NO: 2721405 - RNA, 20 nt, Human
acaugcacagcuaacaugga

SEQ ID NO: 2721406 - RNA, 23 nt, Human
acaugcacagcuaacauggaagu

SEQ ID NO: 2721407 - RNA, 23 nt, Human
acauaaacaagaccacguuucua

SEQ ID NO: 2721408 - RNA, 22 nt, Human
acaucagcacgauuucuguuua

SEQ ID NO: 2721409 - RNA, 21 nt, Human
acaucagcacgauuucuguuu

SEQ ID NO: 2721410 - RNA, 20 nt, Human
acaucagcacgauuucuguu

SEQ ID NO: 2721411 - RNA, 14 nt, Human
acauaaaucuguga

SEQ ID NO: 2721412 - RNA, 19 nt, Human
acaucagcacgauuucugu

SEQ ID NO: 2721413 - RNA, 18 nt, Human
acauaaaucugugaacuu

SEQ ID NO: 2721414 - RNA, 15 nt, Human
acauaaaucugugaa

SEQ ID NO: 2721415 - RNA, 18 nt, Human
acauuugcucauggaauu

SEQ ID NO: 2721416 - RNA, 16 nt, Human
acauuugcucauggaa

SEQ ID NO: 2721417 - RNA, 14 nt, Human
acauuuguauaaaa

SEQ ID NO: 2721418 - RNA, 14 nt, Human
accacuacauucug

SEQ ID NO: 2721419 - RNA, 19 nt, Human
accacguuucuaaaggcua

SEQ ID NO: 2721420 - RNA, 15 nt, Human
accacguuucuaaag

SEQ ID NO: 2721421 - RNA, 13 nt, Human
accagcagccugg

SEQ ID NO: 2721422 - RNA, 14 nt, Human
accagcagccugga

SEQ ID NO: 2721423 - RNA, 17 nt, Human
accagcagccuggaccc

SEQ ID NO: 2721424 - RNA, 16 nt, Human
acccaaguccaagcau

SEQ ID NO: 2721425 - RNA, 13 nt, Human
acccaagggccug

SEQ ID NO: 2721426 - RNA, 16 nt, Human
acccaagggccuggcc

SEQ ID NO: 2721427 - RNA, 16 nt, Human
acccaugcugcccugu

SEQ ID NO: 2721428 - RNA, 19 nt, Human
acccaugcugcccugugag

SEQ ID NO: 2721429 - RNA, 17 nt, Human
acccaugcugcccugug

SEQ ID NO: 2721430 - RNA, 18 nt, Human
acccaugcugcccuguga

SEQ ID NO: 2721431 - RNA, 15 nt, Human
accccggccaccugc

SEQ ID NO: 2721432 - RNA, 21 nt, Human
accaucccugaaggccccgcc

SEQ ID NO: 2721433 - RNA, 22 nt, Human
accaucccugaaggccccgccc

SEQ ID NO: 2721434 - RNA, 16 nt, Human
accaucaugucuggcu

SEQ ID NO: 2721435 - RNA, 17 nt, Human
accaucaugucuggcua

SEQ ID NO: 2721436 - RNA, 18 nt, Human
accaucccugaaggcccc

SEQ ID NO: 2721437 - RNA, 16 nt, Human
accaucccugaaggcc

SEQ ID NO: 2721438 - RNA, 14 nt, Human
accaucaugucugg

SEQ ID NO: 2721439 - RNA, 20 nt, Human
accccucaacaccucugcac

SEQ ID NO: 2721440 - RNA, 18 nt, Human
acuuguaaaggaauuuaa

SEQ ID NO: 2721441 - RNA, 20 nt, Human
acuuguaaaggaauuuaaaa

SEQ ID NO: 2721442 - RNA, 19 nt, Human
acuuguaaaggaauuuaaa

SEQ ID NO: 2721443 - RNA, 18 nt, Human
acuucugccauauucugu

SEQ ID NO: 2721444 - RNA, 19 nt, Human
acuucugccauauucuguu

SEQ ID NO: 2721445 - RNA, 21 nt, Human
acuucuuuaauuuuggaauuu

SEQ ID NO: 2721446 - RNA, 13 nt, Human
acuguuucaaacu

SEQ ID NO: 2721447 - RNA, 20 nt, Human
acuuauuguagcauccugga

SEQ ID NO: 2721448 - RNA, 23 nt, Human
acuuauuguagcauccuggaaua

SEQ ID NO: 2721449 - RNA, 12 nt, Human
acuguuuugaau

SEQ ID NO: 2721450 - RNA, 19 nt, Human
acuucacauauugauuucc

SEQ ID NO: 2721451 - RNA, 14 nt, Human
acuggaagcacagc

SEQ ID NO: 2721452 - RNA, 16 nt, Human
acuggaagcacagcuu

SEQ ID NO: 2721453 - RNA, 15 nt, Human
acuggaagcacagcu

SEQ ID NO: 2721454 - RNA, 14 nt, Human
acuggagaaaaugg

SEQ ID NO: 2721455 - RNA, 12 nt, Human
acugucuucagu

SEQ ID NO: 2721456 - RNA, 23 nt, Human
acuuuguucuggcucuuccaggc

SEQ ID NO: 2721457 - RNA, 23 nt, Human
acuuuccuucauucaacccaccu

SEQ ID NO: 2721458 - RNA, 19 nt, Human
acuuuauacccagaaaguu

SEQ ID NO: 2721459 - RNA, 22 nt, Human
acuuuuauaaacuuuaccuuuu

SEQ ID NO: 2721460 - RNA, 19 nt, Human
acuuuuauaaacuuuaccu

SEQ ID NO: 2721461 - RNA, 15 nt, Human
acuuuuauaaacuuu

SEQ ID NO: 2721462 - RNA, 12 nt, Human
acuuuucugaua

SEQ ID NO: 2721463 - RNA, 21 nt, Human
agaaaaguugaauuuuacaug

SEQ ID NO: 2721464 - RNA, 18 nt, Human
agaaaaguugaauuuuac

SEQ ID NO: 2721465 - RNA, 23 nt, Human
agaaaauggaagacagcucuuau

SEQ ID NO: 2721466 - RNA, 15 nt, Human
agaaaauggacgugu

SEQ ID NO: 2721467 - RNA, 20 nt, Human
agaaaauggacguguuauga

SEQ ID NO: 2721468 - RNA, 23 nt, Human
agaaaauauuauguguuuccaua

SEQ ID NO: 2721469 - RNA, 22 nt, Human
agaaaauggacguguuaugacu

SEQ ID NO: 2721470 - RNA, 23 nt, Human
agaaaauggacguguuaugacuc

SEQ ID NO: 2721471 - RNA, 18 nt, Human
agaaauaaaguuucuguu

SEQ ID NO: 2721472 - RNA, 15 nt, Human
agaaauaaaguuucu

SEQ ID NO: 2721473 - RNA, 20 nt, Human
agaaaggaggggauagagag

SEQ ID NO: 2721474 - RNA, 23 nt, Human
agaaaggaggggauagagagaga

SEQ ID NO: 2721475 - RNA, 18 nt, Human
acucaaaagcugggcagg

SEQ ID NO: 2721476 - RNA, 11 nt, Human
acuauaaugua

SEQ ID NO: 2721477 - RNA, 17 nt, Human
acucaaacucuuaaaac

SEQ ID NO: 2721478 - RNA, 16 nt, Human
acucaaacucuuaaaa

SEQ ID NO: 2721479 - RNA, 14 nt, Human
acucccccaggugg

SEQ ID NO: 2721480 - RNA, 21 nt, Human
acucauaaaaagccugcaauu

SEQ ID NO: 2721481 - RNA, 17 nt, Human
acuccccugcugggugu

SEQ ID NO: 2721482 - RNA, 13 nt, Human
acuccccugcugg

SEQ ID NO: 2721483 - RNA, 14 nt, Human
acuagcuauggugu

SEQ ID NO: 2721484 - RNA, 21 nt, Human
acucuacccucuuagaaaaac

SEQ ID NO: 2721485 - RNA, 13 nt, Human
acucuacccucuu

SEQ ID NO: 2721486 - RNA, 18 nt, Human
acucuacccucuuagaaa

SEQ ID NO: 2721487 - RNA, 11 nt, Human
acucuuaaaac

SEQ ID NO: 2721488 - RNA, 18 nt, Human
acucuuaaaacccaagug

SEQ ID NO: 2721489 - RNA, 16 nt, Human
acucugugucaggugg

SEQ ID NO: 2721490 - RNA, 16 nt, Human
acucuaucaaguauua

SEQ ID NO: 2721491 - RNA, 14 nt, Human
acucuaucaaguau

SEQ ID NO: 2721492 - RNA, 18 nt, Human
acgcugugcugcccugcc

SEQ ID NO: 2721493 - RNA, 15 nt, Human
acgcugugcugcccu

SEQ ID NO: 2721494 - RNA, 16 nt, Human
acgcugugcugcccug

SEQ ID NO: 2721495 - RNA, 17 nt, Human
acgcugugcugcccugc

SEQ ID NO: 2721496 - RNA, 15 nt, Human
acuaagagagaauga

SEQ ID NO: 2721497 - RNA, 16 nt, Human
acuaagagagaaugag

SEQ ID NO: 2721498 - RNA, 11 nt, Human
acguggcugcu

SEQ ID NO: 2721499 - RNA, 13 nt, Human
acguggcugcuuc

SEQ ID NO: 2721500 - RNA, 14 nt, Human
acguggcugcuuca

SEQ ID NO: 2721501 - RNA, 15 nt, Human
acguggcugcuucaa

SEQ ID NO: 2721502 - RNA, 22 nt, Human
acuaaguuuuuauggcuuuugu

SEQ ID NO: 2721503 - RNA, 15 nt, Human
acuaaguuuuuaugg

SEQ ID NO: 2721504 - RNA, 18 nt, Human
acgccacugcacuauagc

SEQ ID NO: 2721505 - RNA, 17 nt, Human
acgauuucuguuuagau

SEQ ID NO: 2721506 - RNA, 14 nt, Human
acgauuucuguuua

SEQ ID NO: 2721507 - RNA, 13 nt, Human
acgauuucuguuu

SEQ ID NO: 2721508 - RNA, 12 nt, Human
acgauuucuguu

SEQ ID NO: 2721509 - RNA, 20 nt, Human
accugccccucaacucuccu

SEQ ID NO: 2721510 - RNA, 23 nt, Human
accugccccucaacucuccucca

SEQ ID NO: 2721511 - RNA, 16 nt, Human
accucugcacaagcug

SEQ ID NO: 2721512 - RNA, 18 nt, Human
accucugcacaagcugca

SEQ ID NO: 2721513 - RNA, 21 nt, Human
accucugcacaagcugcaccc

SEQ ID NO: 2721514 - RNA, 23 nt, Human
accuuucaauaggaaaaacugau

SEQ ID NO: 2721515 - RNA, 17 nt, Human
accuuucaauaggaaaa

SEQ ID NO: 2721516 - RNA, 21 nt, Human
accuuucaauaggaaaaacug

SEQ ID NO: 2721517 - RNA, 14 nt, Human
accuuggcugcagg

SEQ ID NO: 2721518 - RNA, 16 nt, Human
accuuucaauaggaaa

SEQ ID NO: 2721519 - RNA, 12 nt, Human
accuuggcucaa

SEQ ID NO: 2721520 - RNA, 14 nt, Human
accuuggcucaagu

SEQ ID NO: 2721521 - RNA, 12 nt, Human
accuuggcugca

SEQ ID NO: 2721522 - RNA, 20 nt, Human
auacaauuuuguuucuguac

SEQ ID NO: 2721523 - RNA, 19 nt, Human
auacaauuuuguuucugua

SEQ ID NO: 2721524 - RNA, 12 nt, Human
auaccugucccc

SEQ ID NO: 2721525 - RNA, 18 nt, Human
auaaugugaaacuggauu

SEQ ID NO: 2721526 - RNA, 17 nt, Human
auaauuaacauguuaaa

SEQ ID NO: 2721527 - RNA, 22 nt, Human
auaauuaacauguuaaaccaug

SEQ ID NO: 2721528 - RNA, 21 nt, Human
auaauuaacauguuaaaccau

SEQ ID NO: 2721529 - RNA, 20 nt, Human
auaauuaacauguuaaacca

SEQ ID NO: 2721530 - RNA, 21 nt, Human
auaaugugaaacuggauuaaa

SEQ ID NO: 2721531 - RNA, 19 nt, Human
auaaugugaaacuggauua

SEQ ID NO: 2721532 - RNA, 18 nt, Human
auaucacuugucaauaaa

SEQ ID NO: 2721533 - RNA, 23 nt, Human
auaugcuucuguuuuauaauuuu

SEQ ID NO: 2721534 - RNA, 19 nt, Human
auaugcuuauacacuuaca

SEQ ID NO: 2721535 - RNA, 16 nt, Human
auaugcuuauacacuu

SEQ ID NO: 2721536 - RNA, 14 nt, Human
auaugcuuauacac

SEQ ID NO: 2721537 - RNA, 15 nt, Human
auauccuuucuaaca

SEQ ID NO: 2721538 - RNA, 16 nt, Human
auauccuuucuaacaa

SEQ ID NO: 2721539 - RNA, 14 nt, Human
auaugcuauuucua

SEQ ID NO: 2721540 - RNA, 22 nt, Human
auaugccugggcagaaggaaga

SEQ ID NO: 2721541 - RNA, 23 nt, Human
auauuucagauaaucacaauaca

SEQ ID NO: 2721542 - RNA, 18 nt, Human
auauuuauuuuaauaaug

SEQ ID NO: 2721543 - RNA, 14 nt, Human
auauuuauuacugu

SEQ ID NO: 2721544 - RNA, 19 nt, Human
auauuuauuacuguaagaa

SEQ ID NO: 2721545 - RNA, 13 nt, Human
auauucaggaagc

SEQ ID NO: 2721546 - RNA, 14 nt, Human
auauucaggaagcu

SEQ ID NO: 2721547 - RNA, 16 nt, Human
auauucaggaagcuca

SEQ ID NO: 2721548 - RNA, 16 nt, Human
auauaggaacuuaaau

SEQ ID NO: 2721549 - RNA, 15 nt, Human
auaguaugguggcug

SEQ ID NO: 2721550 - RNA, 16 nt, Human
auaguaugguggcugg

SEQ ID NO: 2721551 - RNA, 22 nt, Human
auauaaguauucuaaauuuuau

SEQ ID NO: 2721552 - RNA, 15 nt, Human
aguugaauuuuacau

SEQ ID NO: 2721553 - RNA, 20 nt, Human
aguugaauuuauuggcuuuu

SEQ ID NO: 2721554 - RNA, 19 nt, Human
aguugaauuuauuggcuuu

SEQ ID NO: 2721555 - RNA, 17 nt, Human
aguugaauuuauuggcu

SEQ ID NO: 2721556 - RNA, 13 nt, Human
aguugaauuuauu

SEQ ID NO: 2721557 - RNA, 11 nt, Human
aguugaauuua

SEQ ID NO: 2721558 - RNA, 18 nt, Human
aguuacagacaaagcgug

SEQ ID NO: 2721559 - RNA, 16 nt, Human
aguuguuacauuuuua

SEQ ID NO: 2721560 - RNA, 15 nt, Human
aguuguuacauuuuu

SEQ ID NO: 2721561 - RNA, 13 nt, Human
aguuguuacauuu

SEQ ID NO: 2721562 - RNA, 21 nt, Human
agugucuuaauuaaaagaaua

SEQ ID NO: 2721563 - RNA, 23 nt, Human
agugugacaaggauugcuacugu

SEQ ID NO: 2721564 - RNA, 13 nt, Human
agucaaauugugu

SEQ ID NO: 2721565 - RNA, 15 nt, Human
agucaaauuguguga

SEQ ID NO: 2721566 - RNA, 17 nt, Human
agucaaauugugugaaa

SEQ ID NO: 2721567 - RNA, 16 nt, Human
agucaagugaaaaagg

SEQ ID NO: 2721568 - RNA, 20 nt, Human
agucaagugaaaaaggagga

SEQ ID NO: 2721569 - RNA, 16 nt, Human
aguccaagcauuuaga

SEQ ID NO: 2721570 - RNA, 21 nt, Human
aguccaagcauuuagauguau

SEQ ID NO: 2721571 - RNA, 23 nt, Human
agucauucagauaugauucaaau

SEQ ID NO: 2721572 - RNA, 20 nt, Human
agucauucagauaugauuca

SEQ ID NO: 2721573 - RNA, 15 nt, Human
agucauucagauaug

SEQ ID NO: 2721574 - RNA, 13 nt, Human
agugauccuccca

SEQ ID NO: 2721575 - RNA, 17 nt, Human
aucagcugcugaaacaa

SEQ ID NO: 2721576 - RNA, 20 nt, Human
aucagccugcuccagcuguu

SEQ ID NO: 2721577 - RNA, 23 nt, Human
aucagcugcuacuacuccuguag

SEQ ID NO: 2721578 - RNA, 13 nt, Human
aucagcugcuacu

SEQ ID NO: 2721579 - RNA, 19 nt, Human
aucauggagguuugaagau

SEQ ID NO: 2721580 - RNA, 12 nt, Human
aucaccugucuu

SEQ ID NO: 2721581 - RNA, 21 nt, Human
aucaccugucuugccuuuuuc

SEQ ID NO: 2721582 - RNA, 11 nt, Human
aucagccuggg

SEQ ID NO: 2721583 - RNA, 20 nt, Human
aucagccugggcaaugugau

SEQ ID NO: 2721584 - RNA, 21 nt, Human
aucagccugggcaaugugaua

SEQ ID NO: 2721585 - RNA, 12 nt, Human
aucagcugcuac

SEQ ID NO: 2721586 - RNA, 13 nt, Human
aucgaugcagugc

SEQ ID NO: 2721587 - RNA, 14 nt, Human
auccuccucagauc

SEQ ID NO: 2721588 - RNA, 13 nt, Human
auccuuucuaaca

SEQ ID NO: 2721589 - RNA, 11 nt, Human
auccuccucag

SEQ ID NO: 2721590 - RNA, 13 nt, Human
auccuccaggugc

SEQ ID NO: 2721591 - RNA, 14 nt, Human
auccuccaggugca

SEQ ID NO: 2721592 - RNA, 19 nt, Human
auccuccaggugcacaagc

SEQ ID NO: 2721593 - RNA, 22 nt, Human
auccuccaggugcacaagcucc

SEQ ID NO: 2721594 - RNA, 15 nt, Human
aucccuacuguaauu

SEQ ID NO: 2721595 - RNA, 18 nt, Human
auccucauacccaccccc

SEQ ID NO: 2721596 - RNA, 19 nt, Human
auccucauacccaccccca

SEQ ID NO: 2721597 - RNA, 22 nt, Human
auccucauacccacccccaccc

SEQ ID NO: 2721598 - RNA, 18 nt, Human
auccacccaccucagccu

SEQ ID NO: 2721599 - RNA, 20 nt, Human
auccacccaccucagccucc

SEQ ID NO: 2721600 - RNA, 16 nt, Human
auccacccaccucagc

SEQ ID NO: 2721601 - RNA, 22 nt, Human
aucuuauaauuuaaaauaugcu

SEQ ID NO: 2721602 - RNA, 19 nt, Human
aucuuccaacucaaacucu

SEQ ID NO: 2721603 - RNA, 22 nt, Human
aucucucgugauugauaagaac

SEQ ID NO: 2721604 - RNA, 17 nt, Human
aucuucuuuauaauucu

SEQ ID NO: 2721605 - RNA, 17 nt, Human
aucuugaagacuuuucu

SEQ ID NO: 2721606 - RNA, 13 nt, Human
augagccuggcaa

SEQ ID NO: 2721607 - RNA, 14 nt, Human
augagccuggcaag

SEQ ID NO: 2721608 - RNA, 12 nt, Human
augagccuggca

SEQ ID NO: 2721609 - RNA, 17 nt, Human
augacuccagaauuucc

SEQ ID NO: 2721610 - RNA, 12 nt, Human
augacuccagaa

SEQ ID NO: 2721611 - RNA, 16 nt, Human
augacuccagaauuuc

SEQ ID NO: 2721612 - RNA, 14 nt, Human
augacucagaauau

SEQ ID NO: 2721613 - RNA, 12 nt, Human
augacccagugg

SEQ ID NO: 2721614 - RNA, 20 nt, Human
augaaacacucaguuguuca

SEQ ID NO: 2721615 - RNA, 20 nt, Human
auguaagggaaacugccagc

SEQ ID NO: 2721616 - RNA, 17 nt, Human
auguaagcucuacugag

SEQ ID NO: 2721617 - RNA, 22 nt, Human
auguaagggaaacugccagcaa

SEQ ID NO: 2721618 - RNA, 21 nt, Human
auguaagggaaacugccagca

SEQ ID NO: 2721619 - RNA, 16 nt, Human
auguaaguaaacgguc

SEQ ID NO: 2721620 - RNA, 17 nt, Human
auguaauaacugugaag

SEQ ID NO: 2721621 - RNA, 15 nt, Human
auggucggaaaacau

SEQ ID NO: 2721622 - RNA, 15 nt, Human
augucacaggcaggu

SEQ ID NO: 2721623 - RNA, 14 nt, Human
augucacaggcagg

SEQ ID NO: 2721624 - RNA, 16 nt, Human
augucacaggcagguc

SEQ ID NO: 2721625 - RNA, 17 nt, Human
augucacaggcaggucc

SEQ ID NO: 2721626 - RNA, 18 nt, Human
auguucucugaggacacu

SEQ ID NO: 2721627 - RNA, 20 nt, Human
auguucuuucacccuuuucu

SEQ ID NO: 2721628 - RNA, 14 nt, Human
auguucuuaauucu

SEQ ID NO: 2721629 - RNA, 22 nt, Human
auguucugacccugcuucaaau

SEQ ID NO: 2721630 - RNA, 20 nt, Human
auguucuuaguggauguucu

SEQ ID NO: 2721631 - RNA, 15 nt, Human
auguucuuaauucuu

SEQ ID NO: 2721632 - RNA, 16 nt, Human
auguuuuaagaggcag

SEQ ID NO: 2721633 - RNA, 18 nt, Human
auguuuuaagaggcaggg

SEQ ID NO: 2721634 - RNA, 14 nt, Human
auuaaaugcccagc

SEQ ID NO: 2721635 - RNA, 15 nt, Human
auuaaaugcccagcc

SEQ ID NO: 2721636 - RNA, 11 nt, Human
auuaaauuaug

SEQ ID NO: 2721637 - RNA, 16 nt, Human
auuaaaugcccagccc

SEQ ID NO: 2721638 - RNA, 13 nt, Human
auuaaauucuugc

SEQ ID NO: 2721639 - RNA, 14 nt, Human
auguguaaguauuc

SEQ ID NO: 2721640 - RNA, 20 nt, Human
augugggcuaguugggcuuc

SEQ ID NO: 2721641 - RNA, 20 nt, Human
augcaugaaguaauaugcac

SEQ ID NO: 2721642 - RNA, 23 nt, Human
augcaugaaguaauaugcacaca

SEQ ID NO: 2721643 - RNA, 18 nt, Human
augcauuugaaaauuuug

SEQ ID NO: 2721644 - RNA, 12 nt, Human
augcauuugaaa

SEQ ID NO: 2721645 - RNA, 10 nt, Human
augcauuuga

SEQ ID NO: 2721646 - RNA, 15 nt, Human
augccugguggcagc

SEQ ID NO: 2721647 - RNA, 16 nt, Human
augccugguggcagcu

SEQ ID NO: 2721648 - RNA, 17 nt, Human
augccugguggcagcug

SEQ ID NO: 2721649 - RNA, 21 nt, Human
augccuggauggggcugcacc

SEQ ID NO: 2721650 - RNA, 23 nt, Human
augccuggauggggcugcaccgg

SEQ ID NO: 2721651 - RNA, 17 nt, Human
augccugggcagaagga

SEQ ID NO: 2721652 - RNA, 21 nt, Human
augcacagcuaacauggaagu

SEQ ID NO: 2721653 - RNA, 23 nt, Human
augcacacauuuuuuaaaugcac

SEQ ID NO: 2721654 - RNA, 23 nt, Human
augcacagaguuguuacauuuuu

SEQ ID NO: 2721655 - RNA, 14 nt, Human
augcacagcuaaca

SEQ ID NO: 2721656 - RNA, 17 nt, Human
augcacacauuuuuuaa

SEQ ID NO: 2721657 - RNA, 22 nt, Human
augcacacauuuuuuaaaugca

SEQ ID NO: 2721658 - RNA, 19 nt, Human
augcacacauuuuuuaaau

SEQ ID NO: 2721659 - RNA, 22 nt, Human
augcuucuucagagacuccugc

SEQ ID NO: 2721660 - RNA, 19 nt, Human
auggaaaugggcagagcag

SEQ ID NO: 2721661 - RNA, 20 nt, Human
auggaaaugggcagagcaga

SEQ ID NO: 2721662 - RNA, 23 nt, Human
auggcugccaaugggagcucaug

SEQ ID NO: 2721663 - RNA, 15 nt, Human
augggaaugaauguc

SEQ ID NO: 2721664 - RNA, 22 nt, Human
auggagccugcacggugaaugg

SEQ ID NO: 2721665 - RNA, 18 nt, Human
auggagccugcacgguga

SEQ ID NO: 2721666 - RNA, 18 nt, Human
agcuucacuguaaaauaa

SEQ ID NO: 2721667 - RNA, 19 nt, Human
agcuuccuucugugaaagu

SEQ ID NO: 2721668 - RNA, 13 nt, Human
aggaaaaacugau

SEQ ID NO: 2721669 - RNA, 15 nt, Human
aggaaaaacugauuu

SEQ ID NO: 2721670 - RNA, 17 nt, Human
agcugggugucaagagg

SEQ ID NO: 2721671 - RNA, 22 nt, Human
agcugggugucaagagggucug

SEQ ID NO: 2721672 - RNA, 21 nt, Human
agcuggucccacucaguccau

SEQ ID NO: 2721673 - RNA, 19 nt, Human
agcuggucccacucagucc

SEQ ID NO: 2721674 - RNA, 20 nt, Human
aggauguucugggacacagu

SEQ ID NO: 2721675 - RNA, 17 nt, Human
aggaggggauagagaga

SEQ ID NO: 2721676 - RNA, 12 nt, Human
aggauucuuccu

SEQ ID NO: 2721677 - RNA, 20 nt, Human
aggaccccuccaugugggcu

SEQ ID NO: 2721678 - RNA, 15 nt, Human
aggagagcuagcagc

SEQ ID NO: 2721679 - RNA, 14 nt, Human
aggagaggggcaca

SEQ ID NO: 2721680 - RNA, 16 nt, Human
aggagaggggcacagg

SEQ ID NO: 2721681 - RNA, 18 nt, Human
aggagaggggcacagggu

SEQ ID NO: 2721682 - RNA, 14 nt, Human
aggaccucagguga

SEQ ID NO: 2721683 - RNA, 20 nt, Human
aggaccucaggugagaagca

SEQ ID NO: 2721684 - RNA, 17 nt, Human
agguaaggaauaccugu

SEQ ID NO: 2721685 - RNA, 13 nt, Human
agguucagcuugu

SEQ ID NO: 2721686 - RNA, 15 nt, Human
agguuaauaaaguaa

SEQ ID NO: 2721687 - RNA, 14 nt, Human
agguuaauguucau

SEQ ID NO: 2721688 - RNA, 15 nt, Human
agguuaauuccaauu

SEQ ID NO: 2721689 - RNA, 22 nt, Human
agguuaauuccaauuauaugag

SEQ ID NO: 2721690 - RNA, 17 nt, Human
agguucaaagauauuuu

SEQ ID NO: 2721691 - RNA, 15 nt, Human
agguucaaagauauu

SEQ ID NO: 2721692 - RNA, 17 nt, Human
aggugcugccauccagg

SEQ ID NO: 2721693 - RNA, 16 nt, Human
aggugcugccauccag

SEQ ID NO: 2721694 - RNA, 14 nt, Human
aggucgaggcagga

SEQ ID NO: 2721695 - RNA, 23 nt, Human
aggcuagugugguguuuccuggc

SEQ ID NO: 2721696 - RNA, 18 nt, Human
aggcugccucucccauca

SEQ ID NO: 2721697 - RNA, 17 nt, Human
agggacgcuacccggga

SEQ ID NO: 2721698 - RNA, 21 nt, Human
agggacgcuacccgggaaggg

SEQ ID NO: 2721699 - RNA, 12 nt, Human
agggacagaggg

SEQ ID NO: 2721700 - RNA, 13 nt, Human
agggacagagggg

SEQ ID NO: 2721701 - RNA, 20 nt, Human
agggacagaggggguggccu

SEQ ID NO: 2721702 - RNA, 18 nt, Human
agggccuggccugagcug

SEQ ID NO: 2721703 - RNA, 19 nt, Human
agggcgggaggauguucug

SEQ ID NO: 2721704 - RNA, 21 nt, Human
aggggauagagagagaccacu

SEQ ID NO: 2721705 - RNA, 15 nt, Human
aggggcacagggucu

SEQ ID NO: 2721706 - RNA, 17 nt, Human
agggcacaccgggcacu

SEQ ID NO: 2721707 - RNA, 15 nt, Human
agggccuggccugag

SEQ ID NO: 2721708 - RNA, 16 nt, Human
agggccuggccugagc

SEQ ID NO: 2721709 - RNA, 17 nt, Human
agggccuggccugagcu

SEQ ID NO: 2721710 - RNA, 20 nt, Human
agggcacaccgggcacucag

SEQ ID NO: 2721711 - RNA, 21 nt, Human
agggcacaccgggcacucaga

SEQ ID NO: 2721712 - RNA, 22 nt, Human
agggcacagaaaauggaagaca

SEQ ID NO: 2721713 - RNA, 17 nt, Human
agacugcauuauauuua

SEQ ID NO: 2721714 - RNA, 10 nt, Human
agagaagaga

SEQ ID NO: 2721715 - RNA, 21 nt, Human
agagaagagauugugguuuca

SEQ ID NO: 2721716 - RNA, 18 nt, Human
agagaaaguacuucucca

SEQ ID NO: 2721717 - RNA, 23 nt, Human
agagaggguggugaccucugccu

SEQ ID NO: 2721718 - RNA, 23 nt, Human
agacugaguacguugugcauuug

SEQ ID NO: 2721719 - RNA, 17 nt, Human
agacaaugacuuacugu

SEQ ID NO: 2721720 - RNA, 13 nt, Human
agacaaugacuua

SEQ ID NO: 2721721 - RNA, 21 nt, Human
agacaauuuauuauggcacau

SEQ ID NO: 2721722 - RNA, 15 nt, Human
agacaauuuauuaug

SEQ ID NO: 2721723 - RNA, 19 nt, Human
agacaaugacuuacuguac

SEQ ID NO: 2721724 - RNA, 13 nt, Human
agaccaucccuga

SEQ ID NO: 2721725 - RNA, 14 nt, Human
agaccaucccugaa

SEQ ID NO: 2721726 - RNA, 17 nt, Human
agaccaucccugaaggc

SEQ ID NO: 2721727 - RNA, 18 nt, Human
agaccaucccugaaggcc

SEQ ID NO: 2721728 - RNA, 21 nt, Human
agaccaucccugaaggccccg

SEQ ID NO: 2721729 - RNA, 18 nt, Human
agacagcccgggcucugc

SEQ ID NO: 2721730 - RNA, 20 nt, Human
agacagcccgggcucugccu

SEQ ID NO: 2721731 - RNA, 16 nt, Human
agacagcccgggcucu

SEQ ID NO: 2721732 - RNA, 14 nt, Human
agacacaacuauuu

SEQ ID NO: 2721733 - RNA, 17 nt, Human
agacagcccgggcucug

SEQ ID NO: 2721734 - RNA, 18 nt, Human
agacgggggcagagaggg

SEQ ID NO: 2721735 - RNA, 19 nt, Human
agacggagucccaccuugg

SEQ ID NO: 2721736 - RNA, 21 nt, Human
agauaggucagugcaaauacu

SEQ ID NO: 2721737 - RNA, 15 nt, Human
agauagccaaggcca

SEQ ID NO: 2721738 - RNA, 16 nt, Human
agauagccaaggccaa

SEQ ID NO: 2721739 - RNA, 13 nt, Human
agaggagaggggc

SEQ ID NO: 2721740 - RNA, 22 nt, Human
agaggggaacagacuggaagca

SEQ ID NO: 2721741 - RNA, 16 nt, Human
agaggggaagagacuu

SEQ ID NO: 2721742 - RNA, 22 nt, Human
agauacuuggggggcugaggug

SEQ ID NO: 2721743 - RNA, 13 nt, Human
agauagccaaggc

SEQ ID NO: 2721744 - RNA, 23 nt, Human
agaggguggugaccucugccuga

SEQ ID NO: 2721745 - RNA, 14 nt, Human
agaguguugaaacg

SEQ ID NO: 2721746 - RNA, 18 nt, Human
agccucccaaagugcugg

SEQ ID NO: 2721747 - RNA, 19 nt, Human
agccucccaaagugcuggg

SEQ ID NO: 2721748 - RNA, 19 nt, Human
agccgagauugcaccacug

SEQ ID NO: 2721749 - RNA, 21 nt, Human
agccgagaucacgccacugca

SEQ ID NO: 2721750 - RNA, 20 nt, Human
agccgagauugcaccacugc

SEQ ID NO: 2721751 - RNA, 22 nt, Human
agccgcuggggccaguuggucc

SEQ ID NO: 2721752 - RNA, 14 nt, Human
agccgcuggggcca

SEQ ID NO: 2721753 - RNA, 22 nt, Human
agccucccgaguagcugggacu

SEQ ID NO: 2721754 - RNA, 17 nt, Human
agccucccaaagugcug

SEQ ID NO: 2721755 - RNA, 20 nt, Human
agccucccaaagugcuggga

SEQ ID NO: 2721756 - RNA, 18 nt, Human
agccucccgaauagcugg

SEQ ID NO: 2721757 - RNA, 19 nt, Human
agccucccgaauagcuggg

SEQ ID NO: 2721758 - RNA, 20 nt, Human
agccucccgaauagcuggga

SEQ ID NO: 2721759 - RNA, 22 nt, Human
agccucccgaauagcugggacu

SEQ ID NO: 2721760 - RNA, 17 nt, Human
agccucccgaguagcug

SEQ ID NO: 2721761 - RNA, 16 nt, Human
agccccagugcccaca

SEQ ID NO: 2721762 - RNA, 20 nt, Human
agccccaucccaaacccuuc

SEQ ID NO: 2721763 - RNA, 11 nt, Human
agccccauccu

SEQ ID NO: 2721764 - RNA, 15 nt, Human
agcccugagcuuucu

SEQ ID NO: 2721765 - RNA, 19 nt, Human
agccgagaucacgccacug

SEQ ID NO: 2721766 - RNA, 20 nt, Human
agccgagaucacgccacugc

SEQ ID NO: 2721767 - RNA, 21 nt, Human
agcaguugaaaagacuccaaa

SEQ ID NO: 2721768 - RNA, 23 nt, Human
agcaguugaaaagacuccaaaga

SEQ ID NO: 2721769 - RNA, 16 nt, Human
agcaguucagagcugc

SEQ ID NO: 2721770 - RNA, 15 nt, Human
agcaguucagagcug

SEQ ID NO: 2721771 - RNA, 17 nt, Human
agcaguucagagcugcc

SEQ ID NO: 2721772 - RNA, 18 nt, Human
agcaguucagagcugccc

SEQ ID NO: 2721773 - RNA, 19 nt, Human
agcacuaaggugugcucug

SEQ ID NO: 2721774 - RNA, 21 nt, Human
agcagccacauuccugaugcu

SEQ ID NO: 2721775 - RNA, 19 nt, Human
agcaguucagagcugcccu

SEQ ID NO: 2721776 - RNA, 15 nt, Human
agccagauuuuccug

SEQ ID NO: 2721777 - RNA, 19 nt, Human
agccagauuuuccugaaaa

SEQ ID NO: 2721778 - RNA, 17 nt, Human
agccauguuuauuacag

SEQ ID NO: 2721779 - RNA, 22 nt, Human
agccauguuuauuacaguauaa

SEQ ID NO: 2721780 - RNA, 20 nt, Human
agccagaggagagaggaccc

SEQ ID NO: 2721781 - RNA, 23 nt, Human
agccaaggccaaaggaagcacau

SEQ ID NO: 2721782 - RNA, 22 nt, Human
agccaaggccaaaggaagcaca

SEQ ID NO: 2721783 - RNA, 20 nt, Human
agccaaggccaaaggaagca

SEQ ID NO: 2721784 - RNA, 12 nt, Human
agcaugccugga

SEQ ID NO: 2721785 - RNA, 19 nt, Human
agccaaagcuaggccuggc

SEQ ID NO: 2721786 - RNA, 20 nt, Human
agccaaagcuaggccuggcc

SEQ ID NO: 2721787 - RNA, 23 nt, Human
agccaaagcuaggccuggccaga

SEQ ID NO: 2721788 - RNA, 17 nt, Human
caagcuggucccacuca

SEQ ID NO: 2721789 - RNA, 19 nt, Human
caagcuggucccacucagu

SEQ ID NO: 2721790 - RNA, 21 nt, Human
caagccagauuuuccugaaaa

SEQ ID NO: 2721791 - RNA, 22 nt, Human
caagccaccaacauacucccau

SEQ ID NO: 2721792 - RNA, 14 nt, Human
caagcaggacaugg

SEQ ID NO: 2721793 - RNA, 18 nt, Human
caagcaggacauggacaa

SEQ ID NO: 2721794 - RNA, 20 nt, Human
caagcgauucuucugcuuca

SEQ ID NO: 2721795 - RNA, 22 nt, Human
caagcgauucuucugcuucagc

SEQ ID NO: 2721796 - RNA, 19 nt, Human
caagcgauucuucugcuuc

SEQ ID NO: 2721797 - RNA, 14 nt, Human
caaguuaaauaaau

SEQ ID NO: 2721798 - RNA, 18 nt, Human
caagugagagcugggugu

SEQ ID NO: 2721799 - RNA, 21 nt, Human
caaguccucuuuucugagagg

SEQ ID NO: 2721800 - RNA, 14 nt, Human
caagugagagcugg

SEQ ID NO: 2721801 - RNA, 15 nt, Human
caagugagagcuggg

SEQ ID NO: 2721802 - RNA, 17 nt, Human
caagugagagcugggug

SEQ ID NO: 2721803 - RNA, 12 nt, Human
caaggcugcagu

SEQ ID NO: 2721804 - RNA, 15 nt, Human
caaggcugcagugag

SEQ ID NO: 2721805 - RNA, 21 nt, Human
caaggcugucaauuacaggaa

SEQ ID NO: 2721806 - RNA, 23 nt, Human
caaggcugucaauuacaggaagu

SEQ ID NO: 2721807 - RNA, 17 nt, Human
caaggggcccaaauucu

SEQ ID NO: 2721808 - RNA, 18 nt, Human
caaggggcccaaauucuu

SEQ ID NO: 2721809 - RNA, 20 nt, Human
caaggucauuuuuuuuaaga

SEQ ID NO: 2721810 - RNA, 14 nt, Human
caaggucauuuuuu

SEQ ID NO: 2721811 - RNA, 14 nt, Human
caaguccucuuuuc

SEQ ID NO: 2721812 - RNA, 22 nt, Human
caaccccuucgcuccugugucu

SEQ ID NO: 2721813 - RNA, 22 nt, Human
caacacucacauuuauucugcu

SEQ ID NO: 2721814 - RNA, 18 nt, Human
caacacucauugaccuga

SEQ ID NO: 2721815 - RNA, 20 nt, Human
caacacucauugaccugagg

SEQ ID NO: 2721816 - RNA, 22 nt, Human
caacacucauugaccugaggcc

SEQ ID NO: 2721817 - RNA, 13 nt, Human
caacgucugugcc

SEQ ID NO: 2721818 - RNA, 14 nt, Human
caacgucugugcca

SEQ ID NO: 2721819 - RNA, 15 nt, Human
caaccuccugggcua

SEQ ID NO: 2721820 - RNA, 14 nt, Human
caaccuccugggcu

SEQ ID NO: 2721821 - RNA, 18 nt, Human
caagacucuuuggacacu

SEQ ID NO: 2721822 - RNA, 13 nt, Human
caagagcccaggc

SEQ ID NO: 2721823 - RNA, 14 nt, Human
caagagcccaggcc

SEQ ID NO: 2721824 - RNA, 15 nt, Human
caagagcccaggccu

SEQ ID NO: 2721825 - RNA, 18 nt, Human
caagacgcugugcugccc

SEQ ID NO: 2721826 - RNA, 23 nt, Human
caagacgcugugcugcccugccc

SEQ ID NO: 2721827 - RNA, 16 nt, Human
caagagcccaggccuc

SEQ ID NO: 2721828 - RNA, 15 nt, Human
caagcaccuccugcc

SEQ ID NO: 2721829 - RNA, 16 nt, Human
caagcaccuccugccu

SEQ ID NO: 2721830 - RNA, 17 nt, Human
caagcaccuccugccuc

SEQ ID NO: 2721831 - RNA, 20 nt, Human
caagaacuuuccaggaaggc

SEQ ID NO: 2721832 - RNA, 14 nt, Human
caagaccuucuccu

SEQ ID NO: 2721833 - RNA, 16 nt, Human
caagaccuucuccuuc

SEQ ID NO: 2721834 - RNA, 17 nt, Human
caagaccuucuccuuca

SEQ ID NO: 2721835 - RNA, 18 nt, Human
caagaccuucuccuucac

SEQ ID NO: 2721836 - RNA, 16 nt, Human
caagacgcugugcugc

SEQ ID NO: 2721837 - RNA, 17 nt, Human
caagacgcugugcugcc

SEQ ID NO: 2721838 - RNA, 15 nt, Human
caagaaaacaacuuc

SEQ ID NO: 2721839 - RNA, 17 nt, Human
caaugcacuuuguucug

SEQ ID NO: 2721840 - RNA, 22 nt, Human
caaugcacuuuguucuggcucu

SEQ ID NO: 2721841 - RNA, 20 nt, Human
caaugcacuuuguucuggcu

SEQ ID NO: 2721842 - RNA, 21 nt, Human
caaugcacuuuguucuggcuc

SEQ ID NO: 2721843 - RNA, 15 nt, Human
caaugugauaaaacc

SEQ ID NO: 2721844 - RNA, 17 nt, Human
caaugugauaaaacccc

SEQ ID NO: 2721845 - RNA, 23 nt, Human
caauucucauuugucacacacuu

SEQ ID NO: 2721846 - RNA, 16 nt, Human
caauuacaggaaguac

SEQ ID NO: 2721847 - RNA, 23 nt, Human
caauacaucccuuaccugggaaa

SEQ ID NO: 2721848 - RNA, 13 nt, Human
caauaggaaaaac

SEQ ID NO: 2721849 - RNA, 12 nt, Human
caauaggaaaaa

SEQ ID NO: 2721850 - RNA, 17 nt, Human
caauauucgcuguguca

SEQ ID NO: 2721851 - RNA, 23 nt, Human
caaugaccuuucaauaggaaaaa

SEQ ID NO: 2721852 - RNA, 21 nt, Human
caaugaccuuucaauaggaaa

SEQ ID NO: 2721853 - RNA, 15 nt, Human
caaugacuuacugua

SEQ ID NO: 2721854 - RNA, 18 nt, Human
caaugacuuacuguacau

SEQ ID NO: 2721855 - RNA, 17 nt, Human
caaugacuuacuguaca

SEQ ID NO: 2721856 - RNA, 14 nt, Human
caauaggaaaaacu

SEQ ID NO: 2721857 - RNA, 17 nt, Human
caaaauaaaaaugaggu

SEQ ID NO: 2721858 - RNA, 22 nt, Human
caaaacucuccucugcugcugg

SEQ ID NO: 2721859 - RNA, 20 nt, Human
caaaacucuccucugcugcu

SEQ ID NO: 2721860 - RNA, 21 nt, Human
caaaacucuccucugcugcug

SEQ ID NO: 2721861 - RNA, 19 nt, Human
caaaaaucucaauauuuca

SEQ ID NO: 2721862 - RNA, 23 nt, Human
caaaaauauuuuaugauccagca

SEQ ID NO: 2721863 - RNA, 22 nt, Human
caaaaauauuuuaugauccagc

SEQ ID NO: 2721864 - RNA, 21 nt, Human
caaaaauauuuuaugauccag

SEQ ID NO: 2721865 - RNA, 17 nt, Human
caaaaauauuuuaugau

SEQ ID NO: 2721866 - RNA, 15 nt, Human
caaaaauauuuuaug

SEQ ID NO: 2721867 - RNA, 14 nt, Human
caaaaauauuuuau

SEQ ID NO: 2721868 - RNA, 13 nt, Human
auuuuccugaaaa

SEQ ID NO: 2721869 - RNA, 21 nt, Human
auuuugggguacccacugcuc

SEQ ID NO: 2721870 - RNA, 22 nt, Human
auuuugggguacccacugcucu

SEQ ID NO: 2721871 - RNA, 23 nt, Human
auuuugggguacccacugcucug

SEQ ID NO: 2721872 - RNA, 16 nt, Human
caaaaaaugcuugcuu

SEQ ID NO: 2721873 - RNA, 17 nt, Human
caaaaacacagcaaggg

SEQ ID NO: 2721874 - RNA, 15 nt, Human
caaaaacacagcaag

SEQ ID NO: 2721875 - RNA, 14 nt, Human
caaaaacacagcaa

SEQ ID NO: 2721876 - RNA, 13 nt, Human
caaaaacacagca

SEQ ID NO: 2721877 - RNA, 13 nt, Human
caaaaaggcagga

SEQ ID NO: 2721878 - RNA, 18 nt, Human
caaaaaccaguauuguac

SEQ ID NO: 2721879 - RNA, 20 nt, Human
caaaaaccaguauuguacaa

SEQ ID NO: 2721880 - RNA, 19 nt, Human
caaaaaccaguauuguaca

SEQ ID NO: 2721881 - RNA, 21 nt, Human
caaauaugcaaagcacugacu

SEQ ID NO: 2721882 - RNA, 19 nt, Human
caaauaugcaaagcacuga

SEQ ID NO: 2721883 - RNA, 20 nt, Human
caaauacgugggcauucaaa

SEQ ID NO: 2721884 - RNA, 22 nt, Human
caaauacgugggcauucaaaug
